(19) United States
(12) Patent Application Publication
(10) Pub. No.: US 2024/0271161 A1
(43) Pub. Date: Aug. 15, 2024

(54) NOVEL RECOMBINASES AND METHODS OF USE

(71) Applicant: Editas Medicine, Inc., Cambridge, MA (US)

(72) Inventors: Eugenio Marco Rubio, West Roxbury, MA (US); Meng Wu, Wilmington, MA (US); Joseph Connor Neumeyer, Cambridge, MA (US); Hui Li, Apex, NC (US)

(21) Appl. No.: 18/468,681

(22) Filed: Sep. 15, 2023

Related U.S. Application Data
(60) Provisional application No. 63/480,342, filed on Jan. 18, 2023.
(60) Provisional application No. 63/376,048, filed on Sep. 16, 2022.

(51) Int. Cl. C12N 15/90; C12N 9/12

(52) U.S. Cl. CPC C12N 15/90; C12N 9/1241

(57) ABSTRACT

The present disclosure provides novel large serine recombinases and their cognate attachment sites in the human genome. Methods for using these large serine recombinases and attachment sites are also provided herein.

### CROSS-REFERENCE TO RELATED APPLICATIONS

[0001] This application claims the benefit of U.S. Provisional Application No. 63/376,048, filed Sep. 16, 2022, and U.S. Provisional Application No. 63/480,342, filed Jan. 18, 2023, the contents of which are hereby incorporated herein by reference in their entirety.

### SEQUENCE LISTING

[0002] The present specification makes reference to a Sequence Listing (submitted electronically as an .xml file named “2011271-0250_SL.xml” on Sep. 15, 2023). The .xml file was generated on Dec. 21, 2022 and is 64,316,640 bytes in size. The entire contents of the Sequence Listing are herein incorporated by reference.

### Large Table

[0003] The present specification makes reference to Table 1 (submitted electronically as a .txt file named “Table_1. txt” on Sep. 15, 2023). The .txt file was generated on Sep. 14, 2023 and is 3,033,378 bytes in size. The entire contents of Table 1 are herein incorporated by reference.

### BACKGROUND

[0004] Site-specific recombination involves the specialized movement of nucleotide sequences between non-homologous sites within a genome or between genomes (e.g., between phage and bacterial genomes). Mobilization of these genetic elements can occur within a single chromosome or between two different chromosomes, giving rise to variations essential for adaptation and evolution. Site-specific recombination is guided by site-specific recombinases, which are most abundant among prokaryotes and lower eukaryotes (Alberts et al. 2002). Site-specific recombinases recognize two specific “attachment” sites present on one or both DNA molecules, catalyze the cleavage of specific phosphodiester bonds within these two attachment sites, and rejoin the broken ends to form recombinants (Olorunniji et al. 2016). This process doesn't require extensive DNA homology, as homologous recombination (HR) does, nor does it involve any DNA synthesis or degradation. As such, this form of recombination is often referred to as conservative site-specific recombination.

[0005] The vast majority of conservative site-specific recombinases fall into two families: tyrosine recombinases and serine recombinases. Each family is named according to the identity of the active nucleophilic amino acid residue responsible for attacking the DNA phosphodiester bonds to create strand breaks, and subsequent formation of a covalent linkage to conserve bond energy for recombination (Olorunniji et al. 2016). While there are a number of features shared by both families, their proteins have diverging sequences and are structurally distinct. Furthermore, both families operate on divergent recombination mechanisms.

[0006] Tyrosine recombinases have been widely identified in a number of bacteriophage, prokaryotes, fungi, and ciliates. Prominent tyrosine recombinases include Cre, Flp, XerD, HP1 integrase and A integrase (Swalla et al. 2003). Tyrosine recombinases engage in breaking, exchanging, and rejoining the DNA strands two at a time, which results in formation of a “Holliday junction” or four-way junction intermediate. Many tyrosine recombinases, including Cre and Flp, promote recombination between two identical sites, which encourages continual recombination that may result in returning the DNA back to an undesired non-recombinant form. A number of tyrosine recombinases from bacteriophage recombine at non-identical sites (e.g., 2 integrase), but unfortunately require large complex attachment sites making them less useful for clinical applications (Olorunniji et al. 2016).

[0007] Serine recombinases are found in viruses, bacteria, and archaea. Unlike tyrosine recombinases, serine recombinases do not make a Holliday junction or four-way junction intermediate during recombination. Instead, they recognize and bind at two different short attachment sites, known as attP (in a phage genome) and attB (in a bacterial genome), to form a tetrameric synaptic complex. Dual stranded breaks occur simultaneously, and recombination is brought about by a unique subunit rotation mechanism of the cut DNA ends. Recombination results in newly modified sites known as attL and attR, which cannot be excised by site-specific recombination alone and require a phage-encoded recombination directionality factor (RDF) (Van Duyne et al. 2013; Olorunniji et al. 2016). As a result, serine recombinases lead to recombination that is unidirectional and irreversible, preventing inadvertent additional recombination events.

[0008] The unidirectional and irreversible nature of the modifications that result from serine recombinases can make them suitable candidates for insertion, deletion, and reconfiguration of substantial segments of DNA. Under optimal conditions, the short, highly specific attachment sites (about 40-50 bp) are conducive to near 100% conversion of substrates to recombinant products in a matter of a few minutes both in vitro and in vivo (Olorunniji et al. 2016; Van Duyne et al. 2013). While attractive for genetic manipulation, there are still considerable challenges in clinical application of serine recombinases. The present disclosure provided herein seeks to address these challenges.

### SUMMARY OF THE INVENTION

[0009] The present disclosure provides, inter alia, newly identified large serine recombinases included in Table 1 (and Table 2 and Table 3) and identifies and characterizes their respective attachment sites (attB and attP) and exemplary predicted donor sites (attD) and attachment sites in the human genome (attH). The disclosed recombinases, attachment sites, compositions, and methods enable the targeted integration of desired DNA payloads into specific sequences within the human genome, for example, for the purposes of gene therapy.

[0010] In one aspect, the present disclosure provides methods for integrating an exogenous nucleic acid (e.g., an exogenous DNA) into a genome (e.g., a human genome), the method comprising: contacting a cell (e.g., a human cell) with an exogenous nucleic acid (e.g., an exogenous DNA) comprising a nucleic acid sequence of interest and a first attachment site and a serine recombinase or a polynucleotide encoding the serine recombinase, wherein the genome (e.g., human genome) comprises a second attachment site and recombination between the first and second attachment sites results in integration of the exogenous nucleic acid (e.g., exogenous DNA) into the genome (e.g., a human genome). In some embodiments, the cell may be a non-human cell, e.g., a bacterial cell and the targeted genome may be a non-human genome, e.g., a bacterial genome. For example, in some embodiments the methods of the present disclosure may be used to integrate an exogenous nucleic acid into the genome of a bacterial cell in the gut of a human subject.

[0011] In some embodiments, exogenous nucleic acid (e.g., exogenous DNA) is up to 5 kb, up to 25 kb, up to 50 kb, up to 75 kb, up to 100 kb, up to 150 kb, up to 200 kb, up to 250 kb, or up to 300 kb in size.

[0012] In some embodiments, a first attachment site is or comprises a donor attachment (attD) site. In some embodiments, an attD site comprises an attB sequence or an attP sequence. In some embodiments, a first attachment site comprises a nucleic acid sequence at least 50% identical to an attB or attP sequence selected from Table 1. In some embodiments, a first attachment site comprises a nucleic acid sequence at least 50% identical to an attB or attP sequence selected from Table 2. In some embodiments, a first attachment site comprises a nucleic acid sequence at least 50% identical to an attB or attP sequence selected from Table 3.

[0013] In some embodiments, a second attachment site is or comprises an acceptor attachment (attA) site. In some embodiments, an attA site comprises an attB sequence, an attP sequence, or an attH sequence. In some embodiments, a second attachment site comprises a nucleic acid sequence at least 50% identical to: an attB sequence selected from Table 1, an attP sequence selected from Table 1, or an attH sequence selected from Table 1. In some embodiments, a second attachment site comprises a nucleic acid sequence at least 50% identical to: an attB sequence selected from Table 2, an attP sequence selected from Table 2, or an attH sequence selected from Table 2. In some embodiments, a second attachment site comprises a nucleic acid sequence at least 50% identical to: an attB sequence selected from Table 3, an attP sequence selected from Table 3, or an attH sequence selected from Table 3.

[0014] In some embodiments, a serine recombinase comprises an amino acid sequence at least 80% identical to a sequence selected from Table 1. In some embodiments, a serine recombinase comprises an amino acid sequence at least 80% identical to a sequence selected from Table 2. In some embodiments, a serine recombinase comprises an amino acid sequence at least 80% identical to a sequence selected from Table 3.

[0015] The method of any one of the preceding claims, wherein the serine recombinase comprises: an amino-terminal catalytic domain, a recombinase domain, and a DNA-binding zinc ribbon domain, wherein, according to UCLUST algorithm analysis, the amino-terminal catalytic domain, the recombinase domain, and the DNA-binding zinc ribbon domain comprise amino acid sequences at least 90% identical to a sequence selected from Table 1, wherein the sequence selected from Table 1 comprises an amino-terminal catalytic domain, a recombinase domain, and a DNA-binding zinc ribbon domain. As used herein the terms “according to UCLUST algorithm analysis” mean that the reference and query sequences were analyzed using the UCLUST algorithm (see Edgar 2010 and rive5.com/usearch/manual/uclust_algo.html) with default parameters and the cluster_fast command (e.g., usearch-cluster_fast reads.fasta-centroids c.fasta-id 0.90 if seeking to identify sequences with at least 90% identity according to UCLUST algorithm analysis). See also drive5.com/usearch/manual/cmd_cluster_fast.html and drive5.com/usearch/manual/opt_id.html for further details.

[0016] The method of any one of the preceding claims, wherein the serine recombinase comprises: an amino-terminal catalytic domain, a recombinase domain, and a DNA-binding zinc ribbon domain, wherein, according to UCLUST algorithm analysis, the amino-terminal catalytic domain, the recombinase domain, and the DNA-binding zinc ribbon domain comprise amino acid sequences at least 90% identical to a sequence selected from Table 1, wherein the sequence selected from Table 2 comprises an amino-terminal catalytic domain, a recombinase domain, and a DNA-binding zinc ribbon domain.

[0017] In some embodiments, a serine recombinase is a recombinase selected from cluster 1 as identified in Table 1. In some embodiments, a serine recombinase is a recombinase selected from cluster 2 as identified in Table 1. In some embodiments, a serine recombinase is a recombinase selected from cluster 3 as identified in Table 1. In some embodiments, a serine recombinase is a recombinase selected from cluster 4 as identified in Table 1. In some embodiments, a serine recombinase is a recombinase selected from cluster 5 as identified in Table 1. In some embodiments, a serine recombinase is a recombinase selected from cluster 6 as identified in Table 1. In some embodiments, a serine recombinase is a recombinase selected from cluster 7 as identified in Table 1. In some embodiments, a serine recombinase is a recombinase selected from cluster 8 as identified in Table 1. In some embodiments, a serine recombinase is a recombinase selected from cluster 9 as identified in Table 1. In some embodiments, a serine recombinase is a recombinase selected from cluster 10 as identified in Table 1. In some embodiments, a serine recombinase is a recombinase selected from cluster 11 as identified in Table 1. In some embodiments, a serine recombinase is a recombinase selected from cluster 12 as identified in Table 1. In some embodiments, a serine recombinase is a recombinase selected from cluster 13 as identified in Table 1. In some embodiments, a serine recombinase is a recombinase selected from cluster 14 as identified in Table 1. In some embodiments, a serine recombinase is a recombinase selected from cluster 15 as identified in Table 1. In some embodiments, a serine recombinase is a recombinase selected from cluster 16 as identified in Table 1. In some embodiments, a serine recombinase is a recombinase selected from cluster 17 as identified in Table 1. In some embodiments, a serine recombinase is a recombinase selected from cluster 18 as identified in Table 1. In some embodiments, a serine recombinase is a recombinase selected from cluster 19 as identified in Table 1. In some embodiments, a serine recombinase is a recombinase selected from cluster 20 as identified in Table 1. In some embodiments, a serine recombinase is a recombinase selected from cluster 21 as identified in Table 1. In some embodiments, a serine recombinase is a recombinase selected from cluster 22 as identified in Table 1. In some embodiments, a serine recombinase is a recombinase selected from cluster 23 as identified in Table 1. In some embodiments, a serine recombinase is a recombinase selected from cluster 24 as identified in Table 1. In some embodiments, a serine recombinase is a recombinase selected from cluster 25 as identified in Table 1. In some embodiments, a serine recombinase is a recombinase selected from cluster 26 as identified in Table 1. In some embodiments, a serine recombinase is a recombinase selected from cluster 27 as identified in Table 1. In some embodiments, a serine recombinase is a recombinase selected from cluster 28 as identified in Table 1. In some embodiments, a serine recombinase is a recombinase selected from cluster 29 as identified in Table 1. In some embodiments, a serine recombinase is a recombinase selected from cluster 30 as identified in Table 1. In some embodiments, a serine recombinase is a recombinase selected from cluster 31 as identified in Table 1. In some embodiments, a serine recombinase is a recombinase selected from cluster 32 as identified in Table 1. In some embodiments, a serine recombinase is a recombinase selected from cluster 33 as identified in Table 1. In some embodiments, a serine recombinase is a recombinase selected from cluster 34 as identified in Table 1. In some embodiments, a serine recombinase is a recombinase selected from cluster 35 as identified in Table 1. In some embodiments, a serine recombinase is a recombinase selected from cluster 36 as identified in Table 1. In some embodiments, a serine recombinase is a recombinase selected from cluster 37 as identified in Table 1. In some embodiments, a serine recombinase is a recombinase selected from cluster 38 as identified in Table 1. In some embodiments, a serine recombinase is a recombinase selected from cluster 39 as identified in Table 1. In some embodiments, a serine recombinase is a recombinase selected from cluster 40 as identified in Table 1. In some embodiments, a serine recombinase is a recombinase selected from cluster 41 as identified in Table 1. In some embodiments, a serine recombinase is a recombinase selected from cluster 42 as identified in Table 1. In some embodiments, a serine recombinase is a recombinase selected from cluster 43 as identified in Table 1. In some embodiments, a serine recombinase is a recombinase selected from cluster 44 as identified in Table 1. In some embodiments, a serine recombinase is a recombinase selected from cluster 45 as identified in Table 1. In some embodiments, a serine recombinase is a recombinase selected from cluster 46 as identified in Table 1. In some embodiments, a serine recombinase is a recombinase selected from cluster 47 as identified in Table 1. In some embodiments, a serine recombinase is a recombinase selected from cluster 48 as identified in Table 1. In some embodiments, a serine recombinase is a recombinase selected from cluster 49 as identified in Table 1. In some embodiments, a serine recombinase is a recombinase selected from cluster 50 as identified in Table 1. In some embodiments, a serine recombinase is a recombinase selected from cluster 51 as identified in Table 1. In some embodiments, a serine recombinase is a recombinase selected from cluster 52 as identified in Table 1. In some embodiments, a serine recombinase is a recombinase selected from cluster 53 as identified in Table 1. In some embodiments, a serine recombinase is a recombinase selected from cluster 54 as identified in Table 1. In some embodiments, a serine recombinase is a recombinase selected from cluster 55 as identified in Table 1. In some embodiments, a serine recombinase is a recombinase selected from cluster 56 as identified in Table 1. In some embodiments, a serine recombinase is a recombinase selected from cluster 57 as identified in Table 1. In some embodiments, a serine recombinase is a recombinase selected from cluster 58 as identified in Table 1. In some embodiments, a serine recombinase is a recombinase selected from cluster 59 as identified in Table 1. In some embodiments, a serine recombinase is a recombinase selected from cluster 60 as identified in Table 1. In some embodiments, a serine recombinase is a recombinase selected from cluster 61 as identified in Table 1. In some embodiments, a serine recombinase is a recombinase selected from cluster 62 as identified in Table 1. In some embodiments, a serine recombinase is a recombinase selected from cluster 63 as identified in Table 1. In some embodiments, a serine recombinase is a recombinase selected from cluster 64 as identified in Table 1. In some embodiments, a serine recombinase is a recombinase selected from cluster 65 as identified in Table 1. In some embodiments, a serine recombinase is a recombinase selected from cluster 66 as identified in Table 1. In some embodiments, a serine recombinase is a recombinase selected from cluster 67 as identified in Table 1. In some embodiments, a serine recombinase is a recombinase selected from cluster 68 as identified in Table 1. In some embodiments, a serine recombinase is a recombinase selected from cluster 69 as identified in Table 1. In some embodiments, a serine recombinase is a recombinase selected from cluster 70 as identified in Table 1. In some embodiments, a serine recombinase is a recombinase selected from cluster 71 as identified in Table 1. In some embodiments, a serine recombinase is a recombinase selected from cluster 72 as identified in Table 1. In some embodiments, a serine recombinase is a recombinase selected from cluster 73 as identified in Table 1. In some embodiments, a serine recombinase is a recombinase selected from cluster 74 as identified in Table 1. In some embodiments, a serine recombinase is a recombinase selected from cluster 75 as identified in Table 1. In some embodiments, a serine recombinase is a recombinase selected from cluster 76 as identified in Table 1. In some embodiments, a serine recombinase is a recombinase selected from cluster 77 as identified in Table 1. In some embodiments, a serine recombinase is a recombinase selected from cluster 78 as identified in Table 1. In some embodiments, a serine recombinase is a recombinase selected from cluster 79 as identified in Table 1. In some embodiments, a serine recombinase is a recombinase selected from cluster 80 as identified in Table 1. In some embodiments, a serine recombinase is a recombinase selected from cluster 81 as identified in Table 1. In some embodiments, a serine recombinase is a recombinase selected from cluster 82 as identified in Table 1. In some embodiments, a serine recombinase is a recombinase selected from cluster 83 as identified in Table 1. In some embodiments, a serine recombinase is a recombinase selected from cluster 84 as identified in Table 1. In some embodiments, a serine recombinase is a recombinase selected from cluster 85 as identified in Table 1. In some embodiments, a serine recombinase is a recombinase selected from cluster 86 as identified in Table 1. In some embodiments, a serine recombinase is a recombinase selected from cluster 87 as identified in Table 1. In some embodiments, a serine recombinase is a recombinase selected from cluster 88 as identified in Table 1. In some embodiments, a serine recombinase is a recombinase selected from cluster 89 as identified in Table 1. In some embodiments, a serine recombinase is a recombinase selected from cluster 90 as identified in Table 1. In some embodiments, a serine recombinase is a recombinase selected from cluster 91 as identified in Table 1. In some embodiments, a serine recombinase is a recombinase selected from cluster 92 as identified in Table 1. In some embodiments, a serine recombinase is a recombinase selected from cluster 93 as identified in Table 1. In some embodiments, a serine recombinase is a recombinase selected from cluster 94 as identified in Table 1. In some embodiments, a serine recombinase is a recombinase selected from cluster 95 as identified in Table 1. In some embodiments, a serine recombinase is a recombinase selected from cluster 96 as identified in Table 1. In some embodiments, a serine recombinase is a recombinase selected from cluster 97 as identified in Table 1. In some embodiments, a serine recombinase is a recombinase selected from cluster 98 as identified in Table 1. In some embodiments, a serine recombinase is a recombinase selected from cluster 99 as identified in Table 1. In some embodiments, a serine recombinase is a recombinase selected from cluster 100 as identified in Table 1. In some embodiments, a serine recombinase is a recombinase selected from cluster 101 as identified in Table 1. In some embodiments, a serine recombinase is a recombinase selected from cluster 102 as identified in Table 1. In some embodiments, a serine recombinase is a recombinase selected from cluster 103 as identified in Table 1. In some embodiments, a serine recombinase is a recombinase selected from cluster 104 as identified in Table 1. In some embodiments, a serine recombinase is a recombinase selected from cluster 105 as identified in Table 1. In some embodiments, a serine recombinase is a recombinase selected from cluster 106 as identified in Table 1. In some embodiments, a serine recombinase is a recombinase selected from cluster 107 as identified in Table 1. In some embodiments, a serine recombinase is a recombinase selected from cluster 108 as identified in Table 1. In some embodiments, a serine recombinase is a recombinase selected from cluster 109 as identified in Table 1. In some embodiments, a serine recombinase is a recombinase selected from cluster 110 as identified in Table 1. In some embodiments, a serine recombinase is a recombinase selected from cluster 111 as identified in Table 1. In some embodiments, a serine recombinase is a recombinase selected from cluster 112 as identified in Table 1. In some embodiments, a serine recombinase is a recombinase selected from cluster 113 as identified in Table 1. In some embodiments, a serine recombinase is a recombinase selected from cluster 114 as identified in Table 1. In some embodiments, a serine recombinase is a recombinase selected from cluster 115 as identified in Table 1. In some embodiments, a serine recombinase is a recombinase selected from cluster 116 as identified in Table 1. In some embodiments, a serine recombinase is a recombinase selected from cluster 117 as identified in Table 1. In some embodiments, a serine recombinase is a recombinase selected from cluster 118 as identified in Table 1. In some embodiments, a serine recombinase is a recombinase selected from cluster 119 as identified in Table 1. In some embodiments, a serine recombinase is a recombinase selected from cluster 120 as identified in Table 1. In some embodiments, a serine recombinase is a recombinase selected from cluster 121 as identified in Table 1. In some embodiments, a serine recombinase is a recombinase selected from cluster 122 as identified in Table 1. In some embodiments, a serine recombinase is a recombinase selected from cluster 123 as identified in Table 1. In some embodiments, a serine recombinase is a recombinase selected from cluster 124 as identified in Table 1. In some embodiments, a serine recombinase is a recombinase selected from cluster 125 as identified in Table 1. In some embodiments, a serine recombinase is a recombinase selected from cluster 126 as identified in Table 1. In some embodiments, a serine recombinase is a recombinase selected from cluster 127 as identified in Table 1. In some embodiments, a serine recombinase is a recombinase selected from cluster 128 as identified in Table 1. In some embodiments, a serine recombinase is a recombinase selected from cluster 129 as identified in Table 1. In some embodiments, a serine recombinase is a recombinase selected from cluster 130 as identified in Table 1. In some embodiments, a serine recombinase is a recombinase selected from cluster 131 as identified in Table 1. In some embodiments, a serine recombinase is a recombinase selected from cluster 132 as identified in Table 1. In some embodiments, a serine recombinase is a recombinase selected from cluster 133 as identified in Table 1. In some embodiments, a serine recombinase is a recombinase selected from cluster 134 as identified in Table 1. In some embodiments, a serine recombinase is a recombinase selected from cluster 135 as identified in Table 1. In some embodiments, a serine recombinase is a recombinase selected from cluster 136 as identified in Table 1. In some embodiments, a serine recombinase is a recombinase selected from cluster 137 as identified in Table 1. In some embodiments, a serine recombinase is a recombinase selected from cluster 138 as identified in Table 1. In some embodiments, a serine recombinase is a recombinase selected from cluster 139 as identified in Table 1. In some embodiments, a serine recombinase is a recombinase selected from cluster 140 as identified in Table 1. In some embodiments, a serine recombinase is a recombinase selected from cluster 141 as identified in Table 1. In some embodiments, a serine recombinase is a recombinase selected from cluster 142 as identified in Table 1. In some embodiments, a serine recombinase is a recombinase selected from cluster 143 as identified in Table 1. In some embodiments, a serine recombinase is a recombinase selected from cluster 144 as identified in Table 1. In some embodiments, a serine recombinase is a recombinase selected from cluster 145 as identified in Table 1. In some embodiments, a serine recombinase is a recombinase selected from cluster 146 as identified in Table 1. In some embodiments, a serine recombinase is a recombinase selected from cluster 147 as identified in Table 1. In some embodiments, a serine recombinase is a recombinase selected from cluster 148 as identified in Table 1. In some embodiments, a serine recombinase is a recombinase selected from cluster 149 as identified in Table 1. In some embodiments, a serine recombinase is a recombinase selected from cluster 150 as identified in Table 1. In some embodiments, a serine recombinase is a recombinase selected from cluster 151 as identified in Table 1. In some embodiments, a serine recombinase is a recombinase selected from cluster 152 as identified in Table 1. In some embodiments, a serine recombinase is a recombinase selected from cluster 153 as identified in Table 1. In some embodiments, a serine recombinase is a recombinase selected from cluster 154 as identified in Table 1. In some embodiments, a serine recombinase is a recombinase selected from cluster 155 as identified in Table 1. In some embodiments, a serine recombinase is a recombinase selected from cluster 156 as identified in Table 1. In some embodiments, a serine recombinase is a recombinase selected from cluster 157 as identified in Table 1. In some embodiments, a serine recombinase is a recombinase selected from cluster 158 as identified in Table 1. In some embodiments, a serine recombinase is a recombinase selected from cluster 159 as identified in Table 1.

[0018] In some embodiments, a serine recombinase comprises an amino acid sequence at least 80% identical to a sequence selected from SEQ ID NO: 58926, SEQ ID NO: 10611, SEQ ID NO: 33021, SEQ ID NO: 40191, SEQ ID NO: 5681, SEQ ID NO: 36231, SEQ ID NO: 34841, SEQ ID NO: 9906, SEQ ID NO: 21701, SEQ ID NO: 7466, SEQ ID NO: 57456, SEQ ID NO: 41066, SEQ ID NO: 41186, SEQ ID NO: 21126, SEQ ID NO: 1191, SEQ ID NO: 35081, SEQ ID NO: 18926, SEQ ID NO: 51806, SEQ ID NO: 58376, SEQ ID NO: 29771, SEQ ID NO: 21276, or SEQ ID NO: 36986.

[0019] In some embodiments, a serine recombinase, a first attachment site, and a second attachment site comprise sequences at least 80% identical to sequences that have the same system ID in Table 1. In some embodiments, a serine recombinase, a first attachment site, and a second attachment site comprise sequences at least 80% identical to sequences that have the same system ID in Table 2. In some embodiments, a serine recombinase, a first attachment site, and a second attachment site comprise sequences at least 80% identical to sequences that have the same system ID in Table 3.

[0020] In some embodiments, a polynucleotide encoding a serine recombinase is or comprises mRNA. In some embodiments, a polynucleotide encoding a serine recombinase is or comprises DNA.

[0021] In some embodiments, a polynucleotide encoding a serine recombinase is operably linked to a promoter that is active in a human cell.

[0022] In some embodiments, an exogenous nucleic acid (e.g., exogenous DNA) is or comprises a plasmid, a nanoplasmid, a mini-circle, or doggybone DNA (dbDNA).

[0023] In some embodiments, an exogenous nucleic acid (e.g., exogenous DNA) is delivered to a human cell in a lipid nanoparticle (LNP), an adeno-associated virus (AAV), a lentivirus, a virus-like particle (VLP), an exosome, a cationic nanoparticle, or a dendrimer. In some embodiments, an exogenous DNA and a polynucleotide encoding a serine recombinase are delivered to a human cell in an LNP, and wherein the polynucleotide encoding the serine recombinase is or comprises mRNA.

[0024] In some embodiments, a human cell is or comprises: an osteoblast, a chondrocyte, an adipocyte, a skeletal muscle cell, a cardiac muscle cell, a neuron, an astrocyte, an oligodendrocyte, a Schwann cell, a retinal cell, a corneal cell, a skin cell, a monocyte, a macrophage, a neutrophil, a basophil, an eosinophil, an erythrocyte, a megakaryocyte, a dendritic cell, a T-lymphocyte, a B-lymphocyte, an NK-cell, a gastric cell, an intestinal cell, a smooth muscle cell, a vascular cell, a bladder cell, a pancreatic alpha cell, a pancreatic beta cell, a pancreatic delta cell, a liver cell (e.g., a hepatocyte, a hepatic stellate cell, a Kupffer cell, or a liver sinusoidal endothelial cell), a renal cell, an adrenal cell, a lung cell, a mesenchymal stem cell, a hematopoietic stem cell, a hematopoietic progenitor cell, a neuronal stem cell, a retinal stem cell, a cardiac muscle stem cell, a skeletal muscle stem cell, an adipose tissue derived stem cell, a chondrogenic stem cell, a liver stem cell, a kidney stem cell, a pancreatic stem cell, an embryonic stem cell, an induced pluripotent stem cell, or a fate-converted stem or progenitor cell.

[0025] In another aspect, the present disclosure provides a transgenic cell (e.g., a human cell) obtained by a method of the present disclosure. In some embodiments, a transgenic cell (e.g., a human cell) is obtained by culturing a transgenic cell (e.g., a human cell) of the present disclosure (e.g., obtained by a method of the present disclosure).

[0026] In another aspect, the present disclosure provides methods for obtaining integration of an exogenous nucleic acid (e.g., exogenous DNA) comprising a nucleic acid sequence of interest and a first attachment site into a genome (e.g., a human genome) comprising a second attachment site, the method comprising: contacting the first attachment site with the second attachment site in the presence of a serine recombinase, wherein the contacting step results in recombination between the first and second attachment sites, and wherein recombination between the first and second attachment sites results in integration of the exogenous nucleic acid (e.g., exogenous DNA) into the genome (e.g., human genome).

[0027] In some embodiments, a first attachment site is or comprises a donor attachment (attD) site. In some embodiments, an attD site comprises an attB sequence or an attP sequence. In some embodiments, a first attachment site comprises a nucleic acid sequence at least 50% identical to an attB or attP sequence selected from Table 1. In some embodiments, a first attachment site comprises a nucleic acid sequence at least 50% identical to an attB or attP sequence selected from Table 2.

[0028] In some embodiments, a second attachment site is or comprises an acceptor attachment (attA) site. In some embodiments, an attA site comprises an attB sequence, an attP sequence, or an attH sequence. In some embodiments, a second attachment site comprises a nucleic acid sequence at least 50% identical to: an attB sequence selected from Table 1, an attP sequence selected from Table 1, or an attH sequence selected from Table 1. In some embodiments, a second attachment site comprises a nucleic acid sequence at least 50% identical to: an attB sequence selected from Table 2, an attP sequence selected from Table 2, or an attH sequence selected from Table 2. In some embodiments, a second attachment site comprises a nucleic acid sequence at least 50% identical to: an attB sequence selected from Table 3, an attP sequence selected from Table 3, or an attH sequence selected from Table 3.

[0029] In some embodiments, a serine recombinase comprises an amino acid sequence at least 80% identical to a serine recombinase sequence selected from Table 1. In some embodiments, a serine recombinase comprises an amino acid sequence at least 80% identical to a serine recombinase sequence selected from Table 2. In some embodiments, a serine recombinase comprises an amino acid sequence at least 80% identical to a serine recombinase sequence selected from Table 3.

[0030] In some embodiments, a serine recombinase is a recombinase selected from cluster 1 as identified in Table 1. In some embodiments, a serine recombinase is a recombinase selected from cluster 2 as identified in Table 1. In some embodiments, a serine recombinase is a recombinase selected from cluster 3 as identified in Table 1. In some embodiments, a serine recombinase is a recombinase selected from cluster 4 as identified in Table 1. In some embodiments, a serine recombinase is a recombinase selected from cluster 5 as identified in Table 1. In some embodiments, a serine recombinase is a recombinase selected from cluster 6 as identified in Table 1. In some embodiments, a serine recombinase is a recombinase selected from cluster 7 as identified in Table 1. In some embodiments, a serine recombinase is a recombinase selected from cluster 8 as identified in Table 1. In some embodiments, a serine recombinase is a recombinase selected from cluster 9 as identified in Table 1. In some embodiments, a serine recombinase is a recombinase selected from cluster 10 as identified in Table 1. In some embodiments, a serine recombinase is a recombinase selected from cluster 11 as identified in Table 1. In some embodiments, a serine recombinase is a recombinase selected from cluster 12 as identified in Table 1. In some embodiments, a serine recombinase is a recombinase selected from cluster 13 as identified in Table 1. In some embodiments, a serine recombinase is a recombinase selected from cluster 14 as identified in Table 1. In some embodiments, a serine recombinase is a recombinase selected from cluster 15 as identified in Table 1. In some embodiments, a serine recombinase is a recombinase selected from cluster 16 as identified in Table 1. In some embodiments, a serine recombinase is a recombinase selected from cluster 17 as identified in Table 1. In some embodiments, a serine recombinase is a recombinase selected from cluster 18 as identified in Table 1. In some embodiments, a serine recombinase is a recombinase selected from cluster 19 as identified in Table 1. In some embodiments, a serine recombinase is a recombinase selected from cluster 20 as identified in Table 1. In some embodiments, a serine recombinase is a recombinase selected from cluster 21 as identified in Table 1. In some embodiments, a serine recombinase is a recombinase selected from cluster 22 as identified in Table 1. In some embodiments, a serine recombinase is a recombinase selected from cluster 23 as identified in Table 1. In some embodiments, a serine recombinase is a recombinase selected from cluster 24 as identified in Table 1. In some embodiments, a serine recombinase is a recombinase selected from cluster 25 as identified in Table 1. In some embodiments, a serine recombinase is a recombinase selected from cluster 26 as identified in Table 1. In some embodiments, a serine recombinase is a recombinase selected from cluster 27 as identified in Table 1. In some embodiments, a serine recombinase is a recombinase selected from cluster 28 as identified in Table 1. In some embodiments, a serine recombinase is a recombinase selected from cluster 29 as identified in Table 1. In some embodiments, a serine recombinase is a recombinase selected from cluster 30 as identified in Table 1. In some embodiments, a serine recombinase is a recombinase selected from cluster 31 as identified in Table 1. In some embodiments, a serine recombinase is a recombinase selected from cluster 32 as identified in Table 1. In some embodiments, a serine recombinase is a recombinase selected from cluster 33 as identified in Table 1. In some embodiments, a serine recombinase is a recombinase selected from cluster 34 as identified in Table 1. In some embodiments, a serine recombinase is a recombinase selected from cluster 35 as identified in Table 1. In some embodiments, a serine recombinase is a recombinase selected from cluster 36 as identified in Table 1. In some embodiments, a serine recombinase is a recombinase selected from cluster 37 as identified in Table 1. In some embodiments, a serine recombinase is a recombinase selected from cluster 38 as identified in Table 1. In some embodiments, a serine recombinase is a recombinase selected from cluster 39 as identified in Table 1. In some embodiments, a serine recombinase is a recombinase selected from cluster 40 as identified in Table 1. In some embodiments, a serine recombinase is a recombinase selected from cluster 41 as identified in Table 1. In some embodiments, a serine recombinase is a recombinase selected from cluster 42 as identified in Table 1. In some embodiments, a serine recombinase is a recombinase selected from cluster 43 as identified in Table 1. In some embodiments, a serine recombinase is a recombinase selected from cluster 44 as identified in Table 1. In some embodiments, a serine recombinase is a recombinase selected from cluster 45 as identified in Table 1. In some embodiments, a serine recombinase is a recombinase selected from cluster 46 as identified in Table 1. In some embodiments, a serine recombinase is a recombinase selected from cluster 47 as identified in Table 1. In some embodiments, a serine recombinase is a recombinase selected from cluster 48 as identified in Table 1. In some embodiments, a serine recombinase is a recombinase selected from cluster 49 as identified in Table 1. In some embodiments, a serine recombinase is a recombinase selected from cluster 50 as identified in Table 1. In some embodiments, a serine recombinase is a recombinase selected from cluster 51 as identified in Table 1. In some embodiments, a serine recombinase is a recombinase selected from cluster 52 as identified in Table 1. In some embodiments, a serine recombinase is a recombinase selected from cluster 53 as identified in Table 1. In some embodiments, a serine recombinase is a recombinase selected from cluster 54 as identified in Table 1. In some embodiments, a serine recombinase is a recombinase selected from cluster 55 as identified in Table 1. In some embodiments, a serine recombinase is a recombinase selected from cluster 56 as identified in Table 1. In some embodiments, a serine recombinase is a recombinase selected from cluster 57 as identified in Table 1. In some embodiments, a serine recombinase is a recombinase selected from cluster 58 as identified in Table 1. In some embodiments, a serine recombinase is a recombinase selected from cluster 59 as identified in Table 1. In some embodiments, a serine recombinase is a recombinase selected from cluster 60 as identified in Table 1. In some embodiments, a serine recombinase is a recombinase selected from cluster 61 as identified in Table 1. In some embodiments, a serine recombinase is a recombinase selected from cluster 62 as identified in Table 1. In some embodiments, a serine recombinase is a recombinase selected from cluster 63 as identified in Table 1. In some embodiments, a serine recombinase is a recombinase selected from cluster 64 as identified in Table 1. In some embodiments, a serine recombinase is a recombinase selected from cluster 65 as identified in Table 1. In some embodiments, a serine recombinase is a recombinase selected from cluster 66 as identified in Table 1. In some embodiments, a serine recombinase is a recombinase selected from cluster 67 as identified in Table 1. In some embodiments, a serine recombinase is a recombinase selected from cluster 68 as identified in Table 1. In some embodiments, a serine recombinase is a recombinase selected from cluster 69 as identified in Table 1. In some embodiments, a serine recombinase is a recombinase selected from cluster 70 as identified in Table 1. In some embodiments, a serine recombinase is a recombinase selected from cluster 71 as identified in Table 1. In some embodiments, a serine recombinase is a recombinase selected from cluster 72 as identified in Table 1. In some embodiments, a serine recombinase is a recombinase selected from cluster 73 as identified in Table 1. In some embodiments, a serine recombinase is a recombinase selected from cluster 74 as identified in Table 1. In some embodiments, a serine recombinase is a recombinase selected from cluster 75 as identified in Table 1. In some embodiments, a serine recombinase is a recombinase selected from cluster 76 as identified in Table 1. In some embodiments, a serine recombinase is a recombinase selected from cluster 77 as identified in Table 1. In some embodiments, a serine recombinase is a recombinase selected from cluster 78 as identified in Table 1. In some embodiments, a serine recombinase is a recombinase selected from cluster 79 as identified in Table 1. In some embodiments, a serine recombinase is a recombinase selected from cluster 80 as identified in Table 1. In some embodiments, a serine recombinase is a recombinase selected from cluster 81 as identified in Table 1. In some embodiments, a serine recombinase is a recombinase selected from cluster 82 as identified in Table 1. In some embodiments, a serine recombinase is a recombinase selected from cluster 83 as identified in Table 1. In some embodiments, a serine recombinase is a recombinase selected from cluster 84 as identified in Table 1. In some embodiments, a serine recombinase is a recombinase selected from cluster 85 as identified in Table 1. In some embodiments, a serine recombinase is a recombinase selected from cluster 86 as identified in Table 1. In some embodiments, a serine recombinase is a recombinase selected from cluster 87 as identified in Table 1. In some embodiments, a serine recombinase is a recombinase selected from cluster 88 as identified in Table 1. In some embodiments, a serine recombinase is a recombinase selected from cluster 89 as identified in Table 1. In some embodiments, a serine recombinase is a recombinase selected from cluster 90 as identified in Table 1. In some embodiments, a serine recombinase is a recombinase selected from cluster 91 as identified in Table 1. In some embodiments, a serine recombinase is a recombinase selected from cluster 92 as identified in Table 1. In some embodiments, a serine recombinase is a recombinase selected from cluster 93 as identified in Table 1. In some embodiments, a serine recombinase is a recombinase selected from cluster 94 as identified in Table 1. In some embodiments, a serine recombinase is a recombinase selected from cluster 95 as identified in Table 1. In some embodiments, a serine recombinase is a recombinase selected from cluster 96 as identified in Table 1. In some embodiments, a serine recombinase is a recombinase selected from cluster 97 as identified in Table 1. In some embodiments, a serine recombinase is a recombinase selected from cluster 98 as identified in Table 1. In some embodiments, a serine recombinase is a recombinase selected from cluster 99 as identified in Table 1. In some embodiments, a serine recombinase is a recombinase selected from cluster 100 as identified in Table 1. In some embodiments, a serine recombinase is a recombinase selected from cluster 101 as identified in Table 1. In some embodiments, a serine recombinase is a recombinase selected from cluster 102 as identified in Table 1. In some embodiments, a serine recombinase is a recombinase selected from cluster 103 as identified in Table 1. In some embodiments, a serine recombinase is a recombinase selected from cluster 104 as identified in Table 1. In some embodiments, a serine recombinase is a recombinase selected from cluster 105 as identified in Table 1. In some embodiments, a serine recombinase is a recombinase selected from cluster 106 as identified in Table 1. In some embodiments, a serine recombinase is a recombinase selected from cluster 107 as identified in Table 1. In some embodiments, a serine recombinase is a recombinase selected from cluster 108 as identified in Table 1. In some embodiments, a serine recombinase is a recombinase selected from cluster 109 as identified in Table 1. In some embodiments, a serine recombinase is a recombinase selected from cluster 110 as identified in Table 1. In some embodiments, a serine recombinase is a recombinase selected from cluster 111 as identified in Table 1. In some embodiments, a serine recombinase is a recombinase selected from cluster 112 as identified in Table 1. In some embodiments, a serine recombinase is a recombinase selected from cluster 113 as identified in Table 1. In some embodiments, a serine recombinase is a recombinase selected from cluster 114 as identified in Table 1. In some embodiments, a serine recombinase is a recombinase selected from cluster 115 as identified in Table 1. In some embodiments, a serine recombinase is a recombinase selected from cluster 116 as identified in Table 1. In some embodiments, a serine recombinase is a recombinase selected from cluster 117 as identified in Table 1. In some embodiments, a serine recombinase is a recombinase selected from cluster 118 as identified in Table 1. In some embodiments, a serine recombinase is a recombinase selected from cluster 119 as identified in Table 1. In some embodiments, a serine recombinase is a recombinase selected from cluster 120 as identified in Table 1. In some embodiments, a serine recombinase is a recombinase selected from cluster 121 as identified in Table 1. In some embodiments, a serine recombinase is a recombinase selected from cluster 122 as identified in Table 1. In some embodiments, a serine recombinase is a recombinase selected from cluster 123 as identified in Table 1. In some embodiments, a serine recombinase is a recombinase selected from cluster 124 as identified in Table 1. In some embodiments, a serine recombinase is a recombinase selected from cluster 125 as identified in Table 1. In some embodiments, a serine recombinase is a recombinase selected from cluster 126 as identified in Table 1. In some embodiments, a serine recombinase is a recombinase selected from cluster 127 as identified in Table 1. In some embodiments, a serine recombinase is a recombinase selected from cluster 128 as identified in Table 1. In some embodiments, a serine recombinase is a recombinase selected from cluster 129 as identified in Table 1. In some embodiments, a serine recombinase is a recombinase selected from cluster 130 as identified in Table 1. In some embodiments, a serine recombinase is a recombinase selected from cluster 131 as identified in Table 1. In some embodiments, a serine recombinase is a recombinase selected from cluster 132 as identified in Table 1. In some embodiments, a serine recombinase is a recombinase selected from cluster 133 as identified in Table 1. In some embodiments, a serine recombinase is a recombinase selected from cluster 134 as identified in Table 1. In some embodiments, a serine recombinase is a recombinase selected from cluster 135 as identified in Table 1. In some embodiments, a serine recombinase is a recombinase selected from cluster 136 as identified in Table 1. In some embodiments, a serine recombinase is a recombinase selected from cluster 137 as identified in Table 1. In some embodiments, a serine recombinase is a recombinase selected from cluster 138 as identified in Table 1. In some embodiments, a serine recombinase is a recombinase selected from cluster 139 as identified in Table 1. In some embodiments, a serine recombinase is a recombinase selected from cluster 140 as identified in Table 1. In some embodiments, a serine recombinase is a recombinase selected from cluster 141 as identified in Table 1. In some embodiments, a serine recombinase is a recombinase selected from cluster 142 as identified in Table 1. In some embodiments, a serine recombinase is a recombinase selected from cluster 143 as identified in Table 1. In some embodiments, a serine recombinase is a recombinase selected from cluster 144 as identified in Table 1. In some embodiments, a serine recombinase is a recombinase selected from cluster 145 as identified in Table 1. In some embodiments, a serine recombinase is a recombinase selected from cluster 146 as identified in Table 1. In some embodiments, a serine recombinase is a recombinase selected from cluster 147 as identified in Table 1. In some embodiments, a serine recombinase is a recombinase selected from cluster 148 as identified in Table 1. In some embodiments, a serine recombinase is a recombinase selected from cluster 149 as identified in Table 1. In some embodiments, a serine recombinase is a recombinase selected from cluster 150 as identified in Table 1. In some embodiments, a serine recombinase is a recombinase selected from cluster 151 as identified in Table 1. In some embodiments, a serine recombinase is a recombinase selected from cluster 152 as identified in Table 1. In some embodiments, a serine recombinase is a recombinase selected from cluster 153 as identified in Table 1. In some embodiments, a serine recombinase is a recombinase selected from cluster 154 as identified in Table 1. In some embodiments, a serine recombinase is a recombinase selected from cluster 155 as identified in Table 1. In some embodiments, a serine recombinase is a recombinase selected from cluster 156 as identified in Table 1. In some embodiments, a serine recombinase is a recombinase selected from cluster 157 as identified in Table 1. In some embodiments, a serine recombinase is a recombinase selected from cluster 158 as identified in Table 1. In some embodiments, a serine recombinase is a recombinase selected from cluster 159 as identified in Table 1.

[0031] In some embodiments, a serine recombinase, a first attachment site, and a second attachment site comprise sequences at least 80% identical to sequences that have the same system ID in Table 1. In some embodiments, a serine recombinase, a first attachment site, and a second attachment site comprise sequences at least 80% identical to sequences that have the same system ID in Table 2. In some embodiments, a serine recombinase, a first attachment site, and a second attachment site comprise sequences at least 80% identical to sequences that have the same system ID in Table 3.

[0032] In another aspect, the present disclosure provides a system for integrating an exogenous nucleic acid (e.g., exogenous DNA) comprising a nucleic acid sequence of interest into a genome (e.g., human genome), the system comprising: an exogenous nucleic acid (e.g., exogenous DNA) comprising a nucleic acid sequence of interest and a first attachment site, and a serine recombinase or a polynucleotide encoding the serine recombinase.

[0033] In some embodiments, a system comprises a polynucleotide encoding a serine recombinase and the polynucleotide comprises mRNA. In some embodiments, a system comprises a polynucleotide encoding the serine recombinase and the polynucleotide comprises DNA.

[0034] In some embodiments, exogenous nucleic acid (e.g., exogenous DNA) is or comprises a plasmid, a nanoplasmid, a mini-circle, or doggybone DNA (dbDNA).

[0035] In some embodiments, a system comprises a lipid nanoparticle (LNP), an adeno-associated virus (AAV), a lentivirus, a virus-like particle (VLP), an exosome, a cationic nanoparticle, or a dendrimer.

[0036] In some embodiments, a first attachment site is or comprises a donor attachment (attD) site. In some embodiments, an attD site comprises an attB sequence or an attP sequence. In some embodiments, a first attachment site comprises a nucleic acid sequence at least 50% identical to an attB or attP sequence selected from Table 1. In some embodiments, a first attachment site comprises a nucleic acid sequence at least 50% identical to an attB or attP sequence selected from Table 2. In some embodiments, a first attachment site comprises a nucleic acid sequence at least 50% identical to an attB or attP sequence selected from Table 3.

[0037] In some embodiments, a genome (e.g., a human genome) comprises a second attachment site. In some embodiments, a second attachment site is or comprises an acceptor attachment (attA) site. In some embodiments, an attA site comprises an attB sequence, an attP sequence, or an attH sequence. In some embodiments, a second attachment site comprises a nucleic acid sequence at least 50% identical to: an attB sequence selected from Table 1, an attP sequence selected from Table 1, or an attH sequence selected from Table 1. In some embodiments, a second attachment site comprises a nucleic acid sequence at least 50% identical to: an attB sequence selected from Table 2, an attP sequence selected from Table 2, or an attH sequence selected from Table 2. In some embodiments, a second attachment site comprises a nucleic acid sequence at least 50% identical to: an attB sequence selected from Table 3, an attP sequence selected from Table 3, or an attH sequence selected from Table 3.

[0038] In some embodiments, a serine recombinase comprises an amino acid sequence at least 80% identical to a sequence selected from Table 1. In some embodiments, a serine recombinase comprises an amino acid sequence at least 80% identical to a sequence selected from Table 2. In some embodiments, a serine recombinase comprises an amino acid sequence at least 80% identical to a sequence selected from Table 3.

[0039] In some embodiments, a serine recombinase is a recombinase selected from cluster 1 as identified in Table 1. In some embodiments, a serine recombinase is a recombinase selected from cluster 2 as identified in Table 1. In some embodiments, a serine recombinase is a recombinase selected from cluster 3 as identified in Table 1. In some embodiments, a serine recombinase is a recombinase selected from cluster 4 as identified in Table 1. In some embodiments, a serine recombinase is a recombinase selected from cluster 5 as identified in Table 1. In some embodiments, a serine recombinase is a recombinase selected from cluster 6 as identified in Table 1. In some embodiments, a serine recombinase is a recombinase selected from cluster 7 as identified in Table 1. In some embodiments, a serine recombinase is a recombinase selected from cluster 8 as identified in Table 1. In some embodiments, a serine recombinase is a recombinase selected from cluster 9 as identified in Table 1. In some embodiments, a serine recombinase is a recombinase selected from cluster 10 as identified in Table 1. In some embodiments, a serine recombinase is a recombinase selected from cluster 11 as identified in Table 1. In some embodiments, a serine recombinase is a recombinase selected from cluster 12 as identified in Table 1. In some embodiments, a serine recombinase is a recombinase selected from cluster 13 as identified in Table 1. In some embodiments, a serine recombinase is a recombinase selected from cluster 14 as identified in Table 1. In some embodiments, a serine recombinase is a recombinase selected from cluster 15 as identified in Table 1. In some embodiments, a serine recombinase is a recombinase selected from cluster 16 as identified in Table 1. In some embodiments, a serine recombinase is a recombinase selected from cluster 17 as identified in Table 1. In some embodiments, a serine recombinase is a recombinase selected from cluster 18 as identified in Table 1. In some embodiments, a serine recombinase is a recombinase selected from cluster 19 as identified in Table 1. In some embodiments, a serine recombinase is a recombinase selected from cluster 20 as identified in Table 1. In some embodiments, a serine recombinase is a recombinase selected from cluster 21 as identified in Table 1. In some embodiments, a serine recombinase is a recombinase selected from cluster 22 as identified in Table 1. In some embodiments, a serine recombinase is a recombinase selected from cluster 23 as identified in Table 1. In some embodiments, a serine recombinase is a recombinase selected from cluster 24 as identified in Table 1. In some embodiments, a serine recombinase is a recombinase selected from cluster 25 as identified in Table 1. In some embodiments, a serine recombinase is a recombinase selected from cluster 26 as identified in Table 1. In some embodiments, a serine recombinase is a recombinase selected from cluster 27 as identified in Table 1. In some embodiments, a serine recombinase is a recombinase selected from cluster 28 as identified in Table 1. In some embodiments, a serine recombinase is a recombinase selected from cluster 29 as identified in Table 1. In some embodiments, a serine recombinase is a recombinase selected from cluster 30 as identified in Table 1. In some embodiments, a serine recombinase is a recombinase selected from cluster 31 as identified in Table 1. In some embodiments, a serine recombinase is a recombinase selected from cluster 32 as identified in Table 1. In some embodiments, a serine recombinase is a recombinase selected from cluster 33 as identified in Table 1. In some embodiments, a serine recombinase is a recombinase selected from cluster 34 as identified in Table 1. In some embodiments, a serine recombinase is a recombinase selected from cluster 35 as identified in Table 1. In some embodiments, a serine recombinase is a recombinase selected from cluster 36 as identified in Table 1. In some embodiments, a serine recombinase is a recombinase selected from cluster 37 as identified in Table 1. In some embodiments, a serine recombinase is a recombinase selected from cluster 38 as identified in Table 1. In some embodiments, a serine recombinase is a recombinase selected from cluster 39 as identified in Table 1. In some embodiments, a serine recombinase is a recombinase selected from cluster 40 as identified in Table 1. In some embodiments, a serine recombinase is a recombinase selected from cluster 41 as identified in Table 1. In some embodiments, a serine recombinase is a recombinase selected from cluster 42 as identified in Table 1. In some embodiments, a serine recombinase is a recombinase selected from cluster 43 as identified in Table 1. In some embodiments, a serine recombinase is a recombinase selected from cluster 44 as identified in Table 1. In some embodiments, a serine recombinase is a recombinase selected from cluster 45 as identified in Table 1. In some embodiments, a serine recombinase is a recombinase selected from cluster 46 as identified in Table 1. In some embodiments, a serine recombinase is a recombinase selected from cluster 47 as identified in Table 1. In some embodiments, a serine recombinase is a recombinase selected from cluster 48 as identified in Table 1. In some embodiments, a serine recombinase is a recombinase selected from cluster 49 as identified in Table 1. In some embodiments, a serine recombinase is a recombinase selected from cluster 50 as identified in Table 1. In some embodiments, a serine recombinase is a recombinase selected from cluster 51 as identified in Table 1. In some embodiments, a serine recombinase is a recombinase selected from cluster 52 as identified in Table 1. In some embodiments, a serine recombinase is a recombinase selected from cluster 53 as identified in Table 1. In some embodiments, a serine recombinase is a recombinase selected from cluster 54 as identified in Table 1. In some embodiments, a serine recombinase is a recombinase selected from cluster 55 as identified in Table 1. In some embodiments, a serine recombinase is a recombinase selected from cluster 56 as identified in Table 1. In some embodiments, a serine recombinase is a recombinase selected from cluster 57 as identified in Table 1. In some embodiments, a serine recombinase is a recombinase selected from cluster 58 as identified in Table 1. In some embodiments, a serine recombinase is a recombinase selected from cluster 59 as identified in Table 1. In some embodiments, a serine recombinase is a recombinase selected from cluster 60 as identified in Table 1. In some embodiments, a serine recombinase is a recombinase selected from cluster 61 as identified in Table 1. In some embodiments, a serine recombinase is a recombinase selected from cluster 62 as identified in Table 1. In some embodiments, a serine recombinase is a recombinase selected from cluster 63 as identified in Table 1. In some embodiments, a serine recombinase is a recombinase selected from cluster 64 as identified in Table 1. In some embodiments, a serine recombinase is a recombinase selected from cluster 65 as identified in Table 1. In some embodiments, a serine recombinase is a recombinase selected from cluster 66 as identified in Table 1. In some embodiments, a serine recombinase is a recombinase selected from cluster 67 as identified in Table 1. In some embodiments, a serine recombinase is a recombinase selected from cluster 68 as identified in Table 1. In some embodiments, a serine recombinase is a recombinase selected from cluster 69 as identified in Table 1. In some embodiments, a serine recombinase is a recombinase selected from cluster 70 as identified in Table 1. In some embodiments, a serine recombinase is a recombinase selected from cluster 71 as identified in Table 1. In some embodiments, a serine recombinase is a recombinase selected from cluster 72 as identified in Table 1. In some embodiments, a serine recombinase is a recombinase selected from cluster 73 as identified in Table 1. In some embodiments, a serine recombinase is a recombinase selected from cluster 74 as identified in Table 1. In some embodiments, a serine recombinase is a recombinase selected from cluster 75 as identified in Table 1. In some embodiments, a serine recombinase is a recombinase selected from cluster 76 as identified in Table 1. In some embodiments, a serine recombinase is a recombinase selected from cluster 77 as identified in Table 1. In some embodiments, a serine recombinase is a recombinase selected from cluster 78 as identified in Table 1. In some embodiments, a serine recombinase is a recombinase selected from cluster 79 as identified in Table 1. In some embodiments, a serine recombinase is a recombinase selected from cluster 80 as identified in Table 1. In some embodiments, a serine recombinase is a recombinase selected from cluster 81 as identified in Table 1. In some embodiments, a serine recombinase is a recombinase selected from cluster 82 as identified in Table 1. In some embodiments, a serine recombinase is a recombinase selected from cluster 83 as identified in Table 1. In some embodiments, a serine recombinase is a recombinase selected from cluster 84 as identified in Table 1. In some embodiments, a serine recombinase is a recombinase selected from cluster 85 as identified in Table 1. In some embodiments, a serine recombinase is a recombinase selected from cluster 86 as identified in Table 1. In some embodiments, a serine recombinase is a recombinase selected from cluster 87 as identified in Table 1. In some embodiments, a serine recombinase is a recombinase selected from cluster 88 as identified in Table 1. In some embodiments, a serine recombinase is a recombinase selected from cluster 89 as identified in Table 1. In some embodiments, a serine recombinase is a recombinase selected from cluster 90 as identified in Table 1. In some embodiments, a serine recombinase is a recombinase selected from cluster 91 as identified in Table 1. In some embodiments, a serine recombinase is a recombinase selected from cluster 92 as identified in Table 1. In some embodiments, a serine recombinase is a recombinase selected from cluster 93 as identified in Table 1. In some embodiments, a serine recombinase is a recombinase selected from cluster 94 as identified in Table 1. In some embodiments, a serine recombinase is a recombinase selected from cluster 95 as identified in Table 1. In some embodiments, a serine recombinase is a recombinase selected from cluster 96 as identified in Table 1. In some embodiments, a serine recombinase is a recombinase selected from cluster 97 as identified in Table 1. In some embodiments, a serine recombinase is a recombinase selected from cluster 98 as identified in Table 1. In some embodiments, a serine recombinase is a recombinase selected from cluster 99 as identified in Table 1. In some embodiments, a serine recombinase is a recombinase selected from cluster 100 as identified in Table 1. In some embodiments, a serine recombinase is a recombinase selected from cluster 101 as identified in Table 1. In some embodiments, a serine recombinase is a recombinase selected from cluster 102 as identified in Table 1. In some embodiments, a serine recombinase is a recombinase selected from cluster 103 as identified in Table 1. In some embodiments, a serine recombinase is a recombinase selected from cluster 104 as identified in Table 1. In some embodiments, a serine recombinase is a recombinase selected from cluster 105 as identified in Table 1. In some embodiments, a serine recombinase is a recombinase selected from cluster 106 as identified in Table 1. In some embodiments, a serine recombinase is a recombinase selected from cluster 107 as identified in Table 1. In some embodiments, a serine recombinase is a recombinase selected from cluster 108 as identified in Table 1. In some embodiments, a serine recombinase is a recombinase selected from cluster 109 as identified in Table 1. In some embodiments, a serine recombinase is a recombinase selected from cluster 110 as identified in Table 1. In some embodiments, a serine recombinase is a recombinase selected from cluster 111 as identified in Table 1. In some embodiments, a serine recombinase is a recombinase selected from cluster 112 as identified in Table 1. In some embodiments, a serine recombinase is a recombinase selected from cluster 113 as identified in Table 1. In some embodiments, a serine recombinase is a recombinase selected from cluster 114 as identified in Table 1. In some embodiments, a serine recombinase is a recombinase selected from cluster 115 as identified in Table 1. In some embodiments, a serine recombinase is a recombinase selected from cluster 116 as identified in Table 1. In some embodiments, a serine recombinase is a recombinase selected from cluster 117 as identified in Table 1. In some embodiments, a serine recombinase is a recombinase selected from cluster 118 as identified in Table 1. In some embodiments, a serine recombinase is a recombinase selected from cluster 119 as identified in Table 1. In some embodiments, a serine recombinase is a recombinase selected from cluster 120 as identified in Table 1. In some embodiments, a serine recombinase is a recombinase selected from cluster 121 as identified in Table 1. In some embodiments, a serine recombinase is a recombinase selected from cluster 122 as identified in Table 1. In some embodiments, a serine recombinase is a recombinase selected from cluster 123 as identified in Table 1. In some embodiments, a serine recombinase is a recombinase selected from cluster 124 as identified in Table 1. In some embodiments, a serine recombinase is a recombinase selected from cluster 125 as identified in Table 1. In some embodiments, a serine recombinase is a recombinase selected from cluster 126 as identified in Table 1. In some embodiments, a serine recombinase is a recombinase selected from cluster 127 as identified in Table 1. In some embodiments, a serine recombinase is a recombinase selected from cluster 128 as identified in Table 1. In some embodiments, a serine recombinase is a recombinase selected from cluster 129 as identified in Table 1. In some embodiments, a serine recombinase is a recombinase selected from cluster 130 as identified in Table 1. In some embodiments, a serine recombinase is a recombinase selected from cluster 131 as identified in Table 1. In some embodiments, a serine recombinase is a recombinase selected from cluster 132 as identified in Table 1. In some embodiments, a serine recombinase is a recombinase selected from cluster 133 as identified in Table 1. In some embodiments, a serine recombinase is a recombinase selected from cluster 134 as identified in Table 1. In some embodiments, a serine recombinase is a recombinase selected from cluster 135 as identified in Table 1. In some embodiments, a serine recombinase is a recombinase selected from cluster 136 as identified in Table 1. In some embodiments, a serine recombinase is a recombinase selected from cluster 137 as identified in Table 1. In some embodiments, a serine recombinase is a recombinase selected from cluster 138 as identified in Table 1. In some embodiments, a serine recombinase is a recombinase selected from cluster 139 as identified in Table 1. In some embodiments, a serine recombinase is a recombinase selected from cluster 140 as identified in Table 1. In some embodiments, a serine recombinase is a recombinase selected from cluster 141 as identified in Table 1. In some embodiments, a serine recombinase is a recombinase selected from cluster 142 as identified in Table 1. In some embodiments, a serine recombinase is a recombinase selected from cluster 143 as identified in Table 1. In some embodiments, a serine recombinase is a recombinase selected from cluster 144 as identified in Table 1. In some embodiments, a serine recombinase is a recombinase selected from cluster 145 as identified in Table 1. In some embodiments, a serine recombinase is a recombinase selected from cluster 146 as identified in Table 1. In some embodiments, a serine recombinase is a recombinase selected from cluster 147 as identified in Table 1. In some embodiments, a serine recombinase is a recombinase selected from cluster 148 as identified in Table 1. In some embodiments, a serine recombinase is a recombinase selected from cluster 149 as identified in Table 1. In some embodiments, a serine recombinase is a recombinase selected from cluster 150 as identified in Table 1. In some embodiments, a serine recombinase is a recombinase selected from cluster 151 as identified in Table 1. In some embodiments, a serine recombinase is a recombinase selected from cluster 152 as identified in Table 1. In some embodiments, a serine recombinase is a recombinase selected from cluster 153 as identified in Table 1. In some embodiments, a serine recombinase is a recombinase selected from cluster 154 as identified in Table 1. In some embodiments, a serine recombinase is a recombinase selected from cluster 155 as identified in Table 1. In some embodiments, a serine recombinase is a recombinase selected from cluster 156 as identified in Table 1. In some embodiments, a serine recombinase is a recombinase selected from cluster 157 as identified in Table 1. In some embodiments, a serine recombinase is a recombinase selected from cluster 158 as identified in Table 1. In some embodiments, a serine recombinase is a recombinase selected from cluster 159 as identified in Table 1.

[0040] In some embodiments, a serine recombinase, a first attachment site, and a second attachment site comprise sequences at least 80% identical to sequences that have the same system ID in Table 1. In some embodiments, a serine recombinase, a first attachment site, and a second attachment site comprise sequences at least 80% identical to sequences that have the same system ID in Table 2. In some embodiments, a serine recombinase, a first attachment site, and a second attachment site comprise sequences at least 80% identical to sequences that have the same system ID in Table 3.

[0041] In another aspect, the present disclosure provides a transgenic human cell comprising a system of the present disclosure.

[0042] In another aspect, the present disclosure provides a serine recombinase (e.g., an isolated serine recombinase) comprising an amino acid sequence at least 80% identical to a sequence selected from Table 1. In some embodiments, a serine recombinase (e.g., an isolated serine recombinase) comprises an amino acid sequence at least 80% identical to a sequence selected from Table 2. In some embodiments, a serine recombinase (e.g., an isolated serine recombinase) comprises an amino acid sequence at least 80% identical to a sequence selected from Table 3. In some embodiments, a serine recombinase (e.g., an isolated serine recombinase) is fused to one or more nuclear localization signals (NLS). In some embodiments, a nuclear localization signal is fused to the N-terminal of a serine recombinase (e.g., an isolated serine recombinase). In some embodiments, a nuclear localization signal is fused to the C-terminal of a serine recombinase (e.g., an isolated serine recombinase).

[0043] In another aspect, the present disclosure provides a nucleic acid (e.g., an isolated nucleic acid) comprising a polynucleotide encoding a serine recombinase of the present disclosure. In another aspect, the present disclosure provides an expression vector comprising a nucleic acid of the present disclosure. In some embodiments, an expression vector comprises a polynucleotide operably linked to a promoter that is active in a human cell. In another aspect, the present disclosure provides a cell (e.g., a transgenic cell, e.g., a transgenic human cell) comprising a serine recombinase of the present disclosure, a nucleic acid of the present disclosure, or an expression vector of the present disclosure. In another aspect, the present disclosure provides a method of treating a disease in a subject in need thereof, the method comprising administering to the subject a system of the present disclosure, a serine recombinase of the present disclosure, a nucleic acid of the present disclosure, an expression vector of the present disclosure, or a cell of the present disclosure.

### BRIEF DESCRIPTION OF THE DRAWING

[0044] FIG. 1 shows an exemplary illustration of recombinase-mediated integration between an integrative vector and a human genome. In this illustration, the pair of attachment sites involved in the recombination event are present in the human genome (attH) and in the integrative vector (attD).

[0045] FIG. 2 shows an exemplary pair of attP and attB sequences (SEQ ID NO: 2 and SEQ ID NO: 3, respectively). The pair of attachment site sequences comprise pairs of binding regions flanking the central dinucleotide (e.g., TT). The pair of attachment site sequences comprise a pair of recombinase domain (RD) binding regions directly 5′ and 3′ of the central dinucleotide. The pair of attachment site sequences also comprise a pair of zinc ribbon domain (ZD) binding regions 5′ and 3′ of the RD binding regions. The attP attachment site sequence comprises linkers between the RD binding regions and the ZD binding regions.

[0046] FIG. 3 shows an exemplary illustration of a plasmid recombination assay. In this illustration, an attB-LSR plasmid and an attP-mCherry plasmid are co-transfected in a cellular system (e.g., HEK293T cells). Upon successful recombination, the mCherry fluorescent protein is capable of expression in the cellular system.

[0047] FIGS. 4A-B are exemplary graphs demonstrating percent recombination (FIG. 4A) relative to Bxb1 control and mean fluorescence intensity (MFI, FIG. 4B) as measured by digital droplet PCR (ddPCR). Fluorescent data in FIG. 4B was normalized by dividing the MFI of the recombination group (co-transfection of attB-LSR plasmid and attP-mCherry plasmid; “LSR”) by the MFI of the promoterless attP-mCherry only group (“attP only”) to determine fold increase in mCherry fluorescence caused by promoter-swapping.

[0048] FIG. 5 is an exemplary schematic demonstrating clustering and assaying of novel large serine recombinases (LSRs) using methods disclosed in Example 2.

[0049] FIGS. 6A-C show an exemplary illustration of a recombination assay (FIG. 6A), an exemplary graph demonstrating percent recombination via the activity of barcoded LSR cluster representatives on barcoded attB plasmids as determined by next generation sequencing (NGS) readout for recombined barcodes (FIG. 6B, with control recombinase Bxb1 shown as “160”), and an exemplary graph demonstrating barcode reads relative to corrected reads for AttR (FIG. 6C).

[0050] FIGS. 7A-B show exemplary illustrations for measuring genomic integration using the UDiTaS protocol as disclosed in Example 2. As shown in FIG. 7A, the UDiTas reporter plasmid would target its own attD site for integration into the human genome. As shown in FIG. 7B, when LSR integration occurs, amplicons that are half attD site and half human genome are generated, whereas when random integration occurs, amplicons containing the whole attD site are generated.

[0051] FIGS. 8A-B are exemplary graphs demonstrating barcode read count for two separate experiments, each involving three separate groups. FIG. 8A shows unique molecular identifier (UMI) counts across two experiments (first experiment (REQ3707-001): top three graphs and second experiment (REQ3718-001): bottom three graphs). The top graph of each trio (graphs 1 and 4 from the top) represents LSR group 1 (“specific” targeting pool), the middle graph of each trio (graphs 2 and 5 from the top) represents LSR group 2 (“multi-targeting” pool), and the bottom graph of each trio (graphs 3 and 6 from the top) represents the control group. FIG. 8B shows a UMI count comparison across both experiments, denoted Experiment 1 and Experiment 2, of different LSR cluster groups.

[0052] FIGS. 9A-B are exemplary graphs demonstrating genomic integration across LSR clusters. FIG. 9A shows a graph comparing number of landing sites across UMI counts for the different LSR clusters. FIG. 9B highlights two outliers (clusters 16 and 85) which both demonstrated a high UMI count with a low number of landing sites.

[0053] FIG. 10 is a graph depicting number of landing sites and UMI counts for the different LSR clusters as determined by the pooled genomic integration assay (described in Example 2) with an overlaid heatmap corresponding to activity of the LSR cluster in the pooled plasmid recombination assay (PRA; as described in Example 2). Two LSR clusters (clusters 112 and 136) were noted in the right set of graphs for their targeting profile at various loci.

[0054] FIG. 11 is a graph demonstrating percent of UMI read counts across the LSR clusters disclosed gated within the top five landing sites for integration (as a measure of LSR specificity) as well as total UMI read counts (as measure of LSR recombination activity).

### DEFINITIONS

[0055] Approximately: as used herein, “approximately” or “about,” as applied to one or more values of interest, refers to a value that is similar to a stated reference value. In certain embodiments, the term “approximately” or “about” refers to a range of values that fall within 25%, 20%, 19%, 18%, 17%, 16%, 15%, 14%, 13%, 12%, 11%, 10%, 9%, 8%, 7%, 6%, 5%, 4%, 3%, 2%, 1%, or less in either direction (greater than or less than) of the stated reference value unless otherwise stated or otherwise evident from the context.

[0056] Cognate: as used herein, “cognate” refers to the attribute of a serine recombinase to recognize specific attP and attB attachment sites. It is understood in the art that given the thousands of possible attB attachment sites for any given serine recombinase and attP attachment site to recombine, only a select few will undergo actual recombination. As such, these attB sites are ‘cognate’ with their associated attP site and serine recombinase.

[0057] Enhancer: as used herein, “enhancer” refers to a short region of DNA that can be bound by proteins to increase the likelihood for transcription of a particular gene. These bound proteins are usually referred to as transcription factors. Enhancers can be located up to 1 Mbp upstream or downstream from the gene.

[0058] Expression Vector: as used herein, “expression vector” refers to a vector, e.g., a nucleic acid delivery vehicle, for example, such as a DNA delivery vehicle, such as a plasmid, nanoplasmid, or doggybone DNA (dbDNA) designed with the capacity to enable expression of a nucleic acid sequence inserted in the vector following transformation into a host. As disclosed herein, an expression vector can encode, for example, a recombinase, or a nucleic acid sequence of interest intended for integration into the genome of a host cell and a recombinase attachment site (e.g., a donor attachment (“attD”) site, as described herein). The inserted nucleic acid sequence is typically under the control of elements such as promoters, initiation control regions, enhancers, and the like. Initiation control regions or promoters are known to those in the art as elements that are useful to drive expression of a nucleic acid of interest in the desired host cell. The expression vector may be RNA, e.g., mRNA, or DNA. In some embodiments, the expression vector can be double-stranded, e.g., a double-stranded DNA plasmid (dsDNA plasmid). In some embodiments, the expression vector can be single-stranded, e.g., a single-stranded DNA plasmid (ssDNA plasmid). In some cases, the expression vector can be linear (e.g., a linear dsDNA plasmid or a linear ssDNA plasmid).

[0059] Gene: as used herein, “gene” refers to an assembly of nucleotides that encodes the synthesis of a gene product, either an RNA, a polypeptide, or a protein.

[0060] Homologous: as used herein, “homologous” refers to the relationship between proteins that may possess a “common evolutionary origin.” This further includes proteins from superfamilies and homologous proteins from different species. Homologous proteins typically have high percent identity, with variation most often found in redundant codons.

[0061] In vitro: as used herein “in vitro” refers to events that occur in an artificial environment, e.g., in a test tube or reaction vessel, in cell culture, etc., rather than within a multi-cellular organism.

[0062] In vivo: as used herein, “in vivo” refers to events that occur within a multi-cellular organism, such as a human or a non-human animal.

[0063] Nucleic acid: as used herein, the terms “nucleic acid” and “polynucleotide” refer to a polymer of at least three nucleotides. In some embodiments, a nucleic acid comprises DNA. In some embodiments, a nucleic acid comprises RNA, for example, mRNA. In some embodiments, a nucleic acid is single stranded. In some embodiments, a nucleic acid is double stranded. In some embodiments, a nucleic acid comprises both single and double stranded portions. In some embodiments, a nucleic acid comprises a backbone that comprises one or more phosphodiester linkages. In some embodiments, a nucleic acid comprises a backbone that comprises both phosphodiester and non-phosphodiester linkages. For example, in some embodiments, a nucleic acid may comprise a backbone that comprises one or more phosphorothioate or 5′-N-phosphoramidite linkages and/or one or more peptide bonds, e.g., as in a “peptide nucleic acid”. In some embodiments, a nucleic acid comprises one or more, or all, natural residues (e.g., adenine, cytosine, deoxyadenosine, deoxycytidine, deoxyguanosine, deoxythymidine, guanine, thymine, uracil). In some embodiments, a nucleic acid comprises one or more, or all, non-natural residues. In some embodiments, a non-natural residue comprises a nucleoside analog (e.g., 2-aminoadenosine, 2-thiothymidine, inosine, pyrrolo-pyrimidine, 3-methyl adenosine, 5-methylcytidine, C-5 propynyl-cytidine, C-5 propynyl-uridine, 2-aminoadenosine, C5-bromouridine, C5-fluorouridine, C5-iodouridine, C5-propynyl-uridine, C5-propynyl-cytidine, C5-methylcytidine, 1-methyl-pseudouridine, N1-methyl-pseudouridine, 2-aminoadenosine, 7-deazaadenosine, 7-deazaguanosine, 8-oxoadenosine, 8-oxoguanosine, 0(6)-methylguanine, 2-thiocytidine, methylated bases, intercalated bases, and combinations thereof). In some embodiments, a non-natural residue comprises one or more modified sugars (e.g., 2′-fluororibose, ribose, 2′-deoxyribose, arabinose, and hexose) as compared to those in natural residues. In some embodiments, a nucleic acid has a nucleotide sequence that encodes a functional gene product such as an RNA or polypeptide. In some embodiments, a nucleic acid has a nucleotide sequence that comprises one or more introns. In some embodiments, a nucleic acid may be prepared by isolation from a natural source, enzymatic synthesis (e.g., by polymerization based on a complementary template, e.g., in vivo or in vitro), reproduction in a recombinant cell or system, or chemical synthesis. In some embodiments, a nucleic acid is at least 3, 4, 5, 6, 7, 8, 9, 10, 15, 20, 25, 30, 35, 40, 45, 50, 55, 60, 65, 70, 75, 80, 85, 90, 95, 100, 110, 120, 130, 140, 150, 160, 170, 180, 190, 20, 225, 250, 275, 300, 325, 350, 375, 400, 425, 450, 475, 500, 600, 700, 800, 900, 1000, 1500, 2000, 2500, 3000, 3500, 4000, 4500, 5000 or more residues long. Nucleic acid sequences provided herein, including, but not limited to those in the sequence listing, are intended to encompass corresponding nucleic acid sequences containing any combination of natural or modified RNA and/or DNA, including, but not limited to, such nucleic acids having modified nucleobases. By way of further example and without limitation, a nucleic acid having the nucleobase sequence “ATCGATCG” encompasses any nucleic acid having such nucleobase sequence, whether modified or unmodified, including, but not limited to, such nucleic acids comprising RNA bases, such as those comprising the sequence “AUCGAUCG” and those comprising some DNA bases and some RNA bases such as “AUCGATCG” and nucleic acids comprising other modified or naturally occurring bases, such as “ATmeCGAUCG,” wherein meC indicates a cytosine base comprising a methyl group at the 5-position.

[0064] Percent identity: as used herein, “percent identity” refers to the relationship between two or more polypeptide sequences or two or more polynucleotide sequences as determined by comparing the sequences. “Identity” also means the degree of sequence relatedness between polypeptide or polynucleotide sequences as determined by the match between strings of such sequences. “Identity” also refers to the degree of sequence relatedness between DNA and RNA (e.g., mRNA) polynucleotide sequences as determined by the match between strings of such sequences. “Identity” and “similarity” can be calculated by known methods, including but not limited to those described herein.

[0065] Plasmid: as used herein, “plasmid” refers to a genetic structure that can replicate independently of the chromosomes. Plasmids typically exist as small, circular, double-stranded DNA molecules in bacterium. A plasmid carrying a nucleic acid sequence of interest can be circular or linearized prior to delivery into a cell.

[0066] Polypeptide: as used herein, “polypeptide” refers to a polymeric compound comprising covalently linked amino acid residues. One or more polypeptides characterized by a stable functional structure are referred to as a “protein.”

[0067] Promoter: as used herein, a “promoter” refers to a control region of a nucleic acid at which both initiation and the rate of transcription of downstream DNA is controlled. It is a region whereupon relevant proteins (e.g., RNA polymerase II and transcription factors) bind to initiate transcription of a gene. Resulting transcription results in an RNA molecule (e.g., mRNA). Promoters can be “operably linked” to a nucleic acid sequence. To be “operably linked,” a promoter must be in the correct functional location and orientation relative to the nucleic acid sequence in order for it to regulate said sequence. Promoters can include “constitutive promoters” or “inducible promoters”. A constitutive promoter refers to an unregulated promoter that allows for continual transcription of its associated nucleic acid. An inducible promoter is conditioned in a way to act almost as a “gene switch” whereupon endogenous factors, external stimuli, chemical compounds, or environmental conditions can be artificially controlled to initiate promoter activity.

[0068] Recombinase: as used herein, “recombinase” refers to an enzyme capable of catalyzing site-specific recombination events within DNA. Most recombinases fall within two families, tyrosine recombinases and serine recombinases. These families are attributed to the conserved amino acid residue that serves as the nucleophile in the series of transesterification reactions with the DNA strand during recombinase activity. Of particular interest are serine recombinases, which have a specific type of recombination site and a specific mode of activity. Serine recombinases are clustered into three main groups along phylogenetic lines, referred to as (a) large serine recombinases, (b) resolvase/invertases, and (c) IS607-like (Smith & Thorpe, 2002). A serine recombinase may be delivered into a cell as either a protein or as a nucleic acid (e.g., a DNA or mRNA molecule) that encodes the recombinase. A nucleic acid encoding this recombinase may also contain other regulatory components, e.g., suitable promoters, regulators, and/or enhancers. A nucleic acid encoding the recombinase may contain modified or alternative nucleotides and/or other chemical modifications.

[0069] Recombination attachment sites: as used herein, “recombination attachment sites” refers to a pair of attachment sites that are recognized by and acted upon by a recombinase. In some embodiments, an attachment site is referred to as “att” or an “att site”. In some embodiments, these sites denote their origin and evolution from bacteriophages, wherein the bacteriophage genome, containing an “attP” site, can integrate into the host bacterial chromosome, containing an “attB site”. In nature, both attB and attP sites are specific for each serine recombinase, such that a particular recombinase mediates DNA recombination between a specific attP site and a specific attB site. These attP and attB sites are not homologous, thus recombination between attB and attP sites results in new attachment sites known as “attL” and “attR”. The reverse excision reaction between these new attL and attR sites does not occur in the absence of a phage-encoded recombination directionality factor (RDF). Attachment sites of the present disclosure may also comprise non-bacterial or phage sequences as described herein, including variants of the natural attB and attP sites (e.g., variants that include different central dinucleotides) and attachment sites in the human genome (“attH”) that are able to recombine with a natural or variant attP or attB site in the presence of the particular recombinase. These attH sites may exist in one or more desired location(s) in the human genome. In some embodiments, an attH site in the human genome can be identical to either an attB or attP site. In some embodiments an attH site can have homology to either an attB or an attP sequence. For example, an attH site with homology to an attB site may recombine with the attP site that normally recombines with the attB site while an attH site with homology to an attP site may recombine with the attB site that normally recombines with the attP site. In these circumstances, the attP/B site that can specifically recombine with an attH site is referred to as an “attD site” (i.e., donor attachment site, e.g., an attachment site in a donor plasmid). Variants of the natural attB and attP sites (e.g., variants that include different central dinucleotides) that can specifically recombine with an attH site are also considered attD sites of the present disclosure.

[0070] Target site: as used herein, “target site” describes a location bearing an attachment site (e.g., a cognate attachment site) for an exogenous nucleic acid (e.g., exogenous DNA), such as an exogenous DNA carrying a nucleic acid sequence of interest. For example, a target site may comprise an attB site that will recombine with a cognate attP site of an exogenous nucleic acid (e.g., exogenous DNA) in the presence of the particular recombinase. A target site may also be a site that is homologous but not identical to a bacterial or phage attachment site sequence, but instead be a “human attachment site” (attH site) identified in the human genome that is capable of recombining with the corresponding attB or attP site in the presence of the particular recombinase.

### DETAILED DESCRIPTION

[0071] Site-specific recombination involves the specialized movement of genetic elements into and out of non-homologous regions within a genome or between genomes. Mobilization of these genetic elements can occur within a single chromosome or between two different chromosomes, giving rise to variations essential for adaptation and evolution. While abundant among bacteria and viruses, site-specification recombination can still function in heterologous systems, such as mammalian cells, potentially making it a very useful tool for manipulation or engineering of the genome via integration, excision, or inversion events.

[0072] A number of challenges currently exist in terms of applying these tools in a human genome context. For one, the ability of DNA integration to occur is governed by the presence of specific attachment sites that are cognate with a recombinase. Problematically, previously identified attachment sites do not exist in the human chromosome. Before recombinase-mediated DNA integration could be performed, the human cell would therefore have to first be engineered by adding attachment sites at desired locations to allow for site-specific recombination to occur. This requirement for an additional step is time-consuming and costly.

[0073] The present disclosure provides a number of novel large serine recombinases identified to target a number of novel attachment sites in the human genome. The applications of these novel large serine recombinases allow for genetic integration of large DNA payloads that is highly specific, efficient, and avoids complications of prior methodology.

### Site-Specific Recombinases

[0074] Site-specific recombinases recognize two specific sequences present on one or two DNA molecules, catalyzing the cleavage of specific phosphodiester bonds within these two “attachment” sites, and rejoins these broken ends to form recombinants (Olorunniji et al. 2016). This process doesn't require extensive DNA homology, as does homologous recombination (HR), nor does it involve any DNA synthesis or degradation. As such, this form of recombinase-mediated recombination is often referred to as conservative site-specific recombination.

[0075] Based on amino acid sequence homology, conservative site-specific recombinases fall into one of two mechanistically different families: tyrosine recombinases and serine recombinases. Each family is named according to the identity of the active nucleophilic amino acid residue responsible for attacking the DNA phosphodiester bonds to create strand breaks, and subsequent formation of a covalent linkage to conserve bond energy for recombination (Olorunniji et al. 2016). While there are a number of features shared by both families, their proteins have diverging sequences and are structurally distinct. Furthermore, both families operate using different recombination mechanisms.

### Tyrosine Recombinase Family

[0076] Some of the most well-known recombinases are in the tyrosine recombinase family. Tyrosine recombinases carry out recombination by breaking, exchanging, and rejoining DNA strands two at a time through the formation of a “Holliday junction” or four-way intermediate. Within these Holliday junctions, two of the strands are recombinant whereas the other two strands are non-recombinant. There is a specific amount of separation between breaks in the top and bottom strand of DNA for each tyrosine recombinase system (Olorunniji et al. 2016).

[0077] Tyrosine recombinase systems perform diverse programmed DNA rearrangements in bacteria, archaea, viruses, and lower eukaryotes, including integration and excision of DNA, monomerization of chromosome and plasmid multimers, circulation of bacteriophage replication intermediates, resolution of transposition intermediates, inversion-mediated switching of gene expression, and amplification of plasmid copy number. Intriguingly, tyrosine recombinases both structurally and mechanistically are related to Type IB topoisomerases, which include the human topoisomerase (Olorunniji et al. 2016).

[0078] A key functional component of tyrosine recombinases is a catalytic domain, which plays a crucial role in DNA sequence recognition, subunit interactions, and regulatory functions. Within the catalytic domain is an active site, which comprises four highly conserved residues comprising an arginine-histidine-arginine triad and the aforementioned nucleophilic tyrosine residue (Swalla et al. 2003). The catalytic domain serves a similar mechanistic role, but can be structurally different, between different tyrosine recombinase systems.

[0079] Prominent members of the tyrosine recombinase family include integrases from coliphage I and prophage lambda, both of which help catalyze integration or excision of DNA elements from a phage genome onto a bacterial host. These integrases, as well as other tyrosine recombinases and serine recombinases, are capable of recognizing specific attachment sites on the phage genome, attP, and its counterpart on the bacterial genome, attB. Integration of phage DNA via site-specific recombination results in the generation of a linearized sequence flanked by newly modified attachment sites, called attL (left) and attR (right), respectively. Integrases of the tyrosine recombinase family require an accessory protein, known as the integration host factor (IHF), which binds and bends the DNA for integration. Problematically, the IHF is hard to introduce into the human system and requires a large attP site (about 200 bp) to initiate its mechanistic role (Merrick et al. 2018).

[0080] The tyrosine recombinase family also includes members, such as Cre, Flp, and Dre, which catalyze non-directional site-specific recombination in the absence of accessory proteins. These tyrosine recombinase systems have a number of advantages over their integrase counterparts, including small attachment sites (about 35 bp) and high efficiency of recombination in mammalian models (Kim et al. 2003; Lambert et al. 2007). Regardless of these inherent advantages, there are major drawbacks that limit their use. Due to the identical nature of the attachment sites, recombination mediated by tyrosine recombinases, such as Cre, often results in non-modification of these sites. This can lead to the occurrence of continual recombination events, even after the initial desired recombination effect, which may result in further excision and return to the undesired original DNA product. In some embodiments, the reversible nature of these tyrosine recombinase systems can be overcome by introduction of specialized mutated sites, whereupon recombination results in newly modified sites that do not undergo further recombination (Zhang et al. 2002). In some embodiments, their efficacy is still relatively low compared to that of the serine recombinase family.

### Serine Recombinase Family

[0081] As described herein, the serine recombinase family presents an attractive option for integrating large DNA payloads in a unidirectional manner that was not previously achievable with alternative gene transfer methods. It also does so without the burden of requiring accessory proteins or the presence of undesirable reverse reactions that affect its tyrosine recombinase family counterparts.

[0082] The serine recombinase family comprises resolvase/invertases, large serine recombinases (e.g., those included in Table 1), small serine recombinases, and transposases. Similar in function to the members of the tyrosine recombinase family, members of the serine recombinase family help mediate site-specific recombination events, but do so without accessory proteins and in one direction. Despite both tyrosine and serine recombinases controlling a number of recombination events, they are unrelated in protein sequence and structure, and work via different mechanisms.

[0083] Unlike tyrosine recombinases, serine recombinases rely predominantly on serine as their nucleophilic residue. DNA is cleaved by nucleophilic displacement of a DNA hydroxyl by the nucleophilic residue. In tyrosine recombinases, the result is creation of a 3′-phosphotyrosyl bridge, which contrasts with the formation of a 5′-phosphoserine linkage by serine recombinases (Grindley et al. 2006). Thus, serine recombinases do not form four-way intermediates or Holliday junctions, instead initiating double-stranded breaks at both sites without having to cleave one strand of each duplex at a time (Grindley et al. 2006). The double-stranded breaks are symmetrically located at the center of a crossover and are about 2 bp apart. Recombination events mediated by serine recombinases proceed by a unique subunit rotation mechanism that interchanges the positions of the cut DNA ends (Olorunniji et al. 2016).

[0084] Large serine recombinases (LSRs) comprise three primary structural domains: an amino-terminal catalytic domain, a recombinase domain, and a DNA-binding zinc ribbon domain (Van Duyne et al. 2013). The catalytic domain of LSRs contains a highly conserved nucleophilic serine residue surrounded by three arginine residues (Keenholtz et al. 2011). It serves as the prime site for formation of a synaptic complex between the recombinase and DNA, catalyzing the cleavage of DNA strands, and sequential subunit rotation during strand exchange (Bai et al. 2011; Van Duyne et al. 2013). The recombinase domain and neighboring zinc ribbon domain are both components of LSRs that further differentiate them from their small serine recombinase (SSRs) counterparts. Both domains play an integral role in binding DNA around the attP and attB attachment sites (Van Duyne et al. 2013). As exemplified by a serine recombinase from the Mycobacteriophage BxB1, these domains of LSRs are highly efficient and specific for their relatively small (about 40-50 bp) attachment sites attB and attP (Kim et al. 2003). In some embodiments, an HMMR computer software package (Eddy 2009) is used to identify the three domains typically associated with large serine recombinases: a resolvase/invertase domain (PF00239), a zinc ribbon domain (PF13408), and a recombinase domain Pfam (PF07508). Exemplary amino-terminal catalytic domains (PF00239) include amino acids 4-164 of SEQ ID NO: 58926, amino acids 5-154 of SEQ ID NO: 10611, amino acids 4-163 of SEQ ID NO: 33021, amino acids 4-162 of SEQ ID NO: 40191, amino acids 7-155 of SEQ ID NO: 5681, amino acids 4-155 of SEQ ID NO: 36231, amino acids 7-130 of SEQ ID NO: 34841, amino acids 13-160 of SEQ ID NO: 9906, amino acids 4-147 of SEQ ID NO: 21701, and amino acids 7-155 of SEQ ID NO: 7466. Exemplary recombinase domains (PF07508) include amino acids 190-276 of SEQ ID NO: 58926, amino acids 194-302 of SEQ ID NO: 10611, amino acids 191-287 of SEQ ID NO: 33021, amino acids 187-282 of SEQ ID NO: 40191, amino acids 179-261 of SEQ ID NO: 5681, amino acids 181-291 of SEQ ID NO: 36231, amino acids 191-262 of SEQ ID NO: 34841, amino acids 184-311 of SEQ ID NO: 9906, amino acids 170-259 of SEQ ID NO: 21701, and amino acids 184-261 of SEQ ID NO: 7466. Exemplary zinc ribbon domains (PF13408) include amino acids 296-350 of SEQ ID NO: 58926, amino acids 319-367 of SEQ ID NO: 10611, amino acids 304-357 of SEQ ID NO: 33021, amino acids 298-350 of SEQ ID NO: 40191, amino acids 281-352 of SEQ ID NO: 5681, amino acids 304-356 of SEQ ID NO: 36231, amino acids 279-335 of SEQ ID NO: 34841, amino acids 322-382 of SEQ ID NO: 9906, amino acids 273-332 of SEQ ID NO: 21701, and amino acids 281-352 of SEQ ID NO: 7466.

[0085] While there are mechanistic similarities among the LSRs, there are large differences in sequence identity between the LSRs, and the exact modalities responsible for targeting attachment sites for these recombinases are largely unknown (Van Duyne et al. 2013). Additionally, few large serine recombinases have been identified, and even fewer of those are capable of acting upon the human genome. Thus, the identification, characterization, and application of new LSRs would be useful in expanding the options for use in genetic engineering of non-bacterial cells (e.g., human cells) and for the manipulation of synthetic genetic circuits.

[0086] Described herein is a set of novel LSRs from a variety of phage (Table 1), identification of their respective attachment sites (attB and attP), and prediction of exemplary prospective attachment sites within the human genome. In general, an attachment site in the human genome (i.e., a human attachment site, “attH site”) can be identical or have homology to either an attB or an attP sequence of the present disclosure. It can also be identical or have homology to variants of an attB or attP sequence of the present disclosure (e.g., variants that include different central dinucleotides). An attH site identical or with homology to an attB site may recombine with an attP site (e.g., the attP site that normally recombines with the attB site). An attH site identical or with homology to an attP site may recombine with an attB site (e.g., the attB site that normally recombines with the attP site). For a given LSR and a given donor sequence for recombination (i.e., attD), there might be more than one putative attH site (e.g., sequences sharing high similarity with either an attB or attP) in a human genome. Methods for identification and characterization of these novel LSRs and human attachment sites are further discussed herein.

[0087] A “pair of attachment site sequences”, a “pair of an attB site sequence and an attP site sequence”, a “pair of an attH (or attA) site sequence and an attD site sequence”, and like terms, refer to pairs of attachment site sequences that share the same central dinucleotide where recombination can occur in the presence of the recombinase. In some embodiments, the central dinucleotide is non-palindromic. In some embodiments, the central dinucleotide is palindromic. In some embodiments, the central dinucleotide is selected from the group consisting of: AA, TT, GG, CC, AG, GA, AC, CA, TG, GT, TC, CT, AT, TA, CG, and GC. In some embodiments, a pair of a human attachment site (attH) sequence and a donor attachment site (attD) sequence comprise a central dinucleotide that differs from a homologous pair of attB and attP site sequences. In some embodiments, a pair of attachment site sequences are used in a recombination event, wherein one attachment site sequence is used in a host (e.g., human) genome (e.g., attH or attA) and the other attachment site sequence (e.g., attD) is part of an integrative vector (e.g., a DNA expression vector or plasmid). This is illustrated in FIG. 1 for an exemplary embodiment.

[0088] As shown in FIG. 2, in some embodiments, a pair of attachment site sequences comprise pairs of binding regions flanking the central dinucleotide. In some embodiments, a pair of attachment site sequences comprise a pair of recombinase domain (RD) binding regions directly 5′ and 3′ of the central dinucleotide. In some embodiments, the RD binding regions are each 10 base pairs long. In some embodiments, a pair of attachment site sequences comprise a pair of zinc ribbon domain (ZD) binding regions 5′ and 3′ of the RD binding regions. In some embodiments, the ZD binding regions are each 9 base pairs long. In some embodiments, an attachment site sequence comprises linkers between the RD binding regions and the ZD binding regions flanking the central dinucleotide. In some embodiments, a linker comprises 1, 2, 3, 4, 5, or more than 5 nucleotides. In some embodiments, an attachment site sequence comprises, from 5′ to 3′: a first ZD binding region, a first linker, a first RD binding region, a central dinucleotide, a second RD binding region, a second linker, and a second ZD binding region (e.g., see the attP site sequences shown in Table 1, Table 2 or Table 3 and any corresponding attD or attH sequences). In some embodiments, an attachment site sequence comprises, from 5′ to 3′: a first ZD binding region, a first RD binding region, a central dinucleotide, a second RD binding region, and a second ZD binding region (e.g., see the attB site sequences shown in Table 1, Table 2 or Table 3 and any corresponding attD or attH sequences).

[0089] In some embodiments, the present disclosure encompasses the use of attD sites (and corresponding attH (or attA) sites) that are variants of the attP or attB sites shown in Table 1, Table 2 or Table 3, where (i) the central dinucleotide is replaced with a different dinucleotide, e.g., where a central “CT” is replaced with “AG”, etc. and/or (ii) one or both of the linkers in an attP site are shortened from 5 to 4, 3, 2, 1 or 0 nucleotides, e.g., where “CCTAG” is replaced with “CCTA”, “CCT”, “CC”, “C” or absent.

[0090] In some embodiments, the present disclosure encompasses the use of attD sites (and corresponding attH (or attA) sites) that are variants of the attP or attB sites shown in Table 1, Table 2 or Table 3, where (i) the RD binding regions are shorter than 10 base pairs long, e.g., where 1, 2, or 3 nucleotides are removed from one or both ends of an RD binding region and/or (ii) the ZD binding regions are shorter than 9 base pairs long, e.g., where 1, 2, or 3 nucleotides are removed from one or both ends of a ZD binding region.

[0091] In some embodiments, in a pair of attachment site sequences used in a recombination event, wherein one attachment site sequence is present in a host (e.g., human) genome (e.g., attH or attA) and the other attachment site sequence (e.g., attD) is part of an integrative vector (e.g., a DNA expression vector or plasmid), the attachment site sequences share at least 50% identity (e.g., at least 50%, 55%, 60%, 65%, 70%, 75%, 80%, 85%, 90%, 91%, 92%, 93%, 94%, 95%, 96%, 97%, 98%, 99% or 100% identity) across the 30 to 50 base pairs (e.g., 30, 35, 40, 45, or 50 base pairs) surrounding the central dinucleotide sequences of the attachment sites. In some embodiments, in a pair of attachment site sequences, the sequences upstream and downstream of the central dinucleotide share 100% homology. In some embodiments, in a pair of attachment site sequences, the sequences upstream (e.g., 15 to 25 base pairs upstream, e.g., 15, 20, or 25 base pairs upstream) of the central dinucleotide share at least 50% homology (e.g., 50%, 55%, 60%, 65%, 70%, 75%, 80%, 85%, 90%, 95%, 99%, or 100% homology). In some embodiments, in a pair of attachment site sequences, the sequences downstream (e.g., 15 to 25 base pairs downstream, e.g., 15, 20, or 25 base pairs downstream) of the central dinucleotide share at least 50% homology (e.g., 50%, 55%, 60%, 65%, 70%, 75%, 80%, 85%, 90%, 91%, 92%, 93%, 94%, 95%, 96%, 97%, 98%, 99%, or 100% homology). In some embodiments, in a pair of attachment site sequences (e.g., attH and attD), the sequences upstream and/or downstream of the central dinucleotide in one attachment site (e.g., attH) share a certain percent identity with the sequences upstream and/or downstream of the central dinucleotide of the other attachment site (e.g., attD), for example, the upstream and/or downstream sequences are 50%, 55%, 60%, 65%, 70%, 75%, 80%, 81%, 82%, 83%, 84%, 85%, 86%, 87%, 88%, 89%, 90%, 91%, 92%, 93%, 94%, 95%, 96%, 97%, 98%, or 99% identical in sequence. In some embodiments, in a pair of attachment site sequences (e.g., attH and attD), the sequence upstream of the central dinucleotide in one attachment site (e.g., attH) and the sequence upstream of the central dinucleotide in the other attachment site (e.g., attD) share at least 50%, e.g., 50%, 55%, 60%, 65%, 70%, 75%, 80%, 81%, 82%, 83%, 84%, 85%, 86%, 87%, 88%, 89%, 90%, 91%, 92%, 93%, 94%, 95%, 96%, 97%, 98%, 99% or 100% identity. In some embodiments, in a pair of attachment site sequences (e.g., attH and attD), the sequence downstream of the central dinucleotide in one attachment site (e.g., attH) and the sequence downstream of the central dinucleotide in the other attachment site (e.g., attD) share at least 50%, e.g., 50%, 55%, 60%, 65%, 70%, 75%, 80%, 81%, 82%, 83%, 84%, 85%, 86%, 87%, 88%, 89%, 90%, 91%, 92%, 93%, 94%, 95%, 96%, 97%, 98%, 99% or 100% identity.

[0092] In some embodiments, an LSR of the present disclosure comprises one or more protein domains selected from Table 1. In some embodiments, an LSR of the present disclosure comprises one, two, or three of the protein domains selected from Table 1. In some embodiments, an LSR of the present disclosure comprises an amino acid sequence at least 80% identical to a sequence selected from Table 1, Table 2 or Table 3. In some embodiments, an LSR of the present disclosure comprises an amino acid sequence at least 85% identical to a sequence selected from Table 1, Table 2 or Table 3. In some embodiments, an LSR of the present disclosure comprises an amino acid sequence at least 90% identical to a sequence selected from Table 1, Table 2 or Table 3. In some embodiments, an LSR of the present disclosure comprises an amino acid sequence at least 95% identical to a sequence selected from Table 1, Table 2 or Table 3. In some embodiments, an LSR of the present disclosure comprises an amino acid sequence at least 96% identical to a sequence selected from Table 1, Table 2 or Table 3. In some embodiments, an LSR of the present disclosure comprises an amino acid sequence at least 97% identical to a sequence selected from Table 1, Table 2 or Table 3. In some embodiments, an LSR of the present disclosure comprises an amino acid sequence at least 98% identical to a sequence selected from Table 1, Table 2 or Table 3. In some embodiments, an LSR of the present disclosure comprises an amino acid sequence at least 99% (e.g., 99.0%, 99.1%, 99.2%, 99.3%, 99.4%, 99.5%, 99.6%, 99.7%, 99.8%, or 99.9%) identical to a sequence selected from Table 1, Table 2 or Table 3. In some embodiments, an LSR of the present disclosure comprises an amino acid sequence that differs from a sequence selected from Table 1, Table 2 or Table 3by 1, 2, 3, 4, 5, 6, 7, 8, 9, 10, 15, or 20 amino acids where each difference may be in the form of a substitution, a deletion or an insertion. In some embodiments, an LSR of the present disclosure comprises an amino acid sequence identical to a sequence selected from Table 1, Table 2 or Table 3.

[0093] In some embodiments, an LSR of the present disclosure comprises an amino acid sequence at least 80%, 85%, 90%, 95%, 96%, 97%, 98%, 99%, 99.1%, 99.2%, 99.3%, 99.4%, 99.5%, 99.6%, 99.7%, 99.8%, 99.9%, or 100% identical to an amino acid sequence selected from SEQ ID NO: 58926, SEQ ID NO: 10611, SEQ ID NO: 33021, SEQ ID NO: 40191, SEQ ID NO: 5681, SEQ ID NO: 36231, SEQ ID NO: 34841, SEQ ID NO: 9906, SEQ ID NO: 21701, SEQ ID NO: 7466, SEQ ID NO: 57456, SEQ ID NO: 41066, SEQ ID NO: 41186, SEQ ID NO: 21126, SEQ ID NO: 1191, SEQ ID NO: 35081, SEQ ID NO: 18926, SEQ ID NO: 51806, SEQ ID NO: 58376, SEQ ID NO: 29771, SEQ ID NO: 21276, or SEQ ID NO: 36986. In some embodiments, an LSR of the present disclosure comprises an amino acid sequence that differs from a sequence selected from SEQ ID NO: 58926, SEQ ID NO: 10611, SEQ ID NO: 33021, SEQ ID NO: 40191, SEQ ID NO: 5681, SEQ ID NO: 36231, SEQ ID NO: 34841, SEQ ID NO: 9906, SEQ ID NO: 21701, SEQ ID NO: 7466, SEQ ID NO: 57456, SEQ ID NO: 41066, SEQ ID NO: 41186, SEQ ID NO: 21126, SEQ ID NO: 1191, SEQ ID NO: 35081, SEQ ID NO: 18926, SEQ ID NO: 51806, SEQ ID NO: 58376, SEQ ID NO: 29771, SEQ ID NO: 21276, or SEQ ID NO: 36986 by 1, 2, 3, 4, 5, 6, 7, 8, 9, 10, 15, or 20 amino acids where each difference may be in the form of a substitution, a deletion or an insertion.

[0094] In some embodiments, an LSR of the present disclosure recognizes cognate attachment sites. In some embodiments, an LSR of the present disclosure and its cognate attachment sites all have the same system ID in Table 1, Table 2 or Table 3 (i.e., they are all selected from or derived from sequences that are in the same row of Table 1, Table 2 or Table 3). In some embodiments, an attachment site is an attP site. In some embodiments, an attachment site is an attB site. In some embodiments, an attachment site is an attD (donor attachment) site. In some embodiments, an attachment site is an attH site. In some embodiments, an attachment site is an attA site. In some embodiments, an LSR of the present disclosure and its cognate attachment sites attB and attP all have the same system ID in Table 1, Table 2 or Table 3. In some embodiments, an LSR of the present disclosure and its cognate attachment sites attD and attH all have the same system ID in Table 1, Table 2 or Table 3. In some embodiments, an LSR of the present disclosure and its cognate attachment sites attD and attA all have the same system ID in Table 1, Table 2 or Table 3.

[0095] In some embodiments, an attP of the present disclosure comprises a nucleic acid sequence at least 80% identical to an attP sequence selected from Table 1, Table 2 or Table 3. In some embodiments, an attP of the present disclosure comprises a nucleic acid sequence at least 85% identical to an attP sequence selected from Table 1, Table 2 or Table 3. In some embodiments, an attP of the present disclosure comprises a nucleic acid sequence at least 90% identical to an attP sequence selected from Table 1, Table 2 or Table 3. In some embodiments, an attP of the present disclosure comprises a nucleic acid sequence at least 95% identical to an attP sequence selected from Table 1, Table 2 or Table 3. In some embodiments, an attP of the present disclosure comprises a nucleic acid sequence at least 96% identical to an attP sequence selected from Table 1, Table 2 or Table 3. In some embodiments, an attP of the present disclosure comprises a nucleic acid sequence at least 97% identical to an attP sequence selected from Table 1, Table 2 or Table 3. In some embodiments, an attP of the present disclosure comprises a nucleic acid sequence at least 98% identical to an attP sequence selected from Table 1, Table 2 or Table 3. In some embodiments, an attP of the present disclosure comprises a nucleic acid sequence at least 99% identical to an attP sequence selected from Table 1, Table 2 or Table 3. In some embodiments, an attP of the present disclosure comprises a nucleic acid sequence identical to an attP sequence selected from Table 1, Table 2 or Table 3.

[0096] In some embodiments, an attB of the present disclosure comprises a nucleic acid sequence at least 80% identical to an attB sequence selected from Table 1, Table 2 or Table 3. In some embodiments, an attB of the present disclosure comprises a nucleic acid sequence at least 85% identical to an attB sequence selected from Table 1, Table 2 or Table 3. In some embodiments, an attB of the present disclosure comprises a nucleic acid sequence at least 90% identical to an attB sequence selected from Table 1, Table 2 or Table 3. In some embodiments, an attB of the present disclosure comprises a nucleic acid sequence at least 95% identical to an attB sequence selected from Table 1, Table 2 or Table 3. In some embodiments, an attB of the present disclosure comprises a nucleic acid sequence at least 96% identical to an attB sequence selected from Table 1, Table 2 or Table 3. In some embodiments, an attB of the present disclosure comprises a nucleic acid sequence at least 97% identical to an attB sequence selected from Table 1, Table 2 or Table 3. In some embodiments, an attB of the present disclosure comprises a nucleic acid sequence at least 98% identical to an attB sequence selected from Table 1, Table 2 or Table 3. In some embodiments, an attB of the present disclosure comprises a nucleic acid sequence at least 99% identical to an attB sequence selected from Table 1, Table 2 or Table 3. In some embodiments, an attB of the present disclosure comprises a nucleic acid sequence identical to an attB sequence selected from Table 1, Table 2 or Table 3.

[0097] In some embodiments, an attD of the present disclosure comprises a nucleic acid sequence at least 80% identical to an attD sequence selected from Table 1, Table 2 or Table 3. In some embodiments, an attD of the present disclosure comprises a nucleic acid sequence at least 85% identical to an attD sequence selected from Table 1, Table 2 or Table 3. In some embodiments, an attD of the present disclosure comprises a nucleic acid sequence at least 90% identical to an attD sequence selected from Table 1, Table 2 or Table 3. In some embodiments, an attD of the present disclosure comprises a nucleic acid sequence at least 95% identical to an attD sequence selected from Table 1, Table 2 or Table 3. In some embodiments, an attD of the present disclosure comprises a nucleic acid sequence at least 96% identical to an attD sequence selected from Table 1, Table 2 or Table 3. In some embodiments, an attD of the present disclosure comprises a nucleic acid sequence at least 97% identical to an attD sequence selected from Table 1, Table 2 or Table 3. In some embodiments, an attD of the present disclosure comprises a nucleic acid sequence at least 98% identical to an attD sequence selected from Table 1, Table 2 or Table 3. In some embodiments, an attD of the present disclosure comprises a nucleic acid sequence at least 99% identical to an attD sequence selected from Table 1, Table 2 or Table 3. In some embodiments, an attD of the present disclosure comprises a nucleic acid sequence identical to an attD sequence selected from Table 1, Table 2 or Table 3.

[0098] In some embodiments, an attH of the present disclosure comprises a nucleic acid sequence at least 80% identical to an attH sequence selected from Table 1, Table 2 or Table 3. In some embodiments, an attH of the present disclosure comprises a nucleic acid sequence at least 85% identical to an attH sequence selected from Table 1, Table 2 or Table 3. In some embodiments, an attH of the present disclosure comprises a nucleic acid sequence at least 90% identical to an attH sequence selected from Table 1, Table 2 or Table 3. In some embodiments, an attH of the present disclosure comprises a nucleic acid sequence at least 95% identical to a sequence selected from Table 1, Table 2 or Table 3. In some embodiments, an attH of the present disclosure comprises a nucleic acid sequence at least 96% identical to an attH sequence selected from Table 1, Table 2 or Table 3. In some embodiments, an attH of the present disclosure comprises a nucleic acid sequence at least 97% identical to an attH sequence selected from Table 1, Table 2 or Table 3. In some embodiments, an attH of the present disclosure comprises a nucleic acid sequence at least 98% identical to an attH sequence selected from Table 1, Table 2 or Table 3. In some embodiments, an attH of the present disclosure comprises a nucleic acid sequence at least 99% identical to an attH sequence selected from Table 1, Table 2 or Table 3. In some embodiments, an attH of the present disclosure comprises a nucleic acid sequence identical to an attH sequence selected from Table 1, Table 2 or Table 3.

[0099] In some embodiments, a pair of attachment site sequences have the same system ID in Table 1, Table 2 or Table 3. In some embodiments, a pair of attachment site sequences attB and attP have the same system ID in Table 1, Table 2 or Table 3. In some embodiments, a pair of attachment site sequences attB and attP each comprise a nucleic acid sequence at least 80%, 85%, 90%, 95%, 96%, 97%, 98%, or 99% identical to a sequence selected from Table 1, Table 2 or Table 3. In some embodiments, a pair of attachment site sequences attB and attP each comprise a nucleic acid sequence at least 80%, 85%, 90%, 95%, 96%, 97%, 98%, or 99% identical to a sequence selected from Table 1, Table 2 or Table 3 and have the same system ID in Table 1, Table 2 or Table 3. In some embodiments, a pair of attachment site sequences attD and attH have the same system ID in Table 1, Table 2 or Table 3. In some embodiments, a pair of attachment site sequences attD and attH each comprise a nucleic acid sequence at least 80%, 85%, 90%, 95%, 96%, 97%, 98%, or 99% identical to a sequence selected from Table 1, Table 2 or Table 3. In some embodiments, a pair of attachment site sequences attD and attH each comprise a nucleic acid sequence at least 80%, 85%, 90%, 95%, 96%, 97%, 98%, or 99% identical to a sequence selected from Table 1, Table 2 or Table 3 and have the same system ID in Table 1, Table 2 or Table 3.

[0100] In some embodiments, an attachment site sequence present in a host (e.g., human) genome (e.g., attH or attA) shares an identical central dinucleotide sequence with an attP, attB, or attH in Table 1, Table 2 or Table 3. In some embodiments, an attachment site sequence present in a host (e.g., human) genome (e.g., attH or attA) contains no mismatches relative to the central dinucleotide sequence of an attP, attB, or attH in Table 1, Table 2 or Table 3. In some embodiments, an attachment site sequence present in a host (e.g., human) genome (e.g., attH or attA) shares at least 50% identity (e.g., at least 50%, 55%, 60%, 65%, 70%, 75%, 80%, 85%, 90%, 95%, 99% or 100% identity) with the 30 to 50 base pairs (e.g., 30, 35, 40, 45, or 50 base pairs) surrounding the central dinucleotide of an attP, attB, or attH in Table 1, Table 2 or Table 3. In some embodiments, the 15 to 25 nucleotides located immediately 5′ or upstream of the central dinucleotide of an attachment site sequence present in a host (e.g., human) genome (e.g., attH or attA) share at least 50% sequence identity (e.g., at least 50%, 55%, 60%, 65%, 70%, 75%, 80%, 85%, 90%, 95%, 99% or 100% identity) with the 15 to 25 nucleotides located immediately 5′ or upstream of the central dinucleotide of an attP, attB, or attH in Table 1, Table 2 or Table 3. In some embodiments, the 15 to 25 nucleotides located immediately 3′ or downstream of the central dinucleotide of an attachment site sequence present in a host (e.g., human) genome (e.g., attH or attA) share at least 50% sequence identity (e.g., at least 50%, 55%, 60%, 65%, 70%, 75%, 80%, 85%, 90%, 95%, 99% or 100% identity) with the 15 to 25 nucleotides located immediately 3′ or downstream of the central dinucleotide of an attP, attB, or attH in Table 1, Table 2 or Table 3.

[0101] In some embodiments, an attachment site sequence present in a host (e.g., human) genome (e.g., attH or attA) can contain up to 15 nucleotide mismatches (e.g., 1, 2, 3, 4, 5, 6, 7, 8, 9, 10, 11, 12, 13, 14, or 15 mismatches) across the 30 base pairs surrounding the central dinucleotide of an attP, attB, or attH in Table 1, Table 2 or Table 3. In some embodiments, an attachment site sequence present in a host (e.g., human) genome (e.g., attH or attA) can contain up to 20 nucleotide mismatches (e.g., 1, 2, 3, 4, 5, 6, 7, 8, 9, 10, 11, 12, 13, 14, 15, 16, 17, 18, 19, or 20 mismatches) across the 40 base pairs surrounding the central dinucleotide of an attP, attB, or attH in Table 1, Table 2 or Table 3. In some embodiments, an attachment site sequence present in a host (e.g., human) genome (e.g., attH or attA) can contain up to 25 nucleotide mismatches (e.g., 1, 2, 3, 4, 5, 6, 7, 8, 9, 10, 11, 12, 13, 14, 15, 16, 17, 18, 19, 20, 21, 22, 23, 24, or 25 mismatches) across the 50 base pairs surrounding the central dinucleotide of an attP or attH in Table 1, Table 2 or Table 3.

[0102] In some embodiments, the 15 nucleotides located immediately 5′ or upstream of the central dinucleotide of an attachment site sequence present in a host (e.g., human) genome (e.g., attH or attA) can contain up to 7 nucleotide mismatches (e.g., 1, 2, 3, 4, 5, 6, or 7 mismatches) relative to the 15 nucleotides located immediately 5′ or upstream of the central dinucleotide of an attP, attB, or attH in Table 1, Table 2 or Table 3. In some embodiments, the 20 nucleotides located immediately 5′ or upstream of the central dinucleotide of an attachment site sequence present in a host (e.g., human) genome (e.g., attH or attA) can contain up to 10 nucleotide mismatches (e.g., 1, 2, 3, 4, 5, 6, 7, 8, 9, or 10 mismatches) relative to the 20 nucleotides located immediately 5′ or upstream of the central dinucleotide of an attP, attB, or attH in Table 1, Table 2 or Table 3. In some embodiments, the 25 nucleotides located immediately 5′ or upstream of the central dinucleotide of an attachment site sequence present in a host (e.g., human) genome (e.g., attH or attA) can contain up to 13 nucleotide mismatches (e.g., 1, 2, 3, 4, 5, 6, 7, 8, 9, 10, 11, 12, or 13 mismatches) relative to the 25 nucleotides located immediately 5′ or upstream of the central dinucleotide of an attP or attH in Table 1, Table 2 or Table 3.

[0103] In some embodiments, the 15 nucleotides located immediately 3′ or downstream of the central dinucleotide of an attachment site sequence present in a host (e.g., human) genome (e.g., attH or attA) can contain up to 7 nucleotide mismatches (e.g., 1, 2, 3, 4, 5, 6, or 7 mismatches) relative to the 15 nucleotides located immediately 3′ or downstream of the central dinucleotide of an attP, attB, or attH in Table 1, Table 2 or Table 3. In some embodiments, the 20 nucleotides located immediately 3′ or downstream of the central dinucleotide of an attachment site sequence present in a host (e.g., human) genome (e.g., attH or attA) can contain up to 10 nucleotide mismatches (e.g., 1, 2, 3, 4, 5, 6, 7, 8, 9, or 10 mismatches) relative to the 20 nucleotides located immediately 3′ or downstream of the central dinucleotide of an attP, attB, or attH in Table 1, Table 2 or Table 3. In some embodiments, the 25 nucleotides located immediately 3′ or downstream of the central dinucleotide of an attachment site sequence present in a host (e.g., human) genome (e.g., attH or attA) can contain up to 13 nucleotide mismatches (e.g., 1, 2, 3, 4, 5, 6, 7, 8, 9, 10, 11, 12, or 13 mismatches) relative to the 25 nucleotides located immediately 3′ or downstream of the central dinucleotide of an attP or attH in Table 1, Table 2 or Table 3.

[0104] In some embodiments, an attachment site sequence (e.g., attD) present on an exogenous nucleic acid, e.g., exogenous DNA (e.g., an expression vector, such as a DNA plasmid) shares an identical central dinucleotide sequence as an attD, attP or attB in Table 1, Table 2 or Table 3. In some embodiments, an attachment site sequence (e.g., attD) present on an exogenous nucleic acid, e.g., exogenous DNA (e.g., an expression vector, such as a DNA plasmid) contains no mismatches relative to the central dinucleotide sequence of an attD, attP, or attB in Table 1, Table 2 or Table 3. In some embodiments, an attachment site sequence (e.g., attD) present on an exogenous nucleic acid, e.g., exogenous DNA (e.g., an expression vector, such as a DNA plasmid) shares at least 50% identity (e.g., at least 50%, 55%, 60%, 65%, 70%, 75%, 80%, 85%, 90%, 95%, 99% or 100% identity) with the 30 to 50 base pairs (e.g., 30, 35, 40, 45, or 50 base pairs) surrounding the central dinucleotide of an attD, attP, or attB in Table 1, Table 2 or Table 3. In some embodiments, the 15 to 25 nucleotides located immediately 5′ or upstream of the central dinucleotide of an attachment site sequence (e.g., attD) present on an exogenous nucleic acid, e.g., exogenous DNA (e.g., an expression vector, such as a DNA plasmid) share at least 50% sequence identity (e.g., at least 50%, 55%, 60%, 65%, 70%, 75%, 80%, 85%, 90%, 95%, 99% or 100% identity) with the 15 to 25 nucleotides located immediately 5′ or upstream of the central dinucleotide of an attD, attP, or attB in Table 1, Table 2 or Table 3. In some embodiments, the 15 to 25 nucleotides located immediately 3′ or downstream of the central dinucleotide of an attachment site sequence (e.g., attD) present on an exogenous nucleic acid, e.g., exogenous DNA (e.g., an expression vector, such as a DNA plasmid) share at least 50% sequence identity (e.g., at least 50%, 55%, 60%, 65%, 70%, 75%, 80%, 85%, 90%, 95%, 99% or 100% identity) with the 15 to 25 nucleotides located immediately 3′ or downstream of the central dinucleotide of an attD, attP, or attB in Table 1, Table 2 or Table 3.

[0105] In some embodiments, an attachment site sequence (e.g., attD) present on an exogenous nucleic acid, e.g., exogenous DNA (e.g., an expression vector, such as a DNA plasmid) can contain up to 15 nucleotide mismatches (e.g., 1, 2, 3, 4, 5, 6, 7, 8, 9, 10, 11, 12, 13, 14, or 15 mismatches) across the 30 base pairs surrounding the central dinucleotide of an attD, attP, or attB in Table 1, Table 2 or Table 3. In some embodiments, an attachment site sequence (e.g., attD) present on an exogenous nucleic acid, e.g., exogenous DNA (e.g., an expression vector, such as a DNA plasmid) can contain up to 20 nucleotide mismatches (e.g., 1, 2, 3, 4, 5, 6, 7, 8, 9, 10, 11, 12, 13, 14, 15, 16, 17, 18, 19, or 20 mismatches) across the 40 base pairs surrounding the central dinucleotide of an attD, attP, or attB in Table 1, Table 2 or Table 3. In some embodiments, an attachment site sequence (e.g., attD) present on an exogenous nucleic acid, e.g., exogenous DNA (e.g., an expression vector, such as a DNA plasmid) can contain up to 25 nucleotide mismatches (e.g., 1, 2, 3, 4, 5, 6, 7, 8, 9, 10, 11, 12, 13, 14, 15, 16, 17, 18, 19, 20, 21, 22, 23, 24, or 25 mismatches) across the 50 base pairs surrounding the central dinucleotide of an attD or attP in Table 1, Table 2 or Table 3.

[0106] In some embodiments, the 15 nucleotides located immediately 5′ or upstream of the central dinucleotide of an attachment site sequence (e.g., attD) present on an exogenous nucleic acid, e.g., exogenous DNA (e.g., an expression vector, such as a DNA plasmid) can contain up to 7 nucleotide mismatches (e.g., 1, 2, 3, 4, 5, 6, or 7 mismatches) relative to the 15 nucleotides located immediately 5′ or upstream of the central dinucleotide of an attD, attP, or attB in Table 1, Table 2 or Table 3. In some embodiments, the 20 nucleotides located immediately 5′ or upstream of the central dinucleotide of an attachment site sequence (e.g., attD) present on an exogenous nucleic acid, e.g., exogenous DNA (e.g., an expression vector, such as a DNA plasmid) can contain up to 10 nucleotide mismatches (e.g., 1, 2, 3, 4, 5, 6, 7, 8, 9, or 10 mismatches) relative to the 20 nucleotides located immediately 5′ or upstream of the central dinucleotide of an attD, attP, or attB in Table 1, Table 2 or Table 3. In some embodiments, the 25 nucleotides located immediately 5′ or upstream of the central dinucleotide of an attachment site sequence (e.g., attD) present on an exogenous nucleic acid, e.g., exogenous DNA (e.g., an expression vector, such as a DNA plasmid) can contain up to 13 nucleotide mismatches (e.g., 1, 2, 3, 4, 5, 6, 7, 8, 9, 10, 11, 12, or 13 mismatches) relative to the 25 nucleotides located immediately 5′ or upstream of the central dinucleotide of an attD or attP in Table 1, Table 2 or Table 3.

[0107] In some embodiments, the 15 nucleotides located immediately 3′ or downstream of the central dinucleotide of an attachment site sequence (e.g., attD) present on an exogenous nucleic acid, e.g., exogenous DNA (e.g., an expression vector, such as a DNA plasmid) can contain up to 7 nucleotide mismatches (e.g., 1, 2, 3, 4, 5, 6, or 7 mismatches) relative to the 15 nucleotides located immediately 3′ or downstream of the central dinucleotide of an attD, attP, or attB in Table 1, Table 2 or Table 3. In some embodiments, the 20 nucleotides located immediately 3′ or downstream of the central dinucleotide of an attachment site sequence (e.g., attD) present on an exogenous nucleic acid, e.g., exogenous DNA (e.g., an expression vector, such as a DNA plasmid) can contain up to 10 nucleotide mismatches (e.g., 1, 2, 3, 4, 5, 6, 7, 8, 9, or 10 mismatches) relative to the 20 nucleotides located immediately 3′ or downstream of the central dinucleotide of an attD, attP, or attB in Table 1, Table 2 or Table 3. In some embodiments, the 25 nucleotides located immediately 3′ or downstream of the central dinucleotide of an attachment site sequence (e.g., attD) present on an exogenous nucleic acid, e.g., exogenous DNA (e.g., an expression vector, such as a DNA plasmid) can contain up to 13 nucleotide mismatches (e.g., 1, 2, 3, 4, 5, 6, 7, 8, 9, 10, 11, 12, or 13 mismatches) relative to the 25 nucleotides located immediately 3′ or downstream of the central dinucleotide of an attD or attP in Table 1, Table 2 or Table 3.

### Application of Large Serine Recombinases

[0108] The LSRs of the present disclosure can be used to incorporate an exogenous nucleic acid, e.g., exogenous DNA into a human chromosome. The methods and compositions described herein enable the targeted insertion of large nucleic acid sequences (e.g., DNA sequences) into the human genome that was not possible using prior methods and compositions for genetic modification. In some embodiments, the set of LSRs and characterized human attachment sites allow for design of human gene expression systems (e.g., expression vectors). In some embodiments, a human gene expression system comprises a nucleic acid encoding an exogenous nucleic acid sequence of interest operably linked to a promoter that is operable in a human cell. In some embodiments, the nucleic acid encoding the nucleic acid sequence of interest further comprises a donor attachment site (attD). In some embodiments an attD site comprises an attP or attB site that is cognate with a large serine recombinase included in Table 1, Table 2 or Table 3. In some embodiments, an attD site comprises any of the aforementioned variant attP or attB sites of the present disclosure including a sequence that is at least 80% identical to an attP or attB site that is cognate with a large serine recombinase included in Table 1, Table 2 or Table 3. In some embodiments, a promoter of a gene expression system of the present disclosure is constitutive. In some embodiments, a promoter of a gene expression system of the present disclosure is inducible. In some embodiments, a gene expression system of the present disclosure may contain other regulatory elements, including enhancers. In some embodiments, a vector comprises a nucleic acid encoding a nucleic acid sequence of interest and a donor attachment site (attD). In some embodiments, the vector can be a DNA vector. In some embodiments, the DNA vector can be a plasmid, a nanoplasmid, a minicircle, or a doggybone DNA (dbDNA). In some embodiments, the DNA vector can be single-stranded. In some embodiments, the DNA vector can be double-stranded. In some embodiments, the DNA vector can be circular. In some embodiments, the DNA vector can be linear, e.g., linearized prior to delivery to a human cell. In some embodiments, an integration system of the present disclosure comprises an LSR, or a nucleic acid encoding an LSR, such as an mRNA or DNA sequence encoding an LSR. In some embodiments, the LSR is an LSR present in Table 1, Table 2 or Table 3. In some embodiments, an integration system comprises an LSR and a nucleic acid encoding a nucleic acid sequence of interest and an attD. In some embodiments, an integration system comprises one or more nucleic acids encoding a nucleic acid sequence of interest, an attD, and an LSR. In some embodiments, a gene expression system comprises a DNA (e.g., a plasmid DNA) encoding a nucleic acid sequence of interest and an attD, and an mRNA encoding an LSR. In some embodiments, an integration system of the present disclosure or a component thereof can be delivered into a human cell via a lipid nanoparticle (LNP). In some embodiments, an mRNA encoding an LSR comprises a modification. In some embodiments, the modification is or comprises: modified nucleotides as described herein (e.g., 1-methyl-pseudouridine and/or N1-methyl-pseudouridine), a 5′ modification (e.g., a 5′ cap), an untranslated region (UTR) (e.g., a 5′ and/or 3′ UTR), a 3′ modification (e.g., a polyA tail), or combinations thereof. Upon delivery into a human cell, an LSR of the present disclosure can mediate recombination between an attD of a nucleic acid encoding a nucleic acid sequence of interest with a human attachment site (attH), e.g., an attH of Table 1, Table 2 or Table 3, present in the genome of the cell. As a result, a relatively large exogenous nucleic acid sequence of interest could be integrated into a desired location of the human genome.

[0109] In some embodiments, LSRs of the present disclosure (e.g., in Table 1, Table 2 or Table 3) can be used to mediate excision or inversion events of the human genome. If both attachment sites exist on the same nucleic acid molecule and in the same direction, a recombinase of the present disclosure (e.g., in Table 1, Table 2 or Table 3) would be capable of mediating excision of any DNA between the attachment sites. Furthermore, if both attachment sites exist on the same nucleic acid molecule but in inverse orientations, the recombinase could be used to mediate inversion of any DNA in between the sites. A combination of these different recombination events mediated by LSRs of the present disclosure (e.g., in Table 1, Table 2 or Table 3) may be employed by one skilled in the art for precise genetic engineering of the human genome.

[0110] In some embodiments, the present disclosure provides insertion of a “landing pad” comprising an attachment site (e.g., an attH, attA, attB or attP sequence of the present disclosure) in the human genome. In some embodiments, LSRs of the present disclosure can be used to meditate integration at a landing pad comprising an attachment site. A landing pad can be inserted via any method known in the art, including, for example, prime editing. In some embodiments, insertion of a landing pad may use a prime editing gRNA (pegRNA) in conjunction with a prime editor (PE). The pegRNA is a gRNA with a primer binding sequence (PBS) and a donor template containing the desired RNA sequence added at one of the termini, e.g., the 3′ end. The PE:pegRNA complex binds to the target DNA, and the nickase domain of the prime editor nicks only one strand, generating a flap. The PBS, located on the pegRNA, binds to the DNA flap and the edited RNA sequence is reverse transcribed using the reverse transcriptase domain of the prime editor. The edited strand is incorporated into the DNA at the end of the nicked flap, and the target DNA is repaired with the new reverse transcribed DNA. The original DNA segment is removed by a cellular endonuclease. This leaves one strand edited (e.g., with an inserted landing pad), and one strand unedited. In other embodiments, a landing pad may be inserted via CRISPR-mediated homologous recombination with a donor template or using a base editor.

[0111] In some embodiments, a human cell is a quiescent cell. In some embodiments, a human cell is or comprises: an osteoblast, a chondrocyte, an adipocyte, a skeletal muscle cell, a cardiac muscle cell, a neuron, an astrocyte, an oligodendrocyte, a Schwann cell, a retinal cell (e.g., a retinal ganglion cell, a photoreceptor cell, or a retinal epithelium cell), a corneal cell, a skin cell, a monocyte, a macrophage, a neutrophil, a basophil, an eosinophil, an erythrocyte, a megakaryocyte, a dendritic cell, a T-lymphocyte, a B-lymphocyte, an NK-cell, a gastric cell, an intestinal cell, a smooth muscle cell, a vascular cell, a bladder cell, a pancreatic alpha cell, a pancreatic beta cell, a pancreatic delta cell, a liver cell (e.g., a hepatocyte, a hepatic stellate cell, a Kupffer cell, or a liver sinusoidal endothelial cell), a renal cell, an adrenal cell, or a lung cell. In certain embodiments, the human cell is a photoreceptor cell, a retinal epithelial cell or a retinal ganglion cell. In some embodiments, a human cell is a stem cell or progenitor cell. In some embodiments, a stem cell or progenitor cell is or comprises: a mesenchymal stem cell, a hematopoietic stem cell, a neuronal stem cell, a retinal stem cell, a cardiac muscle stem cell, a skeletal muscle stem cell, an adipose tissue derived stem cell, a chondrogenic stem cell, a liver stem cell, a kidney stem cell, a pancreatic stem cell, an embryonic stem cell, an induced pluripotent stem cell, or a fate-converted stem or progenitor cell. In some embodiments, a human cell is a hematopoietic stem cell or a hematopoietic progenitor cell.

### Nucleic Acid Sequence of Interest

[0112] The LSRs of the present disclosure can be used to integrate any nucleic acid sequence of interest into a cell, e.g., in the cell of a subject. In some embodiments, the nucleic acid sequence of interest may include a prokaryotic DNA sequence, cDNA from eukaryotic mRNA, a genomic DNA sequence from eukaryotic (e.g., mammalian) DNA, or a synthetic DNA sequence.

[0113] In some embodiments, the nucleic acid sequence of interest may encode a gene product. In some embodiments, a gene product comprises an antibody, an antigen, an enzyme, a growth factor, a receptor (e.g., cell surface, cytoplasmic, or nuclear), a hormone, a lymphokine, a cytokine, a chemokine, a reporter, a functional fragment of any of the above, or a combination of any of the above. In some embodiments, a gene product comprises a miRNA, an shRNA, a native polypeptide (i.e., a polypeptide found in nature) or fragment thereof; a variant polypeptide (i.e., a mutant of the native polypeptide having less than 100% sequence identity with the native polypeptide) or fragment thereof; an engineered polypeptide or peptide fragment, a therapeutic peptide or polypeptide, an imaging marker, a selectable marker, and the like.

[0114] In some embodiments, the nucleic acid sequence of interest may encode a therapeutic protein or other gene product that confers a desired feature to the modified cell. In some embodiments, the therapeutic protein may be a protein deficient in the cell or subject. In some embodiments, for example, therapeutic proteins include, but are not limited to, those deficient in lysosomal storage disorders, such as alpha-L-iduronidase, arylsulfatase A, beta-glucocerebrosidase, acid sphingomyelinase, and alpha- and beta-galactosidase; and those deficient in hemophilia such as Factor VIII and Factor IX. Other examples of therapeutic proteins include, but are not limited to, antibodies or antibody fragments (e.g., scFv) such as those targeting pathogenic proteins (e.g., tau, alpha-synuclein, and beta-amyloid protein) and those targeting cancer cells (e.g., chimeric antigen receptors (CARs)).

[0115] In some embodiments, the nucleic acid sequence of interest may encode a protein involved in immune regulation, or an immunomodulatory protein. In some embodiments, for example, such proteins include, PD-L1, CTLA-4, M-CSF, IL-4, IL-6, IL-10, IL-11, IL-13, TGF-β1, and various isoforms thereof. By way of example, in some embodiments, the nucleic acid sequence of interest may encode an isoform of HLA-G (e.g., HLA-G1, -G2, -G3, -G4, -G5, -G6, or -G7) or HLA-E; allogeneic cells expressing such a nonclassical MHC class I molecule may be less immunogenic and better tolerated when transplanted into a human patient who is not the source of the cells, making “universal” cell therapy possible.

[0116] In some embodiments, the nucleic acid sequence of interest may encode a gene product that confers therapeutic value, e.g., a new therapeutic activity to the cell. In some embodiments, exemplary gene products are polypeptides such as a chimeric antigen receptor (CAR) or antigen-binding fragment thereof, a T cell receptor or antigen binding fragment thereof, a non-naturally occurring variant of FcγRIII (CD16), interleukin 15 (IL-15), interleukin 15 receptor (IL-15R) or a variant thereof, interleukin 12 (IL-12), interleukin-12 receptor (IL-12R) or a variant thereof, human leukocyte antigen G (HLA-G), human leukocyte antigen E (HLA-E), leukocyte surface antigen cluster of differentiation CD47 (CD47), or any combination of two or more thereof. It is to be understood that the present disclosure is not limited to any particular gene product and that the selection of a gene product will depend on the application.

[0117] In some embodiments, the nucleic acid sequence of interest may encode a cytokine. In some embodiments, expression of a cytokine from a modified cell generated using a method as described herein allows for localized dosing of the cytokine in vivo (e.g., within a subject in need thereof) and/or avoids a need to systemically administer a high-dose of the cytokine to a subject in need thereof (e.g., a lower dose of the cytokine may be administered). In some embodiments, the risk of dose-limiting toxicities associated with administering a cytokine is reduced while cytokine mediated cell functions are maintained. In some embodiments, to facilitate cell function without the need to additionally administer high-doses of soluble cytokines, a partial or full peptide of one or more of IL2, IL4, IL6, IL7, IL9, IL10, IL11, IL 12, IL15, IL18, IL21, IFN-α, IFN-β and/or their respective receptor is introduced to the cell to enable cytokine signaling with or without the expression of the cytokine itself, thereby maintaining or improving cell growth, proliferation, expansion, and/or effector function with reduced risk of cytokine toxicities. In some embodiments, the introduced cytokine and/or its respective native or modified receptor for cytokine signaling are expressed on the cell surface. In some embodiments, the cytokine signaling is constitutively activated. In some embodiments, the activation of the cytokine signaling is inducible. In some embodiments, the activation of the cytokine signaling is transient and/or temporal. In some embodiments, the nucleic acid sequence of interest may encode IL2, IL3, IL4, IL6, IL7, IL9, IL10, IL11, IL 12, IL13, IL15, IL21, GM-CSF, IFN-α, IFN-b, IFN-g, erythropoietin, and/or the respective cytokine receptor. In some embodiments, the nucleic acid sequence of interest may encode CCL3, TNFα, CCL23, IL2RB, IL12RB2, or IRF7.

[0118] In some embodiments, the nucleic acid sequence of interest may encode a chemokine and/or the respective chemokine receptor. In some embodiments, a chemokine receptor can be, but is not limited to, CCR2, CCR5, CCR8, CX3C1, CX3CR1, CXCR1, CXCR2, CXCR3A, CXCR3B, or CXCR2. In some embodiments, a chemokine can be, but is not limited to, CCL7, CCL19, or CXL14.

[0119] As used herein, the term “chimeric antigen receptor” or “CAR” refers to a receptor protein that has been modified to give cells expressing the CAR the new ability to target a specific protein. Within the context of the disclosure, a cell modified to comprise a CAR or an antigen binding fragment may be used for immunotherapy to target and destroy cells associated with a disease or disorder, e.g., cancer cells.

[0120] CARs of interest can include, but are not limited to, a CAR targeting mesothelin, EGFR, HER2 and/or MICA/B. To date, mesothelin-targeted CAR T-cell therapy has shown early evidence of efficacy in a phase I clinical trial of subjects having mesothelioma, non-small cell lung cancer, and breast cancer (NCT02414269). Similarly, CARs targeting EGFR, HER2 and MICA/B have shown promise in early studies (see, e.g., Li et al. (2018), Cell Death & Disease, 9(177); Han et al. (2018) Am. J. Cancer Res., 8(1):106-119; and Demoulin (2017) Future Oncology, 13(8); the entire contents of each of which are expressly incorporated herein by reference in their entireties).

[0121] In some embodiments, the nucleic acid sequence of interest may encode any suitable CAR, NK cell specific CAR (NK-CAR), T cell specific CAR, or other binder that targets a cell, e.g., an NK cell, to a target cell, e.g., a cell associated with a disease or disorder, may be expressed in the modified cells provided herein. Exemplary CARs, and binders, include, but are not limited to, bi-specific antigen binding CARs, switchable CARs, dimerizable CARs, split CARs, multi-chain CARs, inducible CARs, CARs and binders that bind BCMA, androgen receptor, PSMA, PSCA, Muc1, HPV viral peptides (i.e., E7), EBV viral peptides, WT1, CEA, EGFR, EGFRVIII, IL13Ra2, GD2, CA125, EpCAM, Muc16, carbonic anhydrase IX (CAIX), CCR1, CCR4, carcinoembryonic antigen (CEA), CD3, CD5, CD7, CD10, CD19, CD20, CD22, CD23, CD24, CD26, CD30, CD33, CD34, CD35, CD38 CD41, CD44, CD44V6, CD49f, CD56, CD70, CD92, CD99, CD123, CD133, CD135, CD148, CD150, CD261, CD362, CLEC12A, MDM2, CYPIB, livin, cyclin 1, NKp30, NKp46, DNAMI, NKp44, CA9, PD1, PDL1, an antigen of cytomegalovirus (CMV), epithelial glycoprotein-40 (EGP-40), GPRC5D, receptor tyrosine kinases erb-B2,3,4, EGFIR, ERBB folate binding protein (FBP), fetal acetylcholine receptor (AChR), folate receptor-a, ganglioside G3 (GD3) human Epidermal Growth Factor Receptor 2 (HER-2), human telomerase reverse transcriptase (hTERT), ICAM-1, Integrin B7, Interleukin-13 receptor subunit alpha-2 (IL-13Ra2), K-light chain, kinase insert domain receptor (KDR), Lewis A (CA19.9), Lewis Y (Le Y), L1 cell adhesion molecule (LI-CAM), LILRB2, melanoma antigen family A 1 (MAGE-A1), MICA/B, Mucin 16 (Muc-16), NKCSI, NKG2D ligands, c-Met, cancer-testis antigen NY-ESO-1, oncofetal antigen (h5T4), PRAME, prostate stem cell antigen (PSCA), PRAME prostate-specific membrane antigen (PSMA), tumor-associated glycoprotein 72 (TAG-72), TIM-3, TRBC1, TRBC2, vascular endothelial growth factor R2 (VEGF-R2), Wilms tumor protein (WT-1), a pathogen antigen, or any suitable combination thereof.

[0122] In some embodiments, the nucleic acid sequence of interest may encode a protein or polypeptide whose expression within a cell, e.g., a cell modified as described herein, enables the cell to inhibit or evade immune rejection after transplant or engraftment into a subject. In some embodiments, the protein or polypeptide is HLA-E, HLA-G, CTL4, CD47, or an associated ligand.

[0123] In some embodiments, the nucleic acid sequence of interest may encode a T cell receptor (TCR) or an antigen-binding fragment thereof, e.g., a recombinant TCR. In some embodiments, the recombinant TCR can bind to an antigen of interest, e.g., an antigen selected from, but not limited to, CD279, CD2, CD95, CD152, CD223CD272, TIM3, KIR, A2aR, SIRPa, CD200, CD200R, CD300, LPA5, NY-ESO, PD1, PDL1, or MAGE-A3/A6. In some embodiments, the TCR or antigen-binding fragment thereof can bind to a viral antigen, e.g., an antigen from hepatitis A, hepatitis B, hepatitis C (HCV), human papilloma virus (HPV) (e.g., HPV-16 (such as HPV-16 E6 or HPV-16 E7), HPV-18, HPV-31, HPV-33, or HPV-35), Epstein-Barr virus (EBV), human herpes virus 8 (HHV-8), human T-cell leukemia virus-1 (HTLV-1), human T-cell leukemia virus-2 (HTLV-2) or a cytomegalovirus (CMV).

[0124] In some embodiments, the nucleic acid sequence of interest may encode a single-chain variable fragment that can bind to CD47, PD1, CTLA4, CD28, OX40, 4-1BB, and ligands thereof.

[0125] As used herein, the term “HLA-G” refers to the HLA non-classical class I heavy chain paralogues. This class I molecule is a heterodimer consisting of a heavy chain and a light chain (beta-2 microglobulin). The heavy chain is anchored in the membrane. HLA-G is expressed on fetal derived placental cells. HLA-G is a ligand for NK cell inhibitory receptor KIR2DL4, and therefore expression of this HLA by the trophoblast defends it against NK cell-mediated death. See e.g., Favier et al., PLOS One 2011 6(7):e21011, the entire contents of which are incorporated herein by reference. An exemplary sequence of HLA-G is set forth as NG_029039.1.

[0126] As used herein, the term “HLA-E” refers to the HLA class I histocompatibility antigen, alpha chain E, also sometimes referred to as MHC class I antigen E. The HLA-E protein in humans is encoded by the HLA-E gene. The human HLA-E is a non-classical MHC class I molecule that is characterized by a limited polymorphism and a lower cell surface expression than its classical paralogues. This class I molecule is a heterodimer consisting of a heavy chain and a light chain (beta-2 microglobulin). The heavy chain is anchored in the membrane. HLA-E binds a restricted subset of peptides derived from the leader peptides of other class I molecules. HLA-E expressing cells escape allogeneic responses and lysis by NK cells. See, e.g., Gornalusse et al., Nature Biotechnology 2017 35(8): 765-772, the entire contents of which are incorporated herein by reference. Exemplary sequences of the HLA-E protein are provided in NM_005516.6.

[0127] As used herein, the term “CD47,” also sometimes referred to as “integrin associated protein” (IAP), refers to a transmembrane protein that in humans is encoded by the CD47 gene. CD47 belongs to the immunoglobulin superfamily, partners with membrane integrins, and also binds the ligands thrombospondin-1 (TSP-1) and signal-regulatory protein alpha (SIRPa). CD47 acts as a signal to macrophages that allows CD47-expressing cells to escape macrophage attack. See, e.g., Deuse et al., Nature Biotechnology 2019 37:252-258, the entire contents of which are incorporated herein by reference.

[0128] In some embodiments, the nucleic acid sequence of interest may encode a chimeric switch receptor (see, e.g., WO2018094244A1; Ankri et al., Journal of Immunology 2013 191:4121-4129; Roth et al., Cell. 2020 181(3):728-744.e21; and Boyerinas et al., Blood, 2017 130(S1):1911). In some embodiments, chimeric switch receptors are engineered cell-surface receptors comprising an extracellular domain from an endogenous cell-surface receptor and a heterologous intracellular signaling domain, such that ligand recognition by the extracellular domain results in activation of a different signaling cascade than that activated by the wild-type form of the cell-surface receptor. In some embodiments, a chimeric switch receptor comprises an extracellular domain of an inhibitory cell-surface receptor fused to an intracellular domain that leads to the transmission of an activating signal rather than the inhibitory signal normally transduced by the inhibitory cell-surface receptor. In some embodiments, extracellular domains derived from cell-surface receptors known to inhibit immune effector cell activation can be fused to activating intracellular domains. In such an embodiment, engagement of the corresponding ligand may then activate signaling cascades that increase, rather than inhibit, the activation of the immune effector cell. For example, in some embodiments, a gene product of interest is a PD1-CD28 switch receptor, wherein the extracellular domain of PD1 is fused to the intracellular signaling domain of CD28 (see, e.g., Liu et al., Cancer Res 76:6 (2016), 1578-1590 and Moon et al., Molecular Therapy 22 (2014), S201). In some embodiments, encoding gene product of interest is or comprises the extracellular domain of CD200R and the intracellular signaling domain of CD28 (see, e.g., Oda et al., Blood 130:22 (2017), 2410-2419).

[0129] In some embodiments, the nucleic acid sequence of interest may encode a reporter (e.g., GFP, mCherry, etc.). In certain embodiments, a reporter may be a colored or fluorescent protein such as: blue/UV proteins, e.g., TagBFP, mTagBFP2, Azurite, EBFP2, mKalamal, Sirius, Sapphire, T-Sapphire; cyan proteins, e.g. ECFP, Cerulean, SCFP3A, mTurquoise, mTurquoise2, monomeric Midoriishi-Cyan, TagCFP, mTFP1; green proteins, e.g. EGFP, Emerald, Superfolder GFP, Monomeric Azami Green, TagGFP2, mUKG, m Wasabi, Clover, mNeonGreen; yellow proteins, e.g. EYFP, Citrine, Venus, SYFP2, TagYFP; orange proteins, e.g., Monomeric Kusabira-Orange, mKOK, mK02, mOrange, mOrange2; red proteins, e.g., mRaspberry, mStrawberry, mTangerine, tdTomato, TagRFP, TagRFP-T, mApple, mRuby, mRuby2; far-red proteins, e.g. mPlum, HcRed-Tandem, mKate2, mNeptune, NirFP; near-IR proteins, e.g. TagRFP657, IFP1.4, iRFP; long stokes shift proteins, e.g., mKeima Red, LSS-mKate1, LSS-mKate2, mBeRFP; photoactivatible proteins, e.g. PA-GFP, PAmCherryl, PATagRFP; photoconvertible proteins, e.g., Kaede (green), Kaede (red), KikGRI (green), KikGRI (red), PS-CFP2, PS-CFP2, mEos2 (green), mEos2 (red), mEos3.2 (green), mEos3.2 (red), PSmOrange, PSmOrange, photoswitchable proteins, e.g., Dronpa, and combinations thereof.

[0130] In some embodiments, the nucleic acid sequence of interest may be a suicide gene (see e.g., Zarogoulidis et al., J Genet Syndr Gene Ther. 2013 4:1000139). In some embodiments, a suicide gene can use a gene-directed enzyme prodrug therapy (GDEPT) approach, a dimerization inducing approach, and/or therapeutic monoclonal antibody mediated approach. In some embodiments, a suicide gene is biologically inert, has an adequate bio-availability profile, an adequate bio-distribution profile, and can be characterized by intrinsic acceptable and/or absence of toxicity. In some embodiments, a suicide gene codes for a protein able to convert, at a cellular level, a non-toxic prodrug into a toxic product. In some embodiments, a suicide gene may improve the safety profile of a cell described herein (see e.g., Greco et al., Front Pharmacology 2015 6:95; Jones et al., Front Pharmacology 2014 5:254). In some embodiments, a suicide gene is a herpes simplex virus thymidine kinase (HSV-TK). In some embodiments, a suicide gene is a cytosine deaminase (CD). In some embodiments, a suicide gene is an apoptotic gene (e.g., a caspase). In some embodiments, a suicide gene is dimerization inducing, e.g., comprising an inducible FAS (iFAS) or inducible Caspase9 (iCasp9)/AP1903 system. In some embodiments, a suicide gene is a CD20 antigen, and cells expressing such an antigen can be eliminated by clinical-grade anti-CD20 antibody administration. In some embodiments, a suicide gene is a truncated human EGFR polypeptide (huEGFRt) which confers sensitivity to a pharmaceutical-grade anti-EGFR monoclonal antibody, e.g., cetuximab. In some embodiments a suicide gene is a c-myc tag, which confers sensitivity to pharmaceutical-grade anti-c-myc antibodies.

[0131] In some embodiments, the nucleic acid sequence of interest may be a safety switch signal. In cell therapy, a safety switch can be used to stop proliferation of the genetically modified cells when their presence in the patient is not desired, for example, if the cells do not function properly, if planned therapeutic interventions change, or if the therapeutic goal has been achieved. In some embodiments, a safety switch may, for example, be a so-called suicide gene, or suicide switch, which upon administration of a pharmaceutical compound to the patient, will be activated or inactivated such that the cells enter apoptosis. Suicide genes, sometimes called suicide switches or safety switches can be triggered or activated by a cellular event, environmental event or chemical agent resulting in a cellular response by cells that have the suicide gene incorporated in their genome. In some embodiments, activation of a safety switch induces cellular apoptosis. In some embodiments, activation of the safety switch inhibits growth of cells incorporated with the safety switch. In some embodiments, a suicide switch may encode an enzyme not found in humans (e.g., a bacterial or viral enzyme) that converts a harmless substance into a toxic metabolite in the human cell. Examples of suicide switch include, without limitation, genes for thymidine kinases, cytosine deaminases, intracellular antibodies, telomerases, toxins, caspases (e.g., iCaspase9) and HSV-TK, and DNases. In some embodiments, the suicide gene may be a thymidine kinase (TK) gene from the Herpes Simplex Virus (HSV) and the suicide TK gene becomes toxic to the cell upon administration of ganciclovir, valganciclovir, famciclovir, or the like to the patient.

[0132] In some embodiments, a safety switch may be a rapamycin-inducible human Caspase 9-based (RapaCasp9) cellular suicide switch in which a truncated caspase 9 gene, which has its CARD domain removed, is linked after either the FRB (FKBP12-rapamycin binding) domain of mTOR, or FKBP12 (FK506-binding protein 12). Addition of the drug rapamycin enables heterodimerization of FRB and FKBP12 which subsequently causes homodimerization of truncated caspase 9 and induction of apoptosis. In some embodiments, using a two construct and/or biallelic approach as described herein, FRB and FKBP12 are separated onto different alleles by incorporating two donor constructs, one with one or more transgenes plus FRB, the other with one or more transgenes plus FKBP12. When referring to a safety switch in this application, it should be interpreted to include all components necessary for the function of the safety switch (e.g., FRB domain and FKBP12 domain and truncated caspase 9 gene are all components of, and make up, the safety switch).

### Methods of Treatment

[0133] The present disclosure, among other things, provides methods and LSRs that can be used in the treatment of a disease, disorder, or condition. In some embodiments, LSRs described herein can be used to integrate a gene of interest, including but limited to, those described herein for the treatment of a subject. In some embodiments, LSRs as described herein can be used for ex vivo modification of a cell. In some embodiments, the cell is a mammalian cell. In some embodiments, the mammalian cell is a human cell. In some embodiments, the human cell is derived from the subject, e.g., an autologous cell. In some other embodiments, the human cell is derived from an individual that is not the subject, e.g., an allogeneic cell. In some embodiments, the ex vivo modified cells are administered to a subject as a pharmaceutical composition. In some other embodiments, the LSRs of the present disclosure are administered in vivo to a subject as a pharmaceutical composition.

[0134] Administration of a pharmaceutical compositions described herein may be carried out in any convenient manner (e.g., injection, ingestion, transfusion, inhalation, implantation, or transplantation). In some embodiments, a pharmaceutical composition described herein is administered by injection or infusion. Pharmaceutical compositions described herein may be administered to a subject intravenously, transarterially, subcutaneously, intradermally, intratumorally, intranodally, intramedullary, intramuscularly, or intraperitoneally. In some embodiments, a pharmaceutical composition described herein is administered parenterally (e.g., intravenously, subcutaneously, intraperitoneally, or intramuscularly). In some embodiments, a pharmaceutical composition described herein is administered by intravenous infusion or injection. In some embodiments, a pharmaceutical composition described herein is administered by intramuscular or subcutaneous injection.

[0135] In some embodiments, a pharmaceutical composition described herein is administered at a pharmaceutically suitable dosage to a subject. In some embodiments, a pharmaceutical composition described herein is administered monthly. In some embodiments, a pharmaceutical composition described herein is administered once every other month. In some embodiments, a pharmaceutical composition described herein is administered once every three months. In some embodiments, a pharmaceutical composition described herein is administered once every six months. In some embodiments, a pharmaceutical composition described herein is administered once a year.

### EXAMPLES

### Example 1: Identification of Large Serine Recombinases and Uses Thereof

[0136] The present Example describes computational methods that were used to assess phage insertions and identify cognate large serine recombinases from thousands of bacterial genomes, and find and characterize the respective potential attachment sites in the human genome (attH) for these recombinases. As described herein, these methods allowed for the identification and assessment of the novel large serine recombinases of Table 1 and their respective potential attachment sites in the human genome. The application of these novel large serine recombinases allows for efficient and specific integration of exogenous nucleic acid, e.g., exogenous DNA into a host human genome.

Computational Discovery of Phage Insertions from Thousands of Bacterial Genomes

[0137] Genomes from numerous bacterial isolates from within the same species were compared against each other in order to detect putative phage insertions. Bacterial genomes were downloaded from the NCBI Refseq database and a collection of bacterial genomes in the ENA database (available through the world wide web at ftp.ebi.ac.uk/pub/databases/ENA2018-bacteria-661k/). Data analysis was performed separately for the NCBI and ENA datasets. Bacterial species with at least two genome assemblies in either dataset were used for analysis. Overall, 283,589 genome assemblies from the NCBI Refseq database and 635,246 genome assemblies from the ENA database were evaluated. The genome assemblies of each bacterial species were grouped by their respective NCBI taxon ID.

[0138] In order to compare the genomes of the same bacterial species, the most complete genome was selected as a reference and then aligned to shortened sequences (also known as reads) that were generated from the other, less complete genomes available for the species. For the NCBI dataset, the evaluation of genome assemblies was based on the assembly status with the following ranking: Complete>Chromosome>Scaffold>Contig and assembly size, while the ENA genome assemblies were ranked by the genome completeness scores provided by the dataset. For bacterial species that have more than one distantly related lineage, one reference genome was selected from each lineage for separate analysis. The computational tool PopPunk was used to estimate the core genome distances among genomes (Lees et al. 2019), and genome assemblies within 0.05 core genome distance were grouped into one lineage. Non-reference genomes were each tiled into 300 bp long sequences, with 100 bp overlaps. Each of these sequences were converted into reads and assembled into FASTQ file format. These non-reference genome reads were aligned using BWA MEM algorithm (Li and Durbin 2009).

[0139] The putative phage insertions were identified based on either of two read alignment patterns. The first pattern assumes that the reference bacterial genome does not contain a phage insertion. As such, reads generated from the phage-bacterial genome boundary in a genome containing the phage insertion would be aligned to the attB site in the reference genome with one end being clipped (including both soft-clipped and hard-clipped ends). A genomic region supported by clipped reads in both forward and reverse directions was considered to be a putative phage insertion site, and the full phage insertion sequence was inferred from the positions of clipped reads in their source genome. Alternatively, in a second pattern, assuming a phage insertion is present in the reference genome, reads generated from genomes without the phage insertion would be split to align the two flanking regions outside the phage insertion (e.g., the left and right ends are aligned with some distance). This is known as a “split read”. As a result, the full phage insertion sequence can be determined to be the sequence between the two aligned positions of the “split read” in the reference genome.

### Identification of Large Serine Recombinases and Their Cognate Attachment Sites in Bacterial Genomes

[0140] The identified putative phage insertions exemplified in Table 1 were analyzed using the gene prediction software of Prodigal (PROkaryotic DYnamic programming Gene-finding ALgorithm) (Hyatt et al. 2010) to identify protein coding sequences. These sequences were analyzed using the HMMR computer software package (Eddy 2009) to identify the three domains typically associated with large serine recombinases (protein domains in Table 1): a resolvase/invertase domain (PF00239), a zinc ribbon domain (PF13408), and a recombinase domain Pfam (PF07508). Predicted recombinase proteins with at least one of these three domains were retained for further analysis.

[0141] The cognate attachment sites (attP/B) of each large serine recombinase were reconstructed from the sequences surrounding the phage insertion boundary. The sequences flanking outside a phage insertion were concatenated to generate an attB sequence, B₁+D+B₂. Moreover, the sequences inside of a phage insertion were concatenated to generate an attP sequence, P₂+D+P₁. D represents the conserved sequences (about 2-20 bp) shared between sequences in the left and right boundary of a phage element, which is also called target site duplication generated by phage insertion. The center core dinucleotide in attB/attP was further determined by searching for the position within D that achieves the optimal alignment between the attP left half-site sequence and the reverse complement of its right half-site sequence (considering the greater symmetry of the attP sequence). Finally, the attP and attB sequences, ideally with the same core dinucleotides in the center, were reconstructed as 50 bp sequences and 40 bp sequences, respectively.

### Selection Criteria for High-Quality Large Serine Recombinase Candidates

[0142] First, in order to arrive at the novel set of large serine recombinases in Table 1, several filtering criteria were applied to select a subset of high-quality candidates and their respective attB/P sites. First, the size of phage insertions was restricted to approximately 3-200 kb. Second, the distance from the LSR protein sequence to the phage insertion boundary had to be within 500 bp. Third, target site duplication (D) had to be in the range of 2-20 bp. Fourth, only LSR proteins containing at least two of the three canonical LSR protein domains or ones comprising 400-700 unambiguous amino acids were retained. To remove redundant large serine recombinases with the same attB and attP sites identified in different isolates or bacterial species, only one large serine recombinase and their respective attB and attP sites was retained as a representative in Table 1.

[0143] Second, in order to identify putative large serine recombinases more likely capable of mediating recombination with the human genome, the attB and attP sequences of each large serine recombinase were searched against a human reference genome (hg38) using CALITAS (Fennell et al. 2021) not allowing for gaps in the alignment. For each LSR, the attP sequence is 10-bp larger than its corresponding attB sequence, so the potential 5-bp linker region at each attP half site (the sequence between the ZD and RD motifs; FIG. 2) was masked with NNNNN, so that mismatches between the sequences in the linker region and the corresponding human region would not be counted as mismatches. The center dinucleotide in both attB and attP was also masked with NN, since it can be changed to any bases that match the corresponding human sites. For each large serine recombinase, the best alignment with the fewest mismatches was selected from all attB and attP matched sequences, and the best matched human sequence is described as attH (potential attachment site in human genome). The attB or attP sequence of each large serine recombinase used to align with attH (and most closely matches attH) is termed attA, and the other attachment site sequence (either the attB or attP sequence with the center dinucleotides changed to match attH) is termed attD (donor sequence that can be used for targeted integration at an attH). Finally, alignment between attA and attH was refined using CALITAS (Fennell et al. 2021) to determine the number of mismatches and gaps between the two sequences.

### Categorization of Identified Large Serine Recombinases

[0144] The present disclosure describes a novel set of large serine recombinases and their respective predicted attachment sites in the human genome that allow for efficient genetic manipulation and integration of large DNA payloads. As described herein, these large serine recombinase systems have been discovered through the development and use of computational algorithms to analyze a large number of bacterial genomes for recombinase-mediated phage insertions, and then comparison of the predicted recombinase attachment site sequences in the bacteria and phage genomes to similar sequences found in the human genome. This library of large serine recombinases and cognate human attachment sites are disclosed in Table 1.

[0145] Table 1 is organized with priority given to the large serine recombinase systems with lowest calculable mismatches (mm) between the attachment site sequence (attA sequence, being whichever of the attB or attP sequence that most closely matches the attH sequence) and human attachment site sequence (attH sequence), using CALITAS as described above. These large serine recombinases are numbered accordingly under system ID (system_id) up through the 12,713 identified. These high-quality large serine recombinase candidates were identified from different bacterial genomes as described above, and are annotated within Table 1 with the bacterial species name (species_name) and associated respective NCBI taxon id (taxon_id) with their isolate accession number (isolate_accession). Computational identification of putative phage insertion is further described within this table as where the insertion would occur (insertion_origin), its size (insertion_size), and location within the large serine recombinase origin (lsr_location).

[0146] All LSRs are further defined by the strand of the large serine recombinase (lsr_strand) and respective protein sequence (lsr_protein). The sequences of the predicted attachment sites for integration, attH, with the fewest mismatches based on sequence alignment with either attB/attP for each corresponding large serine recombinase are described in Table 1. The human genomic locations of these attH sites are further defined by their respective chromosome number, nucleic acid start position and nucleic acid end position (attH_coordinates) of the predicted insertion site in a respective DNA strand (sense, + or antisense, −). For certain LSRs, Table 1 also includes the human genomic locations of other potential attachment sites for integration (alt_attH_sites). In some embodiments, these alternative attH sites include the same number of mismatches as the attH site described above (based on sequence alignment with either attB/attP for each corresponding large serine recombinase). In some embodiments, these alternative attH sites include additional mismatches based on sequence alignment with either attB/attP for each corresponding large serine recombinase.

[0147] For each system ID in Table 1 (i.e., each row of Table 1), there are SEQ ID NOs identified by each of the following headers: “LSR_Protein SEQ ID NO:”, “attp_sequence SEQ ID NO:”, “attb_sequence SEQ ID NO:”, “attD_sequence SEQ ID NO:”, and “attH_sequence SEQ ID NO:”. The SEQ ID NOs in Table 1 serve as placeholders for the sequences identified as SEQ ID NOs: 1-63565 in the Sequence Listing. As used herein, “sequence selected from Table 1” and similar terms are understood to refer to the sequences in the Sequence Listing identified by the SEQ ID NOs in Table 1.

### Example 2: Screening of Large Serine Recombinases

[0148] The present Example describes methods (Individual LSR Screening) that were used to assess the functionality of some individual LSRs identified in Table 3. The present Example also describes methods (Pooled LSR Screening) that were used to assess the functionality of cluster representative LSRs identified in Table 2.

### Individual LSR Screening

### Synthesis and Cloning

[0149] Each mammalian codon-optimized LSR gene was synthesized downstream of its respective 40 bp attB sequence and cloned via Gibson assembly into an expression plasmid which contained a 5′ promoter and 3′ P2A-GFP expression cassette. This cloning process was automated via BioXP 3250 (CODEX DNA). The attP sequence was synthesized as an oligonucleotide (IDT) and cloned using NEBridgeR Golden Gate Assembly Kit (NEB) upstream a promoter-less mCherry gene.

### Preparation and Sequencing

[0150] Assembled plasmids were transformed into OneShotTop10 Bacteria or c3040H competent cells (NEB) and plated onto agar plates with appropriate antibiotics. Colonies with growth were picked and grown in 1.5 mL of LB selection media overnight and finally miniprepped with Qiagen Plasmid Plus 96 Miniprep kit (Qiagen). The isolated plasmid preps were sequenced via Oxford Nanopore Sequencing to validate cloning.

### Plasmid Recombination Assay

[0151] For screening of individual recombinase function in mammalian cells, each attB-LSR plasmid and an attP-mCherry plasmid were co-transfected into HEK-293T cells in a 96 well format using TransIT-293 Transfection Reagent (Mirus) (see FIG. 3). Two control groups were used per LSR: an attP-mCherry plasmid alone to quantify background expression, and attB-LSR with a non-specific mCherry to assess cross-reactivity of recombination. After 48-72 hours of culture, the cells were trypsinized and pelleted. Half were re-suspended and analyzed for mCherry protein (PE-Texas Red) and eGFP protein (FITC) expression via flow cytometry (Novocyte Quanteon Flow Cytometer System). Mean fluorescent intensity (MFI) of PE-Texas Red was used as the readout for recombination with eGFP as a surrogate for LSR expression. Fluorescent data was normalized by dividing the MFI of the recombination group by the MFI of the promoterless attP-mCherry only group to determine fold increase in mCherry fluorescence caused by promoter-swapping. With the remaining half of the cell population, genomic DNA was isolated using DNAdvance Kit (Beckman Coulter) and a ddPCR reaction was subsequently performed to quantify the percent recombination (BioRad: ddPCR Supermix for Probes). 2 ddPCR assays were designed; one measuring an amplicon across the recombination junction in a recombined plasmid and the other measuring mCherry (IDT). The ratio of recombination junction positive droplets to mCherry droplets was then used to calculate percent recombination. The ddPCR data, after determining recombination positive droplets, was normalized to % recombination of Bxb1, a consistent and highly active LSR in the field, which was a control present on each transfection and instrument run. Empty data points represent lost replicate plates due to instrument or user error.

### Results

[0152] Many LSRs that were tested showed recombinase activity, as seen by positive % recombination relative to Bxb1 by ddPCR (FIG. 4A) and MFI mCherry when viewing the fold increase relative to promoterless mCherry (attP only, FIG. 4B). These results showed that more than half of the screened LSRs have above 2% recombination activity relative to Bxb1 and greater than 2-fold increase in MFI of mCherry relative to promoterless mCherry. Notably, the ddPCR and mCherry MFI results showed a strong correlation. Table 3 provides details for the individual LSRs that were tested in accordance with these methods and also notes the cluster they belong to (see Pooled LSR Screening below).

TABLE 3
LSRs from Individual LSR Screening and Inclusion in LSR Clusters

| | | LSR | | | | | | |
|---|---|---|---|---|---|---|---|---|
| System | | Protein | attP | attB | attD | attH | | Screened |
| ID: | LSR location | SEQ ID NO: | SEQ ID NO: | SEQ ID NO: | SEQ ID NO: | SEQ ID NO: | Cluster | Label |
| 1406 | SEYX01000017.1: 32210-33946 | 7026 | 7027 | 7028 | 7029 | 7030 | 199 | PRO411 |
| 1408 | JAGDLG010000002.1: 43469-45241 | 7036 | 7037 | 7038 | 7039 | 7040 | 199 | PRO412 |
| 765 | CDMF01000001.1: 3566594-3568282 | 3821 | 3822 | 3823 | 3824 | 3825 | 2746 | PRO413 |
| 62 | UTAC01000001.1: 161628-163097 | 306 | 307 | 308 | 309 | 310 | 1119 | PRO414 |
| 55 | CP012312.1: 2083693-2085372 | 271 | 272 | 273 | 274 | 275 | 237 | PRO415 |
| 11045 | SAMN06040332.contig00014: 98555-100075 | 55221 | 55222 | 55223 | 55224 | 55225 | 7 | PRO416 |
| 1529 | NVDH01000013.1: 413916-415436 | 7641 | 7642 | 7643 | 7644 | 7645 | 106 | PRO417 |
| 4671 | VTTT01000003.1: 200824-202329 | 23351 | 23352 | 23353 | 23354 | 23355 | 528 | PRO418 |
| 169 | CTKJ01000021.1: 42840-44573 | 841 | 842 | 843 | 844 | 845 | 115 | PRO419 |
| 166 | QSLI01000006.1: 62456-63892 | 826 | 827 | 828 | 829 | 830 | 387 | PRO420 |
| 5517 | NTRM01000007.1: 108739-110214 | 27581 | 27582 | 27583 | 27584 | 27585 | 45 | PRO421 |
| 917 | CP047394.1: 2957116-2958642 | 4581 | 4582 | 4583 | 4584 | 4585 | 1823 | PRO422 |
| 668 | DS264311.1: 17878-19620 | 3336 | 3337 | 3338 | 3339 | 3340 | 2755 | PRO423 |
| 4670 | JADWNC010000007.1: 204939-206444 | 23346 | 23347 | 23348 | 23349 | 23350 | 528 | PRO424 |
| 1936 | VWSY01000001.1: 2767353-2768864 | 9676 | 9677 | 9678 | 9679 | 9680 | 25 | PRO425 |
| 2015 | JACBEG010000001.1: 430924-432438 | 10071 | 10072 | 10073 | 10074 | 10075 | 695 | PRO426 |
| 2393 | LVUK01000124.1: 1052-2899 | 11961 | 11962 | 11963 | 11964 | 11965 | 24 | PRO427 |
| 11979 | SAMN00254032.contig00004: 162231-163994 | 59891 | 59892 | 59893 | 59894 | 59895 | 34 | PRO428 |
| 4606 | JACYXR010000011.1: 190394-192022 | 23026 | 23027 | 23028 | 23029 | 23030 | 298 | PRO429 |
| 4294 | JTMO01000027.1: 80289-81905 | 21466 | 21467 | 21468 | 21469 | 21470 | 147 | PRO430 |
| 11134 | RBSL01000205.1: 16360-18030 | 55666 | 55667 | 55668 | 55669 | 55670 | 188 | PRO431 |
| 348 | JYLP01000027.1: 19858-21285 | 1736 | 1737 | 1738 | 1739 | 1740 | 263 | PRO432 |
| 2192 | RYCU01000001.1: 643473-645272 | 10956 | 10957 | 10958 | 10959 | 10960 | 64 | PRO433 |
| 1084 | AIDX01000001.2: 1656567-1658024 | 5416 | 5417 | 5418 | 5419 | 5420 | 117 | PRO437 |
| 11584 | FVFC01000006.1: 167188-168609 | 57916 | 57917 | 57918 | 57919 | 57920 | 101 | PRO438 |
| 883 | NUQZ01000052.1: 68993-70510 | 4411 | 4412 | 4413 | 4414 | 4415 | 1356 | PRO439 |
| 828 | CP068488.1: 4213722-4215398 | 4136 | 4137 | 4138 | 4139 | 4140 | 72 | PRO440 |
| 6848 | SAMEA3545244.contig00001: 110539-112131 | 34236 | 34237 | 34238 | 34239 | 34240 | 87 | PRO441 |
| 1483 | CZAV01000001.1: 649554-650777 | 7411 | 7412 | 7413 | 7414 | 7415 | 2008 | PRO442 |
| 1689 | CP016349.1: 1998207-2000111 | 8441 | 8442 | 8443 | 8444 | 8445 | 418 | PRO443 |
| 2686 | JABEQB010000025.1: 3462-4988 | 13426 | 13427 | 13428 | 13429 | 13430 | 2784 | PRO444 |
| 767 | BBIV01000008.1: 75641-77248 | 3831 | 3832 | 3833 | 3834 | 3835 | 2775 | PRO445 |
| 1216 | JAAQXZ010000018.1: 98061-99626 | 6076 | 6077 | 6078 | 6079 | 6080 | 1622 | PRO446 |
| 1385 | CP049698.1: 2416186-2418009 | 6921 | 6922 | 6923 | 6924 | 6925 | 2003 | PRO447 |
| 88 | JRFS01000048.1: 2943-4670 | 436 | 437 | 438 | 439 | 440 | 100 | PRO448 |
| 428 | LDGR01000022.1: 239790-241181 | 2136 | 2137 | 2138 | 2139 | 2140 | 178 | PRO449 |
| 5652 | CAKAFH0100000011: 613414-614679 | 28256 | 28257 | 28258 | 28259 | 28260 | 545 | PRO450 |
| 12187 | JACEVK010000003.1: 94997-96499 | 60931 | 60932 | 60933 | 60934 | 60935 | 236 | PRO451 |
| 7621 | JACRTO010000008.1: 76315-77868 | 38101 | 38102 | 38103 | 38104 | 38105 | 250 | PRO452 |

### Pooled LSR Screening

### Clustering and Design

[0153] As shown in FIG. 5, starting from the 12,713 identified LSR proteins we selected 12,003 that contained each of a resolvase/invertase domain (PF00239), zinc ribbon domain (PF13408), and recombinase domain (PF07508) and clustered them based on ≥90% sequence identity across the three protein domains using the UCLUST algorithm (Edgar 2010). 159 large LSR clusters each containing at least 10 individual LSR proteins were retained for future analysis. These 159 clusters comprised 6,280 LSRs in total. The individual LSR that is closest in terms of genetic distance to all other individual LSRs within the same cluster (the centroid LSR) was selected as the cluster representative LSR for further screening. Table 2 depicts the representative LSR for each of the 159 clusters.

TABLE 2
Representative LSRs from LSR Clusters

| | | LSR | | | | | |
|---|---|---|---|---|---|---|---|
| System | | Protein | attP | attB | attD | attH | Cluster |
| ID: | LSR location | SEQ ID NO: | SEQ ID NO: | SEQ ID NO: | SEQ ID NO: | SEQ ID NO: | NO: |
| 6023 | SAMEA4426195.contig00019: 60060-61580 | 30111 | 30112 | 30113 | 30114 | 30115 | 1 |
| 11786 | SAMEA4559502.contig00002: 272767-274290 | 58926 | 58927 | 58928 | 58929 | 58930 | 2 |
| 2123 | SAMN02847255.contig00006: 127364-129007 | 10611 | 10612 | 10613 | 10614 | 10615 | 3 |
| 1548 | SAMEA4816500.contig00002: 535421-536779 | 7736 | 7737 | 7738 | 7739 | 7740 | 4 |
| 10695 | SAMN04497704.contig00023: 12393-13916 | 53471 | 53472 | 53473 | 53474 | 53475 | 5 |
| 6605 | SAMN04357335.contig00009: 180468-182090 | 33021 | 33022 | 33023 | 33024 | 33025 | 6 |
| 8039 | SAMEA4548080.contig00004: 197458-198978 | 40191 | 40192 | 40193 | 40194 | 40195 | 7 |
| 9840 | SAMEA1031511.contig00009: 3354-5123 | 49196 | 49197 | 49198 | 49199 | 49200 | 8 |
| 9156 | SAMEA1031428.contig00011: 70731-72380 | 45776 | 45777 | 45778 | 45779 | 45780 | 9 |
| 407 | SAMEA3916543.contig00008: 34962-36575 | 2031 | 2032 | 2033 | 2034 | 2035 | 10 |
| 1137 | SAMEA1026767.contig00005: 68407-69852 | 5681 | 5682 | 5683 | 5684 | 5685 | 11 |
| 7247 | CP031643.1: 3713651-3715198 | 36231 | 36232 | 36233 | 36234 | 36235 | 12 |
| 8890 | ABAB01000021.1: 9995-11602 | 44446 | 44447 | 44448 | 44449 | 44450 | 13 |
| 6969 | SAMEA4560321.contig00018: 78514-80079 | 34841 | 34842 | 34843 | 34844 | 34845 | 14 |
| 9998 | SAMEA2053924.contig00007: 72430-74199 | 49986 | 49987 | 49988 | 49989 | 49990 | 15 |
| 1982 | LT969517.1: 1729777-1731399 | 9906 | 9907 | 9908 | 9909 | 9910 | 16 |
| 8471 | SAMEA102223918.contig00007: 26330-27757 | 42351 | 42352 | 42353 | 42354 | 42355 | 17 |
| 10474 | SAMN03197368.contig00004: 83225-84601 | 52366 | 52367 | 52368 | 52369 | 52370 | 18 |
| 379 | SAMN07159041.contig00003: 161292-162821 | 1891 | 1892 | 1893 | 1894 | 1895 | 19 |
| 9245 | AVHW01000071.1: 1586-3184 | 46221 | 46222 | 46223 | 46224 | 46225 | 20 |
| 12340 | SAMN09062737.contig00010: 80709-82280 | 61696 | 61697 | 61698 | 61699 | 61700 | 21 |
| 10432 | SAMN08922688.contig00004: 147964-149580 | 52156 | 52157 | 52158 | 52159 | 52160 | 22 |
| 3941 | SAMEA1034821.contig00012: 10790-12544 | 19701 | 19702 | 19703 | 19704 | 19705 | 23 |
| 4183 | SAMEA882193.contig00023: 13310-15157 | 20911 | 20912 | 20913 | 20914 | 20915 | 24 |
| 8653 | CP021422.1: 1211528-1213039 | 43261 | 43262 | 43263 | 43264 | 43265 | 25 |
| 2512 | SAMEA1564953.contig00005: 111328-112821 | 12556 | 12557 | 12558 | 12559 | 12560 | 26 |
| 1279 | SAMEA4061524.contig00047: 12618-14162 | 6391 | 6392 | 6393 | 6394 | 6395 | 27 |
| 4096 | LEER01000007.1: 162255-164171 | 20476 | 20477 | 20478 | 20479 | 20480 | 28 |
| 2495 | SAMEA3539452.contig00050: 9635-11257 | 12471 | 12472 | 12473 | 12474 | 12475 | 29 |
| 8444 | CP062497.1: 2600356-2601858 | 42216 | 42217 | 42218 | 42219 | 42220 | 30 |
| 2493 | SAMN02923806.contig00001: 246631-248457 | 12461 | 12462 | 12463 | 12464 | 12465 | 31 |
| 2204 | SAMEA3484564.contig00031: 12997-14862 | 11016 | 11017 | 11018 | 11019 | 11020 | 32 |
| 12219 | JAKNFY010000003.1: 230362-232218 | 61091 | 61092 | 61093 | 61094 | 61095 | 33 |
| 11980 | CAAGXG010000001.1: 937537-939300 | 59896 | 59897 | 59898 | 59899 | 59900 | 34 |
| 11265 | SAMEA103957246.contig00028: 13053-14663 | 56321 | 56322 | 56323 | 56324 | 56325 | 35 |
| 4213 | SAMEA103956214.contig00005: 128521-129966 | 21061 | 21062 | 21063 | 21064 | 21065 | 36 |
| 3024 | SAMD00009255.contig00005: 57581-59329 | 15116 | 15117 | 15118 | 15119 | 15120 | 37 |
| 5352 | SAMN08217911.contig00001: 500299-501714 | 26756 | 26757 | 26758 | 26759 | 26760 | 38 |
| 9064 | SAMN07659369.contig00012: 22375-24018 | 45316 | 45317 | 45318 | 45319 | 45320 | 39 |
| 12188 | SAMEA2056598.contig00009: 93335-94966 | 60936 | 60937 | 60938 | 60939 | 60940 | 40 |
| 11319 | SAMN02368459.contig00005: 42399-44366 | 56591 | 56592 | 56593 | 56594 | 56595 | 41 |
| 4421 | NAMP01000009.1: 271120-272949 | 22101 | 22102 | 22103 | 22104 | 22105 | 42 |
| 5387 | SAMEA3918403.contig00015: 32190-33752 | 26931 | 26932 | 26933 | 26934 | 26935 | 43 |
| 1465 | SAMN07155085.contig00017: 89966-91873 | 7321 | 7322 | 7323 | 7324 | 7325 | 44 |
| 1741 | SAMN06242082.contig00007: 156247-157722 | 8701 | 8702 | 8703 | 8704 | 8705 | 45 |
| 4031 | SAMEA3725544.contig00004: 79048-80670 | 20151 | 20152 | 20153 | 20154 | 20155 | 46 |
| 7810 | VYRD01000012.1: 141992-143485 | 39046 | 39047 | 39048 | 39049 | 39050 | 47 |
| 16 | SAMN07609731.contig00003: 28206-29882 | 76 | 77 | 78 | 79 | 80 | 48 |
| 4350 | SAMEA1919981.contig00001: 335197-336807 | 21746 | 21747 | 21748 | 21749 | 21750 | 49 |
| 3686 | SAMEA2040565.contig00003: 150-1589 | 18426 | 18427 | 18428 | 18429 | 18430 | 50 |
| 9395 | SAMEA2152096.contig00001: 82745-84373 | 46971 | 46972 | 46973 | 46974 | 46975 | 51 |
| 8012 | PNGL01000005.1: 218135-219571 | 40056 | 40057 | 40058 | 40059 | 40060 | 52 |
| 7146 | DS264285.1: 93661-95229 | 35726 | 35727 | 35728 | 35729 | 35730 | 53 |
| 1374 | SAMN08611390.contig00005: 113315-114871 | 6866 | 6867 | 6868 | 6869 | 6870 | 54 |
| 5286 | SAMEA3649730.contig00009: 34792-36417 | 26426 | 26427 | 26428 | 26429 | 26430 | 55 |
| 7380 | SAMEA3545329.contig00002: 40880-42541 | 36896 | 36897 | 36898 | 36899 | 36900 | 56 |
| 4056 | SAMEA69785668.contig00016: 50768-52345 | 20276 | 20277 | 20278 | 20279 | 20280 | 57 |
| 2101 | SAMEA1929523.contig00004: 163348-164733 | 10501 | 10502 | 10503 | 10504 | 10505 | 58 |
| 1122 | SAMEA2147867.contig00004: 1527-2939 | 5606 | 5607 | 5608 | 5609 | 5610 | 59 |
| 5743 | SAMN00691192.contig00011: 29686-31557 | 28711 | 28712 | 28713 | 28714 | 28715 | 60 |
| 8180 | VYVP01000025.1: 13412-15268 | 40896 | 40897 | 40898 | 40899 | 40900 | 61 |
| 9644 | CP053228.1: 5466927-5468669 | 48216 | 48217 | 48218 | 48219 | 48220 | 62 |
| 11016 | JAJBMY010000003.1: 112134-113783 | 55076 | 55077 | 55078 | 55079 | 55080 | 63 |
| 2190 | SAMEA4668412.contig00012: 26697-28496 | 10946 | 10947 | 10948 | 10949 | 10950 | 64 |
| 1511 | JAHLER010000006.1: 77201-78814 | 7551 | 7552 | 7553 | 7554 | 7555 | 65 |
| 11067 | JH992940.1: 172124-174154 | 55331 | 55332 | 55333 | 55334 | 55335 | 66 |
| 3449 | MCYX01000233.1: 17710-19281 | 17241 | 17242 | 17243 | 17244 | 17245 | 67 |
| 9646 | SAMN09980281.contig00004: 163373-164974 | 48226 | 48227 | 48228 | 48229 | 48230 | 68 |
| 5822 | SAMN06032688.contig00003: 203296-204942 | 29106 | 29107 | 29108 | 29109 | 29110 | 69 |
| 10869 | SAMN02363658.contig00001: 42204-43802 | 54341 | 54342 | 54343 | 54344 | 54345 | 70 |
| 11379 | JADNIM010000003.1: 38932-40590 | 56891 | 56892 | 56893 | 56894 | 56895 | 71 |
| 825 | QSVA01000008.1: 113741-115417 | 4121 | 4122 | 4123 | 4124 | 4125 | 72 |
| 4178 | SAMEA3572810.contig00007: 86149-87768 | 20886 | 20887 | 20888 | 20889 | 20890 | 73 |
| 11657 | SAMN08815326.contig00001: 429809-431185 | 58281 | 58282 | 58283 | 58284 | 58285 | 74 |
| 4341 | NUYS01000003.1: 6115-7488 | 21701 | 21702 | 21703 | 21704 | 21705 | 75 |
| 1494 | SAMEA3206487.contig00004: 184507-185949 | 7466 | 7467 | 7468 | 7469 | 7470 | 76 |
| 3021 | SAMEA3893659.contig00001: 85323-86831 | 15101 | 15102 | 15103 | 15104 | 15105 | 77 |
| 4674 | SAMEA2155293.contig00001: 623439-624914 | 23366 | 23367 | 23368 | 23369 | 23370 | 78 |
| 247 | SAMN07640820.contig00185: 192-2276 | 1231 | 1232 | 1233 | 1234 | 1235 | 79 |
| 3619 | CP066055.1: 203354-204886 | 18091 | 18092 | 18093 | 18094 | 18095 | 80 |
| 4477 | SAMEA103985801.contig00002: 117200-118897 | 22381 | 22382 | 22383 | 22384 | 22385 | 81 |
| 11492 | QVMC01000014.1: 27088-28758 | 57456 | 57457 | 57458 | 57459 | 57460 | 82 |
| 1433 | LZZO01000031.1: 239095-240519 | 7161 | 7162 | 7163 | 7164 | 7165 | 83 |
| 3415 | SAMN07974935.contig00001: 955948-957624 | 17071 | 17072 | 17073 | 17074 | 17075 | 84 |
| 8214 | JADNKD010000015.1: 58134-59807 | 41066 | 41067 | 41068 | 41069 | 41070 | 85 |
| 1390 | SAMD00010696.contig00004: 222324-224033 | 6946 | 6947 | 6948 | 6949 | 6950 | 86 |
| 6847 | SAMEA29984668.contig00007: 3876-5468 | 34231 | 34232 | 34233 | 34234 | 34235 | 87 |
| 6892 | SAMEA1034577.contig00028: 17682-19277 | 34456 | 34457 | 34458 | 34459 | 34460 | 88 |
| 2335 | SAMEA30012418.contig00001: 93358-95229 | 11671 | 11672 | 11673 | 11674 | 11675 | 89 |
| 11399 | JAGDJM010000001.1: 989306-990943 | 56991 | 56992 | 56993 | 56994 | 56995 | 90 |
| 7515 | SAMEA104076892.contig00004: 414361-416295 | 37571 | 37572 | 37573 | 37574 | 37575 | 91 |
| 2873 | SAMEA3512032.contig00006: 226692-228626 | 14361 | 14362 | 14363 | 14364 | 14365 | 92 |
| 8238 | JAEHJY010000005.1: 636416-637939 | 41186 | 41187 | 41188 | 41189 | 41190 | 93 |
| 9090 | SAMN09758972.contig00023: 19764-21332 | 45446 | 45447 | 45448 | 45449 | 45450 | 94 |
| 10874 | SAMN07658784.contig00014: 50878-52341 | 54366 | 54367 | 54368 | 54369 | 54370 | 95 |
| 8823 | LRFT01000008.1: 299384-301111 | 44111 | 44112 | 44113 | 44114 | 44115 | 96 |
| 2756 | SAMEA2273751.contig00021: 4220-6019 | 13776 | 13777 | 13778 | 13779 | 13780 | 97 |
| 3103 | SAMN09655750.contig00001: 23615-24967 | 15511 | 15512 | 15513 | 15514 | 15515 | 98 |
| 411 | SAMN09384874.contig00003: 69752-71404 | 2051 | 2052 | 2053 | 2054 | 2055 | 99 |
| 56 | JADNBE010000007.1: 26250-27977 | 276 | 277 | 278 | 279 | 280 | 100 |
| 5624 | SAMN07659792.contig00007: 108119-109519 | 28116 | 28117 | 28118 | 28119 | 28120 | 101 |
| 10493 | SAMN07135203.contig00014: 76689-78440 | 52461 | 52462 | 52463 | 52464 | 52465 | 102 |
| 4226 | SAMN09849028.contig00001: 144792-146207 | 21126 | 21127 | 21128 | 21129 | 21130 | 103 |
| 239 | SAMN09769763.contig00015: 28882-30276 | 1191 | 1192 | 1193 | 1194 | 1195 | 104 |
| 7584 | JAAQZA010000003.1: 291159-292913 | 37916 | 37917 | 37918 | 37919 | 37920 | 105 |
| 5383 | CP071739.1: 1336980-1338500 | 26911 | 26912 | 26913 | 26914 | 26915 | 106 |
| 3807 | JAJQFN010000527.1: 808-2259 | 19031 | 19032 | 19033 | 19034 | 19035 | 107 |
| 10421 | CP056148.1: 3947717-3949513 | 52101 | 52102 | 52103 | 52104 | 52105 | 108 |
| 4679 | CZAL01000004.1: 68838-70718 | 23391 | 23392 | 23393 | 23394 | 23395 | 109 |
| 10878 | SAMEA4470192.contig00005: 237352-239097 | 54386 | 54387 | 54388 | 54389 | 54390 | 110 |
| 7017 | CP045814.1: 2354008-2355576 | 35081 | 35082 | 35083 | 35084 | 35085 | 111 |
| 3786 | CP010106.1: 2351151-2352614 | 18926 | 18927 | 18928 | 18929 | 18930 | 112 |
| 2725 | FKZR01000004.1: 346065-347810 | 13621 | 13622 | 13623 | 13624 | 13625 | 113 |
| 29 | JAHOHS010000041.1: 18214-19956 | 141 | 142 | 143 | 144 | 145 | 114 |
| 790 | SAMN09671422.contig00009: 36535-38268 | 3946 | 3947 | 3948 | 3949 | 3950 | 115 |
| 763 | SAMN05444063.contig00002: 400236-401840 | 3811 | 3812 | 3813 | 3814 | 3815 | 116 |
| 2047 | SAMEA4550069.contig00003: 99226-100683 | 10231 | 10232 | 10233 | 10234 | 10235 | 117 |
| 9417 | BBDT01000003.1: 22618-24234 | 47081 | 47082 | 47083 | 47084 | 47085 | 118 |
| 3526 | JTES01000002.1: 318539-320254 | 17626 | 17627 | 17628 | 17629 | 17630 | 119 |
| 9701 | JAJBNY010000010.1: 80455-82032 | 48501 | 48502 | 48503 | 48504 | 48505 | 120 |
| 3469 | JAUE01000036.1: 18751-20418 | 17341 | 17342 | 17343 | 17344 | 17345 | 121 |
| 4295 | SAMN02693865.contig00009: 18041-19795 | 21471 | 21472 | 21473 | 21474 | 21475 | 122 |
| 3092 | SIYA01000011.1: 72929-74530 | 15456 | 15457 | 15458 | 15459 | 15460 | 123 |
| 4304 | SAMEA4427736.contig00005: 191907-193790 | 21516 | 21517 | 21518 | 21519 | 21520 | 124 |
| 2523 | SAMN02923848.contig00002: 177553-179199 | 12611 | 12612 | 12613 | 12614 | 12615 | 125 |
| 2521 | SAMN09384789.contig00001: 117383-119221 | 12601 | 12602 | 12603 | 12604 | 12605 | 126 |
| 2497 | SAMN07659527.contig00014: 98872-100659 | 12481 | 12482 | 12483 | 12484 | 12485 | 127 |
| 8 | SAMEA2266828.contig00014: 199-1962 | 36 | 37 | 38 | 39 | 40 | 128 |
| 9695 | JAFFRR010000020.1: 109299-110684 | 48471 | 48472 | 48473 | 48474 | 48475 | 129 |
| 7033 | SAMN02934513.contig00004: 266274-268163 | 35161 | 35162 | 35163 | 35164 | 35165 | 130 |
| 4195 | SAMN06187708.contig00002: 307109-308617 | 20971 | 20972 | 20973 | 20974 | 20975 | 131 |
| 937 | SAMN07661511.contig00025: 11621-13285 | 4681 | 4682 | 4683 | 4684 | 4685 | 132 |
| 130 | CP017112.1: 2244961-2246535 | 646 | 647 | 648 | 649 | 650 | 133 |
| 2565 | JAFHCM010000008.1: 66093-67844 | 12821 | 12822 | 12823 | 12824 | 12825 | 134 |
| 9949 | QDER01000003.1: 3046-4452 | 49741 | 49742 | 49743 | 49744 | 49745 | 135 |
| 10362 | SAMN07534973.contig00001: 114744-116135 | 51806 | 51807 | 51808 | 51809 | 51810 | 136 |
| 7769 | SAMEA3473579.contig00002: 659699-661366 | 38841 | 38842 | 38843 | 38844 | 38845 | 137 |
| 396 | CP071326.1: 205471-207492 | 1976 | 1977 | 1978 | 1979 | 1980 | 138 |
| 8354 | SAMN06299513.contig00003: 467425-469221 | 41766 | 41767 | 41768 | 41769 | 41770 | 139 |
| 11676 | SAMN07609274.contig00016: 21590-23158 | 58376 | 58377 | 58378 | 58379 | 58380 | 140 |
| 10895 | SAMEA3866237.contig00006: 64775-66142 | 54471 | 54472 | 54473 | 54474 | 54475 | 141 |
| 12706 | SAMD00002831.contig00017: 75582-77144 | 63526 | 63527 | 63528 | 63529 | 63530 | 142 |
| 12097 | SAMN05710316.contig00033: 50360-52027 | 60481 | 60482 | 60483 | 60484 | 60485 | 143 |
| 5955 | SAMN02356610.contig00006: 156412-157920 | 29771 | 29772 | 29773 | 29774 | 29775 | 144 |
| 49 | SAMN04376559.contig00001: 34912-36546 | 241 | 242 | 243 | 244 | 245 | 145 |
| 2671 | SAMEA1530134.contig00001: 83143-84810 | 13351 | 13352 | 13353 | 13354 | 13355 | 146 |
| 9726 | SAMEA2247577.contig00011: 149643-151286 | 48626 | 48627 | 48628 | 48629 | 48630 | 147 |
| 4256 | SAMN04123844.contig00002: 201133-202839 | 21276 | 21277 | 21278 | 21279 | 21280 | 148 |
| 11735 | NFHM01000012.1: 72850-74532 | 58671 | 58672 | 58673 | 58674 | 58675 | 149 |
| 5426 | NFHY01000001.1: 135829-137451 | 27126 | 27127 | 27128 | 27129 | 27130 | 150 |
| 1159 | CP026362.1: 1564096-1565772 | 5791 | 5792 | 5793 | 5794 | 5795 | 151 |
| 7398 | SAMEA2710612.contig00004: 131882-133273 | 36986 | 36987 | 36988 | 36989 | 36990 | 152 |
| 5984 | SAMEA1566194.contig00005: 10675-12114 | 29916 | 29917 | 29918 | 29919 | 29920 | 153 |
| 3397 | JADMOI010000001.1: 158941-160779 | 16981 | 16982 | 16983 | 16984 | 16985 | 154 |
| 7963 | SAMEA3357052.contig00010: 63403-65097 | 39811 | 39812 | 39813 | 39814 | 39815 | 155 |
| 1310 | PSNF01000030.1: 58968-60821 | 6546 | 6547 | 6548 | 6549 | 6550 | 156 |
| 7360 | SAMN05294119.contig00004: 257440-259095 | 36796 | 36797 | 36798 | 36799 | 36800 | 157 |
| 577 | QYTJ01000020.1: 90589-92004 | 2881 | 2882 | 2883 | 2884 | 2885 | 158 |
| 5782 | SAMEA2205381.contig00006: 31023-32804 | 28906 | 28907 | 28908 | 28909 | 28910 | 159 |

[0154] For each cluster, the corresponding attB sequences of each LSR protein were aligned to infer specificity of each LSR cluster's targeting sites (higher attB sequence identity indicates that the landing sites are likely to be more specific). Based on the inferred specificity score, the 159 LSR clusters were grouped into one of two categories: “putative multi-targeting LSRs” or “putative specific LSRs”. To prepare an attD sequence of each LSR for the screening, the center dinucleotides of the original attP sequence were modified to ensure 1) the dinucleotides are in not in palindromic pattern (AT, TA, CG, or GC); and 2) each attD sequence had a minimum number of mismatches against the human reference genome (hg38).

### Synthesis and Cloning

[0155] AttD-LSR fragments were synthesized by Twist Biosciences with homology arms for gibson assembly. The fragments were validated by Oxford Nanopore Long-Read sequencing and pooled into specific and multi-targeting LSR pools based on attB-consensus within the cluster. These fragments were inserted into a backbone downstream of a CMV promoter, with a 3′ Nuclear Localization Sequence (NLS) for nuclear targeting of proteins to target the genome i/? cellulo, and with a Puromycin resistance gene, using NEBuilder® HiFi DNA Assembly Master Mix (M5520A VIAL). Resulting plasmids were then transformed into NEB® Stable Competent E. coli (High Efficiency) (C3040IVIAL) to generate two libraries (one including the specific LSR pool and the other including the multi-targeting LSR pool). Both libraries had a coverage of 56,470× calculated via colony counts of serial dilution onto agar-carbenicillin plates.

[0156] AttA Recombination plasmids were cloned from oligo pools generated by Twist Biosciences using NEBridge® Golden Gate Enzyme Mix (BsmBI-v2) (M2617AAVIAL). The library coverage was determined to be 1,294× as described above. The libraries were sequenced via Oxford Nanopore Long read sequencing to validate unbiased cloning and representation of all LSRs within the pool.

### Plasmid Recombination Assay

[0157] The same protocol as described above for the individual LSR screening was also used with the pooled LSR libraries, but an Illumina sequencing NGS readout was used to determine which barcodes recombined (illustrated in FIG. 6A), based on counts within the amplicons. These were normalized to the starting % of reads of each LSR and attA plasmid in the library and compared to a Bxb1 positive control.

### Genomic Integration Assay

[0158] HEK-293T cells were transfected with a multi-targeting or specific LSR library as described above. Cells were selected with 1 μg/mL of Puromycin to enrich cells that had plasmid integration. Selection began at day 2 and continued until day 18 post-transfection. Genomic DNA was isolated from the Puromycin positive cells and genomic integration was determined via sequencing of barcodes (illustrated in FIGS. 7A and 7B).

### ILL-seq

[0159] For Illumina amplicon sequencing, two rounds of amplification were performed: round 1 PCR was performed in a 12 μL reaction volume, comprising 6 μL of NEBNext® Ultra™ II Q5® Master Mix (New England Biolabs), 0.25 μM forward and reverse primer, and 20 ng of gDNA template. PCR conditions were as follows: 30 seconds at 98° C. for initial denaturation, followed by 20 cycles of 10 seconds at 98ºC for denaturation, 15 seconds at 60ºC for annealing, 30 seconds at 72ºC for extension, and 5 minutes at 72ºC for the final extension. Round 2 PCR was performed in a 12 μl reaction volume, consisting of 6 μL of NEBNext® Ultra™ II Q5® Master Mix (New England Biolabs), 1 μM forward and reverse primers, and 4 μl of PCR Round 1 product. PCR conditions were as follows: 30 seconds at 98° C. for initial denaturation, followed by 14 cycles of 10 seconds at 98ºC for denaturation, 15 seconds at 60ºC for annealing, 30 seconds at 72ºC for extension, and 5 minutes at 72° C. for the final extension. The PCR reactions that were to be combined into a sequencing library were pooled and purified using AMPure XP beads (Beckman Coulter) as per the manufacturer's protocol. Purified products were size selected in the 300 to 1200 base pair range using a BluePippin (Sage Science) and re-purified with AMPure XP beads (Beckman Coulter). 8-10 pmol of sequencing library were analyzed via MiSeq Reagent Kit v3 with 10-15% PhiX Control v3 (Illumina) to obtain 2×300 cycle reads. Source code and data analytical methods are as described in Maeder et al., 2019 Nature Medicine 25:229-233.

### UDiTaS

[0160] For measuring genomic integration, sequencing libraries were prepared using the UDiTaS protocol according to the publication Giannoukos et al., 2018 with some minor modifications. Briefly, 50 ng gDNA was used as input into the tagmentation reaction; 4 μL nuclease free water, 2 μL 1 mg/mL transposome (Tn5 complexed with custom barcoded oligo), 4 μL 5× TAPS-DMF buffer and 10 μL DNA (10 ng/μL), which was incubated at 55° C. for 7 minutes and placed on ice. To inactivate the transposase, 1 μL of Proteinase K (NEB, P8107S) was added to each tagmented reaction, mixed well and placed on the thermal cycler (37° C. for 1 hour, 95° C. 10 minutes and 4° C. hold) followed by AMPure XP (1×) clean up according to the manufacturer's protocol. Round 1 PCR volume was increased to 50 μL final volume: 25 μL 2× Platinum SuperFi Master mix (12358-010, ThermoFisher Scientific), 3 μL 0.5 M Tetramethylammonium chloride (TMAC; T3411, Sigma-Aldrich), 1.25 μL 10 μM P5 primer, 0.375 μL 100 μM assay specific primer and 20.5 μL tagmented DNA. Round 1 PCR conditions were as follows: 98° C. for 2 minutes followed by 15 cycles of 98° C. for 10 seconds, 65° C. for 10 seconds, and 72ºC for 90 seconds and a final extension of 72ºC for 5 minutes. Round 1 PCR products were cleaned up with Ampure XP (0.9×) according to the manufacturer's protocol and eluted in 15 μL nuclease free water directly into the round 2 PCR mix: 25 μL 2× Platinum SuperFi Master mix (12358-010, ThermoFisher Scientific), 2.5 μL 10 μM P5 primer, 7.5 μL 10 μM UDiTaS Round 2 P7_bc_SBS12 primer. Round 2 PCR conditions were as follows: 98° C. for 2 minutes followed by 15 cycles of 98° C. for 10 seconds, 65° C. for 10 seconds, and 72° ° C. for 90 seconds and a final extension of 72ºC for 5 minutes. Round 2 products were cleaned up with Ampure XP (0.9×) according to the manufacturer's protocol and run on the Agilent Tapestation 4200 using the D5000 tapes for quantification and sizing of the products to calculate nM for pooling. AMPure XP clean-up was increased to 1.2× reaction volume after pooling and to 1.5× reaction volume after size selection on BluePippin (400-850 bp). Library quantification was performed using Qubit dsDNA HS assay to determine concentration (ng/μL) (Q32851: ThermoFisher Scientific) and Agilent Bioanalyzer High Sensitivity DNA Kit (5067-4626: Agilent) for size (bp) in order to calculate the nM. The sequencing library (9 pM) was loaded into an Illumina MiSeq Reagent kit v3 containing 4.2% 20 pM PhiX Control v3 (Illumina #FC-110-3001) to obtain 2×300 cycle reads and index reads (8 and 18 bp).

### Analysis

[0161] For Illumina sequencing analysis of plasmid recombination, the reads from each LSR plasmid were identified and classified by searching the concatenated sequence of corresponding 10-bp barcode plus the first 20-bp of attD (>=90% sequence identity). Then, the attR sequence of each LSR was generated by concatenating the attD left half-site and the attA right half-site. The number of reads that contained the attR sequence (>=90% sequence identity) indicated the expected recombined plasmid and was counted for each LSR group.

[0162] For UDiTaS sequencing analysis of human genome integration, sequencing read pairs generated using the UDiTas protocol were first aligned to a representative LSR plasmid sequence (LSR plasmid for cluster 1), and then aligned to human reference genome (hg38) using Bowtie2 aligner (Langmead and Salzberg, 2002). The integrations to human genome were detected by searching the read-pairs, with R1 reads being aligned to human reference genome and R2 reads being partially aligned to the LSR plasmid sequence and human reference genome. The 10-bp barcode sequences in the R2 reads were used to differentiate LSRs. The exact positions of cut sites in the plasmid sequence and the integration sites in the human genome were determined based on the coordinates of R2 read alignments to the human genome. Finally, the reads with the same Unique Molecular Identifiers (UMI) were collapsed to remove duplicated reads due to PCR amplification. The results from these analyses are summarized in Table 4.

TABLE 4
LSR Functional Annotations

| | | | dis- | | |
|---|---|---|---|---|---|
| | | | tance_ | | |
| | | | to_ | | |
| | | | expec- | umi_ | |
| lsr_ | | umi_ | ted_ | frac- | functional_ |
| cluster | landing_site | count | cut | tion | annotation |
| PRO426 | chr1: | 368 | 6 | 21.67 | exon 2 of the |
| | 15835976 | | | | lncRNA |
| | | | | | AL450998.2 |
| | | | | | ENST00000317122) |
| PRO426 | chr4: | 197 | 0 | 11.6 | intron 3 of the gene |
| | 36049472 | | | | ARAP2 |
| | | | | | (ENST00000503225) |
| | | | | | and is 2533-bp from |
| | | | | | exon 4 |
| PRO426 | chr3: | 124 | 0 | 7.3 | intron 11 of the gene |
| | 4717822 | | | | ITPR1 |
| | | | | | (ENST00000648016) |
| | | | | | and is 422-bp |
| | | | | | from exon |
| | | | | | 11 |
| PRO426 | chr7: | 86 | 0 | 5.06 | intergenic region |
| | 135538107 | | | | and is 19810-bp |
| | | | | | from the gene |
| | | | | | NUP205 |
| | | | | | (ENST00000285968) |
| c11 | chr4: | 30 | 5 | 41.67 | intron 1 of |
| | 136332691 | | | | the lncRNA |
| | | | | | AC018680.1 |
| | | | | | (ENST00000500324) |
| | | | | | and is 62459-bp from |
| | | | | | exon 2 |
| c11 | chr7: | 26 | 5 | 36.11 | intergenic region |
| | 17948577 | | | | and is 5655-bp |
| | | | | | from the TEC |
| | | | | | gene AC080080.1 |
| | | | | | (ENST00000625121) |
| c11 | chr7: | 12 | 5 | 16.67 | intron 2 of |
| | 25395275 | | | | the lncRNA |
| | | | | | AC005100.1 |
| | | | | | (ENST00000668357) |
| | | | | | and is 2211-bp from |
| | | | | | exon 3 |
| c6 | chrX: | 44 | 12 | 97.78 | intron 1 of the gene |
| | 86717740 | | | | DACH2 |
| | | | | | (ENST00000484479) |
| | | | | | and is 3019-bp from |
| | | | | | exon 1 |
| c16 | chr4: | 74 | 3 | 54.01 | intergenic |
| | 39400428 | | | | region and is |
| | | | | | 1180-bp from the |
| | | | | | snRNA RNU6 |
| | | | | | (ENST00000410660) |
| c16 | chr8: | 52 | 1 | 37.96 | intergenic |
| | 48523362 | | | | region and is |
| | | | | | 5205-bp from the |
| | | | | | lncRNA AC026904.1 |
| | | | | | (ENST00000665034) |
| c16 | chrX: | 11 | 3 | 8.03 | intergenic |
| | 149757546 | | | | region and is |
| | | | | | 251-bp from the |
| | | | | | pseudogene |
| | | | | | AC244098.2 |
| | | | | | (ENST00000422068) |
| c18 | chr13: | 31 | 5 | 96.88 | intron 2 of the gene |
| | 66866243 | | | | PCDH9 |
| | | | | | (ENST00000544246) |
| | | | | | and is 234831-bp |
| | | | | | from |
| | | | | | exon 2 |
| c19 | chr7: | 64 | 2 | 25 | intergenic |
| | 25862013 | | | | region and is |
| | | | | | 30104-bp from the |
| | | | | | lncRNA AC018706.1 |
| | | | | | (ENST00000666265) |
| c19 | chr8: | 28 | 6 | 10.94 | intron 1 of the gene |
| | 106661826 | | | | OXR1 |
| | | | | | (ENST00000497705) |
| | | | | | and is 17383-bp from |
| | | | | | exon 2 |
| c19 | chr13: | 25 | 0 | 9.77 | intron 1 of |
| | 62721865 | | | | the lncRNA |
| | | | | | LINC00448 |
| | | | | | (ENST00000448411) |
| | | | | | and is 10228-bp from |
| | | | | | exon 2 |
| c19 | chr18: | 25 | 0 | 9.77 | intergenic region and |
| | 78725856 | | | | there are no genes |
| | | | | | within 50 kB |
| c19 | chr1: | 22 | 0 | 8.59 | intergenic |
| | 180592222 | | | | region and is |
| | | | | | 25702-bp from the |
| | | | | | lncRNA OVAAL |
| | | | | | (ENST00000648175) |
| c19 | chr2: | 18 | 2 | 7.03 | intron 12 of the |
| | 88796321 | | | | pseudogene |
| | | | | | ANKRD36BP2 |
| | | | | | (ENST00000393515) |
| | | | | | and is 3826-bp from |
| | | | | | exon 12 |
| c19 | chr3: | 15 | 1 | 5.86 | intergenic region |
| | 160642025 | | | | and is 35135-bp |
| | | | | | from the gene |
| | | | | | ARL 14 |
| | | | | | (ENST00000320767) |
| c19 | chr4: | 13 | 0 | 5.08 | intron 1 of the gene |
| | 127965441 | | | | MFSD8 |
| | | | | | (ENST00000641447) |
| | | | | | and is 218-bp |
| | | | | | from exon 1 |
| c27 | chr8: | 18 | 1 | 58.06 | intron 2 of |
| | 59614252 | | | | the lncRNA |
| | | | | | AC087664.2 |
| | | | | | (ENST00000653946) |
| | | | | | and is 1362-bp from |
| | | | | | exon 2 |
| c27 | chrX: | 13 | 8 | 41.94 | intergenic |
| | 103553615 | | | | region and is |
| | | | | | 10302-bp from the |
| | | | | | lncRNA AL021308.1 |
| | | | | | (ENST00000655887) |
| c75 | chr17: | 44 | 2 | 95.65 | intron 10 of the gene |
| | 41955533 | | | | TTC25 |
| | | | | | (ENST00000377540) |
| | | | | | and is 215-bp |
| | | | | | from exon 10 |
| c76 | chr13: | 55 | 11 | 100 | intergenic |
| | 63797320 | | | | region and is |
| | | | | | 13416-bp from the |
| | | | | | snRNA RNU6 |
| | | | | | (ENST00000365608) |
| c77 | chr5: | 111 | 2 | 26.12 | intron 5 of the gene |
| | 26905860 | | | | CDH9 |
| | | | | | (ENST00000231021) |
| | | | | | and is 98-bp |
| | | | | | from exon 6 |
| c77 | chr1: | 71 | 1 | 16.71 | intergenic |
| | 227389055 | | | | region and is |
| | | | | | 4499-bp from the |
| | | | | | lncRNA LINC01641 |
| | | | | | (ENST00000660249) |
| c77 | chr2: | 28 | 0 | 6.59 | intron 1 of the gene |
| | 213638073 | | | | SPAG16 |
| | | | | | (ENST00000451561) |
| | | | | | and is 147982-bp |
| | | | | | from exon 1 |
| c77 | chr9: | 27 | 0 | 6.35 | intron 5 of the |
| | 82518940 | | | | pseudogene |
| | | | | | AL162726.3 |
| | | | | | (ENST00000586399) |
| | | | | | and is 1733-bp from |
| | | | | | exon 6 |
| c77 | chr1: | 22 | 4 | 5.18 | intron 1 of the gene |
| | 109396337 | | | | SORT1 |
| | | | | | (ENST00000256637) |
| | | | | | and is 1249-bp from |
| | | | | | exon 2 |
| c77 | chr17: | 22 | 0 | 5.18 | intron 1 of the gene |
| | 48206495 | | | | SKAP1 |
| | | | | | (ENST00000581400) |
| | | | | | and is 16994-bp from |
| | | | | | exon 1 |
| c84 | chr10: | 26 | 1 | 15.66 | intron 1 of the gene |
| | 15858956 | | | | MINDY3 |
| | | | | | (ENST00000277632) |
| | | | | | and is 1249-bp from |
| | | | | | exon 2 |
| c84 | chr1: | 22 | 0 | 13.25 | intron 1 of the gene |
| | 88687296 | | | | PKN2 |
| | | | | | (ENST00000316005) |
| | | | | | and is 2667-bp from |
| | | | | | exon 1 |
| c84 | chr10: | 19 | 1 | 11.45 | intergenic |
| | 132014516 | | | | region and is |
| | | | | | 14670-bp from |
| | | | | | the TEC |
| | | | | | gene AL162274.3 |
| | | | | | (ENST00000623138) |
| c84 | chr7: | 18 | 0 | 10.84 | intron 2 of the gene |
| | 114618539 | | | | FOXP2 |
| | | | | | (ENST00000360232) |
| | | | | | and is 10000-bp from |
| | | | | | exon 3 |
| c84 | chr2: | 16 | 1 | 9.64 | intron 1 of |
| | 212915149 | | | | the lncRNA |
| | | | | | AC093865.1 |
| | | | | | (ENST00000415387) |
| | | | | | and is 11705-bp |
| | | | | | from exon 1 |
| c84 | chr3: | 15 | 0 | 9.04 | intron 1 of the |
| | 168297568 | | | | pseudogene |
| | | | | | EGFEM1P |
| | | | | | (ENST00000502332) |
| | | | | | and is 11736-bp from |
| | | | | | exon 2 |
| c84 | chr13: | 13 | 0 | 7.83 | intron 1 of the gene |
| | 93280879 | | | | GPC6 |
| | | | | | (ENST00000377047) |
| | | | | | and is 53262-bp from |
| | | | | | exon 1 |
| c84 | chr12: | 11 | 0 | 6.63 | intron 1 of the gene |
| | 63918832 | | | | SRGAP1 |
| | | | | | (ENST00000355086) |
| | | | | | and is 65114-bp from |
| | | | | | exon 2 |
| c84 | chr3: | 11 | 0 | 6.63 | intergenic |
| | 114123046 | | | | region and is |
| | | | | | 5606-bp from the |
| | | | | | gene DRD3 |
| | | | | | (ENST00000460779) |
| c85 | chr4: | 138 | 15 | 99.28 | intron 1 of the gene |
| | 90847539 | | | | CCSER1 |
| | | | | | (ENST00000515693) |
| | | | | | and is 31693-bp from |
| | | | | | exon 1 |
| c93 | chr13: | 66 | 2 | 21.36 | intron 6 of the gene |
| | 71533910 | | | | DACH1 |
| | | | | | (ENST00000613252) |
| | | | | | and is 23113-bp from |
| | | | | | exon 7 |
| c93 | chr15: | 48 | 3 | 15.53 | intergenic |
| | 95944076 | | | | region and is |
| | | | | | 46506-bp from the |
| | | | | | lncRNA AC012409.2 |
| | | | | | (ENST00000619812) |
| c93 | chr7: | 38 | 0 | 12.3 | intron 4 of the gene |
| | 26750804 | | | | SKAP2 |
| | | | | | (ENST00000345317) |
| | | | | | and is 10839-bp from |
| | | | | | exon 4 |
| c93 | chr1: | 34 | 1 | 11 | intergenic |
| | 33458319 | | | | region and is |
| | | | | | 7930-bp from the |
| | | | | | pseudogene TLR12P |
| | | | | | (ENST00000413515) |
| c93 | chr21: | 18 | 2 | 5.83 | intron 1 of |
| | 16322103 | | | | the lncRNA |
| | | | | | MIR99AHG |
| | | | | | (ENST00000654997) |
| | | | | | and is 127469-bp |
| | | | | | from exon 1 |
| c93 | chr9: | 16 | 2 | 5.18 | intergenic |
| | 122906773 | | | | region and is |
| | | | | | 1283-bp from the |
| | | | | | gene ZBTB6 |
| | | | | | (ENST00000373659) |
| c93 | chr14: | 16 | 10 | 5.18 | intron 1 of |
| | 57077739 | | | | the lncRNA |
| | | | | | AL391152.1 |
| | | | | | (ENST00000551408) |
| | | | | | and is 10573-bp from |
| | | | | | exon 1 |
| c103 | chr5: | 54 | 0 | 61.36 | intron 1 of the |
| | 34187488 | | | | pseudogene |
| | | | | | AC138409.2 |
| | | | | | (ENST00000514048) |
| | | | | | and is 1983-bp from |
| | | | | | exon 2 |
| c103 | chr5: | 24 | 0 | 27.27 | intron 1 of the gene |
| | 66893032 | | | | MAST4 |
| | | | | | (ENST00000403666) |
| | | | | | and is 6918-bp from |
| | | | | | exon 2 |
| c104 | chr2: | 19 | 1 | 44.19 | intergenic region and |
| | 175681273 | | | | there are no genes |
| | | | | | within 50 kB |
| c104 | chr9: | 12 | 8 | 27.91 | intron 5 of the gene |
| | 9572566 | | | | PTPRD |
| | | | | | (ENST00000381196) |
| | | | | | and is 2165-bp from |
| | | | | | exon 6 |
| c104 | chr9: | 4 | 8 | 9.3 | intron 5 of the gene |
| | 9572573 | | | | PTPRD |
| | | | | | (ENST00000381196) |
| | | | | | and is 2158-bp from |
| | | | | | exon 6 |
| c104 | chr2: | 3 | 13 | 6.98 | intron 1 of the gene |
| | 212271439 | | | | ERBB4 |
| | | | | | (ENST00000260943) |
| | | | | | and is 146535-bp |
| | | | | | from exon 1 |
| c111 | chr10: | 41 | 5 | 56.16 | intron 1 of the gene |
| | 103183251 | | | | NT5C2 |
| | | | | | (ENST00000343289) |
| | | | | | and is 8268-bp from |
| | | | | | exon 1 |
| c111 | chr21: | 28 | 4 | 38.36 | intron 2 of the gene |
| | 33462603 | | | | IFNGR2 |
| | | | | | (ENST00000421802) |
| | | | | | and is 16194-bp from |
| | | | | | exon 3 |
| c111 | chr12: | 4 | 4 | 5.48 | intron 3 of the gene |
| | 4564682 | | | | DYRK4 |
| | | | | | (ENST00000539309) |
| | | | | | and is 183-bp from |
| | | | | | exon 3 |
| c112 | chrX: | 79 | 1 | 36.07 | intron 7 of the gene |
| | 23936860 | | | | CXorf58 |
| | | | | | (ENST00000379211) |
| | | | | | and is 1434-bp from |
| | | | | | exon 7 |
| c112 | chrX: | 33 | 2 | 15.07 | intron 7 of the gene |
| | 23936864 | | | | CXorf58 |
| | | | | | (ENST00000379211) |
| | | | | | and is 1438-bp from |
| | | | | | exon 7 |
| c112 | chr22: | 26 | 0 | 11.87 | intergenic region and |
| | 27624873 | | | | there are no genes |
| | | | | | within 50 kB |
| c112 | chr5: | 22 | 4 | 10.05 | intron 3 of the gene |
| | 93898542 | | | | FAM172A |
| | | | | | (ENST00000509739) |
| | | | | | and is 16853-bp from |
| | | | | | exon 3 |
| c112 | chr3: | 16 | 3 | 7.31 | intron 1 of the gene |
| | 168083868 | | | | GOLIM4 |
| | | | | | (ENST00000309027) |
| | | | | | and is 11230-bp from |
| | | | | | exon 2 |
| c136 | chr5: | 46 | 2 | 30.26 | intron 1 of |
| | 141210696 | | | | the lncRNA |
| | | | | | AC244517.11 |
| | | | | | (ENST00000624192) |
| | | | | | and is 30976-bp from |
| | | | | | exon 2 |
| c136 | chr8: | 42 | 2 | 27.63 | intron 1 of the gene |
| | 78582474 | | | | PKIA |
| | | | | | (ENST00000352966) |
| | | | | | and is 15883-bp from |
| | | | | | exon 2 |
| c136 | chr9: | 16 | 5 | 10.53 | intron 1 of the gene |
| | 1996360 | | | | SMARCA2 |
| | | | | | (ENST00000637383) |
| | | | | | and is 15973-bp from |
| | | | | | exon 1 |
| c136 | chr4: | 15 | 0 | 9.87 | intergenic |
| | 113870011 | | | | region and is |
| | | | | | 29775-bp from the |
| | | | | | pseudogene |
| | | | | | AC111193.1 |
| | | | | | (ENST00000504097) |
| c140 | chr2: | 77 | 15 | 53.85 | intron 8 of the gene |
| | 26938383 | | | | DPYSL5 |
| | | | | | (ENST00000288699) |
| | | | | | and is 1647-bp from |
| | | | | | exon 9 |
| c140 | chr7: | 28 | 2 | 19.58 | intergenic |
| | 27181341 | | | | region and is |
| | | | | | 169-bp from the gene |
| | | | | | HOXA11 |
| | | | | | (ENST00000517402) |
| c140 | chr11: | 9 | 0 | 6.29 | exon 1 of the |
| | 65422844 | | | | lncRNA NEAT1 |
| | | | | | (ENST00000499732) |
| c140 | chr14: | 8 | 0 | 5.59 | intergenic |
| | 62513194 | | | | region and is |
| | | | | | 1678-bp from the |
| | | | | | pseudogene |
| | | | | | AL389895.1 |
| | | | | | (ENST00000554127) |

### Results

[0163] Representative LSRs from each cluster described above (Table 2) were assayed in a pooled plasmid recombination assay (FIG. 6A). The LSRs were assayed in two separate pools, one pool corresponding to putative specific LSR clusters and the other to putative multi-targeting LSR clusters based on attB-consensus within the cluster. Results are shown in FIG. 6B. In FIG. 6B, LSRs from putative specific LSR clusters are shown in blue (clusters 3, 14, 2, 136, 112, 7, 93, 152, 148, 12, 19, 57, 27, 5, 1, 41, 103, 58, 21, 111, 49, 69, 137, 98, 155 and 6) and LSRs from putative multi-targeting LSR clusters are shown in red (clusters 82, 144, 51, 36, 118, 154, 99, 106, and 72). Positive control Bxb1 is shown as 160 in black. As depicted, many LSRs demonstrated efficient recombination. Representative LSRs from some clusters (e.g., clusters 3 and 14) demonstrated recombination levels that are 10-fold higher than Bxb1 control recombinase (FIG. 6B). Additionally, barcode reads and correct attR reads were highly correlated, thus confirming the orthogonality of the LSR clusters and accuracy of the target site prediction (FIG. 6C).

[0164] Representative LSRs from each cluster described above (Table 2) were also assayed in a pooled genomic integration assay (FIGS. 7A and 7B). As seen in FIG. 8A, the majority of the unique molecular identifiers (UMI) counts are observed at position 72 of next generation sequence (NGS) reads across two replicate experiments (FIG. 8A). This is consistent with LSR-mediated recombination at the central dinucleotide region of the attD sequence as a result of targeted integration rather than random plasmid integration. These results were observed for both the putative specific LSR cluster pool, and the putative multi-targeting LSR cluster pool, while the control samples lacking an LSR and attD site had no detectable targeted integration at position 72. Only reads with the expected cut site were analyzed. The integration events, as measured by UMI, were strongly correlated across the two replicate experiments (R²=0.9688, FIG. 8B).

[0165] Further results from the pooled genomic integration assay are shown in FIGS. 9A and 9B, which depicts UMI count (as a measure of recombination activity) and number of landing sites in the human genome (as a measure of specificity) for each LSR tested. As depicted, many LSRs show integration into the human genome. Particularly promising LSRs for single effector gene therapy are highlighted in the top, left shaded quadrant. These LSRs have high UMI counts (indication of recombination activity) with low counts of landing sites (indication of recombination specificity), showing efficient integration into less than 10 genomic loci (FIG. 9A). Using a regression analysis, representative LSRs from cluster 16 and 85 were identified as outliers that demonstrate efficient and specific integration in the human genome. Cluster 16 has 3 integration sites with over 50% at its top integration locus, and cluster 85 has 2 sites with over 99% at its top integration locus (FIG. 9B).

[0166] To examine LSR clusters in both the context of plasmid recombination and genomic integration, the plasmid recombination data was overlayed via heat map onto the genomic integration data (FIG. 10). Clusters 136 and 112 are highly efficient across both functional assays, respectively demonstrating twelve and fifteen integration loci with over 80% of integrations occurring across the top 5 integration sites (FIG. 10).

[0167] Further results from the pooled genomic integration assay are shown in FIG. 11 and Table 5, which show (for each cluster) the percent of UMI in the top 5 genomic integration sites (y-axis) and the total number of UMI (x-axis). This highlights clusters with specific targeting at fewer genomic sites. Select LSRs shown in red squares in FIG. 11 have a % of UMI in Top 5 sites>50 and a #total UMI>30. The integration sites of these clusters were interrogated and functionally annotated (Table 4). Of note, the integration sites for the clusters identified in previous analyses (clusters 16, 85, 112, and 136) are also described.

TABLE 5
UMI Top 5 Landing Sites

| lsr_cluster | total_umi_count | top5_umi_fraction |
|---|---|---|
| Dn29 | 60 | 86.67 |
| PRO418 | 1 | 100 |
| PRO426 | 1698 | 50.16 |
| PRO439 | 2 | 100 |
| Pa01 | 1 | 100 |
| c3 | 7 | 100 |
| c6 | 45 | 100 |
| c10 | 9 | 100 |
| c11 | 72 | 98.62 |
| c12 | 25 | 100 |
| c16 | 137 | 100 |
| c18 | 32 | 100 |
| c19 | 256 | 64.07 |
| c25 | 3215 | 26.87 |
| c27 | 31 | 100 |
| c29 | 7 | 100 |
| c33 | 1 | 100 |
| c36 | 13661 | 11.58 |
| c39 | 6 | 100 |
| c41 | 1 | 100 |
| c42 | 1535 | 33.29 |
| c45 | 4 | 100 |
| c46 | 23 | 100 |
| c49 | 1 | 100 |
| c51 | 1175 | 39.91 |
| c52 | 4 | 100 |
| c59 | 2 | 100 |
| c60 | 19 | 100 |
| c72 | 473 | 46.51 |
| c75 | 46 | 99.99 |
| c76 | 55 | 100 |
| c77 | 425 | 60.95 |
| c83 | 10 | 100 |
| c84 | 166 | 60.84 |
| c85 | 139 | 100 |
| c89 | 2 | 100 |
| c93 | 309 | 66.02 |
| c94 | 21 | 100 |
| c96 | 19 | 100 |
| c98 | 17 | 99.99 |
| c99 | 931 | 47.91 |
| c100 | 19 | 100 |
| c103 | 88 | 97.72 |
| c104 | 43 | 93.03 |
| c109 | 1 | 100 |
| c111 | 73 | 100 |
| c112 | 219 | 80.37 |
| c113 | 13 | 100 |
| c117 | 3 | 100 |
| c134 | 12 | 100 |
| c136 | 152 | 82.9 |
| c140 | 143 | 89.51 |
| c145 | 6 | 100 |
| c150 | 9 | 100 |
| c152 | 1 | 100 |
| c154 | 22 | 100.01 |
| c157 | 13 | 100 |
| c158 | 10 | 100 |
| c159 | 4 | 100 |

### REFERENCES

[0168] Alberts, B., Johnson, A., Lewis, J., et al. (2002). Site-Specific Recombination. Molecular Biology of the Cell. 4th edition.
[0169] Altschul SF, G. W. (1990). Basic local alignment search tool. Journal of Molecular Biology 215(3), 403.
[0170] Bai, H., Sun, M., Hatfull, G., Grindley, N., & Marko, J. (2011). Single-molecule analysis reveals the molecular bearing mechanism of DNA strand exchange by a serine recombinase. PNAS 108(18), 7419.
[0171] Edgar, R. C. (2010). Search and clustering orders of magnitude faster than BLAST. Bioinformatics 26(19), 2460.
[0172] Fennell, T., Zhang, D., Isik, M., Wang, T., Gotta, G., Wilson, C. J., & Marco, E. (2021). CALITAS: A CRISPR-Cas-aware Aligner for In silico off-Target Search. The CRISPR Journal 4(2), 264.
[0173] Giannoukos, G., Ciulla, D. M., Marco, E. et al. (2018). UDiTaS™, a genome editing detection method for indels and genome rearrangements. BMC Genomics 19, 212.
[0174] Grindley, N., Whiteson, K., & Rice, P. (2006). Mechanisms of Site-Specific Recombination. Annual Review of Biochemistry 75, 567.
[0175] Hyatt, D., Chen, G.-L., Locascio, P., Land, M., Larimer, F., & Hauser, L. (2010). Prodigal: prokaryotic gene recognition and translation initiation site identification. BMC Bioinformatics 11, 1.
[0176] Keenholtz, R., Rowland, S., Boocock, M., Stark, W. M., & Rice, P. (2011). Structural Basis for Catalytic Activation of a Serine Recombinase. Structure 19(6), 799.
[0177] Kim, A., Ghosh, P., Aaron, M., Bibb, L. A., Jain, S., & Hatfull, G. (2003). Mycobacteriophage Bxb1 integrates into the Mycobacterium smegmatis groELI gene. Molecular Microbiology 50(2), 463.
[0178] Lambert, J. M., Bongers, R. S., & Kleerebezem, M. (2007). Cre-lox-Based System for Multiple Gene Deletions and Selectable-Marker Removal in Lactobacillus plantarum. Applied and Environmental Microbiology 73(4), 1126.
[0179] Lees, J. A., Harris, S. R., Tonkin-Hill, G., Gladstone, R. A., Lo, S. W., Weiser, J. N., Corander, J., Bentley, S. D., & Croucher, N. J. (2019). Fast and flexible bacterial genomic epidemiology with PopPUNK. Genome Research 29(2), 304.
[0180] Li H. & Durbin, R. (2009). Fast and accurate short read alignment with Burrows-Wheeler transform. Bioinformatics 25(14), 1754.
[0181] Merrick, C. A., Zhao, J., & Rosser, S. J. (2018). Serine Integrases: Advancing Synthetic Biology. ACS Synthetic Biology 7(2), 299.
[0182] Olorunniji, F. J., Rosser, S. J., & Stark, W. M. (2016). Site-specific recombinases: molecular machines for the Genetic Revolution. Biochemical Journal 473(6), 673.
[0183] Smith, M. C., & Thorpe, H. M. (2002). Diversity in the serine recombinases. Molecular Microbiology 44(2), 299.
[0184] Swalla, B. M., Gumport, R. I., & Gardner, J. F. (2003). Conservation of structure and function among tyrosine recombinases: homology-based modeling of the lambda integrase core-binding domain. Nucleic Acids Research 31(3), 805.
[0185] Van Duyne, G. D., & Rutherford, K. (2013). Large serine recombinase domain structure and attachment site binding. Critical Reviews in Biochemistry and Molecular Biology 48(5), 476.
[0186] Zhang, Z., & Lutz, B. (2002). Cre recombinase-mediated inversion using lox66 and lox71: method to introduce conditional point mutations into the CREB-binding protein. Nucleic Acids Research 30(17), e90.

### EQUIVALENTS

[0187] It is to be appreciated by those skilled in the art that various alterations, modifications, and improvements to the present disclosure will readily occur to those skilled in the art. Such alterations, modifications, and improvements are intended to be part of the present disclosure and are intended to be within the spirit and scope of the invention. Accordingly, the foregoing description and drawing are by way of example only and any invention described in the present disclosure if further described in detail by the claims that follow.

[0188] Those skilled in the art will appreciate typical standards of deviation or error attributable to values obtained in assays or other processes as described herein. The publications, websites and other reference materials referenced herein to describe the background of the invention and to provide additional detail regarding its practice are hereby incorporated by reference in their entireties.

The application's sequence listing, which the Patent Office published only in electronic form, follows.

SEQUENCE LISTING (63565 sequences)

SEQ ID NO: 1 - protein, 568 aa, Hungateiclostridium thermocellum
MKGLPKRAAVLCRVSTEDQAEGTSLDTQAEICTEEAKRRGYHVTEEDIFKEDGYSGALGIDARPVLHQLWEKYQAGEYDAIFVYRQDRLSRSLALFAALRDEARKVRRCGFKGDGFIFVQGSNDDTPEGKLQSNILATFAEYEREVIKLRTVTGKKKLAKAGKYSGGSQPFGYRWDDEKEQWVIREDEAKIVKLIFQWYVYGDESGQPLGMVRIAEKLTELGIPTPNQFRKTRKGRAGKMQAYWSDATVQRILTHTVYAGTNYLWRGDKMQVSPEQVEKIKNEKTDGWFEVDFPPIIDKMLWEKAQEKRVQSRGGFNRKRPKPILAGRIFCGICQRPFHDAMYNKGTKLVFKCNGKLKQYHLDGSPKCDSPVLDGEAVTAEVKKRIIDMLQDKDQMRKAIEEYVGSLERRKEELETLLSPISEQISQLQEKQKRLATVYVDGALSHEDYKRQINELKEQELAVRRRYEHYWPEMENLTKLEQNIAVVKEAIEEELFDVRYQPDDSTVTENIAFVKVHDEKHLTVGFPQRIVTWEELLDRLQVKLWVYPDRLEVRGIVPIEDIANPKCC

SEQ ID NO: 2 - DNA, 50 bp, Hungateiclostridium thermocellum
  source 1..50: mol_type = genomic DNA
agatatagcgaatcctaaatgctgttcagtatttaggaatcgcttaaatt

SEQ ID NO: 3 - DNA, 40 bp, Hungateiclostridium thermocellum
  source 1..40: mol_type = genomic DNA
ttttaaaatatatataattttaaatatatatttttaaata

SEQ ID NO: 4 - DNA, 50 bp, Hungateiclostridium thermocellum
  source 1..50: mol_type = genomic DNA
agatatagcgaatcctaaatgctgtacagtatttaggaatcgcttaaatt

SEQ ID NO: 5 - DNA, 40 bp, Hungateiclostridium thermocellum
  source 1..40: mol_type = genomic DNA
ttttgaaatatatatattttaaaatacatattttgaaata

SEQ ID NO: 6 - protein, 580 aa, Bacteroides caccae
MKAILLVRVSTKAQDFDEQEREIYNMAIKDGYLPECIIPVCEKESGIKLAEEERAGLNKMKELIEEDNDINCVYCWEVSRIARRKKINFSVLDYLTTHKIQLVVKNPSIRLFKDNGDIDEGAEMVFTLFSQMAESEMRTKLARWKRTKDAKRKESIYTGGWILYGYTVDETTKKLIIDEKQANIVKTIFALYLTGKYSYGSLAKELMQTGLLVGYTLLTARKFISLTLNNLAYAGLPSSTNKRNNVKTEGNIYPQLVTLEMINKCKEIAKSNTNKPKKQYNNYYFGKGLLRCPYCGGIMVAKKNNNTYHCQECTKGFWIQINLVDSILWHSSIALYATKLAHKDDEDRKQYYCQLTICDSKIKTSESRIKAMQERAEVIEYKAYVEGTLSITKADSFINELNNKIDRERKELNKWMNDRATIQGLLIEVSRDDKVVNLDKVAEIKDDKTRYDIIHEVFDCAFIDRIEQYKYTISIYPKLWNHPLQYTLNTKKNTVFTDVTEDIHQHLIGKRHSFIDDIEVLPISEEIKCYEERFKAVRNKEKNRYYNVKYCREHKEDNARRQREYRARQKALKVKDNQGE

SEQ ID NO: 7 - DNA, 50 bp, Bacteroides caccae
  source 1..50: mol_type = genomic DNA
atatataaatagggttaaatagtatgtattatatagtataatttacatat

SEQ ID NO: 8 - DNA, 40 bp, Bacteroides caccae
  source 1..40: mol_type = genomic DNA
atgcctatgctgtgccggttgaagcctctcacgtgtgcac

SEQ ID NO: 9 - DNA, 40 bp, Bacteroides caccae
  source 1..40: mol_type = genomic DNA
atgcctatgctgtgccggttaaagcctctcacgtgtgcac

SEQ ID NO: 10 - DNA, 50 bp, Bacteroides caccae
  source 1..50: mol_type = genomic DNA
atatataaatatatttatatattatatattatatatatttttatatatat

SEQ ID NO: 11 - protein, 503 aa, Clostridioides difficile
MNNRIDAIYARQSVDKKDSISIESQIEFCKYELKGGNCKEYTDKGYSGKNTDRPKFQELVRDIKRGLIAKVIVYKLDRISRSILDFANMMELFQQYDVEFVSSTEKFDTSTPMGRAMLNICIVFAQLERETIQKRVTDAYYSRSQRGFKMGGKAPYGFHTEPIKMDGINTKKLVVNPDEAANIRLIFEMYAQPTTSYGDITRYFAEQGILFYGKELIRPTLAQMLRNPVYVQADLDVYEFFKSQGTVIVNDAADFTGTNGCYLYQGRDVKPSKKNDLKDQMLVLAPHEGIVPADIWLACRKKLMNNMKIQSARKATHTWLAGKIKCGNCGYALMSIFNPSGRQYLRCTKRLDNKSCPGCGKIITSELEAVVYQQMVKKLEKHKTLTGRKKAAKANPKIAALQVELLHVDSEIEKLVDSLTGANNVLLSYVNVKIAELDGRKQELVKQIAELTVETISPGQVNQISGYLDTWDDVSFDDKRRVVDLMITTVAATSDSLNITWKI

SEQ ID NO: 12 - DNA, 50 bp, Clostridioides difficile
  source 1..50: mol_type = genomic DNA
gtgtagtcccttgtaaactgtactttaggtcagtttacaaggaactacac

SEQ ID NO: 13 - DNA, 40 bp, Clostridioides difficile
  source 1..40: mol_type = genomic DNA
aaattatttgtaattatgatttaatttatataaattacag

SEQ ID NO: 14 - DNA, 50 bp, Clostridioides difficile
  source 1..50: mol_type = genomic DNA
gtgtagtcccttgtaaactgtactaaaggtcagtttacaaggaactacac

SEQ ID NO: 15 - DNA, 40 bp, Clostridioides difficile
  source 1..40: mol_type = genomic DNA
aaattatttatatttaataaataatttatataaattatat

SEQ ID NO: 16 - protein, 532 aa, Faecalibacterium prausnitzii
MTENNNRVCCLYRVSTDKQVDFNSNHEADLPMQRKACHKFAESKGWVIVHEEQEEGVSGHKVRAAARDKLQIIKDYARRGKFDILLVFMFDRIGRIADETPFVVEWFVRNGIRVWSTQEGEQRFDNHTDKLLNYIRFWQADGESEKTSVRTRTSLRQLVEEGHFKGGNAPYGYDLVRSGRINKRKHELYELHINEQEAAVVRIVFDKYVYEGYGPQHIATYLNNSGYRARSGKCWHPSSIRGMVQNLTYTGVLRCGDARSELMPDLQIVPQEQFENAQRIRNERSVRSTAEAENRLPLNIHGKSLLAGNAYCGHCGAKLELTSSRKWRKMADGSLDDTLRIRYTCYGKLRKQTNCTGQTGYTVHILDEIIDKAVRQIFSKMRGIPKEQIVTKRYEKENTERKNHLQDLQTQRNKAEKDLLALKTEVLACIKGESVLPRGTLAEMITEQEEKLAELENLCESATEELEKTAELMDKVSRLYDELISYADLYDSANFEAKKMIVNQLIRRVDVYRGYQINISFNFDLTPYIEGE

SEQ ID NO: 17 - DNA, 50 bp, Faecalibacterium prausnitzii
  source 1..50: mol_type = genomic DNA
gggtgtgttttgataccaaccgggctcccgaacggtatcgaaacacaccc

SEQ ID NO: 18 - DNA, 40 bp, Faecalibacterium prausnitzii
  source 1..40: mol_type = genomic DNA
tgcatgccatgcaagcgctctcccagctgagctaatcccc

SEQ ID NO: 19 - DNA, 50 bp, Faecalibacterium prausnitzii; identical to SEQ ID NO: 17
  source 1..50: mol_type = genomic DNA

SEQ ID NO: 20 - DNA, 40 bp, Faecalibacterium prausnitzii
  source 1..40: mol_type = genomic DNA
tgcatgctaagcaagcgctctaccacttgagctaattccc

SEQ ID NO: 21 - protein, 532 aa, Faecalibacterium prausnitzii
MTKNNNRVCCLYRVSTDKQVDFNSNHEADLPMQRKACHKFAESKGWVIVHEEQEEGVSGHKVRAAARDKLQIIKDYARKGKFDILLVFMFDRIGRIADETPFVVEWFVRNGIRVWSTQEGEQRFDNHTDKLLNYIRFWQADGESEKTSVRTRTSLRQLVEEGHFKGGNAPYGYDLVRSGRINKRKHELYELHINEQEAAVVRIVFDKYVYEGYGPQHIATYLNNSGYRARSGKCWHPSSIRGMVQNLTYTGVLRCGDARSELMPDLQIVPQEQFENAQRIRNERSVRSTAEAENRLPLNIHGKSLLAGNAYCGHCGAKLELTSSRKWRKMADGSLDDTLRIRYTCYGKLRKQTNCTGQTGYTVHILDEIIDKAVRQIFSKMRGIPKEQIVTKRYEKENAERKNHLQDLQTQRNKAEKDLFALKTEVLACIKGESVLPRETLAEMITAQEEKLTELENLCEAASEELEKTAELMDKVSRLYDELISYADLYDSANFEAKKMIVNQLIRRVDVYRGYQINISFNFDLTPYIEGE

SEQ ID NO: 22 - DNA, 50 bp, Faecalibacterium prausnitzii
  source 1..50: mol_type = genomic DNA
gggtgtgttttgataccaaccgggctcccgaacggtatcgaaacgcaccc

SEQ ID NO: 23 - DNA, 40 bp, Faecalibacterium prausnitzii; identical to SEQ ID NO: 18
  source 1..40: mol_type = genomic DNA

SEQ ID NO: 24 - DNA, 50 bp, Faecalibacterium prausnitzii; identical to SEQ ID NO: 22
  source 1..50: mol_type = genomic DNA

SEQ ID NO: 25 - DNA, 40 bp, Faecalibacterium prausnitzii; identical to SEQ ID NO: 20
  source 1..40: mol_type = genomic DNA

SEQ ID NO: 26 - protein, 583 aa, Clostridioides difficile
MQEVEVIKARNVLSKQARGKAIERLRVAAYCRVSTDSEDQLNSYKSQVQYYTDMIKKNKEWVLADIYADEAITGTQVTKREDFQRMINDCMNGEIDMVITKSISRFARNTLDTLKYVRMLKERNIAVYFEDEKINTLTMDGELLLVVLSSVAQQEVENISANVKKGLKMKMKRGELVGFQGCLGYDYHPEDKTITVNQEEAEIVRYIFNRYVDGAGGSVIGQELENLGYKTKYGSSTWAPSTVIGIIKNEKYKGDILLGKTFTVDPISKRRLENMGEEDKFYMKDHHEPIISEEVFEKAQEILNRRNKNRTTVGSGKREKYSRKYAFSCMLECGFCGGTLTRRNWHSGSQYSKVIWQCVTATKKGKKFCKHSKGIPETAIEEAFVESYRLLCDDNKDVLEEFLQRMDDTLSSSVVSKQLAKAEKEIDALEKKKSKLVDMRLEEIIDKETYESKYADLVSKQEQLVEERQKLQETSDNEKDIKKRLKEFKKTLEQNEVLDKFDRYVFESIVEKVIVGGLDENGNVDPAQLTFVYKTGLKNSVDGAKFKPQRKNERGRHRTNELCSHDSNEVDKMCSDSSNDTCG

SEQ ID NO: 27 - DNA, 50 bp, Clostridioides difficile
  source 1..50: mol_type = genomic DNA
ttccgatagtagtaacgacacatgtggagacggtagcattattgtccaaa

SEQ ID NO: 28 - DNA, 40 bp, Clostridioides difficile
  source 1..40: mol_type = genomic DNA
ttccctcattctacacatgtggaaactgtagctaagataa

SEQ ID NO: 29 - DNA, 50 bp, Clostridioides difficile
  source 1..50: mol_type = genomic DNA
ttccgatagtagtaacgacacatgaggagacggtagcattattgtccaaa

SEQ ID NO: 30 - DNA, 40 bp, Clostridioides difficile
  source 1..40: mol_type = genomic DNA
ttccctcattttacagatgaggaaactgaggctcagatta

SEQ ID NO: 31 - protein, 583 aa, Clostridioides difficile
MQEVEVIKAKNVLSRQARGKAIERLRVAAYCRVSTDSEDQLNSYKSQVQYYTDMIKKNKEWVLADIYADEAITGTQVTKREDFQRMINDCMNGEIDMVFTKSISRFARNTLDTLKYVRMLKERNIAVYFEDEKINTLTMDGELLLVVLSSVAQQEVENISANVKKGLKMKMKRGELVGFQGCIGYDYHPEDKTITVNQEEAEIVRYIFNRYVDGAGGSVIGQELESLGYKTKYGSSTWAPSTVIGIIKNEKYKGDILLGKTFTVDPISKRRLENMGEEDKFYMKDHHEPIISEEVFEKAQEILNRRNKNRTTVGSGKREKYSRKYAFSCMLECGFCGGTLTRRNWHSGSQYSKVIWQCVTATKKGKKFCKHSKGIPETAIEEAFVESYRLLCDDNKDVLEEFLQRMDDTLSSSVVSKQLAKAEKEIDALEKKKSKLVDMRLEEIIDKETYESKYADLVSKQEQLVEERQKLQETSDNEKDIKKRLKEFKKTLEQNEVLDKFDRYVFESIVEKVIVGGLDENGNVDPAQLTFVYKTGLKNSVDGAKFKPQRKNARGRHRTNELCSHDSNEVDKMCSDSSNDTCG

SEQ ID NO: 32 - DNA, 50 bp, Clostridioides difficile; identical to SEQ ID NO: 27
  source 1..50: mol_type = genomic DNA

SEQ ID NO: 33 - DNA, 40 bp, Clostridioides difficile; identical to SEQ ID NO: 28
  source 1..40: mol_type = genomic DNA

SEQ ID NO: 34 - DNA, 50 bp, Clostridioides difficile; identical to SEQ ID NO: 29
  source 1..50: mol_type = genomic DNA

SEQ ID NO: 35 - DNA, 40 bp, Clostridioides difficile; identical to SEQ ID NO: 30
  source 1..40: mol_type = genomic DNA

SEQ ID NO: 36 - protein, 588 aa, Clostridioides difficile
MKEVEIIKKNDNLENRRRGKYIDCKRVAAYCRVSTDSEDQLNSYKSQVSYYTDLINNNIEWCMVDIYADEAITGTQVNKREDFQRMINDCMNNEIDMIITKSISRFARNTLDTLKYVRMLKEKNIAVYFEDEKINTLTMDGELLLVVLSSVAQQEVENISANVKKGLKMKMRRGELVGFQGCLGYDYHKEDKTLTINEKEAEIVRYIFNRYIEGAGCSIIGQELENLGYKTKYGSTIWSNSTVLGIIKNEKYIGDVLLGKTFTVDPISKRRLDNLGEEEKYYVKNNHEPIISREIFDKAHEILNRRSKNRGRYEEGVTKREKYSRKYAFSCMMECGFCGGTLTRRNWHSGSEYSKIIWQCVVATKKGKKYCPESKGIPERVIENAFVESYRLLCDEKKSVLEELLNRINDIVGSSEVNNKIKKIEKELSVIEKKINNLVDMRLDDIIEKETYEIKYQELIDNQEKLLNERNKLNVVAKNENSMKQRLKEFKKTLEENEVLDKFDRGVFESVVEKVIIGEKNKDGENDPTKITFIYKTGFKNTLSSDEFKIPRKNARGRHKRKELYLHGNNEVKNLCSHSSSNTCGNCS

SEQ ID NO: 37 - DNA, 50 bp, Clostridioides difficile
  source 1..50: mol_type = genomic DNA
ttcacatagtagttcaaacacatgtggagactgtagcgttgctacgtcga

SEQ ID NO: 38 - DNA, 40 bp, Clostridioides difficile; identical to SEQ ID NO: 28
  source 1..40: mol_type = genomic DNA

SEQ ID NO: 39 - DNA, 50 bp, Clostridioides difficile
  source 1..50: mol_type = genomic DNA
ttcacatagtagttcaaacacatgaggagactgtagcgttgctacgtcga

SEQ ID NO: 40 - DNA, 40 bp, Clostridioides difficile; identical to SEQ ID NO: 30
  source 1..40: mol_type = genomic DNA

SEQ ID NO: 41 - protein, 587 aa, Clostridioides difficile
MKEVEIINKNNHLENRRRGKYIDRKRVAAYCRVSTDSEDQLNSYKSQVSYYTDLINNNIEWCMVDIYADEAITGTQVNKREEFQRMINDCMNNEIDMIITKSISRFARNTLDTLKYVRMLKEKNIAVYFEDEKINTLTMDGELLLVVLSSVAQQEVENISANVKKGLKMKMRRGELVGFQGCLGYDYHKEDKTLTINEKEAEIVKYIFNRYIEGAGGSIIGQELENLGYKTKYGSTTWSNSTVLGIIKNEKYMVDVLLGKTFTVDPISKRRLDNLGEEEKYYVKNNHEPIISREIFDKAHEILNRRSKNRGKYEGEVTKREKYSRKYAFSCMMECGFCGGTLTRRNWHSGSEYSKVIWQCVVATKKGKKYCSESKGIPERVIENAFVESYRLLCDEKKSVLEELLSRINDTVGSSEVNNKIRKIEKELSAIEKKINNLVDMRLDDIIEKETYEIKYKELIDNQEKLLNERNKLNIVVKNEKSMKQRLKEFKKTLEENAVLDKFDRSVFESVVEKVIIGEKNKDGENDPTKITFIYKTGFKNTLSSNEFKIPRKNARGRHKRKELCLHGNNEVENLCSHSSSNTCGNC

SEQ ID NO: 42 - DNA, 50 bp, Clostridioides difficile
  source 1..50: mol_type = genomic DNA
ttcacatagtagttcaaacacatgtggagactgtggcgttgctacgtcga

SEQ ID NO: 43 - DNA, 40 bp, Clostridioides difficile; identical to SEQ ID NO: 28
  source 1..40: mol_type = genomic DNA

SEQ ID NO: 44 - DNA, 50 bp, Clostridioides difficile
  source 1..50: mol_type = genomic DNA
ttcacatagtagttcaaacacatgaggagactgtggcgttgctacgtcga

SEQ ID NO: 45 - DNA, 40 bp, Clostridioides difficile; identical to SEQ ID NO: 30
  source 1..40: mol_type = genomic DNA

SEQ ID NO: 46 - protein, 583 aa, Clostridioides difficile; identical to SEQ ID NO: 31

SEQ ID NO: 47 - DNA, 50 bp, Clostridioides difficile
  source 1..50: mol_type = genomic DNA
ttccgatagtagtaacgacacatgtggagacggtagtacttctttcccac

SEQ ID NO: 48 - DNA, 40 bp, Clostridioides difficile; identical to SEQ ID NO: 28
  source 1..40: mol_type = genomic DNA

SEQ ID NO: 49 - DNA, 50 bp, Clostridioides difficile
  source 1..50: mol_type = genomic DNA
ttccgatagtagtaacgacacatgaggagacggtagtacttctttcccac

SEQ ID NO: 50 - DNA, 40 bp, Clostridioides difficile; identical to SEQ ID NO: 30
  source 1..40: mol_type = genomic DNA

SEQ ID NO: 51 - protein, 512 aa, Planobispora rosea
MMITTPDRWTVDYCRISYDKRGAAEGVGTQHVENENSADELGLTIAQTYTDNDLSAFSGIERPDYQRMIEDIEAGKIGTIIIRHADRLHRSVEEVSRFIKVARAHDVKLYSGMKGSFYNLNKAAGRKDLINDTLNAEYESDHRGERVSDARKRQARNGDYGGGVRPFGWGVDTGRVRSVCVNPKAPVAERRYEDRPVLDMSRHNEAEAAEIRRWADDLLSGVSMRQVLADLAERGVKTVAEADGRNLRRNGRAVKHEGWNSRTIKQILTHPRTSGHAVYQGEIVKRNAFEPIIPEEKRQALITLFADPTRKTTPGNTPKWLGSLIYRCGVCDDGTTMTVRKNSRGQFVYRCRTKGHCSRLAAEADSFVELAMIERLSRADIADLLPQRASVDVAGLRDRLRELDAEETDVAIRAAQKKITAVMMEVFAAEIERQRDEIRKLINDATAESPLAEFAASDDAAKVWHSKSLGRKREIIRLLTPITLMPVPAVRGRGFDPASVRFDAWQRAREVA

SEQ ID NO: 52 - DNA, 50 bp, Planobispora rosea
  source 1..50: mol_type = genomic DNA
gtacgcctcattcccgtaaccggcttcaccactacgggtctggggcgtac

SEQ ID NO: 53 - DNA, 40 bp, Planobispora rosea
  source 1..40: mol_type = genomic DNA
catgcgcatggtggtcgtcttgcccgcgccgttggggccc

SEQ ID NO: 54 - DNA, 50 bp, Planobispora rosea; identical to SEQ ID NO: 52
  source 1..50: mol_type = genomic DNA

SEQ ID NO: 55 - DNA, 40 bp, Planobispora rosea
  source 1..40: mol_type = genomic DNA
cactcacatggtggtggtcttgcccgccccgttgtggccc

SEQ ID NO: 56 - protein, 628 aa, Campylobacter jejuni
MRKNEKITALYERLSRDDFGKDDDQQRESNSISNQKAMLEEFAARQGFTNIVHFTDDGISGTCFDRPGFLAMMKEVEAGNVEYLCIKDMSRMGRDYLKVGQIMEILRQRGVRLIAINDGVDSARGDDDFTPFRNIMNEYYARDTSRKIRSTFQSKGKSGKHLTGTVIYGYLWNEARDQWLVDPEAAEVVKRIFSMTIDGYGPYQIASKLKSEKVLIPSAYLAQHGEGVNKNKTFKDVYGWGSSTICNILEKREYLGHTINFKTRKHFKDKKSHYVPEDEWTIFENTHEPIIDQQTFDLVQKIRGNVRRYPDGWGEAAPLTGLLYCADCGGKMYVHRTNNGKRISQYTCSQYTKVPCGTLCKTQHRINEDVVLSLVSEMLKAIAEYAKHDRAEFVRVVQEAQSSQQTTEVRKQRTRLATAKQRVSELEVLLCKIYEDNILGKLSDSRYATLDAQYEKEQSELTAEISVLEKAVKSYEKHEKDADRFIALIDKYENFDKLTIAMLNEFIEKILVHERDRKGSIQTTQEVEIYFNFVGRFVPPAFGEVELTPEELEEIRKREERKDRLHQNYLKRKASGAQKRYEDKIKKRKKAEIEAKKAAIRAEDIAKGVFVPVSSLPQREPMKGVQTA

SEQ ID NO: 57 - DNA, 50 bp, Campylobacter jejuni
  source 1..50: mol_type = genomic DNA
aaaagtccttgacttttcgtctctggtgttgtatgctctaaaagacttct

SEQ ID NO: 58 - DNA, 40 bp, Campylobacter jejuni
  source 1..40: mol_type = genomic DNA
aaaaaataaaaaattcactggaaaaacttataaatatttc

SEQ ID NO: 59 - DNA, 50 bp, Campylobacter jejuni
  source 1..50: mol_type = genomic DNA
aaaagtccttgacttttcgtctcttctgttgtatgctctaaaagacttct

SEQ ID NO: 60 - DNA, 40 bp, Campylobacter jejuni
  source 1..40: mol_type = genomic DNA
aaaaaataaaaaattcacttcacaatctattaaaaattta

SEQ ID NO: 61 - protein, 612 aa, Streptococcus agalactiae
MRNFEKITALYERLSRDDELQGESNSIINQKKILEEYASKNNLSNIIHFTDDGISGTQFDRPGFMAMMNGVNQGNIGCIIVKDMSRLGRDYLKVGQCMEILRQKGVRLIAINDNVDSFYREDDFTPFRNIMNEWYARDTSRKIQSTFKSKGESGKHTASTPPYGYIKDEKDKNKWIVDEKAAEIVRRIFNLTMQGNGPYRIAKILESEKVDIPAYHQQKLGYGLYQSKNFEHPYRWCSSTIASILKKQEYLGHTVNFKTRKHFKDKKSKYVSEDNWLIFENTHEPIIDQETFDNVQRIRGNVKRYPDGWGEYHPLTGLMHCADCGSKMYVHRTSNYKNIPYYTCSAYTKTPCGTLCPSAHRIKAEAVLNLIRETLKDIKKYLNEDNEAFIRSIQNEMEEKEKIEIEKKRTRLIDSKGRLQELERLMCRIYEDMILNKIPNSRYEILNNQYETEQITLSKEIKDLEQQVSRYEKETDRAKKFISLISRYENFDELTTTMINEFVEKIVVHERDRKGSQTSKQKIEIYFNFIGNYELPQAELSDEEKQKLEEEERKIKKRKDKLHQNYLKRKASGKQKEYEDKYKARREQKKQEKIKVLKRVGIPVSEYIKTNI

SEQ ID NO: 62 - DNA, 50 bp, Streptococcus agalactiae
  source 1..50: mol_type = genomic DNA
aaagtccttgacaagttgttacaggagtaatagaattaaggagaacactt

SEQ ID NO: 63 - DNA, 40 bp, Streptococcus agalactiae
  source 1..40: mol_type = genomic DNA
aaatataagctggcagcaggaaaaactgcaaagtcaattc

SEQ ID NO: 64 - DNA, 50 bp, Streptococcus agalactiae
  source 1..50: mol_type = genomic DNA
aaagtccttgacaagttgttacagtggtaatagaattaaggagaacactt

SEQ ID NO: 65 - DNA, 40 bp, Streptococcus agalactiae
  source 1..40: mol_type = genomic DNA
aaatagaagatgatagcagtgaaaactgcaaaggcaagtc

SEQ ID NO: 66 - protein, 607 aa, Streptococcus agalactiae
MRNFEKITALYERLSRDDELEGESNSIVNQKKILEEYASKNNLTNIIHFTDDGISGTQFDRPGFMEMMNGVNSGNIGCIIVKDMSRLGRDYLKVGQCMEILRQKGVRLIAINDNVDSFYREDDFTPFRNIMNEWYARDTSRKIQSTFRSKGESGKHTASTPPYGYIKDEKDKDKWVVDEKAAEIVRRIFNLTMDGAGPYKIAKILEADKIDIPAYHQQKLGYGLHQSKNFEYPYRWCSSTIASILKKKEYLGHTVNFKTRKHFKDKKSKYVSEDNWLIFENTHEAIIDQETFDNVQRIRGNVKRYPDGWGEYHPLTGLMYCADCGSKMYVHRTSNYKNIPYYNCSAYTKVPCGTLCPSAHRIKAEAVLNLIQETLKDIKKYLDEDNEAFIRSIQNEMEEKEKVEIEKKRTRLIDSKGRLQELERLMCRIYEDMILNKIPNSRYEILNNQYETEQITLSKEIKDLEQQVSRYEKETDRAKKFISLISRYENFDELTTTMINEFVEKIVVHERDRKGSQTSKQKIEIYFNFIGNYELPQAELSDEEKQKLEEEERKIKERKDKLHQNYLKRKASGKQKEYEDKYKARREQKKQEKLKVLKRVGIPLYEM

SEQ ID NO: 67 - DNA, 50 bp, Streptococcus agalactiae; identical to SEQ ID NO: 62
  source 1..50: mol_type = genomic DNA

SEQ ID NO: 68 - DNA, 40 bp, Streptococcus agalactiae; identical to SEQ ID NO: 63
  source 1..40: mol_type = genomic DNA

SEQ ID NO: 69 - DNA, 50 bp, Streptococcus agalactiae; identical to SEQ ID NO: 64
  source 1..50: mol_type = genomic DNA

SEQ ID NO: 70 - DNA, 40 bp, Streptococcus agalactiae; identical to SEQ ID NO: 65
  source 1..40: mol_type = genomic DNA

SEQ ID NO: 71 - protein, 612 aa, Streptococcus agalactiae
MRNFEKITALYERLSRDDELQGESNSIINQKKILEEYASKNNLSNIIHFTDDGISGTQFDRPGFMAMMNGVNQGNIGCIIVKDMSRLGRDYLKVGQCMEILRQKGVRLIAINDNVDSFYREDDFTPFRNIMNEWYARDTSRKIQSTFRSKGESGKHTASTPPYGYIKDEKDKNKWIVDEKAAEIVRRIFNLTMQGNGPYRIAKILESEKVDIPAYHQQKLGYGLYQSKNFEHPYRWCSSTIASILKKQEYLGHTVNFKTRKHFKDKKSKYVSEDNWLIFENTHEPIIDQETFDNVQRIRGNVKRYPDGWGEYHPLTGLMHCADCGSKMYVHRTSNYKNIPYYTCSAYTKTPCGTLCPSAHRIKAEAVLNLIRETLKDIKKYLNEDNEAFIRSIQNEMEEKEKIEIEKKRTRLIDSKGRLQELERLMCRIYEDMILNKIPNSRYEILNNQYETEQITLSKEIKDLEQQVSRYEKETDRAKKFISLISRYENFDELTTTMINEFVEKIVVHERDRKGSQTSKQKIEIYFNFIGNYELPQAELSDEEKQKLEEEERKIKKRKDKLHQNYLKRKASGKQKEYEDKYKARREQKKQEKIKVLKRVGIPVSEYIKTNI

SEQ ID NO: 72 - DNA, 50 bp, Streptococcus agalactiae; identical to SEQ ID NO: 62
  source 1..50: mol_type = genomic DNA

SEQ ID NO: 73 - DNA, 40 bp, Streptococcus agalactiae; identical to SEQ ID NO: 63
  source 1..40: mol_type = genomic DNA

SEQ ID NO: 74 - DNA, 50 bp, Streptococcus agalactiae; identical to SEQ ID NO: 64
  source 1..50: mol_type = genomic DNA

SEQ ID NO: 75 - DNA, 40 bp, Streptococcus agalactiae; identical to SEQ ID NO: 65
  source 1..40: mol_type = genomic DNA

SEQ ID NO: 76 - protein, 558 aa, Clostridioides difficile
MLQTDKITALYCRLSQEDMQAGESESIQNQKMILQKYADEHHFFNTRFFVDDGFSGVSFEREGLQAMLHEVEAGNVATVITKDLSRLGRNYLKTGELIEIVFPEYEVRYIAINDGVDTAREDNEFTPLRNWFNEFYARDTSKKIRAVKQAKAQKGERVNGQVPYGYIADPNDRNHLLPDPETAHIVKQIFAMYVRGDRICEIQNWLREHEVLTVAELQYRRTGSHRHPRPHPNCIYNWPDKTLYDILARKEYLGHTITGKSYKVSYKSKKTKKNPEEKRYFFPNTHEPLIDEETFELAQKRIATKHRPTKVDEIDIFSGLLFCGDCGYKMYLQQGAGTLERKHAYTCGKYRNRIRTGELCTTHYIRKSVLKELVLADLQRVLSYVKEHEQEFIETANECSAKAVQKTLTQQRKELDKAQSRISELNILFRKLYEDNALGKLSDEQFAFLTSGYDEEKKTLTRRIAELSQEIDNATERSADVKRFVALVRKYTAITELTYENVHEFIDRILIHELDKETNTRKIEIFYSFVGRVDTGDKPTESISYFRQIGADVKSYAI

SEQ ID NO: 77 - DNA, 50 bp, Clostridioides difficile
  source 1..50: mol_type = genomic DNA
aggttacgttatcttacctcaacaaaagctgacgttagataacgatactt

SEQ ID NO: 78 - DNA, 40 bp, Clostridioides difficile
  source 1..40: mol_type = genomic DNA
tggatatacaggtggaataaatataggagatgaatattta

SEQ ID NO: 79 - DNA, 50 bp, Clostridioides difficile
  source 1..50: mol_type = genomic DNA
aggttacgttatcttacctcaacataagctgacgttagataacgatactt

SEQ ID NO: 80 - DNA, 40 bp, Clostridioides difficile
  source 1..40: mol_type = genomic DNA
tgtatatataggtgttatatatataggagatgcatatata

SEQ ID NO: 81 - protein, 518 aa, Aneurinibacillus thermoaerophilus
MYRPTGKDVFIYLRKSRKDIEEEKKALENGRQYDTLSKHRKELLELVKREQHNVIDIFEEVVSGEFLSERHVAQEMLRQVEEGAVEGVVVMDLDRLGRGDMIDAGTIFRAFKFSDTLIITPNEVIDCNSEGAELLFGVKSIIAREELKQINKRLQGGRRRSAKDGKSITRKPPYGYIRDENLKLHPHPEEAPVVRKIFELAAEGNGRQAVVKKLELLGIQPPEGKVWEQSTISYIIKNEVYLGHIVWGKHKYIKRNGKRIRKNVPPELWIRHENAHEPIISKDLFEQANLALSGRYRTPTKEGSQLTNPLAGIVKCSVCGRSLRYVYSKERRPQLRCINLHCQSVQKGALFHLIEERVINSLHMLVEQATLQQDELAASLQKEESIIERKQKQISKLEREIQELHGMRDTAFEMLEKKVYTEEIFLQRHQTISQKIKEAEANIEQLKKEIELEEAQLHHQKNILPQIQKVVDTYWEIESPVEKNHLLKSILEKVYYTRKKEWTKKDQFELEIVPRLPI

SEQ ID NO: 82 - DNA, 50 bp, Aneurinibacillus thermoaerophilus
  source 1..50: mol_type = genomic DNA
tatatatatcatcaagaaatgtactgatagaaatctttatgatatataca

SEQ ID NO: 83 - DNA, 40 bp, Aneurinibacillus thermoaerophilus
  source 1..40: mol_type = genomic DNA
cgttgaatgtctattatattggttaacctcaccatatccg

SEQ ID NO: 84 - DNA, 40 bp, Aneurinibacillus thermoaerophilus
  source 1..40: mol_type = genomic DNA
cgttgaatgtctattatatatgttaacctcaccatatccg

SEQ ID NO: 85 - DNA, 50 bp, Aneurinibacillus thermoaerophilus
  source 1..50: mol_type = genomic DNA
tatatatatctaccagatatatatatatatatatctaccagatatatata

SEQ ID NO: 86 - protein, 499 aa, Clostridium butyricum
MDRTCIYLRKSRADEEIEKTLGEGETLAKHRKALMKYAKEKQLSIVEIKEEIVSGDSLFHRPKMLELLKEVENNEYTGVLVMDIDRLGRGGMKDQGIILDAFKESNTKIITPTKTYDLNNDLDEEITEFKTFFSRRELKVINKRMQGGRIRSVEDGNYIATNPPLGYDIEYVNKNRILKINDSESKIIKIIFDRYINGDGAGTIASYLNSLGYKTKINKNFTASSVLFILKNPIYIGKITWKKKELKKSKSPNKVRDCKTRNKNEWIISEGKHDSIIDKNTFNRANELLQEKYHVPYRQNNPPVNPFAGILICGKCKHKMIMRKARGKKRIMCIHKCGNISMNFDKFEDLAFKSIKEFLKNYELKIETSITDNKKIDYSRELILLKKELTLLNSQKMNIFDSYERKIYSEEMFIERSNNISSRISSIQFEIDKLVDLIAEESLKEKSDNLLNFKNVILSYKNTEDIKLKNELLKSIIIKIELINTPDALVIDVYPRLLK

SEQ ID NO: 87 - DNA, 50 bp, Clostridium butyricum
  source 1..50: mol_type = genomic DNA
tgtatacatcatgttgtgtataattcattacgcataatatgatgtataca

SEQ ID NO: 88 - DNA, 40 bp, Clostridium butyricum
  source 1..40: mol_type = genomic DNA
tatatccattagacaaaactcattgccttccttatcaact

SEQ ID NO: 89 - DNA, 40 bp, Clostridium butyricum
  source 1..40: mol_type = genomic DNA
tatatccattagacaaaactaattgccttccttatcaact

SEQ ID NO: 90 - DNA, 50 bp, Clostridium butyricum
  source 1..50: mol_type = genomic DNA
tgtatacatacatatgtgtatacatagatacgtatatgtgtatatataca

SEQ ID NO: 91 - protein, 577 aa, Bacteroides fluxus
MERKAAIYLRVSTTDQNYERQRDELEATVKYEGYKLVKVYEEKKSAVLDMDTREELTKMRQLSKADVDAIFFWDVTRLSRKSIDFITLVEEFSNKGICLYFKNERLTTLQDNGEMHPMAKLQLYILGVFAQMDAENLKAKFKSGKERSLAIGNAYTANPPYGYKLKNKKLYIDEEEATIVRTFFDWYLEGKPLREIEMLLNSKNIPTRKGELWSKAMIIKMIKNPVYKGEPVYKNRNKDGEVIKERTFNAPIIIEPAKWELAQIQKEKNKTYADKGRTRKALLRGLLVCGNCEKPYNVVLTGAGFINYACSDNRASINTKVGCTNGGISAGYLDYICWETIKGIYMYQNFKQKFQEEKAKNMALLDENKSQIKNYIDNISKLEKQKDRVREGYRKGIYDDISAAKDISILTTEIEKNKSLIKKIDGENELLKNKISQSLEHYKITDKQPVYEEKLAIVKDLIEIIKLYSYGMYKRVIKLDLKMGLSFNILYNSNHAISSYAVIDDNVATFNKENLKILPNSLADKISDFTVTSDNNEIFGEEVFGRYNFDELWNICKNYKLLKPLPKLTEEDKYKQK

SEQ ID NO: 92 - DNA, 50 bp, Bacteroides fluxus
  source 1..50: mol_type = genomic DNA
ataagtacaatagttacctatagacaaacatcaataactattgtatatat

SEQ ID NO: 93 - DNA, 40 bp, Bacteroides fluxus
  source 1..40: mol_type = genomic DNA
ataggcacaatcatagatgcaatagttggtaagcatcacc

SEQ ID NO: 94 - DNA, 40 bp, Bacteroides fluxus; identical to SEQ ID NO: 93
  source 1..40: mol_type = genomic DNA

SEQ ID NO: 95 - DNA, 50 bp, Bacteroides fluxus
  source 1..50: mol_type = genomic DNA
acacatacaatatatacctatatacatacatctatacaacgtgtatatat

SEQ ID NO: 96 - protein, 578 aa, Bacteroides xylanisolvens
MKAILLVRVSTKAQDFDEQEREIYNMAIKDGYLPECIIPVCEKESGIKLAEEERAGLNKMKELIEEDNDINCVYCWEVSRIARRKKINFSVLDYLTTHKIQLVVKNPSIRLFKDNGDIDEGAEMVFTLFSQMAESEMRTKLARWKRTKDAKRKESIYTGGWILYGYTVDETTKKLIIDEKQANIVKTIFALYLTGKYSYGSLAKELMQTGLLVGYTLLTARKFISLTLNNLAYAGLPSSTNKRNNVKTEGNIYPQLVTLEMINKCKEIAKSNTNKPKKQYNNYYFGKGLLRCPYCGGIMVAKKNNNTYHCQECTKGFWIQINLVDSILWHSSIMLYATKLAHKDDEDRKQYYCQLTICDSKIKTSESRIKAMQERAEVIEHKAYVEGTLSITKADSFINELNNKIDKERKELNKWMNDRATIQNLLIEVSRDDKVVNLDKVAEIKDDKTRYDIIHEVFDCAFIDKIEQYKYTISIYPKLWNHPLQYTLNTKKNTVFTDVTEDIHQHLIGKFHAIEDGVEVLPVSEEIKCYEERFKAVRNKEKNRYYNVKYCREHKEDNARRQREYRARQKALKAKTIK

SEQ ID NO: 97 - DNA, 50 bp, Bacteroides xylanisolvens
  source 1..50: mol_type = genomic DNA
atacataaataggattaaatagtacaaattatatagtataatttatatat

SEQ ID NO: 98 - DNA, 40 bp, Bacteroides xylanisolvens
  source 1..40: mol_type = genomic DNA
gggcacatgtaagaggattcaaccggcacagtattggaat

SEQ ID NO: 99 - DNA, 40 bp, Bacteroides xylanisolvens
  source 1..40: mol_type = genomic DNA
gggcacatgtaagaggattataccggcacagtattggaat

SEQ ID NO: 100 - DNA, 50 bp, Bacteroides xylanisolvens
  source 1..50: mol_type = genomic DNA
atatatagatatatttatatagatatatttatatagatatatttatatat

SEQ ID NO: 101 - protein, 580 aa, Bacteroides xylanisolvens
MKAILLVRVSTKAQDFDEQEREIYNMAIKDGYLPECIIPVCEKESGIKLAEEERAGLNKMKELIEEDNDINCVYCWEVSRIARRKKINFSVLDYLTTHKIQLVVKNPSIRLFKDNGDIDEGAEMVFTLFSQMAESEMRTKLARWKRTKDAKRKESIYTGGWILYGYTVDETTKKLIIDEKQANIVKTIFALYLTGKYSYGSLAKELMQTGLLVGYTLLTARKFISLTLNNLAYAGLPSSTNKRNNVKTEGNIYPQLVTLEMINKCKEIAKSNTNKPKKQYNNYYFGKGLLRCPYCGGIMVAKKNNNTYHCQECTNGFWIQINLVDSILWHSSIALYATKLAHKDDEDRKQYYCQLAICDSKIKTSESRIKAMQERAEVIEYKAYVEGTLSITKADSFINELNNKIDRERKELNKWMNDRATIQGLLIEVSRDDKVVNLDKVAEIKDDKTRYDIIHEVFDCAFIDRIEQYKYTISIYPKLWNHPLQYTLNTKKNTVFTDVTEDIHQHLIGKRHSFIDDIEVLPISEEIKCYEERFKAVRNKEKNRYYNVKYCREHKEDNARRQREYRARQKALKVKDNQGE

SEQ ID NO: 102 - DNA, 50 bp, Bacteroides xylanisolvens
  source 1..50: mol_type = genomic DNA
atacataaataggtttaaatagtacaaattatatagtacaatttatatat

SEQ ID NO: 103 - DNA, 40 bp, Bacteroides xylanisolvens
  source 1..40: mol_type = genomic DNA
gagcgcatgtgagaggattcaaccggcacagtattggaat

SEQ ID NO: 104 - DNA, 40 bp, Bacteroides xylanisolvens
  source 1..40: mol_type = genomic DNA
gagcgcatgtgagaggattataccggcacagtattggaat

SEQ ID NO: 105 - DNA, 50 bp, Bacteroides xylanisolvens; identical to SEQ ID NO: 100
  source 1..50: mol_type = genomic DNA

SEQ ID NO: 106 - protein, 578 aa, Bacteroides xylanisolvens
MKAILLVRVSTKAQDFDEQEREIYNMAIKDGYLPEYIIPVCEKESGIKLAEEERAGLNKMKELIEEDNDINCVYCWEVSRIARRKKINFSVLDYLTTHKIQLVVKNPSIRLFKDNGDIDEGAEMVFTLFSQMAESEMRTKLARWKRTKDAKRKESIYTGGWILYGYTVDETTKKLIIDEKQANIVKTIFALYLTGKYSYGSLAKELMQTGLLVGYTLLTARKFISLTLNNLAYAGLPSSTNKRNNVKTEGNIYPQLVTLEMINKCKEIAESNTNKPKKQYNNYYFGKGLLRCPYCGGIMVAKKNNNTYHCQECTKGFWIQINLVDSILWHSSIMLYATKLAHKDDEDRKQYYCQLTICDSKIKTSESRIKAMQERAEVIEHKAYVEGTLSITKADSFINELNNKIDKERKELNKWMNDRATIQNLLIEVSRDDKVVNLDKVAEIKDDKTRYDIIHEVFDCAFIDKIEQYKYTISIYPKLWNHPLQYTLNTKKNTVFTDVTEDIHQHLIGKFHAIEDGVEVLPVSEEIKCYEERFKAVRNKEKNRYYNVKYCREHKEDNARRQREYRARQKALKAKTIK

SEQ ID NO: 107 - DNA, 50 bp, Bacteroides xylanisolvens
  source 1..50: mol_type = genomic DNA
atacataaatagggttaaatagtacaaattatatagtataatttatatat

SEQ ID NO: 108 - DNA, 40 bp, Bacteroides xylanisolvens
  source 1..40: mol_type = genomic DNA
gggcgcatgtgagaggattcaaccggcacagtattggaat

SEQ ID NO: 109 - DNA, 40 bp, Bacteroides xylanisolvens
  source 1..40: mol_type = genomic DNA
gggcgcatgtgagaggattataccggcacagtattggaat

SEQ ID NO: 110 - DNA, 50 bp, Bacteroides xylanisolvens; identical to SEQ ID NO: 100
  source 1..50: mol_type = genomic DNA

SEQ ID NO: 111 - protein, 578 aa, Bacteroides ovatus
MKAILLVRVSTKAQDFDEQEREIYNMAIKDGYLPECIIPVCEKESGIKLAEEERAGLNKMKELIEEDNDINCVYCWEVSRIARRKKINFSVLDYLTTHKIQLVVKNPSIRLFKDNGDIDEGAEMVFTLFSQMAESEMRTKLARWKRTKDAKRKESIYTGGWILYGYTVDETTKKLIIDEKQANIVKTIFALYLTGKYSYGSLAKELMQTGLLVGYTLLTARKFISLTLNNLAYAGLPSSTNKRNNVKTEGNIYPQLVTLEMINKCKEIAKSNTNKPKKQYNNYYFGKGLLRCPYCGGIMVAKKNNNTYHCQECTKGFWIQINLVDSILWHSSIMLYATKLAHKDDEDRKQYYCQLTICDSKIKTSESRIKAMQERAEVIEHKAYVEGTLSITKANSFINELNNKIDKERKELNKWMNDRATIQNLLIEVSRDDKVVNLDKVAEIKDDKTRYDIIHEVFDCAFIDKIEQYKYTISIYPKLWNHPLQYTLNTKKNTVFTDVTEDIHQHLIGKFHAIEDGVEVLPVSEEIKCYEERFKAVRNKEKNRYYNVKYCREHKEDNARRQREYRARQKALKAKTIK

SEQ ID NO: 112 - DNA, 50 bp, Bacteroides ovatus; identical to SEQ ID NO: 97
  source 1..50: mol_type = genomic DNA

SEQ ID NO: 113 - DNA, 40 bp, Bacteroides ovatus
  source 1..40: mol_type = genomic DNA
gcgcgcatgtgcgaggtttcaaccggcatagtattggtat

SEQ ID NO: 114 - DNA, 40 bp, Bacteroides ovatus
  source 1..40: mol_type = genomic DNA
gcgcgcatgtgcgaggtttataccggcatagtattggtat

SEQ ID NO: 115 - DNA, 50 bp, Bacteroides ovatus; identical to SEQ ID NO: 100
  source 1..50: mol_type = genomic DNA

SEQ ID NO: 116 - protein, 578 aa, Bacteroides ovatus
MKAILLVRVSTKAQDFDEQEREIYNMAIKDGYLPECIIPVCEKESGIKLAEEERAGLNKMKELIEEDNDINCVYCWEVSRIARRKKINFSVLDYLTTHKIQLVVKNPSIRLFKDNGDIDEGAEMVFTLFSQMAESEMRTKLARWKRTKDAKRKESIYTGGWILYGYTVDETTKKLIIDEKQANIVKTIFALYLTGKYSYGSLAKELMQTGLLVGYTLLTARKFISLTLNNLAYAGLPSSTNKRNNVKTEGNIYPQLVTLEMINKCKEIAKSNTNKPKKQYNNYYFGKGLLRCPYCGGIMVAKKNNNTYHCQECTKGFWIQINLVDSILWHSSIMLYATKLAHKDDEDRKQYYCQLTICDSKIKTSESRIKAMQERAEVIEHKAYVEGTLSITKADSFINELNNKIDKERKELNKWMNDRATIQNLLIEVSRDDKVVNLDKVAEIKDDKTRYDIIHEVFDCAFIDRIEQYKYTISIYPKLWNHPLQYTLNTKKNTVFTDVTEDIHQHLIGKRHSFIDDIEVLPISEEIKCYEERFKAVRNKEKNRYYNVKYCREHKEDNARRQREYRARQKALKAKTIK

SEQ ID NO: 117 - DNA, 50 bp, Bacteroides ovatus
  source 1..50: mol_type = genomic DNA
atacataaatagggttaaatagtatgaattatatagtataatttatatat

SEQ ID NO: 118 - DNA, 40 bp, Bacteroides ovatus
  source 1..40: mol_type = genomic DNA
attccaatactatgccggttgaaacctcgcacatgcgcgc

SEQ ID NO: 119 - DNA, 40 bp, Bacteroides ovatus
  source 1..40: mol_type = genomic DNA
attccaatactatgccggtataaacctcgcacatgcgcgc

SEQ ID NO: 120 - DNA, 50 bp, Bacteroides ovatus; identical to SEQ ID NO: 100
  source 1..50: mol_type = genomic DNA

SEQ ID NO: 121 - protein, 578 aa, Bacteroides ovatus
MKAILLVRVSTKAQDFDEQEREIYNMAIKDGYLPECIIPVCEKESGIKLAEEERAGLNKMKELIEEDNDINCVYCWEVSRIARRKKINFSVLDYLTTHKIQLVVKNPSIRLFKDNGDIDEGAEMVFTLFSQMAESEMRTKLARWKRTKDAKRKESIYTGGWILYGYTVDETTKKLIIDEKQANIVKTIFALYLTGKYSYGSLAKELMQTGLLVGYTLLTARKFISLTLNNLAYAGLPSSTNKRNNVKTEGNIYPQLVTLEMINKCKEIAKSNTNKPKKQYNNYYFGKGLLRCPYCGGIMVAKKNNNTYHCQECTNGFWIQINLVDSILWHSSIALYATKLAHKDDEDRKQYYCQLAICDSKIKTSESRIKAMQERAEVIEYKAYVEGTLSITKADSFINELNNKIDRERKELNKWMNDRATIQGLLIEVSRDDKVVNLDKVAEIKDDKTRYDIIHEVFDCAFIDRIEQYKYTISIYPKLWNHPLQYTLNTKKNTVFTDVTEDIHQHLIGKRHSFIDDIEVLPISEEIKCYEERFKAVRNKEKNRYYNVKYCREHKEDNARRQREYRARQKALKAKTIK

SEQ ID NO: 122 - DNA, 50 bp, Bacteroides ovatus; identical to SEQ ID NO: 117
  source 1..50: mol_type = genomic DNA

SEQ ID NO: 123 - DNA, 40 bp, Bacteroides ovatus; identical to SEQ ID NO: 118
  source 1..40: mol_type = genomic DNA

SEQ ID NO: 124 - DNA, 40 bp, Bacteroides ovatus; identical to SEQ ID NO: 119
  source 1..40: mol_type = genomic DNA

SEQ ID NO: 125 - DNA, 50 bp, Bacteroides ovatus; identical to SEQ ID NO: 100
  source 1..50: mol_type = genomic DNA

SEQ ID NO: 126 - protein, 580 aa, Bacteroides ovatus; identical to SEQ ID NO: 101

SEQ ID NO: 127 - DNA, 50 bp, Bacteroides ovatus; identical to SEQ ID NO: 117
  source 1..50: mol_type = genomic DNA

SEQ ID NO: 128 - DNA, 40 bp, Bacteroides ovatus
  source 1..40: mol_type = genomic DNA
ataccaatactatgccggttgaaacctcgcacatgcgcgc

SEQ ID NO: 129 - DNA, 40 bp, Bacteroides ovatus
  source 1..40: mol_type = genomic DNA
ataccaatactatgccggtataaacctcgcacatgcgcgc

SEQ ID NO: 130 - DNA, 50 bp, Bacteroides ovatus; identical to SEQ ID NO: 100
  source 1..50: mol_type = genomic DNA

SEQ ID NO: 131 - protein, 578 aa, Bacteroides caccae; identical to SEQ ID NO: 96

SEQ ID NO: 132 - DNA, 50 bp, Bacteroides caccae; identical to SEQ ID NO: 117
  source 1..50: mol_type = genomic DNA

SEQ ID NO: 133 - DNA, 40 bp, Bacteroides caccae
  source 1..40: mol_type = genomic DNA
ataccgatactattcaggttgtgtcccttggcgtgcgcac

SEQ ID NO: 134 - DNA, 40 bp, Bacteroides caccae
  source 1..40: mol_type = genomic DNA
ataccgatactattcaggtattgtcccttggcgtgcgcac

SEQ ID NO: 135 - DNA, 50 bp, Bacteroides caccae; identical to SEQ ID NO: 100
  source 1..50: mol_type = genomic DNA

SEQ ID NO: 136 - protein, 578 aa, Bacteroides caccae; identical to SEQ ID NO: 96

SEQ ID NO: 137 - DNA, 50 bp, Bacteroides caccae; identical to SEQ ID NO: 117
  source 1..50: mol_type = genomic DNA

SEQ ID NO: 138 - DNA, 40 bp, Bacteroides caccae; identical to SEQ ID NO: 8
  source 1..40: mol_type = genomic DNA

SEQ ID NO: 139 - DNA, 40 bp, Bacteroides caccae
  source 1..40: mol_type = genomic DNA
atgcctatgctgtgccggtataagcctctcacgtgtgcac

SEQ ID NO: 140 - DNA, 50 bp, Bacteroides caccae; identical to SEQ ID NO: 100
  source 1..50: mol_type = genomic DNA

SEQ ID NO: 141 - protein, 580 aa, Bacteroides caccae
MKAILLVRVSTKAQDFDEQEREIYNMAIKDGYLPECIIPICEKESGIKLAEEERAGLNKMKELIEEDNDINCVYCWEVSRIARRKKINFSVLDYLTTHKIQLVVKNPSIRLFKDNGDIDEGAEMVFTLFSQMAESEMRTKLARWKRTKDAKRKESLYTGGWILYGYTVDETTKKLIIDEKQANIVKTIFALYLTGKYSYGSLAKELMQTGLLVGYTLLAARKFVSLTLNNLAYAGLPSSTNKHHNLKTEGNIYPQLVTLEMINKCKEIAKDNITKPKKQYDSYYFGKGLLRCPYCGGIMVAKKNNNTYHCQICTKGFWIQINLVDSILWYSSIALYATKLMHRNDENRKQYYCQLTICDSKIKTSESQIKAMQERAEVIEYKAYVEGTLSITKADSFINELNNKIDRERKELNKWMNDRATIQGLLIEVSRDDKVVNLDKVAEIKDDKTRYDIIHEVFDCAFIDRIEQYKYTISIYPKLWNHPLQYTLNTKKNTVFTDVTEDIHQHLIGKKHSFIDDIEVLPVSEEIKCYEERFKAVRNKEKNRYYNVKYCREHKEDNARRQREYRARKKALEAKNNQAK

SEQ ID NO: 142 - DNA, 50 bp, Bacteroides caccae
  source 1..50: mol_type = genomic DNA
atacataaatagggttaaatagtatcaattatatagtataatttatatat

SEQ ID NO: 143 - DNA, 40 bp, Bacteroides caccae
  source 1..40: mol_type = genomic DNA
atgccgattgcccgtttgttccaccccatgcaatgtgcgc

SEQ ID NO: 144 - DNA, 40 bp, Bacteroides caccae
  source 1..40: mol_type = genomic DNA
atgccgattgcccgtttgtatcaccccatgcaatgtgcgc

SEQ ID NO: 145 - DNA, 50 bp, Bacteroides caccae; identical to SEQ ID NO: 100
  source 1..50: mol_type = genomic DNA

SEQ ID NO: 146 - protein, 580 aa, Bacteroides thetaiotaomicron; identical to SEQ ID NO: 101

SEQ ID NO: 147 - DNA, 50 bp, Bacteroides thetaiotaomicron; identical to SEQ ID NO: 107
  source 1..50: mol_type = genomic DNA

SEQ ID NO: 148 - DNA, 40 bp, Bacteroides thetaiotaomicron
  source 1..40: mol_type = genomic DNA
gggcacatgcaaaaggattcaatgcgtcgagtatcggaat

SEQ ID NO: 149 - DNA, 40 bp, Bacteroides thetaiotaomicron
  source 1..40: mol_type = genomic DNA
gggcacatgcaaaaggattatatgcgtcgagtatcggaat

SEQ ID NO: 150 - DNA, 50 bp, Bacteroides thetaiotaomicron; identical to SEQ ID NO: 100
  source 1..50: mol_type = genomic DNA

SEQ ID NO: 151 - protein, 483 aa, Aeribacillus pallidus
MGFSYKPNTEHIFCLGGIRMAVGIYIRVSTEEQAKEGYSISAQREKLKAYCQVQDWNDFRFYVDEGISAKDTNRPQLQLMLQHIKEGMIDTVLVYRLDRLTRSVVDLYKLLEIFEKHNCTFKSATEVYDTSTAIGRLFITLVAAMAQWERENLGERVRMGQIEKARQGKYSAKAPFGFDKGPDDRLVINEDEKTVVLDMIEKIKEGYSIRKLADYMDNSGIPPIRGYKWHIASILDILKNPALYGAVRWRDEIIEGAHEGIITKEEYQHLLKVLESRQNFKKRETYSIFVFQMKLICPQCGNRLASERTRYYRKRDNKIVESNQYRCQACTLNKRKSIGVSEKKIERALLKYFESIKFDHIPEVEDNSKQEIEQLTAQLKKIERQREKYQKAWANDLVSDEEFSHRMKETKQMYEEIKTKLDAIQPAQQEFDIEKLKDIVNNFRMNWSYLSPDEKRQFINTFVESIQFEKQDGTVQILDVNFY

SEQ ID NO: 152 - DNA, 50 bp, Aeribacillus pallidus
  source 1..50: mol_type = genomic DNA
ttttgtatttatgtaaaatatatacctgtataatttatataaatacaaaa

SEQ ID NO: 153 - DNA, 40 bp, Aeribacillus pallidus
  source 1..40: mol_type = genomic DNA
ttttgtgtttaaatataaacctacgaaatgctcttgtttt

SEQ ID NO: 154 - DNA, 40 bp, Aeribacillus pallidus
  source 1..40: mol_type = genomic DNA
ttttgtgtttaaatataaaattacgaaatgctcttgtttt

SEQ ID NO: 155 - DNA, 50 bp, Aeribacillus pallidus
  source 1..50: mol_type = genomic DNA
ttttgtatttttacaatatatttaatagtatatatttaaggtatacaaaa

SEQ ID NO: 156 - protein, 586 aa, Bacteroides congonensis
MKAILLVRVSTDRQEYDEQEKIIYSQAIRDGYKDSDIIPIKEKESGIKLSEEERQGLNRMKEAIEADNEINCVYAWEISRIARKKKVLFSILDYLITRKIQLKIQEPSITLLNADGSINEASETIFTLFAQMAESEMRNKTARFSRSKTASKSKGKYIGGFYPFGYCVDEEGYFQIKEDEAEEVRFIFNSYVSERHSVKTISAEARLKGFKINKSYQVRNILTNNSYASLNEGGVKYPQIISKEMFQLSREIARKNNTNIGLKTKNFYLCAGLIKCHLCGYRYSGIKGTHQYTCRGKLSPDAYNLPHKCSAPSISINLLDAIVWEFTKKIESFNPSNLISEVARIEREIEELNKQIENCNHLLELNEKNRAKNNKMYKIDALSDDEYETENNKIKAERRNIENDIKTINEKINGLNDLKAYRTSYETVKGNLDNITDLPTRREIIRNNIEYIKIYNADISQHKIIKIKCKRYDYESFFIASTTSHKSYAKQYNHHTKFNKETKMIDVYIDDEYKCSYSWYQAMAEDALYSRTLVFNKELHYKDNYNAVKAKEQRDKNKEKRNARARELYRIKQEQLKRNQQTEQPE

SEQ ID NO: 157 - DNA, 50 bp, Bacteroides congonensis
  source 1..50: mol_type = genomic DNA
tatatataatataaacataatgtatttacactttctatatgtttcatata

SEQ ID NO: 158 - DNA, 40 bp, Bacteroides congonensis
  source 1..40: mol_type = genomic DNA
gccttttctcatctgggattttacattgtctactttcatt

SEQ ID NO: 159 - DNA, 40 bp, Bacteroides congonensis
  source 1..40: mol_type = genomic DNA
gccttttctcatctgggattatacattgtctactttcatt

SEQ ID NO: 160 - DNA, 50 bp, Bacteroides congonensis
  source 1..50: mol_type = genomic DNA
tatatattatatatacataatatatatacaccttatatatattatatata

SEQ ID NO: 161 - protein, 539 aa, Moritella viscosa
MKTAVSYRRVSSGKQLKGHGLTRQKEMVTNWIKRLDLQLVDDLVDDGLSAFKGHHKSKGELGVLLHAVQSNSISFDCLLVENFDRLGRMGVMDQFSQFSILINAGIELHIISEDKIFTSESINKNPYELFGVLAQMARSYDESKQKAQRVKKAFDSKMKLVEEHGVIFTKTVPVWLKVNSERTKFTIKPEAELVQRIFQLALQGYGATKIAKVFTKEKIPVPVYDKRSNSIWTQNKIQRILSNHAVYGKFVGTKTTIERDGYYPAIVSKEDFFIVQQQSKVRLNHRTKTTTNEVPNLFSGLLTCGHCDRAMRTHKLKNAPFLRKRTFRCKTSAQTDGCCHNNSYHLKSFEIGMILVLFEIDFSTNKKNQSKLPFIKAQIDDFNKQNENLVQAIMSGNVSKLIINKSVELEQQIADLKKELIKEEAAENISAPQLNLAERDQIIEDALYNEVYDVRLKLQSKLQQLISNIKIYDFGVLIELSMNRKVFFKPLSNRDFTPMYTLRIPDDVFDGPNDWQQLVTKSKIKIDTSRIKRTANPVV

SEQ ID NO: 162 - DNA, 50 bp, Moritella viscosa
  source 1..50: mol_type = genomic DNA
agtttactttatactttaatagttaggacttttgtattatttgcaacatt

SEQ ID NO: 163 - DNA, 40 bp, Moritella viscosa
  source 1..40: mol_type = genomic DNA
gaatactgcctggaaaagcagtcgtattagggtggatatt

SEQ ID NO: 164 - DNA, 40 bp, Moritella viscosa
  source 1..40: mol_type = genomic DNA
gaatactgcctggaaaagctttcgtattagggtggatatt

SEQ ID NO: 165 - DNA, 50 bp, Moritella viscosa
  source 1..50: mol_type = genomic DNA
attttatttggcaatttattatttttgacttttataattattgcagcatt

SEQ ID NO: 166 - protein, 562 aa, Kandleria vitulina
MSNMKRTGQTALYERLSRDDDQGSDPEMQGESNSITNQKQLLESYAKRNGFVNIYHYTDDGVSGTTFDREGFQKMIKAVEENKVSTVIVKDMSRFGRDYLKVGFYTEILFKEKGVRFIAINNGIDSEKQAESDFTPFLNIMNEWYARDTSRKIQSIFRARMEEGKRVSPSVPYGYYRNPKNKQELLVDKESAKVVKRIYHLVIEGYGVTQIADILTKDKVLIPSAYAEIHYPENNHSSKKRGIEDPYFWTPTTVGYILEKREYMGHTILGKTICVDYKTKKRRKAKEEELIIFKNTHEAIIDEETWNNAQRLRKTVRRSPKYGTTSHPFTGLLICSDCGGKLSYREPAEHKEKKYDSDYSFVCQHYRHRKGTCSMHYIKVKTVNEILLKSIKEITDFAKEEKQEFLKVMNKLSDEKREEKYQEDKEKLEKLSSRNEELTTLITKLYEDHALGKIPVKHFDRLFNTYDTEQQDLEKQIQYFENEIESYHQRKVDTDKFLKMIEKYTNIEKLTVPMINEYIEKVVVHEATGGRKGKYRKQQVDVYFNFIGNCQVPQKADIEKMA

SEQ ID NO: 167 - DNA, 50 bp, Kandleria vitulina
  source 1..50: mol_type = genomic DNA
ggaacagtaaattgaaaaaaagatttactgttttttgctgctcaaatttc

SEQ ID NO: 168 - DNA, 40 bp, Kandleria vitulina
  source 1..40: mol_type = genomic DNA
acagtaaatcaaaaaaggtttactgttttttctttgtcta

SEQ ID NO: 169 - DNA, 40 bp, Kandleria vitulina
  source 1..40: mol_type = genomic DNA
acagtaaatcaaaaaaggtgaactgttttttctttgtcta

SEQ ID NO: 170 - DNA, 50 bp, Kandleria vitulina
  source 1..50: mol_type = genomic DNA
agaaaagtaaagaaaaaaagaaatgaactttttttttccattaaaatttc

SEQ ID NO: 171 - protein, 562 aa, Kandleria vitulina
MSNMKRTGQTALYERLSRDDDQGSDPEMQGESNSITNQKQLLESYAKRNGFVNIYHYTDDGVSGTTFDREGFQKMIKAVEENKVSTVIVKDMSRFGRDYLKVGFYTEILFKEKGVRFIAINNGIDSEKQAESDFTPFLNIMNEWYARDTSRKIQSIFRARMEEGKRVSPSVPYGYYRNPKNKQELLVDKESAKVVKRIYHLVIEGYGVTQIADILTKDKVLIPSAYAEIHYPENNHSSKKRGIEDPYFWTPTTVGYILEKREYMGHTILGKTICVDYKTKKRRKAKEEELIIFKNTHEAIIDEETWNNAQRLRKTVRRSPKYGTTSHPFTGLLICSDCGGKLSYREPAEHKEKKYDSDYSFVCQHYRHRKGTCSMHYIKVKTVNEILLKSIKEITDFAKEEKQEFLKVMNKLSDEKREEKYQEDKEKLEKLSSRNEELTTLITKLYEDHALGKIPVKHFDRLFNIYDTEQQDLEKQIQYFEQEIESYHQKKVDTDKFLKMIEKYTNIEKLTVPMINEYIEKVVVHEATGGRKGKYRKQQVDVYFNFIGNCQVPQKADIEKMA

SEQ ID NO: 172 - DNA, 50 bp, Kandleria vitulina; identical to SEQ ID NO: 167
  source 1..50: mol_type = genomic DNA

SEQ ID NO: 173 - DNA, 40 bp, Kandleria vitulina; identical to SEQ ID NO: 168
  source 1..40: mol_type = genomic DNA

SEQ ID NO: 174 - DNA, 40 bp, Kandleria vitulina; identical to SEQ ID NO: 169
  source 1..40: mol_type = genomic DNA

SEQ ID NO: 175 - DNA, 50 bp, Kandleria vitulina; identical to SEQ ID NO: 170
  source 1..50: mol_type = genomic DNA

SEQ ID NO: 176 - protein, 502 aa, Clostridium perfringens
MNNKICMYLRKSRADEELEKTLGEGETLSKHRNALLKFAKEKKLNIVEIKEEIVSGESLFFRPKMLELLKEVEAKKYNGVLVMDMQRLGRGDMKDQGIILETFKNSNTKIITPQKTYDLNNDFDEEYTEFEAFMSRKELKMINRRMQGGRVRSVEEGNYIATNPPFGYDIDFIKKSRTLKINEDEAPAINLIFKLYIEGNGASAIADELNVLGYKTKLGNNFSQSSVLTIIKNPVYIGKIAWKRKDIKKSKTPGKVKDTRLRDVSEWIIADGKHKAIINTETWEVAQKILKSRYHIPYQLSNSPVNVFAGLITCGICGKKMVMRKARGINRLMCIYKCGNKSTRFDNVESDCLKYLREYLTDYTAEIKNQIKEDDKNIYISQIFQLKKELTTLNNQRLKLFDLLERNLYDEDTFLERSKNINDRIETVSSTLKSIEKLLKKKSKASYEEDIEFFKSVLDAYDETENISKKNSLLKSILFKIEYTKTNKGKDYEIKLFPKLRK

SEQ ID NO: 177 - DNA, 50 bp, Clostridium perfringens
  source 1..50: mol_type = genomic DNA
tacatacaacatattagatatatttcattacacacaacatgttgtatgta

SEQ ID NO: 178 - DNA, 40 bp, Clostridium perfringens
  source 1..40: mol_type = genomic DNA
aatatctatgagacaaatttcattaccttccttatctact

SEQ ID NO: 179 - DNA, 40 bp, Clostridium perfringens
  source 1..40: mol_type = genomic DNA
aatatctatgagacaaatttgattaccttccttatctact

SEQ ID NO: 180 - DNA, 50 bp, Clostridium perfringens
  source 1..50: mol_type = genomic DNA
tacatacatacaaatacatatatttgtgtacacacactaatgtgtatata

SEQ ID NO: 181 - protein, 502 aa, Clostridium perfringens
MNKKICIYLRKSRADEELEKTLGEGETLSKHRNALLKFAKENKLNVTDIKEEIVSGDSLFFRPKMLELLKEVENNMYYGVLVMDIDRLGRGGMKDQGIILDAFKESKTKIITPLKTYDLDNEMDEEITEFKTFFSRRELKTINRRMQGGRIRSIEEGNYIATNPPYGYDISFIKKNRTLKINEDEAPAINLIFKLYIEGNGASAIANELNNLGYKTKLGNNFSPSSVLTIIKNPIYIGKIPWKRKDIKKSKTPGKVKDTRTRDKSEWIIADGKHPGIVTNEIWESAQKILKGRYHIPYQLSNAPVNPFAGIISCGICGKKMVMRKARGINRLMCIYKCGNKSTRFDNVESDCLEALKDYLSNYSAEIKNSIKKEDIDMYSIQITNLKKELTTLNNQRLKLFDLLERNLYDEDTFLERSKNINDRIENITHTLKSLEKKVKKNSYTSYEEDIKHFKNVLDAYNLTKDVSKKNNLLKSILYKIEYTKTEKGKDYEIKLFPKLRK

SEQ ID NO: 182 - DNA, 50 bp, Clostridium perfringens
  source 1..50: mol_type = genomic DNA
tacatacaacatactagatatatttcattacacacaataagttgtatgta

SEQ ID NO: 183 - DNA, 40 bp, Clostridium perfringens; identical to SEQ ID NO: 178
  source 1..40: mol_type = genomic DNA

SEQ ID NO: 184 - DNA, 40 bp, Clostridium perfringens; identical to SEQ ID NO: 179
  source 1..40: mol_type = genomic DNA

SEQ ID NO: 185 - DNA, 50 bp, Clostridium perfringens; identical to SEQ ID NO: 180
  source 1..50: mol_type = genomic DNA

SEQ ID NO: 186 - protein, 502 aa, Clostridium perfringens
MNKKICIYLRKSRADEELEKTLGEGETLSRHRNALLKFAKENKLNVTDIKEEIVSGDSLFFRPKMLELLKEIENNMYYGVLVMDIDRLGRGGMKDQGIILDAFKISKTKIITPIKTYDLDNEMDEELTEFKTFFSRRELKTINRRMQGGRVRSVEEGNYIATNPPFGYDIDFIKKNRTLKINEDEAPAINLIFKLYIEGNGASFIANELNNLGYKTKLGNNFSPSSVLTIIKNPIYIGKIPWKRKDIKKSKIPGKVKDTRTRDKAEWIIANGKHPAIITNEIWESSQTILKGRYHIPYQLSNAPVNPFAGLITCGICGKKMVMRKARGINRLMCIYKCGNKSTRFDSVEYDCLEALKDYLSNYSAEIKNSIQKEDIDMYSIQITNLKKELTTLNNQRLKLFDLLERNLYDEDTFLERSKNVNDRIENITHTLKSLEKKVKKNSYTSYEDDIKHFENVLDAYNLTKDISKKNNLLKSILYKIEYTKTEKGKDYEIKLFPKLRK

SEQ ID NO: 187 - DNA, 50 bp, Clostridium perfringens
  source 1..50: mol_type = genomic DNA
tacatacaacatgctagatatatttcattacacacaatatgttgtatgta

SEQ ID NO: 188 - DNA, 40 bp, Clostridium perfringens
  source 1..40: mol_type = genomic DNA
aatatctatgagacaaatttcattaccctccttatctact

SEQ ID NO: 189 - DNA, 40 bp, Clostridium perfringens
  source 1..40: mol_type = genomic DNA
aatatctatgagacaaatttgattaccctccttatctact

SEQ ID NO: 190 - DNA, 50 bp, Clostridium perfringens; identical to SEQ ID NO: 180
  source 1..50: mol_type = genomic DNA

SEQ ID NO: 191 - protein, 574 aa, Serratia marcescens
MRKCFLYSRVSSDAQISGDGLVRQEDKLKQYLLQNALRLNLSVDDCEILVDSGVSGWKGSNMGDTAALGQLFHRVESGEIDGSVLIVESLDRFSRENPFRVAGYIAKLAEHSIDIIDVEQNLVIGTSNPWSSTIASIIANRAHEESTLKSKRIKAAWNSRRRKAEESGQYMIKNTPFWIDVLDDKYVANADASIVREIFDLYLQGYGSFTIAKKMNEAGKVIRNKRWSTPKICALLRNPRCNGDFISHSLERDYEKGTSTSVEHVIKGLYPKIVTDEEFALVLNRLNDGSKNKRVCNDRKVTILNGLLKCSICGGALTVRSAGAYRYVGCLKTIEKGGCYSKPIRYDALEKIVVNHIRNMDLGKVYESNDSQEVISKERIKSLMSHIEEYKAGITQLRERGKKPSFDMLTELQNSEDELELLKKELEQLSLSKIDLSEFAVSTELFDITQIALRTRLERTISSLLNKIKVYHTKDLSFSLIEMIYVNDVVKHVLVADKKGDVTGDVVIRRNGESTTYESCSVKIIKDEDGVFSLDCNISEVVLNDYLLLMNVVDFVDSEAKEFLNLHLNAVLAH

SEQ ID NO: 192 - DNA, 50 bp, Serratia marcescens
  source 1..50: mol_type = genomic DNA
tttattttagtgttctataataatgtgatactttagaacactacgataaa

SEQ ID NO: 193 - DNA, 40 bp, Serratia marcescens
  source 1..40: mol_type = genomic DNA
atttgtgatgtaacataatgtaaatcttcatataaaaaac

SEQ ID NO: 194 - DNA, 40 bp, Serratia marcescens
  source 1..40: mol_type = genomic DNA
atttgtgatgtaacataatttaaatcttcatataaaaaac

SEQ ID NO: 195 - DNA, 50 bp, Serratia marcescens
  source 1..50: mol_type = genomic DNA
tttattttatatatctttaatcatttcatacttttgcatcctatggtaaa

SEQ ID NO: 196 - protein, 478 aa, Vagococcus teuberi
MKTAIYVRVSTNEQAEEGYSIDEQIDKLKKFCEVKDWQVANIYKDPGFTGSNIDRPGLKKLINDVENKKIETVLVYKLDRLSRSQKDTLFLIEDVFGINNTNFVSLNENFDTSTPFGKAMIGILAVFAQLEREQIKERMTMGKIGRAKAGKAMSWHWAPFGYTHKDDSYEVVDLEAQIVKQIFHDYLSGISITKLRDKMNDEGHIGKDIAWSYRTIRQTLDNPTYAGYTKYKDQIFPGNHEAIVSKEVYDEVQKQLEIRQKEAYKKNNNPRPFQAKYLVSGLVRCGHCGAALGLHQYAKKKDGTRTKIYKCHSRTGKKKNVTMVKADNCPSCDYPKEELENVVLSEIEKIRINPQLIQKSSHSAQEIDDTPLIKRLEELDRKLEKLVSLYLDETLSLEMLNDKKELIQKEKTAIEGKLNKTNKQKPELKISEAADILKNLKGSILKLDYEKQKIIVRKLIKQITLKDDEMVIQWRFAV

SEQ ID NO: 197 - DNA, 50 bp, Vagococcus teuberi
  source 1..50: mol_type = genomic DNA
taaatatatttactataccgcatttcaatataggtaaccaaatatatcaa

SEQ ID NO: 198 - DNA, 40 bp, Vagococcus teuberi
  source 1..40: mol_type = genomic DNA
taataacacaatcagcatttcaagcaacgtaaaaccgtca

SEQ ID NO: 199 - DNA, 40 bp, Vagococcus teuberi
  source 1..40: mol_type = genomic DNA
taataacacaatcagcattttaagcaacgtaaaaccgtca

SEQ ID NO: 200 - DNA, 50 bp, Vagococcus teuberi
  source 1..50: mol_type = genomic DNA
tacatatattgaatatcatgcattttaatatatgtaaatacatatattaa

SEQ ID NO: 201 - protein, 509 aa, Parageobacillus caldoxylosilyticus
MRVALYYRVSTKLQEDKYSLAAQKEELTKYAKSQGWNIVGEFKDVESGGKLEKKGLTALLDLVDEGGVDVVLVVDQDRLSRLDTVAWEYLKSVLRDNNVKIAEPGNIIDLNNEDDEFISDIKNLIAKREKRAIVRRLMRGKRQRMREGKGWGQPPFEYQYDHQTGKYKAKPEWKWVIPFIDNLYLNEQLGMKAISDRLNEISKTPTGKSWNEHLVHTRLVSKAFHGVMEKTFANGETISIPGIYEPLRTEETYRKIQEEREKRGEQFSVSGRKGSAKHILKRTKIICGECGRKIQIATHGTKEKPIYYAKHGRKEIVDGSVCDININTVRFDKNIMTALKEILSSEEQAKKYINLDIDQNELNALKKNIKTLNKKISKLQESLDRLLDLYLAGGLKKEKYLEKQKQLESQIEIYKKELDQNELKLKTVESNMWNYEYLYEYLEVITDLEKELTPMERVQLVGKIFPTATLYREKLILTADVKGIPVDIEIPIDPDPYPWHPKKRNTYTK

SEQ ID NO: 202 - DNA, 50 bp, Parageobacillus caldoxylosilyticus
  source 1..50: mol_type = genomic DNA
tatgggtattccctaatatttatttcaataaatatagggaaatacccata

SEQ ID NO: 203 - DNA, 40 bp, Parageobacillus caldoxylosilyticus
  source 1..40: mol_type = genomic DNA
cattaatacgattagcatttcgattaacgtaaaccccttt

SEQ ID NO: 204 - DNA, 40 bp, Parageobacillus caldoxylosilyticus
  source 1..40: mol_type = genomic DNA
cattaatacgattagcattatgattaacgtaaaccccttt

SEQ ID NO: 205 - DNA, 50 bp, Parageobacillus caldoxylosilyticus
  source 1..50: mol_type = genomic DNA
tatttgtttattataatatttattataataaatatatatgtataccctac

SEQ ID NO: 206 - protein, 525 aa, Clostridioides difficile
MTENRKTAVYIRLSMEDENVDGRTKLESDSVTSQRILLKSFVIDQLGVDESDILEYVDDGVSGTHFKRNGFQQLQEDMKSGQIGCVVVKDFSRFGRDYLEVGFYIEYIFPLLQIRFISINDSYDSAASSGMTGGMNVALKNLVYNMYSLDLSKKISSAMQTRMKNGTRLPVNARYGYRKGKDGRLEIDPDSAKVVKMIFQMAAEGMSFAEITRELNKQEIATCDEQKMSRGEQVQFRRFDTIMKKRWNPTTVSAIIRDEIYIGTRIWGKTRCSMHTGHKAVINDESDWIRLENHHDPIVDRELFEKANRLHPKKSRGVAETRTNYTLARRKKQPALMLCAHCGHCLVRETEHLLKCSDGRTSGDHVCKSLVVRREPLEKNIMELVHQFAFSMLENRKIVESRNQSKGMETNVAELLKQSRQLSSEKMKLYDEYKDDRIDRELYKQKAGQIGRQLEEIRRKIAESERDAKILEQNNTAKEMKLEEFLSMEKFDTEKLREIIKVIRVHSQEEIEIEWNFDDVFLGQR

SEQ ID NO: 207 - DNA, 50 bp, Clostridioides difficile
  source 1..50: mol_type = genomic DNA
atcaaatttaatataagtttttatattaaaaaacatactaaaaatctgat

SEQ ID NO: 208 - DNA, 40 bp, Clostridioides difficile
  source 1..40: mol_type = genomic DNA
aatttacgctttattttaatttaaaaaaatgattacttta

SEQ ID NO: 209 - DNA, 40 bp, Clostridioides difficile; identical to SEQ ID NO: 208
  source 1..40: mol_type = genomic DNA

SEQ ID NO: 210 - DNA, 50 bp, Clostridioides difficile
  source 1..50: mol_type = genomic DNA
aacaaattttgttatacattttattttaaaaaacatagtacaaataggat

SEQ ID NO: 211 - protein, 476 aa, Lysinibacillus fusiformis
MTVGIYIRVSTEEQANEGYSISAQRERLKAFCLAQNWHDYKFYVDEGISGRDTKRPQLKKMMEDIKAGHINVLLVYRLDRLTRSVRDLHRILDELEKYSCTFRSATEFYDTSTAMGKMFITIIAAIAEWESANLGERVTMGQVEKARQGEWAAQPPYGFFKDDKHKLQIHKEEIKAVKLMVKKIREGMSFRQLAFYMDSTQYKPKRGYKWHVRTLLSLMHNPALYGAMYWKEQIYENTHQGIMTKEEFDQLQKIISSRQNYKSRNVSSHFVFQTKLICPDCGSRCTSERYTWKRKTDNAVEVRNSYRCQVCALNNPKSTPFSVREVKVDEALIEYMINFTVAPSEVVELNENDQLLDIKNNLRKIENQREKYQRAWANDLITDDEFKVRMDESRLQFDSLQNDLKNIEGEKYDVVDIERYIEITKTFNDNYLNLTQEERRTFIQTFIESVKVEIVEHTKGKGYRNQKIRIADVSFY

SEQ ID NO: 212 - DNA, 50 bp, Lysinibacillus fusiformis
  source 1..50: mol_type = genomic DNA
attcgtatttacgttaccttcactactactaacttcacataaacccaaac

SEQ ID NO: 213 - DNA, 40 bp, Lysinibacillus fusiformis
  source 1..40: mol_type = genomic DNA
tttaatatttaaaaaaagaacaacaaaatgttcctgatta

SEQ ID NO: 214 - DNA, 50 bp, Lysinibacillus fusiformis
  source 1..50: mol_type = genomic DNA
attcgtatttacgttaccttcacttgtactaacttcacataaacccaaac

SEQ ID NO: 215 - DNA, 40 bp, Lysinibacillus fusiformis
  source 1..40: mol_type = genomic DNA
tttaatgtttaaaaaaatatgaacaatgtattgctcatta

SEQ ID NO: 216 - protein, 477 aa, Lysinibacillus fusiformis
MTVGIYIRVSTEEQANEGYSISAQRERLKAFCTAQNWHDYKFYVDEGISGRDTKRPQLKKMMEDIRAGHINVLLVYRLDRLTRSVRDLHRILDELEKYNCTFRSATEFYDTSTAMGKMFITIIAAIAEWESANLGERVTMGQVEKARQGEWAAQPPYGFYKDENHKLQIHEEEIKAVKIMVKKIREGMSFRQLAFYMDSTKYKPKRGYKWHTRTLLNLMHNPALYGAMYWKGKVYENTHQGIMTKEEYDQLQKIISSRQNYKSRNVTSHFVYQTKLICPDCGNRCTSERYTWERKTDKIVEVRNSYRCQVCGLNDPTTTPFSVREVKVDDALIEYMNNFVISPSKDEELNTDNEQLFEIKNEIRKIENQREKYQRAWANDLITDDEFKVRMDESRLRYDSLQKELKNIEGEKYDVVDIERYKEIALSFNENYINLTQEERRTFVQTFIDSVVIEIVEHTKGKGYRNQKIRIADVRFY

SEQ ID NO: 217 - DNA, 50 bp, Lysinibacillus fusiformis
  source 1..50: mol_type = genomic DNA
attcgtatttatgttaactctactacgactaacttcacataaatacaaac

SEQ ID NO: 218 - DNA, 40 bp, Lysinibacillus fusiformis; identical to SEQ ID NO: 213
  source 1..40: mol_type = genomic DNA

SEQ ID NO: 219 - DNA, 50 bp, Lysinibacillus fusiformis
  source 1..50: mol_type = genomic DNA
attcgtatttatgttaactctacttggactaacttcacataaatacaaac

SEQ ID NO: 220 - DNA, 40 bp, Lysinibacillus fusiformis; identical to SEQ ID NO: 215
  source 1..40: mol_type = genomic DNA

SEQ ID NO: 221 - protein, 503 aa, Clostridioides difficile; identical to SEQ ID NO: 11

SEQ ID NO: 222 - DNA, 50 bp, Clostridioides difficile; identical to SEQ ID NO: 12
  source 1..50: mol_type = genomic DNA

SEQ ID NO: 223 - DNA, 40 bp, Clostridioides difficile
  source 1..40: mol_type = genomic DNA
aatttgtttaatatataatttgctaacaataaaatatcat

SEQ ID NO: 224 - DNA, 50 bp, Clostridioides difficile; identical to SEQ ID NO: 12
  source 1..50: mol_type = genomic DNA

SEQ ID NO: 225 - DNA, 40 bp, Clostridioides difficile
  source 1..40: mol_type = genomic DNA
aatttcattaaaatataatttgcctacaataaaatatact

SEQ ID NO: 226 - protein, 503 aa, Clostridioides difficile; identical to SEQ ID NO: 11

SEQ ID NO: 227 - DNA, 50 bp, Clostridioides difficile; identical to SEQ ID NO: 12
  source 1..50: mol_type = genomic DNA

SEQ ID NO: 228 - DNA, 40 bp, Clostridioides difficile
  source 1..40: mol_type = genomic DNA
atattttttaaacatctgattatttttatataaaaaatct

SEQ ID NO: 229 - DNA, 50 bp, Clostridioides difficile; identical to SEQ ID NO: 14
  source 1..50: mol_type = genomic DNA

SEQ ID NO: 230 - DNA, 40 bp, Clostridioides difficile
  source 1..40: mol_type = genomic DNA
atatcttttaaaaatatataaatttttatataaaatattt

SEQ ID NO: 231 - protein, 544 aa, Streptococcus suis
MKSTTLQRTLTTKYSSLDRTEELTALYCRISNEDMNAGDSNSILNQKSILEKYAKDNRLGTYRFFIDDGYTGTNFSKRPAFQEMLELVNAGIVKTVVVKDLSRFGRNATEVGLYTDILFPKLDVRFIAINDNVDSANSNITDLDYSGFLNIFNEFHSKSTSAKVRSVLRSKAERGERIGGFAPFGYQLDPKDKNHLVIDEVAAEIVRRIFRLYLDGMTVSKIANLLSSEKVPTVTKYRQKVVDPNCDWYRESVKNILSRPEYCGDLVLAKSYIKSYKDKRKILNDTKDWLVFKDRHEAIIPRDQFELVQTMLAKKRRRTKSNRHGLFSGLVYCHDCGYRHYFCTGKSISPNQERYICSGFQSKKVKCSDSHYIRELKLQEIVLSDLNDKIQYVKKHKQEFLQLLVSKTEKDSKKELKATERRLSECQKRTSQLDIIIKKLYEDNVLGKLSDERFMSLSKDYEHEQNLLKSEILEKSSYLSEQKDKLMDVNRFISIIDQYTTLTELNSSIVNELIERIEIHQPDKSSGKRVQQIDIFYTFVGKFN

SEQ ID NO: 232 - DNA, 50 bp, Streptococcus suis
  source 1..50: mol_type = genomic DNA
ttggtaggttagatagttctacctaagggtgatatatgcaaacctattaa

SEQ ID NO: 233 - DNA, 40 bp, Streptococcus suis
  source 1..40: mol_type = genomic DNA
aaataaaaaaaggaaacccaaaggtttcttttttaattaa

SEQ ID NO: 234 - DNA, 50 bp, Streptococcus suis
  source 1..50: mol_type = genomic DNA
ttggtaggttagatagttctacctgcgggtgatatatgcaaacctattaa

SEQ ID NO: 235 - DNA, 40 bp, Streptococcus suis
  source 1..40: mol_type = genomic DNA
aaaaaaaaaaaggaaagcagcaggtttatttcatatttaa

SEQ ID NO: 236 - protein, 544 aa, Streptococcus suis
MKSTTLQRTLTTKYSSLDRAEELTALYCRISNEDMNAGDSNSILNQKSILEKYAKDNRLGTYRFFIDDGYTGTNFSKRPAFQEMLELVNAGIVKTVVVKDLSRFGRNATEVGLYTDILFPKLDVRFIAINDNVDSANSNITDLDYSGFLNIFNEFHSKSTSAKVRSVLRSKAERGERIGGFAPFGYQLDPKDKNHLVIDEVAAEIVRRIFRLYLDGMTISKIANLLSSEKVPTVTKYRQKVVDPNCDWYRESVKNILSRPEYCGDLVLAKSYIKSYKDKRKILNDAKDWLVFKDRHEAIIPRDQFELVQTMLAKKRRRTKSNRHGLFSGLVYCHDCGYRHYFCTGKSISPNQERYICSGFQSKKVKCSDSHYIRELKLQEIVLSDLNDKIQYVKKHKQEFLQLLVSKTEKDSKKELKATERRLSECQKRTSQLDIIIKKLYEDNVLGKLSDERFMSLSKDYEHEQNLLKSEILEKSSYLSEQKDKLMDVNRFISIIDQYTTLTELNSSIVNELIERIEIHQPDKSSGKRVQQIDIFYTFVGKFN

SEQ ID NO: 237 - DNA, 50 bp, Streptococcus suis; identical to SEQ ID NO: 232
  source 1..50: mol_type = genomic DNA

SEQ ID NO: 238 - DNA, 40 bp, Streptococcus suis; identical to SEQ ID NO: 233
  source 1..40: mol_type = genomic DNA

SEQ ID NO: 239 - DNA, 50 bp, Streptococcus suis; identical to SEQ ID NO: 234
  source 1..50: mol_type = genomic DNA

SEQ ID NO: 240 - DNA, 40 bp, Streptococcus suis; identical to SEQ ID NO: 235
  source 1..40: mol_type = genomic DNA

SEQ ID NO: 241 - protein, 544 aa, Streptococcus suis
MKSTTLQRTLTTKYSSLDRTEELTALYCRISNEDMNAGDSNSILNQKSILEKYAKDNRLGTYRFFIDDGYTGTNFSKRPAFQEMLELVNAGIVKTVVVKDLSRFGRNATEVGLYTDILFPKLDVRFIAINDNVDSANSNITDLDYSGFLNIFNEFHSKSTSAKVRSVLRSKAERGERIGGFAPFGYQLDPKDKNHLVIDEVAAEIVRRIFRLYLDGMTISKIANLLSSEKVPTVTKYRQKAVDPNCDWYRESVKNILSRPEYCGDLVLAKSYIKSYKDKRKILNDAKDWLVFKDRHEAIIPRDQFELVQTMLAKKRRRTKSNRHGLFSGLVYCHDCGYRHYFCTGKSISPNQERYICSGFQSKKVKCSDSHYIRELKLQEIVLSDLNDKIQYVKKHKQEFLQLLVSKTEKDSKKELKATERRLSECQKRTSQLDIIIKKLYEDNVLGKLSDERFMSLSKDYEHEQNLLKSEILEKSSYLSEQKDKLMDVNRFISIIDQYTTLTELNSSIVNELIERIEIHQPDKSSGKRVQQIDIFYTFVGKFN

SEQ ID NO: 242 - DNA, 50 bp, Streptococcus suis; identical to SEQ ID NO: 232
  source 1..50: mol_type = genomic DNA

SEQ ID NO: 243 - DNA, 40 bp, Streptococcus suis; identical to SEQ ID NO: 233
  source 1..40: mol_type = genomic DNA

SEQ ID NO: 244 - DNA, 50 bp, Streptococcus suis; identical to SEQ ID NO: 234
  source 1..50: mol_type = genomic DNA

SEQ ID NO: 245 - DNA, 40 bp, Streptococcus suis; identical to SEQ ID NO: 235
  source 1..40: mol_type = genomic DNA

SEQ ID NO: 246 - protein, 485 aa, Streptococcus pyogenes
MAEKRKVAIYCRVSSMHQAIEGYSIEQQRDSLTKYCEAMEWNIYDIYIDAGFSGGKLERPAMDKLIREAEAGKFDTVAVYKLDRLSRSVQDTLHLIRDVFKEHDINFVCLQENIDTKSAMGNLFLTLLSAIAEFEREQITERMAMGRHGRAKSGKSMMWARPAYGYRYDRESQTVSVVQSEATIVKRIYKEYLEGKSVSKIKNDLNSEGHITKEKPWVYKRITYILQSRVYTGVNEYKGEIYDGKHEAIIDTETFELTQMEFAKRQQQTKDKKNNPRPFQAKYMLSGLARCGYCKAPLKLRLGAVRKDGTRAMVYDCHNRWNRKVTYLTIYNDNKQCTESGRYQKADLEAYVLDKIKELQLNPDTIREKMDLNEKPTANTEEIKKQIAKTNQQIDKLNDLYLNDLITVEKLKERANKLKKERELLEAELSKNSDHLFKAKKKQLNDLLMNKDIDSMTYEEQRNLVKMLIYKVDVTKEDINIIFDF

SEQ ID NO: 247 - DNA, 50 bp, Streptococcus pyogenes
  source 1..50: mol_type = genomic DNA
ttagcgtttttagtgtcttgcattcaaatgcaagatactaaaattcttcc

SEQ ID NO: 248 - DNA, 40 bp, Streptococcus pyogenes
  source 1..40: mol_type = genomic DNA
cttagattttccttgcaaccaatttctaaatcaaactcca

SEQ ID NO: 249 - DNA, 50 bp, Streptococcus pyogenes; identical to SEQ ID NO: 247
  source 1..50: mol_type = genomic DNA

SEQ ID NO: 250 - DNA, 40 bp, Streptococcus pyogenes
  source 1..40: mol_type = genomic DNA
attagattttcatttcaaccaaactcaaaaacaaactcca

SEQ ID NO: 251 - protein, 485 aa, Streptococcus pyogenes
MAEKRKVAVYCRVSSMHQAIEGYSIEQQRDSLTKYCEAMEWNIYDIYIDAGFSGGKLERPAMDKLIREAEAGKFDTVAVYKLDRLSRSVQDTLHLIRDVFKEHDIDFVCLQENIDTKSAMGNLFLTLLSAIAEFEREQITERMAMGRHGRAKSGKSMMWARPAYGYRYDRESQTVSVVQSEAMIVKRIYKEYLEGKSVSQIKNDLNSEGHITKEKPWVYKRITYILQSRVYTGVNEYKGEIYDGKHEAIIDTETFELTQMEFAKRQQQTKDKKNNPRPFQAKYMLSGLARCGYCKAPLKLRLGAVRKDGTRAMVYDCHNRWNRKVTYLTIYNDNKQCTESGRYQKADLEAYVLDKIKELQLNPDTIREKMDLNEKPTANTEEIKKQIAKTNQQIDKLNDLYLNDLITVEKLKERADKLKKERELLEAELSKNSDHLFKAKKKQLNDLLMNKDIDSMTYEEQRNLVKMLIYKVDVTKEDINIIFDF

SEQ ID NO: 252 - DNA, 50 bp, Streptococcus pyogenes; identical to SEQ ID NO: 247
  source 1..50: mol_type = genomic DNA

SEQ ID NO: 253 - DNA, 40 bp, Streptococcus pyogenes; identical to SEQ ID NO: 248
  source 1..40: mol_type = genomic DNA

SEQ ID NO: 254 - DNA, 50 bp, Streptococcus pyogenes; identical to SEQ ID NO: 247
  source 1..50: mol_type = genomic DNA

SEQ ID NO: 255 - DNA, 40 bp, Streptococcus pyogenes; identical to SEQ ID NO: 250
  source 1..40: mol_type = genomic DNA

SEQ ID NO: 256 - protein, 485 aa, Streptococcus pyogenes
MAEKRKVAVYCRVSSMHQAIEGYSIEQQRDSLTKYCEAMEWNIYDIYIDAGFSGGKLERPAMDKLIREAEAGKFDTVAVYKLDRLSRSVQDTLHLIRDVFKEHDIDFVCLQENIDTKSAMGNLFLTLLSAIAEFEREQITERMAMGRHGRAKSGKSMMWARPAYGYRYDRESQTVSVVQSEAMIVKRIYKEYLEGKSVSQIKNDLNSEGHITKEKPWVYKRITYILQSRVYTGVNEYKGEIYDGKHEAIIDTETFELTQMEFAKRQQQTKDKKNNPRPFQAKYMLSGLARCGYCKAPLKLRLGAVRKDGTRAMVYDCHNRWNRKVTYLTIYNDNKQCTESGRYQKADLEAYVLDKIKELQLNPDTIREKMDLNEKPTANTEEIKKQIAKINQQIDKLNDLYLNDLITVEKLKERANKLKKERELLEAELSKNSDHLFKAKKKQLNDLLMNKDIDSMTYEEQRNLVKMLIYKVDVTKEDINIIFDF

SEQ ID NO: 257 - DNA, 50 bp, Streptococcus pyogenes; identical to SEQ ID NO: 247
  source 1..50: mol_type = genomic DNA

SEQ ID NO: 258 - DNA, 40 bp, Streptococcus pyogenes; identical to SEQ ID NO: 248
  source 1..40: mol_type = genomic DNA

SEQ ID NO: 259 - DNA, 50 bp, Streptococcus pyogenes; identical to SEQ ID NO: 247
  source 1..50: mol_type = genomic DNA

SEQ ID NO: 260 - DNA, 40 bp, Streptococcus pyogenes; identical to SEQ ID NO: 250
  source 1..40: mol_type = genomic DNA

SEQ ID NO: 261 - protein, 628 aa, Campylobacter jejuni; identical to SEQ ID NO: 56

SEQ ID NO: 262 - DNA, 50 bp, Campylobacter jejuni
  source 1..50: mol_type = genomic DNA
aaaaagtccttgacttttcgtctctggtgttgtatgctctaaaagacttc

SEQ ID NO: 263 - DNA, 40 bp, Campylobacter jejuni
  source 1..40: mol_type = genomic DNA
taaaaaataaaaaattcaccggaaaaacttataaatattt

SEQ ID NO: 264 - DNA, 50 bp, Campylobacter jejuni
  source 1..50: mol_type = genomic DNA
aaaaagtccttgacttttcgtctcaagtgttgtatgctctaaaagacttc

SEQ ID NO: 265 - DNA, 40 bp, Campylobacter jejuni
  source 1..40: mol_type = genomic DNA
caaaaaaaaaaaaaatcacaaaacaatcttataaatgttt

SEQ ID NO: 266 - protein, 539 aa, Streptococcus suis
MNRTKKYIAALYCRLSKDDGSTNESMSIYSQKAMLKQYAEQNNIAVYDYYVDDGYSGTNFERPAFKKMITDIENGKINCVITKDLSRLGRNYLESGAYIEMYFPQKNVRYIAITDGIDTINSYEFDIMPFKNILNEMYAKDTSKKVKSALKSRMKEGTYIGSKAPFGFKKDPDDKHRLVIDERVKPIIELVYELCLEGKGTQLISQEMMKRKIPRPSSFLENADKLYGLTEENKYKWTHRMVLSILRDPVYCGNMERNKRPTLSFKNRKRLYVSKEDRIVVKDTHEGIVSEEVWTQVQQMLDKRKNTNKSGITYDNIFKGLVKCPTCGYALTPKADYRLNKKETIDFVHFSCSGYKKYGVKACTSHRINARDLYNVVLEDIQYHGQMALSSREDFVMKIAEKIDKDKVDERKDKTEKLNSSKIKLKDLDKAFEKLYEDRLSESISERNFNLMNEKLSRQQEKLIEEIDLLEEEIKEIADTEENCEQFVENISKFAKIKELNRYILNQVIDKIYVYDKEEVDGEIKQKVEIHYKFIGKLD

SEQ ID NO: 267 - DNA, 50 bp, Streptococcus suis
  source 1..50: mol_type = genomic DNA
ttgaccacttaggacagttcaactgatgttgaacagtccgaagtggcaag

SEQ ID NO: 268 - DNA, 40 bp, Streptococcus suis
  source 1..40: mol_type = genomic DNA
atttccttggcattcaagggatattcgacagctcagatgg

SEQ ID NO: 269 - DNA, 50 bp, Streptococcus suis
  source 1..50: mol_type = genomic DNA
ttgaccacttaggacagttcaacttctgttgaacagtccgaagtggcaag

SEQ ID NO: 270 - DNA, 40 bp, Streptococcus suis
  source 1..40: mol_type = genomic DNA
aatcccttggcgttcaaggtctgttggagagctcaggtgg

SEQ ID NO: 271 - protein, 559 aa, Clostridioides difficile
MARTKNRETNRTVSQLSYNLTRWNLAKYIRLSKEDLNRGKDDSNSVTNQKKLLDDYYRQHLDEFESAETYVDDGCTGTDTNRADFQRLLADIYAKKVNCVIVKDLSRLSRNYTDAGSLIENLFVQMNVRFISLAEGVDSYLNPDSVSSILVPITNVMNDQYCYQTSKKIRQVFDYKKRNGEFIGSYAPYGYIKDPNDKHALLVDHEAAEVVKQIFSMCLSGMTVRAIVNHLNDHGVMCPSVYKQSQGLKYKCPNGQTQPMWSTITISNMLKNPVYVGDMAQGRNRVKSYKIHKIEAVPEKDWIVVQNTHEPIIDREAFEKVKQLLKRDTRTSPKQKQLYLFSGFLRCADCGRAMSRIASKEFYVYYQCGTYKSLSKKACTMHSIKSTRLEAAVLYAIRQQVHLAVSYSAIVSKINLAPLKKSQSARLNELIAAKEKELAKIMRYKQALYQDWKDGHITHNDYRHMNEDYEQQNEAIGTVIANLKKERDELENGIDTENPFLATFRKYENIDKLTREILIELVDHIKVYEGGDISIRFKFADELRRIIQYIEVNSHLQVG

SEQ ID NO: 272 - DNA, 50 bp, Clostridioides difficile
  source 1..50: mol_type = genomic DNA
ggttttcctaatatataacactcatatgagccaaatgtattaggaaaact

SEQ ID NO: 273 - DNA, 40 bp, Clostridioides difficile
  source 1..40: mol_type = genomic DNA
ttatcctcttctattatcctattcttatctatgccatttt

SEQ ID NO: 274 - DNA, 50 bp, Clostridioides difficile
  source 1..50: mol_type = genomic DNA
ggttttcctaatatataacactcatttgagccaaatgtattaggaaaact

SEQ ID NO: 275 - DNA, 40 bp, Clostridioides difficile
  source 1..40: mol_type = genomic DNA
ttatctttttctcttatacttttcttttccttgccatttt

SEQ ID NO: 276 - protein, 575 aa, Ruminococcus bromii
MTATQKHDIIPVCTTVLSADQQPKEDIMLDQQKITILYCRLSNEDAQDGESNSIANQREYLTRYARDHGYTNLKILVDDGYTGTNFNRPGVQEGFELVKQGLVGCWLVKDLSRFGRDYLTVGQYTDIIFPSYDVRFIAVNDGVDSNRGDSEGFAAIRNLFNEWYPRDTSKKVRVSLRQRGTSGKHMGKPPYGYRCDPEDKDHWILDEEAAPVVKLIFDLCIDGKGPEQIARILEEKQILTAKALYAKRKKKPMPERPYHWSNQSIVGILERQEYTGCTCNFKTYSKSYKLKKRIPNEPENMFYLPDTQEAIVSQAQFDRVQELRKNKRRPAKAERQGLFSGLLFCADCGGKLHFATSKSFEGKQDHYVCNNYKSNRGTCTAHYIREDVLREIVLERIRAVNEYIRSDVDGFQEEWLQCRRTDQERSIRDDKKKLEQAKKRLADLDVIISRLYEDYVLGNLNQDRYRKMSADYEAEQERLKLEIEVIEEWVEQREEMNDGLDAFIALTQKYVDVEELTQTIVNEYIKKIVVYAPDKSSGKRKQKVKIFFNFVDDVDIPVISEPIVTQTTYERRKTA

SEQ ID NO: 277 - DNA, 50 bp, Ruminococcus bromii
  source 1..50: mol_type = genomic DNA
atagttacttgtcactattaagccttggcttaacagtgataaggaactaa

SEQ ID NO: 278 - DNA, 40 bp, Ruminococcus bromii
  source 1..40: mol_type = genomic DNA
cacaaaaagtacgaaataattgctttttattattttttta

SEQ ID NO: 279 - DNA, 50 bp, Ruminococcus bromii
  source 1..50: mol_type = genomic DNA
atagttacttgtcactattaagccctggcttaacagtgataaggaactaa

SEQ ID NO: 280 - DNA, 40 bp, Ruminococcus bromii
  source 1..40: mol_type = genomic DNA
cataacaattacgagataactgccatttatttttttttta

SEQ ID NO: 281 - protein, 503 aa, Campylobacter jejuni; identical to SEQ ID NO: 11

SEQ ID NO: 282 - DNA, 50 bp, Campylobacter jejuni; identical to SEQ ID NO: 12
  source 1..50: mol_type = genomic DNA

SEQ ID NO: 283 - DNA, 40 bp, Campylobacter jejuni
  source 1..40: mol_type = genomic DNA
atgttttttattataaatgttactaatatcaaaactttct

SEQ ID NO: 284 - DNA, 50 bp, Campylobacter jejuni
  source 1..50: mol_type = genomic DNA
gtgtagtcccttgtaaactgtactctaggtcagtttacaaggaactacac

SEQ ID NO: 285 - DNA, 40 bp, Campylobacter jejuni
  source 1..40: mol_type = genomic DNA
ctttttgctattataaatgcttctaatattaagactttct

SEQ ID NO: 286 - protein, 505 aa, Gemella morbillorum
MNRKITTIQANKDLSRQSKLPSIKKKKVAGYARVSTDNEDQTSSYETQMKYYEEYISSRKDWEFVKMYSDEGISGTNTKKRLGFQEMVNDALAGKIDLILTKSVSRFARNTVDSLSTVRKLKDVGVEIYFEKENIWTFDSKGELLITIMSSLAQEESRSISENITWSKRKQAAEGKVTFPYNNVLGFKPKEDGGFEVDKEQARIVRYIFGQFLSGKNPNQIAKHLTENKISTPRGKEKWSYSSVRSILTNEKYKGDALLQKYYIADFLNKTQKRNNGELPQYYVENSHEAIIDKEVFDAVQVQLSENKKWYTEKNYFGKIRCGCCGSSYVRHLWHSTNKYKETIYRCKDKYKNEEKCNTPHIRDDEIQRWIVSALNKVIDNRKEIIGNIKLLMKMIKEDRGADDEIIQLEEKLEDIRNDVEKLIITNSKIAQDQEEYTRKYNKLIEEYKLLEKQLEQRNLDLLSKNKRVRELKIFIDSLEKQGELLTEYDAKLFNYLVDTIIIHE

SEQ ID NO: 287 - DNA, 50 bp, Gemella morbillorum
  source 1..50: mol_type = genomic DNA
tttggtagatacgataataattcataaagtgtataggtgtagcaaagaaa

SEQ ID NO: 288 - DNA, 40 bp, Gemella morbillorum
  source 1..40: mol_type = genomic DNA
taaatattaagataatttatgaaggaaaaagaatagaaat

SEQ ID NO: 289 - DNA, 50 bp, Gemella morbillorum; identical to SEQ ID NO: 287
  source 1..50: mol_type = genomic DNA

SEQ ID NO: 290 - DNA, 40 bp, Gemella morbillorum
  source 1..40: mol_type = genomic DNA
taaatcttatgttacttgataaaggaaaaagaaaggaaat

SEQ ID NO: 291 - protein, 554 aa, Ruminococcus bicirculans
MAKQTTYNVGIYVRLSQEDERAGESLSIENQKKMLTEYVSKQEGWNLIEICEDDGYSGTSFDRPGIKQILDDAKSGKINLILCKDLSRFGRNYIEVGQYIDYIFPSFNIRFIALSDNVDTLDRNSSAMDLMPVMNLFNEWHAANTSKKVRSVMAANSRQGKYLAASASYGYIKADDEKHTPLIDEDAAVIVRRIFEQRARGLSPKQIAIQLNKDGIATPSDHRYQLKGKDNPLVTSHLWNDCMVRGILNNEIYIGNLAQQRVTTVSYKNHKQIRKDRSEWIVIENNHEPIISRELWDKVREVDASVSIGKTTKEGVILPLSGFMYCPDCGYKMKMNRTMHTSKKRGTYETVSYRCGTYVRSGMDGCTPHSILERVISQIVVDDIRAKARLAVEDEDALREAVRKRRQATADAESQHNSKELHEGEKRLAQLETLISKTYEEKLLGTVPEELCVKMLNQYLDEQKMLREKVAVLKEKCETAEQAEKDIDRYIENIKKYVDIQELTRETCLELIEYIVIGDRPESKDEDRQIHIFYKFLDKGLTEKRNILLPQNVE

SEQ ID NO: 292 - DNA, 50 bp, Ruminococcus bicirculans
  source 1..50: mol_type = genomic DNA
gggtgtacttttatggggttctcctctgtgaagcacttataagtacaccc

SEQ ID NO: 293 - DNA, 40 bp, Ruminococcus bicirculans
  source 1..40: mol_type = genomic DNA
cggcgttctctcgctgtcttccgtgggcacacgcacaccc

SEQ ID NO: 294 - DNA, 50 bp, Ruminococcus bicirculans
  source 1..50: mol_type = genomic DNA
gggtgtacttttatggggttctcccatgtgaagcacttataagtacaccc

SEQ ID NO: 295 - DNA, 40 bp, Ruminococcus bicirculans
  source 1..40: mol_type = genomic DNA
ttgcgttctctctctctttcacgtgggcacacacacacgc

SEQ ID NO: 296 - protein, 540 aa, Megamonas rupellensis
MKQPYNTTIYNTALYMRLSRDDELQGESGSIQTQRMMLRQYAAEHGLNVIDEYIDDGWSGTNFDRPDFQRMIDDIEDGKINCVVTKDLSRLGRNYILTGQYTEIYFPSKGVRYIAVNDNVDTINGENELAPFLNILNEMHARQTSKKVKAAMRTRFANGAHYGAYAPLGYVKDPDKKGHLLIDPETRWIIEKIFDLAVHGRGAASITRILVEEKVPTPGWLNFQRYGTFANIYAGAPEEKAYAWTIAQVKSILKEETYIGHSVHNKQTNISFKNKKKVRKPKEEWYRVENTHEAIISEDVFRQVQEQICNRRRRQKNGTTQIFSGLVKCADCGWSLAYGMNSQNKNPYAHYHCSKYGQGLHQCSMHYIRYDVLYAYVLSRLQYWSVLAQQDGDKLLKRLLNASDKERNTARKRQTAELKKAEKRKAEVDTLFAKMYEDWSAGRITEYNFNMLSEKYQGEQRELDVKIERLHEAMETAAQTAVDAEKWIGLMKQYVNPTELTAELLNTLIEKILVHEAVKSEDGSREQEVEIFYRFIGKIE

SEQ ID NO: 297 - DNA, 50 bp, Megamonas rupellensis
  source 1..50: mol_type = genomic DNA
caatatctttaactaagggaaacgggagtttcccaaagttaaagatacca

SEQ ID NO: 298 - DNA, 40 bp, Megamonas rupellensis
  source 1..40: mol_type = genomic DNA
attttccagataaaatatagggaagaattttccctatatt

SEQ ID NO: 299 - DNA, 50 bp, Megamonas rupellensis
  source 1..50: mol_type = genomic DNA
caatatctttaactaagggaaacggaagtttcccaaagttaaagatacca

SEQ ID NO: 300 - DNA, 40 bp, Megamonas rupellensis
  source 1..40: mol_type = genomic DNA
attttccaaataaaatattgagaagtatttcaccagtatt

SEQ ID NO: 301 - protein, 520 aa, Clostridioides difficile
MMYNIARYDALYGRQSVDKKDSISVESQLDFCKYETHGQPYQTYTDKGFSGKNTNRPDFERMMRDIRAGRIKRVIVYKLDRISRSILDFANMMEVFQEYDVEFVSSTEKFDTSTPIGRAMLNICIVFAQLERETIQKRVTDAYYSRNKKGFFMGGRVPYGFKLEPIVIDGIRTSFYLPIEEEMQQIELIYQLYAEGVKENGEPYSVSDIRNYLLEHNIPQLRGGYWTVSSISSILANPSYAIADLSLYEFFHSQGANITNPMELWEGGNGCYLYQGTVSKDKSRNSFKDKEVVLAPHVGRVPSYIWIKCRLRCMNSRQMATTNKGKSSWLVGKVKCGNCGKGLQISPSRVSKKTGKSIRYMNCSHKYVTKGLGCSGTGSRIYVDELENYVLKQIKGKLAEFEGLNEQNATQTNPRLNENKIRLAQIDKEINDLVEKVSGANSVLMRYINEKIEQLDAERRALSEENLSMTVNQSSDTLNMIFNHVSTWEETSFEDKQKVLDAFVKVIKIANGNIEMTWNI

SEQ ID NO: 302 - DNA, 50 bp, Clostridioides difficile
  source 1..50: mol_type = genomic DNA
tgatttaaaagtgtttggtttactaaagcgatatgaacactttcaaatca

SEQ ID NO: 303 - DNA, 40 bp, Clostridioides difficile
  source 1..40: mol_type = genomic DNA
aaatctattaaaataacataataaaaaaaatattaagaat

SEQ ID NO: 304 - DNA, 50 bp, Clostridioides difficile; identical to SEQ ID NO: 302
  source 1..50: mol_type = genomic DNA

SEQ ID NO: 305 - DNA, 40 bp, Clostridioides difficile
  source 1..40: mol_type = genomic DNA
aaatataataaaataaaataatacataaaaaattaaaaat

SEQ ID NO: 306 - protein, 489 aa, Kocuria rhizophila
MDRHYLMRSTDDQETDCRAWCAQQTWNVGRVITDANRSASKWRTREREGFEEALHLIASKKYDAFVTWEPSRAGRELLAYVQLRAACQEAGVLYLTKGRVYDFSRHDDSFMMGLEFLTAEKDAAVIRDRQLRTVRLNAQKGRPHGRLPYGYRRVYDEQTRALVRQEIDPGKASIIITAVDEILDGVSINNIVTRLNRAGVPTPMKPTSDQSRGWMSSTLRQLIKSPTIAGLRMYQGEVIGEADWPAIVPVEKWEKVNQILADRARRTRYVEEGNHSHPRWLLSFIARCGFCSHPLVRIHGAVDRKRTGMPRDNYICGKVGCRKVSIDIPYTDAYVTGALLGWLSKPESLAVILGPDDNWNERVREAQDHVAALRRRLADAAGEYAQGRISMTMLADVEERLKPEIERAAKAAVPPVADRQLLALIQTKDLDAAWEALDLVEKRRMLKMLLDIRIEKAKTMGGRFDPARIKITPRFSVPETYQWRRPESS

SEQ ID NO: 307 - DNA, 50 bp, Kocuria rhizophila
  source 1..50: mol_type = genomic DNA
gaacaacccatcgaattgttgggttcacccagcagctagatggcagatgc

SEQ ID NO: 308 - DNA, 40 bp, Kocuria rhizophila
  source 1..40: mol_type = genomic DNA
gtccaggtggttggtgggctcgtccaggaagatcacgtcc

SEQ ID NO: 309 - DNA, 50 bp, Kocuria rhizophila; identical to SEQ ID NO: 307
  source 1..50: mol_type = genomic DNA

SEQ ID NO: 310 - DNA, 40 bp, Kocuria rhizophila
  source 1..40: mol_type = genomic DNA
atccaggtgattggtgggctcatccaggaagagcatgtgg

SEQ ID NO: 311 - protein, 552 aa, Eubacteriaceae bacterium
MKRQQEEFTALYCRLSQDDGREGESNSIVNQKEYLMKYAKEHGFPNPKFYVDDGYTGTNFDRPSFKEMSVDIEKGLVKTVIVKDLSRFGRNYIEVGSYSEIIYPEAGIRFIAIMDNVDTGSLESNEFAAFTNLFNEWYPKSTSKKVKEVKKAKGLAGEHLGAPPYGYLQNPDDKTRWLVDEEAAVTVRRIFSLCMQGKGVSAIATALWEDKVLTPSAYKVSKGIGVAKKSEHPYNWEPATIASILENVAYIGVTESFKSTRLGFKSRKRIPTAKDRRTYIEDAHTPIINRDMWEKVQVIRENKRRPTKSGMTSIFSGLLYCADCGAKLSLATANGYAHFRCSMYKRTSRAKECTQHYIREDALKQLVLKQLQHFLSYLQQFERVFIRQQIDATLAERRYELSAKQKQIEKDEKRIKELDRLFRKIYEDNVNGKLNDERFYKLSDGYEAEQEQLKQEIEALTAEVSEADTEATNVAKLIAVTKKYTRIDELTPEVLNAFVDKIVIHEREKKDGKRTQQIDIHYSYVGIVDIPTDEEMREMEREHMQRTTRQTA

SEQ ID NO: 312 - DNA, 50 bp, Eubacteriaceae bacterium
  source 1..50: mol_type = genomic DNA
ttttatccctatctggtttaacccatgagtgaaaccagataaggagaaaa

SEQ ID NO: 313 - DNA, 40 bp, Eubacteriaceae bacterium
  source 1..40: mol_type = genomic DNA
tattattatacgttgacctataggagattaaatcaaaaaa

SEQ ID NO: 314 - DNA, 50 bp, Eubacteriaceae bacterium; identical to SEQ ID NO: 312
  source 1..50: mol_type = genomic DNA

SEQ ID NO: 315 - DNA, 40 bp, Eubacteriaceae bacterium
  source 1..40: mol_type = genomic DNA
aattattattctttgaccgataggagctcaaatcaaaaat

SEQ ID NO: 316 - protein, 525 aa, Clostridioides difficile
MTDHRKTAVYIRLSAEDDNVDGRAKKESDSVTSQRILLKSFVIDQLGVDEADILEYVDDGVSGTHFKRQGFQQLQDDMKSGEIGCVVVKDFSRFGRDYLEVGFYIEYIFPLLQIRFISINDSYDSAASSGMTGGMNVALQNLVYNMYSLDLSKKISSAMQTRTKNGTRLPVNARYGYKKGKDGRLEVDPEAAKVVKMIFQMAAEGTSFADITRELNRQAIATCDEQKLSRGDQVQFQRFDTIKKKHWSPTTVSAIVRDEIYIGTRIWGKTRCSMHTGHKAVLNDETEWVRLENHHTAIIDRELFEKANEMHPKKKRSVAESRTNFTLERRKKQPALLICANCGHSLLKETEHLLKCSDARTNGDPVCRSLVIRREPMEENILGLVRQYAASMLKKGKKVSSKRQCEYKEINTTELQKQSRQLTSEKMKLYDDYKDGRIDRDSYKQRAEKISVQLDEIKRKIEDAKNSKKLLEQNELSDKIKLKDFLGIQKFDTEKLREVIKVIRVHSQDEIEIEWNFDDIFSEQR

SEQ ID NO: 317 - DNA, 50 bp, Clostridioides difficile
  source 1..50: mol_type = genomic DNA
aaaagacatatataatttatatataaattttatatctgattttcgattat

SEQ ID NO: 318 - DNA, 40 bp, Clostridioides difficile
  source 1..40: mol_type = genomic DNA
ataatatagaaattaatgcaaatactgtacatcaagtatt

SEQ ID NO: 319 - DNA, 50 bp, Clostridioides difficile
  source 1..50: mol_type = genomic DNA
aaaagacatatataatttatatatatattttatatctgattttcgattat

SEQ ID NO: 320 - DNA, 40 bp, Clostridioides difficile
  source 1..40: mol_type = genomic DNA
atagttttgaaatttatacatatactttacatgaagtatt

SEQ ID NO: 321 - protein, 503 aa, Clostridioides difficile; identical to SEQ ID NO: 11

SEQ ID NO: 322 - DNA, 50 bp, Clostridioides difficile; identical to SEQ ID NO: 12
  source 1..50: mol_type = genomic DNA

SEQ ID NO: 323 - DNA, 40 bp, Clostridioides difficile
  source 1..40: mol_type = genomic DNA
atgttatttatattaaagtttagatatctaaaaatacttt

SEQ ID NO: 324 - DNA, 50 bp, Clostridioides difficile
  source 1..50: mol_type = genomic DNA
gtgtagtcccttgtaaactgtactacaggtcagtttacaaggaactacac

SEQ ID NO: 325 - DNA, 40 bp, Clostridioides difficile
  source 1..40: mol_type = genomic DNA
atgttttttaaattaaaatacagatattttaacattcttt

SEQ ID NO: 326 - protein, 476 aa, Bacillus cereus
MIKKVAIYLRKSRNEDSISDAEALENHRETLTALADSNEWSYNVYAEIGSSMKESRPELNKLLKNVSSFDAVLVMDIDRLSRDRYHSAQIMQMFKENHVKIVTADGRITDLNNDQEEIMTGMQEVFANYEYNMIKKRLQRGKQAAAKKGNWATGRVPLGYEYDRETKRLKVREEESKIVVLIFQLFNDGYSAEKVSIELNRQGYKGKNGKSFVPSNVLRILRNDVYRGHTTMLEHRVLNTHEAIIEAPLWESVHRRVAVVRGKGSRVAHELSGILKCGYCGKTLAINIQPTNGVKMVKGCHRRDVDTGVLCRNRGFKYEEVYAGLTQEIKYYRHKLVQDVSLMMQRESNLGRAHDGKVKSLEEQLNKVSQAISRLNRAFVNGDLTDDEFSALKEEKVKERVNIEERLQKLKDTNGMSLVEEIECMVSNLDKLLGANDKPLSVKALNEILKSVILEAHLCFMPDIDLEPKLKITWRK

SEQ ID NO: 327 - DNA, 50 bp, Bacillus cereus
  source 1..50: mol_type = genomic DNA
aattatatctaaaaatcaatacatttgtgtattgacttctagatatttca

SEQ ID NO: 328 - DNA, 40 bp, Bacillus cereus
  source 1..40: mol_type = genomic DNA
aaatatatttttaatacatttgagtgtagtatgaactttt

SEQ ID NO: 329 - DNA, 50 bp, Bacillus cereus
  source 1..50: mol_type = genomic DNA
aattatatctaaaaatcaatacatgtgtgtattgacttctagatatttca

SEQ ID NO: 330 - DNA, 40 bp, Bacillus cereus
  source 1..40: mol_type = genomic DNA
aattctactgttaatacatgtgagtgtattatgaaattct

SEQ ID NO: 331 - protein, 490 aa, Fusobacterium nucleatum
MNRAVAYCRFSSNNQREESIEAQIRAITEYCKIKKLNLIKIYKDEAISGTSVKNRENFIEMIAESKNKTFDYVIVHKYDRFARNRYDHAIYEKKLNDNNVKLLSVLEEMSDSPENVILKSVLTGMNEYYSLNLSREVKKGQKENALKAIHNGGIVPLGYSLDENRKYIVNEKEAEIVRFIFNLALHGVGYANIAAALNEKGYKNKLGKNFKKTSIRDLLMNQKYIGTYFFGLRYPNGKLKENPIIIKNSHEAIIPEDIFYKVQERFKISKKKPRKGKNDYILTGYCTCGLCGGSYSGGYRTKNRHGTVYYGYECRNRKAKVNDCKNKSINKKLLENIIFDTIKKNILNDENIKTITKDLVKVINEKMDTRTEEVNKCKKEIEKLERMSLKLLGKHLEGIILEEIFNKKNQELNQQIYSQKEKLYSLENLHNVKVDEGAILEYLYELKKDSEDKIKRILIETFVQNIKIYPDKLEICLSKFPKVIVKNGTP

SEQ ID NO: 332 - DNA, 50 bp, Fusobacterium nucleatum
  source 1..50: mol_type = genomic DNA
agtaaatttccaaaggtaatagttaaaaatggcacacccagaagtcaact

SEQ ID NO: 333 - DNA, 40 bp, Fusobacterium nucleatum
  source 1..40: mol_type = genomic DNA
ttatgtcaattattttttaaaaaatggcacacccagtagg

SEQ ID NO: 334 - DNA, 50 bp, Fusobacterium nucleatum
  source 1..50: mol_type = genomic DNA
agtaaatttccaaaggtaatagttgtaaatggcacacccagaagtcaact

SEQ ID NO: 335 - DNA, 40 bp, Fusobacterium nucleatum
  source 1..40: mol_type = genomic DNA
ttatgttaattattatttagtaaattgctcaaccagaatg

SEQ ID NO: 336 - protein, 490 aa, Fusobacterium nucleatum; identical to SEQ ID NO: 331

SEQ ID NO: 337 - DNA, 50 bp, Fusobacterium nucleatum
  source 1..50: mol_type = genomic DNA
agtaaatttccaaaggtaatagttagaaatggcacacccagaagtcaact

SEQ ID NO: 338 - DNA, 40 bp, Fusobacterium nucleatum; identical to SEQ ID NO: 333
  source 1..40: mol_type = genomic DNA

SEQ ID NO: 339 - DNA, 50 bp, Fusobacterium nucleatum; identical to SEQ ID NO: 334
  source 1..50: mol_type = genomic DNA

SEQ ID NO: 340 - DNA, 40 bp, Fusobacterium nucleatum; identical to SEQ ID NO: 335
  source 1..40: mol_type = genomic DNA

SEQ ID NO: 341 - protein, 503 aa, Anaerobutyricum hallii
MNNRIDAIYARQSVDKKDSISIESQIEFCKYELKGGNCKEYTDKGYSGKNTDRPKFQELVRDIKRGLIAKVVVYKLDRISRSILDFANMMELFQQYNVEFVSSTEKFDTSTPMGRAMLNICIVFAQLERETIQKRVTDAYYSRSQRGFKMGGKAPYGFHTEPIKMDGINTKKLVVNPEEAANIRLMFEMYAQPTTSYGDITRYFAEQGILFHGKELIRPTLAQMLRNPVYVQADLDVYEFFKSQGTVIVNDVADFTGMNGCYLYQGRDVKASKKNDLKDQMLVLAPHEGIVPSDTWLTCRKKLMNNMKIQSARKATHTWLAGKIKCGNCGYALMSIYNPSGKQYLRCTKRLDNKSCPGCGKIITSELEAVVYQQMVKKLASYKTLTGKKKAAKANPKITALQVELAHVDSEIEKLVDSLTGANNVLFSYVNVKIAELDGRKQELLARIAELTVEAISPEQVSQISGYLDTWENVSFDDKRRVVDLMITTIAATSDSLNITWKI

SEQ ID NO: 342 - DNA, 50 bp, Anaerobutyricum hallii; identical to SEQ ID NO: 12
  source 1..50: mol_type = genomic DNA

SEQ ID NO: 343 - DNA, 40 bp, Anaerobutyricum hallii
  source 1..40: mol_type = genomic DNA
ctgatatttgaattgcaaatttacatattgtatatatcat

SEQ ID NO: 344 - DNA, 50 bp, Anaerobutyricum hallii
  source 1..50: mol_type = genomic DNA
gtgtagtcccttgtaaactgtacttaaggtcagtttacaaggaactacac

SEQ ID NO: 345 - DNA, 40 bp, Anaerobutyricum hallii
  source 1..40: mol_type = genomic DNA
ctgctatttcaaatgctaatatatatattatatatattat

SEQ ID NO: 346 - protein, 493 aa, Blautia wexlerae
MDSRIDAIYGRQSIDKKDSISIESQFEFCRYELKGGEGKEYKDKGYSGKNIERPDFQRLLQDIRLGLIKRVIVYKLDRISRSIVDFAKLMELFKQYDVEFVSCTEKFDTSTPMGRAMLNICIVFAQLERESIQMRVQDAFYSRCTKGYYMRGRTPYGFDTEPIVMDGIKTKKLVENAEMDFAELMYQMYAEPGNSYGDISRYFAENDIKVYDKSLKRGFIAQLLRNPVYVQADMDIYEYFKAQGVKIESPPEMFTGDNSCYLYQGREGEEPLLVIAPHQGRIPSQLWLTVQRKLSQNTTFQNGRKCHNTWLAGKIKCGRCGYALASLNARNGVTYLRCKQRADNKSCEGAGTLTAQSMEAFVYGEMVKKMRKFHTLKGGKEQSYNPKLTAARVALAKTESEIEKLLDTLSGANPLLLQYANTRIEELDAERQKQLRLVADLTANSVSASQIDSITGYLDDWESVSFDDKRKVVDILISQIDATSESVTIHWKI

SEQ ID NO: 347 - DNA, 50 bp, Blautia wexlerae
  source 1..50: mol_type = genomic DNA
cattatgcccttgtcaagaatagtttaggtttctttacaaaggcataatc

SEQ ID NO: 348 - DNA, 40 bp, Blautia wexlerae
  source 1..40: mol_type = genomic DNA
caggatttttcaaaatattttcttcagatgtgttatatgt

SEQ ID NO: 349 - DNA, 50 bp, Blautia wexlerae
  source 1..50: mol_type = genomic DNA
cattatgcccttgtcaagaatagtccaggtttctttacaaaggcataatc

SEQ ID NO: 350 - DNA, 40 bp, Blautia wexlerae
  source 1..40: mol_type = genomic DNA
atggatttttcaaaatattcccttcagcagtttaaaatgt

SEQ ID NO: 351 - protein, 524 aa, Tenacibaculum maritimum
MKDLSIFNQFARTDESKSLRQAGNAVIYTRVSTKEQADNNASLDTQLKYCEQLAQKKGLDVVEYFGGTYESAKSDERKHFQKMLNFVKRRKDIGYIIVYSYDRFSRTGANGAYISDQLKRQGIVTISATQEVDTSTSAGSFQQNLYYMFSQFDNELRRDKSVSGMQEKLRRGDWTGAWPYGYTNTNPGKGKKPNFVINDKGKLLKKAFEWKAMSNTSHVEISKKLKRKGLELSAKKLSDYFRNPFYCGLMVNKLIPGEVIQGNHEPMISREMFLKIHNLLNSREEGRKYNLDDENLPLKMFVKSTECGTPYTGYVVKKKGLYYYKNRRSGSRENRSAKKLHNSFMALLENYTLADPKYIEPLKEIIEQTFIDLNKEQIDEAKVLNTQATELDVKLDRLEERYVFEEITKVQYDKFKSKLESEKNKITELVSNSGFNSSNLKKSIDKALNLALNLPSLWQSGNIEVKRSLQFMLFPEGIGYDFKNDRLRTFRVNSIFSAIASISDNLEGNKNGTFQNNFEKSRLV

SEQ ID NO: 352 - DNA, 50 bp, Tenacibaculum maritimum
  source 1..50: mol_type = genomic DNA
aattttgaaaaatcccgtttagtgaactcaacgggacagagttcgaactt

SEQ ID NO: 353 - DNA, 40 bp, Tenacibaculum maritimum
  source 1..40: mol_type = genomic DNA
gattttaaagggtttagtgaccatggcaggattcaaacct

SEQ ID NO: 354 - DNA, 50 bp, Tenacibaculum maritimum
  source 1..50: mol_type = genomic DNA
aattttgaaaaatcccgtttagtggcctcaacgggacagagttcgaactt

SEQ ID NO: 355 - DNA, 40 bp, Tenacibaculum maritimum
  source 1..40: mol_type = genomic DNA
gattttagaggctttactggccatggctgaatttacacct

SEQ ID NO: 356 - protein, 493 aa, Clostridium cadaveris
MDNRIDAIYGRQSIDKKDSISIESQFEFCRYELKGGEGREYKDKGYSGKNIERPDFQRLLQDIKLGLIKRVIVYKLDRISRSIVDFAKLMELFKQYDVEFVSCTEKFDTSTPMGRAMLNICIVFAQLERESIQMRVQDAFYSRCTKGYYMRGRTPYGFDTEPIVMDGIKTKKLVETPEMDFAELMFQMYAEPGNSYGDITRYFVKNSIKVYDKALQRAFISKLLRNPVYVQADMDIYEYFKAQGVKIESPPEMFTGDNSCYLYQGREGEEQILVIAPHQGRIPSQLWLAVQRKLSQNTTFQNGRKCHHTWLAGKIKCGRCGYALTALKAQNGVVYLRCKQRADNGSCEGAGTLTAQSMESFVYGEMVAKMRKYHTLKGGKEQSYNPKLTAARVALAKTESEIEKLLDTLSGANPLLLQYANNKIEELDAERQKQLKLVADLTANSVSDTQIDSITNYLNDWESVSFDDKRKVVDILISHIDATSESVAIHWKI

SEQ ID NO: 357 - DNA, 50 bp, Clostridium cadaveris
  source 1..50: mol_type = genomic DNA
cattatgcctttgtaaaaaatagtttaggtttttatacaatggcataatc

SEQ ID NO: 358 - DNA, 40 bp, Clostridium cadaveris
  source 1..40: mol_type = genomic DNA
tactataacataaaatgagttgataaaagtatatagatta

SEQ ID NO: 359 - DNA, 50 bp, Clostridium cadaveris
  source 1..50: mol_type = genomic DNA
cattatgcctttgtaaaaaatagtgaaggtttttatacaatggcataatc

SEQ ID NO: 360 - DNA, 40 bp, Clostridium cadaveris
  source 1..40: mol_type = genomic DNA
tatttcaacatgaaatgaggagttaaaaatatatagaata

SEQ ID NO: 361 - protein, 511 aa, Elizabethkingia anophelis
MKIADLYIRVSTDEQADKGYSQRDQEERLRRFCFTNKITVGQVIYEDHSAKTFNRPQWTNLLNNLKKKSSKTNLILFTKWDRFSRNAGDAYLMINTLNKLGIEPQAVEQPLDLSIPENKMMLAIYLAAPEVENDRRALNTFYGMRRARKEGRLMGKAPFGYINRSKEDGRKYVALKDPEASAMQWAFNEIAKGILAADQVRQKMNTIGATKLSRSAFHVAIRNPLYYGKIFIAKFQDEEAHLVQGQHEPLISKELFNKVQLILDGNKRAERPNTKILSDVNLPLRGFLVCPDCGRNLTGSASKGRSNRYYYYHCLSSCGSRHKAEVANDIFEKGIRQFELNDGVKSILKKLLLDNYKKFIQSPINEKKRIAQEIDRLNAKLSIARNKLLSETIDDEEYLEIKKECREKIEHLEEQLSKDGTDTKSIDIEKSLERALHSIVNIPKLYSEGTIQTRRAIIGSIFPEKLEFDGKTYRTARMNVIANHIFQINNGLALKKNRANENIFHLSCLVA

SEQ ID NO: 362 - DNA, 50 bp, Elizabethkingia anophelis
  source 1..50: mol_type = genomic DNA
tatatttcatttgtcctgtttagtagccgaaaccgaacaaatctcgaaac

SEQ ID NO: 363 - DNA, 40 bp, Elizabethkingia anophelis
  source 1..40: mol_type = genomic DNA
ttttatttatatattttgtagccccgagcagaatcgaact

SEQ ID NO: 364 - DNA, 50 bp, Elizabethkingia anophelis
  source 1..50: mol_type = genomic DNA
tatatttcatttgtcctgtttagtctccgaaaccgaacaaatctcgaaac

SEQ ID NO: 365 - DNA, 40 bp, Elizabethkingia anophelis
  source 1..40: mol_type = genomic DNA
ttttatttatatatattgtctctccgacaagaatataagt

SEQ ID NO: 366 - protein, 503 aa, Blautia wexlerae; identical to SEQ ID NO: 341

SEQ ID NO: 367 - DNA, 50 bp, Blautia wexlerae; identical to SEQ ID NO: 12
  source 1..50: mol_type = genomic DNA

SEQ ID NO: 368 - DNA, 40 bp, Blautia wexlerae
  source 1..40: mol_type = genomic DNA
atgttattaatcataccgtttactttagatataatattat

SEQ ID NO: 369 - DNA, 50 bp, Blautia wexlerae; identical to SEQ ID NO: 14
  source 1..50: mol_type = genomic DNA

SEQ ID NO: 370 - DNA, 40 bp, Blautia wexlerae
  source 1..40: mol_type = genomic DNA
atggtatatattataccttaaaccttatatataatattat

SEQ ID NO: 371 - protein, 537 aa, Sphaerobacter thermophilus
MASVSNRTTAAQSRRAAIYARVSTDRQSVEGQIEFAREWAPKHGYTLTEIYADNARSGTIPFAEREAGRRLLIDLRAGRFDVVLVYKYDRLGRDREVGDIETRQAILDIERAGGQIIAMTQPIDASTIMGRFTRSVQIDIGTIERLNTLERSADTLATLVRRPGFFTGGTAPYGYRVEGQDRDARLVVDEEPIPGLDISPADVVRMIYHWLVAEGRSTVWIAAELNRRGIPTRALLAGRARPTAGIWRPGRVSTMVRNTVYKGVAVYGRRKSGRSPFPVPVTEREVPAIVDAETWEAAQEQLRRNKKRAKRNAKRQYLLSGLVKCGACGSNYTGLAYTTKDGQERRYYTCNNIHQRHNTGGERCTNPALSWQYEELIWRDIDAWLENPGPILEELAAQLNTDADDAGNIEADIERRRRQLAGQEKERERLLTAYRKGIIDDTDLERELAAMRRERAVLEEEIEALKRAQQRREERRAGLVTAAALLEELKARRREGLTFAVKRQVVEALVKEIVVQPDGTPDVTYRFAVINNRTELC

SEQ ID NO: 372 - DNA, 50 bp, Sphaerobacter thermophilus
  source 1..50: mol_type = genomic DNA
tgccgtgattaacaaccgcacggaactttgtgcggtgaattatcacggtg

SEQ ID NO: 373 - DNA, 40 bp, Sphaerobacter thermophilus
  source 1..40: mol_type = genomic DNA
cccgcagtagccattcggaactttgtggaggtactgctgg

SEQ ID NO: 374 - DNA, 50 bp, Sphaerobacter thermophilus
  source 1..50: mol_type = genomic DNA
tgccgtgattaacaaccgcacggatttttgtgcggtgaattatcacggtg

SEQ ID NO: 375 - DNA, 40 bp, Sphaerobacter thermophilus
  source 1..40: mol_type = genomic DNA
gccgcagtagccattggggttcttgctcaggtactgctgg

SEQ ID NO: 376 - protein, 473 aa, Candidatus Frankia alpina
MCPMARAGIYVRISEDRGGVGLGVARQEADCRALCARKEWDVVDVYSDNDTSAYSGRPRPEWDRLVSDIRGGAIDAVACWHVDRLTRHPRELEDVIDLADRLGLELATATGEIDLVTPTGRMVPRILGAAARHESEHKAERQRRQRRQAAEAGRPNGGGTRPFGYESDFVTVRESEAAVIREVAGRALAGESLSSVARHLAERGVTTPMGGQRQPRTLRTMLAAARISGRREHKPRASGAKGTRPLIGEIVADALWPSIISPEHSDQLRAMLSGRTLAAATGRTYLLSGILRCGLCKGRMSGRPRSGVPRYVCPNMPGGKTCGRVATNAARTDDHVRDLVLVALEDPGFVDRLHAIAEVDPEVRRAVVQDERRLEELAVEWADGEISRAEWKTARERIESRLTTNRRRLTRVAAARSLEGMTGSYDELLAEWDRRNDAQRRAVVTATLIKVVVKPADPRRRWDPDRFDPEWRV

SEQ ID NO: 377 - DNA, 50 bp, Candidatus Frankia alpina
  source 1..50: mol_type = genomic DNA
aggtcacatgtcgataggcccgtgggcacgggtctgtcaacatgtgcccc

SEQ ID NO: 378 - DNA, 40 bp, Candidatus Frankia alpina
  source 1..40: mol_type = genomic DNA
cggctactgcggcctcggcggcacgggcctatcctgcccg

SEQ ID NO: 379 - DNA, 50 bp, Candidatus Frankia alpina; identical to SEQ ID NO: 377
  source 1..50: mol_type = genomic DNA

SEQ ID NO: 380 - DNA, 40 bp, Candidatus Frankia alpina
  source 1..40: mol_type = genomic DNA
tggctactgcggccttgggggcaccggcgtgtcctgccca

SEQ ID NO: 381 - protein, 481 aa, Streptomyces malaysiensis
MAIRAAIYVRISQDRGGAGLGIARQEEDCRALCERKGWDVVDVYPDNDVSAYSGAPRPKWQELLEDINEGMVNAVVCWHVDRLTRSPRELEDVIDLADRHGLELATVSGEIDLATPTGRMIARMLGAAARHEAEHKAERQQRQRRQAAEAGKIAGGGKRPYGYEDDRITVREGEAEIIREGARRVLAGESLASICRDWKSREIVTVAGIPWKPSGLRRMLASARISGRREHTPRRSWESTRPLLGEIVGDAVWPGIISHEDSDRLRALLSDPDRRRTSDGGNRSYLLSGILRCGKPTGEPGKACGWGMVGRPRSGVPRYVCPNTPGTDACGGTATNAERTDGQIRDMVLAAFESPTFMKRLREPDEDGSELYQKVRADEEELEALAEDYGNQAISRKEWMVARAPIQERLERNRARLTKVSRKAVLLGFVGSFEDMLSRWEKMNDSQRRAVITAAVRSIEVLPANPRKRWDPDRFVIDWIA

SEQ ID NO: 382 - DNA, 50 bp, Streptomyces malaysiensis
  source 1..50: mol_type = genomic DNA
gggtcacttagcttgacgcccgtgcctacgagggtgtagctatgtgaccc

SEQ ID NO: 383 - DNA, 40 bp, Streptomyces malaysiensis
  source 1..40: mol_type = genomic DNA
cgggcaggagacgcccgtgccgccgatgccgcagtagccg

SEQ ID NO: 384 - DNA, 50 bp, Streptomyces malaysiensis; identical to SEQ ID NO: 382
  source 1..50: mol_type = genomic DNA

SEQ ID NO: 385 - DNA, 40 bp, Streptomyces malaysiensis
  source 1..40: mol_type = genomic DNA
tgggcaggacacgccggtgcccccaaggccgcagtagcca

SEQ ID NO: 386 - protein, 624 aa, Blautia obeum
MDAQEDMHMNDYNKITALYSRLSVGDEDRDGGESNSIQNQKKFLESYARQLKLTNIRHYIDDDESGRFFDRSAYSRMIEDVENGKIGVCIMKDMTRWGRDYLQVGNAMEIFRRNNVRFIAVNNGIDSEKPDTLEFAPFINIMSEWYAKDISKKVKTGIKTKGMSGKPIATEALYGYVKSPDNKDFWIIDEEAAGVVRLIFRLFLDGKNRNQIAVYLTQAQIPTPTFYMKERGRGTCKNRALNEDNRYKWNKATLTHILTRQEYCGDVVNFKTTKHFRDKRNHYVDRSQWQITENVHEPIIDRADFETAQRILENAPVRRPNGDGEIHPLSGLLFCKDCGAKMHIRIDYRNGGKRHVAYCSEYHKGKAKNPKCHSPHIIDADLLMQTVAEVLKKIEDYSISNRAEFEALVKKNLAMQQTDQTKKQQKRIPQITTRLEQIDKVLNKLYEDNALGTIPQDRYEQMSQKYSEEYYALKTELSILQEQLSAYENAGGRAQKFLKLTERHAAFTDLTPAILNEFISRIEVHERDQKRARYAIQHISIYFNYIGRFENEVTQLAEPTEQEIRQMREEIEEAKKEKSRAYHRKYSREYRARNLEKQREYERIKAREYRARRKAQTAAAQPAQ

SEQ ID NO: 387 - DNA, 50 bp, Blautia obeum
  source 1..50: mol_type = genomic DNA
aaaagcacttgacaaaacgcttcatggagtgcataatcttaagtgtaaag

SEQ ID NO: 388 - DNA, 40 bp, Blautia obeum
  source 1..40: mol_type = genomic DNA
ggagtatggttctgctagatggggaacagaaaaagatata

SEQ ID NO: 389 - DNA, 50 bp, Blautia obeum
  source 1..50: mol_type = genomic DNA
aaaagcacttgacaaaacgcttcagtgagtgcataatcttaagtgtaaag

SEQ ID NO: 390 - DNA, 40 bp, Blautia obeum
  source 1..40: mol_type = genomic DNA
gtagtttggtcctggtagagtgggagcaggaaaaaatata

SEQ ID NO: 391 - protein, 481 aa, Streptococcus agalactiae
MITTNKVAIYVRVSTTNQAEEGYSIEEQKDKLKSYCNIKDWNVFNVYTDGGFSGSNTERPALEQLIKDAKKKKFDTVLVYKLDRLSRSQKDTLYLIEDIFLENNIDFVSLLENFDTSTPFGKAMVGILSVFAQLEREQIKERMQLGKLGRAKAGKSMMWAKVAYGYTYHKGSGEMTINELEAIVVREIFNSYLEGMSITKLRDKINDTYPKTPAWSYRIIRQILDNPVYCGYNQYKGEVYKGNHEPIISEEDFNKTQDELKIRQRTAAEKFNPRPFQAKYMLSGIAQCGYCKAPLKIIMGAVRKDGTRFIKYECYQRHPRTTRGVTTYNNNQKCHSSSYYKQDVEDYVLREISKLQNDKKAIDELFENTNMDTIDRESIKKQIEAISSKIKRLNDLYIDDRITIDELRKKSTEFTLSKTFLEEKLENDPILKQQESKDNIKKILSCDDILTMDYDQQKIIVKGLINKVQVTADKVIIKWKI

SEQ ID NO: 392 - DNA, 50 bp, Streptococcus agalactiae
  source 1..50: mol_type = genomic DNA
tataaagaaatttactatccttgatttctaaaagcgtatctaaaactctc

SEQ ID NO: 393 - DNA, 40 bp, Streptococcus agalactiae
  source 1..40: mol_type = genomic DNA
atgatcaaaacaactaacatttctaaaagtgtaaatgctt

SEQ ID NO: 394 - DNA, 50 bp, Streptococcus agalactiae
  source 1..50: mol_type = genomic DNA
tataaagaaatttactatccttgacttctaaaagcgtatctaaaactctc

SEQ ID NO: 395 - DNA, 40 bp, Streptococcus agalactiae
  source 1..40: mol_type = genomic DNA
ttcatcaaaacacctaacacttctcaatgtgtacatactt

SEQ ID NO: 396 - protein, 474 aa, Bacillus siamensis
MNLMDENTQKNVGIYVRVSTEEQAKEGYSISAQKEKLKAYCVSQGWESYKFYIDEGKSAKDIHRPSLELMLRHIEQGIIDTVLVYRLDRLTRSVRDLYSLLDYFDKYQAIFRSATEVYDTGSATGRLFITLVAAMAKWERENLGERVKMGQVEKARQGQFSAPAPFGFTKEGESLVKNTEEGEVLLDMIDKIKKGYSLRELADYLDESDAIPKRGYKWHIASILVILKNPVLYGGFRWAGEILEGAFEGYISKKEFEQLQKMLHDRQNFKRRETSSVFIFQAKIICPNCGSRLTCERSIYFRKKDNKNVESNHYRCQACALNKKPAIGISEKKLEKALIEYMQNANFKREPKIPQERQQDYDKLHQKIISIEKQRKKYQKAWSMELMTDQEFEQLMAETKEALQKATAKLEQSDLQSIEKPLDIERAKELAKMFRENWSVLTGEEKRQVVQELIKHIEFEKKDNKARVLDIHFY

SEQ ID NO: 397 - DNA, 50 bp, Bacillus siamensis
  source 1..50: mol_type = genomic DNA
attagggtttatgtaaagtacaagcatgtaaacttaacataaatacaaat

SEQ ID NO: 398 - DNA, 40 bp, Bacillus siamensis
  source 1..40: mol_type = genomic DNA
tttagtatttaaatataaacagacaaaatgctcctgggat

SEQ ID NO: 399 - DNA, 50 bp, Bacillus siamensis
  source 1..50: mol_type = genomic DNA
attagggtttatgtaaagtacaagattgtaaacttaacataaatacaaat

SEQ ID NO: 400 - DNA, 40 bp, Bacillus siamensis
  source 1..40: mol_type = genomic DNA
ttaagtatttaaaaataaaatgaaaaaattatccttggac

SEQ ID NO: 401 - protein, 440 aa, Blautia obeum
MKQQIYNTALYLRLSRDDELQGESSSITTQRSMLRLYAKEHHLNVIDEYIDDGWSGTNFDRPSFQRMIEDIEAGKINCVVTKDLSRLGRNYIMTGQYTELYFPSHNVRYIAIDDGVDSEKGESEIAPFKNIINEWVARDTSRKVKSAFKTKFAEGAHYGAYAPLGYKKHPDIKGKLLVDDETKWIIEKIFSLAYQGYGSAKITKQLRAEKVPTASWLNFTRYGTFAHIFEGKPESKRYEWTIAHVKAILKSEVYIGNSVHNMQSTVSFKSKKKVRKPESEWFRVENTHEPIIDKEVFYRVQEQIKSRRRQTKEKATPIFAGLVKCADCGWSMRFGTNKTNKTPYSYYACSYYGQFGKGNCSMHYIRYDVLYQAVLERLQYWAKAVQQDEEKVLNKIQKAGNAERIREKKKKASTLKKARTDKMRLTVYLRKCMKIEPVRR

SEQ ID NO: 402 - DNA, 50 bp, Blautia obeum
  source 1..50: mol_type = genomic DNA
taatatttttaactaagggaaaccggtgtttcccaaacaaaaagatatta

SEQ ID NO: 403 - DNA, 40 bp, Blautia obeum
  source 1..40: mol_type = genomic DNA
agtttccagatgggaaacaggaacaaatctgccggatctt

SEQ ID NO: 404 - DNA, 50 bp, Blautia obeum
  source 1..50: mol_type = genomic DNA
taatatttttaactaagggaaacctgtgtttcccaaacaaaaagatatta

SEQ ID NO: 405 - DNA, 40 bp, Blautia obeum
  source 1..40: mol_type = genomic DNA
agtttccagatgagatgcatgaacaaggatgccagatctt

SEQ ID NO: 406 - protein, 537 aa, Blautia obeum
MKQQIYNTALYLRLSRDDELQGESSSITTQRSMLRLYAKEHHLNVIDEYIDDGWSGTNFDRPSFQRMIEDIEAGKINCVVTKDLSRLGRNYIMTGQYTELYFPSHNVRYIAIDDGVDSEKGESEIAPFKNIINEWVARDTSRKVKSAFKTKFAEGAHYSAYAPLGYKKHPDIKGKLLIDDETKWIIEKIFSLAYQGYGSAKITKQLRAEKVPTASWLNFTRYGTFAHIFEGKPESKRYEWTIAHVKAILKSEVYIGNSVHNMQSTVSFKSKKKVRKPESEWFRVENTHEPIIDKEVFYRVQEQIKSRRRQTKEKATPIFAGLVKCADCGWSMRFGTNKANKTPYSYYACSYYGQFGKGNCSMHYIRYDVLYQAVLERLQYWAKAVQQDEEKVLNKIQKVGNAERIREKKKKASTLKKAENRQNEIDRLFAKMYEDRACEKITERNFVMLSSKYQKEQIELEQQITSLREELSKMEQDMIGAEKWIELIKEYSVPKELTAPLLNAMIEKILIHEATTNEDNERIQEIEIYYRFIGKVE

SEQ ID NO: 407 - DNA, 50 bp, Blautia obeum; identical to SEQ ID NO: 402
  source 1..50: mol_type = genomic DNA

SEQ ID NO: 408 - DNA, 40 bp, Blautia obeum; identical to SEQ ID NO: 403
  source 1..40: mol_type = genomic DNA

SEQ ID NO: 409 - DNA, 50 bp, Blautia obeum; identical to SEQ ID NO: 404
  source 1..50: mol_type = genomic DNA

SEQ ID NO: 410 - DNA, 40 bp, Blautia obeum; identical to SEQ ID NO: 405
  source 1..40: mol_type = genomic DNA

SEQ ID NO: 411 - protein, 503 aa, Campylobacter coli
MNNRIDAIYARQSVDKKDSISIESQIEFCKYELKGGNCKEYTDKGYSGKNTDRPKFQELVRDIKRGLIAKVIVYKLDRISRSILDFANMMELFQQYDVEFVSSTEKFDTSTPMGRAMLNICIVFAQLERETIQKRATDAYYSRSQRGFKMGGKAPYGFHTEPIKMDGINTKKLVVNPDEAANIRLIFEMYAQPTTSYGDITRYFAEQGILFYGKELIRPTLAQMLRNPVYVQADLDVYEFFKSQGTVIVNDAADFTGTNGCYLYQGRDVKPSKKNDLKDQMLVLAPHEGIVPADIWLACRKKLMNNMKIQSARKATHTWLAGKIKCGNCGYALMSIFNPSGRQYLRCTKRLDNKSCPGCGKIITSELEAVVYQQMVKKLEKHKTLTGRKKAAKANPKIAALQVELLHVDSEIEKLVDSLTGANNVLLSYVNVKIAELDGRKQELVKQIAELTVETISPGQVNQISGYLDTWDDVSFDDKRRVVDLMITTVAATSDSLNITWKI

SEQ ID NO: 412 - DNA, 50 bp, Campylobacter coli; identical to SEQ ID NO: 12
  source 1..50: mol_type = genomic DNA

SEQ ID NO: 413 - DNA, 40 bp, Campylobacter coli
  source 1..40: mol_type = genomic DNA
gtgatttttattttctctttttcagatattctaataacat

SEQ ID NO: 414 - DNA, 50 bp, Campylobacter coli; identical to SEQ ID NO: 12
  source 1..50: mol_type = genomic DNA

SEQ ID NO: 415 - DNA, 40 bp, Campylobacter coli
  source 1..40: mol_type = genomic DNA
gtgattatttttttctcttttccacatgttctaacaactt

SEQ ID NO: 416 - protein, 483 aa, Anoxybacillus caldiproteolyticus
MTVGIYIRVSTEEQAKEGYSISAQREKLKAYCEIQDWHDYRFYVDEGISAKDMNRPQLLQMIQHIKEGLIDTVLVYRLDRLTRSVMDLYKLLEIFEKYNCTFKSATEVYDTSTAIGRLFITLVAAMAQWERENMGERIRLGFQEKVRQGKYAQNQRPFGYNLDLKTGTLTINEEEAKVVRLIVDLYLKKGYGANRICKYLNERNIKTRDGNAWNDKPLMQLLKNPLYTGTIRWGLDYEKPMLVEGAVPAIIDKQTFEEIQRTIEKRRGLSPRSVASDYIFSGVFKCSVCGHPMVGFMTYQTLATGERVTYKNYRCLRKKTGECKGIKNVSERKLEKAFLDYLKKIDFSPVLEETAASGEEKLNKTDHIDIEELKKELDKIEKRKKKWQYAWANEMMSDDEFRERMNEERELESKIKKQLEEFEVPQEITTDKTELYSFLQDMERNWSKLSTSEKKSLVQLVVKQIHVAFNEKGEVYIDHIDFY

SEQ ID NO: 417 - DNA, 50 bp, Anoxybacillus caldiproteolyticus
  source 1..50: mol_type = genomic DNA
ttatgtagtaccataacctttcagccatcgaaagttatggtactacataa

SEQ ID NO: 418 - DNA, 40 bp, Anoxybacillus caldiproteolyticus
  source 1..40: mol_type = genomic DNA
ccttgttccttctttccttcctttaaaacttgagccataa

SEQ ID NO: 419 - DNA, 50 bp, Anoxybacillus caldiproteolyticus
  source 1..50: mol_type = genomic DNA
ttatgtagtaccataacctttcagtcatcgaaagttatggtactacataa

SEQ ID NO: 420 - DNA, 40 bp, Anoxybacillus caldiproteolyticus
  source 1..40: mol_type = genomic DNA
ccttcttccttctttcctttctttaaaatgtaattcttaa

SEQ ID NO: 421 - protein, 465 aa, Staphylococcus sciuri
MKTALYLRVSTQEQATTGYSITGQEDKLRSYAKAKEFSNIKVFTDAGYSGSNTKRPALNLLIKEVEQGKISNILIYKLDRLSRSQKDTLYLIEEKFLKNDVALISLSESFDTSTPFGRAMVGMLSVFAQLERENIKERMIMGREQRLKKGLWHGAGGGSGKVAGYDYKDGKLVINEYEALFVRRMFQLYVEGEGYFNIYKKLSKEMPGVIKEPSNISKLLKNSVYIGMIDYNGETYKGIHEPIIDEHTFNTVQKLRQTRTVNRDMSITRYLLPRLLKCGYCGENMIGKTGSKKKDGTYYTYYCCYSKEIKRRKKVINSNFSHECESVYHTAQLVEDKVINEVMNLDSTKIIRDYETKNDDHIIYEKQIKDIDTKIEKLMNLYIDSNIDKKTLDVKHKELEDEKRLVEKTMRDSKADVNKEVVLKHLSNFKDIDWIDDREALKNSLHILIKDIRIYNDSMKVNFNI

SEQ ID NO: 422 - DNA, 50 bp, Staphylococcus sciuri
  source 1..50: mol_type = genomic DNA
aatatgtagtaacaggactaaccattaagttaatctttttactacatgaa

SEQ ID NO: 423 - DNA, 40 bp, Staphylococcus sciuri
  source 1..40: mol_type = genomic DNA
catttcaatttctacaccattactttgatcaatcgccata

SEQ ID NO: 424 - DNA, 50 bp, Staphylococcus sciuri
  source 1..50: mol_type = genomic DNA
aatatgtagtaacaggactaaccatcaagttaatctttttactacatgaa

SEQ ID NO: 425 - DNA, 40 bp, Staphylococcus sciuri
  source 1..40: mol_type = genomic DNA
catttcaatttttacaacatctctatgatgatttgccata

SEQ ID NO: 426 - protein, 512 aa, Flavonifractor plautii
MCAYSVFNTFPVYPLSAKPLILLAFCRYRYHTSLFDRPSFQRMMNDVEAGKVNCIVTKDLSRFGREHVMMDYYLEFVFPEKQIRYIAIAENEDTEKGLSEFVPFKNLFNEWFAKDTSRKVKSALHAKFEKGERIFAYAPLGYKRHPEIKNTLTPDEETRWIVEKIFDLAVHGAGAAKITRILIAEKVPTAGWLNYKRYGTFANIYAGAPEEKSYAWTIAQVKSILKDETYIGNSIHNKQTNISYKNKKKVRKPKEEWIRVENTHEALVSKDVFDRVQELIETRRRKQKDGTTQIFSGLVKCADCGWSLAFGMNNQNKKPYGHYHCSNYGQGTGHCTMHYIRYDILYTYVLARIQYWSYQAQMDEGRLLQKLLKAGDRERTASQKKQAAELNKAEKRKAELDRLFAKMYEDWAAGRITEYNFNMLSQRYQTEQQELAEKIEKLNADLVAQQQSAVDAEKWVNLIKQYVNPSELTAELLNALIEKIVVHEAVKDESNTRTQEIEIYYRFIGKVE

SEQ ID NO: 427 - DNA, 50 bp, Flavonifractor plautii
  source 1..50: mol_type = genomic DNA
ttatctctttaagttggggaaaccggagtttcccaaagttaaagatacta

SEQ ID NO: 428 - DNA, 40 bp, Flavonifractor plautii
  source 1..40: mol_type = genomic DNA
ggtaagcaaatgggagagcggacagacaaacccagatgtg

SEQ ID NO: 429 - DNA, 50 bp, Flavonifractor plautii
  source 1..50: mol_type = genomic DNA
ttatctctttaagttggggaaacccaagtttcccaaagttaaagatacta

SEQ ID NO: 430 - DNA, 40 bp, Flavonifractor plautii
  source 1..40: mol_type = genomic DNA
ggtaagtaaatggtggagccagcattcaaacccagatctg

SEQ ID NO: 431 - protein, 550 aa, Lactococcus lactis
MNRSLKIEYSEITDEKNLTVLYARLSKDDGKSGDSDSILNQKLLLENFAREQKLAPYVFLADDGVSGTTFNRPAFQQAIELVNRGQVKTFVVKDLSRFGRDYLKVGAFTEVAFPEKGVRFIAINDNVDSDRPDDNSLAPFRNLFNEWYARDCSKKIKAVKHSKGNAGIPMTANVPYGYLKGENYKETHEWIVDEEAAIVIRRIFHDYASGKSMTMIAKELETERVNTPAAHKVSIGLKSNKMPSFRYGWNAQTIRQVLAHREYCGHTVNFKTYKKSYKTKKHLPTPLEEQKIFKNTHEAIIDEDLFELVQEKRGAYRPRRTMHHHVGLFSGITCCMDCGSLHHYDHNGGDCSPFYYCSGASKRIKICKSRHSIMEKRLEPIVLEDVRRITQLVKNNESELVTFLEKKFRAQKSRTFQKDKQMLEKAKHRFLELDQIIQHLYEDNLSGKLSDARYAKMSQNYEQEQEKLGKDLACLEQRVAEVEDVTSDINRFIQVAKKYLEPDQLEADMVRELIEKIEIGEKGRVDGKNEQKIRIIYRFVGEIDEKNGLI

SEQ ID NO: 432 - DNA, 50 bp, Lactococcus lactis
  source 1..50: mol_type = genomic DNA
atttcgagttacggggtgtgttataatgaacatcccccgtaacacgaaaa

SEQ ID NO: 433 - DNA, 40 bp, Lactococcus lactis
  source 1..40: mol_type = genomic DNA
attattttaaatttgatataataaaggcatgaaaaaatcc

SEQ ID NO: 434 - DNA, 50 bp, Lactococcus lactis
  source 1..50: mol_type = genomic DNA
atttcgagttacggggtgtgttattttgaacatcccccgtaacacgaaaa

SEQ ID NO: 435 - DNA, 40 bp, Lactococcus lactis
  source 1..40: mol_type = genomic DNA
attattttaaatcttggatttttacggcatgaaaatatcc

SEQ ID NO: 436 - protein, 575 aa, Eubacterium rectale; identical to SEQ ID NO: 276

SEQ ID NO: 437 - DNA, 50 bp, Eubacterium rectale; identical to SEQ ID NO: 277
  source 1..50: mol_type = genomic DNA

SEQ ID NO: 438 - DNA, 40 bp, Eubacterium rectale
  source 1..40: mol_type = genomic DNA
tcaaaataataaatatcacttgcttttattactttttttg

SEQ ID NO: 439 - DNA, 50 bp, Eubacterium rectale; identical to SEQ ID NO: 279
  source 1..50: mol_type = genomic DNA

SEQ ID NO: 440 - DNA, 40 bp, Eubacterium rectale
  source 1..40: mol_type = genomic DNA
tcaaaataataaatctttcctctttttttttctttttttg

SEQ ID NO: 441 - protein, 548 aa, Mycolicibacterium rutilum
MSLRFAFYGRVSTEDAQDPEASRSWQKRRAIDLITPHGGVLAVDYFDIGQSRSLPWKRRPEASRLLADVTSRDRGFDAVVIGEPARAFYGPQFALTFPVLTHYGVGLWVPEVGGAVDPGSEAHDLVMTLFGGMSKGERARIQMRVRTAMSALAQDTTRYLGGRPPYGYRLVDAGPHPNPAKASLGQRLHRLEPDPATCSVVERIYRMYADGAGLRFIAQQLTDDGVPSPSQYDPERNRHRDPRGWSHSAIRAILDNPAYRGIRVWGKQEKYEVLVNPDDVAAGYETRMRWRDEVDWIAPDRRTHEALITDELARAVRLRMQARRGPGLVCSRESTVPYALRGLLFCAACGRRMQGAARPGKQTTRILYRCEFGKSRSVPVDLSDHPRTVYLREDAVTARLDEWIATLADPEDLARGQDVDPAAGPGYAALQRQLSEANAKVAALITAVESGVAVEDLTAALRQRTAERDELRARVERVARPRAMCAAEISELVKELGGLSVILGAATGAERAEVYASLGLRLDYDPHLRRVTATADLSRVAGCVRGGT

SEQ ID NO: 442 - DNA, 50 bp, Mycolicibacterium rutilum
  source 1..50: mol_type = genomic DNA
agtcgtgtcgccggatgtgtccgaggggggacttgtccgtctacgacacg

SEQ ID NO: 443 - DNA, 40 bp, Mycolicibacterium rutilum
  source 1..40: mol_type = genomic DNA
gcagcgattgagtgtccgaggggggacttgaacccccacg

SEQ ID NO: 444 - DNA, 50 bp, Mycolicibacterium rutilum
  source 1..50: mol_type = genomic DNA
agtcgtgtcgccggatgtgtccgaccggggacttgtccgtctacgacacg

SEQ ID NO: 445 - DNA, 40 bp, Mycolicibacterium rutilum
  source 1..40: mol_type = genomic DNA
gcagctcttgagtggcacacctgggacttgaacccccacc

SEQ ID NO: 446 - protein, 550 aa, Streptococcus agalactiae
MNKLNRQPSYTLDNVGKITALYCRLSKDDELQGDSNSIINQKSMLKKYAEDNHFNNLMFFVDDGYSGTNFQRPDWLKLTALIDEGKIGTIIVKDMSRLGRDYLQVGMYTEMVFPNADIRFIAINNGVDSNNQSDNDMTPFINIFNEFYAKDTSRKIKAVFKAKGQSGKPLCINPPYGYLKDPEDKNHWIVDEEAASVVREIFRLCVNGYGPSQIANELIKRNIPTPSEHFFSLGIKIPSAKSEIKGVWNQKTISNMLEKQEYLGHTVNFKTRKKSYKCKKTLLNPKEDWLIFKNTHEAIIDQETFDIVQRIRDGRRVRANLGEMPVLSGMLFCADCGNKLYQVRGKDWSHDKEYFVCATYRKQKGKCSSHQIRNIQIEAILLHELRTITSFAKQHEEEFVGLVMKKSEKELTQKLKSSNRELEQAKARISKLDTIVQHLYEDNLDGKISDERFKSMSESYDKEQAELKSKIESLEAFISKAQEECLNVDSFLKLVRQYTDIQELNAEIIRTFVDKIYVEKSEKVAGTRTKKQTIWIQWNYIGAVDIPLHK

SEQ ID NO: 447 - DNA, 50 bp, Streptococcus agalactiae
  source 1..50: mol_type = genomic DNA
ttaaatccctaagtgaacgcccctaaaggagtgttcagtaagggattaaa

SEQ ID NO: 448 - DNA, 40 bp, Streptococcus agalactiae
  source 1..40: mol_type = genomic DNA
atagaaaaaaagacaagataataatcttgacttttttctt

SEQ ID NO: 449 - DNA, 50 bp, Streptococcus agalactiae
  source 1..50: mol_type = genomic DNA
ttaaatccctaagtgaacgcccctataggagtgttcagtaagggattaaa

SEQ ID NO: 450 - DNA, 40 bp, Streptococcus agalactiae
  source 1..40: mol_type = genomic DNA
ctagaaaaatagcaaagatattcatattgacatttttctt

SEQ ID NO: 451 - protein, 549 aa, Streptomyces scabiei
MTDDLVQRAHWGDLEGQNWAVLVRLSLEADDEELSATAPGRKQDRPASNGEKWRPATGRDIKSREEQEKDARRFVESRGGRYVYTYEEPDTSAWKRKRVRQPDGTVAYRVIRPVFEGALADLKRGMAPDGERLDGLIVYDIDRLTRDNRHLEDAIEVVENFRRPIIDITGTLDLLTDNGRTVARLLVTVANKSSADTARRVRRKHRAMQQAGIPTGSTRPFGYQDDKRTLEPKEAAAIRKAVERIITGASPRSIAADWNKQGIATTLGNTWSKGTVKQVLRNPRICGYRSKKVREFNPETGTESVRIETVLDDDGAPVKGQWTAIISVADWEAVTEAIGRNPEPGDSYNARKYLGTSVLRCDKNGCGSRLRAQKAPASRNKPEGFFYYTCPDKRSGFGCGGVRISGPDTDEALKMLVITKYEEEAQERAATAVPEAWDGEEELARIREDIADWTEQREQRTVSKERYFAFLAKAEASERRLVKERNEWRRRALRVKGEPVDLRRVWDDLDFVERHAYVEKTLLTVLVSPAVRPRGPVWNRLTPIYREED

SEQ ID NO: 452 - DNA, 50 bp, Streptomyces scabiei
  source 1..50: mol_type = genomic DNA
gtgttacatccaccgatgccttgcgaacagagcatcggcggaagtaacct

SEQ ID NO: 453 - DNA, 40 bp, Streptomyces scabiei
  source 1..40: mol_type = genomic DNA
tggcgcaggcatctccaccgactccggcattcccgactac

SEQ ID NO: 454 - DNA, 50 bp, Streptomyces scabiei; identical to SEQ ID NO: 452
  source 1..50: mol_type = genomic DNA

SEQ ID NO: 455 - DNA, 40 bp, Streptomyces scabiei
  source 1..40: mol_type = genomic DNA
tggggcaggaatctccaccgaatcggggataccagactac

SEQ ID NO: 456 - protein, 581 aa, Clostridioides difficile
MQEVEVIKARNVLSKQARGKAIERLRVAAYCRVSTDSEDQLNSYKSQVQYYTDMIKKNKEWVLADIYADEAITGTQVTKREDFQRMINDCMNGEIDMVITKSISRFARNTLDTLKYVRMLKERNIAVYFEDEKINTLTMDGELLLVVLSSVAQQEVENISANVKKGLKMKMKRGELVGFQGCLGYDYHPEDKTITVNQEEAEIVRYIFNRYVEGAGGSVIGQELENLGYKTKYGSSTWAPSTVIGIIKNEKYKGDILLGKTFTVDPISKRRLENMGEEDKFYMKDHHEPIISEEIFEKAQEILNRRNKNRTTVGSGKREKYSRKYAFSCMLECGFCGSTLSRRNWHSSSEYSKVIWQCVTATKKGKKFCPDSKGIPETAIEEAFIESYRLLCDNNKDVLEEFLHRLDETLSNSTVSKQLSKIEKEISAVEGKKNKLVDMRLEDSIDKDTYETKYTALMEKLEQLASDRQKLQETAVNEKDIKRRLKEFKTTLEQNEVLDVFDRHVFESIVEKVIVGGYDEDGNKDPAQLTFVYKTGMKNSVDGSRFKPQRKNARGRHRTDELCSHESNEVNSLCSDNSADT

SEQ ID NO: 457 - DNA, 50 bp, Clostridioides difficile
  source 1..50: mol_type = genomic DNA
cattgtgttccgataatagtgccgacacatatagagacggtagcgttatt

SEQ ID NO: 458 - DNA, 40 bp, Clostridioides difficile
  source 1..40: mol_type = genomic DNA
agatatgttccctcattctacacatgtggaaactgtagct

SEQ ID NO: 459 - DNA, 50 bp, Clostridioides difficile
  source 1..50: mol_type = genomic DNA
cattgtgttccgataatagtgccggcacatatagagacggtagcgttatt

SEQ ID NO: 460 - DNA, 40 bp, Clostridioides difficile
  source 1..40: mol_type = genomic DNA
agatattttccttcattttgcatatgaggaaactgaggct

SEQ ID NO: 461 - protein, 546 aa, Sellimonas intestinalis
MNQQPDKITALYCRLSQDDALDGESNSITNQKALLSRYASEHGFRNTMFFVDDGFSGISFQRPGFQEMMKYVEDYSVSTLIVKDLSRLGREYSYMGRLQDFIFPAYDVRFIAINDDVDSAKGENDFAVFKKVFNDYYAKDTSKKIRAVVKMRGEAGEHLASNPPYGYIKDPLDKKKWIVDEEAAKVVRRIFDLCIAGKGPMQIAKILTAEKVLTVTAYRAKQKGWTIPDDLYQWCAKSVSSILERREYTGCTVNFKTYTKSLKFKKRLQNPKENQRIFEGTQPAIIEYGQWERVQALRENKRRPTKTGKTSIFSGLVRCADCGAKLYYCTCNSYKDDSQDHFVCSNYKSNTGSCQIHYIREITLYKRVLECVQRTLTYVRLFRDDFTQEMLMQDEASRKAELAQKRKALSGAQKRMEDLDKIIQHLYEDNVLGKLSDLRFQKLSSQYETEQAEIRQFSETLEREIAEEAEQVLDVGRFLQLAERYSDIQVLDAATVNELIEKIVIHSPEKINGRKHVTIEIYFTYVGKIRIPLQKPELSASTEKPA

SEQ ID NO: 462 - DNA, 50 bp, Sellimonas intestinalis
  source 1..50: mol_type = genomic DNA
ttatttccttatgagccgctgcctaaaggcagtagctcataaggaaatat

SEQ ID NO: 463 - DNA, 40 bp, Sellimonas intestinalis
  source 1..40: mol_type = genomic DNA
gaaaaaaaggacatctttaaaatcagtttttctctttttt

SEQ ID NO: 464 - DNA, 50 bp, Sellimonas intestinalis
  source 1..50: mol_type = genomic DNA
ttatttccttatgagccgctgcctccaggcagtagctcataaggaaatat

SEQ ID NO: 465 - DNA, 40 bp, Sellimonas intestinalis
  source 1..40: mol_type = genomic DNA
gaaaaaaagtaaatattcaccaacattctttctctttttt

SEQ ID NO: 466 - protein, 503 aa, Roseburia hominis; identical to SEQ ID NO: 341

SEQ ID NO: 467 - DNA, 50 bp, Roseburia hominis; identical to SEQ ID NO: 12
  source 1..50: mol_type = genomic DNA

SEQ ID NO: 468 - DNA, 40 bp, Roseburia hominis
  source 1..40: mol_type = genomic DNA
taaatatttatttttcaaattcttttcatatagattacaa

SEQ ID NO: 469 - DNA, 50 bp, Roseburia hominis; identical to SEQ ID NO: 14
  source 1..50: mol_type = genomic DNA

SEQ ID NO: 470 - DNA, 40 bp, Roseburia hominis
  source 1..40: mol_type = genomic DNA
caaatatttacatttcaaaaacatttcttatatattataa

SEQ ID NO: 471 - protein, 612 aa, Streptococcus agalactiae
MRNFEKITALYERLSRDDELQGESNSIINQKKILEEYASKNNLSNIIHFTDDGISGTQFDRPGFMAMMNGVNQGNIGCIIVKDMSRLGRDYLKVGQCMEILRQKGVRLIAINDNVDSFYREDDFTPFRNIMNEWYARDTSRKIQSTFRSKGESGKHTASTPPYGYIKDEKDKNKWIVDEKAAEIVRRIFNLTMQGNGPYRIAKILESEKVDIPAYHQQKLGYGLYQSKNFEHPYRWCSSTIASILKKQEYLGHTVNFKTRKHFKDKKSKYVSEDNWLIFENTHEPIIDQETFDNVQRIRGNVKRYPDGWGEYHPLTGLMYCADCGSKMYVHRTSNYKNIPYYTCSAYTKTPCGMLCPSAHRIKAEVVLNLIQDTLKDIKKYLDEDNEAFICSIQNEMEEKEKIEIEKKKVRLTESQNRLRELERLMCRIYEDMILNKIPNSRYEILNNQYETEQITLSKEIKDLEQQVSRYEKETDRARKFISLISRYENFDELTTTMINEFVEKIIVHERDRKGSQTSKQKIEIYFNFIGNYELPQAELSEEKKQKLEEEERKIEERKDKLHQNYLKRKASGKQKEYEDKYKARREQKKQEKIKVLKRVGIPVSEYIKTNI

SEQ ID NO: 472 - DNA, 50 bp, Streptococcus agalactiae; identical to SEQ ID NO: 62
  source 1..50: mol_type = genomic DNA

SEQ ID NO: 473 - DNA, 40 bp, Streptococcus agalactiae
  source 1..40: mol_type = genomic DNA
aaatataagctggcagcaggaaaaactgccaagtcaattc

SEQ ID NO: 474 - DNA, 50 bp, Streptococcus agalactiae; identical to SEQ ID NO: 64
  source 1..50: mol_type = genomic DNA

SEQ ID NO: 475 - DNA, 40 bp, Streptococcus agalactiae; identical to SEQ ID NO: 65
  source 1..40: mol_type = genomic DNA

SEQ ID NO: 476 - protein, 612 aa, Streptococcus agalactiae
MRNFEKITALYERLSRDDELQGESNSIINQKKILEEYASKNNLSNIIHFTDDGISGTQFDRPGFMAMMNGVNQGNIGCIIVKDMSRLGRDYLKVGQCMEILRQKGVRLIAINDNVDSFYREDDFTPFRNIMNEWYARDTSRKIQSTFRSKGESGKHTASTPPYGYIKDEKDKNKWIVDEKAAEIVRRIFNLTMQGNGPYRIAKILESEKVDIPAYHQQKLGYGLYQSKNFEHPYRWCSSTIASILKKQEYLGHTVNFKTRKHFKDKKSKYVSEDNWLIFENTHEPIIDQETFDNVQRIRGNVKRYPDGWGEYHPLTGLMYCADCGSKMYVHRTSNYKNIPYYTCSAYTKTPCGMLCPSAHRIKAEVVLNLIQDTLKDIKKYLDEDNEAFICSIQNEMEEKEKIEIEKKKVRLTESQNRLRELERLMCRIYEDMILNKIPNSRYEILNNQYETEQITLSKEIKDLEQQVSRYEKETDRARKFISLISRYENFDELTTTMINEFVEKIIVHERDRKGSQTSKQKIEIYFNFIGNYELPQAELSDEEKQKLEEEERKIKKRKDKLHQNYLKRKASGKQKEYEDKYKARREQKKQEKIKVLKRVGIPVSEYIKTNI

SEQ ID NO: 477 - DNA, 50 bp, Streptococcus agalactiae; identical to SEQ ID NO: 62
  source 1..50: mol_type = genomic DNA

SEQ ID NO: 478 - DNA, 40 bp, Streptococcus agalactiae; identical to SEQ ID NO: 473
  source 1..40: mol_type = genomic DNA

SEQ ID NO: 479 - DNA, 50 bp, Streptococcus agalactiae; identical to SEQ ID NO: 64
  source 1..50: mol_type = genomic DNA

SEQ ID NO: 480 - DNA, 40 bp, Streptococcus agalactiae; identical to SEQ ID NO: 65
  source 1..40: mol_type = genomic DNA

SEQ ID NO: 481 - protein, 612 aa, Streptococcus agalactiae; identical to SEQ ID NO: 471

SEQ ID NO: 482 - DNA, 50 bp, Streptococcus agalactiae; identical to SEQ ID NO: 62
  source 1..50: mol_type = genomic DNA

SEQ ID NO: 483 - DNA, 40 bp, Streptococcus agalactiae
  source 1..40: mol_type = genomic DNA
aaatataagctggcagcaggaaaaactgcaaagtcgattc

SEQ ID NO: 484 - DNA, 50 bp, Streptococcus agalactiae; identical to SEQ ID NO: 64
  source 1..50: mol_type = genomic DNA

SEQ ID NO: 485 - DNA, 40 bp, Streptococcus agalactiae; identical to SEQ ID NO: 65
  source 1..40: mol_type = genomic DNA

SEQ ID NO: 486 - protein, 617 aa, Streptococcus agalactiae
MRNFEKITALYERLSRDDELEGESNSIVNQKKILEEYASKNNLTNIIHFTDDGISGTQFDRPGFMDMMNGVNTGNIGCIIVKDMSRLGRDYLKVGQCMEILRQKGVRLIAINDNVDSFYREDDFTPFRNIMNEWYARDTSRKIQSTFRSKGESGKHTASTPPYGYIKDEKDKDKWIVDEKAAQIVRRIFNLTMDGAGPYKIAKILEADKIDIPAYHQQKMGYGLHQSKNFEYPYRWCSSTIASILKKKEYLGHTVNFKTRKHFKDKKSKYVSEDKWLIFENTHEAIIDQETFDNVQRIRGNVKRYPDGWGEYHPLTGLMYCADCGSKMYVHRTNNYKNIPYYVCSNYKKVPCGTLCPSAHRIKAEVVLNLIQETLKDIKNYLDEDNEAFLHSIQNEMEETEKMEMEKKKTRLTDSKNRLQELERLMCRIYEDMILEKIPNTRYEILNNQYETEQRELSKEIDGLEKAIKRYEKETDRAKKFIRLIERYDNFDELTPTIINEFVEKILVHERDRKGSQTANQKVEIYFNFIGNYEPPKEELSEEEMQKLTEEEEKERARKDRLHQNYLKRKANGKQKEYEERYKARREEKKTGEAKGFEKTMKKHKITRLKSIDNLSV

SEQ ID NO: 487 - DNA, 50 bp, Streptococcus agalactiae; identical to SEQ ID NO: 62
  source 1..50: mol_type = genomic DNA

SEQ ID NO: 488 - DNA, 40 bp, Streptococcus agalactiae; identical to SEQ ID NO: 473
  source 1..40: mol_type = genomic DNA

SEQ ID NO: 489 - DNA, 50 bp, Streptococcus agalactiae; identical to SEQ ID NO: 64
  source 1..50: mol_type = genomic DNA

SEQ ID NO: 490 - DNA, 40 bp, Streptococcus agalactiae; identical to SEQ ID NO: 65
  source 1..40: mol_type = genomic DNA

SEQ ID NO: 491 - protein, 612 aa, Streptococcus agalactiae
MRNLEKITALYERLSRDDELQGESNSIINQKKILEEYASKNNLSNIIHFTDDGISGTQFDRPGFMAMMNGVNQGNIGCIIVKDMSRLGRDYLKVGQCMEILRQKGVRLIAINDNVDSFYREDDFTPFRNIMNEWYARDTSRKIQSTFRSKGESGKHTASTPPYGYIKDEKDKNKWIVDEKAAEIVRRIFNLTMQGNGPYRIAKILESEKVDIPAYHQQKLGYGLYQSKSFEHPYRWCSSTIASILKKQEYLGHTVNFKTRKHFKDKKSKYVSEDNWLIFENTHEPIIDQETFDNVQRIRGNVKRYPDGWGEYHPLTGLMYCADCGSKMYVHRTSNYKNIPYYTCSAYTKTPCGMLCPSAHRIKAEVVLNLIQDTLKDIKKYLDEDNEAFICSIQNEMEEKEKIEIEKKKVRLTESQNRLRELERLMCRIYEDMILNKIPNSRYEILNNQYETEQITLSKEIKDLEQQVSRYEKETDRARKFISLISRYVNFDELTTTMINEFVEKIIVHERDRKGSQTSKQKIEIYFNFIGNYELPQAELSEEKKQKLEEEERKIEERKDKLHQNYLKRKASGKQKEYEDKYKARREQKKQEKIKVLKRVGIPVSEYIKTNI

SEQ ID NO: 492 - DNA, 50 bp, Streptococcus agalactiae; identical to SEQ ID NO: 62
  source 1..50: mol_type = genomic DNA

SEQ ID NO: 493 - DNA, 40 bp, Streptococcus agalactiae; identical to SEQ ID NO: 473
  source 1..40: mol_type = genomic DNA

SEQ ID NO: 494 - DNA, 50 bp, Streptococcus agalactiae; identical to SEQ ID NO: 64
  source 1..50: mol_type = genomic DNA

SEQ ID NO: 495 - DNA, 40 bp, Streptococcus agalactiae; identical to SEQ ID NO: 65
  source 1..40: mol_type = genomic DNA

SEQ ID NO: 496 - protein, 607 aa, Streptococcus agalactiae
MRNFEKITALYERLSRDDELQGESNSIINQKKILEEYASKNNLSNIIHFTDDGISGTQFDRPGFMAMMNGVNQGNIGCIIVKDMSRLGRDYLKVGQCMEILRQKGVRLIAINDNVDSFYREDDFTPFRNIMNEWYARDTSRKIQSTFRSKGESGKHTASTPPYGYIKDEKDKNKWIVDEKAAEVVRRIFNMTMQGNGPYRIAKILESEKVDIPAYHQQKLGYGLYQSKNFEHPYRWCSSTIASILKKQEYLGHTVNFKTRKHFKDKKSKYVSEDNWLIFENTHEPIIDQETFDNVQRIRGNVKRYPDGWGEYHPLTGLMYCADCGSKMYVHRTSNYKNIPYYTCSAYTKTPCGTLCPSAHRIKAEAVLNLIRETLKDIKKYLDEDNEAFIRSIQNEMEEKEKIEIEKKKIRLTESQNRLQELERLMCRIYEDMILNKIPNSRYEILNNQYETEQVALSKEIKDLEQQVSRYEKETDRARKFISIISRYENFDELTTTMINEFVEKIIVHERDRKGSQTSKQKIEIYFNFIGNYELPQAELSEEEKQKLEEEERKIKERKDKLHQNYLKRKANGKQQEYEERYKERREQKKQEKLKVLKRVGIPLCEM

SEQ ID NO: 497 - DNA, 50 bp, Streptococcus agalactiae
  source 1..50: mol_type = genomic DNA
aaagtccttgacaagtcgttacaggagtaatagaattaaggagaacactt

SEQ ID NO: 498 - DNA, 40 bp, Streptococcus agalactiae
  source 1..40: mol_type = genomic DNA
aaatataagctggcagcaggaaaaactgctaagtcaattc

SEQ ID NO: 499 - DNA, 50 bp, Streptococcus agalactiae
  source 1..50: mol_type = genomic DNA
aaagtccttgacaagtcgttacagtggtaatagaattaaggagaacactt

SEQ ID NO: 500 - DNA, 40 bp, Streptococcus agalactiae; identical to SEQ ID NO: 65
  source 1..40: mol_type = genomic DNA

SEQ ID NO: 501 - protein, 485 aa, Lactococcus lactis
MSKKVAIYTRVSTTNQAEEGYSIDEQIDKLKMYCEAMDWKVSEIYTDAGFSGSKLTRPAMEKMITDIGLKKFDTVIVYKLDRLSRSVRDTLYLVKDVFTKNEIDFISLSESIDTSSAMGSLFLTILSAINEFERENIKERMTMGKIGRAKSGKSMMWAKTAFGYSHNQETGILEINPLEASIVEQIFNEYLKGTSITKLRDKLNEAGHIAKELPWSYRTIRQTLDNPVYCGYIKYKNNTFEGLHKPIISHETYLKVQKELEARQQQTYEKNNNPRPFQAKYLLSGIARCGYCGAPLRIVLGHRRKDGSRTMKYQCVNRFPRKTKGVTTYNDNKKCDSGAYDMQWIEDIVLKTLNGFQKSDKKLRKILNIKEESKVDTSGFQKQLKSINNKIQKNSDLYLNDFITMDDLKKRTEMLQGEKKLIQARINEVDKPSTSEIFDLVKSELGETPISKISYEDKKKIVNNLISKVDVTADNIDIIFKFQLA

SEQ ID NO: 502 - DNA, 50 bp, Lactococcus lactis
  source 1..50: mol_type = genomic DNA
ttgcgagtttttatttcgtttatctcaattaaggtaactaaaaaactcct

SEQ ID NO: 503 - DNA, 40 bp, Lactococcus lactis
  source 1..40: mol_type = genomic DNA
agctagtacaattaacatctctatcaaagtaaaagctttt

SEQ ID NO: 504 - DNA, 50 bp, Lactococcus lactis
  source 1..50: mol_type = genomic DNA
ttgcgagtttttatttcgtttatctaaattaaggtaactaaaaaactcct

SEQ ID NO: 505 - DNA, 40 bp, Lactococcus lactis
  source 1..40: mol_type = genomic DNA
aacttgtacaactgacatgtatatcaaagtaagtgctttt

SEQ ID NO: 506 - protein, 495 aa, Streptomyces tirandamycinicus
MTSNDHLVPVVAYARISADLARDAHGVKDQHKINDETAAKLGWRIVHHYTENDLSAAKADLVRPDFEAMLKVLKAGRLPDGRAVRGAVVVADDRLVRRVGDYERFVDALTFEDGRIDADAKGLKDLYNEDVESMGLFGVVISKAEVRKIRRRTRRSHRRRAEQGIPVGGKRPFGWEDDKRTLHPEEAERLAQAARDVIAGKSLHSILAKWREEGVQTVHGNPWGSRSLKLALWNPRLCGWRKHNGELVRNADGVPVVGQWEPIITPKEWMAIDALFSARVRLNIKADGTVTDYRTPSYLLTGILRCGKPQGDGQICNAPMRVSARPDLSGGYVYQCPSRSMGGCGGSGRNGAKVDEYVTEAVLARLEERAAVKQQEDSEWGGAEELERLGKKQRAMLQKWQEDLISDELFFPENHKMEVRIKELRKERTEHALRAQRASKVTADVRERWFAGDLDLAQKRALIREALHAVIVLPVGGGGRRPFNPDLLVLRWTEG

SEQ ID NO: 507 - DNA, 50 bp, Streptomyces tirandamycinicus
  source 1..50: mol_type = genomic DNA
atgttgcggtcaagatactgctggtggtacccatgtgtctcaggcagtat

SEQ ID NO: 508 - DNA, 40 bp, Streptomyces tirandamycinicus
  source 1..40: mol_type = genomic DNA
cttgtcgaggtactgctggtggtatccctcggccggatag

SEQ ID NO: 509 - DNA, 50 bp, Streptomyces tirandamycinicus; identical to SEQ ID NO: 507
  source 1..50: mol_type = genomic DNA

SEQ ID NO: 510 - DNA, 40 bp, Streptomyces tirandamycinicus
  source 1..40: mol_type = genomic DNA
cttgtccaggaactgctggtggtgtccatcgactggaaag

SEQ ID NO: 511 - protein, 571 aa, Phocea massiliensis
MKQSNNNKKSRDVTAFLYERLSRDDNMDGESYSIGNQKKLLIKVAKEKGYTNLVHFFDDGISGVTMDRPGFADMIQQLEQGKAAAVFVKDLSRLGRNYIEVGRLTEEFFPNHDIRLVAVSDNIDTDEGENELAPIRNLFNEWYARDISKKRRISNKIKGNAGEPMGQPPYGYIKDPENPKRWIVDEEAARVVRRIYRMTLEGVGTEQIAAKLEEDGVLTPRAYWHSKGINRPGKVKDLPPTHWNSSSVIKMLSVQEYCGDILNFKTYSKSYKNKKRLENDRENWAIFKDVHEPIIERAVFEQVQQKRGKMRKRQAKDGERSMFSGLLVCADCGSNLHFHFNQGNPEIKYFNCSNYKGNRGTCGSTHYVRVDFLEQVVLGEIRRLTKYAGLYEDDFLKEVIGHSRQAEETERRLKEKELKSLLARDDELDGLFERIYEDNVSGKLSDDRFAKMSRRYEEEQKELSEKIKKLRSEIEKQSSRATSTDMFVSIVRKYTRARKLTPRMLNELVEKIEVYNAEKIDGEWVQRLRIHYNCVGEMNIPNEPALPIPAVTVNTRKGVFVSYTTDDRPAV

SEQ ID NO: 512 - DNA, 50 bp, Phocea massiliensis
  source 1..50: mol_type = genomic DNA
caaatgctgtaagaacactcgccatggtgcgagtggtgatacagcatttt

SEQ ID NO: 513 - DNA, 40 bp, Phocea massiliensis
  source 1..40: mol_type = genomic DNA
tttctgactggttttttcttggtgcggataagaggacttg

SEQ ID NO: 514 - DNA, 50 bp, Phocea massiliensis
  source 1..50: mol_type = genomic DNA
caaatgctgtaagaacactcgccacagtgcgagtggtgatacagcatttt

SEQ ID NO: 515 - DNA, 40 bp, Phocea massiliensis
  source 1..40: mol_type = genomic DNA
ttgctgactgatgtattcccagtgctgagaagaggacttg

SEQ ID NO: 516 - protein, 503 aa, Roseburia hominis; identical to SEQ ID NO: 341

SEQ ID NO: 517 - DNA, 50 bp, Roseburia hominis
  source 1..50: mol_type = genomic DNA
tgtgtagtcccttgtaaactgtactttatctttttaaaagaaaatggtac

SEQ ID NO: 518 - DNA, 40 bp, Roseburia hominis
  source 1..40: mol_type = genomic DNA
tgatcttctaataatattacttatcacttataaaagaaat

SEQ ID NO: 519 - DNA, 50 bp, Roseburia hominis; identical to SEQ ID NO: 517
  source 1..50: mol_type = genomic DNA

SEQ ID NO: 520 - DNA, 40 bp, Roseburia hominis
  source 1..40: mol_type = genomic DNA
tgatattgtaataatattattcatgaaatataaaagaact

SEQ ID NO: 521 - protein, 585 aa, Clostridioides difficile
MKEVEIINKNDHLENRRRGKYIDRKRVAAYCRVSTDSEDQLNSYKSQVSYYTDLINNNIEWCMVDIYADEAITGTQVNKREEFQRMINDCMNNEIDMIITKSISRFARNTLDTLKYVRMLKEKSIAVYFEDEKINTLTMDGELLLVVLSSVAQQEVENISANVKKGLKMKMRRGELVGFQGCLGYDYHKEDKTLTINEKEAEIVRYIFNRYIEGAGGSIIGQELENLGYKTKYGSTTWSNSTVLGIIKNEKYIGDVLLGKTFTVDPISKRRLDNLGEEEKYYVKNNHEPIISREIFDKAHEILNRRSKNRGKYEEEVKKREKYSRKYAFSCMMECGFCGGTLTRRNWHSGSEYSKVIWQCVVATKKGKKYCPESKGISERVIENAFVESYRLLCDEKKSVLEELLSRINDTVESSEVNNKIRKIEKELSAIEKKINNLVDMRLEDIIEKETYEIKYQELIDNQEKLLNERNKLNIVVKNEKSMKQRLKEFKKTLEENEVLDKFDRSVFESVVEKVIIGEKNKDGENDPTKITFIYKTGFKNTLSSNKFKIPRKNAKGRHKRKELCLHGNNEVESLYSHSSSNTCG

SEQ ID NO: 522 - DNA, 50 bp, Clostridioides difficile
  source 1..50: mol_type = genomic DNA
tatattcacatagtagttcaaacacatgtggagactgtagtgttgctacg

SEQ ID NO: 523 - DNA, 40 bp, Clostridioides difficile
  source 1..40: mol_type = genomic DNA
tatgttccctcattctacacatgtggaaactgtagctaag

SEQ ID NO: 524 - DNA, 50 bp, Clostridioides difficile
  source 1..50: mol_type = genomic DNA
tatattcacatagtagttcaaacagttgtggagactgtagtgttgctacg

SEQ ID NO: 525 - DNA, 40 bp, Clostridioides difficile
  source 1..40: mol_type = genomic DNA
ttatttccctcattttacagttgaggaaactgaagctatg

SEQ ID NO: 526 - protein, 586 aa, Clostridioides difficile
MKEVEIINKNDHLENRRRGKYIDRKRVAAYCRVSTDSEDQLNSYKSQVSYYTDLINNNIEWCMVDIYADEAITGTQVNKREEFQRMINDCMNNEIDMIITKSISRFARNTLDTLKYVRMLKEKSIAVYFEDEKINTLTMDGELLLVVLSSVAQQEVENISANVKKGLKMKMRRGELVGFQGCLGYDYHKEDKTLTINEKEAEIVRYIFNRYIEGAGGSIIGQELENLGYKTKYGSTTWSNSTVLGIIKNEKYIGDVLLGKTFTVDPISKRRLDNLGEEEKYYVKNNHEPIISREIFDKAHEILNRRSKNRGKYEEEVKKREKYSRKYAFSCMMECGFCGGTLTRRNWHSGSEYSKVIWQCVVATKKGKKYCPESKGISERVIENAFVESYRLLCDEKKSVLEELLSRINDTVESSEVNNKIRKIEKELSAIEKKINNLVDMRLEDIIEKETYEIKYQELIDNQEKLLNERNKLNIVVKNEKSMKQRLKEFKKTLEENEVLDKFDRSVFESVVEKVIIGEKNKDGENDPTKITFIYKTGFKNTLSSNKFKIPRKNAKGRHKRKELCLHGNNEVESLYSHSSSNTCGN

SEQ ID NO: 527 - DNA, 50 bp, Clostridioides difficile; identical to SEQ ID NO: 522
  source 1..50: mol_type = genomic DNA

SEQ ID NO: 528 - DNA, 40 bp, Clostridioides difficile; identical to SEQ ID NO: 523
  source 1..40: mol_type = genomic DNA

SEQ ID NO: 529 - DNA, 50 bp, Clostridioides difficile; identical to SEQ ID NO: 524
  source 1..50: mol_type = genomic DNA

SEQ ID NO: 530 - DNA, 40 bp, Clostridioides difficile; identical to SEQ ID NO: 525
  source 1..40: mol_type = genomic DNA

SEQ ID NO: 531 - protein, 587 aa, Clostridioides difficile
MKEVEIINKNDHLENRRRGKYIDRKRVAAYCRVSTDSEDQLNSYKSQVSYYTDLINNNIEWCMVDIYADEAITGTQVNKREEFQRMINDCMNNEIDMIITKSISRFARNTLDTLKYVRMLKEKSIAVYFEDEKINTLTMDGELLLVVLSSVAQQEVENISANVKKGLKMKMRRGELVGFQGCLGYDYHKEDKTLTINEKEAEIVRYIFNRYIEGAGGSIIGQELENLGYKTKYGSTTWSNSTVLGIIKNEKYIGDVLLGKTFTVDPISKRRLDNLGEEEKYYVKNNHEPIISREIFDKAHEILNRRSKNRGKYEEEVKKREKYSRKYAFSCMMECGFCGGTLTRRNWHSGSEYSKVIWQCVVATKKGKKYCPESKGISERVIENAFVESYRLLCDEKKSVLEELLSRINDTVESSEVNNKIRKIEKELSAIEKKINNLVDMRLEDIIEKETYEIKYQELIDNQEKLLNERNKLNIVVKNEKSMKQRLKEFKKTLEENEVLDKFDRSVFESVVEKVIIGEKNKDGENDPTKITFIYKTGFKNTLSSNKFKIPRKNAKGRHKRKELCLHGNNEVESLYSHSSSNTCGNC

SEQ ID NO: 532 - DNA, 50 bp, Clostridioides difficile; identical to SEQ ID NO: 522
  source 1..50: mol_type = genomic DNA

SEQ ID NO: 533 - DNA, 40 bp, Clostridioides difficile; identical to SEQ ID NO: 523
  source 1..40: mol_type = genomic DNA

SEQ ID NO: 534 - DNA, 50 bp, Clostridioides difficile; identical to SEQ ID NO: 524
  source 1..50: mol_type = genomic DNA

SEQ ID NO: 535 - DNA, 40 bp, Clostridioides difficile; identical to SEQ ID NO: 525
  source 1..40: mol_type = genomic DNA

SEQ ID NO: 536 - protein, 581 aa, Clostridioides difficile
MHEVEVIKAKNVLSRQARGKAIERLRVAAYCRVSTDSEDQLNSYKSQVQYYTDMIKKNKEWVLADIYADEAITGTQVTKREDFQRMINDCMNGEIDMVFTKSISRFARNTLDTLKYVRMLKERNIAVYFEDEKINTLTMDGELLLVVLSSVAQQEVENISANVKKGLKMKMKRGELVGFQGCIGYDYHPEDKTITVNQEEAEIVRYIFNRYVDGAGGSVIGQELESLGYKTKYGSSTWAPSTVIGIIKNEKYKGDILLGKTFTVDPISKRRLENMGEEDKFYMKDHHEPIISEEVFEKAQEILNRRNKNRITVGSGKREKYSRKYAFSCMLECGFCGGTLTRRNWHSGSKYSKVIWQCVTATKKGKKFCKHSKGIPETAIEEAFVESYRLLCDDNKDVLEEFLQRMDDTLSSSVVSKQLAKAEKEIDALEKKKSKLVDMRLEEIIDKETYESKYADLVSKQEQLVEERQKLQETSDNEKDIKKRLKEFKKTLEQNEVLDKFDRYVFESIVEKVIVGGLDENGNVDPAQLTFVYKTGLKNSVDGAKFKTQRKNARGRHRTNELCSHDSNEVDKMCSDSSNDT

SEQ ID NO: 537 - DNA, 50 bp, Clostridioides difficile
  source 1..50: mol_type = genomic DNA
tgtgttccgatagtagtaacgacacatatagagacttgtgtgttgctaca

SEQ ID NO: 538 - DNA, 40 bp, Clostridioides difficile; identical to SEQ ID NO: 523
  source 1..40: mol_type = genomic DNA

SEQ ID NO: 539 - DNA, 50 bp, Clostridioides difficile
  source 1..50: mol_type = genomic DNA
tgtgttccgatagtagtaacgacagttatagagacttgtgtgttgctaca

SEQ ID NO: 540 - DNA, 40 bp, Clostridioides difficile; identical to SEQ ID NO: 525
  source 1..40: mol_type = genomic DNA

SEQ ID NO: 541 - protein, 581 aa, Clostridioides difficile
MQEVEVIKARNVLSKQARGKAIERLRVAAYCRVSTDSEDQLNSYKSQVQYYTDMIKKNKEWVLADIYADEAITGTQVTKREDFQRMINDCMNGEIDMVITKSISRFARNTLDTLKYVRMLKERNIAVYFEDEKINTLTMDGELLLVVLSSVAQQEVENISANVKKGLKMKMKRGELVGFQGCLGYDYHPEDKTITVNQEEAEIVRYIFNRYVEGAGGSVIGQELENLGYKTKYGSSTWAPSTVIGIIKNEKYKGDILLGKTFTVDPISKRRLENMGEEDKFYMKYHHEPIISEEIFEKAQEILNRRNKNRTTVGSGKREKYSRKYAFSCMLECGFCGSTLSRRNWHSSSEYSKVIWQCVTATKKGKKFCPDSKGIPETAIEEAFIESYRLLCDNNKDVLEEFLHRLDETLSNSTVSKQLSKIEKEISAVEGKKNKLVDMRLEDSIDKDTYETKYTALMEKLEQLASDRQKLQETAVNEKDIKRRLKEFKTTLEQNEVLDVFDRHVFESIVEKVIVGGYDEDGNKDPAQLTFVYKTGMKNSVDGSRFKPQRKNARGRHRTDELCSHESNEVNSLCSDNSADT

SEQ ID NO: 542 - DNA, 50 bp, Clostridioides difficile
  source 1..50: mol_type = genomic DNA
tgtgttccgataatagtgccgacacatatagagacttgtgtgttgctaca

SEQ ID NO: 543 - DNA, 40 bp, Clostridioides difficile; identical to SEQ ID NO: 523
  source 1..40: mol_type = genomic DNA

SEQ ID NO: 544 - DNA, 50 bp, Clostridioides difficile
  source 1..50: mol_type = genomic DNA
tgtgttccgataatagtgccgacagttatagagacttgtgtgttgctaca

SEQ ID NO: 545 - DNA, 40 bp, Clostridioides difficile; identical to SEQ ID NO: 525
  source 1..40: mol_type = genomic DNA

SEQ ID NO: 546 - protein, 581 aa, Clostridioides difficile
MQEVEVIKAKNVLARQARGKAIERLRVAAYCRVSTDSEDQLNSYKSQVQYYTDMIKKNKEWVLADIYADEAITGTQVTKREDFQRMINDCMNGEIDMVFTKSISRFARNTLDTLKYVRMLKERNIAVYFEDEKINTLTMDGELLLVVLSSVAQQEVENISANVKKGLKMKMKRGELVGFQGCIGYDYHPEDKTITVNQEEAEIVRYIFNRYVDGAGGSVIGQELESLGYKTKYGSSTWAPSTVIGIIKNEKYKGDILLGKTFTVDPISKRRLENMGEEDKFYMKDHHEPIISEEVFEKAQEILNRRNKNRTTVGSGKREKYSRKYAFSCMLECGFCGGTLTRRNWHSGSKYSKVIWQCVTATKKGKKFCKHSKGIPETAIEEAFVESYRLLCDDNKDVLEEFLQRMDDTLSSSVVSKQLAKAEKEIDALEKKKSKLVDMRLEEIIDKETYESKYADLVSKQEQLVEERQKLQETSDNEKDIKKRLKEFKKTLEQNEVLDKFDRYVFESIVEKVIVGGLDENGNVDPAQLTFVYKTGLKNSVDGAKFKTQRKNARGRHRTNELCSHDSNEVDKMCSDSSNDT

SEQ ID NO: 547 - DNA, 50 bp, Clostridioides difficile; identical to SEQ ID NO: 537
  source 1..50: mol_type = genomic DNA

SEQ ID NO: 548 - DNA, 40 bp, Clostridioides difficile; identical to SEQ ID NO: 523
  source 1..40: mol_type = genomic DNA

SEQ ID NO: 549 - DNA, 50 bp, Clostridioides difficile; identical to SEQ ID NO: 539
  source 1..50: mol_type = genomic DNA

SEQ ID NO: 550 - DNA, 40 bp, Clostridioides difficile; identical to SEQ ID NO: 525
  source 1..40: mol_type = genomic DNA

SEQ ID NO: 551 - protein, 581 aa, Clostridioides difficile
MQEVEVIKAKNVLSRQARGKAIERLRVAAYCRVSTDSEDQLNSYKSQVQYYTDMIKKNKEWVLADIYADEAITGTQVTKREDFQRMINDCMNGEIDMVFTKSISRFARNTLDTLKYVRMLKERNIAVYFEDEKINTLTMDGELLLVVLSSVAQQEVENISANVKKGLKMKMKRGELVGFQGCIGYDYHPEDKTITVNQEEAEIVRYIFNRYVDGAGGSVIGQELESLGYKTKYGSSTWAPSTVIGIIKNEKYKGDILLGKTFTVDPISKRRLENMGEEDKFYMKDHHEPIISEEVFEKAQEILNRRNKNRTTVGSGKREKYSRKYAFSCMLECGFCGGTLTRRNWHSGSQYSKVIWQCVTATKKGKKFCKHSKGIPETAIEEAFVESYRLLCDDNKDVLEEFLQRMDDTLSSSVVSKQLAKAEKEIDALEKKKSKLVDMRLEEIIDKETYESKYADLVSKQEQLVEERQKLQETSDNEKDIKKRLKEFKKTLEQNEVLDKFDRYVFESIVEKVIVGGLDENGNVDPAQLTFVYKTGLKNSVDGAKFKPQRKNARGRHRTNELCSHDSNEVDKMCSDSSNDT

SEQ ID NO: 552 - DNA, 50 bp, Clostridioides difficile; identical to SEQ ID NO: 537
  source 1..50: mol_type = genomic DNA

SEQ ID NO: 553 - DNA, 40 bp, Clostridioides difficile; identical to SEQ ID NO: 523
  source 1..40: mol_type = genomic DNA

SEQ ID NO: 554 - DNA, 50 bp, Clostridioides difficile; identical to SEQ ID NO: 539
  source 1..50: mol_type = genomic DNA

SEQ ID NO: 555 - DNA, 40 bp, Clostridioides difficile; identical to SEQ ID NO: 525
  source 1..40: mol_type = genomic DNA

SEQ ID NO: 556 - protein, 581 aa, Clostridioides difficile
MQEVEVIKAKNVLARQARGKAIERLRVAAYCRVSTDSEDQLNSYKSQVQYYTDMIKKNKEWVLADIYADEAITGTQVTKREDFQRMINDCMNGEIDMVFTKSISRFARNTLDTLKYVRMLKERNIAVYFEDEKINTLTMDGELLLVVLSSVAQQEVENISANVKKGLKMKMKRGELVGFQGCIGYDYHPEDKTITVNQEEAEIVRYIFNRYVDGAGGSVIGQELESLGYKTKYGSSTWAPSTVIGIIKNEKYKGDILLGKTFTVDPISKRRLENMGEEDKFYMKDHHEPIISEEVFEKAQEILNRRNKNRTTVGSGKREKYSRKYAFSCMLECGFCGGTLTRRNWHSGSKYSKVIWQCVTATKKGKKFCKHSKGIPETAIEEAFVESYRLLCDDNKDVLEEFLQRMDDTLSSSVVSKQLAKAEKEIDALEKKKSKLVDMRLEEIIDKETYESKYADLVSKQEQLVEERQKLQETSDNEKDIKKRLKEFKKTLEQNEVLDKFDRYVFESIVEKVIVGGIDENGNVDPAQLTFVYKTGLKNSVDGAKFKTQRKNARGRHRTNELCSHDSNEVDKMCSDSSNDT

SEQ ID NO: 557 - DNA, 50 bp, Clostridioides difficile; identical to SEQ ID NO: 537
  source 1..50: mol_type = genomic DNA

SEQ ID NO: 558 - DNA, 40 bp, Clostridioides difficile; identical to SEQ ID NO: 523
  source 1..40: mol_type = genomic DNA

SEQ ID NO: 559 - DNA, 50 bp, Clostridioides difficile; identical to SEQ ID NO: 539
  source 1..50: mol_type = genomic DNA

SEQ ID NO: 560 - DNA, 40 bp, Clostridioides difficile; identical to SEQ ID NO: 525
  source 1..40: mol_type = genomic DNA

SEQ ID NO: 561 - protein, 583 aa, Clostridioides difficile
MKEVKVIKARNDLQTRTRGKTIELMRVGAYCRVSTDSADQLNSYKSQVAYYTDMIKKNKEWVLADIYADEAITGTQVAKREDFQRMINDCMNGEIDMVITKSISRFARNTLDTLKYVRMLKERNIAVYFEDEKINTLTMDGELLLVVLSSVAQQEVENISANVKKGLKMKMKRGELVGFQGCLGYDYHKDTKTITVNEEEAEIVRYIFNRYIEGAGGSVIAHELENLGYKTKYGSSTWVQSTVIGIIKNEKYKGDLLLGKTFTVDPISKRRLENFGEEDKFYIRNHHEPIISEEVFEKAQEILARRNVNIGKIGEGNTKREKYSRKYAFSCMLECGFCGGTLTRRNWHSSSQYSKVIWQCVTATKKGKKFCKHSKGIPETAIEEAFVESYRLLCDDNKDVLEEFLQRMDDTLSSSVVSKQLAKAEKEIDALEKKKSKLVDMRLEEIIDKETYESKYADLVSKQEQLVEERKKLQETSDNEKDIKKRLKEFKKTLEQNEVLDKFDRYVFESIVEKVIVGGLDENGNVDPAQLTFVYKTGLKNSVDGAKFKPQRKNARGRHRTDELCSHDSNEVDKMCSDSSNDT

SEQ ID NO: 562 - DNA, 50 bp, Clostridioides difficile; identical to SEQ ID NO: 537
  source 1..50: mol_type = genomic DNA

SEQ ID NO: 563 - DNA, 40 bp, Clostridioides difficile; identical to SEQ ID NO: 523
  source 1..40: mol_type = genomic DNA

SEQ ID NO: 564 - DNA, 50 bp, Clostridioides difficile; identical to SEQ ID NO: 539
  source 1..50: mol_type = genomic DNA

SEQ ID NO: 565 - DNA, 40 bp, Clostridioides difficile; identical to SEQ ID NO: 525
  source 1..40: mol_type = genomic DNA

SEQ ID NO: 566 - protein, 583 aa, Clostridioides difficile
MNDVQVIKANRNENRIRGRKVEILRVAAYCRVSTDSEDQLNSYKSQVMYYTDLIKKKPEWSLADIYADEAITGTQVTKREDFQRMINDCMNGDIDMIITKSISRFARNTLDTLKYVRMLKEKGIAVFFEDENINTLTMDGELLLVVLSSVAQQEVENISSNVKKGLKMKMQRGELVGFQGCLGYDYHKDTKSISVNEKEAEIVRYIFNRYIEGAGCTVIANELENLGYKTKYGSSRWVQSTVIGIIKNEKYKGDLLLGKTFTVDPISKRRLENFGEEDKFYIRDHHEAIISEEIFEEAQKILAKRNVNRGVHQEGQKRNKFSRKYAFSCMIKCGFCGGTLSRRNWHSSSAYTKTIWHCVTATKHGKKNCPHCKGIPEEVIENAFVKSYQLLCSDQHEVVSEFLQKVEDILKDDASLKRLPKIEKEMADLRRRKEKLLDLRLDNNIDRDIYDKKNQELSEQLKKLQAEQLQLVELSKNQESTKTRIREFRKNLNSGELLESFDRVVFESVVERIIIGGYNDEGVEDPLKITFVYKTGIHSNLNAKDFKPKRKNAVAVHTDAELCSYASAEDNKLCLHSSSDTCG

SEQ ID NO: 567 - DNA, 50 bp, Clostridioides difficile
  source 1..50: mol_type = genomic DNA
tgtgtttacatagtagctccgacacatgtggagactattgtgttgataca

SEQ ID NO: 568 - DNA, 40 bp, Clostridioides difficile; identical to SEQ ID NO: 523
  source 1..40: mol_type = genomic DNA

SEQ ID NO: 569 - DNA, 50 bp, Clostridioides difficile
  source 1..50: mol_type = genomic DNA
tgtgtttacatagtagctccgacagttgtggagactattgtgttgataca

SEQ ID NO: 570 - DNA, 40 bp, Clostridioides difficile; identical to SEQ ID NO: 525
  source 1..40: mol_type = genomic DNA

SEQ ID NO: 571 - protein, 583 aa, Clostridioides difficile
MQEVEVIKAKNVLSRQARGKAIERLRVAAYCRVSTDSEDQLNSYKSQVQYYTDMIKKNKEWVLADIYADEAITGTQVTKREDFQRMINDCMNGEIDMVFTKSISRFARNTLDTLKYVRMLKERNIAVYFEDEKINTLTMDGELLLVVLSSVAQQEVENISANVKKGLKMKMKRGELVGFQGCIGYDYHPEDKTITVNQEEAEIVRYIFNRYVDGAGGSVIGQELESLGYKTKYGSSTWAPSTVIGIIKNEKYKGDILLGKTFTVDPISKRRLENMGEEDKFYMKDHHEPIISEEVFEKAQEILNRRNKNRTTVGSGKREKYSRKYAFSCMLECGFCGGTLTRRNWHSGSKYSKVIWQCVTATKKGKKFCKHSKGIPETAIEEAFVESYRLLCDDNKDVLEEFLQRMDDTLSSSVVSKQLAKAEKEIDALEKKKSKLVDMRLEEIIDKETYESKYADLVSKQEQLVEERQKLQETSDNEKDIKKRLKEFKKTLEQNEVLDKFDRYVFESIVEKVIVGGLDENGNVDPAQLTFVYKTGLKNSVDGAKFKTQRKNARGRHRTNELCSHDSNEVDKMCSDSSNDTCG

SEQ ID NO: 572 - DNA, 50 bp, Clostridioides difficile
  source 1..50: mol_type = genomic DNA
tgtgttccgatagtagtaacgacacatgtggagacttgtgtgttgctaca

SEQ ID NO: 573 - DNA, 40 bp, Clostridioides difficile; identical to SEQ ID NO: 523
  source 1..40: mol_type = genomic DNA

SEQ ID NO: 574 - DNA, 50 bp, Clostridioides difficile
  source 1..50: mol_type = genomic DNA
tgtgttccgatagtagtaacgacagttgtggagacttgtgtgttgctaca

SEQ ID NO: 575 - DNA, 40 bp, Clostridioides difficile; identical to SEQ ID NO: 525
  source 1..40: mol_type = genomic DNA

SEQ ID NO: 576 - protein, 583 aa, Clostridioides difficile; identical to SEQ ID NO: 31

SEQ ID NO: 577 - DNA, 50 bp, Clostridioides difficile; identical to SEQ ID NO: 572
  source 1..50: mol_type = genomic DNA

SEQ ID NO: 578 - DNA, 40 bp, Clostridioides difficile; identical to SEQ ID NO: 523
  source 1..40: mol_type = genomic DNA

SEQ ID NO: 579 - DNA, 50 bp, Clostridioides difficile; identical to SEQ ID NO: 574
  source 1..50: mol_type = genomic DNA

SEQ ID NO: 580 - DNA, 40 bp, Clostridioides difficile; identical to SEQ ID NO: 525
  source 1..40: mol_type = genomic DNA

SEQ ID NO: 581 - protein, 583 aa, Clostridioides difficile
MQEVEVIKAKNVLARQARGKAIERLRVAAYCRVSTDSEDQLNSYKSQVQYYTDMIKKNKEWVLADIYADEAITGTQVTKREDFQRMINDCMNGEIDMVFTKSISRFARNTLDTLKYVRMLKERNIAVYFEDEKINTLTMDGELLLVVLSSVAQQEVENISANVKKGLKMKMKRGELVGFQGCIGYDYHPEDKTITVNQEEAEIVRYIFNRYVDGAGGSVIGQELESLGYKTKYGSSTWAPSTVIGIIKNEKYKGDILLGKTFTVDPISKRRLENMGEEDKFYMKDHHEPIISEEVFEKAQEILNRRNKNRTTVGSGKREKYSRKYAFSCMLECGFCGGTLTRRNWHSGSKYSKVIWQCVTATKKGKKFCKHSKGIPETAIEEAFVESYRLLCDDNKDVLEEFLQRMDDTLSSSVVSKQLAKAEKEIDALEKKKSKLVDMRLEEIIDKETYESKYADLVSKQEQLVEERQKLQETSDNEKDIKKRLKEFKKTLEQNEVLDKFDRYVFESIVEKVIVGGLDENGNVDPAQLTFVYKTGLKNSVDGAKFKTQRKNARGRHRTNELCSHDSNEVDKMCSDSSNDTCG

SEQ ID NO: 582 - DNA, 50 bp, Clostridioides difficile; identical to SEQ ID NO: 572
  source 1..50: mol_type = genomic DNA

SEQ ID NO: 583 - DNA, 40 bp, Clostridioides difficile; identical to SEQ ID NO: 523
  source 1..40: mol_type = genomic DNA

SEQ ID NO: 584 - DNA, 50 bp, Clostridioides difficile; identical to SEQ ID NO: 574
  source 1..50: mol_type = genomic DNA

SEQ ID NO: 585 - DNA, 40 bp, Clostridioides difficile; identical to SEQ ID NO: 525
  source 1..40: mol_type = genomic DNA

SEQ ID NO: 586 - protein, 583 aa, Clostridioides difficile; identical to SEQ ID NO: 26

SEQ ID NO: 587 - DNA, 50 bp, Clostridioides difficile; identical to SEQ ID NO: 572
  source 1..50: mol_type = genomic DNA

SEQ ID NO: 588 - DNA, 40 bp, Clostridioides difficile; identical to SEQ ID NO: 523
  source 1..40: mol_type = genomic DNA

SEQ ID NO: 589 - DNA, 50 bp, Clostridioides difficile; identical to SEQ ID NO: 574
  source 1..50: mol_type = genomic DNA

SEQ ID NO: 590 - DNA, 40 bp, Clostridioides difficile; identical to SEQ ID NO: 525
  source 1..40: mol_type = genomic DNA

SEQ ID NO: 591 - protein, 583 aa, Clostridioides difficile
MNDVQVIKANRNENCIRGRKVEILRVAAYCRVSTDSEDQLNSYKSQVMYYTDLIKKKPEWSLADIYADEAITGTQVTKREDFQRMINDCMNGDIDMVITKSISRFARNTLDTLKYVRMLKEKGIAVFFEDENINTLTMDGELLLVVLSSVAQQEVENISSNVKKGLKMKMQRGELVGFQGCLGYDYHKDTKSISVNEKEAEIVRYIFNRYIEGAGCTVIANELENLGYKTKYGSSRWVQSTVIGIIKNEKYKGDLLLGKTFTVDPISKRRLENFGEEDKFYIRDHHEAIISEEIFEEAQKILAKRNVNRGVHQEGQKRNKFSRKYAFSCMIKCGFCGGTLSRRNWHSSSAYTKTIWHCVTATKHGKKNCPHCKGIPEEVIENAFVKSYQLLCSDQHEVVSEFLQKVEGILKDEASLKRLPKIEKEMTDLQRRKEKLLDLRLDNNIDRDIYDKKNQELSEQLKKLQAEQLQLVELSKNQESTKTRIREFRKNLNSGELLESFDRVVFESVVERIIIGGYNDEGVEDPLKITFVYKTGIHSNLNAKDFKPKRKNAAAVHTDAELCSYASVEDNKLCLHSSSDTCG

SEQ ID NO: 592 - DNA, 50 bp, Clostridioides difficile; identical to SEQ ID NO: 567
  source 1..50: mol_type = genomic DNA

SEQ ID NO: 593 - DNA, 40 bp, Clostridioides difficile; identical to SEQ ID NO: 523
  source 1..40: mol_type = genomic DNA

SEQ ID NO: 594 - DNA, 50 bp, Clostridioides difficile; identical to SEQ ID NO: 569
  source 1..50: mol_type = genomic DNA

SEQ ID NO: 595 - DNA, 40 bp, Clostridioides difficile; identical to SEQ ID NO: 525
  source 1..40: mol_type = genomic DNA

SEQ ID NO: 596 - protein, 587 aa, Clostridioides difficile
MKEVEIIKKNDYLENRRRGKYIDRKRVAAYCRVSTDSEDQLNSYKSQVSYYTDLINNNIEWCMVDIYADEAITGTQVNKREDFQRMINDCMNNEIDMIITKSISRFARNTLDTLKYVRMLKEKNIAVYFEDEKINTLTMDGELLLVVLSSVAQQEVENISANVKKGLKMKMRRGELVGFQGCLGYDYHKEDKTLTINEKEAEIVRYIFNRYIEGAGGSIIGQELENLGYKTKYGSTTWSNSTVLGIIKNEKYIGDVLLGKTFTIDPISKRRLDNLGEEEKYYVKNNHEPIISREIFDKAHEILNRRSKNRGKYEAGVTKREKYSRKYAFSCMMECGFCGGTLTRRNWHSGSEYSKVIWQCVVATKKGKKYCPESKGISERVIENAFVESYRLLCDEKKSVLEELLNRINDTVGSSEVNNKIKKIEKELSVIEKKINNLVDMRLDDIIEKETYEIKYQELIDNQEKLLNERNKLNVVAKNEKSMKQRLKEFKKTLEENEVLDKFDRGVFESVVEKVIIGEKNKDGENDPTKITFIYKTGFKNTLSSDEFKIPRKNARGRHKRKELCLHGNNEVENLCSHSSSNTCGNC

SEQ ID NO: 597 - DNA, 50 bp, Clostridioides difficile
  source 1..50: mol_type = genomic DNA
tatgttcacatagtagttcaaacacatgtggagactgtagtgttgctacg

SEQ ID NO: 598 - DNA, 40 bp, Clostridioides difficile; identical to SEQ ID NO: 523
  source 1..40: mol_type = genomic DNA

SEQ ID NO: 599 - DNA, 50 bp, Clostridioides difficile
  source 1..50: mol_type = genomic DNA
tatgttcacatagtagttcaaacagttgtggagactgtagtgttgctacg

SEQ ID NO: 600 - DNA, 40 bp, Clostridioides difficile; identical to SEQ ID NO: 525
  source 1..40: mol_type = genomic DNA

SEQ ID NO: 601 - protein, 583 aa, Clostridioides difficile
MNDVQVIKANRNENRIRGRKVEILRVAAYCRVSTDSEDQLNSYKSQVMYYTDLIKKKPEWSLADIYADEAITGTQVTKREDFQRMINDCMNGDIDMVITKSISRFARNTLDTLKYVRMLKEKGIAVFFEDENINTLTMDGELLLVVLSSVAQQEVENISSNVKKGLKMKMQRGELVGFQGCLGYDYHKDTKSISVNEKEAEIVRYIFNRYIEGAGCTVIANELENLGYKTKYGSSRWVQSTVIGIIKNEKYKGDLLLGKTFTVDPISKRRLENFGEEDKFYIRDHHEAIISEEIFEEAQKILAKRNVNRGVHQEGQKRNKFSRKYAFSCMIKCGFCGGTLSRRNWHSSSAYTKTIWHCVTATKHGKKNCPHCKGIPEEVIENAFVKSYQLLCSDQHEVVSEFLQKVEDILKDDASLKRLPKIEKEMTDLQRRKEKLLDLRLDNNIDRDIYDKKNQELSEQLKKLQAEQLQLVELSKNQESTKTRIREFRKNLNSGELLESFDRVVFESVVERIIIGGYNDEGVEDPLKITFVYKTGIHSNLNAKDFKPKRKNAAAVHTDAELCSYASVEDNKLCLHSSSDTCG

SEQ ID NO: 602 - DNA, 50 bp, Clostridioides difficile; identical to SEQ ID NO: 567
  source 1..50: mol_type = genomic DNA

SEQ ID NO: 603 - DNA, 40 bp, Clostridioides difficile; identical to SEQ ID NO: 523
  source 1..40: mol_type = genomic DNA

SEQ ID NO: 604 - DNA, 50 bp, Clostridioides difficile; identical to SEQ ID NO: 569
  source 1..50: mol_type = genomic DNA

SEQ ID NO: 605 - DNA, 40 bp, Clostridioides difficile; identical to SEQ ID NO: 525
  source 1..40: mol_type = genomic DNA

SEQ ID NO: 606 - protein, 581 aa, Clostridioides difficile
MSDVQVIKANKSENRFRGRKVEILRVAAYCRVSTDSEDQLNSYKSQVMYYTDLIKKKHDWSLVDIYADEAITGTQVTKREDFQRMINDCMNGDIDMVITKSISRFARNTLDTLKYVRMLKEKGIAVFFEDENINTLTMDGELLLVVLSSVAQQEVENISSNVKKGLKMKMKRGELVGFQGCLGYDYHKETKSISVNEKEAEIVRYIFNRYIEGAGCTVIANELENLGYKTKYGSSRWVQSTVIGIIKNEKYKGDLLLGKTFTVDPISKRRLENFGEEDKFYIQNHHEPIISEEVFEEAQKILAKRNVNRGVHQEGQKRNKFSRKYAFSCMIKCGFCGGTLTRRNWHSSSAYTKTIWQCVTATKQGKKYCPHCKGIPEEVIEKAFVKSYQLLCSDQHQVVEEFLQKVEGVLNEDTSLKRLPKIEKGMNDLRKRKEKLLDLRLDTTIDRDIYESKNQELSEQLKKLQEEQEQLLELSKNRESTKTRLREFRKNLSSGEILENFDRVVFESVVEKIIIGGYNEEGVEEPLKITFVYKTGIHSNFNGKDFKPKRRNAAALHSDIELCSYASDEATELCSYSSPDT

SEQ ID NO: 607 - DNA, 50 bp, Clostridioides difficile
  source 1..50: mol_type = genomic DNA
tgtgttcatatagtagccccgacacatatcgagactatcgtgttgctaca

SEQ ID NO: 608 - DNA, 40 bp, Clostridioides difficile; identical to SEQ ID NO: 523
  source 1..40: mol_type = genomic DNA

SEQ ID NO: 609 - DNA, 50 bp, Clostridioides difficile
  source 1..50: mol_type = genomic DNA
tgtgttcatatagtagccccgacagttatcgagactatcgtgttgctaca

SEQ ID NO: 610 - DNA, 40 bp, Clostridioides difficile; identical to SEQ ID NO: 525
  source 1..40: mol_type = genomic DNA

SEQ ID NO: 611 - protein, 581 aa, Clostridioides difficile
MQEVEVIKAKNVLARQARGKAIERLRVAAYCRVSTDSEDQLNSYKSQVQYYTDMIKKNKEWVLADIYADEAITGTQVTKREDFQRMINDCMNGEIDMVFTKSISRFARNTLDTLKYVRMLKERNIAVYFEDEKINTLTMDGELLLVVLSSVAQQEVENISANVKKGLKMKMKRGELVGFQGCIGYDYHPEDKTITVNQEEAEIVRYIFNRYVDGAGGSVIGQELESLGYKTKYGSSTWAPSTVIGIIKNEKYKGDILLGKTFTVDPISKRRLENMCEEDKFYMKDHHEPIISEEVFEKAQEILNRRNKNRTTVGSGKREKYSRKYAFSCMLECGFCGGTLTRRNWHSGSKYSKVIWQCVTATKKGKKFCKHSKGIPETAIEEAFVESYRLLCDDNKDVLEEFLQRMDDTLSSSVVSKQLAKAEKEIDALEKKKSKLVDMRLEEIIDKETYESKYADLVSKQEQLVEERQKLQETSDNEKDIKKRLKEFKKTLEQNEVLDKFDRYVFESIVEKVIVGGLDENGNVDPAQLTFVYKTGLKNSVDGAKFKTQRKNARGRHRTNELCSHDSNEVDKMCSDSSNDT

SEQ ID NO: 612 - DNA, 50 bp, Clostridioides difficile; identical to SEQ ID NO: 537
  source 1..50: mol_type = genomic DNA

SEQ ID NO: 613 - DNA, 40 bp, Clostridioides difficile; identical to SEQ ID NO: 523
  source 1..40: mol_type = genomic DNA

SEQ ID NO: 614 - DNA, 50 bp, Clostridioides difficile; identical to SEQ ID NO: 539
  source 1..50: mol_type = genomic DNA

SEQ ID NO: 615 - DNA, 40 bp, Clostridioides difficile; identical to SEQ ID NO: 525
  source 1..40: mol_type = genomic DNA

SEQ ID NO: 616 - protein, 581 aa, Clostridioides difficile
MQEVEVIKAKNVLSRQARGKAIERLRVAAYCRVSTDSEDQLNSYKSQVQYYTDMIKKNKEWVLADIYADEAITGTQVTKREDFQRMINDCMNGEIDMVFTKSISRFARNTLDTLKYVRMLKERNIAVYFEDEKINTLTMDGELLLVVLSSVAQQEVENISANVKKGLKMKMKRGELVGFQGCIGYDYHPEDKTITVNQEEAEIVRYIFNRYVDGAGGSVIGQELESLGYKTKYGSSTWAPSTVIGIIKNEKYKGDILLGKTFTVDPISKRRLENMGEEDKFYMKDHHEPIISEEIFEKAQEILNRRNKNRTTVGSGKREKYSRKYAFSCMLECGFCGSTLSRRNWHSSSEYSKVIWQCVTATKKGKKFCPDSKGIPETAIEEAFIESYRLLCDNNKDVLEEFLHRLDETLSNSTVSKQLSKIEKEISAVEGKKNKLVDMRLEDSIDKDTYETKYTALMEKLEQLASDRQKLQETAVNEKDIKRRLKEFKTTLEQNEVLDVFDRHVFESIVEKVIVGGYDEDGNKDPAQLTFVYKTGMKNSVDGSRFKPQRKNARGRHRTDELCSHESNEVNSLCSDNSADT

SEQ ID NO: 617 - DNA, 50 bp, Clostridioides difficile; identical to SEQ ID NO: 542
  source 1..50: mol_type = genomic DNA

SEQ ID NO: 618 - DNA, 40 bp, Clostridioides difficile; identical to SEQ ID NO: 523
  source 1..40: mol_type = genomic DNA

SEQ ID NO: 619 - DNA, 50 bp, Clostridioides difficile; identical to SEQ ID NO: 544
  source 1..50: mol_type = genomic DNA

SEQ ID NO: 620 - DNA, 40 bp, Clostridioides difficile; identical to SEQ ID NO: 525
  source 1..40: mol_type = genomic DNA

SEQ ID NO: 621 - protein, 581 aa, Clostridioides difficile
MQEVEVIKAKNVLARQARGKAIERLRVATYCRVSTDSEDQLNSYKSQVQYYTDMIKKNKEWVLADIYADEAITGTQVTKREDFQRMINDCMNGEIDMVFTKSISRFARNTLDTLKYVRMLKERNIAVYFEDEKINTLTMDGELLLVVLSSVAQQEVENISANVKKGLKMKMKRGELVGFQGCIGYDYHPEDKTITVNQEEAEIVRYIFNRYVDGAGGSVIGQELESLGYKTKYGSSTWAPSTVIGIIKNEKYKGDILLGKTFTVDPISKRRLENMGEEDKFYMKDHHEPIISEEVFEKAQEILNRRNKNRTTVGSGKREKYSRKYAFSCMLECGFCGGTLTRRNWHSGSKYSKVIWQCVTATKKGKKFCKHSKGIPETAIEEAFVESYRLLCDDNKDVLEEFLQRMDDTLSSSVVSKQLAKAEKEIDALEKKKSKLVDMRLEEIIDKETYESKYADLVSKQEQLVEERQKLQETSDNEKDIKKRLKEFKKTLEQNEVLDKFDRYVFESIVEKVIVGGLDENGNVDPAQLTFVYKTGLKNSVDGAKFKTQRKNARGRHRTNELCSHDSNEVDKMCSDSSNDT

SEQ ID NO: 622 - DNA, 50 bp, Clostridioides difficile; identical to SEQ ID NO: 537
  source 1..50: mol_type = genomic DNA

SEQ ID NO: 623 - DNA, 40 bp, Clostridioides difficile; identical to SEQ ID NO: 523
  source 1..40: mol_type = genomic DNA

SEQ ID NO: 624 - DNA, 50 bp, Clostridioides difficile; identical to SEQ ID NO: 539
  source 1..50: mol_type = genomic DNA

SEQ ID NO: 625 - DNA, 40 bp, Clostridioides difficile; identical to SEQ ID NO: 525
  source 1..40: mol_type = genomic DNA

SEQ ID NO: 626 - protein, 568 aa, Cupriavidus metallidurans
MTAQNNLAYSYVRWSSAEQSKGDSHRRQLAKFEDYCTRKGLTPAADSFIDKGRSGYKQEHLNDTGELRRFLNLVEDGTIAAGSTLIVEDLDRLGRQEVVAALGVFTMILTAGIRIVTLGDGEGEREYTADSGTIPLLISLLEMSRAHGESKRKSELVSAAFANKQHAARLYKAPMGNIAPLWLSLKHGWRSYEADGSAYEEIPARAAVVRLIFQWAIDGYGKDVIARKLNDEGHLPFKANTKWKEKGLKGWGSSSVDKVLKNRAVFGEYQPTTRKGTRDGKRMAAGDAISGYFPATVSVETFYEAQAAIDGRRTARATRQSPKFNVWGGIAKCEKCGNALHLVNKGIAPKGSTYLRCSNSRKGVCKARAVRLDQAEAVFRGMLLRLDTLALVKDSSANVEKSLRAAEGELVGAEKTLADLAERLMENASSKTFATAVRTAEGRVSALQSRVESLKAELASENSIGWTEFLSRLDLVSYEGRAKANALCKRLGVVVMIGASGYGVTKNGKPIFSMDFREGEAGYVMPAFGGALPAFLAVSDVPSDAEREDADQARYASLEDEGQATGEY

SEQ ID NO: 627 - DNA, 50 bp, Cupriavidus metallidurans
  source 1..50: mol_type = genomic DNA
aatggtgtcttctgtcctaccttcttattcgaaaggtagaatgcaccaat

SEQ ID NO: 628 - DNA, 40 bp, Cupriavidus metallidurans
  source 1..40: mol_type = genomic DNA
ggcgggacagcactcggccttgctggtcggcccgccgggc

SEQ ID NO: 629 - DNA, 50 bp, Cupriavidus metallidurans
  source 1..50: mol_type = genomic DNA
aatggtgtcttctgtcctaccttcctattcgaaaggtagaatgcaccaat

SEQ ID NO: 630 - DNA, 40 bp, Cupriavidus metallidurans
  source 1..40: mol_type = genomic DNA
ggcgggccagcactccgaactgctggccggcccgccagcc

SEQ ID NO: 631 - protein, 525 aa, Ruminococcus torques; identical to SEQ ID NO: 316

SEQ ID NO: 632 - DNA, 50 bp, Ruminococcus torques
  source 1..50: mol_type = genomic DNA
cattttcgagtagatataaatattgtaatgaaataattgagaagaaattc

SEQ ID NO: 633 - DNA, 40 bp, Ruminococcus torques
  source 1..40: mol_type = genomic DNA
gaagaagattatcaatattgtaatgaaataattcgaataa

SEQ ID NO: 634 - DNA, 50 bp, Ruminococcus torques
  source 1..50: mol_type = genomic DNA
cattttcgagtagatataaatattaaaatgaaataattgagaagaaattc

SEQ ID NO: 635 - DNA, 40 bp, Ruminococcus torques
  source 1..40: mol_type = genomic DNA
gaaggagattaacaataataaaattaaacaattataataa

SEQ ID NO: 636 - protein, 475 aa, Clostridioides difficile
MNVAIYLRKSRADEEAEHRGEFETLSRHKTTLLKLAREQNLNVIEIKEELVSGESIEYRPKMIELLDEIKNNNYDAVLVMDIDRLGRGNMQDQGLILDTFKKSKTKIITPRKTYNLNDEFDEEYSEFEAFMARKELKLISRRMQRGKIKSIEEGKFIAQAPPYGYDIKYLNNKERVLVINEDKATVVKIIFDMYLNGDGACKISNYLNELGYKTTTGRTWYEKGIRDIIKNKVYCGYIVWNKVERKRNSSRTRGIEEQIEVKGKHEPIISEDIWNKAQNIRKKRINSPTPNNKITNPLAGIVKCGYCNHTLIAKSNTTSSGYEKYMVCTNCKNKATKLYILENKILEVLNKWLVNYRLSLKDEKDNSKPENTLEHTLINLNKELDTLEKQKERLHDFLEQGIYDSNTFGERLKILLSRIENVREAINKTNIDIEMQKERNTVKTQIVPQLEKILSEYTEEKEPYLKNVLLKSVIN

SEQ ID NO: 637 - DNA, 50 bp, Clostridioides difficile
  source 1..50: mol_type = genomic DNA
gtattgcttaaaagtgtaataaattaattaaaactggaaaaggagatttc

SEQ ID NO: 638 - DNA, 40 bp, Clostridioides difficile
  source 1..40: mol_type = genomic DNA
aataacaatattatatttgtatgcagtctataaaaaagaa

SEQ ID NO: 639 - DNA, 50 bp, Clostridioides difficile
  source 1..50: mol_type = genomic DNA
gtattgcttaaaagtgtaataaataaattaaaactggaaaaggagatttc

SEQ ID NO: 640 - DNA, 40 bp, Clostridioides difficile
  source 1..40: mol_type = genomic DNA
gataacaatatcatattagaattcaatccataaaacagaa

SEQ ID NO: 641 - protein, 537 aa, Enterococcus faecium
MKQQIYNTALYLRLSRDDELQGESSSITTQRSMLRLYAKEHHLNVIDEYIDDGWSGTNFDRPSFQRMIEDIEAGKINCVVTKDLSRLGRNYIMTGQYTELYFPSHNVRYIAIDDGVDSEKGESEIAPFKNIINEWVARDTSRKVKSAFKTKFAEGAHYGAYAPLGYKKHPDIKGKLLVDDETKWIIEKIFSLAYQGYGSAKITKQLRAEKVPTASWLNFTRYGTFAHIFEGKPESKRYEWTIAHVKAILKSEVYIGNSVHNMQSTVSFKSKKKVRKPESEWFRVENTHEPIIDKEVFYRVQEQIKSRRRQTKEKATPIFAGLVKCADCGWSMRFGTNKTNKTPYSYYACSYYGQFGKGNCSMHYIRYDVLYQAVLERLQYWAKAVQQDEEKVLNKIQKAGNAERIREKKKKASTLKKAENRQNEIDRLFAKMYEDRACEKITERNFVMLSSKYQKEQIELEQQITSLREELSKMEQDMIGAEKWIELIKEYSVPKELTAPLLNAMIEKILIHEATTNEDNERIQEIEIYYRFIGKVE

SEQ ID NO: 642 - DNA, 50 bp, Enterococcus faecium; identical to SEQ ID NO: 402
  source 1..50: mol_type = genomic DNA

SEQ ID NO: 643 - DNA, 40 bp, Enterococcus faecium
  source 1..40: mol_type = genomic DNA
tataagtagatgggaaaaaggtattaatattccagatatt

SEQ ID NO: 644 - DNA, 50 bp, Enterococcus faecium
  source 1..50: mol_type = genomic DNA
taatatttttaactaagggaaaccaatgtttcccaaacaaaaagatatta

SEQ ID NO: 645 - DNA, 40 bp, Enterococcus faecium
  source 1..40: mol_type = genomic DNA
tataagtagataccacgaaaatattaatattacagaaatt

SEQ ID NO: 646 - protein, 524 aa, Bacillus subtilis
MIKNLENIQHVAIYLRISQEKKGENVETLENHRQILIEFCEEHGFTYEEFGEVISGGKSEITQRVALKRLLDNIEKYDAIACFELTRISRNGLISQTVKQYCIDYDKPILTPYQSYDLANSETDRLLFDVGSMISSHEHSTIGKRSKANKMQMSKAGLHVSGNVPFGYKRNNDTKKLEIDEEAAPTIRYIFQLHSEGYGSFKIRDILNNEGYKSATGKAFNLPSIKRIIRNPAYKGTLIFNNRKKIKRNGKFEYDNVETITVENAHPAIIPPDVWEKANQDREFRALKSINIREKPATKSGVTLLKDLIFCGVCGRKMIIRKDTKSSTGYTLKKCEYLLPNGEKCPNCGKKLDAVIARVLTGLTKYADDLSQMEEQLRKNNASDLNEKNQLKLNQIDKAIMEIEQKQKNLIELAMEGLFSHEEIREKKQELVKRMDELKAKREEVINSINSLSVEEEIELIQEKRKLILSLREDMDQEYGNELLKRFIKKIHFTRVIPEDILKRSTRNSERQNYPFNIKFEFFD

SEQ ID NO: 647 - DNA, 50 bp, Bacillus subtilis
  source 1..50: mol_type = genomic DNA
acgcagtcaataaaaaatgacatacctactgtgttttttaaaataagtat

SEQ ID NO: 648 - DNA, 40 bp, Bacillus subtilis
  source 1..40: mol_type = genomic DNA
tacctcaggctatgcggttcctacctttgtcgttgacgca

SEQ ID NO: 649 - DNA, 40 bp, Bacillus subtilis
  source 1..40: mol_type = genomic DNA
tacctcaggctatgcggttggtacctttgtcgttgacgca

SEQ ID NO: 650 - DNA, 50 bp, Bacillus subtilis
  source 1..50: mol_type = genomic DNA
tctcaggcaggagaaaattaaaaaggtactgtgttttgatgaatacgtat

SEQ ID NO: 651 - protein, 517 aa, Bacillus subtilis
MIKNLENIQHVAIYLRISQEKKGENVETLENHRQILIEFCEEHGFTYEEFGEVISGGKSEITQRVVLKRLLDNIEKYDAIACFELTRISRNGLISQTVKQYCIDYDKPILTPYQSYDLANSETDRLLFDVGSMISSHEHSTIGKRSKANKMQMSKAGLHVSGNVPFGYKRNNDTKKLEIDEEAAPTIRYIFQLHSEGYGSFKIRDILNNEGYKSATGKAFNLPSIKRIIRNPAYKGTLIFNNRKKIKRNGKFEYDNVETITVENAHPAIIPPDVWEKANQDREFRALKSINIREKPATKSGVTLLKDLIFCGVCGRKMIIRKDTKSSTGYTLKKCEYLLPNGEKCPNCGKKLDAVIARVLTGLIKYADDLSQMEERLRKNNASDLNEKNQLKLNQIDKAIMEIEQKQKNLIELAMEGLFSHEEIREKKQELVKRMDELKAKREEVVNSINALSVEEEIELIQEKRKLILSLREDMDQEYGNELLKRFIKKIHFTRVIPEDILKRSTRNSEGLVKKSV

SEQ ID NO: 652 - DNA, 50 bp, Bacillus subtilis; identical to SEQ ID NO: 647
  source 1..50: mol_type = genomic DNA

SEQ ID NO: 653 - DNA, 40 bp, Bacillus subtilis; identical to SEQ ID NO: 648
  source 1..40: mol_type = genomic DNA

SEQ ID NO: 654 - DNA, 40 bp, Bacillus subtilis; identical to SEQ ID NO: 649
  source 1..40: mol_type = genomic DNA

SEQ ID NO: 655 - DNA, 50 bp, Bacillus subtilis; identical to SEQ ID NO: 650
  source 1..50: mol_type = genomic DNA

SEQ ID NO: 656 - protein, 524 aa, Bacillus subtilis
MIKNLENIHHVAIYLRISQEKKGENVETLENHRQILIEFCEEHGFTYEEFGEVISGGKSEITQRVALKRLLDNIEKYDAIACFELTRISRNGLISQTVKQYCIDYDKPILTPYQSYDLANSETDRLLFDVGSMISSHEHSTIGKRSKANKMQMSKAGLHVSGNVPFGYKRNNETKKLEIDEEAAPTIRYIFQLHSEGYGSFKIRDILNNEGYKSATGKAFNLPSIKRIIRNPAYKGTLIFNNRKKIKRNGKFEYDNVETITVENAHPAIIPPDVWDKANQDRESRALKSISIREKPATKSGVTLLKDLIFCGVCGRKMIIRKDTKSSIGYTLKKCEYLLPNGEKCPNCGKKLDAVIARVLTGLIKYADDLSQMEERLRKNNASDLNEKNQLKLNQIDKAIMEIEQKQKNLIELAMEGLFSHEEIREKKQELVKRMDELKAKREEVVNSINALSVEEEIELIQEKRKLILSLREDMDQEYGNELLKRFIKKIHFTRVIPEDILKRSTRNSERQNYPFNIKFEFFD

SEQ ID NO: 657 - DNA, 50 bp, Bacillus subtilis
  source 1..50: mol_type = genomic DNA
acacagtcaataaaaaatgacatacctactgtgtttttaaaaataagtat

SEQ ID NO: 658 - DNA, 40 bp, Bacillus subtilis; identical to SEQ ID NO: 648
  source 1..40: mol_type = genomic DNA

SEQ ID NO: 659 - DNA, 40 bp, Bacillus subtilis; identical to SEQ ID NO: 649
  source 1..40: mol_type = genomic DNA

SEQ ID NO: 660 - DNA, 50 bp, Bacillus subtilis; identical to SEQ ID NO: 650
  source 1..50: mol_type = genomic DNA

SEQ ID NO: 661 - protein, 503 aa, Clostridium thermobutyricum
MKKKVAFLSRVSTMDQHSSIENQQKIFNQWLEKNSDCKFFKIYEDEGISGSKGYKRAGWLNLIEDGKRGLYDVVVAKSFSRFGRNQTETLQAIKELRAKNVRVVFLEDNLDSVEDMSKFGLFAWLAEQEAQKTSERIKMVWDSFNAQGKVHVCVAPYGYSYDKNRKNFIINEIEKPIVIKIFNWYLKGYGFNKISQMLIDQNISSKRGGKWAGSTIRSILTNEFYIGILVQGKSRTLDVTMKESRSIPEEEWYRHNGNHEAIISEDIFRKVNNQIKERSLRAKKSYTKGHSNIKRNSNKSLFSNLLICGECKSTMTIKTKKREKYKPYYQCLKYDRLSLKSGHISNRIDESFLIETVKEVLIDLTENNFEKLKNIQESKVISKNNKKIEKEIVAINKKIEDQIKLVNSLLLLYTNGTITEQQFKLQNDNINKGLNNFIERREALEKDLKKEVNNTEKKLVFKGIEAIVNKPLEEWNNSELKEVIECITVYIDGTIDLKVKYFN

SEQ ID NO: 662 - DNA, 50 bp, Clostridium thermobutyricum
  source 1..50: mol_type = genomic DNA
taatacttttaaataagttaagatacttcttaaattacttaaaagtataa

SEQ ID NO: 663 - DNA, 40 bp, Clostridium thermobutyricum
  source 1..40: mol_type = genomic DNA
tgatcctaataatcaagatacttcaattttaacaggttca

SEQ ID NO: 664 - DNA, 40 bp, Clostridium thermobutyricum
  source 1..40: mol_type = genomic DNA
tgatcctaataatcaagatttttcaattttaacaggttca

SEQ ID NO: 665 - DNA, 50 bp, Clostridium thermobutyricum
  source 1..50: mol_type = genomic DNA
aaatacttttacaaaagctaaaattttaataaatttaatgaaaagtataa

SEQ ID NO: 666 - protein, 502 aa, Clostridium paraputrificum
MNKVCIYLRKSRADEEIEKALGQGETLRKHRKSLLKFAKENNLNIVDIKEEIVSGDSLFFRPKMLELLKEVEEKKYTGVLVMDIDRLGRGGMKDQGIILDAFKESNTEIITPTKTYNLNNEFDEEMTEFKTFFARRELKSITKRMQGGRVRSVEEGNYIGTNPPLGYEIFYIQKSRTLKIVQEEAEIIKIIFKMYSENNGATSIAEHLNMLGLKTKTGNKFSPSSVLAILKNPIYIGKITWKKREEKKSKIPGKTKDCRTRDKSEWIISQGKHEAIISEDLFNKCQNILTGRYHIPYQLHNKPVNPFSGLITCKICGKKMTMRPSRGINRLMCVHKCGNRSSRFDYVESDLIKALEEYVANYKIQIEIKEKKVDLGLYKKQATLITNELNELKKQKNKLFDLLERGIYDEMIFLERSKNIDKRIEECECSLTKINEELSLNNLKTEENIVNFKNAIEAYKETNDIDSKNLILKSILEKVEYYKDKEAKNDDFELTIYPKFLR

SEQ ID NO: 667 - DNA, 50 bp, Clostridium paraputrificum
  source 1..50: mol_type = genomic DNA
tacatacatcatcaacaacaaatttcattacgttatatatgttatatgta

SEQ ID NO: 668 - DNA, 40 bp, Clostridium paraputrificum
  source 1..40: mol_type = genomic DNA
aacatcaataaggcaaatttcattaccttctttatccact

SEQ ID NO: 669 - DNA, 40 bp, Clostridium paraputrificum
  source 1..40: mol_type = genomic DNA
aacatcaataaggcaaatttaattaccttctttatccact

SEQ ID NO: 670 - DNA, 50 bp, Clostridium paraputrificum
  source 1..50: mol_type = genomic DNA
taaataaattagacacaacaaatataaatactttatagctcttatattca

SEQ ID NO: 671 - protein, 570 aa, Bacteroides thetaiotaomicron
MREAALLLRCSTNLQDYNRQKNDLLALADKLGFSVRDEYIFGEYVTGKDDIRKGNRQSVQSLIDACLERMVDAVLIWEVSRLSRNFIYGVTTIDKFNRDYKIPIYFRDKRRWTIDIETGKIDIDFEKDLRKYFEQAEAELITLRSRLASGKRDAAGLNQVIGSVAPFGYDRINKHNVINPVTSLVVKEMYEKYLEEGATLLSVSSYLSAKYPQYIIKLRSAGSIRNILVNKANTGILVYTIYDEIDDIGYRYEVMQPSIISVEVYNAVLAKLKKNRTITAYPHSKKHLLQKMLFCYECGTCYTPSESLKRGTCYYRCGQKTAHIKPCNNSMSLNESIIDSVIWKFLKEQLFSESELNKEQREIAIEKEEENRKNIVTDIEIVEGAIANTYKDLDSLEDMLITRRITSERFDNKKAKIDTKLGELKHQRDKLNERINAIDFNIKRLNNLDYTKSFFDEVENDLEKKIALLKEYVQFIYPYMIGKNIVLLKTHTIDGIYYIFYRIYKGNFSKDKIQRTAYYIHEALAEFKPNENNNFYAPNPSILGIDNEYLYYFVDEMKEVCENNGFEFEY

SEQ ID NO: 672 - DNA, 50 bp, Bacteroides thetaiotaomicron
  source 1..50: mol_type = genomic DNA
agttgcaaatgttttaaaataaataaataaagcataaaacatttgtgatt

SEQ ID NO: 673 - DNA, 40 bp, Bacteroides thetaiotaomicron
  source 1..40: mol_type = genomic DNA
taatcacagtaaacttaaaaaacgtatcactatgatgtta

SEQ ID NO: 674 - DNA, 40 bp, Bacteroides thetaiotaomicron; identical to SEQ ID NO: 673
  source 1..40: mol_type = genomic DNA

SEQ ID NO: 675 - DNA, 50 bp, Bacteroides thetaiotaomicron
  source 1..50: mol_type = genomic DNA
agttgcaatcagtctgaaataaataattaaagcaaagcatttttgtaaca

SEQ ID NO: 676 - protein, 502 aa, Clostridium perfringens
MNNKICMYLRKSRADEELEKTLGEGETLSKHRNALLKFAKEKKLNIVEIKEEIVSGESLFFRPKMLELLKEVEAKKYDGVLVMDMQRLGRGDMKDQGIILETFKNSNTKIITPQKTYDLNNDFDEEYTEFEAFMSRKELKMINRRMQGGRVRSVEEGNYIATNPPYGYDIGFINKSRVLKVNEYESNAIKLIFKLYLDGNGASFIANELNNLGYKTKLGNNFSNSSVLTIIKNPVYIGKIAWKRKDIKKSRTPGKVKDTKTRDKSEWIIADGKHEAIIDMNTWDKTQEILKCKYHIPYQLTNSPANPFAGLITCGVCGKKMVMRKARGINRLMCIYKCGNKSTRFDLVESDCFEALKEHLKNYTAEVENELIEENTNIYTSQISQLKKELTTLNNQRLKLFDLLERNLYDEDTFLERSKNINDRIETVSSTLKSIEKLLKKKSKSSYQEDIQFFQSVLDAYNETKDISKKNSLLKSILYKIEYTKLNGSKEHVIKVFPKLRK

SEQ ID NO: 677 - DNA, 50 bp, Clostridium perfringens
  source 1..50: mol_type = genomic DNA
tacatacaacatattagttatatttcattacacacaacatgttatatgta

SEQ ID NO: 678 - DNA, 40 bp, Clostridium perfringens
  source 1..40: mol_type = genomic DNA
aatatctataagacaaatttcatttccttccttatccact

SEQ ID NO: 679 - DNA, 40 bp, Clostridium perfringens
  source 1..40: mol_type = genomic DNA
aatatctataagacaaatttaatttccttccttatccact

SEQ ID NO: 680 - DNA, 50 bp, Clostridium perfringens
  source 1..50: mol_type = genomic DNA
tttatacaaatatgtatttatatataattatatacactatataatatgta

SEQ ID NO: 681 - protein, 503 aa, Klebsiella michiganensis
MIEAFSYVRFSTKSQATGTSLERQLNASRLFCTQHGLRLSNQSYHDLGISGFKNVRRPELEQMFEAIQTGVIPAGSFILIEAIDRLSRKGISHTQDILKKILQHDIKVAFVGEDAKTLQGQVLKKDSLNDLSSVIMVALAADLAHKESLRKSKLVRESKAIAREKAQNGVILPGKSMFWLDYDKEQRHYVLNDRATIAKEIIELRLLGHGPRKIAKILNERQIPGPTGKEWYQPTIKRIITSPVLYGAYQSHQVIEGKYIPVALVENYYPALIDYNLFSQIQFDNKHASKGRPSRVNPFGGVFYCECGNAICFKKSYSKTAKEDKNEYHYHYCIAAREGRCKNTKAIPNFTPILINLLDKLEIKSTSTKNIRTESIISKRNKIEQLNEMLLKLDSPPVSVLKTISNLEKELQTLLEQPEITAPKQEDIVVLSTIKDPLKYNMHLKRLVKRITVYQINGPKSLRIKVDKTDGHYQNFLIQNGKTIFKSDTERLKKLLAGFKDGF

SEQ ID NO: 682 - DNA, 50 bp, Klebsiella michiganensis
  source 1..50: mol_type = genomic DNA
ttttatttaaatgaaactgttttacagataatagtttcatttaaacaaaa

SEQ ID NO: 683 - DNA, 40 bp, Klebsiella michiganensis
  source 1..40: mol_type = genomic DNA
taggggcaggtatgttaggcagataataattccacctgca

SEQ ID NO: 684 - DNA, 40 bp, Klebsiella michiganensis
  source 1..40: mol_type = genomic DNA
taggggcaggtatgttaggttgataataattccacctgca

SEQ ID NO: 685 - DNA, 50 bp, Klebsiella michiganensis
  source 1..50: mol_type = genomic DNA
ttttttttagtagaaacttttttattcataaaaaatccatcaaaacaaaa

SEQ ID NO: 686 - protein, 501 aa, Clostridioides difficile
MNVSIYLRKSRADEEAEHRGEFETLSRHKTTLLKLAKEQSLNVIDIKEELISGESIEYRPKMIELLDEVKNNNYDAVLVMDIDRLGRGNMQDQGLILDTFKKSKTKIITPRKIYDLNDEFDEEYSEFEAFMARKELKLISRRMQRGKIKSIEEGKFIAQAAPYGYNIKYLNNKERILIINEDKATVIKLIFDMYLKGDGACKIASYLNELGYKTTTGRTWYEKGVRDIIKNKVYCGYIVWNKVERKRNSSRTRGIEEQIEVKGKHEPIISEDIWNKAQNIRKKRSNSPTPNNKITNPLAGIVKCGYCNHTLVAKSNTTSSGCEKYMVCTNCKNKATKLYILENKILLVLNKWLMDYRLSLKEEKDNFKIKDNLEHTLVSLNKELNNLEKQRERLHDFLEQGIYDSDTFLQRSKILMSRLENIRKSINKTNIDIEMEKERKVVKTQVVPQLERVLNEYTEDKEPYLKNILLKTVINYAVYKKEPNQRTDDFSLILYPNISKN

SEQ ID NO: 687 - DNA, 50 bp, Clostridioides difficile
  source 1..50: mol_type = genomic DNA
tgatgttataatcaaactgattaccaaaaatcagtatgtttataacataa

SEQ ID NO: 688 - DNA, 40 bp, Clostridioides difficile
  source 1..40: mol_type = genomic DNA
taatgtaagaactgatgtacaatttggtgtaatggcagga

SEQ ID NO: 689 - DNA, 40 bp, Clostridioides difficile
  source 1..40: mol_type = genomic DNA
taatgtaagaactgatgtattatttggtgtaatggcagga

SEQ ID NO: 690 - DNA, 50 bp, Clostridioides difficile
  source 1..50: mol_type = genomic DNA
tgattttttattatatctgattacttaaaaacataatttttataatataa

SEQ ID NO: 691 - protein, 574 aa, Serratia marcescens
MRKCFLYSRVSSDVQISGDGLGRQEDKLKQYLLQNALRLNLSVDDCEILVDSGVSGWKGSNMGDTAALGQLFRRVESGEIDGSVLIVESLDRFSRENPFRVAGYIAKLAEHSIDIIDVEQNLVIGTSNPWSSTIASIIANRAHEESTLKSKRIKAAWNSRRKKAEESGQYMIKNTPFWIDVLDDKYVANADASIVREIFDLYLQGYGSFTIAKKMNEAGKVIRNKRWSTPKICALLRNPRCNGDFISHSLERDYEKGTSNSVEHVIKGLYPKIVTDEEFALVLNRLNDGSKNKRVCNDRKVTILNGLLKCSICGGALTVRSAGAYRYVGCLKTIEKGGCYSKPIRYDALEKIVVNHIRNMDLGQVYESNDSQEVITKERIKTLMSHIEEYKAGITQLRERGKKPSFDMLTELQNSEDELELLKKELEQLSLSKIDLSEFAVSTELFDITQIALRTRLERTISSLLNKIKVYHTKDLSFSLIEMIYVNDVVKHVLVADKKGDVTGDVVIRRNGESTTYESCSVKIIKDEGGVFSLDCNISEVVLNDYLFLMNIVDFVDSEAKEFLNLHLNAVLAH

SEQ ID NO: 692 - DNA, 50 bp, Serratia marcescens
  source 1..50: mol_type = genomic DNA
tttattttagtgttatataataatgtgatacattagaacactaagataaa

SEQ ID NO: 693 - DNA, 40 bp, Serratia marcescens; identical to SEQ ID NO: 193
  source 1..40: mol_type = genomic DNA

SEQ ID NO: 694 - DNA, 40 bp, Serratia marcescens; identical to SEQ ID NO: 194
  source 1..40: mol_type = genomic DNA

SEQ ID NO: 695 - DNA, 50 bp, Serratia marcescens
  source 1..50: mol_type = genomic DNA
tttaatttaggattaaataataatttaataaattattggattaaattaaa

SEQ ID NO: 696 - protein, 525 aa, Enterococcus faecium; identical to SEQ ID NO: 316

SEQ ID NO: 697 - DNA, 50 bp, Enterococcus faecium
  source 1..50: mol_type = genomic DNA
gatagtcaaaaagacatatataatttatttgaaattttatatctaatttt

SEQ ID NO: 698 - DNA, 40 bp, Enterococcus faecium
  source 1..40: mol_type = genomic DNA
gtaaatttatatcagtaatttataataattatgactctta

SEQ ID NO: 699 - DNA, 40 bp, Enterococcus faecium
  source 1..40: mol_type = genomic DNA
gtaaatttatatcagtaatgtataataattatgactctta

SEQ ID NO: 700 - DNA, 50 bp, Enterococcus faecium
  source 1..50: mol_type = genomic DNA
aatagtcaagatatcaaatgtaatgtgttcaaaattaaattcctaatttt

SEQ ID NO: 701 - protein, 535 aa, Pseudomonas gingeri
MNGAKVYSYTRFSDPKQALGHSADRQLQYAKVWAAERGLTLDESLSLKDEGLSAFHQRHVKQGALGVFLLAVDEGRIPPGSVLIVEGLDRLSRAEPIQAQAQLAQIINAGITVVTASDGREYNREKLKAQPMDLVYSLLVMIRAHEESDTKSKRVKAAIRRQCEGWMAGTYRGLIRNGGDANWLKWTGSAWELIPDRVEVVLLAIEKYKEGLGSDRAYRFMIERGYNLNTVGINAAQLYRLIKLPALKGVKRLAIDGEDFELPDYYPRLMSDIEFDELQLLTTQRSRRRPKGAIPGVVTGIGISYCGYCGAGMTGVNQMAKIQADGMLRDCNRRLICLSNLNAKGCSHGSISVAPVERALMAYCSDHMNLQRLLEPAHDGQDLRVHLMNARKVVDDLDRQLSRVTEALLAGESDGATPMVFVRKARELEEQLQAAKVAVQQAERELVSATSRQAPADARVWANLVAGVDAQEVGPREMVRQLMMDTFERIVLYIRGVVPDGRKYIDVLLIAKSGQRRWMRIERRTGQWAAGSDRP

SEQ ID NO: 702 - DNA, 50 bp, Pseudomonas gingeri
  source 1..50: mol_type = genomic DNA
tatttatattccccatcatctggattgccagacgatgggcaatatatact

SEQ ID NO: 703 - DNA, 40 bp, Pseudomonas gingeri
  source 1..40: mol_type = genomic DNA
gatgaggatggcttttggattgccggcggccaccagaaac

SEQ ID NO: 704 - DNA, 40 bp, Pseudomonas gingeri
  source 1..40: mol_type = genomic DNA
gatgaggatggcttttggaaagccggcggccaccagaaac

SEQ ID NO: 705 - DNA, 50 bp, Pseudomonas gingeri
  source 1..50: mol_type = genomic DNA
tatttatatgatttatcatgttgaaagtcataccaactcaaatatataat

SEQ ID NO: 706 - protein, 551 aa, Vibrio cholerae
MLLMQKGYHMQKTAVSYRRVSSGKQLRGHGLARQREMSIAWCATHNLLLVDDLVDNGLSAFKGHHKHKGEFGPLLHAVQTGTVKFDCLLVENFDRIGRMPVMEQFSQFSLLINAGIELHIISENRIFTSESINSNPYELFGVLAQMARSYDESRLKAQRIKQAYDKKLQALQEHGVIFSKTVPFWLDVNHDRTAFSLNKHVLTVKRCFDLAVQGHGATKISRLLNDEEVPVPEHGARKCIQAWTRNKVQRVLTNPAVYGRFVGKKTQVDREDYYPDVISKQIFHQVQSMISTRNAVNPKTSNKQVSNLFSGLMFCECGRTMKLYNFAGGDFFSKRTFKCRSSSEDGHCEHKTVYWLKSFEIQALILLYELNCSNKPSKPSQAPIIEQQIRELEASNANLVKLIMQGQVSQAIANASMQLELEIQQAKKQLEATKLAEATPDTQLDQSERDATIQAVLYDEQYQARLLMQSQVQQLIKQVTFYKHGVLFELKSGIQYWLRPLTNRDFSSVYSLRVPDGLCIEQLHTIVPQTPITVDTSKRQSAASNVPIFSV

SEQ ID NO: 707 - DNA, 50 bp, Vibrio cholerae
  source 1..50: mol_type = genomic DNA
actattgcaacgcgctaaacagttaaaattatatagcgcgttgcaatagt

SEQ ID NO: 708 - DNA, 40 bp, Vibrio cholerae
  source 1..40: mol_type = genomic DNA
aataacccgccgaagaagtaaatctttcaggtgcattatt

SEQ ID NO: 709 - DNA, 40 bp, Vibrio cholerae
  source 1..40: mol_type = genomic DNA
aataacccgccgaagaagtgaatctttcaggtgcattatt

SEQ ID NO: 710 - DNA, 50 bp, Vibrio cholerae
  source 1..50: mol_type = genomic DNA
actattgtcccttcctatacaattgaaattatatatgtttctgccacagt

SEQ ID NO: 711 - protein, 502 aa, Clostridium perfringens
MTNKTCIYLRKSRADEELEKTLGEGETLYKHRNALLKFAKEKKLNIVEIKEEIVSGESLFFRPQMLELLKEVEAKKYDGVLVMDMQRLGRGDMKDQGIILETFKNSNTKIITPQKTYDLNNDFDEEYTEFEAFMSRKELKMINRRMQGGRVRSIEEGNYIATNPPFGYDISFIKKSRTLKINEHESKAVKLIFKLYIEGNGASFIATELNNLGYKTKLGNNFSSSSVLTIIKNPVYAGKIAWKRKDIKKSRTPGKIKDTRLRDKSEWIISDGKHEAIIDMETWNLAEEILKGRYHIPYQLANAPVNPFAGLITCGVCGKKMVMRKARGINRLMCIYKCGNKSTRFDNVESDCLDALKEYLVNYSAEIKNSTKKEDVDVYSNQISMLKKELSLLNNQKLKLFDLLERNIYDETTFLERSKNINDRIFSINNSLCNLEKLLKKKSISSYEEDIKLFKSVLDAYNETEDVSKRNTLLKSILYKIEYTKTEKGKDYEIKLFPKLRK

SEQ ID NO: 712 - DNA, 50 bp, Clostridium perfringens
  source 1..50: mol_type = genomic DNA
tacatacaacatactagatatatttcattacatacaatatgttgtatgta

SEQ ID NO: 713 - DNA, 40 bp, Clostridium perfringens; identical to SEQ ID NO: 178
  source 1..40: mol_type = genomic DNA

SEQ ID NO: 714 - DNA, 40 bp, Clostridium perfringens
  source 1..40: mol_type = genomic DNA
aatatctatgagacaaattatattaccttccttatctact

SEQ ID NO: 715 - DNA, 50 bp, Clostridium perfringens
  source 1..50: mol_type = genomic DNA
aacatacatgttattggatacattatagtacatacatgtgattggatata

SEQ ID NO: 716 - protein, 502 aa, Clostridium perfringens
MNKKICIYLRKSRADEELEKTLGEGETLSRHRNALLKFAKENKLNVTDIKEEIVSGDSLFFRPKMLELLKEVENNMYYGVLVMDIDRLGRGGMKDQGIILDAFKESKTKIITPIKTYDLDNEMDEELTEFKTFFSRRELKTINRRMQGGRVRSVEEGNYIATNPPFGYDIDFIKKNRTLKINEDEAPAINLIFKLYIEGNGASFIANELNNLGYKTKLGNNFSPSSVLTIIKNPIYIGKIPWKRKDIKKSKTPGKVKDTRTRDKAEWIIANGKHPAIITNEIWESAQTILKGRYHIPYQLANSPVNPFAGLITCGICGKKMVMRKARGINRLMCIYKCGNKSTRFDNVESDCLEALKDYLSNYSAEIKNSIKKEDIDMYSIQITNLKKELTTLNNQRLKLFDLLERNLYDEDTFLERSKNINNRIENITHTLKSLEKKVKKNSYTSYEEDIKHFKNVLDAYNLTKDVSKKNNLLKSILYKIEYTKTKKGKDYEIKLFPKLRK

SEQ ID NO: 717 - DNA, 50 bp, Clostridium perfringens
  source 1..50: mol_type = genomic DNA
cacatacaacatactagatatatttcattacatacaatatgttgtatgta

SEQ ID NO: 718 - DNA, 40 bp, Clostridium perfringens; identical to SEQ ID NO: 178
  source 1..40: mol_type = genomic DNA

SEQ ID NO: 719 - DNA, 40 bp, Clostridium perfringens; identical to SEQ ID NO: 714
  source 1..40: mol_type = genomic DNA

SEQ ID NO: 720 - DNA, 50 bp, Clostridium perfringens; identical to SEQ ID NO: 715
  source 1..50: mol_type = genomic DNA

SEQ ID NO: 721 - protein, 502 aa, Clostridium perfringens
MTNKTCIYLRKSRADEELEKTLGEGETLYKHRNALLKFAKEKKLNIVEIKEEIVSGESLFFRPQMLELLKEVEANKYDGVLVMDMQRLGRGDMKDQGIILETFKNSNTKIITPQKTYDLNNDFDEEYTEFEAFMSRKELKMINRRMQGGRVRSIEEGNYIATNPPFGYDISFIKKSRTLKINEHESKAVKLIFKLYIKGNGASFIANELNNLGYKTKLGNNFSSSSVLTIIKNPVYAGKIAWKRKDIKKSRTPGKIKDTRLRDKSEWIISDGKHEAIIDMETWNLAEEILKGRYHIPYQLANAPVNPFAGLITCGVCGKKMVMRKARGINRLMCIYKCGNKSTRFDNVESDCLDALKEYLVNYSAEIKNSTKKEDVDVYSNQISMLKKELSLLNNQKLKLFDLLERNIYDETTFLERSKNINDRIFSINNSLCNLEKLLKKKSISSYEEDIKFFKSVLDAYNETEDVSKRNTLLKSILYKIEYTKTEKGKDYEIKLFPKLRK

SEQ ID NO: 722 - DNA, 50 bp, Clostridium perfringens
  source 1..50: mol_type = genomic DNA
tacatataacatactagatatatttcattacacacaatatgttgtatgca

SEQ ID NO: 723 - DNA, 40 bp, Clostridium perfringens
  source 1..40: mol_type = genomic DNA
aatatctatgagacaaatttcatttccttccttatccact

SEQ ID NO: 724 - DNA, 40 bp, Clostridium perfringens
  source 1..40: mol_type = genomic DNA
aatatctatgagacaaatttaatttccttccttatccact

SEQ ID NO: 725 - DNA, 50 bp, Clostridium perfringens
  source 1..50: mol_type = genomic DNA
tatatatatgtgtgtatatatatatacttacacacacgcatatatatgca

SEQ ID NO: 726 - protein, 578 aa, Bacteroides xylanisolvens; identical to SEQ ID NO: 96

SEQ ID NO: 727 - DNA, 50 bp, Bacteroides xylanisolvens
  source 1..50: mol_type = genomic DNA
atacataaatagggttaaatggtacaaattatatagtataatttatatat

SEQ ID NO: 728 - DNA, 40 bp, Bacteroides xylanisolvens
  source 1..40: mol_type = genomic DNA
gagcgcatgtgagaggattcaaccgacacagtattggaat

SEQ ID NO: 729 - DNA, 40 bp, Bacteroides xylanisolvens
  source 1..40: mol_type = genomic DNA
gagcgcatgtgagaggattataccgacacagtattggaat

SEQ ID NO: 730 - DNA, 50 bp, Bacteroides xylanisolvens; identical to SEQ ID NO: 100
  source 1..50: mol_type = genomic DNA

SEQ ID NO: 731 - protein, 511 aa, Clostridium perfringens
MSVKGGIYQMNNKICIYLRKSRADEELEKSLGDGETLSKHRNALLKFAKEKQLNIIEIKEEIVSGDSLFFRPKMLELLKEVENNMYDGVLVMDIDRLGRGGMKDQGIILDAFKESKTKIITPLKTYDLENEMDEELTEFKTFFSRRELKTINRRMQGGRVRSVEEGNYIATNPPYGYDISFIKKSRTLKKNEFESNAVKLIFKLYIEGNGASFIANELNTLGYKTKLANNFSPSSVLTIIKNPVYIGKIAWKRKDIKKSKTPGKVKDTKLRDKSEWIIADGKHEAIIDIKTWNLAQEILKGRYHIPYQLANAPVNPFAGLITCGICGKKMVMRNVRGINRLMCTYKCGNKSYKFKPIEEECLKSLKSYLTNYTATIKNETSEDDIDIYSNQISMLKKELTTLNNQKLKLFDLLERNIYDENTFLERSKNINSRIDSINNSLCTLEKILKKKSSSTNEDDIKYFKSVLDAYDLTKDIGKKNNLLKSILYKIEYTKNNKGNDYEIKLFPKLRK

SEQ ID NO: 732 - DNA, 50 bp, Clostridium perfringens
  source 1..50: mol_type = genomic DNA
tacatacaacatattagatatatttcattacacacttcatgttatatgta

SEQ ID NO: 733 - DNA, 40 bp, Clostridium perfringens; identical to SEQ ID NO: 678
  source 1..40: mol_type = genomic DNA

SEQ ID NO: 734 - DNA, 40 bp, Clostridium perfringens
  source 1..40: mol_type = genomic DNA
aatatctataagacaaattatatttccttccttatccact

SEQ ID NO: 735 - DNA, 50 bp, Clostridium perfringens
  source 1..50: mol_type = genomic DNA
tatatactatgtattatatctaatatattacatactgtgtattatatcta

SEQ ID NO: 736 - protein, 540 aa, Vibrio alfacsensis
MKKYHLYHRVSKLVQSEDGQGIQRQEQGCEIWITDYNKRLLDDGKQPFSKGLVYEDHGKSAYTAENFKRGQLGTLMKDIGKGTIAKGDLIVIELIDRFSRADVDFVRKKFQSILDSGVKIAITKWNIVFEEKMDGIAGVSARMLLEIGMYLAHQESSQKSARIKATRVLLEDSGKKSIAKPPFWLARNPDLKSYTVIEENADLVRKIFNLKLNYNYGPQRIIKHIGDVNIYRYKFDDEGNLIKTTQNSSLSESTVNALIRNPNVIGMLKGKNYYPRIIDDKTYYAVQRRTGENKGGANDVFKNVFLGVGKCGCDIKNISELGCISFNKCGYTMAYSSRKVKNPVKGMYLRCNNKSKKNKCTAKNIDYYKAQQKVYKVLKSIKFDESKSVDIAHLEERIHNLDKEISRVRELMAQYTDDFEWERQYKVKRDERKKIENEIINSKSMISSKISSLDLDFNVEKDRVLFNQILKDNRVIVYFKENGMDIKVGSLNNIGIRVGYEEGDIEVDDVLENLSKGSFKAIEIVDKKRKRFWFSSMFDD

SEQ ID NO: 737 - DNA, 50 bp, Vibrio alfacsensis
  source 1..50: mol_type = genomic DNA
atgttgttaaacatgcagttgactaatgacaaatatatgatagactacat

SEQ ID NO: 738 - DNA, 40 bp, Vibrio alfacsensis
  source 1..40: mol_type = genomic DNA
aggcaagccacagttggcaaaagaaacaaaaggaccgcgt

SEQ ID NO: 739 - DNA, 40 bp, Vibrio alfacsensis
  source 1..40: mol_type = genomic DNA
aggcaagccacagttggcattagaaacaaaaggaccgcgt

SEQ ID NO: 740 - DNA, 50 bp, Vibrio alfacsensis
  source 1..50: mol_type = genomic DNA
atgttgttaatgaggcagatgactttggaggaatatttttaaaaagacat

SEQ ID NO: 741 - protein, 622 aa, Bacteroides intestinalis
MKAAIYIRISTKKQNTDRQYEELKSYANSMGYTIVESYEDQISGFKDEEERHDLNRLKEDAKTEKFDIILFSELSRLSRKTTNILELISYFRDDCKKSLYFQKQNLNVTTDKSDLGSELQLNILATIGSYEIELSTERQMGGKIQKVKKQCWTHGSRPYGYNIDENKYLHINEEEATVIREIYAYYLNNMTSVQIAHLLNSRNIYAPATKNKKQNLWHPNSVCQILRAKRNIGIFEATYHEPDPKNKDKIRKRKNRKIVEEIKYTNKALAIVSDDIFYSANEKIDKNIKNKDTAKKNISLLKGLLTCGHCGSNFFYKKSGRDKDFSYVCYGSRYSFSIGKKKCINPITINAPKMDGLIIYMAKSRLLMRRLIENSDINIKSKEEQLQKNEEIILLQNLSIKKINEEFNQYIKKAIKYGIDDNITEKEHQRIKKQIRQIEGNIERIKKENYSLNKQIKILSKDKCITDEMYNGMQLNEMKELFEEYIEKIVLYNTTQWVIVNVCYFDGSNEFSFLRKSARANELLHYNTIIQSVISEKQYIMLLRDYYDTLEIGNRYYYYPYYSNINNDVIYDKEREVFIKFGTKKGKETTEYTISEFIKFIYPKTMKEVTAYEYYYPNQKNE

SEQ ID NO: 742 - DNA, 50 bp, Bacteroides intestinalis
  source 1..50: mol_type = genomic DNA
aaaggctacttgatattgataatttgtattatctttttcaaataaccttt

SEQ ID NO: 743 - DNA, 40 bp, Bacteroides intestinalis
  source 1..40: mol_type = genomic DNA
aaacgcatccatatctatatgtatgatttttcgttcagtg

SEQ ID NO: 744 - DNA, 40 bp, Bacteroides intestinalis
  source 1..40: mol_type = genomic DNA
aaacgcatccatatctatatctatgatttttcgttcagtg

SEQ ID NO: 745 - DNA, 50 bp, Bacteroides intestinalis
  source 1..50: mol_type = genomic DNA
aaatgatataaattattaatgttttctattatcttttcataataagcttt

SEQ ID NO: 746 - protein, 622 aa, Bacteroides uniformis
MKAAIYIRISTKKQNTDRQYEELKSYANSMGYTIVESYEDQISGFKDEEERHDLNRLKEDAKTEKFDIILFSELSRLSRKTTNILELISYFRDDCKKSLYFQKQNLNVTTDKSDLGSELQLNILATIGSYEIELSTERQMGGKIQKVKKQCWTHGSRPYGYNIDENKYLHINEEEATVIREIYAYYLNNMTSVQIAHLLNSRNIYAPATKNKKQNLWHPNSVCQILRAKRNIGIFEATYHEPDPKNKDKIRKRKNRKIVEEIKYTNKALAIVSDDIFYSANEKIDKNIKNKDTAKKNISLLKGLLTCGHCGSNFFYKKSGRDKDYSYVCYGSRYSFSIGKKKCINPITINAPKMDGLIIYMAKSRLLMRRLIENSDINIKSKEEQLQKNEEIILLQNLSIKKINEEFNQYIKKAIKYGIDDNITEKEHQRIKKQIRQIEGNIERIKKENYSLNKQIKILSKDKCITDEMYNGMQLNEMKELFEEYIEKIVLYNTTQWAIVNVCYFDGSNEFSFLRKSARANELLHYNTIIQSVISEKQYIMLLRDYYDTLEIGNRYYYYPYYSNINNDVIYDKEREVFIKFGTKKGKETTEYTISEFIKFIYPKTMKEVTAYEYYYPNQKNE

SEQ ID NO: 747 - DNA, 50 bp, Bacteroides uniformis; identical to SEQ ID NO: 742
  source 1..50: mol_type = genomic DNA

SEQ ID NO: 748 - DNA, 40 bp, Bacteroides uniformis
  source 1..40: mol_type = genomic DNA
gaatgcgtccatatcgatgtgtataatttttcgtccggtc

SEQ ID NO: 749 - DNA, 40 bp, Bacteroides uniformis
  source 1..40: mol_type = genomic DNA
gaatgcgtccatatcgatgtctataatttttcgtccggtc

SEQ ID NO: 750 - DNA, 50 bp, Bacteroides uniformis; identical to SEQ ID NO: 745
  source 1..50: mol_type = genomic DNA

SEQ ID NO: 751 - protein, 504 aa, Clostridioides difficile
MNVAIYLRKSRADEEAEKQGEFETLSRHKSTLLKIAKDQNLNVIEIKEELVSGESIIHRPKMIELLKEVEENKYDSVLVMDLDRLGRGDMKDQGIILETFKESKTKIITPRKTYDLTDEFDEEYSEFEAFMARKELKLISRRMQRGRIKSVEEGNFIGTSAPFGYDAVTTGRKERILVPNKDADVVRIIFDLYINEDMGCSKISKHLNNLGIKTSTGANWYNSAITNIIKNKVYCGYIQWQKKDYKKSKNPNKIKTVKLRPKDEWIEAKGKHEPIVSESVWKKAQNILNKNGHVSYGNQIKNPLAGIVICKNCGRPLVYRPYTDHDYIICYHPGCNKSSRFEFVESAILKSLEDAVKKYQLRMSDIDLKENNADNNIEFQKRVLKGLETELKELGKQKNKLYDLLERGIYDEDTFIKRSNNIDSRTEEIIISIDTLKNKLNTVKKDTAKIINDIKTVLSLYHDSDSLGKNKLLKSVIDRAIYYKSKEQKLDSFELTVHLKLYES

SEQ ID NO: 752 - DNA, 50 bp, Clostridioides difficile
  source 1..50: mol_type = genomic DNA
aacatataaagcgtagtgtgtaatgaaataaatactactttttatctata

SEQ ID NO: 753 - DNA, 40 bp, Clostridioides difficile
  source 1..40: mol_type = genomic DNA
aacagataaagaaggtaatgaaataagtcttttagatata

SEQ ID NO: 754 - DNA, 40 bp, Clostridioides difficile
  source 1..40: mol_type = genomic DNA
aacagataaagaaggtaatataataagtcttttagatata

SEQ ID NO: 755 - DNA, 50 bp, Clostridioides difficile
  source 1..50: mol_type = genomic DNA
attatataatatattgtatgtaatataatatataatatatattatatata

SEQ ID NO: 756 - protein, 505 aa, Clostridioides difficile
MSVAIYLRKSRADEEAEKQGEFETLSRHKSTLLKLAKDQNLNVLEIKEELVSGESIIHRPKMIELLKEVEENKYDSVLVMDLDRLGRGDMKDQGIILETFKESKTKIITPRKTYDLTDEFDEEYSEFEAFMARKELKLISRRMQRGRIKSVEEGNFIGTSAPFGYDAVTTGRKERILVPNKDADVVRTIFDLYINEDMGCSKISKYLNNLGIKTATGASWYNSAITNIIKNKVYCGYIQWRKKDYKKSKNPNKMKTVKLRPKDEWIEAKGKHKPLISELVWKKAQNILNKNGHVSYGNQIKNPLAGIVICKNCGRPLVYRPYTDHDYIICYHPGCNKSSRFEFVESAILKSLEDAVKKYQLRISDIDLKKSNTDNNIEFQKRVLKGLETELKELGKQKNKLYDLLERGIYDEDTFIDRSNNIDSRTEEIKISIETLKNKLDIVKKDTSKMIEDIKTVLSLYHDSDSLGKNKLLKSVIDRAVYYKSKEQKLDSFELTVHLKLYEKQ

SEQ ID NO: 757 - DNA, 50 bp, Clostridioides difficile
  source 1..50: mol_type = genomic DNA
aacatataaagcgtagtgtgtaatgaaataaatactactctttatatgta

SEQ ID NO: 758 - DNA, 40 bp, Clostridioides difficile; identical to SEQ ID NO: 753
  source 1..40: mol_type = genomic DNA

SEQ ID NO: 759 - DNA, 40 bp, Clostridioides difficile; identical to SEQ ID NO: 754
  source 1..40: mol_type = genomic DNA

SEQ ID NO: 760 - DNA, 50 bp, Clostridioides difficile; identical to SEQ ID NO: 755
  source 1..50: mol_type = genomic DNA

SEQ ID NO: 761 - protein, 502 aa, Clostridium perfringens
MNKKICIYLRKSRADEELEKTLGEGETLSKHRNALLKFAKENKLNVTDIKEEIVSGDSLFFRPKMLELLKEVENNMYYGVLVMDIDRLGRGGMKDQGIILDAFKESKTKIITPLKTYDLDNEMDEEITEFKTFFSRRELKTINRRMQGGRIRSIEEGNYIATNPPYGYDISFIKKNRTLKINEDEAPAINLIFKLYIEGNGASAIANELNNLGYKTKLGNNFSPSSVLTIIKNPIYIGKIPWKRKDIKKSKTPGKVKDTRTRDKSEWIIADGKHPAIVTNEIWESAQKILKGRYHIPYQLSNAPVNPFAGIISCGICGKKMVMRKARGINRLMCIYKCGNKSTRFDNVESDCLEALKDYLSNYSAEIKNSIKKEDIDMYSIQITNLKKELTTLNNQRLKLFDLLERNLYDEDTFLERSKNINDRIENITHTLKSLEKKVKKNSYNSYEEDIKHFKNVLDAYNLTKDVSKKNNLLKSILYKIEYTKTEKGKDYEIKLFPKLRK

SEQ ID NO: 762 - DNA, 50 bp, Clostridium perfringens
  source 1..50: mol_type = genomic DNA
tacatacaacatactagatatatttcattacattcaatatgttatatgta

SEQ ID NO: 763 - DNA, 40 bp, Clostridium perfringens; identical to SEQ ID NO: 188
  source 1..40: mol_type = genomic DNA

SEQ ID NO: 764 - DNA, 40 bp, Clostridium perfringens
  source 1..40: mol_type = genomic DNA
aatatctatgagacaaatttaattaccctccttatctact

SEQ ID NO: 765 - DNA, 50 bp, Clostridium perfringens
  source 1..50: mol_type = genomic DNA
ttcataaagaaatatagatatatttaattacatatatgtatttatacata

SEQ ID NO: 766 - protein, 515 aa, Vibrio parahaemolyticus
MKAYSYKRFSSKQQRKGDSLRRQNKLINDYCHQHNLTLSEHNFEDLGVSAFRSTNSNEDSGLGQFLLALQENKISTPCYLLVESLDRLSRDNVKTAMRQLWSITDYNVTVVTLSDSKQYTRDMDFTDFLMAGLIMQRANEESQTKSCRLLATWENRRTNPNAPKTKNCPFWLTLAVDKQGYSVNDSVQLLHRVYDLALNGLGSPTIAKTLNREGIPSPTGKTWTDATITKTLNSRSVLGEYQPHQRIYQDGKRKDVPIGEPLKGFYPTIFSEAYFNQVQAAIKSRAKSKNRGATKSHLNVVKGIATCSLCGGNIRLKKQSELYYLQCAEREKGLCKSKPINLRFLSDWLSEVWTRADYAPISASETPESEKLKQLESKLSNVENVISGLLRLLDGTNDYQILSSLESRMVEKRELMESIEKLEAELAPYNLNTKAMRKRYTLVKLAFMQSSEQDIIIARNQLALLLNQLKGFKIGMVEGTAYFDVVTPSGELKRYQSVNRPYYKGRMPQKIWTSI

SEQ ID NO: 767 - DNA, 50 bp, Vibrio parahaemolyticus
  source 1..50: mol_type = genomic DNA
aaccatactttggcaaattatttcatatagtggtttgcttaagtatggtt

SEQ ID NO: 768 - DNA, 40 bp, Vibrio parahaemolyticus
  source 1..40: mol_type = genomic DNA
aaccatctgttatgcctttatgcaagccgttggcatggtg

SEQ ID NO: 769 - DNA, 40 bp, Vibrio parahaemolyticus
  source 1..40: mol_type = genomic DNA
aaccatctgttatgcctttctgcaagccgttggcatggtg

SEQ ID NO: 770 - DNA, 50 bp, Vibrio parahaemolyticus
  source 1..50: mol_type = genomic DNA
cacgatactggaataaagtatttcctttagtggtttcttggagtgtcttt

SEQ ID NO: 771 - protein, 491 aa, Bacillus pseudomycoides
MGLAAIYLRLSRNEEQLNIDEILSNHRNALTKLAKQQKLTYDIYQEISSGVNTDRPQLNLLLSRLDDYDALLVMDIDRISRDNAHAEEIKKMLILHDIKILTPQGAIDLSQESNEMLFSFQAMMANFEYKQIRKRLGRGRLAAAEQGKWTMSNRVPLGYKKNEEKRLEIVEDEAKIIRFIFQKTLERVSANEIAKQLDTLGWRSRNGKVLTSAHISQVRRNVVYYGVVQACRRVNGRVVDEVFVENAHEPIISKQTFLEVQEILAENTTGNFFHKLKAKRRLQNLIYCNCCGRKRYLQSDGAGKEFIKSCSYKIDNNVCQDRGHKYEPVEQYVLQRVKERKQKVEKALEKLKSLDIVDEEKELIVRREALEKQLNKFEKRQRNLKTMRMDGEISKAEFYEMRDENEGKIKSIRQQIDLIDIQLEDLSNTDEKQCEYEYIIGMLERLEELEPEACNAFLKRFIKKIWFSSNTETNHDTTKPRKKATIKIEWL

SEQ ID NO: 772 - DNA, 50 bp, Bacillus pseudomycoides
  source 1..50: mol_type = genomic DNA
ccgaataaaaatagaaaaacaacaaatgttaattttctatttttatttgg

SEQ ID NO: 773 - DNA, 40 bp, Bacillus pseudomycoides
  source 1..40: mol_type = genomic DNA
aactgttggcaaaattacaaatatgaaaatattagatggc

SEQ ID NO: 774 - DNA, 40 bp, Bacillus pseudomycoides
  source 1..40: mol_type = genomic DNA
aactgttggcaaaattacatgtatgaaaatattagatggc

SEQ ID NO: 775 - DNA, 50 bp, Bacillus pseudomycoides
  source 1..50: mol_type = genomic DNA
ccgaatgtctcaagaaatacagcatgtgtttcttttaacagtttatttgg

SEQ ID NO: 776 - protein, 491 aa, Bacillus pseudomycoides
MGLAAIYLRLSRNEEQLDIDEILSSHRNALTKLAKQQKLTYDMYQEISSGVNTDRPQLNLLLSRLDDYDALLVMDIDRISRDNAHAEEIKKMLILHDIKILTPQGAIDLSQESNEMLFSFQAMMANFEYKQIRKRLGRGRLAAAEQGKWTMSNRVPLGYKKNEEKRLEIVEDEAKIIRFIFQKTLERVSANEIAKQLDTLGWRSRNGKVLTSAHISQVRRNVVYYGVVQACRRVNGRVVDEVFVENAHEPIISKQTFLEVQEILAENTTGNFFNKAKSIRKLQGLIYCNCCKRKRYIQCDGHGVDFVKSCIYKVDNNNCRDRGHKYAPIEQFVLQKVKEKKPAFEQELRMLKSLDTVEVENKLLIQKESLEKQLDKFNKRQRNLKEMRMDGEITKVEFYEMRDRNEEQIKQVRQQMELIDIRLENLSNTDEEQKRLEDAIKKLDMLEELNDEVCNAFLKKFIKKIWFSSNTEANHDTTRERVEATVEIEWL

SEQ ID NO: 777 - DNA, 50 bp, Bacillus pseudomycoides; identical to SEQ ID NO: 772
  source 1..50: mol_type = genomic DNA

SEQ ID NO: 778 - DNA, 40 bp, Bacillus pseudomycoides
  source 1..40: mol_type = genomic DNA
aactgttggcaaaattacaaatatgaaaatattagatggt

SEQ ID NO: 779 - DNA, 40 bp, Bacillus pseudomycoides
  source 1..40: mol_type = genomic DNA
aactgttggcaaaattacatgtatgaaaatattagatggt

SEQ ID NO: 780 - DNA, 50 bp, Bacillus pseudomycoides; identical to SEQ ID NO: 775
  source 1..50: mol_type = genomic DNA

SEQ ID NO: 781 - protein, 484 aa, Leuconostoc carnosum
MKKKVALYVRVSTLEQAESGYSIGEQIDKLKKFADIKDWNVYEVYEDGGWSGSNTNRPALERLINDAKRQLFDTILVYKLDRLSRSQKDTLFLIEDIFKVNNIDFVSLNENFDTSTAFGTAMIGILSVFAQLEREQIRERMKLGLVGRAKSGKAMGWHMTPFGYTYDKQSGNFIINNLTASIVREIFNDYLSGISITKLRDKLNESGHIGKDRNWSYRTLRQTLDNPTYTGVVKYDHKIYAGNHEPIIESDVFQAVQIELSKRQQLAYQKNNNPRPFQSKYMLSGIVKCGYCGSPMVSTLGNKRKDGTRLKKYQCVNRHVRKSSGVTIYNNNIKCDSGFYMMADIENYVINTVSDLQASPESVQKLFNKNNNNIEKVNIDEIKKEISKLSSRLKKLSDLYMNDLLSLDELKEKTSELKSTRVLLENKILEDKNNSNIKIKERIINNMNKKSIQKMSYQEQTNLVKSLINKVSVTREMIEISWNF

SEQ ID NO: 782 - DNA, 50 bp, Leuconostoc carnosum
  source 1..50: mol_type = genomic DNA
caaacatatttactatatctgatttcaattaagtatattaaatatgttta

SEQ ID NO: 783 - DNA, 40 bp, Leuconostoc carnosum
  source 1..40: mol_type = genomic DNA
aaatagcacaatagctgcttcaattaatgtaaaagctgat

SEQ ID NO: 784 - DNA, 40 bp, Leuconostoc carnosum
  source 1..40: mol_type = genomic DNA
aaatagcacaatagctgctccaattaatgtaaaagctgat

SEQ ID NO: 785 - DNA, 50 bp, Leuconostoc carnosum
  source 1..50: mol_type = genomic DNA
caaaaatattatgcatagcttaatccaattacgtacaaaggataagttta

SEQ ID NO: 786 - protein, 484 aa, Leuconostoc carnosum
MKKKVALYVRVSTLEQAESGYSIGEQIDKLKKFADIKDWNVYEVYEDGGWSGSNTNRPALERLINDAKRHLFDTILVYKLDRLSRSQKDTLFLIEDIFKANNIDFVSLNENFDTSTAFGTAMIGILSVFAQLEREQIRERMKLGLVGRAKSGKAMGWHMTPFGYTYDKQSGNFIINNLTASIVREIFNDYLSGISITKLRDKLNESGHIGKDRNWSYRTLRQTLDNPTYIGVVKYDHKIYAGNHEPIIENDVFQAVQIELSKRQQLAYQKNNNPRPFQSKYMLSGIIKCGYCGSPMVSTLGNKRKDGTRLKKYQCVNRHVRKSSGVTIYNNNIKCNSGFYMMADIENYVINTVSDLQASPESVQKLFNKNNNNIEKVNIDEIKKEISKLSSRLKKLSDLYMNDLLSLDELKEKTSELKSTRVLLENKISEDENNSDLEIKERIINNMNKKSIQKMSYQEQSNLVKSLINKVSVTREMIEISWNF

SEQ ID NO: 787 - DNA, 50 bp, Leuconostoc carnosum; identical to SEQ ID NO: 782
  source 1..50: mol_type = genomic DNA

SEQ ID NO: 788 - DNA, 40 bp, Leuconostoc carnosum
  source 1..40: mol_type = genomic DNA
aaatagtacaatagctgcttcaattaatgtaaaagctgat

SEQ ID NO: 789 - DNA, 40 bp, Leuconostoc carnosum
  source 1..40: mol_type = genomic DNA
aaatagtacaatagctgctccaattaatgtaaaagctgat

SEQ ID NO: 790 - DNA, 50 bp, Leuconostoc carnosum; identical to SEQ ID NO: 785
  source 1..50: mol_type = genomic DNA

SEQ ID NO: 791 - protein, 484 aa, Leuconostoc carnosum
MKKKVALYVRVSTLEQAESGYSIGEQIDKLKKFADIKDWNVYEVYEDGGWSGSNTNRPALERLINDAKRHLFDTILVYKLDRLSRSQKDTLFLIEDIFKVNNIDFVSLNENFDTSTAFGTAMIGILSVFAQLEREQIRERMKLGLVGRAKSGKAMGWHMTPFGYTYDKQSGNFIINNLTASIVREIFNDYLSGISITKLRDKLNESGHIGKDRNWSYRTLRQTLDNPTYTGVVKYDHKIYAGNHEPIIENDVFQAVQIELSKRQQLAYQKNNNPRPFQSKYMLSGIVKCGYCGSPMVSTLGNKRKDGTRLKKYQCVNRHVRKSSGVTIYNNNIKCDSGFYMMTDIENYVINTVSDLQASPELVQKLFNKNNNNIEKVNIDEIKKEISKLSSRLKKLSDLYMNDLLSLDELKDKTSELKSTRLLLENKISEDKNNSDREIKERIINNLNKKSIQKMSYLEQSNLVKSLINKVSVTRETIEISWNF

SEQ ID NO: 792 - DNA, 50 bp, Leuconostoc carnosum
  source 1..50: mol_type = genomic DNA
caaacatatttactatatctaatttcaattaagtatattaaatatgttta

SEQ ID NO: 793 - DNA, 40 bp, Leuconostoc carnosum; identical to SEQ ID NO: 788
  source 1..40: mol_type = genomic DNA

SEQ ID NO: 794 - DNA, 40 bp, Leuconostoc carnosum; identical to SEQ ID NO: 789
  source 1..40: mol_type = genomic DNA

SEQ ID NO: 795 - DNA, 50 bp, Leuconostoc carnosum; identical to SEQ ID NO: 785
  source 1..50: mol_type = genomic DNA

SEQ ID NO: 796 - protein, 472 aa, Bacillus pumilus
MEETKNKSVGIYVRVSTDEQAKEGYSISAQKEKLKAYCVSQGWASFKFYVDEGKSAKDTHRPSLELLLRHIEQGIIDTVLVYRLDRLTRSVRDLYTLLDYFDKYNAVFRSATEVYDTGSATGRLFITLVAAMAQWERENLGERVKMGQNEKARQGQFSAPAPFGFIKKGKSLVKNHEQGEILLEIIDKVKKGYSTRQIANYLDDSGILPRRGYRWHPGTILTLLKNPILYGSFRWGDEIIEDTHEGYISKDEFDHLQEILKERSIVKKRDSYSVFIFQSKIVCASCGNRLASERSGYLRKKDKKYVENINYRCQTCAQNRKPSIMGSEKKFQKALVKYMQNVTPKLEPKIPEEKKHDYEKVHQKILNLEKQRKKYQKAWSLDLMTDEEFEQLMHETKEALKSAQKELAETHSSDYPKTQIDIERAKEIVTMFNENWSVLTNQEKRDIVQELIKHINFTKKDGEITITHIEFY

SEQ ID NO: 797 - DNA, 50 bp, Bacillus pumilus
  source 1..50: mol_type = genomic DNA
attagtgtttatgttaagtagaagcatgtaaacataacataaacacaaaa

SEQ ID NO: 798 - DNA, 40 bp, Bacillus pumilus
  source 1..40: mol_type = genomic DNA
ttttgtattaagataaagacaaacgaaattctcctgtgtc

SEQ ID NO: 799 - DNA, 40 bp, Bacillus pumilus
  source 1..40: mol_type = genomic DNA
ttttgtattaagataaagattaacgaaattctcctgtgtc

SEQ ID NO: 800 - DNA, 50 bp, Bacillus pumilus
  source 1..50: mol_type = genomic DNA
atgagtgtttcttttaagtagaattttgaaaataaacaggtaactctaaa

SEQ ID NO: 801 - protein, 472 aa, Bacillus altitudinis
MEETKNKSVGIYVRVSTDEQAKEGYSISAQKEKLKAYCVSQGWASFKFYVDEGKSAKDTHRPSLELLLRHIEQGIIDTVLVYRLDRLTRSVRDLYTLLDYFDKYNAVFRSATEVYDTGSATGRLFITLVAAMAQWERENLGERVKMGQNEKARQGQFSAPAPFGFIKKGKSLVKNHEQGEILLEIIDKVKKGYSTRQIANYLDDSGILPRRGYRWHPRTILTLLKNPVLYGSFRWGDEIIEDTHEGYISKDEFDHLQEILKERSIVKKRDSYSVFIFQSKIVCASCGNRLASERSGYLRKKDKKYVENINYRCQTCAQNRKPSIMGSEKKFQKALVKYMQNVTPKLEPKIPEEKKHDYEKVHQKILNLEKQRKKYQKAWSLDLMTDEEFEQLMHETKEALKSAQKELAETHSTDYPKTQIDIERAKEIVTMFNENWSVLTNQEKRDIVQELIKHINFTKKDGEITITHIEFY

SEQ ID NO: 802 - DNA, 50 bp, Bacillus altitudinis; identical to SEQ ID NO: 797
  source 1..50: mol_type = genomic DNA

SEQ ID NO: 803 - DNA, 40 bp, Bacillus altitudinis
  source 1..40: mol_type = genomic DNA
tttggtattgagataaagacaaacgaaattctcctgcgtc

SEQ ID NO: 804 - DNA, 40 bp, Bacillus altitudinis
  source 1..40: mol_type = genomic DNA
tttggtattgagataaagattaacgaaattctcctgcgtc

SEQ ID NO: 805 - DNA, 50 bp, Bacillus altitudinis; identical to SEQ ID NO: 800
  source 1..50: mol_type = genomic DNA

SEQ ID NO: 806 - protein, 530 aa, Streptomyces olivaceus
MSRRGVSRYARSMPIAPEYLHLVHPGVEFTALLYGRASRDPKKKGRSVEDQLGTGTELCDAYGWPIAETFKDIDRSASRHARRKRDDFEALIDAIDAGRGRIVVAFEASRYYRDIEAYIRLRNACMANEVLLCYNGQVYDLSKREDRKATAQDAIAAEDEAEGIRDRLLRTARSTAAKGTPHGRVLYGYARRYDPDTGDLIEQYKHPTRAPLVHEAFQRIAAGETEYSIIQDFRSRGERLPGVEWRYYHLRNMLRNPGYAGHRVFQGEILREGTWPPIVPQELFDQVQQIVKDPARLTTKDWSVKYLLSGGGQCGECQHFPHLRVVKTRGYRAYQCSDNYHTMMRVSMLDAYVEQALLEWLKLRAADAFRTDDQQEQAAKARTRLGALRQQLAEAQEKAATFDDEGRPRLSVDSLTALEARLLPMIEAAEAESRVVKVTPLLEGLIGAEDVEERWEALTIEQRRSVVRQCVNVFLHRARARGVRSIEPGRVTLTFVGEPGFKARPRRARGNVPAPRPERSLGQADGPPAG

SEQ ID NO: 807 - DNA, 50 bp, Streptomyces olivaceus
  source 1..50: mol_type = genomic DNA
acaccccctcacagtaacttctcaccggacaatgtcgcgcaggggggttt

SEQ ID NO: 808 - DNA, 40 bp, Streptomyces olivaceus
  source 1..40: mol_type = genomic DNA
cacgatcgtgaagttggctccgctgacggcgagcgtgtgc

SEQ ID NO: 809 - DNA, 40 bp, Streptomyces olivaceus
  source 1..40: mol_type = genomic DNA
cacgatcgtgaagttggcttggctgacggcgagcgtgtgc

SEQ ID NO: 810 - DNA, 50 bp, Streptomyces olivaceus
  source 1..50: mol_type = genomic DNA
acaccccttggaaataacttctcatgtgtcgatctcagccagggaggctt

SEQ ID NO: 811 - protein, 478 aa, Streptococcus pyogenes
MNKVAIYVRVSTTNQAEEGYSIEEQIDKLKAYCMIKDWSVYDVYVDAGFSGSNIKRPAIQKLIKDTKRKVFDTVLVYKLDRLSRSQKDTLYLIEDVFLENKIDFVSLLENFDTSTAFGKAMVGILSVFAQLDREQIKERMQLGKLGRAKSGKPMMWAKVAYGYTYHIGTGKMTVNQSEAIIVKEVFSSYLNGRSITKLRDDLNEKYPKTPAWSYRTIRQMLDNPVYCGYNKYKGQVYPGNHAPIISKEIYNQVQDELKIRQQKAYEHNNNYRPFQSKYMLSGIAQCGYCKAPLKITLGTIRKDGTRFKRYQCVQRTPRKTKGATVYNNNEKCNSGFYEKDDIEAYVLESISKLQTDSNCIDELFNDEPEKLDRDALNKEIETLSNKISRLNDLYINNLITLDDLKTKTDTLQSKIDILKEKLEKDPALERQKNKQKMLKKLDTKDIFKMDYEEQKMLVRALINKVQVTADSIKILWKI

SEQ ID NO: 812 - DNA, 50 bp, Streptococcus pyogenes
  source 1..50: mol_type = genomic DNA
ttaacaaatttagtatcattcatttcaatcaaatatattaaatttgttta

SEQ ID NO: 813 - DNA, 40 bp, Streptococcus pyogenes
  source 1..40: mol_type = genomic DNA
ccataacactattcccatttcagtgagggaacagctaaac

SEQ ID NO: 814 - DNA, 40 bp, Streptococcus pyogenes
  source 1..40: mol_type = genomic DNA
ccataacactattcccattaaagtgagggaacagctaaac

SEQ ID NO: 815 - DNA, 50 bp, Streptococcus pyogenes
  source 1..50: mol_type = genomic DNA
ttaaaaaattaacaataattccttaatatcaaatatccagtctatgttca

SEQ ID NO: 816 - protein, 511 aa, Streptococcus pyogenes
MRKDKTTRKTGIKKPFFLYPFYHFSTIIERGTNMNKVAIYVRVSTTNQAEEGYSIEEQIDKLKAYCMIKDWSVYDVYVDAGFSGSNIKRPAIQKLIKDTKRKVFDTVLVYKLDRLSRSQKDTLYLIEDVFLENKIDFVSLLENFDTSTAFGKAMVGILSVFAQLDREQIKERMQLGKLGRAKSGKPMMWAKVAYGYTYHIGTGKMTVNQSEAIIVKEVFSSYLNGRSITKLRDDLNEKYPKTPAWSYRTIRQMLDNPVYCGYNKYKGQVYPGNHAPIISKEIYNQVQDELKIRQQKAYEHNNNYRPFQSKYMLSGIAQCGYCKAPLKITLGTIRKDGTRFKRYQCVQRTPRKTKGATVYNNNEKCNSGFYEKDDIEAYVLESISKLQTDSNCIDELFNDEPEKLDRDALNKEIETLSNKISRLNDLYINNLITLDDLKTKTDTLQSKIDILKEKLEKDPALERQKNKQKMLKKLDTKDIFKMDYEEQKMLVRALINKVQVTADSIKILWKI

SEQ ID NO: 817 - DNA, 50 bp, Streptococcus pyogenes; identical to SEQ ID NO: 812
  source 1..50: mol_type = genomic DNA

SEQ ID NO: 818 - DNA, 40 bp, Streptococcus pyogenes
  source 1..40: mol_type = genomic DNA
tgacaaacttagtaaagtttcaagcaaagtaaaagcttta

SEQ ID NO: 819 - DNA, 40 bp, Streptococcus pyogenes
  source 1..40: mol_type = genomic DNA
tgacaaacttagtaaagttaaaagcaaagtaaaagcttta

SEQ ID NO: 820 - DNA, 50 bp, Streptococcus pyogenes; identical to SEQ ID NO: 815
  source 1..50: mol_type = genomic DNA

SEQ ID NO: 821 - protein, 511 aa, Streptococcus equinus; identical to SEQ ID NO: 816

SEQ ID NO: 822 - DNA, 50 bp, Streptococcus equinus; identical to SEQ ID NO: 812
  source 1..50: mol_type = genomic DNA

SEQ ID NO: 823 - DNA, 40 bp, Streptococcus equinus
  source 1..40: mol_type = genomic DNA
taacaggacaatcaacatctccacaagtgtgaaagcttca

SEQ ID NO: 824 - DNA, 40 bp, Streptococcus equinus
  source 1..40: mol_type = genomic DNA
taacaggacaatcaacatcaacacaagtgtgaaagcttca

SEQ ID NO: 825 - DNA, 50 bp, Streptococcus equinus; identical to SEQ ID NO: 815
  source 1..50: mol_type = genomic DNA

SEQ ID NO: 826 - protein, 478 aa, Streptococcus lutetiensis
MNKVAIYVRVSTTNQAEEGYSIEEQIDKLKAYCMIKDWSVYDVYVDAGFSGSNIKRPAIQKLIKDTKRKVFDTVLVYKLDRLSRSQKDTLYLIEDVFLENKIDFVSLLENFDTSTAFGKAMVGILSVFAQLDREQIKERMQLGKLGRAKSGKPMMWAKVAYGYTYHIGTGKMTVNQSEAIIVKEVFSSYLNGRSITKLRDDLNEKYPKTPAWSYRTIRQMLDNPVYCGYNKYKGQVYPGNHAPIISKEIYNQVQDELKIRQQKAYEHNNNYRPFQSKYMLSGIAQCGYCKAPLKITLGTIRKDGTRFKRYQCVQRTPRKTKGATIYNNNEKCNSGFYEKDDIEAYVLESISKLQTDSNCIDDLFNDEPEKLDRDALNKEIEALSNKISRLNDLYINNLIALDDLKTKTDTLQSKIDILKERLEKDPALERQKNKQKMLKTLDTKDIFKMDYEEQKMLVRALINKVQVTADSIKILWKI

SEQ ID NO: 827 - DNA, 50 bp, Streptococcus lutetiensis; identical to SEQ ID NO: 812
  source 1..50: mol_type = genomic DNA

SEQ ID NO: 828 - DNA, 40 bp, Streptococcus lutetiensis
  source 1..40: mol_type = genomic DNA
tagcaaaacaatcaacatctccacaagtgtaaaagcttct

SEQ ID NO: 829 - DNA, 40 bp, Streptococcus lutetiensis
  source 1..40: mol_type = genomic DNA
tagcaaaacaatcaacatcaacacaagtgtaaaagcttct

SEQ ID NO: 830 - DNA, 50 bp, Streptococcus lutetiensis; identical to SEQ ID NO: 815
  source 1..50: mol_type = genomic DNA

SEQ ID NO: 831 - protein, 577 aa, Yersinia enterocolitica
MKKCYLYVRVSSEQQLSGDGLDRQESMLIRYFDDNASCYDFDPNYELIVDRGVSAFKGHHQRESAGLGGFFKKVRNGEVEKGSVLCVESLDRFSRENPFKCVEYISILDSYQIELHDVDKKLKIGRKYPNSLSFAVMIAERSYEESRLKSVRIQKGWDKRRKMAKEEGQYMIKNCPKWIDVVNDRYVLNENHIVIREIFDLYLSGIGSYTIAVMLNRDNKTIDGMKWNSTKICHVLRNRRCKGEYTSNRVIRNFDDDTVTSTFEILNIYPRIVSDDEFHEVSTRLEKFNYTGRIRHDLKRTVFNSLLKCELCGSALGVSSTSGYTYIKCDNARANSGCTGVLMAYMPFEKAILSHIKDIDISRVINIDSTISNIDILKTEIVELESYIQSFTAGIENLKQQGRLPTFDMLDGKAQAEERLQDVKKKLAAERDTANVSNLEFSSDIHKLENIIERSRLEVELRKVIKRIAVKANKTYITADISYYNDDNIKHVLLINKKKTTIEVMGEIVQQDGWRTYSFSEGGSLVFRVKSNGDIWTLSAAKNKSISEIQKYMTMMVGREPIDFDFYINEDFIEWVE

SEQ ID NO: 832 - DNA, 50 bp, Yersinia enterocolitica
  source 1..50: mol_type = genomic DNA
actttgtttaatgtttaatgtattttgataccatatactttatacaaaat

SEQ ID NO: 833 - DNA, 40 bp, Yersinia enterocolitica
  source 1..40: mol_type = genomic DNA
ttttatggtgtcacaatttttaatgccataaaggcacaat

SEQ ID NO: 834 - DNA, 40 bp, Yersinia enterocolitica
  source 1..40: mol_type = genomic DNA
ttttatggtgtcacaatttgtaatgccataaaggcacaat

SEQ ID NO: 835 - DNA, 50 bp, Yersinia enterocolitica
  source 1..50: mol_type = genomic DNA
acttttttcatttattcatttattgtggtaaaatatatataatacaaaat

SEQ ID NO: 836 - protein, 452 aa, Yersinia enterocolitica
MKKCYLYVRVSSEQQLSGDGLDRQESMLIRYFDDNASCYDFDPNYELIVDRGVSAFKGHHQRESAGLGGFFKKVRNGEVEKGSVLCVESLDRFSRENPFKCVEYISILDSYQIELHDVDKKLKIGRKYPNSLSFAVMIAERSYEESRLKSVRIQKGWDKRRKMAKEEGQYMIKNCPKWIDVVNDRYVLNENHIVIREIFDLYLSGIGSYTIAVMLNRDNKTIDGMKWNSTKICHVLRNRRCKGEYTSNRVIRNFDDDTVTSTFEILNIYPRIVSDDEFHEVSTRLEKFNYTGRIRHDLKRTVFNSLLKCELCGSALGVSSTSGYTYIKCDNARANSGCTGVLMAYMPFEKAILSHIKDIDISRVINIDSTISNIDILKTEIVELESYIQSFTAGIENLKQQGRLPTFDMLDGKAQAEERLQDVKKKLAAERDTANVSNLEFSSDIHKLENII

SEQ ID NO: 837 - DNA, 50 bp, Yersinia enterocolitica; identical to SEQ ID NO: 832
  source 1..50: mol_type = genomic DNA

SEQ ID NO: 838 - DNA, 40 bp, Yersinia enterocolitica; identical to SEQ ID NO: 833
  source 1..40: mol_type = genomic DNA

SEQ ID NO: 839 - DNA, 40 bp, Yersinia enterocolitica; identical to SEQ ID NO: 834
  source 1..40: mol_type = genomic DNA

SEQ ID NO: 840 - DNA, 50 bp, Yersinia enterocolitica; identical to SEQ ID NO: 835
  source 1..50: mol_type = genomic DNA

SEQ ID NO: 841 - protein, 577 aa, Yersinia mollaretii; identical to SEQ ID NO: 831

SEQ ID NO: 842 - DNA, 50 bp, Yersinia mollaretii; identical to SEQ ID NO: 832
  source 1..50: mol_type = genomic DNA

SEQ ID NO: 843 - DNA, 40 bp, Yersinia mollaretii
  source 1..40: mol_type = genomic DNA
ttttatggtgtcacaatttttaatgccataaaggcgcaat

SEQ ID NO: 844 - DNA, 40 bp, Yersinia mollaretii
  source 1..40: mol_type = genomic DNA
ttttatggtgtcacaatttgtaatgccataaaggcgcaat

SEQ ID NO: 845 - DNA, 50 bp, Yersinia mollaretii; identical to SEQ ID NO: 835
  source 1..50: mol_type = genomic DNA

SEQ ID NO: 846 - protein, 551 aa, Enterobacter roggenkampii
MNIKTAFCYCRVSSGRQKTEMGGFGMSRQQALLTSYVDEYEDKNNLGYKLSVDQMVFLNAESVSGFSGKNIEPGSVLHCFITDYKNGNIKNSVLIIENVDRFSRINPNEAAELFLGLINSGCDIHEVDTETVHHRTSDLNQISAGLSRSHKESLRKQKLSLKNWDKRFEKTVKDKVPLTERCPGWLKVTNGTYHVIPERIAPIQLIFKLYNDGFGQAYIRDKLNNDGYHYNDKTWSSWSIHRVLKDVRVTGKHKTQSLLRNNYDGILMYPVIISDIDFKLAEQRLNKPGRDKKINRRANTVFSGLLICGVCKTAHILINNEQGKRFGRCSYANAGNNRCLASGFKYNVVEHALLNHLRHLDFGKLNIKNHNAEMEKLNDDLIYHKNYLLKVQKLVDADDLPSERDYLLLKKLEIKIREIEGKIHDIKNIENVNVSYSDIKSKINDDLLDVNNIKGRQEFNVNIRKIIREIQIFKSQPALVFVSVSFYASQDLQWLSISLKDGTVFSNTYIENESVTITLGDKLLTYDTKQKQYFIDGKPINNQEALSMIQK

SEQ ID NO: 847 - DNA, 50 bp, Enterobacter roggenkampii
  source 1..50: mol_type = genomic DNA
tactatgaattgactttaattatcaccattagctatgctattctatagtc

SEQ ID NO: 848 - DNA, 40 bp, Enterobacter roggenkampii
  source 1..40: mol_type = genomic DNA
cgcaataatgccgatgaccaccatcagctcaataagagtg

SEQ ID NO: 849 - DNA, 40 bp, Enterobacter roggenkampii
  source 1..40: mol_type = genomic DNA
cgcaataatgccgatgacctccatcagctcaataagagtg

SEQ ID NO: 850 - DNA, 50 bp, Enterobacter roggenkampii
  source 1..50: mol_type = genomic DNA
tactgtgatctaaatttaattgtctccattagccacagggagctattgtc

SEQ ID NO: 851 - protein, 550 aa, Pseudomonas asiatica
MLASTHRHRRKAFAAMKAPATRRPKAISYVRFSSMRQTNGTSVERQQMMIDQWRLAHPEYDYDSELTYEDLASSGFKGEHIEEGGGFAMLLDAVRRGVIQAGDVVLVEAIDRTGRMEAMDMFSILSPIISAGVSIITLDDGVVYNRASMNSGALFILAAKIQQAYQYSAALSRRIEASYEFRKKAAKNGVMPKRWTPIWLTTSGEVKADIAAQVKIAFELYVSGLGKNAIAKRIRESGVPELAKTSGPTVDGWLQNPTAIGRWAPKPIRGEPQEVIEGVYPEIVSLSLYQKAQLHRERVATSAPVQHSKHFLVGLVKCSECGKNYVYQNVNGKPHNMKCRVHTNDKQCSNSACMPKPVMDAILAWTGDRAKLDGIATLHTGVNEVEIAALRAEIDGVSFKITGLTETIKAIGAVKEVLDDLKALSADRQSMQDRLTLLERTEKPAEGKYWQHQAEMWWMEENDPERLSALMQQVGYTITVHPDKTIRVSGVDMVYRYDGYSVGKKHYRIYQGERLVTVWKGSYGETGVIRREDDPLLEIIEGPEQHTPDF

SEQ ID NO: 852 - DNA, 50 bp, Pseudomonas asiatica
  source 1..50: mol_type = genomic DNA
gaacgtcatattgaaaatacttgtgaacaacgttttgcaatgttagcatc

SEQ ID NO: 853 - DNA, 40 bp, Pseudomonas asiatica
  source 1..40: mol_type = genomic DNA
tcgggtaatcaaggggtgggatcaaggcctgatgggtatg

SEQ ID NO: 854 - DNA, 40 bp, Pseudomonas asiatica
  source 1..40: mol_type = genomic DNA
tcgggtaatcaaggggtggagtcaaggcctgatgggtatg

SEQ ID NO: 855 - DNA, 50 bp, Pseudomonas asiatica
  source 1..50: mol_type = genomic DNA
gaatgtaatgggataaatacttgtagacaaacttgtcataatttagaatc

SEQ ID NO: 856 - protein, 510 aa, Bacillus thuringiensis
MLIKTVAIYNRISRDNGESEDVLLSHRTTNTRLCESKGYQYKLYEEIESGGKFEERKILLQLLSDIAQGLYDGLVVVELSRIARDTLYSQIIAKVLEENDVPIITPNRIYNLSDESDRLMYDMESMISSKELRTITRRMKNGKLEGAKRGEWIQGVPPFGYKRGDNKKLAIVEPEAKLVEQIFNYAENGYGVPSITNKLTGYKTRAGNSFTDTAVYAILNNKTYTGSILYNVKDKKGNITESIVTSNAHDAIITKEKFHLVQQAIKGRMSGDMETRNRSRGIVLSTLKDLVYCTSCKLKMGFRKDSKQVNAIYLNPCKCGNRGISESRLLDAFQKKFRFLEQFYKEEWQKALKTTETVSKDTLVQQVEQLQKQRDKLNKKLKDNRSAYLEEVFTKEEYLNEKTDIESELRRISASIDDLLQDINSLDKESITSQYEAKIEKIKKINNLYNKEVSYNDMVEVNRLLKLILDKVYYRRLTEKVTGINASRDGLSVEQGDYIEILIASKDVHK

SEQ ID NO: 857 - DNA, 50 bp, Bacillus thuringiensis
  source 1..50: mol_type = genomic DNA
caacacattataaaaaaaatcatatgtatgtatttttttatatgtggtca

SEQ ID NO: 858 - DNA, 40 bp, Bacillus thuringiensis
  source 1..40: mol_type = genomic DNA
gacctcctctcatcccatatgtatgaaaaaagagcttgta

SEQ ID NO: 859 - DNA, 40 bp, Bacillus thuringiensis
  source 1..40: mol_type = genomic DNA
gacctcctctcatcccatatctatgaaaaaagagcttgta

SEQ ID NO: 860 - DNA, 50 bp, Bacillus thuringiensis
  source 1..50: mol_type = genomic DNA
caagacattaaattaaagatcatttctatttattttgtgctatgggagca

SEQ ID NO: 861 - protein, 474 aa, Paenibacillus polymyxa
MKHAAIYIRVSTDEQAEQGYSIDAQKEKLTAYCVSQGLDHFKLYIDDGYTGTNMERPAFRRMVRHIQEGKISAVIVRKLDRLSRKQKDVMTIIEDIFEKNNVSFTSTTELFDTSTPFGKAMIGVLAVFAQLDRDMIVERTTMGRRQRVNTGRWYGGRVPFGYKWNKELQELEIVPEEARIVKRIFQMYSEGHSRLEIAEWAASRTNERMIDHSVIRDMLERVVYIGKLRNAGQIVDGLQEPIISQKLWDAVRAEAVKRKDGALPKGDFLLTGVMKCGVCEGNIVHVKRCTKVKDKEYNYELYACKKQHVRIKDRVGKCNLGYFRRENIEQFVVDQIKFLATYPEKITELMNEEKEMPDDEISYEQLQAELKKVNTNLENLYDAIESGDLKASSVSDRIRKLEEKRELLENDIDELTDNKLPTADEKTVRAVISDIGSAWDYFTEEEQKTAIRKLIKHVVLEKDGRHHIEWIFSF

SEQ ID NO: 862 - DNA, 50 bp, Paenibacillus polymyxa
  source 1..50: mol_type = genomic DNA
ttttcattttgattatgttttgacaaaacaaagtacaatatatatgaaaa

SEQ ID NO: 863 - DNA, 40 bp, Paenibacillus polymyxa
  source 1..40: mol_type = genomic DNA
tagccactggagttttggaaaaacatttcacaagatgaaa

SEQ ID NO: 864 - DNA, 40 bp, Paenibacillus polymyxa
  source 1..40: mol_type = genomic DNA
tagccactggagttttggaataacatttcacaagatgaaa

SEQ ID NO: 865 - DNA, 50 bp, Paenibacillus polymyxa
  source 1..50: mol_type = genomic DNA
ttttcttttaagcaaagttttgacataaacaagtactttaaatagggaca

SEQ ID NO: 866 - protein, 559 aa, Bacteroides sp D20
MKAILLVRVSTKTQDFDEQERAIYEMAIKDGYSPDDIIPICEKESGIKLSEEERAGLNRMKELIETDNAINCVYCWEVSRIARRKKINFSVLDYLINHKVQLVIKEPSIRLFKDNGDIDEGAEMIFTLFSQMAESEMRTKLARWKRTKDAKRKESYYTGGWLLYGYKVDEKTRKIVPDESAAVVEQIFNMYLTGKYSYGSLAKELIHTGIFNYKLSTARSMVSLILNNTAYAGLPSSSNGYNKLRTEGNVYPAIVTLEMIERCKKIAEGNVYKAKKQYNNYYFGKGLLRCPYCGGTMVAKKNNNTYHCQNCDKGFWIQINLVDSILWYTGSMIYLGRMTSNNDEARKQYQQQLENYDNKITTSENRITAIQNKIDVIEHRAYVDGTLSINKADSFIKELNDKISEENKALNKWKNEQSAVKQMLIDIESKVTGVTLETINNIKDDETRFKIIHEVLDNAFIDKLGAYQYNISIYPTLSEKPLQFLLDTKKNKAYTDLRKVKGINRLQEINCYEQRFKPIRDKQKNREYNVKYCQEHKEENARRQREYRARLKALKEDKK

SEQ ID NO: 867 - DNA, 50 bp, Bacteroides sp D20
  source 1..50: mol_type = genomic DNA
atacctaaaatatacaaaataatacatatttcattagatattttagataa

SEQ ID NO: 868 - DNA, 40 bp, Bacteroides sp D20
  source 1..40: mol_type = genomic DNA
gtgcgcattgcctcaatcacaaccgccactccatcggcat

SEQ ID NO: 869 - DNA, 40 bp, Bacteroides sp D20
  source 1..40: mol_type = genomic DNA
gtgcgcattgcctcaatcataaccgccactccatcggcat

SEQ ID NO: 870 - DNA, 50 bp, Bacteroides sp D20
  source 1..50: mol_type = genomic DNA
atacctaaacaatgtagaaaaatatatatttaatgacatactttatatag

SEQ ID NO: 871 - protein, 477 aa, Carnobacterium mobile
MKKVAIYARVSTLNQAKEGYSIDGQINALTKYCEAMDWKIVDTYTDAGYSGSSIDRPAMKRMLLDIENKRLDAVIVYKLDRLSRNVQDTLDLIKNVFNENSIDFISLSENIDTSSAMGGLFLTLLSAIAEFEREQITERMHMGKVGRARSGKPMGWTRPPFGYTYADGNYIVDDFKALIIKKIYKEYLSGTSITKLRDKLNEEGHIGKDIKWSYRAVRLILDNPVYAGYINFKEEVYKGNHKPIVSKETFDKVQLELDIRQKQAYANNNNPRPFQGKYMLSGLARCGYCGAPLESTLGNIRKDGTRLKKYQCMNRTVKLRTTNYNNNKKCVSGFYHMNVLEEYVVDEISKLQMNPKTAFEQTETKSEDHTEIYEQRIISIDKKINKLSDLYMNDLISLEDMQLKAKSLKDERSNLIDKIYRSENNLKNIKKEKAQTYLDNLEKNINEETYENKKKIINILIEKVYVKADEIKVNWKF

SEQ ID NO: 872 - DNA, 50 bp, Carnobacterium mobile
  source 1..50: mol_type = genomic DNA
taaacatatttactatacatcatctcaataatagatattcaatatattta

SEQ ID NO: 873 - DNA, 40 bp, Carnobacterium mobile
  source 1..40: mol_type = genomic DNA
aaaaagcactaaaaccatctcaattaaagtgaaaccgtta

SEQ ID NO: 874 - DNA, 40 bp, Carnobacterium mobile
  source 1..40: mol_type = genomic DNA
aaaaagcactaaaaccatcataattaaagtgaaaccgtta

SEQ ID NO: 875 - DNA, 50 bp, Carnobacterium mobile
  source 1..50: mol_type = genomic DNA
tatatatatcatatatatataatcatcttaatagatgtagtatatatata

SEQ ID NO: 876 - protein, 550 aa, Enterobacter roggenkampii
MGIKTAFCYCRVSSGRQKTEKGGFGMSRQQALLTTYVEEYEDKDGLGYELSVDNIVFLKAEGVSGFSGKNIEQGSVLHSFIADYKSGKIKNAVLIIENIDRFSRANPNEAAELFLGLINKGCDVHEIDTETVHHRCSDLNQISAGLTRSHKESLRKQKLSIKNWDERFERTVKKHVPLTGRCPGWLKVENNQYQEIPENVAPIRLIFEWYNNGYGQAFIRDRLNSQGYKYNGKTWSNWSVHRVLKDERVTGKHRTQSTLRNNFDGIMMYPTIVTELQFKRAEQRLTKPGRDKKINRRANTLFSGVLVCGLCKAGHILINNENGNRFGRCSHAIAGNKRCVANGFKYNVVENTLLKYLRHLDFGSLSNSSHAAEVENLSSELIHYSNYLANVQRTVDSVDIPTETDYKVLKNLEAKIRELQGKIDDLKALENVSVSYEDIVKKINYELLDVSNIEVRQDFNIKIRKIIREIQILKIQKNIVLVSVSFYVSTDLQWLTISLKEGFLLSNTYVENKALVVTLGDDVMTYDIEKEQYFLNSKPISNEDAYALFG

SEQ ID NO: 877 - DNA, 50 bp, Enterobacter roggenkampii
  source 1..50: mol_type = genomic DNA
tactataaaataactttactaatcaccattatatatgttattatatagta

SEQ ID NO: 878 - DNA, 40 bp, Enterobacter roggenkampii
  source 1..40: mol_type = genomic DNA
cgcaataatgccgatgaccaccatcagctcaatgagagtg

SEQ ID NO: 879 - DNA, 40 bp, Enterobacter roggenkampii
  source 1..40: mol_type = genomic DNA
cgcaataatgccgatgacctgcatcagctcaatgagagtg

SEQ ID NO: 880 - DNA, 50 bp, Enterobacter roggenkampii
  source 1..50: mol_type = genomic DNA
tactatatattatattttataatatgtaatatatattatattatataata

SEQ ID NO: 881 - protein, 505 aa, Klebsiella pneumoniae
MTLAFSYVRFSTKHQASGTSLERQVNASKLFCSQNGLTLSNQSYHDLGISGFKNVRRPELEQMLEAIQTGDIPSGSYILIEAIDRLSRKGISHTQDILKKILQYDVKVAFVGEDAKTLQGHILNKDSLNDLSSVILVALAADLAHKESLRKSKLVKASKAIAREKAADGEILPGKSVFYLDYDKKNKKYVFNKRVDLARKIIQMRLEGKGPRKIARLLNEENIPGPTGKQWYQMSVKRLLKSPVLYGAYQTHQIIEEKYIPVSLIENYYPALIDYQTFSQIQFDDKRVSKGRPSRHKFSGVLYCECGAVLCRKVNTYETKQGPKEYQYFNCFGAFEGRCKNNKAIKDLHIPLEKAIDKLQIKTRSVKNIKNEQIIAKREKIDQLNKMLLELEMPPVSVLKTISTLEKELQELLEQPDVQPPKSADVKTLVAIKDAEQYNLYLKRLVKRITIFQLNGPKNIRIKIEKTDGHYQSFIVNNGKIMFNADTKALQEHLRKLKEGTSDED

SEQ ID NO: 882 - DNA, 50 bp, Klebsiella pneumoniae
  source 1..50: mol_type = genomic DNA
ttttgtcaaaatgaaactgttctccgagtaatagtatcattttacaaaaa

SEQ ID NO: 883 - DNA, 40 bp, Klebsiella pneumoniae
  source 1..40: mol_type = genomic DNA
ccctcgcagaaatgtgccgcgggtaatagttctttcatat

SEQ ID NO: 884 - DNA, 40 bp, Klebsiella pneumoniae
  source 1..40: mol_type = genomic DNA
ccctcgcagaaatgtgccgaaggtaatagttctttcatat

SEQ ID NO: 885 - DNA, 50 bp, Klebsiella pneumoniae
  source 1..50: mol_type = genomic DNA
ttttgtaaatctaaaactgttttaaaatgaatagttcatctttataaaaa

SEQ ID NO: 886 - protein, 505 aa, Klebsiella pneumoniae
MTLAFSYVRFSTKHQASGTSLERQVNASKLFCSQNGLTLSNQSYHDLGISGFKNVRRPELEQMLEAIQTGDIPSGSYILIEAIDRLSRKGISHTQDILKKILQYDVKVAFVGEDAKTLQGHILNKDSLNDLSSVILVALAADLAHKESLRKSKLVKASKAIAREKAADGEILPGKSVFYLDYDKKNKKYVFNKRVDLARKIIQMRLEGKGPRKIARLLNEENIPGPTGKQWYQMSVKRLLKSPVLYGAYQTHQIIEEKYIPVSLIENYYPALIDYQTFSQIQFDDKRVSKGRPSRHKFSGVLYCECGAVLCRKVNTYETKQGPKEYQYFNCFGAFEGRCKNNKAIKDLHIPLEKAIDKLQIKTRSVKNIKNEQIIAKREKIDQLNKMLLELEMPPVSVLKTISTLEKELQELLEQPDVQPPKSADVKTLVAIKDAEQYNLYLKRLIKRITIFQLNGPKNIRIKIEKTDGHYQSFIVNNGKIMFNADTKALQEHLRKLKEGTSDED

SEQ ID NO: 887 - DNA, 50 bp, Klebsiella pneumoniae; identical to SEQ ID NO: 882
  source 1..50: mol_type = genomic DNA

SEQ ID NO: 888 - DNA, 40 bp, Klebsiella pneumoniae; identical to SEQ ID NO: 883
  source 1..40: mol_type = genomic DNA

SEQ ID NO: 889 - DNA, 40 bp, Klebsiella pneumoniae; identical to SEQ ID NO: 884
  source 1..40: mol_type = genomic DNA

SEQ ID NO: 890 - DNA, 50 bp, Klebsiella pneumoniae; identical to SEQ ID NO: 885
  source 1..50: mol_type = genomic DNA

SEQ ID NO: 891 - protein, 493 aa, Mediterraneibacter glycyrrhizinilyticus
METKYCYGYVRVSTSGQEELSPDSQTALLKEYAKKNGMVILKIFYELGISGRKADKRPEFQKMIALAKSDDHPVDYIVVWKFSRFARNQEESIVYKSLLKKKHNVEVVSVSEPIIDGPFGSLIERIIEWMDEYYSVRLSGEVTRGMTEKAKRGGYQARPPLGYRIQEHGKPPVIVPEEAEIVKLIFNKYVNEHIGFFDIARYLNLHGFKTSHNKPFERRSIEYILQNPTYCGMVRWNRVINETKEIRPESEWIISDGQHPAIISKELFEQAQARRKSEYRPSGTRPSSTYKHWLSGLVKCPVCGRTMVSKRVAGSKVYSYFTCYGYSKGKCLAKTSVSSLKLEPAVLASLKEVLDTGNIVYRYVNPVQTQTVDLSAIIMDQLKKNAEKFDRIKEAYRNGVDTLEEYQENKKLVQREKELLEKQLEECRVEEPEEDPSKAAMLERVRNVYEIICSDTVDNVTKNEILKNIIDKIVYNREKDELKVYYYYTPQPQ

SEQ ID NO: 892 - DNA, 50 bp, Mediterraneibacter glycyrrhizinilyticus
  source 1..50: mol_type = genomic DNA
ttttgtaggttatcgcaaaaaggtcaacctttatgtaacaacatacaata

SEQ ID NO: 893 - DNA, 40 bp, Mediterraneibacter glycyrrhizinilyticus
  source 1..40: mol_type = genomic DNA
tcttcgccccccattgcgtcatccatcccggacactggac

SEQ ID NO: 894 - DNA, 40 bp, Mediterraneibacter glycyrrhizinilyticus
  source 1..40: mol_type = genomic DNA
tcttcgccccccattgcgtactccatcccggacactggac

SEQ ID NO: 895 - DNA, 50 bp, Mediterraneibacter glycyrrhizinilyticus
  source 1..50: mol_type = genomic DNA
ttttgtggggctttgcaaaactgtacattattatttgagcacatacaata

SEQ ID NO: 896 - protein, 497 aa, Tenacibaculum dicentrarchi
MKAVAYIRISSSEQEYKRQHEELSELARFKNLNLVKVFADVVSGSKTKAKERASFEIMDKYLLDNSDVKNLLILETSRLGRKKLDVLNTIEDFFLRGVNIHIKDLNLCTMENGKRSITTDILVSLLSIMADEETRLLSERIKSGKMSKAKENKAFGAKVIGYKKGKDGTPIIDEKEAPIIKRIFELASQGLGMRKISSIIESEFNREFAIGTLSSIIKNSFHKGKRKYKDLILDVPPIVSKGLWQKANDSINSRSKFGSRKYVNTNVVQGKIKCGVCNSVMYQKVIPKGRINSFVCKDTKCKNSINRPWLFRMIRLIVDKHALKNKDEKVREKIKLQITSHKAELQINNKLLAKLKRRSEKIRILWLDDEITDARYKSDISNVNKEIKLCNTKSKEIEKAIVIAEKSLKNDIEHYSKELSVFKTEIQDVLSHVIIDKERVLINIFGWREYDLSKPNSIKLGWEARKPISERYKNEKLPLRKPISDEDLNLMIDNYTL

SEQ ID NO: 897 - DNA, 50 bp, Tenacibaculum dicentrarchi
  source 1..50: mol_type = genomic DNA
agcaatatataaaaattaattacttttagtattattttttatatattgct

SEQ ID NO: 898 - DNA, 40 bp, Tenacibaculum dicentrarchi
  source 1..40: mol_type = genomic DNA
ggctatagttcttgatacttttaaaattcgatcataggct

SEQ ID NO: 899 - DNA, 40 bp, Tenacibaculum dicentrarchi
  source 1..40: mol_type = genomic DNA
ggctatagttcttgatactaataaaattcgatcataggct

SEQ ID NO: 900 - DNA, 50 bp, Tenacibaculum dicentrarchi
  source 1..50: mol_type = genomic DNA
agcaatatagtcaaataaatgactaaaactattaatagatttgtatttct

SEQ ID NO: 901 - protein, 502 aa, Clostridium perfringens
MNNKICMYLRKSRADEELEKTLGEGETLSKHRNALLKFAKEKKLNIVEIKEEIVSGESLFFRPKMLELLKEVEAKKYDGVLVMDMQRLGRGDMKDQGIILETFKNSNTKIITPQKTYDLNNDFDEEYTEFEAFMSRKELKMINRRMQGGRVRSVEEGNYIATNPPYGYDIGFINKSRVLKVNEYESNAIKLIFKLYLDGNGASFIANELNNLGYKTKLGNNFSNSSVLTIIKNPVYIGKIAWKRKDIKKSRTPGKVKDTKTRDKSEWIIADGKHEAIIDMNTWDKTQEILKGKYHIPYQLTNSPANPFAGLITCGVCGKKMVMRKARGINRLMCIYKCGNKSTRFDLVESDCFEALKEHLKNYTAEVENELIEENTNIYTSQISQLKKELTTLNNQRLKLFDLLERNLYDEDTFLERSKNINDRIETVSSTLKSIEKLLKKKSKSSYQEDIQFFQSVLDAYNETKDISKKNSLLKSILYKIEYTKLNGSKEHVIKVFPKLRK

SEQ ID NO: 902 - DNA, 50 bp, Clostridium perfringens
  source 1..50: mol_type = genomic DNA
tacatacaacatattagttatatttcattacacacaacaagttgtatgta

SEQ ID NO: 903 - DNA, 40 bp, Clostridium perfringens; identical to SEQ ID NO: 678
  source 1..40: mol_type = genomic DNA

SEQ ID NO: 904 - DNA, 40 bp, Clostridium perfringens
  source 1..40: mol_type = genomic DNA
aatatctataagacaaatttgatttccttccttatccact

SEQ ID NO: 905 - DNA, 50 bp, Clostridium perfringens; identical to SEQ ID NO: 180
  source 1..50: mol_type = genomic DNA

SEQ ID NO: 906 - protein, 502 aa, Clostridium perfringens
MNKKICIYLRKSRADEELEKTLGEGETLSKHRNALLKFAKENKLNVTDIKEEIVSGDSLFFRPKMLELLKEVENNMYYGVLVMDIDRLGRGGMKDQGIILDAFKESKTKIITPLKTYDLDNEMDEEITEFKTFFSRRELKTINRRMQGGRIRSIEEGNYIATNPPYGYDISFIKKNRTLKINEDEAPAINLIFKLYIEGNGASAIANELNNLGYKTKLGNNFSPSSVLTIIKNPIYIGKIPWKRKDIKKSKTPGKVKDTRTRDKSEWIIADGKHPAIVTNEIWESAQKILKGRYHIPYQLSNAPVNPFAGIISCGICGKKMVMRKARGINRLMCIYKCGNKSTRFDNVESDCLEALKDYLSNYSAEIKNSIKKEDIDMYSIQITNLKKELTTLNNQRLKLFDLLERNLYDEDTFLERSKNINDRIENITHTLKSLEKKVKKNSYTSYEEDIKHFKNVLDAYNLTKDVSKKNNLLKSILYKIEYTKTEKGKDYEIKLFPKLRK

SEQ ID NO: 907 - DNA, 50 bp, Clostridium perfringens
  source 1..50: mol_type = genomic DNA
tacatacaacatactagatatatttcattacacacaatatgttgtatgca

SEQ ID NO: 908 - DNA, 40 bp, Clostridium perfringens; identical to SEQ ID NO: 188
  source 1..40: mol_type = genomic DNA

SEQ ID NO: 909 - DNA, 40 bp, Clostridium perfringens; identical to SEQ ID NO: 189
  source 1..40: mol_type = genomic DNA

SEQ ID NO: 910 - DNA, 50 bp, Clostridium perfringens; identical to SEQ ID NO: 180
  source 1..50: mol_type = genomic DNA

SEQ ID NO: 911 - protein, 502 aa, Clostridium perfringens
MNNKICIYLRKSRADEELEKTLGEGETLSKHRNALLKFAKEKKLNIVEIKEEIVSGESLFFRPKMLELLKEVEAKKYDGVLVMDMQRLGRGDMKDQGIILETFKNSNTKIITPQKTYDLNNDFDEEYTEFEAFMSRKELKMINRRMQGGRVRSVEEGNYIATNPPYGYDIGFINKSRVLKVNEYESNAIKLIFKLYLDGNGASFIANELNNLGYKTKLGNNFSNSSVLTIIKNPVYIGKIAWKRKDIKKSKTPGKVKDTKTRDKSEWIIADGKHEAIIDINTWDKTQEILKGKYHIPYQLTNSPANPFAGLITCGVCGKKMVMRKARGINRLMCIYKCGNKSTRFDLVESDCFEALKEHLKNYTAEVENELIEENTNIYTSQISQLKKELTTLNNQRLKLFDLLERNLYDEDTFLERSKNINDRIETVSSTLKSIEKLLKKKSKSSYQEDIQFFQSVLDAYNETEDIAKKNSLLKSILYKIEYTKLNGSKEHVIKVFPKLRK

SEQ ID NO: 912 - DNA, 50 bp, Clostridium perfringens
  source 1..50: mol_type = genomic DNA
tacatacaacatattagttatatttcattacacacaacatgttgtatgta

SEQ ID NO: 913 - DNA, 40 bp, Clostridium perfringens; identical to SEQ ID NO: 178
  source 1..40: mol_type = genomic DNA

SEQ ID NO: 914 - DNA, 40 bp, Clostridium perfringens; identical to SEQ ID NO: 179
  source 1..40: mol_type = genomic DNA

SEQ ID NO: 915 - DNA, 50 bp, Clostridium perfringens; identical to SEQ ID NO: 180
  source 1..50: mol_type = genomic DNA

SEQ ID NO: 916 - protein, 520 aa, Escherichia coli
MKKAVYCYARVSSRGQAKDGYGMSRQQTMLRDYVAAYDDSQHNRGYEFGDISWLYAEGVSAYSGKNIEDGSVLKNFIDDVLQKKITNSVLVIENLDRFSRAAPNRAAGLFLSLINAGCDIHEVETEMIHHQYSDLNIISGGLQRAHNESKRKARLSIKNWDERIKNTIEGTSVLTHRVPSWIEVKNNKYVIKEGEAEKFNLIFKMYADGFGPAAIRDELKKKKMQINESEPTINHLVKIIKDQRLIGKFNSTGRKILDGMIIYPVVVEQSLFETVNDLRKQRNPLGKVNVKANNLFAGLCICMNCGRYVQVNSVDKKGDTYFRCGGSLLKIDKCKERGFKYKIIENALLEHIRNFDFSMLRSNDDDIQIKINYLSIELATKENYSSEILADMEKEYIPDPNDRRILKNLQRRISEIRTEITRLKQSNVGYEKFSDLKESCTDDLLDSKNTNLRLNFNVKIKRVIKNIKMKRLGNAIMLVVNYIGVNEKQAMVIDSKTGDVKFMAVQNDDLKSVEYLINKS

SEQ ID NO: 917 - DNA, 50 bp, Escherichia coli
  source 1..50: mol_type = genomic DNA
tacagtaatttactgttaatgaccaccatgatatactgctttttactgtt

SEQ ID NO: 918 - DNA, 40 bp, Escherichia coli
  source 1..40: mol_type = genomic DNA
ggcaatgatgccaataaccaccatcagttcgataagtgta

SEQ ID NO: 919 - DNA, 40 bp, Escherichia coli
  source 1..40: mol_type = genomic DNA
ggcaatgatgccaataacctacatcagttcgataagtgta

SEQ ID NO: 920 - DNA, 50 bp, Escherichia coli
  source 1..50: mol_type = genomic DNA
gacagtgattcaaggttaatgacctacatgctaaacttgttttaattttt

SEQ ID NO: 921 - protein, 520 aa, Escherichia coli
MKKAVYCYARVSSRGQAKDGYGMSRQQTMLRDYVAAYDDSQHNRGYEFGDISWLYAEGVSAYSGKNIEDGSVLKNFIDDVLQKKITNSVLVIENLDRFSRAAPNRAAGLFLSLINAGCDIHEVETEMIHHQYSDLNIISGGLQRAHNESKRKARLSIKNWDERIKNTIEGTSVLTHRVPSWIEVKNNKYVIKEGEAEKFNLIFKMYADGFGPAAIRDELKKKKMQTNESEPTINHLVKIIKDQRLIGKFNSTGRKILDGMIIYPVVVEQSLFETVNDLRKQRNPLGKVNVKANNLFAGLCICMNCGRYVQVNSVDKKGDTYFRCGGSLLKIDKCKERGFKYKIIENALLEHIRNFDFSMLRSNDDDIQIKINYLSIELATKENYSSEILADMEKEYIPDPNDRRILKNLQRRISEIRTEITRLKQSNVGYEKFSDLKESCTDDLLDSKNTNLRLNFNVKIKRVIKNIKMKRLGNAIMLVVNYIGVNEKQAMVIDSKTGDVEFMAVQNDDLKSVEYLINKS

SEQ ID NO: 922 - DNA, 50 bp, Escherichia coli; identical to SEQ ID NO: 917
  source 1..50: mol_type = genomic DNA

SEQ ID NO: 923 - DNA, 40 bp, Escherichia coli; identical to SEQ ID NO: 918
  source 1..40: mol_type = genomic DNA

SEQ ID NO: 924 - DNA, 40 bp, Escherichia coli; identical to SEQ ID NO: 919
  source 1..40: mol_type = genomic DNA

SEQ ID NO: 925 - DNA, 50 bp, Escherichia coli; identical to SEQ ID NO: 920
  source 1..50: mol_type = genomic DNA

SEQ ID NO: 926 - protein, 520 aa, Escherichia coli
MKKAVYCYARVSSRGQAKDGYGMSRQQTMLRDYVAAYDDSQHNRGYEFGDISWLYAEGVSAYSGKNIEDGSVLKNFIDDVLQKKITNSVLVIENLDRFSRAAPNRAAGLFLSLINAGCDIHEVETEMIHHQYSDLNIISGGLQRAHNESKRKARLSIKNWDERIKNTIEGTSVLTHRVPSWIEVKNNKYVIKEGEAEKFNLIFKMYADGFGPAAIRDELKKKKMQINESEPTINHLVKIIKDQRLIAKFNSTGRKILDGMIIYPVVIEQSLFETVNDLRKQRNPLGKVNVKANNLFAGLCICMNCGRYVQVNSVDKKGDTYFRCGGSLLKIDKCKERGFKYKIIENALLEHIRNFDFSMLRSNDDDIQIKINYLSIELATKENYSSEILADMEKEYIPDPNDRRILKNLQRRISEIRTEITRLKQSNVGYEKFSDLKESCTDDLLDSKNTNLRLNFNVKIKRVIKNIKMKRLGNAIMLVVNYIGVNEKQAMVIDSKTGDVKFMAVQNDDLKSVEYLINKS

SEQ ID NO: 927 - DNA, 50 bp, Escherichia coli; identical to SEQ ID NO: 917
  source 1..50: mol_type = genomic DNA

SEQ ID NO: 928 - DNA, 40 bp, Escherichia coli; identical to SEQ ID NO: 918
  source 1..40: mol_type = genomic DNA

SEQ ID NO: 929 - DNA, 40 bp, Escherichia coli; identical to SEQ ID NO: 919
  source 1..40: mol_type = genomic DNA

SEQ ID NO: 930 - DNA, 50 bp, Escherichia coli; identical to SEQ ID NO: 920
  source 1..50: mol_type = genomic DNA

SEQ ID NO: 931 - protein, 520 aa, Escherichia coli
MKKAVYCYARVSSRGQAKDGYGMSRQQTMLRDYVAAYDDSQHNRGYEFGDISWLYAEGVSAYSGKNIEDGSVLKNFIDDVLQKKITNSVLVIENLDRFSRAAPNRAAGLFLSLINAGCDIHEVETEMIHHQYSDLNIISGGLQRAHNESKRKARLSIKNWDERIKNTIEGTSVLTHRVPSWIEVKNNKYVIKEGEAEKFNLIFKMYADGFGPAAIRDELKKKKMQINESEPTINHLVKIIKDQRLIGKFNSTGRKILDGMIIYPVVVEQSLFETVNDLRKQRNPLGKVNVKANNLFAGLCICMNCGRYVQVNSVDKKGDTYFRCGGSLLKIDKCKERGFKYKIIENALLEHIRNFDFSMLRSNDDDIQIKINYLSIELATKENYSSEILADMEKEYIPDPNDRRILKNLQRRISEIRTEITRLKQSNVGYEKFSDLKESCTDDLLDYKNTNLRLNFNVKIKRVIKNIKMKRLGNAIMLVVNYIGVNEKQAMVIDSKTGDVKFMAVQNDDLKSVEYLINKS

SEQ ID NO: 932 - DNA, 50 bp, Escherichia coli; identical to SEQ ID NO: 917
  source 1..50: mol_type = genomic DNA

SEQ ID NO: 933 - DNA, 40 bp, Escherichia coli; identical to SEQ ID NO: 918
  source 1..40: mol_type = genomic DNA

SEQ ID NO: 934 - DNA, 40 bp, Escherichia coli; identical to SEQ ID NO: 919
  source 1..40: mol_type = genomic DNA

SEQ ID NO: 935 - DNA, 50 bp, Escherichia coli; identical to SEQ ID NO: 920
  source 1..50: mol_type = genomic DNA

SEQ ID NO: 936 - protein, 520 aa, Escherichia coli
MKKAVYCYARVSSRGQAKDGYGMSRQQTMLRDYVAAYDDSQHNRGYEFGDISWLYAEGVSAYSGKNIEDGSVLKNFIDDVLQKKITNSVLVIENLDRFSRAAPNRAAGLFLSLINAGCDIHEVETEMIHHQYSDLNIISGGLQRAHNESKRKSRLSIKNWDERIKNTIEGTSVLTHRVPSWIEVKNNKYVIKEGEAEKFNLIFKMYADGFGPAAIRDELKKKKMQINESEPTINHLVKIIKGQRLIGKFNSTGRKILDDMIIYPVVVEQSLFETVNDLRKQRNPLGKVNVKANNLFAGLCICMNCGRYVQVNSVDKKGDTYFRCGGSLLKIDKCKERGFKYKIIENALLEHIRNFDFSMLRSNDDDIQIKINYLSIELATKENYSSEILADMEKEYIPDPNDRRILKNLQRRISEIRTEITRLKQSNVGYEKFSDLKESCTDDLLDSKNTNLRLNFNVKIKRVIKNIKMKRLGNAIMLVVNYIGVNEKQAMVIDSKTGDVKFMAVQNDDLKSVEYLINKS

SEQ ID NO: 937 - DNA, 50 bp, Escherichia coli; identical to SEQ ID NO: 917
  source 1..50: mol_type = genomic DNA

SEQ ID NO: 938 - DNA, 40 bp, Escherichia coli; identical to SEQ ID NO: 918
  source 1..40: mol_type = genomic DNA

SEQ ID NO: 939 - DNA, 40 bp, Escherichia coli; identical to SEQ ID NO: 919
  source 1..40: mol_type = genomic DNA

SEQ ID NO: 940 - DNA, 50 bp, Escherichia coli; identical to SEQ ID NO: 920
  source 1..50: mol_type = genomic DNA

SEQ ID NO: 941 - protein, 518 aa, Escherichia coli
MKKTVYCYARVSSRGQAKDGFGMSRQQKMLNDYVSTYDDSLHKRGYELGAVNWLFAEGISAYSGKNIEDGSVLKSFIDDVLDRKIINAVLVIENLDRFSRAEPIKAANLFLNLITAGCDIHEVETETIHHSSSDLSIITGGLQRAHNESKRKARLSIKNWDERIKNAIEGKAVLTHRVPSWLEVKDNGYVIKEGEKEKYNLIFQMYADGFGPAAIRDVLKERNMLINDSEPTIAHLNKIIKDERLIGKFNSTGRKKLSGLVIYPVVVDLSLFHIVDQLRKQRNPVGKIHRKANNLFAGLCICMECGRYVQVNSIEPNGESYFRCGGSLVKSDRCQERGFKYKFFENALLQHIRNFDFSSLNANESEVQIKVNHLSMELLAHIKYRDEILQDIEKEDIPDPIDRRILKNLQKKIGEIESEISNLKRLNVNVSAFDELKQYSEELRDPLNADIRLDFNIKIKRVIKNIIIKRYSDAIFLVINYIAINEKQAIVINSKNGEVLYMGVQNDDLKTVEHLIGN

SEQ ID NO: 942 - DNA, 50 bp, Escherichia coli
  source 1..50: mol_type = genomic DNA
tacagtaatttactgttaatgaccaccatgatatacttctttttactgtt

SEQ ID NO: 943 - DNA, 40 bp, Escherichia coli; identical to SEQ ID NO: 918
  source 1..40: mol_type = genomic DNA

SEQ ID NO: 944 - DNA, 40 bp, Escherichia coli; identical to SEQ ID NO: 919
  source 1..40: mol_type = genomic DNA

SEQ ID NO: 945 - DNA, 50 bp, Escherichia coli; identical to SEQ ID NO: 920
  source 1..50: mol_type = genomic DNA

SEQ ID NO: 946 - protein, 520 aa, Escherichia coli
MKKAVYCYARVSSRGQAKDGYGMSRQQTMLRDYVAAYDDSQHNRGYEFGDISWLYAEGVSAYSGKNIEDGSVLKNFIDDVLQKKITNSVLVIENLDRFSRAAPNRAAGLFLSLINAGCDIHEVETEMIHHQYSDLNIISGGLQRAHNESKRKARLSIKNWDERIKNTIEGTSVLTHRVPSWIEVKNNKYVIKEGEAEKFNLIFKMYADGFGPAAIRDELKKKKMQINESEPTINHLVKIIKDQRLIGEFNSTGRKILDGMIIYPVVVEQSLFETVNDLRKQRNPLGKVNVKANNLFAGLCICMNCGRYVQVNSVDKKGDTYFRCGGSLLKIDKCKERGFKYKIIENALLEHIRNFDFSMLRSNDDDIQIKINYLSIELATKENYSSEILADMEKEYIPDPNDRRILKNLQRRISEIRTEITRLKQSNVGYEKFSDLKESCTDDLLDSKNTNLRLNFNVKIKRVIKNIKMKRLGNAIMLVVNYIGVNEKQAMVIDSKTGDVKFMAVQNDDLKSVEYLINKS

SEQ ID NO: 947 - DNA, 50 bp, Escherichia coli; identical to SEQ ID NO: 917
  source 1..50: mol_type = genomic DNA

SEQ ID NO: 948 - DNA, 40 bp, Escherichia coli; identical to SEQ ID NO: 918
  source 1..40: mol_type = genomic DNA

SEQ ID NO: 949 - DNA, 40 bp, Escherichia coli; identical to SEQ ID NO: 919
  source 1..40: mol_type = genomic DNA

SEQ ID NO: 950 - DNA, 50 bp, Escherichia coli; identical to SEQ ID NO: 920
  source 1..50: mol_type = genomic DNA

SEQ ID NO: 951 - protein, 520 aa, Escherichia coli
MKKAVYCYARVSSRGQAKDGYGMSRQQTMLRDYVAAYDDSQHNRGYEFGDISWLYAEGVSAYSGKNIEDGSVLKNFIDDVLQKKITNSVLVIENLDRFSRAAPNRAAGLFLSLINAGCDIHEVETEMIHHQYSDLNIISGGLQRAHNESKRKARLSIKNWDERIKNTIEGTSVLTHRAPSWIEVKNNKYVIKEGEAEKFNLIFKMYADGFGPAAIRDELKKKKMQINESEPTINHLVKIIKDQRLIGKFNSTGRKILDGMIIYPVVVEQSLFETVNDLRKQRNPLGKVNVKANNLFAGLCICMNCGRYVQVNSVDKKGDTYFRCGGSLLKIDKCKERGFKYKIIENALLEHIRNFDFSMLRSNDDDIQIKINYLSIELATKENYSSEILADMEKEYIPDPNDRRILKNLQRRISEIRTEITRLKQSNVGYEKFSDLKESCTDDLLDSKNTNLRLNFNVKIKRVIKNIKMKRLGNAIMLVVNYIGVNEKQAMVIDSKTGDVKFMAVQNDDLKSVEYLINKS

SEQ ID NO: 952 - DNA, 50 bp, Escherichia coli; identical to SEQ ID NO: 917
  source 1..50: mol_type = genomic DNA

SEQ ID NO: 953 - DNA, 40 bp, Escherichia coli; identical to SEQ ID NO: 918
  source 1..40: mol_type = genomic DNA

SEQ ID NO: 954 - DNA, 40 bp, Escherichia coli; identical to SEQ ID NO: 919
  source 1..40: mol_type = genomic DNA

SEQ ID NO: 955 - DNA, 50 bp, Escherichia coli; identical to SEQ ID NO: 920
  source 1..50: mol_type = genomic DNA

SEQ ID NO: 956 - protein, 520 aa, Escherichia coli
MKKAVYCYARVSSRGQAKDGYGMSRQQTMLRDYVAAYDDSQHNRGYEFGDISWLYAEGVSAYSGKNIEDGSVLKNFIDDVLQKKITNSVLVIENLDRFSRAAPNRAAGLFLSLINAGCDIHEVETEMIHHQYSDLNIISGGLQRAHNESKRKARLSIKNWDERIKNTIEGTSVLTHRVPSWIEVKNNKYVIKEGETEKFNLIFKMYADGFGPAAIRDELKKKKMQINESEPTINHLVKIIKDQRLIGKFNSTGRKILDGMIIYPVVVEQSLFETVNDLRKQRNPLGKVNVKANNLFAGLCICMNCGRYVQVNSVDKKGDTYFRCGGSLLKIDKCKERGFKYKIIENALLEHIRNFDFSMLRSNDDDIQIKINYLSIELATKENYSSEILADMEKEYIPDPNDRRILKNLQRRISEIRTEITRLKQSNVGYEKFSDLKESCTDDLLDSKNTNLRLNFNVKIKRVIKNIKMKRLGNAIMLVVNYIGVNEKQAMVIDSKTGDVKFMAVQNDDLKSVEYLINKS

SEQ ID NO: 957 - DNA, 50 bp, Escherichia coli; identical to SEQ ID NO: 917
  source 1..50: mol_type = genomic DNA

SEQ ID NO: 958 - DNA, 40 bp, Escherichia coli; identical to SEQ ID NO: 918
  source 1..40: mol_type = genomic DNA

SEQ ID NO: 959 - DNA, 40 bp, Escherichia coli; identical to SEQ ID NO: 919
  source 1..40: mol_type = genomic DNA

SEQ ID NO: 960 - DNA, 50 bp, Escherichia coli; identical to SEQ ID NO: 920
  source 1..50: mol_type = genomic DNA

SEQ ID NO: 961 - protein, 520 aa, Escherichia coli
MKKAVYCYARVSSRGQAKDGYGMSRQQTMLRDYVAAYDDSQHNRGYEFGDISWLYAEGVSAYSGKNIEDGSVLKNFIDDVLQKKITNSVLVIENLDRFSRAAPNRAAGLFLSLINAGCDIHEVETEMIHHQYSDLNIISGGLQRAHNESKRKARLSIKNWDERIKNTIEGTSVLTHRVPSWIEVKNNKYVIKEGEAEKFNLIFKMYADGFGPAAIRDELKKKKMQINESEPTINHLVKIIKDQRLIGKFNSTGRKILDGMIIYPVVVEQSLFETVNDLRKQRNPLGKVNVKANNLFAGLCICMNCGRYVQVNSVDKKGDTYFRCGGSLLKIDKCKERGFKYKIIENALLEHIRNFDFSMLRSNDDDIQIKINYLSIELATKENYSSEILADMEKEYIPDPNDRRILKNLQRRISEIRTEITRLKQSNVGYEKFSDLKESCTDDLLNSKNTNLRLNFNVKIKRVIKNIKMKRLGNAIMLVVNYIGVNEKQAMVIDSKTGDVKFMAVQNDDLKSVEYLINKS

SEQ ID NO: 962 - DNA, 50 bp, Escherichia coli; identical to SEQ ID NO: 917
  source 1..50: mol_type = genomic DNA

SEQ ID NO: 963 - DNA, 40 bp, Escherichia coli; identical to SEQ ID NO: 918
  source 1..40: mol_type = genomic DNA

SEQ ID NO: 964 - DNA, 40 bp, Escherichia coli; identical to SEQ ID NO: 919
  source 1..40: mol_type = genomic DNA

SEQ ID NO: 965 - DNA, 50 bp, Escherichia coli; identical to SEQ ID NO: 920
  source 1..50: mol_type = genomic DNA

SEQ ID NO: 966 - protein, 520 aa, Escherichia coli
MKKAVYCYARVSSRGQAKDGYGMSRQQTMLRDYVAAYDDSQHNRGYEFGDISWLYAEGVSAYSGKNIEDGSVLKNFIDDVLQKKITNSVLVIENLDRFSRAAPNRAAGLFLSLINAGCDIHEVETEMIHHQYSDLNIISGGLQRAHNESKRKARLSIKNWDERIKNTIEGTSVLTHRVPSWIEVKNNKYVIKEGEAEKFNLIFKMYADGFGPAAIRDELKKKKMQINESEPTINHLVKIIKDQRLIGKFNSTGRKILDGMIIYPVVIEQSLFETVNDLRKQRNPLGKVNVKANNLFAGLCICMNCGRYVQVNSVDKKGDTYFRCGGSLLKIDKCKERGFKYKIIENALLEHIRNFDFSMLRSNDDDIQIKINYLSIELATKENYSSEILADMEKEYIPDPNDRRILKNLQRRISEIRTEITRLKQSNVGYEKFSDLKESCTDDLLDSKNTNLRLNFNVKIKRVIKNIKMKRLGNAIMLVVNYIGVNEKQAMVIDSKTGDVKFMAVQNDDLKSVEYLINKS

SEQ ID NO: 967 - DNA, 50 bp, Escherichia coli; identical to SEQ ID NO: 917
  source 1..50: mol_type = genomic DNA

SEQ ID NO: 968 - DNA, 40 bp, Escherichia coli; identical to SEQ ID NO: 918
  source 1..40: mol_type = genomic DNA

SEQ ID NO: 969 - DNA, 40 bp, Escherichia coli; identical to SEQ ID NO: 919
  source 1..40: mol_type = genomic DNA

SEQ ID NO: 970 - DNA, 50 bp, Escherichia coli; identical to SEQ ID NO: 920
  source 1..50: mol_type = genomic DNA

SEQ ID NO: 971 - protein, 520 aa, Escherichia coli
MKKAVYCYARVSSRGQAKDGYGMSRQQTMLRDYVAAYDDSQHNRGYEFGDISWLYAEGVSAYSGKNIEDGSVLKNFIDDVLQKKITNSVLVIENLDRFSRAAPNRAAGLFLSLINAGCDIHEVETEMIHHQYSDLNIISGGLQRAHNESKRKARLSIKNWDERIKNTIEGTSVLTHRVPSWIEVKNNKYVIKEGEAEKFNLIFKMYADGFGPAAIRDELKKKKMQINESEPTINHLVKIIKDQRLIGKFNSTGRKILDGMIIYPVVVEQSLFETVNDLRKQRNPLGKVNVKANNLFAGLCICMNCGRYVQVNSVDKKGDTYFRCGGSLLKIDKCKERGFKYKIIENALLEHIRNFDFSMLRSNDDDIQIKINYLSIELATKENYSSEILADMEKEYIPDPNDRRILKNLQRRISEIRTEITRLKQSNVGYEKFSDLKESCTDDLLDSKNTNVRLNFNVKIKRVIKNIKMKRLGNAIMLVVNYIGVNEKQAMVIDSKTGDVKFMAVQNDDLKSVEYLINKS

SEQ ID NO: 972 - DNA, 50 bp, Escherichia coli; identical to SEQ ID NO: 917
  source 1..50: mol_type = genomic DNA

SEQ ID NO: 973 - DNA, 40 bp, Escherichia coli; identical to SEQ ID NO: 918
  source 1..40: mol_type = genomic DNA

SEQ ID NO: 974 - DNA, 40 bp, Escherichia coli; identical to SEQ ID NO: 919
  source 1..40: mol_type = genomic DNA

SEQ ID NO: 975 - DNA, 50 bp, Escherichia coli; identical to SEQ ID NO: 920
  source 1..50: mol_type = genomic DNA

SEQ ID NO: 976 - protein, 580 aa, Serratia marcescens
MRWIMRKCFLYSRVSSDVQISGDGLGRQEDKLKQYLLQNALRLNLSVDDCEILVDSGVSGWKGSNMGDTAALGQLFRRVESGEIDGSVLIVESLDRFSRENPFRVAGYIAQLAEHSIDIIDVEQNLVIGTSNPWSSTIASIIANRAHEESTLKSKRIKAAWNSRRRKAEESGQYMIKNTPFWIDVLDDKYVANADASIVREIFDLYLQGYGSFTIAKKMNEAGKVIRNKRWSTPKICALLRNPRCNGDFISHSLERDYEKGTSTSVEHVIKGLYPKIVTDEEFALVLNRLDDGSKNKRVCNDRKVTILNGLLKCSICGGALTVRSAGAYRYVGCLKTIEKGGCYSKPIRYDALEKIVVNHIRNMDLGKVYESNDSQEVITKERIKSLMSHIEEYKAGITQLRERGKKPSFDMLTELQNSEDELELLKKELEQLSLSKIDLSEFAVSTELFDITQIALRTRLERTISSLLNKIKVYHTKDLSFSLIEMIYVNDVVKHVLVADKKGDVTGDVVIRRNGESTTYESCSVKIIKDECGVFSLDCNISEVILNDYLLLMNVVDFVDSEAKEFLNLHLNTVLQQDG

SEQ ID NO: 977 - DNA, 50 bp, Serratia marcescens
  source 1..50: mol_type = genomic DNA
tttattttagtgttctataataatgtgatacattggaacactaagataaa

SEQ ID NO: 978 - DNA, 40 bp, Serratia marcescens; identical to SEQ ID NO: 193
  source 1..40: mol_type = genomic DNA

SEQ ID NO: 979 - DNA, 40 bp, Serratia marcescens; identical to SEQ ID NO: 194
  source 1..40: mol_type = genomic DNA

SEQ ID NO: 980 - DNA, 50 bp, Serratia marcescens; identical to SEQ ID NO: 195
  source 1..50: mol_type = genomic DNA

SEQ ID NO: 981 - protein, 560 aa, Bacillus amyloliquefaciens
MLILKGDQKLNTEQIMSLIGKVNALIYARVSTTDQAKKGFSIESQLDRCKERAMSKFGYKASELIALVEPGGMGDDPNRPALNHALYLLQKGLGKKFLVLHPDRLTRDNTLQGVISRRIWGMGVDIEFIEFEVNPNDPESMLMYNIQGSIAQYNKAKIHANSKRGRLAKAKKGEFPSFKRLYGYKFNTVTDLPEYNEEEKEILLEMKDMLLNKKLSSNEIAKELSRRGVAAPNGKTWFQSTVSRMLQNEDYTGDFYYGKSKVVQVNGKKKQIATPKDEWILIKIPPMWDHETRDQIIKQLKANFKGRSRSTRDYLLKGKAVCGRCGGSCGSGITSKTKSGIYKYYSCCNKSTKAYQNGKELFKCKGKNWRVDIVDEVFWKWFKKLIKNPKKFLDQFLEEASNEKSIEDIKIKINRLQKQHEEIDSEIANYVILFGKGKIKESMFDELTRPLELNKEHVENELEILQSQLNANKKVEDRNEQTIKYMNSFAEMVDKDLSMSEKRNFLDFFIEKVTLYDDDHMEVVWKNKTLNEDRSQTVDFTEGEPEEASDNQHKRLNRIQ

SEQ ID NO: 982 - DNA, 50 bp, Bacillus amyloliquefaciens
  source 1..50: mol_type = genomic DNA
aacataaaagattaaaccgtattcaagaacaaggttttaacttttatgtc

SEQ ID NO: 983 - DNA, 40 bp, Bacillus amyloliquefaciens
  source 1..40: mol_type = genomic DNA
ggcgattgatacgcttgtcaagcatatggaagacaaacag

SEQ ID NO: 984 - DNA, 40 bp, Bacillus amyloliquefaciens
  source 1..40: mol_type = genomic DNA
ggcgattgatacgcttgtcatgcatatggaagacaaacag

SEQ ID NO: 985 - DNA, 50 bp, Bacillus amyloliquefaciens
  source 1..50: mol_type = genomic DNA
aaaatgaaataataaacagtattcatgaacaaagtttattattttctgca

SEQ ID NO: 986 - protein, 560 aa, Bacillus amyloliquefaciens
MLILKGDQKLNTEQIMSLIGKVNALIYARVSTTDQAKKGFSIESQLDRCKERAMSKFGYKDSELIALVEPGGMGDDPNRPALNHALYLLQKGLGKKFLVLHPDRLTRDNTLQGVISRRIWGMGVDIEFIEFEVNPNDPESMLMYNIQGSIAQYNKAKIHANSKRGRLAKAKKGEFPSFKRLYGYKFNTVTDLPEYNEEEKEILLEMKDMLLNKKLSSNEIAKELSRRGVAAPNGKTWFQSTVSRMLQNEDYTGDFYYGKSKVVQVNGKKKQIATPKDEWILIKIPPMWDHETRDQIIKQLKANFKGRSRSTRDYLLKGKAVCGRCGGSCGSGITSKTKSGIYKYYSCCNKSTKAYQNGKELFKCKGKNWRVDIVDEVFWKWFKKLIKNPKKFLDQFLEEASNEKSIEDIKIKINRLQKQHEEIDSEIANYVILFGKGKIKESMFDELTRPLELNKEHVENELEILQSQLNANKKVEDRNEQTIKYMNSFAEMVDKDLSMSEKRNFLDFFIEKVTLYDDDHMEVVWKNKTLNEDRSQTVDFTEGEPEEASDNQHKRLNRIQ

SEQ ID NO: 987 - DNA, 50 bp, Bacillus amyloliquefaciens; identical to SEQ ID NO: 982
  source 1..50: mol_type = genomic DNA

SEQ ID NO: 988 - DNA, 40 bp, Bacillus amyloliquefaciens; identical to SEQ ID NO: 983
  source 1..40: mol_type = genomic DNA

SEQ ID NO: 989 - DNA, 40 bp, Bacillus amyloliquefaciens; identical to SEQ ID NO: 984
  source 1..40: mol_type = genomic DNA

SEQ ID NO: 990 - DNA, 50 bp, Bacillus amyloliquefaciens; identical to SEQ ID NO: 985
  source 1..50: mol_type = genomic DNA

SEQ ID NO: 991 - protein, 560 aa, Bacillus velezensis
MLILKGDQKLNTEQIMSLIGKVNALIYARVSTTDQAKKGFSIESQLDRCKERAMSKFGYKDSELIALVEPGGMGDDPNRPALNHALYLLQKGLGKKFLVLHPDRLTRDNTLQGVISRRIWGMGVDIEFIEFEVNPNDPESMLMYNIQGSIAQYNKAKIHANSKRGRLAKAKKGEFPSFKRLYGYKFNTVTDLPEYNEEEKEILLEMKDMLLNKKLSSNEIAKELSRRGVAAPNGKTWFQSTVSRMLQNEDYTGDFYYGKSKVVQVNGKKKQIATPKDEWILIKIPPMWDHESRDQIIKQLKANFKGRSRSTRDYLLKGKAVCGRCGGSCGSGITSKTKSGIYKYYSCCNKSTKAYQNGKELFKCKGKNWRVDIVDEVFWKWFKKLIKNPKKFLDQFLEEASNEKSIEDIKIKINRLQKQHEEIDSEIANYVILFGKGKIKESMFDELTRPLELNKEHVENELEILQSQLNANKKVEDRNEQTIKYMNSFAEMVDKDLSMSEKRNFLDFFIEKVTLYDDDHMEVVWKNKTLNEDRSQTVDFTEGETEEASDNQHKRLNRIQ

SEQ ID NO: 992 - DNA, 50 bp, Bacillus velezensis; identical to SEQ ID NO: 982
  source 1..50: mol_type = genomic DNA

SEQ ID NO: 993 - DNA, 40 bp, Bacillus velezensis; identical to SEQ ID NO: 983
  source 1..40: mol_type = genomic DNA

SEQ ID NO: 994 - DNA, 40 bp, Bacillus velezensis; identical to SEQ ID NO: 984
  source 1..40: mol_type = genomic DNA

SEQ ID NO: 995 - DNA, 50 bp, Bacillus velezensis; identical to SEQ ID NO: 985
  source 1..50: mol_type = genomic DNA

SEQ ID NO: 996 - protein, 560 aa, Bacillus velezensis
MLILKGDQKLNTEQIMSLIGKVNALIYARVSTTDQAKKGFSIESQLDRCKERAMSKFGYKDSELIALVEPGGMGDDPNRPALNHALYLLQKGLGKKFLVLHPDRLTRDNTLQGVISRRIWGMGVDIEFIEFEVNPNDPESMLMYNIQGSIAQYNKAKIHANSKRGRLAKAKKGEFPSFKRLYGYKFNTVTDLPEYNEEEKEILLEMKDMLLNKKLSSNEIAKELSRRGVAAPNGKTWFQSTVSRMLQNEDYTGDFYYGKSKVVQVNGKKKQIATPEEEWILIKIPPMWDHETRDQIMKQLKANFKGRSRSTRDYLLKGKAVCGRCGGSCGSGITSKTKSGTYKYYSCRNKNAKAYQNGKELFKCKGKNWRVDIVDDVFWKWFKKLIKNPKKFLDQFLEEASNEKSIEEIKIKISRLQKQLEEIDSEIANYVILFGKGKIKESMFDELTKPLELNKEHVENELEILQSQLNANKKVEDRNEKTIKYMNSFAEMVDKDLSMSEKRNFLDFFIEKVTLYDDDHMEVVWKNKTLNGERSQKVDFTEDEPEEDSDNQHKRLNRIQ

SEQ ID NO: 997 - DNA, 50 bp, Bacillus velezensis; identical to SEQ ID NO: 982
  source 1..50: mol_type = genomic DNA

SEQ ID NO: 998 - DNA, 40 bp, Bacillus velezensis; identical to SEQ ID NO: 983
  source 1..40: mol_type = genomic DNA

SEQ ID NO: 999 - DNA, 40 bp, Bacillus velezensis; identical to SEQ ID NO: 984
  source 1..40: mol_type = genomic DNA

SEQ ID NO: 1000 - DNA, 50 bp, Bacillus velezensis; identical to SEQ ID NO: 985
  source 1..50: mol_type = genomic DNA

SEQ ID NO: 1001 - protein, 560 aa, Bacillus velezensis
MLILKGEQKLNTEQIMSLIGKVNALIYARVSTTDQAKKGFSIESQLDRCKERAMSKFGYKDSELIALVEPGGMGDDPNRPALNHALYLLQKGLGKKFLVLHPDRLTRDNTLQGVISRRIWGMGVDIEFIEFEVNPNDPESMLMYNIQGSIAQYNKAKIHANSKRGRLAKAKKGEFPSFKRLYGYKFNTVTDLPEYNEEEKEVLLEMKDMLINKKLSSNEIAKELSRRGVAAPNGKTWFQSTVSRMLQNEDYTGDFYYGKSKVVQVNGKKKQIATPKEEWILIKIPPMWDHETRDQIIKQLKANFKGRSRSTRDYLLKGKAVCGRCGGSCGSGITSKTKSGTYKYYSCRNKNAKAYQNGKELFKCQGKNWRVDIVDEVFWKWFKKLIKNPKKFLDQFLEEASNEKSIEEIKIKISRLQKQLEEIESEIANYVILFGKGKIKESMFDELTKPLELNKEHVENELEILQSQLNANKEVEDRNEKTIKYMSSFAEMVNKDLSMSEKRNFLDFFIEKVTLYDDDHMEVVWKNKTLNGERSQKVDFTEDEPEEDSDNQHKRLNRIQ

SEQ ID NO: 1002 - DNA, 50 bp, Bacillus velezensis; identical to SEQ ID NO: 982
  source 1..50: mol_type = genomic DNA

SEQ ID NO: 1003 - DNA, 40 bp, Bacillus velezensis
  source 1..40: mol_type = genomic DNA
ggcgatcgatacgcttgtcaagcatatggaagacaaacag

SEQ ID NO: 1004 - DNA, 40 bp, Bacillus velezensis
  source 1..40: mol_type = genomic DNA
ggcgatcgatacgcttgtcatgcatatggaagacaaacag

SEQ ID NO: 1005 - DNA, 50 bp, Bacillus velezensis; identical to SEQ ID NO: 985
  source 1..50: mol_type = genomic DNA

SEQ ID NO: 1006 - protein, 479 aa, Lactococcus lactis
MKKVAIYCRVSTLNQAEDGYSIGEQQDKLNKYCDIMGWEVIETYTDAGFSGSNIERPAMKQLLKDAANHRFNTILVYKLDRLSRSTSDNLYLIKEVFKKNNIEFVSLNEKIDTSDAMGEFFFTLLAAVAEMERKTITERMVLGRLGRAKAGKTMSYQLPPFGYIRNKELDILEVVPHEAKIIKYIYSKYISGDSITKICHDLNDKGHIGKNVRWSHSSVKNALTNTVYIAKGKFKGEMYEQEHEKIIDENTFWLVQDEINKRQIRESQRTNNPRPFQAKYMLSGLMKCGYCGGHIRTVTGNKRLDGSKPVRYVCDRRSDYRKLMEPDEIKCKSGFYRRLDLEQYVIDYLADLPNDESELKEALSIGQTSEFDPTLLLTEIESINKKIDKENYLFRNDYIDEVELQRNVKNLVDTKKLLENQLQENNGDKINEQKRKRILDMLNTGNIREMNYEQQKKIVKSCISKILLTSEEITIEFNF

SEQ ID NO: 1007 - DNA, 50 bp, Lactococcus lactis
  source 1..50: mol_type = genomic DNA
ttaaggtttttagtcaaagctgttttaatatcttttactaaaaactttat

SEQ ID NO: 1008 - DNA, 40 bp, Lactococcus lactis
  source 1..40: mol_type = genomic DNA
tcattatcctaaaacttttttaatatcttctgttacttgg

SEQ ID NO: 1009 - DNA, 40 bp, Lactococcus lactis
  source 1..40: mol_type = genomic DNA
tcattatcctaaaacttttctaatatcttctgttacttgg

SEQ ID NO: 1010 - DNA, 50 bp, Lactococcus lactis
  source 1..50: mol_type = genomic DNA
tttagttttaagaataaaactgttctaataagttttgaataaatctttat

SEQ ID NO: 1011 - protein, 479 aa, Lactococcus lactis
MKKVAIYCRVSTLNQAEDGYSIGEQQDKLSKYCDIMGWEVIETYTDAGFSGSNIERPAMKQLLKDAANHRFNTILVYKLDRLSRSTSDNLYLIKEIFKKNNIEFVSLNEKIDTSDAMGEFFFTLLAAVAEMERKTITERMVLGRIGRAKAGKTMSYQLPPFGYIRNKELDILEVVPHEAKIIKYIYSKYISGDSITKICHDLNDKGHIGKNVRWSHSSVKNALTNTVYIAKGKFKGEMYEQEHEKIIDENTFWIVQDEINKRQIRESQRTNNPRPFQAKYMLSGLMKCGYCGGHIRTVTGNKRLDGSKPVRYVCDRRSDYRKLMEPDEIKCKSGFYRRLDLEQYVIDYLADLPNDESELKEALSIGQTSEFDPTMLLTEIETINKKIDKENYLFRNDYIDEVELQRNVKNLVDTKKLLENQLQENNGDKINEQKRKRILDMLNTGNIREMNYEQQKKIVKSCISKILLTSEEITIEFNF

SEQ ID NO: 1012 - DNA, 50 bp, Lactococcus lactis
  source 1..50: mol_type = genomic DNA
ttaaggtttctagtcaaagctgttttaatatcttttactaaaaactttat

SEQ ID NO: 1013 - DNA, 40 bp, Lactococcus lactis
  source 1..40: mol_type = genomic DNA
ttattatcctaaaacttttttaatatcttctgttacttgg

SEQ ID NO: 1014 - DNA, 40 bp, Lactococcus lactis
  source 1..40: mol_type = genomic DNA
ttattatcctaaaacttttctaatatcttctgttacttgg

SEQ ID NO: 1015 - DNA, 50 bp, Lactococcus lactis; identical to SEQ ID NO: 1010
  source 1..50: mol_type = genomic DNA

SEQ ID NO: 1016 - protein, 600 aa, Flavobacterium commune
MEKKAILLVRVSTLIQDYEAQIFDLKQYGNRLGYTKFHIVQTKETAFADLSQKVGTNEMFKFIEENPKYNTILTTEISRIGRRQSILHSIKEYCLDKQIQIHIKDLDFKLLDDNGQIPLQSEMTFTLYGMFAESEIKQKKDRFSRSRKDLMQQGLSISGKLLFGYDRKKLESNKNTLIVNEEQATIVRQIYNWYLNGLHNVKNPSIKAISLECVKLGYHPYTHSKRNVNKLLKEQAYVGEKTTNNKRKNPKFGIVSNEPEYLTSNSKIKYPVIIDVDTYNNVQAKLKSNITQGDKETKHITILSKLLSCPSCGRKMQGNYRKSITGNKNSYRCTSRGDTVSCASVGKSLSMNLIDSAIWSLVKADLPSLAKKINQINPDEYLLELDNHLINFAKREKEIQISIEENVAILNSVGRLTSPNIIQLIQKTGKTIGKLESELNKIAQEKSIIELNKLMIFDKQDNVESVINDNLSSIESSKEQLKKYINSFVQEINIFQHNVQFTVLEVVIKDFTIRKDYTDYFDVKLPIQLELAYVLLDKRVTRNIKGYYFKAQTASTDYTKYFNLVSTKMIPMVLNEIQSNDGGQDRLSESLNYIKLNLEK

SEQ ID NO: 1017 - DNA, 50 bp, Flavobacterium commune
  source 1..50: mol_type = genomic DNA
atggtatttttgtactatatttatataaatatatagaacacgaataccat

SEQ ID NO: 1018 - DNA, 40 bp, Flavobacterium commune
  source 1..40: mol_type = genomic DNA
tcccggcgggccaatcaaaataatgttatgtcctccggca

SEQ ID NO: 1019 - DNA, 40 bp, Flavobacterium commune
  source 1..40: mol_type = genomic DNA
tcccggcgggccaatcaaaacaatgttatgtcctccggca

SEQ ID NO: 1020 - DNA, 50 bp, Flavobacterium commune
  source 1..50: mol_type = genomic DNA
atagtgtatgtatactatatatatactaatatatagtgtatgtatactat

SEQ ID NO: 1021 - protein, 678 aa, Bacteroides thetaiotaomicron
MVKKAAILARVSRDRQETESQIKDLQFDAELEGYVVPEEYIFSEKITGMDSYDKEERESLQNLKSVIETKQDIEVVFMWELTRLSRNPYFLIEQLRWFNYRKIPIYFHDLEKWTINRETLVEDFETTNRIFGAATYGQQEWEKIKKRTKRGRDAKARKGLFVGHIADGYKVALVGLEKHIVLDEERVPLIKDIFNMYTEQQMSTDRIARELNERGILTFNALEAKRNEGNDRFSQVYKKKNTNIELLKSEIKWTASSIGQLLKNRWYIGERQYNKVTYGVPSIISEEQFEKVQHQLIYNKKVITKRRESVYPLKGLLVCGKCGQLMYGHKVRINSSYYCSSLETGKKCGAEGICKQNIDGIIWDYIQYIQFYMLRHYGMAKLSTIFGLENIDKELLQESIDKKKLKIKQKKQRIEDLSIGLAELIIQKSSSVNATIINVFSKKQIQIEKDIDSIENEIKELEVQIAEDERIIDRNASIDETISDKIGEVERSHDMKRVYDIIHQLILRVTLYNLEDYYKLIEIEVSSHRKFYAIYNSRKLKGRYIQVPFTNDDFSYNKETNRFQHRYKFIGMLNTMEIEKEGKMLTREMISKHSEGDIDKLIEVSRERSLPYLLCDFSTTELIGFLGNWHYIRNIRRIELEPSDEEFQKWKEDYKKWDKVRNMRKKEKRKLLKSEVKE

SEQ ID NO: 1022 - DNA, 50 bp, Bacteroides thetaiotaomicron
  source 1..50: mol_type = genomic DNA
aactagttttcttatatattgtttaaaaatgacatataagaatattagtt

SEQ ID NO: 1023 - DNA, 40 bp, Bacteroides thetaiotaomicron
  source 1..40: mol_type = genomic DNA
gaattcgggtaattcgtccaaaaataaaactccgttatgc

SEQ ID NO: 1024 - DNA, 40 bp, Bacteroides thetaiotaomicron; identical to SEQ ID NO: 1023
  source 1..40: mol_type = genomic DNA

SEQ ID NO: 1025 - DNA, 50 bp, Bacteroides thetaiotaomicron
  source 1..50: mol_type = genomic DNA
atctaatttactttaatattgtataaatatgacatatatacacattattt

SEQ ID NO: 1026 - protein, 475 aa, Bacillus atrophaeus
MNLMEESSQKNVGIYVRVSTEEQAKEGYSIAAQKEKLKAYCISQGWANYKFYIDEGKSAKDIHRPSLELMLRHIEQGIINTVLVYRLDRLTRSVRDLYSLLDYFDKYNAVFRSATEVYDTGSATGRLFITLVAAMAQWERENLGERVQMGQVEKARQGQYSAPAPYGFKKEGEHLVKNPQEGEILLDMIDKIKKGYSLRELAEYLDESDAVPRRAYKWHIASILVILKNPVLYGDFRWAGEIMEGSFEGYITEDEFEQLQKILHDRQNFKKRETYSIFIFQTKIICPNCGNRLTSERSKYFRKRDSKHVESNHYRCQACLLNKRPSIGGSEKKFEKALIEYMQNVKPRLEPQIPEEKQQDYDKLHQKILNIEKQRKKYQKAWSMDLMTDQEFEQLMAETKEALQKAQTDLEQEQVFHKPKKPIDIERAKEIVTMFKESWSVLTSQEKRQTVQELIKQIEFEKKGLKIKILDIQFY

SEQ ID NO: 1027 - DNA, 50 bp, Bacillus atrophaeus
  source 1..50: mol_type = genomic DNA
attagtgtttatgtaaagtatgagcatgtaaaatagacataaatactaaa

SEQ ID NO: 1028 - DNA, 40 bp, Bacillus atrophaeus
  source 1..40: mol_type = genomic DNA
ttttgtatttaaatataaacagacaaaatgctcttgggtt

SEQ ID NO: 1029 - DNA, 40 bp, Bacillus atrophaeus
  source 1..40: mol_type = genomic DNA
ttttgtatttaaatataaatggacaaaatgctcttgggtt

SEQ ID NO: 1030 - DNA, 50 bp, Bacillus atrophaeus
  source 1..50: mol_type = genomic DNA
attattgtatgttaatagtttgagtgtgtaaaataattaagaaaactata

SEQ ID NO: 1031 - protein, 537 aa, Clostridioides difficile
  REGION 260..352: note = misc_feature - Xaa can be any naturally occurring amino acid
MTENRKTAVYIRLSMEDENVDGRTKLESDSVTSQRILLKSFVIDQLGVDESDILEYVDDGVSGTHFKRNGFQQLQEDMKSGQIGCVVVKDFSRFGRDYLEVGFYIEYIFPLLQIRFISINDSYDSAASSGMTGGMNVALKNLVYNMYSLDLSKKISSAMQTRMKNGTRLPVNARYGYRKGKDGRLEIDPDSAKVVKMIFQMAAEGMSFAEITRELNKQEIATCDEQKMSRGEQVQFRRFDTIMKKRWNPTTVSAIIRDEXXXXXXXXXXXXXXXXXXXXXXXXXXXXXXXXXXXXXXXXXXXXXXXXXXXXXXXXXXXXXXXXXXXXXXXXXXXXXXXXXXXXXXXXXXXXXHCGHCLVRETEHLLKCSDGRTSGDHVCKSLVVRREPLEKNIMELVHQFAFSMLENRKIVESRNQSKGMETNVAELLKQSRQLSSEKMKLYDEYKDDRIDRELYKQKAGQIGRQLEEIRRKIAESERDAKILEQNNTAKEMKLEEFLSMEKFDTEKLREIIKVIRVHSQEEIEIEWNFDDVFLGQR

SEQ ID NO: 1032 - DNA, 50 bp, Clostridioides difficile
  source 1..50: mol_type = genomic DNA
atttaatataagtttttatattaaaaaacatactaaaaatctgattatcc

SEQ ID NO: 1033 - DNA, 40 bp, Clostridioides difficile
  source 1..40: mol_type = genomic DNA
acgctttattttaatttaaaaaaatgattactttaaagaa

SEQ ID NO: 1034 - DNA, 40 bp, Clostridioides difficile
  source 1..40: mol_type = genomic DNA
acgctttattttaatttaataaaatgattactttaaagaa

SEQ ID NO: 1035 - DNA, 50 bp, Clostridioides difficile
  source 1..50: mol_type = genomic DNA
ttttaatatttttatttattttaataaatataccacacatatgtttaccc

SEQ ID NO: 1036 - protein, 525 aa, Clostridioides difficile; identical to SEQ ID NO: 206

SEQ ID NO: 1037 - DNA, 50 bp, Clostridioides difficile; identical to SEQ ID NO: 1032
  source 1..50: mol_type = genomic DNA

SEQ ID NO: 1038 - DNA, 40 bp, Clostridioides difficile; identical to SEQ ID NO: 1033
  source 1..40: mol_type = genomic DNA

SEQ ID NO: 1039 - DNA, 40 bp, Clostridioides difficile; identical to SEQ ID NO: 1034
  source 1..40: mol_type = genomic DNA

SEQ ID NO: 1040 - DNA, 50 bp, Clostridioides difficile; identical to SEQ ID NO: 1035
  source 1..50: mol_type = genomic DNA

SEQ ID NO: 1041 - protein, 503 aa, Serratia ureilytica
MIQAYSYVRFSTKLQSKGSSLERQLKASQEFCTLHNLQLSTKSFRDLGVSAFKNTNRPELEQMLEAIKEGEISKGSYILIEAIDRLSRKGISHTQTVLKDILSYGVNVAFVGEDAKTLQNTVLNQDSLNDLSTVILVALAADLAHKESLRKSKLIKASKAIARDNAKDGKKNKFHVGFWLKYNDDKKEYIFSERLDVVRLIVNDRLKGLGPRKIATHLNDLEIPSPLGKQWNHMTITKVITNPALYGAYQTTVMIDQKAVPDTLIEDYFPAVVNKDTFMLLQADSSKANKGKPSKANPFGGLLKCSCGHGMNFSVKYDKRRNGDAKEYQYHFCSASTEGRCKFKKKIRDLVPLLVEIMDKLEIKETPRKNIAKQEIISITEKIEQLNNMLLQLDKPPLSVLKTISELESKKEKLLKEPEQQSINQQDVKRLSSINDTFEYNQLLKRIVDRIIIHQFDTSYRVEVKKLDGHKQNFLIKNNKVLFKSDTKALTELLRSFKDVEDV

SEQ ID NO: 1042 - DNA, 50 bp, Serratia ureilytica
  source 1..50: mol_type = genomic DNA
ttttgtcattatgtaaacatttttcgaaaaatgtttacataatgacaaaa

SEQ ID NO: 1043 - DNA, 40 bp, Serratia ureilytica
  source 1..40: mol_type = genomic DNA
cctcggcgccaacatttttcgtgatttcttcgccggcgtg

SEQ ID NO: 1044 - DNA, 40 bp, Serratia ureilytica
  source 1..40: mol_type = genomic DNA
cctcggcgccaacatttttgatgatttcttcgccggcgtg

SEQ ID NO: 1045 - DNA, 50 bp, Serratia ureilytica
  source 1..50: mol_type = genomic DNA
tattctccttaagaagacatttttgaaaaactgttttaaaaaagagaaaa

SEQ ID NO: 1046 - protein, 532 aa, Clostridioides difficile
MKAAIYSRKSRFTGKGDSIENQIQLCIDYAKSIGVKDFLIYEDEGFSGSNIDRPQFKKMMQDAKDKKFSYLVCYRLDRISRNVSDFSTLIEKLNELSISFISIKEQFDTSTPMGRAMMFISSVFAQLERETIAERIKDNMYELARSGRWLGGNTPHGFNSEKITFLDENLKERSMYKLQVNDEQMEIVKLIYNKYLELRSLSKLYKYVYNNGIRGPRGGKFDPSSLSRILRNPAYVKANDEILDYLKNSGMDVVGTPDRKCGILTYAKNTSNSIAAIAKHHGVIEPEIWLEVQNQLDKNRDKTPRISTGKTALLSGLIKCGKCGSNMRITYKGKKTDKDLKYYYICGTKKTLGSDSCNCKNLNGPLVESLVIDKIKNCKEESIISAFNSNNIKTDNVFNIFKSETNLLKNQILDKERLIKNLVIELAKNTGSTASDYIVSQIESLNNEISILKDKINILESSNINISSDSINIDIIVSNLKRFNDEVDNASLDDKRLLLSTIINSIVWDSSLGNLNIVYMGAEVDNSVSLSN

SEQ ID NO: 1047 - DNA, 50 bp, Clostridioides difficile
  source 1..50: mol_type = genomic DNA
acttttttagctatagcaaaaaaaaggtgtataaaagtgcaactttagaa

SEQ ID NO: 1048 - DNA, 40 bp, Clostridioides difficile
  source 1..40: mol_type = genomic DNA
acatgatattggtgaagcaataagcatatcagataaggtt

SEQ ID NO: 1049 - DNA, 40 bp, Clostridioides difficile
  source 1..40: mol_type = genomic DNA
acatgatattggtgaagcattaagcatatcagataaggtt

SEQ ID NO: 1050 - DNA, 50 bp, Clostridioides difficile
  source 1..50: mol_type = genomic DNA
acatttttgcacagagccaaataattgcttataacatagtgactttagaa

SEQ ID NO: 1051 - protein, 466 aa, Bacillus paranthracis
MPVGIYIRVSTEEQAREGFSISAQREKLKAYCESRNWDDYKFYVDEGLSAKDTNRPQLRTMLSHIEQGLITTVLVYKLDRLTRSVIDLYKLIDVFDKYNCSFKSHTEEYDTSTAMGRMFITIIAVLAQWERENLGERVRMGQIEKARQGKYSAKAPFGFNKDKDDVLVINEEESKVVLDMIKRIEEGYSIRRLARHLDSYTKPIRAHKWHIATILSILSNPALYGAIYWAGEIIEGAHLGIITKEEFDKLQQLISSRQNFKKRKVSSIHMFQMTLVCPTCGSRFTCERSAYTRKTDKVTIEHNRYRCQPCALYGRKSMSVSEINTEKAFIDYINGLQFNNMPEQKSTEEVNELEIVKKQQVNIEKQREKYLKAWSKDLISDDEFTNLMKDTKKELEKLKEQLKHLKEDEEDEVTNYEDTKEIVNDIKDNWYALTQEEKKRFVNMFIESIYVDKIGNQVIVKNVNFY

SEQ ID NO: 1052 - DNA, 50 bp, Bacillus paranthracis
  source 1..50: mol_type = genomic DNA
ttttgtatttatgttaaatttacacatatatagtttatataaatacaaaa

SEQ ID NO: 1053 - DNA, 40 bp, Bacillus paranthracis
  source 1..40: mol_type = genomic DNA
ctttgtgttcaaatagagacatacaaaatgctcctgctgc

SEQ ID NO: 1054 - DNA, 40 bp, Bacillus paranthracis
  source 1..40: mol_type = genomic DNA
ctttgtgttcaaatagagaaatacaaaatgctcctgctgc

SEQ ID NO: 1055 - DNA, 50 bp, Bacillus paranthracis
  source 1..50: mol_type = genomic DNA
ttttttgttaagtctaaaattacaaatataaaaattttcaaaataaaaaa

SEQ ID NO: 1056 - protein, 596 aa, Streptococcus anginosus
MKDVLLNSFFIEEFERKEVIVRNYEKITALYERLSRDDELQGESNSIVNQKKILEEYASKNNLFNSIHFTDDGISGTQFDRPGFMAMMNGVNQGNIGCIIVKDMSRLGRDYLKVGQCMEILRQKGVRLIAINDNVDSFYKDDDFTPFRNIMNEWYARDTSRKIKSTFKAKGESGKHTGSSPPYGYIKDKDDKNQWIIDEKAAEVVRRIFHLTMDGKGPYAIARILEADKIDIPAYHQQKLGYGLHQSKVFEYPYRWCSSTIASILKKQEYLGHTVNFKTRKHFKDKKSKYVSEDNWLIFENTHEPIIDQETFDNVQRIRGNVKRYPDGWGEYHPLTGLMYCADCGSKMYVHRTSNYKNIPYYTCSAYTKIPCGTLCPSAHRIKAEVVLKLIQSTLQDIKKSLDEDNEAFLHSIQNEMEESEKIEMEKKRTRLTDSTNRLQELERLMCRIYEDMILEKIPNTRYEILNNQYETEQRELSKEIDGLEKAIKRYEKETNRAKKFIRLIERYDNFDELTPTIINEFVEKILVHERDRKGSQTANQKVEIYFNFIGNYEPPKEELSEEEMQKLREEEEKERARKDRLHQNYLKRKANGKQK

SEQ ID NO: 1057 - DNA, 50 bp, Streptococcus anginosus
  source 1..50: mol_type = genomic DNA
aaaagtccttgacaagtagcaacaggagtaatagaattaagaagaacact

SEQ ID NO: 1058 - DNA, 40 bp, Streptococcus anginosus
  source 1..40: mol_type = genomic DNA
aaaatataaacttgctgccggaaaaacagcaaaatctatt

SEQ ID NO: 1059 - DNA, 40 bp, Streptococcus anginosus
  source 1..40: mol_type = genomic DNA
aaaatataaacttgctgccaaaaaaacagcaaaatctatt

SEQ ID NO: 1060 - DNA, 50 bp, Streptococcus anginosus
  source 1..50: mol_type = genomic DNA
aagaatcctcttgtagtagcaacaaaaattataaaatgcctaagaacaaa

SEQ ID NO: 1061 - protein, 635 aa, Peptostreptococcus stomatis
MKNVLLNSFFIEEFERKEVIVRNYEKITALYERLSRDDELQGESNSIVNQKKILEEYAKKNHLENIIHFTDDGISGTQFDRPGFMAMMNGVNQGNIGCIIVKDMSRLGRDYLKVGQCMEILRQKGVRLIAINDNVDSFYKDDDFTPFRNIMNEWYARDTSRKIKSTFKAKGESGKHTGSSPPYGYIKDKDDKNQWIIDEKAAEVVRRIFHLTMDGKGPYAIARILEADKIDIPAYHQQKLGYGLHQSKVFEYPYRWCSSTIASILKKQEYLGHTVNFKTRKHFKDKKSKYVSEDNWLIFENTHEPIIDQETFDNVQRIRGNVKRYPDGWGEYHPLTGLMYCADCGSKMYVHRTSNYKNIPYYTCSVYTKVPCGTLCPSAHRIKAEVVLKLIQSTLQDIKKSLDEDNEAFLRSIQNEMEESEKMEMEKKKTRLTDSKNRLQELERLMCRIYEDMILEKIPNNRYEILNNQYETEQRELSKEIDGLEKAIKRYEKETDRAKKFIRLIERYDNFDELTPTIINEFVEKILVHERDRKGSQTANQKVEIYFNFIGNYEPPKEELSEEEMQKLREEEEKERERKDKLHQNYLKRKANGKQKEYEERYKARREEKKQEKLKVLKRAGIPVSEYRKIFKKQK

SEQ ID NO: 1062 - DNA, 50 bp, Peptostreptococcus stomatis; identical to SEQ ID NO: 1057
  source 1..50: mol_type = genomic DNA

SEQ ID NO: 1063 - DNA, 40 bp, Peptostreptococcus stomatis
  source 1..40: mol_type = genomic DNA
aaagtacaaattggctgccggaaaaacagccaagtctatt

SEQ ID NO: 1064 - DNA, 40 bp, Peptostreptococcus stomatis
  source 1..40: mol_type = genomic DNA
aaagtacaaattggctgccaaaaaaacagccaagtctatt

SEQ ID NO: 1065 - DNA, 50 bp, Peptostreptococcus stomatis; identical to SEQ ID NO: 1060
  source 1..50: mol_type = genomic DNA

SEQ ID NO: 1066 - protein, 638 aa, Blautia pseudococcoides
MNVGYVRLSRDDDKRNYVSIENQMLIIRQYAAERNIVIDRWYEDDGVSGYIFDRPGFNQLMADLEKDIDTVFVKDFSRLGRHNAKVLLLLDEFQERGKQLIVIDDSYDSSNPDDDTIGIKTWFNEKYVKDTSKKIRRALGARQKEGTLMTQPPFGYKRNEKDKAIIEVVPKEAEYVKMIFDLYLKGSGYRKIAAYLTQNHVPTPSMIRHERELEEGRHTKRQIATEWSDGMVKDMLDNDFYIGTFRLHKRERVTIHGKDKRVPKENQNVFENNHPPIIDKVTFDLVQEVKAKRVKNNYRGSRGQWIGSEIPNPFGSCLFCKDCGSRLTPIVRQTSSRERKYYICSTYNTKGRRYCSKAHLIEEQDLMEDVVNYIQLCRDSLSEMISTYDMKDFESEKKSVEEKRSDIQEMILEQKKQLKTLFSQKVKDLAVSPENEDIINETYNSLQQDILAAIHSLELQLDELNNTKLETVDVRKKLKTALEVVDDIIQKGILDRKDIEILVERILVDENGLPEIELKYGLSGLIKYSPAEELNRRENTIIYTTLQLILEDTRGYTSAKYLSAKLTDAGFKKSKKSVLPYIGLMIDMGVIKPSDNSLKPYTIVKTPAEIKEIMAAFQQNISSDSTYDQNLHLYMVNR

SEQ ID NO: 1067 - DNA, 50 bp, Blautia pseudococcoides
  source 1..50: mol_type = genomic DNA
atttacatttatatatggtcaacaggtgtaagcctctacataatgtaaat

SEQ ID NO: 1068 - DNA, 40 bp, Blautia pseudococcoides
  source 1..40: mol_type = genomic DNA
tattctgggcggtcgggcaggcggtatgccggaaatggta

SEQ ID NO: 1069 - DNA, 40 bp, Blautia pseudococcoides
  source 1..40: mol_type = genomic DNA
tattctgggcggtcgggcatccggtatgccggaaatggta

SEQ ID NO: 1070 - DNA, 50 bp, Blautia pseudococcoides
  source 1..50: mol_type = genomic DNA
ataaacatttacaaatgctcaacatcactaatcatcaggggaatgtaaat

SEQ ID NO: 1071 - protein, 502 aa, Clostridium perfringens
MTNKICIYLRKSRADEELEKTLGEGETLYKHRNALLKFAKEKKLNIVEIKEEIVSGESLFFRPQMLELLKEVEANKYDGVLVMDMQRLGRGDMKDQGIILETFKNSNTKIITPQKTYDLNNDFDEEYTEFEAFMSRKELKMINRRMQGGRVRSIEEGNYIATNPPFGYDISFIKKSRTLKINEHESKAVKLIFKLYIKGNGASFIANELNNLGYKTKLGNNFSSSSVLTIIKNPVYAGKIAWKRKDIKKSRTPGKIKDTKLRDKSEWIISDGKHEAIIDMETWNLAEEILKGRYHIPYQLANAPVNPFAGLITCGVCGKKMVMRKARGINRLMCIYKCGNKSTRFDNVESDCLDALKEYLVNYSAEIKNSTKKEDVDVYSNQISMLKKELSLLNNQKLKLFDLLERNIYDETTFLERSKNINDRIFSINNSLCNLEKLLKKKSIRSYEEDIKLFKSVLDAYNETEDVSKRNTLLKSILYKIEYTKTEKGKDYEIKLFPKLRK

SEQ ID NO: 1072 - DNA, 50 bp, Clostridium perfringens
  source 1..50: mol_type = genomic DNA
tacatataacatactaggtatatttcattacattcaatatgttgtatgta

SEQ ID NO: 1073 - DNA, 40 bp, Clostridium perfringens
  source 1..40: mol_type = genomic DNA
aatatctataagacaaatttcattaccttccttatctact

SEQ ID NO: 1074 - DNA, 40 bp, Clostridium perfringens
  source 1..40: mol_type = genomic DNA
aatatctataagacaaatttgattaccttccttatctact

SEQ ID NO: 1075 - DNA, 50 bp, Clostridium perfringens
  source 1..50: mol_type = genomic DNA
tacatataaatgtgtatgtgtatatgagtacatccatatatgtgcatgta

SEQ ID NO: 1076 - protein, 569 aa, Vibrio cholerae
MTIAYSYLRLSTKEQIKGDGARRQFEATIKACEEHGWQLSTTTFKDLGRSAYHGHHLKHGDFGVILESIREGIIPSGSVLVLENVDRMSRQDPQESVYLMLDIIRAGVKIYTLHDRRLHEKESKDSFMNLMVWALAAERAHDESRVKSERVRQAKAERRRQAREEGKAIVGRVPSWIRKVTPKGGEPYYELDEERTEVVRLIFQLKLDGHGLGAITNELVRRGIPPMGNRKLSTGEMKWQVSTIRKWLSSPTVYGQYQPHIRVDGKKVPEGDPIDNFYPAAVDRETFLKVQAILGKHNRGRTAEEGENMLRGLLRCECGGNLSLHITKRGDRRYKYLRCNHDFMDSCTSKRFDYDGVESLLLQTLQSIDWSSVLGIQSDKNRDVISTLKERKVVLDEDLNETNKRMTNLSKQLEALDEPSMFLLNRLSELEKHATALLQELGKVSEELEGLEHAVETSSNSFKQGSEIIEFLGLPLRSIDPEELVKKRVKMNSILRREIDHVYVSKLNEDLWRWSVVATGGESLFDLDINGKCTDGDIASAHTGLCGVQYKKVDRRKFNRVKKDSIEFS

SEQ ID NO: 1077 - DNA, 50 bp, Vibrio cholerae
  source 1..50: mol_type = genomic DNA
tttttactaattgtggatttcttcaagaataaatatacatttggtaaaac

SEQ ID NO: 1078 - DNA, 40 bp, Vibrio cholerae
  source 1..40: mol_type = genomic DNA
cgtggcggtggatttcttcaatatgggcgctatggaaaac

SEQ ID NO: 1079 - DNA, 40 bp, Vibrio cholerae; identical to SEQ ID NO: 1078
  source 1..40: mol_type = genomic DNA

SEQ ID NO: 1080 - DNA, 50 bp, Vibrio cholerae
  source 1..50: mol_type = genomic DNA
tttttattaaaaaaggatttttttaagaaaaaatgattttttggtaacac

SEQ ID NO: 1081 - protein, 569 aa, Vibrio cholerae; identical to SEQ ID NO: 1076

SEQ ID NO: 1082 - DNA, 50 bp, Vibrio cholerae; identical to SEQ ID NO: 1077
  source 1..50: mol_type = genomic DNA

SEQ ID NO: 1083 - DNA, 40 bp, Vibrio cholerae
  source 1..40: mol_type = genomic DNA
ggcggtggtggatttcttcaatatgggcgctatggaaaac

SEQ ID NO: 1084 - DNA, 40 bp, Vibrio cholerae; identical to SEQ ID NO: 1083
  source 1..40: mol_type = genomic DNA

SEQ ID NO: 1085 - DNA, 50 bp, Vibrio cholerae; identical to SEQ ID NO: 1080
  source 1..50: mol_type = genomic DNA

SEQ ID NO: 1086 - protein, 576 aa, Vibrio vulnificus
MTIAYSYLRLSTKEQIKGDGARRQFEATIKACEEHGWQLSTTTFKDLGRSAYHGHHLKHGDFGVILESIREGIIPSGSVLVLENVDRMSRQDPQESVYLMLDIIRAGVKIYTLHDRRLHEKESKDSFMNLMVWALAAERAHDESRVKSERVRQAKAERRRQAREEGKAIVGRVPSWIRKVTPKRGEPYYELDEKRAEVVRLIFQMKIDGHGLGAITNELVRRGIPPMGNRRIATGEMKWQVSTVRKWLSSPTVYGQYQPHIRVDGKKVPEGDPIDNFYPAAVDRETFLKVQAILGKHNRGRTAEEGENMLRGLLRCECGGNLSLHITKRGDKRYKYLRCNHDFMDSCTSKRFDYDGVESLLLQTLQSIDWSSVLGIQYDKNKGAMSSLKERKVVLDQDLNETNKRMTNLSKQLEALDEPSMFLLNRLSELEKHSMALLQELDKVSKELEGLEHAVEISSNSFKQGSEIIAFLGLPLRSIDPEELVKKRVKMNAILRKEIDHIYVSKLNEDWWRWSVVATGGEPLFDLDINGKCTYGDIASAHTGLCGVQYKKVDGRKFNRAKRTALNSVDNDELNK

SEQ ID NO: 1087 - DNA, 50 bp, Vibrio vulnificus; identical to SEQ ID NO: 1077
  source 1..50: mol_type = genomic DNA

SEQ ID NO: 1088 - DNA, 40 bp, Vibrio vulnificus
  source 1..40: mol_type = genomic DNA
cgtcgccgttgatttcttcaacatgggtgcgatggaaaac

SEQ ID NO: 1089 - DNA, 40 bp, Vibrio vulnificus; identical to SEQ ID NO: 1088
  source 1..40: mol_type = genomic DNA

SEQ ID NO: 1090 - DNA, 50 bp, Vibrio vulnificus; identical to SEQ ID NO: 1080
  source 1..50: mol_type = genomic DNA

SEQ ID NO: 1091 - protein, 543 aa, Rossellomorea aquimaris
MMNIHSIKRIKGVYSMIGIYCRVSTQTQADEGYSLETQEELCMKRAKDLGYPPSQVKLYREEGRSGEDIDRPVMNELREDTANGVTTKVIITDPDRLTRDLTDKLIVCKEWDRQGVEIVFIDTEYQNTPEGQMFFNMRSVFAQYELSQIRKRTIRGRLRAVEKDKKIMPMRVAPYGYDYKDGELLVNDQEAVFVKKIYKWYLDGSTLREIGNKLFKAGAVPKRAESKNFGATSIRRILTSEIYLGKYVYNKRETKKVWGERTSSGKQKKTYTIRDEADWITVDVPQLIDQKTFDLAQKQKEKNIKKRGNVKFNYLFKGMIRCKHCGRIWECTSYSGRLDKKTGERKKYAVYRCPNLNPKRYGDGVEKCESKSIRIDLLDDYIMNMIRECLTSRELFEEAIKAQMTDKDDGLDVEIADLEKQLKKKTDERERVKRMFVVAQVITEDEMLRDMKKINGDISKLTDEIDVLNRRKENQEKSELSDEDVDVIISNVEKMFDGEMEFQDKRELMELLIEEIVIDAKTEKIGITVKGLLEHCFMFTSSR

SEQ ID NO: 1092 - DNA, 50 bp, Rossellomorea aquimaris
  source 1..50: mol_type = genomic DNA
acattgctttatgtttacatcgtcaagaagttatgaacatgatatgatgt

SEQ ID NO: 1093 - DNA, 40 bp, Rossellomorea aquimaris
  source 1..40: mol_type = genomic DNA
attggttgctcacatcgtcaagaaattcgaaaacacaggg

SEQ ID NO: 1094 - DNA, 40 bp, Rossellomorea aquimaris; identical to SEQ ID NO: 1093
  source 1..40: mol_type = genomic DNA

SEQ ID NO: 1095 - DNA, 50 bp, Rossellomorea aquimaris
  source 1..50: mol_type = genomic DNA
acattgcttcacaattaaatcagcaaatatttatgaacgctacatgatgt

SEQ ID NO: 1096 - protein, 481 aa, Lactococcus garvieae
MKKVAIYVRVSTLNQAEEGYSISEQTDKLKAYCVAKGWTVAEIYTDAGFTGSNIDRPGLQQLINDISVQKFDTVLIYKLDRLSRSVRDTLYLAKDVFAKNNIDFVSLSENIDTSSAMGGLFLTILSAISEFERETIKERMQLGKLGRAKSGKSMMWSRTAFGYLHNTDTGVLEIEPLQAEVVKQIFQEYLNGMSITKLRDKLNSEGHTGKDKPWSYRALRATLANPVYTGKVKYNNQIFDGLHQAIISPELFQAVQSELEIRQKEAYQKNNNPRPFQSKYILSGIAKCGYCKTPLQVILGSVRKDGSRDIKYQCKNRFPRKTKGVTIYNDNKKCDSGFYYMSDIEAEVIDQISLLQLNNGALENLISINSEPVIDTTEFEKQLINIDNKIKRLSDLYINDMISLVEMKQRSENLKKDRDALKAKITSSNKTSTTDRLKTARKLIGNKPIESLSYDQQKNIINRIISRVYVTAETVDITWSL

SEQ ID NO: 1097 - DNA, 50 bp, Lactococcus garvieae
  source 1..50: mol_type = genomic DNA
taaagagttttactatccttcatttcaattaaagatagtgaaattcttta

SEQ ID NO: 1098 - DNA, 40 bp, Lactococcus garvieae
  source 1..40: mol_type = genomic DNA
aagtaagacgacaagcatttcaatcaaagtaaaagctttg

SEQ ID NO: 1099 - DNA, 40 bp, Lactococcus garvieae
  source 1..40: mol_type = genomic DNA
aagtaagacgacaagcattgaaatcaaagtaaaagctttg

SEQ ID NO: 1100 - DNA, 50 bp, Lactococcus garvieae
  source 1..50: mol_type = genomic DNA
tgaagagtttgtttattcttacttgaaatcaaaaataacctcattcttta

SEQ ID NO: 1101 - protein, 481 aa, Lactococcus garvieae
MKRVAIYVRVSTLNQAEEGYSISEQTDKLKAYCVAKGWTVAEIYTDAGFTGSNIDRPGMQQLINDISVQKFDTVLIYKLDRLSRSVRDTLYLAKDVFAKNNIDFVSLSENIDTSSAMGGLFLTILSAISEFERETIKERMQLGKLGRAKSGKSMMWSRTAFGYLHNTDTGVLEIEPLQAEVVKQIFQEYLNGMSITKLRDKLNSEGHTGKDKPWSYRALRATLANPVYTGKVKYNNQIFDGLHKAIISPELFQAVQSELEIRQKEAYQKNNNPRPFQSKYILSGIAKCGYCKTPLQVILGSVRKDGSRDIKYQCKNRFPRKTKGVTIYNDNKKCDSGFYYMSDIEAEVIDQISLLQLNNGALENLISINSEPVIDTTEFEKQLINIDNKIKRLSDLYINDMISLDEMKQRSGNLKKDRDALKAKITSSNKTSATDRLKAARKLIGNKPIESLSYEQQKNIINRIISHVYVTAETVDITWSL

SEQ ID NO: 1102 - DNA, 50 bp, Lactococcus garvieae; identical to SEQ ID NO: 1097
  source 1..50: mol_type = genomic DNA

SEQ ID NO: 1103 - DNA, 40 bp, Lactococcus garvieae; identical to SEQ ID NO: 1098
  source 1..40: mol_type = genomic DNA

SEQ ID NO: 1104 - DNA, 40 bp, Lactococcus garvieae; identical to SEQ ID NO: 1099
  source 1..40: mol_type = genomic DNA

SEQ ID NO: 1105 - DNA, 50 bp, Lactococcus garvieae; identical to SEQ ID NO: 1100
  source 1..50: mol_type = genomic DNA

SEQ ID NO: 1106 - protein, 553 aa, Hafnia alvei
MRTKMAYCYCRVSSGHQTTEKGGYGMSRQQGMLMDYVDEYSDSDGLGYGLSSESVVFLNAEGVSGFSGANLAKGSVLLAFIEDVKAGKIKNAVLCIENIDRFSRTNPQTAALSFLQLIEAGCNIHEAENGIVHHNNSDLNLISSGLIRSHRESLRKQKLSLKNWDKRFDKVVRKEAVLTARCPSWLYVEDNKYLEVIEHTKSIRLIFDLYIKGFGQAYIRDELNSRQWLYNGKTWGSWNVHRVLNDVRVTGKHRTQSDLRKNFDGLVIYPAIISEMDFNSVQQKLKSPGRSKKINRRANNLFSGLLMCGHCNTAHILLQVDKDKRFGRCSYATAGNNRCHARGFKYEIIENALIEHLRHFEIQDLKEDEYNLELHNLQDELIYHNNYCAEVQHIVDSVDIPSDRDYRILKNIEGKIREIEGRIDEIKAAGNVVYEFEKIVESINLDLKDVNNVSIRQEFNSRLRKVIKSISVFRSNELILLSIDYYACKDYQWININPKTGVLQGNLYVEEDQIVIQTNSGIVTYSTTNRQYSLNENVINEDEALKVLQEHIK

SEQ ID NO: 1107 - DNA, 50 bp, Hafnia alvei
  source 1..50: mol_type = genomic DNA
aactttaaattagcgtatatgattaccatgagttatgctaaattatagtt

SEQ ID NO: 1108 - DNA, 40 bp, Hafnia alvei
  source 1..40: mol_type = genomic DNA
ggcaatgattgcaataacaaccattaattcgattagcgta

SEQ ID NO: 1109 - DNA, 40 bp, Hafnia alvei
  source 1..40: mol_type = genomic DNA
ggcaatgattgcaataacagtcattaattcgattagcgta

SEQ ID NO: 1110 - DNA, 50 bp, Hafnia alvei
  source 1..50: mol_type = genomic DNA
aaatttaaaatgtagtatttgattgttttgatttattttaaattatcctt

SEQ ID NO: 1111 - protein, 553 aa, Hafnia paralvei
MRTKMAYCYCRVSSGHQTTEKGGYGMSRQQGMLMDYVDEYSDSDGLGYGLSSESVVFLNAEGVSGFSGANLAKGSVLLAFIEDVKAGKIKNAVLCIENIDRFSRTNPQTAALSFLQLIEAGCNIHEAENGIVHHNNSDLNLISSGLIRSHRESLRKQKLSLKNWDKRFDKVVRKEAVLTARCPSWLYVEDNKYLEVIEHTKSIRLIFDLYIKGFGQAYIRDELNSRQWLYNGKTWGSWNVHRVLNDVRVTGKHRTQSDLRKNFDGLVIYPAIISEMDFNSVQQKLKSPGRSKKINRRANNLFSGLLMCGHCNTAHILLQVDKDKRFGRCSYATAGNNRCHARGFKYEIIENALIEHLRHFEIQDFKEDEYNLELHNLQDELIYHNNYCAEVQHIVDSVDIPSDRDYRILKNIEGKIREIEGRIDEIKAAGNVVYEFEKIVESINLDLKDVNNVSIRQEFNSRLRKVIKSISVFRSNELILLSIDYYACKDYQWININPKTGVLQGNLYVEEDQIVIQTNSGIVTYSTTNRQYSLNENVINEDEALKVLQEHIK

SEQ ID NO: 1112 - DNA, 50 bp, Hafnia paralvei; identical to SEQ ID NO: 1107
  source 1..50: mol_type = genomic DNA

SEQ ID NO: 1113 - DNA, 40 bp, Hafnia paralvei
  source 1..40: mol_type = genomic DNA
ggcaataatggcaataacaaccattaattcgattagcgta

SEQ ID NO: 1114 - DNA, 40 bp, Hafnia paralvei
  source 1..40: mol_type = genomic DNA
ggcaataatggcaataacagtcattaattcgattagcgta

SEQ ID NO: 1115 - DNA, 50 bp, Hafnia paralvei; identical to SEQ ID NO: 1110
  source 1..50: mol_type = genomic DNA

SEQ ID NO: 1116 - protein, 503 aa, Clostridium tunisiense
MKKVAVYARRSEEKETGESIQNQLNICKRYAENYYKDASIDEYFDDDYSGRNMNRPEFSKLMKLVKKGYYQSIIFWKLDRVARNALDFLALHKELEKIGVNLVSVTEGFDPSTPAGKLMMTMLAAVAEMERKNISQRVATNMNEMAKQGRWTGGTVPFGFKVNSIEGKKYLIEDENNIKIASKLFKKYLEEESLYTVSKWLKANYAINKQPTSIKRILQNLVYVQADNDIYRYLQNKGIVLHGELNNNGLLSYGKTNNTKEEGMEFREESEWIVSVAKHKGVITGAEYIHIQKTLEKKTNSGRRGTGEVTYLNGLCRCAYCKGYMRTKQKKNPNGSIYRYFACGNRDSGRNDCKNIMVKISDVEETVLDKLYHYKVGSVQVENDLADTSILKADLDKKKRQIKNLVMKISLDEELEDIFLEQIKELKNEVTEIEKSMDDIERQNLMNDVDSYNREAFLDNLKNFKDLFERSVDVETKRKLVKSLVKRVNIDGLNKIIELDPYF

SEQ ID NO: 1117 - DNA, 50 bp, Clostridium tunisiense
  source 1..50: mol_type = genomic DNA
tttttattatctactattcttttcgtaaggtgaaccttgtgtaataaaaa

SEQ ID NO: 1118 - DNA, 40 bp, Clostridium tunisiense
  source 1..40: mol_type = genomic DNA
tttatctcgaacctttttcgtaaggtgacccatttgctgc

SEQ ID NO: 1119 - DNA, 40 bp, Clostridium tunisiense
  source 1..40: mol_type = genomic DNA
tttatctcgaacctttttcataaggtgacccatttgctgc

SEQ ID NO: 1120 - DNA, 50 bp, Clostridium tunisiense
  source 1..50: mol_type = genomic DNA
tttttattatatggtatgcttttaatttggagaacctacttttttaaaaa

SEQ ID NO: 1121 - protein, 635 aa, Salmonella enterica
MRLYRYRGVVIMIKTFIYSRVSSQEQLSGGGLDRQETDVREYVTRNGLDQYEIVAMVDRGISGYDGSNMRDGELGKWYKDAITGMYWGSHLVLEAIDRFSRRDPMLAMEDFTVLVNKGGIKVHIVKFNTFINGDNLPMLSMMMNLAHSESKQKSDRISKGWQRRRRMALDNGTAITARTPYWIDVRDNEYRLNNSSIAVVEAFAMYKQGLSCGLIAKKLNELKHYFPYMWTKTAVQHIVDGLNTSGIIDAPRAIKTIKAFYKSGFSVEDIAKKMNAEFQFMKEWNAPAVHKLLQNKSVTGLVEIQKRKLIQEFDSDGKPLELRTKSEGEKYFESIYPQIISIDDFELIQKLLESNRKVDTKTGKGQTTGGTVTQNEDGELVKQFILSSLCRCYKCGGAMFNNIVRSKRKNGKVDTYSYLRCLNERDAHCDVKALNYPVIERAIIEHVKGLNFDTMFKGTNNSELELLKTREVELLRDIATYEDAIAARKAAGKNTSPVLVTSLVDAQDDLEALQKKIRAISGVTVNAEELTSLNESVFDVAEYELRNMVELELQKIIKRITFNCTEKNIYFITIQYNTGTVLQHGLKVDKKKGVIETYELHEGNKGYVSNGEVITPALIEAAESKNIGIFEGKVM

SEQ ID NO: 1122 - DNA, 50 bp, Salmonella enterica
  source 1..50: mol_type = genomic DNA
tttttgtgtaaagtgcaacctatacaaatgagttgatcaaaatacaaaaa

SEQ ID NO: 1123 - DNA, 40 bp, Salmonella enterica
  source 1..40: mol_type = genomic DNA
ttttagcttgataatcatacaaataggtgccgttgcagca

SEQ ID NO: 1124 - DNA, 40 bp, Salmonella enterica
  source 1..40: mol_type = genomic DNA
ttttagcttgataatcatattaataggtgccgttgcagca

SEQ ID NO: 1125 - DNA, 50 bp, Salmonella enterica
  source 1..50: mol_type = genomic DNA
tgtttgagttcatgggaacctatgttaatgagttgaaaagaatggaaaga

SEQ ID NO: 1126 - protein, 569 aa, Methylobacterium durans
MPTAYSYIRMSTDQQIRGDSLRRQLEFSRQWAEQHGVVLDESLRDIGVSAWKGKNRKEGALGRFLEMVNTGEVRRGSYLLVESLDRLSRDQVLEALGLFLEVIRSGITIVTLADNQSYSQESVGNDWSKLIISLTIMARAHEESQRKSERVSQSYVARVAAAKDGRGLSILTPSWITATKRGRGDYLFELNEHAETVRRIFELTADGLGQMAIAQRFNQDGTPTLTPAKGWYNSSVSNILNSRVALGEFQPHRMEGRTRLPAGDPIPDYFPAAVDATLFTRAQARRFKRPFIGGRKGTLFSNIFSGLCLCQRCGGSMVMSTGSKSQGAKQHLRCLSNMRKKGCTNATRFAYADLEPAVLDKVREFQLSDVMRSRRGDDPLKQIDEDIAQARLSIEKLDRLVRNLMQELEEEDDPAFRKAAREKAKARLAERNEQQERLEDLEHSRNKVQAELSEGTRIEDEIEQLRAEWEQADQPTRYQLRAKVNSALRDFIDFINFDGDTQVVTIIVLGGLRAYRFQTGEFLASVDLLPHVGSRSEGGIDPSMFTTDGITAEGDNARRAALNKLLSRA

SEQ ID NO: 1127 - DNA, 50 bp, Methylobacterium durans
  source 1..50: mol_type = genomic DNA
tagcggtaattgcaagcgcactgtttgctgcgcgcttgcatttatttggc

SEQ ID NO: 1128 - DNA, 40 bp, Methylobacterium durans
  source 1..40: mol_type = genomic DNA
gccccattaaccgtgccggttgtaggcctgttaaccatga

SEQ ID NO: 1129 - DNA, 40 bp, Methylobacterium durans
  source 1..40: mol_type = genomic DNA
gccccattaaccgtgccgggggtaggcctgttaaccatga

SEQ ID NO: 1130 - DNA, 50 bp, Methylobacterium durans
  source 1..50: mol_type = genomic DNA
cagtggtaaccacgagctcactgggggcagcgctattattgttatttggc

SEQ ID NO: 1131 - protein, 455 aa, Listeria booriae
MKAAIYIRVSTDEQAKKFSIPAQERLAKAFCESKGWPIYKIYTDGGFSGKNLDRPALQEMLSETDKFDAVIVYRLDRLSRSQVDTMTLIETFFLKNDIEFISLTETLDTTSPGGRAMIGVLAAFSQMERESIRERSIMGRIQRVKSGLRDSPVKKRNFGYDIVGGKLYINESEASIIRDVCNRFEVLQSIGKLQQEQKANGVEVITRARIMNYLTNDLYIGYVHYLDEVHRKGIHEPIISEDQYYRIQAILERIKRAPNINKKSQSLLSGLIRCAVCGSTYHHAVKGSKKYASGKVIEYRYYTCKRNRRKPELEGCANKSYRGEKLEDIVINRIKNYSVDTRTDEKMKDLAENREKIDAQVAKKNRLLALYVDGVYQKSDLDPLMREIDAEIKRLTDEASQQSKEINNKEITKRLLDKNRTLDFDNLDFAEKQRLLRSIIKEIVINGDNVKVYWL

SEQ ID NO: 1132 - DNA, 50 bp, Listeria booriae
  source 1..50: mol_type = genomic DNA
tttagtacctcatgtttttatgacggtagatagctatatgagaacctaat

SEQ ID NO: 1133 - DNA, 40 bp, Listeria booriae
  source 1..40: mol_type = genomic DNA
ttttggctcaagttatgacggtagacgagaaggtacacga

SEQ ID NO: 1134 - DNA, 40 bp, Listeria booriae
  source 1..40: mol_type = genomic DNA
ttttggctcaagttatgactgtagacgagaaggtacacga

SEQ ID NO: 1135 - DNA, 50 bp, Listeria booriae
  source 1..50: mol_type = genomic DNA
ttttgtaccttggtttttgaggaatgtggatagctaatactaaacataat

SEQ ID NO: 1136 - protein, 464 aa, Enterococcus faecalis
MKRAALYIRVSTMEQAKEGYSIPAQTDKLKAFAKAKDMAVAKVYTDPGFSGAKMERPALQEMISDIQNKKIDVVLVYKLDRLSRSQKNTLYLIEDVFLKNNVDFISMQESFDTSTPFGRATIGMLSVFAQLERDTITERMHMGRTERAKQGYYHGSGIVPLGYDYVDGELIINDYEAQIIQEIYDLYVNQGKGQQYITKRMVAKYPDKVKTLTIVKYALTNPLYIGKISWDGKVYDGHHTPIIDKSMYDKAQEIIARKAQKGGEQHGNQLGLLLGITYCGKCGAKVFRYVSGGKKYRYNYYMCRSVKKMLPSLVKDWNCKQPSLRQEVVEKKVIDSLKSLDFKKIERELKQVENKTKSKITTINNQISKKHNEKQKILDLYQYGTFDVTMLNERMKKIDNEINALTDNISNLEGTKSESLINKLETLKTFNWETETTENKILIIKEFVERIELFDDEVIIKYKF

SEQ ID NO: 1137 - DNA, 50 bp, Enterococcus faecalis
  source 1..50: mol_type = genomic DNA
tttaggtacatagtgttatttacactaataaacaaaaccatatacctaaa

SEQ ID NO: 1138 - DNA, 40 bp, Enterococcus faecalis
  source 1..40: mol_type = genomic DNA
ttcgcgtggatgagcaatactttgattcagtgaacctttg

SEQ ID NO: 1139 - DNA, 40 bp, Enterococcus faecalis
  source 1..40: mol_type = genomic DNA
ttcgcgtggatgagcaatagtttgattcagtgaacctttg

SEQ ID NO: 1140 - DNA, 50 bp, Enterococcus faecalis
  source 1..50: mol_type = genomic DNA
ttttgttaccaacttttatctacagtaatacacaaaactacatatttaaa

SEQ ID NO: 1141 - protein, 464 aa, Enterococcus faecalis
MKRAALYIRVSTMEQAKEGYSIPAQTDKLKAFAKAKDMAVAKVYTDPGFSGAKMERPALQEMISDIQNKKIDVVLVYKLDRLSRSQKNTLYLIEDVFLKNNVDFISMQESFDTSTPFGRATIGMLSVFAQLERDTITERMHMGRTERAKQGYYHGSGIVPLGYDYVDGELIINDYEAQIIQEIYDLYVNQGKGQQYITKRMVAKYPDKVKTLTIVKYALTNPLYIGKISWDGKVYDGHHTPIIDKSMYDKAQEIIARKAQKGGEQHGNQLGLLLGITYCGKCGAKVFRYVSGGKKYRYNYYMCRSVKKMLPSLVKDWNCKQPSLRQEVVEKKVIDSLKSLDFKKIERELKQVENKTKSKITTINNQISKKHNEKHKILDLYQYGTFDVTMLNERMKKIDNEINALTANISNLEGTKSESLINKLETLKTFNWETETTENKILIIKEFVERIELYDDEVIIKYKF

SEQ ID NO: 1142 - DNA, 50 bp, Enterococcus faecalis
  source 1..50: mol_type = genomic DNA
tttaggtacatagtgttatttacactaataaacaaaatcatatacctaaa

SEQ ID NO: 1143 - DNA, 40 bp, Enterococcus faecalis
  source 1..40: mol_type = genomic DNA
ttcgcgtggatgagcaatactttgattcagtgatcctttg

SEQ ID NO: 1144 - DNA, 40 bp, Enterococcus faecalis
  source 1..40: mol_type = genomic DNA
ttcgcgtggatgagcaatagtttgattcagtgatcctttg

SEQ ID NO: 1145 - DNA, 50 bp, Enterococcus faecalis; identical to SEQ ID NO: 1140
  source 1..50: mol_type = genomic DNA

SEQ ID NO: 1146 - protein, 464 aa, Enterococcus faecalis
MKRAALYIRVSTMEQAKEGYSIPAQTDKLKAFAKAKDMAVAKVYTDPGFSGAKMERPALQEMISDIQNKKIDVVLVYKLDRLSRSQKNTLYLIEDVFLKNNVDFISMQESFDTSTPFGRATIGMLSVFAQLERDTITERMHMGRTERAKQGYYHGSGIVPLGYDYVDGELIINDYEAQIIQEIYDLYVNQGKGQQYITKRMVAKYPDKVKTLTIVKYALTNPLYIGKISWDGKVYDGHHTPIIDKSMYDKAQEIIARKAQKGGEQHGNQLGLLLGITYCGKCGAKVFRYVSGGKKYRYNYYMCRSVKKMLPSLVKDWNCKQPSLRQEVVEKKVIDSLKSLDFKKIERELKQVENKTKSKITTINNQISKKHNEKQKILDLYQYGTFDVTMLNERMKKIDNEINALTANIANLEGTKSESLINKLETLKTFNWETETTENKILIIKEFVERIELYDDEVIIKYKF

SEQ ID NO: 1147 - DNA, 50 bp, Enterococcus faecalis; identical to SEQ ID NO: 1142
  source 1..50: mol_type = genomic DNA

SEQ ID NO: 1148 - DNA, 40 bp, Enterococcus faecalis; identical to SEQ ID NO: 1143
  source 1..40: mol_type = genomic DNA

SEQ ID NO: 1149 - DNA, 40 bp, Enterococcus faecalis; identical to SEQ ID NO: 1144
  source 1..40: mol_type = genomic DNA

SEQ ID NO: 1150 - DNA, 50 bp, Enterococcus faecalis; identical to SEQ ID NO: 1140
  source 1..50: mol_type = genomic DNA

SEQ ID NO: 1151 - protein, 464 aa, Enterococcus faecalis
MKRAALYIRVSTMEQAKEGYSIPAQTDKLKAFAKAKDMAVTKVYTDPGFSGAKMERPALQEMISDIQNKKIDVVLVYKLDRLSRSQKNTLYLIEDVFLKNNVDFISMQESFDTSTPFGRATIGMLSVFAQLERDTITERMHMGRTERAKQGYYHGSGIVPLGYDYVDGELIINDYEAQIIQEIYDLYVNQGKGQQYITKRMVAKYPDKVKTLTIVKYALTNPLYIGKISWDGKVYDGHHTPIIDKSMYDKAQEIIARKAQKGGEQHGNQLGLLLGITYCGKCGAKVFRYVSGGKKYRYNYYMCRSVKKMLPSLVKDWNCKQPSLRQEVVEKKVIDSLKSLDFKKIERELKQVENKTKSKITTINNQISKKHNEKQKILDLYQYGTFDVTMLNERMKKIDNEINALTANIANLEGIKSESLINKLETLKTFNWETETTENKILIIKEFVERIELFDDEVIIKYKF

SEQ ID NO: 1152 - DNA, 50 bp, Enterococcus faecalis; identical to SEQ ID NO: 1142
  source 1..50: mol_type = genomic DNA

SEQ ID NO: 1153 - DNA, 40 bp, Enterococcus faecalis; identical to SEQ ID NO: 1143
  source 1..40: mol_type = genomic DNA

SEQ ID NO: 1154 - DNA, 40 bp, Enterococcus faecalis; identical to SEQ ID NO: 1144
  source 1..40: mol_type = genomic DNA

SEQ ID NO: 1155 - DNA, 50 bp, Enterococcus faecalis; identical to SEQ ID NO: 1140
  source 1..50: mol_type = genomic DNA

SEQ ID NO: 1156 - protein, 464 aa, Enterococcus faecalis
MKRAALYIRVSTMEQAKEGYSIPAQTDKLKAFAKAKDMAVTKVYTDPGFSGAKMERPALQEMISDIQNKKIDVVLVYKLDRLSRSQKNTLYLIEDVFLKNNVDFISMQESFDTSTPFGRATIGMLSVFAQLERDTITERMHMGRTERAKQGYYHGSGIVPLGYDYVDGELIINDYEAQIIQEIYDLYVNQGKGQQYITKRMVAKYPDKVKTLTIVKYALTNPLYIGKISWDGKVYDGHHTPIIDKSMYDKAQEIIARKAQKGGEQHGNQLGLLLGITYCGKCGAKVFRYVSGGKKYRYNYYMCRSVKKMLPSLVKDWNCKQPSLRQEVVEKKVIDSLKSLDFKKIERELKQVENKTKSKITTINNQISKKHNEKQKILDLYQYGTFDVTMLNERMKKIDNEINALTANISNLEGTKSESLINKLETLKTFNWETETTENKILIIKEFIERIELFDDEVIIKYKF

SEQ ID NO: 1157 - DNA, 50 bp, Enterococcus faecalis; identical to SEQ ID NO: 1142
  source 1..50: mol_type = genomic DNA

SEQ ID NO: 1158 - DNA, 40 bp, Enterococcus faecalis; identical to SEQ ID NO: 1138
  source 1..40: mol_type = genomic DNA

SEQ ID NO: 1159 - DNA, 40 bp, Enterococcus faecalis; identical to SEQ ID NO: 1139
  source 1..40: mol_type = genomic DNA

SEQ ID NO: 1160 - DNA, 50 bp, Enterococcus faecalis; identical to SEQ ID NO: 1140
  source 1..50: mol_type = genomic DNA

SEQ ID NO: 1161 - protein, 464 aa, Enterococcus faecalis
MKRAALYIRVSTMEQAKEGYSIPAQTDKLKAFAKAKDMAVTKVYTDPGFSGAKMERPALQEMISDIQNKKIDVVLVYKLDRLSRSQKNTLYLIEDVFLKNNVDFISMQESFDTSTPFGRATIGMLSVFAQLERDTITERMHMGRTERAKQGYYHGSGIVPLGYDYVDGELIINDYEAQIIQEIYDLYVNQGKGQQYITKRMVAKYPDKVKTLTIVKYALTNPLYIGKISWDGKVYDGHHTPIIDKSMYDKAQEIIARKAQKGGEQHGNQLGLLLGITYCGKCGAKVFRYVSGGKKYRYNYYMCRSVKKMLPSLVKDWNCKQPSLRQEVVEKKVIDSLKSLDFKKIERELKQVENKTKSKITTINNQISKKHNEKQKILDLYQYGTFDVTMLNERMKKIDNEINALTANISNLEGTKSESLINKLETLKTFNWETETTENKILIIKEFVERIELFDDEVIIKYKF

SEQ ID NO: 1162 - DNA, 50 bp, Enterococcus faecalis; identical to SEQ ID NO: 1142
  source 1..50: mol_type = genomic DNA

SEQ ID NO: 1163 - DNA, 40 bp, Enterococcus faecalis; identical to SEQ ID NO: 1143
  source 1..40: mol_type = genomic DNA

SEQ ID NO: 1164 - DNA, 40 bp, Enterococcus faecalis; identical to SEQ ID NO: 1144
  source 1..40: mol_type = genomic DNA

SEQ ID NO: 1165 - DNA, 50 bp, Enterococcus faecalis; identical to SEQ ID NO: 1140
  source 1..50: mol_type = genomic DNA

SEQ ID NO: 1166 - protein, 464 aa, Enterococcus faecalis
MKRAALYIRVSTMEQAKEGYSIPAQTDKLKAFAKAKDMAVAKVYTDPGFSGAKMERPALQEMISDIQNKKIDVVLVYKLDRLSRSQKNTLYLIEDVFLKNNVDFISMQESFDTSTPFGRATIGMLSVFAQLERDTITERMHMGRTERAKQGYYHGSGIVPLGYDYVDGELIINDYEAQIIQEIYDLYVNQGKGQQYITKRMVAKYPDKVKTLTIVKYALTNPLYIGKISWDGKVYDGHHTPIIDKSMYDKAQEIIARKAQKGGEQHGNQLGLLLGITYCGKCGAKVFRYVSGGKKYRYNYYMCRSVKKMLPSLVKDWNCKQPSLRQEVVEKKVIDSLKSLDFKKIERELKQVENKTKSKITTINNQISKKHNEKQKILDLYQYGTFDVTMLNERMKKIDNEINALTANIANLEGIKSESLINKLETLKTFNWETETTENKILIIKEFVERIELFDDEVIIKYKF

SEQ ID NO: 1167 - DNA, 50 bp, Enterococcus faecalis
  source 1..50: mol_type = genomic DNA
tttaggtacatagtgttatttacactaataaacaaaactatatacctaaa

SEQ ID NO: 1168 - DNA, 40 bp, Enterococcus faecalis; identical to SEQ ID NO: 1143
  source 1..40: mol_type = genomic DNA

SEQ ID NO: 1169 - DNA, 40 bp, Enterococcus faecalis; identical to SEQ ID NO: 1144
  source 1..40: mol_type = genomic DNA

SEQ ID NO: 1170 - DNA, 50 bp, Enterococcus faecalis; identical to SEQ ID NO: 1140
  source 1..50: mol_type = genomic DNA

SEQ ID NO: 1171 - protein, 464 aa, Enterococcus faecalis
MKRAALYIRVSTMEQAKEGYSIPAQTDKLKAFAKAKDMAVTKIYTDPGFSGAKMERPALQEMISDIQNKKIDVVLVYKLDRLSRSQKNTLYLIEDVFLKNNVDFISMQESFDTSTPFGRATIGMLSVFAQLERDTITERMHMGRTERAKQGYYHGSGIVPLGYDYVDGELIINDYEAQIIQEIYDLYVNQGKGQQYITKRMVAKYPDKVKTLTIVKYALTNPLYIGKISWDGKVYDGHHTPIIDKSMYDKAQEIIARKAQKGGEQHGNQLGLLLGITYCGKCGAKVFRYVSGGKKYRYNYYMCRSVKKMLPSLVKDWNCKQPSLRQEVVEKKVIDSLKSLDFKKIERELKQVENKTKSKITTINNQISKKHNEKQKILDLYQYGTFDVTMLNERMKKIDNEINALTANIANLEGTKSESLINKLETLKTFNWETETTENKILIIKEFVERIELFDDEVIIKYKF

SEQ ID NO: 1172 - DNA, 50 bp, Enterococcus faecalis; identical to SEQ ID NO: 1167
  source 1..50: mol_type = genomic DNA

SEQ ID NO: 1173 - DNA, 40 bp, Enterococcus faecalis; identical to SEQ ID NO: 1143
  source 1..40: mol_type = genomic DNA

SEQ ID NO: 1174 - DNA, 40 bp, Enterococcus faecalis; identical to SEQ ID NO: 1144
  source 1..40: mol_type = genomic DNA

SEQ ID NO: 1175 - DNA, 50 bp, Enterococcus faecalis; identical to SEQ ID NO: 1140
  source 1..50: mol_type = genomic DNA

SEQ ID NO: 1176 - protein, 464 aa, Enterococcus faecalis
MKRAALYIRVSTMEQAKEGYSIPAQTDKLKAFAKAKDMAVTKVYTDPGFSGAKMERPALQEMISDIQNKKIDVVLVYKLDRLSRSQKNTLYLIEDVFLKNNVDFISMQESFDTSTPFGRATIGMLSVFAQLERDTITERMHMGRTERAKQGYYHGSGIVPLGYDYVDGELIINDYEAQIIQEIYDLYVNQGKGQQYITKRMVAKYPDKVKTLTIVKYALTNPLYIGKISWDGKVYDGHHTPIIDKSMYDKAQEIIARKAQKGGEQHGNQLGLLLGITYCGKCGAKVFRYVSGGKKYRYNYYMCRSVKKMLPSLVKDWNCKQPSLRQEVVEKKVIDSLKSLDFKKIERELKQVENKTKSKITTINNQISKKHNEKQKILDLYQYGTFDVTMLNERMKKIDNEINALTDNISNLEGTKSESLINKLETLKTFNWETETTENKILIIKEFVERIELFDDEVIIKYKF

SEQ ID NO: 1177 - DNA, 50 bp, Enterococcus faecalis; identical to SEQ ID NO: 1137
  source 1..50: mol_type = genomic DNA

SEQ ID NO: 1178 - DNA, 40 bp, Enterococcus faecalis; identical to SEQ ID NO: 1143
  source 1..40: mol_type = genomic DNA

SEQ ID NO: 1179 - DNA, 40 bp, Enterococcus faecalis; identical to SEQ ID NO: 1144
  source 1..40: mol_type = genomic DNA

SEQ ID NO: 1180 - DNA, 50 bp, Enterococcus faecalis; identical to SEQ ID NO: 1140
  source 1..50: mol_type = genomic DNA

SEQ ID NO: 1181 - protein, 464 aa, Enterococcus faecalis
MKRAALYIRVSTMEQAKEGYSIPAQTDKLKAFAKAKDMAVTKVYTDPGFSGAKMERPALQEMISDIQNKKIDVVLVYKLDRLSRSQKNTLYLIEDVFLKNNVDFISMQESFDTSTPFGRATIGMLSVFAQLERDTITERMHMGRTERAKQGYYHGSGIVPLGYDYVDGELIINDYEAQIIQEIYDLYVNQGKGQQYITKRMVAKYPDKVKTLTIVKYALTNPLYIGKISWDGKVYDGHHIPIIDKSMYDKAQEIIARKAQKGGEQHGNQLGLLLGITYCGKCGAKVFRYVSGGKKYRYNYYMCRSVKKMLPSLVKDWNCKQPSLRQEVVEKKVIDSLKSLDFKKIERELKQVENKTKSKITTINNQISKKHNEKQKILDLYQYGTFDVTMLNERMKKIDNEINALTANIANLEGTKSESLINKLETLKTFNWETETTENKILIIKEFVERIELFDDEVIIKYKF

SEQ ID NO: 1182 - DNA, 50 bp, Enterococcus faecalis; identical to SEQ ID NO: 1167
  source 1..50: mol_type = genomic DNA

SEQ ID NO: 1183 - DNA, 40 bp, Enterococcus faecalis; identical to SEQ ID NO: 1143
  source 1..40: mol_type = genomic DNA

SEQ ID NO: 1184 - DNA, 40 bp, Enterococcus faecalis; identical to SEQ ID NO: 1144
  source 1..40: mol_type = genomic DNA

SEQ ID NO: 1185 - DNA, 50 bp, Enterococcus faecalis; identical to SEQ ID NO: 1140
  source 1..50: mol_type = genomic DNA

SEQ ID NO: 1186 - protein, 464 aa, Enterococcus faecalis; identical to SEQ ID NO: 1171

SEQ ID NO: 1187 - DNA, 50 bp, Enterococcus faecalis; identical to SEQ ID NO: 1142
  source 1..50: mol_type = genomic DNA

SEQ ID NO: 1188 - DNA, 40 bp, Enterococcus faecalis; identical to SEQ ID NO: 1143
  source 1..40: mol_type = genomic DNA

SEQ ID NO: 1189 - DNA, 40 bp, Enterococcus faecalis; identical to SEQ ID NO: 1144
  source 1..40: mol_type = genomic DNA

SEQ ID NO: 1190 - DNA, 50 bp, Enterococcus faecalis; identical to SEQ ID NO: 1140
  source 1..50: mol_type = genomic DNA

SEQ ID NO: 1191 - protein, 464 aa, Enterococcus faecalis
MKRAALYIRVSTMEQAKEGYSIPAQTDKLKAFAKAKDMAVTKVYTDPGFSGAKMERPALQEMISDIQNKKIDVVLVYKLDRLSRSQKNTLYLIEDVFLKNNVDFISMQESFDTSTPFGRATIGMLSVFAQLERDTITERMHMGRTERAKQGYYHGSGIVPLGYDYVDGELIINDYEAQIIQEIYDLYVNQGKGQQYITKRMVAKYPDKVKTLTIVKYALTNPLYIGKISWDGKVYDGHHTPIIDKSIYDKAQEIIARKAQKGGEQHGNQLGLLLGITYCGKCGAKVFRYVSGGKKYRYNYYMCRSVKKMLPSLVKDWNCKQPSLRQEVVEKKVIDSLKSLDFKKIERELKQVENKTKSKITTINNQISKKHNEKQKILDLYQYGTFDVTMLNERMKKIDNEINALTANIANLEGTKSESLINKLETLKTFNWETETTENKILIIKEFVERIELFDDEVIIKYKF

SEQ ID NO: 1192 - DNA, 50 bp, Enterococcus faecalis; identical to SEQ ID NO: 1167
  source 1..50: mol_type = genomic DNA

SEQ ID NO: 1193 - DNA, 40 bp, Enterococcus faecalis; identical to SEQ ID NO: 1143
  source 1..40: mol_type = genomic DNA

SEQ ID NO: 1194 - DNA, 40 bp, Enterococcus faecalis; identical to SEQ ID NO: 1144
  source 1..40: mol_type = genomic DNA

SEQ ID NO: 1195 - DNA, 50 bp, Enterococcus faecalis; identical to SEQ ID NO: 1140
  source 1..50: mol_type = genomic DNA

SEQ ID NO: 1196 - protein, 552 aa, Bacteroides uniformis
MKAILLVRVSTKVQDFDEQEKEIYRMAVKDGYKPEDIISICEKESGIKLPEEERAGLNRMKELIESDNTINCVYCWEVSRIARKKKINFSVLDYLVERKVQLIVKNPSIRLLKDDGTVDEAADMVFTLFSQMAESEMRTKLARWKRTKDANRKQSIYTGGWLLYGYKVDNGKIVEDEKEASVVRKIFNMYLTGNYSYNSLAKELTEQGIIRKGSRTYACKFVSLTLRNIAYAGEPSSFSGLNKLKTEGNVYPPIVTIEMINKCKEIAKGNILLPKKKYDNYYFGKGLLRCPYCGSIMVAKKNNNTYHCQNCDKGIWVQINIVDSILWRVASGLYLSKLITGNTKDRITYQKKLKEYDNKIATSEKNLKDIENRITKVEDSAYLDGTMSIDRAKGIIKQLGGKLADERKMLSQYYMEREQIQGLLIKVDEPKELDVSNITDDKLRFEIIHETIEYAFIDRINTIKCNISIYIPYNNEPLRFELHTKANKVFSLIDGYSKGEEIKCYERRFITPRNVEKSSEYNKRYCQEHKEENARRQREYRARKKALKENGL

SEQ ID NO: 1197 - DNA, 50 bp, Bacteroides uniformis
  source 1..50: mol_type = genomic DNA
atggttaaataaatactaataatatctattctttacctatatttaaacat

SEQ ID NO: 1198 - DNA, 40 bp, Bacteroides uniformis
  source 1..40: mol_type = genomic DNA
acaccgatgctacctgcattccaaccccggacatgggcac

SEQ ID NO: 1199 - DNA, 40 bp, Bacteroides uniformis
  source 1..40: mol_type = genomic DNA
acaccgatgctacctgcattgcaaccccggacatgggcac

SEQ ID NO: 1200 - DNA, 50 bp, Bacteroides uniformis
  source 1..50: mol_type = genomic DNA
atggttaaaatggtaaatatgttatgtatattttaccacaatttaaacat

SEQ ID NO: 1201 - protein, 694 aa, Sinorhizobium meliloti
MSTDNAMKISADHLRRDAFLYVRQSSLRQVFENTESTKRQYALRDRAVALGWPIERVHVIDNDLGLSGAQSQERDGFQRLVTEVAMGHAGIVLGLEVSRLARNNADWHRLLELAAMSRTLIMDEDGVYDAASFNDRMLLGLKGTMSEAELHILKSRLQGGILNKARRGELELPLPIGLVYTPDMRVVLDPDRQIQDTVRMLFDTFREVGSACAVVRRLRNEKILFPRRIRRGIGKGDVLWSEIDHSRVIQILHNPRYAGAFAYGRTRTIYNAKLKSVQQKMPRSDWQVLIPQAHEGYISWDEFERNQTSLEQNAVGFSPGLRGRMPRQGNGLLQGRVLCGRCGARMRVHYEQFEGNLRPYYICNEAVVRHAGKACQWARGPAIDEAVSALLLEAMAPTAIEVALAVQEEISQRVEQAASLRDKQLQRARYEAELARRRYLKVDPDNRLVADALEADWNGKLRDLDTLQREHERQNETDQSLLDGAMQERIRALAADFPRIWNNKRTSPVERKRMLGLLIEDVTLLVDEQINMHIRWRGGRTQSLAVARPRPMAVIRKTPEAVVALINELLETDNDQQIASRLNALGHRNWRGEAFTLKKVMLVRRAYGLKTRFERLRESGMLTGEEVARRFGVSATTVHQLGRDGVLKRHRYATNHRYLYEPPGNVRLAKGVGGRYGSRQPRLMDAQQIQQGAS

SEQ ID NO: 1202 - DNA, 50 bp, Sinorhizobium meliloti
  source 1..50: mol_type = genomic DNA
acaaggtgcatcgtgatgtctgctccttctttcaagtccaggactgcagt

SEQ ID NO: 1203 - DNA, 40 bp, Sinorhizobium meliloti
  source 1..40: mol_type = genomic DNA
accgcagcttccactttcgccttgtcccgcgggcgtcgcg

SEQ ID NO: 1204 - DNA, 40 bp, Sinorhizobium meliloti
  source 1..40: mol_type = genomic DNA
accgcagcttccactttcgagttgtcccgcgggcgtcgcg

SEQ ID NO: 1205 - DNA, 50 bp, Sinorhizobium meliloti
  source 1..50: mol_type = genomic DNA
tcaaggttctccaacaagactgctagttctttcaaggtaaggagtccagt

SEQ ID NO: 1206 - protein, 694 aa, Sinorhizobium meliloti
MSTDNAMKISADHLRRDAFLYVRQSSLRQVFENTESTKRQYALRDRAVALGWPIERVHVIDNDLGLSGAQSQDRDGFQRLVTEVAMGHAGIVLGLEVSRLARNNADWHRLLELAAMSRTLIMDEDGVYDAASFNDRMLLGLKGTMSEAELHILKSRLQGGILNKARRGELELPLPIGLVYTPDMRVVLDPDRQIQDTVRMLFDTFREVGSACAVVRRLRSEKILFPRRIRRGIGKGDVLWSEIDHSRVIQILHNPRYAGAFAYGRTRTIYNAKLKSVQQKMPRSDWQVLIPQAHEGYISWDEFERNQTSLEQNAVGFSPGLRGRMPRQGNGLLQGRVLCGRCGARMRVHYEQFEGNLRPYYICNEAVVRHAGKACQWARGPAIDEAVSALLLEAMAPTAIEVALAVQEEISQRVEQAASLRDKQLQRARYEAELARRRYLKVDPDNRLVADALEADWNGKLRDLDTLQREHERQNETDQSLLDGAMQERIRALAADFPGIWNNERTSPVERKRMLGLLIEDVTLLVDEQINMHIRWRGGRTQSLAVARPRPMAVIRKTPEAVVALINELLETDNDQQIASRLNALGHRNWRGEAFTLKKVMLVRRAYGLKTRFERLRESGMLTGEEVARRFGVSATTVHQLGRDGVLKRHRYATNHRYLYEPPGNVRLAKGVGGRYGSRKPRLIDAQPIQQGAS

SEQ ID NO: 1207 - DNA, 50 bp, Sinorhizobium meliloti; identical to SEQ ID NO: 1202
  source 1..50: mol_type = genomic DNA

SEQ ID NO: 1208 - DNA, 40 bp, Sinorhizobium meliloti; identical to SEQ ID NO: 1203
  source 1..40: mol_type = genomic DNA

SEQ ID NO: 1209 - DNA, 40 bp, Sinorhizobium meliloti; identical to SEQ ID NO: 1204
  source 1..40: mol_type = genomic DNA

SEQ ID NO: 1210 - DNA, 50 bp, Sinorhizobium meliloti; identical to SEQ ID NO: 1205
  source 1..50: mol_type = genomic DNA

SEQ ID NO: 1211 - protein, 694 aa, Sinorhizobium meliloti
MSTDNAMKISADHLRRDAFLYVRQSSLRQVFENTESTKRQYALRDRAVALGWPIERVHVIDNDLGLSGAQSQDRDGFQRLVTEVAMGHAGIVLGLEVSRLARNNADWHRLLELAAMSRTLIMDEDGVYDAASFNDRMLLGLKGTMSEAELHILKSRLQGGILNKARRGELELPLPIGLVYTPDMRVVLDPDRQIQDTVRMLFDTFREVGSACAVVRRLRSEKILFPRRIRRGIGKGDVLWSEIDHSRVIQILHNPRYAGAFAYGRTRTIYNAKLKSVQQKMPRSDWQVLIPQAHEGYISWDEFERNQTSLEQNAVGFSPGLRGRMPRQGNGLLQGRVLCGRCGARMRVHYEQFEGNLRPYYICNEAVVRHAGKACQWARGPAIDEAVSALLLEAMAPTAIEVALAVQEEISQRVEQAASLRDKQLQRARYEAELARRRYLKVDPDNRLVADALEADWNGKLRDLDTLQREHERRNETDQSLLDGAMQERIRALAADFPGIWNNERTSPVERKRMLGLLIEDVTLLVDEQINMHIRWRGGRTQSLAVARPRPMAVIRKTPEAVVALINELLETDNDQQIASRLNALGHRNWRGEAFTLKKVMLVRRAYGLKTRFERLRESGMLTGEEVARRFGVSATTVHQLGRDGVLKRHRYATNHRYLYEPPGNVRLAKGVGGRYGSRKPRLIDAQPIQQGAS

SEQ ID NO: 1212 - DNA, 50 bp, Sinorhizobium meliloti; identical to SEQ ID NO: 1202
  source 1..50: mol_type = genomic DNA

SEQ ID NO: 1213 - DNA, 40 bp, Sinorhizobium meliloti; identical to SEQ ID NO: 1203
  source 1..40: mol_type = genomic DNA

SEQ ID NO: 1214 - DNA, 40 bp, Sinorhizobium meliloti; identical to SEQ ID NO: 1204
  source 1..40: mol_type = genomic DNA

SEQ ID NO: 1215 - DNA, 50 bp, Sinorhizobium meliloti; identical to SEQ ID NO: 1205
  source 1..50: mol_type = genomic DNA

SEQ ID NO: 1216 - protein, 694 aa, Sinorhizobium meliloti
MSTDNAMKISADHLRRDAFLYVRQSSLRQVFENTESTKRQYALRDRAVALGWPIERVHVIDNDLGLSGAQSQDRDGFQRLVTEVAMGHAGIVLGLEVSRLARNNADWHRLLELAAMSRTLIMDEDGVYDAASFNDRMLLGLKGTMSEAELHILKSLLQGGILNKARRGELELPLPIGLVYTPDMRVVLDPDRQIQDTVRMLFDTFREVGSACAVVRRLRSEKILFPRRIRRGIGKGDVLWSEIDHSRVIQILHNPRYAGAFAYGRTRTIYNAKLKSVQQKMPRSDWQVLIPQAHEGYISWDEFERNQTSLEQNAVGFSPGLRGRMPRQGNGLLQGRVLCGRCGARMRVHYEQFEGNLRPYYICNEAVVRHAGKACQWARGPAIDEAVSALLLEAMAPTAIEVALAVQEEISQRVEQAASLRDKQLQRARYEAELARRRYLKVDPDNRLVADALEADWNGKLRDLDTLQREHERQNETDQSLLDGAMQERIRALAADFPGIWNNERTSPVERKRMLGLLIEDVTLLVDEQINMHIRWRGGRTQSLAVARPRPMAVIRKTPEAVVALINELLETDNDQQIASRLNALGHRNWRGEAFTLKKVMLVRRAYGLKTRFERLRESGMLTGEEVARRFGVSATTVHQLGRDGVLKRHRYATNHRYLYEPPGNVRLAKGVGGRYGSRKPRLIDAQPIQQGAS

SEQ ID NO: 1217 - DNA, 50 bp, Sinorhizobium meliloti; identical to SEQ ID NO: 1202
  source 1..50: mol_type = genomic DNA

SEQ ID NO: 1218 - DNA, 40 bp, Sinorhizobium meliloti; identical to SEQ ID NO: 1203
  source 1..40: mol_type = genomic DNA

SEQ ID NO: 1219 - DNA, 40 bp, Sinorhizobium meliloti; identical to SEQ ID NO: 1204
  source 1..40: mol_type = genomic DNA

SEQ ID NO: 1220 - DNA, 50 bp, Sinorhizobium meliloti; identical to SEQ ID NO: 1205
  source 1..50: mol_type = genomic DNA

SEQ ID NO: 1221 - protein, 694 aa, Sinorhizobium meliloti
MSTDNAMKISADHLRRDAFLYVRQSSLRQVFENTESTKRQYALRDRAVALGWPIERVHVIDNDLGLSGAQSQDRDGFQRLVTEVAMGHAGIVLGLEVSRLARNNADWHRLLELAAMSRTLIMDEDGVYDAASFNDRMLLGLKGTMSEAELHILKSRLQGGILNKARRGELELPLPIGLVYTPDMRVVLDPDRQIQDTVRMLFDTFREVGSACAVVRRLRSEKILFPRRIRRGIGKGDVLWSEIDHSRVIQILHNPRYAGAFAYGRTRTIYNAKLKSVQQKMPRSDWQVLIPQAHEGYISWDEFERNQTSLEQNAVGFSPGLRGRMPRQGNGLLQGRVLCGRCGARMRVHYEQFEGNLRPYYICNEAVVRHAGKACQWARGPAIDEAVSALLLEAMAPTAIEVALAVQEEISQRVEQAASLRDKQLQRARYEAELARRRYLKVDPDNRLVADALEADWNGKLRDLDTLQREHERQNETDQSLLDGAMQERIRALAADFPRIWNNERTSPVERKRMLGLLIEDVTLLVDEQINMHIRWRGGRTQSLAVARPRPMAVIRKTPEAVVALINELLETDNDQQIASRLNALGHRNWRGEAFTLKKVMLVRRAYGLKTRFERLRESGMLTGEEVARRFGVSATTVHQLGRDGVLKRHRYATNHRYLYEPPGNVRLAKGVGGRYGSRQPRLIDAQQIQQGAS

SEQ ID NO: 1222 - DNA, 50 bp, Sinorhizobium meliloti; identical to SEQ ID NO: 1202
  source 1..50: mol_type = genomic DNA

SEQ ID NO: 1223 - DNA, 40 bp, Sinorhizobium meliloti; identical to SEQ ID NO: 1203
  source 1..40: mol_type = genomic DNA

SEQ ID NO: 1224 - DNA, 40 bp, Sinorhizobium meliloti; identical to SEQ ID NO: 1204
  source 1..40: mol_type = genomic DNA

SEQ ID NO: 1225 - DNA, 50 bp, Sinorhizobium meliloti; identical to SEQ ID NO: 1205
  source 1..50: mol_type = genomic DNA

SEQ ID NO: 1226 - protein, 694 aa, Sinorhizobium meliloti
MSTDNAMKISADHLRRDAFLYVRQSSLRQVFENTESTKRQYALRDRAVALGWPIERVHVIDNDLGLSGAQSQDRDGFQRLVSEVAMGHAGIVLGLEVSRLARNNADWHRLLELAAMSRTLIMDEDGIYDAASFNDRMLLGLKGTMSEAELHILKSRLQGGILNKARRGELELPLPIGFVYTPDTRVVLDPDRQIQDTVRMLFDTFREAGSACAVVRRLRSEKILFPRRIRRGIGKGDVLWSEIDHSRLLQILHNPRYAGAFAYGRTRTVYNAKLKSVQQKMPRSDWQVLIPQAHEGYISWDEFERNQSSLEQNAVGFSPGLRGRMPRQGSGLLQGRVLCGRCGARMRVHYERFEDKLRPYYVCNEAVVRHAGKTCQWARGPAIDEAVSALLLEAMAPTAIEVALAVQQEISQRVEQAASLRDKQLQRARYEAELARRRYLKVDPDNRLVADALEADWNGKLRDLDALQREHERQNETDQSLLDGATQERIRALAADFPGIWNNERTSPVERKRMLGLLIEDVTLLVDEQINMHIRWRGGRTQSLAVTRPRPMAVIRKTPETVVALINELLETDNDQQIANRLNTLGHRNWRGEPFTLKKVMLVRRAYGLKTRFERLRESGMLTGEEVAHRLGVSATTVHQLGRDGVLKRHRYATNHRYLYEPPGNVRLAKGVGGRYGSRKPRLIDAQPIQQGAS

SEQ ID NO: 1227 - DNA, 50 bp, Sinorhizobium meliloti; identical to SEQ ID NO: 1202
  source 1..50: mol_type = genomic DNA

SEQ ID NO: 1228 - DNA, 40 bp, Sinorhizobium meliloti; identical to SEQ ID NO: 1203
  source 1..40: mol_type = genomic DNA

SEQ ID NO: 1229 - DNA, 40 bp, Sinorhizobium meliloti; identical to SEQ ID NO: 1204
  source 1..40: mol_type = genomic DNA

SEQ ID NO: 1230 - DNA, 50 bp, Sinorhizobium meliloti; identical to SEQ ID NO: 1205
  source 1..50: mol_type = genomic DNA

SEQ ID NO: 1231 - protein, 694 aa, Sinorhizobium meliloti
MSTDNAMKISADHLRRDAFLYVRQSSLRQVFENTESTKRQYALRDRAVALGWPIERVHVIDNDLGLSGAQSQDRDGFQRLVSEVAMGHAGIVLGLEVSRLARNNADWHRLLELAAMSRTLIMDEDGIYDAASFNDRMLLGLKGTMSEAELHILKSRLQGGILNKARRGELELPLPIGFVYTPDTRVVLDPDRQIQDTVRMLFDTFREAGSACAVVRRLRSEKILFPRRIRRGIGKGDVLWSEIDHSRLLQILHNPRYAGAFAYGRTRTVYNAKLKSVQQKMPRSDWQVLIPQAHEGYISWDEFERNQTSLEQNAVGFSPGLRGRMPRQGNGLLQGRVLCGRCGARMRVHYEQFEGNLRPYYICNEAVVRHAGKACQWARGPAIDEAVSALLLEAMAPTAIEVALAVQEEISQRVEQAASLRDKQLQRARYEAELARRRYLKVDPDNRLVADALEADWNGKLRDLDALQREHERQNETDQSLLDGAMQERIRALAADFPGIWNNERTSVVERKRMLGLLIEDVTLLVDEQINMHIRWRGGRTQSLAVTRPRPMAVIRKTPETVVALINELLETDNDQQIASRLNTLGHRNWRGEPFTLKKVMLVRRAYGLKTRFERLRESGMLTGEEVAHRLGVSATTVHQLGRDGVLKRHRYATNHRYLYEPPGNVRLAKGVGGRYGSRKPRLIDAQPIQQGAS

SEQ ID NO: 1232 - DNA, 50 bp, Sinorhizobium meliloti; identical to SEQ ID NO: 1202
  source 1..50: mol_type = genomic DNA

SEQ ID NO: 1233 - DNA, 40 bp, Sinorhizobium meliloti; identical to SEQ ID NO: 1203
  source 1..40: mol_type = genomic DNA

SEQ ID NO: 1234 - DNA, 40 bp, Sinorhizobium meliloti; identical to SEQ ID NO: 1204
  source 1..40: mol_type = genomic DNA

SEQ ID NO: 1235 - DNA, 50 bp, Sinorhizobium meliloti; identical to SEQ ID NO: 1205
  source 1..50: mol_type = genomic DNA

SEQ ID NO: 1236 - protein, 584 aa, Sinorhizobium medicae
MSTDNAMKISADHLRRDAFLYVRQSSLRQVFENTESTKRQYALRDRAVALGWPIERVHVIDNDLGLSGAQSQDRDGFQRLVSEVAMGHAGIVLGLEVSRLARNNADWHRLLELAAMSRTLIMDEDGVYDAASFNDRMLLGLKGTMSEAELHILKSRLQGGILNKARRGELELPLPIGLVYTPDMRVVLDPDRQIQDTVRMLFDTFREVGSACAVVRRLRNEKILFPRRIRRGIGKGDVLWSEIDHSRVIQILHNPRYAGAFAYGRTRTIYNAKLKSVQQKMPRSDWQVLIPQAHEGYISWDEFERNQTSLEQNAVGFSPGLRGRMPRQGNGLLQGRVLCGRCGARMRVHYEQFEGNLRPYYICNEAVVRHAGKACQWARGPAIDEAVSALLLEAMAPTAIEVALAVQEEISQRVEQAASLRDKQLQRARYEAELARRRYLKVDPDNRLVADALEADWNGKLRDLDTLQREHERQNETDQSLLDGAMQERIRALAADFPRIWNNKRTSPVERKRMLGLLIEDVTLLVDEQINMHIRWRGGRTQSLAVAHGRDPQDPGSGCGTDQRTAGDRQRSADCQSSQRTRAS

SEQ ID NO: 1237 - DNA, 50 bp, Sinorhizobium medicae; identical to SEQ ID NO: 1202
  source 1..50: mol_type = genomic DNA

SEQ ID NO: 1238 - DNA, 40 bp, Sinorhizobium medicae
  source 1..40: mol_type = genomic DNA
accgcagctttcactttcgccttgtcccgcgggcgtcgcg

SEQ ID NO: 1239 - DNA, 40 bp, Sinorhizobium medicae
  source 1..40: mol_type = genomic DNA
accgcagctttcactttcgagttgtcccgcgggcgtcgcg

SEQ ID NO: 1240 - DNA, 50 bp, Sinorhizobium medicae; identical to SEQ ID NO: 1205
  source 1..50: mol_type = genomic DNA

SEQ ID NO: 1241 - protein, 694 aa, Sinorhizobium meliloti
MSTDIAMKVDADHLRRDAFLYVRQSSLRQVFENTESTKRQYALRDRAVALGWPIERVHVIDSDLGLSGAQSQDRDGFQHLVSEVAMGHAGIVQGLEVSRLARNNADWHRLLELAALSRTLIMDEDGVYDPAYFNDRMLLGLKGTMSEAELHILKSRLQGGILNKARRGELEMPLPIGLVYTPDARVVLDPDRQIQDTVRLLFDTFRETGSACAVVRRLRGEKILFPRRIHRGIGKGDVLWNEIDHSRVLQILHNPRYAGAFAYGRTRTAYNAKLKPVQLRVARSDWQVLIPDAHEGYISWAEYERNQTALEQNAAGFSPGLRGRMPRQGSGLLQGRLLCGRCGARMRVHYEPFEGRLRPYYVCNEAVVRHAGKHCQWVRGAPVDEAVSALLLEVMAPAAIDVALAVQQEITQRVEQATALRGAQLQRARYEAELARRRYLKVDPDNRLVADALEADWNARLRDLDALQREHERQNEADHSLLDEPAQQRIRALTADFPRIWNDERTDPVERKRMLGLLIEDVTLLVDDEVNIHIRWRGGRTQSLSVARPRPMSVIRKTPAQVVALINELLETANDRQIAARLNELGHRNWRGEPFTLKKVMLVRRTYGLKSRYERLRESGMLTGEEVAQQLGVCASTVHQLGRKGILKRHRYATNHRYLYQPPGNVRLEKGAGSRYGGRQPRLIVAQRLQQGAS

SEQ ID NO: 1242 - DNA, 50 bp, Sinorhizobium meliloti; identical to SEQ ID NO: 1202
  source 1..50: mol_type = genomic DNA

SEQ ID NO: 1243 - DNA, 40 bp, Sinorhizobium meliloti
  source 1..40: mol_type = genomic DNA
aacggtctctcgaccttgcccttcgtcttggcccgacggg

SEQ ID NO: 1244 - DNA, 40 bp, Sinorhizobium meliloti
  source 1..40: mol_type = genomic DNA
aacggtctctcgaccttgcagttcgtcttggcccgacggg

SEQ ID NO: 1245 - DNA, 50 bp, Sinorhizobium meliloti; identical to SEQ ID NO: 1205
  source 1..50: mol_type = genomic DNA

SEQ ID NO: 1246 - protein, 694 aa, Sinorhizobium meliloti; identical to SEQ ID NO: 1241

SEQ ID NO: 1247 - DNA, 50 bp, Sinorhizobium meliloti; identical to SEQ ID NO: 1202
  source 1..50: mol_type = genomic DNA

SEQ ID NO: 1248 - DNA, 40 bp, Sinorhizobium meliloti
  source 1..40: mol_type = genomic DNA
aacggtctctcgaccttgcccttcgtcttggcccgatagg

SEQ ID NO: 1249 - DNA, 40 bp, Sinorhizobium meliloti
  source 1..40: mol_type = genomic DNA
aacggtctctcgaccttgcagttcgtcttggcccgatagg

SEQ ID NO: 1250 - DNA, 50 bp, Sinorhizobium meliloti; identical to SEQ ID NO: 1205
  source 1..50: mol_type = genomic DNA

SEQ ID NO: 1251 - protein, 564 aa, Sinorhizobium meliloti
MSTDIAMKVDADHLRRDAFLYVRQSSLRQVFENTESTKRQYALRDRAVALGWPIERVHVIDSDLGLSGAQSQDRDGFQHLVSEVAMGHAGIVQGLEVSRLARNNADWHRLLELAALSRTLIMDEDGVYDPAYFNDRMLLGLKGTMSEAELHILKSRLQGGILNKARRGELEMPLPIGLVYTPDARVVLDPDRQIQDTVRLLFDTFRETGSACAVVRRLRGEKILFPRRIHRGIGKGDVLWNEIDHSRVLQILHNPRYAGAFAYGRTRTAYNAKLKPVQLRVARSDWQVLIPDAHEGYISWAEYERNQTALEQNAAGFSPGLRGRMPRQGSGLLQGRLLCGRCGARMRVHYEPFEGRLRPYYVCNEAVVRHAGKHCQWVRGAPVDEAVSALLLEVMAPAAIDVALAVQQEIIQRVEQATALRGAQLQRARYEAELARRRYLKVDPDNRLVADALEADWNARLRDLDALQREHERQNEADHSLLDEPAQQRIRALTADFPRIWNDERTDPVERKRMLGLLIEDVTLLVDDEVNIHIRWRGGRTQSLSVARPRPMSVIRKTPARSWR

SEQ ID NO: 1252 - DNA, 50 bp, Sinorhizobium meliloti; identical to SEQ ID NO: 1202
  source 1..50: mol_type = genomic DNA

SEQ ID NO: 1253 - DNA, 40 bp, Sinorhizobium meliloti; identical to SEQ ID NO: 1248
  source 1..40: mol_type = genomic DNA

SEQ ID NO: 1254 - DNA, 40 bp, Sinorhizobium meliloti; identical to SEQ ID NO: 1249
  source 1..40: mol_type = genomic DNA

SEQ ID NO: 1255 - DNA, 50 bp, Sinorhizobium meliloti; identical to SEQ ID NO: 1205
  source 1..50: mol_type = genomic DNA

SEQ ID NO: 1256 - protein, 564 aa, Sinorhizobium meliloti
MSTDIAMKVDADHLRRDAFLYVRQSSLRQVFENTESTKRQYALRDRAVALGWPIERVHVIDSDLGLSGAQSQDRDGFQHLVSEVAMGHAGIVQGLEVSRLARNNADWHRLLELAALSRTLIMDEDGVYDPAYFNDRMLLGLKGTMSEAELHILKSRLQGGILNKARRGELEMPLPIGLVYTPDARVVLDPDRQIQDTVRLLFDTFRETGSACAVVRRLRGEKILFPRRIHRGIGKGDVLWNEIDHSRVLQILHNPRYAGAFAYGRTRTAYNAKLKPVQLRVARSDWQVLIPDAHEGYISWAEYERNQTALEQNAAGFSPGLRGRMPRQGSGLLQGRLLCGRCGARMRVHYEPFEGRLRPYYVCNEAVVRHAGKHCQWVRGAPVDEAVSALLLEVMAPAAIDVALAVQQEITQRVEQATALRGAQLQRARYEAELARRRYLKVDPDNRLVADALEADWNARLRDLDALQREHERQNEADHSLLDEPAQQRIRALTADFPRIWNDERTDPVERKRMLGLLIEDVTLLVDDEVNIHIRWRGGRTQSLSVARPRPMSVIRKTPARSWR

SEQ ID NO: 1257 - DNA, 50 bp, Sinorhizobium meliloti; identical to SEQ ID NO: 1202
  source 1..50: mol_type = genomic DNA

SEQ ID NO: 1258 - DNA, 40 bp, Sinorhizobium meliloti; identical to SEQ ID NO: 1248
  source 1..40: mol_type = genomic DNA

SEQ ID NO: 1259 - DNA, 40 bp, Sinorhizobium meliloti; identical to SEQ ID NO: 1249
  source 1..40: mol_type = genomic DNA

SEQ ID NO: 1260 - DNA, 50 bp, Sinorhizobium meliloti; identical to SEQ ID NO: 1205
  source 1..50: mol_type = genomic DNA

SEQ ID NO: 1261 - protein, 509 aa, Sinorhizobium meliloti
MSTDIAMKVDADHLRRDAFLYVRQSSLRQVFENTESTKRQYALRDRAVALGWPIERVHVIDSDLGLSGAQSQDRDGFQHLVSEVAMGHAGIVLGLEVSRLARNNADWHRLLELAALSRTLIMDEDGVYDPAYFNDRMLLGLKGTMSEAELHILKSRLQGGILNKARRGELEMPLPIGLVYTPDARVVLDPDRQIQDTVRLLFDTFRETGSACAVVRRLRGEKILFPRRIRRGIGKGDVLWNEIDHSRVLQILHNPRYAGAFAYGRTRTAYNAKLKPVQLRVARSDWQVLIPDAHEGYISWAEYERNQTALEQNAAGFSPGLRGRMPRQGSGLLQGRLLCGRCGARMRVHYEPFEGRLRPYYVCNEAVVRHAGKHCQWVRGAPVDEAVSALLLEVMAPAAIDVALAVQQEITQRVEQATALRGAQLQRARYEAELARRRYLKVDPDNRLVADALEADWNARLRDLDALQREHERQNEADHSLLDEPAQQRIRALTADFPRIWNDERTDPV

SEQ ID NO: 1262 - DNA, 50 bp, Sinorhizobium meliloti; identical to SEQ ID NO: 1202
  source 1..50: mol_type = genomic DNA

SEQ ID NO: 1263 - DNA, 40 bp, Sinorhizobium meliloti; identical to SEQ ID NO: 1248
  source 1..40: mol_type = genomic DNA

SEQ ID NO: 1264 - DNA, 40 bp, Sinorhizobium meliloti; identical to SEQ ID NO: 1249
  source 1..40: mol_type = genomic DNA

SEQ ID NO: 1265 - DNA, 50 bp, Sinorhizobium meliloti; identical to SEQ ID NO: 1205
  source 1..50: mol_type = genomic DNA

SEQ ID NO: 1266 - protein, 552 aa, Bacteroides helcogenes
MKAILLVRVSTKVQDFDEQEKEIYRMAVKDGYKPEDIISICEKESGIKLPEEERAGLNRMKELIESDNTINCVYCWEVSRIARKKKINFSVLDYLVERKVQLIVKNPSIRLLKDDGTVDEAADMVFTLFSQMAESEMRTKLARWKRTKDANRKQSIYTGGWLLYGYKVDNGRIVEDEKEASVVRKIFNMYLTGNYSYNSLAKELTEQGIIRKGSRTYACKFVSLTLRNIAYAGEPSSSSGLNKLKTEGNVYPPIVTIEMINKCKEIAKGNILLPKKKYDNYYFGKGLLRCPYCGSIMVAKKNNNTYHCQNCDKGIWVQINIVDSILWRVASGLYLSKLITGNTKDRIAYQKKLKEYDNKIATSEKNLKDIENRITKVEDSAYLDGTMSIDRAKGIIKQLGGKLADERKMLSQYYMEREQIQGLLIKVDEPKELDVSNITDDKLRFEIIHETIEYAFIDRINTIKCNISIYIPYNNEPLRFELHTKANKVFSLIDGYSKGEEIKCYERRFITPRNVEKSSEYNKKYCREHKAENARRQREYRARKKALKERGL

SEQ ID NO: 1267 - DNA, 50 bp, Bacteroides helcogenes
  source 1..50: mol_type = genomic DNA
atggttaaataaatactaagaatatctattctttacctatatttgaatat

SEQ ID NO: 1268 - DNA, 40 bp, Bacteroides helcogenes
  source 1..40: mol_type = genomic DNA
atgccgatgctcttgtcgttccagccggtggcatgggctc

SEQ ID NO: 1269 - DNA, 40 bp, Bacteroides helcogenes
  source 1..40: mol_type = genomic DNA
atgccgatgctcttgtcgttacagccggtggcatgggctc

SEQ ID NO: 1270 - DNA, 50 bp, Bacteroides helcogenes
  source 1..50: mol_type = genomic DNA
aagtttatatataaactaaaaatatatattatatataaatatttgaatat

SEQ ID NO: 1271 - protein, 552 aa, Bacteroides uniformis; identical to SEQ ID NO: 1266

SEQ ID NO: 1272 - DNA, 50 bp, Bacteroides uniformis
  source 1..50: mol_type = genomic DNA
atggttaaataaatactaagaatatgtattctttacctatatttgaatat

SEQ ID NO: 1273 - DNA, 40 bp, Bacteroides uniformis
  source 1..40: mol_type = genomic DNA
ccgccatcagcaaggtggatggagaaacattgaaggcaac

SEQ ID NO: 1274 - DNA, 40 bp, Bacteroides uniformis
  source 1..40: mol_type = genomic DNA
ccgccatcagcaaggtggatagagaaacattgaaggcaac

SEQ ID NO: 1275 - DNA, 50 bp, Bacteroides uniformis; identical to SEQ ID NO: 1270
  source 1..50: mol_type = genomic DNA

SEQ ID NO: 1276 - protein, 552 aa, Bacteroides uniformis; identical to SEQ ID NO: 1266

SEQ ID NO: 1277 - DNA, 50 bp, Bacteroides uniformis
  source 1..50: mol_type = genomic DNA
atggttaaataaatactaagaatagatattctttacctatatttgaatat

SEQ ID NO: 1278 - DNA, 40 bp, Bacteroides uniformis
  source 1..40: mol_type = genomic DNA
gtgcccatgtccggggttggaatgcaggtagcatcggtgt

SEQ ID NO: 1279 - DNA, 40 bp, Bacteroides uniformis
  source 1..40: mol_type = genomic DNA
gtgcccatgtccggggttgtaatgcaggtagcatcggtgt

SEQ ID NO: 1280 - DNA, 50 bp, Bacteroides uniformis; identical to SEQ ID NO: 1270
  source 1..50: mol_type = genomic DNA

SEQ ID NO: 1281 - protein, 509 aa, Geobacillus thermodenitrificans
MRAALYYRVSTKLQEDKYSLAAQKEELAKYAKSQDWNIVGEFKDVESGGKLEKKGLNALLDLVDEGGVDVVLVVDQDRLSRLDTVAWEYLKSVLRDNNVKIAEPGNIIDLNNEDDEFISDIKNLIAKREKRAIVRRMMRGKRQRMREGKGWGAPPFEYYYDRETGTYKAKPEWKWVIPFIDNLYLNEQLGMKAISDRLNEISNTPTGKPWNEHLVHTRLVSKAFHGVMEKTFTNGETISIPGIYEPLRTEETYRKIQEEREKRGAQFSVSGRKSSEKHILKRTKITCGECGRKIQIATHGTKERPIYYAKHGRKERLDGSVCDININTVRFDKNIMTALKEILSSEEQAKKYINLDMDQDELNALKKNIKALNKKISQLQESLDRLLDLYLAGGLKKEKYLEKQKQLESQIEIYKKELDQNELKLKTVESSMWNYEYLYEYLEVITDLEKELTPMERVQIVGKIFPNATLYREKLILTADVKGIPIDIEIPIDPDPYPWHPKKRNTYTK

SEQ ID NO: 1282 - DNA, 50 bp, Geobacillus thermodenitrificans
  source 1..50: mol_type = genomic DNA
tatgggtattccctaatatttatttcaataaatattagggaatacccatt

SEQ ID NO: 1283 - DNA, 40 bp, Geobacillus thermodenitrificans
  source 1..40: mol_type = genomic DNA
cattaacacaatgagcatttcaataagtgtaaaccctttt

SEQ ID NO: 1284 - DNA, 40 bp, Geobacillus thermodenitrificans
  source 1..40: mol_type = genomic DNA
cattaacacaatgagcattataataagtgtaaaccctttt

SEQ ID NO: 1285 - DNA, 50 bp, Geobacillus thermodenitrificans; identical to SEQ ID NO: 205
  source 1..50: mol_type = genomic DNA

SEQ ID NO: 1286 - protein, 601 aa, Escherichia coli
MKKCFISHRVSSEQQFSGGRSGIVRQAENLNLYVERIRLLETMDDPEAVILCDQGVSAFKGLNISEGEMGRWIEQVQSGMWDNSHLVLESIDRFSRQNPFTVVAYISQLVNHNITIHDVSLNLLINRSNSAMLPIVTMSAQRAYEESKIKSDRIRDGWKRKREAAFNHGTIVTNKRPQWIEIIDDKYVLNDKVHIVKEVFRLCKEGIGTPTIAKILNAKGDNWLFESGRLWRGESVHKLLKNKRVTGSIFISEIIRDYNSTSNPIEQKRYEMYVYPIVISKEEFNLVQQLLRSRRGRITTNKDTDELKKSNIFNSICRCGKCGEAMYHNVVKSHRNSKKNGKFTEEYRYIRCLGERDNLCDNKALRYEVVEQFIIEHIKGMNFSSILKPNNHKTELDVLRLNIDIEKGHIREYRHGIEKLKALGKKIPFDVLVELEESQKRLSDLEEKESKYTDLNVDTEYLKSVDPSVLFEQGNIEVRSRIEKELSMLLESIVLHRLDKHYVITLEYKQVSILKHVLFIEAGKVPVLISSLSIEKYSDEHIYTMPSFSIRCGEGVPEIHGEAISLVDYSLLLNYIDGVDGSEYVSEWMRTNQNFIFSKET

SEQ ID NO: 1287 - DNA, 50 bp, Escherichia coli
  source 1..50: mol_type = genomic DNA
tgtttgtttactatagctgctattcaagtgtatgctacgttatacaaaca

SEQ ID NO: 1288 - DNA, 40 bp, Escherichia coli
  source 1..40: mol_type = genomic DNA
tttttgcatgataatcatacaaataggtgccattacagca

SEQ ID NO: 1289 - DNA, 40 bp, Escherichia coli
  source 1..40: mol_type = genomic DNA
tttttgcatgataatcataagaataggtgccattacagca

SEQ ID NO: 1290 - DNA, 50 bp, Escherichia coli
  source 1..50: mol_type = genomic DNA
tgtttgtttctttcttttcctactagattgtatgctccgtgataccaaca

SEQ ID NO: 1291 - protein, 484 aa, Leuconostoc carnosum
MKKKVALYVRVSTLEQAESGYSIGEQIDKLKKFADIKDWNVYEVYEDGGWSGSNTNRPALERLINDAKRHLFDTILVYKLDRLSRSQKDTLFLIEDIFKANNIDFVSLNENFDTSTAFGTAMIGILSVFAQLEREQIRERMKLGLVGRAKSGKAMGWHMTPFGYTYDKQSGNFIINNLTASIVREIFNDYLSGISITKLRDKLNESGHIGKDRNWSYRTLRQTLDNPTYIGVVKYDHKIYAGNHEPIIENDVFQAVQIELSKRQQLAYQKNNNPRPFQSKYMLSGIIKCGYCGSPMVSTLGNKRKDGTRLKKYQCVNRHVRKSSGVTIYNNNIKCDSGFYMMADIENYVINTVSDLQASPESVKKLFNKNNNNIEKVNIDEIKKEISKLSSRLKKLSDLYMNDLLSLDELKEKTSELKSTRLLLENKILEDKNNSNIKIKERIINNMNKKSIQKMSYQEQTNLVKSLINKVSVTREMIEISWNF

SEQ ID NO: 1292 - DNA, 50 bp, Leuconostoc carnosum
  source 1..50: mol_type = genomic DNA
caaacatatttactatatttgatttcaattaagtatattaaatatgttta

SEQ ID NO: 1293 - DNA, 40 bp, Leuconostoc carnosum; identical to SEQ ID NO: 788
  source 1..40: mol_type = genomic DNA

SEQ ID NO: 1294 - DNA, 40 bp, Leuconostoc carnosum
  source 1..40: mol_type = genomic DNA
aaatagtacaatagctgctttaattaatgtaaaagctgat

SEQ ID NO: 1295 - DNA, 50 bp, Leuconostoc carnosum
  source 1..50: mol_type = genomic DNA
caaaaatatgttgaatatttaatattaactaaataaaaataaaatgttta

SEQ ID NO: 1296 - protein, 452 aa, Listeria monocytogenes
MKAAIYIRVSTQEQIENYSIQAQTEKLTALCRSKDWDVYDIFIDGGYSGSNMNRPALNEMLSKLHEIDAVVVYRLDRLSRSQRDTITLIEEYFLKNNVEFVSLSETLDTSSPFGRAMIGILSVFAQLERETIRDRMVMGKIKRIEAGLPLTTAKGRTFGYDVIDTKLHINEEEAKQLQMIYDIFEEEKSITSLQKRLKKLGFKVKSYSSYNNWLTNDLYCGYVSYADKVHTKGVHEPIISEEQFYRVQEIFSRMGKNPNMNRDSASLLNNLVVCGKCGFGFVHRRKDTVSRGKKYHYRYYSCKTYKHTHELEKCGNKIWRADKLEELIIDRVNNYSFASRNVDKEDELDSLNEKLKIEHTKKKRLFDLYISGSYEVSELDAMMADIDAQINYYEAQIEANEELKKNKKIQENLADLATVDFDSLEFREKQLYLKSLINKIYIDGEQVTIEWL

SEQ ID NO: 1297 - DNA, 50 bp, Listeria monocytogenes
  source 1..50: mol_type = genomic DNA
tttagttcctcgttttctctcgttggaagaagaagaaacgagatacaaaa

SEQ ID NO: 1298 - DNA, 40 bp, Listeria monocytogenes
  source 1..40: mol_type = genomic DNA
tttcggatcaagctatgagggacgcaaagagggaactaaa

SEQ ID NO: 1299 - DNA, 40 bp, Listeria monocytogenes
  source 1..40: mol_type = genomic DNA
tttcggatcaagctatgaggaacgcaaagagggaactaaa

SEQ ID NO: 1300 - DNA, 50 bp, Listeria monocytogenes
  source 1..50: mol_type = genomic DNA
tctatatccaatgatgctctccttgaaaaaaggagacaaaagatacaaaa

SEQ ID NO: 1301 - protein, 465 aa, Clostridium innocuum
MKTTMMYSQRNEVIDTKYLTKLREERTKNTALVKKRAVYARVSTREQALTGYGIDAQLSNIMNKLQADGIDINTVEVYIDDGFSAKSLNRPAMQRLLKDILDDKVNEVLIYKLDRLARNVIDTYELLQFFIDQKCELKAVVDNLDIHSANGRLLVGVLAIIAQWEREVIKERASDANEEMLNQGKYPFGQVPFGYNRDPEGYLHIDLQAAEYIRYCFELAMSGNTMKEIEHIAPLKYPEFQKKAEVIRNMLLRTINYGVYEFEDKEYELPGIVSKRTYEKAKRMIYKRYKETDPSKYYFGNKITDTCGKICERKSTSKKLKEGVKKYYYYVCPECQKRISQDRIVEATLSRIAVYAREQQEMKSQNYLYRRLRTLDKKTKNAYQDYVSAKIDAKVYGMLVNKLEEEKEKIMKKLSIKTTGRDMNTEKWSSMSDKERKNYIEYYVKEIIVDTSLKAAISIEFNEEA

SEQ ID NO: 1302 - DNA, 50 bp, Clostridium innocuum
  source 1..50: mol_type = genomic DNA
aagttctcctttagcaaagggcaacccaccatgacaataatagtcgaact

SEQ ID NO: 1303 - DNA, 40 bp, Clostridium innocuum
  source 1..40: mol_type = genomic DNA
cggttcgatcccgatacgctccaccatgatagatcagaag

SEQ ID NO: 1304 - DNA, 40 bp, Clostridium innocuum
  source 1..40: mol_type = genomic DNA
cggttcgatcccgatacgcgacaccatgatagatcagaag

SEQ ID NO: 1305 - DNA, 50 bp, Clostridium innocuum
  source 1..50: mol_type = genomic DNA
aagttctcctcctttacaggggaagacaccaggactcggagagtcccact

SEQ ID NO: 1306 - protein, 480 aa, Streptococcus mutans
MIATNKVAIYIRVSTTNQAEEGYSIEEQQEKLKAYCAIKDWSIYDVYIDGGFTGSNTDRPELKRLVKEAKNKKFDTVLVYKLDRLSRSQKDTLYLIEEVFTKNNIAFLSLLENFDTSSAFGKAMIGILSVFAQLEREQIKERMQLGKVGRAKSGKSMMWAKPSYGYIYHKETGKMTVDEYESIAIKFIFSSYLAGRSITKLRDDLNKKYPKEIAWNYKMVRHILDNPVYCGDIRFKDEIYSGNHEAIISKEDFEKVQEELAIRQRTAAENSNPRPFQAKYMLSGIAQCGYCKAPLKIIMGAIRKDGTRFIRYECYQRHPRKIKGVTVYNDNKKCNSGYYDKKELEQYVLKEVSKLQEDKEYLESLFNVPDKSIERDKIQGQVNILENKISRLNDLYIDDRISLDELKIKSDNFLKMKAVLETELENDPAIKQQKKKENMKKILKTKDILSMNYEQQKAVIRALITKVQVTAESIIIKWKI

SEQ ID NO: 1307 - DNA, 50 bp, Streptococcus mutans
  source 1..50: mol_type = genomic DNA
tataaagaattttactatcttttatttctataagcgtaaaagctttaatt

SEQ ID NO: 1308 - DNA, 40 bp, Streptococcus mutans
  source 1..40: mol_type = genomic DNA
attgccaaagtcactaaactttctataagcgtaaaagccc

SEQ ID NO: 1309 - DNA, 40 bp, Streptococcus mutans
  source 1..40: mol_type = genomic DNA
attgccaaagtcactaaaccttctataagcgtaaaagccc

SEQ ID NO: 1310 - DNA, 50 bp, Streptococcus mutans
  source 1..50: mol_type = genomic DNA
tataaagatattcactatcattttcttctattagctttattgttttactt

SEQ ID NO: 1311 - protein, 463 aa, Bacillus wiedmannii
MTIGIYIRVSTEEQVRDGFSISAQREKLKAYCVAQDWDSFKFYVDEGVSAKDTNRPQLSIMLDHIKKGLINTVLVYRLDRLTRSVMDLYKLLDTFDKYNCAFKSATEVYDTSTAMGRMFITIVAALAQWERENLGERVRMGQLEKARQGEYSAKAPFGFDKNEQCKLIINPEESKVVLDMIGKIEAGYSIRQLADHLDGYVKPIRGYKWHIRTILDILSNHAMYGAIRWSNEVIENAHPGIITKDRFKKVQQLLSSRQNFKKRKTTSIFIFQMKLLCPKCGNHLTCERVRYHRKKDNQDIEHNRYRCQACVLNKKKAFSCSENKIEVAFLDYIEKYRFKQVPQYQTGDNEIDILKKQLSKVERQREKFQKAWSNDLMTDEEFTNRMKETKQKLESIKEKLKSLRPNKNENISDDVIKEIINNIKGNWSHLSSDEKKQFMNMFIENMKVDKKEGVIKILDIAFY

SEQ ID NO: 1312 - DNA, 50 bp, Bacillus wiedmannii
  source 1..50: mol_type = genomic DNA
attagtgtttatgttaaatttacacatataaagttcacgtaaatacaaaa

SEQ ID NO: 1313 - DNA, 40 bp, Bacillus wiedmannii
  source 1..40: mol_type = genomic DNA
ctttgtgttcaaatataaacatacaaaatgctcctgctgc

SEQ ID NO: 1314 - DNA, 40 bp, Bacillus wiedmannii
  source 1..40: mol_type = genomic DNA
ctttgtgttcaaatataaatttacaaaatgctcctgctgc

SEQ ID NO: 1315 - DNA, 50 bp, Bacillus wiedmannii
  source 1..50: mol_type = genomic DNA
attagatttagcaataagtttacattcaaatagttattttaaatacaaaa

SEQ ID NO: 1316 - protein, 578 aa, Parabacteroides merdae
MKGAIYSRVSTEQQDYSKQTNELKDYAKRNGIEVVYVFEEKESGFNNNRPEFEKLRKLTKQDIDIILVWEISRISRRAIYLQQQVQEFTDKGICIYAKKDGFSTLNDDGSVNASTKMLIGFASIIAEQEAATLKERTISSKRNKILREGKSYTYYAPYGYDYSKETKMLSINEKQAQVVKRIFQLSIDGYSTERIAILLNAEKIPTKGKKENWTAGTVCNMLTNPVYKGEANYTLKKEKKAGSTYCKPMEVVTISTPAIIEKEQFELSLQKLAERTKRSNSFGTKYNPLLRGLIHCPHCDVKYVYNFGTNQYLCVNKYKKASNKNVHCTAKCISNKLDSIVWNVVKTFFYKELAAGKAQEQIEPLQAEIESYKRQILLLDGKQSELTARANIIVDAAIEIKIQFPNMPDLYANKMKEVEEINKEASKYQKEKERLEKLIHSNESRIKNINRASKESALVESITDETEKYDLVHKAIDKIMIFGEGKISIIIVTFSTGQTIYLGYSSKSNSKYYTIFYPSSDIYFDIQTSKGYINHLKEKATINSDGSIYLGDLTGEVKEYSIIDFVNYLDIEENRRYY

SEQ ID NO: 1317 - DNA, 50 bp, Parabacteroides merdae
  source 1..50: mol_type = genomic DNA
atatataactgtaaatgttaaatctagataaaatatttgcagatatatct

SEQ ID NO: 1318 - DNA, 40 bp, Parabacteroides merdae
  source 1..40: mol_type = genomic DNA
atctattgtctatacgtagtactacctatagacgatatgt

SEQ ID NO: 1319 - DNA, 40 bp, Parabacteroides merdae; identical to SEQ ID NO: 1318
  source 1..40: mol_type = genomic DNA

SEQ ID NO: 1320 - DNA, 50 bp, Parabacteroides merdae
  source 1..50: mol_type = genomic DNA
atatataaaaatatatataaaatatatataaaatatatataaatatatat

SEQ ID NO: 1321 - protein, 578 aa, Parabacteroides merdae
MKGAIYSRVSTEQQDYSKQTNELKDYAKRNGIEVVYVFEEKESGFNNNRPEFEKLRKLTKQDIDIILVWEISRISRRAIYLQQQVQEFTDKGICIYAKKDGFSTLNDDGSVNASTKMLIGFASIIAEQEAATLKERTISSKRNKILREGKSYTYYAPYGYDYSKETKMLSINEKQAQVVKRIFQLSIDGYSTERIAILLNAEKIPTKGKKENWTAGTVCNMLTNPVYKGEANYTLKKEKKAGSTYCKPMEVVTISTPAIIEKEQFELSLQKLAERTKRSNSFGTKYNPLLRGLIHCPHCDVKYVYNFGTNQYLCVNKYKKASNKNVHCTAKCISNKLDSIVWNVVKTFFYKELAAGKAQEQIEPLQAEIESYKRQILLLDGKQSELTARANIIVDAAIEIKIQFPNMPDLYANKMKEVEEINKEASKYQKEKERLEKLIHSNESRIKNINRASKESALVESITDETEKYDLVHKAIDKIMIFGEGKTSIIIVTFSTGQTIYLGYSSKSNSKYYTIFYPSSDIYFDIQTNKGYINHLKEKATINSDGSIYLGDLTGEVKEYSIIDFVNYLDIEENRRYY

SEQ ID NO: 1322 - DNA, 50 bp, Parabacteroides merdae; identical to SEQ ID NO: 1317
  source 1..50: mol_type = genomic DNA

SEQ ID NO: 1323 - DNA, 40 bp, Parabacteroides merdae
  source 1..40: mol_type = genomic DNA
acatatcgtctattggtagtactacgtatcgtctataaat

SEQ ID NO: 1324 - DNA, 40 bp, Parabacteroides merdae; identical to SEQ ID NO: 1323
  source 1..40: mol_type = genomic DNA

SEQ ID NO: 1325 - DNA, 50 bp, Parabacteroides merdae; identical to SEQ ID NO: 1320
  source 1..50: mol_type = genomic DNA

SEQ ID NO: 1326 - protein, 556 aa, Vibrio harveyi
MKKLLIEYHRVSDPTQLAKTGMAQQKAPSELIEKLCREHNLEVFPTVFDDRGISAFKGTKVRNGYEELKELLASGEVHPESVLVVLNQDRLSRQAVFDAQVELMGILKHCRIYVMHDNRLMDRNSENIMGDLILSLANAQRAFSESDAKSKRTKGAVLNKIKAHQNGVRGVTGKPINLGMGKLPWWYSSDPVTKEIEPIEEAVAAARTAVELFIKGESVYGVKRHLDEHHQLPEKLSKKAKNGWSIDVVRRMHKSPNLVGEFSISVDGVEHQVTEYLEPIIDRKTYLKFLKVRGSKSTVRRAKDGAVALFGGLGHCRGCGGTLTNLSDKGRISLRCTNALNRRVACPSPVSITGNWFKDYMVNVVLRYLGTKQTTRPVNSEADLKLLDQQIAKSEQKLEQLLEVLVASPSGALGKLVQSQEQQLLQLQTHRDDLEMKVVTEVFDPLEKMPENDLELRDALLRLIKDMRISRIGRGTVLVSIFTKNDINVSVAFKSGVLLREGYLSGTSDGDAQFIDDAQFHKFVADGELDLWLSNQDDLSVASAGGMGSLFDKEPS

SEQ ID NO: 1327 - DNA, 50 bp, Vibrio harveyi
  source 1..50: mol_type = genomic DNA
aattgtaatcatagtacttttgatacaactaaaatcctctagtcacaatt

SEQ ID NO: 1328 - DNA, 40 bp, Vibrio harveyi
  source 1..40: mol_type = genomic DNA
cgtagcgacagctttcggcacatctaagttattttcgaaa

SEQ ID NO: 1329 - DNA, 40 bp, Vibrio harveyi
  source 1..40: mol_type = genomic DNA
cgtagcgacagctttcggcttatctaagttattttcgaaa

SEQ ID NO: 1330 - DNA, 50 bp, Vibrio harveyi
  source 1..50: mol_type = genomic DNA
aattgtagtagagataattttcaattaatttaaatcttgtggtcactatt

SEQ ID NO: 1331 - protein, 556 aa, Vibrio owensii
MKKLLIEYHRVSDPTQLAKTGMAQQKAPSELIEKLCREHNLEVFPTVFDDRGISAFKGTKVRNGYEELKELLASGEVHPESVLVVLNQDRLSRQAVFDAQVELMGILKHCRIYVMHDNRLMDRNSENIMGDLILSLANAQRAFSESDAKSKRTKGAVLNKIKAHQNGVRGVTGKPINLGMGKLPWWYSSDPVTKEIEPIEEAVAAARTAVELFIKGESVYGVKRHLDEHHQLPEKLSKKAKNGWSIDVVRRMHKSPNLVGEFSISVDGVEHQVTDYLEPIIDRNTYLKFLKVRGSKSTVRRAKDGAVALFGGLGHCRGCGGTLTNLSDKGRISLRCTNALNRRVACPSPVSITGNWFKDYMVNVVLRYLGTKQTTRPVNSEADLKLLDQQIAKSEQKLEQLLEVLVASPSGALGKLVQSQEQQLLQLQTHRDDLEMKVVTEVFDPLEKMPENDLELRDALLRLIKDMRISRIGRGTVLVSIFTKNDINVSVAFKSGVLLREGYLSGTSDGDAQFIDDAQFHKFVADGELDLWLSNQDDLSVASAGGMGSLFDKEPS

SEQ ID NO: 1332 - DNA, 50 bp, Vibrio owensii; identical to SEQ ID NO: 1327
  source 1..50: mol_type = genomic DNA

SEQ ID NO: 1333 - DNA, 40 bp, Vibrio owensii
  source 1..40: mol_type = genomic DNA
tgttgcgacagctttaggtacgtctaagttattttcgaaa

SEQ ID NO: 1334 - DNA, 40 bp, Vibrio owensii
  source 1..40: mol_type = genomic DNA
tgttgcgacagctttaggtttgtctaagttattttcgaaa

SEQ ID NO: 1335 - DNA, 50 bp, Vibrio owensii; identical to SEQ ID NO: 1330
  source 1..50: mol_type = genomic DNA

SEQ ID NO: 1336 - protein, 519 aa, Klebsiella quasipneumoniae
MPKAISYIRFSTKIQSVGDSTKRQSKYINDWLKRNPDYYLDESLRFQDLGISGFSGANAKSGAFGEFLAAVESGYIEAGSVLLVESLDRVSRQDIDTAGEQLRKILRSGVEVVTLVDNEWYTKESLKDSLSMIKAMLVMERAHEESAMKSTRLRSMWAGKRERAANGEIMSKRCAAWLKVSEDRSHFEFIHENVKAVQRVFQLRLEGLSHIKIAKKMNDEGFYTLNQHKSIKGGWSQSSVTELLSNRSVIGFKVPSKSMAVKGVSEIPNYYPSIITDEQFYAVQQLKQGSGRKPSSDLPLLTNLFKGVLRCSECGFVVVVAGVSAKRSGIYKCSMKSEGRCNSVGFSRLQTDRALVQGLLYNTNRLSLNRDNGSAIGALQSELEQLQKQRERLIKLAMLADDTESMAKDLKALNSQIKDAEKAVSEVHQREQSSQLETLSHLDLTVKKDRVEAQIIIKRIVKEIRLNTAGKKCDVFLHNGLKLYNFPLDRVVDGEIFLEVLPLLEADEFDFDTYRLINP

SEQ ID NO: 1337 - DNA, 50 bp, Klebsiella quasipneumoniae
  source 1..50: mol_type = genomic DNA
gtgtatcaatagaaaggtctcttcagaattagacctatcttatgatacac

SEQ ID NO: 1338 - DNA, 40 bp, Klebsiella quasipneumoniae
  source 1..40: mol_type = genomic DNA
atggacagggcggctgtcgaggatcacgcggttgacgtta

SEQ ID NO: 1339 - DNA, 40 bp, Klebsiella quasipneumoniae
  source 1..40: mol_type = genomic DNA
atggacagggcggctgtcgcagatcacgcggttgacgtta

SEQ ID NO: 1340 - DNA, 50 bp, Klebsiella quasipneumoniae
  source 1..50: mol_type = genomic DNA
gtggataaggagtcaggtcttctccaaattagaacttcccaaagatacac

SEQ ID NO: 1341 - protein, 545 aa, Vibrio parahaemolyticus
MNKYHLYQRVSKQIQAEEGHGIQRQEQACEHWISDYNKRLLSEGKSAYSKGLIYEDRGKSAYTAANFKRGELGALINDIENGKIEKGDLIVIELIDRFSRANVDFVRSQFQRILDAGVKIAITKWNLVFEENMESVSSVTGRILLEIGMYLAYQESSQKSSRIKASRKLLEDSGRKSIAKPPFWLARNLDLKSYTIIEENAEIIRKIFDLKLNFNYGPQKIIKSLGDLDIYRYSFDENGKLIKTTKNSPLSESSINAYIRNTNVIGKLDGRDYYPRIIDDRTFYAVQKRTRENTGGVGEIFRNVFVGVGKCGCLIRKENENGCDSLAKCGYIMAFSSRKVKNPTKGMYLKCNRKRKSTKCDSENINYYLAQNKIYNVLKSLKFDIDQSVDISHLEEKINTIDKSMSKIREYMTQYSDDEEWENQYKIKRMEREKIENEIKASKSRITGKLSNLDIDFSKEKDRVLFNQFLKDNRITVYFTKERMEIIIGSLNNFSIKCGYDDSNRDIDHIIESYSKNGLVGIEEKSGKSEGKGLLRFNLPTVPGS

SEQ ID NO: 1342 - DNA, 50 bp, Vibrio parahaemolyticus
  source 1..50: mol_type = genomic DNA
atgtcgtctatcgtgtagttgactaaagacaactgcatgttatactacat

SEQ ID NO: 1343 - DNA, 40 bp, Vibrio parahaemolyticus
  source 1..40: mol_type = genomic DNA
aggcaagccacagttggcaaatgaaacgaatgggccacgt

SEQ ID NO: 1344 - DNA, 40 bp, Vibrio parahaemolyticus
  source 1..40: mol_type = genomic DNA
aggcaagccacagttggcatttgaaacgaatgggccacgt

SEQ ID NO: 1345 - DNA, 50 bp, Vibrio parahaemolyticus
  source 1..50: mol_type = genomic DNA
atgtcgtcagaagtggagatgactttaatcaactgccgatcaaactacag

SEQ ID NO: 1346 - protein, 545 aa, Vibrio vulnificus
MKKYHLYQRVSKQIQAEEGLGIQRQEQVCEHWISEYNKRLLDDGKSAYSKGLVYEDHGKSAYTTANFKRGELGTLMKDIESGKIAKGDLIVIELIDRFSRANVDFVRKKFQSILDAGVKVAITKWNLVFEENMEGISSVSARLLLEIGMHLAYQESSQKSTRIKASRKLLERSGKKSIAKPPFWLVRNLDLRSYTIIEENAEIVRKIFDLKLKFNYGPQKIIKSLGELEIYRYKFDDNGNLVKTTKNSPLSESSINAYIRNPNVIGKLDGKDYYPRIIDDKTYYAVQKRTRENTGGASDIFRNVFVGVGKCGCLIRNEDENGYVKFTKCGYIMAYSSRKVKNPAKGQYLKCNKKRKNAKCKSENINYYLAQNKVYSVLKSLKFDFSQSVDISHLEEKINILNKEMSKIRTFMAKYTDDDEWENHYNVKRMEREKIENEIKNSKSLITGKISSLDLDFSAEKDRVLFNQFLKDNRVIVYFTKENMEIIIGSLNNFSIKCGYDDSSRDIDHLIESYSKNGLVGIEEKVGKSEGKGLLRFNLPTVSGS

SEQ ID NO: 1347 - DNA, 50 bp, Vibrio vulnificus
  source 1..50: mol_type = genomic DNA
atgtcgtcaatcatgcagttgactaaagacaattgtatgataaactacat

SEQ ID NO: 1348 - DNA, 40 bp, Vibrio vulnificus
  source 1..40: mol_type = genomic DNA
aggcaagccgcaattcgcaaaagagacaaatggaccacgt

SEQ ID NO: 1349 - DNA, 40 bp, Vibrio vulnificus
  source 1..40: mol_type = genomic DNA
aggcaagccgcaattcgcattagagacaaatggaccacgt

SEQ ID NO: 1350 - DNA, 50 bp, Vibrio vulnificus; identical to SEQ ID NO: 1345
  source 1..50: mol_type = genomic DNA

SEQ ID NO: 1351 - protein, 545 aa, Vibrio vulnificus; identical to SEQ ID NO: 1346

SEQ ID NO: 1352 - DNA, 50 bp, Vibrio vulnificus; identical to SEQ ID NO: 1347
  source 1..50: mol_type = genomic DNA

SEQ ID NO: 1353 - DNA, 40 bp, Vibrio vulnificus
  source 1..40: mol_type = genomic DNA
aggcaagccgcaattcgcaaaagagacaaaaggaccacgt

SEQ ID NO: 1354 - DNA, 40 bp, Vibrio vulnificus
  source 1..40: mol_type = genomic DNA
aggcaagccgcaattcgcattagagacaaaaggaccacgt

SEQ ID NO: 1355 - DNA, 50 bp, Vibrio vulnificus; identical to SEQ ID NO: 1345
  source 1..50: mol_type = genomic DNA

SEQ ID NO: 1356 - protein, 576 aa, Serratia marcescens
MRKCFLYSRVSSDVQSSGDGLGRQEDKLKQYLLQNALRLNLSVDDCEILVDSGVSGWKGSNMGDTAALGQLFRRVESGEINGSVLIVESLDRFSRENPFRVGGYIAKLAEHSIDIIDVEQNLVIGTSNPWSSTIASIIANRAHEESTLKSKRIKAAWNSRRKKAEESGQYMIKNTPFWIDVLDDKYVANADASIVREIFDLYLQGYGSFTIAKKMNEAEKVIRNKRWSTPKICALLRNPRCNGDFISHSLERDYEKGTSNSVEHVIKGLYPKIVTDEEFALVLNRLDDGSKNKRVCNDRKVTILNGLLKCSICGGALTVRSAGAYRYVGCLKTIEKGGCYSKPIRYDALEKIVVNHIRNMDLGKVYESNDSQEVITKERIKSLMSHIEEYKAGITQLRERGKKPSFDMLTELQNSEDELELLKKELEQLSLSKIDLSEFAVSTELFDITQIALRTRLERTISSLLNKIKVYHTKDLSFSLIEMIYVNDVVKHVLVADKKGDVTGDVVIRRNGESTTYESCSVKIIKDEGGVFSLDCNISEVVLNDYLLLMNVVDFVDSEAKEFLNLHLNTVLQQDG

SEQ ID NO: 1357 - DNA, 50 bp, Serratia marcescens
  source 1..50: mol_type = genomic DNA
tttattttagtgttaaggtgaaatgtgatacattagaacactaagataaa

SEQ ID NO: 1358 - DNA, 40 bp, Serratia marcescens; identical to SEQ ID NO: 193
  source 1..40: mol_type = genomic DNA

SEQ ID NO: 1359 - DNA, 40 bp, Serratia marcescens; identical to SEQ ID NO: 193
  source 1..40: mol_type = genomic DNA

SEQ ID NO: 1360 - DNA, 50 bp, Serratia marcescens
  source 1..50: mol_type = genomic DNA
ttttttttaaaaaaaaggtaaaatgtgttacattagcgccataaaagtga

SEQ ID NO: 1361 - protein, 483 aa, Intestinimonas butyriciproducens
MNVVIYARYSSDRQTEQSIEGQLKECYEYARRNGYAVVGEYIDRAISGTTDHRPEFLRMIADGDKKLFQAVLVYQLDRFARNRYDSATYKAKLKKNGIRVLSARENISDDASGVLMEAVLEGMAEYYSVELSQKIRRGMDINAEKCLSTGGNLALGFCVDSEKHIQIDWDTAPVVQKIFEMYASGQSMADIIRYLNANHIKTSYGNEFNKNSINRILRNKRYIGIYTYRGTETPDGLPRIISDDLFYEVQDMMDKKKKAPARAKAFENYILSTKLFCGYCQAAMTGISGTSKTGTKYHYYQCVTNRRDKSCHKKTVSKAYIEDLVIKETRKLLTKENIDRIAKEVVRLCEQEKDTDNLKRLKKLLKENERATENLFKALESGQIVDVIAERISQKKQERNELEQQILVETSSHPTPTVNEVRFFLNQFRKGDVNDLKYRQALVDTFVNKIYLYDDKMTVLYNTQDSHSDVTIDDLSSSRVVLV

SEQ ID NO: 1362 - DNA, 50 bp, Intestinimonas butyriciproducens
  source 1..50: mol_type = genomic DNA
gatttgagttcgtctagggtcgttttggtggacctaggcgggccaaataa

SEQ ID NO: 1363 - DNA, 40 bp, Intestinimonas butyriciproducens
  source 1..40: mol_type = genomic DNA
tggctacagaggtcttattttggtggaggcggggggagtt

SEQ ID NO: 1364 - DNA, 40 bp, Intestinimonas butyriciproducens
  source 1..40: mol_type = genomic DNA
tggctacagaggtcttatttgggtggaggcggggggagtt

SEQ ID NO: 1365 - DNA, 50 bp, Intestinimonas butyriciproducens
  source 1..50: mol_type = genomic DNA
ggtttgagtatgaatagggttgtctgggtggacctaattaagagaggtaa

SEQ ID NO: 1366 - protein, 528 aa, Terrisporobacter othiniensis
MIAAIYSRKSKFTGKGESIENQIQLCMDYAKNIGITEFLVYEDEGFSGGSTDRPKFQDMLADAKDKKFDCLICYRLDRISRNVSDFSALIEELNKLGVSFISIKEQFDTSTPMGRAMMYISSVFAQLERETIAERVKDNMYELARTGRWLGGNTPTGFTSEKITYFDESMNQRSMWKLKVDKEEMKLVELIYSKYEELKSLSQVEKYFLSSNHKGKNNGNLDKSTLQSILRNPCYAKSSEEVIKYLSNNGMDVVGSPDNSHGFLTYAKQSNTPIVSVAKHKGIIDSDRWFYIQKILDSNKSKAPRVVSGSNVALLTGLLKCRCGSTMRVNYGSKRKDGTRGHYYICAKKNTKGLVACDNKNINGEQLEEVVIEQIKNVNENNIFNKFEESKKATLEKNKNIKSEKKIINKKIEDANSAIENLVKQLSLNTDSVASKYIISEIEKLNQELESLNNKLIKLDNLSKEIDSIDINLNIISDAFIKFRNEFDNADLNTKRFLLSSIIDEIIWDGDTGNINVCYLGTKKKALI

SEQ ID NO: 1367 - DNA, 50 bp, Terrisporobacter othiniensis
  source 1..50: mol_type = genomic DNA
cattgtattttagttgttgtagcttctgcaacagcaaccaaaatacaatg

SEQ ID NO: 1368 - DNA, 40 bp, Terrisporobacter othiniensis
  source 1..40: mol_type = genomic DNA
agatcccgtacaaattgcttccgtatgcccaacataaaat

SEQ ID NO: 1369 - DNA, 40 bp, Terrisporobacter othiniensis
  source 1..40: mol_type = genomic DNA
agatcccgtacaaattgctttcgtatgcccaacataaaat

SEQ ID NO: 1370 - DNA, 50 bp, Terrisporobacter othiniensis
  source 1..50: mol_type = genomic DNA
cattgttttccagctattgttgcttttgagacagcagttgtaattctatg

SEQ ID NO: 1371 - protein, 622 aa, Bacteroides fragilis
MKAAIYIRISTKKQNTDRQYEELKSYANSMGYTIVESYEDQISGFKDEEERHDLNRLKEDAKTEKFDIILFSELSRLSRKTTNILELISYFRDDCKKSLYFQKQNLNVTTDKSDLGSELQLNILATIGSYEIELSTERQMGGKIQKVKKQCWTHGSRPYGYNIDENKYLHINEEEATVIREIYAYYLNNMTSVQIAHLLNSRNIYAPATKNKKQNLWHPNSVCQILRAKRNIGIFEATYHEPDPKNKDKIRKRKNRKIVEEIKYTNKALAIVSDDIFYSANEKIDKNIKNKDTAKKNISLLKGLLTCGHCGSNFFYKKSGRDKDFSYVCYGSRYSFSIGKKKCINPITINAPKMDGLIIYMAKSRLLMRRLIENSDINIKSKEEQLQKNEEIILLQNLSIKKINEEFNQYIKKAIKYGIDDNITEKEHQRIKKQIRQIEENIERIKKENYSLNKQIKILSKDKCITDEMYNGMQLNEMKELFEEYIEKIVLYNTTQWVIVNVCYFDGSNEFSFLRKSARANELLHYNTIIQSVISEKQYIMLLRDYYDTLEIGNRYYYYPYYSNINNDVIYDKEREVFIKFGTKKGKEITEYTISEFIKFIYPKTMKEVTAYEYYYPNQKNE

SEQ ID NO: 1372 - DNA, 50 bp, Bacteroides fragilis
  source 1..50: mol_type = genomic DNA
aaaggctacttaatattgataatatgtattatctttttcaaataaccttt

SEQ ID NO: 1373 - DNA, 40 bp, Bacteroides fragilis
  source 1..40: mol_type = genomic DNA
gaaagcatccatatcaatatgtataatcttacgttcgccc

SEQ ID NO: 1374 - DNA, 40 bp, Bacteroides fragilis
  source 1..40: mol_type = genomic DNA
gaaagcatccatatcaatagttataatcttacgttcgccc

SEQ ID NO: 1375 - DNA, 50 bp, Bacteroides fragilis
  source 1..50: mol_type = genomic DNA
aaaggatacacaatacatttaacagttattatctttggaaaataaccttg

SEQ ID NO: 1376 - protein, 481 aa, Streptococcus parasanguinis
MNEINKVALYVRVSTTSQMEEGYSIEEQKAKLESYCDIKDWHIYKVYTDGGFSGSTTERPALEQLIKDARSKLFDTVLVYKLDRLSRSQKDTLYLIEDIFLKNNIEFVSLLENFDTSTPFGRAVIGLLSVFAQLEREQIKERMQLGKLGRAKAGKSMMWAKTSYGYNYDKETGSMTINEYEALAVKEIFTSYLAGMSITKLRDKINEEYPKQPAWSYRTIRGILANPVYCGLNQYKGQTFQGTHKPIISLVDFEQTQRELAKRQQTAKELSNPRPFQAKYMLSGLAQCGYCHAPLKVILGAVRKDGSRFKRYECYQRHPRTTKGVTVYNNNKKCDSGYYDMELLEHYVLTRISQLQNDPDKIQELFSDDTSPAIDKQGIQKQIDSLTLKLSKLNDLYLDDRITLDELRTKSADFIKQRNALEDEIKKASNDKQAGQREKIEKLLDASSVLDMSYDNQKVIVRELIDKVQVTSDKVVIRWKI

SEQ ID NO: 1377 - DNA, 50 bp, Streptococcus parasanguinis
  source 1..50: mol_type = genomic DNA
ttgataaattaagttacgctattttcaatgcaagaaagtaaatttgtcaa

SEQ ID NO: 1378 - DNA, 40 bp, Streptococcus parasanguinis
  source 1..40: mol_type = genomic DNA
caataagaccaccaacatttcaataagtgtaaaggccttt

SEQ ID NO: 1379 - DNA, 40 bp, Streptococcus parasanguinis
  source 1..40: mol_type = genomic DNA
caataagaccaccaacattttaataagtgtaaaggccttt

SEQ ID NO: 1380 - DNA, 50 bp, Streptococcus parasanguinis
  source 1..50: mol_type = genomic DNA
ttgttaaatgtggttatgctatttttaatggaaaaaacctgatatttaaa

SEQ ID NO: 1381 - protein, 464 aa, Enterococcus faecalis
MDKKAAIYIRVSTQEQATEGYSIQAQTDRLTKYVEAKDFILYKKYIDAGYSASKLERPAMQELIQDVQSKKVDVVIVYKLDRLSRSQKDTMYLIEDIFRPNDVELISMQESFDTSTAFGSATVGMLSVFAQLERKSISERMITGRVERAKKGFYHTGGQDRPPAGYQFNSDNQLIINEYEAAAIKDLFRLYNDGLGKSSISEYLKKNYPGKNKWLPSSIDRMLKNSLYIGKVKFSGVEYDGIHEPIIDEVTFYKTQKEIARRKQSNTKRYNYVALLGGLCECGICGAKMANRRAVGRKGKVYRYYRCYSKKGSPKHMMKTDGCSSKAQQQFIIDEAVINNLKNIDVEAELKRRSAPQTNTSLISSQIESIDKQINKLIDLFQVDSMPLDVISEKIDKLNKEKQSMEKLLERKNRLDKTELQHRFDILKSFDWDNSSIESKRAVIEMLVQKVIIHDNSIEIILVE

SEQ ID NO: 1382 - DNA, 50 bp, Enterococcus faecalis
  source 1..50: mol_type = genomic DNA
gatgtacaacattgctctttattttcaaatacagaataatgttgtataaa

SEQ ID NO: 1383 - DNA, 40 bp, Enterococcus faecalis
  source 1..40: mol_type = genomic DNA
atgcgccacttctgaaatttcaaaaagatcagtggtcaaa

SEQ ID NO: 1384 - DNA, 40 bp, Enterococcus faecalis
  source 1..40: mol_type = genomic DNA
atgcgccacttctgaaattttaaaaagatcagtggtcaaa

SEQ ID NO: 1385 - DNA, 50 bp, Enterococcus faecalis
  source 1..50: mol_type = genomic DNA
gaagtaataccactctctttatttttaaatgatgaaaatttctgtataaa

SEQ ID NO: 1386 - protein, 470 aa, Enterococcus faecalis
MKGESELDKKAAIYIRVSTQEQATEGYSIQAQTDRLTKYVEAKDFILYKKYIDAGYSASKLERPAMQELIQDVQSKKVDVVIVYKLDRLSRSQKDTMYLIEDIFRPNDVELISMQESFDTSTAFGSATVGMLSVFAQLERKSISERMITGRVERAKKGFYHTGGQDRPPAGYQFNSDNQLIINEYEAAAIKDLFRLYNDGLGKSSISEYLKKNYPGKNKWLPSSIDRMLKNSLYIGKVKFSGAEYDGIHEPIIDEVTFYKTQKEIARRKQTNTKRYNYVALLGGLCECGICGAKMANRRAVGRKGKVYRYYRCYSKKGSPKHMMKTDGCSSKAQQQFIIDEAVINNLKNIDVEAELKRRSAPQTNTSLISSQIESIDKQINKLIDLFQVDSMPLDVISEKIDKLNKEKQSMEKLLERKNKLDKTELQHRFDVLKSFDWDNSSIESKRVVIEMLVQKVIIHDNSIEIILVE

SEQ ID NO: 1387 - DNA, 50 bp, Enterococcus faecalis; identical to SEQ ID NO: 1382
  source 1..50: mol_type = genomic DNA

SEQ ID NO: 1388 - DNA, 40 bp, Enterococcus faecalis
  source 1..40: mol_type = genomic DNA
atgcgccacttccgaaatttcaaaaagatcagtggtcaaa

SEQ ID NO: 1389 - DNA, 40 bp, Enterococcus faecalis
  source 1..40: mol_type = genomic DNA
atgcgccacttccgaaattttaaaaagatcagtggtcaaa

SEQ ID NO: 1390 - DNA, 50 bp, Enterococcus faecalis; identical to SEQ ID NO: 1385
  source 1..50: mol_type = genomic DNA

SEQ ID NO: 1391 - protein, 621 aa, Lysinibacillus fusiformis
MTIRETEPRTSLRAAIYIRVSIKNLQEDRYSLSAQTTELTRYAESQGWEIVDIFKDTDSGTKLKKPGLESLLDYVEDGKIDVVLVIEQDRLSRLDAVSWHFLKNVLRENNVKIAEPGHIMDLSNVDDEFYSDLKNIFAHRNRRDIIRKMMRGKRQFTREGKVWGKQPDGYIHVKETSSVVVDENRSWIIPYIDDLLLEQGISATGVASCLNQLCKTPTGKEWTVNQVLQRYKNKAYHGVLEKTFSNGETITVEDVYPKLRSLETFEAITQRLKENYKAKPAESHFLRNVIITCASCNRLVSVNKTSSHSRKKDKTYPVFTLRHLNESTHDDCEAKPYVNTKRIKNILITAVKSILIDEKTAKKYIDAEFDDKELDKIKKQLSELNKQKNDVNSKMDKILKLYLDGKWSEEVLDKERDQLDSRLKHIENSIDDLKRKYELVKTSQFNYDVVVEFLSIAAHFDSLLEESEQQRLIGSIFPTATLDVSNNLLIMHARLPQQVTLDIRIDIETMEAVKEREMYAAAREKYNAIQTYLNKNKGASLERIQKHFHSNYSTLIKYQEWFGPFKHLAPNRLGPEMRQKRIKTIKKALQSHPNATGRQLEKITGINRKMIYKLIREEKLR

SEQ ID NO: 1392 - DNA, 50 bp, Lysinibacillus fusiformis
  source 1..50: mol_type = genomic DNA
tcctgttttccaccgaactttatcttaataaatgtgtgatttaacataag

SEQ ID NO: 1393 - DNA, 40 bp, Lysinibacillus fusiformis
  source 1..40: mol_type = genomic DNA
atgcgttccaaagcgaattttcttgaaaatagttgcctgc

SEQ ID NO: 1394 - DNA, 40 bp, Lysinibacillus fusiformis
  source 1..40: mol_type = genomic DNA
atgcgttccaaagcgaatttacttgaaaatagttgcctgc

SEQ ID NO: 1395 - DNA, 50 bp, Lysinibacillus fusiformis
  source 1..50: mol_type = genomic DNA
ttctctttttaaaagatctttatctaaataaatgtgtcaccttccaatag

SEQ ID NO: 1396 - protein, 508 aa, Clostridium leptum
MNVVIYARYSDSKQREESIEAQLKVCHAYAESKGYTVIREYIDRALSGRSDDRPQFQLMIKHSERKQFQKVLVYKLDRFSRDEYDPAIYKAQLRKNGVKVESATENIPDNSFGILIEALISGNNASYSVELREKVKRNLELNAEKCLSNGGTTPLGYKLVRLNPNEEKSKKKYVINEETAPTVQEVFTKYANGWSIKEICDSLNARGLKSAQRAAFNKSSLHTMLCNRKYLGIYIYDGIEIPGGMPQIIDEDLFNKVAEKMKLNKKNPGRARAKAEYILTTKLFCGYCKEKMVGHSSNQISKKGIIFNYYKCKNSGRNKPCKKKMVHKDYIEDIIIMECRKLLTPENISRIAKEVVKIAQSFDDRSALHRLESLIQKAQEEKENQMTSLRACKDDTIREMIFEDLGRIGAEIKELEKQIEIEKERHYVVTEQQVVDHLKSLADGDIKDITYRKSLIRLFVNKIFLYDDKFTITFNTGDEEVTITEVMLSEIEEELSGNSLCFLKNKVH

SEQ ID NO: 1397 - DNA, 50 bp, Clostridium leptum
  source 1..50: mol_type = genomic DNA
ttctctttgttttttaaagaacaaggttcaccacaccaatattaaacaaa

SEQ ID NO: 1398 - DNA, 40 bp, Clostridium leptum
  source 1..40: mol_type = genomic DNA
cggggttcgaatccccgatggttcaccaataaggccgagg

SEQ ID NO: 1399 - DNA, 40 bp, Clostridium leptum
  source 1..40: mol_type = genomic DNA
cggggttcgaatccccgatacttcaccaataaggccgagg

SEQ ID NO: 1400 - DNA, 50 bp, Clostridium leptum
  source 1..50: mol_type = genomic DNA
ttctctttgaaaagtatgaaacaaacttcggcacacagtttttaaaaaat

SEQ ID NO: 1401 - protein, 605 aa, Tenacibaculum maritimum
MLAIYTRLSIEDDENNSIENQINEGTHYAVNNGFKDNFKIYNEGEGVKGSTTIKKRPKLSLLIEDIKKGDISIIYVRYQSRISRKLKILGEFLEIIEEYNINLFVGDKGLIDMNLPSNKLMIQFFGAIDEFTPNNQSYQTKKTQRLKAEQGYVWGVIPYGYQADSITKKAIINEEESSVIKRIFKLSKEGYGCEKIAKTLNADGVETKMKKMVTNQYSNKEYKDEKKYFSKSQNKIVKVDRTTSIWLSKTIYDMLKNTWYIGQRKWGGVVYPVPPIISKELFNEVNNKLTNSNHKKGKSVNYRFLLKGIIFCEKCGRAYNGNRKYNNKNHNKTSKYSANYYQCASKRLMKHNCDNFGINITNLESFIICHLFKNKELLSHLENLEKKDTALIENKEELNRLTEQIIEQENIRDNVEKSLFVEGINDTTRTRFIKKLNNVEEHVKGLNTKIEHARLRINEIENDRLLNITNQINSYNKNWEFQEYKEAVNNIIDRIIVLGERNEKTFNNKKYHLIQVKYKGYDDYSVFLSKKPHTKWIWLNSVRKMTEEEINEEIAMQEELIKYETGKEIKVTKKEIENIYDGKLLVNENINKIIQLKTEDIIDFD

SEQ ID NO: 1402 - DNA, 50 bp, Tenacibaculum maritimum
  source 1..50: mol_type = genomic DNA
acatacacaaatatatgtattaaagatatgatgcactaatttgtgtatgt

SEQ ID NO: 1403 - DNA, 40 bp, Tenacibaculum maritimum
  source 1..40: mol_type = genomic DNA
agatacagcgggtaggagagatatggtgcatatgagactt

SEQ ID NO: 1404 - DNA, 40 bp, Tenacibaculum maritimum
  source 1..40: mol_type = genomic DNA
agatacagcgggtaggagatatatggtgcatatgagactt

SEQ ID NO: 1405 - DNA, 50 bp, Tenacibaculum maritimum
  source 1..50: mol_type = genomic DNA
acatatatacacatatgtattacatatatcatatacatatatgtatatgt

SEQ ID NO: 1406 - protein, 463 aa, Brevibacterium casei
MAIYARISRDRNGAGLGVDRQEADCRALAERLGWNVVAVYVDNDISAYSGASRPQYREMLREVRAGHIRGVVAWHTDRLHRKTTELEEFVRVAEESNLQVQTVTAGTVDLTTPSGRMVARMLGAAAQHEVDHARERMKRAKAQMAMNGQYRGGQRPYGYEPDGMTVRESEASVVRDATKSLLAGRSLAAVARELNEQGHKTSRGKDWTYARLRDVIIRPRNAGLLSRGKPDNPDVDIVGPAQWAPLVDEETWRAVHAVLTDKSRRTQNGNDVRWLGSGLYLCGKCNSPMRPAPYGGTPSRGSERKYLYRCVESAHLTVSTRQTDDHVRSVVAELVRDPRIVAAMTGDDSQLTEARARRSALAVRLETFESDYAAGAITGAQLQRATEVVNAELAQLDAQLTEGLRKTTATPVTSAPDPGAAFLAAPVDVQRAVLAAVLTVTILPAPYKGAAWTPERLSFNPVA

SEQ ID NO: 1407 - DNA, 50 bp, Brevibacterium casei
  source 1..50: mol_type = genomic DNA
atatgtcaaatagtaggttttgaactgtcaaaactgtaaaattgacatat

SEQ ID NO: 1408 - DNA, 40 bp, Brevibacterium casei
  source 1..40: mol_type = genomic DNA
ctccggccgccgcgtcgacctctcacagccgttcgtcgac

SEQ ID NO: 1409 - DNA, 40 bp, Brevibacterium casei
  source 1..40: mol_type = genomic DNA
ctccggccgccgcgtcgaccactcacagccgttcgtcgac

SEQ ID NO: 1410 - DNA, 50 bp, Brevibacterium casei
  source 1..50: mol_type = genomic DNA
atatgtcagtattcacattttcaacagtcaaaactgctaaattgaaactt

SEQ ID NO: 1411 - protein, 474 aa, Bacillus amyloliquefaciens
MNLMDENTQKNVGIYVRVSTEEQAKEGYSISAQKEKLKAYCVSQGWDSYKFYIDEGKSAKDIHRPSLELMLRHIEQGIIDTVLVYRLDRLTRSVRDLYSLLDYFDKYQAVFRSATEVYDTGSATGRLFITLVAAMAQWERENLGERVKMGQVEKARQGQFSAPAPFGFTKEGESLVKNPEEGEVLLDMIDKIKKGYSLRELADYLDESDAIPKRGYKWHIASILVILKNPVLYGGFRWAGEILEGAFEGYISKKEFEQLQKMLHDRQNFKRRETSSIFIFQAKILCPNCGSRLTCERSIYFRKKDNKNVESNHYRCQACALNKKPAIGISEKKFEKALIEYMQNANFKREPKIPQEKQQDYDKLHQKIISIEKQRKKYQKAWSMELMTDQEFEQLMAETKEALQKALAKLEQNDLHPIEKPLNIERAKELAKMFRENWSVLTGEEKRQTVQELIKHIEFEKKDNKARILDIHFY

SEQ ID NO: 1412 - DNA, 50 bp, Bacillus amyloliquefaciens
  source 1..50: mol_type = genomic DNA
tttattagggtttatataaagtataaacatgtgaaatagacataaataca

SEQ ID NO: 1413 - DNA, 40 bp, Bacillus amyloliquefaciens
  source 1..40: mol_type = genomic DNA
atttttggtatttaaatataagcagacaaaatgctcctgg

SEQ ID NO: 1414 - DNA, 40 bp, Bacillus amyloliquefaciens
  source 1..40: mol_type = genomic DNA
atttttggtatttaaatatatgcagacaaaatgctcctgg

SEQ ID NO: 1415 - DNA, 50 bp, Bacillus amyloliquefaciens
  source 1..50: mol_type = genomic DNA
tctattaggaacagtataataaatatacatttaaaagatctataaacaca

SEQ ID NO: 1416 - protein, 498 aa, Klebsiella variicola
MKQNGQAYSYIRFSSKKQEQGDSVRRQTELAEQYAHANNLILSDKNFQDLGISAFKEGNRPSLGDMLEAIEKGQIEQGSTIIIESLDRLSRRGIDVTQQIIKSILQNNVFIASLVDGLLLNRESTNDLVSVIRIALAADLAYKESEKKSQRLRETKGQQRQRALNGEVINKILPFWLQRKEDKYVFSEKLDTVKRIIELRRKGLGTNKIARTLNDEGHKPLRSAGWNHTTVGKTINSVALYGAYQTSETTKDRKVILLDIIENYYPAVISKDEFILLQSDQKQNKPGYKSEHNAFAGILKHECGGALVRKFHVVSGKTYQYHVCANARDGKCNVTKNFKNIEVALYRIMKELKLEKKTSIDETLLLERNSVKAKIQELNDMLLNLSKIPISVIQTINNLEEKLQQLEENIKHQNSMIISEQAFDFKLLQEIKDPQELNMMLKRVIEQIIVFNIGKRWRVKVLYRNKHSQSFIWDGEKISFISDTKKLLELFKSQTEEV

SEQ ID NO: 1417 - DNA, 50 bp, Klebsiella variicola
  source 1..50: mol_type = genomic DNA
tcttgttcactttgaaacaatattgtgatattgttgcaaagaagcaaaat

SEQ ID NO: 1418 - DNA, 40 bp, Klebsiella variicola
  source 1..40: mol_type = genomic DNA
cttactgccaaactgcatggtaacgttgctggatactagc

SEQ ID NO: 1419 - DNA, 40 bp, Klebsiella variicola
  source 1..40: mol_type = genomic DNA
cttactgccaaactgcatgtcaacgttgctggatactagc

SEQ ID NO: 1420 - DNA, 50 bp, Klebsiella variicola
  source 1..50: mol_type = genomic DNA
tcttgtttacctgaaaacaatatttccatatttttttcccaaagaatatt

SEQ ID NO: 1421 - protein, 498 aa, Klebsiella pneumoniae; identical to SEQ ID NO: 1416

SEQ ID NO: 1422 - DNA, 50 bp, Klebsiella pneumoniae; identical to SEQ ID NO: 1417
  source 1..50: mol_type = genomic DNA

SEQ ID NO: 1423 - DNA, 40 bp, Klebsiella pneumoniae
  source 1..40: mol_type = genomic DNA
cttgctgccaaactgcatggtaacgttgctggatactagc

SEQ ID NO: 1424 - DNA, 40 bp, Klebsiella pneumoniae
  source 1..40: mol_type = genomic DNA
cttgctgccaaactgcatgtcaacgttgctggatactagc

SEQ ID NO: 1425 - DNA, 50 bp, Klebsiella pneumoniae; identical to SEQ ID NO: 1420
  source 1..50: mol_type = genomic DNA

SEQ ID NO: 1426 - protein, 498 aa, Klebsiella quasipneumoniae
MKQNGQAYSYIRFSSKKQEQGDSVRRQTELAEQYAHANNLILSDKNFQDLGISAFKEGNRPSLGDMLEAIEKGQIEQGSTIIIESLDRLSRRGIDVTQQIIKSILQNNVFIASLVDGLLLNRESTNDLVSVIRIALAADLAYKESEKKSQRLRETKGQQRQRALNGEVINKILPFWLERKQNKFVFSDKLDTVKRIIELRRKGLGTNKIAKALNNEGHKPLRSAGWNHTTVGKTINSVALYGAYQTSETTKDRKVILLDIVENYYPAVITKEEFMLLQSDQKQNKPGYKSEHNAFTGILKHECGGALVRKFHVVSGKTYQYHVCANARDGKCNVTKNFKNIEIALYRIMKELKLEKNTSSDETLLVERNSVKAKIQELNDMLLKLPKIPISVIQTINNLEEKLQGLEAKIKQQDSIIISEKAFDFHRLQEIKDPQEMNMMLKRVIEKITVFNIGKKWRVKVTYRNKHSQSFIWDGEKISFISDTKKLLELIKSHAEEV

SEQ ID NO: 1427 - DNA, 50 bp, Klebsiella quasipneumoniae; identical to SEQ ID NO: 1417
  source 1..50: mol_type = genomic DNA

SEQ ID NO: 1428 - DNA, 40 bp, Klebsiella quasipneumoniae; identical to SEQ ID NO: 1418
  source 1..40: mol_type = genomic DNA

SEQ ID NO: 1429 - DNA, 40 bp, Klebsiella quasipneumoniae; identical to SEQ ID NO: 1419
  source 1..40: mol_type = genomic DNA

SEQ ID NO: 1430 - DNA, 50 bp, Klebsiella quasipneumoniae; identical to SEQ ID NO: 1420
  source 1..50: mol_type = genomic DNA

SEQ ID NO: 1431 - protein, 498 aa, Klebsiella quasipneumoniae
MKQNGQAYSYIRFSSKKQEQGDSVRRQTELAEQYAHANNLILSDKNFQDLGISAFKEGNRPSLGDMLEAIEKGQIEQGSTIIIESLDRLSRRGIDVTQQIIKSILQNNVFIASLVDGLLLNRESTNDLVSVIRIALAADLAYKESEKKSQRLRETKGQQRQRALNGEVINKILPFWLQRKEDKYVFSEKLDTVKRIIELRRKGLGTNKIARTLNDEGHKPLRSAGWNHTTVGKTINSVALYGAYQTSETTKDRKVILLDIIENYYPAVISKDEFILLQSDQKQNKPGYKSEHNAFAGILKHECGGALVRKFHVVSGKTYQYHVCANARDGKCNVTKNFKNIEVALYRIMKELKLEKKTSIDETLLLERNSVKAKIQELNDMLLNLSKIPISVIQTINNLEEKLQQLEENIKHQNSMIISEQAFDFKLLQEIKDPQELNMMLKRVIEQIIVFNIGKRWRVKVLYRNKHSQSFIWDGEKISFISDTKKLLELLKSQTEEV

SEQ ID NO: 1432 - DNA, 50 bp, Klebsiella quasipneumoniae; identical to SEQ ID NO: 1417
  source 1..50: mol_type = genomic DNA

SEQ ID NO: 1433 - DNA, 40 bp, Klebsiella quasipneumoniae; identical to SEQ ID NO: 1418
  source 1..40: mol_type = genomic DNA

SEQ ID NO: 1434 - DNA, 40 bp, Klebsiella quasipneumoniae; identical to SEQ ID NO: 1419
  source 1..40: mol_type = genomic DNA

SEQ ID NO: 1435 - DNA, 50 bp, Klebsiella quasipneumoniae; identical to SEQ ID NO: 1420
  source 1..50: mol_type = genomic DNA

SEQ ID NO: 1436 - protein, 513 aa, Clostridium botulinum
MKRIAIYSRKSRETDTGESIKNQIDMCKTYFNRADEECSFEVFQDEGFSGGNTNRPSFQRMLELAKHKQFDVIAVYKVDRIARNIVDFVNIYDELENHDVKLVSITEGFDPSTPIGKMMMMLLASFAEMERMNIAERVKDNMKGLAKIGRWSGGTPPTGYRNKTIINDNGKKESYLELIPQKKQLLISIFEKAADGYTTYQIGEMFNMPPKTISNILCNPTYVRSDELSANYLKSVGYSVFGELNGNGYLSYNRRPRKKGKKLFNAKGMFVAVSEHEAIIDSKTWIKANNNLKDRATEARPRISPQSFLAHLVKCKCGSGMYIHKGHLKKNGTRNTYFVCSKKKSKDKCTSKWLRIDVVEAEVLDLLKKISLNPKILDAYLKKKNNSVNYVESIKNIKKQINKNTETINALTDKLILLEGASIDIVSKKINSMANENTRLNTQLLEIEREKMFLEVDGENLKLLISNISKFLAKFDKIDISEKQNFIKTIIKEVVWDSTSNDGEDEITIKFLE

SEQ ID NO: 1437 - DNA, 50 bp, Clostridium botulinum
  source 1..50: mol_type = genomic DNA
agacataatttcagatgtaccgcatgtgcaatacatctgaaattgatgcc

SEQ ID NO: 1438 - DNA, 40 bp, Clostridium botulinum
  source 1..40: mol_type = genomic DNA
cggcggcggttgggccggatgtgcagcagctataagcgct

SEQ ID NO: 1439 - DNA, 40 bp, Clostridium botulinum
  source 1..40: mol_type = genomic DNA
cggcggcggttgggccggacatgcagcagctataagcgct

SEQ ID NO: 1440 - DNA, 50 bp, Clostridium botulinum
  source 1..50: mol_type = genomic DNA
tgtcataatatgatatataccgcacatggaatgcatttcccattgaagac

SEQ ID NO: 1441 - protein, 502 aa, Clostridium perfringens
MNNKICIYLRKSRADEELEKTLGEGETLSKHRNALLKFAKENKLNVTDIKEEIVSGDSLFFRPKMLELLKEIENNMYYGVLVMDIDRLGRGGMKDQGIILDAFKESKTKIITPLKTYDLDNEMDEELTEFKTFFSRRELKTINRRMQGGRVRSVEEGNYIATNPPFGYDITFIKKNRTLKINEYESNAVKLIFKLYTEGNGASFIANELNNLGYKTKLGNNFSPSSVLTIIKNPVYVGKIAWKRKDIKKSKTLGKVKDTRLRDVSEWIIADGKHQAIITNENWEAAQTILKGRYHIPYQLSNAPVNPLAGLITCGVCGKKMVMRNVRGINRLMCIYKCGNKSTRFDNVESDCLESLRDYLINYSAEIKNSIKKEDIDIYSNQITNLKKELTTLNNQRLKLFDLLERNLYDEATFLERSKNINDRIETITQTLKSLEKKVKKNSYTSYEEDIKYFKNVLDAYNLTKDISKKNNLLKSILYKVEYTKNNKGKDYEIKLFPKLRK

SEQ ID NO: 1442 - DNA, 50 bp, Clostridium perfringens
  source 1..50: mol_type = genomic DNA
tacatacaacatattaattatatttcattacattcaatatgttgtatgta

SEQ ID NO: 1443 - DNA, 40 bp, Clostridium perfringens; identical to SEQ ID NO: 178
  source 1..40: mol_type = genomic DNA

SEQ ID NO: 1444 - DNA, 40 bp, Clostridium perfringens
  source 1..40: mol_type = genomic DNA
aatatctatgagacaaatttaattaccttccttatctact

SEQ ID NO: 1445 - DNA, 50 bp, Clostridium perfringens
  source 1..50: mol_type = genomic DNA
tatatataattatataattatatataattatatatattatattatatgta

SEQ ID NO: 1446 - protein, 503 aa, Clostridium perfringens
MKRIAIYSRKSVFIEGSISIETQINMCKEYMINKFPDATFEIFEDEGFSGGNTNRPAFQKMLKLAELKEIDIVVCYKIDRIARNTLDFLNILEIFKKNNVELVSITEGFDPNTQMGKVMLTLLASFAEMERTNIQQRVKDSMFSLAQKGNWTGGAPPLGFKVKESGGIEIYNKNLILDVFNMKFKKYKNTEIIEYIESKYNHKFVNTTLASMLRKPIYTKSSKEVSTYLKTKGYKILREENNSNSYYTYKNNNQDYAIVNNDVDGLIEPYVWISINKAMDDNSNGETNRFSEKFWLTKSLRCKYCGKTYCGQTKNVKSKYTNKDGVSKEYIGTYEYYMCRDMLRGRLKTCENTKRIKRSYLEKKIEELIYILKDKSFFEKSYYKREVDNPAKELKELESNMKKLDKTINNLTDKIALLSNDAAMILIDKIETLVKEKKALKDKMISLELKSLDNLEGKEEFIYENILEFNTNLSVDQKRNIAINIFKEIVYDYKTDKFEVFFN

SEQ ID NO: 1447 - DNA, 50 bp, Clostridium perfringens
  source 1..50: mol_type = genomic DNA
tttgtttaacttaaaagtattgcacttcctataatgtttattttaacaaa

SEQ ID NO: 1448 - DNA, 40 bp, Clostridium perfringens
  source 1..40: mol_type = genomic DNA
tttcatatccattgaaacgcttccaccagtagcgtggaag

SEQ ID NO: 1449 - DNA, 40 bp, Clostridium perfringens
  source 1..40: mol_type = genomic DNA
tttcatatccattgaaacgtatccaccagtagcgtggaag

SEQ ID NO: 1450 - DNA, 50 bp, Clostridium perfringens
  source 1..50: mol_type = genomic DNA
tttgtttaaagaaaaagtattgtataaattataatttttatttaaataaa

SEQ ID NO: 1451 - protein, 479 aa, Mycobacterium avium
MAKAKTPGQRVGVRSAAIYARISADAEGTGLGVARQVQDCRKLAADRGWPVGDEYVDNDVSAYSGKPRREYARMLDDLKSGARDAVIVYNLDRLHRRPLELEDFVTLCESVGVRDVATVTADIDLGNDDGLFMARIFAAFAAKESGRKSARIRRKMLQNAEQGLPHGPARPFGYENDKITVRPAEAKVIREMVDRYLAGASIRSLTIWLNDTGIAPPASTSWQTTTVRNILASGRIAGLREHHGEVIGPAAWPAVITPAERDRILARMAARSVTKTRAPRTYLLSGMLRCGRCGNRLFSQARHNNPTNRVRRYVCLKGPDHGGCGRLTVVARPVEELLTDAVLTRLDSPQLADALNGKARVDADVAALAAQLEADQARLDELAALYAEGAVSAREWIAARDPITDRITQARRDIAKATDTSSVVDLVGTGEMLRGQWDDLDIDRQQAIIKSVLDHAVIAPGTPGSRKLDINRVQPQWRL

SEQ ID NO: 1452 - DNA, 50 bp, Mycobacterium avium
  source 1..50: mol_type = genomic DNA
caggtagatcaacgacttgtaaccaagctgaaatgtcgctaaactaccct

SEQ ID NO: 1453 - DNA, 40 bp, Mycobacterium avium
  source 1..40: mol_type = genomic DNA
cggcgccaccgaattggccaacctggtgctggtctgcccg

SEQ ID NO: 1454 - DNA, 40 bp, Mycobacterium avium
  source 1..40: mol_type = genomic DNA
cggcgccaccgaattggccatcctggtgctggtctgcccg

SEQ ID NO: 1455 - DNA, 50 bp, Mycobacterium avium
  source 1..50: mol_type = genomic DNA
gagggagatgataaacatgaaaccatgtggaaatgtggattaaccaccct

SEQ ID NO: 1456 - protein, 479 aa, Mycobacterium kansasii; identical to SEQ ID NO: 1451

SEQ ID NO: 1457 - DNA, 50 bp, Mycobacterium kansasii; identical to SEQ ID NO: 1452
  source 1..50: mol_type = genomic DNA

SEQ ID NO: 1458 - DNA, 40 bp, Mycobacterium kansasii
  source 1..40: mol_type = genomic DNA
cggtcgtacccaggcgtcgaacctgaaatgcctttgtaga

SEQ ID NO: 1459 - DNA, 40 bp, Mycobacterium kansasii
  source 1..40: mol_type = genomic DNA
cggtcgtacccaggcgtcgatcctgaaatgcctttgtaga

SEQ ID NO: 1460 - DNA, 50 bp, Mycobacterium kansasii; identical to SEQ ID NO: 1455
  source 1..50: mol_type = genomic DNA

SEQ ID NO: 1461 - protein, 479 aa, Mycobacteroides abscessus; identical to SEQ ID NO: 1451

SEQ ID NO: 1462 - DNA, 50 bp, Mycobacteroides abscessus; identical to SEQ ID NO: 1452
  source 1..50: mol_type = genomic DNA

SEQ ID NO: 1463 - DNA, 40 bp, Mycobacteroides abscessus
  source 1..40: mol_type = genomic DNA
gggcagcaccgatatgggcaacgtcacgcaggtgttgccc

SEQ ID NO: 1464 - DNA, 40 bp, Mycobacteroides abscessus
  source 1..40: mol_type = genomic DNA
gggcagcaccgatatgggcatcgtcacgcaggtgttgccc

SEQ ID NO: 1465 - DNA, 50 bp, Mycobacteroides abscessus; identical to SEQ ID NO: 1455
  source 1..50: mol_type = genomic DNA

SEQ ID NO: 1466 - protein, 479 aa, Mycobacterium persicum
MAKAKTPGQRVGVRSAAIYARISADAEGTGLGVARQVQDCRKLAADRGWPVGDEYVDNDVSAYSGKPRREYARMLDDLKSGARDAVIVYNLDRLHRRPLELEDFVTLCESVGVRDVATVTADIDLGNDDGLFMARIFAAFAAKESGRKSARIRRKMLQNAEQGLPHGPARPFGYENDKITVRPAEAKVIREMVDRYLAGASIRSLTIWLNDTGIAPPASTSWQTTTVRNILASGRIAGLREHHVEVIGPAAWPAVITPAERDRILARMAARSVTKTRAPRTYLLSGMLRCGRCGNRLFSQARHNNPTNRVRRYVCLKGPDHGGCGRLTVVARPVEELLTDAVLTRLDSPQLADALNGKARVDADVAALAAQLEADQARLDELAALYAEGAVSAREWIAARDPITDRITQARRDIAKATDTSSVVDLVGTGEMLRGQWDDLDIDRQQAIIKSVLDHAVIAPGTPGSRKLDINRVQPQWRL

SEQ ID NO: 1467 - DNA, 50 bp, Mycobacterium persicum; identical to SEQ ID NO: 1452
  source 1..50: mol_type = genomic DNA

SEQ ID NO: 1468 - DNA, 40 bp, Mycobacterium persicum; identical to SEQ ID NO: 1458
  source 1..40: mol_type = genomic DNA

SEQ ID NO: 1469 - DNA, 40 bp, Mycobacterium persicum; identical to SEQ ID NO: 1459
  source 1..40: mol_type = genomic DNA

SEQ ID NO: 1470 - DNA, 50 bp, Mycobacterium persicum; identical to SEQ ID NO: 1455
  source 1..50: mol_type = genomic DNA

SEQ ID NO: 1471 - protein, 479 aa, Mycobacteroides abscessus; identical to SEQ ID NO: 1451

SEQ ID NO: 1472 - DNA, 50 bp, Mycobacteroides abscessus; identical to SEQ ID NO: 1452
  source 1..50: mol_type = genomic DNA

SEQ ID NO: 1473 - DNA, 40 bp, Mycobacteroides abscessus
  source 1..40: mol_type = genomic DNA
tggccccaccactggcgccaatctgaaggccttgtgccgc

SEQ ID NO: 1474 - DNA, 40 bp, Mycobacteroides abscessus
  source 1..40: mol_type = genomic DNA
tggccccaccactggcgccattctgaaggccttgtgccgc

SEQ ID NO: 1475 - DNA, 50 bp, Mycobacteroides abscessus; identical to SEQ ID NO: 1455
  source 1..50: mol_type = genomic DNA

SEQ ID NO: 1476 - protein, 475 aa, Streptococcus pneumoniae
MKTMNKVAIYVRVSTTSQVEEGYSIDEQKDKLEAYCKIKDWKIYDVYVDGGFSGANTQRPELERLISDVKRKKVDIVLVYKLDRLSRSQKDTLFLIEDVFAKNDVAFISLQENFDTSTPFGKASIGMLSVFAQLEREQIKERMMLGKEGRAKNGKSMSWTTIPFGYDYSKETGVLSVNPTQALIVNRIFTEYLNGKPVVKIIRDLNAEGHVGRKRPWGETITKYLLKNETYLGKVKYKDKVYEGQHEPIITQELFDLVQLEVERRQISAYEKYNNPRPFRAKYMLSGLMKCGYCGASLGLRYTRKDKNGISHHKYQCRNRHSKDLEKRCESGWYSKEELERIVIKELERIKFDPKYKNETLAKKEETIKVEEIKKQLERINNQVSKLTELYLDEIITRKELDEKNDKIKTERQFLEEQLENQKSNVLSIRKRKLTRLLKDFDVEKLSYEDASKIVKNIIKEIIVTKDGMSITLDF

SEQ ID NO: 1477 - DNA, 50 bp, Streptococcus pneumoniae
  source 1..50: mol_type = genomic DNA
tattttagtcaaagtaattaagataagttagagttagtaacagtatttta

SEQ ID NO: 1478 - DNA, 40 bp, Streptococcus pneumoniae
  source 1..40: mol_type = genomic DNA
ttaaacgtccaatcaagataactttattatacatattttc

SEQ ID NO: 1479 - DNA, 40 bp, Streptococcus pneumoniae
  source 1..40: mol_type = genomic DNA
ttaaacgtccaatcaagattgctttattatacatattttc

SEQ ID NO: 1480 - DNA, 50 bp, Streptococcus pneumoniae
  source 1..50: mol_type = genomic DNA
tcttatggtcaaagtaattaagattggatagatttacctgtaagatttta

SEQ ID NO: 1481 - protein, 475 aa, Streptococcus pneumoniae
MKTTNKVAIYVRVSTTSQVEEGYSIDEQKDKLEAYCKIKDWKIYDVYVDGGFSGANTQRPELERLISDVKRKKVDIVLVYKLDRLSRSQKDTLFLIEDVFAKNDVAFISLQENFDTSTPFGKASIGMLSVFAQLEREQIKERMMLGKEGRAKNGKSMSWTTIPFGYDYSKETGVLSVNPTQALIVNRIFTEYLNGKPVVKIIRDLNAEGHVGRKRPWGETITKYLLKNETYLGKVKYKDKVYEGQHEPIITQELFDLVQLEVERRQISAYEKYNNPRPFRAKYMLSGLMKCGYCGASLGLRYTRKDKNGISHHKYQCRNRHSKDLEKRCESGWYSKEELERGVIKELERIKFDPKYKNETLAKKEETIKVEEIKKQLERINNQVSKLTELYLDEIITRKELDEKNDKIKTERQFLEEQLENQKSNVLSIRKRKLTRLLKDFDVEKLSYEDASKIVKNIIKEIIVTKDGMSITLDF

SEQ ID NO: 1482 - DNA, 50 bp, Streptococcus pneumoniae; identical to SEQ ID NO: 1477
  source 1..50: mol_type = genomic DNA

SEQ ID NO: 1483 - DNA, 40 bp, Streptococcus pneumoniae
  source 1..40: mol_type = genomic DNA
ttaaacgcccaatcatgataactttattatacatattttc

SEQ ID NO: 1484 - DNA, 40 bp, Streptococcus pneumoniae
  source 1..40: mol_type = genomic DNA
ttaaacgcccaatcatgattgctttattatacatattttc

SEQ ID NO: 1485 - DNA, 50 bp, Streptococcus pneumoniae; identical to SEQ ID NO: 1480
  source 1..50: mol_type = genomic DNA

SEQ ID NO: 1486 - protein, 475 aa, Streptococcus pneumoniae
MKTTNKVAIYVRVSTTSQVEEGYSIDEQKDKLEAYCKIKDWKIYDVYVDGGFSGANTQRPELERLISDVKRKKVDIVLVYKLDRLSRSQKDTLFLIEDVFAKNDVAFISLQENFDTSTPFGKASIGMLSVFAQLEREQIKERMMLGKEGRAKNGKSMSWTTIPFGYDYSKETGVLSVNPTQALIVNRIFTEYLNGKPVVKIIRDLNAEGHVGRKRPWGETITKYLLKNETYLGKVKYKDKVYEGQHEPIITQELFDLVQLEVERRQISAYEKYNNPRPFRAKYMLSGLMKCGYCGASLGLRYTRKDKNGISHHKYQCRNRHSKDLEKRCESGWYSKEELERVVIKELERIKFDPKYKNETLAKKEETIKVEEIKKQLERINNQVSKLTELYLDEIITRKELDEKNDKIKTERQFLEEQLENQKSNVLSIRKRKLTRLLKDFDVEKLSYEDASKIVKNIIKEIIVTKDGMSITLDF

SEQ ID NO: 1487 - DNA, 50 bp, Streptococcus pneumoniae; identical to SEQ ID NO: 1477
  source 1..50: mol_type = genomic DNA

SEQ ID NO: 1488 - DNA, 40 bp, Streptococcus pneumoniae; identical to SEQ ID NO: 1478
  source 1..40: mol_type = genomic DNA

SEQ ID NO: 1489 - DNA, 40 bp, Streptococcus pneumoniae; identical to SEQ ID NO: 1479
  source 1..40: mol_type = genomic DNA

SEQ ID NO: 1490 - DNA, 50 bp, Streptococcus pneumoniae; identical to SEQ ID NO: 1480
  source 1..50: mol_type = genomic DNA

SEQ ID NO: 1491 - protein, 475 aa, Streptococcus pneumoniae
MKTTNKVAIYVRVSTTSQVEEGYSIDEQKDKLEAYCKIKDWKIYDVYVDGGFSGANTQRPELERLISDVKRKKVDIVLVYKLDRLSRSQKDTLFLIEDVFAKNDVAFISLQENFDTSTPFGKASIGMLSVFAQLEREQIKERMMLGKEGRAKNGKSMSWTTIPFGYDYSKETGVLSVNPTQALIVNRIFTEYLNGKPVVKIIRDLNAEGHVGRKRPWGETITKYLLKNETYLGKVKYKDKVYEGQHEPIITQELFDLVQLEVERRQISAYEKYNNPRPFRAKYMLSGLMKCGYCGASLGLRYTRKDKNGISHHKYQCRNRHSKDLEKRCESGWYSKEELERGVIKEFERIKFDPKYKNETLAKKEETIKVEEIKKQLERINNQVSKLTELYLDEIITRKELDEKNDKIKTERQFLEEQLENQKSNVLSIRKRKLTRLLKDFDVEKLSYEDASKIVKNIIKEIIVTKDGMSITLDF

SEQ ID NO: 1492 - DNA, 50 bp, Streptococcus pneumoniae; identical to SEQ ID NO: 1477
  source 1..50: mol_type = genomic DNA

SEQ ID NO: 1493 - DNA, 40 bp, Streptococcus pneumoniae; identical to SEQ ID NO: 1483
  source 1..40: mol_type = genomic DNA

SEQ ID NO: 1494 - DNA, 40 bp, Streptococcus pneumoniae; identical to SEQ ID NO: 1484
  source 1..40: mol_type = genomic DNA

SEQ ID NO: 1495 - DNA, 50 bp, Streptococcus pneumoniae; identical to SEQ ID NO: 1480
  source 1..50: mol_type = genomic DNA

SEQ ID NO: 1496 - protein, 475 aa, Streptococcus pneumoniae; identical to SEQ ID NO: 1481

SEQ ID NO: 1497 - DNA, 50 bp, Streptococcus pneumoniae; identical to SEQ ID NO: 1477
  source 1..50: mol_type = genomic DNA

SEQ ID NO: 1498 - DNA, 40 bp, Streptococcus pneumoniae
  source 1..40: mol_type = genomic DNA
ttaaacgcccaatcaagataactttattatacatattttc

SEQ ID NO: 1499 - DNA, 40 bp, Streptococcus pneumoniae
  source 1..40: mol_type = genomic DNA
ttaaacgcccaatcaagattgctttattatacatattttc

SEQ ID NO: 1500 - DNA, 50 bp, Streptococcus pneumoniae; identical to SEQ ID NO: 1480
  source 1..50: mol_type = genomic DNA

SEQ ID NO: 1501 - protein, 475 aa, Streptococcus pneumoniae
MKTTNKVAIYVRVSTTSQVEEGYSIDEQKDKLEAYCKIKDWKIYDVYVDGGFSGANTQRPELERLISDVKRKKVDIVLVYKLDRLSRSQKDTLFLIEDVFAKNDVAFISLQENFDTSTPFGKASIGMLSVFAQLEREQIKERMMLGKEGRAKNGKSMSWTTIAFGYDYSKETGVLSVNPTQALIVNRIFTEYLNGKPVVKIIRDLNAEGHVGRKRPWGETITKYLLKNETYLGKVKYKDKVYEGQHEPIITQELFDLVQLEVERRQISAYEKYNNPRPFRAKYMLSGLMKCGYCGASLGLRYTRKDKNGISHHKYQCRNRHSKDLEKRCESGWYSKEELERGVIKELERIKFDPKYKNETLAKKEETIKVEEIKKQLERINNQVSKLTELYLDEIITRKELDEKNDKIKTERQFLEEQLENQKSNVLSIRKRKLTRLLKDFDVEKLSYEDASKIVKNIIKEIIVTKDGMSITLDF

SEQ ID NO: 1502 - DNA, 50 bp, Streptococcus pneumoniae; identical to SEQ ID NO: 1477
  source 1..50: mol_type = genomic DNA

SEQ ID NO: 1503 - DNA, 40 bp, Streptococcus pneumoniae; identical to SEQ ID NO: 1498
  source 1..40: mol_type = genomic DNA

SEQ ID NO: 1504 - DNA, 40 bp, Streptococcus pneumoniae; identical to SEQ ID NO: 1499
  source 1..40: mol_type = genomic DNA

SEQ ID NO: 1505 - DNA, 50 bp, Streptococcus pneumoniae; identical to SEQ ID NO: 1480
  source 1..50: mol_type = genomic DNA

SEQ ID NO: 1506 - protein, 475 aa, Streptococcus pneumoniae; identical to SEQ ID NO: 1486

SEQ ID NO: 1507 - DNA, 50 bp, Streptococcus pneumoniae; identical to SEQ ID NO: 1477
  source 1..50: mol_type = genomic DNA

SEQ ID NO: 1508 - DNA, 40 bp, Streptococcus pneumoniae
  source 1..40: mol_type = genomic DNA
ttaaacgtccaatcatgataactttattatacatattttc

SEQ ID NO: 1509 - DNA, 40 bp, Streptococcus pneumoniae
  source 1..40: mol_type = genomic DNA
ttaaacgtccaatcatgattgctttattatacatattttc

SEQ ID NO: 1510 - DNA, 50 bp, Streptococcus pneumoniae; identical to SEQ ID NO: 1480
  source 1..50: mol_type = genomic DNA

SEQ ID NO: 1511 - protein, 475 aa, Streptococcus pneumoniae
MKTTNKVAIYVRVSTTSQVEEGYSIDEQKDKLEAYCKIKDWKIYDIYVDGGFSGANTQRPELERLISDVKRKKVDIVLVYKLDRLSRSQKDTLFLIEDVFAKNDVAFISLQENFDTSTPFGKASIGMLSVFAQLEREQIKERMMLGKEGRAKNGKSMSWTTIPFGYDYSKETGVLSVNPTQALIVNRIFTEYLNGKPVVKIIRDLNAEGHVGRKRPWGETITKYLLKNETYLGKVKYKDKVYEGQHEPIITQELFDLVQLEVERRQISAYEKYNNPRPFRAKYMLSGLMKCGYCGASLGLRYTRKDKNGISHHKYQCRNRHSKDLEKRCESGWYSKEELERVVIKELERIKFDPKYKNETLAKKEETIKVEEIKKQLERINNQVSKLTELYLDEIITRKELDEKNDKIKTERQFLEEQLENQKSNVLSIRKRKLTRLLKDFDVEKLSYEDASKIVKNIIKEIIVTKDGMSITLDF

SEQ ID NO: 1512 - DNA, 50 bp, Streptococcus pneumoniae; identical to SEQ ID NO: 1477
  source 1..50: mol_type = genomic DNA

SEQ ID NO: 1513 - DNA, 40 bp, Streptococcus pneumoniae; identical to SEQ ID NO: 1478
  source 1..40: mol_type = genomic DNA

SEQ ID NO: 1514 - DNA, 40 bp, Streptococcus pneumoniae; identical to SEQ ID NO: 1479
  source 1..40: mol_type = genomic DNA

SEQ ID NO: 1515 - DNA, 50 bp, Streptococcus pneumoniae; identical to SEQ ID NO: 1480
  source 1..50: mol_type = genomic DNA

SEQ ID NO: 1516 - protein, 475 aa, Streptococcus pneumoniae
MKTTNKVAIYVRVSTTSQVEEGYSIDEQKDKLEAYCKIKDWKIYDVYVDGGFSGANTQRPELERLISDVKRKKVDIVLVYKLDRLSRSQKDTLFLIEDVFAKNDVAFISLQENFDTSTPFGKASIGMLSVFAQLEREQIKERMILGKEGRAKNGKSMSWTTIPFGYDYSKETGVLSVNPTQALIVNRIFTEYLNGKPVVKIIRDLNAEGHVGRKRPWGETITKYLLKNETYLGKVKYKDKVYEGQHEPIITQELFDLVQLEVERRQISAYEKYNNPRPFRAKYMLSGLMKCGYCGASLGLRYTRKDKNGISHHKYQCRNRHSKDLEKRCESGWYSKEELERGVIKELERIKFDPKYKNETLAKKEETIKVEEIKKQLERINNQVSKLTELYLDEIITRKELDEKNDKIKTERQFLEEQLENQKSNVLSIRKRKLTRLLKDFDVEKLSYEDASKIVKNIIKEIIVTKDGMSITLDF

SEQ ID NO: 1517 - DNA, 50 bp, Streptococcus pneumoniae; identical to SEQ ID NO: 1477
  source 1..50: mol_type = genomic DNA

SEQ ID NO: 1518 - DNA, 40 bp, Streptococcus pneumoniae; identical to SEQ ID NO: 1498
  source 1..40: mol_type = genomic DNA

SEQ ID NO: 1519 - DNA, 40 bp, Streptococcus pneumoniae; identical to SEQ ID NO: 1499
  source 1..40: mol_type = genomic DNA

SEQ ID NO: 1520 - DNA, 50 bp, Streptococcus pneumoniae; identical to SEQ ID NO: 1480
  source 1..50: mol_type = genomic DNA

SEQ ID NO: 1521 - protein, 475 aa, Streptococcus pneumoniae
MKTTNKVAIYVRVSTTSQVEEGYSIDEQKDKLEAYCKIKDWKIYDVYVDGGFSGANTQRPELERLISDVKRKKVDIVLVYKLDRLSRSQKDTLFLIEDVFAKNDVAFISLQENFDTSTPFGKASIGMLSVFAQLEREQIKERMMLGKEGRAKNGKSMSWTTIPFGYDYSKETGVLSVNPTQALIVNRIFTEYLNGKPVVKIIRDLNAEGHVGRKRPWGETITKYLLKNETYLGKVKYKDKVYEGQHEPIITQELFDLVQLEVERRQISAYEKYNNPRPFRAKYMLSGLMKCGYCGASLGLRYTRKDKNGISHHKYQCRNRHSKDLEKRCESGWYSKEELERIVIKELERIKFDPKYKNETLAKKEETIKVEEIKKQLERINNQVSKLTELYLDEIITRKELDEKNDKIKTERQFLEEQLENQKSNVLSIRKRKLTRLLKDFDVEKLSYEDASKIVKNIIKEIIVTKDGMSITLDF

SEQ ID NO: 1522 - DNA, 50 bp, Streptococcus pneumoniae; identical to SEQ ID NO: 1477
  source 1..50: mol_type = genomic DNA

SEQ ID NO: 1523 - DNA, 40 bp, Streptococcus pneumoniae; identical to SEQ ID NO: 1478
  source 1..40: mol_type = genomic DNA

SEQ ID NO: 1524 - DNA, 40 bp, Streptococcus pneumoniae; identical to SEQ ID NO: 1479
  source 1..40: mol_type = genomic DNA

SEQ ID NO: 1525 - DNA, 50 bp, Streptococcus pneumoniae; identical to SEQ ID NO: 1480
  source 1..50: mol_type = genomic DNA

SEQ ID NO: 1526 - protein, 475 aa, Streptococcus pneumoniae; identical to SEQ ID NO: 1486

SEQ ID NO: 1527 - DNA, 50 bp, Streptococcus pneumoniae; identical to SEQ ID NO: 1477
  source 1..50: mol_type = genomic DNA

SEQ ID NO: 1528 - DNA, 40 bp, Streptococcus pneumoniae; identical to SEQ ID NO: 1498
  source 1..40: mol_type = genomic DNA

SEQ ID NO: 1529 - DNA, 40 bp, Streptococcus pneumoniae; identical to SEQ ID NO: 1499
  source 1..40: mol_type = genomic DNA

SEQ ID NO: 1530 - DNA, 50 bp, Streptococcus pneumoniae; identical to SEQ ID NO: 1480
  source 1..50: mol_type = genomic DNA

SEQ ID NO: 1531 - protein, 475 aa, Streptococcus pneumoniae; identical to SEQ ID NO: 1501

SEQ ID NO: 1532 - DNA, 50 bp, Streptococcus pneumoniae; identical to SEQ ID NO: 1477
  source 1..50: mol_type = genomic DNA

SEQ ID NO: 1533 - DNA, 40 bp, Streptococcus pneumoniae; identical to SEQ ID NO: 1478
  source 1..40: mol_type = genomic DNA

SEQ ID NO: 1534 - DNA, 40 bp, Streptococcus pneumoniae; identical to SEQ ID NO: 1479
  source 1..40: mol_type = genomic DNA

SEQ ID NO: 1535 - DNA, 50 bp, Streptococcus pneumoniae; identical to SEQ ID NO: 1480
  source 1..50: mol_type = genomic DNA

SEQ ID NO: 1536 - protein, 475 aa, Streptococcus pneumoniae; identical to SEQ ID NO: 1481

SEQ ID NO: 1537 - DNA, 50 bp, Streptococcus pneumoniae; identical to SEQ ID NO: 1477
  source 1..50: mol_type = genomic DNA

SEQ ID NO: 1538 - DNA, 40 bp, Streptococcus pneumoniae; identical to SEQ ID NO: 1478
  source 1..40: mol_type = genomic DNA

SEQ ID NO: 1539 - DNA, 40 bp, Streptococcus pneumoniae; identical to SEQ ID NO: 1479
  source 1..40: mol_type = genomic DNA

SEQ ID NO: 1540 - DNA, 50 bp, Streptococcus pneumoniae; identical to SEQ ID NO: 1480
  source 1..50: mol_type = genomic DNA

SEQ ID NO: 1541 - protein, 475 aa, Streptococcus pneumoniae; identical to SEQ ID NO: 1521

SEQ ID NO: 1542 - DNA, 50 bp, Streptococcus pneumoniae; identical to SEQ ID NO: 1477
  source 1..50: mol_type = genomic DNA

SEQ ID NO: 1543 - DNA, 40 bp, Streptococcus pneumoniae; identical to SEQ ID NO: 1498
  source 1..40: mol_type = genomic DNA

SEQ ID NO: 1544 - DNA, 40 bp, Streptococcus pneumoniae; identical to SEQ ID NO: 1499
  source 1..40: mol_type = genomic DNA

SEQ ID NO: 1545 - DNA, 50 bp, Streptococcus pneumoniae; identical to SEQ ID NO: 1480
  source 1..50: mol_type = genomic DNA

SEQ ID NO: 1546 - protein, 475 aa, Streptococcus pneumoniae; identical to SEQ ID NO: 1521

SEQ ID NO: 1547 - DNA, 50 bp, Streptococcus pneumoniae; identical to SEQ ID NO: 1477
  source 1..50: mol_type = genomic DNA

SEQ ID NO: 1548 - DNA, 40 bp, Streptococcus pneumoniae; identical to SEQ ID NO: 1508
  source 1..40: mol_type = genomic DNA

SEQ ID NO: 1549 - DNA, 40 bp, Streptococcus pneumoniae; identical to SEQ ID NO: 1509
  source 1..40: mol_type = genomic DNA

SEQ ID NO: 1550 - DNA, 50 bp, Streptococcus pneumoniae; identical to SEQ ID NO: 1480
  source 1..50: mol_type = genomic DNA

SEQ ID NO: 1551 - protein, 475 aa, Streptococcus pneumoniae
MKTMNKVAIYVRVSTTNQVEEGYSIDEQKDKLEAYCKIKDWKIYDVYVDGGFSGANTQRPELERLISDVKRKKVDIVLVYKLDRLSRSQKDTLFLIEDVFAKNDVAFISLQENFDTSTPFGKASIGMLSVFAQLEREQIKERMMLGKEGRAKNGKSMSWTTIPFGYDYSKETGVLSVNPTQALIVNRIFTEYLNGKPVVKIIRDLNAEGHVGRKRPWGETITKYLLKNETYLGKVKYKDKVYEGQHEPIITQELFDLVQLEVERRQISAYEKYNNPRPFRAKYMLSGLMKCGYCGASLGLRYTRKDKNGISHHKYQCRNRHSKDLEKRCESGWYSKEELERVVIKELERIKFDPKYKNETLAKKEETIKVEEIKKQLERINNQVSKLTELYLDEIITRKELDEKNDKIKTERQFLEEQLENQKSNVLSIRKRKLTRLLKDFDVEKLSYEDASKIVKNIIKEIIVTKDGMSITLDF

SEQ ID NO: 1552 - DNA, 50 bp, Streptococcus pneumoniae; identical to SEQ ID NO: 1477
  source 1..50: mol_type = genomic DNA

SEQ ID NO: 1553 - DNA, 40 bp, Streptococcus pneumoniae; identical to SEQ ID NO: 1498
  source 1..40: mol_type = genomic DNA

SEQ ID NO: 1554 - DNA, 40 bp, Streptococcus pneumoniae; identical to SEQ ID NO: 1499
  source 1..40: mol_type = genomic DNA

SEQ ID NO: 1555 - DNA, 50 bp, Streptococcus pneumoniae; identical to SEQ ID NO: 1480
  source 1..50: mol_type = genomic DNA

SEQ ID NO: 1556 - protein, 475 aa, Streptococcus pneumoniae
MKTMNKVAIYVRVSTTNQVEEGYSIDEQKDKLEAYCKIKDWKIYDVYVDGGFSGANTQRPELERLISDVKRKKVDIVLVYKLDRLSRSQKDTLFLIEDVFAKNDVAFISLQENFDTSTPFGKASIGMLSVFAQLEREQIKERMMLGKEGRAKNGKSMSWTTIPFGYDYSKETGVLSVNPTQALIVNRIFTEYLNGKPVVKIIRDLNAEGHVGRKRPWGETITKYLLKNETYLGKVKYKDKVYEGQHEPIITQELFDLVQLEVERRQISAYEKYNNPRPFRAKYMLSGLMKCGYCGASLGLRYTRKDKNGISHHKYQCRNRHSKDLEKRCESGWYSKEELERVVIKELERIKFDPKYKNETLAKKEETIKGEEIKKQLERINNQVSKLTELYLDEIITRKELDEKNDKIKTERQFLEEQLENQKSNVLSIRKRKLTRLLKDFDVEKLSYEDASKIVKNIIKEIIVTKDGMSITLDF

SEQ ID NO: 1557 - DNA, 50 bp, Streptococcus pneumoniae; identical to SEQ ID NO: 1477
  source 1..50: mol_type = genomic DNA

SEQ ID NO: 1558 - DNA, 40 bp, Streptococcus pneumoniae; identical to SEQ ID NO: 1498
  source 1..40: mol_type = genomic DNA

SEQ ID NO: 1559 - DNA, 40 bp, Streptococcus pneumoniae; identical to SEQ ID NO: 1499
  source 1..40: mol_type = genomic DNA

SEQ ID NO: 1560 - DNA, 50 bp, Streptococcus pneumoniae; identical to SEQ ID NO: 1480
  source 1..50: mol_type = genomic DNA

SEQ ID NO: 1561 - protein, 475 aa, Streptococcus pneumoniae; identical to SEQ ID NO: 1486

SEQ ID NO: 1562 - DNA, 50 bp, Streptococcus pneumoniae; identical to SEQ ID NO: 1477
  source 1..50: mol_type = genomic DNA

SEQ ID NO: 1563 - DNA, 40 bp, Streptococcus pneumoniae; identical to SEQ ID NO: 1483
  source 1..40: mol_type = genomic DNA

SEQ ID NO: 1564 - DNA, 40 bp, Streptococcus pneumoniae; identical to SEQ ID NO: 1484
  source 1..40: mol_type = genomic DNA

SEQ ID NO: 1565 - DNA, 50 bp, Streptococcus pneumoniae; identical to SEQ ID NO: 1480
  source 1..50: mol_type = genomic DNA

SEQ ID NO: 1566 - protein, 475 aa, Streptococcus pneumoniae; identical to SEQ ID NO: 1516

SEQ ID NO: 1567 - DNA, 50 bp, Streptococcus pneumoniae; identical to SEQ ID NO: 1477
  source 1..50: mol_type = genomic DNA

SEQ ID NO: 1568 - DNA, 40 bp, Streptococcus pneumoniae; identical to SEQ ID NO: 1478
  source 1..40: mol_type = genomic DNA

SEQ ID NO: 1569 - DNA, 40 bp, Streptococcus pneumoniae; identical to SEQ ID NO: 1479
  source 1..40: mol_type = genomic DNA

SEQ ID NO: 1570 - DNA, 50 bp, Streptococcus pneumoniae; identical to SEQ ID NO: 1480
  source 1..50: mol_type = genomic DNA

SEQ ID NO: 1571 - protein, 481 aa, Streptococcus pneumoniae
MKTTNKVAIYVRVSTTSQVEEGYSIDEQKAKLSSYCDIKDWNVYKIYTDGGFSGANTDRPALEGLIKDAKKRKFDTVLVYKLDRLSRSQKDTLYLIEDIFIKNNIAFLSLQENFDTSTPFGKAMIGLLSVFAQLEREQIKERMQLGKIGRAKAGKSMMWAKTSYGYDYHRDTGTITINPAQAVAVKFIFESYIRGRSITKLRDDLNEKYPKHVPWSYRAVRAILDNPVYCGLNQFKGEIYPGNHEPIISKEDYDKTQAELKIRQKTAAENSNPRPFQAKYILSGIAQCGYCGAPLKIILGVKRKDGSRFKKYECHQRHPRTLRGVTTYNDNKKCDSGFYYKDKLEAYVLKEISKLQDDAGYLDKIFSEDNAETIDRESYKRQIEELSKKLSRLNDLYIDDRITLEELQSKSAEFISMRGTLEAELENDPALRKDKRKADMRKLLNAEKVFSMDYESQKVLVRGLINKVRVTSEDIVIKWKI

SEQ ID NO: 1572 - DNA, 50 bp, Streptococcus pneumoniae
  source 1..50: mol_type = genomic DNA
taaataattttagtaacctacatctcaatcaaggatactaaaatttttga

SEQ ID NO: 1573 - DNA, 40 bp, Streptococcus pneumoniae
  source 1..40: mol_type = genomic DNA
cagcaagaccaccaacatctccaccaatgtaaaagcttta

SEQ ID NO: 1574 - DNA, 40 bp, Streptococcus pneumoniae
  source 1..40: mol_type = genomic DNA
cagcaagaccaccaacatcaacaccaatgtaaaagcttta

SEQ ID NO: 1575 - DNA, 50 bp, Streptococcus pneumoniae
  source 1..50: mol_type = genomic DNA
taaataatgtcaaaaacagacttaaaaaataaggatttggaaatttttga

SEQ ID NO: 1576 - protein, 481 aa, Streptococcus pneumoniae
MITTNKVAIYVRVSTTSQVEEGYSIDEQKAKLSSYCDIKDWNVYKIYTDGGFSGANTDRPALESLIKDAKKRKFDTVLVYKLDRLSRSQKDTLYLIEDIFIKNNIAFLSLQENFDTSTPFGKAMIGLLSVFAQLEREQIKERMQLGKIGRAKAGKSMMWAKTSYGYDYHRDTGDVTVNPAQAVAVKFIFESYLRGRSITKLRDDLNENYPKHVPWSYRAVRAILDNPVYCGFNQFKGEIYPGNHEPIITEEVYNKTKEELKIRQRTAAENVNPRPFQAKYILSGIGQCGYCGAPLKIILGVKRKDGSRFKKYECHQRHPRTLRGITTYNDNKKCDSGFYYKDDLEAYVLTEISKLQDDAGYLDKIFSEDSAETIDRESYKKQIEELSKKLSRLNDLYIDDRITLEELQSKSAEFISMRGTLETELENDPALRKDKRKAEMRKLLNAEKVFLMDYESQKVLVRGLINKVRVTAEDIVIKWKI

SEQ ID NO: 1577 - DNA, 50 bp, Streptococcus pneumoniae
  source 1..50: mol_type = genomic DNA
taaataattttagtaacctacatttcaatcaaggatactaaaatttttga

SEQ ID NO: 1578 - DNA, 40 bp, Streptococcus pneumoniae; identical to SEQ ID NO: 1573
  source 1..40: mol_type = genomic DNA

SEQ ID NO: 1579 - DNA, 40 bp, Streptococcus pneumoniae; identical to SEQ ID NO: 1574
  source 1..40: mol_type = genomic DNA

SEQ ID NO: 1580 - DNA, 50 bp, Streptococcus pneumoniae; identical to SEQ ID NO: 1575
  source 1..50: mol_type = genomic DNA

SEQ ID NO: 1581 - protein, 481 aa, Streptococcus oralis
MKITNKVAIYVRVSTTSQVEEGYSIDEQKAKLSSYCDIKDWNVYKIYTDGGFSGANTDRPALEGLIKDAKRKKFDTVLVYKLDRLSRSQKDTLYLIEDIFIKNNIAFLSLQENFDTSTPFGKAMIGLLSVFAQLEREQIKERMQLGKIGRAKAGKSMMWARTSYGYDYHRGTGTITVNPAQALAVKFIFESYLRGRSITKLRDDLNENYPKHVPWSYRAVRAILDNPVYCGFNQFKGEVYPGNHEPIITEEVYNKTKAELKIRQRTAAENVNPRPFQAKYILSGIGQCGYCGAPLKIILGVKRKDGSRFKKYECHQRHPRTLRGITTYNDNKKCDSGFYYKDDLETYVLTEISKLQDDAGYLDKIFSEDSAETIDRESYKRQIEELSKKLSRLNDLYIDDRITLEELQNKSAEFINMRATLETELENDPALRKGKRKADMRELLNAEKVFSMDYESQKVLVRGLINKVRVTAEDIVIKWKI

SEQ ID NO: 1582 - DNA, 50 bp, Streptococcus oralis
  source 1..50: mol_type = genomic DNA
taaataattttagtaacctacatttcaatcaaggatagtaaaatttttga

SEQ ID NO: 1583 - DNA, 40 bp, Streptococcus oralis
  source 1..40: mol_type = genomic DNA
agaagcttgtattttcatctccatactggtaagactcctt

SEQ ID NO: 1584 - DNA, 40 bp, Streptococcus oralis
  source 1..40: mol_type = genomic DNA
agaagcttgtattttcatcaacatactggtaagactcctt

SEQ ID NO: 1585 - DNA, 50 bp, Streptococcus oralis; identical to SEQ ID NO: 1575
  source 1..50: mol_type = genomic DNA

SEQ ID NO: 1586 - protein, 571 aa, Leclercia adecarboxylata
MIHLAIPYRRFSSDKQTGNTSLTRQQDLVTKWLSKNPEYKTLPQYDYVDEAVSGYHGDNIKFGQLGEFISEVEKGTFNRYKAPTLLIENFDRFGRLKPRKALGYITDILEAGVSICLLDRGEVITPDKVDDDFFLMQLVMTASRAHGESKRKSDNVTKAWQIKAEGIADGATLTRNVPFWINPDDRQLVIPERAKLVERIFKMRLESMSCYAIGKTLNQEGIPVYTHRTVTPGKDYKKRRVAPCWHSANVSGLLSNKAVLGILPAQQVNKHNKHRQDTLRADTPGYYPAVISATLFAAVQSLKDEKHGKKRVLSNINSIQIFKKMLRCVCGAYMDVAGCRSTYSGVFKCASARAGSTLCTKPSINRQKVEKALLTRLLPSLTRLDVNHELSNQIETLKAEIEGLDILIRKGWEDYENSDHPFYLSDGQASRISQNEKKREEKRSELAALSVTEQSSVYENISHLDLSDYTQRCEARVIIKRMISSITIDTDKGLLDVHLVNGNIITGFCIDSTSNKKDVFTEATDEEKQAELTAIIGERLPLVIPAGDPVGVAYEPMLDWPDVDTGDYPNE

SEQ ID NO: 1587 - DNA, 50 bp, Leclercia adecarboxylata
  source 1..50: mol_type = genomic DNA
aaatgtgtaatagaaattaaaatgaaaactataaattctatcgtacaact

SEQ ID NO: 1588 - DNA, 40 bp, Leclercia adecarboxylata
  source 1..40: mol_type = genomic DNA
tacggactctttataaatgaagctcttaaagacagtaccc

SEQ ID NO: 1589 - DNA, 40 bp, Leclercia adecarboxylata
  source 1..40: mol_type = genomic DNA
tacggactctttataaatgacgctcttaaagacagtaccc

SEQ ID NO: 1590 - DNA, 50 bp, Leclercia adecarboxylata
  source 1..50: mol_type = genomic DNA
aattttataaattaattgaaaatgacaactctaaattcatatgtacaact

SEQ ID NO: 1591 - protein, 579 aa, Leclercia adecarboxylata
MIHLAIPYRRFSSDKQTGNTSLTRQQDLVTKWLSKNPEYKTLPQFDYVDEAVSGYHGDNIKFGQLGEFISEVEKGTFTRYKSPILLIENFDRFGRLKPRKALGYITDILEAGVSICLLDRGEVITPDKVDDDFFLMQLVMTASRAHGESKRKSDNVTKAWQIKAEGIADGATLTRNVPFWINPDNRQLVIPERAKLVERIFKMRLESMSCYAIGKILNQEGIPVYTHRKVTPGKEYKKRRVAPCWHSANVSGLLSNKAVLGILPAQQVNKHNKHRQDTLRTDTPGYYPAVISATLFAAVQSLKDEKHGKKRVLSNINSIQIFKKMLRCVCGAYLDVTGCRSTYAGVFKCASARAGSTLCTKPSINRQKVEESLLTRLLPSLTRLDVNHELSNQIETLKSEIEGLDILIRKGWEDYENSDHPFYLSDGQALRISQNEKKREEKRSELAALNVTEQSSVYENISHLDLSDYTQRCEARVIIKRMISSITIDTDKGLLDVHLVNGNTITGFCIDSTSNKKAVFTEATDEEKQAELTAIIGERLPLVIPAGDPVGVAYEPMYLAPYWVQEEMEKEGQRPPAED

SEQ ID NO: 1592 - DNA, 50 bp, Leclercia adecarboxylata
  source 1..50: mol_type = genomic DNA
aagtgtgtaatagaaattaaaatgaaaactataaattctatcgtacaact

SEQ ID NO: 1593 - DNA, 40 bp, Leclercia adecarboxylata; identical to SEQ ID NO: 1588
  source 1..40: mol_type = genomic DNA

SEQ ID NO: 1594 - DNA, 40 bp, Leclercia adecarboxylata; identical to SEQ ID NO: 1589
  source 1..40: mol_type = genomic DNA

SEQ ID NO: 1595 - DNA, 50 bp, Leclercia adecarboxylata; identical to SEQ ID NO: 1590
  source 1..50: mol_type = genomic DNA

SEQ ID NO: 1596 - protein, 536 aa, Vibrio parahaemolyticus
MLGAFIYQYSRISTTFQKDGSGLQRQKEDTTKLITTLSKELNLPVYDKPLEDSGRSAFHGKHLEKGVFGVFLAAIERGEVKRGSVLVVESLDRLSRQSPNIAQGMMLQIINSGVRIYTTIDNTMYDGNEEPASLMMKLIMSILKFSAAHEESAKKSHRSKRNVEQSCVKFLNGDRSVIVLGGKPPAWMNADKTVKPDELRDVKEMIELRQKGYGYLSITQEVNKKYNFNKWAVNTVTAILKSRALYGERVVNASGTKYVLPDYYPVLMSKSEWLAIQPNNKPIYSTGEKNCIITGIGVTKCGSCGSGLVSRYYSSKKLFRIMCNSRFKYKTDCSISLNAYIAEFLVLQMCADKVWSKHEVDTYAIDEEIASTEIALNDLESNLSELDNIPLMFIKKVGTLEQKLEDLRNKREEMIAANISIDIDEWSNIPATLNEVIGLDNNQRVEIRGMIQNAIKSISITSKRKFYVVEVVFKDGEERRGCFIGRLPRPKVYLDIKSVNDKVKLRANGVLLVDHFDQLINGFNKPEVPASVLDLM

SEQ ID NO: 1597 - DNA, 50 bp, Vibrio parahaemolyticus
  source 1..50: mol_type = genomic DNA
atgtatacattgccacttttcaccgtcataaaacagtggtaatgtatact

SEQ ID NO: 1598 - DNA, 40 bp, Vibrio parahaemolyticus
  source 1..40: mol_type = genomic DNA
tttgcttccgttttttactgtcatgatttggggtggaaat

SEQ ID NO: 1599 - DNA, 50 bp, Vibrio parahaemolyticus
  source 1..50: mol_type = genomic DNA
atgtatacattgccacttttcaccttcataaaacagtggtaatgtatact

SEQ ID NO: 1600 - DNA, 40 bp, Vibrio parahaemolyticus
  source 1..40: mol_type = genomic DNA
tttttttcctttttctattttcattattttggatggaaat

SEQ ID NO: 1601 - protein, 563 aa, Flavonifractor plautii
MARIRKTDERNVHAQQMIWKVGKYIRLSREDGHEVSESVVNQDKILNDEIPSFFQDGLYEVVDTYIDDGTSGTTDIERGDFQRMVGDMKAGRINCIVVKNLSRAFRNSANQGHFLEEFIPLYNTRFISLYQPRIDTFLDPEVVHSLEVSIAGFMNEQYAYKTSTDVRRTFRNKRQNGEFIGSFAPYGYRKDPEDKNSLVIDEEAAQVVLDIFKWFVTEGMSKNGIAKRLNELGIPNPTAYKRSQGYRYQNPHATANDGLWNPTTVGRMLQDQLYIGVMRQGRQKVISYKVHKRAAVPESEWFIVENAVPAIVSREMFDMAQEVHKRDTRTAPGKREVYPFAGLVRCADCKKGMARHSSKGKVYYACRTYREKSKERCTKHSIRLDILENAVLVAIQKQIDMVASLKDMIAEINAAPVVRTQSVRLEALLTQRTKELDKVTGLLDGLYMDWKSGDITRDQYRRMKVKFEEQAAQLQEAVDHIKAECDTLAQGITAEDPYLTTFLKYGNIQSLSRGILVELVKTIYVHEGGELEIEFNFADQFRRIVEFIENNKNDLYVIGGKAV

SEQ ID NO: 1602 - DNA, 50 bp, Flavonifractor plautii
  source 1..50: mol_type = genomic DNA
ggttgcgtatatatgattgtagccacggccccggtcatttaagcgcaacg

SEQ ID NO: 1603 - DNA, 40 bp, Flavonifractor plautii
  source 1..40: mol_type = genomic DNA
tgcggggcctgttggagccaccgggccgacgggcccggcc

SEQ ID NO: 1604 - DNA, 50 bp, Flavonifractor plautii
  source 1..50: mol_type = genomic DNA
ggttgcgtatatatgattgtagcctgggccccggtcatttaagcgcaacg

SEQ ID NO: 1605 - DNA, 40 bp, Flavonifractor plautii
  source 1..40: mol_type = genomic DNA
tgcggggcctctgggagcctggtgggcggcgggcggggcc

SEQ ID NO: 1606 - protein, 550 aa, Gardnerella vaginalis
MNKLNRQPSYTLDNVGKITALYCRLSKDDELQGDSNSIINQKSMLKKYAEDNHFNNLMFFVDDGYSGTNFQRPDWLKLTALIDEGKIGTIIVKDMSRLGRDYLQVGMYTEMVFPNADIRFIAINNGVDSNNQSDNDMTPFINIFNEFYAKDTSRKIKAVFKAKGQSGKPLCINPPYGYLKDPEDKNHWIVDEEAASVVREIFRLCVNGYGPSQIANELIKRNIPTPSEHFFSLGIKIPSAKSEIKGVWNQKTISNMLEKQEYLGHTVNFKTRKKSYKCKKTLLNPKEDWLIFKNTHEAIIDQETFDIVQRIRDGRRVRTNLGEMPVLSGMLFCADCGNKLYQVRGKGWSHDKEYFVCATYRKQKGKCSSHQIRNIQIEAILLHELRMITSFAKQHEEEFVGLVMKKSEKELTQKLKSSNRELEQAKARISKLDTIVQHLYEDNLDGKISDERFKSMSESYDKEQAELKSKIESLEAFISKAQEECLNVDSFLKLVRQYTDIQELNAEIIRTFVDKIYVEKSEKVAGTRTKKQTIWIQWNYIGAVDIPLHK

SEQ ID NO: 1607 - DNA, 50 bp, Gardnerella vaginalis
  source 1..50: mol_type = genomic DNA
ttaaatccctaagtgaatgcccctaaaggagtgttcagtaagggattaaa

SEQ ID NO: 1608 - DNA, 40 bp, Gardnerella vaginalis
  source 1..40: mol_type = genomic DNA
tataagaaattccgtaataaacgttaatttttttatttta

SEQ ID NO: 1609 - DNA, 50 bp, Gardnerella vaginalis
  source 1..50: mol_type = genomic DNA
ttaaatccctaagtgaatgccccttgaggagtgttcagtaagggattaaa

SEQ ID NO: 1610 - DNA, 40 bp, Gardnerella vaginalis
  source 1..40: mol_type = genomic DNA
tacaaatatttacgtaatatgttttaatttttttatatta

SEQ ID NO: 1611 - protein, 515 aa, Bacillus wiedmannii
MKTAIYLRKSRADLEAEARGEGETLAKHRTTLLKIAKEMNLNVLSVREEIVSGESLVKRPEMLALLEEIEDNKYDVVLCMDMDRLGRGGMKEQGIILETFKRSNTKIMTPRKTYDLNDEWDEEYSEFEAFMARKELKIITRRMQRGRVASVEAGNYLGTHAPFGYDIHRLNKRERTLTINPEEASVVRMIFDWYANEDMGANAIRSKLNDLGYKSKLGNEWNPYSILDILKNNVYIGKVTWQKRKEVKQPDAVKRSCARQDKSNWIIADGKHEPIIPESLFEQVQEKLNSRYHVPYNTNGIKNPLAGIIKCSKCGYSMVQRYPKNRKETMDCKHRSCENKSSYTELIEKRLLEALKEWYINYKADFEKHKQDDKLKETQVIQMNEAALRKLEKELVDVQKQKSNLHDLLERGVYTVDMFLERSNVVSDRITEITSTMENLKKEIKIEIKKEKVKKDTIPQVEHVLDLYFKTDDPKKKNSLLKSVLEKAVYKKEKWQRLDDFELVLYPKLPQDGDI

SEQ ID NO: 1612 - DNA, 50 bp, Bacillus wiedmannii
  source 1..50: mol_type = genomic DNA
tgtcgtcaccttgttggtgtaattaggttgacgccaacagggtgataaca

SEQ ID NO: 1613 - DNA, 40 bp, Bacillus wiedmannii
  source 1..40: mol_type = genomic DNA
tgttgccattaggcgcatgagatttactccattcaatcct

SEQ ID NO: 1614 - DNA, 50 bp, Bacillus wiedmannii
  source 1..50: mol_type = genomic DNA
tgtcgtcaccttgttggtgtaattatgttgacgccaacagggtgataaca

SEQ ID NO: 1615 - DNA, 40 bp, Bacillus wiedmannii
  source 1..40: mol_type = genomic DNA
tgttggcattaggtgcaagatatttactccttgccattgt

SEQ ID NO: 1616 - protein, 633 aa, Lysinibacillus capsici
MTVKEAAAKIILRVAIYVRVSTRNQEDKYSLAAQEHDLVEYANKQNWHIVEVFKDVESGAKFDKKGLTALMDCVDDGLVDIVLVADQDRLSRLDTLNWEELKLVLRENNVKIAEPGLVIDLENEDDEFRSDLYNIIARRERRLFRRRSQRGLRQYVREGGIYGRVPFEYVYDKETKEVSLNEEFSWVISFIDELFLQGYGPSSIASHLNKISRTPNGAKWHANTVYQRLLNPAYCGEYSVTFMNGEKITIKKKYPLLRTVETFERIQHIIKTNAKPFSTTRKHHHPLAKLHISCSECGRKISLQQGDKSQYGGYRWYLAHNHGLAEPCPYDPKYNAVRITRPLVLAIKNILLSEETAKRYLDIEFKDESQITHLEQQASNIQKMMSDNNGKIDKLLDLYLDNKLAKEKYEDKTKSIETENADLKASFEELNMKINLMKDEKYSYDALLDNLAVVEEHLSTIYRIDTEYSEKDKEDLISALFEYALLSPANNTITFKFTTINDFPIDLKINIDETNLEYEERLLQQQRERYEATQAILDAQPSPISFMELKRLSGLNAQTLRLDEERFGPYSNLKLGKGSPERKAEIIEGIKRLITVNPNMTSIEIAKELGSSQGTILKYIRENNLREGRQHKG

SEQ ID NO: 1617 - DNA, 50 bp, Lysinibacillus capsici
  source 1..50: mol_type = genomic DNA
tcgtttcggaattgtatcattaggatagagattatataattttttctctt

SEQ ID NO: 1618 - DNA, 40 bp, Lysinibacillus capsici
  source 1..40: mol_type = genomic DNA
gattgtaattaaaataagaatggatataattaacaaaact

SEQ ID NO: 1619 - DNA, 50 bp, Lysinibacillus capsici
  source 1..50: mol_type = genomic DNA
tcgtttcggaattgtatcattaggctagagattatataattttttctctt

SEQ ID NO: 1620 - DNA, 40 bp, Lysinibacillus capsici
  source 1..40: mol_type = genomic DNA
aattgtaatttaaatattactgtacataattaaccacact

SEQ ID NO: 1621 - protein, 581 aa, Escherichia coli
MPQLYSYIRWSSDRQDKGTTKSRQVAAAKAYAEEAGLELVEIIDPGVSAFRGKNRAGKLGDFIDAVKNNAIPSDSWLYCENLDRLSRDQVDEALRLFLELIGLGLTIVTGMDRKVYNRESIRQNPTDLMISILMFIRGNEESETKSHRTIGNVVALVERHKNGLPVNIKSVGRHPFWIDDSGSQYEAVKKHPVYWSIAREALDMFISGHGVYSVKRALDKKYPNGLRGKEWDYQVLKKMRDNRALIGERTIKVDGQSYKLCNYYPALCKDETEFLILAEKKKQNKFISKKCTTDKIRLLSGFSILRCSKCGGTMHSFMNKNVHRYICTNGTHKQKNCSGWSVIGSLVEHCTMIALLIGYINQSRKNGCDTTSIDEDIINKQSVIEGLNSKITNLTLAISIAKDVNELATLLQSLNTQREKLLVEIEKLKERSVSLKAKGSFEIEITDFLILIQYATFKNLEDENRNKIRKVIHSIIEFIVIDKTDSCITIYIKCYGIDEVFIFGGVQRKPYWRFDIGIINDSKLQMISNYDKNIGRTKERKNKEYLDGLRESYQGLYESAVLMLNEMGYPDINGALFWPNR

SEQ ID NO: 1622 - DNA, 50 bp, Escherichia coli
  source 1..50: mol_type = genomic DNA
gcaatgtatttcttgattttttgggcagcctaatgatataaatccaatct

SEQ ID NO: 1623 - DNA, 40 bp, Escherichia coli
  source 1..40: mol_type = genomic DNA
aatcaacaaggttttttggacagccaagggaaacaaagcc

SEQ ID NO: 1624 - DNA, 50 bp, Escherichia coli
  source 1..50: mol_type = genomic DNA
gcaatgtatttcttgattttttggtaagcctaatgatataaatccaatct

SEQ ID NO: 1625 - DNA, 40 bp, Escherichia coli
  source 1..40: mol_type = genomic DNA
aattaacaaggttttctagtaggccaagggatggaaatcc

SEQ ID NO: 1626 - protein, 560 aa, Clostridioides difficile
MPRIRKDKTARSYAEPFWKIGLYIRLSKEDDNEDESESVINQEKILRDFVDSYFEPGTFVIVDVFADDGLTGTDTARPNFKRLEGCIVRKEVNCMIIKSLARGFRNLADQQKFLEEFIPINGARFICTGTPFIDTYANPHSASGLEVPIRGMFNEQFAATTSEEIRKTFKMKRERGEFIGAFATYGYKKDPNDKNSLLIDEEAAEVVKSIYHWFVNEGYSKMGIAKRLNQMGEPNPEAYKKKKGLKYNNPNSGKNDGLWSASTIARILQNEIYTGVMVQGRHRVISYKVHKQISVPEDEWFVVPNTHEAIIDRETFEKAQALHKRDTRTAPGKQEVYLMSGFVRCADCQKAMRRKTARNIAYYSCRSYTDKKICSKHSIRQDKLENAVLAALQMQIALVDQLAEEIERINNAPVINRENKRLSYSLKQAEKQIKQYNDASDSLYLDWKSGEITKDEYRRLKGKIAEQIQQLEANISYLKEEMQIMADGIGADDPYLTAFLKYKNIQSLNRGIVVELIKAVWVHENGEITVDFNFADEYQRIIDYIENNHNIITVIESKAI

SEQ ID NO: 1627 - DNA, 50 bp, Clostridioides difficile
  source 1..50: mol_type = genomic DNA
tgttgtgcataaataaacggctctactgccacgtcaatatatgcacaaca

SEQ ID NO: 1628 - DNA, 40 bp, Clostridioides difficile
  source 1..40: mol_type = genomic DNA
aggaggcccaacaggaccaacaggtccgacaggtccaaca

SEQ ID NO: 1629 - DNA, 50 bp, Clostridioides difficile
  source 1..50: mol_type = genomic DNA
tgttgtgcataaataaacggctctattgccacgtcaatatatgcacaaca

SEQ ID NO: 1630 - DNA, 40 bp, Clostridioides difficile
  source 1..40: mol_type = genomic DNA
aggaattccagcaggtccaattggtcccacagggccaaca

SEQ ID NO: 1631 - protein, 560 aa, Clostridioides difficile
MPRIRKDKMARSYAEPFWKIGLYIRLSREDDNEDESESVINQEKILRDFVDSYFEPGTYVIVDVFADDGLTGTDTARPNFKRLEGCIVRKEVNCMIIKSLARGFRNLADQQKFLEEFIPIHGARFICTGTPFIDTYANPHSASGLEVPIRGMFNEQFAATTSEEIRKTFKMKRERGEFIGAFAPYGYKKDPNDKNSLIVDEEAAEVVKSIYHWFVNEGYSKMGIAKRLNQMGEPNPEAYKKKKGFKYNNPNSDKNDGLWSASTIARILQNEVYTGVMVQGRNRVISYKVHKQINVPEEEWFVVPNTHEAIIDRETFEKAQALHKRDTRTAPGKQEVYLMSGFVRCADCKKAMRRKTARDIAYYSCRSYTDKKICSKHSIRQDKLENAVLAALQMQIALVDRLAEEIERINNAPVINRESKRLSHSLKQAEKQLKQYNDASDSLYLDWKSGEITKEEYRRLKGKIAEQIQQLEANISYLKEEMQVMADGIGTDDPYLTAFLKYKNIQSLNRGIMVELVKAVWVHENGEITVDFNFADEYQRIIDYIENNHNVIRVIENKAI

SEQ ID NO: 1632 - DNA, 50 bp, Clostridioides difficile
  source 1..50: mol_type = genomic DNA
tgttgtgcataaatacacggctctactgccccgtcaatatatgcacaaca

SEQ ID NO: 1633 - DNA, 40 bp, Clostridioides difficile; identical to SEQ ID NO: 1628
  source 1..40: mol_type = genomic DNA

SEQ ID NO: 1634 - DNA, 50 bp, Clostridioides difficile
  source 1..50: mol_type = genomic DNA
tgttgtgcataaatacacggctctattgccccgtcaatatatgcacaaca

SEQ ID NO: 1635 - DNA, 40 bp, Clostridioides difficile; identical to SEQ ID NO: 1630
  source 1..40: mol_type = genomic DNA

SEQ ID NO: 1636 - protein, 530 aa, Blautia obeum
MMYQMGVYCRLSKDDGENKVSESIENQMKLIREYVTKSEDLEIADIYIDDGYSGLYFANRPEFQRMMEDIYKGKIQGVITKDISRLGREHIETSNYIERVFPSLGVRYIAILDGVDSVHHSNEELAQFKTLFNDMYSRDISKKIRGALTAQKKRGQFMSGFAPYGYVKDPADKHHFLVDEEAAKVVRRIFYMSLEGYSRDGIAKKLNQEGILTPSEYKRKVQGLKYANALEKAGAKGWAYPTINVILRNRVYTGAMVQHKSEKISYKVEKYQYIPEEQQYIVEGMHEAIISKDTFEQVQELMKKRTRTPGFNSEVRKVNPYAGIIVCGDCGYNFQRVTCRDGYECGTYHKKGNTVCYSHFIKKEVLDSIVKNEIQRQAELALKESDKDEILKVADRKKEVQRRCAEADQQIERLQKELAAVQKYKKKTYENYVDGVLDKEEYLSYKAEYEKQDKDIRAKIQLAEQEKDSFGEAEESYENWIEKFIKYGTLSEVTREIVTELIEKIVVNGDKSIDIVFKYQSPYPVEKQAV

SEQ ID NO: 1637 - DNA, 50 bp, Blautia obeum
  source 1..50: mol_type = genomic DNA
attttcccctagttataatgaacacatgaaccttataattaagggaaaac

SEQ ID NO: 1638 - DNA, 40 bp, Blautia obeum
  source 1..40: mol_type = genomic DNA
tggaaataattatggttcccatcagggagactcattgttg

SEQ ID NO: 1639 - DNA, 50 bp, Blautia obeum
  source 1..50: mol_type = genomic DNA
attttcccctagttataatgaacatttgaaccttataattaagggaaaac

SEQ ID NO: 1640 - DNA, 40 bp, Blautia obeum
  source 1..40: mol_type = genomic DNA
aggaagaaattctggttcctttaagggagatttgttgttg

SEQ ID NO: 1641 - protein, 541 aa, Clostridioides difficile
MRIYIYSRKSVYTGKGESVENQIEMCREYISTKIPESDNAEIVVYEDEGFSAKNTDRPQFQQMLRDIKLNKPEYVVCYRLDRISRNVSDFSSLIEDLNSYNISFICIKEEFDTSKPMGKAMMYIASVFAQLERETIAERVRDNMLMLARTGRWLGGTTPTGFTSEKIQEIIIDGKIKTSCKLKDNPDELKAIDCILEKFLELRSISGVSKYLIKQGIKSRTGKMFSLLGIKEILQNPVYCIADEDAWEYFTEHHSDVCFEKTDCSNKYGLLAYNKRDYRKKSAPRQDMDKWIVAIGKHKGRISGKKWVAIQNILKDNIPTGKKPAIMHNDYSLLSGLIFCDKCQSRMFAKQRSGKGGNRELYDYICNNKLRGGLDLCDCQNLNGQQADDIVCEYLMQYTDENSGIYKLLEKLKRDLQGQTQKSPVAVIDDKIKKCNSEIDNLINTLSHGSLGAAFIERVNARITELDKELASMKEEKARLHKDVNIIADREIQVDMLSTALSSFKDNFHTLTIEEKRTLIKLMVKKIVWDGKDLHIFIDGE

SEQ ID NO: 1642 - DNA, 50 bp, Clostridioides difficile
  source 1..50: mol_type = genomic DNA
agttgccgtttggatggtggcgcatttccaccaccatacaaagggaaaca

SEQ ID NO: 1643 - DNA, 40 bp, Clostridioides difficile
  source 1..40: mol_type = genomic DNA
tgttccttgtaatggtcgttttcctactttgatagctata

SEQ ID NO: 1644 - DNA, 50 bp, Clostridioides difficile
  source 1..50: mol_type = genomic DNA
agttgccgtttggatggtggcgcatctccaccaccatacaaagggaaaca

SEQ ID NO: 1645 - DNA, 40 bp, Clostridioides difficile
  source 1..40: mol_type = genomic DNA
ttttccttgtaaaggtctttcacctccttggttaggtata

SEQ ID NO: 1646 - protein, 541 aa, Clostridioides difficile
MRIYIYSRKSVYTGKGESVENQIEMCREYISTKIPESDNAEIVVYEDEGFSAKNTDRPQFQQMLRDIKLNKPEYVVCYRLDRISRNVSDFSSLIEDLNSYNISFICIKEEFDTSKPMGKAMMYIASVFAQLERETIAERVRDNMLMLARTGRWLGGTTPTGFTSEKIQEIIIDGKIKTSCKLKDNPEELKAIDCILEKFLELRSISGVSKYLIKQGIKSRTGKMFSLLGIKEILQNPVYCIADEDAWEYFTEHHSDVCFEKTDCSNKYGLLAYNKRDYRKKSAPRQDMDKWIVAIGKHKGRISGKKWVAIQNILKDNIPTGKKPAIMHNDYSLLSGLIFCDKCQSRMFAKQRSGKGGNRELYDYICNNKLRGGLDLCDCQNLNGQQADDIVCEYLMQYTDENSGIYKLLEKLKRDLQGQTQKSPVAVIDDKIKKCNSEIDNLINTLSHGNLGAAFIERVNSRITELDKELASMKEEKARLQKDVNIIADREIQVDMLSTALSSFKDNFHTLTIEEKRTLIKLMVKKIVWDGKDLHIFIDGE

SEQ ID NO: 1647 - DNA, 50 bp, Clostridioides difficile; identical to SEQ ID NO: 1642
  source 1..50: mol_type = genomic DNA

SEQ ID NO: 1648 - DNA, 40 bp, Clostridioides difficile; identical to SEQ ID NO: 1643
  source 1..40: mol_type = genomic DNA

SEQ ID NO: 1649 - DNA, 50 bp, Clostridioides difficile; identical to SEQ ID NO: 1644
  source 1..50: mol_type = genomic DNA

SEQ ID NO: 1650 - DNA, 40 bp, Clostridioides difficile; identical to SEQ ID NO: 1645
  source 1..40: mol_type = genomic DNA

SEQ ID NO: 1651 - protein, 565 aa, Campylobacter hyointestinalis
MPRIRKTQNQPTISRIVWRIAVYIRLSKDDGNDESLSVTNQRKIITEYIEEFFEGEYIIVDVYADDGLTGTDYERPEFQRLIHDVEAGTVNCIICKTLSRAFRNYSDQGYFLEKVFPLYGVRFISIGDPSLDTFKNPDAVQGMEVPITGLMNDRYAARTSNDIRRTFNTKRRKGEFIGAFAPYGYMKDPEDKNAFVVDEEAAEVVRNIFHWFVDEGMSKLGITKKLTEMGIPTPTAYKHSKGLNLQTPRISKNDGMWGITTVCTILKNEMYIGNMVQGKQRVISYKVHEKIAPPKEEWFIVENTHEAIIDRETFDKAQRLQERDTRTAPGKKQLYLFSGLLRCADCQRSMTRKTCNKPNKTYVYYVCSTYVFKSKDKCTRHVIKEEVLHEAVLKAVQAQISLVGDMAEVVKEINNTSTVCTQSKRLQQLLKDRSKELEKLTCVTDNLYMDWKCGDITRAEYVRMKAKFEQQAEQVKGIIANLQTEIQLSEKGVGNDNPYLTTFLKHENVKSLDRGLLVELIDTIYVHENNEITIQFNFADQHKRIVEFIENNQHNLELIKSNNAV

SEQ ID NO: 1652 - DNA, 50 bp, Campylobacter hyointestinalis
  source 1..50: mol_type = genomic DNA
agttgtctataaatctatgcgccgttcggggcaagtatttatagacaacc

SEQ ID NO: 1653 - DNA, 40 bp, Campylobacter hyointestinalis
  source 1..40: mol_type = genomic DNA
agttgattttcctgctccatttggtcctaaaaatccaaat

SEQ ID NO: 1654 - DNA, 50 bp, Campylobacter hyointestinalis
  source 1..50: mol_type = genomic DNA
agttgtctataaatctatgcgccgaccggggcaagtatttatagacaacc

SEQ ID NO: 1655 - DNA, 40 bp, Campylobacter hyointestinalis
  source 1..40: mol_type = genomic DNA
agatgagttaccttctccaacttgtcttacagatccaaat

SEQ ID NO: 1656 - protein, 537 aa, Catenibacterium sp co 0103
MKQQIYNTALYLRLSRDDELQGESSSITTQRSMLRLYAKEHHLNVIDEYIDDGWSGTNFERPSFQRMIEDIEAGKINCVVTKDLSRLGRNYIMTGQYTELYFPSHNVRYIAIDDGVDSEKGESEIAPFKNIINEWVARDTSRKVKSAFKTKFAEGAYYGAYAPLGYKKHPDIKGKLLIDDETKWIIEKIFSLAYQGYGSAKITKILREEKVPTASWLNFTRYGTFAHIFEGKPESKRYEWTIAHVKAILKSEVYIGNSVHNRQSTVSFKSKKKVRKPESEWFRVENTHEPIIDKEVFYRVQEQIKSRRRQTKEKATPIFAGLVKCADCGWSMRFATNKANKTPYSYYACSYYGQFGKGNCSMHYIRYDVLYQAVLERLQYWAKAVQQDEEKVLHKIQKVGNAERIREKKKKASALRKAENRQNETDRLFAKMYEDRACEKITERNFIMLSGKYQKEQIELEQQITNLREELSKMEQDMIGAEKWIELIKEYSVPKELTAPLLNAMIEKILIHEATTNEENERIQEIEIYYRFIGKVD

SEQ ID NO: 1657 - DNA, 50 bp, Catenibacterium sp co 0103
  source 1..50: mol_type = genomic DNA
tcatatctttaactaagggaaagcggagtttcccaaacaaaaggatatta

SEQ ID NO: 1658 - DNA, 40 bp, Catenibacterium sp co 0103
  source 1..40: mol_type = genomic DNA
tgtctctaaatgggagaatggaacaagtgaacccaatacc

SEQ ID NO: 1659 - DNA, 50 bp, Catenibacterium sp co 0103
  source 1..50: mol_type = genomic DNA
tcatatctttaactaagggaaagccaagtttcccaaacaaaaggatatta

SEQ ID NO: 1660 - DNA, 40 bp, Catenibacterium sp co 0103
  source 1..40: mol_type = genomic DNA
tgcctctaaatgggagacacacacaagagaaccctttccc

SEQ ID NO: 1661 - protein, 627 aa, Klebsiella aerogenes
MIKTFIYSRVSTQEQLTKSGLFRQEADVRDYVTRNGLDQYEIVAMEDKGVSGYDGSNMKEAEAELGKWYKEAITGMYWGSHLVLEAIDRFSRRDPMLAMEDFTTLVNKGGIKVHIVKMNQVINGDNLPFLSMMMNLAHNESKQKSDRISKGWKRRRQLAIDNGTVITNRTPYWIDVFNNEYRINSNSSIVIEAFDMYKRGLSCGLISKKLNERKMYFPYMWTKTSVQHIVDGLNTAGMVDSSRAKKLIKSMAKTGKGSDVIAKELNANEVFLKEWNAPAVHKLLQNKSVTGLVEIQKRKLIQDFDEYGKPLDLRYKDETEKHYEMVYPQLVSTDDFELIQKLLESNSKVKDRKGNGTVTTNDDGEVVKQFILSGLCRCGMCGGAMYNNIVKTKRAGGKVDTYSYLRCINERDKTKINEAGDICTVKAMNYSVLEKAIIQHVKGLNFDSLGTTTNDSELELLKVQEVELLKDVVFYEDKIKAAKAIGKTPNRSYREGLAESEDALESVQEKIRGIQGITINSDELTNLNDSVHDITEYELRTMVEMELQKLIKRITFGSTEKNVYFASFTYNSGNITSQGIKVDKKRGVIDTYEIHIDGMAYVSNGEVITDDMLNEANKRNISIGTFR

SEQ ID NO: 1662 - DNA, 50 bp, Klebsiella aerogenes
  source 1..50: mol_type = genomic DNA
atgttgtaaatcgtgctaacaatacataggagttgaccattttacaaaag

SEQ ID NO: 1663 - DNA, 40 bp, Klebsiella aerogenes
  source 1..40: mol_type = genomic DNA
tttttgcatgataatcatacaaataagtaccattacaaca

SEQ ID NO: 1664 - DNA, 50 bp, Klebsiella aerogenes
  source 1..50: mol_type = genomic DNA
atgttgtaaatcgtgctaacaataattaggagttgaccattttacaaaag

SEQ ID NO: 1665 - DNA, 40 bp, Klebsiella aerogenes
  source 1..40: mol_type = genomic DNA
gtgttgaataataataataataataactacaataacaaca

SEQ ID NO: 1666 - protein, 555 aa, Streptococcus suis
MNKSTLTFEEIKTQNLENLPDSITALYCRLSAEDANEGESNSISNQKQILAQVAMRENLPNPFFFVDDGFSGSNAQRPDFQRMMSLVEAGKIQAVVVKDLSRLSRDYLLTGQLTEITFPSKNIRFISLNENLDSNKRNSQDAYLAPLVSLFNNWYSLQCSEKIKLSKHTKAKTGEKIGWIAPYGYLKNPENPKEWLIDDYASQIVKRIFKEYLSGKPIASIANDLRKDKVLTPANYKKKLGISNYRVLESDPFHWKSQMICQMLEKEEYTGATINLKTAKISYKQRGCKLRPREDWLIFPNTHEAIISQEDFEMARKMLGHKRVKRKNHCKDTAGHENLFAGLVFCENGHKLSFCPQQKDNTNLDHYKCYHYYRAGDTCSGSHYLRKETLEELVLGDLQQLISSIQFNEEELLTKLKSHFDIRENKKHDGLRTQLNQAENRAKELDTIIQKLYEKQLLDNISEERFRKLADSYESEQAELNGKVAELRNVLNTQTESAENIDKFLTTIRKYTNLKELTPLLVNELIDKIVVHQPTGRGKNRQVTIELHYRFIGEL

SEQ ID NO: 1667 - DNA, 50 bp, Streptococcus suis
  source 1..50: mol_type = genomic DNA
ggactgctcggtgaggtgtggacattataccatagcccagacagcagtcc

SEQ ID NO: 1668 - DNA, 40 bp, Streptococcus suis
  source 1..40: mol_type = genomic DNA
tatttttttcatgagatgattatagcatatttctagactt

SEQ ID NO: 1669 - DNA, 50 bp, Streptococcus suis
  source 1..50: mol_type = genomic DNA
ggactgctcggtgaggtgtggacaaaataccatagcccagacagcagtcc

SEQ ID NO: 1670 - DNA, 40 bp, Streptococcus suis
  source 1..40: mol_type = genomic DNA
taacttttggatgtgatgaaaatatcatatttcttgactg

SEQ ID NO: 1671 - protein, 540 aa, Streptococcus suis
MKQPYNTTIYNTALYMRLSRDDELQGESGSIQTQRMMLRQYAAEHSLNVIDEYIDDGWSGTNFDRPDFQRMIDDIEDGKINCVVTKDLSRLGRNYILTGQYTEIYFPSKGVRYIAVNDNVDTINGENELAPFLNILNEMHARQTSKKVKAAMRTRFANGAHYGAYAPLGYVKDPDKKGHLLIDPETRWIIEKIFDLAVHGRGAASITRILVEEKVPTPGWLNFQRYGTFANIYAGAPEEKAYAWTIAQVKSILKEETYIGHSVHNKQTNISFKNKKKVRKPKEEWYRVENTHEAIISEDVFRQVQEQICNRRRRQKNGTTQIFSGLVKCADCGWSLAYGMNSQNKNPYAHYHCSKYGQGLHQCSMHYIRYDVLYAYVLSRLQYWSVLAQQDGDKLLKRLLNASDKERNTARKRQTAELKKAEKRKAEVDTLFAKMYEDWSAGRITEYNFNMLSEKYQGEQRELDAKIERLHEAMEVAAQTAVDAEKWIGLMKQYVNPTELTAELLNTLIEKILVHEAVKSEDGSREQEVEIFYRFIGKIE

SEQ ID NO: 1672 - DNA, 50 bp, Streptococcus suis
  source 1..50: mol_type = genomic DNA
caatatctttaactaagggaaacgggggtatcacttagataaagatacca

SEQ ID NO: 1673 - DNA, 40 bp, Streptococcus suis
  source 1..40: mol_type = genomic DNA
tgtttccaagtgggaaaatggtgaagcaacgccagatatc

SEQ ID NO: 1674 - DNA, 50 bp, Streptococcus suis
  source 1..50: mol_type = genomic DNA
caatatctttaactaagggaaacggcggtatcacttagataaagatacca

SEQ ID NO: 1675 - DNA, 40 bp, Streptococcus suis
  source 1..40: mol_type = genomic DNA
tgtctccaagttggaaaatgctgatgtaactccatagatg

SEQ ID NO: 1676 - protein, 544 aa, Streptococcus equi
MKSTTLQRTLTTKYSSLDRAEELTALYCRISNEDMNAGDSNSILNQKSILEKYAKDNRLGAYRFFIDDGYTGTNFSKRPAFQEMLELVNAGIVKTVVVKDLSRFGRNATEVGLYTDILFPKLDVRFIAINDNVDSANSNITDLDYSGFLNIFNEFHSKSTSAKVRSVLRSKAERGERIGGFAPFGYQLDPEDKNHLIIDEVAAEIVRRIFQLYLDGMTISKIANLLFSEKVPTVAEYRQKATDPNCDWYGESVKSILSRPEYCGDLVLAKSYIKSYKDKRKILNDTKDWLVFKDRHEPIIPRDQFELVQTMLAKKRRRTKSNRHGLFSGLVYCHDCGYRHYFCTGKSISPNQERYICSGFQSKKVKCSDSHYIRELKLQEIVLSDLNDKIQYVKKHKQEFLQLLISKTEKDSKKELKATERRLSECQKRASQLDIIIKKLYEDNVLGKLSDERFMSLSKDYEQEQNLLKSEILEKSSYLSEQKDRLMDVNRFISIIDQYTTLTELNSSIVNELIERIEIHQPDKSSGKRVQQIDIFYTFVGKFN

SEQ ID NO: 1677 - DNA, 50 bp, Streptococcus equi
  source 1..50: mol_type = genomic DNA
ttggtaggttagatagttctacctgtgggtgatatacgcaaacctattaa

SEQ ID NO: 1678 - DNA, 40 bp, Streptococcus equi
  source 1..40: mol_type = genomic DNA
aaaatataaacatacctccatgggttctaataatattatt

SEQ ID NO: 1679 - DNA, 50 bp, Streptococcus equi; identical to SEQ ID NO: 1677
  source 1..50: mol_type = genomic DNA

SEQ ID NO: 1680 - DNA, 40 bp, Streptococcus equi
  source 1..40: mol_type = genomic DNA
aaattataaacatatctctgtggtttaaattaatgttatt

SEQ ID NO: 1681 - protein, 544 aa, Streptococcus equi
MKSTTLQRTLTTKYSSLDRAEELTALYCRISNEDMNAGDSNSILNQKSILEKYAKDNRLGAYRFFIDDGYTGTNFSKRPAFQEMLELVNAGIVKTVVVKDLSRFGRNATEVGLYTDILFPKLDVRFIAINDNVDSANSNITDLDYSGFLNIFNEFHSKSTSAKVRSVLRSKAERGERIGGFAPFGYQLDPEDKNHLIIDEVAAEIVRRIFQLYLDGMTISKIANLLFSEKVPTVAEYRQKATDPNCDWYGESVKSILSRPEYCGDLVLAKSYIKSYKDKRKILNDTKDWLVFKDRHEPIIPRDQFELVQTMLAKKRRRTKSNRHGLFSGLVYCHDYGYRHYFCTGKSISPNQERYICSGFQSKKVKCSDSHYIRELKLQEIVLSDLNDKIQYVKKHKQEFLQLLISKTEKDSKKELKATERRLSECQKRASQLDIIIKKLYEDNVLGKLSDERFMSLSKDYEQEQNLLKSEILEKSSYLSEQKDRLMDVNRFISIIDQYTTLTELNSSIVNELIERIEIHQPDKSSGKRVQQIDIFYTFVGKFN

SEQ ID NO: 1682 - DNA, 50 bp, Streptococcus equi; identical to SEQ ID NO: 1677
  source 1..50: mol_type = genomic DNA

SEQ ID NO: 1683 - DNA, 40 bp, Streptococcus equi
  source 1..40: mol_type = genomic DNA
aaaatataaacatacctccgtgggttctaataatattatt

SEQ ID NO: 1684 - DNA, 50 bp, Streptococcus equi; identical to SEQ ID NO: 1677
  source 1..50: mol_type = genomic DNA

SEQ ID NO: 1685 - DNA, 40 bp, Streptococcus equi; identical to SEQ ID NO: 1680
  source 1..40: mol_type = genomic DNA

SEQ ID NO: 1686 - protein, 544 aa, Streptococcus equi; identical to SEQ ID NO: 1676

SEQ ID NO: 1687 - DNA, 50 bp, Streptococcus equi; identical to SEQ ID NO: 1677
  source 1..50: mol_type = genomic DNA

SEQ ID NO: 1688 - DNA, 40 bp, Streptococcus equi; identical to SEQ ID NO: 1683
  source 1..40: mol_type = genomic DNA

SEQ ID NO: 1689 - DNA, 50 bp, Streptococcus equi; identical to SEQ ID NO: 1677
  source 1..50: mol_type = genomic DNA

SEQ ID NO: 1690 - DNA, 40 bp, Streptococcus equi; identical to SEQ ID NO: 1680
  source 1..40: mol_type = genomic DNA

SEQ ID NO: 1691 - protein, 542 aa, Anaerocolumna aminovalerica
MQLNNYQLIVSQALRYCLYLRKSRADLEAEARGEGETLARHEKALLDLAKKLKINIVKIYREIVSGETIAARPVMQELLAEVEQGMWDGVLVMEVERLARGDTVDQGIVAQTFKFSNTKIITPMKIYDPNNEYDEEYFEFGLFMSRREYKTTNRRLQRGRADSVKEGKYVGSVAPFGYKRIKIKNDKGYTLEPIPEQADVVKMIFDWYTSGEVQEDGSRKRLGMTLIARRLNELGIKPQKKDVWTLPTIRDMLSNPVYMGKIRWNFRPHEKKMVNGKIAKRRPHSNDFTIVNGLHEAIIDEFTFNLAQHNIKKNPPKPIGENYVIKNPLAGLIICGKCGRAMVRKLSMNGSATLACTVPQCGNVSSKLEYVEDSVLDALEGWVKEYRTSLKPSEIKDSKLKLNVLEKNIRDNQNKLQELQNQLNTVFEMLEKGVYTTEQFLQRSQAVSSQIEDAKSLSESLSKELKREQSAAENRSYIIPRVEHLLKVYNSLPDAQSKNALLKEVVKKVVYTKERDGKCKDVDPKDFTIALYPVLPYHGSNS

SEQ ID NO: 1692 - DNA, 50 bp, Anaerocolumna aminovalerica
  source 1..50: mol_type = genomic DNA
aatagttaactactatgagcctattctttggcacatagtagttaactatt

SEQ ID NO: 1693 - DNA, 40 bp, Anaerocolumna aminovalerica
  source 1..40: mol_type = genomic DNA
aatttccatatgagccaattcttctgttcctatgtcattc

SEQ ID NO: 1694 - DNA, 50 bp, Anaerocolumna aminovalerica
  source 1..50: mol_type = genomic DNA
aatagttaactactatgagcctataatttggcacatagtagttaactatt

SEQ ID NO: 1695 - DNA, 40 bp, Anaerocolumna aminovalerica
  source 1..40: mol_type = genomic DNA
aattaccatatgatccagcaattctattcctatgtattta

SEQ ID NO: 1696 - protein, 480 aa, Mycobacterium shimoidei
MTNAALTSANDLSAPIRRAIIYTRVSSDKAGGRSVREQEAECRTECERRGWPVAEVLTDNDRSASRYATKDRPEYARLRTLLQPGDVLVMWEASRATRDLERYVELRELLTERRALWCYSGKVYDLTDGGDRFSTGLDILVSEKAAEETRDRIMRAHRANLVNGKPHGRLSYGYRTRLEQDDQGRIIARHREPDPARAPLVAEAARRVLAGETTLSVLRWLVTVDPDTAKWNTTRLHKMLASPTNAGWRVAADGELIKGTWEPIIDEETRLALVAMFAARKTGPRGNQPKHLLSGIAVCAICGEALWRTKGGKAHGGNHYVYGCKKGKHVARSVIDLDAAVLEVVNALLADPVMLAEWTRPPEADPTVAVRLAKLIEQRDGVEAQLAEMKMPAASGARVLAKLEEQIAAAEKAVVPVAVDPAVAEIADSDDPIATWEALPLLGKRTFIRAVMSVTVDRIGPGRWHDRRRGIDIEPRRAAA

SEQ ID NO: 1697 - DNA, 50 bp, Mycobacterium shimoidei
  source 1..50: mol_type = genomic DNA
atagggctataaacgacaaataaccaataaacccgctattatggccctat

SEQ ID NO: 1698 - DNA, 40 bp, Mycobacterium shimoidei
  source 1..40: mol_type = genomic DNA
tctggcggtcttcgacgaccacctcaaacggccgctgtac

SEQ ID NO: 1699 - DNA, 50 bp, Mycobacterium shimoidei
  source 1..50: mol_type = genomic DNA
atagggctataaacgacaaataacatataaacccgctattatggccctat

SEQ ID NO: 1700 - DNA, 40 bp, Mycobacterium shimoidei
  source 1..40: mol_type = genomic DNA
ccagccggtcatcgactacatcctcaaaagccagctgtac

SEQ ID NO: 1701 - protein, 550 aa, Clostridium tyrobutyricum
MNRQSTFSTILKSTIAFEEAKITALYCRLSRDDELAGDSNSIVNQKAILKKYAEDNGFRNIEFYVDDGVSGTTFDRPDFNRMIADVESGRIGTIIIKDMSRFGRDYLKVGYYTEIMFPEADVRFIAINNCIDSANQADSDFTPFLNIINEWYAKDTSKKIRAVFKSKGQSGKPLCTNPPYGYIKDPEDKLHWIIDEKAAEVVRDIFRLCMAGFGPTQIAKQLEKRCIDTPTVHLRKMGINTPARPPENPYAWSARTVADILAKMEYLGHTVNFKTSKKSYKSKVKILSNPEDWLVFKNTHEAIIDEGTWETVQKIRDGKRRPSRLGEMGMLSGMMFCADCGAKLYQVRGKGWTHDKEYFVCATYRKKKGMCSSHQIRNVVVEQLLLEDLRRVTSFAKDHEQEFIRIVMNNSEKELAKELRQSQKEYEQAQTRIADIDKIIRKLYEDNVMGKIPEERFYKMSAEYETEQKALEERITKLKHTIDTANEQSLNTDRFLALVKKYTEITELDAEIIREFIDKIIVFKAEKVDGRRTQRIQIFYNCIGAIDLPN

SEQ ID NO: 1702 - DNA, 50 bp, Clostridium tyrobutyricum
  source 1..50: mol_type = genomic DNA
aataatccctatctgaccgctcctaaagaagcgttcacttagggattgaa

SEQ ID NO: 1703 - DNA, 40 bp, Clostridium tyrobutyricum
  source 1..40: mol_type = genomic DNA
attaaaaaaaacatcctttaattagggtgtttttttaaag

SEQ ID NO: 1704 - DNA, 50 bp, Clostridium tyrobutyricum
  source 1..50: mol_type = genomic DNA
aataatccctatctgaccgctcctatagaagcgttcacttagggattgaa

SEQ ID NO: 1705 - DNA, 40 bp, Clostridium tyrobutyricum
  source 1..40: mol_type = genomic DNA
attaaaaaaaacatactttatttactatgtatatatagag

SEQ ID NO: 1706 - protein, 537 aa, Blautia faecis
MKQQIYNTALYLRLSRDDELQGESSSITTQRSMLRLYAKEHHLNVIDEYIDDGWSGTNFERPSFQRMIEDIEAGKINCVVTKDLSRLGRNYIMTGQYTELYFPSHNVRYIAIDDGVDSEKGESEIAPFKNIINEWVARDTSRKVKSAFKTKFAEGAYYGAYAPLGYKKHPDIKGKLLVDEETKWIVEKIFSLAYQGYGSAKITKVLREEKVPTASWLNFTRYGTFAHIFEGKPESKRYEWTIAHVKAILKSEVYIGNSVHNRQSTVSFKSKKKVRKPESEWFRVENTHEPIIDKEVFYRVQEQIKSRRRQTKEKATPIFAGLVKCADCGWSMRFATNKANKTPYSYYACSYYGQFGKGTCSMHYIRYDVLYQAVLERLQYWAKAVQQDEEKVLNKIQKAGNAERIREKKKKASALKKAENRQNEIDRLFTKMYEDRACEKITERNFIMLSGKYQKEQIELEQQITNLREELSKMEQDMIGAEKWIELIKEYSVPKELTAPLLNAMIEKILIHEATTNEDNERIQEIEIYYRFIGKVD

SEQ ID NO: 1707 - DNA, 50 bp, Blautia faecis
  source 1..50: mol_type = genomic DNA
tcatatctttaactaagggaaactggagtttccccaacaaaaggatatta

SEQ ID NO: 1708 - DNA, 40 bp, Blautia faecis
  source 1..40: mol_type = genomic DNA
aatttccaaatgggaaactggaaaaggctatccggatatt

SEQ ID NO: 1709 - DNA, 50 bp, Blautia faecis
  source 1..50: mol_type = genomic DNA
tcatatctttaactaagggaaactaaagtttccccaacaaaaggatatta

SEQ ID NO: 1710 - DNA, 40 bp, Blautia faecis
  source 1..40: mol_type = genomic DNA
aattttcaattgggtaactaaaataggctaccctgctgtt

SEQ ID NO: 1711 - protein, 521 aa, Clostridium perfringens
MANVTMIPARVNRRAKREEKETEVPKTRVAAYCRVSTDSDEQASSYEMQVEHYTEYISKNPGWELAGIYADDGISGTNTKKREDFNRMIEDCMAGKIDFVISKSISRFARNTLDCLQYIRQLKDKGIAVFFEKENINTMDTKGELLLTIMASLAQQESESLSQNVKLGLQFRYQAGKVQVNHNRFLGYTKDDDGNLIIEPTEAAVIKRIYREYLEGASYRDICGGLMADGILTGAGKKKWIPSTIHKILSNEKYIGDALLQKTITTNLLEKKREINNGIAPQYYVEDSHEAIIPRALYMRVQEEMVRRANLRSGEDGKKKRIYSSKYALSSLCTCEKCGDIYRRIAWNNRGKKYTVWRCCTRVEHGPGECDAPTVLETDLQTAVMNAINKVVGQKSMVIASLETILEQTVICADEELAELDEKIKAVQLELVDKATSSEGYEDLARESDRLNEEKQKILVTIAEDKGRQEKKAELIDFLHKQTTEFDEFDDGLVRRLIEQITVHENGTFTVEFKSGTMVEV

SEQ ID NO: 1712 - DNA, 50 bp, Clostridium perfringens
  source 1..50: mol_type = genomic DNA
aaaaattagttattcaacaacctaactatgaggcagttgtaaaaatgtgt

SEQ ID NO: 1713 - DNA, 40 bp, Clostridium perfringens
  source 1..40: mol_type = genomic DNA
taatatttcacttttaaatactatatataaaactaatggt

SEQ ID NO: 1714 - DNA, 50 bp, Clostridium perfringens
  source 1..50: mol_type = genomic DNA
aaaaattagttattcaacaacctatatatgaggcagttgtaaaaatgtgt

SEQ ID NO: 1715 - DNA, 40 bp, Clostridium perfringens
  source 1..40: mol_type = genomic DNA
taaaatttcattttaaaattatttatataaatttaagggg

SEQ ID NO: 1716 - protein, 521 aa, Clostridium perfringens
MANVTMIPARVNRRAKREEKETEVPKTRVAAYCRVSTDSDEQASSYEMQVEHYTEYISKNPGWELAGIYADDGISGTNTKKREDFNRMIEDCMAGKIDFVISKSISRFARNTLDCLQYIRQLKDKGIAVFFEKENINTMDTKGELLLTIMASLAQQESESLSQNVKLGLQFRYQAGKVQVNHNRFLGYTKDDDGNLIIEPTEVAVIKRIYREYLEGASYRDICGGLMADGILTGAGKKKWIPSTIHKILSNEKYIGDALLQKTITTNLLEKKREINNGIAPQYYVEDSHEAIIPRALYMRVQEEMVRRANLRSGEDGKKKRIYSSKYALSSLCTCEKCGDIYRRIAWNNRGKKYTVWRCCTRVEHGPGECDAPTVLETDLQTAVMNAINKVVGQKSMVIASLETILEQTVICADEELAELDEKIKAVQLELVDKATSSEGYEDLARESDRLNEEKQKILVTIAEDKGRQEKKAELIDFLHKQTTEFDEFDDGLVRRLIEQITVHENGTFTVEFKSGTMVEV

SEQ ID NO: 1717 - DNA, 50 bp, Clostridium perfringens; identical to SEQ ID NO: 1712
  source 1..50: mol_type = genomic DNA

SEQ ID NO: 1718 - DNA, 40 bp, Clostridium perfringens; identical to SEQ ID NO: 1713
  source 1..40: mol_type = genomic DNA

SEQ ID NO: 1719 - DNA, 50 bp, Clostridium perfringens; identical to SEQ ID NO: 1714
  source 1..50: mol_type = genomic DNA

SEQ ID NO: 1720 - DNA, 40 bp, Clostridium perfringens; identical to SEQ ID NO: 1715
  source 1..40: mol_type = genomic DNA

SEQ ID NO: 1721 - protein, 550 aa, Phascolarctobacterium faecium
MNRQPNIDAALVEKITALYCRLSRDDELQGDSNSIKNQKAILQKYAEDNGFRNLRFFVDDGYSGTNFDRPDFQRMIAEMGDGNVATIIVKDMSRLGRDYLKVGYYTEVAFPEADVRFIAINNGVDSANQQDSDFTPFLNIINEWYAKDTSKKIRAVFKAKGESGKPLCTNPPYGYVKDPQDKLHWIIDEDAATVVKEIFHLCMKGLGPTQIATELTKRKIENPAAHGKRNGINVSAQQERDDLFIWRTSTIARILTRQEYLGHTVNFKTKRKSYKQKKQLKNNPSEWQIFRNTHDAIIDEETFKTVQRIRDGRRKVSRLGDMGILSGMMFCADCDNKLYQVRGKGWEHDKEYFVCATYRKVKGGCSSHQIRNVVVEQLLLQNLQRVTAFARGHEDEFLQLITNNFEKELNKELRDCRKEFDQAKARISKLDTIIQRLYEDNVEGKISDERFMKMSTTYESEQKELNARVTALRYFIDHAKEKSLNAEHFLSLVRKYTDIKELDAEIIREFVEKIIVFKAEKIDGHRVQRIQIIYNCIGAVELPSKHEKTA

SEQ ID NO: 1722 - DNA, 50 bp, Phascolarctobacterium faecium
  source 1..50: mol_type = genomic DNA
taaaatccctaagacgcccccacaaaaagcggtgcaacttagggatttac

SEQ ID NO: 1723 - DNA, 40 bp, Phascolarctobacterium faecium
  source 1..40: mol_type = genomic DNA
aaataaaaaaataccacccaaagggtggtattttttatta

SEQ ID NO: 1724 - DNA, 50 bp, Phascolarctobacterium faecium
  source 1..50: mol_type = genomic DNA
taaaatccctaagacgcccccacattaagcggtgcaacttagggatttac

SEQ ID NO: 1725 - DNA, 40 bp, Phascolarctobacterium faecium
  source 1..40: mol_type = genomic DNA
aaaaataaaaatatcaatcttaggttgatattttttatca

SEQ ID NO: 1726 - protein, 612 aa, Ezakiella massiliensis
MMEYATKITALYSRLSVGDEDRDGGESNSIVNQKAFLERYARQHKLMNIRHYIDDDESGRFFDRSAYTQMISDVENGKIGIVIMKDMTRWGRDYLQVGNAMEIFRRNNVRFIAINNGIDSKDQNTLEFAPFINIMSEWYARDISKKVTTGIKTKGASGKPVATEAPYGYIKDSNNKDYWIVDKEAAKVVKLIFTLFMEGKNRNQIAVYLKEKEILTPTFYMKQQDRGTAKNKKLNEENRYNWNKATLTRILKRQEYCGDVVNFKTEKHYKDKRNHYVDKDKWQIIPDVHEPIIDRITFENVQRILKNAPVKRPNGDGEIHALSGLMYCKDCGTKMHIRTIHKSGKVQHVTYCSEYAKGKAKHPKCNSPHRIDVDDVMENLTEVLRKIAQYSLANKEEFEVLVKSSLAKEQTEEIKKQQNRIPQITDRMEQIERVMNKLYEDNALGNIEVKRYELLSRKYAEEYYTLKAEQEEIEERLSEFENANQRAKNFINLAESYSDFEELTPTAINEFISKIVVHERDVKRAKYAVQRIEVYFNYIGKFENELTKEIEPTEQEMIQMREEIEEAKKEKSRAYHRAYSKEYRAKNLEKFREYERIKAREYRARKKLQATT

SEQ ID NO: 1727 - DNA, 50 bp, Ezakiella massiliensis
  source 1..50: mol_type = genomic DNA
aaaggtacttgacaaaacgctctctgggttgcataatattaactgtaaag

SEQ ID NO: 1728 - DNA, 40 bp, Ezakiella massiliensis
  source 1..40: mol_type = genomic DNA
agaatatggatcggcaagatggggaaatgaaaaagatatt

SEQ ID NO: 1729 - DNA, 50 bp, Ezakiella massiliensis
  source 1..50: mol_type = genomic DNA
aaaggtacttgacaaaacgctctcgaggttgcataatattaactgtaaag

SEQ ID NO: 1730 - DNA, 40 bp, Ezakiella massiliensis
  source 1..40: mol_type = genomic DNA
agaaaatgcaagggcaaaagaggtaaaggagaaagatatt

SEQ ID NO: 1731 - protein, 545 aa, Lactococcus lactis
MTRSLTIEYTEMNEGMRDITVLYARLSKDDGRKTGDSDSIVNQKLLLENFAKSEGLGNCVFFPDDGISGTTFNRPAFQAAIQLVEAGRVKHFIVKDLSRFGRDYLKVGAFTEVVFPEKNVRFVAINDNVDSYREEDNSLAPFRNLFNEWYARDTSKKIKAVKHAKGNAGEPISGTLPYGYLKGENYKQTKIWLVDEEAAKIVQRIFHEYIEGKSLSMIAGGLERDKILIPARHKEAIGEHSAKVGKLPYRWSFDVIGSILKNQAYLGYVVNFKTYKKSYKSKKCLPNPREKWKIFPGHHEAIIDKETFDLVQKMRNSRRTRQTHNKRIGLFSGMTFCADCGHKHHYDNHENYKNYFCSGRASRLRYCESYHRIREEDLAKAVADDFAKIQAKVNEESGDFVAELHRKFASDDLKKVAEMERKFHENETRILELDSIISRLYEDNVSGKISDERFAKMSEDFEKEQRNLEIQNIAFREKITKIKADCQNVDNFVKLAKSTALLENLTPEKVRELLERIEISEKTLSEDGEKTQKVRFFYRFVGALE

SEQ ID NO: 1732 - DNA, 50 bp, Lactococcus lactis
  source 1..50: mol_type = genomic DNA
gttttgagttatggggtgtggtataaataccagccccgataactcaacta

SEQ ID NO: 1733 - DNA, 40 bp, Lactococcus lactis
  source 1..40: mol_type = genomic DNA
agaatcaaatttttgatataatagtttcatgaaaaatatt

SEQ ID NO: 1734 - DNA, 50 bp, Lactococcus lactis
  source 1..50: mol_type = genomic DNA
gttttgagttatggggtgtggtatttataccagccccgataactcaacta

SEQ ID NO: 1735 - DNA, 40 bp, Lactococcus lactis
  source 1..40: mol_type = genomic DNA
ataattaaatctttgctaatttatttttataaaaaatatt

SEQ ID NO: 1736 - protein, 475 aa, Pseudomonas lactis
MKQAISYVRFSSFRQHGGSSVERQTAMIAEWLTRHPEYLLSGLKFEDLAKSGYHGDHIKAGGGFGKLLGAVEAGAIKEGDVVLVEAIDRTGRMDTVDMLDLLTPILKAGVSIVTLDDGNTYNRASVNGSHIYMLMAKIQAANQYSEALSRRVTASYRIREEKAKAGEQVKRWTPAWLTVEGKVIDRIAKHVKTAFELYAVGVGKATISVRMRETGEPELAKCSSPTIEGWLRNRTVLGYWNDIPNAYPAIIEPDLFFRAQQRGNEAKTTRPVKTAKHLLVGLVKCGHCGGNYIMQNKDGRPHSMRCLNRQRLKDSGCDNTRTIPKPVLDYIRVATTMRAIETAFQRQQLTVSQKRILAIQSELEAVKQKITDLATAIQTVGAIPEIISQLKARQAEREALDAELLVQERTESPVDRFAAVRIEEDLLDNDPVKLNALLKGVDYRITVHADGLMIVNAPDEIYPWLYGGSDRTAKK

SEQ ID NO: 1737 - DNA, 50 bp, Pseudomonas lactis
  source 1..50: mol_type = genomic DNA
aggggtcacattgtaaagtgttgctcccagcttcttcagatgtgacactg

SEQ ID NO: 1738 - DNA, 40 bp, Pseudomonas lactis
  source 1..40: mol_type = genomic DNA
catgcccatcaagccctggtcccaccccttgatcacgcgg

SEQ ID NO: 1739 - DNA, 50 bp, Pseudomonas lactis
  source 1..50: mol_type = genomic DNA
aggggtcacattgtaaagtgttgctgccagcttcttcagatgtgacactg

SEQ ID NO: 1740 - DNA, 40 bp, Pseudomonas lactis
  source 1..40: mol_type = genomic DNA
ccagcccagcaagccctggtgcctgcccttgaggacgtgg

SEQ ID NO: 1741 - protein, 591 aa, Pseudomonas lactis
MYPAFFEQQEAGSMPSAIPYIRFSSARQTTGSSAERQQQMVTQWLTEHPEYTLSDLTYKDFGKSGYHGEHVKDGGGFAKLLAAVEAGNIKAGDVVLVEAIDRTGRLHPLEMLNKVITPILAAGVSIITLDDKVTYTHESAANGHLFLLVAKIQAAYGYSKQLSERTKASYSIRLEQAKEGMKVKRNTPIWLHSDGRLNDDVAPFIKQAFELYVSGVGKTAIANRLRASGVPELATCSGPTVEAWLRNQAAIGNWEYGKDDPDKPSQVIRGVYPPVISNELFLQAQQRKIAVATKPRERTSKNFLVGIVKCGVCGANLIIHNKEGKPNNMRCLTHHRLKDAGCTNKETIPYQVVHFIYLETAPSWVDRAMKVVQLSVNDKRKLYLAGEREEVTKTIERLVRLSAMGDSVELESQYKLATDRRAVIDNELDVLNRREDDGFASKSTSILENYASTLDHDRLAFHDPIQLSALLKQAGYSITVQPGRKLYLPDNNDPWIYTGVARRGNATLGYRIQDGEMEYTISPVIPKAVDASVYNNSSDGELQHIFDRSYKHIKSAISLDQTRVRNTKAITVEKFESADAAMQHLMSGVEK

SEQ ID NO: 1742 - DNA, 50 bp, Pseudomonas lactis
  source 1..50: mol_type = genomic DNA
cgaggtcacttatgaaaaagctgggaccagctttgtactaaatgacacta

SEQ ID NO: 1743 - DNA, 40 bp, Pseudomonas lactis
  source 1..40: mol_type = genomic DNA
ccgcgtgatcaaggggtgggaccagggcttgatgggcatg

SEQ ID NO: 1744 - DNA, 50 bp, Pseudomonas lactis
  source 1..50: mol_type = genomic DNA
cgaggtcacttatgaaaaagctggcaccagctttgtactaaatgacacta

SEQ ID NO: 1745 - DNA, 40 bp, Pseudomonas lactis
  source 1..40: mol_type = genomic DNA
ccacgtcctcaagggcaggcaccagggcttgctgggctgg

SEQ ID NO: 1746 - protein, 521 aa, Pseudomonas carnis
MKQAISYVRFSSFRQHGGSSVERQTAMIAEWLTRHPEYLLSGLKFEDLAKSGYHGDHIKAGGGFGKLLGAVEAGAIKEGDVVLVEAIDRTGRMDTVDMLDLLTPILKAGVSIVTLDDGNTYNRASVNGSHIYMLMAKIQAANQYSEALSRRVTASYRIREEKAKAGEQVKRWTPAWLTVEGKVIDRIAKHVKTAFELYAVGVGKATISVRMRETGEPELAKCSSPTIEGWLRNRTVLGYWNDIPNAYPAIIEPDLFFRAQQRGNEAKTTRPVKTAKHLLVGLVKCGHCGGNYIMQNKDGRPHSMRCLNRQRLKDSGCDNTRTIPKPVLDYIRVATTMRAIETAFQRQQLTVSQKRILAIQSELEAVKQKITDLATAIQTVGAIPEIISQLKARQAEREALDAELLVQERTESPVDRFAAVRIEEDLLDNDPVKLNALLKGVDYRITVHADGLMIVNAPDEIYPWLYGGSDRTAKKYLLHHLGDVIKIDPKPYLTTRVIETVDIDELIPTLQLLRRTLRRQP

SEQ ID NO: 1747 - DNA, 50 bp, Pseudomonas carnis; identical to SEQ ID NO: 1737
  source 1..50: mol_type = genomic DNA

SEQ ID NO: 1748 - DNA, 40 bp, Pseudomonas carnis; identical to SEQ ID NO: 1738
  source 1..40: mol_type = genomic DNA

SEQ ID NO: 1749 - DNA, 50 bp, Pseudomonas carnis; identical to SEQ ID NO: 1739
  source 1..50: mol_type = genomic DNA

SEQ ID NO: 1750 - DNA, 40 bp, Pseudomonas carnis; identical to SEQ ID NO: 1740
  source 1..40: mol_type = genomic DNA

SEQ ID NO: 1751 - protein, 531 aa, Pseudomonas carnis
MKQAISYVRFSSDRQKHGSSVERQEGMIAEWIKAHPDYGTSELKFSDLGKSGFHGEHIKEAGGFGKLLVAVEEGLIKQGDVVLVEAIDRTGRLEPMDMLTLVINPILKAGVSIITLDDNTTYSKESVNTAQIFLLVAKIQAAHGYSAALSTRVADSYKKRRKDAAKHGIVPRRITPVWLNPDGTPRDEVVPWIKTAFELYVSGVGKSTIAKRMRESGVERLAKASGPGVEGWLRNKAVIGKWETLVGTPDHQVIDDIYPAIIEASLFYKAQVHAEKMKTQRPIKTANHFLVGLVRCGECEKNYIVQNLHGKPHSMRCRTRQSQNDCTNSHCVPKPVLDAIYRYTSVTAAVEAVQQQRMGVNEKEIVTREAELLTLAKRVEGLAEAVKQAGPMPELIEALKQSRIEREAAETALVILRSTVVPPAGEYWTNIGKVWDLTTDDAQRLSAMLRNIGYYLTVNSTGEITSSHSDVSYRYIGVDRALDKYKLLVNGKLTLIPKGYVDDYPYHEPFQGGEETTWDDADYENLRLQYE

SEQ ID NO: 1752 - DNA, 50 bp, Pseudomonas carnis
  source 1..50: mol_type = genomic DNA
cggtgttacttacaaaatacttgcgaacagctttttcgcatgtaacactg

SEQ ID NO: 1753 - DNA, 40 bp, Pseudomonas carnis
  source 1..40: mol_type = genomic DNA
ccgcgtaatcaaggggtgggaccagggcttgatgggcatg

SEQ ID NO: 1754 - DNA, 50 bp, Pseudomonas carnis
  source 1..50: mol_type = genomic DNA
cggtgttacttacaaaatacttgccaacagctttttcgcatgtaacactg

SEQ ID NO: 1755 - DNA, 40 bp, Pseudomonas carnis; identical to SEQ ID NO: 1745
  source 1..40: mol_type = genomic DNA

SEQ ID NO: 1756 - protein, 534 aa, Pseudomonas syringae
MKQAISYIRFSSARQEGGSSVERQEGMIAKWLLDHQDYELSKLNYSDLGKSGFHGEHVKEGGNFGKLLKAVMDGYIKRDDVVLVEAIDRTGRLPALQMLSDVIAPILRAGVSIITLDDNTTYTEASVGGPHLFMLVAKIQAAHEYSRTLSRRVEDSYKKRRKDAKEKGVAPKRMTPVWLNSDGTIREDVAPWIKTAFELYVSGVGKSTIAKRLRESGVERLAKASGPGVEGWLRNKAVIGKWETLIGTPEHHVIDDVYPLIIEPSLFYKAQVHAEKMKTQRPIKTAKHFLVGLVHCGECGKNYIMQNLHGKPHSMRCRTRQSQNNCSNSYVVPKPVLDAIYRYTSVTAALEAVQLQQLGVNEKEIVTREAELLTITKRVEGFVQAVNEAGPMPELLTALKQARIERESAENALVILRATVVTPPANQWREMGKVWSLEAEDAQRLSAMLRQVGYNITVGKGAIIKSSHSDVVYQYLGVDRVKDMYRVLADGEMKLIHKSQVDDYPYHEPFHEVVGEATMDETDKENLLLQYQSS

SEQ ID NO: 1757 - DNA, 50 bp, Pseudomonas syringae
  source 1..50: mol_type = genomic DNA
cagtgttacttacaaagagcttgctcccaacgttttcacatgtaacactg

SEQ ID NO: 1758 - DNA, 40 bp, Pseudomonas syringae
  source 1..40: mol_type = genomic DNA
catgcccatcaggccctggtcccagcccttgatgacgcgc

SEQ ID NO: 1759 - DNA, 50 bp, Pseudomonas syringae
  source 1..50: mol_type = genomic DNA
cagtgttacttacaaagagcttgctgccaacgttttcacatgtaacactg

SEQ ID NO: 1760 - DNA, 40 bp, Pseudomonas syringae; identical to SEQ ID NO: 1740
  source 1..40: mol_type = genomic DNA

SEQ ID NO: 1761 - protein, 534 aa, Pseudomonas syringae
MKQAISYIRFSSARQEGGSSVERQEGMIAKWLLDHQDYELSKLNYSDLGKSGFHGEHVKEGGNFGKLLKAVMDGYIKRDDVVLVEAIDRTGRLPALQMLSDVIAPILRAGVSIITLDDNTTYTEASVGGPHLFMLVAKIQAAHEYSRTLSRRVEDSYKKRRKDAKEKGVAPKRMTPVWLNSDGTVREDVAPWIKTAFELYVSGVGKSTIAKRLRESGVERLAKASGPGVEGWLRNKAVIGKWETLIGTPEHHVIDDVYPLIIEPSLFYKAQVHAEKMKTQRPIKTAKHFLVGLVHCGECGKNYIMQNLHGKPHSMRCRTRQSQNNCSNSYVVPKPVLDAIYRYTSVTAALEAVQLQQLGVNEKEIVTREAELLTITKRVEGFVQAVNEAGPMPELLAALKQARIERESAENALVILRATVVTPPANQWREMGKVWTLEAEDAQRLAAMLRQVGYHITVGKGAIIKSSHSDVVYQYLGVDRVKDMYRVLANGEMKLIHKSQVDDYPYYEPFQEVVGEATMDEADKENLLLQYQSS

SEQ ID NO: 1762 - DNA, 50 bp, Pseudomonas syringae
  source 1..50: mol_type = genomic DNA
ccgtgttacttacaaagagcttgctcccaacgttttcacatgtaacactg

SEQ ID NO: 1763 - DNA, 40 bp, Pseudomonas syringae
  source 1..40: mol_type = genomic DNA
catgcccatcaggccctggtcccagcccttgatgacgcga

SEQ ID NO: 1764 - DNA, 50 bp, Pseudomonas syringae
  source 1..50: mol_type = genomic DNA
ccgtgttacttacaaagagcttgctgccaacgttttcacatgtaacactg

SEQ ID NO: 1765 - DNA, 40 bp, Pseudomonas syringae; identical to SEQ ID NO: 1740
  source 1..40: mol_type = genomic DNA

SEQ ID NO: 1766 - protein, 531 aa, Pseudomonas syringae
MKQAISYIRFSSARQEGGSSVERQEGMIAKWLLDHQDYELSKLNYSDLGKSGFHGEHVKEGGNFGKLLKAVMDGYIKRDDVVLVEAIDRTGRLPALQMLSDVIAPILRAGVSIITLDDNTTYTEASVGGPHLFMLVAKIQAAHEYSRTLSRRVEDSYKKRRKDAKEKGVAPKRMTPVWLNSDGTVREDVAPWIKTAFELYVSGVGKSTIAKRLRESGVDRLAKTSGPSVEGWLRNKAVIGKWETLIGTPEHHVIDDVYPLIIEPSLFYKAQVHAEKMKTQRPVKTANHFLVGLVRCGACEKNYIVQNLHGKPHSMRCRTRQSQNDCTNSNCVPKPVLDAIYRYTSVTAAVEAVQQQQMGVNEKEIVTREAELLTLAKRVEGLAEAVKQAGPMPELIEALKQSRIAREAAENALVILRSTVVAPAGTGWNEMGKVWKLEADDAQRLAAMLRMVGYHITVQTSGEITSSHSDVLYRYIGVDRALDKYKLLVNGKLALIPKGYVDDYPYHEPFQEVEGEMTWNETDYENLRLQY

SEQ ID NO: 1767 - DNA, 50 bp, Pseudomonas syringae
  source 1..50: mol_type = genomic DNA
cagtgttacttacgaagagcttgctcccaacgttttcacatgtaacactg

SEQ ID NO: 1768 - DNA, 40 bp, Pseudomonas syringae; identical to SEQ ID NO: 1758
  source 1..40: mol_type = genomic DNA

SEQ ID NO: 1769 - DNA, 50 bp, Pseudomonas syringae
  source 1..50: mol_type = genomic DNA
cagtgttacttacgaagagcttgctgccaacgttttcacatgtaacactg

SEQ ID NO: 1770 - DNA, 40 bp, Pseudomonas syringae; identical to SEQ ID NO: 1740
  source 1..40: mol_type = genomic DNA

SEQ ID NO: 1771 - protein, 578 aa, Pseudomonas fluorescens
MPSAIPYIRFSSARQTTGSSAERQQQMVTQWLTEHPEYTLSDLTYKDFGKSGYHGEHVKDGGGFAKLLAAVEAGNIKAGDVVLVEAIDRTGRLHPLEMLNKVITPILAAGVSIITLDDKVTYTHESAASGHLFLLVAKIQAAYGYSKQLSERTKASYSIRLEQAKEGMKVKRNTPIWLHSDGRLNDDVAPFIKQAFELYVSGVGKTAIANRLRASGVPELATCSGPTVEAWLRNQAAIGNWEYGKDDPENPSQIIHGVYPPVISHELFLQAQQRKSAVATKPRERTSKNVLVGIVKCGVCGANLIVHNKEGKPNNMRCLTHHRLKDAGCTNKETIPYQVVHFIYLQTAPSWVDRAMKVVQLSVNDKRKLYLAGEREEVTKTIERLVRLSAMGDSVELESQYKLATDRRAVIDNELEVLNRREDDGFASKSTSILENYESTLDHDRLAFHDPIQLSALLKQAGYSITVKPGRKLYLPDNNDPWIYTGVARRGNATLGYRIQDGEMEYTISPVIPKAVDASAYNNNSDGELQHIFDRSYKHIKSAISLDQTRVRNTKAMTVEKFESADAAMQHLMSGVEK

SEQ ID NO: 1772 - DNA, 50 bp, Pseudomonas fluorescens
  source 1..50: mol_type = genomic DNA
cgaggtcacttatgaaaaagctgggaccagctttgtactaagtgacacta

SEQ ID NO: 1773 - DNA, 40 bp, Pseudomonas fluorescens; identical to SEQ ID NO: 1743
  source 1..40: mol_type = genomic DNA

SEQ ID NO: 1774 - DNA, 50 bp, Pseudomonas fluorescens
  source 1..50: mol_type = genomic DNA
cgaggtcacttatgaaaaagctggcaccagctttgtactaagtgacacta

SEQ ID NO: 1775 - DNA, 40 bp, Pseudomonas fluorescens; identical to SEQ ID NO: 1745
  source 1..40: mol_type = genomic DNA

SEQ ID NO: 1776 - protein, 544 aa, Bacillus subtilis
MELKNIVNSYNITNILGYLRRSRQDMEREKRTGEDTLTEQKELMNKILTAIEIPYELKMEIGSGESIEGRPVFKECLKDLEEGKYEAIAVKEITRLSRGSYSDAGQIVNLLQSKRLIIITPYKVYDPRNPVDMRQIRFELFMAREEFEMTRERMTGAKYTYAAQGKWISGLAPYGYQLNKKTSKLDPVEDEAKVIELIFDLFLNGLNGKDYSYNAIATHLTNLQIPSPAGKKKWNRFTVKAILENEAYIGTVKYKVREKEKDGKRTIRPENEQIIVPDAHPPIIDKVQFEEANKKIENKIPLLPNRSDYKLNELAGVCICADCGGPLSKYEAKRKRQNKNGTESLYHVKVLRCLNNKCMNVRYNDVEEAILDYLKYLQALNDNDLTKHLGSVIQSHENKNNIRSKKQMNEQFEQREKELKNKLNFIFDKYESGIYSDEIFLQRKSVLDKELQELKKAKDEINGLVDFKGGLDINQLKENIKNAIELYESSENREEKNKLLRIMLQKVIVKMTAKRKGPIPAQFEITPILRYNFLIGETVSSYES

SEQ ID NO: 1777 - DNA, 50 bp, Bacillus subtilis
  source 1..50: mol_type = genomic DNA
tagtcattatcttgataaacagataaagctgtatataatgatactgacta

SEQ ID NO: 1778 - DNA, 40 bp, Bacillus subtilis
  source 1..40: mol_type = genomic DNA
cattaatatcagtacagataaagctgtatctcctgtgaac

SEQ ID NO: 1779 - DNA, 50 bp, Bacillus subtilis
  source 1..50: mol_type = genomic DNA
tagtcattatcttgataaacagatggagctgtatataatgatactgacta

SEQ ID NO: 1780 - DNA, 40 bp, Bacillus subtilis
  source 1..40: mol_type = genomic DNA
tgttaattgcagtactgatggagctgtaactgctgcgaac

SEQ ID NO: 1781 - protein, 503 aa, Eisenbergiella massiliensis
MNNRIDAIYARQSVDKKDSISIESQIEFCKYELKGGNCKEYTDKGYSGKNTDRPKFQELVRDIKRGLIAKVVVYKLDRISRSILDFTNMMELFQQYNVEFVSSTEKFDTSTPMGRAMLNICIVFAQLERETIQKRVTDAYYSRSQRGFKMGGKAPYGFHTEPIKMDGINTKKLVVNPDEAANIRLMFEMYAQPTTSYGDITRYFAEQGILFNGKELIRPTLAQMLRNPVYVQADLDVYEFFKSQGTVIVNDAADFTGMNGCYLYQGRDVKPSKKNDLKDQMLVLAPHEGIVPSDIWLTCRKKLMNNMKIQSARKATHTWLAGKIKCGNCGYALMSIFNPSGKQYLRCTKRLDNKSCPGCGKIITSELEAVVYQQMIKKLASYKTLTGRKKAAKANPKIAALQVELLHVDSEIEKLVDSLTGANNVLLSYVNVKIAELDGRKQELVKQIAELTVEAISPEQVNQISGYLDTWDNVSFDDKRRVVDLMITTVAATSDSLNITWKI

SEQ ID NO: 1782 - DNA, 50 bp, Eisenbergiella massiliensis; identical to SEQ ID NO: 12
  source 1..50: mol_type = genomic DNA

SEQ ID NO: 1783 - DNA, 40 bp, Eisenbergiella massiliensis
  source 1..40: mol_type = genomic DNA
cttaaatttaaatatttttttgcttccattgaaatatctc

SEQ ID NO: 1784 - DNA, 50 bp, Eisenbergiella massiliensis
  source 1..50: mol_type = genomic DNA
gtgtagtcccttgtaaactgtactgtaggtcagtttacaaggaactacac

SEQ ID NO: 1785 - DNA, 40 bp, Eisenbergiella massiliensis
  source 1..40: mol_type = genomic DNA
acttattttaaatctttttgtgcttctgttgtaatatctc

SEQ ID NO: 1786 - protein, 589 aa, Clostridioides difficile
MKKEVKVIKGDTTLKRTASGCVERSIKRVAAYCRVSTDTEDQINSYNSQVEHYTEFIQKNNEWTLAGIYADEAITGTQVDRRIDFQRLINDCMNGDIDMIITKSISRFARNTLDTLKYVRKLKEFNVAVFFEEENINTLTMDGELLLTILSSVAQQEVENISANVKKGLRMKMERGEMVGFQGCLGYDYDPETKSISINEKEAEIVRYIFRRYIEGVGGMVISRELEEQGYLSPRGNKRWTETTVLGIIKNEKYKGDLMMGKTYTVDPISKRRLDNFGEQDKFYIENHHEPIISEEDFEKAQGIRLRRSKNRNTVANNGGKREKYSRKYAFSSMLECGFCGHNLSRRNWHSSSEYTKVIWQCVNATKNGKKYCPHSKGIEEEAIEKAFMESYRQVCHNNVEITNEFLKTVEEELKDNSLAKDLKKITNQLDKVLKKEKDLVELRLNESISMDVYQDKYNEIAISKEKLLAEKRTLEVTLTDEKALKKRLEGFKKLLESNKYLEEFDRAVFESIVDKIIIGGTNDEGEIDPAMITIIYKTGKKDSQDGRLFKSRRKNAKEVDEKTDNKLYPQSSDEVNNLCSYPMDNTCG

SEQ ID NO: 1787 - DNA, 50 bp, Clostridioides difficile
  source 1..50: mol_type = genomic DNA
gtgttcctatcctatggacaacacatgtggagtgcatagcgttgatacaa

SEQ ID NO: 1788 - DNA, 40 bp, Clostridioides difficile
  source 1..40: mol_type = genomic DNA
atgttccctcattctacacatgtggaaactgtagctaaga

SEQ ID NO: 1789 - DNA, 50 bp, Clostridioides difficile
  source 1..50: mol_type = genomic DNA
gtgttcctatcctatggacaacacttgtggagtgcatagcgttgatacaa

SEQ ID NO: 1790 - DNA, 40 bp, Clostridioides difficile
  source 1..40: mol_type = genomic DNA
attatgactcattctacagttgtggaaattgtagtttaga

SEQ ID NO: 1791 - protein, 589 aa, Clostridioides difficile
MKKDVKVIKGDTTLKRTASGCVERSIKRVAAYCRVSTDTEDQINSYNSQVEHYTEFIQKNKEWTLAGIYADEAITGTQVDRRIDFQRLINDCMNGDIDMIITKSISRFARNTLDTLKYVRKLKEFNVAVFFEEENINTLTMDGELLLTILSSVAQQEVENISANVKKGLRMKMERGEMVGFQGCLGYDYNPETKSISVNEKEAEIVRYIFRRYIEGVGGMVISRELEEQGYLSPRGNKRWTETTVLGIIKNEKYKGDLMMGKTYTVDPISKRRLDNFGEQDKFYIESHHEPIISKEDFEKAQGIRLRRSKNRNTVANNGGKREKYSRKYAFSSMLECGFCGHNLSRRNWHSSSEYTKVIWQCVNATKNGKKYCPHSKGIEEAAIEKAFMESYRQVCHNNVEITNEFLKTVEEELKDNSLAKDLKKISNQLDKIIKKEKDLVELRLNESISMDIYQDKYNEIAISKEKLLAEKRTLEVTLTDEKALKKRLEGFKKLLESNKYLEEFDRAVFESIVDKIIIGGTNDEGEIDPAMITIIYKTGKKDSQDGRLFKSRRKNAKEVNEETGGKLYPQSSDEVNNLYSYPIDNTCG

SEQ ID NO: 1792 - DNA, 50 bp, Clostridioides difficile
  source 1..50: mol_type = genomic DNA
gtattcctatcctattgacaacacatgtggagtgcatagcgttgatacaa

SEQ ID NO: 1793 - DNA, 40 bp, Clostridioides difficile; identical to SEQ ID NO: 1788
  source 1..40: mol_type = genomic DNA

SEQ ID NO: 1794 - DNA, 50 bp, Clostridioides difficile
  source 1..50: mol_type = genomic DNA
gtattcctatcctattgacaacacttgtggagtgcatagcgttgatacaa

SEQ ID NO: 1795 - DNA, 40 bp, Clostridioides difficile; identical to SEQ ID NO: 1790
  source 1..40: mol_type = genomic DNA

SEQ ID NO: 1796 - protein, 484 aa, Clostridioides difficile
MQEVEVIKAKNVLARQARGKAIERLRVAAYCRVSTDSEDQLNSYKSQVQYYTDMIKKNKEWVLADIYADEAITGTQVTKREDFQRMINDCMNGEIDMVFTKSISRFARNTLDTLKYVRMLKERNIAVYFEDEKINTLTMDGELLLVVLSSVAQQEVENISANVKKGLKMKMKRGELVGFQGCIGYDYHPEDKTITVNQEEAEIVRYIFNRYVDGAGGSVIGQELESLGYKTKYGSSTWAPSTVIGIIKNEKYKGDILLGKTFTVDPISKRRLENMGEEDKFYMKDHHEPIISEEVFEKAQEILNRRNKNRTTVGSGKREKYSRKYAFSCMLECGFCGGTLTRRNWHSGSKYSKVIWQCVTATKKGKKFCKHSKGIPETAIEEAFVESYRLLCDDNKDVLEEFLQRMDDTLSSSVVSKQLAKAEKEIDALEKKKSKLVDMRLEEIIDKETYESKYADLVSKQEQLVEERQKLQETSDNEKDIKNV

SEQ ID NO: 1797 - DNA, 50 bp, Clostridioides difficile
  source 1..50: mol_type = genomic DNA
gtgttccgatagtagtaacgacacacgttgagtgcgtagtattgatgtca

SEQ ID NO: 1798 - DNA, 40 bp, Clostridioides difficile; identical to SEQ ID NO: 1788
  source 1..40: mol_type = genomic DNA

SEQ ID NO: 1799 - DNA, 50 bp, Clostridioides difficile
  source 1..50: mol_type = genomic DNA
gtgttccgatagtagtaacgacacttgttgagtgcgtagtattgatgtca

SEQ ID NO: 1800 - DNA, 40 bp, Clostridioides difficile; identical to SEQ ID NO: 1790
  source 1..40: mol_type = genomic DNA

SEQ ID NO: 1801 - protein, 542 aa, Christensenella hongkongensis
MKQTDHITALYCRLSRDDELDGESNSIQNQKNILEKYAKENHFQNLVFYVDDGVSGTTFDRPGFNAMLEQVKAENVSTVIIKDMSRFGRNYLQVGLYTEVLFPEKNVRFIAINDGVDSEKGDNDFTPFRNIINEWYAKDTSKKIRAVMKSKGQAGEYLCTNPPYGYCKDPNDKKKWIVDEEAANVVKEIYRLCMNGNGPTQIARILTERKILTPAAYFQSQGRSYPVIVENGRCAWVADTVAYILERKEYTGCMVNFKTYKKSYKSKKTLLNPEEKQLVFEGTHEAIIDRETWERVQELRRHKRRPTKTGKSNMFSGIAVCADCGSKMYYCTTNQFEKRQDFFVCSASRKAMDKCEAHYIRAVVLEEMVLLHLQYVLDYVARYEQQFVRCMGISQAKEYKKATALKQKELAKSQRRTHELDVLFKRMYEDNVTGKLADERFFTLSQDYEKEQKELREKTVALQAELNEQEQQVTDIQRFVTKCRKYVRLKELTPTILNELVDKVFVHAPVKNGGKRTQDIEIAYNFVGILPPTTFTQNEETA

SEQ ID NO: 1802 - DNA, 50 bp, Christensenella hongkongensis
  source 1..50: mol_type = genomic DNA
atactgtcttatgcagccgccactaatgggggctatccataagacagggg

SEQ ID NO: 1803 - DNA, 40 bp, Christensenella hongkongensis
  source 1..40: mol_type = genomic DNA
aataacaaagaacagccataagtggccgttctttgttttc

SEQ ID NO: 1804 - DNA, 50 bp, Christensenella hongkongensis
  source 1..50: mol_type = genomic DNA
atactgtcttatgcagccgccactggtgggggctatccataagacagggg

SEQ ID NO: 1805 - DNA, 40 bp, Christensenella hongkongensis
  source 1..40: mol_type = genomic DNA
aaacagaaagaactgccatgggttgcccttttctgttttc

SEQ ID NO: 1806 - protein, 550 aa, Anaerofustis stercorihominis
MNNLNRQPYDAAPEKITALYCRLSRDDELQGDSNSIKNQKAILKKYADDNGFTNTEFFVDDGVSGTTFDRPSFQRMIAEMDAGHIATIIVKDMSRLGRDYLKVGYYTEIAFPEAEVRFIAINNGVDSINQQDSDFTPFLNIINEWYAKDTSKKIKAVFKAKGESGKPLCTNPPYGYMKDPNDKNHWIVDEPAAEIVKRIFQLCIEGYGPSQIAKKLENDKVLTPSFYFKEIDLYPTALTTEEPYAWVPRTVADILDRQEYLGHTINFKTRKKSYKLKKTIKNDPSEWQIFKNTHEAIIDEDTFQTVKRIRDGRRRPTPLGEMPVLSGMVFCADCGSKLYQVRGKGWSHDKEYMVCANYRKRGKDTCTSHQIRNVDIENVLLYMIQQVTAFAREHEDEFVEMVTKSNAKAVEREIRESKKEYEQSQTRASKLDTIIQKLYEDNVEGKISDERFAKMLATYETEQSQLTHRLAELKHIIDAAKEKSNNVDSFLRLVKTYTDIKELNAEIIRTFIEKIYVYGNEKPWDRNTKKLKVIFNFIGEVDIPSNVKKA

SEQ ID NO: 1807 - DNA, 50 bp, Anaerofustis stercorihominis
  source 1..50: mol_type = genomic DNA
acaaatcccttattgagttgcccttttgtgaggctcacttagggatttga

SEQ ID NO: 1808 - DNA, 40 bp, Anaerofustis stercorihominis
  source 1..40: mol_type = genomic DNA
ataaaaaagagataagctattggtttatctcttttttatt

SEQ ID NO: 1809 - DNA, 50 bp, Anaerofustis stercorihominis
  source 1..50: mol_type = genomic DNA
acaaatcccttattgagttgccctaatgtgaggctcacttagggatttga

SEQ ID NO: 1810 - DNA, 40 bp, Anaerofustis stercorihominis
  source 1..40: mol_type = genomic DNA
atgagaaagaaataagtaaaagttttctctcttttttttt

SEQ ID NO: 1811 - protein, 481 aa, Streptococcus agalactiae; identical to SEQ ID NO: 391

SEQ ID NO: 1812 - DNA, 50 bp, Streptococcus agalactiae
  source 1..50: mol_type = genomic DNA
taaagaaatttactatccttgatttcaatcaaggttactaaaattattga

SEQ ID NO: 1813 - DNA, 40 bp, Streptococcus agalactiae
  source 1..40: mol_type = genomic DNA
caatgcacttctttttttatcatttacagtagttttattg

SEQ ID NO: 1814 - DNA, 50 bp, Streptococcus agalactiae
  source 1..50: mol_type = genomic DNA
taaagaaatttactatccttgattataatcaaggttactaaaattattga

SEQ ID NO: 1815 - DNA, 40 bp, Streptococcus agalactiae
  source 1..40: mol_type = genomic DNA
cattgcactgctttgtttgatgtgtacagtattcttattg

SEQ ID NO: 1816 - protein, 471 aa, Listeria innocua
MTVGIYIRVSTEEQVKDGFSISAQKEKLKAYCKAQVWEDFKFYVDEGKSAKDMNRPLLQEMITHIKKELIDTVLVYKLDRLTRSVVDLHNLLSVFDKNNCAFKSATEVYDTSSAMGRFFITIISSVAQFERENTSERVSFGMAEKVRQGEYIPLAPFGYVKSTDGKLIVNEVEKEIFLHVVDMISTGYSLRQTCEYLTNIGLKTRRSNDVWKVSTLIWMLKNPAVYGAIKWNNEIYENTHEPLIDKTTFDKLASILAIRSKSTTSRRGHVHHIFKSRLICPACGKRLSGLRTKYVNINKETFYNNNYRCATCKEHRRPAMQVSEQKIEKAFIDYISNYTLQKANSSSKKLDNNLRKQEMLQKEIMSLQRKREKYQKAWAADLMNDDEFSKLMIDTKLEIEAAEIRKKEFDVSLFLSPEDIAKRNNILRELKINWTSLSPTEKTDFISMFIEGIEYVKDDKNKVLITKIRFL

SEQ ID NO: 1817 - DNA, 50 bp, Listeria innocua
  source 1..50: mol_type = genomic DNA
tataggctttttgtcaaatatagagatgtctactttacaaaaatactata

SEQ ID NO: 1818 - DNA, 40 bp, Listeria innocua
  source 1..40: mol_type = genomic DNA
ttcgatattactataacctgatgtgtacttataacccatt

SEQ ID NO: 1819 - DNA, 50 bp, Listeria innocua
  source 1..50: mol_type = genomic DNA
tataggctttttgtcaaatatagatttgtctactttacaaaaatactata

SEQ ID NO: 1820 - DNA, 40 bp, Listeria innocua
  source 1..40: mol_type = genomic DNA
ttagatatgaatataaccttttgtgtttttctaattcatt

SEQ ID NO: 1821 - protein, 471 aa, Listeria innocua
MTVGIYIRVSTEEQVKEGFSISAQKEKLKAYCTAQGWEDFKFYVDEGKSAKDMHRPLLQEMISHIKKGLIDTVLVYKLDRLTRSVVDLHNLLSIFDEFNCAFKSATEVYDTSSAMGRFFITIISSVAQFERENTSERVSFGMAEKVRQGEYIPLAPFGYTKGTDGKLIVNKIEKEIFLQVVEMVSTGYSLRQTCEYLTNIGLKTRRSNDVWKVSTLIWMLKNPAVYGAIKWNNEIYENTHEPLIDKATFNKVAKILSIRSKSTTSRRGHVHHIFKNRLICPACGKRLSGLRTKYINKNKETFYNNNYRCATCKEHRRPAVQISEQKIEKAFIDYISNYTLNKANISSKKLDNNLRKQEMIQKEIISLQRKREKFQKAWAADLMNDDEFSKLMIDTKMEIDAAEDRKKEYDVSLFVSPEDIAKRNNILRELKINWTSLSPTEKTDFISMFIEGIEYVKDDENKAVITKISFL

SEQ ID NO: 1822 - DNA, 50 bp, Listeria innocua
  source 1..50: mol_type = genomic DNA
tataggttttttgtcaaatatggtgatgtgtactttacaaaaacactatt

SEQ ID NO: 1823 - DNA, 40 bp, Listeria innocua; identical to SEQ ID NO: 1818
  source 1..40: mol_type = genomic DNA

SEQ ID NO: 1824 - DNA, 50 bp, Listeria innocua
  source 1..50: mol_type = genomic DNA
tataggttttttgtcaaatatggttttgtgtactttacaaaaacactatt

SEQ ID NO: 1825 - DNA, 40 bp, Listeria innocua; identical to SEQ ID NO: 1820
  source 1..40: mol_type = genomic DNA

SEQ ID NO: 1826 - protein, 668 aa, Streptococcus suis
MKKEYNTSIVGRLDRQEENMSIQANRKTALYCRLSRDDELQGESNSITNQKKILSQFAKQSGFFQCEFFIDDGYSGTNFDRPEFQNMITRVANGEIGTVIVKDLSRFGRNHLHVGIYTTEFFPKHNVRFIAINDNVDTFTTDMETDISIPIKNIINEIYAVDTSRKIKAVYRAKGLEGKHTGSHAIYGYKKDPENKDKWIIDEEAAKVVKRIYSLVVSGLGPYQIADLLYKEKVYSPSYYMAMNGYGNRVNKEFDTPYRWWGTSIQCIVRREEYLGHTINFKTIKPSFKDKRRYTNKKENWAIFENTHEAIIDKETWDIANSLLKTTRRQSREGTVNPLTGKLFCGDCGEKLYNSRGINRKGTGHYKEDVRYDNYVCSTYQKHRNECSAHYIRTKVVRELILEALKDISKYIENNEEEFKNIVISARLEEREKSQKENIKKLKADKNRLAVIDRLFVKLYEDNASGRINDETFNKIAVQYTEEQKTLNTEIVELEEVTEKLQSVSDNTEQFIKTIKSFTDFSILTTSMINQLIDKIIIYQKQKLKRYKFTQRIDIYFNFIGKFEIEKDDEIKEDTYIEEKEDKKYIHKDSRFSPITEYLKGQDREIELDFSKVEELIGRKLCKSARTYPSYWYASEDRPMGNSIYNAGYDIVKVDVKKETIRLINYDK

SEQ ID NO: 1827 - DNA, 50 bp, Streptococcus suis
  source 1..50: mol_type = genomic DNA
aaactttgttgacaaatatcaaccgatgttgtattctataagagaagtta

SEQ ID NO: 1828 - DNA, 40 bp, Streptococcus suis
  source 1..40: mol_type = genomic DNA
gcaaaagaacaatatggcagaagttgatacgtttgaattt

SEQ ID NO: 1829 - DNA, 50 bp, Streptococcus suis
  source 1..50: mol_type = genomic DNA
aaactttgttgacaaatatcaaccagtgttgtattctataagagaagtta

SEQ ID NO: 1830 - DNA, 40 bp, Streptococcus suis
  source 1..40: mol_type = genomic DNA
acaaaagaacaatattgcaagattttatttgtatgaatta

SEQ ID NO: 1831 - protein, 668 aa, Streptococcus suis
MKKEYNTSIVGRLDRQEENMSIQANRKTALYCRLSRDDELQGESNSITNQKKILSQFAKQSGFFQCEFFIDDGYSGTNFDRPEFQNMITRVANGEIGTVIVKDLSRFGRNHLHVGIYTTEFFPKHNVRFIAINDNVDTFTTDMETDISIPIKNIINEIYAVDTSRKIKAVYRAKGLEGKHTGSHAIYGYKKDPENKDKWIIDEEAAKVVKRIYSLVVSGLGPYQIADLLYKEKVYSPSYYMAMNGYGNRVNKEFDTPYRWWGTSIQCIVRREEYLGHTINFKTIKPSFKDKRRYTNKKENWAIFENTHEAIIDKETWDIANSLLKTTRRQSREGTVNPLTGKLFCGDCGEKLYNSRGINRKGTGHYKEDVRYDNYVCSTYQKHRNECSAHYIRTKVVRELILEALKDISKYIENNEEEFKNIVISARLEEREKSQKENIKKLKADKNRLAVIDRLFVKLYEDNASGRINDETFNKIAVQYTEEQKTLNTEIVELEEVTEKLQSVSHNTEQFIKTIKSFTDFSILTTSMINQLIDKIIIYQKQKLKRYKFTQRIDIYFNFIGKFEIEKDDEIKEDTYIEEKEDKKYIHKDSRFSPITEYLKGQDREIELDFSKVEELIGRKLCKSARTYPSYWYASEDRPMGNSIYNAGYDIVKVDVKKETIRLINYDK

SEQ ID NO: 1832 - DNA, 50 bp, Streptococcus suis; identical to SEQ ID NO: 1827
  source 1..50: mol_type = genomic DNA

SEQ ID NO: 1833 - DNA, 40 bp, Streptococcus suis; identical to SEQ ID NO: 1828
  source 1..40: mol_type = genomic DNA

SEQ ID NO: 1834 - DNA, 50 bp, Streptococcus suis; identical to SEQ ID NO: 1829
  source 1..50: mol_type = genomic DNA

SEQ ID NO: 1835 - DNA, 40 bp, Streptococcus suis; identical to SEQ ID NO: 1830
  source 1..40: mol_type = genomic DNA

SEQ ID NO: 1836 - protein, 549 aa, Streptococcus dysgalactiae
MSKEKIKVYLYTRVSTSIQIEGYSLEAQKSRMKAFAIYNDYEIVGEYEDAGKSGKSIEGRIQFNRMMEDIKSGKDGVSFVLVFKLSRFARNAADVLSTLQIMQDYGVNLICVEDGIDSSKDAGKLMISVLSAVAEIERENIRIQTMEGRIQKAREGKWNGGFAPYGYKLEDGKLFINEEEAVAIRTIFDQYVNTTIGANGLSKYLENHGIRKIPRQNGKNPLFDAGLIRKILKNPVYNGKIAFGRRTLEKVHGTRNEYKQVEQDEYLISEGIHEAIVSDEVWQAAQVKLKSQAKKYEHVNKGKDTRTHLLSGIVKCPICGVGMFGNKCTKKKKDGTKYKDFYYYGCKHRQMIRGHKCTFRKQIREELLDDAVAEVIVKIVSNPKFASMMQEKINMKVDTSEIEKEIDNYQKELRKSHSTKFKLIEEIDNLDVEDKHYKRRKQDLDDRLYRMYDKIDELESSLIDAKAKKQTIEAEKLTGDNIYKILIYFDKLYKVMNDVERRQLITALISEIQVYEEKQPNGQWLKSITFKLPIIDDDLNISLDNNEQV

SEQ ID NO: 1837 - DNA, 50 bp, Streptococcus dysgalactiae
  source 1..50: mol_type = genomic DNA
agtttggacaataatgaacaagttgagacggtagcacttttgtccaaact

SEQ ID NO: 1838 - DNA, 40 bp, Streptococcus dysgalactiae
  source 1..40: mol_type = genomic DNA
tgaaaagaggcatagtcatgaagattgaagagttaatgga

SEQ ID NO: 1839 - DNA, 50 bp, Streptococcus dysgalactiae
  source 1..50: mol_type = genomic DNA
agtttggacaataatgaacaagttcagacggtagcacttttgtccaaact

SEQ ID NO: 1840 - DNA, 40 bp, Streptococcus dysgalactiae
  source 1..40: mol_type = genomic DNA
tggaatgaggcttagtcatcaatatttaagagcttctgga

SEQ ID NO: 1841 - protein, 570 aa, Bacteroides ovatus
MREAALLLRCSTNLQDYNRQKNDLLALADKLGFNVREEYIFGEYVTGKDDIRKGNRQSIQSLIDVCLESMVDAVLIWEVSRLSRNFIYGVTTIDKFNRDYKIPIYFRDKRKWTIDIETGKIDIDFEKDLRKYFEQAEAELITLRSRLASGKRDAAGLNQVIGSVAPFGYDRVNKRNVINPVTSLVVKEMYEKYLEEGATLLSVSSYLSAKYPQYIVKLRSAGSIRNILVNKANTGILVYTIYDEIDDIGYRYEVMQPSIISVEVYNAVLAKLKKNRTITAYPHSKKHLLQKMLFCYECGTCYTPSESLKRGTCYYRCGQKTAHIKPCNNSMSLNESIIDSVIWKFLKEQLFSESELNKEQREIAIEKEEENRKNIVTDIEIVEGAIANTYKDLDSLEDMLITRRITSERFDKKKAKIDTKLGELKHQKDKLRERINAIDFNIKRLNNLDYTQSFFNEVENDLEKKIALLKEYVQFIYPYMIGKNIVLLKTHTVDGIYYIFYRIYKGNFSKDKIQRTAYYIHEALAEFKPNGNNNFYVPNPSILGIDNEYLYYFVDEMKEVCENNGFEFEY

SEQ ID NO: 1842 - DNA, 50 bp, Bacteroides ovatus
  source 1..50: mol_type = genomic DNA
tatcgcaaatgttttaaattaaataaataaagcataaaacatttgcgatt

SEQ ID NO: 1843 - DNA, 40 bp, Bacteroides ovatus; identical to SEQ ID NO: 673
  source 1..40: mol_type = genomic DNA

SEQ ID NO: 1844 - DNA, 50 bp, Bacteroides ovatus
  source 1..50: mol_type = genomic DNA
tatcgcaaatgttttaaattaaattaataaagcataaaacatttgcgatt

SEQ ID NO: 1845 - DNA, 40 bp, Bacteroides ovatus
  source 1..40: mol_type = genomic DNA
caataacagttaaaatatataacgtatcactaagatgtaa

SEQ ID NO: 1846 - protein, 570 aa, Bacteroides ovatus
MREAALLLRCSTNLQDYNRQKNDLLALADKLGFNVREEYIFGEYVTGKDDIRKGNRQSIQSLIDVCLESMVDAVLIWEVSRLSRNFIYGVTTIDKFNRDYKIPIYFRDKRKWTIDIETGKIDIDFEKDLRKYFEQAEAELITLRSRLASGKRDAAGLNQVIGSVAPFGYDRVNKRNVINPVTSLVVKEMYEKYLEEGATLLSVSSYLSAKYPQYIVKLRSAGSIRNILVNKANTGILVYTIYDEIDDIGYRYEVMQPSIISVEVYNAVLAKLKKNRAITAYPHSKKHLLQKMLFCYECGTCYTPSESLKRGTCYYRCGQKTAHIKPCNNSMSLNESIIDSVIWKFLKEQLFSESELNKEQREIAIEKEEENRKNIVTDIEIVEGAIANTYKDLDSLEDMLITRRITSERFDKKKAKIDTKLGELKHQKDKLRERINAIDFNIKRLNNLDYTQSFFNEVENDLEKKIALLKEYVQFIYPYMIGKNIVLLKTHTVDGIYYIFYRIYKGNFSKDKIQRTAYYIHEALAEFKPNGNNNFYVPNPSILGIDNEYLYYFVDEMREVCENNGFEFEY

SEQ ID NO: 1847 - DNA, 50 bp, Bacteroides ovatus; identical to SEQ ID NO: 1842
  source 1..50: mol_type = genomic DNA

SEQ ID NO: 1848 - DNA, 40 bp, Bacteroides ovatus; identical to SEQ ID NO: 673
  source 1..40: mol_type = genomic DNA

SEQ ID NO: 1849 - DNA, 50 bp, Bacteroides ovatus; identical to SEQ ID NO: 1844
  source 1..50: mol_type = genomic DNA

SEQ ID NO: 1850 - DNA, 40 bp, Bacteroides ovatus; identical to SEQ ID NO: 1845
  source 1..40: mol_type = genomic DNA

SEQ ID NO: 1851 - protein, 537 aa, Longibaculum muris
MKQQIYNTALYLRLSRDDELQGESSSITTQRSMLRLYAKEHHLNVIDEYIDDGWSGTNFERPSFQRMIEDIEAGKINCVVTKDLSRLGRNYIMTGQYTELYFPSHNVRYIAIDDGVDSEKGESEIAPFKNIINEWVARDTSRKVKSAFKTKFAEGAYYGAYAPLGYKKHPDIKGKLLVDEETKWIVEKIFSLAYQGYGSAKITKILREEKVPTASWLNFTRYGTFAHIFEGKPESKRYEWTIAQIKGILKSEVYIGNSVHNRQSTVSFKSKKKVRKPESEWFRVENTHEPIIDKEVFYRVQEQIKSRRRQTKEKATPIFAGLVKCADCGWSMRFGTNKANKTPYSYYACSFYGQFGKGYCSMHYIRYDVLYQAVLERLQYWAKAVQQDEEKVLHKIQKVGNAERIREKKKKASALTKAENRQNEIDRLFAKMYEDRACEKITERNFIMLSGKYQKEQIELEQQITNLREELRKMEQDMIGAEKWIELIKEYSVPKELTAPLLNAMIEKILIHEATTNEENERIQEIEIYYRFIGKVD

SEQ ID NO: 1852 - DNA, 50 bp, Longibaculum muris
  source 1..50: mol_type = genomic DNA
tcatatctttaactaggggaaacggaagtttcccaaacaaaaagatatta

SEQ ID NO: 1853 - DNA, 40 bp, Longibaculum muris
  source 1..40: mol_type = genomic DNA
gatttctaaatgggaatcagatctaagtttaccagatatg

SEQ ID NO: 1854 - DNA, 50 bp, Longibaculum muris
  source 1..50: mol_type = genomic DNA
tcatatctttaactaggggaaacgacagtttcccaaacaaaaagatatta

SEQ ID NO: 1855 - DNA, 40 bp, Longibaculum muris
  source 1..40: mol_type = genomic DNA
gatttctaaatggaaatcaacactaaatctacaagatgct

SEQ ID NO: 1856 - protein, 463 aa, Hungatella hathewayi
MTKPQTVLLRVALYIRVSSDEQAERGDSIRDQKERGTKYIDDHQNMILQDTYIDDGVSGQKLDRDDFTRLIGNVKAGLVDLIIFTKLDRWFRSLRHYLNIQVILDKYNVAWTAIDQPYFDTSTPYGRAFVAQSMTWAELEAQNGGLRVADVFRSKVEHGEVITGKVPRGYMIQNKHLVFSDEAPAMLDSIQFFHREQGLAKTVNYMRETHGINMSIQNLKNSILRNEKYTGRYRGNENYCPRLISDEMYQDIQRVLDNNSTIRSSQKYPYIFSGILICDECGHKMSGCHINVVSRRTCGKVYRYKYPAYECLQYRAYKKCSNGGEIREMRIEEYLLEHIREELSGYLVDFETGEAKRIDNRAKKNKIRRKLDRLKDLYLNEVINLEEYKKDRAEYEEQLAALPDMEQPIKNLKPLKQVLDCNFEIIYNNLNNEEKRAFWRSIIKEIRVSKSIGRNRKYQIIFL

SEQ ID NO: 1857 - DNA, 50 bp, Hungatella hathewayi
  source 1..50: mol_type = genomic DNA
ttttaccgttaagttaagttaccggtcggttaataatatttaatgggaag

SEQ ID NO: 1858 - DNA, 40 bp, Hungatella hathewayi
  source 1..40: mol_type = genomic DNA
cttgccgggccagtttccggtatgctgattcattccagtc

SEQ ID NO: 1859 - DNA, 50 bp, Hungatella hathewayi
  source 1..50: mol_type = genomic DNA
ttttaccgttaagttaagttaccgtccggttaataatatttaatgggaag

SEQ ID NO: 1860 - DNA, 40 bp, Hungatella hathewayi
  source 1..40: mol_type = genomic DNA
ccagcccggccaattgccgtccatctgattcattccagtc

SEQ ID NO: 1861 - protein, 567 aa, Streptococcus cristatus
MNRTLTISDYRQVDTSKVSDITVVYCRLSQDDGLDGDSNSIINQKKILLDVVARENLPNPILFVDDGFSGTNFDRPAISEALRLVENRQVSNFVVKDLSRLGRSYIKVGQLTEITFPSFDVRFIALNDGVDSNKPNESNSIFLPIKSLMDEMYAADTSKKIRAVVQSKARAGERVTVNPPYGYLKDPNNPKNWIIDPVANEVVKRIFQEAKNGKSLSEIAKGLEKDKIFKPDRHRIEIGLKPISASSNVETLPYFWTRETLSAILGREEYLGHTVNLRTRKKSYKDKRKVDNPKEDWLVFKNTHEAIIDQETFDIVQKMRSHKRSNQRYKNRIGHENLFAGLVFCGTCGRKHYFCPQEKNGLNHDHYKCSGYHKPIDGCENLHYIQKSALIEIVSGKLRQTIQEVHFNQDAFLKKLEQQNQAQFSKDNKRQRQQLQKDEHRFKEIDNIIQKLYEDNLLGKISDERFVKLSQSYEEEQKQLQTSISDLTEKLAKQQEDSLNISKFMTRISKYTELPELTVEIVNELIDKIVIHKPAGTKRNRIIQIDIYYNFIGKLNNEKSEPNELAR

SEQ ID NO: 1862 - DNA, 50 bp, Streptococcus cristatus
  source 1..50: mol_type = genomic DNA
aaactgctatgtgtcaggtcagacttaggcagcctgacgctcagcagtct

SEQ ID NO: 1863 - DNA, 40 bp, Streptococcus cristatus
  source 1..40: mol_type = genomic DNA
atgatgaaaaacagcagactttcctgctgttttttgttac

SEQ ID NO: 1864 - DNA, 50 bp, Streptococcus cristatus
  source 1..50: mol_type = genomic DNA
aaactgctatgtgtcaggtcagaccaaggcagcctgacgctcagcagtct

SEQ ID NO: 1865 - DNA, 40 bp, Streptococcus cristatus
  source 1..40: mol_type = genomic DNA
aattttaaaaacagcagaccatcttgctgttgttttttat

SEQ ID NO: 1866 - protein, 626 aa, Blautia obeum
MRNEKITPLYERLSRDDELQGESNSISNQKQMLEEFARRNGLPNPTHFTDDGISGTRFDRPGFLAMMEEVEAGRVEAIVIKDMSRLGRDYLKVGQVMEVLRQRGVRLIAINDGVDSLKGDDDFTPFRNIMNEFYARDTSRKIRSVFKSKGMSGKHLTGTVIYGYLWDEKREHWLVDEEAAEVVRRIFSLTLEGYGPYQIACKLSADRIEIPVVHLARFNEGVNRSKPVKDPYGWGSSTIVNILKKREYLGHTINFKTRKHFKDKKSHYVSEDEWTIFENTHEAIIDQQTFDLAQKIRSNVRRYPNGWGEAAPLTGLLYCADCGGKMYVHRTNNGKRISQYTCSNYTKIPCGTLCPTQHRINESAVLTLVSDTLRAIAEYSRNDRTEFIHTVQETQVAQQSADISKKRRHLAAAQKRAGELEKLICKIYEDNALGKLPDARYRALDAQYAKEQDALEIEIAELEKAVTGYEQSQKSAEKFIALIDKYENFDTLTNTMLNEFVEKILVHERARKGSQDTTQEIEIYFNFLGRYIPPSLQPVPLTPEEQEELRKKEERKDRLHQNYLKRKASGAQKRYEDKIKAKKKAKMDAKKALIRAEGMKKGVFSTVGQLPKEEPRKGGIAASAAV

SEQ ID NO: 1867 - DNA, 50 bp, Blautia obeum
  source 1..50: mol_type = genomic DNA
aaaagtccttgacaactcgtttcgggtgatatatgctctaagtgacttct

SEQ ID NO: 1868 - DNA, 40 bp, Blautia obeum
  source 1..40: mol_type = genomic DNA
tatttacaaaagataaaagggagaactgattaaatcagtt

SEQ ID NO: 1869 - DNA, 50 bp, Blautia obeum
  source 1..50: mol_type = genomic DNA
aaaagtccttgacaactcgtttcgattgatatatgctctaagtgacttct

SEQ ID NO: 1870 - DNA, 40 bp, Blautia obeum
  source 1..40: mol_type = genomic DNA
gatttacagaagatagaagatagagaagattaaaactgtt

SEQ ID NO: 1871 - protein, 608 aa, Peptoniphilaceae bacterium
MRNVEKITALYERLSRDDELEGESNSIVNQKKILEEYASNNNLTNIIHFTDDGISGTQFDRPGFMEMMNGVNTGNIGCIIVKDMSRLGRDYLKVGQCMEILRQKGVRLIAINDNVDSFYREDDFTPFRNIMNEWYARDTSRKIQSTFRSKGESGKHTASTPPYGYIKDEKDKDKWVVDEKAAEIVRRIFNLTMDGAGPYKIAKILEADKIDIPAYHQQKMGYGLHQSKNFEYPYRWCSSTIASILKKKEYLGHTVNFKTRKHFKDKKSKYVSEDKWLIFENTHEAIIDQETFDNVQRIRRNVKRYPDGWGEYHPLTGLMYCADCGSKMYVHRTNNYKNIPYYVCSNYKKEPCGTLCPSAHRIKAEVVLNLIQETLKDIKNYLDEDNEAFIHSIQNEMEEKEKAHIEKKKIRLTESQNRLQELERLMCRIYEDMILNKIPNNRYEILNNQYETEQITLSKEIKDLEQQVSRYEKETDRAKKFISLISRYENFDELTTTMINEFVEKIIVHERDRKGSQTSKQKIEIYFNFIGNYELPQAELSDEEKQKLEEEERKIEERKDKLHQNYLKRKASGKQKEYEDKYKARREQKKQEKLKVLKREGIPARDFQ

SEQ ID NO: 1872 - DNA, 50 bp, Peptoniphilaceae bacterium
  source 1..50: mol_type = genomic DNA
aaaagtccttgacaagttgttacaggagtaatagaattaaggagaacact

SEQ ID NO: 1873 - DNA, 40 bp, Peptoniphilaceae bacterium
  source 1..40: mol_type = genomic DNA
gaaatccaatgcgaataatggtttttcagctctgtatttt

SEQ ID NO: 1874 - DNA, 50 bp, Peptoniphilaceae bacterium
  source 1..50: mol_type = genomic DNA
aaaagtccttgacaagttgttacatgagtaatagaattaaggagaacact

SEQ ID NO: 1875 - DNA, 40 bp, Peptoniphilaceae bacterium
  source 1..40: mol_type = genomic DNA
gaagtccaatgagaaaaattgtttttttaatttgtatttt

SEQ ID NO: 1876 - protein, 509 aa, Escherichia albertii
MKRAISYIRFSSERQLKGDSLRRQARLVNDWLSKNPEYYLDQDLSFRDLGKSAFSGKHLKGGLGDFLTAIEKGLVRAGDTLLIESLDRLSRQAVDQASELLRNILRSGVDVVTLSDGEHYTKESLKDPLALIKSILIMQRAHEESLRKSERVSAAWNRKKELISEGIKVSKRCPAWLELNDDRRTFTIIPEKVEVVKRAFDLRLQGLSFWAITRALNDEGHLSLNQYNPKPQGWSDTAVKNLLRNRAVIGCFKPAGREEVRDYYPSIISESLFYRVQQLNTGQYGRASVSSNPLSVNLFRGIIKCSKCGATVVIGGYDSKRFGMYRCPNRSANRCSAKAISRKQTDATILYMLALCDRFEAENTDTIDSLKLQREDLQRKISKMAELAVELDDMTVITDKLREMKNALSKLDHDIEEETKRLKSITTGNLKDIDRTTKEGMVETQLLIKGVLKEIVLDTSKRRCRVTFHNGKVIDLSIVENPAQDITEAEKSLTEIAEKGLLDVDAFQL

SEQ ID NO: 1877 - DNA, 50 bp, Escherichia albertii
  source 1..50: mol_type = genomic DNA
tagtacatttagaaacacgatatgagtataatacgtttctaaatacaccc

SEQ ID NO: 1878 - DNA, 40 bp, Escherichia albertii
  source 1..40: mol_type = genomic DNA
gtggtccggcatagtcttcagtattacctttttattctcc

SEQ ID NO: 1879 - DNA, 50 bp, Escherichia albertii
  source 1..50: mol_type = genomic DNA
tagtacatttagaaacacgatatgtgtataatacgtttctaaatacaccc

SEQ ID NO: 1880 - DNA, 40 bp, Escherichia albertii
  source 1..40: mol_type = genomic DNA
gaggtcctggatagttttctgtaatagctttttattttct

SEQ ID NO: 1881 - protein, 509 aa, Escherichia albertii
MKRVISYIRFSSEKQSRGDSLRRQTRMVNDWLSKNPEYYLDQDLSFRDLGKSAFSGKHLKGGLGDFLTAIEKGLVRAGDTLLIESLDRLSRQDVDRASELLRNILRSGVDVVTLSDNEHYTKESLKDPLALIKSILIMQRAYEESLRKSERVSAAWNRKKELISEGIKVSKRCPAWLRLNDDRRTFTIIPEKVEVVKRAFDLRLQGLSFWAITRALNDEGHLSLNQYNPKPQGWSDTAVKNLLRNRAVIGCFKPAGREEVRDYYPSIISESLFYRVQQLNTGQYGRASVSSNPLSVNLFRGIIKCSKCGATVVIGGYDSKRFGMYRCPNRSANRCSAKAISRKQTDATILYMLALCDRFEAENTDTIDSLKLQREDLQRKISKMAELAVELDDMTVITDKLREMKNALSKLDHDIEEETKRLKSITTGNLKDIDRTTKEGMVETQLLIKGVLKEIVLDTSKRRCKVTFHNGKAITLPITENPAQDITEAIQSLSEIAEKDLLDVDVFQL

SEQ ID NO: 1882 - DNA, 50 bp, Escherichia albertii
  source 1..50: mol_type = genomic DNA
tagtacatttagaaacctgatatgagtataatacgtttctaaatacaccc

SEQ ID NO: 1883 - DNA, 40 bp, Escherichia albertii; identical to SEQ ID NO: 1878
  source 1..40: mol_type = genomic DNA

SEQ ID NO: 1884 - DNA, 50 bp, Escherichia albertii
  source 1..50: mol_type = genomic DNA
tagtacatttagaaacctgatatgtgtataatacgtttctaaatacaccc

SEQ ID NO: 1885 - DNA, 40 bp, Escherichia albertii; identical to SEQ ID NO: 1880
  source 1..40: mol_type = genomic DNA

SEQ ID NO: 1886 - protein, 509 aa, Escherichia albertii
MRRAISYIRFSSERQLKGDSVRRQSKLVTDWLDKNPEFYLDSSLSFKDLGKSAFSGKHLKGGLGDFLTAIEKGLVKAGDTLLIESLDRLSRQDIDIASELLRRILRAGVDVVTLSDGEHYTRESLKDPLSLIKSILIMQRAHEESLRKSERVQAAWNRKKELISEGIKVSRRCPAWLRLNDDRRTFTIIPDKVEVVKRAFDLRLQGLSFWAITRTLNDEGHLSLNQYTPKQKGWSDTAVKKLLRNRAVIGCFTPAGREEVQGYYPAIISESLFYRVQQLNTGQYGRASVSSNPLSVNLFRGIIKCSECGATIVLGGYALKRFGMYRCPNRSANRCSAKAISRKQTDATILYMLALCDRFETENTDTIDSLRLQREDLQRKISKMAELAIELDDMTIITEKLRDMKNALSKLNHDIEEETQRIKAITTGSLKDIDRTTKEGMIETQLLIKGVLKEIVIDAAKRRCKVTFHNGKSITLPITENPSEDVTEAIQSLSEVTERGLIDVDVVEI

SEQ ID NO: 1887 - DNA, 50 bp, Escherichia albertii
  source 1..50: mol_type = genomic DNA
tggtgtatttagggaacaaatatcagtataatgggttcctaaacacatca

SEQ ID NO: 1888 - DNA, 40 bp, Escherichia albertii; identical to SEQ ID NO: 1878
  source 1..40: mol_type = genomic DNA

SEQ ID NO: 1889 - DNA, 50 bp, Escherichia albertii
  source 1..50: mol_type = genomic DNA
tggtgtatttagggaacaaatatctgtataatgggttcctaaacacatca

SEQ ID NO: 1890 - DNA, 40 bp, Escherichia albertii; identical to SEQ ID NO: 1880
  source 1..40: mol_type = genomic DNA

SEQ ID NO: 1891 - protein, 509 aa, Escherichia albertii
MRRAISYIRFSSERQLKGDSVRRQSKLVTDWLDKNPEFYLDSSLSFKDLGKSAFSGKHLKGGLGDFLTAIEKGLVKAGDTLLIESLDRLSRQDIDIASELLRRILRAGVDVVTLSDGEHYTKESLKDPLSLIKSILIMQRAHEESLRKSERVQAAWNRKKELISEGIKVSRRCPAWLRLNDDRRTFTIIPDKVEVVKRAFDLRLQGLSFWAITRTLNDEGHLSLNQYTPKQKGWSDTAVKKLLRNRAVIGCFTPAGREEVQGYYPAIISESLFYRVQQLNTGQYGRASVSSNPLSVNLFRGIIKCSECGATIVLGGYALKRFGMYRCPNRSANRCSAKAISRKQTDATILYMLALCDRFETENTDTIDGLKIQREDLQRKISKMAELAIELDDMTIITEKLRDMKNALSKLNHDIEEETKRIKAITTGSLKDIDRTTKEGMIETQLLIKGVLKEIVIDAAKRRCKVTFHNGRAITLPITENPSEDVTEAIQSLSEVTERGLIDVDEVII

SEQ ID NO: 1892 - DNA, 50 bp, Escherichia albertii
  source 1..50: mol_type = genomic DNA
tgatgtatttagggaacaaatatcagtataatgggttcctaaacacatca

SEQ ID NO: 1893 - DNA, 40 bp, Escherichia albertii; identical to SEQ ID NO: 1878
  source 1..40: mol_type = genomic DNA

SEQ ID NO: 1894 - DNA, 50 bp, Escherichia albertii
  source 1..50: mol_type = genomic DNA
tgatgtatttagggaacaaatatctgtataatgggttcctaaacacatca

SEQ ID NO: 1895 - DNA, 40 bp, Escherichia albertii; identical to SEQ ID NO: 1880
  source 1..40: mol_type = genomic DNA

SEQ ID NO: 1896 - protein, 479 aa, Streptococcus pneumoniae
MNKVAIYVRVSTKGQAEEGYSIDEQIALLTSYCSIHKWKIHDTYVDAGISGATIERPELSRLSRDAQKKKFNTMIVYDLKRLGRSQRNNISFIEDVLEKNGIGFISLTENFDTSTPLGKAMVGILSAFGQLDRDTIRERMMMGKIGRAKSGKPMMTSTIAFGYTYDKVTSSLNINPAEAIVVKTIYNEYLSGRSLTKLRDYLNENDLLRNGKSWNYQGVSRVLRNPVYMGMVRFRGEVYQGNHDPIIDSETFEAVQKELKKRQLEAYEFNKNTRPFRAKYMLSGIIKCGYCGSPMGVTLGTKRKDGTRNIRYQCVNRFPRTTKGITVYNNGQKCNSGFYEKDDIEIYVLGQVRLLQLNKAKLNKMFETPEIINVEEIENQINSLNNKMKRLNDLYLNDMISLDELKTQTYTFLKQKDLLENELNNNPAIHQEENRKQFQKLLGTKDITQLSYEEQSFAIKNLIDKVFVKPGIIDINWRI

SEQ ID NO: 1897 - DNA, 50 bp, Streptococcus pneumoniae
  source 1..50: mol_type = genomic DNA
ataacaaatttagatactcttgtttcaagtagcgtatctaaaactctcat

SEQ ID NO: 1898 - DNA, 40 bp, Streptococcus pneumoniae
  source 1..40: mol_type = genomic DNA
agataagactgcattgctttcaaatagttagcagccacat

SEQ ID NO: 1899 - DNA, 50 bp, Streptococcus pneumoniae
  source 1..50: mol_type = genomic DNA
ataacaaatttagatactcttgttctaagtagcgtatctaaaactctcat

SEQ ID NO: 1900 - DNA, 40 bp, Streptococcus pneumoniae
  source 1..40: mol_type = genomic DNA
agaaaagacttcattgattctcaatatttagaatcaacat

SEQ ID NO: 1901 - protein, 514 aa, Pseudomonas putida
MPQAISYVRFSSLRQARGHSVERQEQMIGQWLSRNPEYTLSQLQYKDLGKSAYHGKHVEGGGFGKLREAVQEGAIQAGDVVLVEAIDRTGRMDTVAMLDLLTPILKAGVSIITLDDGNTYNRASVNGSHIYMLMAKIQAAHQYSAALSRRITATYEKRKEQAKAGVAPKRSTPVWLTSEGELIESVAVQIRVAFDLYISGVGTSAIAKRMRESGVPELAKVAGASVRRWINNRTAIGEWEVYKLDASRPTEIIRDAYPPVVSLSTFQKAQLHKEAVKTAPAKKTAKHFLVGLLKCGVCGKNYIVQHRKGKTSSVRCRLNQMAGDCTNTAQLPLPIMQALVSFCAGSWKHRAVSSLNSGVNETEIASLRSQVEAYTAKLKGLTESVMAVGALPELVAAMKENNEGREEALASIALLERSVTQDKGWATEAEVWQMEEEDPQRLSSLLAQVGWAITIHPDKTLTTTDSKTVWKYKGKDRSSNRFVLDNGERLYMIGANSYSDTGTIRREDDDDGFV

SEQ ID NO: 1902 - DNA, 50 bp, Pseudomonas putida
  source 1..50: mol_type = genomic DNA
gggggtatcatagtgacgaacagcaggcaggtaggtcggatgatacccct

SEQ ID NO: 1903 - DNA, 40 bp, Pseudomonas putida
  source 1..40: mol_type = genomic DNA
aggggtggtgacgaacagcaggcaggtggacaggctgccc

SEQ ID NO: 1904 - DNA, 50 bp, Pseudomonas putida
  source 1..50: mol_type = genomic DNA
gggggtatcatagtgacgaacagccagcaggtaggtcggatgatacccct

SEQ ID NO: 1905 - DNA, 40 bp, Pseudomonas putida
  source 1..40: mol_type = genomic DNA
agggctggtggagaccagccagcaagtggccatgccgccc

SEQ ID NO: 1906 - protein, 519 aa, Pseudomonas hunanensis
MPQAISYVRFSSLRQARGHSLERQEQMIGEWLVRHPEYTLSDLQYKDLGKSGYHAKHVKGGGFGKLLEAVQDGAIKSGDVVLVEAIDRTGRMDTVDMLDLLTPILKAGVSIITLDDGNTYNRASVNGSHIYLLMAKIQAAHQYSAALSRRITATYEKRKEQAKAGVAPKRATPVWLTSEGELIERVAEQIRVAFDLYISGVGKSTIAKRMRESGVPELAKATGTAVGRWINNRTAIGEWEVYKLDDSRPTEVIRNAYPPVVSLSTFQKAQMHKERVATKPAKKTAKHFLVGLMKCSVCGKNYIVQHRPGKTSSVRCRSNQMAGDCTNNAQLPLPIIQALMAFCADDWKRKAVSSLNTGVNETEIAQLRAEVETYTSKLKGLTDSVMALGAVPELMAAMKENSEARDKANASIALLERTVSHSASWATTTDVWRIERDDPQKLSSLLEQVGFSITINPDKTLTTANSQTVWSYKGKDKGANRFILFNHSTQKYHMISRDDYCDTGVVRYSDDEFLETIEG

SEQ ID NO: 1907 - DNA, 50 bp, Pseudomonas hunanensis
  source 1..50: mol_type = genomic DNA
gggggtatcatgctctccacctgcctgctgttcgtgcacaagctaccacc

SEQ ID NO: 1908 - DNA, 40 bp, Pseudomonas hunanensis
  source 1..40: mol_type = genomic DNA
gggcagcctgtccacctgcctgctgttcgtcaccacccct

SEQ ID NO: 1909 - DNA, 50 bp, Pseudomonas hunanensis
  source 1..50: mol_type = genomic DNA
gggggtatcatgctctccacctgctggctgttcgtgcacaagctaccacc

SEQ ID NO: 1910 - DNA, 40 bp, Pseudomonas hunanensis
  source 1..40: mol_type = genomic DNA
gggcggcatggccacttgctggctggtctccaccagccct

SEQ ID NO: 1911 - protein, 492 aa, Eggerthella lenta
MKQAVVYIRVSTKEQLQGGSLATQLRTCMAYADSHDYEVVRVFQEEGESAKTADRSELQRMLAYCSERKGKVDASIVYSVDRFSRNVEDFITLGGVLRNLGIRLLLATQEVDDTPEGKMQVNMQAVFAQYDNDKRSFRTTEGMRDAAEEGKWVHQAPLGYLDACKTGRGSISPDPERAPLVREAWCLIDAGYSEAEALRMVTAKGLTNKRGKEVPKQTFSRMLRNPLYMGVVETMGVRMKSSVIEPIVEEDLWFRVKRRVDGEKHESSRRRKANSEYPLRGFIEDPEGRRYTGSASRGASGIRYPAYHCTQRGGRRYPVDKVHREFAALLSALSFDENRAKALREAIRLNYLERHETAEGERKRLLKELTVVESSISAAIDKLMTGVLTDGQAKEYLAGREQRKQEIQLRLSELGTTESNVDEIWNFGLGVLSDLSGTWENIANIEVKQRFQRWVFPENLTYDGEKFGTRRIACSLSIKQAKNAEVSTMVPP

SEQ ID NO: 1912 - DNA, 50 bp, Eggerthella lenta
  source 1..50: mol_type = genomic DNA
gccgaggtgtcaactatggtgcccccagataacgtaacttggaacacgat

SEQ ID NO: 1913 - DNA, 40 bp, Eggerthella lenta
  source 1..40: mol_type = genomic DNA
ctggcatttcgtggtgcccccaacgggaatcgaacccgtg

SEQ ID NO: 1914 - DNA, 50 bp, Eggerthella lenta
  source 1..50: mol_type = genomic DNA
gccgaggtgtcaactatggtgcccggagataacgtaacttggaacacgat

SEQ ID NO: 1915 - DNA, 40 bp, Eggerthella lenta
  source 1..40: mol_type = genomic DNA
agaccatttcttggttcccggaatgggaatcgaacccggg

SEQ ID NO: 1916 - protein, 477 aa, Lysinibacillus capsici
MAVGIYIRVSTEEQANEGYSISAQRERLKAFCTAQNWHDYKFYVDEGISGRDTKRPQLKKMMEDIRAGHINVLLVYRLDRLTRSVRDLHRILDELEKYSCTFRSATEFYDTSTAMGKMFITIIAAIAEWESANLGERVTMGQVEKARQGEWAAQPPYGFYKDENHKLQIHEEEIKAVKIMVKRIREGMSFRQLALYMDSTKYKPKRGYKWHIRTLINLMHNPVLYGAMYWKGKVYENTHQGIMTKEEYDQLQKIISSRQNYKSRNVTSHFVYQTKLICPDCGNRCTSERYTWKRKTDNVVEVRNSYRCQVCVLNDPTTTPFSVREVKVDDALIEYMSNFVITPSEKNEINVDNEQLLEIKNELRKIENQREKYQRAWANDLITDDEFKVRMDESRLRYDLLQKELKSIEGEKYDVVDIERYKEIAVSFNKNYIHLTQEEKRTFIQTFIESIEVEIVEHTKGKGYRNQKIRIADVRFY

SEQ ID NO: 1917 - DNA, 50 bp, Lysinibacillus capsici
  source 1..50: mol_type = genomic DNA
attcgtatttatgttaactctactacaactaacttaacataaatacaaac

SEQ ID NO: 1918 - DNA, 40 bp, Lysinibacillus capsici
  source 1..40: mol_type = genomic DNA
ttttatatttaaaaaaagcactacaaaatgctcctgatta

SEQ ID NO: 1919 - DNA, 50 bp, Lysinibacillus capsici
  source 1..50: mol_type = genomic DNA
attcgtatttatgttaactctactttaactaacttaacataaatacaaac

SEQ ID NO: 1920 - DNA, 40 bp, Lysinibacillus capsici
  source 1..40: mol_type = genomic DNA
atttattttcaaaataaactttacagaatgctcatgacta

SEQ ID NO: 1921 - protein, 505 aa, Clostridioides difficile
MSVAIYLRKSRADEDAEKQGEFETLSRHKSTLLKLAKEQNLDVIEIKEELVSGESIIHRPKMLELLKEVEENKYDAVLVMDLDRLGRGDMKDQGIILETFKESKTKIITPRKTYDLTDEFDEEYSEFEAFMARKELKLISRRMQRGRIKSVEEGNFIGTSAPFGYDAVTTGRKERILVPNKDADVVRTIFDLYINEDMGCSKISKYLNNLGIKTATGANWYNSAITNIIKNKVYCGYIQWQKKDYKKSKNPNKIKTVKLRPKDEWIEAKGKHEPLISEITWKKAQNILKKNGHVSYGNQIKNPLAGIVICKNCGRPLVYRPYADHDYIICYHPGCNKSSRFEFIEAAILKSLEDTVKKYQLKSSDLDLDKNNKDSNIEFQKRVLKGLETELKELGKQKNKLYDLLERGIYDEDTFIERSNNISSRTEEIKDSIKTVKNRLSTVKKDNSKIIEDIKTVLSLYHDSDSLGKNKLLKSVIDKAVYYKSKEQKLDSFELMVHLKLHEEQ

SEQ ID NO: 1922 - DNA, 50 bp, Clostridioides difficile
  source 1..50: mol_type = genomic DNA
gacatataaagagtagtgtgtaatgaaataaacactactttttatatgta

SEQ ID NO: 1923 - DNA, 40 bp, Clostridioides difficile; identical to SEQ ID NO: 753
  source 1..40: mol_type = genomic DNA

SEQ ID NO: 1924 - DNA, 50 bp, Clostridioides difficile
  source 1..50: mol_type = genomic DNA
gacatataaagagtagtgtgtaataaaataaacactactttttatatgta

SEQ ID NO: 1925 - DNA, 40 bp, Clostridioides difficile
  source 1..40: mol_type = genomic DNA
aacagattaagaaggtaataacatattccttttaaagaaa

SEQ ID NO: 1926 - protein, 555 aa, Streptococcus suis
MNKSTLTFEEIKTQNLENLPDRITALYCRLSAEDANEGESNSISNQKQILAQVAILENLPNPFFFVDDGFSGSNAQRPDFQKMMNLVETGKIQAVVVKDLSRLSRDYLLTGQLTEITFPSKNIRFISLNENLDSNKRNSQDAYLAPLVSLFNNWYSLQCSEKIKLSKHTKAKAGEKIGWIAPYGYLKNPENPKEWLIDDYASQIVKRIFKEYLSGKPISSIANDLRKDKVLTPANYKKKLGISNYRVLESDPFHWKSQMICQMLEKEEYTGATINLKTAKISYKQRGCKLRPREDWLIFPNTHEAIISQEDFKIARKMLGHKRVKRKNHWKDTTGHENLFAGLVFCENGHKLSFCPQQKDNTNLDHYKCYHYRRAGDTCSGSHYLRKETLEELVLGDLQQLISSIRFNEEELLAKLKSRFDIRESKKQDSLRKHLNKAKKRSLELDTIIQRLYEKQLLSEISDERFRKLVDSYESEQAELSQQIQKFQEVLVSQTESTQNIDKFMRTIRQHTKLENLTTQLVNELIDKIVIHQPTGRGKNRQVTIELHYRFIGEL

SEQ ID NO: 1927 - DNA, 50 bp, Streptococcus suis
  source 1..50: mol_type = genomic DNA
ggactgctcgttgaggggtggacattataccacagcccagacagcagtcc

SEQ ID NO: 1928 - DNA, 40 bp, Streptococcus suis
  source 1..40: mol_type = genomic DNA
ttgttttttcataagttaattatatcacaaattcagaagt

SEQ ID NO: 1929 - DNA, 50 bp, Streptococcus suis
  source 1..50: mol_type = genomic DNA
ggactgctcgttgaggggtggacatcataccacagcccagacagcagtcc

SEQ ID NO: 1930 - DNA, 40 bp, Streptococcus suis
  source 1..40: mol_type = genomic DNA
ttgttttttcattaattattcacatcacatattcagcaaa

SEQ ID NO: 1931 - protein, 545 aa, Faecalibacterium prausnitzii
MSGATNKITALYCRLSQEDERLGESLSIENQKDILLEYAKKNHFPNPVFFVDDGYSGTNYDRPGFQSMLVEIEAGRVGIVITKDLSRLGRNSALTGLYTNFTFPQYGVRYIAINDNYDTIDPNSVNNDFAGIKNWFNEFYARDTSRKIRAVQKAKGERGVPLTVNVPYGYVKDPENPKHWLVDPEAAAIVKRIFSMCMEGRGPTQIANQLWVDKVLTPTAYKLSHGRSTNAPAPEDPYRWDKRAVSLILERREYTGCTVNFKTYTNSIWDKKRHLNPVENQAIFPDTHERIIDDDVFEKVQEIRNQRHRMTRTGKSSIFSGMVYCADCGSKMQYGSSNNRDFSQDFFDCSLHKKNGSKCKGHFIRVKVLEGRVLSHVQRVTNYILRHEDYFRKVMEEQLRVESTEKLTVLKKQLARNEKRIADLKRLFMKIYEDNASGKLSDERFDMMSQSYDAEQKHLEEEALSIQQEIEVQEQQIENIEKFVQKAHKYVHIEELTPYALRELVSAIYVDAPNKSSGKRVQHIHIKYDGLGYIPLDELEAKEKA

SEQ ID NO: 1932 - DNA, 50 bp, Faecalibacterium prausnitzii
  source 1..50: mol_type = genomic DNA
atactgttttatgggaactctgctcttgctgggtatccgtaaaacagttt

SEQ ID NO: 1933 - DNA, 40 bp, Faecalibacterium prausnitzii
  source 1..40: mol_type = genomic DNA
aaaaaagcgtgtttctcccctgccgccgtaccggtcttgc

SEQ ID NO: 1934 - DNA, 50 bp, Faecalibacterium prausnitzii
  source 1..50: mol_type = genomic DNA
atactgttttatgggaactctgctcgtgctgggtatccgtaaaacagttt

SEQ ID NO: 1935 - DNA, 40 bp, Faecalibacterium prausnitzii
  source 1..40: mol_type = genomic DNA
aaaaaggcgtgtttctccccggccgccgcctccatccagc

SEQ ID NO: 1936 - protein, 555 aa, Streptococcus suis; identical to SEQ ID NO: 1926

SEQ ID NO: 1937 - DNA, 50 bp, Streptococcus suis; identical to SEQ ID NO: 1927
  source 1..50: mol_type = genomic DNA

SEQ ID NO: 1938 - DNA, 40 bp, Streptococcus suis
  source 1..40: mol_type = genomic DNA
gatttttttcataggactattatagcgtaaattgactctg

SEQ ID NO: 1939 - DNA, 50 bp, Streptococcus suis; identical to SEQ ID NO: 1927
  source 1..50: mol_type = genomic DNA

SEQ ID NO: 1940 - DNA, 40 bp, Streptococcus suis
  source 1..40: mol_type = genomic DNA
gtttttgttaaaaggactattgtatcttaaagtgactctg

SEQ ID NO: 1941 - protein, 558 aa, Streptococcus suis
MNTTNFSSLTIKEIKTQTLEELPDKITVLYCRLSAEDANEGESNSISSQKQILAQVAEREGLVNPYFFVDDGFSGSNAQRPDFQKALNLVETGKVSNFVVKDLSRLSRDYLLSGQLTEITFPSKNIRFISLNENLDSSKRNSQDAYLTPLVSLFNNWYSLQCSEKIKLSKHTKAKTGEKIGWTAPYGYLKNPENSKEWLIDDYASQIVKRIFKEYLSGKPIASIANGLRKDKILTPANYKKKLGISNYRVLESDPYHWKSQMICQMLEKEEYTGATINLKTAKISYKQRNCRLRPREDWLIFPDTHEAIISKEDFALARKMLGHKRVVQRNTWKDKPGHENIFAGLVFCENGHKLSFCPQQKDHINLDHYKCYHHRRAGDSCSGLHYLRKNVLEELVLTELQQLISSTHLDEEKLLEELKSRFDIREDKRQDSLRKQLNLSKRRSKELDTIIQKLYEKQLLDEISEDRFRKLADGYESEQAELEQQIRELQEVLVGQTESAENIDRFMRIIRQYTNIETLSTQLVNELIDKIVVRQPTGRGKSRQVPIELHYRFIGEI

SEQ ID NO: 1942 - DNA, 50 bp, Streptococcus suis
  source 1..50: mol_type = genomic DNA
ggactgctcagtgaggtgtggatattataacacatcccacccagcagtcc

SEQ ID NO: 1943 - DNA, 40 bp, Streptococcus suis
  source 1..40: mol_type = genomic DNA
gatttttttcataggactattataacgtaaattgactctg

SEQ ID NO: 1944 - DNA, 50 bp, Streptococcus suis; identical to SEQ ID NO: 1942
  source 1..50: mol_type = genomic DNA

SEQ ID NO: 1945 - DNA, 40 bp, Streptococcus suis; identical to SEQ ID NO: 1940
  source 1..40: mol_type = genomic DNA

SEQ ID NO: 1946 - protein, 627 aa, Klebsiella aerogenes
MKKIFLYHRVSTEQQVEDGSGMARQAELLQSYIDRTRIVESMDDPVPVVLEDGGLSAFKGHNFLHGQLGRWMEEVRAGMWDGSILVVENIDRFSRQNPFNVMGYLHDLINHSVAIHDVNMNMVISRENSAMLPMVMMQAQRAYDESKFKSNRIRAGWAKKRDNAFNNGTIVTNKRPKWIDIVDNQYVLNAKARIVTEIFRLYQTGIGCPTIAKTLREMGDDWRFDRIWTGEAVHKILRNRRVTGVIFISELIRDYNSTENSIVQKRYEMNVYPPVIGEDEFNLVQQLLSSRRSGKATGGKRITKKRNDDGSVVTDINGYPTYDTIDCGEITKSNIFNAVCRCAKCGSPMYHNIVVSKRTPAKATSPVEQEYRYIRCLNERDGLCDNKSLRYDVIERFIMEHVKGLDFSTIIQENRINPEVELVRLKLEEEREHIREYEHGIKRLRNLGKKVPFDVLLELEDAQERLKALEDKQATFADVHVDLDVLKNVDLDALYDVTNIELRGRVENELSKVLEKVELHRDSKNYVITFKYRRVDVLKHVLMITASKTPVLVSGVCIETLGDTVAYSTPSFDIIVGDGGDLRFQPIDDEPLSIIDYSLLMNYVDGTEGADAVAAWMRHNMNFLFTK

SEQ ID NO: 1947 - DNA, 50 bp, Klebsiella aerogenes
  source 1..50: mol_type = genomic DNA
tttgtacaatgttgccactactcaaatgaatagtatatagttcaaagtaa

SEQ ID NO: 1948 - DNA, 40 bp, Klebsiella aerogenes
  source 1..40: mol_type = genomic DNA
tttgcatgataatcatacaaataggtaccattacaacaaa

SEQ ID NO: 1949 - DNA, 50 bp, Klebsiella aerogenes
  source 1..50: mol_type = genomic DNA
tttgtacaatgttgccactactcatatgaatagtatatagttcaaagtaa

SEQ ID NO: 1950 - DNA, 40 bp, Klebsiella aerogenes
  source 1..40: mol_type = genomic DNA
ttggaaatagactcatacatataggaacaattacaacaaa

SEQ ID NO: 1951 - protein, 627 aa, Klebsiella aerogenes
MKKIFLYHRVSTEQQVEDGSGMARQAELLQSYIDRTRIVESMDDPVPVVLEDGGLSAFKGHNFLHGQLGRWMEEVRAGMWDGSILVVENIDRFSRQNPFNVMGYLHDLINHSVAIHDVNMNMVISRENSAMLPMVMMQAQRAYDESKFKSNRIRAGWAKKRDNAFNNGTIVTNKRPKWIDIVDNQYVLNAKARIVTEIFRLYQTGIGCPTIAKTLREMGDDWRFDRIWTGEAVHKILRNRRVTGVIFISELIRDYNSTENSIVQKRYEMNVYPPVIGEDEFNLVQQLLSSRRSGKATGGKRITKKRNDDGSVVTDINGYPTYDTIDCGEITKSNIFNAVCRCAKCGSPMYHNIVVSKRTPAKATSPVEQEYRYIRCLNERDGLCDNKSLRYDVIERFIMEHVKGLDFSTIIQENRINPEVELVRLKLEEEREHIREYEHGIKRLRNLGKKVPFDVLLELEDAQERLKALEDKQATFADVHVDLDVLKNVDLDALYDVTNIELRGRVENELSKVLEKVELHRDSKNYVITFKYRRVDVLKHVLMITASKTPVLVSGVCIETLGDTVAYSTPSFDIIVVDGGDLRFQPIDDEPLSIIDYSLLMNYVDGTEGADAVAAWMRHNMNFLFTK

SEQ ID NO: 1952 - DNA, 50 bp, Klebsiella aerogenes
  source 1..50: mol_type = genomic DNA
tttgtacaatgttgccactattcaaatgaatagtatatagttcaaagtaa

SEQ ID NO: 1953 - DNA, 40 bp, Klebsiella aerogenes; identical to SEQ ID NO: 1948
  source 1..40: mol_type = genomic DNA

SEQ ID NO: 1954 - DNA, 50 bp, Klebsiella aerogenes
  source 1..50: mol_type = genomic DNA
tttgtacaatgttgccactattcatatgaatagtatatagttcaaagtaa

SEQ ID NO: 1955 - DNA, 40 bp, Klebsiella aerogenes; identical to SEQ ID NO: 1950
  source 1..40: mol_type = genomic DNA

SEQ ID NO: 1956 - protein, 627 aa, Klebsiella aerogenes
MKKIFLYHRVSTEQQAEDGSGMARQADLLQSYIDRTCIVENMDDPVPVVLEDGGLSAFKGHNFLHGQLGRWMEEVRAGMWDGSILVVENIDRFSRQNPFNVMGYLHDLINHSVAIHDVNMNMVISRENSAMLPMVMMQAQRAYDESKFKSNRIRAGWAKKRDNAFNNGTIVTKKRPKWIDIVDNQYVLNAKARIVTEIFRLYQTGIGCPTIAKTLREMGDDWRFDRIWTSEAVHKILRNRRVTGVIFISELIRDYNSTENSIVQKRYEMNVYPPVIGEDEFNLVQQLLSSRRSGKATGGKRITKKRNDDGSAVTDINGYPTYDTIDCGEITKSNIFNAVCRCAKCGSPMYHNIVVSKRTPAKATSSVEQKYRYIRCLNERDGLCDNKSLRYDVIERFIMEHVKGLDFSTIIQENRINPEVELVRLKLEEEREHIREYEHGIKRLRNLGKKVPFDVLLELEDAQVRLKALEDKQATFADVHVDLDVLKNVDLDALYDVTNIELRGRVENELSKVLEKVELHRDSKNYVITFKYRRVDVLKHVLMITASKTPVLVSGVCIETVGDTVAYSTPSFDIIVVDGGDLHFQPIDDEPLSIIDYSLLMNYVDGSEGADAVAAWMKHNMNFLFTR

SEQ ID NO: 1957 - DNA, 50 bp, Klebsiella aerogenes
  source 1..50: mol_type = genomic DNA
tttgtacaatgttgccactattcaaatgaatagtacatagttcaaagtaa

SEQ ID NO: 1958 - DNA, 40 bp, Klebsiella aerogenes; identical to SEQ ID NO: 1948
  source 1..40: mol_type = genomic DNA

SEQ ID NO: 1959 - DNA, 50 bp, Klebsiella aerogenes
  source 1..50: mol_type = genomic DNA
tttgtacaatgttgccactattcatatgaatagtacatagttcaaagtaa

SEQ ID NO: 1960 - DNA, 40 bp, Klebsiella aerogenes; identical to SEQ ID NO: 1950
  source 1..40: mol_type = genomic DNA

SEQ ID NO: 1961 - protein, 535 aa, Clostridium paraputrificum
MSKRAAIYARKSRISEKGDSIENQIDKCKNYLSNIEVTEYEVFKDDGFSGKNTDRPAFTKLISMIKEKKFDILICYKLDRISRNVSDFSSLVKELEELNISFISVIENFDTGTAMGKAMLYITSVFSQLERETISQRICDNMYALAQKGYWLGGRPPTGFKNKRITYIDQSNKHRSLSVLHPIDNEIALIQLLFDKYLELKSLSKLNKYLLQNMIKTPTGKDFTKSTLGNILRNVAYVKCDNEVLKYLHSQGFNTYGTPNNINGMLIYKRHKGKNSGYHDKNQWIYAISSHAGIITSEKWLAVQNLLNNNYNKAPRTNSSTKALLTPLLRCSECNSKMRLVSGTPAGPNKIRPLYYKCCLKANSGNSRCNSKNIRVDILDTVIVEKIKTILLDKNELLSELILAKNNLESSPKIGSQKSLLKKRSKINSMIDNLMNNIASTTNTDLVQIYNDKIVSLKVDLVKVEKELIEIDEQLSYQEEIINNTESFIQSLKNISDTIDTASIEDKKNFINSIIQTIIVNSNTGKVIVKFKALT

SEQ ID NO: 1962 - DNA, 50 bp, Clostridium paraputrificum
  source 1..50: mol_type = genomic DNA
catcgcattttagtacaaagaacatcagctctttggacaaaaatgcgata

SEQ ID NO: 1963 - DNA, 40 bp, Clostridium paraputrificum
  source 1..40: mol_type = genomic DNA
aatttctcttaatattacatcagctctaaaaacaaacatt

SEQ ID NO: 1964 - DNA, 50 bp, Clostridium paraputrificum
  source 1..50: mol_type = genomic DNA
catcgcattttagtacaaagaacaagagctctttggacaaaaatgcgata

SEQ ID NO: 1965 - DNA, 40 bp, Clostridium paraputrificum
  source 1..40: mol_type = genomic DNA
aatttcccttaatattaaaagaaattttgaaacaaaaatt

SEQ ID NO: 1966 - protein, 536 aa, Clostridium algidicarnis
MIAAIYSRKSKFTGKGDSVENQVQMCKEYGEKILGITEFVIYEDEGFSGSNTNRPKFIELMADVKKKKFDVLICYRLDRISRNVADFSSSLELLQSNNIAFVSIKEQFDTSTPMGKAMIYIASVFAELERDTIAERIRDNMLELAKSGRWLGGQTPLGFDSKKTISLDEEYKERTTYMLSPIDDELKLVKLIYEKYLEFNSLRKVNQYLLENNFKTKFGSDWNAKSISDLLQSPTYVNANQEVFDFLIEKGIDCIGKPNNKSGILSYNKKKGPNVHREKTEWIAAIAKHSGIIDADKWLKIQQTLIINKKNSPRLGKTHTTLLSGLLRCGKCGSPMTVIHGSKDKEGNKRFYYGCSLKVYSKGTRCDNSNVRSDEIESIVIDKLKNVTKDNGLLLEELKSVKNQVNDKCNYADELNLLKASLKSNEEAINNLVKQLAKKQSSIASNYIFDEIEKREKEINDTKAKLKALSENKSKGSEIDINVDLLIYNLKNFYSTIDYADIENKKYLISTLIDKISWNGSTGEVDIKLWGSPKKK

SEQ ID NO: 1967 - DNA, 50 bp, Clostridium algidicarnis
  source 1..50: mol_type = genomic DNA
aattgcagattgctatggcgagcttctgctcgccacagcaatctgcaaca

SEQ ID NO: 1968 - DNA, 40 bp, Clostridium algidicarnis
  source 1..40: mol_type = genomic DNA
agtacctgtacagatagcttctgtatgccctacaaaaagt

SEQ ID NO: 1969 - DNA, 50 bp, Clostridium algidicarnis
  source 1..50: mol_type = genomic DNA
aattgcagattgctatggcgagcttttgctcgccacagcaatctgcaaca

SEQ ID NO: 1970 - DNA, 40 bp, Clostridium algidicarnis
  source 1..40: mol_type = genomic DNA
agtgcctgtacaaatttcttttggatgaccttgaaaaagt

SEQ ID NO: 1971 - protein, 519 aa, Coprococcus comes
MNIAAYCRVSTDKADQLNSLEAQKEFFSEYTKRTGDTLVRLYADEGISGTKIKNRKEFLRMMSDAEHGLFDMVVVKDISRFARNTVDLLQNVRKLKSLGIETQFLTANMTSMGNSEFVLTIFGALAQEESANTSKRVKFGKKMNAEKGRVPNIVYGYDKTIGDYFNLAINKEESKVVQQIYKWYTEEGYGAAKIANMLNEKGYKTKRNCKWSQNATCRILTNEIYTGKIINGKQEVSDFLTGQRRDKDETEWMVVERPELRIIEDETFEKAQEILRGRHDAFNLSHERQSNKHLFSTLIKCKECGWSFRRTVRTYKNTYVRWVCSGRNGRGVDSCPNKTVVDEEELIEVLQEYFTNVLKQKKKVIAHVVNEFQRVYKAKDENVEYEKELNAELAKLQKTRQKYMDMYTDDLISREELNEKIGGSRQEMERIENELKMVSYHLTKGEQLENILNNTFKEIEDITDVHQMTNQQLKRLIQKIEVDKDGNVDIYLRLLGDLGLDESVLIDENETVQKCNNQT

SEQ ID NO: 1972 - DNA, 50 bp, Coprococcus comes
  source 1..50: mol_type = genomic DNA
ccgttcaaaaatgtaacaaccaaacatgcggttgtaacaaaatagaatgt

SEQ ID NO: 1973 - DNA, 40 bp, Coprococcus comes
  source 1..40: mol_type = genomic DNA
ggtaagtaagagtacgatacataaagatgtaacagaacgt

SEQ ID NO: 1974 - DNA, 50 bp, Coprococcus comes
  source 1..50: mol_type = genomic DNA
ccgttcaaaaatgtaacaaccaaaattgcggttgtaacaaaatagaatgt

SEQ ID NO: 1975 - DNA, 40 bp, Coprococcus comes
  source 1..40: mol_type = genomic DNA
ggtaagtaagagaatgataatttaagatgtaactaatagg

SEQ ID NO: 1976 - protein, 673 aa, Photobacterium ganghwense
MIGAEALREEIFQYDKTKFKGICVPYARFSTKGQSKVGKKSLERQLSKAREYAKRNNLFINEDLIFTDKGVSGYSNQGELSKAFKKGQMATMLLLLEEVPPEERDNVYITFHNFDRFSRMSPDAAQAHFNKILNRGFKIVTTIDNQLYDRRDKGMSNMLISIIKMTTAWQESLNKSIYITDALSRKKKVIEYLYNHASQKGKHKHIGVVQPSIPRWIDQESITYDYTDVNGSKRTDTFKKFSLNSHKAEIVRKIFDLKIAGLGYTRICQKLNNDGVEVFEQGRFKKAKKWHPYAVQNIITSDKVLGHITLKEMVTEEYHCKETDEIKTKKVKKEVTSKLENYYPAVVDEEVFRLANVLKFQEKKGKPLGRIGERTNIFATFMSCYCGATLQYSRSQINKRSNKAPVYREQLRCNNALVKNGCFDDYINYVELEHAFFKYVHHIDFREVCLVGDKSLETEIKNLQAEITYLNGQKKELKLKNSGLEKTFESAISQGLNADYVLVALNEAKKSADLIETKINDLKVRITKLQLSLDSKESDFLDIVEYSMRIKNSSTETKIMMRKKLNDFLHSKIKWMEVCSSKHSKFVILCFHDDVIRTFAYSENYANDLMFNTIKINYEVEDSQLNYELFLIYIHQIKRSLRGETEVVSNGDLIEALQRLKRKFYSGKGIDYV

SEQ ID NO: 1977 - DNA, 50 bp, Photobacterium ganghwense
  source 1..50: mol_type = genomic DNA
gtgttggtaaacataggtttatctttagataaagacattattaccaacac

SEQ ID NO: 1978 - DNA, 40 bp, Photobacterium ganghwense
  source 1..40: mol_type = genomic DNA
catgttgagtttaatgtctttcaaggtaaacatacccagg

SEQ ID NO: 1979 - DNA, 50 bp, Photobacterium ganghwense
  source 1..50: mol_type = genomic DNA
gtgttggtaaacataggtttatctatagataaagacattattaccaacac

SEQ ID NO: 1980 - DNA, 40 bp, Photobacterium ganghwense
  source 1..40: mol_type = genomic DNA
caggttaaggttaatgtttatggaggtaaaaatacctagg

SEQ ID NO: 1981 - protein, 652 aa, Vibrio owensii
MQIKDEVFKSLSNEHNLPIAQETYQDLGKSAYKGEHLENELGLFLSAVKSGVVAKGSILVVYSLDRLSRLEIGYAKQTYYDLTNNGVSVYSMADNHLYRAHNAADDIVSTITFERAHNESKIKSQRVIDSHKEGHKRWKETGESQGNLGRTPLWIDQSTNTFNINAEGVKKAVEMKIAGYGDLKIKQYLDANFEYKPTRKKGRVKQSNTWDYTSIYQLWDRRTLIGEKAFKIEGVEHVMENYYPALIDEDTFRKLQALKKRKKGRDTGSGKIPLLKSLVRCGICGGAMVFMDKGGDRVSYVCNLALKGEHERELYNANMLDLLTIEICKDAYLAESEVVNNTAIDTEKLKLETELEKQQESRDNLRDYYKATPTKTFLDLIADNEAKILDLEARLDAINQNSVVINADELASLPEIYSDDVRSDYLHPERLAIRNNLYRFISSIIVTRSVESCSDAKTKIANCIDITWHFKNGQKRRLAMLPYKYMQTDDGGKALYLPFVYMYGSTNNIKVEDGSQFLSDILKKLHKLDLTKYLFPSKGRYKWSHLFLVCGKSYWVPLTDGVFLESHDLSYRHVFEFNRDGYEVVQTSNSHNHLSLMFNDPSTDDIAYDYPDSTFIELAHKFGFSATRDFSQFLQDNDFNRELYSSLDFLMS

SEQ ID NO: 1982 - DNA, 50 bp, Vibrio owensii
  source 1..50: mol_type = genomic DNA
agaggaaagttgttttcttttggcttgccaataaaaaacagtttccttcg

SEQ ID NO: 1983 - DNA, 40 bp, Vibrio owensii
  source 1..40: mol_type = genomic DNA
gaagagtacctactctggtttgataaaaaaggctttcctg

SEQ ID NO: 1984 - DNA, 50 bp, Vibrio owensii
  source 1..50: mol_type = genomic DNA
agaggaaagttgttttcttttggccagccaataaaaaacagtttccttcg

SEQ ID NO: 1985 - DNA, 40 bp, Vibrio owensii
  source 1..40: mol_type = genomic DNA
gaaaagaacctgctctggtcaggtaggaaaggcttccctt

SEQ ID NO: 1986 - protein, 484 aa, Streptococcus dysgalactiae
MNKVAIYVRVSTTMQAEEGYSIDEQIDKLTSYCKIKDWTVYDIYKDGGFSGGNIERPAMERLISDAKRKRFDTVLVYKLDRLSRSQKDTLYLIEEIFGKNDISFLSLNESFDTSTPFGKAMIGILSVFAQLEREQIKERMLLGKIGRAKTGKSMMFSKVSFGYTYDRVKDELIVNQAEAMIVRKIFDEYLGGRSLTKLRDYLNNNQIYRGDKPWNYQGLRRILSNPVYIGMIRYREEIYPGNHQPIIDTDDYNKTQEEIKKRQIEALEFSNNPRPFRAKYMLSGIAKCGYCGTPLQIILGTKRKDGTRNMRYQCINRFPRQTKGITIYNDGKKCNSGFYEKADIEEFVIAEIRGLQLNHNKLDDMFDKHPTIDIEGIEKQITSLDNKLKRLNDLYLNDMIELDDLKKQTQSLRKQKTMLEDELQNNPAIMQEKNKKHFQEMLGTKDITTLDYETQKNIVNNLVNKVFVKSGHIKIEWKIPFKKA

SEQ ID NO: 1987 - DNA, 50 bp, Streptococcus dysgalactiae
  source 1..50: mol_type = genomic DNA
gcgtgagttttagatactaaacatgaaagtagcgtatctaaaactcttac

SEQ ID NO: 1988 - DNA, 40 bp, Streptococcus dysgalactiae
  source 1..40: mol_type = genomic DNA
gaataacttcactgaatttgaagagctggtacggtatgcc

SEQ ID NO: 1989 - DNA, 50 bp, Streptococcus dysgalactiae
  source 1..50: mol_type = genomic DNA
gcgtgagttttagatactaaacatccaagtagcgtatctaaaactcttac

SEQ ID NO: 1990 - DNA, 40 bp, Streptococcus dysgalactiae
  source 1..40: mol_type = genomic DNA
ggatgacttggctgaatttccagagctggtatgttattac

SEQ ID NO: 1991 - protein, 580 aa, Enterocloster bolteae
MYNMSPYSLSRSFRDKPCRAVIYGRASTEHEAQVKALQNQMQWYDDVARFHPQWNVINRYIDQGITGTQVYKRDAFMRMMEDAKQQKFDLIVTREVCRFARNTVDALVCVRQLAAIGIEVYFVNDNIWTLDGDGELRLTIMATMAQEESRKISERSLAGQRVSREKGVLYGNGNIFGYTRNKLTKQFEIDPDQAETVKMIFDLYDSGMGETLVAKELTRLGRKNGVGKVKWDAGKVSKIIKRKNYLGYTVYCQSYSNNYLEQKRIKRDESEFVYVKGGFPQIISEEQYERCNAIRRSRTKRLTDEKGRTRSFGIQQAQNVWGRKMRCRCGSPMLRHRWRTNNAGKPIYGYECKRHHDTPRIRLQNEQGNPTPICEIKPVGQSKLELMASQIFERVWGDQREIVLQTCKMLDACYKPDADRRADLMKAKDDSVQLLQQQLDDLVVVRARGEIEQDKFLQRTIEIQQQMEALRQSKAQIASEDYNPGRLDMEAIEAALCEAVEMHDGLVSEDFIDLFVSQVTPLSDSRFAWCLDFSPQPTVAFLNLAGQRKYTTCSMDSKLHFGPFADEEGHTIPFPGSLRR

SEQ ID NO: 1992 - DNA, 50 bp, Enterocloster bolteae
  source 1..50: mol_type = genomic DNA
tacacaaggtatgtacggcgcaggctgctatcaagaacccccgcaagtaa

SEQ ID NO: 1993 - DNA, 40 bp, Enterocloster bolteae
  source 1..40: mol_type = genomic DNA
cgtctggcagcagcacaggcagcgttgaacaataagtaac

SEQ ID NO: 1994 - DNA, 50 bp, Enterocloster bolteae
  source 1..50: mol_type = genomic DNA
tacacaaggtatgtacggcgcaggaagctatcaagaacccccgcaagtaa

SEQ ID NO: 1995 - DNA, 40 bp, Enterocloster bolteae
  source 1..40: mol_type = genomic DNA
cttctgtctgcagcacaggaatcgtttaacagtaggtgac

SEQ ID NO: 1996 - protein, 579 aa, Parabacteroides johnsonii
MKRAAIYLRVSTSDQNYDRQEIELTQLANALGYEVKYTYEEKKSAVLKMDTRDQLTNMRKLTNKEVDRIFIWDITRLSRRAIDFINLVNEFAEKGICLHFKDKNIITLDEDGSLNTLTGMYLYLLGVFAQMDAENLKAKMKSGKEAALLKGNSYTNIAPFGYELKNKHLYIKESEARYVKRAFELYRDGKDTQYIADMFNANGVPLKSGRTDIVWVKGTISQILNNTAYYGKGKRTAIVKKATLDSPAEKKVSYFDTPSIISKELFDECRKIAKANRSRQDKSKSIVCILRGLLKCGRCGRFYVLGNNNKQREYRDGDLRANINQRLGCKNGSIKADIADNLVWKAIQGIYKYEKFKEKCLAEKEKYKKEIASNNNAMLNIEKDLKQLDNQSENLVKFAIKGLLSEDEFAKQKQSLDSEKARKNNMLDELKASNFFLQRKIDAEFDYSVLSGTFNLSQDEKKQICNDLIDNVLIYGYGAYKKMLQVNLKMDLTYNILINTHHVINSYCIFNDEVVTFCDPFNNKSVLKGMNLNVGISDFEVTSNNNELFDTDVFGGYSFDEMWNIMNRYGYISKIESEE

SEQ ID NO: 1997 - DNA, 50 bp, Parabacteroides johnsonii
  source 1..50: mol_type = genomic DNA
aaacgtacaatagtaattgtgtttttgtagtttaatactattgtgcatat

SEQ ID NO: 1998 - DNA, 40 bp, Parabacteroides johnsonii
  source 1..40: mol_type = genomic DNA
gtagtcacatttactctttttcctttctatatgtgcattc

SEQ ID NO: 1999 - DNA, 50 bp, Parabacteroides johnsonii
  source 1..50: mol_type = genomic DNA
aaacgtacaatagtaattgtgtttctgtagtttaatactattgtgcatat

SEQ ID NO: 2000 - DNA, 40 bp, Parabacteroides johnsonii
  source 1..40: mol_type = genomic DNA
ttgttcacatttactctttcttcttcctaaatttccattc

SEQ ID NO: 2001 - protein, 659 aa, Clostridium beijerinckii
MSKKKIVAACYCRVSTNTKQQASSLDNQQSYFNDFFRDNSNYRLYKIYPDKGISGTLLHREQFDKMLIDAGLDILTVKPMKFEVGKIPDATNAEVDVLSDAKNAKTYATYKKYVVVPSARTPKFTEILVRNTSRFARNIMVADILNELREKDVYVRFLDINKTSENPEDVSFIQLFQTFDEMFSRDLSRKVKAGNERSVARKVVRSTPRLYGFDYIKRGTLQENNQLKARAIEDDVVRRIYRLYAGCISVYDEVLPVCDYKCDTCTIERTAGVGERVISRCLTESGVKTRTGKEFGITTIANVLNNEKYCGYINTGKYDAGALFSNNKKIKIRDEYLLEPDPNIEAIISKELFDLCQERRSSRYDVIKAKGLPSTSSPFGGLLVCSVCGSKYVHNSDRGRGFYLCGLKKRKGLKTCNSVNVSDAIVTEYMYRLMAGALSADLYQDRQAVFKAICKSIADKINYIESKRDPEKVAQLQADRENADSELRAYYKQLIKEEEKGEDSTTLQRLIDDTKEVLSGIQKQLDRYTKKPIAYLDECKILREYAYELLNTPDISLEGLTKRTYTVSEVLNTINCIDVYGPTDYSGGAVSELLLKPRLKMPEMVKNIIIYNEAIFSEGVKEEKTMENLENVHIIPPAKLKEDIDELSAKLEVLETQYF

SEQ ID NO: 2002 - DNA, 50 bp, Clostridium beijerinckii
  source 1..50: mol_type = genomic DNA
accttgcctctgtaaccaaacataataatgttaggttacagaagcaaggt

SEQ ID NO: 2003 - DNA, 40 bp, Clostridium beijerinckii
  source 1..40: mol_type = genomic DNA
agctggaaaacacaatataattctttatggagagccagga

SEQ ID NO: 2004 - DNA, 50 bp, Clostridium beijerinckii
  source 1..50: mol_type = genomic DNA
accttgcctctgtaaccaaacatattaatgttaggttacagaagcaaggt

SEQ ID NO: 2005 - DNA, 40 bp, Clostridium beijerinckii
  source 1..40: mol_type = genomic DNA
agctggaagacacaatatatttattcaaggagagctctgt

SEQ ID NO: 2006 - protein, 535 aa, Clostridium celatum
MSKAAIYARKSKATEKGASVENQINKCKSHLNNLDITDILIYKDDGFSGKDTDRPAFIQMMKDAKNKKFTTLICYKFDRVSRNVSDFSNLVDELTELGISFISLSEQFDTSTPIGKAMMNICSVFSQLERETTCLRVTDNMYALAESGYWLGGECPTGYKNKRVFYTDSSGKQKSYSVLEPIAEEVKLVKLIFEKYLFFGSLSKLEKYMLSNNIKTKRNKDFSKTSLSSILRNPAYVKADKNVFKYFKSLKINTFGTPDDLHGVLIYKKHKGKKGKTHDISEWIYSISSHEGIIAAEDWLNVQKMLDSNKSRAPALGCSNTALLSGLVTCAKCNKPMRVAYGTKIPNSNNKRFYYMCTLKHNSGKTRCDSRNVNGIDLDTIVINKIKELSTNKKILLNELLAHSKSIDSSFENSYYDSINKEIESNNVSINNLLSNIALTTDEDIVKIFLEKISALKEKNKELNAKLTELNGEIASHKKLLNNSTKLIERLKNISKYIDTATNEEKKKLISSIIERVYVNGDTGAVNIKFKQPDN

SEQ ID NO: 2007 - DNA, 50 bp, Clostridium celatum
  source 1..50: mol_type = genomic DNA
catcgcaatttagtgataagagcatctgctctccttaccaaattgcaatg

SEQ ID NO: 2008 - DNA, 40 bp, Clostridium celatum
  source 1..40: mol_type = genomic DNA
aatttctcttaaaataacatctgctctaaaaacaaacatc

SEQ ID NO: 2009 - DNA, 50 bp, Clostridium celatum
  source 1..50: mol_type = genomic DNA
catcgcaatttagtgataagagcatgtgctctccttaccaaattgcaatg

SEQ ID NO: 2010 - DNA, 40 bp, Clostridium celatum
  source 1..40: mol_type = genomic DNA
attatttcttaaactatcatgtgttctaaaaataaccatc

SEQ ID NO: 2011 - protein, 551 aa, Streptomyces hygroscopicus
MPNVVSSPMSELVQRAQWGKLDGMNWAGLTRLSTEEAEGEPLATDADRPGAVRFLTGRDIRSTAEQEKDTRAFVEGRGGRYVHTYTEPDTSAWKRKRIRLPDGRAVHRVVRPVFEGALEDLKAGRTPDGEPLDGLIVYDIDRLTRDSRHLEDAIEVVEHYHRPIIDITGTLDLLTDNGRAMARVIVAMANKQSADTARRVKRKHKAMQQQGIPAGGGRPFGWQEDRRTLDPGEAKLLREAARRLIDGSPWYAIIADWNRAGIQTANGKKWNVQVLKKIMTNPRICGYRSRTVYEFDPETKAESAHTVIVHDDEGNPVLGQHQPVLSVEQWRAMCAIIEASPKRGSGHNARKYLLTGTLRCGKEGCGAKLRAGRAGPSQKKPEGFYFYSCHNSASGQGCGGIRIPGPEADELVRKLLIAKHEEEAARRQAVTATAAWPDEEKLGRVREDIDDLKQARRDRLISAERYYRDLSEYEAEEQRLTRERNAWQRKALVSSGKPVDIAAEWARPDITLAEKRAYVERAFTAIVVLPVGRGRRVPLRERLVPLYAEEE

SEQ ID NO: 2012 - DNA, 50 bp, Streptomyces hygroscopicus
  source 1..50: mol_type = genomic DNA
aaaatacattcgccagggtgttgcaagcagcggaatgccgaatgtagttt

SEQ ID NO: 2013 - DNA, 40 bp, Streptomyces hygroscopicus
  source 1..40: mol_type = genomic DNA
aaaacgcttgatctgacgcaactaatttatcaagcatttt

SEQ ID NO: 2014 - DNA, 50 bp, Streptomyces hygroscopicus
  source 1..50: mol_type = genomic DNA
aaaatacattcgccagggtgttgcttgcagcggaatgccgaatgtagttt

SEQ ID NO: 2015 - DNA, 40 bp, Streptomyces hygroscopicus
  source 1..40: mol_type = genomic DNA
aaattgcttgatctaagggttctattttatcaagattttt

SEQ ID NO: 2016 - protein, 599 aa, Klebsiella variicola
MKKKLYSYIRWSSAQQTAGTSLERQTAAAREYAKAHDLEFVEILDAGVSAFRGKNATDGALAEFIAAVENGAIPSDSWLYVENLDRLSRATVRNALKLLLHITDLGVTVVTGMDGKIYSAETMDRDFTDLMISLLLFSRANEESKTKSDRVKEASMKALARVQAGLPATIKGGGADPFWIQRGGRETSPTQHPTHWLAIKKIVELSLQGIGCNRIRQVLNADPTLYPPPRQKDTPQRRALIDAGLAPTGWNIHRIEDARRQPSLYGLKTIKLSGHTYNLEGYYPAVCSEEEFHLIQNISANNRKKSGDIRNTITLLSGLNLCKCGSCGGWVTTFRKNGKLTYRCDAGHRKIHHCPTTWSLNALIIESSTIRALIAGVAHNIIEDSHDLESVAGEIDSRRAEVSEIDCKRERLAVRIAEEDDDLLMQQLRQYNARKRDLLAEIGTLTQREALRSEGQNVAERLAEAQRLLTAEMVADIFTSDRLAVRELIRKSMRQVTIWKRQDKSLKVECEFISGWRYTFEGVMNEGQKSFIEYRTSPDGINMMEIYDKLNAITAKAFKHVLDVDDSVMLPTLSHVQAYHDMAVRLGHSPLTGSQFFWK

SEQ ID NO: 2017 - DNA, 50 bp, Klebsiella variicola
  source 1..50: mol_type = genomic DNA
ttgggttcctatttcttttacagccaggtgtagttaatataggtatacct

SEQ ID NO: 2018 - DNA, 40 bp, Klebsiella variicola
  source 1..40: mol_type = genomic DNA
ctcccgcccctgctccagccaggtgtaccaggtgacgccg

SEQ ID NO: 2019 - DNA, 50 bp, Klebsiella variicola
  source 1..50: mol_type = genomic DNA
ttgggttcctatttcttttacagcgcggtgtagttaatataggtatacct

SEQ ID NO: 2020 - DNA, 40 bp, Klebsiella variicola
  source 1..40: mol_type = genomic DNA
ctcccgccgctgctccagcgcggcgcagccactgccgccg

SEQ ID NO: 2021 - protein, 599 aa, Klebsiella variicola
MKKKLYSYIRWSSAQQTAGTSLERQTAAAREYAKAHDLEFVEILDAGVSAFRGKNATDGALAEFIAAVENGAIPSDSWLYVENLDRLSRATVRNALKLLLHITDLGVTVVTGMDGKIYSAETMDKDFTDLMISLLLFSRANEESKTKSDRVKEASMKALARVQAGLPATIKGGGADPFWIQRGDRETSPTQHPTHWLAIKKIVELSLQGVGCNRIRQVLNDDPTLYPPPRQKDTPRRRALLDAGLAPTGWNIHRIEDARRQPSLYGLKTITLSGHTYSLEGYYPAVCSEEEFHLIQNISASNRIKSGDIRNTITLLSGLNLCKCGSCGGWVTTFRKNGKLTYRCDAGHRKIHHCPTRWSLNARIIESATVRALIAGVAHNIIEDSQDLESVAGEIDNRRAEVADIDRKRERLAARIAEEDDDLLMQQLRQYNARKRDLLTEIGALTQREALRSEGQNVAERLAEAQRLLTADMVNDIFTSDRLAVRELIRKSMRQVTIWKRQDKSLKVECEFISGWRYTFEGVMKEGKKSFIEYRTSPDGINMMEIYDKLNAITAKAFKHVLDVDDNVMPPTLSHVQAYHDMSVRLGHSPLTGSQFFWR

SEQ ID NO: 2022 - DNA, 50 bp, Klebsiella variicola
  source 1..50: mol_type = genomic DNA
ttgggttcctatttattttacagccaggtgtagttaatataagtgcacct

SEQ ID NO: 2023 - DNA, 40 bp, Klebsiella variicola; identical to SEQ ID NO: 2018
  source 1..40: mol_type = genomic DNA

SEQ ID NO: 2024 - DNA, 50 bp, Klebsiella variicola
  source 1..50: mol_type = genomic DNA
ttgggttcctatttattttacagcgcggtgtagttaatataagtgcacct

SEQ ID NO: 2025 - DNA, 40 bp, Klebsiella variicola; identical to SEQ ID NO: 2020
  source 1..40: mol_type = genomic DNA

SEQ ID NO: 2026 - protein, 599 aa, Klebsiella variicola
MKKKLYSYIRWSSAQQTAGTSLERQTAAAREYAKAHDLEFVEILDAGVSAFRGKNATDGALAEFIAAVENGAIPPDSWLYVENLDRLSRATVRNALKLLLHITDLGVTVVTGMDGKIYSAETMDKDFTDLMISLLLFSRANEESKTKSDRVKEASMKALARVQAGLPATIKGGGADPFWIQRGGRETSPTQHPTHWLAIKKIVELSLQGIGCNRIRQVLNDDPTLYPPPRQKDTPRRRALLDAGLAPTGWNIHRIEDARRQPSLYGLKTITLSGHTYSLEGYYPAVCSEEEFHLIQNISASNRIKSGDIRNTITLLSGLNLCKCGSCGGWVTTFRKNGKLTYRCDAGHRKIHHCPTTWSLNARIIESATVRALIAGVAHNIIEDSQDLESVAGEIDNRRAEVSEIDRKRERLVVRIAEEDDDLLMQQLRQYNARKRDLLAEIGTLTQREALRSEGQNVAERLAEAQRLLTAEMVADIFNSDRLAVRELIRKSMRQVTIWKRQDKSLKVECEFISGWRYTFEGVMNGGQKSFIEYRTSPDGINMMEIYDKLNAITAKAFKHALGVDDNVMLPTLSHVQVYHDMAVRLGHSPLTGSQFFWR

SEQ ID NO: 2027 - DNA, 50 bp, Klebsiella variicola
  source 1..50: mol_type = genomic DNA
ttgggttcctatttcttttacatccaggtgtagttaatataggtgcatct

SEQ ID NO: 2028 - DNA, 40 bp, Klebsiella variicola; identical to SEQ ID NO: 2018
  source 1..40: mol_type = genomic DNA

SEQ ID NO: 2029 - DNA, 50 bp, Klebsiella variicola
  source 1..50: mol_type = genomic DNA
ttgggttcctatttcttttacatcgcggtgtagttaatataggtgcatct

SEQ ID NO: 2030 - DNA, 40 bp, Klebsiella variicola; identical to SEQ ID NO: 2020
  source 1..40: mol_type = genomic DNA

SEQ ID NO: 2031 - protein, 537 aa, Enterococcus faecium
MKQQIYNTALYLRLSRDDELQGESSSITTQRSMLRLYAKEHHLNVIDEYIDDGWSGTNFERPSFQRMIEDIEAGKINCVVTKDLSRLGRNYIMTGQYTELYFPSHNVRYIAIDDGVDSEKGESEIAPFKNIINEWVARDTSRKVKSAFRTKFAEGAHYGAYAPLGYKKHPDIKGKLLVDEETKWIVEKIFSLAYQGYGSAKITKILREEKVPTASWLNFTRYGTFAHIFEGKPESKRYEWTIAHVKAILKSEVYIGNSVHNMQSTVSFKSKKKVRKPENEWLRVENTHEPIIDKEVFYRVQEQIKSRRRQTKQKETPIFAGLVKCADCGWSMRFATNKANRTPYSYYSCSYYGQFGKGNCSMHYIRYDVLYQAVLERLQYWAKVVQQDEEKVLNKIQKAGNAERIREKKKKASALKKAENRQNEIDQLFAKMYEDRACEKITERNFVMLSSKYQQEQIELEQQIASLREELNKMEQDMIGAEKWIELIKEYSVPKELTAPLLNAMIEKILVHEATTNEDNERIQEIEIYYRFIGKID

SEQ ID NO: 2032 - DNA, 50 bp, Enterococcus faecium
  source 1..50: mol_type = genomic DNA
tcatatctttaactaagggaaaccggagtttcccaaacaaaaggatatta

SEQ ID NO: 2033 - DNA, 40 bp, Enterococcus faecium
  source 1..40: mol_type = genomic DNA
aagtcgaaggtgggaaagtggcgtatcttgcccagacacc

SEQ ID NO: 2034 - DNA, 50 bp, Enterococcus faecium
  source 1..50: mol_type = genomic DNA
tcatatctttaactaagggaaaccacagtttcccaaacaaaaggatatta

SEQ ID NO: 2035 - DNA, 40 bp, Enterococcus faecium
  source 1..40: mol_type = genomic DNA
aagtagaagttggggaaatacagtatcttggcaagacagc

SEQ ID NO: 2036 - protein, 546 aa, Anaerofustis stercorihominis
MNQQPDKITALYCRLSQDDALDGESNSITNQKALLSKYAAEHGFRNLMFFVDDGFSGTNFQRPGFQEMMNYVEDYSVSTLIVKDLSRLGREYSYMGRLQDFIFPAYDVRFIAINDDVDSAKGENDFAVFKNVFNDYYAKDTSKKIRAVVKMRGEAGEHIASNPPYGYVKDPQNKKKWIVDEEAAKVVRRIFDLCIAGKGPMQIAKILTADRVLTVTAYNARQKGWTMPDNLYQWCSKSVAGILERPEYTGCTVNFKTYTKSLKFKKRMENPKENQRVFEDTQPAIIERGQWERVQALRSNKRRPTKTGKTSIFSGLVYCADCGAKLYYCTCNTYKDESQDHFVCSNYKSNTGSCQIHYIREVTLYKRVLECIQGTLTYVRLFRDDFTQEMLAQDEASRKSELTQKRKALSGAQKRMEDLDKIIQRLYEDSVLGKLSDLRFQKLSAQYETEQAEIQRLAVSLEREIENEAGQIADVGRFLQLANRYSDLQELDASTVNELIEKIVVHSPEKIGGKKHVTIEVYFTYVGKIRIPLAKPELLTETEEPT

SEQ ID NO: 2037 - DNA, 50 bp, Anaerofustis stercorihominis
  source 1..50: mol_type = genomic DNA
ttacttccttatgggtctccggctaatggtagtatcccataaggaaacat

SEQ ID NO: 2038 - DNA, 40 bp, Anaerofustis stercorihominis
  source 1..40: mol_type = genomic DNA
ataaaaaaagaccctatgtaaaaatagaggtcttttattt

SEQ ID NO: 2039 - DNA, 50 bp, Anaerofustis stercorihominis
  source 1..50: mol_type = genomic DNA
ttacttccttatgggtctccggctcttggtagtatcccataaggaaacat

SEQ ID NO: 2040 - DNA, 40 bp, Anaerofustis stercorihominis
  source 1..40: mol_type = genomic DNA
atgaaaaatgcccctaattctaaaaagaggtttttaattt

SEQ ID NO: 2041 - protein, 493 aa, Enterocloster bolteae
MDNRIDAIYGRQSIDKKDSISIESQFEFCRYELKGGEGREYKDKGYSGKNIERPDFQRLLQDIKLGLIKRVIVYKLDRISRSIVDFAKLMELFKQYNVEFVSCTEKFDTSTPMGRAMLNICIVFAQLERESIQMRVQDAFYSRCTKGYYMRGRTPYGFDTEPIVMDGIKTKKLVENAEMDFAELMFQMYAEPGNSYGDITRYFVKHSIKVYDKALQRAFISKLLRNPVYVQADMDIYEYFKAQGVKIESTPEMFTGDNSCYLYQGREGEEQILVIAPHQGRITSQLWLTVQRKLSQNTSFQNGRKCHNTWLAGKIKCGRCGYALTALRAQNGVTYLRCKQRADNGSCEGAGTLTAQSMESFVYGEMVEKMRKYHTLKGGKEQGYNPKLTAARVALAKTESEIEKLLDTLSGANPLLLQYANNRIEELDTERQKQLKLVADLTANSVSDTQIDCITNYLNDWESVSFDDKRKVVDILISHIDATSESVTIHWKI

SEQ ID NO: 2042 - DNA, 50 bp, Enterocloster bolteae
  source 1..50: mol_type = genomic DNA
cattatgcccttgtaaaaaatagtttaggtttttatacaagggtataatc

SEQ ID NO: 2043 - DNA, 40 bp, Enterocloster bolteae
  source 1..40: mol_type = genomic DNA
aatatcttttacaaaacccttatcaatttttaatatatca

SEQ ID NO: 2044 - DNA, 50 bp, Enterocloster bolteae
  source 1..50: mol_type = genomic DNA
cattatgcccttgtaaaaaatagtcaaggtttttatacaagggtataatc

SEQ ID NO: 2045 - DNA, 40 bp, Enterocloster bolteae
  source 1..40: mol_type = genomic DNA
attattttttaaaagatcccaagaaaattttaatatatca

SEQ ID NO: 2046 - protein, 550 aa, Streptococcus sp group B
MNKLNRQPSYTLDNVGKITALYCRLSKDDELQGDSNSIINQKSMLKKYAEDNHFNNLMFFVDDGYSGTNFQRPDWLKLTTLIDEGKIGTIIVKDMSRLGRDYLQVGMYTEMVFPNADIRFIAINNGVDSNNQSDNDMTPFINIFNEFYAKDTSRKIKAVFKAKGQSGKPLCINPPYGYLKDPEDKNHWIVDEEAASVVREIFRLCVNGYGPSQIANELIKRNIPTPSEHFFSLGIKIPSAKSEIKGVWNQKTISNMLEKQEYLGHTVNFKTRKKSYKCKKTLLNPKEDWLIFKNTHEAIIDQETFDIVQRIRDGRRVRANLGEMPVLSGMLFCADCGNKLYQVRGKDWSHDKEYFVCATYRKQKGKCSSHQIRNIQIEAILLHELRTITSFAKQHEEEFVGLVMKKSEKELTQKLKSSNRELEQAKARISKLDTIVQHLYEDNLDGKISDERFKSMSESYDKEQAELKSKIESLEAFISKAQEECLNVDSFLKLVRQYTDIQELNAEIIRTFVDKIYVEKSEKVAGTRTKKQTIWIQWNYIGAVDIPLHK

SEQ ID NO: 2047 - DNA, 50 bp, Streptococcus sp group B; identical to SEQ ID NO: 447
  source 1..50: mol_type = genomic DNA

SEQ ID NO: 2048 - DNA, 40 bp, Streptococcus sp group B
  source 1..40: mol_type = genomic DNA
aataaaaaagtagggattaaaaaatctctacttttttatt

SEQ ID NO: 2049 - DNA, 50 bp, Streptococcus sp group B
  source 1..50: mol_type = genomic DNA
ttaaatccctaagtgaacgcccctttaggagtgttcagtaagggattaaa

SEQ ID NO: 2050 - DNA, 40 bp, Streptococcus sp group B
  source 1..40: mol_type = genomic DNA
aaaagaaaagtaggcatatttaaatttcttctttcttatt

SEQ ID NO: 2051 - protein, 550 aa, Streptococcus sp group B; identical to SEQ ID NO: 446

SEQ ID NO: 2052 - DNA, 50 bp, Streptococcus sp group B; identical to SEQ ID NO: 447
  source 1..50: mol_type = genomic DNA

SEQ ID NO: 2053 - DNA, 40 bp, Streptococcus sp group B; identical to SEQ ID NO: 2048
  source 1..40: mol_type = genomic DNA

SEQ ID NO: 2054 - DNA, 50 bp, Streptococcus sp group B; identical to SEQ ID NO: 2049
  source 1..50: mol_type = genomic DNA

SEQ ID NO: 2055 - DNA, 40 bp, Streptococcus sp group B; identical to SEQ ID NO: 2050
  source 1..40: mol_type = genomic DNA

SEQ ID NO: 2056 - protein, 550 aa, Streptococcus agalactiae; identical to SEQ ID NO: 1606

SEQ ID NO: 2057 - DNA, 50 bp, Streptococcus agalactiae; identical to SEQ ID NO: 1607
  source 1..50: mol_type = genomic DNA

SEQ ID NO: 2058 - DNA, 40 bp, Streptococcus agalactiae; identical to SEQ ID NO: 2048
  source 1..40: mol_type = genomic DNA

SEQ ID NO: 2059 - DNA, 50 bp, Streptococcus agalactiae
  source 1..50: mol_type = genomic DNA
ttaaatccctaagtgaatgcccctttaggagtgttcagtaagggattaaa

SEQ ID NO: 2060 - DNA, 40 bp, Streptococcus agalactiae; identical to SEQ ID NO: 2050
  source 1..40: mol_type = genomic DNA

SEQ ID NO: 2061 - protein, 502 aa, Fusicatenibacter saccharivorans
MEFIREDCIYARQSVDRKDSISIESQIDFCKYELKGGSCRVFKDKGYSGKNTDRPEFQKLLGEIRKGKVRRVIVYKLDRISRSILDFANMMELFQEYDVEFVSSTEKFDTSTPMGRAMLNICIVFAQLERETIQKRVTDAYYSRCLKGFHMSGQAPYGYQLEPTVVEGIRTKKMVADPVAADHVRLMFEMYAEPETSFGDITRYFEEHDIKIYGKSMFRTFLSQLLRNPVYAQADLELYEFFKSQGAAIVNDASDFAGTNGCYLYQGRDVKEDKDRCLKDQILVIAPHKALISSDTWLKCRKKLMANTTFQQGRKPKNTWLAGKIKCGHCGYALKATHVPNSTGYFRCTKRTENKGCPGCGKIRKEEFEQFIFSAMQEKFKDFQILHGREEKVNPKLTAYQVELAQVEAEIEKLLDTLTGANATLLAYANKKIEELDTRRQTISKAIAELSVETISPQQIKKLSYYLDNWDSIDFDDKRKAADGLISTIKATSDRVQIEWKI

SEQ ID NO: 2062 - DNA, 50 bp, Fusicatenibacter saccharivorans
  source 1..50: mol_type = genomic DNA
tttgtaccccttgtacaccgatgtttgcaacggtgtacaaagggaacata

SEQ ID NO: 2063 - DNA, 40 bp, Fusicatenibacter saccharivorans
  source 1..40: mol_type = genomic DNA
ttttgtcattggcagaggattatgatggctttgtatttgg

SEQ ID NO: 2064 - DNA, 50 bp, Fusicatenibacter saccharivorans
  source 1..50: mol_type = genomic DNA
tttgtaccccttgtacaccgatgtgggcaacggtgtacaaagggaacata

SEQ ID NO: 2065 - DNA, 40 bp, Fusicatenibacter saccharivorans
  source 1..40: mol_type = genomic DNA
ttgtgtcatgggtagaggaggatgataggtttgcatttaa

SEQ ID NO: 2066 - protein, 515 aa, Listeria booriae
MRVIKMRVAIYIRVSTKMQQEKGYSLEAQKVELNRYAREQGWNVVREFQDVDSGAKRDKDGLNALLDTIEDGLIEVVLVIDQDRLSRLDTINWEYLKSTLRENSVKIAEPRSGITDLDNEDDEFISDIKNLIARRERKSMTRRMIRGKKQRLREQSAYGKPPLGYKYKKDSDKKAYEIDDKWAWVIPKIDSWYMNDKLGMSIIAEKLNEISVTNTGNRWHENTIQRIINSTNYHGTRLYKFKDGEEIEVKGVFPPLRTEEEYKAIQAEKTKRHYRYKVDIRRPKSAHIIRRVHLTCGVCGRKLTLYNKTSSAPAYYIKHSTKKWAHGIDCKMSVNTRRFEHHLKRILKEVLQSEEQAKKYIDFDDKTSQIPIIEKDITRATSSLNEIKQRKSKMIDLYLDDYFTKEVLDEKQAEIDREIKQMEEMIAAKQKQLNLIQHSSWDYEMLMNYLEITEELEVNLDEFQKAHIFGELFPEGVLYENRLVLKSQSLPFEITVPVESREFIYKYRYEKPPYS

SEQ ID NO: 2067 - DNA, 50 bp, Listeria booriae
  source 1..50: mol_type = genomic DNA
aataggcactaccacacagtcattgaagtaactgtgtttaagtacctatt

SEQ ID NO: 2068 - DNA, 40 bp, Listeria booriae
  source 1..40: mol_type = genomic DNA
atctggttttactctcgtagaaatgttaatagttctgtta

SEQ ID NO: 2069 - DNA, 50 bp, Listeria booriae
  source 1..50: mol_type = genomic DNA
aataggcactaccacacagtcatttaagtaactgtgtttaagtacctatt

SEQ ID NO: 2070 - DNA, 40 bp, Listeria booriae
  source 1..40: mol_type = genomic DNA
atctggttttacccttgtatacaagttaataatttagcta

SEQ ID NO: 2071 - protein, 475 aa, Bacillus cereus
MYVRVSTDKDEQVSSVENQVDICRYWIEKNGYEWDQNAVYFDDGISGTAWLERHAMQLILQKVRKNELDTVVFKSIHRLARDLKDALEIKEILLGHGVRLVTIEEGYDSYYEGNNDMKFEIYAMFAAQLPKTLSTSISAALSAKVRRGEHTGTIPFGYDRIDKKLIINDEEALLVKEMFDWYEDGRGYRMIANNLNKKGCRTRFGNLWSEASVKTIVTNSLYTGEHVMHKYKTVKIDGKKKTVKNPKEKWLVFENHHDAIISKEQWERINPVSGVKDKKTKSDYRNEFRGIVWCAHCGKRVRAIYAGVRSKYERVYMKCSTYKAYGTCVNHIPIRYEDFRNLILERLKQKQEYIETRLVAQIKDKLQGKIAKSKKTIKQLESKKEKLLELYMDSFIDKETFVNRNRKLEDEMTAQELQLLKLKDKDIQNRETKDIQDAFMLLQEEQDLHKAFQKLIKKIVFYQDGKLDIEYTFDI

SEQ ID NO: 2072 - DNA, 50 bp, Bacillus cereus
  source 1..50: mol_type = genomic DNA
ttgtagctattgatataatgaacatctgtctggtatactaatagcgacaa

SEQ ID NO: 2073 - DNA, 40 bp, Bacillus cereus
  source 1..40: mol_type = genomic DNA
aggtggtcacggtgggacatcaagtaataactggcagcaa

SEQ ID NO: 2074 - DNA, 50 bp, Bacillus cereus
  source 1..50: mol_type = genomic DNA
ttgtagctattgatataatgaacagatgtctggtatactaatagcgacaa

SEQ ID NO: 2075 - DNA, 40 bp, Bacillus cereus
  source 1..40: mol_type = genomic DNA
aagtggtcactgtgggagagaaagaaagaactggaaccca

SEQ ID NO: 2076 - protein, 588 aa, Streptomyces lunaelactis
MRILLDLTQPFPEDTKFAVSYLRVSTKAQTETGYDEEGLSIAAQRDANQKKAEQLGAVIVAEFVDAAESAKTADRPELQAMLRFIHELRVISYVIVDKVDRLARNREDDVLINMAVRKAGAQFVSSKENIDETPSGKLLHGIMASIAEFYSANLATEAKKGMRQKAKSGGTPGHAPLGYRNVRERIDGREIRTVAVDSERAPLIQWMFSAYATGDWTMRQLTAELNRRGLRIPATKKLPERPLRYQHIDKMLVNRYYTGFVRYEGVWYEGRHTALIDTVTFEQVQAVRTARAAAREKVQKHPHYLKGSIFCGRCSGRFGVMNARNRWGTVYPYFYCLGRAKKEDCTQSTVLIADVEVAVADYWSRIQLSESRIAAIREQVMAALVGRQHSNRVELDRQEKRRKELQNQQLKLIEMRYADAISLEHLKSEQERITRELAQAQQIIDQCSTEIEAVMKVVEEALLLCANAHRLYLSAPPDVRRQLNQAVFARFWIIDDQVQGADLTQGFAHLLAPDLAQLSEVKNGEDTKIETRSRPGKGRARSTGVQRANLELVRPRDAIERPNGPLPADTTNPGPNRDRGSNVTVLVS

SEQ ID NO: 2077 - DNA, 50 bp, Streptomyces lunaelactis
  source 1..50: mol_type = genomic DNA
gggttcaaacgtgaccgttttggtgtcccaaaggggactcaacttgaacc

SEQ ID NO: 2078 - DNA, 40 bp, Streptomyces lunaelactis
  source 1..40: mol_type = genomic DNA
aacaggggtctcagctggtgtccgaggggggacttgaacc

SEQ ID NO: 2079 - DNA, 50 bp, Streptomyces lunaelactis
  source 1..50: mol_type = genomic DNA
gggttcaaacgtgaccgttttggttgcccaaaggggactcaacttgaacc

SEQ ID NO: 2080 - DNA, 40 bp, Streptomyces lunaelactis
  source 1..40: mol_type = genomic DNA
aacaggggtctcactgtgttgccaagggtggtcttgaact

SEQ ID NO: 2081 - protein, 552 aa, Hungatella hathewayi
MKRQQEKFTALYCRLSQDDGREGESNSIVNQKEYLMKYAKEHGFPNPKFYVDDGYTGTNFDRPSFKEMSADIEKGLVKTVIVKDLSRFGRNYIEVGSYSEIIYPEAGVRFIAIMDNVDTGSLESNEFAAFTNLFNEWYPKSTSKKVKEVKKAKGLAGEHLGAPPYGYLRNPDDKTRWLVDGEAAAVVRRIFSLCMQGKGVSAIATTLWKDRTLTPSAYKASKGIGVAKVSEDPYCWETSAVAAILENVAYIGITESFKSTRLGFKSKKRIPTAKDRRAYIENAHAPIIDRDIWEKVQIIRENKRRPNKSGITSMFSGLLYCADCGAKLSLATANGYAHFRCSQYKRTSRTQNCTQHYIREDALNQLVLKQLQHFLSYLQQFERVFIRRQIDTTLAERRYELSAKQKQIEKDEKRMDELDRLFRKIYEDNVSGKLNDERFYKLSDGYEAEQGQLKREIEALTAEVSQADMEVTNVAKLIAVTKKYTRIDELTPEILNAFVDKIVIHEREKKDGKRTQQIDIYYSYVGIVDIPTDEEMREMEREYMRRTTRQTA

SEQ ID NO: 2082 - DNA, 50 bp, Hungatella hathewayi
  source 1..50: mol_type = genomic DNA
ttttatccctatctggtttaactcatgaatgaaaccagataaggagaaaa

SEQ ID NO: 2083 - DNA, 40 bp, Hungatella hathewayi
  source 1..40: mol_type = genomic DNA
ttataaaaaaatctggcatataaacaataaatcatacaat

SEQ ID NO: 2084 - DNA, 50 bp, Hungatella hathewayi
  source 1..50: mol_type = genomic DNA
ttttatccctatctggtttaactcaagaatgaaaccagataaggagaaaa

SEQ ID NO: 2085 - DNA, 40 bp, Hungatella hathewayi
  source 1..40: mol_type = genomic DNA
ttataaacaaatatgacctaaaaacaaaaaaacaaacaaa

SEQ ID NO: 2086 - protein, 556 aa, Aerococcus urinae
MSNTKRTGQTALYERLSRDDEMQGESNSITNQKQLLESYAKRNGFVNIYHYTDDGVSGTTFDREGFQKMIKAVEENKVSTVIVKDMSRFGRDYLKVGFYTEILFKEKGVRFIAINNGIDSEKQAESDFTPFLNIMNEWYARDTSRKIQSIFRARMEEGKRVSPSVPYGYYRNPKNKQELLVDKESSKVVKRIYRLVIEGYGVTQIADILTKDKVLIPSAYAEIHYPENNHSSKKRGIEDPYFWTPTTVSYILEKQEYMGHTVLGKTISVDYKTKKRRKAKADELIIFKNTHEAIIDEETWNNAQRLRKTVRRSPKYGTTSHPFTGLLICSDCGGKLSYREPAEHKEKKYDCDYCFVCQHYRHRKGTCSMHYIKVKTVNEILLKSIKEITDFAKEDKQEFLKVMNKLSDEKREEKYQGDKEKLEKLSSRNAELTTLITKLYEDHALGKIPVKHFDRLFNTYDTEQQDLENQIQYFEDEIESYHQRKVDTDKFLKMIEKYTDIEELTVPMINEYIEKVVVHEATGGRKGKERKQQVDVYFNFIGNCQIPQKADMEKAP

SEQ ID NO: 2087 - DNA, 50 bp, Aerococcus urinae
  source 1..50: mol_type = genomic DNA
ttatgtccttgacaaatcttcccaaaaggattaacctcttagggacagag

SEQ ID NO: 2088 - DNA, 40 bp, Aerococcus urinae
  source 1..40: mol_type = genomic DNA
ctatgtagtaacagatcctaaaggcacacttgtgttagag

SEQ ID NO: 2089 - DNA, 50 bp, Aerococcus urinae
  source 1..50: mol_type = genomic DNA
ttatgtccttgacaaatcttcccagtaggattaacctcttagggacagag

SEQ ID NO: 2090 - DNA, 40 bp, Aerococcus urinae
  source 1..40: mol_type = genomic DNA
ccgtgtagtagcacatcccgtatgcagacttgtgttagaa

SEQ ID NO: 2091 - protein, 557 aa, Pseudoalteromonas tetraodonis
MSDDKLSGNVYLYQRFSSQAQEGNSSLYRQGEAQREWLRSHPNCVVVELEGKPLIDAGVSAFSGKHLSSGSLGRLVAAIESKVVPKGSIILVEHFSRLSRMTITETEKLLDKIWDHDVSIVTARDQSVYSPSKRNDLATRMRLIVEIDKAHSDSKWRSEKVKSSWSRREYNAKENKIPPKMRMPFWLDQKGKLNEYADVVRDIFKLHAEGLGQVLIERALRKKYGKIKPLKNINPTKIIRIIQNPKCIGLVYNEKLYESVVSDKDFYNSQRICKERLFTSVRPDRKWPLHGLVKCGHCGSGMSIQQSAESLPLLRCSRKQRSGGESCDAPTTFPYVVAYHFFFAYVEPLILAKISGAKRSSTSHEKKAKLTYELKGLQTKLADLKDYYKNSEKKSGTIFGLMEELDDEINDIVSQLAEIQAEIETKLNVASISKKIVDLSQTDPLNYNLELNRIGNKIILKNKELSFSLEEDDVVARFKFSQYDRKRKAYQCVFYGSKEYYRESEYVTEVRTSDWDIDRLMYPHKSRGSTVENAARLMYYLKIHSESGYLDILLKDD

SEQ ID NO: 2092 - DNA, 50 bp, Pseudoalteromonas tetraodonis
  source 1..50: mol_type = genomic DNA
tatatgcacatatttacatttaatgagctcaatgataatgtgtgcatata

SEQ ID NO: 2093 - DNA, 40 bp, Pseudoalteromonas tetraodonis
  source 1..40: mol_type = genomic DNA
aattgatcacttaatatgtgaattaaaagcggcgcaaagt

SEQ ID NO: 2094 - DNA, 50 bp, Pseudoalteromonas tetraodonis
  source 1..50: mol_type = genomic DNA
tatatgcacatatttacatttaatacgctcaatgataatgtgtgcatata

SEQ ID NO: 2095 - DNA, 40 bp, Pseudoalteromonas tetraodonis
  source 1..40: mol_type = genomic DNA
ccttgaacacttaatatctacataaaaagttgtgcaaagt

SEQ ID NO: 2096 - protein, 463 aa, Bacillus cereus
MTVGIYIRVSTEEQVRDGFSISAQREKLKAYCVAQDWDKFKFYVDEGVSAKDTNRPQLSIMLDHIKKGLINTVLVYRLDRLTRSVMDLYKLLDTFDKYNCAFKSATEVYDTSTAMGRMFITIVAALAQWERENLGERVRMGQLEKARQGEYSAKAPFGFDKNEHSKLIINLEESKVVLDMVRKIEEGYSIRQLADHLDGYIKPIRGYKWHIRTVLDILSNHAMYGAIRWSNEIIENAHPGIIKKDRFMKVQQLLSSRQNFKKRKTTSIFIFQMKLLCPNCGNHLTCERVMYHRKKDNQDIEHNRYRCQACVLNKKKAFSSSEKKIEVSFLNYVEKYKFKQVPKFQTEDNEIDILKKQLSKVERQREKFQKAWSNDLMTDEEFANRMKETKQALESIKEKLKSLSPNKNEDIDDNVIKEIINNIKSNWSHLSSDEKKQFMNMFIENIKIDKKDGVTEVLDIEFY

SEQ ID NO: 2097 - DNA, 50 bp, Bacillus cereus
  source 1..50: mol_type = genomic DNA
attagtgtttatgttacatttacacatgtaaagttcacgtatatacaaaa

SEQ ID NO: 2098 - DNA, 40 bp, Bacillus cereus
  source 1..40: mol_type = genomic DNA
ttttgtatttaaatataaacaaacaaaatgctcttgttgt

SEQ ID NO: 2099 - DNA, 50 bp, Bacillus cereus
  source 1..50: mol_type = genomic DNA
attagtgtttatgttacatttacaaatgtaaagttcacgtatatacaaaa

SEQ ID NO: 2100 - DNA, 40 bp, Bacillus cereus
  source 1..40: mol_type = genomic DNA
aattaaaattaaatataaaaaaacaaaatgcaccttttgt

SEQ ID NO: 2101 - protein, 464 aa, Bacillus thuringiensis
MTVGIYIRVSTEEQVRDGFSISAQREKLKAYCIAQDWDSFKFYVDEGVSAKDTNRPQLNIMLDHIKKGLINTILVYRLDRLTRSVMDLYKLLDTFDKYNCAFKSATEVYDTSTAMGRMFITIVAALAQWERENLGERVRMGQLEKARQGEYSAKAPFGFDKNDHSKLVINDIESKVVLDMVRKIEEGYSIRQLANHLDSYIKPIRGYKWHIRTILDILSNHAMYGAIRWSNEIIENAHPGIITKDRFMKLQKIISSRQNFKKRQSNSIFIYQMKLVCPNCGNRLGSERSRYYRKKDDQHIECNQYRCQACALNKINKPFASSEKKIEKAFLKYISDLRFEQIPQLKEDDNESEIIKKQISKTERQREKFQKAWSNDLMTDEEFTDRMRETKKMLEELTEKLHALKPIENTKIDCAVIKDIVDNIKNNWSFLPPADKKQFMNMFIESIKIDKKDGTTEVLDIVFY

SEQ ID NO: 2102 - DNA, 50 bp, Bacillus thuringiensis
  source 1..50: mol_type = genomic DNA
attagtgtttatgttacatttacacatgtaaagttctcgtaaatacgaaa

SEQ ID NO: 2103 - DNA, 40 bp, Bacillus thuringiensis; identical to SEQ ID NO: 2098
  source 1..40: mol_type = genomic DNA

SEQ ID NO: 2104 - DNA, 50 bp, Bacillus thuringiensis
  source 1..50: mol_type = genomic DNA
attagtgtttatgttacatttacaaatgtaaagttctcgtaaatacgaaa

SEQ ID NO: 2105 - DNA, 40 bp, Bacillus thuringiensis; identical to SEQ ID NO: 2100
  source 1..40: mol_type = genomic DNA

SEQ ID NO: 2106 - protein, 465 aa, Bacillus cereus
MTVGIYIRVSTEEQARDGFSISAQREKLKAYCVAQDWDNFKFYVDEGVSAKDTNRPQLSILLNHIQQGLITTVLVYRLDRLTRSVMDLYKLLDTFDKYNCAFKSATEVYDTSTAMGRMFITIVAALAQWERENLGERVRMGQLEKARQGEYSAKAPFGFNKNKHNKLVINEIESKVVLDMVRKIEEGYSIRQLAIYLDSYVKPIRGYKWHIRTILDILSNNAMYGAIKWSNEIIEGAHEGILTKERFIQLQKILSSRQNIKKRQTHSIFIYQMKLICPNCGNRLSSERSRYYRKKDEQHVECNQYRCQSCALNKHTTKPFATSERKVESALMNYISNLQFEQVPKINNENNELEILKKQVKKVEKQREKYQKAWSNDLMTDDEFTERMNETKIILNSAKKKLQTLEVNNHQEIDVDVIKEKVNNIKKNWFHLSPDEKKQFMSMFIENIKIDKKDGVTEVLDIEFY

SEQ ID NO: 2107 - DNA, 50 bp, Bacillus cereus
  source 1..50: mol_type = genomic DNA
attagtgtttatgttacatttacacatataaagttcacgtaaatacgaaa

SEQ ID NO: 2108 - DNA, 40 bp, Bacillus cereus; identical to SEQ ID NO: 2098
  source 1..40: mol_type = genomic DNA

SEQ ID NO: 2109 - DNA, 50 bp, Bacillus cereus
  source 1..50: mol_type = genomic DNA
attagtgtttatgttacatttacaaatataaagttcacgtaaatacgaaa

SEQ ID NO: 2110 - DNA, 40 bp, Bacillus cereus; identical to SEQ ID NO: 2100
  source 1..40: mol_type = genomic DNA

SEQ ID NO: 2111 - protein, 463 aa, Bacillus toyonensis
MTIGIYIRVSTEEQVRDGFSISAQREKLKAYCVAQDWDSFKFYVDEGVSAKDTNRPQLSIMLDHIKKGLINTVLVYRLDRLTRSVMDLYKLLDTFDKYNCAFKSATEVYDTSTAMGRMFITIVAALAQWERENLGERVRMGQLEKARQGEYSAKAPFGFDKNEQSKLIINPEESKVVLDMVRKIEEGYSIRQLANHLDGYIKPIRGYKWHIRTILDILSNNAMYGAIRWSNEIIENAHPGIITKDRFLKVQQLLSSRQNFKKRKTTSIFIFQMKLLCPNCGNHLTCERVMYHRKKDNKDIEHNRYRCQACVLNKKKAFSSSEKKIEKAFLDYIDDYRFTKVPELKKEDDEKEILKKKLSKVERQREKFQKAWSNDLMTDEEFADRMKETKNTLEEIKEELYKSGLNQNEKIDSDTVRRIVNDIKNKWSLLSSLEKKQFMNLFVKNIQLKKINEKNIVVNITFY

SEQ ID NO: 2112 - DNA, 50 bp, Bacillus toyonensis
  source 1..50: mol_type = genomic DNA
attagtatttatgttatgtttacacatataaagttcacgtatatacaaaa

SEQ ID NO: 2113 - DNA, 40 bp, Bacillus toyonensis; identical to SEQ ID NO: 2098
  source 1..40: mol_type = genomic DNA

SEQ ID NO: 2114 - DNA, 50 bp, Bacillus toyonensis
  source 1..50: mol_type = genomic DNA
attagtatttatgttatgtttacaaatataaagttcacgtatatacaaaa

SEQ ID NO: 2115 - DNA, 40 bp, Bacillus toyonensis; identical to SEQ ID NO: 2100
  source 1..40: mol_type = genomic DNA

SEQ ID NO: 2116 - protein, 463 aa, Bacillus toyonensis
MTVGIYIRVSTEEQVRDGFSISAQREKLKAYCVAQDWDKFKFYVDEGVSAKDTNRPQLSIMLDHIKKGLINTVLVYRLDRLTRSVMDLYKLLDTFDKYNCAFKSATEVYDTSTAMGRMFITIVAALAQWERENLGERVRMGQLEKARQGEYSAKAPFGFDKNEHSKLIINLEESNVVLDMVRKIEEGYSIRQLADHLDGYIKPIRGYKWHIRTILDILSNHAMYGAIRWSNEIIENAHPGIITKDKFMKVQQLLSSRQNFKKRKTTSIFIFQMKLLCPNCGNHLTCERVMYHRKKDNQDIEHNRYRCQACVLNKKKAFSSSEKKIEVSFLNYIEKYRFKQLPKFQTEDNEIDILKKQLSKVERQREKFQKAWSNDLMTDEEFANRMKETKQALESIKEKLKSLSPNKNENINNDVIKEIINNIKSNWLHLSSDEKKQFTNMFIENIKIDKKDGVTEVLDIEFY

SEQ ID NO: 2117 - DNA, 50 bp, Bacillus toyonensis
  source 1..50: mol_type = genomic DNA
attagtgtatatgttacatttacacatgtaaagttcacgtatatacaaaa

SEQ ID NO: 2118 - DNA, 40 bp, Bacillus toyonensis; identical to SEQ ID NO: 2098
  source 1..40: mol_type = genomic DNA

SEQ ID NO: 2119 - DNA, 50 bp, Bacillus toyonensis
  source 1..50: mol_type = genomic DNA
attagtgtatatgttacatttacaaatgtaaagttcacgtatatacaaaa

SEQ ID NO: 2120 - DNA, 40 bp, Bacillus toyonensis; identical to SEQ ID NO: 2100
  source 1..40: mol_type = genomic DNA

SEQ ID NO: 2121 - protein, 463 aa, Bacillus toyonensis
MTVGIYIRVSTEEQVRDGFSISAQREKLKAYCVAQDWDKFKFYVDEGVSAKDTNRPQLSIMLDHIKKGLINTVLVYRLDRLTRSVMDLYKLLDTFDKYNCAFKSATEVYDTSTAMGRMFITIVAALAQWERENLGERVRMGQLEKARQGEYSAKAPFGFDKNEHSKLIINLEESKVVLDMVRKIEEGYSIRQLADHLDGYTKPIRGYKWHIRTVLDILSNHAMYGAIRWSNEIIENAHPGIIKKDRFMKVQQLLSSRQNFKKRKTTSIFIFQMKLLCPNCGNHLTCERVMYHRKKDNQDIEHNRYRCQACVLNKKKAFSSSEKKIEVSFLNYVEKYRFKQVPEFQTEDNEIDILKKQLSKVERQREKFQKAWSNDLMTDEEFANRMKETKQALESIKEKLKSLSPNKNEDIDDDVIKEIINNIKSNWSHLSSDEKKQFINMFIESIKIDKKDGVTEVLDIEFY

SEQ ID NO: 2122 - DNA, 50 bp, Bacillus toyonensis; identical to SEQ ID NO: 2097
  source 1..50: mol_type = genomic DNA

SEQ ID NO: 2123 - DNA, 40 bp, Bacillus toyonensis; identical to SEQ ID NO: 2098
  source 1..40: mol_type = genomic DNA

SEQ ID NO: 2124 - DNA, 50 bp, Bacillus toyonensis; identical to SEQ ID NO: 2099
  source 1..50: mol_type = genomic DNA

SEQ ID NO: 2125 - DNA, 40 bp, Bacillus toyonensis; identical to SEQ ID NO: 2100
  source 1..40: mol_type = genomic DNA

SEQ ID NO: 2126 - protein, 463 aa, Bacillus toyonensis
MTVGIYIRVSTEEQVRDGFSISAQREKLKAYCVAQDWDKFKFYVDEGVSAKDTNRPQLSIMLDHIKKGLINTVLVYRLDRLTRSVMDLYKLLDTFDKYNCAFKSATEVYDTSTAMGRMFITIVAALAQWERENLGERVRMGQLEKARQGEYSAKAPFGFDKNEHSKLIINLEESKVVLDMVRKIEEGYSIRQLADHLDGYIKPIRGYKWHIRTVLDILSNHAMYGAIRWSNEIIENAHPGIIKKDRFMKVQQLLSSRQNFKKRKTTSIFIFQMKLLCPNCGNHLTCERVMYHRKKDNQDIEHNRYRCQACVLNKKKAFSSSEKKIEVSFLNYVEKYKFKQVPKFQTEDNEIDILKKQLSKVERQREKFQKAWSNDLMTDEEFANRMKETKQALESIKEKLKSLSPNKNEDIDDDVIKEIINNIKSNWSHLSSDEKKQFMNMFIENIKIDKKDGVTEVLDIEFY

SEQ ID NO: 2127 - DNA, 50 bp, Bacillus toyonensis; identical to SEQ ID NO: 2097
  source 1..50: mol_type = genomic DNA

SEQ ID NO: 2128 - DNA, 40 bp, Bacillus toyonensis; identical to SEQ ID NO: 2098
  source 1..40: mol_type = genomic DNA

SEQ ID NO: 2129 - DNA, 50 bp, Bacillus toyonensis; identical to SEQ ID NO: 2099
  source 1..50: mol_type = genomic DNA

SEQ ID NO: 2130 - DNA, 40 bp, Bacillus toyonensis; identical to SEQ ID NO: 2100
  source 1..40: mol_type = genomic DNA

SEQ ID NO: 2131 - protein, 463 aa, Bacillus toyonensis
MTVGIYIRVSTEEQVRDGFSISAQREKLKAYCVAQDWDKFKFYVDEGVSAKDTNRPQLSIMLDHIKKGLINTVLVYRLDRLTRSVMDLYKLLDTFDKYNCAFKSATEVYDTSTAMGRMFITIVAALAQWERENLGERVRMGQLEKARQGEYSAKAPFGFDKNEHSKLIINLEESKVVLDMVRKIEEGYSIRQLADHLDGYIKPIRGYKWHIRTVLDILSNHAMYGAIRWSNEIIENAHPGIIKKDRFMKVQQLLSSRQNFKKRKTTSIFIFQMKLICPNCGNHLTCERVMYHRKKDNQDIEHNRYRCQACVLNKKKAFSSSEKKIEVSFLNYVEKYKFKQVPKFQTEDNEIDILKKQLSKVERQREKFQKAWSNDLMTDEEFANRMKETKQALESIKEKLKSLSPNKNEDIDDDVIKEIINNIKSNWSHLSSDEKKQFMNMFIENIKIDKKDGVTEVLDIEFY

SEQ ID NO: 2132 - DNA, 50 bp, Bacillus toyonensis; identical to SEQ ID NO: 2097
  source 1..50: mol_type = genomic DNA

SEQ ID NO: 2133 - DNA, 40 bp, Bacillus toyonensis; identical to SEQ ID NO: 2098
  source 1..40: mol_type = genomic DNA

SEQ ID NO: 2134 - DNA, 50 bp, Bacillus toyonensis; identical to SEQ ID NO: 2099
  source 1..50: mol_type = genomic DNA

SEQ ID NO: 2135 - DNA, 40 bp, Bacillus toyonensis; identical to SEQ ID NO: 2100
  source 1..40: mol_type = genomic DNA

SEQ ID NO: 2136 - protein, 463 aa, Bacillus toyonensis
MTVGIYIRVSTEEQVRDGFSISAQREKLKAYCVAQDWDNFKFYVDEGVSAKDTNRPQLSIMLDHIKKGLINTVLVYRLDRLTRSVMDLYKLLDTFDKYNCAFKSATEVYDTSTAMGRMFITIVAALAQWERENLGERVRMGQLEKARQGEYSAKAPFGFDKNEHSKLIINLEESRVVLDMVRKIEEGYSIRQLADHLDGYIKPIRGYKWHIRTILDILSNHAMYGAIRWSNEIIENAHPGIITKDKFMKVQQLLSSRQNFKKRKTTSIFIFQMKLLCPNCGNHLTCERVMYHRKKDNQDIEHNRYRCQACVLNKKKAFSSSEKKIEVSFLNYIEKYRFKQVPKFQTEDNEIDILKKQLSKVERQREKFQKAWSNDLMTDEEFANRMKETKQALESIKEKLKSLRPNKNENMDDDVIKEIINNIKSNWSHLSSDEKKQFMNMFIENIKIDKKDGVTEVLDIEFY

SEQ ID NO: 2137 - DNA, 50 bp, Bacillus toyonensis; identical to SEQ ID NO: 2097
  source 1..50: mol_type = genomic DNA

SEQ ID NO: 2138 - DNA, 40 bp, Bacillus toyonensis; identical to SEQ ID NO: 2098
  source 1..40: mol_type = genomic DNA

SEQ ID NO: 2139 - DNA, 50 bp, Bacillus toyonensis; identical to SEQ ID NO: 2099
  source 1..50: mol_type = genomic DNA

SEQ ID NO: 2140 - DNA, 40 bp, Bacillus toyonensis; identical to SEQ ID NO: 2100
  source 1..40: mol_type = genomic DNA

SEQ ID NO: 2141 - protein, 463 aa, Bacillus toyonensis
MTVGIYIRVSTEEQVRDGFSISAQREKLKAYCVAQDWDKFKFYVDEGVSAKDTNRPQLSIMLDHIKKGLINTVLVYRLDRLTRSVMDLYKLLDTFDKYNCAFKSATEVYDTSTAMGRMFITIVAALAQWERENLGERVRMGQLEKARQGEYSAKAPFGFDKNEHSKLIINLEESKVVLDMVRKIEEGYSIRQLADHLDGYTKPIRGYKWHIRTVLDILSNHAMYGAIRWSNEIIENAHPGIIKKDRFMKVQQLLSSRQNFKKRKTTSIFIFQMKLLCPNCGNHLTCERVMYHRKKDNQDIEHNRYRCQACVLNKKKAFSSSEKKIEVSFLNYVEKYRFKQVPKFQTEDNEIDILKKQLSKVERQREKFQKAWSNDLMTDEEFANRMKETKQALESIKEKLKSLSPNKNEDIDDDVIKEIINNIKSNWSHLSSDEKKQFMNMFIESIKIDKKDGVTEVLDIEFY

SEQ ID NO: 2142 - DNA, 50 bp, Bacillus toyonensis; identical to SEQ ID NO: 2097
  source 1..50: mol_type = genomic DNA

SEQ ID NO: 2143 - DNA, 40 bp, Bacillus toyonensis; identical to SEQ ID NO: 2098
  source 1..40: mol_type = genomic DNA

SEQ ID NO: 2144 - DNA, 50 bp, Bacillus toyonensis; identical to SEQ ID NO: 2099
  source 1..50: mol_type = genomic DNA

SEQ ID NO: 2145 - DNA, 40 bp, Bacillus toyonensis; identical to SEQ ID NO: 2100
  source 1..40: mol_type = genomic DNA

SEQ ID NO: 2146 - protein, 538 aa, Elusimicrobiaceae bacterium
MSDKKIRCAIYTRKSTEEGLEQEFNSLQAQWEACEAYIKSQKHEHWQLLPSEYDDGGYSGGNMERPALKRLLQDVQNGLVDIIVVYKIDRLTRSLMDFSKIVEILDKHNASFVSITQHFNTTTSMGRLTLNMLLSFAQFEREVTGERIRDKISASKKKGMWMGGKPPLGYYRKDKKIYPDEEKSALVRSIFEKYTELKSTTLLKDWLVEQGHNISVGNLNCILRNKAYIGLVGHKGTWYQGEHQGIISQELFGQVQAVMADNRINRQHYDPSKSLLSGKLYDDKDNAMSPSWSTGSGGKKYRYYVSQALIRKEPGKVGKVSKVSLQKLEQFIDNWFSEFLKDKTKIYPYIQQFGVSKQKEIIKRLPSYPITRDVEKELIKRIKLNLNKIGITLYQEQVTELLNAIYENREMRQLKPEELQQENPYTEPYHIGTIANGEKIIVGRFVESKKRPNTELIKILNQAYTWHQDVINGASTQTIAKRDKVCVQYVRRILNLSFLSPKIIRAILNGTRPADCTLKKLLSIKSSNWQEQEQSFYK

SEQ ID NO: 2147 - DNA, 50 bp, Elusimicrobiaceae bacterium
  source 1..50: mol_type = genomic DNA
tgcctaacggggataaatgctgaaagttcaaaactaaaatacagtgggtg

SEQ ID NO: 2148 - DNA, 40 bp, Elusimicrobiaceae bacterium
  source 1..40: mol_type = genomic DNA
aacggggatatatgctaattattcaaaactaaaatacgga

SEQ ID NO: 2149 - DNA, 50 bp, Elusimicrobiaceae bacterium
  source 1..50: mol_type = genomic DNA
tgcctaacggggataaatgctgaaggttcaaaactaaaatacagtgggtg

SEQ ID NO: 2150 - DNA, 40 bp, Elusimicrobiaceae bacterium
  source 1..40: mol_type = genomic DNA
atcgctaatgtatactcatggttcaaaactaaaatacaga

SEQ ID NO: 2151 - protein, 407 aa, Roseburia inulinivorans
MNNRIDAIYARQSVDKKDSISIESQIEFCKYELKGGNCKEYTDKGYSGKNTDRPKFQELVRDIKRGLIAKVVVYKLDRISRSILDFANMMELFQQYNVEFVSSTEKFDTSTPMGRAMLNICIVFAQLERETIQKRVTDAYYSRSQRGFKMGGKAPYGFHTEPIKMDGINTKKLVVNPEEAANIRLMFEMYAQPTTSYGDITRYFAEQGILFHGKELIRPTLAQMLRNPVYVQADLDVYEFFKSQGTVIVNDVADFTGMNGCYLYQGRDVKASKKNDLKDQMLVLAPHEGIVPSDTWLTCRKKLMNNMKIQSARKATHTWLAGKIKCGNCGYALMSIYNPSGKQYLRCTKRLDNKSCPGCGKIITSELEAVVYQQMVKKLASYKTLTGKRKRQRQTRKSPPCKWNLPM

SEQ ID NO: 2152 - DNA, 50 bp, Roseburia inulinivorans; identical to SEQ ID NO: 12
  source 1..50: mol_type = genomic DNA

SEQ ID NO: 2153 - DNA, 40 bp, Roseburia inulinivorans
  source 1..40: mol_type = genomic DNA
aattgttttattcttcatattcctttttacaaaactaatt

SEQ ID NO: 2154 - DNA, 50 bp, Roseburia inulinivorans; identical to SEQ ID NO: 324
  source 1..50: mol_type = genomic DNA

SEQ ID NO: 2155 - DNA, 40 bp, Roseburia inulinivorans
  source 1..40: mol_type = genomic DNA
gattgtttttatctttataaccctttttataaaacagatc

SEQ ID NO: 2156 - protein, 503 aa, Roseburia inulinivorans; identical to SEQ ID NO: 341

SEQ ID NO: 2157 - DNA, 50 bp, Roseburia inulinivorans; identical to SEQ ID NO: 12
  source 1..50: mol_type = genomic DNA

SEQ ID NO: 2158 - DNA, 40 bp, Roseburia inulinivorans; identical to SEQ ID NO: 2153
  source 1..40: mol_type = genomic DNA

SEQ ID NO: 2159 - DNA, 50 bp, Roseburia inulinivorans; identical to SEQ ID NO: 324
  source 1..50: mol_type = genomic DNA

SEQ ID NO: 2160 - DNA, 40 bp, Roseburia inulinivorans; identical to SEQ ID NO: 2155
  source 1..40: mol_type = genomic DNA

SEQ ID NO: 2161 - protein, 493 aa, Enterocloster bolteae
MDSRIDAIYGRQSIDKKDSISIESQFEFCRYELKGGEGKEYKDKGYSGKNIERPDFQRLLQDIRLGLIKRVIVYKLDRISRSIVDFAKLMELFKQYDVEFVSCTEKFDTSTPMGRAMLNICIVFAQLERESIQMRVQDAFYSRCTKGYYMRGRTPYGFDTEPIVMDGIKTKKLVENAEMDFAELMYQMYAEPGNSYGDISRYFAENDIKVYDKSLKRGFIAQLLRNPVYVQADMDIYEYFKAQGVKIESPPEMFTGDNSCYLYQGREGEEPILVIAPHQGRIPSQLWLTVQRKLSQNTTFQNGRKCHNTWLAGKIKCGRCGYALASLNARNGVTYLRCKQRADNKSCEGAGTLTAQSMEVFVYGEMVKKMRKFHTLKGGKEQSYNPKLTAARVALAKTESEIEKLLDTLSGANPLLLQYANTRIEELDAERQKQLRLVADLTANSVSASQIDSITGYLDDWESVSFDDKRKVVDILISQIDTTSESVTIHWKI

SEQ ID NO: 2162 - DNA, 50 bp, Enterocloster bolteae
  source 1..50: mol_type = genomic DNA
cattatgcccttgtaaaaaatagttaaggtttctttacaaaggcataatc

SEQ ID NO: 2163 - DNA, 40 bp, Enterocloster bolteae
  source 1..40: mol_type = genomic DNA
ttctgtctcaatctacacatataaatagagtaacaggaca

SEQ ID NO: 2164 - DNA, 50 bp, Enterocloster bolteae; identical to SEQ ID NO: 2162
  source 1..50: mol_type = genomic DNA

SEQ ID NO: 2165 - DNA, 40 bp, Enterocloster bolteae
  source 1..40: mol_type = genomic DNA
atctctctaaatccacacataaaaacagagcaactggaca

SEQ ID NO: 2166 - protein, 587 aa, Vibrio breoganii
MTPKVYPYHRYSTKNQRKGTSIKRQRAFAEKVATQLNLTLGDSFIDDGQSGFHGKNSKDGGALFDFIAKAKSGAIPRGSVLAVESWDRFSRQDFRKPLKRLLDLLDEDIKVAVGTGSEYQLFEKQADNDADAEFMGFSTLLVAQMEMFRAWSESKRKSEMQIKSYYHTIDNHNSTGQTVRKIPGHYPKWIVSDKNGFQLHEDSKYLEQAIELYLSGMSYEDIAGKLKGKPCFWTNGWNAPALRKAFISPQLHGDRPVEVQGETKTAKEYFPALITKDKFNELQRAIERRKGHQGQQTFVSIVTGGGWLFCGFCGSPMSGQTQSFRESSRYTGIKLGDHTFDYSKVKCGSKKSDCICGMSHTTTIEKILLEFCADKANMSFLESSNSYDSEIIQVKNEIEQCSLRLTNLSNAIADFGYTTETQAVFKATTKQKSELEEKLAGYLSLEQKQTQVTGDTLERMLTLYDENTDESRQTISEILSSTIKKCSLITWKTRDSSLYETKINKFGKNKGKRTKEIKLERVREYPLCMELTTDARLPIKGEVCVVLEFVSGAKRLVYADDKGNWTMCYDGGLDRYYTRIDDKIIRT

SEQ ID NO: 2167 - DNA, 50 bp, Vibrio breoganii
  source 1..50: mol_type = genomic DNA
tgtactatacttcttaaccactgcttgatgtaattaaaaagtgtagtaca

SEQ ID NO: 2168 - DNA, 40 bp, Vibrio breoganii
  source 1..40: mol_type = genomic DNA
aagatacgaaaaccattgttttacacggttcgggtaatac

SEQ ID NO: 2169 - DNA, 50 bp, Vibrio breoganii
  source 1..50: mol_type = genomic DNA
tgtactatacttcttaaccactgcaagatgtaattaaaaagtgtagtaca

SEQ ID NO: 2170 - DNA, 40 bp, Vibrio breoganii
  source 1..40: mol_type = genomic DNA
aaattacaaagactattgtaaaacatggtttgggtaatac

SEQ ID NO: 2171 - protein, 481 aa, Streptococcus pneumoniae
MITTNKVAIYVRVSTTNQVEEGYSIDEQKDKLSSYCDIKDWNVYKVYTDGGFSGSNTDRPALESLIKDAKKRKFDTVLVYKLDRLSRSQKDTLHLIEDVFIKNGIEFLSLQENFDTSTPFGKAMIGLLSVFAQLEREQIKERMQLGKLGRAKSGKSMMWAKTSYGYDYHKETGTVTINPAQALTIKFIFESYLRGRSITKLRDDLNEKYPKHVPWSYRAVRTILDNPVYCGFNQYKGEIYPGNHEPIISKEEYDKTQSELKIRQRTAAENVNPRPFQAKYILSGIAQCGYCGAPLKIMLGVKRKDGSRLKKYECHQRHPRTLRGVTTYNDNKKCDSGFYYKDKLEASVLKEISKLQDDADYLDKIFSGDNAETIDRESYKKQIEELSKKLSRLNDLYIDDRITLEELQSKSAEFISMRGTLETELENDPALRKNKRKADMRKLLNAEKVFSMDYENQKVLVRRLINKVKVTAEDIVINWKI

SEQ ID NO: 2172 - DNA, 50 bp, Streptococcus pneumoniae
  source 1..50: mol_type = genomic DNA
taaataattttagtaacctacatttcaatcaaggatagtaaaactctcac

SEQ ID NO: 2173 - DNA, 40 bp, Streptococcus pneumoniae
  source 1..40: mol_type = genomic DNA
cagcaagactactaacatctccaccaatgtaaaagcttta

SEQ ID NO: 2174 - DNA, 50 bp, Streptococcus pneumoniae
  source 1..50: mol_type = genomic DNA
taaataattttagtaacctacattagaatcaaggatagtaaaactctcac

SEQ ID NO: 2175 - DNA, 40 bp, Streptococcus pneumoniae
  source 1..40: mol_type = genomic DNA
cagcaggactagaagcatcagcaccaatgcaaattcttca

SEQ ID NO: 2176 - protein, 479 aa, Streptococcus pneumoniae
MNKVAIYVRVSTKGQAEEGYSIDEQIALLTSYCSIHKWKIHDTYVDAGISGATIERPELSRLSRDAQKKKFNTMIVYDLKRLGRSQRNNIAFIEDVLEKNGIGFISLTENFDTSTPLGKAMVGILSAFGQLDRDTIRERMMMGKIGRAKSGKPMMTSTIAFGYTYDKVTSSLNINPAEAIIVKTIFNEYLSGRSLTKLRDYLNENDLLRNGKPWNYQGVSRILRNPVYMGMVRFRGEVYQGNHDPIIDSETFEAVQKELKKRQLETYEFNKNTRPFRAKYMLSGIIKCGYCGSPMGVTLGTKRKDGTRNIRYQCVNRFPRTTKGITVYNNGQKCNSGFYEKDDIEIYVLGQVRLLQLNKAKLNKMFETPEIINVEEIENQINSLNNKMKRLNDLYLNDMISLDELKTQTYTFLKQKDLLENELNNNPAIHQEENRKQFQKLLGTKDITQLSYEEQSFAIKNLIDKVFVKPGIIDINWRI

SEQ ID NO: 2177 - DNA, 50 bp, Streptococcus pneumoniae
  source 1..50: mol_type = genomic DNA
ataacaaatttagatactcttgtttcaagtagtgtatctaaaactctcac

SEQ ID NO: 2178 - DNA, 40 bp, Streptococcus pneumoniae; identical to SEQ ID NO: 2173
  source 1..40: mol_type = genomic DNA

SEQ ID NO: 2179 - DNA, 50 bp, Streptococcus pneumoniae
  source 1..50: mol_type = genomic DNA
ataacaaatttagatactcttgttagaagtagtgtatctaaaactctcac

SEQ ID NO: 2180 - DNA, 40 bp, Streptococcus pneumoniae; identical to SEQ ID NO: 2175
  source 1..40: mol_type = genomic DNA

SEQ ID NO: 2181 - protein, 481 aa, Streptococcus pneumoniae
MKTMNKVAIYVRVSTTNQVEEGYSIDEQKDKLSSYCDIKDWNVYKVYTDGGFSGSNTDRPALESLIKDAKKRKFDTVLVYKLDRLSRSQKDTLHLIEDVFIKNGIEFLSLQENFDTSTPFGKAMIGLLSVFAQLEREQIKERMQLGKLGRAKSGKSMMWAKTSYGYDYHKETGTVTINPAQALTIKFIFESYLRGRSITKLRDDLNEKYPKHVPWSYRAVRTILDNPVYCGFNQYKGEIYPGNHEPIISKEEYDKTQSELKIRQRTAAENVNPRPFQAKYILSGIAQCGYCGAPLKIMLGVKRKDGSRLKKYECHQRHPRTLRGVTTYNDNKKCDSGFYYKDKLEAYVLKEISKLQDDADYLDKIFSGDNAETIDRESYKKQIEELSKKLSRLNDLYIDDRITLEELQSKSAEFISMRGTLETELENDPALRKNKRKADMRKLLNAEKVFSMDYENQKVLVRRLINKVKVIAEDIVINWKI

SEQ ID NO: 2182 - DNA, 50 bp, Streptococcus pneumoniae; identical to SEQ ID NO: 2172
  source 1..50: mol_type = genomic DNA

SEQ ID NO: 2183 - DNA, 40 bp, Streptococcus pneumoniae; identical to SEQ ID NO: 2173
  source 1..40: mol_type = genomic DNA

SEQ ID NO: 2184 - DNA, 50 bp, Streptococcus pneumoniae; identical to SEQ ID NO: 2174
  source 1..50: mol_type = genomic DNA

SEQ ID NO: 2185 - DNA, 40 bp, Streptococcus pneumoniae; identical to SEQ ID NO: 2175
  source 1..40: mol_type = genomic DNA

SEQ ID NO: 2186 - protein, 481 aa, Streptococcus pneumoniae
MKTMNKVAIYVRVSTTSQVEEGYSIDEQKAKLSSYCDIKDWNVYKIYTDGGFSGSNTDRPALESLIKDAKKRKFDTVLVYKLDRLSRSQKDTLHLIEDVFIKNGIEFLSLQENFDTSTPFGKAMIGLLSVFAQLEREQIKERMQLGKIGRAKAGKSMMWAKTSYGYNYHKETGTVTINPAQALAVKFIFESYLRGRSITKLRDDLNEKYPKHVPWSYRAVRTILDNPVYCGFNQYKGEIYPGNHEPIISKEEYDKTQSELKIRQRTAAENVNPRPFQAKYILSGIAQCGYCGAPLKIMLGVKRKDGSRLKKYECHQRHPRTLRGVTTYNDNKKCDSGFYYKDKLEASVLKEISKLQDDADYLDKIFSGDNAETIDRESYKKQIEELSKKLSRLNDLYIDDRITLEELQSKSAEFISMRATLETELENDSALRKNKRKADMRKLLNAEKVFSMDYEKQKVLVRGLINKVQVTAEDIVIKWKI

SEQ ID NO: 2187 - DNA, 50 bp, Streptococcus pneumoniae
  source 1..50: mol_type = genomic DNA
taaataattttagtaacttacatttcaatcaaggatagtaaaactctcac

SEQ ID NO: 2188 - DNA, 40 bp, Streptococcus pneumoniae; identical to SEQ ID NO: 2173
  source 1..40: mol_type = genomic DNA

SEQ ID NO: 2189 - DNA, 50 bp, Streptococcus pneumoniae
  source 1..50: mol_type = genomic DNA
taaataattttagtaacttacattagaatcaaggatagtaaaactctcac

SEQ ID NO: 2190 - DNA, 40 bp, Streptococcus pneumoniae; identical to SEQ ID NO: 2175
  source 1..40: mol_type = genomic DNA

SEQ ID NO: 2191 - protein, 481 aa, Streptococcus pneumoniae
MKTMNKVAIYVRVSTTNQVEEGYSIDEQKDKLSSYCDIKDWNVYKVYTDGGFSGSNTDRPALESLIKDAKKRKFDTVLVYKLDRLSRSQKDTLHLIEDVFIKNGIEFLSLQENFDTSTPFGKAMIGLLSVFAQLEREQIKERMQLGKIGRAKAGKSMMWAKTSYGYDYHRETGTITINPAQALTIKFIFESYLRGRSITKLRDDLNEKYPKHVPWSYRAVRTILDNPVYCGFNQYKGEIYPGNHESIISKEEYDKTQSELKIRQRTAAENVNPRPFQAKYILSGIAQCGYCGAPLKIMLGVKRKDGSRLKKYECHQRHPRTLRGVTTYNDNKKCDSGFYYKDKLEAYVLTEISKLQDNAGYLDKIFSGDNAETIDRESYKKQIEELSKKLSRLNDLYIDDRITLEELQSKSAEFISMRGTLETELENDPALRKNKRKADMRKLLNAEKIFSMDYEGQKVLVRGLINKVQVTAEDIVINWKI

SEQ ID NO: 2192 - DNA, 50 bp, Streptococcus pneumoniae
  source 1..50: mol_type = genomic DNA
taaataattttagtaacctacatttcaatcaaggatagtaaaattctcac

SEQ ID NO: 2193 - DNA, 40 bp, Streptococcus pneumoniae; identical to SEQ ID NO: 2173
  source 1..40: mol_type = genomic DNA

SEQ ID NO: 2194 - DNA, 50 bp, Streptococcus pneumoniae
  source 1..50: mol_type = genomic DNA
taaataattttagtaacctacattagaatcaaggatagtaaaattctcac

SEQ ID NO: 2195 - DNA, 40 bp, Streptococcus pneumoniae; identical to SEQ ID NO: 2175
  source 1..40: mol_type = genomic DNA

SEQ ID NO: 2196 - protein, 481 aa, Streptococcus pneumoniae
MKTMNKVAIYVRVLTTNQVEEGYSIDEQKDKLSSYCDIKDWNVYKVYTDGGFSGSNTDRPALESLIKDAKKRKFDTVLVYKLDRLSRSQKDTLHLIEDVFIKNGIEFLSLQENFDTSTPFGKAMIGLLSVFAQLEREQIKERMQLGKLGRAKSGKSMMWAKTSYGYDYHKETGTVTINPAQALTIKFIFESYLRGRSITKLRDDLNEKYPKHVPWSYRAVRTILDNPVYCGFNQYKGEIYPGNHEPIISKEEYDKTQSELKIRQRTAAENVNPRPFQAKYILSGIAQCGYCGAPLKIMLGVKRKDGSRLKKYECHQRHPRTLRGVTTYNDNKKCDSGFYYKDKLEASVLKEISKLQDDADYLDKIFSGDNAETIDRESYKKQIEELSKKLSRLNDLYIDDRITLEELQSKSAEFISMRGTLETELENDPALRKNKRKADMRKLLNAEKVFSMDYESQKVLVRRLINKVKVTAEDIVINWKI

SEQ ID NO: 2197 - DNA, 50 bp, Streptococcus pneumoniae; identical to SEQ ID NO: 2172
  source 1..50: mol_type = genomic DNA

SEQ ID NO: 2198 - DNA, 40 bp, Streptococcus pneumoniae; identical to SEQ ID NO: 2173
  source 1..40: mol_type = genomic DNA

SEQ ID NO: 2199 - DNA, 50 bp, Streptococcus pneumoniae; identical to SEQ ID NO: 2174
  source 1..50: mol_type = genomic DNA

SEQ ID NO: 2200 - DNA, 40 bp, Streptococcus pneumoniae; identical to SEQ ID NO: 2175
  source 1..40: mol_type = genomic DNA

SEQ ID NO: 2201 - protein, 481 aa, Streptococcus pneumoniae
MKTMNKVAIYVRVSTTNQVEEGYSIDEQKDKLSSYCDIKDWNVYKVYTDGGFSGSNTDRPALESLIKDAKKRKFDTVLVYKLDRLSRSQKDTLHLIEDVFIKNGIEFLSLQENFDTSTPFGKAMIGLLSVFAQLEREQIKERMQLGKLGRAKSGKSMMWAKTSYGYDYHKETGTVTINPAQALTIKFIFESYLRGRSITKLRDDLNEKYPKHVPWSYRAVRTILDNPVYCGFNQYKGEIYPGNHEPIISKEEYDKTQSELKIRQRTAAENVNPRPFQAKYILSGIAQCGYCGAPLKIMLGVKRKDGSRLKKYECHQRHPRTLRGVTTYNDNKKCDSGFYYKDKLEASVLKEISKLQDDADYLDKIFSGDNAETIDRESYKKQIEELSKKLSRLNDLYIDDRITLEELQSKSAEFISMRGTLETELENDPALRKNKRKADMRKLLNAEKVFSMDYESQKVLVRRLINKVKVTAEDIVINWKI

SEQ ID NO: 2202 - DNA, 50 bp, Streptococcus pneumoniae; identical to SEQ ID NO: 2172
  source 1..50: mol_type = genomic DNA

SEQ ID NO: 2203 - DNA, 40 bp, Streptococcus pneumoniae; identical to SEQ ID NO: 2173
  source 1..40: mol_type = genomic DNA

SEQ ID NO: 2204 - DNA, 50 bp, Streptococcus pneumoniae; identical to SEQ ID NO: 2174
  source 1..50: mol_type = genomic DNA

SEQ ID NO: 2205 - DNA, 40 bp, Streptococcus pneumoniae; identical to SEQ ID NO: 2175
  source 1..40: mol_type = genomic DNA

SEQ ID NO: 2206 - protein, 481 aa, Streptococcus pneumoniae
MKTMNKVAIYVRVSTTSQVEEGYSIDEQKAKLSSYCDIKDWNVYKIYTDGGFSGSNTDRPALESLIKDAKKRKFDTVLVYKLDRLSRSQKDTLHLIEDVFIKNGIEFLSLQENFDTSTPFGKAMIGLLSVFAQLEREQIKERMQLGKIGRAKAGKSMMWAKTSYGYNYHKETGTVTINPAQALAVKFIFESYLRGRSITKLRDDLNEKYPKHVPWSYRAVRTILDNPVYCGFNQYKGEIYPGNHEPIISKEEYDKTQSELKIRQRTAAENVNPRPFQAKYILSGIAQCGYCGAPLKIMLGVKRKDGSRLKKYECHQRHPRTLRGVTTYNDNKKCDSGFYYKDKLEASVLKEISKLQDDADYLDKIFSGDNAETIDRESYKKQIEELSKKLSRLNDLYIDDRITLEELQSKSSEFISMRATLETELENDSALRKNKRKADMRKLLNAEKVFSMDYEKQKVLVRGLINKVQVTAEDIVIKWKI

SEQ ID NO: 2207 - DNA, 50 bp, Streptococcus pneumoniae; identical to SEQ ID NO: 2187
  source 1..50: mol_type = genomic DNA

SEQ ID NO: 2208 - DNA, 40 bp, Streptococcus pneumoniae; identical to SEQ ID NO: 2173
  source 1..40: mol_type = genomic DNA

SEQ ID NO: 2209 - DNA, 50 bp, Streptococcus pneumoniae; identical to SEQ ID NO: 2189
  source 1..50: mol_type = genomic DNA

SEQ ID NO: 2210 - DNA, 40 bp, Streptococcus pneumoniae; identical to SEQ ID NO: 2175
  source 1..40: mol_type = genomic DNA

SEQ ID NO: 2211 - protein, 481 aa, Streptococcus pneumoniae
MIATNKVAIYVRVSTTNQVEEGYSIDEQKDKLSSYCDIKDWNVYKVYTDGGFSGSNTDRPALESLIKDAKKRKFDTVLVYKLDRLSRSQKDTLYLIEDIFIKNNIAFLSLQENFDTSTPFGKAMIGLLSVFAQLEREQIKERMQLGKIGRAKAGKSMMWAKTSYGYDYHRETGTITINPAQALAIKFIFESYLRGRSITKLRDDLNEKYPKHVPWSYRAVRTILDNPVYCGFNQYKGEIYPGNHEPIISKEEYDKTQSELKIRQRTAAENVNPRPFQAKYILSGIAQCGYCGAPLKIMLGVKRKDGSRLKKYECHQRHPRTLRGVTTYNDNKKCDSGFYYKDKLEASVLKEISKLQDDADYLDKIFSGDNAETIDRESYKKQIEELSKKLSRLNDLYIDDRITLEELQSKSAEFISMRGTLETELENDPALRKNKRKADMRKLLNAEKVFSMDYENQKVLVRRLINKVKVTAEDIVINWKI

SEQ ID NO: 2212 - DNA, 50 bp, Streptococcus pneumoniae; identical to SEQ ID NO: 2172
  source 1..50: mol_type = genomic DNA

SEQ ID NO: 2213 - DNA, 40 bp, Streptococcus pneumoniae; identical to SEQ ID NO: 2173
  source 1..40: mol_type = genomic DNA

SEQ ID NO: 2214 - DNA, 50 bp, Streptococcus pneumoniae; identical to SEQ ID NO: 2174
  source 1..50: mol_type = genomic DNA

SEQ ID NO: 2215 - DNA, 40 bp, Streptococcus pneumoniae; identical to SEQ ID NO: 2175
  source 1..40: mol_type = genomic DNA

SEQ ID NO: 2216 - protein, 481 aa, Streptococcus pneumoniae
MITTNKVAIYVRVSTTSQVEEGYSIDEQKAKLSSYCDIKDWSVYKIYTDGGFSGSNTDRPALEGLIKDAKKRKFDTVLVYKLDRLSRSQKDTLYLIEDIFIKNNIAFLSLQENFDTSTPFGKAMIGLLSVFAQLEREQIKERMQLGKIGRAKAGKSMMWAKTSYGYDYHRETGTITINPAQALAVKFIFESYLRGRSITKLRDDLNEKYPKHVPWSYRAVRTILDNPVYCGFNQYKGEIYPGNHESIISKEEYDKTQSELKIRQRTAAENVNPRPFQAKYILSGIAQCGYCGAPLKIMLGVKRKDGSRLKKYECHQRHPRTLRGVTTYNDNKKCDSGFYYKDKLEASVLKEISKLQDDADYLDKIFSGDNAETIDRESYKKQIEELSKKLSRLNDLYIDDRITLEELQSKSAEFISMRGTLETELENDPALRKNKRKADMRKLLNAEKVFSMDYENQKVLVRRLINKVKVTAEDIVINWKI

SEQ ID NO: 2217 - DNA, 50 bp, Streptococcus pneumoniae; identical to SEQ ID NO: 2172
  source 1..50: mol_type = genomic DNA

SEQ ID NO: 2218 - DNA, 40 bp, Streptococcus pneumoniae; identical to SEQ ID NO: 2173
  source 1..40: mol_type = genomic DNA

SEQ ID NO: 2219 - DNA, 50 bp, Streptococcus pneumoniae; identical to SEQ ID NO: 2174
  source 1..50: mol_type = genomic DNA

SEQ ID NO: 2220 - DNA, 40 bp, Streptococcus pneumoniae; identical to SEQ ID NO: 2175
  source 1..40: mol_type = genomic DNA

SEQ ID NO: 2221 - protein, 478 aa, Streptococcus pneumoniae
MNKVAIYVRVSTTSQVEEGYSIDEQKAKLSSYCDIKDWNVYKIYTDGGFSGSNTDRPALESLIKDAKKRKFDTVLVYKLDRLSRSQKDTLHLIEDVFIKNGIEFLSLQENFDTSTPFGKAMIGLLSVFAQLEREQIKERMQLGKIGRAKAGKSMMWAKTSYGYNYHKETGTVTINPAQALAVKFIFESYLRGRSITKLRDDLNEKYPKHVPWSYRAVRTILDNPVYCGFNQYKGEIYPGNHEPIISKEEYDKTQSELKIRQRTAAENVNPRPFQAKYILSGIAQCGYCGAPLKIMLGVKRKDGSRLKKYECHQRHPRTLRGVTTYNDNKKCDSGFYYKDKLEASVLKEISKLQDDADYLDKIFSGDNAETIDRESYKKQIEELSKKLSRLNDLYIDDRITLEELQSKSAEFISMRATLETELENDSALRKNKRKADMRKLLNAEKVFSMDYEKQKVLVRGLINKVQVTAEDIVIKWKI

SEQ ID NO: 2222 - DNA, 50 bp, Streptococcus pneumoniae; identical to SEQ ID NO: 2187
  source 1..50: mol_type = genomic DNA

SEQ ID NO: 2223 - DNA, 40 bp, Streptococcus pneumoniae; identical to SEQ ID NO: 2173
  source 1..40: mol_type = genomic DNA

SEQ ID NO: 2224 - DNA, 50 bp, Streptococcus pneumoniae; identical to SEQ ID NO: 2189
  source 1..50: mol_type = genomic DNA

SEQ ID NO: 2225 - DNA, 40 bp, Streptococcus pneumoniae; identical to SEQ ID NO: 2175
  source 1..40: mol_type = genomic DNA

SEQ ID NO: 2226 - protein, 481 aa, Streptococcus pneumoniae
MITTNKVAIYVRVSTTNQVEEGYSIDEQKDKLSSYCDIKDWNVYKVYTDGGFSGSNTDRPALESLIKDAKKRKFDTVLVYKLDRLSRSQKDTLHLIEDVFIKNGIEFLSLQENFDTSTPFGKAMIGLLSVFAQLEREQIKERMQLGKIGRAKAGKSMMWAKTSYGYDYHRETGTITINPAQALAIKFIFESYLRGRSITKLRDDLNEKYPKHVPWSYRAVRTILDNPVYCGFNQYKGEIYPGNHESIISKEEYDKTQSELKIRQRTAAENVNPRPFQAKYILSGIAQCGYCGAPLKIMLGVKRKDGSRLKKYECHQRHPRTLRGVTTYNDNKKCDSGFYYKDKLEAYVLTEISKLQDNAGYLDKIFSGDNAETIDRESYKKQIEELSKKLSRLNDLYIDDRITLEELQSKSAEFISMRGTLETELENDPALRKNKRKADMRKLLNAEKIFSMDYEGQKVLVRGLINKVQVTAEDIVINWKI

SEQ ID NO: 2227 - DNA, 50 bp, Streptococcus pneumoniae; identical to SEQ ID NO: 2192
  source 1..50: mol_type = genomic DNA

SEQ ID NO: 2228 - DNA, 40 bp, Streptococcus pneumoniae; identical to SEQ ID NO: 2173
  source 1..40: mol_type = genomic DNA

SEQ ID NO: 2229 - DNA, 50 bp, Streptococcus pneumoniae; identical to SEQ ID NO: 2194
  source 1..50: mol_type = genomic DNA

SEQ ID NO: 2230 - DNA, 40 bp, Streptococcus pneumoniae; identical to SEQ ID NO: 2175
  source 1..40: mol_type = genomic DNA

SEQ ID NO: 2231 - protein, 481 aa, Streptococcus pneumoniae
MKTMNKVAIYVRVSTTNQVEEGYSIDEQKDKLSSYCDIKDWNVYKVYTDGGFSGSNTDRPALESLIKDAKKRKFDTVLVYKLDRLSRSQKDTLHLIEDVFIKNGIEFLSLQENFDTSTPFGKAMIGLLSVFAQLEREQIKERMQLGKIGRAKAGKSMMWAKTSYGYDYHRETGTITINPAQALAIKFIFESYLRGRSITKLRDDLNEKYPKHVPWSYRAVRTILDNPVYCGFNQYKGEIYPGNHEPIISKEEYDKTQSELKIRQRTAAENVNPRPFQAKYILSGIAQCGYCGAPLKIMLGVKRKDGSRLKKYECHQRHPRTLRGVTTYNDNKKCDSGFYYKDKLEASVLKEISKLQDDDDYLDKIFSGDNAETIDRESYKKQIEELSKKLSRLNDLYIDDRITLEELQSKSAEFISMRATLETELENDPALRKNKRKADMRKLLNAEKVFSMDYEGQKVLVRGLINKVKVTAEDIVINWKI

SEQ ID NO: 2232 - DNA, 50 bp, Streptococcus pneumoniae; identical to SEQ ID NO: 2172
  source 1..50: mol_type = genomic DNA

SEQ ID NO: 2233 - DNA, 40 bp, Streptococcus pneumoniae; identical to SEQ ID NO: 2173
  source 1..40: mol_type = genomic DNA

SEQ ID NO: 2234 - DNA, 50 bp, Streptococcus pneumoniae; identical to SEQ ID NO: 2174
  source 1..50: mol_type = genomic DNA

SEQ ID NO: 2235 - DNA, 40 bp, Streptococcus pneumoniae; identical to SEQ ID NO: 2175
  source 1..40: mol_type = genomic DNA

SEQ ID NO: 2236 - protein, 481 aa, Streptococcus pneumoniae
MKTMNKVAIYVRVSTTNQVEEGYSIDEQKDKLSSYCDIKDWNVYKVYTDGGFSGSNTDRPALESLIKDAKKRKFDTVLVYKLDRLSRSQKDTLHLIEDVFIKNGIEFLSLQENFDTSTPFGKAMIGLLSVFAQLEREQIKERMQLGKLGRAKSGKSMMWAKTSYGYDYHKETGTVTINPAQALTIKFIFESYLRGRSITKLRDDLNEKYPKHVPWSYRAVRTILDNPVYCGFNQYKGEIYPGNHEPIISKEEYDKTQSELKIRQRTAAENVNPRPFQAKYILSGIAQCGYCGAPLKIMLGVKRKDGSRLKKYECHQRHPRTLRGVTTYNDNKKCDSGFYYKDKLEASVLKEISKLQDDADYLDKIFSGDNAETIDRERYKKQIEELSKKLSRLNDLYIDDRITLEELQSKSAEFISMRATLETELENDPALRKNKRKADMRKLLNAEKVFSMDYEGQKVLVRGLINKVQVTAEDIVIKWKI

SEQ ID NO: 2237 - DNA, 50 bp, Streptococcus pneumoniae; identical to SEQ ID NO: 2172
  source 1..50: mol_type = genomic DNA

SEQ ID NO: 2238 - DNA, 40 bp, Streptococcus pneumoniae; identical to SEQ ID NO: 2173
  source 1..40: mol_type = genomic DNA

SEQ ID NO: 2239 - DNA, 50 bp, Streptococcus pneumoniae; identical to SEQ ID NO: 2174
  source 1..50: mol_type = genomic DNA

SEQ ID NO: 2240 - DNA, 40 bp, Streptococcus pneumoniae; identical to SEQ ID NO: 2175
  source 1..40: mol_type = genomic DNA

SEQ ID NO: 2241 - protein, 481 aa, Streptococcus pneumoniae
MIATNKVAIYVRVSTTNQVEEGYSIDEQKDKLSSYCDIKDWNVYKVYTDGGFSGSNTDRPALESLIKDAKKRKFDTVLVYKLDRLSRSQKDTLHLIEDVFIKNGIEFLSLQENFDTSTPFGKAMIGLLSVFAQLEREQIKERMQLGKIGRAKAGKSMMWAKTSYGYDYHRETGTITINPAQALAVKFIFESYLRGRSITKLRDDLNEKYPKHVPWSYRAVRTILDNPVYCGFNQYKGEIYPGNHESIISKEEYDKTQSELKIRQRTAAENVNPRPFQAKYILSGIAQCGYCGAPLKIMLGVKRKDGSRLKKYECHQRHPRTLRGVTTYNDNKKCDSGFYYKDKLEAYVLKEISKLQDDADYLDKIFSGDNAETIDRESYKKQIEELSKKLSRLNDLYIDDRITLEELQSKSAEFISMRGTLETKLENDPALRKNKRKADMRKLLNAEKVFSMDYENQKVLVRRLINKVKVTAEDIVINWKI

SEQ ID NO: 2242 - DNA, 50 bp, Streptococcus pneumoniae; identical to SEQ ID NO: 2172
  source 1..50: mol_type = genomic DNA

SEQ ID NO: 2243 - DNA, 40 bp, Streptococcus pneumoniae; identical to SEQ ID NO: 2173
  source 1..40: mol_type = genomic DNA

SEQ ID NO: 2244 - DNA, 50 bp, Streptococcus pneumoniae; identical to SEQ ID NO: 2174
  source 1..50: mol_type = genomic DNA

SEQ ID NO: 2245 - DNA, 40 bp, Streptococcus pneumoniae; identical to SEQ ID NO: 2175
  source 1..40: mol_type = genomic DNA

SEQ ID NO: 2246 - protein, 479 aa, Streptococcus pneumoniae
MNKVAIYVRVSTKGQAEEGYSIDEQIALLTSYCSIHKWKIHDTYVDAGISGATIERPELSRLSRDAQKKKFNTMIVYDLKRLGRSQRNNIAFIEDVLEKNGIGFISLTENFDTSTPLGKAMVGILSAFGQLDRDTIRERMMMGKIGRAKSGKPMMTSTIAFGYTYDKVTSSLNINQAEAIVVKTIFNEYLSGRSLTKLRDYLNENDLLRNGKPWNYQGVSRVLRNPVYMGMVRFRGEVYQGNHDPIIDSETFEAVQKELKKRQLETYEFNKNTRPFRAKYMLSGIIKCGYCGSPMGVTLGTKRKDGTRNIRYQCVNRFPRTTKGITVYNNGQKCNSGFYEKDDIEIYVLGQVRLLQLNEAKLNKMFETPEIINVEEIENQINSLNNKMKRLNDLYLNDMISLDELKTQTYTFLKQKDLLENELNNNPAIHQEENRKQFQKLLGTKDITQLSYEEQSFAIKNLIDKVFVKPGIIDINWRI

SEQ ID NO: 2247 - DNA, 50 bp, Streptococcus pneumoniae
  source 1..50: mol_type = genomic DNA
ataacaaatttagatactcttgtttcaagtagcgtatctaaaactcttat

SEQ ID NO: 2248 - DNA, 40 bp, Streptococcus pneumoniae; identical to SEQ ID NO: 2173
  source 1..40: mol_type = genomic DNA

SEQ ID NO: 2249 - DNA, 50 bp, Streptococcus pneumoniae
  source 1..50: mol_type = genomic DNA
ataacaaatttagatactcttgttagaagtagcgtatctaaaactcttat

SEQ ID NO: 2250 - DNA, 40 bp, Streptococcus pneumoniae; identical to SEQ ID NO: 2175
  source 1..40: mol_type = genomic DNA

SEQ ID NO: 2251 - protein, 480 aa, Streptococcus pneumoniae
MKSTNKVAIYVRVSTTSQADEGYSIDEQIDKLESYCKIKDWSVYKVYTDGGFSGSNTNRPAIEQLIKDAQKKKFDTVLVYKLDRLSRSQKDTLYLIEEVFIKNGIEFLSLQENFDTSTPFGKAMIGLLAVFAQLEREQIKERMQLGKLGRAKAGKSMMWAKTSYGYDYHKETGTVTINPVQSLAIKFIFESYLSGRSITKLRDDLNEKYPKPIPWNYRAVRVILDNPVYCGYNQYLGEIYKGNHEPIISKEVYDKTQKELKIRQRTALENLNPRPFQAKYMLSGIGQCGYCGAPLKIMMGMIRKDGTRLVKYECHQRHPRKLRGVTTYNDNKKCDSGFYHKADIEAYVLQEISKLQVDKESFEGLFKAKKDEIDRKAYQRQINELTGKISRLNDLYIDSRITLEQLQGKSAEFLEMRSRLENELENDPALKRNEKKEDMRRILEKDDIYKMDYEMQASVVRSLISKVQVTAECIKILWRI

SEQ ID NO: 2252 - DNA, 50 bp, Streptococcus pneumoniae
  source 1..50: mol_type = genomic DNA
gagagagttttactatccctcatttcaatcaaggatactaaaattattta

SEQ ID NO: 2253 - DNA, 40 bp, Streptococcus pneumoniae; identical to SEQ ID NO: 2173
  source 1..40: mol_type = genomic DNA

SEQ ID NO: 2254 - DNA, 50 bp, Streptococcus pneumoniae
  source 1..50: mol_type = genomic DNA
gagagagttttactatccctcattagaatcaaggatactaaaattattta

SEQ ID NO: 2255 - DNA, 40 bp, Streptococcus pneumoniae; identical to SEQ ID NO: 2175
  source 1..40: mol_type = genomic DNA

SEQ ID NO: 2256 - protein, 481 aa, Streptococcus pneumoniae
MKTMNKVAIYVRVSTTNQVEEGYSIDEQKDKLSSYCDIKDWNVYKVYTDGGFSGSNTDRPALESLIKDAKKRKFDTVLVYKLDRLSRSQKDTLHLIEDVFIKNGIEFLSLQENFDTSTPFGKAMIGLLSVFAQLEREQIKERMQLGKLGRAKSGKSMMWAKTSYGYDYHKETGTVTINPAQALTIKFIFESYLRGRSITKLRDDLNEKYPKHVPWSYRAVRTILDNPVYCGFNQYKGEIYPGNHEPIISKEEYDKTQSELKIRQRTAAENVNPRPFQAKYILSGIAQCGYCGAPLKIMLGVKRKDGSRLKKYECHQRHPRTLRGVTTYNDNKKCDSGFYYKDKLEAYVLKEISKLQDDADYLDKIFSGDNAETIDRESYKKQIEELSKKLSRLNDLYIDDRITLEELQSKSAEFISMRATLETELENDPALRKNKRKADMRKLLNAEKVFSMDYEGQKVLVRRLINKVKVTAEDIVINWKI

SEQ ID NO: 2257 - DNA, 50 bp, Streptococcus pneumoniae
  source 1..50: mol_type = genomic DNA
taaataattttagtaacctacatctcaatcaaggctagtaaaactctcac

SEQ ID NO: 2258 - DNA, 40 bp, Streptococcus pneumoniae; identical to SEQ ID NO: 2173
  source 1..40: mol_type = genomic DNA

SEQ ID NO: 2259 - DNA, 50 bp, Streptococcus pneumoniae
  source 1..50: mol_type = genomic DNA
taaataattttagtaacctacatcagaatcaaggctagtaaaactctcac

SEQ ID NO: 2260 - DNA, 40 bp, Streptococcus pneumoniae; identical to SEQ ID NO: 2175
  source 1..40: mol_type = genomic DNA

SEQ ID NO: 2261 - protein, 481 aa, Streptococcus pneumoniae
MITTNKVAIYVRVSTTSQVEEGYSIDEQKAKLSSYCDIKDWSVYKIYTDGGFSGSNTDRPALEGLIKDAKKRKFDTVLVYKLDRLSRSQKDTLYLIEDIFIKNNIAFLSLQENFDTSTPFGKAMIGLLSVFAQLEREQIKERMQLGKIGRAKAGKSMMWAKTSYGYDYHRETGTITINPAQALAVKFIFESYLRGRSITKLRDDLNEKYPKHVPWSYRAVRTILDNPVYCGFNQYKGEIYPGNHESIISKEEYDKTQSELKIRQRTAAENVNPRPFQAKYILSGIAQCGYCGAPLKIMLGVKRKDGSRLKKYECHQRHPRTLRGVTTYNDNKKCDSGFYYKDKLEAYVLTEISKLQDNAGYLDKIFSGDNAETIDRESYKKQIEELSKKLSRLNDLYIDDRITLEELQSKSAEFISMRGTLETELENDPALRKNKRKADMRKLLNAEKIFSMDYEGQKVLVRGLINKVQVTAEDIVINWKI

SEQ ID NO: 2262 - DNA, 50 bp, Streptococcus pneumoniae; identical to SEQ ID NO: 2172
  source 1..50: mol_type = genomic DNA

SEQ ID NO: 2263 - DNA, 40 bp, Streptococcus pneumoniae; identical to SEQ ID NO: 2173
  source 1..40: mol_type = genomic DNA

SEQ ID NO: 2264 - DNA, 50 bp, Streptococcus pneumoniae; identical to SEQ ID NO: 2174
  source 1..50: mol_type = genomic DNA

SEQ ID NO: 2265 - DNA, 40 bp, Streptococcus pneumoniae; identical to SEQ ID NO: 2175
  source 1..40: mol_type = genomic DNA

SEQ ID NO: 2266 - protein, 481 aa, Streptococcus pneumoniae; identical to SEQ ID NO: 2226

SEQ ID NO: 2267 - DNA, 50 bp, Streptococcus pneumoniae; identical to SEQ ID NO: 2172
  source 1..50: mol_type = genomic DNA

SEQ ID NO: 2268 - DNA, 40 bp, Streptococcus pneumoniae; identical to SEQ ID NO: 2173
  source 1..40: mol_type = genomic DNA

SEQ ID NO: 2269 - DNA, 50 bp, Streptococcus pneumoniae; identical to SEQ ID NO: 2174
  source 1..50: mol_type = genomic DNA

SEQ ID NO: 2270 - DNA, 40 bp, Streptococcus pneumoniae; identical to SEQ ID NO: 2175
  source 1..40: mol_type = genomic DNA

SEQ ID NO: 2271 - protein, 615 aa, Enterobacter cloacae
MLIQTKIRRSIMKKVFVYHRVSSDQQLDGSGIARQAELLEGYLERTGICADMDDPAPVVLSDQGVSAFKGLNISEGELGAWMEQVRNGMWDSSILVVESIDRFSRQNPFDVMGYINALMTHNVAIHDVMANIVISRSNSKDLPFVMMNAQRAYDESKYKSDRIRKGWAKKREQAFNKGTIVTNKRPQWIEVEKDKYVLNEKAAVVKEIFALYQTGMGCPTIAKQLQRKEGEQYKFNRPWTGELVHKILTNRRVTGKIFISEIIRNHDDIENPVTQKKYDMDVYPVVINEEEFELVQELLKSRRPNAGRITVKKDGQEEVLIKSNLFSGIARCTECGGPMYHNVVRAKRTPKKGDPKIEEYRYIRCLNERDGLCENKAMTYETVERFVVEHLLGMDLSTVIKEQEFNPEIEVLRIQIDQVRDQITNYENGIERRKSAGKPITFDMREDLDDAKFELEQLLARQASLATVQVDVPVLQDVNVTELYDVNNVDIRTRYENELNKIVSNIRLKRNGTSYTIDISYKQNELKRHVLFVENKKKEQTLISEVIIEDIDGGKFYYTPSFMIRLKDGEIRFQQTSEDLSIVDYSLLLNYVDAVDRNEAVGVWMRNQFNFLNSN

SEQ ID NO: 2272 - DNA, 50 bp, Enterobacter cloacae
  source 1..50: mol_type = genomic DNA
atgttgtaataagcgttacacactcaagtgtgttatgcttatacaaacaa

SEQ ID NO: 2273 - DNA, 40 bp, Enterobacter cloacae
  source 1..40: mol_type = genomic DNA
ttttttcctgataatcatacaaataagtgccattacaaca

SEQ ID NO: 2274 - DNA, 50 bp, Enterobacter cloacae
  source 1..50: mol_type = genomic DNA
atgttgtaataagcgttacacactttagtgtgttatgcttatacaaacaa

SEQ ID NO: 2275 - DNA, 40 bp, Enterobacter cloacae
  source 1..40: mol_type = genomic DNA
tattttaatgatgataatattaataagagacattactaca

SEQ ID NO: 2276 - protein, 555 aa, Streptomyces noursei
MVNFAFAGRVSREDLQDPDASRAWQRHRAEALISSVNGVITDEYFDIGQTRALPWQRRPRATALLSELKNPHRGFDAVVIGEPQRMFYGNQFSLIFPLFQHYGVPLWVPEVGGAVDPGSDAHDLLMSIYGGTSKAERNRIKIRVRATMEALTATEGRFLGGRPPYGYRLVDAGPHPNPARAADGKRLRRLEPDTATAPVVKRIYREYLAGKGLHAIAEALIRDGIPCPSRYDVDRNRHRSSAAWSKNTVKKILVNPRYTGHQVWNRHRKDEVLIDVEDVTLGHRNKLIANAPDKWIYSMERMHEPLVPKGIFEEVQQRMVNRRDGAVAERSPRASSRPYVLRGMLRCRICKRKMLGAASHGRLYYRCVYPGEYAKATGVDHPLSIHLREELIVPPLDTWISTAFEEPRLSETLGEMVRAQRTLAEDSVVADEARRTIHVIEQKLAQYRAALDAGADPTVVAEWIAEAQRDKRLADQRLARRLDPTAERLTVEELRRIVADLGDIKGRLCRADPSRKEELYRELGLELYYDARTRVLHVESRPAPASLVWLRTHPR

SEQ ID NO: 2277 - DNA, 50 bp, Streptomyces noursei
  source 1..50: mol_type = genomic DNA
tcgtgtggttaaggacacatccccggggcgtaatgccccataggtatacg

SEQ ID NO: 2278 - DNA, 40 bp, Streptomyces noursei
  source 1..40: mol_type = genomic DNA
cgtcggcggcccgcacgccggcgcgatgttcacgctggcc

SEQ ID NO: 2279 - DNA, 50 bp, Streptomyces noursei
  source 1..50: mol_type = genomic DNA
tcgtgtggttaaggacacatcccccaggcgtaatgccccataggtatacg

SEQ ID NO: 2280 - DNA, 40 bp, Streptomyces noursei
  source 1..40: mol_type = genomic DNA
cgtctgcggagcccacgcccacccgaaactcacgctggcc

SEQ ID NO: 2281 - protein, 555 aa, Streptococcus suis; identical to SEQ ID NO: 1666

SEQ ID NO: 2282 - DNA, 50 bp, Streptococcus suis
  source 1..50: mol_type = genomic DNA
ggactgctcggtgaggtgtttccattataccatagcccagacagcagtcc

SEQ ID NO: 2283 - DNA, 40 bp, Streptococcus suis
  source 1..40: mol_type = genomic DNA
aattttttgcataggtttattataccatctttgaatgaaa

SEQ ID NO: 2284 - DNA, 50 bp, Streptococcus suis
  source 1..50: mol_type = genomic DNA
ggactgctcggtgaggtgtttccaaaataccatagcccagacagcagtcc

SEQ ID NO: 2285 - DNA, 40 bp, Streptococcus suis
  source 1..40: mol_type = genomic DNA
agtttattgcatacttttaaaataccacctttcaatgatt

SEQ ID NO: 2286 - protein, 584 aa, Clostridium paraputrificum
MKEVEVIKARNDLQTRTRGKTIELMRVGAYCRVSTDSADQLNSYKSQVAYYTDLIKKNQEWVLADIYADEAITGTQVAKREDFQRMINDCMNGEIDMVITKSISRFARNTLDTLKYVRMLKECNIAVYFEDEKINTLTMDGELLLVVLSSVAQQEVENISANVKKGLKMKMKRGELVGFQGCLGYDYHKDTKTITVNEEEAEIVRYIFNRYIEGAGGSVIAHELENLGYKTKYGSSTWVQSTVIGIIKNEKYKGDLLLGKTFTVDPISKRRLENFGEEDKFYIRNHHEPIISEEVFEKAQEILARRNVNRGKIGEGNTKREKYSRKYAFSCMLECGLCGGTLTRRNWHSSSQYSKVIWQCVTATKKGKKFCKHSKGIPETAIEEAFVESYRLLCDDNKDVLEEFLQRMDDTLSSSVVSKQLAKAEKEIDTLEKKKSKLVDMRLEEIIDKETYESKYADLISKQEQLIEERKKLQETSANEKDIKKRLKEFKKTLEQNEVLDKFDRYVFESIVEKVIVGGLDENGNVDPAQLTFVYKTGLKNSVDGAKFKPQRKNARGRHRTDELCSHDSNEVDKMCSDSSNGTY

SEQ ID NO: 2287 - DNA, 50 bp, Clostridium paraputrificum
  source 1..50: mol_type = genomic DNA
tgtgttccgatagtagtaacggcacatatagagacttgtgtgttgctaca

SEQ ID NO: 2288 - DNA, 40 bp, Clostridium paraputrificum
  source 1..40: mol_type = genomic DNA
tatgtttccacaaacagctcatattgagaacgtagcttta

SEQ ID NO: 2289 - DNA, 50 bp, Clostridium paraputrificum
  source 1..50: mol_type = genomic DNA
tgtgttccgatagtagtaacggcagttatagagacttgtgtgttgctaca

SEQ ID NO: 2290 - DNA, 40 bp, Clostridium paraputrificum
  source 1..40: mol_type = genomic DNA
catgttttcacaaacagctgttattaaatctgtagctgta

SEQ ID NO: 2291 - protein, 596 aa, Lachnospira eligens
MRKKELKQDDNRAVVIYARKSKITHKGDSISNQEEYCKEYARLHLMLPEDYEFGIYEDEGKSGFYADRPDFQRMIRDVEHRKIKAIVCYKLDRISRRMSDLTNLIDYLNKYDVALLISSNNLNTMDSNSKMMVQMLGMIAEFERDIIAERLQDNLTELAKDGRWLGGITPTGYSAERSKYGSGKKKNAFTYLVTVPEEKALVEYIFSTFLSLRGMHATAVKLNAEGYTTKTGARFTTLAVKDIIRNPVYCIADKTAYQYFIDNGSNVFGDIEEFDGVHGISVYNRTLQTKEESDDSTFLHPDFTSSTKQKDPEEWIVAVGKHEGFITSEKWIEAQKLKEDIAQKYNQPHRSTNALLSGIMYCPECGSRLRVVSESNRYTHGKPRFKYSCPKAVRKGSCNYVAVHGVEMDEFIVDYLSKLKDNEKDDYKARLRAEIKRVYQSDSNEKEIRVIAKEIEKLERSIKAQVKALRTATAATRPYIQSDIDDMANEIAQKKQEQAKLEEVSADSEMQVKEIEKTLTLIDNFNEISEKDEPGEVISAIQSVLERVYVIREDGKEKVKIFIKGAPKENYESFFEEGVKAAIGVDAMCDLDRYSE

SEQ ID NO: 2292 - DNA, 50 bp, Lachnospira eligens
  source 1..50: mol_type = genomic DNA
tgtgtgatttagataggtatagcgaaagcggcacctacctcaatcacaca

SEQ ID NO: 2293 - DNA, 40 bp, Lachnospira eligens
  source 1..40: mol_type = genomic DNA
gatgcatacatgcatagataactgtattcatacttttgca

SEQ ID NO: 2294 - DNA, 50 bp, Lachnospira eligens
  source 1..50: mol_type = genomic DNA
tgtgtgatttagataggtatagcggtagcggcacctacctcaatcacaca

SEQ ID NO: 2295 - DNA, 40 bp, Lachnospira eligens
  source 1..40: mol_type = genomic DNA
tatgcttacatgcatatatgtatgtgtttatacttatgta

SEQ ID NO: 2296 - protein, 542 aa, Granulibacter bethesdensis
MNAETPVIAQRAALYLRVSTVRQAEHDVSIPDQKRQGEAYCTSRGYRLVDTFIEAGASATNDRRPEFQRMIEAGTSKPAPFDVVVVHSFSRFFRDHFELEFYVRKLAKNGVRLVSITQEMGDDPMHVMMRQIMALFDEYQSKENAKHVLRALKENARQGFWNGSLPPIGYRTVAAEQRGAKTKKKLEIDPLHADTIRLIYRLALGAEADHSQMGVKAIVKHLNARGIFTRDGGRWGIGQVHRILTRRTYIGEHEFNRRSKTKEKKPDAEVVTVAVPPLIEHATFDAVQALMKARNQKTALPHRVVIGPTLLTGICFCGNCGGAMTIRTGKGGRYRYYACSIKARQGETGCKGRAIPMDRLDGLVARHIEDRLLDPDRLEELLETILGRREEQSERRRVHIAELNRRAAESELRLKRLYDAIEAGVADLDDPALKERIAGLKVIRDQSRVDADRAQAMLESTGERAITPEMVGRLSQAARERMRLDGGGYRRDHLRALAQRVEVGDDEVRIMGSKSDLLRTLVAAEGGKSAAIGVPSRGPKWR

SEQ ID NO: 2297 - DNA, 50 bp, Granulibacter bethesdensis
  source 1..50: mol_type = genomic DNA
cggcgtgcccagccgaggaccgaagtggcgggccgcgccagacccggatg

SEQ ID NO: 2298 - DNA, 40 bp, Granulibacter bethesdensis
  source 1..40: mol_type = genomic DNA
cccggaagcccaggaagcgatggcggagagggtgggattc

SEQ ID NO: 2299 - DNA, 50 bp, Granulibacter bethesdensis
  source 1..50: mol_type = genomic DNA
cggcgtgcccagccgaggaccgaaggggcgggccgcgccagacccggatg

SEQ ID NO: 2300 - DNA, 40 bp, Granulibacter bethesdensis
  source 1..40: mol_type = genomic DNA
cccggaaccccaggaagcaggggctccgaggcggggatac

SEQ ID NO: 2301 - protein, 544 aa, Clostridium perfringens
MKQLNIQSSSKITALYCRLSRDDELQGTSNSILNQKMMLEKYARDNNFTNLEFFIDDGYSGTNFNRPDWSRLQSLIDEGKIGCIIVKDMSRLGRDYLRVGYYTDIVFPEADIRFIAINNGIDSNESTENDLTPFINIINEFYAKDTSKKIRAVFKAKGESGKPLATIPPYGYLKDKEDKYKWVIDEEASKVVKKIFQLCVQGYGPSQIASELIKEGIPTPTEHFDKLGINVSSPLSEIKGNWQPKTISLILEKMEYLGHTVNFKTYKKSYKSKKKLENPKEKWQIFENTHEAIIDQETFDIVQRIRQGRRVRNNLGEMPALSGMLYCADCGAKLYQVRGKGWEHEKEYFVCASYRKHKGLCTSHQIKNVQVEELLLHELKKITEYARQYEDDFVKLVQSKTQNELNKSLKESKKDLVHVKERINKLDTIIQRLYEDMVEGKLSEDRFQKLSSNYETEQCELEKKATMLEKIIHDTEQTTLNTTAFLKQVREHTTINKLTPEIIRMFVDKIIVEKPEKIEGTRTKKQTIWIYWNYIGILDIEKTA

SEQ ID NO: 2302 - DNA, 50 bp, Clostridium perfringens
  source 1..50: mol_type = genomic DNA
ataaatccctattggaagtcaccttttggagcgttcaattagggattaac

SEQ ID NO: 2303 - DNA, 40 bp, Clostridium perfringens
  source 1..40: mol_type = genomic DNA
attataaaaaggagctctttttagagcttcttttttgttt

SEQ ID NO: 2304 - DNA, 50 bp, Clostridium perfringens
  source 1..50: mol_type = genomic DNA
ataaatccctattggaagtcacctagtggagcgttcaattagggattaac

SEQ ID NO: 2305 - DNA, 40 bp, Clostridium perfringens
  source 1..40: mol_type = genomic DNA
attttaaaaagaaacccttagcagatctttttgtttgttt

SEQ ID NO: 2306 - protein, 550 aa, Streptococcus agalactiae; identical to SEQ ID NO: 1606

SEQ ID NO: 2307 - DNA, 50 bp, Streptococcus agalactiae; identical to SEQ ID NO: 1607
  source 1..50: mol_type = genomic DNA

SEQ ID NO: 2308 - DNA, 40 bp, Streptococcus agalactiae
  source 1..40: mol_type = genomic DNA
gagaaaaaagactaaagaaaatagagataattttttattt

SEQ ID NO: 2309 - DNA, 50 bp, Streptococcus agalactiae
  source 1..50: mol_type = genomic DNA
ttaaatccctaagtgaatgcccctagaggagtgttcagtaagggattaaa

SEQ ID NO: 2310 - DNA, 40 bp, Streptococcus agalactiae
  source 1..40: mol_type = genomic DNA
gagaaaaaagagaaaagagagaagacatgtttttatattt

SEQ ID NO: 2311 - protein, 497 aa, Streptococcus sp group B
MSKIALYIRLSVEDQMKKDESESIINQRYFLNDFLDRNDEFKSFKREEYVDDGYTGTNEKRPSFQRMLEEVKSGKINAIIVKDLSRFMRDYISLGDYLENIFPFLGIRFIAINDGYDSAKEKGNGTDLDIQFKGLLYDFYTKDISQKVKTVTTELKKQGKFLAWSPPFGYMKDPDDKHNIIIDEKTAWIVRKVYDLALTGLASRKIAAVMNEENIPTPNERKKELTNMDYEYNIVSSDTRDAPTWTNGTVVDILSNENYTGTYVFNMQEKSVLTPGSFKFNPKEEWGRVYDHHEAIVSREEFERVQAIRGNNSFLKGKNTDYPWRKHSPLQGFVRCPTCNHILGFTQTKHKRLDGSIRVHKYFSCRICKCNNVEHKNSRVNDLEEQVLALIKEKYGELEVEPKEKISIKDLEKKIENLQAKKMSYFEKYKLGKMTKVKFVESKKQIDKEIDRLEEKIKLSSNETEVVTDNELTRELMEKYVESVICEGSIVQKIIWK

SEQ ID NO: 2312 - DNA, 50 bp, Streptococcus sp group B
  source 1..50: mol_type = genomic DNA
tgtgtcagttgcttgacatgagaggggtttcgtgtcataataatgacaca

SEQ ID NO: 2313 - DNA, 40 bp, Streptococcus sp group B
  source 1..40: mol_type = genomic DNA
attgattgatccaacttgtggttcaggtactttttgtatt

SEQ ID NO: 2314 - DNA, 50 bp, Streptococcus sp group B
  source 1..50: mol_type = genomic DNA
tgtgtcagttgcttgacatgagagccgtttcgtgtcataataatgacaca

SEQ ID NO: 2315 - DNA, 40 bp, Streptococcus sp group B
  source 1..40: mol_type = genomic DNA
attgcctgatctactttgtccttcagatattttttctatt

SEQ ID NO: 2316 - protein, 497 aa, Streptococcus agalactiae
MSKIALYIRLSVEDMIKTDESESIINQRAYLNDYLYKNEEFKNFTREEYVDDGYSGTNENRPAFQRMLEDVKKNNIQTIIVKDLSRFMRDYITLGDYLENIFPFLGVRFIAINDGYDSNKEKGNGTGLDIQFKGLLYDFYTKDISEKVKSSMTTLKKQGKFLAWSPPLGYMKDPNDRHKIIVDEETAWIVKKIFKLALDGISSRNIAKILNEEKIPTPSKRKSELTNLDFEYSIIRTAKKPRPTWTNGNVIDVLANENYTGTYTFNMQDKSVLNPSSFKFKPKEEWGRVENNHEAIISKEDFEKVQKIKEKNLFMKGKNTDYEWRKKSPLQGFAKCPTCNHILGCTQSKHKRPDGSLRVHTYFTCRICKCNNVKHKNSRAGSLEEQVFEAIKEKYGLEHPIKDEKVKVKPMEKSIEDLEAKKMQNFEKYKLGKMNRQKFIDSKNLIDEEIQAIKEKIQKAKEEKEIIDNTKLTRELMEKYIDSVFCEGNEVLNIIWK

SEQ ID NO: 2317 - DNA, 50 bp, Streptococcus agalactiae
  source 1..50: mol_type = genomic DNA
tttgtcataagcttgacatgagaggggtttcgtgtcataatagtgataga

SEQ ID NO: 2318 - DNA, 40 bp, Streptococcus agalactiae; identical to SEQ ID NO: 2313
  source 1..40: mol_type = genomic DNA

SEQ ID NO: 2319 - DNA, 50 bp, Streptococcus agalactiae
  source 1..50: mol_type = genomic DNA
tttgtcataagcttgacatgagagccgtttcgtgtcataatagtgataga

SEQ ID NO: 2320 - DNA, 40 bp, Streptococcus agalactiae; identical to SEQ ID NO: 2315
  source 1..40: mol_type = genomic DNA

SEQ ID NO: 2321 - protein, 497 aa, Streptococcus agalactiae
MSKIALYIRLSVEDMIKTDESESIINQRAYLNDYLDKNEEFKNFTREEYVDDGYSGTNENRPAFQRMLEDVKKNNIQTIIVKDLSRFMRDYITLGDYLENIFPFLGVRFIAINDGYDSNKEKGNGTDLDIQFKGLLYDFYTKDISEKVKSSMTTLKKQGKFLAWSPPLGYMKDPNDRHKIIVDEETAWIVKKIFKLALDGISSRNIAKILNEEKIPTPSKRKSELTNLDFEYSIIRTAKKPRPTWTNGNVIDVLANENYTGTYTFNMQDKSVLNPSSFKFKPKEEWGRVENNHEAIISKEDFEKVQKIKEKNLFMKGKNTDYEWRKKSPLQGFAKCPTCNHILGCVQSKRKRKDGSIRVHTYFTCRICKCNNVKHKNSRAGSLEEQVFEAIKEKYGLEDSNKDEKIKVKPMEKSIEDLEAKKMQNFEKYKLGKMNRQKFIDSKNLIDEEIQAIKEKILKAKEEKEVIDNTKLTRELMEKYIDSVLCEGNEVLNIIWK

SEQ ID NO: 2322 - DNA, 50 bp, Streptococcus agalactiae
  source 1..50: mol_type = genomic DNA
tttgtcataagcttgacatgagaggggtttcgtgtcataatattgataga

SEQ ID NO: 2323 - DNA, 40 bp, Streptococcus agalactiae; identical to SEQ ID NO: 2313
  source 1..40: mol_type = genomic DNA

SEQ ID NO: 2324 - DNA, 50 bp, Streptococcus agalactiae
  source 1..50: mol_type = genomic DNA
tttgtcataagcttgacatgagagccgtttcgtgtcataatattgataga

SEQ ID NO: 2325 - DNA, 40 bp, Streptococcus agalactiae; identical to SEQ ID NO: 2315
  source 1..40: mol_type = genomic DNA

SEQ ID NO: 2326 - protein, 497 aa, Streptococcus agalactiae
MSKIALYIRLSVEDMIKTDESESIINQRAYLNDYLDKNEEFKNFTREEYVDDGYSGTNENRPAFQRMLEDVKKNNIQTIIVKDLSRFMRDYITLGDYLENIFPFLGVRFIAINDGYDSNKEKGNGTDLDIQFKGLLYDFYTKDISEKVKSSMTTLKKQGKFLAWSPPLGYMKDPNDKHKIIVDEETAWIVKKIFKLALDGISSRNIAKILNEEKIPTPSKRKSELTNLDFEYSIIRTAKKPRPTWTNGNVIDVLANENYTGTYTFNMQDKSVLNPSSFKFKPKEEWGRVENNHEAIISKEDFEKVQKIKEKNLFMKGKNTDYEWRKKSPLQGFAKCPTCNHILGCTQSKHKRPDGSLRVHTYFTCRICKCNNVKHKNSRAGSLEEQVFEAIKEKYGLEDPIKDEKVKVKPMEKSIEDLDAKKMQNFEKYKLGKMNRQKFIDSKNLIDEEIQAIKEKILKAKEEKEVIDNTKLTRELMEKYIDSVFCEGNEVLNIIWK

SEQ ID NO: 2327 - DNA, 50 bp, Streptococcus agalactiae; identical to SEQ ID NO: 2317
  source 1..50: mol_type = genomic DNA

SEQ ID NO: 2328 - DNA, 40 bp, Streptococcus agalactiae; identical to SEQ ID NO: 2313
  source 1..40: mol_type = genomic DNA

SEQ ID NO: 2329 - DNA, 50 bp, Streptococcus agalactiae; identical to SEQ ID NO: 2319
  source 1..50: mol_type = genomic DNA

SEQ ID NO: 2330 - DNA, 40 bp, Streptococcus agalactiae; identical to SEQ ID NO: 2315
  source 1..40: mol_type = genomic DNA

SEQ ID NO: 2331 - protein, 502 aa, Fusicatenibacter saccharivorans
MEFIREDCIYARQSVDRKDSISIESQIDFCKYELKGGSCRVFKDKGYSGKNTDRPEFQKLLGEIRKGKVRRVIVYKLDRISRSILDFATMMELFQEYDVEFVSSTEKFDTSTPMGRAMLNICIVFAQLERETIQKRVTDAYYSRCLKGFHMSGQAPYGYQLEPTVVEGIRTKKMVADPVAADHVRLMFEMYAEPETSFGDITRYFEEHDIKIYGKSMFRTFLSQLLRNPVYAQADLELYEFFKSQGAAIVNDASDFAGTNGCYLYQGRDVKEDKDRCLKDQILVIAPHEALISSDTWLKCRKKLMANTTFQQGRKPKNTWLAGKIKCGHCGYALKATHVPNSTGYFRCTKRTENKGCPGCGKIRKEEFEQFIFSAMQEKFKDFQILHGKEEKVNPKLTAYQVELAQVEAEIEKLLDTLTGANATLLAYANKKIEELDTRRQTISKAIAELSVETISPQQIKKLSYYLDNWDSIDFDDKRKAADGLISTIKATSDRVQIEWKI

SEQ ID NO: 2332 - DNA, 50 bp, Fusicatenibacter saccharivorans; identical to SEQ ID NO: 2062
  source 1..50: mol_type = genomic DNA

SEQ ID NO: 2333 - DNA, 40 bp, Fusicatenibacter saccharivorans
  source 1..40: mol_type = genomic DNA
catatttatatgttgtttctttcttctcataagtaaagga

SEQ ID NO: 2334 - DNA, 50 bp, Fusicatenibacter saccharivorans
  source 1..50: mol_type = genomic DNA
tttgtaccccttgtacaccgatgttcgcaacggtgtacaaagggaacata

SEQ ID NO: 2335 - DNA, 40 bp, Fusicatenibacter saccharivorans
  source 1..40: mol_type = genomic DNA
catatttacatgtagtttctctcttttcacaaagaaatta

SEQ ID NO: 2336 - protein, 626 aa, Clostridioides difficile
MRNEKITPLYERLSRDDELQGESNSISNQKQMLEDFARRNGLPNPTHFTDDGISGTRFDRPGFLAMMEEVEAGRVEAIVIKDMSRLGRDYLKVGQVMEVLRQRGVRLIAINDGVDSLKGDDDFTPFRNIMNEFYARDTSRKIRSVFKSKGMSGKHLTGTVIYGYLWDEKREHWLVDEEAAEVVRRIFSLTLEGYGPYQIACKLSADRIEIPVVHLARFNEGVNRSKPVKDPYGWGSSTIVNILKKREYLGHTINFKTRKHFKDKKSHYVSEDEWTIFENTHEAIIDQQTFDLVQKIRSNVRRYPNGWGEAAPLTGLLYCADCGGKMYVHRTNNGKRISQYTCSNYTKVPCGTLCLTQHRINESAVLTLVSDTLRAIAEYSRNDRTEFIHTVQETQVAQQSADISKKRRRLATAQKRAGELEKLICKIYEDNALGKLPDTRYKALDAQYAKEQDTLEIEIAELEKAVTGYEQSQKSAEKFIALIDKYENFDTLTNTMLNEFVEKILVHERSRKGSQDTTQEIEIYFNFLGRYIPPSLQPVPLTTEEQEELRKKEERKDRLHQNYLKRKASGAQKRYEDKIKAKKKAEMDAKKSLIRAEDMKKGVYSTVSQLPKEEPRKGSIAASAAV

SEQ ID NO: 2337 - DNA, 50 bp, Clostridioides difficile
  source 1..50: mol_type = genomic DNA
aaaagtccttgacaatttgtctctggtgatatatgctctaagtgacttct

SEQ ID NO: 2338 - DNA, 40 bp, Clostridioides difficile
  source 1..40: mol_type = genomic DNA
aaaatacaaacttgctgccggaaaaacagcgaaatctatt

SEQ ID NO: 2339 - DNA, 50 bp, Clostridioides difficile
  source 1..50: mol_type = genomic DNA
aaaagtccttgacaatttgtctcttgtgatatatgctctaagtgacttct

SEQ ID NO: 2340 - DNA, 40 bp, Clostridioides difficile
  source 1..40: mol_type = genomic DNA
gtaccacaaacttggtgcctgaaaataatcgaaatctatt

SEQ ID NO: 2341 - protein, 628 aa, Clostridioides difficile
MRKNEKITALYERLSRDDFGKDDDQQRESNSISNQKAMLEEFAARQGFTNIVHFTDDGISGTCFDRPGFLAMMKEVEAGNVEYLCIKDMSRMGRDYLKVGQIMEILRQRGVRLIAINDGVDSARGDDDFTPFRNIMNEYYARDTSRKIRSTFQSKGKSGKHLTGTVIYGYLWNEARDQWLVDPEAAEVVKRIFAMTIEGYGPYQIASKLKEEKVLIPSAYLAQHGEGVNKNKTFKDVYGWGSSTICNILEKREYLGHTINFKTRKHFKDKKSHYVPEDEWTIFENTHEPIIDQQTFDLVQKIRGNVRRYPDGWGEAAPLTGLLYCADCGGKMYVHRTNNGKRISQYTCSQYTKVPCGTLCKTQHRINEDVVLSLVSEMLKAIAEYAKHDRAEFVRVVQEAQSSQQTAEVRKQRTRLATAKQRVSELEVLLCKIYEDNILGKLSDSRYATLDAQYEKEQSELTAEISALEKAIKSYEKHEKDADRFIALIDKYENFDKLTIAMLNEFIEKILVHERDRKGSIQTTQEVEIYFNFVGRFVPPAFGEVELTPEELEEIRKREERKDRLHQNYLKRKASGAQKRCEDKIKKRKKAEIEAKKAAIRAEDIAKGVFVPVSSLPQREPMKGVQTA

SEQ ID NO: 2342 - DNA, 50 bp, Clostridioides difficile; identical to SEQ ID NO: 57
  source 1..50: mol_type = genomic DNA

SEQ ID NO: 2343 - DNA, 40 bp, Clostridioides difficile; identical to SEQ ID NO: 2338
  source 1..40: mol_type = genomic DNA

SEQ ID NO: 2344 - DNA, 50 bp, Clostridioides difficile
  source 1..50: mol_type = genomic DNA
aaaagtccttgacttttcgtctcttgtgttgtatgctctaaaagacttct

SEQ ID NO: 2345 - DNA, 40 bp, Clostridioides difficile; identical to SEQ ID NO: 2340
  source 1..40: mol_type = genomic DNA

SEQ ID NO: 2346 - protein, 628 aa, Clostridioides difficile; identical to SEQ ID NO: 2341

SEQ ID NO: 2347 - DNA, 50 bp, Clostridioides difficile; identical to SEQ ID NO: 262
  source 1..50: mol_type = genomic DNA

SEQ ID NO: 2348 - DNA, 40 bp, Clostridioides difficile
  source 1..40: mol_type = genomic DNA
aaaaatacaaacttgctgccggaaaaacagcgaaatctat

SEQ ID NO: 2349 - DNA, 50 bp, Clostridioides difficile
  source 1..50: mol_type = genomic DNA
aaaaagtccttgacttttcgtctcctgtgttgtatgctctaaaagacttc

SEQ ID NO: 2350 - DNA, 40 bp, Clostridioides difficile
  source 1..40: mol_type = genomic DNA
agtaccacaaacttggtgcctgaaaataatcgaaatctat

SEQ ID NO: 2351 - protein, 628 aa, Clostridioides difficile
MRKNEKITALYERLSRDDFGKDDDQQRESNSISNQKAMLEEFAARQGFTNIVHFTDDGISGTCFDRPGFLAMMKEVEAGNVEYLCIKDMSRMGRDYLKVGQIMEILRQRGVRLIAINDGVDSVRGDDDFTPFRNIMNEYYARDTSRKIRSTFQSKGKSGKHLTGTVIYGYLWNEARDQWLVDPEAAEVVKRIFAMTIEGYGPYQIASKLKEEKVLIPSAYLAQHGEGVNKNKTFKDVYGWGSSTICNILEKREYLGHTINFKTRKHFKDKKSHYVPEDEWTIFENTHEPIIDQQTFDLVQKIRGNVRRYPDGWGEAAPLTGLLYCADCGGKMYVHRTNNGKRISQYTCSQYTKVPCGTLCKTQHRINEDVVLSLVSEMLKAIAEYAKHDRAEFVRVVQEAQSSQQTAEVRKQRTRLATAKQRVSELEVLLCKIYEDNILGKLSDSRYATLDAQYEKEQSELTAEISALEKAIKSYEKHEKDADRFIALIDKYENFDKLTIAMLNEFIEKILVHERDRKGSIQTTQEVEIYFNFVGRFVPPAFGEVELTPEELEEIRKREERKDRLHQNYLKRKASGAQKRCEDKIKKRKKAEIEAKKAAIRAEDIAKGVFVPVSSLPQREPMKGVQTA

SEQ ID NO: 2352 - DNA, 50 bp, Clostridioides difficile; identical to SEQ ID NO: 262
  source 1..50: mol_type = genomic DNA

SEQ ID NO: 2353 - DNA, 40 bp, Clostridioides difficile; identical to SEQ ID NO: 2348
  source 1..40: mol_type = genomic DNA

SEQ ID NO: 2354 - DNA, 50 bp, Clostridioides difficile; identical to SEQ ID NO: 2349
  source 1..50: mol_type = genomic DNA

SEQ ID NO: 2355 - DNA, 40 bp, Clostridioides difficile; identical to SEQ ID NO: 2350
  source 1..40: mol_type = genomic DNA

SEQ ID NO: 2356 - protein, 580 aa, Burkholderia ubonensis
MSQPLVISYVRFSTARQATGDSLRRQTAAAREWCLKRGWTLDEKLSCRDLGLSGFNQDNASRGALSVFLDKVRSGDIPGGSYLIVENLDRLTRAELPVAVSLLLSIVSADIICVTLQDGQEWTKERLANPADFMLSVMLLYRGHDESKVKSIRIRAVHDKAREERDRSVFGRAPGWLRRTSDGKAWEPVPELVEVVKKVFDLSASGYGGVAIARRANEEKWPVPSLSAKESGTTWHVTFPAKLVRNRAVLGELEFHVSRDGQPTPTGQVVKDWYPQIVDEDLFFRANAAINSRRSKPNRRDATYRNIFQGIIFCGHCGATMARKAKAGGKKNSPGYAQFVCSDRHRGASGCPSINAKELEVGLIPSIFQMLREHLGNEANLDPIRKELAAVHGELEEFQKRRGRLADAIEQADVPIPVLVQRLTECEQAIPGLEARESVLKAQLQEFTFSPDDDTASDAILRALYSDDEASERLRAETHLKMLLTIDAIWVWPQELAVIQWKSTNLLAPLALYKPEKRRTGRAARNPIEIPKSFNVSNRYLEAIQGKIDFPEKRQPQLSENATIHTQKRRRNPINPPSAD

SEQ ID NO: 2357 - DNA, 50 bp, Burkholderia ubonensis
  source 1..50: mol_type = genomic DNA
aagtcgaattaggtggcggacggcttcccataagtcatataatgggatac

SEQ ID NO: 2358 - DNA, 40 bp, Burkholderia ubonensis
  source 1..40: mol_type = genomic DNA
gcagcgcacgccggccggcttgccgcccggcatccccgga

SEQ ID NO: 2359 - DNA, 50 bp, Burkholderia ubonensis
  source 1..50: mol_type = genomic DNA
aagtcgaattaggtggcggacggcgccccataagtcatataatgggatac

SEQ ID NO: 2360 - DNA, 40 bp, Burkholderia ubonensis
  source 1..40: mol_type = genomic DNA
ggcgcccccgccggccgccgcgccgcccggcagcctcggc

SEQ ID NO: 2361 - protein, 526 aa, Enterocloster citroniae
MQGRRVTTIPAVRDRFTAQPIHQTQKRRVAAYARVSTDHEEQLTSYEAQVDYYTGYIKSRDDWEFVHVYTDEGISATGIAKREGFRKMVEDALAGSIDLIVTKSVSRFARNTVDSLSTIRKLKEKGCECYFEKENIWTFDSKGELLITIMSSLAQEESRSISENVTWGQRKRFSDGKVCVPYSHFLGYDKGEDGSMVLNEEEAKIVRRIYGLFLQGHSPYAIAKRLTEEGVRTPAGKEKWHSCTVKSILVNEKYKGDALLQKSYTVDFLTKKTKINEGEVPQYYVENSHEAIISPAVFDEVQHQMAVRHPGKNRLSCTGAFSSRIKCGDCGSWYGSKVWHSNDKYRKIVWQCNHKFDGGEKCTTPHLDEETVKVLFLKAANAIFGERDSIREDYEAVKERLYDTSELEAERIRLQEEMNIVAEMIQQCVNENARVALDQTEYQKKYDGLAERFDRIKERLEAVGSAITERMAKREKTERFLAELEKRGGPLTEFDEEDWYSLVEYATVYSREDIRFTFKNGMEIKA

SEQ ID NO: 2362 - DNA, 50 bp, Enterocloster citroniae
  source 1..50: mol_type = genomic DNA
tgtatcaaagacggtgggaagatagaaatgtgactcgcttatttgataca

SEQ ID NO: 2363 - DNA, 40 bp, Enterocloster citroniae
  source 1..40: mol_type = genomic DNA
gttaagaccaggaaagccagacatgatatggacaggaagt

SEQ ID NO: 2364 - DNA, 50 bp, Enterocloster citroniae
  source 1..50: mol_type = genomic DNA
tgtatcaaagacggtgggaagataccaatgtgactcgcttatttgataca

SEQ ID NO: 2365 - DNA, 40 bp, Enterocloster citroniae
  source 1..40: mol_type = genomic DNA
gttaagaccggcaataccacctatgatgaggacagaaagt

SEQ ID NO: 2366 - protein, 502 aa, Eubacterium callanderi
MDIIREDCIYARQSVDRKDSISIESQIDFCKYELKGGRCRVFKDKGYSGKNTDRPEFQKLLGEIRKGKVRRVIVYKLDRISRSILDFANMMELFQEYDVEFVSSTEKFDTSTPMGRAMLNICIVFAQLERETIQKRVTDAYYSRCLKGFHMSGQAPYGYQLEPTVVDGIRTKKMVAAPAAADHVRLMFEMYAEPGTSFGDITRYFEEQGIKIYGKSMFRTFLSQLLRNPVYAQADLELYEFFKSQGAAIVNDASDFAGTNGCYLYQGRDVKEDKDRCLKDQILVIAPHEALISSDIWLKCRKKLMTNTTFQQGRKPKNTWLAGKIKCGHCGYALKATRVPSGAGYFRCTKRTENKGCPGCGKIHKDEFEQFVFMAMQEKFKDFQILHGKEEKINPKLTAYQVELAQVEAEIEKLLDTLTGANATLLAYANKKIEELDTRRQTISKAIADLSVETISPQQVKKLSYYLDNWNSIDFDDKRKAADGLISTIKATSDRVQIEWKI

SEQ ID NO: 2367 - DNA, 50 bp, Eubacterium callanderi
  source 1..50: mol_type = genomic DNA
tttgtaccccttgtacaccgatgctttcaacggtgtacaaagggaacata

SEQ ID NO: 2368 - DNA, 40 bp, Eubacterium callanderi
  source 1..40: mol_type = genomic DNA
acgattaaaaaagcaggggttccctttctttataaaaaaa

SEQ ID NO: 2369 - DNA, 50 bp, Eubacterium callanderi
  source 1..50: mol_type = genomic DNA
tttgtaccccttgtacaccgatgcagtcaacggtgtacaaagggaacata

SEQ ID NO: 2370 - DNA, 40 bp, Eubacterium callanderi
  source 1..40: mol_type = genomic DNA
aagattgaaaaaacaagggagagctttttttaaaaaaaaa

SEQ ID NO: 2371 - protein, 517 aa, Bacillus cytotoxicus
MKTAIYLRKSRADLEAEQRGEGETLAKHRTALLKVAREKNLNIIAVHEEIVSGESLVHRPEMLKLLQDVEYKKYDAVLCMDMDRLGRGGMKEQGIILETFKRSNTKIVTPRKTYDLNDEWDEEYSEFEAFMARKELKIITRRMQRGRIASVEAGNYISTSPPYGYVIKKLKNGRTLEPHPEQAEVVKLIFDWYTHDDPEIRIGASMIANKLNTLGYKTAKGKTWGNWTVLGIIKNIVYCGKVTWKKKEIKKSTTPGKVKDTRTRDTSEWIVVDGKHEALISEELFEKAQAILKGRYHVPYQLINGVKSPLAGIVKCAKCGASMVYRPYTTQKPALKCYNQTRCHNKSSNYELVEQRILEGLAEWLEIYKANFEANTPEEASSEVKQINVYRQMLKNLEKELTETEKQKEKLFDLLERGIYTDEMFLNRSKSLSAKTEKLQQDIDTVKESINSELQREEAQENIIPQVERVLDLYTKTDDPKKKNSLLKSVLEKAVYNKEKHQYKDDFTLTLYPKLPK

SEQ ID NO: 2372 - DNA, 50 bp, Bacillus cytotoxicus
  source 1..50: mol_type = genomic DNA
acaggataaagtgtagttgataactcattccccactacactttatcctgt

SEQ ID NO: 2373 - DNA, 40 bp, Bacillus cytotoxicus
  source 1..40: mol_type = genomic DNA
aatatcgataagtgatatttcattaccctctttatcttgc

SEQ ID NO: 2374 - DNA, 50 bp, Bacillus cytotoxicus
  source 1..50: mol_type = genomic DNA
acaggataaagtgtagttgataacgtattccccactacactttatcctgt

SEQ ID NO: 2375 - DNA, 40 bp, Bacillus cytotoxicus
  source 1..40: mol_type = genomic DNA
aaaatcactgagtgatattgtattactcttcttatgttgc

SEQ ID NO: 2376 - protein, 555 aa, Streptococcus suis
MNKSTLTIKEIKTQTLEELPDKITVLYCRLSAEDANEGESNSISSQKQILAQVAEHEGLVNPYFFVDDGFSGSNAQRPDFQKALSLVEAGRVSNFVVKDLSRLSRDYLLSGQLTEITFPSKNIRFISLNENLDSSKRNSQDAYLTPLVSLFNNWYSLQCSEKIKLSKHTKAKTGEKIGWIAPYGYLKNPENPKEWLVDEYASQIVKRVFKEYLSGKPIASIANGLRKDKILTPANYKKKLGVSNYRVLESDPYHWKSQMICQMLEKEEYTGATINLKTAKISYKQRNCRLRPREDWLIFPDTHEAIISKEDFALARKMLGHKRVVRRNTWKDKPGHENIFAGLVFCENGHKLSFCPQQKDHINLDHYKCYHHRRAGDSCSGLHYLRKNILEELVLTELQQLISATHLDEEKLLEELKSRFDIREDKRQDSLRKQLNRSKKRSKELDTIIQKLYEKQLLDEISEDRFRKLANGYESEQAELDQQIRELQEVLVKQTESAENINRFMRIIRQHTNVETLSTQLVNELIDKIVVHQPTGRGKSRQVPIELHYRFIGEM

SEQ ID NO: 2377 - DNA, 50 bp, Streptococcus suis
  source 1..50: mol_type = genomic DNA
ggactgctgggggaggtgtggatattataccacaccccacccagcagtcc

SEQ ID NO: 2378 - DNA, 40 bp, Streptococcus suis
  source 1..40: mol_type = genomic DNA
tttttctatcatagtttcattataacaaaaaagggagata

SEQ ID NO: 2379 - DNA, 50 bp, Streptococcus suis
  source 1..50: mol_type = genomic DNA
ggactgctgggggaggtgtggatatgataccacaccccacccagcagtcc

SEQ ID NO: 2380 - DNA, 40 bp, Streptococcus suis
  source 1..40: mol_type = genomic DNA
tatttctatgatagcttcatggtaccaaagtaggaagata

SEQ ID NO: 2381 - protein, 520 aa, Vibrio mediterranei
MPNAIPYIRFSSSIQQKGSSLERQQKLIDDYLKSRPELTLSNLQYQDLGLSGYKGKHLENDLGKLLEAVESGHIKSGDYILVEAMDRLGRLPELEMIALLHSILKHGVKVITLQDNQEYSNEALASNGGLLYLLAGKVQMAHQHSKQLSQRISAAWEKKRKQAELGKGVKRKTPWWITWNEETECFDTVTDADKQIMTDVFTWYLRGLGERRILARLREQFPKKFGTTDPASVKRWFTNKTAIGYWADIPNVYEAAISEQLFYQVQDELKRRSTGKGQTPRSGHYLAGLIQCGECGGNYSMRANKHSPDAMLCGVSNKRKDKCKNGATIPVQVFDWVCTETYHDTLKQIEQKALSQEAEDELVVVNGRISDLESQLDNLMELVAQGSKRTQKKVLQVEEELEELESRQSELMLEVRKPNELSFADAALAGSELKDDPEVLGDLLRKAGYSIVANGTTIHQGDRTWVYGRYYQKEDSYRMKEVDSDGEIIDEFLLPVNRKATEDELKELEKEPHTKTKHDL

SEQ ID NO: 2382 - DNA, 50 bp, Vibrio mediterranei
  source 1..50: mol_type = genomic DNA
gttatcataagtacagctaacatcacgctgtaatcagcggtgttgataag

SEQ ID NO: 2383 - DNA, 40 bp, Vibrio mediterranei
  source 1..40: mol_type = genomic DNA
gctatcaaccgcaaatatcactcaacagtttggtgctaaa

SEQ ID NO: 2384 - DNA, 50 bp, Vibrio mediterranei
  source 1..50: mol_type = genomic DNA
gttatcataagtacagctaacatcctgctgtaatcagcggtgttgataag

SEQ ID NO: 2385 - DNA, 40 bp, Vibrio mediterranei
  source 1..40: mol_type = genomic DNA
gctataaaccgcaaatatcctgtggctgtttgctgctata

SEQ ID NO: 2386 - protein, 501 aa, Bacillus cereus
MKPNIKEVAIYLRKSRDESDGKEDVLAKHESLLLEYAKNHNLKYKIYKEIGSSEYIDSRPKMVRLLIDVSQKLYDAVLVVDLDRLSRGDLEEMGRISRVFRDSKTIVLTPTKTYDFNNEDEALINNFEMVFANHEFRMIKKRMIRGKQQGTKAGKWTNGRPPFPYVYNRLTKELDVDPDKVKVYELMKKMFLGEMKATYEIAWRLNELGFKTNRNSYWYENTVRRILKNEVHLGKVVYGKTSGSGSKKKLNANGVQIKDRSEWIIAEGSHQPLKTEEEHQRILAILESRRYTPKGTRTNVQVLSKLIYCGKCNRVMSFTGKASGKRYVKTCLTTDRFGYRCHNRSLNVEIIYAQLFLDLEQYEQQLLSHEPKEKQGDSSTLQLALQNKHEELERLEKGIERIKDLFIDEMIDKSEMQMRIEKQKQSMQTKKEEIRSIEQSLAVIGNVRTDDDRLYAIKEFKKAWNTEGISKRELNTLAKQLIDRIEYVREGNNVKINIKFL

SEQ ID NO: 2387 - DNA, 50 bp, Bacillus cereus
  source 1..50: mol_type = genomic DNA
ttcaccagattaccttacacaactgtcatgtaatctggtgaaacttttat

SEQ ID NO: 2388 - DNA, 40 bp, Bacillus cereus
  source 1..40: mol_type = genomic DNA
ttttaaacctttcaaaaatgtaaggtttttgtcatttgaa

SEQ ID NO: 2389 - DNA, 50 bp, Bacillus cereus
  source 1..50: mol_type = genomic DNA
ttcaccagattaccttacacaactttcatgtaatctggtgaaacttttat

SEQ ID NO: 2390 - DNA, 40 bp, Bacillus cereus
  source 1..40: mol_type = genomic DNA
tttgaaatattttcaaaatttaaagtttttataatttgaa

SEQ ID NO: 2391 - protein, 587 aa, Bacteroides thetaiotaomicron
MNHKKAIAYIRVSTTHQDVERQRIKFKEYCKNNNLQANEEIIDFGISGAKSDRPGYLRLQALTGKDADILVVSELSRLSRQEEILETINIIQNIVYNGLSLIFLDAPSKVYEAHSTLDITELIILLVGAFRAAQDRKEIKRKNQEGKQALLSQNPYAVVDAKIPYGYNAIYNPNGSRPKKILIENEEEVANVKKIFQLALEGYSLGKIAKYFNNRNILFRGNFVTRQLLSVLVRNILYKGIRRRIHSFDRKDNPNIIENKITPIISESDFERVNQMLKDNHKFCSTGNNYFNTLRGIIKCRCGRGMMVKDKGYASGIKKMVYRCNDVSAKDNPIHCQYKDEISYQFTNEVIFNVFKYIHNTDEIFIFMAKTEQKIYEIDEEIKGIERKIENKNIEIESLNKDNKRLIERYIHAKSQSIANAIQDEQLTIENKIHKLEDEISHCNKEKVKLITNKESLINYIDTEELSSLGNEERAELFKKHLEKVIYLPVTLMQGFYIITFKSKMQRIVAIRKTAKSPIAAILPDGYTVDMNTKLITEYYQSIQTGGCSYPISSSFKQLTIQEYFKKLPQIGNLGILEIDYSYRKGK

SEQ ID NO: 2392 - DNA, 50 bp, Bacteroides thetaiotaomicron
  source 1..50: mol_type = genomic DNA
atgggtattttcgacaatttatattcgtttaacataacgtacttgcccat

SEQ ID NO: 2393 - DNA, 40 bp, Bacteroides thetaiotaomicron
  source 1..40: mol_type = genomic DNA
aggtatctgacaagaatattcaaagaaagcaattgcccaa

SEQ ID NO: 2394 - DNA, 50 bp, Bacteroides thetaiotaomicron
  source 1..50: mol_type = genomic DNA
atgggtattttcgacaatttatatctgtttaacataacgtacttgcccat

SEQ ID NO: 2395 - DNA, 40 bp, Bacteroides thetaiotaomicron
  source 1..40: mol_type = genomic DNA
agctataagaaaagactatctaatgaaagcacttgcctaa

SEQ ID NO: 2396 - protein, 587 aa, Bacteroides faecis; identical to SEQ ID NO: 2391

SEQ ID NO: 2397 - DNA, 50 bp, Bacteroides faecis; identical to SEQ ID NO: 2392
  source 1..50: mol_type = genomic DNA

SEQ ID NO: 2398 - DNA, 40 bp, Bacteroides faecis
  source 1..40: mol_type = genomic DNA
agatatctgacaagaatattcaaagaaagcaattgcccaa

SEQ ID NO: 2399 - DNA, 50 bp, Bacteroides faecis; identical to SEQ ID NO: 2394
  source 1..50: mol_type = genomic DNA

SEQ ID NO: 2400 - DNA, 40 bp, Bacteroides faecis; identical to SEQ ID NO: 2395
  source 1..40: mol_type = genomic DNA

SEQ ID NO: 2401 - protein, 596 aa, Brucella anthropi
MQETDIRPTAYSYVRMSTQQQLKGDSLRRQLERSREYAAENNLRLDETLHDIGISAYTGANVRSGALGQFLQLVQNGQIKRGSYLLVESLDRLSRLQVRNALGPFIELINAGITIVTLADKQVYSDATVDENWTQLMMSLAIMSRAHEESQTKSDRLQRAAEGRRKRALAGETRFSHHMVRWLDQIEIAPDKYEYRLNKHADTVRQIYEWADAGIGQIVITRRLNEAKTPTLTGKGEWQQPTVGLILRNEAVIGTYQPVHRVNGKSQPYGEALRGYLPAVISEELFWRVQKNKRVRNSAGRKGERLTNLIGPLATCAHCQGRMLIKTGGAAKNPQKYIRCDNNYRGGPCTGPSGQFRYDKVENAILDHVREFHSFSAFARENNSAGKQQLQEKIASHETTLAELEKQRKNLMSVAAMAEDDATRADVMRALTERRSREDNTKAELEILRADLMTLDSAERNANSLAERIASERKMWETGSDEKVYESRSKIAQALTQIIDFISFDMDTRRFRVIIGAGIVAYEFDKQGRLTNKFDLATSPMRNGPSPLTVKHFAQADGTKYQRDENGLQSLTSETRDRFAARSEKLTKLMQDKQSS

SEQ ID NO: 2402 - DNA, 50 bp, Brucella anthropi
  source 1..50: mol_type = genomic DNA
aatagcataatacaataaacaaggaacgttaagttttgtattgtgctatt

SEQ ID NO: 2403 - DNA, 40 bp, Brucella anthropi
  source 1..40: mol_type = genomic DNA
caaaagttaaatacaacttaaccttgtttttttaccaagt

SEQ ID NO: 2404 - DNA, 50 bp, Brucella anthropi; identical to SEQ ID NO: 2402
  source 1..50: mol_type = genomic DNA

SEQ ID NO: 2405 - DNA, 40 bp, Brucella anthropi
  source 1..40: mol_type = genomic DNA
caaaagataaatagaactaaaagttgttttttttaaaagt

SEQ ID NO: 2406 - protein, 585 aa, Brucella anthropi
MEETDIRPTAYSYVRMSTQQQLKGDSLRRQLERSREYAAENNLRLDDSLHDIGVSAYTGANVRSGALGQFLQLVQNGQIKRGSYLLVESLDRLSRLQVRNALGPFIELINAGITIVTLADKQVYSDATVDENWTQLMMSLAIMSRAHEESQTKSDRLQRAAEGRRKRALAGETRFSHHMFRWYDQIEIAPDKYEYRLNKHADTVRQIYEWADAGIGQIVITRRLNEAKTPTLTGKGVWQQPTVGLILRNEAVIGTYQPVHRVNGKSQPYGEALRGYLPAVISEELFWRVQKNKRVRNSAGRKGERLTNLIGPLATCAHCQGRMLIKTGGAANNPQKYIRCDNNYRGGTCTGPTGQFRYDKVENAILDHVKEFHSFSAFARENSSAGKQQLQEKIASHETTLAGLEKQRKNLMAIAAMADDDATRADVMREISERRTREDSTKAELEILRADLITLDSAERNANSLAERIASERKAWEIGTDAEVYESRSKIAQALTQIIDLISFDMDTRRFRVIIGAGIVAYEFDKQGRLTNKFDLAVSPMRTGPSPLTVDHFVGTYKGEVESNQLDAKRETLIKIMEENRTKDA

SEQ ID NO: 2407 - DNA, 50 bp, Brucella anthropi
  source 1..50: mol_type = genomic DNA
aatagcataatacaataaacaaggaacgttaagttttgtattatgctatt

SEQ ID NO: 2408 - DNA, 40 bp, Brucella anthropi; identical to SEQ ID NO: 2403
  source 1..40: mol_type = genomic DNA

SEQ ID NO: 2409 - DNA, 50 bp, Brucella anthropi; identical to SEQ ID NO: 2407
  source 1..50: mol_type = genomic DNA

SEQ ID NO: 2410 - DNA, 40 bp, Brucella anthropi; identical to SEQ ID NO: 2405
  source 1..40: mol_type = genomic DNA

SEQ ID NO: 2411 - protein, 576 aa, Brucella anthropi
MEETDIRPTAYSYVRMSTQQQLKGDSLRRQLERSREYAAENNLRLDDSLHDIGVSAYTGANVRSGALGQFLQLVQNGQIKRGSYLLVESLDRLSRLQVRNALGPFIELINAGITIVTLADKQVYSDATVDENWTQLMMSLAIMSRAHEESQTKSDRLQRAAEGRRKRALAGETRFSHHMFRWFDQIEIAPDKYEYRLNKHADTVRQIYEWADAGIGQIVITRRLNEAKTPTLTGKGVWQQPTVGLILRNEAVIGTYQPVHRVNGKSQPYSEALRGYLPAVISEELFWRVQKNKRVRNSAGRKGERLTNLIGPLATCAHCQGRMLIKTGGAAKNPQKYIRCDNNYRGGTCTGPSGQFRYDKVEDAILDHVKEFHSFSAFARENNSVGKQQLQEKIARHETTLAGLEKQRKNLMAIAAIADDDATRADVMRELSDRRAREDSTKAELGILRADLITLDSSERNANSLAKRIASEREAWETGSDAEVYESRSKIAQALTQIIDFISFDMDTRRFRVIIGAGIVAYEFDKQGRLTNKFDLATSLFSIGVSPLKVEHFAQGDDWRYEKLSKVMREKQERLL

SEQ ID NO: 2412 - DNA, 50 bp, Brucella anthropi
  source 1..50: mol_type = genomic DNA
aatagcataatataaaaagtatataacgttaagttttatattatgctatt

SEQ ID NO: 2413 - DNA, 40 bp, Brucella anthropi; identical to SEQ ID NO: 2403
  source 1..40: mol_type = genomic DNA

SEQ ID NO: 2414 - DNA, 50 bp, Brucella anthropi; identical to SEQ ID NO: 2412
  source 1..50: mol_type = genomic DNA

SEQ ID NO: 2415 - DNA, 40 bp, Brucella anthropi; identical to SEQ ID NO: 2405
  source 1..40: mol_type = genomic DNA

SEQ ID NO: 2416 - protein, 612 aa, Bacteroides thetaiotaomicron
MRAAFLIRCSTKKQDYERQVNDLTRLAKKFGYTSSDNMIFGEHITGKDDASKRDRQSIQRLKDAAINKEFDVVLVSEVSRMSRDPMSGRLYVRQLINMDIPVYFRDIDTWTIDPVTGKKVRDAETIIGAAFDAAWKYIKSMKTQIASGRRDELDNNQMSIGQPFFGYKRYGGRDKGKKNSWVINDDAAKVVVDVFEEYVKDGATLKSTALAITAKYGEQFNKKFSIGTIEHILTFEPYCTGIKVVSLTDPDTEDVDEFEVEIPTIITRAMFDKATTKRATNRTARTPYPKQATYILSKLLKCPICEHSLTPQKRGGDKGDKYRLMNGKVAIRWSCMSGINNATDCSSRITISNEKLEAIIWGLVKQELIGFANLNDEDRVARVVELTDKITNLEMNIANFTSHISNMDRLIERAYSAYMDAPDSVMDIAKDKYYKTLTKCENERAECKDKIEALNVEKLRLENMRTFFNQPTLPKDAIEKAESDPIKMRNLVMELVDKIYPYRITTYVSPATNRIMKNGIVLLEVYTINGIYNVLYDGNQRNNKVAYYISGNYATFQNGKNKLDAYDAGEYFVISNATLVTETEDVDLTVTFNELIKICMQNGWEIDYTYKM

SEQ ID NO: 2417 - DNA, 50 bp, Bacteroides thetaiotaomicron
  source 1..50: mol_type = genomic DNA
tagttaaatagttttgagaatagttcgctattcttaaaatacttgcacca

SEQ ID NO: 2418 - DNA, 40 bp, Bacteroides thetaiotaomicron
  source 1..40: mol_type = genomic DNA
tctgttgaattcgggtaattcgtccaaaaataaaactccg

SEQ ID NO: 2419 - DNA, 50 bp, Bacteroides thetaiotaomicron
  source 1..50: mol_type = genomic DNA
tagttaaatagttttgagaatagtaagctattcttaaaatacttgcacca

SEQ ID NO: 2420 - DNA, 40 bp, Bacteroides thetaiotaomicron
  source 1..40: mol_type = genomic DNA
tctagtgaatgcggttaataagtggaaaaataaaactact

SEQ ID NO: 2421 - protein, 612 aa, Bacteroides thetaiotaomicron
MRAAFLIRCSTKKQDYERQVNDLTRLAKKFGYTSSDNMIFGEHITGKDDASKRDRQSIQRLKDAAINKEFDVVLVSEVSRMSRDPMSGRLYVRQLINMDIPVYFRDIDTWTIDPVTGKKVRDAETIIGAAFDAAWKYIKSMKTQIASGRRDELDNNQMSIGQPFFGYKRYGGRDKGKKNSWVINDDAAKVVVDVFEEYVKDGATLKSTALAITAKYGEQFNKKFSIGTIEHILTFEPYCTGIKVVSLTDPDTEDVDEFEVEIPTIITRAMFDKATTKRATNRTARTPYPKQATYILSKLLKCPICEHSLTPQKRGGDKGDKYRLMNGKVAIRWSCMSGINNATDCSSRITISNEKLEAIIWGLIKQELIGFANLNDEDRVARVVELTDKITNLEMNIANFTSHISNMDRLIERAYSAYMDAPDSVMDIAKDKYYKTLTKCENERAECKDKIEALNVEKLRLENMRTFFNQPTLPKDAIEKAESDPIKMRNLVMELIDKIYPYRITTYVSPATNRIMRNGIVLLEVYTINGIYNVLYDGNQRNNKVAYYISGVYATFQNGRNKFDAYDTGEYFVISHATLVTETEDVDMLVTFNELIKICMQNGWEIDYTYKM

SEQ ID NO: 2422 - DNA, 50 bp, Bacteroides thetaiotaomicron
  source 1..50: mol_type = genomic DNA
tggttaaatagctttgagaatagttcgctattcttaaaatacttgcacca

SEQ ID NO: 2423 - DNA, 40 bp, Bacteroides thetaiotaomicron; identical to SEQ ID NO: 2418
  source 1..40: mol_type = genomic DNA

SEQ ID NO: 2424 - DNA, 50 bp, Bacteroides thetaiotaomicron
  source 1..50: mol_type = genomic DNA
tggttaaatagctttgagaatagtaagctattcttaaaatacttgcacca

SEQ ID NO: 2425 - DNA, 40 bp, Bacteroides thetaiotaomicron; identical to SEQ ID NO: 2420
  source 1..40: mol_type = genomic DNA

SEQ ID NO: 2426 - protein, 612 aa, Bacteroides thetaiotaomicron
MRAAFLIRCSTKKQDYERQVNDLTRLAKKFGYTSSDNMIFGEHITGKDDASKRDRQSIQRLKDAAINKEFDVVLVSEVSRMSRDPMSGRLYVRQLINMDIPVYFRDIDTWTIDPVTGKKVRDAETIIGAAFDAAWKYIKSMKTQIASGRRDELDNNQMSIGQPFFGYKRYGGRDKGKKNSWVINDDAAKVVVDVFEEYVKDGATLKSTALAITAKYGEQFNKKFSIGTIEHILTFEPYCTGIKVVSLTDPDTEDVDEFEVEIPTIITRAMFDKATTKRATNRTARTPYPKQATYILSKLLKCPICEHSLTPQKRGGDKGDKYRLMNGKVAIRWSCMSGINNATDCSSRITISNEKLEAIIWGLVKQELIGFANLNDEDRVAKVEELTDKITNLEMNIANFTSHISNMDRLIERAYSAYMDAPDSVMDIAKDKYYKTLTKCENERAECKDKIEALSAEKLRLENMRTFFNQPTLPKDAIEKAESDPIKMRNLVMELIDKIYPYRITTYVSPATNRIMRNGIVLLEVYTINGIYNVLYDGNQRNNKVAYYISSVYATFQNGRNKFDAYDTGEYFVISHATLVTETEDVDMLVTFNELIKICMQNGWEIDYTYKM

SEQ ID NO: 2427 - DNA, 50 bp, Bacteroides thetaiotaomicron
  source 1..50: mol_type = genomic DNA
tggttaaatagctttgagaatagttcgctattattaaaatacttgcacca

SEQ ID NO: 2428 - DNA, 40 bp, Bacteroides thetaiotaomicron; identical to SEQ ID NO: 2418
  source 1..40: mol_type = genomic DNA

SEQ ID NO: 2429 - DNA, 50 bp, Bacteroides thetaiotaomicron
  source 1..50: mol_type = genomic DNA
tggttaaatagctttgagaatagtaagctattattaaaatacttgcacca

SEQ ID NO: 2430 - DNA, 40 bp, Bacteroides thetaiotaomicron; identical to SEQ ID NO: 2420
  source 1..40: mol_type = genomic DNA

SEQ ID NO: 2431 - protein, 481 aa, Streptococcus pyogenes
MMTTNKVAIYVRVSTTNQVEEGYSIDEQKDKLSSYCHIKDWSIYNIYTDGGFSGSNTERPALEQLIKDAKKKLFDTVLVYKLDRLSRSQKDTLYLIEEIFIKNGIEFLSLQENFDTSTPFGKAMIGLLAVFAQLEREQIKERMQLGKLGRAKSGKSMMWARTSYGYDYHKETGTVTINELEAIAVRDIFNSYLAGMSITKLRDKLNDKYPKTPNWHYRIIRGILANPVYCGYNQYKGQIFLGNHEPIISEKTFNKTQDELKARQIAAAQFSNNPRPFRAKYMLSGIAQCGYCGAPLQITLGTIRKDGSRNIRYQCKNRFPRTTKGVTIYNDNKKCDSRFYEKSDVEENVIQQISKLQNDPKVIDGLFADLETTIDRDACIKQIEVLSRKVSRLNDLYIDGLIALDELQTKNAEIINQRSLLEKELENDPAIKHQERKRDMRQTLSTDDIFTMDYEQQKVIVRALINKVQVTAESIKIKWKI

SEQ ID NO: 2432 - DNA, 50 bp, Streptococcus pyogenes
  source 1..50: mol_type = genomic DNA
taaacaattttactatcctttatttcaatcaaagacactaaaattcttgg

SEQ ID NO: 2433 - DNA, 40 bp, Streptococcus pyogenes
  source 1..40: mol_type = genomic DNA
aagaatcaccaataacatttctagaagagtaaatcctttt

SEQ ID NO: 2434 - DNA, 50 bp, Streptococcus pyogenes
  source 1..50: mol_type = genomic DNA
taaacaattttactatcctttattgaaatcaaagacactaaaattcttgg

SEQ ID NO: 2435 - DNA, 40 bp, Streptococcus pyogenes
  source 1..40: mol_type = genomic DNA
aagaatcacaaactatattgacataatattaaatcctttt

SEQ ID NO: 2436 - protein, 482 aa, Streptococcus pyogenes
MITTNKVAIYVRVSTTNQAEEGYSIEEQKDKLSSYCNIKDWSVYKIYTDGGFSGSNTKRPALEQLIKDAKKKLFDTVLVYKLDRLSRSQKDTLYLIEDVFIENDIAFLSLQENFDTSTPFGKAMIGLLSVFAQLEREQIKERMQLGKLGRAKAGKSMMWAKTSYGYDYHKETGTVTINPAQSLAIKFIFEEYLAGRSITKLRDDLNEKFPKDIDWNYRAVRIILANPVYCGYNQYKGQVYPGNHEPIISEEIFNKTQEELKVRQIAAAQFSNNPRPFRAKYMLSGIAQCGYCGTPLTITLGTIRKDGSRNIRYQCKNRFPRTTRGVTTYNDNKKCDSYFYEKADVEENVLNQISKLQEDTSYLDELFSSTEDNGIDRDSYQKQIEELTAKLSRLNDLYIDDRITLEELQRRSAEFTLMRATLEAELENDQALKQQERKDDMREILNREDVLNMDYEGQKVVVRALINKVQVTSEEIVIKWKI

SEQ ID NO: 2437 - DNA, 50 bp, Streptococcus pyogenes
  source 1..50: mol_type = genomic DNA
ctaagaattttactatcctacatctcaatgaatgatactaaaattcctag

SEQ ID NO: 2438 - DNA, 40 bp, Streptococcus pyogenes; identical to SEQ ID NO: 2433
  source 1..40: mol_type = genomic DNA

SEQ ID NO: 2439 - DNA, 50 bp, Streptococcus pyogenes
  source 1..50: mol_type = genomic DNA
ctaagaattttactatcctacatcgaaatgaatgatactaaaattcctag

SEQ ID NO: 2440 - DNA, 40 bp, Streptococcus pyogenes; identical to SEQ ID NO: 2435
  source 1..40: mol_type = genomic DNA

SEQ ID NO: 2441 - protein, 489 aa, Streptococcus pyogenes
MITTNKVAIYVRVSTTSQAEEGYSIEEQIAKLRSYCGIKDWALYKVYKDAGFSGSNIERPGLQSLIAEAKNKHFDTVLVYKLDRLSRSQKDTLYLIEEVFNKQDIAFFSLQENFDTSTAFGKAMIGLLAVFAQLEREQIKERMQLGKLGRAKAGKAMMWAKVAYGYNYNKETGSLDINPAEAEIVKIVYAEYLAGQSITKLKDYLNENGLNTKARPWYYRAIRQILGNPVYAGYNQFSGQVFKGDHQPIVSKEDYDRTQEELKRRQLKAYELFNNPRPFRAKYMLSGLARCGYCGTPLKMSMTAKRKSDGGRTYRYSCINRTSNRTKSPTLYNGGKKCDSGLYYKEDLEKYVLDEVARLQHDPEAIKSLIEPAKTTVDEQEIKSRVNALDTKISRLNDLYLNNLITLEDLKEKTSGILREKAILEKQLTENPTNQIDAEKERIKKIQAKADIRSLPYEEQAMIVKSLINKVDVTAEAITIRWTINNFSD

SEQ ID NO: 2442 - DNA, 50 bp, Streptococcus pyogenes
  source 1..50: mol_type = genomic DNA
tcaataattttagtgactaacatttcaatcaatgtatctaaaattctttg

SEQ ID NO: 2443 - DNA, 40 bp, Streptococcus pyogenes; identical to SEQ ID NO: 2433
  source 1..40: mol_type = genomic DNA

SEQ ID NO: 2444 - DNA, 50 bp, Streptococcus pyogenes
  source 1..50: mol_type = genomic DNA
tcaataattttagtgactaacattgaaatcaatgtatctaaaattctttg

SEQ ID NO: 2445 - DNA, 40 bp, Streptococcus pyogenes; identical to SEQ ID NO: 2435
  source 1..40: mol_type = genomic DNA

SEQ ID NO: 2446 - protein, 482 aa, Streptococcus pyogenes
MITTNKVAIYVRVSTTNQAEEGYSIEEQKDKLSSYCNIKDWSVYKIYTDGGFSGSNTKRPALEQLIKDAKKKLFDTVLVYKLDRLSRSQKDTLYLIEDVFLENKIDFVSLLENFDTSTPFGKAVVGILSVFAQLEREQIKERMQLGKLGRAKSGKSMMWARTSYGYDYHRETGTMTINPVQSLAIKFIFEQYLSGRSITKLRDDLNDKYPKDIDWNYRAVRMILANPVYCGYNQYKGQVYPGNHEPIITEEIYNKTQEELKIRQIAAAEFSNNSRPFRAKYMLSGIAQCGYCGAPLTITLGTRRKDGSRNIRYQCKNRFPRTTRGVTTYNDNKKCDSRFYEKADVEENVLNQISKLQNDTSYLDELFSSTEDNGIDRDSYQKQIEELTAKLSRLNDLYIDDRITLEELQRRSAEFTLMRGMLEAELENDQALKQQERKDDMRQILTRGDVLGMDYEGQKVVVRALINKVQVTSEEIVIKWKI

SEQ ID NO: 2447 - DNA, 50 bp, Streptococcus pyogenes
  source 1..50: mol_type = genomic DNA
ctaagaattttactatcctacatctcaatgaaagatactaaaattcctag

SEQ ID NO: 2448 - DNA, 40 bp, Streptococcus pyogenes; identical to SEQ ID NO: 2433
  source 1..40: mol_type = genomic DNA

SEQ ID NO: 2449 - DNA, 50 bp, Streptococcus pyogenes
  source 1..50: mol_type = genomic DNA
ctaagaattttactatcctacatcgaaatgaaagatactaaaattcctag

SEQ ID NO: 2450 - DNA, 40 bp, Streptococcus pyogenes; identical to SEQ ID NO: 2435
  source 1..40: mol_type = genomic DNA

SEQ ID NO: 2451 - protein, 503 aa, Clostridium perfringens; identical to SEQ ID NO: 11

SEQ ID NO: 2452 - DNA, 50 bp, Clostridium perfringens
  source 1..50: mol_type = genomic DNA
cgaacctgtggtattctaaatacaatcaggaccacccgtaaaacgggtgg

SEQ ID NO: 2453 - DNA, 40 bp, Clostridium perfringens
  source 1..40: mol_type = genomic DNA
ctttttttacttaatataaataaaaaatacataaagcctc

SEQ ID NO: 2454 - DNA, 50 bp, Clostridium perfringens
  source 1..50: mol_type = genomic DNA
cgaacctgtggtattctaaatacatacaggaccacccgtaaaacgggtgg

SEQ ID NO: 2455 - DNA, 40 bp, Clostridium perfringens
  source 1..40: mol_type = genomic DNA
atttttctagttaagataatataaacatgcataaaggctc

SEQ ID NO: 2456 - protein, 475 aa, Streptococcus sp oral taxon 431
MKTTNKVAIYVRVSTSYQAEEGYSIDEQKDKLEAYCKIKDWKIYDVYVDGGFSGANTQRPELERLISDVKRKKVDIVLVYKLDRLSRSQKDTLFLIEDVFTKNDVSFISLQENFDTSTPFGKASIGMLSVFAQLEREQIKERMMLGKEGRAKNGKSMSWTTIPFGYDYSKETGILSVNPTQALIVNRIFTEYLNGKPVAKIIRDLNAEGHVGRKRPWGETITKYLLKNETYLGKSKYKGKVYEGQHEAIISQELFDLVQLEVERRQISAYEKYNNPRPFRAKYMLSGLMKCGYCGASLGLRCTRKDKNGISHHKYQCRNRHSKDLEKRCESGWYSKEELERDVIKELERIKFDPKYKNETLAKKEETIKVEEIKKQLERINNQVSKLTELYLDEIITRKELDEKNAKFKTERQFLEEQLENQKSNVMSIRKRKLTRLLKDFDVEKLSYEDASKIVKNIIKEIIVTKDGMTITLDF

SEQ ID NO: 2457 - DNA, 50 bp, Streptococcus sp oral taxon 431
  source 1..50: mol_type = genomic DNA
ttctgttatttagtcgaaatgattaggataagttagagttagtaacagta

SEQ ID NO: 2458 - DNA, 40 bp, Streptococcus sp oral taxon 431
  source 1..40: mol_type = genomic DNA
tgccacaattcttccaataagaataattttattatacatt

SEQ ID NO: 2459 - DNA, 50 bp, Streptococcus sp oral taxon 431
  source 1..50: mol_type = genomic DNA
ttctgttatttagtcgaaatgattgtgataagttagagttagtaacagta

SEQ ID NO: 2460 - DNA, 40 bp, Streptococcus sp oral taxon 431
  source 1..40: mol_type = genomic DNA
agccactatttttccattagttttaattttcttatatatt

SEQ ID NO: 2461 - protein, 484 aa, Streptococcus pyogenes
MNKVAIYVRVSTTMQAEEGYSIDEQIDKLTSYCKIKDWTVYDIYKDGGFSGGNIERPAMERLISDANRKRFDTVLVYKLDRLSRSQKDTLYLIEEIFGKNDISFLSLNESFDTSTPFGKAMIGILSVFAQLEREQIKERMLLGKIGRAKSGKSMMVSKVSFGYTYDKLKGELIVNQAEALVVRKIFDEYLGGRSLIKLRDYLNSNGIYRGDKYWNYRGLLLILSNPVYIGMIRYRGEIYPGNHQPIIDTEVFNKTQEEIKKRQIEALEFSNNPRPFRAKYMLSGLAKCGYCGTPLKIILGYKRKDGSRSMRYQCINRFPRNTKGITIYNDNKKCDSGFYEKADIEEFVIAQIRGLQLNSYKLDNMFDKQPIIDVEGIEKQITLLDNKLKRLNDLYLNDMIELDDLKKQTQSLRKQKTMLEDELINNPAIMQDKNKNHFKEILGTKDITTLDYETQKSIVNNLVNKVFVKAGHIKIEWKIPFKKV

SEQ ID NO: 2462 - DNA, 50 bp, Streptococcus pyogenes
  source 1..50: mol_type = genomic DNA
gtgtgaattttagatactcttatctcaagcaatgtatctaaatatcttag

SEQ ID NO: 2463 - DNA, 40 bp, Streptococcus pyogenes; identical to SEQ ID NO: 818
  source 1..40: mol_type = genomic DNA

SEQ ID NO: 2464 - DNA, 50 bp, Streptococcus pyogenes
  source 1..50: mol_type = genomic DNA
gtgtgaattttagatactcttatcggaagcaatgtatctaaatatcttag

SEQ ID NO: 2465 - DNA, 40 bp, Streptococcus pyogenes
  source 1..40: mol_type = genomic DNA
tgacaaagtaagacagtgtggaagaaaagtaaaagcttta

SEQ ID NO: 2466 - protein, 457 aa, Bacillus cereus
MRCAIYRRVSTDEQAEKGFSLENQKLRLESFATSQGWEVVEDYVDDGFSGKDTNRPALQRMFSNVDKFDVILVYKLDRFTRSVKDLNEMLETIKENEIAFKSATESIDTTTATGRMILNMMGTTAQWERETISERIKDVFGKLRENGIFSTGHPPYGYRCSGNKSIEIVEEQAEIVRYIYELSKTMGLFKISVELNRKGIKTRRNNKFGQSAVKRILHNPFYCGYMEVNNKWVPIKNEGYIPIISEEEFKTTQKILTKRNKAQTRSRSVSYYPFSGIVLCPECQRAMRGDRAKYGDYYYRYYRCVYGRENINCTNRKRIRAEQVDKAFAEYISGSFENTTIKLDSKDIKSDIEYELKHLDSKIERLSDIYIEGDITKSKYNEKMNSLLNEKEKLKKDLTSCKENVDAEFVRDQINKLESIWHLIDDKTKSESIRSIFDTIKIKQDKNKVTIMDHTLL

SEQ ID NO: 2467 - DNA, 50 bp, Bacillus cereus
  source 1..50: mol_type = genomic DNA
ttttgggttaatggtccatttcctctagtaaatgtattattaacccaaaa

SEQ ID NO: 2468 - DNA, 40 bp, Bacillus cereus
  source 1..40: mol_type = genomic DNA
tttaggattatcaaattcactatgatacgccctgctaaaa

SEQ ID NO: 2469 - DNA, 50 bp, Bacillus cereus
  source 1..50: mol_type = genomic DNA
ttttgggttaatggtccatttccttcagtaaatgtattattaacccaaaa

SEQ ID NO: 2470 - DNA, 40 bp, Bacillus cereus
  source 1..40: mol_type = genomic DNA
tttaagattatgaaattgatcataatacaccatgttaata

SEQ ID NO: 2471 - protein, 540 aa, Eisenbergiella massiliensis
MKQPYNTTIYNTALYLRLSRDDELQGESGSIQTQRMMLRQYAAEHGLTVVDEYIDDGWSGTNFERPSFQRMIDDIEDGKINCVVTKDLSRLGRNYILTGQYTEIYFPSKGVRYIAINDNVDTINGESELAPFLNILNEMHARQTSKKVKAAMHTRFANGAHYGAYAPLGYVKDPDKKGHLLIDPETRWIVEKIFDLAVHGRGAASITRILVEEKVPTPGWLNYERYGTFANIYAGAPAEKAYAWTIAQVKSILKEETYIGHSIHNKQSNISFKNKKKVRKPQEEWYRVENTHEAIISEEVFQKVQELIASRRRKRRNGTTQIFAGLIKCADCGWSLAYGENKQNKNPYGYYHCSKNGQGLRQCSMHYIRYDVLYAYVLARLQYWSMLAQKDEDNLLKRLLNASDRERNSAKKKQAAELKKAEKRKAEVDGLFAKMYEDWSAGRITEYNFNMLSEKYQNEQKELETKIRQLHETMEAAVQTAADAEKWIALMKQYVNPVELTAELLNTLIEKITVHEAVKGEDGSREQEVEIYYRFIGKID

SEQ ID NO: 2472 - DNA, 50 bp, Eisenbergiella massiliensis
  source 1..50: mol_type = genomic DNA
caatatctttaattaagggagacgggagtttcccatagttaaagatacca

SEQ ID NO: 2473 - DNA, 40 bp, Eisenbergiella massiliensis
  source 1..40: mol_type = genomic DNA
cgtttccaaatgggaacgcggactctgctttcctgatatg

SEQ ID NO: 2474 - DNA, 50 bp, Eisenbergiella massiliensis
  source 1..50: mol_type = genomic DNA
caatatctttaattaagggagacgtcagtttcccatagttaaagatacca

SEQ ID NO: 2475 - DNA, 40 bp, Eisenbergiella massiliensis
  source 1..40: mol_type = genomic DNA
tgtttccaatgcagaacgctccctctggtttcctaatatg

SEQ ID NO: 2476 - protein, 503 aa, Clostridioides difficile; identical to SEQ ID NO: 11

SEQ ID NO: 2477 - DNA, 50 bp, Clostridioides difficile; identical to SEQ ID NO: 12
  source 1..50: mol_type = genomic DNA

SEQ ID NO: 2478 - DNA, 40 bp, Clostridioides difficile
  source 1..40: mol_type = genomic DNA
atttagtttagcaaaagatttagagaaaattaaaaaacta

SEQ ID NO: 2479 - DNA, 50 bp, Clostridioides difficile
  source 1..50: mol_type = genomic DNA
gtgtagtcccttgtaaactgtacttcaggtcagtttacaaggaactacac

SEQ ID NO: 2480 - DNA, 40 bp, Clostridioides difficile
  source 1..40: mol_type = genomic DNA
ttttagttttataataaattcagagaaatttaaaaaaata

SEQ ID NO: 2481 - protein, 549 aa, Enterococcus faecalis
MNLDTLQRTLTTQNHNFSRRNKGKQELTVLYARLSQDDGTQGDSDSITNQKAMLEKFARDNNLYNTKFFVDDGYSGTNFNRPGFQEALDLVNNGVVKNFVVKDLSRFGRSYAEVALYTEILFPKLDVRFIAVNDGVDSETQDANEIDFAPFRNVFNEFYAKDTSKKIRAVQRTKGLAGERLAVIPPFGYTKDPNDRNHLLVDEEASKVVQKIFDYCINGYGPHQIAKKLQKERTPTVSEYRAKSNSPVCNWDSKKVVEILERPDYLGHTVNFKTSTKSYRDKRKIYNDPKDWVVFKNTHEPIIDQATFDLVQKMRQKRRRNTKSGRVGLFSGLVHCFDCKRHHVFATAKSISPNQERYVCSGYQNPNYDCDNAHYIREMKLTEIVLSDINDKIDFLKQHEKQFTDSLAKRAKTDQQKELKKAEKRVIEAKKRASELDSIIKRLYEDNVLGKLSDERFNILSKDYEFEQSKLKQEIDELETRLLKQKEDVRNVQKFLDIVRKYTTLEKLTPSIVNELIDRIEIHKPDKSSGKRTQQIDIYYRFVGKLDDL

SEQ ID NO: 2482 - DNA, 50 bp, Enterococcus faecalis
  source 1..50: mol_type = genomic DNA
ttagtaggttacgagaacctagctttagctagggtctcgtaaaacactat

SEQ ID NO: 2483 - DNA, 40 bp, Enterococcus faecalis
  source 1..40: mol_type = genomic DNA
aaaaatagagaagtcattttttaatgacttctctattttt

SEQ ID NO: 2484 - DNA, 50 bp, Enterococcus faecalis
  source 1..50: mol_type = genomic DNA
ttagtaggttacgagaacctagcttcagctagggtctcgtaaaacactat

SEQ ID NO: 2485 - DNA, 40 bp, Enterococcus faecalis
  source 1..40: mol_type = genomic DNA
aaaaattgacaagttcttttccaacaactcctctattttt

SEQ ID NO: 2486 - protein, 504 aa, Paeniclostridium sordellii
MKTCIYLRKSRSDEEAEKQGEFETLSRHRSTLLKVAKEQNLNIVEIKEELVSGESIAYRPKMLELLEEVKNNFYDSVLVMDIDRLGRGNMQDQGLILETFKKSKTKIITPRKTYDLTNEFDEEYSEFEAFMARKELKLITRRMQRGRIKSVEEGKFIASKPPYGYKFIFDENGKKSMVIDEEKANVVKLIFKLYTDGNGASKVANHLNSLGLKTTTGRSWYEKGVRDIIKNKTYAGYVVWNKIERTKTSSKPRSQDDIIESKGLHDSIISEDLWNKAQRVLKGNAILPTPIFKEITNPLAGLIICRCCGHKMLARSSTSKNVYEKFIRCTNCGMNRGSKLYIVEEEVIKQLREWVKIYKTNFKNIPSIENSNSNLDSYNKLLKNLNSEYETLVKQKENLHNLLEQGIYDVDTYLDRSKILTEKIETNKFNIESVKKDIAKEQKVNVSIDDIIPSVEDVLDLYYKTDLMSERNDLLRSVIDYIDYYKEPGSKRSKLDIVINPKLD

SEQ ID NO: 2487 - DNA, 50 bp, Paeniclostridium sordellii
  source 1..50: mol_type = genomic DNA
aactgtcatcatggaactgataaccaattatcagttccatgataacagta

SEQ ID NO: 2488 - DNA, 40 bp, Paeniclostridium sordellii
  source 1..40: mol_type = genomic DNA
aaatgtccgtacagatattcaattcaacgttttatcaggt

SEQ ID NO: 2489 - DNA, 50 bp, Paeniclostridium sordellii
  source 1..50: mol_type = genomic DNA
aactgtcatcatggaactgataacttattatcagttccatgataacagta

SEQ ID NO: 2490 - DNA, 40 bp, Paeniclostridium sordellii
  source 1..40: mol_type = genomic DNA
aaatgtctgttcagatactttgctcaatttttaatcaggt

SEQ ID NO: 2491 - protein, 643 aa, Lysinibacillus sphaericus
MKGAMSLKKAALYVRVSTLHQIDKDSLPFQRQELENYAKYALNIEEVVIFEDAGYSAKNTDRPKYQEMMKRIRSGEFTHLLVWKIDRISRNLKDFSEMYEELKDCKVTFVSKNEQFDTSTAMGEAMLKIILVFAELERKLTAERVFSIMLSRAEKGLWNGATVPFGYVWSEEEKFPVIDPDESKIIQYIYNSYESLRSTLKVAYRLHEEKIATKRNGQWTAKTVRDILRNPFYIGTYRYNMRESGGSRRLKNKEEWVVVENNHPGIIEKEQFERVNKLLSDNYRGLTDVQRADIHKHIFSKMLYCGKCNSLLTAGLDAARKDGYRPSRYTCVTSGGAKRCSNYVSDIIIGPFIFNYVSNLIRLQERITPKHSLRDMERALLRGNSFIDVVGVDNESLKETHFALTGNMSGQEYSLNTKDEIEIPNIEIERLQREKTKFVRALKRLEDLYYFGEEEDAISQKEYIFKKRDLQERLEELDDEINILKQKNDDKTSDVFIDYAQHFLITKEMQQARQVDYRELSKIVGREALSDFMQTIIDNIVVIDKRVQSITFKNGITHTFAYKSLLQSKSSAPTKKQYKNYEGPVIEYLKENGPASRSDLQKATNITRDGIFTLLSELIEREIIVKTGQSTATRYHYNDKQNN

SEQ ID NO: 2492 - DNA, 50 bp, Lysinibacillus sphaericus
  source 1..50: mol_type = genomic DNA
accgtatctctatatacgttaggttgtggagtagtaaacaataatatgat

SEQ ID NO: 2493 - DNA, 40 bp, Lysinibacillus sphaericus
  source 1..40: mol_type = genomic DNA
gagtttccatactctaggttgtaaagtgaaccactacgaa

SEQ ID NO: 2494 - DNA, 50 bp, Lysinibacillus sphaericus
  source 1..50: mol_type = genomic DNA
accgtatctctatatacgttaggtcttggagtagtaaacaataatatgat

SEQ ID NO: 2495 - DNA, 40 bp, Lysinibacillus sphaericus
  source 1..40: mol_type = genomic DNA
cagtttccaacttctaggtcttccagtgaaccagtactaa

SEQ ID NO: 2496 - protein, 615 aa, Klebsiella grimontii
MLIQTKIRRFNMKKVFVYHRVSSDQQLDGSGIARQAELLEGYLERTGICAEMDDPAPVVLSDQGVSAFKGLNISEGELGAWMEQVRNGMWDSSILVVESIDRFSRQNPFDVMGYINALMAHNVAIHDVMANIVISRSNSKDLPFVMMNAQRAYDESKYKSDRIRKGWAKKREQAFNKGTIVTNKRPQWIEVENDKYVVNEKAAVVKEIFALYQTGMGCPTIAKQLQTKEGEQYKFNRPWTGELVHKILTNRRVTGKIFISEIIRNHDDIDNPVTQKKYDMDVYPVVINEEEFELVQELLKSRRPNAGRITVKKEGQEEVLIKSNLFSGIARCTECGGSMYHNVVRAKRTPKKGDPKIEEYRYIRCLNERDGLCENKAMTYETVERFVVEHLLGMDLNTVIKEQEFNPEIEVIRIQIDQVKDQITNYENGIERRKSAGKAVSFEMREELDDAKLELEQLLARQASLATVQVDVPVLQDVNVTELYNVNNVDIRTRYENELNKIVSNIRLKRNGTSYTIDINYKQNELKRHVLFVENKKKEQTLISEVIIEDVDGGKFYYTPSFMIRLKDGEIRFQQTNEDLSIVDYSLLLNYVDAIDRNDAVGVWMRNNMSFLFTK

SEQ ID NO: 2497 - DNA, 50 bp, Klebsiella grimontii
  source 1..50: mol_type = genomic DNA
atgttgtaataagcgtcacacactcaagtgtgttatgcttatacaaacaa

SEQ ID NO: 2498 - DNA, 40 bp, Klebsiella grimontii
  source 1..40: mol_type = genomic DNA
tttttgcatgataatcatacaaataagtgccgttacagca

SEQ ID NO: 2499 - DNA, 50 bp, Klebsiella grimontii
  source 1..50: mol_type = genomic DNA
atgttgtaataagcgtcacacactgtagtgtgttatgcttatacaaacaa

SEQ ID NO: 2500 - DNA, 40 bp, Klebsiella grimontii
  source 1..40: mol_type = genomic DNA
ttcttcaaatataatcaaagtaataagttccgttactgca

SEQ ID NO: 2501 - protein, 615 aa, Klebsiella grimontii
MLIQTKNRRLHMKKVFVYHRVSSDQQLDGSGIARQAELLEGYLERTGICAEMDDPAPVVLSDQGVSAFKGLNISEGELGAWMEQVRNGMWDSSILVVESIDRFSRQNPFDVMGYINALMAHNVAIHDVMANIVISRSNSKDLPFVMMNAQRAYDESKYKSDRIRKGWAKKREHAFNKGTIVTNKRPQWIEVENDKYVLNHKAAVVKEIFSLYQTGMGCPTIAKQLQTKEGEQYKFNRPWTGELVHKILTNRRVTGKIFISEIIRNHDDIENPVTQKKYDMDVYPVVINEEEFELVQELLKSRRPNAGRVTVKKDGQEEVLIKSNLFSGIARCTECGGPMYHNVVRAKRTPKKGDPKIEEYRYIRCLNERDGLCENKAMTYETVERFVVEHLLGMDLSTVIKEHEFNPEIEVLRIQIDQVKDQITNYENGIERRKSAGKPISFDMREELDDAKSALERLLARQASLATVQVDVPVLQDVNVTELYDVNNVDIRTRYENELNKIVSNIRLKRNGKSYTIDINYKQNELKRHVLFVENKKKEQTLISEVIIEDVDGAKFYYTPSFMIMLKDGEIRFQQTNEDLSIIDYSLLLNYIDAVDRNDAVGVWMRNQFNFLTSN

SEQ ID NO: 2502 - DNA, 50 bp, Klebsiella grimontii; identical to SEQ ID NO: 2497
  source 1..50: mol_type = genomic DNA

SEQ ID NO: 2503 - DNA, 40 bp, Klebsiella grimontii; identical to SEQ ID NO: 2498
  source 1..40: mol_type = genomic DNA

SEQ ID NO: 2504 - DNA, 50 bp, Klebsiella grimontii; identical to SEQ ID NO: 2499
  source 1..50: mol_type = genomic DNA

SEQ ID NO: 2505 - DNA, 40 bp, Klebsiella grimontii; identical to SEQ ID NO: 2500
  source 1..40: mol_type = genomic DNA

SEQ ID NO: 2506 - protein, 500 aa, Flavonifractor plautii
MNVVIYARYSSHSQTEQSIEGQLHTCYEYAKNNGYLVVGEYIDRAQSGTTDSRAEFQRMIADSDKHTFEGVLVYQLDRFAHNRYDSAINKAKLKKNGVRVISARENISDDASGILVEGVLESMAEYYSAELSQKIRRGMDINAEKCLSNGSNPGLGYRVDEERRFHIDPEGAAVVREIFEQYASGKTVTEIIQSLNARQIKTSQGKAFNKNSLHRLLRNRRYIGYYIYKGVETPNGMPRILEDELFERVQHILNRNKKAPARSRGREEYLLTTKLFCGYCREMMTGYGGTGKSGKAYHYYACNNFKRRKCKKKVINKEKIENRVVLECRKLLTDSNIEHIAASVAAVCESDWDTISVKRIKAAIQEADTAIENLWKALEKGQAADMITERIEKRQKEKEELQAQLAIEMNKQVRLSAPDIRAYLYALKHGDKNDENTKRGIINIFLRAVYLFDETFTLILNGSDKPIVIDDILLDEIEEGLDDDLANHNLCSSLVADAPP

SEQ ID NO: 2507 - DNA, 50 bp, Flavonifractor plautii
  source 1..50: mol_type = genomic DNA
tcgttggttgcggacgctccaccaaatggacattacacgaacacctactt

SEQ ID NO: 2508 - DNA, 40 bp, Flavonifractor plautii
  source 1..40: mol_type = genomic DNA
actccccccgcctccaccagaaagaaagatacgacgaaag

SEQ ID NO: 2509 - DNA, 50 bp, Flavonifractor plautii
  source 1..50: mol_type = genomic DNA
tcgttggttgcggacgctccaccaggtggacattacacgaacacctactt

SEQ ID NO: 2510 - DNA, 40 bp, Flavonifractor plautii
  source 1..40: mol_type = genomic DNA
actcctcctccctccccctggaagaaaggaaggacgaaag

SEQ ID NO: 2511 - protein, 621 aa, Streptococcus suis
MRRNEKITVLYERLSRDDDLQGESNSISNQKKLLEDYAAQHDFPNPVHFTDDGISGTCFDRPGFLAMMKEVEAGNVEYLCIKDMSRLGRDYLKVGQIMEILRQRGVRLIAINDGVDSARGDDDFTPFRNIMNEYYARDTSRKIRSTFQSKGKTGKHLTGTVIYGYLWNEARDQWLVDPEAAEVVKRIFAMTIEGYGPYQIANRLKEDKVLIPSAYLAQHGEGVNKNKTFKDMYGWGSSTIVNILEKREYLGHTINFKTRKHFKDKKSHYVPEDEWTIFENTHEAIIDQQTFDLVQKIRSKVRRYPDGWGEVAPLTGLLYCADCGGKMYVHRTNNGKRISQYTCSQYTKVPVGTICKTQHRINEDVVLSLVSDMLKAIAEYAKHDRAEFVRVVQEAQSNQQTAEVRKQRTRLATAKQRVSELEVLLCKIYEDNILGKLSDSRYATLDAQYEKEQSELTVEISALEKAIKSYEKHEKDADRFIALIDKYENFDKLTIAMLNEFIEKILVHERDRKGSIQTTQEVEIYFNFVGRFVPPAFGEVELTQEELEEIRKREERKDRLHQNYLKRKASGAQKQYEDKIKERKKAEMDAKKAAIRAEDIAKGVFIPVSSLPQKEPMKAVI

SEQ ID NO: 2512 - DNA, 50 bp, Streptococcus suis
  source 1..50: mol_type = genomic DNA
aaaagtccttgacaattcgtttctggtgttgtatgctctaaaagacttct

SEQ ID NO: 2513 - DNA, 40 bp, Streptococcus suis
  source 1..40: mol_type = genomic DNA
aaagtataaactagcagcgggtaaaactgccaaatctatt

SEQ ID NO: 2514 - DNA, 50 bp, Streptococcus suis
  source 1..50: mol_type = genomic DNA
aaaagtccttgacaattcgtttctagtgttgtatgctctaaaagacttct

SEQ ID NO: 2515 - DNA, 40 bp, Streptococcus suis
  source 1..40: mol_type = genomic DNA
aaatgatagactagcaaagagaaaaactgacaaatgtatt

SEQ ID NO: 2516 - protein, 561 aa, Hafnia alvei
MKRPKAYSYVRFSTPRQAQGDSHRRQVQQAQEYCLTNNLDLDDKTIEDFGVSAFRGNNRTDGELGRFIDAVKAGSIEEGSYLLVESVDRLSRQTIEKALSQFLEILDAGIVIVTLSDKEVFRKGYVDFTKLIISIVYMARANDESEMKSLRSQAAWTNGRKEARENNKVMANSRLPSWLMLGEGKIVSIPDRVEVINEMFRMAHAGNGYQQIAKTLTERGYLTFGKGKVWRPAGIQSVVKSRALIGEFQPHIMRKGKRIPDGEPILGYYPAVISPSLFAEVQHLVDKRNHHSGSYRKGLYNNLFSGVIRCQCGELLRFQNKGNKAQARNYLVCPMQGVTGCQLPYLLYDKLEPQLLQAISKLSAVMKQRQPQTEKTSVLKDELSVLRNKLEAEVKKSKKAAQSMLDFDDDAVFRSLYEECKGNCQYIEDKILQIENEIMGLELSTRTIFQLLHPEDLSNTEQRQQFNSQLKSAVKIEFIYEHTELVAVIKDLKGELLLEQAFGLKLMNSIVHDYEGHIVVKTISNPPYIDPDWLEEERDMYAKGISVEFDECGDFSVESLK

SEQ ID NO: 2517 - DNA, 50 bp, Hafnia alvei
  source 1..50: mol_type = genomic DNA
tgtggtccttataatgaaaatagctcgcagtttttaggagaaatgccgta

SEQ ID NO: 2518 - DNA, 40 bp, Hafnia alvei
  source 1..40: mol_type = genomic DNA
tcgggcttttttgatggtgtcgcagttcttgatgccataa

SEQ ID NO: 2519 - DNA, 50 bp, Hafnia alvei
  source 1..50: mol_type = genomic DNA
tgtggtccttataatgaaaatagcttgcagtttttaggagaaatgccgta

SEQ ID NO: 2520 - DNA, 40 bp, Hafnia alvei
  source 1..40: mol_type = genomic DNA
tcaggcttttttgttgttgttgttgttcttgatgaattaa

SEQ ID NO: 2521 - protein, 503 aa, Ruminococcus gnavus; identical to SEQ ID NO: 341

SEQ ID NO: 2522 - DNA, 50 bp, Ruminococcus gnavus; identical to SEQ ID NO: 12
  source 1..50: mol_type = genomic DNA

SEQ ID NO: 2523 - DNA, 40 bp, Ruminococcus gnavus
  source 1..40: mol_type = genomic DNA
ttattttttctcatgtactttcctccattataaaaaactt

SEQ ID NO: 2524 - DNA, 50 bp, Ruminococcus gnavus
  source 1..50: mol_type = genomic DNA
gtgtagtcccttgtaaactgtacttgaggtcagtttacaaggaactacac

SEQ ID NO: 2525 - DNA, 40 bp, Ruminococcus gnavus
  source 1..40: mol_type = genomic DNA
atgtcttttctcatgttcttgcctccattctatatgactt

SEQ ID NO: 2526 - protein, 503 aa, Ruminococcus gnavus
MNNRIDAIYARQSVDKKDSISIESQIEFCKYELKGGNCKEYTDKGYSGKNTDRPKFQELVRDIKRGLIAKVVVYKLDRISRSILDFANMMELFQQYNVEFVSSTEKFDTSTPMGRAMLNICIVFAQLERETIQKRVTDAYYSRSQRGFKMGGKAPYGFHTEPIKMDGINTKKLVVNPDEAANIRLMFEMYAQPTTSYGDITRYFAEQGILFHGKELIRPTLAQMLRNPVYVQADLDVYEFFKSQGTVIVNDAADFTGTNGCYLYQGRDVKPSKKNDLKDQMLVLAPHEGIVPSDIWLTCRKKLMNNMKIQSARKATHTWLAGKIKCGNCGYALMSIFNPSGKQYLRCTKRLDNKSCPGCGKIITSELEAVVYQQMVKKLASYKTLTGRKKAAKANPKIAALQVELAHVDSEIEKLVDSLTGANNVLLSYVNVKIAELDGRKQELLARIAELTVEAISPEQVSQISGYLDTWENVSFDDKRRVVDLMITTIAATSDSLNITWKI

SEQ ID NO: 2527 - DNA, 50 bp, Ruminococcus gnavus; identical to SEQ ID NO: 12
  source 1..50: mol_type = genomic DNA

SEQ ID NO: 2528 - DNA, 40 bp, Ruminococcus gnavus; identical to SEQ ID NO: 2523
  source 1..40: mol_type = genomic DNA

SEQ ID NO: 2529 - DNA, 50 bp, Ruminococcus gnavus; identical to SEQ ID NO: 2524
  source 1..50: mol_type = genomic DNA

SEQ ID NO: 2530 - DNA, 40 bp, Ruminococcus gnavus; identical to SEQ ID NO: 2525
  source 1..40: mol_type = genomic DNA

SEQ ID NO: 2531 - protein, 449 aa, Staphylococcus epidermidis
MEEAIAYVRQSTLKQQSLATQKSLIMDTAKQYGWSNVAFYDDKKTGRHTKRSGYQKMVEIITSGKCKVLCCYRLNRLHRNLKNAIQFFEICKKHHITIISVNDGYFDLSKEFDCFRLNILMSLAEMESNNISEQTKNGIREKAKQGKLITTHAPFGYRYRKGCFVVQEEEAYTVKSVYRWYLQGLGYKKISQHLDSNPNLIPRKPYQVRNILLNPNYCGRVINKYGTFNDIVPPIIDIDTFEEAQERRIHKQLNRSNSRNKLKRRIKCPYCQSTLTNLTIKKENYSLRYYVCPKNMNDAYRTCPFKSINAPELESEVLDTCKKYFEEQSFHKRLNNTILKVLKQQQMKHKETHLTQEQLIEKLAQNRIDVKTFKRLSASCKSEENYSTYSTYQIDDKLKYVIKNKITLQDIAPFIDCIKITQTKQLQGIYFKNSPLNIVEQSHLITPER

SEQ ID NO: 2532 - DNA, 50 bp, Staphylococcus epidermidis
  source 1..50: mol_type = genomic DNA
tcacatttaataactcctgaaaggaaaataatctcttcaatttattttta

SEQ ID NO: 2533 - DNA, 40 bp, Staphylococcus epidermidis
  source 1..40: mol_type = genomic DNA
ttactttgcaacagaaccgaatgaagtaatatgaaacaac

SEQ ID NO: 2534 - DNA, 50 bp, Staphylococcus epidermidis
  source 1..50: mol_type = genomic DNA
tcacatttaataactcctgaaaggcaaataatctcttcaatttattttta

SEQ ID NO: 2535 - DNA, 40 bp, Staphylococcus epidermidis
  source 1..40: mol_type = genomic DNA
ttaatttgcaacaaaacagcatgctacaatatgaagcaac

SEQ ID NO: 2536 - protein, 564 aa, Streptococcus salivarius
MNRTLTISDYKQVDTSKLSDITVVYCRLSQDDGLDGDSNSITNQKKILLDVVTRENLSNPILFVDDGFSGTNFDRPAISEALRLVENRQVSNFIVKDLSRLGRSYIKVGQLTEITFPSFDVRFIALNDGVDSNKPNETNSIFLPIKSLMDEMYAADTSKKIRAVVQAKAKAGERVTTNPPYGYLKDSNNPKNWIIDPVASEVVKRIFQEAKSGKSLSEISKGLENDKIFKPNRHRIEIGLRPVSSSPNVETLPYFWTRETLSAILGREEYLGHTVNLRTRTKSYKDKRKVDNPKEDWLIFKNTHEAIIDQETFDIVRKMRNHKRSNQRYKNRAGHENLFAGIVFCGTCGRKHYFCPQEKNGLNHDHYKCSGYRKPIDGCENAHYIQKSALIEIVSGKLRQTIQEVYFDQEAFLKKLEQQSQAQFSKNNKRQRQQLQKDKHRSKEIDSIIQKLYEDNLLGKISDERFVKLSQSYEEEQKQLQTSISDLTEKLAKQQEDSLNISKFMARISKYTELPKLTVEIVNELIDKIVIQKPTGTKRNRIIQVDIYYNFVGKLNNEKSEPNN

SEQ ID NO: 2537 - DNA, 50 bp, Streptococcus salivarius
  source 1..50: mol_type = genomic DNA
aaactgctatatgtcaggtcagcagaagacagcctgacactcagcactct

SEQ ID NO: 2538 - DNA, 40 bp, Streptococcus salivarius
  source 1..40: mol_type = genomic DNA
aaacaaaaaatcagctcaagagggctgatttttttatctt

SEQ ID NO: 2539 - DNA, 50 bp, Streptococcus salivarius
  source 1..50: mol_type = genomic DNA
aaactgctatatgtcaggtcagcacgagacagcctgacactcagcactct

SEQ ID NO: 2540 - DNA, 40 bp, Streptococcus salivarius
  source 1..40: mol_type = genomic DNA
aaacaaaaaatcagctctgcgtgtcttttttttttttttt

SEQ ID NO: 2541 - protein, 508 aa, Thermoanaerobacterium xylanolyticum
MNRVCIYLRKSRADEEIEKELGQGETLAKHRKALLKFAKEKNLNIVKIREEIVSGESLIHRPEMLELLKEVEQGMYDAVLCMDLQRLGRGNMQEQGLILEAFKKSNTKIITLQKTYDLNNDFDEEYSEFEAFMSRKELKMINRRLQGGRVRSIQEGNYLSPLPPYGYLIHEEKFSRTLVPNPEQADVVKMIFDMYVNKQMGSSAIANELNKMGYKTYTGRNWASSSVINILKNPVYIGKITWKKKDIKKSADPNKSKDTRQRPRSEWIVSDGKHEPIVGKELFAKAQEIIKNKYHIPYQIVNGPRNPLAGLIICKICGSKMVYRPYKDKEAHIICPNKCGNKSSKFIYVEKRLLQALEEWMQGYELDLQIEEDDSSFAEAQEKQKEALERELHELQKQKNNLHDLLERGIYDIDTFVERSTIVAQRIEETQKSIDVLVQKIEEEKNKRDKEKILPEIRHVLDLYWKTDDIAQKNMLLKSVLEKAEYLKEKKQREDNFELWIYPKLPEK

SEQ ID NO: 2542 - DNA, 50 bp, Thermoanaerobacterium xylanolyticum
  source 1..50: mol_type = genomic DNA
ggtgtctaacatgcagaaggtaactcattaccttctgcatgttagacaca

SEQ ID NO: 2543 - DNA, 40 bp, Thermoanaerobacterium xylanolyticum
  source 1..40: mol_type = genomic DNA
aatatctattagcgagatctcattgccttctttatcaact

SEQ ID NO: 2544 - DNA, 50 bp, Thermoanaerobacterium xylanolyticum
  source 1..50: mol_type = genomic DNA
ggtgtctaacatgcagaaggtaacgcattaccttctgcatgttagacaca

SEQ ID NO: 2545 - DNA, 40 bp, Thermoanaerobacterium xylanolyticum
  source 1..40: mol_type = genomic DNA
aatatttattggccatattgcattaccttatttatcaaat

SEQ ID NO: 2546 - protein, 547 aa, Enterocloster bolteae
MLRQSDKITALYCRLSRDDELQGDSNSIVNQKAILSKYAKENHFSNTAFFVDDGYSGTNFNRPSWSELLERIENGEVATLIVKDMSRLGRDYLKVGFYTEVLFVEKGVRFIAINNGIDSANQQDSDFTPFLNIINEWYAKDTSKKIRAVMKSKGEAGEHLCTNPPYGYIKDPDNKKRWIVDGEAAEVVKRIFALCLDGYGPSQIARILKEDKFITPTIHFQRTGRATRNAPPDNPYNWTGDTIADILERPEYQGHTVNFKTYKQSYKGKKTCYNPEEKWLVFENTHEAIIDADTWKRVQELRKNKRRPTRTGKTNMFSGIVRCADCGEKLYYCTSKNFEARQDHFICSTSRLKGKEICSTHFIRAVVLEQGVLAHMRLTIACVANHEEQFRKAMGAKQKAEAKKELAAKRRQLTQAERRIEELDRLFKRIYEDNANGKLSDSRFQMLSDDYEQEQEELREKLLRLNEEISEQEEQTENIDRFISKVQKYLDLDELTPSVLNDMVKAVYVHAPDKSKGHREQQIDISYDLVGILPASLLNDLQNGETA

SEQ ID NO: 2547 - DNA, 50 bp, Enterocloster bolteae
  source 1..50: mol_type = genomic DNA
atactgtcttatgagtgctgccctaatggtagctactcataaaacagtat

SEQ ID NO: 2548 - DNA, 40 bp, Enterocloster bolteae
  source 1..40: mol_type = genomic DNA
catgaaaacaagcagacaaaactgcttgttttttattttt

SEQ ID NO: 2549 - DNA, 50 bp, Enterocloster bolteae
  source 1..50: mol_type = genomic DNA
atactgtcttatgagtgctgcccttatggtagctactcataaaacagtat

SEQ ID NO: 2550 - DNA, 40 bp, Enterocloster bolteae
  source 1..40: mol_type = genomic DNA
cttgtcaacaagcaaacactactacttttttttttttttt

SEQ ID NO: 2551 - protein, 627 aa, Eubacterium ramulus
MTEKQGFMTALYERLSRDDELNGESNSISNQKKLLEQYAKEHGFTNLVHFTDDGISGTRFDRPGFLAMMKEVESGKVGTILIKDMSRMGRDYLKVGQYMELLRQKNVRLIAVNENVDSFREDDDFTPFRNIMNEWYARDTSKKIKSTFKAKGKSGKHVASTTPYGYLKDKDDPNVWIVDEEAAVVVRRIFHMTMDGYGPYQIAKALKEDKVEIPAVHMAKKDAGLWKGRVEEIKDPYGWGSSTVAGILKKREYLGHTVNFKTRKHFKDKKSHYVSEDNWTVFENTQEAIIDQETFDNVQRIRSNVRRYPDGWGEAHPLTGLMYCADCGSKMYVHRVNNGKRVPQYTCSAYSKVPVGTLCQTQHRINADVVMELIKELLKAVAEYSQLNREEFLETVKKAQTSQQSSEITRLKSRLAEAKKRVQELEKLICRIYEDNILGKLPDERYAILDGQYSKEQKDLSAEIADMEAELSGYEEGRRSAEKFIALVDKYQNFEELTTYMLNEFVEKIVVHERDRKGSVETTQEVEIYFNFIGRYLPPHFGEVKMTPEEIEEMEKREARKDRLHQNYLRRKANGKQQEYYERTKAKKKAELDAKKEEIRQEDIAKGVFIPLSLLPPAEPKKGVASA

SEQ ID NO: 2552 - DNA, 50 bp, Eubacterium ramulus
  source 1..50: mol_type = genomic DNA
aaaaactattgacattttgttactggtgtagtaagtttgaagagacttct

SEQ ID NO: 2553 - DNA, 40 bp, Eubacterium ramulus
  source 1..40: mol_type = genomic DNA
taaatccttaccggttgtaggaatattaactataaatata

SEQ ID NO: 2554 - DNA, 50 bp, Eubacterium ramulus
  source 1..50: mol_type = genomic DNA
aaaaactattgacattttgttactcctgtagtaagtttgaagagacttct

SEQ ID NO: 2555 - DNA, 40 bp, Eubacterium ramulus
  source 1..40: mol_type = genomic DNA
aatatccttactttttgtaccaataataaccataaaaata

SEQ ID NO: 2556 - protein, 556 aa, Streptococcus mitis
MTNSTLTKQIPDWTKVEFEGLSEISVLYCRLSAEDANEGESNSISNQRLILSKLAERENLSNPIVFYDDGYSGSNAQRPAFQQALALVKNNQVSNFVVKDLSRVSRDYLLSGNLLEVVFPSKNIRFISLQENIDSNKKSSQDAYLTPLVSLFNNWYSMQCSEKIKLSKHTKAKNGEKIGWITPYGYLNNPENRKEWLVDEYASEIVKRIFSEYISGRTPTEIAQGLRCDKILTPARYKINLGIANYRILESDPCYWKTQMIWQILEKEEYIGSTINLKTAKISYKQRNCRLRPREDWLIFPDSHEAIISKEDFEIARKMMNHKRVVQRHNWKNKTGHENLFAGLLYCENEHKLSFCPQEKDGVNLDHYKCYHFKRAGDTCSGGHYLRKEVLENLILSELQELINSFQINEADLLQRLKNKFEIKETKKFSELKKQLTKNEQRMVELDTIIQRLYEKQLLGEIADDRFKKLCDSYEAEQAELKEKVQTATTTLGVKMKSAHNIEKFMTTIRKYTQLENLTSKIVNELIDKIIIHQPIGRGKNRQIKLEIHYRFIGDI

SEQ ID NO: 2557 - DNA, 50 bp, Streptococcus mitis
  source 1..50: mol_type = genomic DNA
ggactgctgagtgaagtatggtataatgtacacacctcactcagcagtcc

SEQ ID NO: 2558 - DNA, 40 bp, Streptococcus mitis
  source 1..40: mol_type = genomic DNA
tttctctcttttatgatataatagaaacatgaaattaaaa

SEQ ID NO: 2559 - DNA, 50 bp, Streptococcus mitis; identical to SEQ ID NO: 2557
  source 1..50: mol_type = genomic DNA

SEQ ID NO: 2560 - DNA, 40 bp, Streptococcus mitis
  source 1..40: mol_type = genomic DNA
tttctgtattttatgcttcaataaaaacatgtacttaaaa

SEQ ID NO: 2561 - protein, 522 aa, Eubacterium rectale
MIESKSRVAIYCRLSEEDRNKQSETDDSNSIQNQKSMLLQYSLEHGWEVYNIYSDDDYTGSDRRRPEFNRLLEDAKNRKFDIVLCKTQSRFTRELELVEKYIHGLFPIWGIRFISIVDNADTANKGNKKSRQINGLVNEWYLEDMSENIKSVLTDRRKNGHHIGAFALYGYKKDPDVKGHLIIDEEAAEVVREVFTLFSQGYGKTAIARMLNDRGIQNPTEYKRLHGLRYKQPKTKNSTLWKYFAISDMLVNEIYIGNMVQGKYGSVSYKTKQNKPRPKDEWYRVEGTHEPIIDRELWDRVQALVAQKAKPFTVGTIGLFARKARCMNCGYTMRSSKNHGKHYLQCSNRHVAKDACIGSFISVDKLEKAVIDELNKLSAEYLDKDELEQNVQFNNDLRGQKEALETEIAAYQKKIAEYTKGIRELYLDKVKGILSELDYLDLSKDFSTQKERLEKLMIDTQKQLDVIERKMLIGDNRRQLIEQYTNLEHLDRETVEKLIDYVLVGKKDPVTKEVPIEIHWNF

SEQ ID NO: 2562 - DNA, 50 bp, Eubacterium rectale
  source 1..50: mol_type = genomic DNA
tgttgtctttatacaatcgcaccctctggggcgacttcgtaagaacaaca

SEQ ID NO: 2563 - DNA, 40 bp, Eubacterium rectale
  source 1..40: mol_type = genomic DNA
cgtttttcttgctttttgttctgctgccatatcttccacc

SEQ ID NO: 2564 - DNA, 50 bp, Eubacterium rectale
  source 1..50: mol_type = genomic DNA
tgttgtctttatacaatcgcaccccttggggcgacttcgtaagaacaaca

SEQ ID NO: 2565 - DNA, 40 bp, Eubacterium rectale
  source 1..40: mol_type = genomic DNA
cttttttctttctttctgtctttctgcctttctttccacc

SEQ ID NO: 2566 - protein, 522 aa, Roseburia faecis
MIESKSRVAIYCRLSEEDRNKQSETDDSNSIQNQKSMLLQYSLEHGWEVYNIYSDDDYTGSDRRRPEFNRLLEDAKNRKFDIVLCKTQSRFTRELELVEKYIHGLFPIWGIRFISIVDNADTANKGNKKSRQINGLVNEWYLEDMSENIKSVLTDRRKNGHHIGAFALYGYKKDPDVKGHLIIDEEAAEVVREVFTLFSQGYGKTAIARMLNDRGIPNPTEYKRLHGLRYKQPKTKNSTLWKYFAISDMLVNEIYIGNMVQGKYGSVSYKTKQNKPRPKDEWYRVEGTHEPIIDRELWDRVQALVAQKAKPFTVGTIGLFARKARCMNCGYTMRSSKNHGKHYLQCSNRHVAKDACIGSFISVDKLEKAVIDELNKLSAEYLDKDELEQNVQFNNDLRGQKEALETEIAAYQKKIAEYTKGIRELYLDKVKGILSELDYLDLSKDFSTQKERLEKLMIDTQKQLDVIERKMLIGDNRRQLIEQYTNLEHLDRETVEKLIDYVLVGKKDPVTKEVPIEIHWNF

SEQ ID NO: 2567 - DNA, 50 bp, Roseburia faecis; identical to SEQ ID NO: 2562
  source 1..50: mol_type = genomic DNA

SEQ ID NO: 2568 - DNA, 40 bp, Roseburia faecis; identical to SEQ ID NO: 2563
  source 1..40: mol_type = genomic DNA

SEQ ID NO: 2569 - DNA, 50 bp, Roseburia faecis; identical to SEQ ID NO: 2564
  source 1..50: mol_type = genomic DNA

SEQ ID NO: 2570 - DNA, 40 bp, Roseburia faecis; identical to SEQ ID NO: 2565
  source 1..40: mol_type = genomic DNA

SEQ ID NO: 2571 - protein, 522 aa, Roseburia faecis
MIESKSRVAIYCRLSEEDRNKQSETDDSNSIQNQKSMLLQYSLEHGWEVYNIYSDDDYTGSDRRRPEFNRLLEDAKNRKFDIVLCKTQSRFTRELELVEKYIHGLFPIWGIRFISIVDNADTANKGNKKSRQINGLVNEWYLEDMSENIKSVLTDRRKNGHHIGAFALYGYKKDPDVKGHLIIDEEAAEVVREVFTLFSQGYGKTAIARMLNDRGIPNPTEYKRLHGLRYKQPKTKNSTLWKYFAISDMLVNEIYIGNMVQGKYGSVSYKTKQNKPRPKDEWYRVEGTHEPIIDRELWDRVQALVAQKAKPFTVGTIGLFARKARCMNCGYTMRSSKNHGKHYLQCSNRHVAKDACIGSFISVDKLEKAVIDELNKLSAEYLDKDELEQNVQFNNDLRGQKEALETEIAAYQKKIAEYTKGIRELYLDKVKGILSELDYLDLSKDFSTQKERLEKLVIDTQKQLDVIERKMLIGDNRRQLIEQYTNLEHLDRETVEKLIDYVLVGKKDPVTKEVPIEIHWNF

SEQ ID NO: 2572 - DNA, 50 bp, Roseburia faecis
  source 1..50: mol_type = genomic DNA
tgttgtctttacacaatcgtaccatctggggcgacttcgtaagaacaaca

SEQ ID NO: 2573 - DNA, 40 bp, Roseburia faecis; identical to SEQ ID NO: 2563
  source 1..40: mol_type = genomic DNA

SEQ ID NO: 2574 - DNA, 50 bp, Roseburia faecis
  source 1..50: mol_type = genomic DNA
tgttgtctttacacaatcgtaccacttggggcgacttcgtaagaacaaca

SEQ ID NO: 2575 - DNA, 40 bp, Roseburia faecis; identical to SEQ ID NO: 2565
  source 1..40: mol_type = genomic DNA

SEQ ID NO: 2576 - protein, 489 aa, Fusobacterium nucleatum
MKKAVGYCRYSSNNQREESIEAQMRAIEQYCKTKEIELIRFYKDEAISGTSIKDRESFLEMISDSRNGEFELVIVHKYDRFARNQYDHAIFEKKLNGNNVLLISVLEELNDSPESIILKSVLTGMNEYYSLNLSREVKKGKKENALKGIHNGGLPPLGYDLDENKRYVVNQEEAKIIRFIFSLASQGLTYSDIADILNKKGYKNKSGSNFKKTSIRDTLLNMKYIGTYFLGLKNRKGTYLKDPLIIENSHEAIVDKTIFYKVQGRFRISKNQPRKRKDNYYLLTGHCNCGLCGEAYVGGYRTKNRYGTVYYGYQCKNRKNNTKSCKNRYLRKEKLEKAVISTIKNEILNNKNIEIISKDLFEILRKEFDKSEEIEKCKKEIEKLNNKSLRLLEKNLEGVILEEIFYKKNQEINQELNFLKSKLYSLQESNGKSFTEEGIKLYLYNLKNRFDEKLDRSIIEFFVKDIKIFPDNVIVTLRKLPKLHKNGDP

SEQ ID NO: 2577 - DNA, 50 bp, Fusobacterium nucleatum
  source 1..50: mol_type = genomic DNA
aaattacataaaaatggcgaccccgacttagatcctttcttatgtgataa

SEQ ID NO: 2578 - DNA, 40 bp, Fusobacterium nucleatum
  source 1..40: mol_type = genomic DNA
aataaaaaatggcgaccccgatgtggcttgaacacacaac

SEQ ID NO: 2579 - DNA, 50 bp, Fusobacterium nucleatum
  source 1..50: mol_type = genomic DNA
aaattacataaaaatggcgaccccttcttagatcctttcttatgtgataa

SEQ ID NO: 2580 - DNA, 40 bp, Fusobacterium nucleatum
  source 1..40: mol_type = genomic DNA
attaaaaactgccaaacactttgtggcttaaacaaacaac

SEQ ID NO: 2581 - protein, 475 aa, Bacillus subtilis
MELMEANSHKNVGIYVRVSTEEQAKEGYSIAAQKEKLKAYCVSQGWANYKFYIDEGKSAKDIHRPSLELMLRHIEQGIINTVLVYRLDRLTRSVRDLYSLLDYFDKYNAVFRSATEVYDTGSATGRLFITLVAAMAQWERENLGERVKMGQVEKARQGQYSAPAPFGFTKEGEYLVKNPQEGEILLDMIDKIKKGYSLRELADYLDESDAVPKRGYKWHIASILVMLKNPVLYGAFRWGDEIIEDAFEGYISKEEFDQLQKILHDRQNFKKRETYSIFIFQTKIICPNCGNRLTSERSKYFRKRDNKHVESNHYRCQACLLNKRPTIGGSEKKFERALIEYMQNVKPRLEPIIPEEKQQDYDKLHQKIISIEKQRKKYQKAWSMDLMTDQEFEQLMAETKDALQKAQADLEQEQAFHKPKNPIDIERAKEIVTMFKESWSVLTSEEKRQTVQELIKQIEFEKKDRKIKILDIQFY

SEQ ID NO: 2582 - DNA, 50 bp, Bacillus subtilis
  source 1..50: mol_type = genomic DNA
tttattagtatttatgtaaagtatgaacatgtgaaatagacacaaataca

SEQ ID NO: 2583 - DNA, 40 bp, Bacillus subtilis
  source 1..40: mol_type = genomic DNA
attttttgtatttaagtataagcagacaaaatgctcctgg

SEQ ID NO: 2584 - DNA, 50 bp, Bacillus subtilis
  source 1..50: mol_type = genomic DNA
tttattagtatttatgtaaagtattcacatgtgaaatagacacaaataca

SEQ ID NO: 2585 - DNA, 40 bp, Bacillus subtilis
  source 1..40: mol_type = genomic DNA
actttttgtctataactattcacagccaaaatacgcctgg

SEQ ID NO: 2586 - protein, 577 aa, Gimesia chilikensis
MTRLIPTVAYLRMSNKDQKTSIPQQRKQITAYAKANGYEIVTWYIDDGKSGSREQHKRTEFTRMLSDSTTGNFEVILCLDKSRFGRLDSIEGAFAKQTLRNAGVILHTLLEGDSDWNTHTGRIVDSVLSEAQHEYSYKLGQKTLIGKLNTWSNGTPYGQQTPYGFSRKVVDDKCHIRIIGRREKFTKPKNWSQEFVPGDPDEVEVVQWLFETYANRDVGFRWLAADLNSRNIPSPTGKKWCAKTIQDILCNLRYIGDLPLGKRAAGTFWRLDGEEVVKSETTSVVRNSESLIKKNTHDGIVSRTLFDKVQRRIERRKQTNTHSHKSGGYLLKDVLYCGNCGKPLYGNLNRSGKNTEKKKSGRIIYVCKTAIKYGKQCSCAQWKIEEDLVLPFLKQKLLEGIDKIVLKQSAMKLPKLKKVKPNEVELKMSKLDDLIERGTKNLLLASAEHLSQLDKQLSELKAERAELEKVIEQAKNKKSRHPFIPSDEWIDVLRERRQLFEGLRGQLVDIETGKSRDGKYSRCFHLNADTFRELLISHDCRVDFWWDRKSKHRWKVSKIRVRAFGQNAQFETIASLM

SEQ ID NO: 2587 - DNA, 50 bp, Gimesia chilikensis
  source 1..50: mol_type = genomic DNA
aatgcacaatttgagactatcgcttcactgatggtgccaaatagttcatt

SEQ ID NO: 2588 - DNA, 40 bp, Gimesia chilikensis
  source 1..40: mol_type = genomic DNA
ccctcccaccaggcccgcttcgctgatggtatgatggggc

SEQ ID NO: 2589 - DNA, 50 bp, Gimesia chilikensis
  source 1..50: mol_type = genomic DNA
aatgcacaatttgagactatcgctttactgatggtgccaaatagttcatt

SEQ ID NO: 2590 - DNA, 40 bp, Gimesia chilikensis
  source 1..40: mol_type = genomic DNA
ccctgccaccacggccactttgttcatggtctcatggggc

SEQ ID NO: 2591 - protein, 537 aa, Clostridioides difficile
MKQQIYNTALYLRLSRDDELQGESSSITTQRSMLRLYAKEHHLNVIGEYIDDGWSGTNFERPSFQRMIEDIEAGKINCVVTKDLSRLGRNYIMTGQYTELYFPSHNVRYIAIDDGVDSEKGESEIAPFKNIINEWVARDTSRKVKSAFKTKFAEGAYYGAYAPLGYKKHPDIKGKLLVDEETKWIVEKIFSLAYQGYGSAKITKVLREEKIPTASWLNFTRYGTFAHIFEGKPESKRYEWTIAHVKAILKSEVYIGNSVHNRQSTVSFKSKKKVRKPESEWFRVENTHEPIIDKEVFYRVQEQIKSRRRQTKEKATPIFAGLVKCADCGWSMRFATNKANKTPYSYYACSYYGQFGKGTCSMHYIRYDVLYQAVLERLQYWAKAVQQDEEKVLNKIQKAGNAERIREKKKKASALKKAESRQNEIDRLFAKMYEDRACEKITERNFIMLSGKYQKEQIELEQQITNLREELSKMEQDMIGAEKWIELIKEYSVPKELTAPLLNAMIEKILIHEATTNEDNERIQEIEIYYRFIGKVD

SEQ ID NO: 2592 - DNA, 50 bp, Clostridioides difficile
  source 1..50: mol_type = genomic DNA
tcatatctttaactaagggaaactggagtttcccaaacaaaaggatatta

SEQ ID NO: 2593 - DNA, 40 bp, Clostridioides difficile
  source 1..40: mol_type = genomic DNA
aactacaaaagcacaagaagggctttatgtatatgatact

SEQ ID NO: 2594 - DNA, 50 bp, Clostridioides difficile
  source 1..50: mol_type = genomic DNA
tcatatctttaactaagggaaacttaagtttcccaaacaaaaggatatta

SEQ ID NO: 2595 - DNA, 40 bp, Clostridioides difficile
  source 1..40: mol_type = genomic DNA
aactacaaaagagcaggagtagctctatttatatgagaca

SEQ ID NO: 2596 - protein, 495 aa, Clostridium cochlearium
MYNVAIYLRISVLEKESLSHTDDTINSQRNIIKSFIFGDPELKKANIEEFIDEGYSGSTTSRPGLDKLLLKVKQGKINCIIVKDMSRFMRNYIEMGDYLENIFPFMGVRFIAINDGYDSSNEVQNGTELDIQFKNLLNDYYSRDISEKMTTALLVAKKQGKYTSGAPPYGYLKDPEDNYKLIVDEKVADNVRYIFQLIIEGHSLNETAKILNSEDVITARARRKEIKGYDSYATVHESTVEQTIWVAGMIKRIVNNEAYTGTFVFNKSTKSKLDGGKVIYHPEKDWVRVYDNHEPIVDKETYDEANRILKSRKKNIKFKWGESKYENSPLASFVRCNKCGYKIRFSTSSNGGKLASINVYCHHCRMLEQEEKLPHHKELEKEVFEVLKSRFHIDKTEKEKLLAEQKWLYDKNDQLLKKKRLEFENYKFGKISREDFMEIKNQIQDSEEENKKRIQAIDEDLKQAGSIDSLTKEIVEKYIDRIYISGKGIERIEYQ

SEQ ID NO: 2597 - DNA, 50 bp, Clostridium cochlearium
  source 1..50: mol_type = genomic DNA
tgtgtcagacccttgacacgagagggggctcgtgtcataatagtgacagg

SEQ ID NO: 2598 - DNA, 40 bp, Clostridium cochlearium
  source 1..40: mol_type = genomic DNA
tcttttagtaatggctactggaacaggtaaaacaagaact

SEQ ID NO: 2599 - DNA, 50 bp, Clostridium cochlearium
  source 1..50: mol_type = genomic DNA
tgtgtcagacccttgacacgagagaaggctcgtgtcataatagtgacagg

SEQ ID NO: 2600 - DNA, 40 bp, Clostridium cochlearium
  source 1..40: mol_type = genomic DNA
tcttctagtatttggtattaaaagaggtgaaacaaaaact

SEQ ID NO: 2601 - protein, 566 aa, Flavonifractor plautii
MAEKIMQGIKQISELIGQAVKKRVVCLYRVSTVGQVEKDDIPMQKQYCREFCRGQSGWEIVKEFSEKGVSGFKVSAKDRDAIQEIQKMALKGEFDILLVFMFDRLGRRDDETPFVVEWFVKQGIEVWSAMEGQQRFDTHVDKLLNYIRYWQASGESIKTSLRVKTRLEQLTQEGYYTGGRVPFGYQAVKRGRINKKNHEVRDLAIEPGEAEVMKIIFQKYVYEGYGALRLHRYLMDQGLRTKDGKTITMGIINRVIKNPICIGIIQKGESQSSVLPELKIIDEEVFARAQEIVRERVVPQSEVPLTTRGQSLLVGNVYCGHCGARLTLATAGRNYKKKDGTVVKKTYSCYKCYNKAMAAEKCDGQTTYGVSKLDNLVDQIIHIQLQRIQKAPPQALIEKQRDREAEQVKAKAKLLREQYQQKQRDYQDLKEETLKVVRGTSRLNVDLLNNLIEETTVQMAELEGQIRTAEAELREVLSGAEQVRQEYAQLMDWAGLYDNCSFEAKKMIAAQFVKAVRVKRGYEVDIEFNVSFEEFQTLYLEPESEEDRRSRSATYLSLVEKSGQAG

SEQ ID NO: 2602 - DNA, 50 bp, Flavonifractor plautii
  source 1..50: mol_type = genomic DNA
tttgctaaaagtgctttatttggtacagttagcgaaaatgttctatgata

SEQ ID NO: 2603 - DNA, 40 bp, Flavonifractor plautii
  source 1..40: mol_type = genomic DNA
tagctttacaatttatgctacgggatagaaacataaaaca

SEQ ID NO: 2604 - DNA, 50 bp, Flavonifractor plautii
  source 1..50: mol_type = genomic DNA
tttgctaaaagtgctttatttggtgtagttagcgaaaatgttctatgata

SEQ ID NO: 2605 - DNA, 40 bp, Flavonifractor plautii
  source 1..40: mol_type = genomic DNA
aatctttaaaaattatgctgtgcgaaagaaacaaaaaaaa

SEQ ID NO: 2606 - protein, 477 aa, Bacillus nakamurai
MNLKNENERKSIGIYIRVSTEEQAREGYSIPAQGEKLKAYCISQGWTNYKFYTDEGKSAKDINRPSLELMLRHIEQGIIDTVLVYRLDRLTRSVRDLYSLLDYFDKYNAVFRSATEVYDTGSATGRLFITLVAAMAQWERENLGERVRMGQIEKARQGQFSAPAPYGWKKEGNTLIKNPEQGAVILEMIEKIKEGYSIRKLADYLDNSEYQPTRGYKWHIASILVILKNPALYGALRWNDEIIEDAFEGYITKVEFKLLQTILHDRQNFKKRETTSIFIFQSKIICPNCGNRLTCERSIYFRKKDNKNVESNHYRCQACTLNKRPAIGVSEKKFEKAFINYMEQVSFKREPDFPKQCKSNQDFEKLHQKIIKIENQRKKYQKAWSKDLITDNEFEQLMNETKTALEQANAELQKKQGAAIPKTPVDIEKVKKLIVMFKENWNVLTNEEKREYVQELIERIKFEKKEGKVKILSVDFY

SEQ ID NO: 2607 - DNA, 50 bp, Bacillus nakamurai
  source 1..50: mol_type = genomic DNA
attagtatttatatcaactatacacatgaaaacttgacataaatacgaaa

SEQ ID NO: 2608 - DNA, 40 bp, Bacillus nakamurai
  source 1..40: mol_type = genomic DNA
tttggtatttaaatataaacagacaaaatgctcctgggat

SEQ ID NO: 2609 - DNA, 50 bp, Bacillus nakamurai
  source 1..50: mol_type = genomic DNA
attagtatttatatcaactatacaaatgaaaacttgacataaatacgaaa

SEQ ID NO: 2610 - DNA, 40 bp, Bacillus nakamurai
  source 1..40: mol_type = genomic DNA
cttggaaataaaaaaaaaaaagagaaaatcctcctgggat

SEQ ID NO: 2611 - protein, 474 aa, Bacillus amyloliquefaciens
MNLMDENTQKNVGIYVRVSTEEQAKEGYSISAQKEKLKAYCISQGWDSYKFYIDEGKSAKDIHRPSLELMLRHIEQGIIDTVLVYRLDRLTRSVRDLYSLLDYFDKYQAVFRSATEVYDTGSATGRLFITLVAAMAQWERENLGERVKMGQVEKARQGQFSAPAPFGFTKEGESLVKNPDEGEVLLDMIDKIKKGYSLRELADYLDESDAIPKRGYKWHIASILVILKNPVLYGGFRWAGEILEGAFEGYISKKEFEQLQKMLHDRQNFKRRETSSIFIFQAKILCPNCGSRLTCERSIYFRKKDNKNVESNHYRCQACALNKKPAIGISEKKIEKALIEYMQNANFKREPKIPQEKQQDYDKLHQKIISIEKQRKKYQKAWSMELMTDQEFEQLMAETKEALQKATAKLEQNDLQPIEKPLNIERAKELAKMFRENWSVLTGEEKRQTVQELIKHIEFEKKDNKAKILDIHFY

SEQ ID NO: 2612 - DNA, 50 bp, Bacillus amyloliquefaciens
  source 1..50: mol_type = genomic DNA
attagtgtttatgtaaagtatgagcatgaaaactttacacaaatacgaaa

SEQ ID NO: 2613 - DNA, 40 bp, Bacillus amyloliquefaciens; identical to SEQ ID NO: 2608
  source 1..40: mol_type = genomic DNA

SEQ ID NO: 2614 - DNA, 50 bp, Bacillus amyloliquefaciens
  source 1..50: mol_type = genomic DNA
attagtgtttatgtaaagtatgagaatgaaaactttacacaaatacgaaa

SEQ ID NO: 2615 - DNA, 40 bp, Bacillus amyloliquefaciens; identical to SEQ ID NO: 2610
  source 1..40: mol_type = genomic DNA

SEQ ID NO: 2616 - protein, 474 aa, Bacillus amyloliquefaciens
MNLMDENIQKNVGIYVRVSTEEQAKEGYSISAQKEKLKAYCISQGWDSYKFYIDEGKSAKDIHRPSLELMLRHIEQGIIDTVLVYRLDRLTRSVRDLYSLLDYFDKYQAVFRSATEVYDTGSATGRLFITLVAAMAQWERENLGERVKMGQVEKARQGQFSAPAPFGFTKEGESLVKNPEEGELLLDMIDKIKKGYSLRELADYLDESDAIPKRGYKWHIASILVILKNPVLYGGFRWAGEILEGAFEGYISKKEFEQLQKMLHDRQNFKRRETSSIFIFQAKILCPNCGSRLTCERSIYFRKKDNKNVESNHYRCQACALNKKPAIGISEKKFEKALIEYMQNANFKREPKIPQEKQQDYDKLHQKIISIEKQRKKYQKAWSMELMTDQEFEQLMAETKEALQKATAKLEQNDLQPIEKPLNIERAKELAKMFRENWSVLTGEEKRQTVQELIKHIEFEKKDNKAKILDIHFY

SEQ ID NO: 2617 - DNA, 50 bp, Bacillus amyloliquefaciens
  source 1..50: mol_type = genomic DNA
attagtgtttatgtaaagtataagcatgaaaactttacacaaatacgaaa

SEQ ID NO: 2618 - DNA, 40 bp, Bacillus amyloliquefaciens; identical to SEQ ID NO: 2608
  source 1..40: mol_type = genomic DNA

SEQ ID NO: 2619 - DNA, 50 bp, Bacillus amyloliquefaciens
  source 1..50: mol_type = genomic DNA
attagtgtttatgtaaagtataagaatgaaaactttacacaaatacgaaa

SEQ ID NO: 2620 - DNA, 40 bp, Bacillus amyloliquefaciens; identical to SEQ ID NO: 2610
  source 1..40: mol_type = genomic DNA

SEQ ID NO: 2621 - protein, 474 aa, Bacillus amyloliquefaciens
MNLMDENTPKNVGIYVRVSTEEQAKEGYSISAQKEKLKAYCISQGWENYKFYIDEGKSAKDIHRPSLELMLRHIEQGIINTVLVYRLDRLTRSVRDLYSLLDYFDKYQAIFRSATEVYDTGSATGRLFITLVAAMAQWERENLGERVKMGQVEKARQGQFSAPAPFGFTKEGESLVKNPEEGEVLLDMIDKIKKGYSLRELADYLDESDAIPKRGYKWHIASILVILKNPVLYGGFRWAGEILEGAFEGYISKKEFEQLQKMLHDRQNFKRRETTSIFIFQAKIICPNCGSRLTCERSIYFRKKDNKNVESNHYRCQACALNKKPAIGISEKKFEKAFMEYMQNANLKREPKIPQEKQQDYDKLHQKIISIEKQRKKYQKAWSMELMTDQEFEQLMVETKEALQKATAKLEQNDLQSIEKPLNIERAKELAKMFRENWSVLTGEEKRQTVQELIKHIEFEKKDNKARVLDIHFY

SEQ ID NO: 2622 - DNA, 50 bp, Bacillus amyloliquefaciens
  source 1..50: mol_type = genomic DNA
attagggtttatgtaaagtacaagcatgaaaacttgacacaaatacgaaa

SEQ ID NO: 2623 - DNA, 40 bp, Bacillus amyloliquefaciens; identical to SEQ ID NO: 2608
  source 1..40: mol_type = genomic DNA

SEQ ID NO: 2624 - DNA, 50 bp, Bacillus amyloliquefaciens
  source 1..50: mol_type = genomic DNA
attagggtttatgtaaagtacaagaatgaaaacttgacacaaatacgaaa

SEQ ID NO: 2625 - DNA, 40 bp, Bacillus amyloliquefaciens; identical to SEQ ID NO: 2610
  source 1..40: mol_type = genomic DNA

SEQ ID NO: 2626 - protein, 474 aa, Bacillus amyloliquefaciens
MNLMDENTPKNVGIYVRVSTEEQAKEGYSISAQKEKLKAYCVSQGWESYKFYIDEGKSAKDIHRPSLELMLRHIEQGIIDTVLVYRLDRLTRSVRDLYSLLDYFDKYQAIFRSATEVYDTGSATGRLFITLVAAMAQWERENLGERVKMGQVEKARQGQFSAPAPFGFTKEGESLVKNPEEGEVLLDMIDKIKKGYSLRELADYLDESDAIPKRGYKWHIASILVILKNPVLYGGFRWAGEILEGAFEGYISKKEFEQLQKMLHDRQNFKRRETSSIFIFQAKIICPNCGSRLTCERSIYFRKKDNKNVESNHYRCQACALNKKPAIGISEKKFEKAFMEYMQNANLKREPKIPQEKQQDYDKLHQKIISIEKQRKKYQKAWSMELMTDQEFEQLMVETKEALQKATAKLEQNDLQSIEKPLNIERAKELAKMFRENWSVLTGEEKRQTVQELIKHIEFEKKDNKARVLDIHFY

SEQ ID NO: 2627 - DNA, 50 bp, Bacillus amyloliquefaciens
  source 1..50: mol_type = genomic DNA
attagggtttatataaagtacaagcatgaaaacttgacacaaatacgaaa

SEQ ID NO: 2628 - DNA, 40 bp, Bacillus amyloliquefaciens; identical to SEQ ID NO: 2608
  source 1..40: mol_type = genomic DNA

SEQ ID NO: 2629 - DNA, 50 bp, Bacillus amyloliquefaciens
  source 1..50: mol_type = genomic DNA
attagggtttatataaagtacaagaatgaaaacttgacacaaatacgaaa

SEQ ID NO: 2630 - DNA, 40 bp, Bacillus amyloliquefaciens; identical to SEQ ID NO: 2610
  source 1..40: mol_type = genomic DNA

SEQ ID NO: 2631 - protein, 474 aa, Bacillus velezensis
MNLMDENTPKNVGIYVRVSTEEQAKEGYSISAQKEKLKAYCISQGWDSYKFYIDEGKSAKDIHRPSLELMLRHIEQGIIDTVLVYRLDRLTRSVRDLYSLLDYFDKYQAVFRSATEVYDTGSATGRLFITLVAAMAQWERENLGERVKMGQVEKARQGQFSAPAPFGFTKEGESLVKNPEEGEVLLDMIDKIKKGYSLRELADYLDESDAIPKRGYKWHIASILVILKNPVLYGGFRWAGEILEGAFEGYISKKEFEQLQKMLHDRQNFKRRETSSIFIFQAKILCPNCGSRLTCERSIYFRKKDNKNVESNHYRCQACALNKKPAIGISEKKFEKALIEYMQNANFKREPKIPQEKQQDYDKLHQKIISIEKQRKKYQKAWSMELMTDQEFEQLMAETKEALQKALAKLEQNDLHPIEKPLNIERAKELAKMFRENWSVLTGEEKRQTVQELIKHIEFEKKDNKARILDIHFY

SEQ ID NO: 2632 - DNA, 50 bp, Bacillus velezensis
  source 1..50: mol_type = genomic DNA
attagggtttatgtaaagtataaacatgtaaacttaacataaatacaaat

SEQ ID NO: 2633 - DNA, 40 bp, Bacillus velezensis; identical to SEQ ID NO: 2608
  source 1..40: mol_type = genomic DNA

SEQ ID NO: 2634 - DNA, 50 bp, Bacillus velezensis
  source 1..50: mol_type = genomic DNA
attagggtttatgtaaagtataaaaatgtaaacttaacataaatacaaat

SEQ ID NO: 2635 - DNA, 40 bp, Bacillus velezensis; identical to SEQ ID NO: 2610
  source 1..40: mol_type = genomic DNA

SEQ ID NO: 2636 - protein, 474 aa, Bacillus velezensis
MNLMDENIQKNVGIYVRVSTEEQAKEGYSISAQKEKLKAYCISQGWDSYKFYIDEGKSAKDIHRPSLELMLRHIEQGIIDTVLVYRLDRLTRSVRDLYSLLDYFDKYQAVFRSATEVYDTGSATGRLFITLVAAMAQWERENLGERVKMGQVEKARQGQFSAPAPFGFTKEGESLVKNPEEGEVLLDMIDKIKKGYSLRELADYLDESDAIPKRGYKWHIASILVILKNPVLYGGFRWAGEILEGAFEGYISKKEFEQLQKMLHDRQNFKRRETSSIFIFQAKILCPNCGSRLTCERSIYFRKKDNKNVESNHYRCQACALNKKPAIGISEKKFEKALIEYMQNANFKREPKIPQEKQQDYDKLHQKIISIEKQRKKYQKAWSMELMTDQEFEQLMAETKEALQKATAELEQNDLQPIEKPLNIERAKELAKMFRENWSVLTGEEKRQTVQELIKHIEFEKKDNKAKILDIHFY

SEQ ID NO: 2637 - DNA, 50 bp, Bacillus velezensis; identical to SEQ ID NO: 2617
  source 1..50: mol_type = genomic DNA

SEQ ID NO: 2638 - DNA, 40 bp, Bacillus velezensis; identical to SEQ ID NO: 2608
  source 1..40: mol_type = genomic DNA

SEQ ID NO: 2639 - DNA, 50 bp, Bacillus velezensis; identical to SEQ ID NO: 2619
  source 1..50: mol_type = genomic DNA

SEQ ID NO: 2640 - DNA, 40 bp, Bacillus velezensis; identical to SEQ ID NO: 2610
  source 1..40: mol_type = genomic DNA

SEQ ID NO: 2641 - protein, 474 aa, Bacillus velezensis
MNLMDENIQKNVGIYVRVSTEEQAKEGYSISAQKEKLKAYCISQGWDSYKFYIDEGKSAKDIHRPSLELMLRHIEQGIIDTVLVYRLDRLTRSVRDLYSLLDYFDKYQAVFRSATEVYDTGSATGRLFITLVAAMAQWERENLGERVKMGQVEKARQGQFSAPAPFGFTKEGESLVKNPEEGEVLLDMIDKIKKGYSLRELADYLDESDAIPKRGYKWHIASILVILKNPVLYGGFRWAGEILEGAFEGYISKKEFEQLQKMLHDRQNFKRRETSSIFIFQAKILCPNCGSRLTCERSIYFRKKDNKNVESNHYRCQACALNKKPAIGISEKKFEKALIEYMQNANFKREPKIPQEKQQDYDKLHQKIISIEKQRKKYQKAWSMELMTDQEFEQLMAETKEALQKATAKLEQNDLQPIEKPLNIERAKELAKMFRENWSVLTGEEKRQTVQELIKHIEFEKKDNKAKILDIHFY

SEQ ID NO: 2642 - DNA, 50 bp, Bacillus velezensis; identical to SEQ ID NO: 2617
  source 1..50: mol_type = genomic DNA

SEQ ID NO: 2643 - DNA, 40 bp, Bacillus velezensis; identical to SEQ ID NO: 2608
  source 1..40: mol_type = genomic DNA

SEQ ID NO: 2644 - DNA, 50 bp, Bacillus velezensis; identical to SEQ ID NO: 2619
  source 1..50: mol_type = genomic DNA

SEQ ID NO: 2645 - DNA, 40 bp, Bacillus velezensis; identical to SEQ ID NO: 2610
  source 1..40: mol_type = genomic DNA

SEQ ID NO: 2646 - protein, 474 aa, Bacillus velezensis; identical to SEQ ID NO: 2626

SEQ ID NO: 2647 - DNA, 50 bp, Bacillus velezensis
  source 1..50: mol_type = genomic DNA
attagggtttatgtaaagtacaagcatgaaaacttgacacaaatacaaaa

SEQ ID NO: 2648 - DNA, 40 bp, Bacillus velezensis; identical to SEQ ID NO: 2608
  source 1..40: mol_type = genomic DNA

SEQ ID NO: 2649 - DNA, 50 bp, Bacillus velezensis
  source 1..50: mol_type = genomic DNA
attagggtttatgtaaagtacaagaatgaaaacttgacacaaatacaaaa

SEQ ID NO: 2650 - DNA, 40 bp, Bacillus velezensis; identical to SEQ ID NO: 2610
  source 1..40: mol_type = genomic DNA

SEQ ID NO: 2651 - protein, 474 aa, Bacillus velezensis
MNLMDENTPKNVGIYVRVSTEEQAKEGYSISAQKEKLKAYCISQGWDSYKFYIDEGKSAKDIHRPSLELMLRHIEQGIIDTVLVYRLDRLTRSVRDLYSLLDYFDKYQAVFRSATEVYDTGSATGRLFITLVAAMAQWERENLGERVKMGQVEKARQGQFSAPAPFGFTKEGESLVKNPEEGEVLLDMIDKIKKGYSLRELADYLDESDAIPKRGYKWHIASILVILKNPVLYGGFRWAGEILEGAFEGYISKKEFEQLQKMLHDRQNFKRRETSSIFIFQAKILCPNCGNRLTCERSIYFRKKDNKNVESNHYRCQACALNKKPAIGISEKKFEKALIEYMQNANFKREPKIPQEKQQDYDKLHQKIISIEKQRKKYQKAWSMELMTDQEFEQLMAETKEALQKATAKLEQNDLQPIEKPLNIERAKELAKMFRENWSVLTGEEKRQTVQELIKHIEFEKKDNKAKILDIHFY

SEQ ID NO: 2652 - DNA, 50 bp, Bacillus velezensis; identical to SEQ ID NO: 2612
  source 1..50: mol_type = genomic DNA

SEQ ID NO: 2653 - DNA, 40 bp, Bacillus velezensis; identical to SEQ ID NO: 2608
  source 1..40: mol_type = genomic DNA

SEQ ID NO: 2654 - DNA, 50 bp, Bacillus velezensis; identical to SEQ ID NO: 2614
  source 1..50: mol_type = genomic DNA

SEQ ID NO: 2655 - DNA, 40 bp, Bacillus velezensis; identical to SEQ ID NO: 2610
  source 1..40: mol_type = genomic DNA

SEQ ID NO: 2656 - protein, 474 aa, Bacillus velezensis
MNLMDENTQKNVGIYVRVSTEEQAKEGYSISAQKEKLKAYCVSQGWDSYKFYIDEGKSAKDIHRPSLELMLRHIEQGIIDTVLVYRLDRLTRSVRDLYSLLDYFDKYQAIFRSATEVYDTGSATGRLFITLVAAMAQWERENLGERVKMGQVEKARQGQFSAPAPFGFTKEGESLVKNPEEGEVLLDMIDKIKKGYSLRELADYLDESDSIPKRGYKWHIASILVILKNPVLYGGFRWAGEILEGAFEGYISKKEFEQLQKMLHDRQNFKRRETTSIFIFQAKIICPNCGSRLTCERSIYFRKKDNKNVESNHYRCQACALNKKPAIGISEKKFEKAFMEYLQNANLKREPKIPQGKQQDYDKLHQKIISIEKQRKKYQKAWSMELMTDQEFEQLMAETKEALQKATAKLEQNDLQSIEKPLNIERAKELAKMFRENWSVLTGEEKRQIVQELIKYIEFEKKDNKARVLDIHFY

SEQ ID NO: 2657 - DNA, 50 bp, Bacillus velezensis; identical to SEQ ID NO: 397
  source 1..50: mol_type = genomic DNA

SEQ ID NO: 2658 - DNA, 40 bp, Bacillus velezensis; identical to SEQ ID NO: 2608
  source 1..40: mol_type = genomic DNA

SEQ ID NO: 2659 - DNA, 50 bp, Bacillus velezensis
  source 1..50: mol_type = genomic DNA
attagggtttatgtaaagtacaagaatgtaaacttaacataaatacaaat

SEQ ID NO: 2660 - DNA, 40 bp, Bacillus velezensis; identical to SEQ ID NO: 2610
  source 1..40: mol_type = genomic DNA

SEQ ID NO: 2661 - protein, 474 aa, Bacillus velezensis
MNLMDENTPKNVGIYVRVSTEEQAKEGYSISAQKEKLKAYCVSQGWESYKFYIDEGKSAKDIHRPSLELMLRHIEQGIIDTVLVYRLDRLTRSVRDLYSLLDYFDKYQAIFRSATEVYDTGSATGRLFITLVAAMAQWERENLGERVKMGQVEKARQGQFSAPAPFGFTKEGESLVKNPEEGEVLLDMIDKIKKGYSLRELADYLDESDAIPKRGYKWHIASILVILKNPVLYGGFRWAGEILEGAFEGYISKKEFEQLQKMLHDRQNFKRRETSSIFIFQAKIICPNCGSRLTCERSIYFRKKDNKNVESNHYRCQACALNKKPAIGISEKKFEKAFMEYMQNANLKREPKIPQEKQQDYDKLHQKIISIEKQRKKYQKAWSMELMTDQEFEQLMVETKEALQKATAKLEQNDLQSIEKPLNIERAKELAKMFRENWSVLTGEEKRQTVQELIKHIEFEKKGNKARVLDIHFY

SEQ ID NO: 2662 - DNA, 50 bp, Bacillus velezensis; identical to SEQ ID NO: 2622
  source 1..50: mol_type = genomic DNA

SEQ ID NO: 2663 - DNA, 40 bp, Bacillus velezensis; identical to SEQ ID NO: 2608
  source 1..40: mol_type = genomic DNA

SEQ ID NO: 2664 - DNA, 50 bp, Bacillus velezensis; identical to SEQ ID NO: 2624
  source 1..50: mol_type = genomic DNA

SEQ ID NO: 2665 - DNA, 40 bp, Bacillus velezensis; identical to SEQ ID NO: 2610
  source 1..40: mol_type = genomic DNA

SEQ ID NO: 2666 - protein, 547 aa, Clostridioides difficile
MNREGKKCVLYPRVSTEMQVDGYSLEGQKNSLKRFADREEMEIVGVYEDAGKSGKSIEGRPAFKKMLSDIKNGLEIDYILVYKLSRFGRNAADILNSLEFVQSYGINLICIEEGIDSSQTSGKLLISVLSAVAEIERENIIEQTMNGRREKARQGGWNGGFAPYGYYLENNQLLIEETEAKAIRIIFEKFGNSDIGLGGVAKYLNLQGIKKIPRQNGKLETWSSHFIRQILDNPVYCGKIAYGRRTREKVKGTKNEYKQVHTDDYILEDGQHEGIVSAELWEKVRAKRIATGIKQPSKVGKDRSHLLTGVLKCPMCGSSMYTNKHAWTNKDGTYKEVYYYICGRNKQERGHHCDYKASLRKTDIEPLVIEAVKELVSDKYFAREIKSRIGIQTDTGNVDKEIANYESKLKEVDLNKARLEREIDNLPADARYRERKIHDMTLRLDGLYDTIVELEERIEDAKLRRSSIEMEAITLENVYKIMKNFGKLYAIMSDEEKKSVISYLIKEIQIYPNGESEMPLKSIEFNFPIYRDGKEVRKVLWERGNTV

SEQ ID NO: 2667 - DNA, 50 bp, Clostridioides difficile
  source 1..50: mol_type = genomic DNA
ttgtgggaaagaggtaataccgttgagacggtagtactgctttcccacaa

SEQ ID NO: 2668 - DNA, 40 bp, Clostridioides difficile
  source 1..40: mol_type = genomic DNA
ccctcattctacacatgtggaaactgtagctaagataatc

SEQ ID NO: 2669 - DNA, 50 bp, Clostridioides difficile; identical to SEQ ID NO: 2667
  source 1..50: mol_type = genomic DNA

SEQ ID NO: 2670 - DNA, 40 bp, Clostridioides difficile
  source 1..40: mol_type = genomic DNA
ccctcattttacagatgaggaaactggggcttagagaatt

SEQ ID NO: 2671 - protein, 547 aa, Clostridioides difficile
MNREGKKCVLYPRVSTEMQVDGYSLEGQKNGLKRFADREEMDIVGIYEDAGKSGKSIEGRPAFKKMLSDIKNGLEIDYILVYKLSRFGRNAADILNSLEFVQSYGINLICIEEGIDSSQTSGKLLISVLSAVAEIERENIIEQTMNGRREKARQGGWNGGFAPYGYYLKDNQLLIEETEAEAIRVIFDKFANSDIGLGGVAKYLNLQGIKKIPRQNGTLETWSSHFIRLILDNPVYCGKIAYGRRTREKVKGTKNEYKQVHTDDYILEDGQHEGIVSEELWQKAHTKRMATGIKQPSKIGKDRSHLLTGILKCPICGSSMYTNKHAWTNKDGTYKEVYYYICGRNKQERGHHCDYKASLRKTDIEPLVIEAVKELVSDKYFAKEIEKRIGVQTDTTAIDKELANYESKLKEVDLNKARLEREIDNLPIDARFRERKIHDMTLRLDALYDTIVELEERIEDAKLRKSSIEMETITLDNIYKLMLNFGKLYDIISDEEKKSLITYLIKEIQIYPNGESEQPLKSIEFNFPIYRDGQEVRRLLWEKGNTV

SEQ ID NO: 2672 - DNA, 50 bp, Clostridioides difficile
  source 1..50: mol_type = genomic DNA
ttgtgggaaaaaggtaataccgttgagacggtagtactgctttcccacaa

SEQ ID NO: 2673 - DNA, 40 bp, Clostridioides difficile; identical to SEQ ID NO: 2668
  source 1..40: mol_type = genomic DNA

SEQ ID NO: 2674 - DNA, 50 bp, Clostridioides difficile; identical to SEQ ID NO: 2672
  source 1..50: mol_type = genomic DNA

SEQ ID NO: 2675 - DNA, 40 bp, Clostridioides difficile; identical to SEQ ID NO: 2670
  source 1..40: mol_type = genomic DNA

SEQ ID NO: 2676 - protein, 620 aa, Escherichia fergusonii
MLLSDIILSLSEQIIVMIQSIDADSKSVKPLVHVTIYCRVSSLMQTDGYGLQRQQDAIRAYLEDFDVPKELGYEIDRDNYVLLEDAGKSAYHGYHFSKGQLGQFRQKVLDGEITSGLFIIENVDRFCRMEEYLAIQEFTNLINNGIDILEVDTGEIFSRKVRKSLNKLTVSIERAYAESERKSRISTRSWKNRKRKSLEEGIAINNNTPDWLSLSEDKQSYIVNKERVEILNQIFKMYAEGFGGTAIVNKLNKEKRYYNKTSWSTNKFYHLLRNRRLIGFLGDERHYPAVIDSILFEQVQSLLNGNVRKGKKAGTMMRSIFNGIAKCGFCGNGMICQTMTSSASYLRCIAERSKTTKCTHAKLIRYKESEQVILEHLCNINWDELKKGNSTHRDDIDVLKTQMSIITDKLQKLDLLIQETEDDDDKISLINIKNKNKKELAAIDEKISALTTNLEIPDMEVLSSLKEIQDLDNVELRQKVYSLLSKTVSSIECTRTDSPDPFYTFIINYIGASEKHLLIVELKNNCKVTRFVEKITDDIVTYYTPSFVVAYSNNWESGLPEIRGLQDCDGITIKAELMDCMHLFSILDRTNRGEAKVIRDWLVIPRVQEFFFHTSAYEGE

SEQ ID NO: 2677 - DNA, 50 bp, Escherichia fergusonii
  source 1..50: mol_type = genomic DNA
aaatgtaaaaatattctcaacttcttcaagcgttgcataaaaatacatgt

SEQ ID NO: 2678 - DNA, 40 bp, Escherichia fergusonii
  source 1..40: mol_type = genomic DNA
gtgcagcgtcaattgcttcttcaagtgttgcgtacatggt

SEQ ID NO: 2679 - DNA, 50 bp, Escherichia fergusonii
  source 1..50: mol_type = genomic DNA
aaatgtaaaaatattctcaacttctacaagcgttgcataaaaatacatgt

SEQ ID NO: 2680 - DNA, 40 bp, Escherichia fergusonii
  source 1..40: mol_type = genomic DNA
gtgcagcattaactgcatctacaactgtggctgacatggt

SEQ ID NO: 2681 - protein, 620 aa, Escherichia fergusonii; identical to SEQ ID NO: 2676

SEQ ID NO: 2682 - DNA, 50 bp, Escherichia fergusonii
  source 1..50: mol_type = genomic DNA
aaatgtaaaaatattatcaacttcttcaagcgttgcataaaaatacatgt

SEQ ID NO: 2683 - DNA, 40 bp, Escherichia fergusonii; identical to SEQ ID NO: 2678
  source 1..40: mol_type = genomic DNA

SEQ ID NO: 2684 - DNA, 50 bp, Escherichia fergusonii
  source 1..50: mol_type = genomic DNA
aaatgtaaaaatattatcaacttctacaagcgttgcataaaaatacatgt

SEQ ID NO: 2685 - DNA, 40 bp, Escherichia fergusonii; identical to SEQ ID NO: 2680
  source 1..40: mol_type = genomic DNA

SEQ ID NO: 2686 - protein, 535 aa, Escherichia fergusonii
MAVIQSIDGVLKGVKPHVKAWLYCRVSTLIQIDGYGLQRQQDTVKAFITSYKVPDELGYDIDRENYEVIEDVGRSAYHGNNFTKGELGKFRQKVLDREIISGLLLIENVDRFTRMPEYLSMQEFNNLILRGIDILEVETGTIFSKKIDGSLTKLSVSISRAYSESKRKSNISKRSWANRKRKSLEQGIAINNNTPEWLILHDDKQSYILDEQKIKIINDAFQLYVEGHGATSIINRLNKQKIFINSTGWSTNKFYHLLRNKRLIGFLGDERHYPEVVDPVLFNQVQTLLDGRARQRKKSGTMMRSLFNGIAKCKFCGNGMVCQTMTSSQSYLRCIAERSKTTKCDTAKLIRYKEAEKVLLEHIRNVDWASLQKESSRDAHELNELKIQAAIINGKIEDAQKELVKADDDLIVLLSRVITNRRNELRTLEEKIINLEGNVEEPDVSIIKDLEAIQDQSNIELRQKIYTLLNKTVSTITCARYDIPETIYVFELNYIGTEQKHVVYCTKALEKVIAIYIKKKDDVDLYVTSVVTPTY

SEQ ID NO: 2687 - DNA, 50 bp, Escherichia fergusonii
  source 1..50: mol_type = genomic DNA
tgatgtaatttagttcttaaattcttccagcgtggcataaaaatacatgt

SEQ ID NO: 2688 - DNA, 40 bp, Escherichia fergusonii; identical to SEQ ID NO: 2678
  source 1..40: mol_type = genomic DNA

SEQ ID NO: 2689 - DNA, 50 bp, Escherichia fergusonii
  source 1..50: mol_type = genomic DNA
tgatgtaatttagttcttaaattctaccagcgtggcataaaaatacatgt

SEQ ID NO: 2690 - DNA, 40 bp, Escherichia fergusonii; identical to SEQ ID NO: 2680
  source 1..40: mol_type = genomic DNA

SEQ ID NO: 2691 - protein, 560 aa, Dorea formicigenerans
MARAKNRGYQQSFSPSYTIRRWRLGIYIRLSKEDLKKGKDDSNSVKNQRDLLNDFYRRNIDEFESITEYVDDGHTGTDANREDFQRLLADVMSGKINCVIVKDLSRFARNYSDAGSLIDNLFVQMGVRFISLAENVDSYKNPDSVSNIIVPITNVMNDNYCYQTSKKIRQVFDYKRRNGQYIGAFAPYGYVKHPKDKHRLIVDPDAAENVKLIFTMLIQGSSKRAIALYLNEHGVPSPSAYKVQKGLPVSTRGYDDPMWGVRMIHSILTNPTYTGDLAQGRSRVKSYKVHQIEAVPREEWVEVAGTHEAIIDYETFDKVQALLQRDTRTSPKGREVHLFSGFLKCADCGRAITRCVGKNNNVYYSCSTYKNRSRTACTMHSIKHERLEAAVLFAVQHQVHLAVSYSEIVTQINSAPIKKSQSYRLDDLIAAKERELTKITRYKQSLYQDWKDGEITQQEYRDMKADYERQTSDISAVLTRLNAERAELANGVDNEHPALVAFMKYQNIEALNREILVELVDYIKVYENGNISVKFKFADELHKIAEYIEINTTEDTAVAG

SEQ ID NO: 2692 - DNA, 50 bp, Dorea formicigenerans
  source 1..50: mol_type = genomic DNA
tgttttcctaataggcgctaatcatatgattacttcctattaggaacact

SEQ ID NO: 2693 - DNA, 40 bp, Dorea formicigenerans
  source 1..40: mol_type = genomic DNA
ggagaatatttcgaaagcataatattgtggaatataaaag

SEQ ID NO: 2694 - DNA, 50 bp, Dorea formicigenerans
  source 1..50: mol_type = genomic DNA
tgttttcctaataggcgctaatcaaatgattacttcctattaggaacact

SEQ ID NO: 2695 - DNA, 40 bp, Dorea formicigenerans
  source 1..40: mol_type = genomic DNA
ggagaatatttcaaaagctaaattttctgtatgatataag

SEQ ID NO: 2696 - protein, 548 aa, Peptoniphilus lacrimalis
MIQTNSNHFSFKAAIYCRLSKDDEQKGESASIQNQKELLENYVKSRGWSIYDVYIDDGYTGLNTNRPSFQRLIRDIENKKVDIVITKDLSRLGRNYLQTGYYTENFFPKNNVRYIALNDGVDTFQENNEIVPFKNVLNEFYSRDVSKKMKSAYMTRARQGKFIGCLAPIGYRKDNEDPHKLVIDDETSWIVEKIFDLAFSGYGVQAIRRRLFEEKIPTPTWWNRKKGLRNKKTKLEMTVDGGEYWWDCTTLKEIIENPVYIGHIASQKVNYKFKVGWLSDKPKEEWIIVENTHEPIISEDIYNIANEKLKSRRRPFKNGEESIFAGIVKCPDCGKSLNLGRNKSKKREKLLTCNTYRRYGKSLCSQHRIYYDTLYEIVLKDIRKNAEIALKDEKEIIKALEKSREIDNEEEQKFIMDKIYEDQIRVEDLTKKIERLYDDWLDNKISESNFQKILEKSQNEQDYLNQRIKDNQKLIVKEDLEDINVKKWIELIKKHRDIKKLDKETLNELISKIYVHEKEVVNGEITQTIDIYYNFIGNTDTLQVFYNL

SEQ ID NO: 2697 - DNA, 50 bp, Peptoniphilus lacrimalis
  source 1..50: mol_type = genomic DNA
taataaagtcttagaaaaactaaaaaatctaatcgcctttttttattgta

SEQ ID NO: 2698 - DNA, 40 bp, Peptoniphilus lacrimalis
  source 1..40: mol_type = genomic DNA
aaggcgattagaaaattaaagaaatgctagaagactttta

SEQ ID NO: 2699 - DNA, 50 bp, Peptoniphilus lacrimalis
  source 1..50: mol_type = genomic DNA
taataaagtcttagaaaaactaaatgatctaatcgcctttttttattgta

SEQ ID NO: 2700 - DNA, 40 bp, Peptoniphilus lacrimalis
  source 1..40: mol_type = genomic DNA
aagtccttgggaaaattgatgaaattctagaagacttttc

SEQ ID NO: 2701 - protein, 527 aa, Mycoplasma hominis
MRKNFAIYNDYEIVGEYEDAGKSGKSIEGRIQFNRMMEDIKSGKDGVSFVLVFKLSRFARNAADVLSTLQIMQDYGVNLICVEDGIDSSKDAGKLMISVLSAVAEIERENIRIQTMEGRIQKAREGKWNGGFAPYGYKLEDGKLFINEEEAIAIRTIFDQYVNTTIGANGISKYLENHGIRKIPRQNGKNPLFDAGLIRKILKNPVYNGKIAFGRRTLEKVHGTRNEYKQVEQDEYLISEGIHEAIVSDEVWQAAQVKLKSQAKKYEHVNKGKDTRTHLLSGIVKCPICGVGMFGNKCIKKKKDGTKYKDFYYYGCKHRQMIRGHKCTFRKQIREELLDDAVAEVIVKIVSNPKFASMMQEKINMKVDTSEIETEIDNYQKELRKCHSTKFKLIEEIDNLDVEDKHYKRRKQDLDDRLYRMYDKIDELESSLIDAKAKKQTIEAEKLTGDNIYKVLIYFDKLYKVMNDVERRQLITALISEIQVYEEKQPNGQWLKSITFKLPIIEENLNIGLDNDEHVEMLSLLKK

SEQ ID NO: 2702 - DNA, 50 bp, Mycoplasma hominis
  source 1..50: mol_type = genomic DNA
ttgaaatgttgtcacttttgaaaaaattttgttgaggcacgacaaaaggc

SEQ ID NO: 2703 - DNA, 40 bp, Mycoplasma hominis
  source 1..40: mol_type = genomic DNA
agcagaaggtatctataaaaataaaaattaggtttaatta

SEQ ID NO: 2704 - DNA, 50 bp, Mycoplasma hominis; identical to SEQ ID NO: 2702
  source 1..50: mol_type = genomic DNA

SEQ ID NO: 2705 - DNA, 40 bp, Mycoplasma hominis
  source 1..40: mol_type = genomic DNA
agtaaaagttatctttaaaaataaaaattaattttaatat

SEQ ID NO: 2706 - protein, 516 aa, Dorea formicigenerans
MSKITAMYIRLSMEDEDVSLNQKEESNSVSSQRELLESFIGNHSELKDTKVQEYCDDGFTGTKFERPGYMKLMEDVRADKISCIVVKDLSRLGRDYIEVGSLLEQILPLYQVRVIAVNDNYDSDNYDGSTGGMNVAFKNLIYMLYSRDLSNKVSSAMHTRILKGENISGQLRYGYVKDPNDKHKIIVDPEAAEVVKLIFELTAQGKSKTEVANYLNAQGIDTPSAYKKRKGSRNFFHAVEVKSLWSTSSIRDILNDEVYLGKLIWNKTKKRVGSNNTSSYVPKDEWMVIENCHEPIITQELFDMAHANSKKCVRSKRGKRNYNPFYYCGVCGRALAPSKRVKGDILLCYSSRIEENSPCKSNRVEIAKVEDAIMKTVNMYATVYLDEKGIKRAGKSKEVSPEEKIATLEKKVKSLSSKKMMLYSDYKDDKLTREEYVKRSKAMVEQIDELHQEIEQLKTEIPPEDNSSSKFETQLESIINMESFDREKIQKVIKKVIINGEDNIEIVWNTDDPFFK

SEQ ID NO: 2707 - DNA, 50 bp, Dorea formicigenerans
  source 1..50: mol_type = genomic DNA
tttggtctggggttgacacgagcaggtgtttgagttataataggaccaag

SEQ ID NO: 2708 - DNA, 40 bp, Dorea formicigenerans
  source 1..40: mol_type = genomic DNA
tcaaacacagtgggagagaggaacaggcatttctgacaag

SEQ ID NO: 2709 - DNA, 50 bp, Dorea formicigenerans
  source 1..50: mol_type = genomic DNA
tttggtctggggttgacacgagcatgtgtttgagttataataggaccaag

SEQ ID NO: 2710 - DNA, 40 bp, Dorea formicigenerans
  source 1..40: mol_type = genomic DNA
ttaaacaccatgtgagagatgaacatgcatttctgaacat

SEQ ID NO: 2711 - protein, 588 aa, Pseudomonas otitidis
MPTKPRAYSYIRFSNATQAQGDSYRRQREDAETYCEQHGLELVDSKEYLFFDAGRSAYKARHLDDSGELARFLAYVEDGTVPAGSVLIVESLDRLSRENVQTKALPRFLDLLGKGIDVVTLTDNKRYSAGDDFTSLIISIVYMARAHEESATKGKRVSSAWKIKHEKAQEKATPIGKLCPYWLRFEGGEYHLIPERVKVVQRIYQLAQDGYGHRAISIILNKENIPSFSAERKNASGKWGNSSIAHLLKNRSVLGEYHPHRFVDGVRTPIGEGVKNYFPSIISEDVFYAAQQAINSRKSSQVTRTSGNFNVWAGVAKCEYCRGALHLTNAGRSKNLRCFNNTKGVCPAKPVALIRSEEVFKEILSKVDSLSLVQDNSAKLQQQVAVLDGKIGSITSRLNEIQEQVLAFGGRIPSMLVSTMAKLEDEQAAYMDEREKLKADLGRERIVSKEEFFSRLDMVSYEGRAKANSLLKTLGISVRVRRGEGRGEKAEISYMVDREGETVFSLNDHPLYGIMFFAFEAGSLDAAVLQGDISEQDSSNQAAFIERIGVGKAKQAHLKEMAKNMSYRQIAEKEGMSVREVKRVLGIT

SEQ ID NO: 2712 - DNA, 50 bp, Pseudomonas otitidis
  source 1..50: mol_type = genomic DNA
attagtggattcatgcagcacttcttgatatgatggagaaatacactaaa

SEQ ID NO: 2713 - DNA, 40 bp, Pseudomonas otitidis
  source 1..40: mol_type = genomic DNA
ataccccgcgcagcacttcttgaatttctgcccgctgcca

SEQ ID NO: 2714 - DNA, 50 bp, Pseudomonas otitidis
  source 1..50: mol_type = genomic DNA
attagtggattcatgcagcacttcgggatatgatggagaaatacactaaa

SEQ ID NO: 2715 - DNA, 40 bp, Pseudomonas otitidis
  source 1..40: mol_type = genomic DNA
atacctcgcgcggcacttcgggaagtgtagtccgcggcca

SEQ ID NO: 2716 - protein, 559 aa, Clostridium sporogenes
MARTKNRETNTAVSQFSYNPTRWNLAKYIRLSKEDLNRGKDDSNSVTNQKKLLDDYYRQHLDEFESAETYVDDGCTGTDTNRADFQRLLADIYAKKVNCVIVKDLSRLSRNYTDAGSLIENLFVQMNVRFISLAEGVDSYLNPDSVSSILVPITNVMNDQYCYQTSKKIRQVFDYKKRNGEFIGSYAPYGYIKDPNDKHALLVDHEAAEVVKQIFSMCLSGMTVRAIVNHLNDHGVMCPSVYKQSQGLKYKCPNGQTQPMWSTITISNMLKNPVYVGDMAQGRNRVKSYKIHKIEAVPEKDWIVVPNTHEPIIDREAFEKVKQLLKRDTRTSPKQKQLYLFSGFLRCADCGRAMSRIASKELYVYYQCGTYKSLSKKACTMHSIKSTRLEAAVLYAIRQQVHLAVSYSAIVSKINLAPLKKSQSIRLNELITAKEKELTKIMRYKQALYQDWKDGHITHNDYRHMSEDYEQQNEAIGTVIANLKKERDELENGIDTENPFLATFRKYENIDKLTREILIELVDHIKVYEGGDISIRFKFADELRRIIQYIEVNSHLQVG

SEQ ID NO: 2717 - DNA, 50 bp, Clostridium sporogenes
  source 1..50: mol_type = genomic DNA
ggttttcctaatatataacactcatatgagccaaacgtattaggaaaact

SEQ ID NO: 2718 - DNA, 40 bp, Clostridium sporogenes
  source 1..40: mol_type = genomic DNA
tttctgccttccatggcactatgaagatacaagattaagt

SEQ ID NO: 2719 - DNA, 50 bp, Clostridium sporogenes
  source 1..50: mol_type = genomic DNA
ggttttcctaatatataacactcaattgagccaaacgtattaggaaaact

SEQ ID NO: 2720 - DNA, 40 bp, Clostridium sporogenes
  source 1..40: mol_type = genomic DNA
tttctcactttcatgtcacatagaagaggcaatattaagt

SEQ ID NO: 2721 - protein, 489 aa, Kocuria marina; identical to SEQ ID NO: 306

SEQ ID NO: 2722 - DNA, 50 bp, Kocuria marina; identical to SEQ ID NO: 307
  source 1..50: mol_type = genomic DNA

SEQ ID NO: 2723 - DNA, 40 bp, Kocuria marina
  source 1..40: mol_type = genomic DNA
gtccaggtcgttggagggctcgtccaggatcaacacgttg

SEQ ID NO: 2724 - DNA, 50 bp, Kocuria marina; identical to SEQ ID NO: 307
  source 1..50: mol_type = genomic DNA

SEQ ID NO: 2725 - DNA, 40 bp, Kocuria marina
  source 1..40: mol_type = genomic DNA
gtccaggtggttggtgggctcatccagcatcagcagtgtg

SEQ ID NO: 2726 - protein, 505 aa, Clostridium butyricum
MKCAVYIRVSTDREEQKTSLVNQRQLFEKYIQDKHWDLHDFYVDIESGTKAKRTNFQRMLEDAKAKKFNIILTKELSRLARNVKLAYQIKEIAENNNIEILSFDNSINTLENNTALFGAYAWIYEEESQRISRRMKSALKMSAERGRFKGSFAPYGYYVKDKKLYVRNDNTPNIVKRIFSDYLAGKGFDRIARELYNEGIPTPGQVANKADASDKWHGGSVRTILENPHYTGDLVQGRSTTISVTSNRRTHKSKEDYIIIKNAHEPIISKNDFEAVQQLIKSRKKIRPHQNIHLFTNLLFCHDCGHGMHFKKNRKGYICGSFNRHGLKACSSHIVREKELVDLIITDLKAMLSTIENKKLLNELQKNVDIKKKRLENEAKRFSREIEKLNIRKSKALTKFINDDISKEDYNTFISMINDNINELTKKQKEYDSLISEKFNTDILNELYSLKDTIINLNELTPEILNRLIERIEIKADGTPKIFYRFSESSIYFSALFSNTQHSTC

SEQ ID NO: 2727 - DNA, 50 bp, Clostridium butyricum
  source 1..50: mol_type = genomic DNA
tttagcaacacacaacattcgacatgcgttgacaactgattatagataat

SEQ ID NO: 2728 - DNA, 40 bp, Clostridium butyricum
  source 1..40: mol_type = genomic DNA
aagagctacattttccacatgctttgtcataggaaacata

SEQ ID NO: 2729 - DNA, 50 bp, Clostridium butyricum
  source 1..50: mol_type = genomic DNA
tttagcaacacacaacattcgacatccgttgacaactgattatagataat

SEQ ID NO: 2730 - DNA, 40 bp, Clostridium butyricum
  source 1..40: mol_type = genomic DNA
tacagttagattttccacatcctttctcatagggaaaaga

SEQ ID NO: 2731 - protein, 479 aa, Mycobacterium intracellulare
MSRRKATAQRVGVQSAAVYARISADVEGAGLGVARQLEDCRKLAADRGWPVGDEYVDNDVSAFSGKPRREYARMLADLESGARDAVLVYNLDRLHRRPVELEEFVALCESVGVRDVATVTADIDLGNDDGLFMARIFAAFAAKESGRKSARIRRKMLQNAEQGRPHGSVRPFGYEPDKITVRSEEAAVVREMVDRYLAGASIRSLTMWLNDSGIAPAASKSWRTSAVRQILCSGRVAGLREHHGQVIGEAAWPAIISPMQRDQVLARMTARALTKTRAPRTYLLSGLLRCGRCGNRLYSQARHVNPENRVRRYVCLSGPDQGGCGRLTVVAQPVEDLLTDAVLTRLDSPALADALVGKSSVDANVAELSVQLDADTARLDELAALYADGAVTAREWIAARDPITARIAQTRKAIAAATDTADVNELAGTGHLLREQWDSLDIDRQQAVIKSVLGHAVIAPGTPGARSLDINRVHPHWRI

SEQ ID NO: 2732 - DNA, 50 bp, Mycobacterium intracellulare
  source 1..50: mol_type = genomic DNA
cgggcacattcatgacttatcactaagctgagataatgttaaactaccct

SEQ ID NO: 2733 - DNA, 40 bp, Mycobacterium intracellulare
  source 1..40: mol_type = genomic DNA
cggccccaccgagttgtccaacctggtcctggtctgcccc

SEQ ID NO: 2734 - DNA, 50 bp, Mycobacterium intracellulare
  source 1..50: mol_type = genomic DNA
cgggcacattcatgacttatcactcggctgagataatgttaaactaccct

SEQ ID NO: 2735 - DNA, 40 bp, Mycobacterium intracellulare
  source 1..40: mol_type = genomic DNA
cagcccctcccagttttcccgcctggccctgggccgccac

SEQ ID NO: 2736 - protein, 501 aa, Bacillus thuringiensis
MKPNIKEVAIYLRKSRDESDGKEDVLAKHESLLLEYAKNHNLKYEIYKEIGSSEYIDSRPKMVRLLSDVSQKLYDAVLVVDLDRLSRGDLEEMGRISRVFSDSKTIVITPTKTYDFNNEDQALINNFEMVFANHEFRMIRKRMIRGKQQGTKAGKWTNGRPPFPYVYNRLTKELDVDPDKVKVYELMKKMFLEDMKATYEIAWKLNELGFKTNRNSYWYENTVRRILKNEVHLGKVVYGKTSGSGSKKKLNANGVQIKDRSEWIIAEGSHQPLKTEEEHQRILAIFESRRYTPKGTRTNVQVLSKLIYCGKCNRVMSFTGKASGKKYVKTCLTTDHFGNRCHNRCLNVEVIYAQLFLDLEDYEQQLLNHEPKEKQGDSSTLQLALHNKLVELERLEKGIERIKDLFIDEMIDKSEMQMRIEKQKQSMQTKKEEIRSIEQSLAVIENVITDDDRLHAIKEFKKAWNTEGISKRELNTLAKQLIDRIEYVREGNNVKINIKFL

SEQ ID NO: 2737 - DNA, 50 bp, Bacillus thuringiensis
  source 1..50: mol_type = genomic DNA
agatttcaccagattaccttacacaaatgtcatgtaatctggtgaaactt

SEQ ID NO: 2738 - DNA, 40 bp, Bacillus thuringiensis
  source 1..40: mol_type = genomic DNA
atttttttaaacctttcaaaaatgtaaggtttttgtcatt

SEQ ID NO: 2739 - DNA, 50 bp, Bacillus thuringiensis
  source 1..50: mol_type = genomic DNA
agatttcaccagattaccttacactaatgtcatgtaatctggtgaaactt

SEQ ID NO: 2740 - DNA, 40 bp, Bacillus thuringiensis
  source 1..40: mol_type = genomic DNA
atttttttaaatcattaaataatgtaatgaatttgttaat

SEQ ID NO: 2741 - protein, 465 aa, Mammaliicoccus sciuri
MKTALYLRVSTQEQATTGYSITGQEEKLRAYAKAKGFGNIKVFTDAGYSGSNTKRPALELLIKEVEQGKISNILIYKLDRLSRSQKDTLYLIEEKFLKNDVPLISLSESFDTSTPFGRAMVGMLSVFAQLERENIKERMIMGREQRLKKGLWHGAGGGSGRVAGYDYKDGKLVINEYEALFVRRMFQLYVEGEGYFNIYKKLSKEMPGVIKEPSNISKLLKNPVYIGMIDYNGEIYKGIHEPIIDEHTFNTVQKLRQTRTVNRDMSITRYLLPKLLKCGYCGENMIGKTGSKKKDGTYYTYYCCYSKEINRRKKHVDSNFSLECESVYHTAQLVEDKVINEVMNLDSTKIIHDYETKNDDHIIYEKQIKDIDTKIEKLMNLYIDSNIDKKTLDVKHKELEDEKRLIEKTMRDSKVDVNKEVVLKHLSNFKDIDWVDDREALKNSLHILIKDIRIYNDSMKVNFNI

SEQ ID NO: 2742 - DNA, 50 bp, Mammaliicoccus sciuri
  source 1..50: mol_type = genomic DNA
aatatgtagtaacaggactaaccattaatttaatctttttactacacgaa

SEQ ID NO: 2743 - DNA, 40 bp, Mammaliicoccus sciuri
  source 1..40: mol_type = genomic DNA
catctcaatttcaacaccatttgtttgatcgattcccata

SEQ ID NO: 2744 - DNA, 50 bp, Mammaliicoccus sciuri
  source 1..50: mol_type = genomic DNA
aatatgtagtaacaggactaaccagaaatttaatctttttactacacgaa

SEQ ID NO: 2745 - DNA, 40 bp, Mammaliicoccus sciuri
  source 1..40: mol_type = genomic DNA
catctcaaactcaacatcagatgtctaatctcttcccatc

SEQ ID NO: 2746 - protein, 556 aa, Streptococcus oralis
MTNSTLTKQIPDWTKVEFEGLSEISVLYCRLSAEDANEGESNSISNQRLILSKLAERENLSNPIVFYDDGYSGSNAQRPAFQQALALVENNQVSNFVVKDLSRVSRDYLLSGNLLEVVFPSKNIRFISLQENIDSNKKSSQDAYLTPLVSLFNNWYSMQCSEKIKLSKHTKAKNGEKIGWITPYGYLNNPENRKEWLVDEYASEIVKRIFSEYISGRTPTEIAQGLRCDKILTPARYKKKLGISNYRILESDPCYWKTQMIWQILEKEEYIGSTINLKTAKISYKQRNCRLRPREDWLIFPDSHEAIISKEDFEIARKMMNHKRVVQRRNWKNKTGHENLFAGLLYCENEHKLSFCPQEKDGVNLDHYKCYHFKRAGDTCSGGHYLRKEVLENLILNELQELINSFQINEADLLQRLKDKFEIKETKKFSELKKQLTKNEQRMVELDIIIQKLYEKQLLGEIADDRFKKLCNSYEAEQAELKEKVQTATATLGVKMKYAHNIEKFITTIRKYTQLENLTSKIVNELIDKIIIHQPIGRGKNRQIKLEIHYRFIGDI

SEQ ID NO: 2747 - DNA, 50 bp, Streptococcus oralis
  source 1..50: mol_type = genomic DNA
ggactgctgagtgaagtgtggtataatgtccacacctcacccagcagtcc

SEQ ID NO: 2748 - DNA, 40 bp, Streptococcus oralis
  source 1..40: mol_type = genomic DNA
aagagcaggattttgctataatggtcatatgaatgaaaaa

SEQ ID NO: 2749 - DNA, 50 bp, Streptococcus oralis
  source 1..50: mol_type = genomic DNA
ggactgctgagtgaagtgtggtattatgtccacacctcacccagcagtcc

SEQ ID NO: 2750 - DNA, 40 bp, Streptococcus oralis
  source 1..40: mol_type = genomic DNA
aagaacaggaagtttctattaaggtaaaataaatgaaaaa

SEQ ID NO: 2751 - protein, 450 aa, Erysipelotrichaceae bacterium I46
MKIFGYIRRSSSERNKSNYSIESQQRVCSDLAEKDNRTIEKWYIDEGYSGTTLKRPNMQKMLRDIANTNQEVLIYVWLASRLSRDSNHCNSLRHVFSKYNVTVISDNDDWASLEDIEMYPDKTIAPRIISLSDETEVHRDRKRTRTGLITSARKGNYTKGGDTPPTGYAFIKNPGDAKGRKVEIDSFYVTTMLYIFTQIHDKKRSIESLAIELNSKKVCGVKWSYSKIYKAVTDPIIYGRFLTSYADIRGHSPAYCTEEYYNEMQIIMHRRKKETHHKYLFKNLIKCGDCGAWCNEVPTIHYPRNGNKRGKKIYKYYCCPNCSKRINEQIILRKMIHTVSDIAKDSSNNELILDLTEKLSKIEKRIEFINEEFEAGYLDDDSYKSERMTLLKRRKAINKEIKKLETKVIKKFKEYTYVEQKQLIRKSINYITVNLNDNTLTAIVKIQSNI

SEQ ID NO: 2752 - DNA, 50 bp, Erysipelotrichaceae bacterium I46
  source 1..50: mol_type = genomic DNA
caaatttcgcaattttattgccattcgctccatgtttagtaagaaacatg

SEQ ID NO: 2753 - DNA, 40 bp, Erysipelotrichaceae bacterium I46
  source 1..40: mol_type = genomic DNA
tgagttcgattctcatcacccgctccatatatcaaataag

SEQ ID NO: 2754 - DNA, 50 bp, Erysipelotrichaceae bacterium I46
  source 1..50: mol_type = genomic DNA
caaatttcgcaattttattgccatatgctccatgtttagtaagaaacatg

SEQ ID NO: 2755 - DNA, 40 bp, Erysipelotrichaceae bacterium I46
  source 1..40: mol_type = genomic DNA
tgaaatcaattcccatcacatgctcctcatcacaaataag

SEQ ID NO: 2756 - protein, 540 aa, Streptococcus suis; identical to SEQ ID NO: 296

SEQ ID NO: 2757 - DNA, 50 bp, Streptococcus suis; identical to SEQ ID NO: 297
  source 1..50: mol_type = genomic DNA

SEQ ID NO: 2758 - DNA, 40 bp, Streptococcus suis
  source 1..40: mol_type = genomic DNA
tatttccaaatgggaaaatggtgaagcaacgccagatatt

SEQ ID NO: 2759 - DNA, 50 bp, Streptococcus suis
  source 1..50: mol_type = genomic DNA
caatatctttaactaagggaaacgaaagtttcccaaagttaaagatacca

SEQ ID NO: 2760 - DNA, 40 bp, Streptococcus suis
  source 1..40: mol_type = genomic DNA
tatttccaaaaggaaaaataataaagcaaagcaagaagtg

SEQ ID NO: 2761 - protein, 481 aa, Streptococcus suis
MPKIALYLRLSVDEATADESNSITNQRILLNQYLDRTPEFHPFKRIEFIDDGFSGKNPNRPAFNRLMSDVRVGKIRYIIVKDFSRFMRDYLEFGNYIENIFPFLGVRFIAVNDQFDSFTSENNGVEIDVPFRNLLNDFYARDVSEKVKSAMNTMKRSGKNMSWLPPFGYLKDPNDRFKIIIDESVAPVVKRIFQLCIEGVGLSRIAIILNDENTITPAERKRQISQADYQYQIVVTEKQKRNIWTRSTVSRILKNEAYKGTYLFNAKTIFNGKQVKRPKEEWERIENNHESIVTSEIFEQAQKALKSRNNRHSYQQSTKKYDVILTGFMICEHCGHKLTAYTYKKKTHHYFYCRYCKVQGISLKGCRSDRVEKKILEYLKSKKEDVPSQKSNKSLVYLMSQLKAQKFSYYQDYKDEKINRETYIYYKQEIDKKIDDIEELNKLNNSQCMIDSSLSKETLRESVKQIIVNHAGGYRIDYKNI

SEQ ID NO: 2762 - DNA, 50 bp, Streptococcus suis
  source 1..50: mol_type = genomic DNA
tgctgtcattaacttgacacaagaggggggattgtgtcataataatgaca

SEQ ID NO: 2763 - DNA, 40 bp, Streptococcus suis
  source 1..40: mol_type = genomic DNA
ccatttgggtggcaactgggggcaatgtagaatccaccat

SEQ ID NO: 2764 - DNA, 50 bp, Streptococcus suis
  source 1..50: mol_type = genomic DNA
tgctgtcattaacttgacacaagaccggggattgtgtcataataatgaca

SEQ ID NO: 2765 - DNA, 40 bp, Streptococcus suis
  source 1..40: mol_type = genomic DNA
ccatttgggtggccattacccaaaatgtagaataaaccat

SEQ ID NO: 2766 - protein, 497 aa, Bacillus thuringiensis
MTINNVAIYLRKSRAEDGLTDAESLENHRNVLTGIAERNSWKYEIFEEIGSSMSISERPQLKLLLDSVTNKYIYDAVLVMDVDRLSRDRYDSSLIMKILRDNDVKIVTADGKITDLRDENDALMTDFKDIFSNYEYKQITKRMIRGKEASARKGRWSSGRVPLGYVYNKDTGMLDIDEDKAPIIREIFHMYANGTGTHFISLEMNKRGYRGAMGKPFGGKSIRDIITNEIYLGNATLRKFIKEGNTYKLRPEEEHIRHEGIYPAIVEKELFVSVQRRYESQKMKPNRAKAGTHSLSGLVRCGYCDKVHAIQMRPTKGRVLKGCSKRDLITGVLCKNHGILYEKVMEEVFKDLSKYSATLDETVERLIEDKTMYLNSKDRELASLESQLKTIEAQLKRINYMFMNDLLSEEELGEMKPQKVKEKDHILKRITEVKELTVDDKLEEYEKVSKTLKNILDNREVLSDKDLNRLLSSVINRIVLYNYKDKDVEPRIVIEFK

SEQ ID NO: 2767 - DNA, 50 bp, Bacillus thuringiensis
  source 1..50: mol_type = genomic DNA
tagtctcttttaaaaacttagtagccatgccttgtttccataagagacct

SEQ ID NO: 2768 - DNA, 40 bp, Bacillus thuringiensis
  source 1..40: mol_type = genomic DNA
aatggattttaaatagtagccatgcaatgtctcttgagag

SEQ ID NO: 2769 - DNA, 50 bp, Bacillus thuringiensis
  source 1..50: mol_type = genomic DNA
tagtctcttttaaaaacttagtagctatgccttgtttccataagagacct

SEQ ID NO: 2770 - DNA, 40 bp, Bacillus thuringiensis
  source 1..40: mol_type = genomic DNA
acaggattttaaattgcagctctgcaatgtcttctaagag

SEQ ID NO: 2771 - protein, 497 aa, Bacillus thuringiensis
MTINNVAIYLRKSRAEDGLTDAESLENHRNVLTGIAERNSWKYEIFEEIGSSMSISERPQLKILLDSVTNKYIYDAVLVMDVDRLSRDRYDSSLIMKILRDNDVKIVTADGKITNLRDENDALMTDFKDIFSNYEYKQITKRMIRGKEASARKGRWSSGRVPLGYVYNKDTGMLDIDEDKAPIIREIFHMYANGTGTHFISLEMNKRGYRGAMGKPFGGKSIRDIITNEIYLGNATLRKFIKAGNTYKLRPEEEHIRHEGIYPAIVEKELFESVQRRYESQKMKPNRAKAGTHSLSGLVRCGYCDKVHAIQTRPTKGKVLKGCSKRDLITGVLCKNHGILYEKVMEDVFRDLYKYSVTLDETMKGLIEDKTKYLNSKDRELAALESQLKTVEAQLKRINYMFMNDLLSEEELGEMKPLKVKEKDHILKRIAEVKELTVDDKLEEYEKVSKKLKNLLDNKEVLSDKDLNRLLSSVINRIVLYNYKDKDLEPRIVVEFK

SEQ ID NO: 2772 - DNA, 50 bp, Bacillus thuringiensis
  source 1..50: mol_type = genomic DNA
tggtctcttttaaaaacttagtagccatgccttgtttccataagagacct

SEQ ID NO: 2773 - DNA, 40 bp, Bacillus thuringiensis; identical to SEQ ID NO: 2768
  source 1..40: mol_type = genomic DNA

SEQ ID NO: 2774 - DNA, 50 bp, Bacillus thuringiensis
  source 1..50: mol_type = genomic DNA
tggtctcttttaaaaacttagtagctatgccttgtttccataagagacct

SEQ ID NO: 2775 - DNA, 40 bp, Bacillus thuringiensis; identical to SEQ ID NO: 2770
  source 1..40: mol_type = genomic DNA

SEQ ID NO: 2776 - protein, 511 aa, Elizabethkingia anophelis
MKKADLYIRVSTDEQADKGYSQRDQEERLKRYCTTNKITVGQVIYEDHSAKTFNRPEWIKLLNNLKKKSSKTNLILFTKWDRFSRNAGDAYQMINTLNKLGIEPQAVEQPLDLSIPENKMMLAIYLAAPEVENDRRALNTFYGMRRARKEGRLMGKAPFGYINRSKEDGRKYVALKDPEASAMQWAFNEIAKGILAADQVRQKMNTLCATKLSRSAFHVAIRNPLYCGKIFIAKFQDEEAHLVQGQHEPLISKELFNKVQLILDGNKRAERPNTKILSDVNLPLRGFLVCPECGRNLTGSASKGRSNRYYYYHCLSSCGFRHKAQVANDIFEKGICQFELNDGVKSILKRLLLDNYKKFIQSPINEKKRIAQEIDRLNAKLSIARNKLLSETIDDEEYLEIKKECRAKIEHLEEQLSKDGTDTKSIDIEKSLERALQSIVNIPKLYSEGTIQTRRSIIGSIFPEKLEFDGKTYRTTRMNVIANYIFQINNGLALKKNRANENIFHLSCLVA

SEQ ID NO: 2777 - DNA, 50 bp, Elizabethkingia anophelis
  source 1..50: mol_type = genomic DNA
tatatttcatttgtcctgtttagtagcccaagacgaacaaatctcgaaac

SEQ ID NO: 2778 - DNA, 40 bp, Elizabethkingia anophelis
  source 1..40: mol_type = genomic DNA
ttttgtttatatattttgtagccccgagcagaatcgaact

SEQ ID NO: 2779 - DNA, 50 bp, Elizabethkingia anophelis
  source 1..50: mol_type = genomic DNA
tatatttcatttgtcctgtttagtctcccaagacgaacaaatctcgaaac

SEQ ID NO: 2780 - DNA, 40 bp, Elizabethkingia anophelis; identical to SEQ ID NO: 365
  source 1..40: mol_type = genomic DNA

SEQ ID NO: 2781 - protein, 521 aa, Sphingobium limneticum
MRTILYARFSSDLQNPLSTADQLASMQERAAREGWTVIDTYFDDEVSGRAGISEMQRPGLNAMLARVERGDVDQILAEATDRIARHIGDAHAIREHLEHFGARLFTLSDGYVDEITGTIKGLMDARFLKDLAEKIKRGQRGQHGRGFNAGGLAYGYNVVKKIGDDGEIVRGILEVNEEEAAIVRRIFDDTIAGVSARAIVKALNEEGVPSPGGKLWATNVIHGDRIRANGILRNNIYRGVMVYGRTRRVYHPKTRRYVARVNPVTEWRFMEVPHLRIVSDEQWATIEERYSAFDGDIRKLEKRPKRLLSKLGKCGECGGTWTVIGPDKWGCSARKAKGICTNTRTISTRLYEQRVLGQIKHILLDPEAVALFVDRYNIGIRKRQAEAGSNRAPLERKAADLKSKVTRLVDAIADGAGEFQEVKDRLRTARADLADVQRQLAAMKEAVPLELSSDLADRYRLYIAELDAALATEGTARERAAAAIRELIDTITLTAKADGRGVDIEVTGRMANIINLAKNSG

SEQ ID NO: 2782 - DNA, 50 bp, Sphingobium limneticum
  source 1..50: mol_type = genomic DNA
aggtatctttccgttgtgagcgttcctccgctaccaacggtaagatacct

SEQ ID NO: 2783 - DNA, 40 bp, Sphingobium limneticum
  source 1..40: mol_type = genomic DNA
gtcgggggttcaagtccctcctccgctaccattttattac

SEQ ID NO: 2784 - DNA, 50 bp, Sphingobium limneticum
  source 1..50: mol_type = genomic DNA
aggtatctttccgttgtgagcgtttatccgctaccaacggtaagatacct

SEQ ID NO: 2785 - DNA, 40 bp, Sphingobium limneticum
  source 1..40: mol_type = genomic DNA
gtggggggctgaagtcccctatccactattattgtattac

SEQ ID NO: 2786 - protein, 468 aa, Anoxybacillus flavithermus
MAVALYIRVSTEEQAREGYSISAQREKLIAYCKVHDWYDYRFYIDEGVSAKNLDRPQLKEMIKHIKEGAIDTVLVYRLDRLVRSVTDLYKLLEIFEQHGCKFKSATEVYDTSTAIGRLFITLVAAMAQWERENLGERVRMGQIEKARQGFYSAKAPFGFDKTPDDKLIINENEKKIVLDIIKKIFDGYSIRQISDYMNNSGIPPIRGYKWHIATIMDIVKNPALYGAIKWRDEIIENTHEGIITKEEFEKIQNILHGRKNFKKRNTSSIFIFQGKLICPNCKNRLASERSVYFRKKDKAYTETNHYRCQSCALNKRKAINVSEKRVEKGLIEYFSNMRFHVVPTVVEDEKEKELEALEERLRQIERQREKYQKAWAADLISDEEFTERMRETKRAMAEIQEVLKNVEIDETKNKKHDIESIKAIATNFLLNWNTLTALEKREFMNNFVDGIEFDKQGINVKIKEVSFY

SEQ ID NO: 2787 - DNA, 50 bp, Anoxybacillus flavithermus
  source 1..50: mol_type = genomic DNA
ttttgtgtttatgaaaaatacactacaacgaacttgacataaacacaaaa

SEQ ID NO: 2788 - DNA, 40 bp, Anoxybacillus flavithermus
  source 1..40: mol_type = genomic DNA
tttcgtatttaaatataacacaacgaaatgttcttggctt

SEQ ID NO: 2789 - DNA, 50 bp, Anoxybacillus flavithermus
  source 1..50: mol_type = genomic DNA
ttttgtgtttatgaaaaatacacttgaacgaacttgacataaacacaaaa

SEQ ID NO: 2790 - DNA, 40 bp, Anoxybacillus flavithermus
  source 1..40: mol_type = genomic DNA
tttggtatttatttctaactgaactaaaggttcttgtcta

SEQ ID NO: 2791 - protein, 540 aa, Clostridioides difficile
  REGION 453..485: note = misc_feature - Xaa can be any naturally occurring amino acid
MKAAIYSRKSRFTGKGDSIENQIQLCIDYAKSIGVKDFLIYEDEGFSGSNIDRPQFKKMMQDAKDKKFSYLVCYRLDRISRNVSDFSTLIEKLNELSISFISIKEQFDTSTPMGRAMMFISSVFAQLERETIAERIKDNMYELARSGRWLGGNTPHGFNSEKITFLDENLKERSMYKLQVNDEQMEIVKLIYNKYLELRSLSKLYKYVYNNGIRGPRGGKFDPSSLSRILRNPAYVKANDEILDYLKNSGMDVVGTPDRKCGILTYAKNTSNSIAAIAKHHGVIEPEIWLEVQNQLDKNRDKTPRISTGKTALLSGLIKCGKCGSNMRITYKGKKTDKDLKYYYICGTKKTLGSDSCNCKNLNGPLVESLVIDKIKNCKEESIISAFNSNNIKTDNVFNIFKSETNLLKNQILDKERLIKNLVIELAKNTGSTASDYIVSQIESLNNEISILXXXXXXXXXXXXXXXXXXXXXXXXXXXXXXXXXSNLKRFNDEVDNASLDDKRLLLSTIINSIVWDSSLGNLNIVYMGAEVDNSVSLSN

SEQ ID NO: 2792 - DNA, 50 bp, Clostridioides difficile
  misc_feature 26: note = n is a, c, g, or t
  source 1..50: mol_type = genomic DNA
acttttttagctatagcagaagcaanagaattacctataaaggcaaaaaa

SEQ ID NO: 2793 - DNA, 40 bp, Clostridioides difficile; identical to SEQ ID NO: 1048
  source 1..40: mol_type = genomic DNA

SEQ ID NO: 2794 - DNA, 50 bp, Clostridioides difficile
  source 1..50: mol_type = genomic DNA
acttttttagctatagcagaagcaggagaattacctataaaggcaaaaaa

SEQ ID NO: 2795 - DNA, 40 bp, Clostridioides difficile
  source 1..40: mol_type = genomic DNA
acatgatatttgtaaaagagggagcatttgagataagttt

SEQ ID NO: 2796 - protein, 556 aa, Clostridium sporogenes
MFRQLNKVNTHMVSTGNRITALYCRLSRDDELSGDSNSIKNQKAILQKYADDNGLKNTVFYIDDGFSGTTFDRPDFNRMINDIEAGKVETVIIKDMSRFGRDYLKVGYYTEIIFPEADVRFIAINNGIDSANQEDSDFTPFLNIINEWYAKDTSKKIKAVFKAKGEAGKPLATNPPYGYLKSSEDKNKWIVDEEAAEVIIEIFKLCMSGFGPTQIARKLEEKSICVPSVHIRNMGFKHPARPPKNPYAWNARSVADILSRIEYLGHTANFKTSKKSYKSNVTIDNDPEDWLIFENTHEAIIDESTWKTVQKIREGKRRPSRLGEMGILSGMMFCADCGKKLYQVRGKTIPKEREHFVCSTYRKVKGGCSSHQIRNIIVEELLLEDLQKIVAFAKNHEAEFVKLVMHKTEKNLLKEQRQNQKELDEAVNRISALDTIIGKLYEDHVFGKLTEDRFIKMSSDYEKEQEELKEKVEFLSEGLKAVKDQALNTDNFLKLVKKYTEIKKLDAEIIREFVDKIIVFKAEKINGKRQQKIRIYYNCIGAIDIPNTESKTAQPI

SEQ ID NO: 2797 - DNA, 50 bp, Clostridium sporogenes
  source 1..50: mol_type = genomic DNA
ataaatccctatggtaaagcacctttaggagctttcacatagggattgaa

SEQ ID NO: 2798 - DNA, 40 bp, Clostridium sporogenes
  source 1..40: mol_type = genomic DNA
tatataaaaaagagccctgttaagagctcatttctttttt

SEQ ID NO: 2799 - DNA, 50 bp, Clostridium sporogenes
  source 1..50: mol_type = genomic DNA
ataaatccctatggtaaagcacctataggagctttcacatagggattgaa

SEQ ID NO: 2800 - DNA, 40 bp, Clostridium sporogenes
  source 1..40: mol_type = genomic DNA
taaataaaaaagagccttcataaaagcacattgattttta

SEQ ID NO: 2801 - protein, 545 aa, Enterocloster clostridioformis
MTANTNTYKPGQITALYARLSQEDTLEGDSNSIVNQKAVLSKYAADNGFSNPVFFIDDGVSGVTFDRPNFNRMIAEIEAGNVATVIVKDMSRLGRDYLKVGYYTEIFFVERDVRYIAINDGVDSAKGDNDFTPFCNLFNDFYAKDTSKKVRAIKRAQGQAGEHLTKPPYGYMVSPTDKKQWIVDEEAAAVVKQIFDLCIGGKGPMQIAKILKEDKVLTVKAHYAEKKGKTFPDNPYNWNENSIVAILERMDYCGHTVNFKSYSKSHKLKKRIPTTKEQQAIFFNTHEAIVEDAVFERVQELRANKRRPTKADRQGMFSGLVYCADCGSKLHFATCKSFNGSQDHYRCSNYKSNTGSCTAHFIREEVLKQIIWSRIFDVTALFFDDIIAFKEMMYQQRSTETEKEMKRRKREVMQAQKRIVELDRIFKRIYEDDISGAISHDRFLKLSAEYEAEQRELEEKVKSEQQEVDTYEQNMSDFDSFSAIIRKYVGIKELTPAIVNEFIKKIIVHAPEKADGKRVQKVDIVFNFVGEINFLSATQPKRQGA

SEQ ID NO: 2802 - DNA, 50 bp, Enterocloster clostridioformis
  source 1..50: mol_type = genomic DNA
ttacttccttatcaccgcaaaccttgatgtttacagtgataaggaagtat

SEQ ID NO: 2803 - DNA, 40 bp, Enterocloster clostridioformis
  source 1..40: mol_type = genomic DNA
taaaaaacctaatttaacctgattttgttgttttttcaag

SEQ ID NO: 2804 - DNA, 50 bp, Enterocloster clostridioformis
  source 1..50: mol_type = genomic DNA
ttacttccttatcaccgcaaacctttatgtttacagtgataaggaagtat

SEQ ID NO: 2805 - DNA, 40 bp, Enterocloster clostridioformis
  source 1..40: mol_type = genomic DNA
tgaaaatccaaatttaaccttgttttttttttttttaaaa

SEQ ID NO: 2806 - protein, 555 aa, Streptococcus salivarius
MNKSTLTIKDIKTQNLNILPDRITALYCRLSAEDANEGESNSISNQKQILAQVAMRENLPNPFFFVDDGFSGSNAQRPDFQLMINLVESGKIQAVIVKDLSRLSRDYLLTGQLTEITFPSKNVRFISLNENLDSSKSNSQDAYLAPLVSLFNNWYSLQCSEKIKLSKHTKAKSGEKISWIAPYGYLKNPENPKEWIIDEYASQIVKRVFKEYLAGMSLMEIARRLRKDKILTPANYKKKLGLSNYRIIETDPYYWKNQMICQMLEKEEYTGATINLKTAKVSYKQRSCRLRPREDWLIFPNTHEAIISQEDFEMARKMLGHKRVSQRHNWKDKPGHENLFAGLVFCENGHKLSFCPQQKNDINLDHYKCYHYRRAGDTCSGLHYLRKEVLEELVLKDLQQLISAIHFDEKQLLEKLKSRFDIQEIKKQDSLRKQLSRFKKRSKELDTIIQKLYEKQLLDEISDERFRKLTDSYESEQVELNQQIVRLQEVLISQTESKENVDKFMQTIRRYTNLETLTTQLVNELIDKIIVHQPTGRGKNRQVMIELHYRFIGEL

SEQ ID NO: 2807 - DNA, 50 bp, Streptococcus salivarius
  source 1..50: mol_type = genomic DNA
ggactgctcggtgagtggtggatattataccacagctcagacagcagtcc

SEQ ID NO: 2808 - DNA, 40 bp, Streptococcus salivarius
  source 1..40: mol_type = genomic DNA
tcgtttttccataggaacattttaacataaaagcagaaaa

SEQ ID NO: 2809 - DNA, 50 bp, Streptococcus salivarius
  source 1..50: mol_type = genomic DNA
ggactgctcggtgagtggtggatatgataccacagctcagacagcagtcc

SEQ ID NO: 2810 - DNA, 40 bp, Streptococcus salivarius
  source 1..40: mol_type = genomic DNA
ttggttttccaggggaaaatgttaacactacagcagaaaa

SEQ ID NO: 2811 - protein, 555 aa, Streptococcus salivarius
MNKSTLTIKDIKTQNLNSLPDRITALYCRLSAEDANEGESNSISNQKQILAQVAMRENLPNPFFFVDDGFSGSNAQRPDFQLMINLVESGKIQAVIVKDLSRLSRDYLLTGQLTEITFPSKNVRFISLNENLDSSKSNSQDAYLAPLVSLFNNWYSLQCSEKIKLSKHTKARTGEKISWIAPYGYLKNPENPKEWIIDDYASQIVKRVFKEYLAGMSLMEIARRLRKDKILTPANYKKKLGLSNYRIIETDPYYWKNQMICQMLEKEEYTGATINLKTAKVSYKQRSCRLRPREDWLIFPNTHEAIISQEDFEMARKMLGHKRVSQRHNWKDKPGHENLFAGLVFCENGHKLSFCPQQKGDINLDHYKCYHYRRAGDTCSGLHYLRKEVLEELVLRDLQQLISAIHFDEKQLLEKLKSRFDMQETKKQDSLRKQLSRFKKRSKELDTIIQKLYEKQLLDEISDERFRKLTDSYESEQVELNQQIVKLQEVLISQTESKENVDKFIQTIRRYTNLETLTTQLVNELIDKIIVHQPTGRGKNRQVTIELHYRFIGEL

SEQ ID NO: 2812 - DNA, 50 bp, Streptococcus salivarius
  source 1..50: mol_type = genomic DNA
ggactgctcggtgagtggtggatattataacatagctcagacagcagtcc

SEQ ID NO: 2813 - DNA, 40 bp, Streptococcus salivarius; identical to SEQ ID NO: 2808
  source 1..40: mol_type = genomic DNA

SEQ ID NO: 2814 - DNA, 50 bp, Streptococcus salivarius
  source 1..50: mol_type = genomic DNA
ggactgctcggtgagtggtggatatgataacatagctcagacagcagtcc

SEQ ID NO: 2815 - DNA, 40 bp, Streptococcus salivarius; identical to SEQ ID NO: 2810
  source 1..40: mol_type = genomic DNA

SEQ ID NO: 2816 - protein, 537 aa, Dorea longicatena
MTKQQARLRVRLYARLSKDDGDADKESNSITNQLQMLRYYSKEKGFEIIDEYVDDGYSGTTFNRPDLNRMIEDAMEDTQPSGIMVKDMSRFGRNNAMFMYYVEEIFPNNDILFIALNDDVDTRYEDNEMMPFKSIMNEYYARDTSKKIRSVKKTTALSGGFCGSFAPYGYRVDPNNKRKLLIDPETAPIVKRIFEMSKQGNSVHQIARTLCEEKILIPRAYRAMKNGTLETSTGFRFPTDWVGKNVKMILENQVYLGHMVSHKTQTKSFKNRKLVAVPKEDWIVVKNTHEAIIDEETFELVQKFISVKKRPNKTGRPNMFVGLVKCPDCGRNMAFSNPNGREPRFRCRTYARNSNLCTTHAISYDALVKIVMDDIQKHIKNMETLGDQFIEEMRVLSESGGGKKIKQFKQELELAEKRIAEIDSIIMKLFEQNVAGKISDGRFEKMSVTYENEQRELEERCKALKEKIEAEDYKTKNTNQFLETIRKYENVTELNRSMLVELIDSIYVYQAEGTGKERTQKVEINYRFLCESQCGIA

SEQ ID NO: 2817 - DNA, 50 bp, Dorea longicatena
  source 1..50: mol_type = genomic DNA
gtgagtcccaatgtggtattgcatgatggaaatgtaccattgagatacca

SEQ ID NO: 2818 - DNA, 40 bp, Dorea longicatena
  source 1..40: mol_type = genomic DNA
gtgtattcatcctttcaatgatggaaatggtagaatgagc

SEQ ID NO: 2819 - DNA, 50 bp, Dorea longicatena
  source 1..50: mol_type = genomic DNA
gtgagtcccaatgtggtattgcataatggaaatgtaccattgagatacca

SEQ ID NO: 2820 - DNA, 40 bp, Dorea longicatena
  source 1..40: mol_type = genomic DNA
gtgtagtcatcctgtcaataaaggaaatagtagtttggga

SEQ ID NO: 2821 - protein, 536 aa, Mediterraneibacter faecis
MLRQTNQQPITALYPRLSHEDELQGESNSISNQKRILETYAKQNGFSNLRWYTDDGYSGANFQRPGFQAMLADIEAGKVGTVIVKDMSRLGRNYLQVGMYTEMIFPQKGVRFIAINDGVDSAQGDNDFAPLRNIFNEWLVRDTSKKIRAVKRSKGMSGKPITSKPVYGYLMDEDENFIIDEEAAPVVKQIYNLCLAGNGPTKIARMLTEQQIPTPGTLEYRRTGHTHRYHPGYECKWATNTVVHILENREYTGCLVNFKTTTQSYKCSKIIYNDEDKQAIFENHHEPIIDTQTWERVQELRKQRKRPNRYDEVGLFSGILFCADCGSVMYQQRYQTDKRKQDCYICGNYKKRTHDCTAHFIRTDLLTAGVLSNLRKVTSYAAKHEARFMKLLIEQNEDGGKRRNAAKKKELEAAEKRIAELSAIFKRLYEDSVTGRISDERFTELSADYEAEQRELKERAAAIQAELSKAQEATVNAEKFMNVVRRHTSFEELTPTLLREFVEKIVVHECSYDENKTRRQDIEIYYSFVGKVDLPE

SEQ ID NO: 2822 - DNA, 50 bp, Mediterraneibacter faecis
  source 1..50: mol_type = genomic DNA
ttacttctttatcgcacatcagtaaatgctcatgtgcggtaaagtaacac

SEQ ID NO: 2823 - DNA, 40 bp, Mediterraneibacter faecis
  source 1..40: mol_type = genomic DNA
aaatgacaatcccggtgctaagagccagggcatcaaacag

SEQ ID NO: 2824 - DNA, 50 bp, Mediterraneibacter faecis
  source 1..50: mol_type = genomic DNA
ttacttctttatcgcacatcagtatgtgctcatgtgcggtaaagtaacac

SEQ ID NO: 2825 - DNA, 40 bp, Mediterraneibacter faecis
  source 1..40: mol_type = genomic DNA
aaataatttgcccagtggttggagccagggcataaaacag

SEQ ID NO: 2826 - protein, 550 aa, Pseudoclostridium thermosuccinogenes
MNRQSTFGTIRKSKLAFEEAKITALYCRLSRDDELAGDSNSIVNQKAILKKYAEDNGFRNIEFYVDDGVSGTTFDRPDFNRMIADVESGRIGTIIIKDMSRFGRDYLKVGYYTEIMFPEADVRFIAINNGIDSANQADSDFTPFLNIINEWYAKDTSKKIRAVFKSKGQSGKPLCTNPPYGYIKDPEDKLHWIIDEKAAEVVRDIFRLCMAGFGPTQIAKQLEKRCIDTPTVHLRKMGINTPARPPENPYAWSARTVADILAKMEYLGHTVNFKTSKKSYKSKVKIMNNPEEWLVFKNTHEAIIDEGTWETVQKIRDGKRRPSRLGEMGMLSGMMFCADCGAKLYQVRGKGWTHDKEYFVCATYRKKKGMCSSHQIRNVVVEQLLIEDLRRVTSFAKDHEQEFIRIVMNSSEKELAKELRQSQKEYEQAQSRIADIDKIIRKLYEDNVMGKIPEERFYKMSAEYEAEQKALEERITKLKHTIDTANEQSLNTDRFLALVKKYTEITELDAEIIREFIDKIIVFKAEKVDGRRTQRIQIFYNCIGAIDLPK

SEQ ID NO: 2827 - DNA, 50 bp, Pseudoclostridium thermosuccinogenes
  source 1..50: mol_type = genomic DNA
ataaatccctatctgacagctcctaaagaagcgttcacttagggattgaa

SEQ ID NO: 2828 - DNA, 40 bp, Pseudoclostridium thermosuccinogenes
  source 1..40: mol_type = genomic DNA
ataaaaaaaacgagctgttaaagctcgtttttttttattg

SEQ ID NO: 2829 - DNA, 50 bp, Pseudoclostridium thermosuccinogenes
  source 1..50: mol_type = genomic DNA
ataaatccctatctgacagctcctggagaagcgttcacttagggattgaa

SEQ ID NO: 2830 - DNA, 40 bp, Pseudoclostridium thermosuccinogenes
  source 1..40: mol_type = genomic DNA
acaaaaaaaaagaaatgatggagcactttttttttttttg

SEQ ID NO: 2831 - protein, 565 aa, Streptococcus salivarius
MNRTLTISDYRQVDTSKLSDITVVYCRLSQDDGLDGDSNSITNQKKILLDVVTRENLPNPILFVDDGFSGTNFDRPAISEALRLVENRQVSNFIVKDLSRLGRSYIKVGQLTEITFPSFDVRFIALNDGIDSSKPNETNSIFLPIKSLMDEMYAADTSKKIRAVVQSKARAGERVTVNPPYGYLKAPNNPKNWIVDPVASEVVKRIFQEAKSGKSLSEISKGLENDKIFKPDRHRIEIGLKPISSSPNVEALPYFWTRETLSAILSREEYLGHTVNLRTRTKSYKDKRKVDNPKEDWLIFKNTHEAIIDQETFDIVRKMRNHKRSNQRYKNRIGHENLFAGLVFCGTCGRKHYFCPFQSKTGLNHDHYKCSGYRKPIDGCENPHYIQKSALIEIISDKLRQTIQEAHFNQEAFLKKLEQQSQAQFSKDNKHQRQQLQKDEYRSKEIDNIIQKLYEDNLLGKISDKRFVKLSQSYEEEQKQLQTSISDLTEKLAKQQEDSLNISKFMVRISKYTELPKLTVEIVNELIDKIVIQKPTGTKRNRIIQVDIYYNFIGKLNNEKSEPNN

SEQ ID NO: 2832 - DNA, 50 bp, Streptococcus salivarius
  source 1..50: mol_type = genomic DNA
aaactgctatatgttaggtcagctgaagacagcctgacactcagcactct

SEQ ID NO: 2833 - DNA, 40 bp, Streptococcus salivarius
  source 1..40: mol_type = genomic DNA
agataaaaaaagaggcatggaaacatgtctttttttctat

SEQ ID NO: 2834 - DNA, 50 bp, Streptococcus salivarius
  source 1..50: mol_type = genomic DNA
aaactgctatatgttaggtcagctccagacagcctgacactcagcactct

SEQ ID NO: 2835 - DNA, 40 bp, Streptococcus salivarius
  source 1..40: mol_type = genomic DNA
aaaaaaaaaaagagttatgccaacattttttttttttttt

SEQ ID NO: 2836 - protein, 575 aa, Faecalibacillus intestinalis
MTATQKHDIIPICTTVLSADQPPKEDIMLDQQKITILYCRLSNEDAQEGESNSIANQREYLTRYARDHGYTNLKILVDDGYTGTNFNRPGVQEGFELVKQGLVGCWLVKDLSRFGRDYLTVGQYTDIIFPSYDVRFIAINDGVDSNRGDSESFAAIRNLFNEWYPRDTSKKVRVSLRQRGTSGKHMGKPPYGYRCDPEDKDHWILDEEAAPVVKLIFDLCIDGKGPEQIARILEEKQIMTAKALYAKRKKKPMPERPYHWGNQSIAGILERQEYTGCTCNFKTYSKSYKLKKRIPNEPENMFYLPDTQEAIVSQAQFDRVQELRKNKRRPAKAERQGLFSGLLFCADCGGKLHFATSKSFEGKQDHYVCNNYKSNRGTCTAHYIREDVLREIVLERIRAVNEYIRSDVDGFQEEWLQCRRTDQERSIRDDKKKLEQAKKRLADLDVIIARLYEDYVLGNLNQDRYRKMSADYEAEQERLKLEIEVIEEWVEQREEMNDGLDAFIALTQKYVDVEELTQTIVNEYIKKIIVYAPDKSSGKRKQKVKIFFNFVDDVDIPVISEPIITQTTYEHRKTA

SEQ ID NO: 2837 - DNA, 50 bp, Faecalibacillus intestinalis; identical to SEQ ID NO: 277
  source 1..50: mol_type = genomic DNA

SEQ ID NO: 2838 - DNA, 40 bp, Faecalibacillus intestinalis
  source 1..40: mol_type = genomic DNA
ataaaaaagaaacaataccttcttttataggtattgttct

SEQ ID NO: 2839 - DNA, 50 bp, Faecalibacillus intestinalis
  source 1..50: mol_type = genomic DNA
atagttacttgtcactattaagcctgggcttaacagtgataaggaactaa

SEQ ID NO: 2840 - DNA, 40 bp, Faecalibacillus intestinalis
  source 1..40: mol_type = genomic DNA
aaaaaaaagaaagaataattgcttttataggtatctccct

SEQ ID NO: 2841 - protein, 587 aa, Clostridioides difficile; identical to SEQ ID NO: 596

SEQ ID NO: 2842 - DNA, 50 bp, Clostridioides difficile
  source 1..50: mol_type = genomic DNA
acatagtagttcaaacacatgtggagactgtagtgttgctacgtcgaaaa

SEQ ID NO: 2843 - DNA, 40 bp, Clostridioides difficile
  source 1..40: mol_type = genomic DNA
cctcattctacacatgtggaaactgtagctaagataatca

SEQ ID NO: 2844 - DNA, 50 bp, Clostridioides difficile
  source 1..50: mol_type = genomic DNA
acatagtagttcaaacacatgtggaaactgtagtgttgctacgtcgaaaa

SEQ ID NO: 2845 - DNA, 40 bp, Clostridioides difficile
  source 1..40: mol_type = genomic DNA
tctcattttacacatcaggaaactgaagttaagagaaaca

SEQ ID NO: 2846 - protein, 587 aa, Clostridioides difficile
MKEVEIIKKNDNLENRRRGKYIDRKRVAAYCRVSTDSEDQLNSYKSQVSYYTDLINNNIEWCMVDIYADEAITGTQVNKREDFQRMINDCMNNEIDMIITKSISRFARNTLDTLKYVRMLKEKNIAVYFEDEKINTLTMDGELLLVVLSSVAQQEVENISANVKKGLKMKMRRGELVGFQGCLGYDYHKEDKTLTINEKEAEIVRYIFNRYIEGAGGSIIGQELENLGYKTKYGSTTWSNSTVLGIIKNEKYIGDVLLGKTFTVDPISKRRLDNLGEEEKYYVKNNHEPIISREIFDKAHEILNRRSKNRGKYEAGVTKREKYSRKYAFSCMMECGFCGGTLTRRNWHSGSEYSKVIWQCVVATKKGKKYCPESKGIPERVIENAFVESYRLLCDEKKSVLEELLNRINDIVGSSEVNNKIKKIEKELSVIEKKINNLVDMRLDDIIEKETYEIKYQELIDNQEKLLNERNKLNVVAKNENSMKQRLKEFKKTLEENEVLDKFDRGVFESVVEKVIIGGKNKDGENDPTKITFIYKTGFKNTLSSDEFKIPRKNARGRHKRKELCLHGNNEVENLCSYSSSNTCGNC

SEQ ID NO: 2847 - DNA, 50 bp, Clostridioides difficile
  source 1..50: mol_type = genomic DNA
atatagtagttcaaacacatgtggagactgtggtgttgctacgtcgaaag

SEQ ID NO: 2848 - DNA, 40 bp, Clostridioides difficile; identical to SEQ ID NO: 2843
  source 1..40: mol_type = genomic DNA

SEQ ID NO: 2849 - DNA, 50 bp, Clostridioides difficile
  source 1..50: mol_type = genomic DNA
atatagtagttcaaacacatgtggaaactgtggtgttgctacgtcgaaag

SEQ ID NO: 2850 - DNA, 40 bp, Clostridioides difficile; identical to SEQ ID NO: 2845
  source 1..40: mol_type = genomic DNA

SEQ ID NO: 2851 - protein, 583 aa, Clostridioides difficile; identical to SEQ ID NO: 31

SEQ ID NO: 2852 - DNA, 50 bp, Clostridioides difficile
  source 1..50: mol_type = genomic DNA
cgatagtagtaacgacacatgtggagacttgtgtgttgctacaaagacga

SEQ ID NO: 2853 - DNA, 40 bp, Clostridioides difficile; identical to SEQ ID NO: 2843
  source 1..40: mol_type = genomic DNA

SEQ ID NO: 2854 - DNA, 50 bp, Clostridioides difficile
  source 1..50: mol_type = genomic DNA
cgatagtagtaacgacacatgtggaaacttgtgtgttgctacaaagacga

SEQ ID NO: 2855 - DNA, 40 bp, Clostridioides difficile; identical to SEQ ID NO: 2845
  source 1..40: mol_type = genomic DNA

SEQ ID NO: 2856 - protein, 583 aa, Clostridioides difficile; identical to SEQ ID NO: 26

SEQ ID NO: 2857 - DNA, 50 bp, Clostridioides difficile; identical to SEQ ID NO: 2852
  source 1..50: mol_type = genomic DNA

SEQ ID NO: 2858 - DNA, 40 bp, Clostridioides difficile; identical to SEQ ID NO: 2843
  source 1..40: mol_type = genomic DNA

SEQ ID NO: 2859 - DNA, 50 bp, Clostridioides difficile; identical to SEQ ID NO: 2854
  source 1..50: mol_type = genomic DNA

SEQ ID NO: 2860 - DNA, 40 bp, Clostridioides difficile; identical to SEQ ID NO: 2845
  source 1..40: mol_type = genomic DNA

SEQ ID NO: 2861 - protein, 583 aa, Clostridioides difficile; identical to SEQ ID NO: 581

SEQ ID NO: 2862 - DNA, 50 bp, Clostridioides difficile; identical to SEQ ID NO: 2852
  source 1..50: mol_type = genomic DNA

SEQ ID NO: 2863 - DNA, 40 bp, Clostridioides difficile; identical to SEQ ID NO: 2843
  source 1..40: mol_type = genomic DNA

SEQ ID NO: 2864 - DNA, 50 bp, Clostridioides difficile; identical to SEQ ID NO: 2854
  source 1..50: mol_type = genomic DNA

SEQ ID NO: 2865 - DNA, 40 bp, Clostridioides difficile; identical to SEQ ID NO: 2845
  source 1..40: mol_type = genomic DNA

SEQ ID NO: 2866 - protein, 583 aa, Clostridioides difficile; identical to SEQ ID NO: 571

SEQ ID NO: 2867 - DNA, 50 bp, Clostridioides difficile; identical to SEQ ID NO: 2852
  source 1..50: mol_type = genomic DNA

SEQ ID NO: 2868 - DNA, 40 bp, Clostridioides difficile; identical to SEQ ID NO: 2843
  source 1..40: mol_type = genomic DNA

SEQ ID NO: 2869 - DNA, 50 bp, Clostridioides difficile; identical to SEQ ID NO: 2854
  source 1..50: mol_type = genomic DNA

SEQ ID NO: 2870 - DNA, 40 bp, Clostridioides difficile; identical to SEQ ID NO: 2845
  source 1..40: mol_type = genomic DNA

SEQ ID NO: 2871 - protein, 471 aa, Streptococcus sp group B
MRKVAIYSRVSTINQAEEGYSITGQIDSLTKYCDAMGWVIYKNYSDAGYSGGKLERPAISELIEDGKNNKFDTVLVYKLDRLSRNVKDTLYLIKDIFTKNNIHFVSIKENIDTSSAMGNLFLTLLSAIAEFEREQIKERMQFGVMNRAKSGKTTAWKTPPYGYTYDKENKVLLLNEFEATNVKQIFNMIVAGHSIMSITNYAKEHFAGNTWTHVKIRRILENETYKGLVKYREQTFAGNHDAIIDEELFTKAQLALDKRTNSQNNTRPFQGKYMLSHIAKCGYCGAPLKVCTGRPRVDGTRRQTYVCVNKTESGAKRGVNNYNNNKVCNSGRYEKSCVEKYVINELSKIQHDKEYLEKMKNNSKKVDVSSLKKEIKSIDKKINRLNDLYVNDFISLSKLTEEIKKLNKLKEGYHKTIKLNYVENKNEDVISTLVNNIDISKSSYDVQSRIVKQLVDRVEVTTDNIDIIFNF

SEQ ID NO: 2872 - DNA, 50 bp, Streptococcus sp group B
  source 1..50: mol_type = genomic DNA
aaacgacaataaatattgttgtacatgaaaaacgctgttttttatcattc

SEQ ID NO: 2873 - DNA, 40 bp, Streptococcus sp group B
  source 1..40: mol_type = genomic DNA
ccaaccaatattgttgtacaagccatgctaatatctcctt

SEQ ID NO: 2874 - DNA, 50 bp, Streptococcus sp group B; identical to SEQ ID NO: 2872
  source 1..50: mol_type = genomic DNA

SEQ ID NO: 2875 - DNA, 40 bp, Streptococcus sp group B
  source 1..40: mol_type = genomic DNA
ccacctaatttttttttacatgccaatctactatctcctt

SEQ ID NO: 2876 - protein, 471 aa, Streptococcus agalactiae
MRKVAIYSRVSTINQAEEGYSITGQIDSLTKYCDAMGWVIYKNYSDAGYSGGKLERPAISELIEDGKNNKFDTVLVYKLDRLSRNVKDTLYLIKDIFTKNNIHFVSIKENIDTSSAMGNLFLTLLSAIAEFEREQIKERMQFGVMNRAKSGKTTAWKTPPYGYTYDKENKVLLLNEFEATNVKQIFNMIVAGHSIMSITNYAKEHFAGNTWTHVKIRRILENETYKGLVKYREQTFAGNHDAIIDEELFTKAQLALDKRTNSQNNTRPFQGKYMLSHIAKCGYCGAPLKVCTGRPRVDGTRRQTYVCVNKTESGAKRGVNNYNNNKVCNSGRYEKSCVEKYVINELSKIQHDKEYLEKMKNNSKKVDVSSLKKEIQSIDKKINRLNDLYVNDFISLSKLTEEIKKLNKLKEGYHKTIKLNYVENKNEDVISTLVNNIDISKSSYDVQSRIVKQLVDRVEVTTDNIDIIFNF

SEQ ID NO: 2877 - DNA, 50 bp, Streptococcus agalactiae; identical to SEQ ID NO: 2872
  source 1..50: mol_type = genomic DNA

SEQ ID NO: 2878 - DNA, 40 bp, Streptococcus agalactiae; identical to SEQ ID NO: 2873
  source 1..40: mol_type = genomic DNA

SEQ ID NO: 2879 - DNA, 50 bp, Streptococcus agalactiae; identical to SEQ ID NO: 2872
  source 1..50: mol_type = genomic DNA

SEQ ID NO: 2880 - DNA, 40 bp, Streptococcus agalactiae; identical to SEQ ID NO: 2875
  source 1..40: mol_type = genomic DNA

SEQ ID NO: 2881 - protein, 471 aa, Streptococcus agalactiae
MRKVAIYSRVSTINQAEEGYSITGQIDSLTKYCDAMGWVIYKNYSDAGYSGGKLERPAISELIEDGKNNKFDTVLVYKLDRLSRNVKDTLYLIKDIFTKNNIHFVSIKENIDTSSAMGNLFLTLLSAIAEFEREQIKERMQFGVMNRAKSGKTTAWKTPPYGYSYDKKNKVLLLNEFEATNVKQIFNMIVAGHSIMSITNYAKEHFAGNTWTHVKIRRILENETYKGLVKYREQTFAGNHDAIIDEELFTKAQLALDKRTNSQNNTRPFQGKYMLSHIAKCGYCGAPLKVCTGRPRVDGTRRQTYVCVNKTESGAKRGVNNYNNNKICNSGRYEKSCVEKYVINELSKIQHDKEYLKKMKNNSKKVDVSSLKKEIKSIDKKINRLNDLYVNDFISLPKLTEEIKKLNQLKEGYHKTIKLNYVKNKNEDAISTLVNNIDISKSSYDVQSRIVKQLVDRVEVTTDNIDIIFNF

SEQ ID NO: 2882 - DNA, 50 bp, Streptococcus agalactiae
  source 1..50: mol_type = genomic DNA
aaacgacaaccaatattgttgtacatgaaaaacgctgttttttattattc

SEQ ID NO: 2883 - DNA, 40 bp, Streptococcus agalactiae; identical to SEQ ID NO: 2873
  source 1..40: mol_type = genomic DNA

SEQ ID NO: 2884 - DNA, 50 bp, Streptococcus agalactiae; identical to SEQ ID NO: 2882
  source 1..50: mol_type = genomic DNA

SEQ ID NO: 2885 - DNA, 40 bp, Streptococcus agalactiae; identical to SEQ ID NO: 2875
  source 1..40: mol_type = genomic DNA

SEQ ID NO: 2886 - protein, 535 aa, Clostridium saudiense
MSKAAIYARKSKATEKGASVENQINKCKAHLNNLDITDVLIYKDDGFSGKDTDRPAFIQMMKDAKNKKFTTLICYKFDRVSRNVSDFSNLVDKLTELGISFISLSEQFDTSTPIGKAMMNICSVFSQLERETTCLRVTDNMYALAESGYWLGGECPTGYKNKRVFYTDSSGKQKSYSVLEPISVEVKLVKLIFEKYLFFGSLSKLEKYMLSNNIKTKRNKDFSKTSLSSILRNPAYVRADKNVFKYFKSLKINTFGNPDDLHGVLIYKKHKGKKGKTHDISEWIYSISSHEGIIAAEDWLNVQKMLDSNKSRAPALGCSNTALLSGLVTCAKCNKPMRVAYGTKIPNSNNKRFYYMCTLKHNSGKTRCDSRNVNGIDLDTIVINKIKELSTNKKILLNELLAHSKSIDSSFENSYYDSINKEIESNNVSINNLLTNIALTTDEDIVKIFLEKISALKEKNKELNAKLTELNGEIASHKKLLNNSTKLIERLKNISKYIDTATNEEKKKLISSIIERVYVNGDTGAVNIKFKQPDN

SEQ ID NO: 2887 - DNA, 50 bp, Clostridium saudiense; identical to SEQ ID NO: 2007
  source 1..50: mol_type = genomic DNA

SEQ ID NO: 2888 - DNA, 40 bp, Clostridium saudiense
  source 1..40: mol_type = genomic DNA
aatttccctcaatataacatctgctctaaaaacaaacatt

SEQ ID NO: 2889 - DNA, 50 bp, Clostridium saudiense
  source 1..50: mol_type = genomic DNA
catcgcaatttagtgataagagcaagtgctctccttaccaaattgcaatg

SEQ ID NO: 2890 - DNA, 40 bp, Clostridium saudiense
  source 1..40: mol_type = genomic DNA
aatatccctccagctaagaagtgctttaaaaagaaaaatt

SEQ ID NO: 2891 - protein, 535 aa, Clostridium saudiense
MSKAAIYARKSKATEKGASVENQINKCKAHLNNLDITDVLIYKDDGFSGKDTDRPAFIQMMKDAKNKKFTTLICYKFDRVSRNVSDFSNLVDELTELGISFISLSEQFDTSTPIGKAMMNICSVFSQLERETTCLRVTDNMYALAESGYWLGGECPTGYKSKRVFYTDSSGKQKSYSVLEPISEEVKLVKLIFEKYLFFGSLSKLEKYMLSNNIKTKRNKDFSKTSLSSILRNPAYVKADKNVFKYFKSLKINTFGNPDDLHGVLIYKKHKGKKGKTHDISEWIYSISSHEGIIAAEDWLNVQKRLDSNKSRAPALGCSNIALLSGLVTCAKCNKPMRVAYGTKIPNSNNKRFYYMCTLKHNSGKTRCDSRNVNGIDLDTIVINKIKELSTNKKILLNELLAHSKSIDSSFENSYYDSINKEIESNNVSINNLLSNIALTTDEDIVKIFLEKISALKEKNKELNAKLTELNCEIASHKKLLNNSTKLIERLKNISKYIDTATNEEKKKLISSVIERVYVNGDTGAVNIKFKQPDN

SEQ ID NO: 2892 - DNA, 50 bp, Clostridium saudiense
  source 1..50: mol_type = genomic DNA
catcgcaatatagtagcgagagcatctgctctacttaccaaattgcaatg

SEQ ID NO: 2893 - DNA, 40 bp, Clostridium saudiense; identical to SEQ ID NO: 2888
  source 1..40: mol_type = genomic DNA

SEQ ID NO: 2894 - DNA, 50 bp, Clostridium saudiense
  source 1..50: mol_type = genomic DNA
catcgcaatatagtagcgagagcaagtgctctacttaccaaattgcaatg

SEQ ID NO: 2895 - DNA, 40 bp, Clostridium saudiense; identical to SEQ ID NO: 2890
  source 1..40: mol_type = genomic DNA

SEQ ID NO: 2896 - protein, 556 aa, Streptococcus sp oral taxon 431
MTNSTLTKQIPDWTKVEFEGLSEISILYCRLSSEDANEGESNSISNQRLILSKLAERENLSNPIVFYDDGYSGSNAQRPAFQQALALVKNNQVSNFVVKDLSRVSRDYLLSGNLLEVVFPSKNIRFISLQENIDSNKKSSQDAYLTPLVSLFNNWYSMQCSQKIKLSKHTKAKNGEKIGWITPYGYLNNPENRKEWLVDEYASEIVKRIFSEYISGRTPTEIAQGLRCDKILTPARYKMNLGVANYRILESDPCYWKTQMIWQILEKEEYIGSTINLKTAKISYKQRNCRMRPREDWLIFPDSHEAIISKEDFEIARKMMGHKRVIQRQNWKNKSGHENLFAGLLYCENGHKLSFCPQEKAGVNLDHYKCYHFKRAGDTCSGGHYLRKEVLENLILNELQELINSFQINEADLLQRLKDKFEIKETKKFSELKKQLTKNEQRMLELDTIIQRLYEKQLLGEIADDRFKKLCDSYEAEQAELKEKVQTATETLGMKMKSAHNIEKFMTTIRKYTQPEKLTPKIINELIDKIIIHQPIGRGRNRQIKLEIHYRFIGDI

SEQ ID NO: 2897 - DNA, 50 bp, Streptococcus sp oral taxon 431
  source 1..50: mol_type = genomic DNA
ggactgctgagcgaagtatggtataatgtctacacctcacccagcagtcc

SEQ ID NO: 2898 - DNA, 40 bp, Streptococcus sp oral taxon 431
  source 1..40: mol_type = genomic DNA
ctctctcatttcatggtataatagaagcatgatgacaata

SEQ ID NO: 2899 - DNA, 50 bp, Streptococcus sp oral taxon 431
  source 1..50: mol_type = genomic DNA
ggactgctgagcgaagtatggtattttgtctacacctcacccagcagtcc

SEQ ID NO: 2900 - DNA, 40 bp, Streptococcus sp oral taxon 431
  source 1..40: mol_type = genomic DNA
ctctcctacttcatggtactttaaaagcatcatgaaaatt

SEQ ID NO: 2901 - protein, 548 aa, Finegoldia magna
MIQTNSNHFSFKAAIYCRLSKDDEQKGESASIQNQKELLENYVKSKGWSIYDVYIDDGYTGLNTNRPSFQRLIRDIENKEVDIVITKDLSRLGRNYLQTGYYTENFFPKNNVRYIALNDGVDTFQENNEIVPFKNVLNEFYSRDVSKKMKSAYMTRARQGKFIGCLAPIGYRKDDDDPHKLVIDDETSWIVEKIFDLAFSGYGVQAIRRRLFEEKIPTPTWWNRKKGLRNKKTKLEMTVDGGEYWWDCTTLKEIIENPVYIGHIASQKVNYKFKVGWLSDKPKEEWIIVENTHEPIISEDIYNIANEKLKSRRRPFKNGEESIFAGIVKCPDCGKSLNLGRNKSKKREKLLTCNTYRRYGKSLCSQHRIYYDTLYEIVLKDIRKNAEIALKDEKEIIKALEKSREIDNEEEQKFIMDKIYEDQIRVEDLTKKIEKLYDDWLDNKISESNFQKILEKSQNEQDYLNQRIKDNQKLIVKEDLEDINVKKWIELIKKHRDIKKLDKETLNELISKIYVHEKEVVNGEITQTIDIYYNFIGNTDTLQVFYNL

SEQ ID NO: 2902 - DNA, 50 bp, Finegoldia magna
  source 1..50: mol_type = genomic DNA
tacaatctctaattaggcataaagcaatttatggcaaaataaggacggaa

SEQ ID NO: 2903 - DNA, 40 bp, Finegoldia magna
  source 1..40: mol_type = genomic DNA
taaatctcaaggtattaagcagcttatggctggaggggga

SEQ ID NO: 2904 - DNA, 50 bp, Finegoldia magna
  source 1..50: mol_type = genomic DNA
tacaatctctaattaggcataaagaaatttatggcaaaataaggacggaa

SEQ ID NO: 2905 - DNA, 40 bp, Finegoldia magna
  source 1..40: mol_type = genomic DNA
aaaatctaaagttagtaagaagcctatggcatgagggtga

SEQ ID NO: 2906 - protein, 503 aa, Roseburia hominis; identical to SEQ ID NO: 341

SEQ ID NO: 2907 - DNA, 50 bp, Roseburia hominis; identical to SEQ ID NO: 12
  source 1..50: mol_type = genomic DNA

SEQ ID NO: 2908 - DNA, 40 bp, Roseburia hominis
  source 1..40: mol_type = genomic DNA
gtgtttcttataatattacttatcacttataaaagaaatg

SEQ ID NO: 2909 - DNA, 50 bp, Roseburia hominis; identical to SEQ ID NO: 344
  source 1..50: mol_type = genomic DNA

SEQ ID NO: 2910 - DNA, 40 bp, Roseburia hominis
  source 1..40: mol_type = genomic DNA
gttttatttataataatactaaatatttataaaagaaata

SEQ ID NO: 2911 - protein, 503 aa, Clostridioides difficile
MNNRIDAIYARQSVDKKDSISIESQIEFCKYELKGGNCKEYTDKGYSGKNTDRPKFQELVRDIKRGLIAKVVVYKLDRISRSILDFANMMELFQQYNVEFVSSTEKFDTSTPMGRAMLNICIVFAQLERETIQKRVTDAYYSRSQRGFKMGGKAPYGFHTEPIKMDGINTKKLVVNPDEAANIRLMFEMYAQPTTSYGDITRYFAEQGILFNGKELIRPTLAQMLRNPVYVQANLDVYEFFKSQGTIIVNDAADFTGMNGCYLYQGRDVKPSKKNDLKDQMLVLAPHEGIVPSDIWLTCRKKLMNNMKIQSARKATHTWLAGKIKCGNCGYALMSIFNPSGKQYLRCTKRLDNKSCPGCGKIITSELETVVYQQMIKKLASYKTLTGRKKAAKANPKIAALQVELAHVDGEIEKLVDSLTGANNVLLSYVNVKIAELDGRKQELLARIAELTVEAISPEQVSQISGYLDTWEDVSFDDKRRVVDLMITTIAATSDSLNITWKI

SEQ ID NO: 2912 - DNA, 50 bp, Clostridioides difficile; identical to SEQ ID NO: 12
  source 1..50: mol_type = genomic DNA

SEQ ID NO: 2913 - DNA, 40 bp, Clostridioides difficile
  source 1..40: mol_type = genomic DNA
ttatgctttagcataccacttactatagactttaaatttt

SEQ ID NO: 2914 - DNA, 50 bp, Clostridioides difficile; identical to SEQ ID NO: 344
  source 1..50: mol_type = genomic DNA

SEQ ID NO: 2915 - DNA, 40 bp, Clostridioides difficile
  source 1..40: mol_type = genomic DNA
ggatgctttggcataccagtagctaaatactttaaatttc

SEQ ID NO: 2916 - protein, 458 aa, Clavibacter michiganensis
MHCVIYTRISLDRTGEELAVTRQEQECRALAERQGMEVTEVYSDNDISATSGKVRPAFEAMLARQPEAIVAWHQDRLLRLTRDLERVISLNVPVYTVTAGTLDLTTPAGRAVARTVAAWSQYEGEQKATRQVAANAQRAANGVHTGRVGYGYRREGTALVMHEDEAATIRAAVRRVLDGESLRLICKELDARQVPTPGRGERWNTTTLKQLLLRPSLAGLTVHRGKVVGSAPADAPRVIDEDTHERIKAVLTDPARRSGTPGRAPKYLLGGIARCGRCGGVMARAGGRMTRQPNGNEKRQPPSYVCTECHRVRRKQADVDALVEGVMVGRLQMPDAAELFATGDADALQEARDSIAALDARMSNAADLYAAGDIDAGQLTRITERLRADRAQATTAVDAALPAAVPAELMGQAAAATWAALSMDSKRAVLTALVTITIMPSGSGKTFDPDTVRIGWRS

SEQ ID NO: 2917 - DNA, 50 bp, Clavibacter michiganensis
  source 1..50: mol_type = genomic DNA
tagtacctttttgcagttttgcggggcacgagcatggcaataaggtactt

SEQ ID NO: 2918 - DNA, 40 bp, Clavibacter michiganensis
  source 1..40: mol_type = genomic DNA
gaggatcaggaacaccagcggcaccagcatccccacctcc

SEQ ID NO: 2919 - DNA, 50 bp, Clavibacter michiganensis
  source 1..50: mol_type = genomic DNA
tagtacctttttgcagttttgcggagcacgagcatggcaataaggtactt

SEQ ID NO: 2920 - DNA, 40 bp, Clavibacter michiganensis
  source 1..40: mol_type = genomic DNA
gaggaccagcaggaccagcaggaccagcagccccagcttc

SEQ ID NO: 2921 - protein, 481 aa, Streptococcus australis
MITTNKVAIYVRVSTTNQAEEGYSIEEQKDKLSSYCNIKDWSVYKIYTDGGFSGSNTKRPALEQLIRDAKKKLFDTVLVYKLDRLSRSQKDTLYLIEDVFLENKIDFVSLLENFDTSTPFGKAVVGILSVFAQLEREQIKERMQLGKLGRAKSGKSMMWARTSYGYDYHRETGTMTINPVQSLAIKFIFEQYLSGRSITKLRDDLNDKYPKEIDWNYRAVRMILANPVYCGYNQYKGQVYPGNHEPIITEEDFNKTQEELKIRQNTAAEKFNPRPFQAKYMLSGIAQCGYCGAPLTITLGTIRKDGSRNIRYQCKNRFPRTTRGVTTYNDNKKCDSRFYEKADVEENVLNQISKLQEDTSYLDELFSDSEDNGIDRDSYQKQIEELTAKLSRLNDLYIDDRITLEELQRRSAEFTLMRATLEAELENDQALKQQERKDDMREILNREDVLSMDYEGQKVVVRALINKVQVTSEEIVIKWKI

SEQ ID NO: 2922 - DNA, 50 bp, Streptococcus australis
  source 1..50: mol_type = genomic DNA
ctaagaattttactatcctacatctcaatgaatgatactaaaattactag

SEQ ID NO: 2923 - DNA, 40 bp, Streptococcus australis
  source 1..40: mol_type = genomic DNA
aagcaaaacaactaacatttcaatcagagtaaaagctttt

SEQ ID NO: 2924 - DNA, 50 bp, Streptococcus australis
  source 1..50: mol_type = genomic DNA
ctaagaattttactatcctacatcttaatgaatgatactaaaattactag

SEQ ID NO: 2925 - DNA, 40 bp, Streptococcus australis
  source 1..40: mol_type = genomic DNA
aagaaagacaattgggattttaatcaaagtaatagctttt

SEQ ID NO: 2926 - protein, 613 aa, Klebsiella oxytoca
MRRVFVYHRVSSDQQAERGGGMERQAKLLEDYLARTKLCDDMDDPEPIVLGDPGMSAFKGHNLQHGELGTWVDQVKAGMWDGSILVLESIDRFSRLNPFEVLDYLNSIIERNVSIHDVYDKNIINRRDISAFTRVLNQADRAFKESKFKSDRISAGWRRKREQAFNNGTIVTKKRPVWIDVVDNKYVLNEKAAVVKEIFRLYQTGIGCPTIAKILQKKEGSEWKFDRAWSSEHVHKILRNKRVTGKILISEIIRDYETDDKEKQFTQNFYDMDVYPVVIDEKEFELVQELLKSRRPNAGRATTKKDGDQEIVVKHNMFSGIFRCGDCGQGMFHNVVKTKRNPKKSEARIEEYRYIRCIVERDDLCHNKAMDYTIIEKFLIGRIKNLDFSEIIKVNEVNPEVELVRLQIEQEKAHIQDYELGIERLLNAGKRVSFGMRQELDEAKERLELLESRQAAFETVSVDTDVFTNFDMEELLDITNVGLRSRYERELAKVVDRIELRRRDNLYFVSINYKSTDLIKHWLVIENGKKKGAHLRGDFRIVKDGDTVYYGTDSFVLSSVNDGMPRIHFIENEPLNMIDYAMLLNFIDYIDQSHTVAVWMRHNMNFLFMDTSD

SEQ ID NO: 2927 - DNA, 50 bp, Klebsiella oxytoca
  source 1..50: mol_type = genomic DNA
ttttgtattaatgcttcacctattcaaatggctgtggtattattacaaat

SEQ ID NO: 2928 - DNA, 40 bp, Klebsiella oxytoca
  source 1..40: mol_type = genomic DNA
ttttttcatgataatcatacaaataagtaccattgcagca

SEQ ID NO: 2929 - DNA, 50 bp, Klebsiella oxytoca
  source 1..50: mol_type = genomic DNA
ttttgtattaatgcttcacctattataatggctgtggtattattacaaat

SEQ ID NO: 2930 - DNA, 40 bp, Klebsiella oxytoca
  source 1..40: mol_type = genomic DNA
ttttatcattataatcataatcatcaataccattgtggct

SEQ ID NO: 2931 - protein, 521 aa, Pseudomonas monteilii
MNTGFPVKKQVISYIRFSTGKQSKGSSEWRQDEKVKAWLDSHPEYEPSDLSFEDLGKSGWKGAHIEGGGGMGELLAAIEAGYIRSGDVVLIEALDRAGRLPLRQMLERVINPILDAGVSLVTVDDGVTYTGESSDDVHSHLLVAKIQAANQFSKRLSGRVSESYKKRREEAAEGKVPKRRTPLWLDGDGKLIGHLEPHIKAAFELYADGFGERRILRRLQETGIPEFQGLYGSTLKRWLQNKIAIGNWGEIVNVYPRVVEPELFYRVQERIAGNKKTRPSSPSRHELTGIVKCAHCGRNYNYHIFKEQPTVLQCSNRFMSTVEKCENSKSVPLGVIQYILFRTSKQARIEAIQKKKLTVNQKRIIVLEGEIANLSQRLQHVAKAIAAVGDDEPELVEQMKLLSVQRKEMRAELASIFATGDLASVMDQAAHTLVTNADPMQLGADLQTVGYTITCDKSGSITTSHGDCKRWEYVGYERKRDAYIVKGGEVTEAVPVAPFRETTGSVDIMVVMGWKLDLTKE

SEQ ID NO: 2932 - DNA, 50 bp, Pseudomonas monteilii
  source 1..50: mol_type = genomic DNA
caatactattttgcagctttcactatgcaataagctgcaatcctgtatac

SEQ ID NO: 2933 - DNA, 40 bp, Pseudomonas monteilii
  source 1..40: mol_type = genomic DNA
caccacgaaggccatctgcatggtgaacgggatcaggctc

SEQ ID NO: 2934 - DNA, 50 bp, Pseudomonas monteilii; identical to SEQ ID NO: 2932
  source 1..50: mol_type = genomic DNA

SEQ ID NO: 2935 - DNA, 40 bp, Pseudomonas monteilii
  source 1..40: mol_type = genomic DNA
caccaccaagttcctctgcatggggaaccggatcaggacc

SEQ ID NO: 2936 - protein, 496 aa, Streptomyces sioyaensis
MSNSEQLVPVVAYARISADLARDGHGVEDQHKVNDETAARVGAKIVHYYTDNDLSAAKANVVRPDFEAMLKVLRGGRLPDGQPVRGAIVVADDRLVRRVGDYERFVDALTYEDGRVYADAKGIKDLYNEDVESMGLFGVVIAKAEVRKIKRRTRRSHRRRAELGIPVGGKRPFGWNDDKRTLRAEEAELLAQAARDVIAGKSLHSILEKWRDDGVRTVHGNEWQSRSLKLALWNPRLCGWRRHNGDLVRDVNGVPVVGQWEPLITPKEWMAIDALFSSRVGPNIRADGTIADYRTPSHLLTGILRCGKPKDDGQICNAPMRVNTRPDLSGGFVYQCPSRSMGGCGGSGRNGAKVDEYITETVLAKLEERKAAKKQVDAQWEGEEELERLTQKQRKMLRAWQEDEISDELFFPENRTMEARIKELRNERTQHALRVQRASAVTGEDVRQKWYSGELDLAQKRALIREMLHAVIVLPVGGGGRRPFNPDLLVPRWIED

SEQ ID NO: 2937 - DNA, 50 bp, Streptomyces sioyaensis
  source 1..50: mol_type = genomic DNA
ttttgctgcttgaaagatactgctggtggtatcgctaccacccaggaggt

SEQ ID NO: 2938 - DNA, 40 bp, Streptomyces sioyaensis
  source 1..40: mol_type = genomic DNA
ttcttgtcgaggtactgctggtggtagccctccgccgggt

SEQ ID NO: 2939 - DNA, 50 bp, Streptomyces sioyaensis; identical to SEQ ID NO: 2937
  source 1..50: mol_type = genomic DNA

SEQ ID NO: 2940 - DNA, 40 bp, Streptomyces sioyaensis
  source 1..40: mol_type = genomic DNA
ttcttgctcaggtactgctggtggtagtcttccgcatagt

SEQ ID NO: 2941 - protein, 481 aa, Streptomyces alkaliphilus
MTRRAAIYCRISQDRGGAGLGVARQEEDCRALAARRGWEVVAVHTDNDVSAYTGAPRPAWRELLSDVTDGHVNAVVCWHVDRLTRSPRELEDVIDLADRHGLELATVSGEIDLATPTGRMIARMLGAAARHEAEHKAERQRRQRRQAAEAGRVAGGGRRPFGYEDDRITIRQDEAALVREAAGRVLAGESLASICREWQARGVVTAAGIPWKPAGLRRMLASARISGRREHTPRATWEKTRPLLGEILSDAVWPGIIGHRESDRLRAILSDPGRRTRVEGDREHSYLLTGLLRCAKPKDDGEPCGWGMVGRPRNGVPRYVCPNTPGTAACGGTATVTARTDDHIRDMVLTALDSPTLTRRLHGTEVEDRELYEEIRADEEELEELARDMGERRISRKEWMMARTPVEERLKRNRARLARSSRTAVLSEFVGGFEEMRERWEHMNTSQRRAVLTACVRAIHVRPAAPRKRWDPDRFVIDWIA

SEQ ID NO: 2942 - DNA, 50 bp, Streptomyces alkaliphilus
  source 1..50: mol_type = genomic DNA
tggtcaccgaacttgacgcccgtgcccacgagggtgtacccatgtgaccc

SEQ ID NO: 2943 - DNA, 40 bp, Streptomyces alkaliphilus
  source 1..40: mol_type = genomic DNA
cggacaggagacgcccgtgcccccgatgccgcagtacccg

SEQ ID NO: 2944 - DNA, 50 bp, Streptomyces alkaliphilus; identical to SEQ ID NO: 2942
  source 1..50: mol_type = genomic DNA

SEQ ID NO: 2945 - DNA, 40 bp, Streptomyces alkaliphilus; identical to SEQ ID NO: 385
  source 1..40: mol_type = genomic DNA

SEQ ID NO: 2946 - protein, 449 aa, Vibrio casei
MSQPKIYIYRRVSSERQTKKSGLEIQVSDKTLSDLQEKYPDYSLVELANDAGLSAYHGKHLEATTALTEFIQACKSGKIPKGSILAVYSLDRLSRLKLGAAYEQVFIPIVENGVKIYSETEARIYQNDDTDYILATVLFSRAHNESKTKAKRNRDAIINAVKKWQDEKTFTANLTSAPFWIDNSTGKLNSLSESALFIVDSLIRGIGYKTISEQLQDKYPLPPQRNTSKAGTFWTIETIYKLRSNKALLGNKQVTIKDENGKQQDFTLDDYYQPLITWDTWQQLQKTKANKKRTYTDNIYLLSDLKSVLVCGECGYSMAATANKSSSNKRAKYFCCGASSKKSNHLLWKLDVETLERIVLLLINEGLEDGVKRITSPDYLRQVEEHNAKLEQAETTLEDIKTRWNSTQSPTMLDLMLQQEIKIKELQQKVDEHKALTDTVKNTDSLNDY

SEQ ID NO: 2947 - DNA, 50 bp, Vibrio casei
  source 1..50: mol_type = genomic DNA
caaaggtattatatgacttgtatctccgcataagtcatattaaacttttc

SEQ ID NO: 2948 - DNA, 40 bp, Vibrio casei
  source 1..40: mol_type = genomic DNA
ggaggttgtggtttttgattctccacaagttaatgctttt

SEQ ID NO: 2949 - DNA, 50 bp, Vibrio casei
  source 1..50: mol_type = genomic DNA
caaaggtattatatgacttgtatcaacgcataagtcatattaaacttttc

SEQ ID NO: 2950 - DNA, 40 bp, Vibrio casei
  source 1..40: mol_type = genomic DNA
ggatgtttgggtttttaataatcaacaagttactgatttc

SEQ ID NO: 2951 - protein, 653 aa, Photobacterium damselae
MAVIPYARVSSSKQIEGLSLKLQNDINLLKNIAKEYKTTVSNLFYIDAGVSSFKGKNAQSGELARLLTDIKEGTIKSGDIIVMRALDRLSRQNLTTSEVLYNQIISAGVMIFTTIDNHLYKADCTMSSILKTLALNTANEESAKKSHLTNRYALYRIEQFKNNDIPSNGTAYDIGIGRHPFWIHVENKVIKKHPTNFAIAREMFELSLKGDGVTKVMSYAHSKGLKISYSAVSQMFNSASIYGLLKINHQGINHELHGYYPPIATEEEFYQLRAIKDSFVKISNGNRKKISILGGINKLYCGCCGYAMGIARNGLQQTEYYGCLNRHKDKKQEKCFPLLKQQYVDKLVLNLISTHIWSIEEKDQTILLGLERQLEELKDKYQKQQLMLLEDPDLFDDDAKEILRNQKNKINSLKSDIDNEKVSIASSITDLSTFNEFKSALEFYKQHTSKIDEYIFGSDTEKKEIRSIISKLVKRVVIDHRHMITVEFIDGQKSYSLLLRSKTNKKSWDRYYIKPLIVSDLDFEQLKAANPELAVISATNETINHLDIYLEDVPNPHLILSRYTNRDLEKEFFESLTDDVYEWKRKYLLGKGASATQWQDYKDADVAKYGFTKAEIEITTKYYTKQKKTIIYKNYDLNAIKCLFGAINVCTVM

SEQ ID NO: 2952 - DNA, 50 bp, Photobacterium damselae
  source 1..50: mol_type = genomic DNA
atgcgagagcaactttcttttgcatcatcaaaaacaggttagtataataa

SEQ ID NO: 2953 - DNA, 40 bp, Photobacterium damselae
  source 1..40: mol_type = genomic DNA
taagcaactttgttttgcatcaccaaatagcatttgagta

SEQ ID NO: 2954 - DNA, 50 bp, Photobacterium damselae
  source 1..50: mol_type = genomic DNA
atgcgagagcaactttcttttgcaagatcaaaaacaggttagtataataa

SEQ ID NO: 2955 - DNA, 40 bp, Photobacterium damselae
  source 1..40: mol_type = genomic DNA
tgatcaactttgttttagaagagcaaatagaaattgatta

SEQ ID NO: 2956 - protein, 616 aa, Blautia obeum
MSNYNKITALYSRLSVGDEDRDGGESNSIQNQKIFLENYAKGQHLTNIRHYIDDDESGRFFDRSAYSRMIEDVESGKIGVCIMKDLTRWGRDYLQVGNAMEIFRRNNVRFIAVNNGIDSENPDTLEFAPFINIMSEWYAKDISKKVKTGIKTKGMSGKPIATEAPYGYIKAPDNKDFWIIDEEAAEVVRLIFRLFLDGKNRNQIAVYLTQEQIPTPTFYMKDRGRGTCKNKTLNEDNRYKWNKATLTHILTRQEYCGDVVNFKTTKHFRDKRNHYVDRSQWHITENVHEPIIDRTDFENVQRILENAPVKRPNGDGEIHPLSGLLFCKDCGAKMHIRIDYRNGGKRHVAYCSEYHKGKAKNPKCSSPHIMDADLLMQTVADVLKKIAEYSISNRAEFEALVKKSLAMQQTDKTKKQQKRIPQITTRLEQIDKVLNKLYEDNALGTIPQDRYEQMSQKYSEEYYSLKAELEQLREQLSAFENAGGRAQKFVKLIDRYADFTDLTPTILNEFISRIEVHERDKKRAKQAIQHIGIYFNHIGRFENELTQLAEPTEQEIRQMREEIEEARKEKSRAYHRNYSREYRARNLEKRREYDRIKAREYRAKKKAQAAAALSAP

SEQ ID NO: 2957 - DNA, 50 bp, Blautia obeum
  source 1..50: mol_type = genomic DNA
aaaagcacttgacaaaacgcttcatggagtgcataatcttaactgtaaac

SEQ ID NO: 2958 - DNA, 40 bp, Blautia obeum
  source 1..40: mol_type = genomic DNA
ggagtatggttctgccagatggggaacagaaaaagatata

SEQ ID NO: 2959 - DNA, 50 bp, Blautia obeum
  source 1..50: mol_type = genomic DNA
aaaagcacttgacaaaacgcttcagtgagtgcataatcttaactgtaaac

SEQ ID NO: 2960 - DNA, 40 bp, Blautia obeum; identical to SEQ ID NO: 390
  source 1..40: mol_type = genomic DNA

SEQ ID NO: 2961 - protein, 463 aa, Clostridioides difficile
MRKIKKYEEDTRGVAIYARKSRITNKGDSIGVQFKQCAEYAKRELKLDDDFAFMEYEDKGLSGYYYDRPDFQRMIHDIQNGKIRAVVCYKLDRIGRKTTDLLRLMDFLEKYGVDLLICSNGINTASGVSKIFIQIFAVVAEFERDTLTERITDNLMELAKDGRWLGGNTPIGFTTRRVTTGCGKNKSAYSYLESIEEEKRMVQRLYELFLQNRSIQTTAKEMNKEGYRTQTGVEFNASTTRLILRNPIYCIADDKSYQYFIDHDGNVFGDKEDFDGVHGLSAYNKTDQEKYEDSDSTFISPKFVQTVENKPINEWIISVGKHEGFISSDNWIMAQGILDDIAEKYNRPHRKTNALLAGLVHCPHCGRRLSVISESDRWTNGKPRFKYVCPGYRKKECNFKAVDGVLLDEFVVQQLSKLSDETREHFQKILSIKIEDVIEKSQSTQEYTMLRRKQEQIENSITK

SEQ ID NO: 2962 - DNA, 50 bp, Clostridioides difficile
  source 1..50: mol_type = genomic DNA
tgtgtgatttagataaggatagcatttgcaacggtattttcaatcacaca

SEQ ID NO: 2963 - DNA, 40 bp, Clostridioides difficile
  source 1..40: mol_type = genomic DNA
tatggtaaagtgtatagaattggctaaaaaaatatctaaa

SEQ ID NO: 2964 - DNA, 50 bp, Clostridioides difficile
  source 1..50: mol_type = genomic DNA
tgtgtgatttagataaggatagcatgtgcaacggtattttcaatcacaca

SEQ ID NO: 2965 - DNA, 40 bp, Clostridioides difficile
  source 1..40: mol_type = genomic DNA
tttgggaaagtgtttagaatgcactaaacaaaaatctaag

SEQ ID NO: 2966 - protein, 536 aa, Clostridium symbiosum
MLRQTNQQPITALYPRLSHEDELQGESNSISNQKRILETYAKQNGFSNLRWYTDDGYSGANFQRPGFQAMLADIEAGKVGTVIVKDMSRLGRNYLQVGMYTEMIFPQKGVRFIAINDGVDSAQGDNDFAPLRNIFNEWLVRDTSKKIKAVKRSKGMNGKPITSKPVYGYLMDEDENFIIDEEAAPVVKQIYNLCLAGNGPTKIARMLTEQQIPTPGTLEYRRTGSTRRYHPGYECKWATNTVVHILENREYTGCLVNFKTEKLSYKVKHSVENPPEKQVIFENHHEPIIDTQTWERVQELRKQRKRPNRYDEVGLFSGILFCADCGSVMYQQRYQTDKRKQDCYICGNYKKRTHDCTAHFIRTDLLTAGVLSNLRKVTSYAAKHEARFMKLLIEQNEDGGKRRNAAKKKELEASEKRIAELSAIFKRLYEDSVTGRISDERFTELSADYEAEQRELKERAAAIQAELSKAQEATVNAEKFMNVVRRHTSFEELTPTLLREFVEKIVVHECSYDENKTRRQDIEIYYSFVGKVDLPE

SEQ ID NO: 2967 - DNA, 50 bp, Clostridium symbiosum
  source 1..50: mol_type = genomic DNA
ttacttctttatcgcacatcagtaaatgctcatgtacggtaaggaagcaa

SEQ ID NO: 2968 - DNA, 40 bp, Clostridium symbiosum
  source 1..40: mol_type = genomic DNA
ggaggacattaccagagtcaaggcgcttggtttcctgcat

SEQ ID NO: 2969 - DNA, 50 bp, Clostridium symbiosum
  source 1..50: mol_type = genomic DNA
ttacttctttatcgcacatcagtacttgctcatgtacggtaaggaagcaa

SEQ ID NO: 2970 - DNA, 40 bp, Clostridium symbiosum
  source 1..40: mol_type = genomic DNA
ggaaaacatggccatagtcctggggttttgtttcctgcat

SEQ ID NO: 2971 - protein, 587 aa, Anaerococcus tetradius
MKKDVKVIKGDTTLKRTASGCVERSIKRVAAYCRVSTDSEDQINSYNSQVEHYTEFIQKNNEWTLAGIYADEAITGTQVDRRIDFQRLINDCMNGDIDMIITKSISRFARNTLDTLKYVRKLKEFNVAVFFEEENINTLTMDGELLLTILSSVAQQEVENISANVKKGLRMKMERGEMVGFQGCLGYDYDPETKSISINEKEAEIVRYIFRRYIEGVGGMVISRELEEQGYLSPRGNKRWTETTVLGIIKNEKYKGDLMMGKTYTVDPISKRRLDNFGEQDKFYIENHHEPIISEEDFEKAQGIRLRRSKNRNTVANNGGKREKYSRKYAFSSMLECGFCGHNLSRRNWHSSSEYTKVIWQCVNATKNGKKYCPHSKGIEEEAIEKAFMESYRQVCHNNVEITNEFLKTVEEELKDNSLAKDLKKITNQLDKVLKKEKDLVELRLNESISMDVYQDKYNEIAISKEKLLAEKRTLEVTLTDEKALKKRLEGFKKLLESNKYLEEFDRAVFESIVDKIIIGGTNDEGEIDPAMITIIYKTGKKDSQDGRLFKSRRKNAKEVDEKTDNKLYPQSSDEVNNLCSYPMDNT

SEQ ID NO: 2972 - DNA, 50 bp, Anaerococcus tetradius; identical to SEQ ID NO: 1787
  source 1..50: mol_type = genomic DNA

SEQ ID NO: 2973 - DNA, 40 bp, Anaerococcus tetradius
  source 1..40: mol_type = genomic DNA
caatttccaagatctagacatttagaatctatagctcttt

SEQ ID NO: 2974 - DNA, 50 bp, Anaerococcus tetradius
  source 1..50: mol_type = genomic DNA
gtgttcctatcctatggacaacaccagtggagtgcatagcgttgatacaa

SEQ ID NO: 2975 - DNA, 40 bp, Anaerococcus tetradius
  source 1..40: mol_type = genomic DNA
caatctccaatatgtagtccattagaatccctagattttt

SEQ ID NO: 2976 - protein, 537 aa, Longicatena caecimuris
MKQQIYNTALYLRLSRDDELQGESSSITTQRSMLRLYAKEHYLNVIDEYIDDGWSGTNFERPSFQRMIEDIEAGKINCVVTKDLSRLGRNYIMTGQYTELYFPSHNVRYIAIDDGVDSEKGESEIAPFKNIINEWVARDTSRKVKSAFKTKFAEGAYYGAYAPLGYKKHPDIKGKLLVDEETKWIIEKIFSLAYQGYGSAKITKQLRAEEVPTPAWLNFTRYGTFAHIFEGKPESKRYEWTIAHVKAILKNEVYIGNSVHNKQSTVSFKSKKKVRKPESEWFRVEDTHEPIIEKDVFYRVQEQIKSRRRQTKEKATPIFAGLVKCADCGWSMRFATNKANKTPYSYYSCTFYAQFGKGYCFMHYIRYDVLYQAVLERLQYWAKAVQQDEEKVLNKIQKAGNAERIREKKKKASALKKAENRQNEIDRLFAKMYEDRACEKITERNFVMLSGKYQKEQIELEQQITNLREELSKMEQDMIGAEKWIELIKEYSVPKELTAPLLNAMIEKILIHEATTNEDNERIQEIEIYYRFIGKVD

SEQ ID NO: 2977 - DNA, 50 bp, Longicatena caecimuris
  source 1..50: mol_type = genomic DNA
ttatatctttaactaagggaaagcggagtttcccaaacaaaaggatatta

SEQ ID NO: 2978 - DNA, 40 bp, Longicatena caecimuris
  source 1..40: mol_type = genomic DNA
aatttcaaaatgggaaagagggttatctgtacctgatgca

SEQ ID NO: 2979 - DNA, 50 bp, Longicatena caecimuris
  source 1..50: mol_type = genomic DNA
ttatatctttaactaagggaaagcaaagtttcccaaacaaaaggatatta

SEQ ID NO: 2980 - DNA, 40 bp, Longicatena caecimuris
  source 1..40: mol_type = genomic DNA
aattgcaaaaagaggaagaaaattatttgtaccttatgta

SEQ ID NO: 2981 - protein, 480 aa, Streptococcus agalactiae
MTTNKVAIYVRVSTTNQAEEGYSIDEQKDKLSSYCHIKDWSIYNIYTDGGFSGSNTERPALEQLVKDAKNKKFDTVLVYKLDRLSRSQKDTLYLIEDIFLENKIDFVSLLENFDTSTPFGKAMVGILSVFAQLEREQIKERMQLGKLGRAKSGKSMMWAKTSYGYDYHKETGEMTINELEAIVIREIFQSYLGGRSITKLRDDINQRYPKTPAWSYRIIRQILDNPVYCGYNQYKGKIYKGNHEPIISEEVYNKTQEELKIRQRTAAEKFNPRPFQAKYMLSGIAQCGYCQAPLTIIMGMVRKDGTRFIKYECKQRHPRKTTGVTVYNNNEKCHSGAYQKEEVEEYVLKEISKLQNDTSYLDEIFSTPETESIDRDSYQKQIDELTKKLSRLNDLYIDDRITLEELQKKSAEFTTIRAFLEAELENDPSLKQQEKKEDMRKILGAEDIFLMDYEGQKTMVKGLINKVQVTAEDISIKWKI

SEQ ID NO: 2982 - DNA, 50 bp, Streptococcus agalactiae
  source 1..50: mol_type = genomic DNA
taaagaattttactatcctacatttcaattaaagatactaaatctcttga

SEQ ID NO: 2983 - DNA, 40 bp, Streptococcus agalactiae
  source 1..40: mol_type = genomic DNA
gatcaaaacaactaacatttctaaaagtgtaaatgcttta

SEQ ID NO: 2984 - DNA, 50 bp, Streptococcus agalactiae; identical to SEQ ID NO: 2982
  source 1..50: mol_type = genomic DNA

SEQ ID NO: 2985 - DNA, 40 bp, Streptococcus agalactiae
  source 1..40: mol_type = genomic DNA
catcaaaacacctaacacttctcaatgtgtacatacttaa

SEQ ID NO: 2986 - protein, 481 aa, Streptococcus agalactiae
MITTNKVAIYVRVSTTNQAEEGYSIEEQKDKLKSYCNIKDWNVFNVYTDGGFSGSNTERPALEQLIKDAKKKKFDTVLVYKLDRLSRSQKDTLYLIEDIFLENNIDFVSLLENFDTSTPFGKAMVGILSVFAQLEREQIKERMQLGKLGRAKAGKSMMWAKVAYGYTYHKGSGEMTINELEAIVVREIFNSYLEGMSITKLRDKINDTYPKTPAWSYRIIRQILDNPVYCGYNQYKGEVYKGNHEPIISEEDFNKTQDELKIRQRTAAEKFNPRPFQAKYMLSGIAQCGYCKAPLKIIMGAVRKDGTRFIKYECYQRHPRTTRGVTTYNNNQKCHSSSYYKQDVEDYVLREISKLQNDKKAIDELFENTNMDTIDRESIKKQIEAISSKIKRLNDLYIDDRITIDELRKKSTEFTLSKTFLKEKLENDPILKQQESKDNIKKILSCDDILTMDYDQQKIIVKGLINKVQVTADKVIIKWKI

SEQ ID NO: 2987 - DNA, 50 bp, Streptococcus agalactiae; identical to SEQ ID NO: 1812
  source 1..50: mol_type = genomic DNA

SEQ ID NO: 2988 - DNA, 40 bp, Streptococcus agalactiae; identical to SEQ ID NO: 2983
  source 1..40: mol_type = genomic DNA

SEQ ID NO: 2989 - DNA, 50 bp, Streptococcus agalactiae; identical to SEQ ID NO: 1812
  source 1..50: mol_type = genomic DNA

SEQ ID NO: 2990 - DNA, 40 bp, Streptococcus agalactiae; identical to SEQ ID NO: 2985
  source 1..40: mol_type = genomic DNA

SEQ ID NO: 2991 - protein, 481 aa, Streptococcus agalactiae; identical to SEQ ID NO: 391

SEQ ID NO: 2992 - DNA, 50 bp, Streptococcus agalactiae; identical to SEQ ID NO: 1812
  source 1..50: mol_type = genomic DNA

SEQ ID NO: 2993 - DNA, 40 bp, Streptococcus agalactiae; identical to SEQ ID NO: 2983
  source 1..40: mol_type = genomic DNA

SEQ ID NO: 2994 - DNA, 50 bp, Streptococcus agalactiae; identical to SEQ ID NO: 1812
  source 1..50: mol_type = genomic DNA

SEQ ID NO: 2995 - DNA, 40 bp, Streptococcus agalactiae; identical to SEQ ID NO: 2985
  source 1..40: mol_type = genomic DNA

SEQ ID NO: 2996 - protein, 481 aa, Streptococcus agalactiae; identical to SEQ ID NO: 2986

SEQ ID NO: 2997 - DNA, 50 bp, Streptococcus agalactiae
  source 1..50: mol_type = genomic DNA
taaagaaatttactatccttggtttcaatcaaggttactaaaattattga

SEQ ID NO: 2998 - DNA, 40 bp, Streptococcus agalactiae; identical to SEQ ID NO: 2983
  source 1..40: mol_type = genomic DNA

SEQ ID NO: 2999 - DNA, 50 bp, Streptococcus agalactiae; identical to SEQ ID NO: 2997
  source 1..50: mol_type = genomic DNA

SEQ ID NO: 3000 - DNA, 40 bp, Streptococcus agalactiae; identical to SEQ ID NO: 2985
  source 1..40: mol_type = genomic DNA

SEQ ID NO: 3001 - protein, 484 aa, Streptococcus agalactiae
MNKVAIYVRVSTTMQAEEGYSIDEQIDKLKSYCKIKDWTVYDIYKDGGFSGGNIERPAMERLISDAKRKKFDTVLVYKLDRLSRSQKDTLFLIEEVFDKNDISFLSLNESFDTSTAFGKAMIGILSVFAQLEREQIKERMLLGKIGRAKTGKSMMFSKVSFGYTYDKLKDELVVNQAESIIVRKIFDAYLGGLSLNKLRDYLNNNGIYRGDKPWNYQGLRRILSNPVYIGMIRYREEIYPGNHKAIIDIDDYNKTQEEIKKRQIKALEFSNNPRPFRSKYMLSGIAKCGYCGTPLQIILGSKRKDGTRNMRYQCINRFPRNTKGVTIYNDGKKCESGFYEKADIEEFVINEIRSLQINYNKLDAMFDRHPTVNSDDIKKQIITLDNKLKRLNDLYINNMIELDDLKKQTQSLRKQKTILEDELLNNPAITQEKNKKHFKEMLATKDITKLDYETQKNIVNNLINKVFVKSGYIKIEWKIPFKKA

SEQ ID NO: 3002 - DNA, 50 bp, Streptococcus agalactiae
  source 1..50: mol_type = genomic DNA
gcgtgagttttagataccaaacattctaaaagcgtatctaaaactctcat

SEQ ID NO: 3003 - DNA, 40 bp, Streptococcus agalactiae; identical to SEQ ID NO: 2983
  source 1..40: mol_type = genomic DNA

SEQ ID NO: 3004 - DNA, 50 bp, Streptococcus agalactiae; identical to SEQ ID NO: 3002
  source 1..50: mol_type = genomic DNA

SEQ ID NO: 3005 - DNA, 40 bp, Streptococcus agalactiae; identical to SEQ ID NO: 2985
  source 1..40: mol_type = genomic DNA

SEQ ID NO: 3006 - protein, 478 aa, Streptococcus agalactiae
MNKVAIYVRVSTTNQADEGYSIDEQIDKLKAYCKIKDWTVYKVFTDAGFTGSNIDRPAMTNLISAAKKRQFDTILVYKLDRLSRSQKDTLYLIEEIFIKNGIDFLSLSENFDTSSAFGKAMIGILSVFAQLEREQIKERMMLGKVGRAKSGKTMMWAHPAYGYTYNKETSSLDIVPAEAALIKKIYELYIKGKSISKLRDYLNDNKIFVNKSVPWSHRTISYALTNPVYCGMIRYEGKLYDGLHEPIITKELFNKTQEVLAERRMEASKKNPRPFQSKYMLSGIIRCGCCNAPMKSLLGMPRKDGTRTRRYQCVNRFPRKTKPTTVYNDNKKCDSGYYYMQDLENIVLNKISLMQMDKANIDEIFDEKSDFDIEKAKISIAKIENKINKLNDLYINDLISLDLLKKQSNNLLKEKKIIENEMDEEKVKQSSSLKDDAIKILNTKDIFSMSYEDQSYIVKSLINKVFATDKEVKILFKK

SEQ ID NO: 3007 - DNA, 50 bp, Streptococcus agalactiae
  source 1..50: mol_type = genomic DNA
tagagtgtttaacttacacttatctcaataaatgtacataaaacacttat

SEQ ID NO: 3008 - DNA, 40 bp, Streptococcus agalactiae; identical to SEQ ID NO: 2983
  source 1..40: mol_type = genomic DNA

SEQ ID NO: 3009 - DNA, 50 bp, Streptococcus agalactiae; identical to SEQ ID NO: 3007
  source 1..50: mol_type = genomic DNA

SEQ ID NO: 3010 - DNA, 40 bp, Streptococcus agalactiae; identical to SEQ ID NO: 2985
  source 1..40: mol_type = genomic DNA

SEQ ID NO: 3011 - protein, 481 aa, Streptococcus agalactiae
MITTNKVAIYVRVSTTNQAEEGYSIEEQKDKLKSYCNIKDWNVFNVYTDGGFSGSNTERPALEQLIKDAKKKKFDTVLVYKLDRLSRSQKDTLYLIEDIFLENNIDFVSLLENFDTSTPFGKAMVEILSVFAQLEREQIKERMQLGKLGRAKAGKSMMWAKVAYGYTYHKGSGEMTINELEAIVVREIFNSYLEGMSITKLRDKINDTYPKTPAWSYRIIRQILDNPVYCGYNQYKGEVYKGNHEPIISEEDFNKTQDELKIRQRTAAEKFNPRPFQAKYMLSGIAQCGYCKAPLKIIMGAVRKDGTRFIKYECYQRHPRTTRGVTTYNNNQKCHSSSYYKQDVEDYVLREISKLQNDKKAIDELFENTNMDTIDRESIKKQIEAISSKIKRLNDLYIDDRITIDELRKKSTEFTLSKTFLKEKLENDPILKQQESKDNIKKILSCDDILTMDYDQQKIIVKGLINKVQVTADKVIIKWKI

SEQ ID NO: 3012 - DNA, 50 bp, Streptococcus agalactiae; identical to SEQ ID NO: 2997
  source 1..50: mol_type = genomic DNA

SEQ ID NO: 3013 - DNA, 40 bp, Streptococcus agalactiae; identical to SEQ ID NO: 2983
  source 1..40: mol_type = genomic DNA

SEQ ID NO: 3014 - DNA, 50 bp, Streptococcus agalactiae; identical to SEQ ID NO: 2997
  source 1..50: mol_type = genomic DNA

SEQ ID NO: 3015 - DNA, 40 bp, Streptococcus agalactiae; identical to SEQ ID NO: 2985
  source 1..40: mol_type = genomic DNA

SEQ ID NO: 3016 - protein, 472 aa, Streptococcus agalactiae
MRVSTKGQVEEGYSIEEQIAMLTSYCSIHKWTVFDTYVDAGISGATIERPELSRLSRDAQKKKFNTMIVYDLKRLGRSQRNNIAFIEDILEKNGIGFISLTENFDTSTPLGKAMVGILSAFGQLDRDTIRERMMMGKIGRAKSGKPMMTSTIAFGYTYDKLSSSLNVNQAEAIIVKIIYDEYLAGKSLTKLRDYLNENDLLRKGKPWNYQGVSRVLRNPVYIGMVRFRGEVYQGNHEAIIDAETFEAAQKELKRRQLETYEFNKNPRPFRAKYMLSGIIKCGFCGCPMEITLGTKRKDGTRNIRYQCVNRFPRTTKGITVYNNGQKCNSGFYEKADIEIYVLGQVRLLQLNKAKLDKMFESPEIINVEEIENQINSLNNKMKRLNDLYLNDMISLDDLKTKTYTFLKQKELLENELDNNPAIQQEENRKRFQKLLGTNDITQLSYEEQAFAIKNLINKVFVKPGIIDINWKI

SEQ ID NO: 3017 - DNA, 50 bp, Streptococcus agalactiae
  source 1..50: mol_type = genomic DNA
acaacagatttagatactctaatctcaaatagcgtatctaaaactcttat

SEQ ID NO: 3018 - DNA, 40 bp, Streptococcus agalactiae; identical to SEQ ID NO: 2983
  source 1..40: mol_type = genomic DNA

SEQ ID NO: 3019 - DNA, 50 bp, Streptococcus agalactiae; identical to SEQ ID NO: 3017
  source 1..50: mol_type = genomic DNA

SEQ ID NO: 3020 - DNA, 40 bp, Streptococcus agalactiae; identical to SEQ ID NO: 2985
  source 1..40: mol_type = genomic DNA

SEQ ID NO: 3021 - protein, 550 aa, Aneurinibacillus aneurinilyticus
MNRQSTFSTILKSTIAFEEAKITALYCRLSRDDELAGDSNSIVNQKAILKKYAEDNGFRNIEFYVDDGVSGTTFDRPDFNRMIADVESDRIGTIIIKDMSRFGRDYLKVGYYTEIMFPEADVRFIAINNGIDSANQADSDFTPFLNIINEWYAKDTSKKIRAVFKSKGQSGKPLCTNPPYGYIKDPEDKLHWIIDEKAAEVVRDIFRLCMAGFGPTQIAKQLEKRCIDTPTVHLRKMGINTPARPPENPYAWSARTVADILAKMEYLGHTVNFKTSKKSYKSKVKILNNPEDWLVFKNTHEAIIDKGTWETVQKIRDGKRRPSRLGEMGMLSGMMFCADCGAKLYQVRGKGWTHDKEYFVCATYRKKKGMCSSHQIRNVVVEQLLLEDLRRVTSFAKDHEQEFIRIVMNNSEKELAKELRQSQKEYEQAQTRIADIDKIIRKLYEDNVMGKIPEERFYKMSAEYEAEQKVLEERITKLKHTIDTANEQSLNTDRFLALVKKYTEITELDAEIIREFIDKIIVFKAEKVDGHRTQRIQIFYNCIGAIDLPK

SEQ ID NO: 3022 - DNA, 50 bp, Aneurinibacillus aneurinilyticus
  source 1..50: mol_type = genomic DNA
ataaatccctatctgaccgctcctaaagaagcgttcacttagggattgaa

SEQ ID NO: 3023 - DNA, 40 bp, Aneurinibacillus aneurinilyticus
  source 1..40: mol_type = genomic DNA
ctacaaaaaatgagcgccaaacggtgctcattttttaaaa

SEQ ID NO: 3024 - DNA, 50 bp, Aneurinibacillus aneurinilyticus
  source 1..50: mol_type = genomic DNA
ataaatccctatctgaccgctccttaagaagcgttcacttagggattgaa

SEQ ID NO: 3025 - DNA, 40 bp, Aneurinibacillus aneurinilyticus
  source 1..40: mol_type = genomic DNA
ctacataaactgagagacataccatgctcatagtttaaaa

SEQ ID NO: 3026 - protein, 510 aa, Elizabethkingia miricola
MKKADLYIRVSTDEQADKGYSQRDQEERLKRYCATNKIAVGQVIYEDHSAKTFNRPEWTRLLNSLKKRSSKTDLVLFTKWDRFSRNAGDAYQMISTLNKLGIEPQAVEQPLDLSIPENKMMLAIYLSAPEVENDRRALNTFYGMRRARKEGRLMGRAPFGYINRSKEDGRKYITPKEPEATAMRWAFNEIAKGVFACDQVRQKMNKLHKTTISRSAFHVAVRNPLYYGKIFIAKFQDEEAHLVQGQHEPLISEDLFNKVQLVLDGNKREERPNTKILSDVNLPLRGFLVCPDCGRNLTGSASKGRTNRYYYYHCVSSCGFRQKAELANDIFEKGMRQFALNGTSQIVKKLLLDNYKKFVKNPFDEKKQIAQEIDKLNARLSVARNKLLSEIIDDEEYLEIKDECKTRIESLEEQLSKDGSDTKKINIEKSLDRALKYIENIPKMYSEGEINTRRGIIGSIFPEKLEFDGKMYRTIRMNVIANYIFQINNGLPHNKNRINENKFHLSCLVA

SEQ ID NO: 3027 - DNA, 50 bp, Elizabethkingia miricola
  source 1..50: mol_type = genomic DNA
taaatttcatttgtcctgtttagtagccgaaagcgaacaaatctcgaaac

SEQ ID NO: 3028 - DNA, 40 bp, Elizabethkingia miricola
  source 1..40: mol_type = genomic DNA
ctttttttgcttattttgtagccccgagcagaatcgaact

SEQ ID NO: 3029 - DNA, 50 bp, Elizabethkingia miricola
  source 1..50: mol_type = genomic DNA
taaatttcatttgtcctgtttagtttccgaaagcgaacaaatctcgaaac

SEQ ID NO: 3030 - DNA, 40 bp, Elizabethkingia miricola
  source 1..40: mol_type = genomic DNA
cttttttatcttattatgtttccccaaccagaatgtaaat

SEQ ID NO: 3031 - protein, 548 aa, Streptococcus pseudoporcinus
MIQANSNHFSYRTAIYCRLSKDDEQKGESASIQNQRDMLEHYVKAKGWNIVDVYVDDGYTGLNTNRPSFQRLIKDVENKKIDIVITKDLSRLGRNYLQTGYYTENFFPKNGVRYIAVNDGVDTLQDNNEIVPFKNVLNEFYSRDVSKKMKSAYLTRARQGKFTGCLAPFGYMKNPDDTHTLMIDEETSWIVEKIYDLAISGYGVQAIRRMLFDEKIPTPTWWNRKKGLRNKTTKLEQTVKGGEYWWDCTTIKEIIENPVYLGHTASQKANYQFKIGWLSDKPKNDWIVVENTHEAIISEDTYNMANEKLQSRKRPFKTGEESIFAGLVKCPDCGKALNLGRNKSKKKEKILTCNTYRRYGKNLCSQHRIYFDTLYEIVLADIRKNADFALNDEKAVVKALEKSRDSEAEEEQIYIAKKIEEDSKRVVELSNKIEKLYDDWMDKRISESNFQRILEKAQAEQDLLIKRIEEMERKVVTSKVDEVNVYKWIELIKKHKNIKKLDKETLNELISKIYVHEKEVVGGEITQIIEIHYNFIGNTDNLQVSYNL

SEQ ID NO: 3032 - DNA, 50 bp, Streptococcus pseudoporcinus
  source 1..50: mol_type = genomic DNA
tacaatctctaattgggaataaagcaatttatggcaaagtaaagacggaa

SEQ ID NO: 3033 - DNA, 40 bp, Streptococcus pseudoporcinus
  source 1..40: mol_type = genomic DNA
aaaatctcaaggtattaagcagctgatggctggtggagga

SEQ ID NO: 3034 - DNA, 50 bp, Streptococcus pseudoporcinus
  source 1..50: mol_type = genomic DNA
tacaatctctaattgggaataaagttatttatggcaaagtaaagacggaa

SEQ ID NO: 3035 - DNA, 40 bp, Streptococcus pseudoporcinus
  source 1..40: mol_type = genomic DNA
aaaatcaaaatgtaataagttgcagatggctgatagagta

SEQ ID NO: 3036 - protein, 503 aa, Eisenbergiella tayi
MNNRIDAIYARQSVDKKDSISIESQIEFCKYELKGGNCKEYTDKGYSGKNTDRPKFQELVRDIKRGLIAKVVVYKLDRISRSILDFANMMELFQQYNVEFVSSTEKFDTSTPMGRAMLNICIVFAQLERETIQKRVTDAYYSRSQRGFKMGGKAPYGFHTEPIKMDGINTKKLVVNPDEAANIRLMFEMYAQPTTSYGDITRYFAEQGILFHGKELIRPTLAQMLRNPVYVQADLDVYEFFKSQGTVIVNDAADFTGMNGCYLYQGRDVKPSKKNDLKGQMLVLAPHEGIVPSEIWLTCRKKLMNNMKIQSARKATHTWLAGKIKCGNCGYALMSINNPVGKQYLRCTKRLDNKSCAGCGKIITSELEAVVYQQMVKKLASYKTLTGRKKAAKANPKIAALQVELAHVDGEIEKLVDSLTGANNVLLSYVNVKIAELDGRKQELLARIAELTVEAISPEQVSQISGYLDTWENVSFDDKRRVVDLMITTIAATSDSLNITWKI

SEQ ID NO: 3037 - DNA, 50 bp, Eisenbergiella tayi
  source 1..50: mol_type = genomic DNA
gtgtagtcccttgtaaactgtattttaggtcagtttacaaggaactacac

SEQ ID NO: 3038 - DNA, 40 bp, Eisenbergiella tayi
  source 1..40: mol_type = genomic DNA
aaaaggtttttacaacagattattccaatatagagcaaag

SEQ ID NO: 3039 - DNA, 50 bp, Eisenbergiella tayi
  source 1..50: mol_type = genomic DNA
gtgtagtcccttgtaaactgtattccaggtcagtttacaaggaactacac

SEQ ID NO: 3040 - DNA, 40 bp, Eisenbergiella tayi
  source 1..40: mol_type = genomic DNA
acaatgtttttataacacaccatttcataatagagcaaac

SEQ ID NO: 3041 - protein, 607 aa, Bacillus subtilis
MRAALYYRVSTKMQEHKYSLKAQKEELRKYAKSQEWTIAREYTDVDSGGKLDKTGLNALLDFVEEGGCDVVLCIDQDRLSRLDTVSWEFLKSSLRENHVMIAEPGSITDLDNEDDEFISDIKNLIARREKRSIVRRMMRGKRQRTREGKGWGKPPIEYNYDKNTGTYSLNEKWSWVIPFIDDLYINKGYSFKKIAQELNKITTTPRGKKWSDTVVAAKLKNKAYHGVMKKTFANGETIEVENTYPKLRTEEMYEQIQEIREMKYQQKTRENEVPQLLRRTHMTCGLCGRKLTIHMSGTKEYGIHFYITHGRPERQRDDFKCDLSINMIRVEKNIVSAIKNIIKSEELARDHIKMDFDESDAARLKNELKAAKKALSEAHEKVDRLLPLYLDGKFPKEQLDKQHSFLMNEINTHEKRVKKLKAQLTIVESQQFNYDLILEYFKVAERFDTWLTQHEQMDMIGKLFPQATVYEDYISMAGELPNGAPLEINVKVDPNPYEGRYVNKKENRDPWGKYQKIQQMIKENPGMPQSKIAEELNIAPSTIVRLKNKYGEFEDQVKAIEHDPEGKKKIIEEYVKNNPEASLRQTARDTGISTTTITRIMEKYGIK

SEQ ID NO: 3042 - DNA, 50 bp, Bacillus subtilis
  source 1..50: mol_type = genomic DNA
agtgggttagtacttaagtttattttaattaaactatgtactgacccact

SEQ ID NO: 3043 - DNA, 40 bp, Bacillus subtilis
  source 1..40: mol_type = genomic DNA
aaaagtggtcatttttatttttttaaaaatggtcggcagg

SEQ ID NO: 3044 - DNA, 50 bp, Bacillus subtilis
  source 1..50: mol_type = genomic DNA
agtgggttagtacttaagtttattaaaattaaactatgtactgacccact

SEQ ID NO: 3045 - DNA, 40 bp, Bacillus subtilis
  source 1..40: mol_type = genomic DNA
aaatgtcatcatttttaaaaatttaaaaatggtggtaagg

SEQ ID NO: 3046 - protein, 521 aa, Streptococcus dysgalactiae
MKKVITIEPAKQVTHKVDLPSFTKRRVAGYARVSTDHEDQTTSYEAQMTYYTDYINSRSDWEFVKMYSDEGISGTNTKKRLGFQEMVEDALDGKVDLILTKSVSRFARNTVDSLSTVRKLKEAGVEIYFEKENIWTFDSKGELLITIMSSLAQEESRSISENVTWGRRRQLAEGQVTFSYSQVLGFKKSDTGGFEIDQEEAKIVRYIFHQVLLGNNPNKIARELTAQGIPTPQGKRKWSYGTVKRMLRNEKYKGDALLQKSFTTDFLTKSTKPNEGELPQYYVENNHEAIIKREVFDLVQVELDKLEKKRQTNNIFTGRLFCGDCGSAFGSKVWHSTSKYKRTIYQCNAKYKGEHKCQTPHVTEEEIKGWFLSAMNQLLSNREEIVANTELLIDLAKDTSPLENKIDDLEQQLETIRQDIEDLVDRNARKAQNQDLYQEQYDTLVTAYQERQKELQEATSSLEEQKSKQLSLDGFIQQLKQQEDLITDFNQELWQTSVERLDIKEGKKISLTFKNGVRIDL

SEQ ID NO: 3047 - DNA, 50 bp, Streptococcus dysgalactiae
  source 1..50: mol_type = genomic DNA
tgtatgattaaattgatagcgacagaaatcggagtaaggaaattgataca

SEQ ID NO: 3048 - DNA, 40 bp, Streptococcus dysgalactiae
  source 1..40: mol_type = genomic DNA
catcaatgtttttgcaacagatatggatggcgctttttta

SEQ ID NO: 3049 - DNA, 50 bp, Streptococcus dysgalactiae
  source 1..50: mol_type = genomic DNA
tgtatgattaaattgatagcgacagtaatcggagtaaggaaattgataca

SEQ ID NO: 3050 - DNA, 40 bp, Streptococcus dysgalactiae
  source 1..40: mol_type = genomic DNA
caccaatgtttttgcagcagttctttatggagattttttt

SEQ ID NO: 3051 - protein, 503 aa, Faecalibacterium prausnitzii; identical to SEQ ID NO: 341

SEQ ID NO: 3052 - DNA, 50 bp, Faecalibacterium prausnitzii; identical to SEQ ID NO: 12
  source 1..50: mol_type = genomic DNA

SEQ ID NO: 3053 - DNA, 40 bp, Faecalibacterium prausnitzii
  source 1..40: mol_type = genomic DNA
gaattattttatatgacagttgtttttgtgtatatagaaa

SEQ ID NO: 3054 - DNA, 50 bp, Faecalibacterium prausnitzii; identical to SEQ ID NO: 14
  source 1..50: mol_type = genomic DNA

SEQ ID NO: 3055 - DNA, 40 bp, Faecalibacterium prausnitzii
  source 1..40: mol_type = genomic DNA
gtatttatttatatttcagaattttttgtgtatatttaaa

SEQ ID NO: 3056 - protein, 544 aa, Streptococcus suis; identical to SEQ ID NO: 236

SEQ ID NO: 3057 - DNA, 50 bp, Streptococcus suis; identical to SEQ ID NO: 232
  source 1..50: mol_type = genomic DNA

SEQ ID NO: 3058 - DNA, 40 bp, Streptococcus suis
  source 1..40: mol_type = genomic DNA
aaaaaacaaaaagacagccaagtggctgacttttatctta

SEQ ID NO: 3059 - DNA, 50 bp, Streptococcus suis
  source 1..50: mol_type = genomic DNA
ttggtaggttagatagttctacctatgggtgatatatgcaaacctattaa

SEQ ID NO: 3060 - DNA, 40 bp, Streptococcus suis
  source 1..40: mol_type = genomic DNA
aaaaaagaaaaaattagccatgtcgctgcctaatatctta

SEQ ID NO: 3061 - protein, 546 aa, Clostridium gasigenes
MIAAIYSRKSKFTGKGESIDNQIEMCKEYASKYLNIDEFIEYEDEGCTGANLHRDDFKRLMSDAKLKKFDVLICYRLDRISRNVADFSSTLSTLQNYNIDFVSIKEQFDTSSPMGRAMVYIASVFAQLERETIAERVKDNMMELAKTGRWLGGVSPIGFDSSQITYLDENLKERKMSKLTQNKEELKIVQLLFDKYLELKSLSAVETYTLQNNIKTKKGSYFSKNNLRIILTNTVYVRANNKVINHLNSLGIQTCGEIDNNCGLLSYNKQKTVLTETGAAIRSYRDMSEWITTVSSHSGIIDADKWLMVQQLLKDNKSKFPNEGKTHNALFTGILRCSKCGANMQIAHGHLSKKTGKKFYYYSCSMKKNSKSSVCDNKNGKVEEIDYAVIESLKELGNSKMNILKKIKEENKKSKSVRSTLNNQNSIKLTIQSNEKKIDNLLNKLSIDESLDDLILSKIKKIKLENEDLQNSINTLNILDLNSNEESLNLAFIELLLNRCSIIDTLEPDEIKQLASGLIEYLGWNGETGKIKFDFIGSKEESKKKL

SEQ ID NO: 3062 - DNA, 50 bp, Clostridium gasigenes
  source 1..50: mol_type = genomic DNA
ggtcgcactttggttcaattagctcctgcatattgaaccaaagtgcgata

SEQ ID NO: 3063 - DNA, 40 bp, Clostridium gasigenes
  source 1..40: mol_type = genomic DNA
agaacttgcaaaattagctcctgcatctaacatacattca

SEQ ID NO: 3064 - DNA, 50 bp, Clostridium gasigenes
  source 1..50: mol_type = genomic DNA
ggtcgcactttggttcaattagctcatgcatattgaaccaaagtgcgata

SEQ ID NO: 3065 - DNA, 40 bp, Clostridium gasigenes
  source 1..40: mol_type = genomic DNA
agaagttgtaaaaatacctcatgaatttaacataaattct

SEQ ID NO: 3066 - protein, 515 aa, Kocuria rosea
MGGVRPAIGYVRVSTAGQVDGLSLDVQRQQITAYATQHALDLELIEDAGLSGRREDRPGWREAIRRCEAGEVDVLVVASLSRCARSARQALDLTDRLDSYGVTFVSLKEQIDLSTTMGRFLRTILAGVAELELEQTRERTIDGKLEALRTRQGWWPGGGTPPTGWRTREGGWLEIDPDGQQALALIRDGYLKGWSSGRVTEALNDAGLSTSRGGPWSPVTVRRVAVNEANHTGRVMYGVAQDDTVRGRFRSSKTGLDGGPIEIELPGEPPWTKAEYQAVVEAVSQRRKQSNQRAGGKTLHPLSGRLISPCGRPMHGVDLSRSSHSSGRRVYRCPGKRLPSDQRCACSQIRAEEVEAIVIERLTVALFDPDTFAEKITSWFDLLQQEAGDDRLGDLERQRDAVKARLNKAIDIALDTDSPAVRRKIVDLESRLDQVEDEIATIEAIVTDIDASRARWWTRLQQTRVEPLTDEQALAEAVQAYDITVRVARAHRGHAQEIDIRGALAENTAEQSSSP

SEQ ID NO: 3067 - DNA, 50 bp, Kocuria rosea
  source 1..50: mol_type = genomic DNA
tgagaacacggcggagcagtcatcctcgccgctactccggtgcgttcgcg

SEQ ID NO: 3068 - DNA, 40 bp, Kocuria rosea
  source 1..40: mol_type = genomic DNA
ggagtacgccatggtcgtgctcgccgcggcggccttcggc

SEQ ID NO: 3069 - DNA, 50 bp, Kocuria rosea
  source 1..50: mol_type = genomic DNA
tgagaacacggcggagcagtcatcggcgccgctactccggtgcgttcgcg

SEQ ID NO: 3070 - DNA, 40 bp, Kocuria rosea
  source 1..40: mol_type = genomic DNA
ggagcacgccatgttcttgggcgacgcggcggcccactgg

SEQ ID NO: 3071 - protein, 537 aa, Faecalibacillus faecis; identical to SEQ ID NO: 406

SEQ ID NO: 3072 - DNA, 50 bp, Faecalibacillus faecis
  source 1..50: mol_type = genomic DNA
taatatttttaactaagggaaaccggagtttcccaaacaaaaggatatta

SEQ ID NO: 3073 - DNA, 40 bp, Faecalibacillus faecis
  source 1..40: mol_type = genomic DNA
aatcagtaaatgggaaacaggaagaggttatccggatatt

SEQ ID NO: 3074 - DNA, 50 bp, Faecalibacillus faecis
  source 1..50: mol_type = genomic DNA
taatatttttaactaagggaaacctcagtttcccaaacaaaaggatatta

SEQ ID NO: 3075 - DNA, 40 bp, Faecalibacillus faecis
  source 1..40: mol_type = genomic DNA
aaccagacaatggaaaagatcaagagataatccagatatt

SEQ ID NO: 3076 - protein, 567 aa, Streptococcus constellatus
MNRTLTISDYRQVDTSKLSDITVVYCRLSQDDGLEGDSNSIINQKKILLDVVARENLPNPILFVDDGFSGTNFDRPAISEALRLVENRQVSNFIVKDLSRLGRSYIKVGQLTEITFPSFDVRFIALNDGIDSNKPNETNSIFLPIKSLMDEMYAADTSKKIRAVVQAKARAGERVTTNPPYGYLKDSNNPKNWIIDPVASEVVKRIFQEAKSGKSLSEISKGLENDKVFKPDRHRIEIGLKPISASSNVESLPYFWTRETLSAILGREEYLGHTVNLRTRTKSYKDKRKVDNPKEDWLIFKNTHEAIIDQETFDIVQKMRSHKRSNQRYKNRIGHENLFAGLVFCGTCGRKHYFCPQEKNGLNHDHYKCSGYRKPIDGCENPHYIQKSALIEIVSDKLRQTIQEIHFDQEAFLKKLEQQSQAQFSKDNKRQQLQLQKDEHRFKEIDSIIQKLYEDNLLGKISDERFVKLSQTYEEEQHQLQTSISDLTKKLAQQQEDSLNISKFMTRISKYTELPELTVEIANELIDKIVIHKPTSTKRNRIIQIDIYYNFIGKLNNEKSEPNELAR

SEQ ID NO: 3077 - DNA, 50 bp, Streptococcus constellatus
  source 1..50: mol_type = genomic DNA
aaactgctatgtgtcaggtcggctttagatagtctgacactcagcagtct

SEQ ID NO: 3078 - DNA, 40 bp, Streptococcus constellatus
  source 1..40: mol_type = genomic DNA
atggaagaaaaggctggttttatccagtctttttgtttct

SEQ ID NO: 3079 - DNA, 50 bp, Streptococcus constellatus; identical to SEQ ID NO: 3077
  source 1..50: mol_type = genomic DNA

SEQ ID NO: 3080 - DNA, 40 bp, Streptococcus constellatus
  source 1..40: mol_type = genomic DNA
atgcaagaaaagcctttttttttcttttctttttgtttct

SEQ ID NO: 3081 - protein, 550 aa, Streptococcus agalactiae; identical to SEQ ID NO: 1606

SEQ ID NO: 3082 - DNA, 50 bp, Streptococcus agalactiae; identical to SEQ ID NO: 1607
  source 1..50: mol_type = genomic DNA

SEQ ID NO: 3083 - DNA, 40 bp, Streptococcus agalactiae
  source 1..40: mol_type = genomic DNA
atagcaaaaagaaagaaggaaaggggatctttttttaaag

SEQ ID NO: 3084 - DNA, 50 bp, Streptococcus agalactiae
  source 1..50: mol_type = genomic DNA
ttaaatccctaagtgaatgcccctgaaggagtgttcagtaagggattaaa

SEQ ID NO: 3085 - DNA, 40 bp, Streptococcus agalactiae
  source 1..40: mol_type = genomic DNA
aaagtaaaaagaaaaaagagaatgagagccttttttaaag

SEQ ID NO: 3086 - protein, 558 aa, Enterocloster bolteae
MLQTDKITALYCRLSQEDMQAGESESIQNQKLILQKYADEHHFFNTRFFVDDGFSGVSFEREGLQAMLHEVEAGNVATVITKDLSRLGRNYLKTGELIEIVFPEYEVRYIAINDGVDTAREDNEFTPLRNWFNEFYARDTSKKIRAVKQAKAQKGERVNGEAPYGYLIDPDNRNHLIPDPETAHVVKQIFAMYVRGDRMCEIQNWLRDNEILTVGELRYRRTGSKRHPRPQLNAWYNWPDKTLYDILTRKEYLGHTITGKTYKVSYKSKKTKKNPEEKRYFFPNTHEPLIDEETFELAQKRIATRQRPTKVDEIDLFSGLLFCGDCGYKMYAVRGAGTLERKHAYTCGNYRNRARNDMLCTTHYIRKSVLKELVLADLQRVTSYVKEHEQEFIETANECSAKAVQKTLTQQRKELDKAQNRINELNILFRKLYEDNALGKLSDEQFAFLTSGYDEEKKTLTRRIAELSQEIDNATERSADVKRFVALVRRYTAIEELTYENVHEFIDRILIHELDKETNTRKIEIFYSFVGRVDTGDKPTESISYFRQIGADVKSYAI

SEQ ID NO: 3087 - DNA, 50 bp, Enterocloster bolteae
  source 1..50: mol_type = genomic DNA
aggtatcgttatcttacctcaacaaaagctgacgttagataacgatactt

SEQ ID NO: 3088 - DNA, 40 bp, Enterocloster bolteae
  source 1..40: mol_type = genomic DNA
tggacttcctggaccgaaaaaaactggcccgcttcctcac

SEQ ID NO: 3089 - DNA, 50 bp, Enterocloster bolteae
  source 1..50: mol_type = genomic DNA
aggtatcgttatcttacctcaacagaagctgacgttagataacgatactt

SEQ ID NO: 3090 - DNA, 40 bp, Enterocloster bolteae
  source 1..40: mol_type = genomic DNA
tgagcttcctggaccgaatgacaatggggctcttcctcac

SEQ ID NO: 3091 - protein, 615 aa, Enterobacter hormaechei
MLIQTKNRRLHMKKVFVYHRVSSDQQLDGSGIARQAELLEGYLERTGICAEMDDPAPVVLSDQGVSAFKGLNISEGELGAWMEQVRNGMWDSSILVVESIDRFSRQNPFDVMGYINALMAHNVAIHDVMANIVISRSNSKDLPFVMMNAQRAYDESKYKSDRIRKGWAKKREHAFNKGTIVTNKRPQWIEVENDKYVLNHKAAVVKEIFSLYQTGMGCPTIAKQLQRKEGEQYKFNRPWTGELVHKILTNRRVTGKIFISEIIRNHDDIENPVTQKKYDMDVYPVVINEEEFELVQELLKSRRPNAGRVTVKKDGQEEVLIKSNLFSGIARCTECGGPMYHNVVRAKRTPKKGDPKIEEYRYIRCLNERDGLCENKAMTYETVERFVVEHLLGIDLSTVIKEQEFNPEIEVLRIQIDQVKDQITNYENGIERRKSTGKPISFEMREELDDAKSELERLLARQASLATVQVDVPVLQDVNVTELYNVNNVDIRTRYENELNKIVSNIRLKRNGNFYTIDIIYKQNELKRHVLFIENKKKEQKLISEVIIENVDGAKFYYTPSFVISVKDGEIRFQQTKEDLSIIDYSLLLNYVDAVDRCDAVGVWMRNNMSFLFTK

SEQ ID NO: 3092 - DNA, 50 bp, Enterobacter hormaechei; identical to SEQ ID NO: 2497
  source 1..50: mol_type = genomic DNA

SEQ ID NO: 3093 - DNA, 40 bp, Enterobacter hormaechei
  source 1..40: mol_type = genomic DNA
tttttgcctgataatcatacaaataggtgccattacaaca

SEQ ID NO: 3094 - DNA, 50 bp, Enterobacter hormaechei
  source 1..50: mol_type = genomic DNA
atgttgtaataagcgtcacacacttcagtgtgttatgcttatacaaacaa

SEQ ID NO: 3095 - DNA, 40 bp, Enterobacter hormaechei
  source 1..40: mol_type = genomic DNA
tttttcactgttaatggtatccatagctgccatgacaaca

SEQ ID NO: 3096 - protein, 615 aa, Enterobacter hormaechei
MLIQTKSRRFNMKKVFVYHRVSSDQQLDGSGIARQAELLEGYLERTGICAEMDDPAPVVLSDQGVSAFKGLNISEGELGAWMEQVRNGMWDSSILVVESIDRFSRQNPFDVMGYINALMAHNVAIHDVMANIVISRSNSKDLPFVMMNAQRAYDESKYKSDRIRKGWAKKREQAFNKGTIVTNKRPQWIEVENDKYVLNHKAAVVKEIFALYQTGMGCPTIAKQLQKKEGEQYKFNRPWTGELVHKILTNRRVTGKIFISEIIRNHDDIDNPVTQKKYDMDVYPVVINEEEFELVQELLKSRRPNAGRVTVKKDGQEEVLIKSNLFSGIARCTECGGPMYHNVVRAKRTPKKGDPKIEEYRYIRCLNERDGLCENKAMTYETVERFVVEHLLGMDLSTVMKEQEFNPEIEVLRIQIDQAMDQITNYENGIERRKSTGKPISFEMREELDDAKSELERLLARQASLATVQVDVPVLQDVNVTELYDVNNVDIRTRYENELNKIVSIIRLKRNGTSYTIDINYKQNEVKRHVLFIENKKKEQKLISEVIIEDVDGTKFYYTQSFVISFKDGEIRFQQTKKDLSIIDYSLLLNYVDAVDRIDAVGVWMRNQFNFLTSN

SEQ ID NO: 3097 - DNA, 50 bp, Enterobacter hormaechei; identical to SEQ ID NO: 2497
  source 1..50: mol_type = genomic DNA

SEQ ID NO: 3098 - DNA, 40 bp, Enterobacter hormaechei; identical to SEQ ID NO: 3093
  source 1..40: mol_type = genomic DNA

SEQ ID NO: 3099 - DNA, 50 bp, Enterobacter hormaechei; identical to SEQ ID NO: 3094
  source 1..50: mol_type = genomic DNA

SEQ ID NO: 3100 - DNA, 40 bp, Enterobacter hormaechei; identical to SEQ ID NO: 3095
  source 1..40: mol_type = genomic DNA

SEQ ID NO: 3101 - protein, 615 aa, Enterobacter sp CRENT-193
MLIQTKNRGFNMKKVFVYHRVSSDQQLDGSGIARQAELLEGYLERTGICAEMDDPAPVVLSDQGVSAFKGLNISEGELGAWMEQVRNGMWDSSILVVESIDRFSRQNPFDVMGYINALMAHNVAIHDVMANIVISRSNSKDLPFVMMNAQRAYDESKYKSDRIRKGWAKKREQAFNKGTIVTNKRPQWIEVENDKYVLNHKAAVVKEIFALYQTGMGCPTIAKQLQRKEGEQYKFNRPWTGELVHKILTNRRVTGKIFISEIIRNHDDIENPVTQKKYNMDVYPVVINEEEFELVQELLKSRRPNAGRVTVKKDGQEEVLIKSNLFSGIARCTKCGGPMYHNVVRAKRTPKKGDPKIEEYRYIRCLNERDGLCENKAMAYETVERFVVEHMLGMDLSTVIKEQEFNPEIEVLRIQIDQVKDQITNYENGIERRKSAGKPISFDMREELDDAKSELERLLARQASLATVQVDVPVLQDVNVTELYNVNNVDIRTRYENELNKIVSNIRLKRNGTSYTIDINYKQNELKKHVLFVENKKKEQTLISEVIIEDVDGAKFYYTPSFMIRLKDGEIRFQQTKEDLSVIDYSLLLNYVDAVDRNDAVGVWMRNQFNFLTSN

SEQ ID NO: 3102 - DNA, 50 bp, Enterobacter sp CRENT-193
  source 1..50: mol_type = genomic DNA
atgttgtaataggcgtcacacactcaagtgtgttatgcttatacaaacaa

SEQ ID NO: 3103 - DNA, 40 bp, Enterobacter sp CRENT-193; identical to SEQ ID NO: 3093
  source 1..40: mol_type = genomic DNA

SEQ ID NO: 3104 - DNA, 50 bp, Enterobacter sp CRENT-193
  source 1..50: mol_type = genomic DNA
atgttgtaataggcgtcacacacttcagtgtgttatgcttatacaaacaa

SEQ ID NO: 3105 - DNA, 40 bp, Enterobacter sp CRENT-193; identical to SEQ ID NO: 3095
  source 1..40: mol_type = genomic DNA

SEQ ID NO: 3106 - protein, 615 aa, Enterobacter hormaechei
MLIQTKNRRLNMKKVFVYHRVSSDQQLDGSGIARQAELLEGYLERTGICAEMDDPAPVVLSDQGVSAFKGLNISEGELGAWMEQVRNGMWDSSILVVESIDRFSRQNPFDVMGYINALMAHNVAIHDVMANIVISRSNSKDLPFVMMNAQRAYDESKYKSDRIRKGWAKKREQAFNKGTIVTNKRPQWIEVENDKYVLNHKAAVVKEIFALYQTGMGCPTIAKQLQTKKGELYKFNRPWTGELVHKILTNRRVTGKIFISEIIRNHDDIDNPVTQKKYDMDVYPVVINEEEFELVQELLKSRRPNAGRVTVKKDGQEEVLIKSNLFSGIARCTECGGPMYHNVVRAKRTPKKGDPKIEEYRYIRCLNERDGLCENKAMTYETVERFVVEHLLGMDLSTVIKEHEFNPEIEVLRIQIDQVKDQITNYENGIERRKSAGKPISFDMREELDDAKSALERLLARQASLATVQVDVPVLQDVNVTELYDVNNVDIRTRYENELNKIVSNIRLKRNGKSYTIDINYKQNELKRHVLFVENKKKEQTLIGEVIIEDVDGAKFYYTPSFMIMLKDGEIRFQQTNEDLSIIDYSLLLNYIDAVDRSDAVGVWMRNQFNFLTFN

SEQ ID NO: 3107 - DNA, 50 bp, Enterobacter hormaechei
  source 1..50: mol_type = genomic DNA
atgttgtaataaacgttacacactcaagtgtgatatgcttatacaaacaa

SEQ ID NO: 3108 - DNA, 40 bp, Enterobacter hormaechei; identical to SEQ ID NO: 3093
  source 1..40: mol_type = genomic DNA

SEQ ID NO: 3109 - DNA, 50 bp, Enterobacter hormaechei
  source 1..50: mol_type = genomic DNA
atgttgtaataaacgttacacacttcagtgtgatatgcttatacaaacaa

SEQ ID NO: 3110 - DNA, 40 bp, Enterobacter hormaechei; identical to SEQ ID NO: 3095
  source 1..40: mol_type = genomic DNA

SEQ ID NO: 3111 - protein, 606 aa, Enterobacter hormaechei
MKKVFVYHRVSSDQQLDGSGIARQAELLEAYLKRTNILAEMDDPEPVIITESGGVSAFKGHNMLITSGLGAWMQEIRASMWDGSHLVYENGDRFSRQNPFTVIGYINDLINHNITIHDATMNIIISRENSAMLPMVLMNAQRAYDESKYKSDRIRKGWAKKREQAFNKGTIVTNKRPQWIEVENDKYVLNEKAAVVKEIFALYQTGMGCPTIAKQLQRKEGEQYKFNRPWTGELVHKILTNRRVTGKIFISEIIRNHADIDNPVTQKKYDMDVYPVVISEDEFELVQELLKSRRPNAGRITVKKEGQEEVLIKSNLFSGIARCTECGGSMYHNVVRAKRTPKKSDPKIEEYRYIRCLNERDGLCENKAMTYETVERFVVEHLLGMDLSTVLKEQEFNPEIEVLRIQIDQVKDQITNYENGIERRKSAGKPISFEMREELDDAKSELERLLARQASLATVQVDVPVLQDVNVTELYNVNNVDIRTRYENELNKIVSNICLKRNGKSYTIDINYKQNELKRHVLFVENKKKEQTLISEVIIEDVDGGKFYYTPSFMIRLKDGEIRFQQTNEDLSIVDYSLLLNYVDAIDRNDAVGVWMRNQFNFLTSN

SEQ ID NO: 3112 - DNA, 50 bp, Enterobacter hormaechei
  source 1..50: mol_type = genomic DNA
atgttgtaataagcgtcacacactcaagtatgttatgcttatacaaacaa

SEQ ID NO: 3113 - DNA, 40 bp, Enterobacter hormaechei; identical to SEQ ID NO: 3093
  source 1..40: mol_type = genomic DNA

SEQ ID NO: 3114 - DNA, 50 bp, Enterobacter hormaechei
  source 1..50: mol_type = genomic DNA
atgttgtaataagcgtcacacacttcagtatgttatgcttatacaaacaa

SEQ ID NO: 3115 - DNA, 40 bp, Enterobacter hormaechei; identical to SEQ ID NO: 3095
  source 1..40: mol_type = genomic DNA

SEQ ID NO: 3116 - protein, 486 aa, Enterobacter hormaechei
MNIIISRENSAMLPMVLMNAQRAYDESKYKSDRIRKGWAKKREQAFNKGTIVTNKRPQWIEVENDKYVLNEKAAVVKEIFALYQTGMGCPTIAKQLQRKEGEQYKFNRPWTGELVHKILTNRRVTGKIFISEIIRNHADIDNPVTQKKYDMDVYPVVISEDEFELVQELLKSRRPNAGRITVKKEGQEEVLIKSNLFSGIARCTECGGSMYHNVVRAKRTPKKSDPKIEEYRYIRCLNERDGLCENKAMTYETVERFVVEHLLGMDLSTVLKEQEFNPEIEVLRIQIDQVKDQITNYENGIERRKSAGKPISFEMREELDDAKSELERLLARQASLATVQVDVPVLQDVNVTELYNVNNVDIRTRYENELNKIVSNICLKRNGKSYTIDINYKQNELKRHVLFVENKKKEQTLISEVIIEDVDGGKFYYTPSFMIRLKDGEIRFQQTNEDLSIVDYSLLLNYVDAIDRNDAVGVWMRNQFNFLTSN

SEQ ID NO: 3117 - DNA, 50 bp, Enterobacter hormaechei; identical to SEQ ID NO: 3112
  source 1..50: mol_type = genomic DNA

SEQ ID NO: 3118 - DNA, 40 bp, Enterobacter hormaechei; identical to SEQ ID NO: 3093
  source 1..40: mol_type = genomic DNA

SEQ ID NO: 3119 - DNA, 50 bp, Enterobacter hormaechei; identical to SEQ ID NO: 3114
  source 1..50: mol_type = genomic DNA

SEQ ID NO: 3120 - DNA, 40 bp, Enterobacter hormaechei; identical to SEQ ID NO: 3095
  source 1..40: mol_type = genomic DNA

SEQ ID NO: 3121 - protein, 615 aa, Enterobacter hormaechei
MLIQTKNRRLHMKKVFVYHRVSSDQQLDGSGIARQAELLEGYLERTGICAEMDDPAPVVLSDQGVSAFKGLNISEGELGAWMEQVRNGMWDSSILVVESIDRFSRQNPFDVMGYINALMAHNVAIHDVMANIVISRSNSKDLPFVMMNAQRAYDESKYKSDRIRKGWAKKREHAFNKGTIVTNKRPQWIEVENDKYVLNHKAAVVKEIFALYQTGMGCPTIAKQLQTKEGEQYKFNRPWTGELVHKILTNRRVTGKIFISEIIRNHDDIENPVTQKKYDMDVYPVVINEEEFELVQELLKSRRPNAGRVTVKKDGQEEVLIKSNLFSGIARCTECGGPMYHNVVRAKRTPKKGDPKIEEYRYIRCLNERDGLCKNKALTYETVERFVVEHLLGMDLNTVIKEQEFNPEIEVIRIQIDQMKDQVTNYENGIERRKSAGKAVSFEMREELDDAKLELEQLLARQASLATVQVDVPVLQDVNVTELYDVNNVDIRTRYENELNKIVSNIRLKRNGKSYTIDINYKQKELKRHVLFVENKKKEQTLISEVIIEVVDGAKFYYTPAFMIMLKDGEISFQQTKEDLSIIDYSLLLNYVDAVDREDAVGVWMRNQFNFLTSN

SEQ ID NO: 3122 - DNA, 50 bp, Enterobacter hormaechei
  source 1..50: mol_type = genomic DNA
atgttgtaataagcgtcacgcactcaaatgtgttatgcttatacaaacaa

SEQ ID NO: 3123 - DNA, 40 bp, Enterobacter hormaechei; identical to SEQ ID NO: 3093
  source 1..40: mol_type = genomic DNA

SEQ ID NO: 3124 - DNA, 50 bp, Enterobacter hormaechei
  source 1..50: mol_type = genomic DNA
atgttgtaataagcgtcacgcacttcaatgtgttatgcttatacaaacaa

SEQ ID NO: 3125 - DNA, 40 bp, Enterobacter hormaechei; identical to SEQ ID NO: 3095
  source 1..40: mol_type = genomic DNA

SEQ ID NO: 3126 - protein, 604 aa, Enterobacter hormaechei
MKKVFVYHRVSSDQQLDGSGIARQAELLEGYLERTGICFEMDDPIPVVLSDQGVSAFKGLNISEGELGAWMEEVRKGMWDSSILVVESIDRFSRQNPFDVMGYINALMAHNVAIHDVMANIVISRSNSKDLPFVMMNAQRAYDESKYKSDRIRKGWAKKREQAFNKGTIVTNKRPQWIDVEDDKYILNHKAAVIKEIFELYKTGLGCPTIAKELQKKEGEQYKFNRAWTGELVHKILTNRRVTGKIFISETIRNHDDLDNPVTQKKYQMNVYPIVVNEDEFELVQDLLKSRRPNAGRITIKKTDNEEVLIKSNLFSGIARCMDCGGPMYHNVVRAKRTPKKGDPKVEEYRYIRCLSERDGLCNNKAMTYETVERFVVEHLIGMDISTVIKEQEFNPELEIIRIQIDQVKDQIANYENGIERRKSVGKVISFEMREELDDARLQLEELLARQASLATVNVDIPVLKNVDVNELFNVNNVDIRTRYENELNKIVSTVRLKRVADSYIIDIKYKNNDLKRHVIFVEHKKKEQKLIGDVIIENIDGTILYSTSSFWIRVKDGAIRFQPTKDDLSIIDYHLLLNYVDGLERDNMVAVWMRHNINFLFDK

SEQ ID NO: 3127 - DNA, 50 bp, Enterobacter hormaechei
  source 1..50: mol_type = genomic DNA
tttttgtaataagcgttctgcactcaaatgtgttatgattatacaaacaa

SEQ ID NO: 3128 - DNA, 40 bp, Enterobacter hormaechei; identical to SEQ ID NO: 3093
  source 1..40: mol_type = genomic DNA

SEQ ID NO: 3129 - DNA, 50 bp, Enterobacter hormaechei
  source 1..50: mol_type = genomic DNA
tttttgtaataagcgttctgcacttcaatgtgttatgattatacaaacaa

SEQ ID NO: 3130 - DNA, 40 bp, Enterobacter hormaechei; identical to SEQ ID NO: 3095
  source 1..40: mol_type = genomic DNA

SEQ ID NO: 3131 - protein, 475 aa, Streptococcus pneumoniae; identical to SEQ ID NO: 1481

SEQ ID NO: 3132 - DNA, 50 bp, Streptococcus pneumoniae
  source 1..50: mol_type = genomic DNA
tattttagtcaaagtaattatgataagttagagttagtaacagtatttta

SEQ ID NO: 3133 - DNA, 40 bp, Streptococcus pneumoniae; identical to SEQ ID NO: 1508
  source 1..40: mol_type = genomic DNA

SEQ ID NO: 3134 - DNA, 50 bp, Streptococcus pneumoniae
  source 1..50: mol_type = genomic DNA
tattttagtcaaagtaattatgattagttagagttagtaacagtatttta

SEQ ID NO: 3135 - DNA, 40 bp, Streptococcus pneumoniae
  source 1..40: mol_type = genomic DNA
tgaaacctccaaccatgattactgaattatccatttcttc

SEQ ID NO: 3136 - protein, 474 aa, Bacillus cytotoxicus
MAVGIYIRVSTQEQASEGHSIESQKKKLASYCEIQGWDDYRFYIEEGISGKNTNRPKLKLLMEHIEKGKINILLVYRLDRLTRSVIDLHKLLNFLQEHGCAFKSATETYDTTTANGRMSMGIVSLLAQWETENMSERIKLNLEHKVLVEGERVGAIPYGFDLSDDEKLVKNEKSTILLDMVERVENGWSVNRIVNYLNLTNNDRNWSPNGVLRLLRNPVLYGATRWNDKIAENTHEGIISKERFNRLQQILSDRSIHHRRDVKGTYIFQGVLRCPVCDQTLSVNRFIKKRKDGTEYYGALYRCQPCAKQNKYNFAIGEARFLKALNEYMSTVEFQTEEDEVSSEKNEREILESQLQQIARKREKYQKAWASDLMSDDEFEKLMVETRETYNECKQQLENCKDPVKIDTKYLKEIVFMFHQTFNSLESEKQKEFISKFIRTIRYTIKEQQPIRPDKSKTGKGKQKVIITEVEFYQ

SEQ ID NO: 3137 - DNA, 50 bp, Bacillus cytotoxicus
  source 1..50: mol_type = genomic DNA
ggttgtatttgtagaacttgaccagtttttttagtaacataaatacaact

SEQ ID NO: 3138 - DNA, 40 bp, Bacillus cytotoxicus
  source 1..40: mol_type = genomic DNA
tgttgtttttccagatccagttggtcctgtaaatataagc

SEQ ID NO: 3139 - DNA, 50 bp, Bacillus cytotoxicus
  source 1..50: mol_type = genomic DNA
ggttgtatttgtagaacttgaccaccttttttagtaacataaatacaact

SEQ ID NO: 3140 - DNA, 40 bp, Bacillus cytotoxicus
  source 1..40: mol_type = genomic DNA
tgatgttaatcctgatccacctggtcatgtcaatatctgc

SEQ ID NO: 3141 - protein, 525 aa, Blautia faecis
MTENRKTAVYIRLSMEDGNVDGRTKLESDSVTSQRILLKSFVIDQLGVDEADILEYVDDGVSGTHFKRNGFQQLQEDMKSGQIGCVVVKDFSRFGRDYLEVGFYIEYIFPLLQIRFISINDSYDSAASSGMTGGMNVALKNLVYNMYSLDLSKKISSAMQTRMKNGTRLPVNARYGYRKGKDGRLEIDPDSAKVVKMIFQMAAEGMSFADITRELNKQEIATCDEQKISRGEQVQFQRFDTIMKKRWNPTTVSAIIRDEIYIGTRIWGKTRCSMHTGHKAVLNNESDWIRLENHHDPIVDRELFEKANRLHPKKSRGVAETRTNYTLARRKKQPALMLCAHCGHCLVRETEHLLKCSDGRTSGDHVCRSLVVRREPMEKHILELVHQFASSMLENRKIVEPKNQSKGMESNVAELLKQSRQLSSEKMKLYDEYKDDRIDRESYKQKAEKIGRQLEEIRRKIAESERDAKMLEQDNTAKEIKLEEFLNMEKFDTEKLREVIKVIRVHSQEEIEIEWNFDDVFLGQR

SEQ ID NO: 3142 - DNA, 50 bp, Blautia faecis
  source 1..50: mol_type = genomic DNA
agtcgaactctagcattgcgtaatgaatgaaaacatagcatatttattgt

SEQ ID NO: 3143 - DNA, 40 bp, Blautia faecis
  source 1..40: mol_type = genomic DNA
aaattggacattgtgttatgaatgaaaaaagggtataata

SEQ ID NO: 3144 - DNA, 50 bp, Blautia faecis
  source 1..50: mol_type = genomic DNA
agtcgaactctagcattgcgtaattaatgaaaacatagcatatttattgt

SEQ ID NO: 3145 - DNA, 40 bp, Blautia faecis
  source 1..40: mol_type = genomic DNA
aaattggagattttgtttctaaagaaagaagggcagaata

SEQ ID NO: 3146 - protein, 521 aa, Gemella sanguinis
MNRKITTIQANKKLSHQSKLPSIKKKKVAGYARVSTDNEDQTSSYETQMKYYEEYISSRKDWEFVKMYSDEGISGTNTKKRLGFQEMVNDALAGKIDLILTKSVSRFARNTVDSLSTVRKLKDVGVEIYFEKENIWTFDSKGELLITIMSSLAQEESRSISENITWSKRKQAAEGRVTFAYNNVLGFKPKEDGGFEVDKEQAKIVRYIFGQFLSGKNPNQIAKHLTENKILTPRGKEKWSYSSVRSILTNEKYKGDALLQKYYIADFLNKTQKRNNGELPQYYVENSHEAIIDKEVFDTVQVQLSENKKWYTEKNYFGKIRCGCCGSSYVRHLWHSTDKYKETIYRCKDKYKNEEKCDTPHIRDDEIQRWIVSALNKVIDNRKEIIGNIKLLMKMIKEDRGSDDEIIQLEEKLENIRTDVEKLIITNSRIAQDQEEYTRKYNKLIEEYKFLEKELEQKNLDLLSKNKRVRELKIFIDSLEKQDELLTEYDTKLFNYLVEKLIIHKEKRIEIHFKNGEVISI

SEQ ID NO: 3147 - DNA, 50 bp, Gemella sanguinis
  source 1..50: mol_type = genomic DNA
tgtatgataaaattagttgttacagaaataacaacgtaaaatagaataca

SEQ ID NO: 3148 - DNA, 40 bp, Gemella sanguinis
  source 1..40: mol_type = genomic DNA
ctataaattaatagttacagatatagatgatacactggta

SEQ ID NO: 3149 - DNA, 50 bp, Gemella sanguinis
  source 1..50: mol_type = genomic DNA
tgtatgataaaattagttgttacatgaataacaacgtaaaatagaataca

SEQ ID NO: 3150 - DNA, 40 bp, Gemella sanguinis
  source 1..40: mol_type = genomic DNA
ctagaaattaataattacatgtaaacaagatactctccta

SEQ ID NO: 3151 - protein, 470 aa, Eubacterium rectale
MRNIRIGKNTSNNKKTGLYIRVSTNFQFEEGYSVGAQTEKLEKYCNYQEIDNYDLYIDGGYSGSNLNRPEMKRLIKEIQEGKVESVVVVKLDRLSRSQKDTIYLLEDVFEANDVGFISLNENFDTTTPYGKAMVGILSVFAQYERENIRERTQMGITERIKTGKWRGTKPPFGYDYNNGDDVLVPNKDAETVRKIFELYKEGYSTYALAKMFDLKGDKQVSDMLSRVTYIGKLKYNKEIVDGLHEPIVDKKLFDEVQELRKTRTRATSHKSQYLLTGLIYCGLCGAKMRYQKWSGGRVMIYCYSLDHSKPHLVKNPNCQNGKLDAAEVEDVVVSDMLKLSKEYEVIEEKSEQQNQKGFEAMNQRKSVLEGKLKSLYNLYASDTNNSVLLETIGEINKELENLNTQIEQYTLKNTRAKDMTARAKAFKSVADSWEFMSFNERQKTVREYIKKIKISNDYVEIEYNDLLTLQ

SEQ ID NO: 3152 - DNA, 50 bp, Eubacterium rectale
  source 1..50: mol_type = genomic DNA
aaatttccactataatacattatcccaatagagtaagataaaggaaacga

SEQ ID NO: 3153 - DNA, 40 bp, Eubacterium rectale
  source 1..40: mol_type = genomic DNA
cttttctacatacgcagtaccgttgataataggggaaata

SEQ ID NO: 3154 - DNA, 50 bp, Eubacterium rectale
  source 1..50: mol_type = genomic DNA
aaatttccactataatacattatcggaatagagtaagataaaggaaacga

SEQ ID NO: 3155 - DNA, 40 bp, Eubacterium rectale
  source 1..40: mol_type = genomic DNA
ctttcctaaatacacagttgggattgtaataggggaaaga

SEQ ID NO: 3156 - protein, 470 aa, Eubacterium rectale
MRNIRIGKNTSNNKKTGLYIRVSTNFQFEEGYSVGAQTEKLEKYCNYQEIDNYDLYIDGGYSGSNLNRPEMKRLIKEIQEGKVESVVVVKLDRLSRSQKDTIYLLEDVFEANDVGFISLNENFDTTTPYGKAMVGILSVFAQYERENIRERTQMGITERIKTGKWRGTKPPFGYDYNNGDDVLVPNKDAETVRKIFELYKEGYSTYALAKMFDLKGDKQVSDMLSRVTYIGKLKYNKEIVDGLHEPIVDKKLFDEVQELRKTRTRATSHKSQYLLTGLIYCGLCGAKMRYQKWSGGRVMIYCYSLDHSKPHLVKNPNCQNGKLDAAEVEEVVVSDMLKLSKEYEVIEEKSEQQNQKGFEAMNQRKSVLEGKLKSLYNLYASDTNNSVLLETIGEINKELENLNTQIEQYTLKNTRAKDMTARAKAFKSVADSWEFMSFNERQKTVREYIKKIKISNDYVEIEYNDLLTLQ

SEQ ID NO: 3157 - DNA, 50 bp, Eubacterium rectale; identical to SEQ ID NO: 3152
  source 1..50: mol_type = genomic DNA

SEQ ID NO: 3158 - DNA, 40 bp, Eubacterium rectale; identical to SEQ ID NO: 3153
  source 1..40: mol_type = genomic DNA

SEQ ID NO: 3159 - DNA, 50 bp, Eubacterium rectale; identical to SEQ ID NO: 3154
  source 1..50: mol_type = genomic DNA

SEQ ID NO: 3160 - DNA, 40 bp, Eubacterium rectale; identical to SEQ ID NO: 3155
  source 1..40: mol_type = genomic DNA

SEQ ID NO: 3161 - protein, 559 aa, Enterocloster clostridioformis
MSRTKNRGFQQSFSPSYTIRRWRLGEYIRLSKEDLKKGKDDSNSVKNQRDLLNDFYQKHIEEFESVSEYVDDGHTGTDANRENFQRLLADVMSGKINCVVVKDLSRFARNYSDAGSLIDNLFVQMGVRFISLAENVDSYLNPDSVSSIIVPITNVMNDQYCYQTSKKIRQVFDYKRRNGQYIGSFAPYGYIKDPKDKHQLIVDPEAAEIVKLIYNKTLQGETRRAIVYHLNDHGIPSPTTYRKNKGLPYSCSVSDNPMWGDRVLTNILTNPIYTGDLVQGRRRVKSYKVHEIEAVPEDEWVRVADTHEAIIDRETFEKVQALLKRDTRTAPRKKELHLFSGFLRCADCEKSITRSQSGKNVYYACSTYKYRSRTACSMHSIKHERLEAAVLFAVRQQVHLAVSFSEILARINSAPVKKSQSFRLDDLIAAKEKELAKITRYKQSLYQDWKDGEITQQDYRTMKADYERQISSISDVLERLTAERAELANGVDSEHPALVAFKKHQNIETLNREILIDLVNYIKVYENGNISVKFKFADEFRRIAEYIEINISEIPAAAG

SEQ ID NO: 3162 - DNA, 50 bp, Enterocloster clostridioformis
  source 1..50: mol_type = genomic DNA
tgttttcctaatatgaaacattcatatgattgtttcctattaggaacgct

SEQ ID NO: 3163 - DNA, 40 bp, Enterocloster clostridioformis
  source 1..40: mol_type = genomic DNA
caaaagtatcccatcttcatactcctgatattccagctgc

SEQ ID NO: 3164 - DNA, 50 bp, Enterocloster clostridioformis
  source 1..50: mol_type = genomic DNA
tgttttcctaatatgaaacattcatctgattgtttcctattaggaacgct

SEQ ID NO: 3165 - DNA, 40 bp, Enterocloster clostridioformis
  source 1..40: mol_type = genomic DNA
caaagctatcccatcttcttccacctgcttttccagccac

SEQ ID NO: 3166 - protein, 406 aa, Clostridioides difficile
MKQQIYNTALYLRLSRDDELQGESSSITTQKSMLRLYAKEHHLNVIDEYIDDGWSGTNFERPSFQRMIEDIEAGKINCVVTKDLSRFGRNYIMTGQYTELYFPSHNVRYIAIDDGVDSEKGESEIAPFKNIINEWVARDTSRKVKSAFRTKFAEGAHYGAYAPLGYKKHPDIKGKLLIDDETKWIVEKIFSLAYQGYGSAKITKILREEKVPTASWLNFTRYGTFAHIFEGKPESKRYEWTIAHVKAILKSEVYIGNSVHNMQSTVSFKSKKKVRKPESEWFRVENTHEPIIDKEVFYRVQEQIKSRRRQTKEKATPIFAGLVKCADCGWSMRFGTNTANKTPYSYYACSFYGQFGKGYCSMHYIRYDVLYQAILERLQYWAKAVQQDEEKVLHKIQKAGNAERIR

SEQ ID NO: 3167 - DNA, 50 bp, Clostridioides difficile
  source 1..50: mol_type = genomic DNA
tcatatctttaactaagggaaagtggagtttcactaattttaaaatattg

SEQ ID NO: 3168 - DNA, 40 bp, Clostridioides difficile
  source 1..40: mol_type = genomic DNA
aatagcaaaatgggaaattggagaatctattcctgatata

SEQ ID NO: 3169 - DNA, 50 bp, Clostridioides difficile
  source 1..50: mol_type = genomic DNA
tcatatctttaactaagggaaagtcaagtttcactaattttaaaatattg

SEQ ID NO: 3170 - DNA, 40 bp, Clostridioides difficile
  source 1..40: mol_type = genomic DNA
aaaagagaactgggaaattcaggaatctaatcataatata

SEQ ID NO: 3171 - protein, 537 aa, Clostridioides difficile
MKQQIYNTALYLRLSRDDELQGESSSITTQKSMLRLYAKEHHLNVIDEYIDDGWSGTNFERPSFQRMIEDIEAGKINCVVTKDLSRFGRNYIMTGQYTELYFPSHNVRYIAIDDGVDSEKGESEIAPFKNIINEWVARDTSRKVKSAFRTKFAEGAHYGAYAPLGYKKHPDIKGKLLIDDETKWIVEKIFSLAYQGYGSAKITKILREEKVPTASWLNFTRYGTFAHIFEGKPESKRYEWTIAHVKAILKSEVYIGNSVHNMQSTVSFKSKKKVRKPESEWFRVENTHEPIIDKEVFYRVQEQIKSRRRQTKEKATPIFAGLVKCADCGWSMRFGTNTANKTPYSYYACSFYGQFGKGYCSMHYIRYDVLYQAILERLQYWAKAVQQDEEKVLHKIQKAGNAERIREKKKKASALKKAENRQNEIDRLFAKMYEDRACEKITERNFVMLSGKYQKEQIELEQQITSLREELSKMEQDMIGAEKWVELIKEYSVPKELTAPLLNAMIEKILIHEATTNEDNERIQEIEIYYRFIGKVD

SEQ ID NO: 3172 - DNA, 50 bp, Clostridioides difficile; identical to SEQ ID NO: 3167
  source 1..50: mol_type = genomic DNA

SEQ ID NO: 3173 - DNA, 40 bp, Clostridioides difficile; identical to SEQ ID NO: 3168
  source 1..40: mol_type = genomic DNA

SEQ ID NO: 3174 - DNA, 50 bp, Clostridioides difficile; identical to SEQ ID NO: 3169
  source 1..50: mol_type = genomic DNA

SEQ ID NO: 3175 - DNA, 40 bp, Clostridioides difficile; identical to SEQ ID NO: 3170
  source 1..40: mol_type = genomic DNA

SEQ ID NO: 3176 - protein, 537 aa, Clostridioides difficile
MKQQIYNTALYLRLSRDDELQGESSSITTQKSMLRLYAKEHHLNVIDEYIDDGWSGINFERPSFQRMIEDIEAGKINCVVTKDLSRFGRNYIMTGQYTELYFPSHNVRYIAIDDGVDSEKGESEIAPFKNIINEWVARDTSRKVKSAFRTKFAEGAHYGAYAPLGYKKHPDIKGKLLIDDETKWIVEKIFSLAYQGYGSAKITKILREEKVPTASWLNFTRYGTFAHIFEGKPESKRYEWTIAHVKAILKSEVYIGNSVHNMQSTVSFKSKKKVRKPESEWFRVENTHEPIIDKEVFYRVQEQIKSRRRQTKEKATPIFAGLVKCADCGWSMRFGTNTANKTPYSYYACSFYGQFGKGYCSMHYIRYDVLYQAILERLQYWAKAVQQDEEKVLHKIQKAGNAERIREKKKKASALKKAENRQNEIDRLFAKMYEDRACEKITERNFVMLSGKYQKEQIELEQQITSLREELSKMEQDMIGAEKWVELIKEYSVPKELTAPLLNAMIEKILIHEATTNEDNERIQEIEIYYRFIGKVD

SEQ ID NO: 3177 - DNA, 50 bp, Clostridioides difficile; identical to SEQ ID NO: 3167
  source 1..50: mol_type = genomic DNA

SEQ ID NO: 3178 - DNA, 40 bp, Clostridioides difficile; identical to SEQ ID NO: 3168
  source 1..40: mol_type = genomic DNA

SEQ ID NO: 3179 - DNA, 50 bp, Clostridioides difficile; identical to SEQ ID NO: 3169
  source 1..50: mol_type = genomic DNA

SEQ ID NO: 3180 - DNA, 40 bp, Clostridioides difficile; identical to SEQ ID NO: 3170
  source 1..40: mol_type = genomic DNA

SEQ ID NO: 3181 - protein, 530 aa, Blautia massiliensis
MMYQMGVYCRLSKDDGENKVSESIENQMKLIREYVTKSEDLEIADIYIDDGYSGLYFANRPEFQRMMEDIYKGKIQGVITKDISRLGREHIETSNYIERVFPSLGVRYIAILDGVDSVHHSNEELAQFKTLFNDMYSRDISKKIRGALTAQKKRGQFMSGFAPYGYVKDPADKHHFLVDEEAAKVVRRIFYMSLEGYSRDGIAKKLNQEGILTPSEYKRKVQGLKYANALEKAGAKGWAYPTINVILRNRVYTGAMVQHKSEKISYKVEKYQYIPEEQQYIVEGMHEAIISKDTFEQVQELMKKRTRTPGFNSEVRKVNPYAGIIVCGDCGYNFQRVTCRDGYECGTYHKKGNTVCYSHFIKKEVLDSIVKNEIQRQAELALKESDKDEILKVADRKKEVQRRCAEADQQIERLQKELAAVQKYKKKTYENYVDGVLDKEEYLSYKAEYEKQDKDIRAKIQLAELEKDSFGEAEESYENWIEKFIKYGTLSEVTREIVTELIEKIVVNGDKSIDIVFKYQSPYPVEKQAV

SEQ ID NO: 3182 - DNA, 50 bp, Blautia massiliensis; identical to SEQ ID NO: 1637
  source 1..50: mol_type = genomic DNA

SEQ ID NO: 3183 - DNA, 40 bp, Blautia massiliensis
  source 1..40: mol_type = genomic DNA
tgggaataattatggttctcacagaggggattctcttctg

SEQ ID NO: 3184 - DNA, 50 bp, Blautia massiliensis
  source 1..50: mol_type = genomic DNA
attttcccctagttataatgaacacctgaaccttataattaagggaaaac

SEQ ID NO: 3185 - DNA, 40 bp, Blautia massiliensis
  source 1..40: mol_type = genomic DNA
tgggaataatattggttctcccagagggcctgctctgggg

SEQ ID NO: 3186 - protein, 530 aa, Blautia massiliensis; identical to SEQ ID NO: 1636

SEQ ID NO: 3187 - DNA, 50 bp, Blautia massiliensis; identical to SEQ ID NO: 1637
  source 1..50: mol_type = genomic DNA

SEQ ID NO: 3188 - DNA, 40 bp, Blautia massiliensis; identical to SEQ ID NO: 3183
  source 1..40: mol_type = genomic DNA

SEQ ID NO: 3189 - DNA, 50 bp, Blautia massiliensis; identical to SEQ ID NO: 3184
  source 1..50: mol_type = genomic DNA

SEQ ID NO: 3190 - DNA, 40 bp, Blautia massiliensis; identical to SEQ ID NO: 3185
  source 1..40: mol_type = genomic DNA

SEQ ID NO: 3191 - protein, 415 aa, Acutalibacter muris
MFNDYYAKDISKKIRAVVKIRGEAGEHIASNPPYGYVKDPQNKKKWIVDEEAAKVVRRIFDLCIAGKGPMQIAKILTASKVLTVTAYNAKQKGWAMPDNLYQWCSKSVTTILERTECTGCTVNFKTYTKSLKFKKRMVNPKEKQRIFEDTQPAIIERGQRERVQELRTNKRRPTKTGKTSIFSGLVYCADCGAKLYYCTCNTYKDDSQNHFVCSNYKSNTGSCQIHYIREVTLYKRVLECIQGTLSYVQLFRDDFTQEMLAQDEASRKAELTQKRKALSGAQKRMEDLDKIIQRLYEDSVLGKLSDLRFQKLSAQYETEQAEIQRLASSLEQEIENETEQIADVGRFLQLADRYSDLQELDASTVNELIDRIVIHSPERIGGRKHVTIEIYFTYVGKIRIPLYKPDIPAGTEKPA

SEQ ID NO: 3192 - DNA, 50 bp, Acutalibacter muris
  source 1..50: mol_type = genomic DNA
ttacttccttatgggtgtccgcctaatggcggtagtccataaggaaatat

SEQ ID NO: 3193 - DNA, 40 bp, Acutalibacter muris
  source 1..40: mol_type = genomic DNA
cataaagagagccgcctttaatggcggctctcttttattt

SEQ ID NO: 3194 - DNA, 50 bp, Acutalibacter muris
  source 1..50: mol_type = genomic DNA
ttacttccttatgggtgtccgccttatggcggtagtccataaggaaatat

SEQ ID NO: 3195 - DNA, 40 bp, Acutalibacter muris
  source 1..40: mol_type = genomic DNA
gataaagagatcccccttttatgacagctttttttttttt

SEQ ID NO: 3196 - protein, 479 aa, Mycobacterium intracellulare; identical to SEQ ID NO: 2731

SEQ ID NO: 3197 - DNA, 50 bp, Mycobacterium intracellulare
  source 1..50: mol_type = genomic DNA
cacattcatgacttatcactaacctgagataatgttaaactaccctcatg

SEQ ID NO: 3198 - DNA, 40 bp, Mycobacterium intracellulare
  source 1..40: mol_type = genomic DNA
cccaccgagttgtccaagctggtcctggtctgcccctacc

SEQ ID NO: 3199 - DNA, 50 bp, Mycobacterium intracellulare
  source 1..50: mol_type = genomic DNA
cacattcatgacttatcactaaccagagataatgttaaactaccctcatg

SEQ ID NO: 3200 - DNA, 40 bp, Mycobacterium intracellulare
  source 1..40: mol_type = genomic DNA
acctcccaggtgtctaggcaggtcctggtctgcccgtccc

SEQ ID NO: 3201 - protein, 466 aa, Microbacterium sp TPU 3598
MDVVRAAAVYARVSSDQTGQQLAVTRQLEDCRKLAAERGWVVAEEYVDNDISAFRGKHRPAYERMLADIAAGVRDGVLVYNTDRLTRRPIELEEFTLVCEAARVRSFATVTADIDLGNDDGMFMARVLAAVAAKESGRKSERLRRKAQQNAEAGRPNGGHLRPFGYEADRVTVNEAEALLIREVVNRFLAGESLHALAVWLESTGVPTTGGRPWHTTTLRQMLISARIAGLRSHKGVVVGDAVWEPIITPAQREQVLAAVERKRVSGRRVPRRYLLSGLLRCGKCGSRLYSARRETTRRYVCSSGPDHQGCGKLTVVAEPVEEWLAAAALYRLDTPEMTDRVTGRISADERLSTLTAQLQVAQAKREELASMWAADEISRTEWSAARVPIEARIEQAEKELSRLRSTDSLATLVGRGKELEAEWEALTLARQVAIIQAVLDCATILPGTPGTRAVDPDRIVPEWRT

SEQ ID NO: 3202 - DNA, 50 bp, Microbacterium sp TPU 3598
  source 1..50: mol_type = genomic DNA
tggtatgacttacgagttgcgccgttgcggactattcgttagtctgacct

SEQ ID NO: 3203 - DNA, 40 bp, Microbacterium sp TPU 3598
  source 1..40: mol_type = genomic DNA
ccagcagagggcgacgccgttgtcggtgtgggtggggccg

SEQ ID NO: 3204 - DNA, 50 bp, Microbacterium sp TPU 3598
  source 1..50: mol_type = genomic DNA
tggtatgacttacgagttgcgccgtggcggactattcgttagtctgacct

SEQ ID NO: 3205 - DNA, 40 bp, Microbacterium sp TPU 3598
  source 1..40: mol_type = genomic DNA
ccagcacagggcagggccgtgggctgggtgggtggggccc

SEQ ID NO: 3206 - protein, 558 aa, Clostridioides difficile
MLQQSNNTITSIYPIGNQTEELTALYCRLSQDDKQEGDSNSIINQKKILKRYAIEHGYQPYVFFVDDGFSGTNFNRPDFQRMIAEVEAGRIKRVIVKDMSRLGRDYLQVGMYTEIMFPNMDVHFIAVNDGVDSHVGENEFTPFRNIINEWYAKDTSKKIRAVKRSKGMAGEHIGSHAPYGYMKNPDNKKEWLIDEEAAEVVREIFRLCVNGYGPTRIANILTERKILCPTYYALEHGEKPRTVLPPDKYLWSATVVSHILERMDYLGHTVNFKTHVKSYKNRKKIDNSPEQWRIFENTHEAIIDKETFEIVQKIRSGKRRPTKMGDMPMFSGLLYCADCGSKMTFHRQMAQSAEKHNFVCSNYRHNSKSCTMHYIRNVVVEQIVLENLKEVIRYVSDYEDEFVQMVMDTDMRQRNKELSQKKKRLTEIHSRIQELDKIFQRIYEDNISGKLSDERFMKLSKGYEEEQHTLQEEQTSLEKELQKEEKQSVDVKQFLSVVRKYTNLTELTPEIVHEFIDKIIVHAPDKSSGKRLQEIEIIYNHIGVFDHSKVTLWKGKAV

SEQ ID NO: 3207 - DNA, 50 bp, Clostridioides difficile
  source 1..50: mol_type = genomic DNA
aaacatccttaccaaaccctcacattagcaaggctttgataaggatggta

SEQ ID NO: 3208 - DNA, 40 bp, Clostridioides difficile
  source 1..40: mol_type = genomic DNA
ttttactaaatttctctcttttattaactttgcagctgtt

SEQ ID NO: 3209 - DNA, 50 bp, Clostridioides difficile
  source 1..50: mol_type = genomic DNA
aaacatccttaccaaaccctcacatgagcaaggctttgataaggatggta

SEQ ID NO: 3210 - DNA, 40 bp, Clostridioides difficile
  source 1..40: mol_type = genomic DNA
ttttactaaatggttctcttgtattaactggccatctgat

SEQ ID NO: 3211 - protein, 617 aa, Roseburia hominis
MSKQPEMVIARNNDTTLNLDNQMYQQPVTSFQRVSNDAPLSEETKTAIQNTVLQFYVHSQPQEEAEGITACYERLSQEDKLDGESNSISNQKRILEKYCRDHGYTAIRHYDEDDGYSGTNFNRPGFQRMLADIKAGKIKRVVVKDMSRFGRNYLQVGMYTEMLFPEYGVHFIAVNDGVDSVRGDSEFTAIRNVFNEMYAKDTSKKIRATWQSKGRSGEHLTTIPPYGYKKDPENKKRWIVDEEAAAVVQKIFALCMDGMGPTQIAKWLQENKVLSPVAYCYENDLPTTSKRPTDPYKWATKTVVHILERLDYLGHTVNFKTSKQSFKSKKVLWNDPADWVIFENTQEPIIEESVFLIVQKIRQGRRRPTKMGDMGMFSGLLFCADCGGKMYLCRANHFKPEQEYYLCSTYRKDRTLCSTHSIRRVVLEEIVLRNLREAIQYVTQYEDDFVQRAADQSLRERDKELAQKKDTLAQSQKRIAELDVIIKRLYEDNISGKLSDERFIKLSRDYELEQTNLTNLVEHLRQEVKEQEKQKVNVRQFIAAVRKYTDMQQLDASILREFVDKIYISEVYTPDENEPRIKVREIEIVYNFIGAFDFEEAREQSQAAQKEKKTGVA

SEQ ID NO: 3212 - DNA, 50 bp, Roseburia hominis
  source 1..50: mol_type = genomic DNA
atgttttcttacggaaccacgcctttaaccgtggtgtcataagaaaacat

SEQ ID NO: 3213 - DNA, 40 bp, Roseburia hominis
  source 1..40: mol_type = genomic DNA
ggcaataaagggatacgcattgaaaactatgttttgtatt

SEQ ID NO: 3214 - DNA, 50 bp, Roseburia hominis
  source 1..50: mol_type = genomic DNA
atgttttcttacggaaccacgcctggaaccgtggtgtcataagaaaacat

SEQ ID NO: 3215 - DNA, 40 bp, Roseburia hominis
  source 1..40: mol_type = genomic DNA
ggcattaaagggatccctaggggagaatatggtttgtatt

SEQ ID NO: 3216 - protein, 577 aa, Ruminococcus gnavus
MSINRNNTSETPKKAALYVRVSTNYQIDRDSLPMQRQELITYAQLIFGINDYVIFEDAGYSGKNTDRPEFQNMMRRIRAGEFTHLLCWKIDRISRNLLDFASMYQELKDLGVTFVSKNEQFDTSTAIGEAMLKIILVFAELERNMTSERVTATMLSRAQNGLWNGGRVPYGYDYDKDSKTFSINQEEAFLVRKMYDLYSEHRSLVMVSRTLNEDGYASRAGNDWSPVSIFIILTNPFYTGIYRYNHYKIPGLKIEKDPSEWIEVPDHHPRIISDEQFDNVNRILQSNSRSKRLPGQQHTSKGTHIFGGLLYCGTCGSQYVSTPSRLLASGYRPSKYACPNLRKKKTCNTKSISDPVIGEFVLNYVLNMMHARAAFSSIHDTSELQDALLSGGTFQNVDHIGKDGLDSCFHMFSSTPLDGKRFRKPKKATTIDPELKRLRAEKRKTERALDRLMNLYLYADNPISEKDFVIRKQALDDYLKEINENLGMIDRGRGIETISDENFIKRASYFIMSKELAGKDYIYFKKLAMDMDAEILRDFFQEIIDSIVMEGSNVKEIVFRNGLAHTFFYKDAEKPEA

SEQ ID NO: 3217 - DNA, 50 bp, Ruminococcus gnavus
  source 1..50: mol_type = genomic DNA
gggtatcattctataaacatcgcatccccgattgctacagtaacgtatct

SEQ ID NO: 3218 - DNA, 40 bp, Ruminococcus gnavus
  source 1..40: mol_type = genomic DNA
ctataaaataatcatcgcatctccgaagctgaaaaaacga

SEQ ID NO: 3219 - DNA, 50 bp, Ruminococcus gnavus
  source 1..50: mol_type = genomic DNA
gggtatcattctataaacatcgcaatcccgattgctacagtaacgtatct

SEQ ID NO: 3220 - DNA, 40 bp, Ruminococcus gnavus
  source 1..40: mol_type = genomic DNA
ctataaaataaacattgccattccaaaggagaaagaaaga

SEQ ID NO: 3221 - protein, 576 aa, Ruminococcus gnavus
MKKNFKMPGSGSETPIRVAIYVRVSTVYQIDKDSLPMMKQDLTSYCKYILNTDDFVIFEDAGYSGKNTDRPAYQKMMSQIRQGLFTHLLVWKIDRISRNLLDFANMYAELKDLGVTFVSKNEQFDTSTAIGEAMLKIILVFAELERNMTSERVTATMINRASNGVWNGGRIPYGYSYDKPTQVFSIDPEENKIYNFMVETYEDTQSIVHTSRRLNEAGYRSRNGNMWSPVAVWTILRNPWYKGVYRYNYYKIPGRKAIKDESEWVIVENHHPASIDSDRFDRIQATLDKNARYRNTPGRKTAQKNVHVFSGLVWCAECGSAFTASPGKLHVSGYRPSKYGCPNVRKTKTCHAKYTSDVVLGEFLLNYILNILNAQKQFAYIHSTDDLQKRLLHGSTFSNVDHVDPDGLASLLNMLEKCSGSDPVLLKRPRSKPKMDPELKRMMADQKKQQRALDRLNDLYLYSDDSISEREYLVRKQQITDRLQEINEAIGMMSQEPWMRTMNDEEFIRQASSFILTQKLADKQYIYYENLAESLDPEILKNFFVSILDSIILRDGRPETVVFRNGLSHTFTYKDS

SEQ ID NO: 3222 - DNA, 50 bp, Ruminococcus gnavus
  source 1..50: mol_type = genomic DNA
ggaggctacacaatcatcatagcatcccgtatgattacgggtgtaccacc

SEQ ID NO: 3223 - DNA, 40 bp, Ruminococcus gnavus; identical to SEQ ID NO: 3218
  source 1..40: mol_type = genomic DNA

SEQ ID NO: 3224 - DNA, 50 bp, Ruminococcus gnavus
  source 1..50: mol_type = genomic DNA
ggaggctacacaatcatcatagcaatccgtatgattacgggtgtaccacc

SEQ ID NO: 3225 - DNA, 40 bp, Ruminococcus gnavus; identical to SEQ ID NO: 3220
  source 1..40: mol_type = genomic DNA

SEQ ID NO: 3226 - protein, 576 aa, Ruminococcus gnavus
MKKNFKMPGSGSETPIRVAIYVRVSTVYQIDKDSLPMMKQDLTSYCKYILNTDDFVIFEDAGYSGKNTDRPAYQKMMSQIRQGLFTHLLVWKIDRISRNLLDFANMYTELKDLGVTFVSKNEQFDTSTAIGEAMLKIILVFAELERNMTSERVTATMINRASNGVWNGGRIPYGYSYDKPTQVFSIDPEENKVYNFLVETYEDTQSIVHTSRRLNEAGYRSRNGNMWSPVAVWTILRNPWYKGVYRYNYYKIPGRKAIKDESEWVIVENHHPASIDPDRFDRIQATLDKNARYRNAPGRKTAQKNVHVFSGLVWCAECGSAFTASPGKLHVSGYRPSKYGCPNVRKTKTCHAKYTSDVVLGEFLLNYILNILNAQKQFAYIHSTDDLQKRLLHGSTFSNVDHVDPDGLASLLNMLEKCSGSDPVLLKRPRSKPKMDPELKRMMADQKKQQRALDRLNDLYLYSDDSISEREYLVRKQQITDRLQEINEAIGMTSQEPWMRTMNDEEFIRQASSFILTQKLADKQYIYYENLAESLDPEILKNFFVSILDSIILRDGRPETVVFRNGLSHTFTYKDS

SEQ ID NO: 3227 - DNA, 50 bp, Ruminococcus gnavus; identical to SEQ ID NO: 3222
  source 1..50: mol_type = genomic DNA

SEQ ID NO: 3228 - DNA, 40 bp, Ruminococcus gnavus; identical to SEQ ID NO: 3218
  source 1..40: mol_type = genomic DNA

SEQ ID NO: 3229 - DNA, 50 bp, Ruminococcus gnavus; identical to SEQ ID NO: 3224
  source 1..50: mol_type = genomic DNA

SEQ ID NO: 3230 - DNA, 40 bp, Ruminococcus gnavus; identical to SEQ ID NO: 3220
  source 1..40: mol_type = genomic DNA

SEQ ID NO: 3231 - protein, 577 aa, Ruminococcus gnavus
MISNSAATHAKVAIYIRVSTLHQIDRDSLPMQRQDLIAYAKLILNTDDVTVFEDAGYSGKNTIRPEFQKMMSQLRTGTYTHLLVWKIDRISRNLLDFAEMYQELKDLGVTFVSKNEQFDTSTAMGEAMLKIILVFAELERNMTSERVAATMISRASNGQWNGGRIPYGYDYDPEEQTFSFNSDEYNIAHLIHDKYEELRSLVYLARYLNEHGYRTRAGNDWSPVSLDIILRSVFYCGDYQYNRLKEGDRQRPKDKSEWITVKDHHPAIVSRGQKERILALLESNRRLKSFRKSGKSKYTHIFSGLLICGNCGQPMTSSISTVKKTTGRRYSLYFCPTHRKSKLWCTGKSTSDPIIGEFVFNYILNMLNAQKAFSPETSIQELEQQLLSGDTFSPVAAIAPDGLQDLFHTLRTGTVKGEVFGKDVKIKTDSEPPLQLSKLKKEKIRLERAIDRLNKLFLYSEKAMSESEYLTQKIQLSDSLEEVEDKLAFLASEDSLQQSITDDEFISKASNFILSQKLTDRNYVSFQSLSATVSPEVLDSFLSSIIDNIVFKDGAVHSITFRNGLSHTFIYKEKPEV

SEQ ID NO: 3232 - DNA, 50 bp, Ruminococcus gnavus
  source 1..50: mol_type = genomic DNA
tcgttctacaaaatcatcatcgcatcccccatgtagagggcgtgccttca

SEQ ID NO: 3233 - DNA, 40 bp, Ruminococcus gnavus; identical to SEQ ID NO: 3218
  source 1..40: mol_type = genomic DNA

SEQ ID NO: 3234 - DNA, 50 bp, Ruminococcus gnavus
  source 1..50: mol_type = genomic DNA
tcgttctacaaaatcatcatcgcaatccccatgtagagggcgtgccttca

SEQ ID NO: 3235 - DNA, 40 bp, Ruminococcus gnavus; identical to SEQ ID NO: 3220
  source 1..40: mol_type = genomic DNA

SEQ ID NO: 3236 - protein, 502 aa, Clostridium innocuum
MEFIREDCIYARQSVDRKDSISIESQIDFCKYELKGGSCRVFKDKGYSGKNTDRPEFQKLLGEIRKGKVRRVIVYKLDRISRSILDFATMMELFQEYDVEFVSSTEKFDTSTPMGRAMLNICIVFAQLERETIQKRVTDAYYSRCLKGFHMSGQAPYGYQLEPTVVEGIRTKKMVADPVAADHVRLMFEMYAEPETSFGDITRYFEEHDIKIYGKSMFRTFLSQLLRNPVYAQADLELYEFFKSQGAAIINDASDFAGTNGCYLYQGRDVKEDKDRCLKDQILVIAPHEALISSDTWLKCRKKLMANTTFQQGRKPKNTWLAGKIKCGHCGYALKATHVPNSTGYFRCTKRTENKGCPGCGKIRKEEFEQFIFSAMQEKFKDFQILHGREEKVNPKLTAYQVELAQVEAEIEKLLDTLTGANATLLAYANKKIEELDTRRQTISKAIAELSVETISPQQIKKLSYYLDNWDSIDFDDKRKAADGLISTIKATSDRVQIEWKI

SEQ ID NO: 3237 - DNA, 50 bp, Clostridium innocuum; identical to SEQ ID NO: 2062
  source 1..50: mol_type = genomic DNA

SEQ ID NO: 3238 - DNA, 40 bp, Clostridium innocuum
  source 1..40: mol_type = genomic DNA
ctgaaataaaatttaacccttttctaaatttaatctcata

SEQ ID NO: 3239 - DNA, 50 bp, Clostridium innocuum
  source 1..50: mol_type = genomic DNA
tttgtaccccttgtacaccgatgtaagcaacggtgtacaaagggaacata

SEQ ID NO: 3240 - DNA, 40 bp, Clostridium innocuum
  source 1..40: mol_type = genomic DNA
ctcaaacaaacttgaacccaattataactttaacatcata

SEQ ID NO: 3241 - protein, 547 aa, Escherichia coli
MKLLVTYIRWSTREQDSGDSLRRQTNLIDAFYAKHKDDYYLLPAHRYVDKGKSGFHQQHKNQGSDFRRMFENVMSGAIPEGSLIVVENFDRFSRADIDTAIDDVRQILRKGVSILTLGDGELYDKSALTDPVKLIKHIIIAERAHQESLVKQKRIAQVWNHKTQLARELKKPMGKQAPGWLELSEDGSHYIVDEDKASLVNIIYDKRLSGMSMFAICKWLNEQGYPTINQRKVRISKTKKPDGNWSALSVKHILTSRSVLGYLPAKISTEDRKTVLREEIEGFYPQIVTDSKFYAVQQLLEETGKGKTSSGEHWLYVNILKGLIRCKCGLVMTPTGIRKPVYQGTYRCNGNKESRCSYGTVSRKLLDTQLCSRLFSKLSQLHDEATDTAKLDELQRRLNTVDGELEKLTETLIQLPNITQIQEALRVKQEEKDELIVQLSREKARVKSVSSLDLSGLDMESVEGRTEAQIIIKRLVKEIVVSGNEKLVDIYLHNGNMIRGFPLDGKDDHTLTLEEATDEMQPLDDMLIFGEPVTRIYPAGDMEEVDA

SEQ ID NO: 3242 - DNA, 50 bp, Escherichia coli
  source 1..50: mol_type = genomic DNA
gtacgtgtttagctatgtaaaagcactagtattcttgccttaacactcat

SEQ ID NO: 3243 - DNA, 40 bp, Escherichia coli
  source 1..40: mol_type = genomic DNA
gtgcatggaataataaagcaccagaactttagccatttct

SEQ ID NO: 3244 - DNA, 50 bp, Escherichia coli
  source 1..50: mol_type = genomic DNA
gtacgtgtttagctatgtaaaagcaatagtattcttgccttaacactcat

SEQ ID NO: 3245 - DNA, 40 bp, Escherichia coli
  source 1..40: mol_type = genomic DNA
ttgaattgaataataaagaaagagaactttatcaacttct

SEQ ID NO: 3246 - protein, 549 aa, Clostridioides difficile
MKKEKIKVYTYKRVSTAMQIDGYSLDAQRARMKAYADFNDYEIVGEYEDAGKSGKSIEGRLQFRQMMEDVKSGKDNISYVLVFKLSRFGRNAADVLSTLQVMQDFGVNLICVEDGIDSSKDAGKLMISVLSAVAEIERENIRVQTMEGRIQKAREGKWNGGFAPYGYQLVNGKLEINEEEAVAVRTIYDQYVNTDIGSNGISKYLENHGIRKIQRQNGKNPLFDAHLVRLILKNPVYCGKIAYGRRKTEKVHGTRNEYHLVEQDNFLLVDGLHEAIIPEDVWNAAQVKLVAQAKKYEHVNKGKNERTHLLSGIVKCPICGAGMYGNKSIKHKKDGTKYKDFFYYGCKHRSMQRGHKCDYKKQIREELLDDAVAEVIVKLVSNPNFATMMQEKINMKVDTTAIDQEIENYEKQLRQDYSIKSKLMEEIDNLDPDDRHYIRRKADLDGRLYRMYDKIEELESQLIDARAKKTSIEAEKITGDNIYKVLICFDKLYFAMNDVERRQLIEALIAEIQIYEERKPNGQWLKSIRFKLPIIENNLRIGLDNSEHV

SEQ ID NO: 3247 - DNA, 50 bp, Clostridioides difficile
  source 1..50: mol_type = genomic DNA
ggtttggacaacagtgaacacgttgagacggtatgtttattgtccaaact

SEQ ID NO: 3248 - DNA, 40 bp, Clostridioides difficile
  source 1..40: mol_type = genomic DNA
ccctcattctactcatgtggaaactgtagctaagataatc

SEQ ID NO: 3249 - DNA, 50 bp, Clostridioides difficile
  source 1..50: mol_type = genomic DNA
ggtttggacaacagtgaacacgtttggacggtatgtttattgtccaaact

SEQ ID NO: 3250 - DNA, 40 bp, Clostridioides difficile
  source 1..40: mol_type = genomic DNA
ccctcactctcctcatctgtgaactgtgggtaacagtatc

SEQ ID NO: 3251 - protein, 576 aa, Vibrio parahaemolyticus
MPIAYSYVRFSTPEQMLGDSQRRQLDMALDYCARNGLELSNRSFRDLGISGFKGKSRPSLQELLDCIKMGIIKPGDYILIETFDRLSRQGVDATHQLIRTILLSKVVVVSLQDNLVLTESSLNNTADIIRIAIAADLANQESQRKSIRVKAARDNARRLAAEGKPSLISTNLPFWLSLDGKKIVINEDKAALVNRIFDMSKDGHGFTRIVTTLNRENIPAPKATLWAKSTISRLLSNRAVLGELQPYIMEGDRRVKDTKTGVITNYYPQVVSDEKFLAVQVAKKDRRTYQSGNRSKKLVFSNVLQQFAKCGKCGSTMEFVDKGKPPKGGQYLTCSLAKRGGACKQNKHFKYQTIERSLYNLFFDGTISFEKSDSGQKANLLNQLEYQLDNLKKGYSSFLESGVDFTMKEVIAAAKKQEASIKELEIKVQDLRWEVTSSDLDDVQFTVENLKKLMDNVKENFQLRSKFNLALIKKFGTCSIQEIQGYIRINLGDDGATFISPDSKWLIPFYTGYLPMPMIASGSKLATSIDGEEMKKQIYKFFDFMNEVFPDTKDSFQANKIKCLNAVNQYVSNGML

SEQ ID NO: 3252 - DNA, 50 bp, Vibrio parahaemolyticus
  source 1..50: mol_type = genomic DNA
tttagggaatggttgcacaaccttctgatactgtgataccattccctaga

SEQ ID NO: 3253 - DNA, 40 bp, Vibrio parahaemolyticus
  source 1..40: mol_type = genomic DNA
ggctggaaaccacaacctacttttccttggtcctcctggt

SEQ ID NO: 3254 - DNA, 50 bp, Vibrio parahaemolyticus; identical to SEQ ID NO: 3252
  source 1..50: mol_type = genomic DNA

SEQ ID NO: 3255 - DNA, 40 bp, Vibrio parahaemolyticus
  source 1..40: mol_type = genomic DNA
ggctggaagccccaaccctctaatccttggtctttctggt

SEQ ID NO: 3256 - protein, 515 aa, Vibrio parahaemolyticus
MTKAYSYIRFSTKGQIEGRSLQRQLETARKYAEENGLELQSLSFQDLGVSGFKGRNSEQGALSQFIEAVKEGTIPEGSWLLLESFDRMSRQPVEKSMRLLMELVELGIIVVTLMDKQVYRRGQLDMTKLIISLVIMSRAHEESAAKSKRLADVWHAKQAVAHLKPLGTHLPAWLEYNEDKTKIQINYEKAVVVHYIFELSANGYGRSALIRKLNSQGIAPIGSRAKRWHLSYVTKLLNNTAVLGEYIPHVTDKLGQRVPTGEVIENYYPPIIEKDLWLRAKAAAQSRKIRGTGAIRRGHTRNILSGMVSCECGSSMQFVNKGSSDKGGYYLVCSTARHGAGCQYIGHRYYSVQWVVLIALQKLLHTFANKADNHEKEMQLEGELVELDRKLNNLINDLEENGSSKYISAAIRKTEQRMDIVKNELLMLQSSKAVENDEVDLQEITLSLNENFERLRLHQYLKRHITNIVVYKNKERLEINLKTGEDIILTFIPSENLWQTNTGVSFSVTFDTRWG

SEQ ID NO: 3257 - DNA, 50 bp, Vibrio parahaemolyticus
  source 1..50: mol_type = genomic DNA
atgggtcttttaggtactaaaagcagtaatattggatataatagacctac

SEQ ID NO: 3258 - DNA, 40 bp, Vibrio parahaemolyticus
  source 1..40: mol_type = genomic DNA
accaggaggaccaaggaaaagtaggttgtggtttccagcc

SEQ ID NO: 3259 - DNA, 50 bp, Vibrio parahaemolyticus; identical to SEQ ID NO: 3257
  source 1..50: mol_type = genomic DNA

SEQ ID NO: 3260 - DNA, 40 bp, Vibrio parahaemolyticus
  source 1..40: mol_type = genomic DNA
accagaaagaccaaggattagagggttggggcttccagcc

SEQ ID NO: 3261 - protein, 548 aa, Vibrio parahaemolyticus
MSTPIAYSYIRFSSLEQAKGDSFRRQTTLAKDYCDKHGLNLADLTLRDLGKSAYHGTHFKDGALGEFINAVKEGTIPKGSYLLVESMDRLSREKISIALGRFMELLGLGISIVTLQDNRTYTTESLDRIEDLMLSLVFMMRAHEESLTKSKRLKAAHAEKRKQARENLKPTGYNMPHWIKLTESGYELIPERVELLKRIFQMTIDGLGAIAIHKQLNQEAIKPWGRSKTGWHTTYIKKILRARTVLGEYQPFKTENGKRIEDGEPIQGYYPEAIDVDTFKRANLAIESRNGKSSGTRKNAINNLFTGLVVCKNCGATMHYLNKGSGSKGGQYLVCSRARQGAHHDGIICKYASMRYPVIEDAVLSIAATLNLRLHTPSNQEESAYINEQLSDVSRNLKTVEASIVRLVDLLDSSTGSKALLTKLEQRETEQQELEQRYRELGKRLDEIELTPKSNNVWKELKHTLKTLKVEAADRTNVTLRAKINSQLMQCIEKIKFDAITKVVSIKIDECRTIDLRFDQKQKTYMVKPSWDVREFPPHTFIVKNTLK

SEQ ID NO: 3262 - DNA, 50 bp, Vibrio parahaemolyticus
  source 1..50: mol_type = genomic DNA
tggggtgataccagttacagtaagctattagagtgcctgaaataacccca

SEQ ID NO: 3263 - DNA, 40 bp, Vibrio parahaemolyticus; identical to SEQ ID NO: 3253
  source 1..40: mol_type = genomic DNA

SEQ ID NO: 3264 - DNA, 50 bp, Vibrio parahaemolyticus; identical to SEQ ID NO: 3262
  source 1..50: mol_type = genomic DNA

SEQ ID NO: 3265 - DNA, 40 bp, Vibrio parahaemolyticus; identical to SEQ ID NO: 3255
  source 1..40: mol_type = genomic DNA

SEQ ID NO: 3266 - protein, 546 aa, Vibrio parahaemolyticus
MRLAYSYIRFSSLEQAKGDSFRRQTALAKDYCDKHGLKLADLTLRDLGKSAYHGTHFKDGALGEFINAVKEGTIPAGSYLLVESMDRLSREKISIALGRFMELLGLGISIVTLQDNRTYTTQSLDRIEDLMLSLVFMMRAHEESATKSKRLREAHKEKRKQARENLKPTGYNTPHWIELTESGYELIPDRVELLKRIFQMTIDGLGAIAIHKQLNQEAIKPWGRSKTGWHTTYIKKILRARTVLGEYQPFKTENGKRVEDGEPIQGYYPEAIDVDTFKRANLAIESRKGKSSGTRKNAINNLFTGLVVCKNCGATMHYLNKGSGSKGGQYLVCSRARQGAHHDGIRCKYASMRYPLIEEAVLSVAATLNLRLYTADNEEESAHIKEQLSHVSRNLKTVEASILRLVDLLDSSAGSKALLTKLEQREAQQQDLEQRYRELEKRLDEIELTPKSNNVWKELKHTLKTLKVEAADRTDISLRAKINSQLVQCIETIEFDAVAKVITIRVDGSRTIDLRFDQKQKGYTVKPSWDSREFPPYTFMVKNFLK

SEQ ID NO: 3267 - DNA, 50 bp, Vibrio parahaemolyticus
  source 1..50: mol_type = genomic DNA
aggggtgattccgattacaacaagctattggagtgtctgaaataacccct

SEQ ID NO: 3268 - DNA, 40 bp, Vibrio parahaemolyticus; identical to SEQ ID NO: 3253
  source 1..40: mol_type = genomic DNA

SEQ ID NO: 3269 - DNA, 50 bp, Vibrio parahaemolyticus; identical to SEQ ID NO: 3267
  source 1..50: mol_type = genomic DNA

SEQ ID NO: 3270 - DNA, 40 bp, Vibrio parahaemolyticus; identical to SEQ ID NO: 3255
  source 1..40: mol_type = genomic DNA

SEQ ID NO: 3271 - protein, 553 aa, Vibrio parahaemolyticus
MKQQLAYSYVRFSSPQQAKGDSFRRQTKAAREYCDKHGLQLADLTLHDLGLSAYSGTHYEQGALGDFVRAVQQGKVAQGSYLIVESLDRLSREEVDIAFSRFASILRANINIVTLQDGKQFTRESLKNTTDILTSILVMLRAFEESDIKAQRIKAARDEKHRQARENKKPTGYRPPDWMKLENGSYQLIPERAGIIKRIFQLNNGGLGAIAIARLLNEEQIPAWGRSKTGWQTSYIKKILKTRTVLGEYQPHVMVNRVRSAVGDPITDFYPPVIDPKTFKLAQLTMTSRDKRPGGIRNSRMTNLFTGLVRCKHCGNTMHFVDKGRPPKGGQYLLCSLAKTGATNKDGVSCKRASIRYKETENAILTVAATLNLRVTKPSNEAEVSHLKENLSRVNAELGTVENSITRIADAIAALPDSSGLLSKLVELEQQKQDKKNEYQALEKRIDEIELTPKSSNVWKELKSTLRTLRVEAANRANVELRAKINSQLLSCIDRIEFDNHAKVVTIHIDDYRNIEIRFEDKMKSYTVKPSWDSREFPPNTFMIKSVVDTKRV

SEQ ID NO: 3272 - DNA, 50 bp, Vibrio parahaemolyticus
  source 1..50: mol_type = genomic DNA
tggggtgataccagatacagtgagctgttaaagtatctgaaataacccca

SEQ ID NO: 3273 - DNA, 40 bp, Vibrio parahaemolyticus; identical to SEQ ID NO: 3253
  source 1..40: mol_type = genomic DNA

SEQ ID NO: 3274 - DNA, 50 bp, Vibrio parahaemolyticus; identical to SEQ ID NO: 3272
  source 1..50: mol_type = genomic DNA

SEQ ID NO: 3275 - DNA, 40 bp, Vibrio parahaemolyticus; identical to SEQ ID NO: 3255
  source 1..40: mol_type = genomic DNA

SEQ ID NO: 3276 - protein, 562 aa, Vibrio parahaemolyticus
MKQTLAYSYVRFSSPEQAKGDSFRRQTEAARKYCNKHGLELADLRFHDLGISGYKGNHFTQGALGDFVEAIEQGKVRGGSYLIVESLDRLSREEVDIAFSRFASILRADIKIVTLQDGKVFSRASLKNTTDILVSILVMLRAFEESESKANRIREARDEKHRQARENKKPTGYRPPDWVRTVKDADSGKPKYELIPERAEVIKRIYHLNNSGMGAIVIARLLNEERIPPWGRSKTGWQTSYIKKILKARTVLGEYQPHIVTNRVREAVGEPVFGFYPAVIDPNTFKLAQMTMTARDKRSGGVRKDKVNNLFTGLAKCKHCGNTMHFVDKGKPPKGNQYLLCSLAKTGAVHNGVSCKRASIRYQQTEDAILTVAATLNLKFEPPTNKGEVERLQSQLSEVHADLGTAEEAIVRITNAIAELPDSSGLIAKLAELELQKREKKSEYQAIENRIDELNLVPQASSVWNELQQELKVFREDASDRTNVKLRTKINNQLLNSIDRIEFDNHAKIVTIHIDSKRIVEIRFEEKMKGYTVKPSWDNREFFPNTFIIKEQIRKVHYEKEQ

SEQ ID NO: 3277 - DNA, 50 bp, Vibrio parahaemolyticus
  source 1..50: mol_type = genomic DNA
tggggtgattccagatacaaggtgctgctatcgtgtcttaaataacccca

SEQ ID NO: 3278 - DNA, 40 bp, Vibrio parahaemolyticus; identical to SEQ ID NO: 3253
  source 1..40: mol_type = genomic DNA

SEQ ID NO: 3279 - DNA, 50 bp, Vibrio parahaemolyticus; identical to SEQ ID NO: 3277
  source 1..50: mol_type = genomic DNA

SEQ ID NO: 3280 - DNA, 40 bp, Vibrio parahaemolyticus; identical to SEQ ID NO: 3255
  source 1..40: mol_type = genomic DNA

SEQ ID NO: 3281 - protein, 515 aa, Vibrio parahaemolyticus
MRKAYSYIRFSTKGQIEGRSLQRQLETARKYAEENGLELQSLSFQDLGVSGFKGRNSEQGALSQFIEAVKEGTIPEGSWLLLESFDRMSRQPVEKSMRLLMELVELGIIVVTLMDKQIYRRGQLDMTKLIISLVIMSRAHEESAAKSKRLADVWHAKQAVAHLKPLGIHLPAWLEYNEDKTKIQINYEKAVVVRYIFELSANGYGRSALIRKLNSKGIAPIGSRAKRWHLSYVTKLLNNTAVLGEYIPHVTDKLGQRVPTGEVIENYYPPIIEKDLWLRAKAAAQSRKIRGTGAIRKGHTRNILSGMVSCECGSSMQLVNKGSSDKGGYYLVCSTARHGAGCQYIGHRYYSVQWVVLIALQKLLHTFANKADNHGKEMQLEGELVELDRKLNHLINDLEENGSSKYISAAIRKTEQRMDIVKNELLMLQSSKAVENDEVDLQEITLRLNEDFERLRLHQYLKRHIANIVVYKNKERLEISLKTGEDIILTFTPSENLWQSNTGISFSVNFDTRWG

SEQ ID NO: 3282 - DNA, 50 bp, Vibrio parahaemolyticus
  source 1..50: mol_type = genomic DNA
atgggtcttttaggtattaaaaataggaatcttagatataatagacccac

SEQ ID NO: 3283 - DNA, 40 bp, Vibrio parahaemolyticus; identical to SEQ ID NO: 3258
  source 1..40: mol_type = genomic DNA

SEQ ID NO: 3284 - DNA, 50 bp, Vibrio parahaemolyticus; identical to SEQ ID NO: 3282
  source 1..50: mol_type = genomic DNA

SEQ ID NO: 3285 - DNA, 40 bp, Vibrio parahaemolyticus; identical to SEQ ID NO: 3260
  source 1..40: mol_type = genomic DNA

SEQ ID NO: 3286 - protein, 556 aa, Vibrio parahaemolyticus
MSTPIAYSYIRFSSLEQAKGDSFRRQTTLAKDYCDKHGLNLADLTLRDLGKSAYHGTHFKDGALGEFINAVKEGTIPKGSYLLVESMDRLSREKISIALGRFMELLGLGISIVTLQDNRTYTTESLDRIEDLMLSLVFMMRAHEESLTKSKRLKAAHAEKRKQARENLKPTGYNMPHWIKLTESGYELIPERVELLKRIFQMTIDGLGAIAIHKQLNQEAIKPWGRSKTGWHTTYIKKILRARTVLGEYQPFKTENGKRIEDGEPIQGYYPEAIDVDTFKRANLAIESRNGKSSGTRKNAINNLFTGLVVCKNCGATMHYLNKGSGSKGGQYLVCSRARQGAHHDGVSCKYASMRYPVIEDAVLSIAATLNLRLHTAHNEAESAQLKEQLSSVSLNLKTVEVSIVRLVDLLDSSSGSKALLTKLEQREAEQQELEQRYRELEKRLDEIEFTPKSNNVWKELKHTLKTLKFEAADRTNVPLRAKINSQLVQCIEKIEFDASAKVVTIKIDESREVLLKFDNKQHSYVVKPSWDVREFLPATFIVKETARRASDLIYR

SEQ ID NO: 3287 - DNA, 50 bp, Vibrio parahaemolyticus
  source 1..50: mol_type = genomic DNA
tggggtgataccagttacagcaagctattagaatgtctgaaataacccca

SEQ ID NO: 3288 - DNA, 40 bp, Vibrio parahaemolyticus; identical to SEQ ID NO: 3253
  source 1..40: mol_type = genomic DNA

SEQ ID NO: 3289 - DNA, 50 bp, Vibrio parahaemolyticus; identical to SEQ ID NO: 3287
  source 1..50: mol_type = genomic DNA

SEQ ID NO: 3290 - DNA, 40 bp, Vibrio parahaemolyticus; identical to SEQ ID NO: 3255
  source 1..40: mol_type = genomic DNA

SEQ ID NO: 3291 - protein, 551 aa, Vibrio parahaemolyticus
MKQQLAYSYVRFSSPQQAKGDSFRRQTKAAREYCEKHGLQLADLTLHDLGLSAYSGTHYEQGALGDFVRAVQQGKVDQGSYLIVESLDRLSREEVDIAFSRFASLLRANINIVTLQDGKQFTRESLKNTTDILTSILVMLRAFEESDIKAKRIKAARDEKHRQARENKKPTGYRPPDWMKLESGSYQLIPERAAIIKRIFQLNNGGLGAIAIARLLNEEQIPAWGRSKTGWQTSYIKKILKTRTVLGEYQPHVVVNRVRSAVGEPITDFYPPVIDPKTFKLAQLTMTSRDKRPGGIRNSRMTNLFTGLVRCKHCGNTMHFVDKGRPPKGGQYLLCSLAKTGAINKDGVSCKRVSIRYKETEDAILTVAATLNLRVTKPSNEAEVSNLKEKLSRVNAELGTVENSITRIADAIAELPDSSGLLSKLVELEQQKQDKKSEYQALEKRIDELELIPKSLNVWKELKSTLRTLRVEAADKANVELRAKINSQLLSCIDRIEFDNHAKAITVCIDENRSVEIRFAEKMKGYTIKPSWDNRDFLPKTFLVKSVARTI

SEQ ID NO: 3292 - DNA, 50 bp, Vibrio parahaemolyticus
  source 1..50: mol_type = genomic DNA
tggggagattcaagctacaacaagcttaagttgtacctcaaataacccca

SEQ ID NO: 3293 - DNA, 40 bp, Vibrio parahaemolyticus; identical to SEQ ID NO: 3253
  source 1..40: mol_type = genomic DNA

SEQ ID NO: 3294 - DNA, 50 bp, Vibrio parahaemolyticus; identical to SEQ ID NO: 3292
  source 1..50: mol_type = genomic DNA

SEQ ID NO: 3295 - DNA, 40 bp, Vibrio parahaemolyticus; identical to SEQ ID NO: 3255
  source 1..40: mol_type = genomic DNA

SEQ ID NO: 3296 - protein, 555 aa, Vibrio parahaemolyticus
MKLAYSYVRFSSPEQAKGDSLRRQTESARDYCERKGLKLADLTLKDLGLSAYHGVHFKDGALGEFIKAVEAEQIPKGAYLLVESIDRFSREKIHVAYRRFSELLELGINIVTLQDERVYTEASLNNLGDIMISLVTMSRAFEESDVKAKRLREAHAAKRAAARKNKTPTGYRPPDWLVQASQGYDLIPERVAIIRRIFQLTIDGLGAIAISKLLNREGVPTWGRSKTGWQTTYIKKLLRTRTVLGEYQPHKTVNRKREPDGEPIHGYYPPIIDPQTFRKADLAIRSRDRRPVSVRKAAVNNIFTGLVKCKNCGNTMHYVNKGRDSVKGGQYLVCSMARTGALVNGQKCSYSSMRYQVIEDAVLHIASIISLDLSPPDNSQELQSLKNELAVAESVRAELESTVESLIDKLEKVDDDELLLNRYNKRSQELKEQRQSCTEILKAIDELECKPTELHIFKKLSETVKKLKTEAADRENVVLRTRINSQLVSMLESIDIDGSNKLVSIQVDGTKTIDLRFDKRQKNYMVKPSWDRREFPPKTFAVKYATGSFRTQLFS

SEQ ID NO: 3297 - DNA, 50 bp, Vibrio parahaemolyticus
  source 1..50: mol_type = genomic DNA
tggggtgattccagttatcaaactcttatagattgtctggaataaccccg

SEQ ID NO: 3298 - DNA, 40 bp, Vibrio parahaemolyticus; identical to SEQ ID NO: 3253
  source 1..40: mol_type = genomic DNA

SEQ ID NO: 3299 - DNA, 50 bp, Vibrio parahaemolyticus; identical to SEQ ID NO: 3297
  source 1..50: mol_type = genomic DNA

SEQ ID NO: 3300 - DNA, 40 bp, Vibrio parahaemolyticus; identical to SEQ ID NO: 3255
  source 1..40: mol_type = genomic DNA

SEQ ID NO: 3301 - protein, 604 aa, Phocaeicola dorei
MIKIIGYARVSTTKQDLSRQKLKIKEFCENNNYELIEIIEDFGISGVVADRKGYIELQSKTYKDADMIVISELSRLSRQEDVTETVYNIQQIINKGLSVILLDSPSKIYEANKLLDITEILILTIKAWAAAQERLDIKKKNQDGKQALFQAYPYAVVDQKIPYGYKAVPNPNGKRPKYILEEVPEEVENIKRLFALVNSGKTLGAVARYFNERNITFRGYYSTVAILSNYIHSDIYRGIRRRTQRLGREEPYTIEVRIKPIISEEDFMKAQELIKNNYKNTPTGKVNHNPLKGIIRCRCGRAMTVKDKKPAAGISKLTYRCSCVDRKSHPDFCKYNIDEVSYDLTNEILYSLFKSMHTAEYINFFRNQTDNRVTELQEEIAGIEKRLSTLYLDKENLSNESQENANKFLLTTNPTLLNIIQEKQNQLDEKIKSIDKEIIRYKKSQSKKIADIERIKDNNGKEKLQNLSIEEQGELYHKYLERVNYIPVTTMQGYYIVQFLNGIKFYIAITKVRSIAMASLLLDNWTIDEKGIITANYDTLKSSDMKNFSIEMIRKTKTMTLQEYLKSDLAKERALHLDLSYRERYLEELHKAGLDGRLRPLKKE

SEQ ID NO: 3302 - DNA, 50 bp, Phocaeicola dorei
  source 1..50: mol_type = genomic DNA
ttgggtttttctattttattatactcacttaactaaatagacttgcccaa

SEQ ID NO: 3303 - DNA, 40 bp, Phocaeicola dorei
  source 1..40: mol_type = genomic DNA
aggaacctgaagacaatattcaaaaaaagcaattgcccaa

SEQ ID NO: 3304 - DNA, 50 bp, Phocaeicola dorei; identical to SEQ ID NO: 3302
  source 1..50: mol_type = genomic DNA

SEQ ID NO: 3305 - DNA, 40 bp, Phocaeicola dorei
  source 1..40: mol_type = genomic DNA
aggtatgtgaagagaatattcaacataaataattgcccaa

SEQ ID NO: 3306 - protein, 604 aa, Phocaeicola dorei
MIKIIGYARVSTTKQDLSRQKLKIKEFCENNNYELIEIIEDFGISGVVADRKGYIELQSKTYKDADMIVISELSRLSRQEDVTETVYNIQQIINKGLSVILLDSPSKIYEANKLLDITEILILTIKAWAAAQERLDIKKKNQDGKQALFQAYPYAVVDQKIPYGYKAVPNPNGKRPKYILEEVPEEVENIKRLFALVNSGKTLGAVARYFNERNITFRGYYSTVAILSNYIHSDIYRGIRRRTQRLGREEPYTIEVRIKPIISEEDFMKAQELIKNNYKNTPTGKVNHNPLKGIIRCRCGRAMTVKDKKPAAGISKLTYRCSCVDRKSHPDFCKYNIDEVSYDLTNEILYSLFKSMHTAEYINFFRNQTDNRVTELQEEIAGIEKRLSALYLDKENLSNESQDNANKFLLTTNPTLLNIIQEKQNQLDEKIKSIDKEIIRYKKSQSKKMADIERIKDNNGKEKLQNLSIEEQGELYHKYLERVNYIPVTTMQGYYIVQFLNGIKFYIAITKVRSIAMASLLLDNWTIDEKGIITANYDTLKSSDMKNFSIEMIRKTKTMTLQEYLKSDLAKERALHLDLSYRERYLEELHKAGLDGRLRPLKKE

SEQ ID NO: 3307 - DNA, 50 bp, Phocaeicola dorei; identical to SEQ ID NO: 3302
  source 1..50: mol_type = genomic DNA

SEQ ID NO: 3308 - DNA, 40 bp, Phocaeicola dorei; identical to SEQ ID NO: 3303
  source 1..40: mol_type = genomic DNA

SEQ ID NO: 3309 - DNA, 50 bp, Phocaeicola dorei; identical to SEQ ID NO: 3302
  source 1..50: mol_type = genomic DNA

SEQ ID NO: 3310 - DNA, 40 bp, Phocaeicola dorei; identical to SEQ ID NO: 3305
  source 1..40: mol_type = genomic DNA

SEQ ID NO: 3311 - protein, 604 aa, Phocaeicola vulgatus
MVKIIGYARVSTTKQDLSRQKLKIKEFCENNNYELIEIIEDFGISGVVADRKGYIELQSKTYKDADMIVISELSRLSRQEDVTETVYNIQQIINKGLSVILLDSPSKIYEANKLLDITEILILTIKAWAAAQERLDIKKKNQDGKQALFQAYPYAVVDQKIPYGYKAVPNPNGKRPKYILEEVPEEVENIKRLFALVNSGKTLGAVARYFNERNITFRGYYSTVAILSNYIHSDIYRGIRRRTQRLGREEPYTIEVRIKPIISEEDFMKAQELIKNNYKSTPTGKVNHNPLKGIIRCRCGRAMTVKDKKPAAGISKLTYRCSCVDRKSHPDFCKYNIDEVSYDLTNEILYSLFKSMHTAEYINFFRNQTDNRVTELQEEIAGIEKRLSTLYLDKENLSNESQDNANKFLLTTNPTLLNIIQEKQNQLDEKIKSIDKEIIKYKKSQSKKMADIERIKDNNGKEKLQNLSIEEQGELYHKYLERVNYIPVTTMQGYYIVQFLNGIKFYIAITKVRNIAMASLLLDNWTIDEKGLITANYDTLKSSDMKNFSIEIIRKEKTMTLQKYLKSDLAKERALHLDLSYRERYLEQLHKAGLDGRHRPLKKE

SEQ ID NO: 3312 - DNA, 50 bp, Phocaeicola vulgatus
  source 1..50: mol_type = genomic DNA
ttgggtttttccgttttattatactcacttaactaaatagacttgcccaa

SEQ ID NO: 3313 - DNA, 40 bp, Phocaeicola vulgatus; identical to SEQ ID NO: 3303
  source 1..40: mol_type = genomic DNA

SEQ ID NO: 3314 - DNA, 50 bp, Phocaeicola vulgatus; identical to SEQ ID NO: 3312
  source 1..50: mol_type = genomic DNA

SEQ ID NO: 3315 - DNA, 40 bp, Phocaeicola vulgatus; identical to SEQ ID NO: 3305
  source 1..40: mol_type = genomic DNA

SEQ ID NO: 3316 - protein, 604 aa, Phocaeicola vulgatus
MIKIIGYARVSTTKQDLSRQKLKIKEFCENNNYELIEIIEDFGISGVVADRKGYIELQSKTYKDADMIVISELSRLSRQEDVTETVYNIQQIINKGLSVILLDSPSKIYEANKLLDITEILILTIKAWAAAQERLDIKKKNQDGKQALFQAYPYAVVDQKIPYGYKAVPNPNGKRPKYILEEVPEEVENIKRLFALVNSGKTLGAVARYFNERNITFRGYYSTVAILSNYIHSDIYRGIRRRTQRLGREEPYTIEVRIKPIISEEDFMKAQELIKNNYKNTPTGKVNHNPLKGIIRCRCGRAMTVKDKKPAAGISKLTYRCSCVDRKSHPDFCKYNIDEVSYDLTNEILYSLFKSMHTAEYINFFRNQTDNRVTELQEEIAGIEKRLSVLYLDKENLSNESQDNANKFLLTTNPTLLNIIQEKQNQLDEKIKSIDKEIIRYKKSQSKKMADIERIKDNNGKEKLQNLSIKEQGELYHKYLERVNYIPVTTMQGYYIVQFLNGIKFYIAITKVRSIAMASLLLDNWTIDEKGIITANYDTLKSSDMKNFSIEMIRKTKTMTLQEYLKSDLAKERALHLDLSYRERYLEELHKAGLDGRLRPLKKE

SEQ ID NO: 3317 - DNA, 50 bp, Phocaeicola vulgatus; identical to SEQ ID NO: 3312
  source 1..50: mol_type = genomic DNA

SEQ ID NO: 3318 - DNA, 40 bp, Phocaeicola vulgatus; identical to SEQ ID NO: 3303
  source 1..40: mol_type = genomic DNA

SEQ ID NO: 3319 - DNA, 50 bp, Phocaeicola vulgatus; identical to SEQ ID NO: 3312
  source 1..50: mol_type = genomic DNA

SEQ ID NO: 3320 - DNA, 40 bp, Phocaeicola vulgatus; identical to SEQ ID NO: 3305
  source 1..40: mol_type = genomic DNA

SEQ ID NO: 3321 - protein, 604 aa, Phocaeicola vulgatus
MVKIIGYARVSTTKQDLSRQKLKIKEFCENNNYELIEIIEDFGISGVVADRKGYIELQSKTYKDADMIVISELSRLSRQEDVTETVYNIQQIINKGLSVILLDSPSKIYEANKLLDITEILILTIKAWAAAQERLDIKKKNQDGKQALFQAYPYAVVDQKIPYGYKAVPNPNGKRPKYILEEVPEEVENIKRLFALVNSGKTLGAVARYFNERNITFRGYYSTVAILSNYIHSDIYRGIRRRTQRLGREEPYTIEVRIKPIISEEDFMKAQELIKNNYKSTPTGKVNHNPLKGIIRCRCGRAMTVKDKKPAAGISKLTYRCSCVDRKSHPDFCKYNIDEVSYDLTNEILYSLFKSMHTAEYINFFRNQTDNRVTELQEEIAGIEKRLSTLYLDKENLSNESQDNANKFLLTTNPTLLNIIQEKQNQLDEKIKSIDKEIIKYKKSQSKKMADIERIKDNNGKEKLQNLSIEEQGELYHKYLERVNYIPVTTMQGYYIVQFLNGIKFYIAITKVRNIAMASLLLDNWTIDEKGLITANYDTLKSSDMKNFSIEMIRKAKTMTLQEYLKSDLAKERALHLDLSYRERYLEQLHKAGLDGRHRPLKKE

SEQ ID NO: 3322 - DNA, 50 bp, Phocaeicola vulgatus; identical to SEQ ID NO: 3312
  source 1..50: mol_type = genomic DNA

SEQ ID NO: 3323 - DNA, 40 bp, Phocaeicola vulgatus; identical to SEQ ID NO: 3303
  source 1..40: mol_type = genomic DNA

SEQ ID NO: 3324 - DNA, 50 bp, Phocaeicola vulgatus; identical to SEQ ID NO: 3312
  source 1..50: mol_type = genomic DNA

SEQ ID NO: 3325 - DNA, 40 bp, Phocaeicola vulgatus; identical to SEQ ID NO: 3305
  source 1..40: mol_type = genomic DNA

SEQ ID NO: 3326 - protein, 604 aa, Phocaeicola vulgatus
MIKIIGYARVSTTKQDLSRQKLKIKEFCENNNYELIEIIEDFGISGVVADRKGYIELQSKTYKDADMIVISELSRLSRQEDVTETVYNIQQIINKGLSVILLDSPSKIYEANKLLDITEILILTIKAWAAAQERLDIKKKNQDGKQALFQAYPYAVVDQKIPYGYKAVPNPNGKRPKYILEEVPEEVENIKRLFALVNSGKTLGAVARYFNERNITFRGYYSTVAILSNYIHSDIYRGIRRRTQRLGREEPYTIEVRIKPIISEEDFMKAQELIKNNYKNTPTGKVNHNPLKGIIRCRCGRAMTVKDKKPAAGISKLTYRCSCVDRKSHPDFCKYNIDEVSYDLTNEILYSLFKSMHTAEYINFFRNQTDNRVTELQEEIAGIEKRLSALYLDKENLSNESQDNANKFLLTTNPTLLNIIQEKQNQLDEKIKSIDKEIIRYKKSQSKKMADIERIKDNNGKEKLQNLSIEEQGELYHKYLERVNYIPVTTMQGYYIVQFLNGIKFYIAITKVRSIAMASLLLDNWTIDEKGLITANYDTLKSSDMKNFSIEMIRKAKTMTLQEYLKSDLAKERALHLDLSYRERYLEQLHKAGLDGRHRPLKKE

SEQ ID NO: 3327 - DNA, 50 bp, Phocaeicola vulgatus; identical to SEQ ID NO: 3312
  source 1..50: mol_type = genomic DNA

SEQ ID NO: 3328 - DNA, 40 bp, Phocaeicola vulgatus; identical to SEQ ID NO: 3303
  source 1..40: mol_type = genomic DNA

SEQ ID NO: 3329 - DNA, 50 bp, Phocaeicola vulgatus; identical to SEQ ID NO: 3312
  source 1..50: mol_type = genomic DNA

SEQ ID NO: 3330 - DNA, 40 bp, Phocaeicola vulgatus; identical to SEQ ID NO: 3305
  source 1..40: mol_type = genomic DNA

SEQ ID NO: 3331 - protein, 604 aa, Phocaeicola vulgatus
MTKIIGYARVSTTKQDLSRQKLKIKEFCENNNYELIEIIEDFGISGVVSDRRGYLELQSRTYKDADMIVISELSRLSRQEDVTETVHNIQQIINKGLSVILLDSPSKIYEANKLLDITEILILTIKAWAAAQERLDIKKKNQDGKQALFQAYPYAVVDQKIPYGYKAVPNPNGKRPKYILEEVPEEVENIKRLFALVNSGKTLGAVARYFNERNITFRGYYSTVAILSNYIHSDIYRGIRRRTQKLGREEPYTIEVRIKPIINEEDFMKAQELIKNNYKNTPTGKVNHNPLKGIIKCRCGRAMTVKDKKPAAGISKLTYRCSCVDRKSHPDFCKYNIDEVSYDLTNEILYSLFKSMHTAEYINFFRNQTDNRVTELQEEIAGIEKRLSTLYLDKENLSNESKENANKFLLTTNPTLLNIIQEKQNQLDDKIKSIDKEIVKYKKSQSKKAADIERIKDNNGKEKLQNLSIEEQGELYHKYLERVNYIPVTTMQGYYIVQFLNGIKFYIAITKVRSIAMASLLLDNWTIDEKGIITANYDTLKSSDMKNFSIEMIRKTKTMTLQEYLKSDLAKERALHLDLSYRERYLKELHKAGLDGRLRPLKKE

SEQ ID NO: 3332 - DNA, 50 bp, Phocaeicola vulgatus
  source 1..50: mol_type = genomic DNA
ttgggtttttctattttattatactcgcttaactaaacagacttgcccaa

SEQ ID NO: 3333 - DNA, 40 bp, Phocaeicola vulgatus; identical to SEQ ID NO: 3303
  source 1..40: mol_type = genomic DNA

SEQ ID NO: 3334 - DNA, 50 bp, Phocaeicola vulgatus; identical to SEQ ID NO: 3332
  source 1..50: mol_type = genomic DNA

SEQ ID NO: 3335 - DNA, 40 bp, Phocaeicola vulgatus; identical to SEQ ID NO: 3305
  source 1..40: mol_type = genomic DNA

SEQ ID NO: 3336 - protein, 580 aa, Blautia obeum
MVRRKTALRGVSASTRITKVAIYIRVSTIHQVDKDSIPMQKKDLIAYCQLILGTDNYEIFEDAGYSGKNTDRPAFQDMMGRIRKGEFTHVLVWKIDRISRNLLDFAEMYEELQSLRVTFVSKNEQFDTSTAIGEAMLKIVLVFAELERNMTSERVTATMISRANNGQWNGGRIPFGYSYDSGTSTFSIREDEAVVCRRLKDLYLDNKSLVYTARALNADGYKTRAGADWTPTAVWIIASSPFYAGIYRYNRYKGTENRTLNPEEEWVMIPEHHPAIFTLEEHEAMKSSLKTNARYVDNPVGKPHATANIHIFQGIAYCGKCGNKMVSTPGKKHADGYRPSNYSCPLHRRSKKCDNATVNDMIVGEFAINYILNMLNAKKTFSNIDTPEELQRHLLTGSTFSDISSIEEDGLNDFFNLLSRYGSDNSYVFAIKTPRRKKASVNPELAALRKEKEKQERALQRLQDLYLYSDKSMSEKDFILRKSEISDRLKDINAQLGLITQNPDSLLSDEEFIKQASHLLIQKELKGRKYIYYKNLATSVDPEILRTYMETILDSMYIIDGRISSIVFKNGLTHKFIYKN

SEQ ID NO: 3337 - DNA, 50 bp, Blautia obeum
  source 1..50: mol_type = genomic DNA
ggatgttaaatgataagcatggcatcccggatatttatgaattgtaacca

SEQ ID NO: 3338 - DNA, 40 bp, Blautia obeum
  source 1..40: mol_type = genomic DNA
tcagagaatcagcatggcatccccaaacgaaaagaaacga

SEQ ID NO: 3339 - DNA, 50 bp, Blautia obeum; identical to SEQ ID NO: 3337
  source 1..50: mol_type = genomic DNA

SEQ ID NO: 3340 - DNA, 40 bp, Blautia obeum
  source 1..40: mol_type = genomic DNA
acagaaaatcagcatggcatccgcacaggaaaaaagaaga

SEQ ID NO: 3341 - protein, 512 aa, Arthrobacter zhaoguopingii
MNEIPVGPATAASIYVRRSSRQDLGKNQSLQEQETDCRRLAASLGLSVVEVYLEREGTGASRRSAKARPEWKRALHDLDSGERFHTLIVWSLDRADRRGADTLAALLTKHAATGRRILGLDGTDTSDERQRLVTIIRGEIAREEAENTAKRVLRTKASRRAEGSWLGGSPPYGLMIADGKVAPDPVTAPTARFIAEQALAGRSLWALARELQKQGIPSPKGGTWTVGSLSALLRSPAFAGLQSVRRRSASGAWPAIADVYLDPDSRQPVSVGEGIISPTERSLILATLASRSSEYERGVVRGRKGSSTITGGLLRCDACGSRSSASSSSNGGSYRCAAMARGLDCDSPFTAPRVGVDEYVARRFLSYLAALEPGDGRLDRIAERWAVHVDPTSAAERAEAQSAVDAVEADLARARRLAVSGVLTEEEAAAEISRLRTLLKRAGEALGALPRPEVDVSPLLDLVESAEAWEALPGQDRRDLLTLAIREVRVSRASGRGVRFDPSSRVSIAWID

SEQ ID NO: 3342 - DNA, 50 bp, Arthrobacter zhaoguopingii
  source 1..50: mol_type = genomic DNA
gggaagattttgatcctcgacttctgcgagtcctgacagaaaagactaac

SEQ ID NO: 3343 - DNA, 40 bp, Arthrobacter zhaoguopingii
  source 1..40: mol_type = genomic DNA
gatcgtcctgctcgatttctggaccttctgctgcatcaac

SEQ ID NO: 3344 - DNA, 50 bp, Arthrobacter zhaoguopingii
  source 1..50: mol_type = genomic DNA
gggaagattttgatcctcgacttcttcgagtcctgacagaaaagactaac

SEQ ID NO: 3345 - DNA, 40 bp, Arthrobacter zhaoguopingii
  source 1..40: mol_type = genomic DNA
aatagtcgtccttgatttcttcacctactgctgcataaac

SEQ ID NO: 3346 - protein, 484 aa, Actinosynnema pretiosum
MSTTRCAIYARISEDREGAHLGVDRQVADCRELAARLGWDVVHVFTDNDISAYSGKPRPGYRALLAAMRDGEIGGVLAWHTDRLHRNVRELLDYITTSNAGGVDTHTCRAGQLDLTTPTGRASAITQAAWAAQESEHKADRVRRARLEAAQEGRWQGGARPFGYGPDGESLNPAEAAEITRAAEVILAGGSLRSVVRDLNARGVQTTFHKAEWSTIAFRDVLLRPRNAGLVVYRGEVLEGVTARWPAILPEPTWRALVAVLTDPARRTNGANNAVKWLGSGLYLCGVCELPTLRASVAGGSRAPAYRCSSRDRQITGPHVSRRATAVDEVVERVLVERLSRPDAVDLLRRRTDAVDVAALNTEIQAVRHQLDALDDDLDAGTISRARWARRNERLKTRLDELDKALAGAVRVDPLAGVVGAPDVARVWFGTLPDRSDGLDLGRRRSILDAVVTVTVRRQAPGRRADGSYFDENSLGWDWKDDAR

SEQ ID NO: 3347 - DNA, 50 bp, Actinosynnema pretiosum
  source 1..50: mol_type = genomic DNA
gggtgtctccgccggggtttcgggaagacgagacccactctatgacaccc

SEQ ID NO: 3348 - DNA, 40 bp, Actinosynnema pretiosum
  source 1..40: mol_type = genomic DNA
gggcgggacgggctcgggcaagaccaccctgctggccgcg

SEQ ID NO: 3349 - DNA, 50 bp, Actinosynnema pretiosum
  source 1..50: mol_type = genomic DNA
gggtgtctccgccggggtttcggggggacgagacccactctatgacaccc

SEQ ID NO: 3350 - DNA, 40 bp, Actinosynnema pretiosum
  source 1..40: mol_type = genomic DNA
gggcggggccgggccgggcgggagcagccggctggcggcg

SEQ ID NO: 3351 - protein, 572 aa, Amycolatopsis sp AA4
MQTESDDKKGAVKRSVYLLRVSDKKQMYTAMDIDPEGNSIPTQREWCDKRNRELKALKVDEYIEPGYSGQEMNKRPIFKQLLKRIVEQRDVDYVVIYMRSRIFRNYIEAAIVKQQLGQLGVKLVSARENFGEGYLAEGMEAMVDVMNWMDVKRNGEDIKVKMLNKVKNGGTNGRARLGYINTAAMIDGHKVNTIAVDEERAKYVKIAFKLFATGKYNVDDLRDKLTDLGLRMPRTNEPISRQTLYARLRDRYYLGYVIHKGMEYPGRHPKLVTEELFDKVQRVLESHSGSGVRHRKHHHYLKGTIWCDRCKQRFMVQRAKGRTGGVYFYFFCGGREDKVCEQPYIPVNAMEAAVEAHYGRVLRLSSAFRSAVRDAVDAAVATSSSLSDDMRAEFERRLTKLDKKEDYFLELAADEDWPKDKLRAKVQALRSELQKIRQQLDQAEAQLEAGREVFYTALSLLERPQDVYLAGSEEVRTVLNRAFFTRLCVDVEEDVPTVTSHELTEPFGVLWATYAHYEAAQAAELGETLERGSEKQTGVALGEHGACDLRVSLSEAVDRALLADGSSTSDMV

SEQ ID NO: 3352 - DNA, 50 bp, Amycolatopsis sp AA4
  source 1..50: mol_type = genomic DNA
tgatggttctagtacgtctgacatggtggacctaattacccactactcca

SEQ ID NO: 3353 - DNA, 40 bp, Amycolatopsis sp AA4
  source 1..40: mol_type = genomic DNA
gtgcgggggtggcggccggggtggggccggagagactcga

SEQ ID NO: 3354 - DNA, 50 bp, Amycolatopsis sp AA4
  source 1..50: mol_type = genomic DNA
tgatggttctagtacgtctgacatcgtggacctaattacccactactcca

SEQ ID NO: 3355 - DNA, 40 bp, Amycolatopsis sp AA4
  source 1..40: mol_type = genomic DNA
gtgcggggctggcgacaggcgcgggcccggtgagacccgg

SEQ ID NO: 3356 - protein, 523 aa, Vibrio jasicida
MRFSRPEQAKGTSIERQSHFAEQYAQDHGLELDKSLTMMDKGLSAFHGVHKTKGAFGQFLAAVTAGKVKSGSVLVVESLDRLSREDPLIAQSALSDLILSGITVVTAADNQVYSRDEIQQNPFKLIMSLVVMIRANEESETKQRRSNAFLKSALKQYQTSGKIRRLGADPSWLDYNKEDGTYSFNERVEVIRRILALYNQGIGSLKIARQLTEENIPTLSGKRSAWGQTTVANIVKSHALYGMKRINVQGVDYDLEDFYPELITKSKWLALQQHRTKRSKSMHGRGEAVHLITGHGKGFTTCGYCGGGLGAQTQKQYKRSGEYSKTVTRLHCLTHKETSSCCSSVFLEPIESAVLFAACIGVQPQALVPTVNAIDHNALIDEIDAKIKHIVEQVTSGAPWDLFKDVHDKMKQDKKKLQSERDSQKPDIDQNDLEKWVDELVNLADKAKSGDKAARLRCRTLIKSVCKNIVIKLRGHDSKSEPLVIVTFVTDEQFEFRVASDGTLRFVDNDMAVNRRLRELDTQ

SEQ ID NO: 3357 - DNA, 50 bp, Vibrio jasicida
  source 1..50: mol_type = genomic DNA
tagttatgcactgtacatttgctctctgtctaatgtatagtgataactta

SEQ ID NO: 3358 - DNA, 40 bp, Vibrio jasicida
  source 1..40: mol_type = genomic DNA
gaagtaaccgaaggcaccatctgtccagtggatgtcttgc

SEQ ID NO: 3359 - DNA, 50 bp, Vibrio jasicida
  source 1..50: mol_type = genomic DNA
tagttatgcactgtacatttgctctttgtctaatgtatagtgataactta

SEQ ID NO: 3360 - DNA, 40 bp, Vibrio jasicida
  source 1..40: mol_type = genomic DNA
gaagtaaaggaaggcggcatttgtccagtgcaagtcgtcc

SEQ ID NO: 3361 - protein, 501 aa, Bacillus toyonensis
MKPDIKEVAIYLRKSRDESDGKEDVLAKHESLLLEYAKNHNLKYKIYKEIGSSEYIDSRPKMVRLLSDVSQKLYDAVLVVDLDRLSRGDLEEMGRISRVFRDSKTIVITPTKTYDFNNEDQALINNFEMVFANHEFRMIRKRMIRGKQQGTKAGKWTNGRPPFPYVYNRLTKELDVDPDKVKVYELMKKMFLEDMKATYEIAWKLNELGFKTNRNSYWYENTVRRILKNEVHLGKVVYGKTSGSGSKKKLNANGVQIKDRSEWIIAEGSHQPLKTEEEHQRILAILESRRYTPKGTRTNVQVLSKLIYCGKCNRVMSFTGKASGKKYVKTCLTTDHFGNRCHNRCLNVEVIYAQLFLDLEDYEQQLLNHEPKEKQGDSSTLQLALHNKLVELERLEKGIERIKDLFIDEMIDKSEMQMRIEKQKQSMQTKKEEIRSIEQSLAVIENVITDDDRLHAIKEFKKAWNTEGIRKKELNTLAKQLIDRIEYVREGNNVQINIKFL

SEQ ID NO: 3362 - DNA, 50 bp, Bacillus toyonensis
  source 1..50: mol_type = genomic DNA
aggtttcactagattacctttcaaaagtgaaatgtaacttggtgaaacct

SEQ ID NO: 3363 - DNA, 40 bp, Bacillus toyonensis
  source 1..40: mol_type = genomic DNA
caatttttttacctttcaaaaatgtaaggtttttgtcatt

SEQ ID NO: 3364 - DNA, 50 bp, Bacillus toyonensis
  source 1..50: mol_type = genomic DNA
aggtttcactagattacctttcaagggtgaaatgtaacttggtgaaacct

SEQ ID NO: 3365 - DNA, 40 bp, Bacillus toyonensis
  source 1..40: mol_type = genomic DNA
gagtttttttatatttccaggatataaggtttttatcata

SEQ ID NO: 3366 - protein, 501 aa, Bacillus toyonensis
MKPNIKEVAIYLRKSRDESDGKEDVLAKHESLLLEYVKNHNLKYEIYKEIGSSEYIDSRPKMVRLLNDVSQKLYDAVLVVDLDRLSRGDLEEMGRIGRIFKDSKTIVLTPTKTYDFNDEEQALINNFEMVFANHEFRMIKKRMLRGKLQGTKAGKWTNGRPPFPYVYNRLTKELDVDSDKVKVYEFMKKMFLEDMKATYEIAWKLNELGFKTNRNSYWYENTVRRLLINEVHLGKVVYGKTSGSGSKKKLNANGVQIKDRSEWIIAEGSHQQLKTEEEHQRILAILESRRYTPKGTRTNVQVLSKLIYCGKCNRVMSFTGKASGKKYVKTCLTTDHFGNRCHNRCLNVEVIYAQLFLDLEQYEQQLLNHEPKEKQGDSSTLQLALHNKLEELERLEKGVNRIKDLFIDEVIDKSEMKKRLEKQKQLMQTKKEEIRSIEQSLAVIENIRTDNDRLHAIREFKKAWNTEGISKRELNTLAKQLIDRIEYVREGNNVQINIKFL

SEQ ID NO: 3367 - DNA, 50 bp, Bacillus toyonensis
  source 1..50: mol_type = genomic DNA
aagtttcaccagattacctttcaaaaatgtaatgtaacttggtgaaactt

SEQ ID NO: 3368 - DNA, 40 bp, Bacillus toyonensis; identical to SEQ ID NO: 3363
  source 1..40: mol_type = genomic DNA

SEQ ID NO: 3369 - DNA, 50 bp, Bacillus toyonensis
  source 1..50: mol_type = genomic DNA
aagtttcaccagattacctttcaaggatgtaatgtaacttggtgaaactt

SEQ ID NO: 3370 - DNA, 40 bp, Bacillus toyonensis; identical to SEQ ID NO: 3365
  source 1..40: mol_type = genomic DNA

SEQ ID NO: 3371 - protein, 566 aa, Veillonella seminalis
MRNFEKITALYERLSRDDELQGESNSIVNQKKILEEYASKNNLTNIIHFTDDGISGTQFDRPGFMAMMNGVNQGNIGCIIVKDMSRLGRDYLKVGQCMEILRQKGVRLIAINDNVDSFYREDDFTPFRNIMNEWYARDTSRKIQSTFRSKGESGKHTASTPPYGYIKDEKDKNKWIVDEKAAEIVRRIFNLTMQGNGPYRIAKILESEKVDIPAYHQQKLGYGLYQSKNFEHPYRWCSSTIASILKKQEYLGHTVNFKTRKHFKDKKSKYVSEDNWLIFENTHEPIIDQETFDNVQRIRGNVKRYPDGWGEYHPLTGLMYCADCGSKMYVHRTSNYKNIPYYTCSAYTKTPCGMLCPSAHRIKAEVVLNLIQDTLKDIKKYLDEDNEAFICSIQNEMEEKEKIEIEKKKVRLTESQNRLRELERLMCRIYEDMILNKIPNSRYEILNNQYETEQITLSKEIKDLEQQVSRYEKETDRARKFISLISRYENFDELTTTMINEFVEKIIVHERDRKGSQTSKQKIEIYFNFIGNYELPQAELSEEKNKNLRKKKEKSKKEKTSYIKIT

SEQ ID NO: 3372 - DNA, 50 bp, Veillonella seminalis; identical to SEQ ID NO: 62
  source 1..50: mol_type = genomic DNA

SEQ ID NO: 3373 - DNA, 40 bp, Veillonella seminalis
  source 1..40: mol_type = genomic DNA
aaatataagcttgcagcaggaaaaactgcaaaatcaattt

SEQ ID NO: 3374 - DNA, 50 bp, Veillonella seminalis
  source 1..50: mol_type = genomic DNA
aaagtccttgacaagttgttacagcagtaatagaattaaggagaacactt

SEQ ID NO: 3375 - DNA, 40 bp, Veillonella seminalis
  source 1..40: mol_type = genomic DNA
aattagtaatctgcagcagcaaaaactgcaaaatcaaata

SEQ ID NO: 3376 - protein, 546 aa, Holdemanella biformis
MKKQYKVGIYCRLSVDDASNSAKAKNYIPGDKSASIENQYEILSKFVMLNGWMEVKTYRDDGYSGGNFQRPGFLEMLEDARHGLINLILVKDLSRLGRDFVEVGRYTDVIFPSLGCRFVSVLDCLDSEGDNTDMLHFRSLMNDYHLKDLSGKIKSVLYAKKKSGQYLTAYAPYGYRKSDEDKHRLVVDEEAAAVVREIYQMRCSGMAYGKIAAALNEKSILSPRWHWELHYGKKGSCKYSKLWTYATVKNILNDTVYLGIVTQNRTGSRSYKDKTMIQKPETEWICHEDAHEAIVDRKLWETVQEKNRAVKQRVASHAAPLPALFTGKLVCADCGHPLAATRETQRRKNGTSKRYVSYICSHFATTGRSACSWHRIYEISLKTLVLNEIRAHSRAVAQDENAVLDKLKQQILSESAARQEDSRLEISRLRRRIGELEHMTAKLYEDKVSGIINNDTFAVLIQESEQERIQKAERLEVLLAEERKAQQEVENIRQWAGIIRRYLDMQELDREIVEELIDHIEVGERSVIDGQRQQDVKIFYRFVGVV

SEQ ID NO: 3377 - DNA, 50 bp, Holdemanella biformis
  source 1..50: mol_type = genomic DNA
acccttcccaaacagcttatgttcttgaacagaggttattcgggaaaggg

SEQ ID NO: 3378 - DNA, 40 bp, Holdemanella biformis
  source 1..40: mol_type = genomic DNA
cccattcataatcatgatattcaatatattttggattgtt

SEQ ID NO: 3379 - DNA, 50 bp, Holdemanella biformis
  source 1..50: mol_type = genomic DNA
acccttcccaaacagcttatgttcgtgaacagaggttattcgggaaaggg

SEQ ID NO: 3380 - DNA, 40 bp, Holdemanella biformis
  source 1..40: mol_type = genomic DNA
cccattcagaataatgatagttaaaattttgtagattgat

SEQ ID NO: 3381 - protein, 485 aa, Lactococcus lactis; identical to SEQ ID NO: 501

SEQ ID NO: 3382 - DNA, 50 bp, Lactococcus lactis
  source 1..50: mol_type = genomic DNA
taattgcgagtttttatttcgtttattaaggtaactaaaaaactcctttt

SEQ ID NO: 3383 - DNA, 40 bp, Lactococcus lactis
  source 1..40: mol_type = genomic DNA
tagtacaattaacatctcaatctctatcaaagtaaaagct

SEQ ID NO: 3384 - DNA, 50 bp, Lactococcus lactis
  source 1..50: mol_type = genomic DNA
taattgcgagtttttatttcgtttaataaggtaactaaaaaactcctttt

SEQ ID NO: 3385 - DNA, 40 bp, Lactococcus lactis
  source 1..40: mol_type = genomic DNA
tagtaaaatttacatctcaaactatatagagaaaaaagct

SEQ ID NO: 3386 - protein, 533 aa, Pseudomonas moraviensis
MTKKCFPYVRFSSTRQEDGSTRTRQNELIEAFVAKHGLEVDRHLEDAGTSAFHGKHAGSDGVLGQFLKEVRKGEIEKGSYLLIENFDRLSRDKIVRSNKIFTDLLFSGIKIVILDKNKIYDADNLDFGDWITALVEFERANAESQRKSDFSSKAWKLNRDKMHNGEIVTKKVPTWLKVENNTFIIDEVKIDRIRTLFRLSLSKGLQEATKEYNSLYGEKLAIHQAQYLLSNRKLIGEHQPQKIHYNENGRLIRKDEGNPISNYYPQVIDEDLFLKVQSVITSRKPFSGRYSAQRYNVFRDLIFCRFCGGTIRYMNKGERDYFICTNSMTGKCGLKGQQSIRGKKVFGRFFKFTNGINIGTLLEENTNADEIKNELMKLENKKTKISNRLDDFKSQIKKMIMEGETIPETYNEIIVDLENSIIKYDDEIEIKNKELDKIISSFRSFYDLQGIDIEKIIYDKSQEAIEKRVQYNNELKNIIKKIQVDYLNDILHVEFSNGVNRHILNDELANEYNKDEIENSWASVVKSIAQKTN

SEQ ID NO: 3387 - DNA, 50 bp, Pseudomonas moraviensis
  source 1..50: mol_type = genomic DNA
atggaaccttttacagagcatatccagacgtgctatgttattggttccac

SEQ ID NO: 3388 - DNA, 40 bp, Pseudomonas moraviensis
  source 1..40: mol_type = genomic DNA
ccgtgcgtagcagtagatgcagccgtgttcgcagccgcga

SEQ ID NO: 3389 - DNA, 50 bp, Pseudomonas moraviensis
  source 1..50: mol_type = genomic DNA
atggaaccttttacagagcatatcaagacgtgctatgttattggttccac

SEQ ID NO: 3390 - DNA, 40 bp, Pseudomonas moraviensis
  source 1..40: mol_type = genomic DNA
ccggtcgttgcagtagatgaagccgttgtcgcagcggcac

SEQ ID NO: 3391 - protein, 572 aa, Pseudomonas sp LPH1
MTKQAVPYIRFSSFRQTEGDSYRRQAELIDRWLTQHPEYTRSNLTFEDLAKSGFSTDAGKAASGFIKIREAIEAGLIRAGDCVLLEAIDRATRRGALDAFDLLAPILRAGVSIVTIDDGTEYTEQSLNGTQIFLLVAKLQAAHGYSKTLSERVSASYEARRTRAKGGEKIKRHTPVWLDSEGNIIQEVANQIRLVFEWYISGVGKHSIAARVRESGVSQLAKCSGPTVQGWLTNHAAIGAWANSDSTGDSIHGVYPAIVEPEKFHLVQKLLEERKTERKRTSKHFLVGLVKCAHCEASMVFHSVKGVPSAMRCLTHHRLKTAGCTNNKSIPVNIIKLVQVLTSYRAFKRALAKQTLSNSDKRRISLEVEIAQATTEINKLVALALSVDIQEVQEKLIARTADRQALEAELASLNTGDTVASESLTVLREESTLMHSDPMVLNAMLKDVGYAIKCDRGGRITTSEGREQWEYLGVKRKAKSNSTEAYRLFERPYTIIMVNPDPSIEVPAIHTSDLLSEEETDIRYQRYSGLVLSALNGGGEEEHLDTPYVKISAPYVHKETKDQTNCPLKEEH

SEQ ID NO: 3392 - DNA, 50 bp, Pseudomonas sp LPH1
  source 1..50: mol_type = genomic DNA
cgttgtcactaacaaaaaacatggtcccatgatcttggtttgtgatactg

SEQ ID NO: 3393 - DNA, 40 bp, Pseudomonas sp LPH1
  source 1..40: mol_type = genomic DNA
catgcccatcaggccctggtcccagcccttgattacccgg

SEQ ID NO: 3394 - DNA, 50 bp, Pseudomonas sp LPH1; identical to SEQ ID NO: 3392
  source 1..50: mol_type = genomic DNA

SEQ ID NO: 3395 - DNA, 40 bp, Pseudomonas sp LPH1
  source 1..40: mol_type = genomic DNA
tcaccccagcagcccctggtcccagcccttgatgacctgg

SEQ ID NO: 3396 - protein, 527 aa, Pseudomonas putida
MPSAIPYIRFSSARQTSGSSAERQRQMVTRWVQDHPDYTLSDLTYEDLGRSGYHGEHVKEGGGFAKLLQAVEAGLIKGGDCVLVEAIDRTGRLPAFEMIAEVLKPILYAGVNIVTLDDQIEYTKESVNNGHLHLLAAKIQAAHSYSKALSERTKASYAIRREQAKATGKVKRHTPIWLTSGGDVIEHIAVHVRQAFELYASGVGKTTIANRLRTSGVSELSKCSGPTVEGWLRNKAVIGYWDEIPNVYPSIISDELFLLAQQRKKAVATMPRQRTSKNHLVGLVVCGVCGSNYIVHQKDGKPNNMRCGTHHRLKSAGCANSETIPYQVVSYVYSLTAVHWIERALQAIQLSANDKRKLALTSERDVASSAISRLTKLLATVDDDEITTELQSYSERRKAIDVELSVLERSPIADGNTLNAAITQDRMMIADPVQLNGLLKQAGYRISVYQGKLIKVVDEIFPWVYQGIKRKSESNVTLGYRMLHLGEEMIISPELPELINWGEYTDNPIEGIRYMLRRSHKLISVNG

SEQ ID NO: 3397 - DNA, 50 bp, Pseudomonas putida
  source 1..50: mol_type = genomic DNA
ccgtgtaactaacagaaatgttggtcacagcctttccgcaaagtacacca

SEQ ID NO: 3398 - DNA, 40 bp, Pseudomonas putida
  source 1..40: mol_type = genomic DNA
catgcccatcagcccctggtcccagcctttgatgacacgg

SEQ ID NO: 3399 - DNA, 50 bp, Pseudomonas putida; identical to SEQ ID NO: 3397
  source 1..50: mol_type = genomic DNA

SEQ ID NO: 3400 - DNA, 40 bp, Pseudomonas putida; identical to SEQ ID NO: 3395
  source 1..40: mol_type = genomic DNA

SEQ ID NO: 3401 - protein, 523 aa, Vibrio diabolicus
MNVVLYIRVSSNRQAEEGHSIEGQLQDLQNFCSRNEHVIVKEYIESGSSAYKGERPVFNQMLAEVTSNVFDVEAVIVYSLSRFARDLLYQLASIKKLEDSGIKLISATEPLPEDDMTFKSLTVVLGLVNEMNSRQNAINVKSRLTQTAEAGYFTGGPVPFGYQSVACDPTKKNSRKKLVICEKEAEIVRKIYQLSLNGMRGKALGVKAIAKYLNDKAISNRGSKWSINAVHRLLCSTTYFGEFVFGKSRKDNKLPQVVVPVRPIIDRELFNSVQNGLQSRDVEQIHVKAIRSRSLLTGLIKCGNCGRGMTVATGKSGKYKYYACATKLKNGVSLCDSKWVSKPNLELEVEELILKQVITKDFILDIIDDIKVMLTSKHTQSESELLKLCRKLKSIQQKLENSYEQIAAKESLIDDSYADYLTGLQHQRAELQEKIDMIKAQGHLPIRKFGDKQIEVFVKVMRRLFREQDDEAKKILYLSLLQEVRVFPDKLILKGSKLGMLAMVSKTKEGTRILVPSFISKWR

SEQ ID NO: 3402 - DNA, 50 bp, Vibrio diabolicus
  source 1..50: mol_type = genomic DNA
tgccctctttcatatcaaagtggcgggccaattgggatgattacgggcac

SEQ ID NO: 3403 - DNA, 40 bp, Vibrio diabolicus
  source 1..40: mol_type = genomic DNA
gagctctctaataagtggcggagagatagggatttgaacc

SEQ ID NO: 3404 - DNA, 50 bp, Vibrio diabolicus
  source 1..50: mol_type = genomic DNA
tgccctctttcatatcaaagtggcatgccaattgggatgattacgggcac

SEQ ID NO: 3405 - DNA, 40 bp, Vibrio diabolicus
  source 1..40: mol_type = genomic DNA
gagctcacagagaagcgacatagagaaagagatttgaacc

SEQ ID NO: 3406 - protein, 548 aa, Blautia luti
MKKTKTKCYLYTRVSTSMQVDGYSLDAQRDKLRKYAEYEDMVVAGEYSDEGFSGKNIQGRHEFQRMLQDIQDCKDGVEYVLVFKLSRFGRNAADVLNSLQLMQDFGVNLICVEDGIDSSKDSGKLMISVLSAVAEIERENIRTQTMAGREQKAREGKWNGGFAPYGYRLEKGELLIAEDEVDVIRTIFDRYIHTNDGVSGVAKYLNRQGFVKKLRQNGTIPGFSASFVKSIIDNPVYMGKIAYGRRRTEKKIGTRNEMHVVEQSEFPVYEGKHEAIISEEDWNLAQEKRKINAYRRGKVNDPTHAHILSGILKCPCCGKSLYGNIAKAHSKDKKTRYYYYCKNTVTPTGHECTFRLNIEQMEMNRMVASIISAMVSDPRFADAIKAKIGSAVDTNDLEKQLEALQAQLRQTLGTKARLERQMDGLDVNDPYYDRKISDLQRRYDEQYGAIDEIEVQIDDVQSQIRSIRQEKISGDNIYRLLLAFDQVYEAASEVERKEFMRAFIERIELFPEKQPDGNWIRKIIFNFPVPVNGTEVKELPLENETIVE

SEQ ID NO: 3407 - DNA, 50 bp, Blautia luti
  source 1..50: mol_type = genomic DNA
cccttggaaaatgaaacaatagtcgagacggttgttttgctttccaaggg

SEQ ID NO: 3408 - DNA, 40 bp, Blautia luti
  source 1..40: mol_type = genomic DNA
tgggatgactgtgcatgtggagacagttgctcttttgtcc

SEQ ID NO: 3409 - DNA, 50 bp, Blautia luti
  source 1..50: mol_type = genomic DNA
cccttggaaaatgaaacaatagtcatgacggttgttttgctttccaaggg

SEQ ID NO: 3410 - DNA, 40 bp, Blautia luti
  source 1..40: mol_type = genomic DNA
tggtaagactgttcatgagatggcaggtgctcttttctgc

SEQ ID NO: 3411 - protein, 629 aa, Klebsiella variicola
MPQLYSYIRWSTDRQDKGTTRNRQLAAAKAYADENGLEMVEILEPGVSAFRGKNRTEKLGGFIDAVKNNAIPSDSYLYCENLDRISRDQVDKALSLFLELIGLGLTIITGMDRKVYNRDTIRQNPTDLMISILMFIRGNEESETKSNRTVGNVVALVERHKEGLPVNIKSVGRHPFWIDDTGSQYEAVKKHPFYWNIAREIIDMFLSGNGVYSVKKYLDEKYPNGLKGREWDYQVLKKMRDNRALIGERTINLRGVPYKLENYYPWLCKDEAEFFLLEKRKQQNNYKSKKEGADTIKLLSGLSILRCSKCGGTMHSFMNHGKARYICTNGVHLQKNCSGWSITAQLVEHCTMIALLIGYMDKSRKNGSDTTLIEEELNEKEKFIKALDSKISNLVTAIAIAPDVNSLAHSLNEINSKRKELVLSVEKLKERLVSFQGKGSFEVDIMEFLILIQWAVFTNMEDNDRDKIRKIIDAIIEYIVVDKTNDCITIKIKYYGNDEVLVFGGVDRKPHWRFSIDFDTGKEGALTVLENDLKDVPEIQKAVSYLHKLEKGYLAMYDSAVTMLAEVGYPEIKGTQFWPNTGKHEKVTVAFDGVEHTISFNGRLPKAIASAIEKTGLTRQQFIEKFKIQ

SEQ ID NO: 3412 - DNA, 50 bp, Klebsiella variicola
  source 1..50: mol_type = genomic DNA
gctggctttatttcttgattcttagggcaccctaatgatataaatccaat

SEQ ID NO: 3413 - DNA, 40 bp, Klebsiella variicola
  source 1..40: mol_type = genomic DNA
tgagtccacgagatttttcgggcagcccagggagacgaag

SEQ ID NO: 3414 - DNA, 50 bp, Klebsiella variicola
  source 1..50: mol_type = genomic DNA
gctggctttatttcttgattcttatagcaccctaatgatataaatccaat

SEQ ID NO: 3415 - DNA, 40 bp, Klebsiella variicola
  source 1..40: mol_type = genomic DNA
tgagttcaggagattgaactaggagtccagggagaccaag

SEQ ID NO: 3416 - protein, 596 aa, Streptococcus agalactiae
MATNKKITALYERLSRDDEMVGDSNSIINQKKMLEDYADKHGYTNIMHFTDDGYSGGSFERPSWKKLIEGVENNIIDTVIVKDMSRVGRDYLQVGFYTEVMFREKGVHFIAVANSVDSDKTESAEFAPFLNIMNEWYIRDTSKKIKSVLKSRGLEGGHHTSNHAIYGYRKDKDNPSKWIIDEEAAEVVRRIFQMSLEGNGPYQIAKILTEEKVERPSYYLAQRGMGNHISNYNSTEPYLWRGTTISNILSRPEYMGYTVNFRTYKESYKSHKSKKTPKDEWIIFENTQEAIIDEETFNTVQKLRKTIRRTDSVGIANPLTGLVFCADCGAKMYNHRGKAGFKRDWLGRKTDKRRPLKDEYICSTYNLARGNFEEKCSSHYIRSEVINKLVLDTIKEVSEYVKLNEEEFIKKVYRASKEQQEKTSKLLKKRLAKEEKRISEINSLIRKLYEDNVSGKLSNKHFDMMLKDFEKEQTALEKSIEQTKDTLRDFEEDSIRADKFIALVKKYTDFSELTTQMINEFVDKIVVHEGKWENCERIQEVEIYLNFIGKFEMPKKEPTKEELEELEKLRKKREKKREYNYRYMKKVKDRIEAEGI

SEQ ID NO: 3417 - DNA, 50 bp, Streptococcus agalactiae
  source 1..50: mol_type = genomic DNA
aaatacccttgacaaaagctatcagaggttatattctatgaagtgtagat

SEQ ID NO: 3418 - DNA, 40 bp, Streptococcus agalactiae
  source 1..40: mol_type = genomic DNA
agctccaagtcattataatgaagatacacttttaaaggct

SEQ ID NO: 3419 - DNA, 50 bp, Streptococcus agalactiae
  source 1..50: mol_type = genomic DNA
aaatacccttgacaaaagctatcacaggttatattctatgaagtgtagat

SEQ ID NO: 3420 - DNA, 40 bp, Streptococcus agalactiae
  source 1..40: mol_type = genomic DNA
aggtccaagactttctagtcaaaattcacttttgaaggct

SEQ ID NO: 3421 - protein, 516 aa, Clostridium sporogenes
MYKVVYYARVSTEEEGQKNALQNQIGMLEDFINNNIEWELVNSYIDEGKSGTTSKGRKEYNKLYEDLATDKFDIIVIKDLSRLNRNPLDYYKFIDRMVKNEKRLFMFSDNKFYESDDALINGIKAILAQEYSRDISKKVNAGHKQRQKKGTVITNGTTWGYDQQRGSKQLIINEEEAKIVRKIFNWYCDGNGFRKIFKLLEEEGVKNRNGKPFAMTTLKRIIKNEKYKGTLVCNKRHKDFDTKRVKKNSKEEWIIHENAIPAIVTEDIWNKANKILNSKKRKNNADKEEVAGYFNGTHLYSSKIICGQCNRTFWHTKARQKSKWQCKEYKSFGLKKENGHGCWNVQLFTDEIDDIVKDAIYQFWSNKDKAINNVMNILNKVIGNETDNNEEEILKKQQYKLEQKKSRLIDMLADDLITKNEYKNKKKEIDTQLKSIEEKLYIYEEKNQNIKNREERLNEIKNVLNKNIESKDSIDEEIIKIMLDKIIVKSEKELDIYLNPLLLSKKITVPYVSTNV

SEQ ID NO: 3422 - DNA, 50 bp, Clostridium sporogenes
  source 1..50: mol_type = genomic DNA
ccgttccgtatgtgtccactaatgtctacgaatggacacatactgaaagt

SEQ ID NO: 3423 - DNA, 40 bp, Clostridium sporogenes
  source 1..40: mol_type = genomic DNA
ggtaaaaatatcaattctatctaaaagtggcccagaaagt

SEQ ID NO: 3424 - DNA, 50 bp, Clostridium sporogenes
  source 1..50: mol_type = genomic DNA
ccgttccgtatgtgtccactaatgattacgaatggacacatactgaaagt

SEQ ID NO: 3425 - DNA, 40 bp, Clostridium sporogenes
  source 1..40: mol_type = genomic DNA
agtaaaaagacatattctaattaaaagtggaccagagatt

SEQ ID NO: 3426 - protein, 522 aa, Enterocloster aldenensis
MNTKSKVAIYCRLSEEDRNKQHETDDSNSIQNQKSMLIQYVLEQGWEVYNIYSDDDYTGSDRRRPEFNKLLNDAEHRKFDIILCKTQSRFTRELELVEKYIHGLFPIWGIRFISIVDNADTANKGNKKSRQINGLVNEWYLEDMSENIRSVLADRRKNGFHIGAFALYGYKKDPEQKGHLIIDEEAAAVVREVFTLFSQGYGKTAIARMLNDRGIPNPTEYKRLHGLRYKQPTRKNSTLWKYFAISDMLTNEIYIGNMVQGKYGSVSYKTKQNKPRPKEEWYRVEGTHEPIIDRELWDRVQSMVAEKAKPFTVGTIGLFARKARCMNCGYTMRSNKQTDGRHYLQCSNRHVAKDACIGSFISVKKLEQAVISELNKLSQEYLDKDELEQNVEFHSNVKEKKTALETQLATYQKKIEEDAKVIRELYLDKVKGILSENDFLNLSKDFTNDRERLEKLVIETQKQLDVIERKIQTGDNRRQLIEQYTNLEHLDRETVETLIDYILVGKRIPGTRNVPIEIHWNF

SEQ ID NO: 3427 - DNA, 50 bp, Enterocloster aldenensis
  source 1..50: mol_type = genomic DNA
tgttgcacttatgtagttgcaccatctggggcgaccttgtaagtacaaca

SEQ ID NO: 3428 - DNA, 40 bp, Enterocloster aldenensis
  source 1..40: mol_type = genomic DNA
ggtgctcctggccttctgttccgcggccaggtcttcatga

SEQ ID NO: 3429 - DNA, 50 bp, Enterocloster aldenensis
  source 1..50: mol_type = genomic DNA
tgttgcacttatgtagttgcaccaagtggggcgaccttgtaagtacaaca

SEQ ID NO: 3430 - DNA, 40 bp, Enterocloster aldenensis
  source 1..40: mol_type = genomic DNA
ggtgcttctgggcttctgcagccaggccaggccttcctca

SEQ ID NO: 3431 - protein, 513 aa, Laceyella sacchari
MERVAIYLRKSRADLEAEARGEGETLSKHKKALLKLAKAMNLNIVRIRQEVASGESLIHRPEMMELLKEVDAGFYDGVLVMDMDRLGRGNMQEQGIILDTFKKSGTKIITPRKTYDLRDEFDEEYTEFEAFMARKELKIITRRLQSGRVRSIEEGNYIATRPPYGYQIVEDRSGRYLVPDPEQAPVVKMIFDWYTNENPNERLGCNQIANRLNELGLRTYTNKLWTSSSILTIIKNAVYIGRIQWKKRSYKKSINPTKIRETKMRPQSEWIDVKGKHEPLISEEQFQKAQEILKKKYHLPYHLSKGITNPLAGLIRCVKCNSSMVLRPYINQKPHLICKNSYCDNKSTRFDLVESRVINSLNIWLEAYELQWSQDDMPKESNHKVDLIEVTIKNLQTELKNLEAQKERLHDLLERQIYDEDTYLERSKNLAMRLKDVREAIKQSVVELEEEKLKSKAQIEIIPRVKHVLELYPQLDDPKQKNTLLKSVLEFCIYRKEKHQRGEEFELTLHPKL

SEQ ID NO: 3432 - DNA, 50 bp, Laceyella sacchari
  source 1..50: mol_type = genomic DNA
aacagataacctctaagtgttaactcgttgccacagggaggttatctgtg

SEQ ID NO: 3433 - DNA, 40 bp, Laceyella sacchari
  source 1..40: mol_type = genomic DNA
aatgtcaacgaatgtgatttcattcccttccttgtctgtg

SEQ ID NO: 3434 - DNA, 50 bp, Laceyella sacchari
  source 1..50: mol_type = genomic DNA
aacagataacctctaagtgttaactagttgccacagggaggttatctgtg

SEQ ID NO: 3435 - DNA, 40 bp, Laceyella sacchari
  source 1..40: mol_type = genomic DNA
attataaacgaatgtgatttacctccttttcttgtctgag

SEQ ID NO: 3436 - protein, 492 aa, Fusobacterium nucleatum
MKRAVAYCRFSSSNQREESIDAQVRAIKEYCDKNKLKLLKIYKDEAISGTSTKDREMFLEMILDCKKNLFDCVIVHKYDRFARNRYDHALYEKILNDNNVKLISVLEQLVDDSPESVILKSVLAGMNEYYSKNLSREVKKGKKENALKAIHNGGIPPLGYDLDVNKKYIVNKKEAEAVKLIFELALDGVGYVSIADILNKRGYKNKRGKEFKKISIRDTLLNIKYIGTYYYGLKDGHGRLQKEPIIIENSHEAIIDKDIFYKVQSKMKKNLKGPRNRNGQLYFLTGYCVCGECGGPFSGGYRSVNRNGSVSYGYYCQKKKRKETKCNNKAIRKELLETFIFDIIKKEVFNDEKVEKIIKDIISFSENKKLIREEEIKEYTKEIEKLQKITLKLLEKNLEGNILDEIFNIKNNELKEKIQVLREKIYSVKNITKINEKELRKYLIKFKESANEQAKRKVVEAFVQEIRVYRDKIKIVLRKFPKDLDMVKIGGD

SEQ ID NO: 3437 - DNA, 50 bp, Fusobacterium nucleatum
  source 1..50: mol_type = genomic DNA
ttggatatggttaagattggtggagatgaagaaataaaaattataaccat

SEQ ID NO: 3438 - DNA, 40 bp, Fusobacterium nucleatum
  source 1..40: mol_type = genomic DNA
tattgatagaaatggtggagatgacgagagtcgaactcgt

SEQ ID NO: 3439 - DNA, 50 bp, Fusobacterium nucleatum
  source 1..50: mol_type = genomic DNA
ttggatatggttaagattggtggaattgaagaaataaaaattataaccat

SEQ ID NO: 3440 - DNA, 40 bp, Fusobacterium nucleatum
  source 1..40: mol_type = genomic DNA
tatttatagcaatgctgaaattgactagattagaacttgt

SEQ ID NO: 3441 - protein, 492 aa, Fusobacterium nucleatum
MKRAVAYCRFSSSNQREESIDAQVRAIKEYCDKNKLKLLKIYKDEAISGTSTKDREMFLEMILDCKKNLFDCVIVHKYDRFARNRYDHALYEKILNDNNVKLISVLEQLVDDSPESVILKSVLAGMNEYYSKNLSREVKKGKKENALKAIHNGGIPPLGYDLDKNKKYVINKKEAEAVKLIFELALDGVGYVSIADILNKRGYKNKRGKEFKKISIRDTLLNIKYIGTYYYGLKDGHGRLQKEPIIIENSHEAIIDKDIFYKVQSKMKKNLKGPRNRNGQLYFLTGYCVCGECGGPFSGGYRSVNRNGSVSYGYYCQKKKRKETKCNNKAIRKELLETFIFDIIKKEVFNDEKVEKIIKDIISFSENKKLIREEEIKEYTKEIEKLQKITLKLLEKNLEGNILDEIFNIKNNELKEKIQVLREKIYSVKNITKINEKELRKYLIKFKESANEQAKRKVVEAFVQEIRVYRDKIKIVLRKFPKDLDMVKIGGD

SEQ ID NO: 3442 - DNA, 50 bp, Fusobacterium nucleatum; identical to SEQ ID NO: 3437
  source 1..50: mol_type = genomic DNA

SEQ ID NO: 3443 - DNA, 40 bp, Fusobacterium nucleatum; identical to SEQ ID NO: 3438
  source 1..40: mol_type = genomic DNA

SEQ ID NO: 3444 - DNA, 50 bp, Fusobacterium nucleatum; identical to SEQ ID NO: 3439
  source 1..50: mol_type = genomic DNA

SEQ ID NO: 3445 - DNA, 40 bp, Fusobacterium nucleatum; identical to SEQ ID NO: 3440
  source 1..40: mol_type = genomic DNA

SEQ ID NO: 3446 - protein, 492 aa, Fusobacterium nucleatum; identical to SEQ ID NO: 3436

SEQ ID NO: 3447 - DNA, 50 bp, Fusobacterium nucleatum; identical to SEQ ID NO: 3437
  source 1..50: mol_type = genomic DNA

SEQ ID NO: 3448 - DNA, 40 bp, Fusobacterium nucleatum
  source 1..40: mol_type = genomic DNA
tattgatagtaatggtggagatgacgagagtcgaactcgt

SEQ ID NO: 3449 - DNA, 50 bp, Fusobacterium nucleatum; identical to SEQ ID NO: 3439
  source 1..50: mol_type = genomic DNA

SEQ ID NO: 3450 - DNA, 40 bp, Fusobacterium nucleatum; identical to SEQ ID NO: 3440
  source 1..40: mol_type = genomic DNA

SEQ ID NO: 3451 - protein, 553 aa, Pseudomonas monteilii
MARLISYLRMSTSEQLKGFSLERQRKLIADFAAKNGLSLDESHSIEDIGRSSFSDDAEQKQLARFFEDLDAGKFAPGDVFALENIDRLTRRGPIDAILKVNAIISKGLKLAIISNDEQKIIEDVNDVFTIINLSIDAARSHGESKNKSKKGLSNWQEKRELAATHGIAMTAQAPAWLDTEIFYVMDETKGKQIKRRRYVLNPEKAETVKLIFELFQNGNGSLKIKNILNDRKIPTFKGAEYWEPSVISKILRNPATHGFYQPQKQRTGKRDLVPAGDPIPDYFPAIVSVETFEQCQRITAANSTRKGRKGKVFTNLFTGLLRCVDCGGPVHLLNPGIDKRAKVPKQVNYIVCKKGKFTRECILKRLRYDDFEAAMLKAIQEINLADVLNENNPLETLIKQIRAIETRIEKNNTMLENFRLAFRESGTLPSFMIEEANNAENDNKALEIERTELQAQMAQLNVYNTNIDNAIEELKTNGTYEARAKINLVLHEIIKTINIDFELVDFAIIFKNGVKRFVNDGIVQNVFTTKTGSDQYYSEIEEILNHPTSQSRK

SEQ ID NO: 3452 - DNA, 50 bp, Pseudomonas monteilii
  source 1..50: mol_type = genomic DNA
tacaggttaaacgcttccgacttgatcaagtccggcgtataatacctgta

SEQ ID NO: 3453 - DNA, 40 bp, Pseudomonas monteilii
  source 1..40: mol_type = genomic DNA
ccaaggataggcggacttgatcagcaccgcgttgcccggc

SEQ ID NO: 3454 - DNA, 50 bp, Pseudomonas monteilii
  source 1..50: mol_type = genomic DNA
tacaggttaaacgcttccgacttgctcaagtccggcgtataatacctgta

SEQ ID NO: 3455 - DNA, 40 bp, Pseudomonas monteilii
  source 1..40: mol_type = genomic DNA
ccaagcataggggtactttctccgcaccacgctgccctgc

SEQ ID NO: 3456 - protein, 574 aa, Serratia marcescens
MRKCFLYSRVSSDVQISGDGLGRQEDKLKQYLLQNALRLNLSVDDCEILVDSGVSGWKGSNMGDTAALGQLFRRVESGEIDGSVLIVESLDRFSRENPFRVAGYIAKLAEHSIDIIDVEQNLVIGTSNPWSSTIASIIANRAHEESTLKSKRIKAAWNSRRKKAEESGQYMIKNTPFWIDVLDDKYVANADASIVREIFDLYLQGYGSFTIAKKMNEAGKVIRNKRWSTPKICALLRNPRCNGDFISHSLERDYEKGTSTSVEHVIKGLYPKIVTDEEFALVLNRLDDGSKNKRVCNDRKVTILNGLLKCSICGGALTVRSAGAYRYVGCLKTIEKGGCYSKPIRYDVLEKIVVNHIRNMDLGKVYESNDSQEIITKERIKSLMSHIEEYKAGITQLRERGKKPSFDMLTELQNSEDELELLKKELEQLSLSKIDLSEFAVSTELFDITQIALRTRLERTISSLLNKIKVYHTKDLSFSLIEMIYVNDVVKHVLVADKKGDVTGDVVIRRNGESTTYESCSVKIIKDEGGLFSLDCNISEVVLNDYLLLMNVVDFVDSEAKEFLNLHLNAVLAH

SEQ ID NO: 3457 - DNA, 50 bp, Serratia marcescens
  source 1..50: mol_type = genomic DNA
tttattttagtgttttaaaataatgtgataccttagaacactaagataaa

SEQ ID NO: 3458 - DNA, 40 bp, Serratia marcescens; identical to SEQ ID NO: 193
  source 1..40: mol_type = genomic DNA

SEQ ID NO: 3459 - DNA, 50 bp, Serratia marcescens
  source 1..50: mol_type = genomic DNA
tttattttagtgttttaaaataattggataccttagaacactaagataaa

SEQ ID NO: 3460 - DNA, 40 bp, Serratia marcescens
  source 1..40: mol_type = genomic DNA
atttctaatctaatatgattgaaatctttatatgaaagac

SEQ ID NO: 3461 - protein, 579 aa, Serratia proteamaculans
MRKCFLYSRVSSDAQISGDGLVRQEDKLKQYLLQNAERLNLSTIDYEILVDSGISGWKGSNMGDTAALGQLFMRVESDEIDDSVLIVESLDRFSRENPFRVAGYISKLAEHGIDIIDVENNLVIGPSNPWSSTISSIIANRAHEESTLKSKRIKAAWDSRRKKAKESGQYMIKNTPFWIDVLDDKYVVNANASIVREIFDLYLQGYGSFTIAKKMNEVGKIIRDKRWSTPKICALLRNPRCNGDFISNSLERNYEKGTSTSTEHVIKGLYPKIVTDDEFALVLNRLDGNHKNRRVRNDRKVTILNGLLKCSICGGALTVRSAGAYRYVGCLKTIEKGGCYAKPMRYDVLEKIIIEHIRNMDIGQVYESNDSKEFQLQSRIKNLASHIDEFTNGIASIRAKNKKPSFEMLSELQQSEEELESLKKEQEQYKLSKIDLGEFKVSTELLDVTQVALRSRLESTISNLLNKIKIHHTKDMSFSLIELVYVNDVVKHILVADKKGLVSGDVIIRQDDDLTIYESRSVKIIKDEGRIFSLDCSISEIALNDYLFLMNIVDFIDSDAKEFLNLHLNAVLQHESQQK

SEQ ID NO: 3462 - DNA, 50 bp, Serratia proteamaculans
  source 1..50: mol_type = genomic DNA
tttattttagtgttcaatagtaatgtgataccttagaacactacgataaa

SEQ ID NO: 3463 - DNA, 40 bp, Serratia proteamaculans; identical to SEQ ID NO: 193
  source 1..40: mol_type = genomic DNA

SEQ ID NO: 3464 - DNA, 50 bp, Serratia proteamaculans
  source 1..50: mol_type = genomic DNA
tttattttagtgttcaatagtaattggataccttagaacactacgataaa

SEQ ID NO: 3465 - DNA, 40 bp, Serratia proteamaculans; identical to SEQ ID NO: 3460
  source 1..40: mol_type = genomic DNA

SEQ ID NO: 3466 - protein, 574 aa, Serratia marcescens
MRKCFLYSRVSSDVQISGDGLGRQEDKLKQYLLQNALRLNLSIDDCEILVDSGVSGWKGSNMGDTAALGQLFRRVESGEIDGSVLIVESLDRFSRENPFRVAGYIAKLAEHSIDIIDVEQNLVIGTSNPWSSTIASIIANRAHEESTLKSKRIKAAWNSRRKKAEESGQYMIKNTPFWIDVLDNKYVANADASIVREIFDLYLQGYGSFTIAKKMNEAGKVIRNKRWSTPKICALLRNPRCNGDFISHSLERDYEKGTSSSVEHVIKGLYPKIVTDEEFALVLNRLDDGSKNKRVCNDRKVTILNGLLKCSICGGALTVRSAGAYRYVGCLKTIEKGGCYSKPIRYDALEKIVVNHIRNMDLGKVYESNDSQEVITKERIKSLMSHIEEYKAGITQLRERGKKPSFDMLTELQNSEDELELLKKELEQLSLSKIDLSEFAVSTELFDITQIALRTRLERTISSLLNKIKVYHTKDLSFSLIEMIYVNDVVKHVLVADKKGDVTGDVVIRRNGESTTYESCSVKIIKDEGGLFSLDCNISEVVLNDYLLLMNVVDFVDSEAKEFLNLHLNAVLAH

SEQ ID NO: 3467 - DNA, 50 bp, Serratia marcescens
  source 1..50: mol_type = genomic DNA
tttattttagtgttctaaaataatgtgatacattagaacactaagataaa

SEQ ID NO: 3468 - DNA, 40 bp, Serratia marcescens; identical to SEQ ID NO: 193
  source 1..40: mol_type = genomic DNA

SEQ ID NO: 3469 - DNA, 50 bp, Serratia marcescens
  source 1..50: mol_type = genomic DNA
tttattttagtgttctaaaataattggatacattagaacactaagataaa

SEQ ID NO: 3470 - DNA, 40 bp, Serratia marcescens; identical to SEQ ID NO: 3460
  source 1..40: mol_type = genomic DNA

SEQ ID NO: 3471 - protein, 578 aa, Serratia marcescens
MRWIMRKCFLYSRVSSDVQISGDGLGRQEDKLKQYLLQNALRLNLSVDDCEILVDSGVSGWKGSNMGDTAALGQLFRRVESGEIDGSVLIVESLDRFSRENPFRVAGYIAKLVEHSIDIIDVEQNLVIGTSNPWSSTIASIIANRAHEESTLKSKRIKAAWNSRRRKAEESGQYMIKNTPFWIDVLDDKYVANADASIVREIFDLYLQGYGSFTIAKKMNEAGKVIRNKRWSTPKICALLRNPRCNGDFISHSLERDYEKGTSTSVEHVIKGLYPKIVTDEEFALVLNRLNDGSKNKRVCKDRKVTILNGLLKCSICGGALTVRSAGAYRYVGCLKTIEKGGCYSKPIRYDALEKIVVNHIRNMDLGKVYESNDSQEVISKERIKSLMSHIEEYKAGITQLRERGKKPSFDMFTELQNSEDELELLKKELEQLSLSKIDLSEFAVSTELFDITQIALRTRLERTISSLLNKIKVYHTKDLSFSLIEMIYVNDVVKHVLVADKKGDVTGDVVIRRNGESTTYESCSVKIIKDEDGVFSLDCNISKVVLNDYLLLMNVVDFVDSEAKEFLNLHLNAVLAH

SEQ ID NO: 3472 - DNA, 50 bp, Serratia marcescens
  source 1..50: mol_type = genomic DNA
tttattttagtgttaaagtgtaatgtgatacattagaatactaagataaa

SEQ ID NO: 3473 - DNA, 40 bp, Serratia marcescens; identical to SEQ ID NO: 193
  source 1..40: mol_type = genomic DNA

SEQ ID NO: 3474 - DNA, 50 bp, Serratia marcescens
  source 1..50: mol_type = genomic DNA
tttattttagtgttaaagtgtaattggatacattagaatactaagataaa

SEQ ID NO: 3475 - DNA, 40 bp, Serratia marcescens; identical to SEQ ID NO: 3460
  source 1..40: mol_type = genomic DNA

SEQ ID NO: 3476 - protein, 612 aa, Aerococcus urinae
MIEYHNKITALYSRLSVGDEDRDGGESNSIVNQKAFLERYAREKKLINIRHYIDDDESGRFFDRSAYTQMISDVEQGKIGIVIMKDMTRWGRDYLQVGNAMEIFRRNNVRFIAINNGIDSIDQNTLEFAPFINIMSEWYARDISKKVKTGIKTKGADGKPVATEAPYGYIKDPENKDYWIVDKEAAEVVKLIFRLFMEGKNRNQIAVYLKEKEILTPTFYMKQQGRGTAKNKPLNEENRYNWNKATLTRILKRQEYCGDVVNFKTEKHYRDKRNHYVDKSKWQITENVHEPIIDRTTFENVERMLKNAPVKRPNGDGEIHALSGLMYCKDCGTKMHIRTIHKNGRVQHVTYCSEYAKGKAKHPKCNSPHRIDVDEVMENIAEVLRKIAQYSLENKAEFEKLVKESLYKEQTEEVKKNQKRMPQITDRMEQIERVMNKLYEDNALGNLDTERYEQLSRKYAEEYYTLKAEKEEIKERLSECENANQRAKKFIRLAESYSNFEELTPTIINEFISKIAVHERDVKRAKYVVQRIEVYFNYIGKFENELTKQIEPTEQEMIQMREEIEEARREKSRAYHRAYSKAYRAKNLEKCREYEKLKAREYRAKKKLQATT

SEQ ID NO: 3477 - DNA, 50 bp, Aerococcus urinae
  source 1..50: mol_type = genomic DNA
aaaggtacttgacaaaacgcttcctgggttgcataatattaactgaacag

SEQ ID NO: 3478 - DNA, 40 bp, Aerococcus urinae
  source 1..40: mol_type = genomic DNA
ggaatatggatctgcaagatggggagaaagtaaggatatt

SEQ ID NO: 3479 - DNA, 50 bp, Aerococcus urinae
  source 1..50: mol_type = genomic DNA
aaaggtacttgacaaaacgcttccgtggttgcataatattaactgaacag

SEQ ID NO: 3480 - DNA, 40 bp, Aerococcus urinae
  source 1..40: mol_type = genomic DNA
ggaatatgaatatacatgagtgtgtgaaaatagggatatt

SEQ ID NO: 3481 - protein, 612 aa, Urinicoccus massiliensis
MIEYHNKITALYSRLSVGDEDRDGGESNSIVNQKAFLERYARDKKLINIRHYIDDDESGRFFDRSAYTQMINDVEQGKIGIVIMKDMTRWGRDYLQVGNAMEIFRRNNVRFIAINNGIDSIDQNTLEFAPFINIMSEWYARDISKKVKTGIKTKGADGKPVATEAPYGYIKDPENKDYWIVDKEAAEVVKLIFRLFMEGKNRNQIAVYLKEKEILTPTFYMKQQNRGTAKNKPLNEENRYNWNKATLTRILKRQEYCGDVVNFKTEKHYRDKRNHYVDKSKWQITENVHEPIIDRTTFENVERMLKNAPVKRPNGDGEIHALSGLMYCKDCGTKMHIRTIHKNGRVQHVTYCSEYAKGKAKHPKCNSPHRIDVDEVMENIAEVLRKIAQYSLENKAEFEKLVKGSLYKEQTEEFKKNQKRMPQITDRMEQIERVMNKLYEDNALGNMDTERYEQLSRKYAEEYYTLKAEKEEIKERLSECENANQRAKKFIRLAESYSNFEELTPTIINEFISKIVVHERDVKRAKYVVQRIEVYFNYIGKFENELTKQIEPTEQEMLQMREEIEEAKKEKSRAYHRAYSKAYRAKNLEKCREYEKLKAREYRAKKKLQATT

SEQ ID NO: 3482 - DNA, 50 bp, Urinicoccus massiliensis
  source 1..50: mol_type = genomic DNA
aaagatacttgacaaaacgcttcctgggttgcataatattaactgaacag

SEQ ID NO: 3483 - DNA, 40 bp, Urinicoccus massiliensis; identical to SEQ ID NO: 3478
  source 1..40: mol_type = genomic DNA

SEQ ID NO: 3484 - DNA, 50 bp, Urinicoccus massiliensis
  source 1..50: mol_type = genomic DNA
aaagatacttgacaaaacgcttccgtggttgcataatattaactgaacag

SEQ ID NO: 3485 - DNA, 40 bp, Urinicoccus massiliensis; identical to SEQ ID NO: 3480
  source 1..40: mol_type = genomic DNA

SEQ ID NO: 3486 - protein, 517 aa, Clostridium thermobutyricum
MNNSVACYIRVSTDKIDQQRSLEKQKVLLQEQYKNSDISMYSDTGTGTSFNRKGFKQLLFDCGLNAKTLKDGRLVFEVDSLRKSLFKEIIVINTSRFARNIAIIDILRILWDYKKVNVKFLDVQKDSNNPSDMILLQMFFAMAENEVAETSKRTKRGNKTTILQNKIRNNSIFGWDFNRESNSLIANEKEKKVVEFIFETALTNGLKNTAKLTNEKGYRTKKGNLWTYSTIKTLITNPKYKGYNVRNKYESINLFTESKSKYLKKENWVVMKNERIEPLVSEELWEKVQEALSRRCRNGNKGQNARIYDTRGKIKCKCGANYVRCVTTKVADKPYSQHYLICSNKKKHGKKYCDASNTTVGKIDQYIEKQRKSYYKNIQLQMHVKILQLEEELNNIDNNEVFNIKNKEEELNLLKKKLEKLLDTFISSSETMQKLVEKKVGELENKIKNLEKEIANNKEMNFNKEKHKRQIKNKINKLKSEIKSSNEEKLTRQQWLDKVEEIVIESKEKFKTKYNLD

SEQ ID NO: 3487 - DNA, 50 bp, Clostridium thermobutyricum
  source 1..50: mol_type = genomic DNA
attgtcataaaggtattatgaatggacacttttaacaacttaatgacaac

SEQ ID NO: 3488 - DNA, 40 bp, Clostridium thermobutyricum
  source 1..40: mol_type = genomic DNA
tttggaattgtgaggaatggacaactaaaattatataatt

SEQ ID NO: 3489 - DNA, 50 bp, Clostridium thermobutyricum
  source 1..50: mol_type = genomic DNA
attgtcataaaggtattatgaatgagcacttttaacaacttaatgacaac

SEQ ID NO: 3490 - DNA, 40 bp, Clostridium thermobutyricum
  source 1..40: mol_type = genomic DNA
ttggtcattgtaagaaatgagcaactaaaagtatagactt

SEQ ID NO: 3491 - protein, 521 aa, Enterococcus casseliflavus
MNQKLLLENFARDQKMSPTLFLSDDGISGTTFKRTAFQEAIDLVEQGRVKNFIVKDLSRFGRDYLKVGAFTEMAFPKKGVRFIAINDNVDSDREDDNSLAPFKNLFNEWYDRDCSKKIKTVKRVKGNAGIPMGANIPYGYLKGKNYLQTHEWVVDETAAVIVRRLFREYALGKSMKLIAEELRAEKVPLPSVHKAQMGLKTSKLPMDPYLWTSSIVRQVLGYREYCGHTVNFKTYKTKQSLPSPPEQHKIFRNTHEAIIDEELFERVQEMRGTYRPSQTRRKKFGLFSGIAYCMDCGYVHHYSYTRKGQKDYSYYFCGGVAKRNKICISYHRITERALNDYVLKDVQRVLGFLKVNEAELANYLESQNQGQTSRQVERERQLLQEAEQRSKVLDHISQRLYEDNLSGKVSDAQYMKMSVRYESEQEELNEKIEALRQTLEAVEEVKSGIERFVRTAKKYLQPEKLEPDLVHALIEKIEIGEKIKHDGYTVQEINIIYRFVGNLTEQNFFLEEFPSYGLCYN

SEQ ID NO: 3492 - DNA, 50 bp, Enterococcus casseliflavus
  source 1..50: mol_type = genomic DNA
tttccaagttatgggctgtgttataataaacactgctcgtagcaaggaac

SEQ ID NO: 3493 - DNA, 40 bp, Enterococcus casseliflavus
  source 1..40: mol_type = genomic DNA
aattttttttatatgttataataagcaagttgaagtgaaa

SEQ ID NO: 3494 - DNA, 50 bp, Enterococcus casseliflavus
  source 1..50: mol_type = genomic DNA
tttccaagttatgggctgtgttatattaaacactgctcgtagcaaggaac

SEQ ID NO: 3495 - DNA, 40 bp, Enterococcus casseliflavus
  source 1..40: mol_type = genomic DNA
aatttattgtacattttaaattaagccagttgaattggaa

SEQ ID NO: 3496 - protein, 540 aa, Ruminococcus gnavus
MKQPYNTTIYNTALYLRLSRDDELQGESGSIQTQRMMLRQYAAEHGLTVVDEYIDDGWSGTNFERPSFQRMIDDIEDGKINCVVTKDLSRLGRNYILTGQYTEIYFPSKGVRYIAINDNVDTINGESELAPFLNILNEMHARQTSKKVKAAMHTRFANGAHYGAYAPLGYVKDPDKKGHLLIDPETRWIVEKIFDLAVHGRGAASITRILVEEKVPTPGWLNYERYGTFANIYAGAPAEKAYAWTIAQVKSILKEETYIGHSVHNKQSNISFKNKKKVRKPQEEWYRVENTHEAIISEEVFQKVQELIASRRRKRRNGTTQIFAGLIKCADCGWSLAYGENKQNKNPYGYYHCSKNGQGLRQCSMHYIRYDVLYAYVLARLQYWSMLAQKDEDKLLKRLLNASDRERNSAKNKQAAELKKAEKRKAEVDGLFAKMYEDWSAGRITEYNFNMLSEKYQNEQKELETKIRQLHEMMEAAVQTAADAEKWIALMKQYVNPVELTAELLNTLIEKITVHEAVKGEDGSREQEVEIYYRFIGKID

SEQ ID NO: 3497 - DNA, 50 bp, Ruminococcus gnavus
  source 1..50: mol_type = genomic DNA
taatatctttaattaagggaaacgggagtttcccatagttaaagatacca

SEQ ID NO: 3498 - DNA, 40 bp, Ruminococcus gnavus
  source 1..40: mol_type = genomic DNA
aatttcaaattgggagaatgggaagaattatccagatgtg

SEQ ID NO: 3499 - DNA, 50 bp, Ruminococcus gnavus
  source 1..50: mol_type = genomic DNA
taatatctttaattaagggaaacgtaagtttcccatagttaaagatacca

SEQ ID NO: 3500 - DNA, 40 bp, Ruminococcus gnavus
  source 1..40: mol_type = genomic DNA
cttttaaaagtgggagaaatacaaaaattagccagatgtg

SEQ ID NO: 3501 - protein, 416 aa, Citrobacter koseri
MKLIKHIIIAERAHQESLVKQKRIAQVWNHKTQLARELKKPMGKQAPGWLELSEDGSHYIVDEDKASLVNLIFDKRLSGLSMFAICKWLNEQGYPTINQRKVRISKTQKPDGNWSALSVKHILTSRSVLGYLPAKISTEDRKTVLREEIEGFYPQIVTDSKFYAVQQLLEETGKGKTSSGEHWLYVNILKGVVRCKCGLVMTPTGIRKPVYQGTYRCNGNKESRCNYGTVSRKLLDTQLCSRLFSKLSQLHDEATDTDRLDELQRRLTTVDIELEKLTETLIQLPNITQIQEALRVKQEEKDELIAQLSREKARVKSVSSLDLSGLDMESVEGRTEAQIIIKRLVKEIVVSGNEKLVDIYLHNGNMIRGFPLDGKDDHTLTLEEATDEMQPLDDMLIFGEPVTRVYPAGDMEEVDA

SEQ ID NO: 3502 - DNA, 50 bp, Citrobacter koseri
  source 1..50: mol_type = genomic DNA
atacgtgtttagctatgtaaaagcactagtattcttgccttaacactcat

SEQ ID NO: 3503 - DNA, 40 bp, Citrobacter koseri
  source 1..40: mol_type = genomic DNA
gtacatggaataataaagcaccataatttttgccattttg

SEQ ID NO: 3504 - DNA, 50 bp, Citrobacter koseri
  source 1..50: mol_type = genomic DNA
atacgtgtttagctatgtaaaagcattagtattcttgccttaacactcat

SEQ ID NO: 3505 - DNA, 40 bp, Citrobacter koseri
  source 1..40: mol_type = genomic DNA
gcacgtggtattataaaacatcttaatttttgccagtctg

SEQ ID NO: 3506 - protein, 612 aa, Streptococcus pyogenes
MRNFEKITALYERLSRDDELQGESNSIINQKKILEEYASKNNLSNIIHFTDDGISGTQFDRPGFMAMMNGVNQGNIGCIIVKDMSRLGRDYLKVGQCMEILRQKGVRLIAINDNVDSFYREDDFTPFRNIMNEWYARDTSRKIQSTFRSKGESGKHTASTPPYGYIKDEKDKNKWIVDEKAAEIVRRIFNLTMQGNGPYRIAKILESEKVDIPAYHQQKLGYGLYQSKNFEHPYRWCSSTIASILKKQEYLGHTVNFKTRKHFKDKKSKYVSEDNWLIFENTHEPIIDQETFDNVQRIRGNVKRYPDGWGEYHPLTGLMYCADCGSKMYVHRTSNYKNIPYYTCSAYTKTPCGMLCPSAHRIKAEVVLNLIQDTLKDIKKYLDEDNEAFICSIQNEMEEKEKIEIEKKKVRLTESQNRLRELERLMCRIYEDMILNKIPNSRYEILNNQYETEQITLSKEIKDLEQQVSRYEKETDRARKFISLISRYENFDELTTTMINEFVEKIIVHERDRKGSQTSKQKIEIYFNFIGNYELPQAELSEEKKQKLEKEERKIEERKDKLHQNYLKRKASGKQKEYEDKYKARREQKKQEKIKVLKRLGIPVSEYIKTNI

SEQ ID NO: 3507 - DNA, 50 bp, Streptococcus pyogenes; identical to SEQ ID NO: 62
  source 1..50: mol_type = genomic DNA

SEQ ID NO: 3508 - DNA, 40 bp, Streptococcus pyogenes
  source 1..40: mol_type = genomic DNA
ttatctgctgttgttgctggtattacaaaagctgatttat

SEQ ID NO: 3509 - DNA, 50 bp, Streptococcus pyogenes
  source 1..50: mol_type = genomic DNA
aaagtccttgacaagttgttacagaggtaatagaattaaggagaacactt

SEQ ID NO: 3510 - DNA, 40 bp, Streptococcus pyogenes
  source 1..40: mol_type = genomic DNA
ttatctcctattgtttctgagatttgaaattctgatttct

SEQ ID NO: 3511 - protein, 617 aa, Streptococcus pyogenes
MRNFEKITALYERLSRDDELEGESNSIVNQKKILEEYASKNNLSNIIHFTDDGISGTQFDRPGFMEMMNGVNTGNIGCIIVKDMSRLGRDYLKVGQCMEILRQKGVRLIAINDNVDSFYREDDFTPFRNIMNEWYARDTSRKIQSTFRSKGESGKHTASTPPYGYIKDEKDKDKWVVDEKAAEIVRRIFNLTMDGAGPYKIAKILEADKIDIPAYHQQKMGYGLHQSKNFEYPYRWCSSTIASILKKKEYLGHTVNFKTRKHFKDKKSKYVSEDKWLIFENTHEAIIDQETFDNVQRIRGNVKRYPDGWGEYHPLTGLMYCADCGSKMYVHRTNNYKNIPYYVCSNYKKVPCGTLCPSAHRIKAEVVLNLIQETLKDIKNYLDEDNEAFLHSIQNEMEETEKMEMEKKKTRLTDSKNRLQELERLMCRIYEDMILEKIPNTRYEILNNQYETEQRELSKEIDGLEKAIKRYEKETDRAKKFIRLIERYDNFDELTPTIINEFVEKILVHERDRKGSQTANQKVEIYFNFIGNYEPPKEELSEEEMQKLTEEEEKERARKDRLHQNYLKRKANGKQKEYEERYKARREEKKTGEAKGFEKTMKKHKITRLKSIDNLSV

SEQ ID NO: 3512 - DNA, 50 bp, Streptococcus pyogenes; identical to SEQ ID NO: 62
  source 1..50: mol_type = genomic DNA

SEQ ID NO: 3513 - DNA, 40 bp, Streptococcus pyogenes; identical to SEQ ID NO: 3508
  source 1..40: mol_type = genomic DNA

SEQ ID NO: 3514 - DNA, 50 bp, Streptococcus pyogenes; identical to SEQ ID NO: 3509
  source 1..50: mol_type = genomic DNA

SEQ ID NO: 3515 - DNA, 40 bp, Streptococcus pyogenes; identical to SEQ ID NO: 3510
  source 1..40: mol_type = genomic DNA

SEQ ID NO: 3516 - protein, 502 aa, Blautia faecis
MEFIREDCIYARQSVDRKDSISIESQIDFCKYELKGGSCRVFKDKGYSGKNTDRPEFQKLLGEIRKGKVRRVIVYKLDRISRSILDFATMMELFQEYDVEFVSSTEKFDTSTPMGRAMLNICIVFAQLERETIQKRVTDAYYSRCLKGFHMSGQAPYGYQLEPTVVEGIRTKKMVADPVAADHVRLMFEMYAEPETSFGDITRYFEEHDIKIYGKSMFRTFLSQLLRNPVYAQADLELYEFFKSQGAAIVNDASDFAGTNGCYLYQGRDVKEDKDRCLKDQILVIAPHEALISSDTWLKCRKKLMANTTFQQGRKPKNTWLAGKIKCGHCGYALKATHVPNSTGYFRCTKRTENKGCPGCGKIRKEEFEQFIFSAMQEKFKDFQILHGKEEKVNPKLTAYQVELAQVEAEIEKLLDTLTGANATLLAYANKKIEELDTRRQTISKAIAELSVETISPQQIKKLSYYLDNWESIDFDDKRKAADGLISTIKATSDRVQIEWKI

SEQ ID NO: 3517 - DNA, 50 bp, Blautia faecis; identical to SEQ ID NO: 2062
  source 1..50: mol_type = genomic DNA

SEQ ID NO: 3518 - DNA, 40 bp, Blautia faecis
  source 1..40: mol_type = genomic DNA
aatttatctatggaaatacttctgacaattttggaaatat

SEQ ID NO: 3519 - DNA, 50 bp, Blautia faecis
  source 1..50: mol_type = genomic DNA
tttgtaccccttgtacaccgatgtatgcaacggtgtacaaagggaacata

SEQ ID NO: 3520 - DNA, 40 bp, Blautia faecis
  source 1..40: mol_type = genomic DNA
aatatatatatggaaatatatatgatatatatggaaatat

SEQ ID NO: 3521 - protein, 578 aa, Blautia sp YL58
MARKKLQTRGIHATVRQNRVAIYIRVSTTYQIDKDSLPMQRKDLVSYCSLILGTDDYEIFEDAGYSGKNTDRPAFQDMMRKVRNGEFTHILVWKIDRISRNLLDFAEMYEELQSLRVIFVSKNEQFDTSTAIGEAMLKIILVFAELERNMTSERVTATMISRASNGLWNGGRVPFGYYYNPENSLFSIKEDEAEICRLLKDDYISNKSLTNTARMLNAAGYVTRGGAAWTPTAVWIIASSPFYAGIYRYNRYKGTENRTMNPEDEWIMIPDHHPAIFTLEEHEKMLSILETNARQKNSVGKQCTRTNIHIFSGIVYCGKCGNKLTSTPGRKHADGYRTSNYSCPKKRATRDCDNPTVNDLIIGEFVINYVLNMLNAKKSFSTINAPEELQKSLLYGSTFSDIDHIELDGLHDFFNLLSRYGSDNSFVFTTKKPIKKKAAVNPELDALRKEKEKQERALHRLQDLYLYSDNAMSEKDFILRKMEIAKRLDDINSQLGMITKNSDAILSDEDFIKQASHLLIQKELQGKQYIYFKNLASNISPEILKTYMETILDSVYTTDGQITTIVFKNGLSHKFIYK

SEQ ID NO: 3522 - DNA, 50 bp, Blautia sp YL58
  source 1..50: mol_type = genomic DNA
cggtgttaaacgataagcatagcatccctcatgttaatggcttaccacca

SEQ ID NO: 3523 - DNA, 40 bp, Blautia sp YL58
  source 1..40: mol_type = genomic DNA
atctgtaataaacatagcatccccaaacgaaaagaaccga

SEQ ID NO: 3524 - DNA, 50 bp, Blautia sp YL58
  source 1..50: mol_type = genomic DNA
cggtgttaaacgataagcatagcaaacctcatgttaatggcttaccacca

SEQ ID NO: 3525 - DNA, 40 bp, Blautia sp YL58
  source 1..40: mol_type = genomic DNA
ctctgtaggaaacatagcaaacccaagagaaaacacccta

SEQ ID NO: 3526 - protein, 477 aa, Rhodococcus erythropolis
MDAVIYTRVSHDASGRGRSVAEQEQECRAVAAEHGWTVRQVVSDISIGASRHSAVKSRPGFEQLAHVLRRGDVLVVWESSRLTRKLGEYLAMRELCESRHVLLCVGDEITDFSKSSDRSRSASDALAAEAEADKTSDRVRRNVRARATSGDAHSVLPFGYVRTYDPATGAKSWSLDPVNAPLVREAVEGVLSGRTLYSIAADWNARRIPTANGNLWQPRTVKQLLRRPALAGLRQYQGQVIGAGNWPPIITTDQHQRLLAVFTDPTRIVHRGQKAVHLLTGIATCSQCGEPMRYLRHSGKKDQYRCPAGCVGRSAGPVDDWVLSHMFRLIDLWRANVFLMHDDSPTDSPTASLDWAEARELQQRLDAFTDQAIEGTISNDQLARATKKLQPLIDAAKDRARQNTIHPLLKRLGESPNSIWESWDIEEQRQLIKNVISVVIYPTKKGTRTLDTETVKVTWRGDPIVPPDGISFDTNHT

SEQ ID NO: 3527 - DNA, 50 bp, Rhodococcus erythropolis
  source 1..50: mol_type = genomic DNA
gtagtgccttttggtaccccgaccgaactggagatgcaataagagcgtag

SEQ ID NO: 3528 - DNA, 40 bp, Rhodococcus erythropolis
  source 1..40: mol_type = genomic DNA
gggtgcaggcatctccaccgactccggaatcccggactac

SEQ ID NO: 3529 - DNA, 50 bp, Rhodococcus erythropolis; identical to SEQ ID NO: 3527
  source 1..50: mol_type = genomic DNA

SEQ ID NO: 3530 - DNA, 40 bp, Rhodococcus erythropolis; identical to SEQ ID NO: 455
  source 1..40: mol_type = genomic DNA

SEQ ID NO: 3531 - protein, 533 aa, Clostridioides difficile
MMTNNEIKNVVMYCRTSTELQADNFSIPAQIDKITQYCKFHNYNLTGKYIDECKSGTTIKNRTSFINLINDIKSKKNTISAVVIFDISRIARNLSDLSSIINLFEKYNIALISIHDNINTSDAYSRSMAYIFGTFAELNRYSIVNACRSGMEQRAKKGLWNGGKMFGYVSNKNKELEIVPEQATIVKEIFNLYVNKNWGYKKIACHLNACNYKTLNNGTWSIYSIKQIIDNPTYAGFIRWGQYLDWAKKGRKGKNEDYELFQGQHQPIIDMETWTKSQAMRKINKDKFNKIYEGDFILTGLLRCPVCGASMISHRTKKKNKPNEFYRYYQCSNFFNKGVTVCTSNLVNADTAEKYVLDRISEIINSQEIINSLISKLNNRTNKDITPLEKQLKELEKSLAKINIKRNEHMENHFNDFISSDDLNANLKYLREKEDKITTQINIIKNEISQLSDFQCIDSEKVINILKNFNSVFINATIEQKKSLLRSIIDSISVNRGKTTKDRIINKIKLHFEPVDIQAQKINKKFATTCDTV

SEQ ID NO: 3532 - DNA, 50 bp, Clostridioides difficile
  source 1..50: mol_type = genomic DNA
gtttgcgactacttgtgatacggttcaccgtcaacagtcaattcgcaaaa

SEQ ID NO: 3533 - DNA, 40 bp, Clostridioides difficile
  source 1..40: mol_type = genomic DNA
catttatttatgatacggttctccattatttatcctataa

SEQ ID NO: 3534 - DNA, 50 bp, Clostridioides difficile
  source 1..50: mol_type = genomic DNA
gtttgcgactacttgtgatacggtttaccgtcaacagtcaattcgcaaaa

SEQ ID NO: 3535 - DNA, 40 bp, Clostridioides difficile
  source 1..40: mol_type = genomic DNA
catttatttaggatttggatttcccttatttctctcataa

SEQ ID NO: 3536 - protein, 537 aa, Clostridium spiroforme; identical to SEQ ID NO: 641

SEQ ID NO: 3537 - DNA, 50 bp, Clostridium spiroforme; identical to SEQ ID NO: 402
  source 1..50: mol_type = genomic DNA

SEQ ID NO: 3538 - DNA, 40 bp, Clostridium spiroforme
  source 1..40: mol_type = genomic DNA
aacttcaaaatgtgcttttggatgatcacatgctggacat

SEQ ID NO: 3539 - DNA, 50 bp, Clostridium spiroforme
  source 1..50: mol_type = genomic DNA
taatatttttaactaagggaaacctatgtttcccaaacaaaaagatatta

SEQ ID NO: 3540 - DNA, 40 bp, Clostridium spiroforme
  source 1..40: mol_type = genomic DNA
cacttcctagtgtcctttttaatgatcacatataggacat

SEQ ID NO: 3541 - protein, 500 aa, Ruminococcus bromii
MNVVIYARFSSHSQTEQSIEGQLKVCYEYAEQNHYTVVGEYIDRAMSGKYDNRAEFQRMISDSDKHTFEGVLVYQLDRFARNRYDSAIYKAKLKKNGVRVLSARENITDDASGILVEGVLESMAEYYSAELSQKIHRGMEINAQKCLSNGSNPGLGFKVDKDRRFYVDEEEAKIVREIFERYASGETKAEIVKDLKRRKIKTSLGNDFTYNSLSRMLSNKRYIGVYMYNGQETPDRMPRILDDDLFYKVQEILDKNKKAPARTHGEGEYLLTTKLFCGHCKNMMVGYGGTSKTGKQYHYYICKEARKKRCDKTIVSKKKIEDRVIAECLKLLTDDNIKFIAQKVAEECNKSPDNLTVKQLKKAIREADTAIENLWRGIEQGQSVPMLTERLNKRQAGKDALEEQLAIEENKRICLSEAQILAFLNFVCEMPLDDVNKRRAIINILVHSVYLYDDHFTLIINASKKPMSVDNIPLEEIEEAFNSDKTCTEQCSTMTSPAPP

SEQ ID NO: 3542 - DNA, 50 bp, Ruminococcus bromii
  source 1..50: mol_type = genomic DNA
agtgttcgactatgacgtcgcctgctccaccaaacaagtattggatgaac

SEQ ID NO: 3543 - DNA, 40 bp, Ruminococcus bromii
  source 1..40: mol_type = genomic DNA
ggggttcgattcccctcatctccaccaactcggtcacgat

SEQ ID NO: 3544 - DNA, 50 bp, Ruminococcus bromii; identical to SEQ ID NO: 3542
  source 1..50: mol_type = genomic DNA

SEQ ID NO: 3545 - DNA, 40 bp, Ruminococcus bromii
  source 1..40: mol_type = genomic DNA
ggggctctcctcccctcaactccaccaagtcgttcgcgat

SEQ ID NO: 3546 - protein, 497 aa, Paenibacillus lautus
MVVRQKEAEVIEAVGYIRQSDERQDKEDISEQTQLRKIEAFCDFNGFKLVKVFKDIDYSGFRIKYTKRPGLMEALEYVENRPAVKKFVFFNLSRLTRLRKDFQAIHETLKTLSIDICSASEAVDFSTANGRFVAGILVDMNEYYSDSLSDTMNETKKTNAEKGRWNGGPAPYGLVKNKDGYGFVEDFDISHYIRKGFQMAKEGKGPYLIARWFNSQNFKTKTGKEWSPRGVRYMLTNPTYAAMQRWKDKYYPLLVCPELVSWDDFQYIQSTLFGNDNVWKGKQRQLLSSIMICPLCGSRMHSRYFNNRSNRKYVCSRKIQTGDCKSPNIDQASLNNAVINLIGKIAEEKFEPDHILPELGDTEDKGLNSIRKLQDELSNIERAEQQVFDDYYLHKKLNDDQYNNIIRRYEKRKQEIHKLLDKIPLPVSRSFGDYDDALKDFAEAIEVLDDDDKRRSVELLVEKIVPGAPTLVHFKWGEVKQIVPTETKKYKSKLIIY

SEQ ID NO: 3547 - DNA, 50 bp, Paenibacillus lautus
  source 1..50: mol_type = genomic DNA
caacacacttttaggataggagtggagactcctatccctcaagtgtgttt

SEQ ID NO: 3548 - DNA, 40 bp, Paenibacillus lautus
  source 1..40: mol_type = genomic DNA
aatattttggataggagtggagagaaaccatactgtactt

SEQ ID NO: 3549 - DNA, 50 bp, Paenibacillus lautus
  source 1..50: mol_type = genomic DNA
caacacacttttaggataggagtggtgactcctatccctcaagtgtgttt

SEQ ID NO: 3550 - DNA, 40 bp, Paenibacillus lautus
  source 1..40: mol_type = genomic DNA
actatgttgaataggagtggtgagagagcatgctgttatt

SEQ ID NO: 3551 - protein, 497 aa, Paenibacillus glucanolyticus
MVLRKKEEDQIEAVGYIRQSDEREDKEDISEQTQLRKIESFCDFHGFKLVKVFKDIDYSGFRIKYTKRPGLMEALEYVENRPTVKKFVFFNLSRLTRLRKDYQAIRETLEGLSIDICSASELLDFSTANGRFIAGVLVDMNEYYSDSLSDTMNETKRTNAEKGRWNGGPAPYGLKKNKDGFGFIEDFEVSYFIRKSFEMAKDGKGPYLISKWLNNQGFKTKTGREWAPRRVRYMLKNPTYAAMQKWKDKYYPLSECPELVSWDDFSYIQSTLFGESKVWKGRQRQMLSSILICPICGARMHSRYFNDRSNRKYVCSRKIETGDCKSPNLDQASLNAAVIKLLGGIAEEKFEPAHIIPELVGTEDKSLNSVRKLQDELSNIERAEQQVFDDYYLHQKINEEQYNNIIRRYEKRKIEIHQLLDKIPLPVSKSFGDYDDVLKDLAGAIDDLEDDDKRRSVELLVEKIVPGEPTLVHFKWGEVKEIVPTETKKYKSKLIIY

SEQ ID NO: 3552 - DNA, 50 bp, Paenibacillus glucanolyticus
  source 1..50: mol_type = genomic DNA
caacacagtttttggataggagtggagactcttatcccgagactgtgttt

SEQ ID NO: 3553 - DNA, 40 bp, Paenibacillus glucanolyticus; identical to SEQ ID NO: 3548
  source 1..40: mol_type = genomic DNA

SEQ ID NO: 3554 - DNA, 50 bp, Paenibacillus glucanolyticus
  source 1..50: mol_type = genomic DNA
caacacagtttttggataggagtggtgactcttatcccgagactgtgttt

SEQ ID NO: 3555 - DNA, 40 bp, Paenibacillus glucanolyticus; identical to SEQ ID NO: 3550
  source 1..40: mol_type = genomic DNA

SEQ ID NO: 3556 - protein, 613 aa, Streptococcus agalactiae
MRNFEKITALYERLSRDDELEGESNSIVNQKKILEEYASKNNLTNIIHFTDDGISGTQFDRPGFMEMMNGVNTGNIGCIIVKDMSRLGRDYLKVGQCMEILRQKGVRLIAINDNVDSFYREDDFTPFRNIMNEWYARDTSRKIQSTFRSKGESGKHTASTPPYGYIKDEKDKDKWVVDEKAAEIVRRIFNLTMDGAGPYKIAKILEADKIDIPAYHQQKMGYGLHQSKNFEYPYRWCSSTIASILKKKEYLGHTVNFKTRKHFKDKKSKYVSEDKWLIFENTHEAIIDQETFDNVQRIRGNVKRYPDGWGEYHPLTGLMYCADCGSKMYVHRTNNYKNIPYYVCSNYKKVPCGTLCPSAHRIKAEAVLNLIQETLKDIKKYLDEDNEAFIRSIQNEMEEKEKVEIEKKKIKLTESQNRLQELERLMCRIYEDMILNKIPNNRYEILNNQYETEQLTLSKEIKDLELVISRYEKETDRARKFISLINRYENFDELTNTMINEFVEKIIIHERDRKGSQTSKQKIEIYFNFIGNYELPQAELSEEEKQKLEEEERKIKERKDKLHQNYLKRKASGKQKEYEKKYKARREQKKQEKLKVLKRGGIPVCEMQNILIE

SEQ ID NO: 3557 - DNA, 50 bp, Streptococcus agalactiae; identical to SEQ ID NO: 62
  source 1..50: mol_type = genomic DNA

SEQ ID NO: 3558 - DNA, 40 bp, Streptococcus agalactiae
  source 1..40: mol_type = genomic DNA
aaatataagcttgcagcaggaaaaactgctaagtcaattc

SEQ ID NO: 3559 - DNA, 50 bp, Streptococcus agalactiae; identical to SEQ ID NO: 64
  source 1..50: mol_type = genomic DNA

SEQ ID NO: 3560 - DNA, 40 bp, Streptococcus agalactiae; identical to SEQ ID NO: 65
  source 1..40: mol_type = genomic DNA

SEQ ID NO: 3561 - protein, 612 aa, Streptococcus agalactiae
MRNFEKITALYERLSRDDELQGESNSIINQKKILEEYASKNNLSNIIHFTDDGISGTQFDRPGFMAMMNGVNQGNIGCIIVKDMSRLGRDYLKVGQCMEILRQKGVRLIAINDNVDSFYREDDFTPFRNIMNEWYARDTSRKIQSTFRSKGESGKHTASTPPYGYIKDEKDKNKWIVDEKAAEIVRRIFNLTMQGNGPYRIAKILESEKVDIPAYHQQKLGYGLYQSKNFEHPYRWCSSTIASILKKQEYLGHTVNFKTRKHFKDKKSKYVSEDNWLIFENTHEPIIDQETFDNVQRIRGNVKRYPDGWGEYHPLTGLMHCADCGSKMYVHRTSNYKNIPYYTCSAYTKTPCGTLCPSAHRIKAEAVLNLIRETLKDIKKYLNEDNEAFIRSIQNEMVEKEKIEIEKKRTRLIDSKGRLQELERLMCRIYEDMILNKIPNSRYEILNNQYETEQITLSKEIKDLEQQVSRYEKETDRAKKFISLISRYENFDELTTTMINEFVEKIIVHERDRKGSQTSKQKIEIYFNFIGNYELPQAELSEEKKQKLEEEERKIEERKDKLHQNYLKRKASGKQKEYEDKYKARREQKKQEKIKVLKRVGIPVSEYIKTNI

SEQ ID NO: 3562 - DNA, 50 bp, Streptococcus agalactiae; identical to SEQ ID NO: 62
  source 1..50: mol_type = genomic DNA

SEQ ID NO: 3563 - DNA, 40 bp, Streptococcus agalactiae
  source 1..40: mol_type = genomic DNA
aaatataagcttgcagcaggaaaaactgcaaagtcgattc

SEQ ID NO: 3564 - DNA, 50 bp, Streptococcus agalactiae; identical to SEQ ID NO: 64
  source 1..50: mol_type = genomic DNA

SEQ ID NO: 3565 - DNA, 40 bp, Streptococcus agalactiae; identical to SEQ ID NO: 65
  source 1..40: mol_type = genomic DNA

SEQ ID NO: 3566 - protein, 613 aa, Streptococcus agalactiae
MRNFEKITALYERLSRDDELQGESNSIINQKKILEEYASKNNLSNIIHFTDDGISGTQFDRPGFMAMMNGVNQGNIGCIIVKDMSRLGRDYLKVGQCMEILRQKGVRLIAINDNVDSFYREDDFTPFRNIMNEWYARDTSRKIQSTFRSKGESGKHTASTPPYGYIKDEKDKNKWIVDEKAAEIVRRIFNLTMDGAGPYKIAKILEADKIDIPAYHQQKMGYGLHQSKNFEYPYRWCSSTIASILKKKEYLGHTVNFKTRKHFKDKKSKYVSEDKWLIFENTHEAIIDQETFDNVQRIRGNVKRYPDGWGEYHPLTGLMYCADCGSKMYVHRTNNYKNIPYYVCSNYKKVPCGTLCPSAHRIKAEAVLNLIQETLKDIKKYLDEDNEAFIRSIQNEMEEKEKVEIEKKKIKLTESQNRLQELERLMCRIYEDMILNKIPNNRYEILNNQYETEQLTLSKEIKDLELVISRYEKETDRARKFISLINRYENFDELTNTMINEFVEKIIIHERDRKGSQTSKQKIEIYFNFIGNYELPQAELSEEEKQKLEEEERKIKERKDKLHQNYLKRKASGKQKEYEKKYKARREQKKQEKLKVLKRGGIPVCEMQNILIE

SEQ ID NO: 3567 - DNA, 50 bp, Streptococcus agalactiae; identical to SEQ ID NO: 62
  source 1..50: mol_type = genomic DNA

SEQ ID NO: 3568 - DNA, 40 bp, Streptococcus agalactiae
  source 1..40: mol_type = genomic DNA
aaatataagctggcagcaggaaaaactgccaagtcaattt

SEQ ID NO: 3569 - DNA, 50 bp, Streptococcus agalactiae; identical to SEQ ID NO: 64
  source 1..50: mol_type = genomic DNA

SEQ ID NO: 3570 - DNA, 40 bp, Streptococcus agalactiae; identical to SEQ ID NO: 65
  source 1..40: mol_type = genomic DNA

SEQ ID NO: 3571 - protein, 608 aa, Streptococcus agalactiae
MRNLEKITALYERLSRDDELQGESNSIINQKKILEEYASKNNLSNIIHFTDDGISGTQFDRPGFMAMMNGVNQGNIGCIIVKDMSRLGRDYLKVGQCMEILRQKGVRLIAINDNVDSFYREDDFTPFRNIMNEWYARDTSRKIQSTFRSKGESGKHTASTPPYGYIKDEKDKNKWIVDEKAAEIVRRIFNLTMQGNGPYRIAKILESEKVDIPAYHQQKLGYGLYQSKNFEHPYRWCSSTIASILKKQEYLGHTVNFKTRKHFKDKKSKYVSEDNWLIFENTHEPIIDQETFDNVQRIRGNVKRYPDGWGEYHPLTGLMYCADCGSKMYVHRTSNYKNIPYYTCSAYTKTPCGTLCPSAHRIKAEVVLNLIRETLKDIKKYLYEDNEAFIRSIQNEMEEKEKIEIEKKYTRLIDSKGRLQELERLMCRIYEDMILNKIPNSRYEILNNQYETEQITLSKEIKDLEQQVSRYEKETDRAKKFISLISRYENFDELTTTMINEFVEKIIVHERDRKGSQTSKQKIEIYFNFIGNYELPQAELSDEEKQKLEEEERKIEERKDKLHQNYLKRKASGKQKEYEDKYKARREQKKQEKLKVLKREGIPARDFQ

SEQ ID NO: 3572 - DNA, 50 bp, Streptococcus agalactiae; identical to SEQ ID NO: 62
  source 1..50: mol_type = genomic DNA

SEQ ID NO: 3573 - DNA, 40 bp, Streptococcus agalactiae
  source 1..40: mol_type = genomic DNA
aaatataagctggcagcaggaaaaactgcaaagtctattt

SEQ ID NO: 3574 - DNA, 50 bp, Streptococcus agalactiae; identical to SEQ ID NO: 64
  source 1..50: mol_type = genomic DNA

SEQ ID NO: 3575 - DNA, 40 bp, Streptococcus agalactiae; identical to SEQ ID NO: 65
  source 1..40: mol_type = genomic DNA

SEQ ID NO: 3576 - protein, 608 aa, Finegoldia magna
MRNFEKITALYERLSRDDELEGESNSIVNQKKILEEYASKNNLTNIIHFTDDGISGTQFDRPGFMEMMNGVNTGNIGCIIVKDMSRLGRDYLKVGQCMEILRQKGIRLIAINDNVDSFYREDDFTPFRNIMNEWYARDTSRKIQSTFRSKGESGKHTASTPPYGYIKDEKDKDKWVVDEKAAEIVRRIFNLTMDGAGPYKIAKILEADKIDIPAYHQQKMGYGLHQSKNFEYPYRWCSSTIASILKKKEYLGHTVNFKTRKHFKDKKSKYVSEDKWLIFENTHEAIIDQETFDNVQRIRGNVKRYPDGWGEYHPLTGLMYCADCGSKMYVHRTNNYKNIPYYVCSNYKKAPCGTLCPSAHRIKAEVVLNLIQETLKDIKNYLDEDNEAFIHSIQNEMEEKEKAHIEKKKIRLTESQNRLQELERLMCRIYEDMILNKIPNNRYEILNNQYETEQITLSKEIKDLEQQVSRYEKETDRAKKFISLISRYENFDELTTTMINEFVEKIIVHERDRKGSQTSKQKIEIYFNFIGNYELPQAELSDEEKQKLEEEERKIEERKDKLHQNYLKRKASGKQKEYEDKYKARREQKKQEKLKVLKREGIPARDFQ

SEQ ID NO: 3577 - DNA, 50 bp, Finegoldia magna; identical to SEQ ID NO: 62
  source 1..50: mol_type = genomic DNA

SEQ ID NO: 3578 - DNA, 40 bp, Finegoldia magna
  source 1..40: mol_type = genomic DNA
aaatataagcttgcagcaggaaaaactgccaagtcaattc

SEQ ID NO: 3579 - DNA, 50 bp, Finegoldia magna; identical to SEQ ID NO: 64
  source 1..50: mol_type = genomic DNA

SEQ ID NO: 3580 - DNA, 40 bp, Finegoldia magna; identical to SEQ ID NO: 65
  source 1..40: mol_type = genomic DNA

SEQ ID NO: 3581 - protein, 608 aa, Streptococcus agalactiae
MRNFEKITALYERLSRDDELEGESNSIVNQKKILEEYASKNNLTNIIHFTDDGISGTQFDRPGFMEMMNGVNTGNIGCIIVKDMSRLGRDYLKVGQCMEILRQKGIRLIAINDNVDSFYREDDFTPFRNIMNEWYARDTSRKIQSTFRSKGESGKHTASTPPYGYIKDEKDKDKWVVDEKAAEIVRRIFNLTMDGAGPYKIAKILEADKIDIPAYHQKKLGYGLHQSKNFEYPYRWCSSTIASILKKKEYLGHTVNFKTRKHFKDKKSKYVSEDNWLIFENTHEAIIDQETFDNVQRIRGNVKRYPDGWGEYHPLTGLMYCADCGSKMYVHRTNNYKNIPYYVCSNYKKAPCGTLCPSAHRIKAEVVLNLIQETLKDIKNYLDEDNEAFIHSIQNEMEEKEKAHIEKKKIRLTESQNRFQELERLMCRIYEDMILNKIPNNRYEILNNQYETEQITLSKEIKDLEQQVSRYEKETDRAKKFISLISRYENFDELTTTMINEFVEKIIVHERDRKGSQTSKQKIEIYFNFIGNYELPQAELSDEEKQKLEEEERKIEERKDKLHQNYLKRKASGKQKEYEDKYKARREQKKQEKLKVLKREGIPARDFQ

SEQ ID NO: 3582 - DNA, 50 bp, Streptococcus agalactiae; identical to SEQ ID NO: 1872
  source 1..50: mol_type = genomic DNA

SEQ ID NO: 3583 - DNA, 40 bp, Streptococcus agalactiae
  source 1..40: mol_type = genomic DNA
gaaatataagctggcagcaggaaaaactgcaaagtcaatt

SEQ ID NO: 3584 - DNA, 50 bp, Streptococcus agalactiae
  source 1..50: mol_type = genomic DNA
aaaagtccttgacaagttgttacagtagtaatagaattaaggagaacact

SEQ ID NO: 3585 - DNA, 40 bp, Streptococcus agalactiae
  source 1..40: mol_type = genomic DNA
aaaatagaagatgatagcagtgaaaactgcaaaggcaagt

SEQ ID NO: 3586 - protein, 537 aa, Acetivibrio thermocellus
MKKRVCAYCRVSTDKDDQINSFNSQKQFFEEYIRKNEEWELVEIYADEGITGTSTEKRTEFLRMIEDVKYKKIDLILTKEISRFARNTLDSIYYTRKLKSMGVGVIFINDGINTLDEDAELRLTIMASIAQEESRRISQRVKWGQKRQMEKGVVFGRELLGYNLRNGVLTINEQEAEIVRMIFHKFTNEGKGTHVIARELYEAGIKTKRGNLNWSNTMILKVLRNEKYVGDLCQKKTITPDFLTHKKKYNKGQEEMIYIKNHHEPIISRELWEATQKELEKRTTSREQKSKYSNRYWCSGKIFCGLCGSRFVGRLKKLKNGDTYRAWRCQKAAEHGREKIDKWGNTIGCNQESINHVVLGEIIGYILKNIIVENKEKIINDLKELIKKYEKPVKVLNTDSLLKQIESINIKKQKLIDSMLEGIISKQDVAMMNEKYDKEIEELRQKVKEIEEANINNQKQADMLKSYIDRIHKIVNDLENNNPEEIYKKTVEKIIVHKDKILEIYFNCLVNPIKVRYKAKGKLNYTIECELLNSEQF

SEQ ID NO: 3587 - DNA, 50 bp, Acetivibrio thermocellus
  source 1..50: mol_type = genomic DNA
gtgagcaattttgaaaacgatatacctatatcgttatcaaaaatgcacat

SEQ ID NO: 3588 - DNA, 40 bp, Acetivibrio thermocellus
  source 1..40: mol_type = genomic DNA
atgtgccaattcttcggttcctatatcatttaaaatacct

SEQ ID NO: 3589 - DNA, 50 bp, Acetivibrio thermocellus
  source 1..50: mol_type = genomic DNA
gtgagcaattttgaaaacgatatagatatatcgttatcaaaaatgcacat

SEQ ID NO: 3590 - DNA, 40 bp, Acetivibrio thermocellus
  source 1..40: mol_type = genomic DNA
ttgtgcaagtttttatgtggatatatcttttaaaatacct

SEQ ID NO: 3591 - protein, 537 aa, Acetivibrio thermocellus
MKKRVCAYCRVSTDKDDQINSFNSQKQFFEEYIKQNDEWELVDIYADEGITGTSTEKRTEFLRMIDDVQYKKIDLILTKEISRFARNTLDSIYYTRKLKSMGVGVIFINDGINTLDEDAELRLTIMASIAQEESRKISQRVKWGQKRQMEKGVVFGRELLGYNLRNGVLTINEQEAEIVRMIFHKFTNEGKGTHVIARELYEAGIKTKRGNLNWSNTMILKVLRNEKYVGDLCQKKTITPDFLTHKKKYNKGQEEMIYIKNHHEPIISRELWEATQKELKKRTTSREQKSKYSNRYWCSGKIFCGLCGSRFVGRLKKLKNGDTYRAWRCQKAAEHGREKIDKWGNTIGCNQESINHVVLGKIIGYILKNIIVENKEEIINDLKELIKKYEKPVKVLNTDSLLKQIESINIKKQKLIDSMLEGIISKQDVAMMNEKYDKEIEELKQKVKEIEEANINNQKQADMLKSYIDRINEMVNALEYQSADELYKKMVDKVVVHKGKILEVYLNCLFNPIKVRYNATGKLDYKIEVDWLNSEQF

SEQ ID NO: 3592 - DNA, 50 bp, Acetivibrio thermocellus; identical to SEQ ID NO: 3587
  source 1..50: mol_type = genomic DNA

SEQ ID NO: 3593 - DNA, 40 bp, Acetivibrio thermocellus; identical to SEQ ID NO: 3588
  source 1..40: mol_type = genomic DNA

SEQ ID NO: 3594 - DNA, 50 bp, Acetivibrio thermocellus; identical to SEQ ID NO: 3589
  source 1..50: mol_type = genomic DNA

SEQ ID NO: 3595 - DNA, 40 bp, Acetivibrio thermocellus; identical to SEQ ID NO: 3590
  source 1..40: mol_type = genomic DNA

SEQ ID NO: 3596 - protein, 564 aa, Clostridium perfringens
MPRSRKSQMSRLTNNRTIWKVAVYIRLSREDGNDESLSVINQKKILKEYLEEMFEDEYVLVDFYVDDGLTGTDDERESFQRMIKDVKQGKVNCIICKTLARAFRNYSDQGYFLEEFLPLYRTRFICLGSPKFDTYLNPEAITDGLDVPITGLMNDRYAARASADIRRTFNTKRRNGEFIGAFAPYGYKKSPDNKNKLIIDEEAAQVIRDIFRWRVEEGINKLGIVRRLNELGTLTPTKYKHSKGLMLKNPNLDKQDGMWSMNTICTILKNRMYIGDMVQGRQRVISYKVHKTICTPENEWFIVENTHEAIIDKDTYLKAQELDQRDIRMSPKGRNVYLFSGFLRCADCKRSMTKKTNKNKLNDGTVKEYNYYICSTYALKNKSKCSRHSIKLEILEEAVLKAIQIQIAMVENMSEVISEINKQATIVNQSSRLKKQLNEKQKELEKIICVTDNLYMDWKSEEISRNEYARMKSRFEIKAEEIRRIISNIEAEIQSSSKGVGDNDPYLKTFLKYKNIKELNRGILIELIDAIYIHENNEITIQFKFADQYKRLKEFIKDNHFSKN

SEQ ID NO: 3597 - DNA, 50 bp, Clostridium perfringens
  source 1..50: mol_type = genomic DNA
acttgtctatacgtcaatggttcaaatgagccataaatgtatagatacta

SEQ ID NO: 3598 - DNA, 40 bp, Clostridium perfringens
  source 1..40: mol_type = genomic DNA
aataggatatattggaacaaatggtgctggaaaaagtaca

SEQ ID NO: 3599 - DNA, 50 bp, Clostridium perfringens; identical to SEQ ID NO: 3597
  source 1..50: mol_type = genomic DNA

SEQ ID NO: 3600 - DNA, 40 bp, Clostridium perfringens
  source 1..40: mol_type = genomic DNA
aataaaagttattttaacaaatggtgctggaaaaagtgga

SEQ ID NO: 3601 - protein, 434 aa, Lachnospiraceae bacterium oral taxon 082
MIFPQKGVRFIAINDGVDSAQGDNDFAPLRNIFNEWLVRDTSKKIKAVKRSKGMSGKPVTSKPVYGYFMDEDENFIIDGEAAPVVRQIYSLCLAGNGPTKIARMLTEQEIPTPGTLEYRRTGSTRRYHPGYECKWATNTVVHILENREYTGCLVNFKTEKPSYKTKHSVENPIEKQAIFENHHEPIIDTQMWERVQELRKQRKRPNRYDEVGLFSGILFCADCGSVLYQQRYQNATRKQDCYICGSYKKRTRDCTAHFIRTDLLTAGVTDNLRKVTSYAAKHEARFMKLLIEQNEDGGKRRNAARKKELEAAEKRISELSAIFKRLYEDSVTGRISDERFTELSADYEAEQKELKERAAAIRAELSKAQEATVNAEKFMNVVRKYTSFEELTPTLLREFVEKIVVHECSYDENGTRRQDIDIYYSFVGKVDLPE

SEQ ID NO: 3602 - DNA, 50 bp, Lachnospiraceae bacterium oral taxon 082
  source 1..50: mol_type = genomic DNA
ctacttctttatcacacatcagcaaatgctcatgtacggtaaggaagcaa

SEQ ID NO: 3603 - DNA, 40 bp, Lachnospiraceae bacterium oral taxon 082
  source 1..40: mol_type = genomic DNA
aaatgataatccaggagcaaaatcccaaggcattaagcag

SEQ ID NO: 3604 - DNA, 50 bp, Lachnospiraceae bacterium oral taxon 082
  source 1..50: mol_type = genomic DNA
ctacttctttatcacacatcagcatatgctcatgtacggtaaggaagcaa

SEQ ID NO: 3605 - DNA, 40 bp, Lachnospiraceae bacterium oral taxon 082
  source 1..40: mol_type = genomic DNA
atgtgaaaatccagttgcataatagcaaggcattaagaag

SEQ ID NO: 3606 - protein, 587 aa, Clostridioides difficile
MKEVEIIKKNDNLENRRRGKYIDCKRVAAYCRVSTDSEDQLNSYKSQVSYYTDLINNNIEWCMVDIYADEAITGTQVNKREDFQRMINDCMNNEIDMIITKSISRFARNTLDTLKYVCMLKEKNIAVYFEDEKINTLTMDGELLLVVLSSVAQQEVENISANVKKGLKMKMRRGELVGFQGCLGYDYHKEDKTLTINEKESEIVRYIFNRYIEGAGCSIIGQELENLGYKTKYGSTIWSNSTVLGIIKNEKYIGDVLLGKTFTVDPISKRRLDNLGEEEKYYVKNNHEPIISREIFDKAHEILNRRSKNRGRYEEGVTKREKYSRKYAFSCMMECGFCGGTLTRRNWHSGSEYSKIIWQCVVATKKGKKYCPESKGIPERVIENAFVESYRLLCDEKKSVLEELLNRINDIVGSSEVNNKIKKIEKELSVIEKKINNLVDMRLDDIIEKETYEIKYQELIDNQEKLLNERNKLNVVAKNENSMKQRLKEFKKTLEENEVLDKFDRGVFESVVEKVIIGEKNKDGENDPTKITFIYKTGFKNTLSSDEFKIPRKNARGRHKRKELCLHGNNEVENLCSHSSSNTCGNC

SEQ ID NO: 3607 - DNA, 50 bp, Clostridioides difficile
  source 1..50: mol_type = genomic DNA
tatgttcacatagtagttcaaacacatgtggagactgtggtgttgatacg

SEQ ID NO: 3608 - DNA, 40 bp, Clostridioides difficile
  source 1..40: mol_type = genomic DNA
tatgttccctcattctactcatgtggaaactgtagctaag

SEQ ID NO: 3609 - DNA, 50 bp, Clostridioides difficile
  source 1..50: mol_type = genomic DNA
tatgttcacatagtagttcaaacagatgtggagactgtggtgttgatacg

SEQ ID NO: 3610 - DNA, 40 bp, Clostridioides difficile
  source 1..40: mol_type = genomic DNA
caactaccctcattcaactgatgtggaaactaaagcttag

SEQ ID NO: 3611 - protein, 524 aa, Pseudomonas fulva
MPTAFSYARFSSARQKRGSSLERQKAMLASWLSQHSEYSLSVETYQDLGKSAWKGDHIKEGGDFAKLLAAVDEGVIKKGDAVLVEAIDRTGRLPVLEMLSTIVSPILRAGVSIITLEDGIVFTEASLNEGGHIYILVGKIQAARQYSDNLSRRLKGSYDSRRRLAKDEGKTPKRHTPVWLTSTGVLIPDIAEQIKLAFELYTSGLGKAVIAKRMRESGVPALAKTSGPGVEGWLRNEAVIGRWNGSEVYEPIVDQSLYHLAQIEGERRKTAPPAKTATHFYVGLVKCGSCGGNFIMRTIKGLQVSMRCRKRQELKGCDNKKVIPKVVIDAVYRYTSTPAARKLVAHERRGVNEKAIIAAEAKVLELTKEIDAMVLAFSGAMAIPEVAGRIKALHAEREAAERELALLKVTVERPPTNWRVQGRVDDLARNDSQRLAAMLRSVGYIITIHSDGRLCTSESKTVYRYAGVDRCEDMYRLTAGSNQLLISKVPEEAFDEWWEPGEGEEVVSSEWDPDDLDAMRSLHG

SEQ ID NO: 3612 - DNA, 50 bp, Pseudomonas fulva
  source 1..50: mol_type = genomic DNA
attgtgtacatatgaaaatgttgcttgtaggtaattcacatgtttacaat

SEQ ID NO: 3613 - DNA, 40 bp, Pseudomonas fulva
  source 1..40: mol_type = genomic DNA
tttgtgcatgaggcgtttcttgtaagtgctgaccgtcttg

SEQ ID NO: 3614 - DNA, 50 bp, Pseudomonas fulva
  source 1..50: mol_type = genomic DNA
attgtgtacatatgaaaatgttgcccgtaggtaattcacatgtttacaat

SEQ ID NO: 3615 - DNA, 40 bp, Pseudomonas fulva
  source 1..40: mol_type = genomic DNA
tttgtgtaggatccgtttcccttaagtgctcatggtcttg

SEQ ID NO: 3616 - protein, 524 aa, Pseudomonas fulva
MPTAFSYARFSSATQKKGSSLERQRAMVARWLVAHPDYSLSDQTFQDLGKSGWKGEHIKEGGGFAELLVAVQAGLIQKGDAVLVEAIDRTGRLPVLDMLSIIVSPILRAGVSIVTLEDNLVFTEASLNEGGHIYILVGKIQAARQYSDNLSRRLTASYDSRRRLAKEGKAPKRNTPVWLTSNGDVIGEVAEQIRLAFELYTSGLGKAVIAKRMRESGVPALAKTSGPGVEGWLRNEAAIGRWNGSEVYEPIVDLSRYQLAQIEGERRKTTPTAKTATHFYVGLVKCGSCGGNFIMRTIKGVQVSMRCRKRQELKGCDNKKVIPKVVIDAVYRHTSTPAARKLVAHERRSVNEKAIIAAEAKVLELAKEIEAMVLAFSGAMAIPEVVGRIQALHAEREAAERELALLKVTVERPPTDWRVQGRVDDLGRTDPQRLAAMLRSVGYTITIDSDGRLCTSESKTVYRYAGVNRREDMYRLAVAGGKELLISKIPVEVFDEWWEAEDGDEVVTSEWDADNPDAMRSRHG

SEQ ID NO: 3617 - DNA, 50 bp, Pseudomonas fulva
  source 1..50: mol_type = genomic DNA
tttgtgtacatctgaaattgttgcttgtaggtatctcatatgtttacaat

SEQ ID NO: 3618 - DNA, 40 bp, Pseudomonas fulva; identical to SEQ ID NO: 3613
  source 1..40: mol_type = genomic DNA

SEQ ID NO: 3619 - DNA, 50 bp, Pseudomonas fulva
  source 1..50: mol_type = genomic DNA
tttgtgtacatctgaaattgttgcccgtaggtatctcatatgtttacaat

SEQ ID NO: 3620 - DNA, 40 bp, Pseudomonas fulva; identical to SEQ ID NO: 3615
  source 1..40: mol_type = genomic DNA

SEQ ID NO: 3621 - protein, 525 aa, Pseudomonas fulva
MPTAFSYARFSSARQKRGSSLERQKVMLANWLSLHPEYSLHVETYQDLGKSAWKGDHIKEGGDFAKLLAAVEEGVIKSGDAVLVEAIDRTGRLPVLEMLSTIVSPILRAGVSIITLEDGIVFTEASLNEGGHIYILVGKIQAARQYSDNLSRRLKGSYDSRRRLAKEEGKTPKRHTPVWLTSEGVVIPEVAEQIKVAFELYTSGLGKAVIAKRMRESGVPALAKTSGPGVEGWLRNEVAIGRWNGSEVYEPIIDQSLYHLAQIEGERRKTAPPAKTATHFYVGLVKCGSCEGNFIMRTIKGVQVSMRCRKRQELKGCDNKKVIPKTVIDAVYERTSKSATHRLVAKERSGVNEKAIIAAEAKILELSKGIQTMVSAFSASIKIPEVASQIQALHGEREAAERELAILKATVERPPNMWRVQGRVEDLERNDPQRLAAMLRNAGYTITIYSDGRLSTSESGTVYRYVGVNRKEDKYKLMWGDTELLVSKVSYVDDGEDWMHWEPVGEGSESEWDADDPEAMQSRWE

SEQ ID NO: 3622 - DNA, 50 bp, Pseudomonas fulva
  source 1..50: mol_type = genomic DNA
caggtgtacatgtgaaaatgttgcttgtaggtgatacacatgtttacaat

SEQ ID NO: 3623 - DNA, 40 bp, Pseudomonas fulva; identical to SEQ ID NO: 3613
  source 1..40: mol_type = genomic DNA

SEQ ID NO: 3624 - DNA, 50 bp, Pseudomonas fulva
  source 1..50: mol_type = genomic DNA
caggtgtacatgtgaaaatgttgcccgtaggtgatacacatgtttacaat

SEQ ID NO: 3625 - DNA, 40 bp, Pseudomonas fulva; identical to SEQ ID NO: 3615
  source 1..40: mol_type = genomic DNA

SEQ ID NO: 3626 - protein, 604 aa, Bacteroides fragilis
MTKIIGYARVSTTKQDLSRQKLKIKEFCENNNYELIEIIEDFGISGVVADRKGYIELQSKTYKDADMIVISELSRLSRQEDVTETVYNIQQIINKGLSVILLDSPSKIYEANKLLDITEILILTIKAWAAAQERLDIKKKNQDGKQALFQAYPYAVVDQKIPYGYKAVPNPNGKRPKYILEEVPEEVENIKRLFALVNSGKTLGAVARYFNERNITFRGYYSTVAILSNYIHSDIYRGIRRRTQRLGREEPYTIEVRIKPIISEEDFMKAQELIKNNYKNTPTGKVNHNPLKGIIRCRCGRAMTVKDKKPAAGISKLTYRCSCVDRKSHPDFCKYNIDEVSYDLTNEILYSLFKSMHTAEYINFFRNQTDNRVTELQEEIAGIEKRLSALYLDKENLSNESQDNANKFLLTTNPTLLNIIQEKQNQLDEKIKSIDKEIIRYKKSQSKKMADIERIKDNNGKEKLQNLSIEEQGELYHKYLERVNYIPVTTMQGYYIVQFLNGIKFYIAITKVRSIAMASLLLDNWTIDEKGIITANYNTLKSSDMKNFSIEMIRKTKTMTLQEYLKSDLAKERALHLDLSYRERYLEELHKAGLDGRLRPLKKE

SEQ ID NO: 3627 - DNA, 50 bp, Bacteroides fragilis; identical to SEQ ID NO: 3312
  source 1..50: mol_type = genomic DNA

SEQ ID NO: 3628 - DNA, 40 bp, Bacteroides fragilis
  source 1..40: mol_type = genomic DNA
cggaatttgaaaagtatactcaaaaaaagcaattgcccag

SEQ ID NO: 3629 - DNA, 50 bp, Bacteroides fragilis
  source 1..50: mol_type = genomic DNA
ttgggtttttccgttttattatacacacttaactaaatagacttgcccaa

SEQ ID NO: 3630 - DNA, 40 bp, Bacteroides fragilis
  source 1..40: mol_type = genomic DNA
aggaatttgaaaactatacacatactatgcaattgcaaag

SEQ ID NO: 3631 - protein, 539 aa, Campylobacter coli
MLRQATQNLITALYPRLSHEDELQGESNSISNQKRILEAFAKQNGFTNLRWYTDDGFSGANFQSPGFQAMLADIEAGKVGTVIVKDMSRLGRNYLQVGFYTEMLFPQKGVRFIAVNDNVDSANGGMDNDFTPLRNLFNEWLVRDTSKKIKAVKRAKGMSGKPVTSKPVYGYLMDEDENYLVDEETAPVVQQIYQLCLAGNGPTKIARMLTEQQIPTPGTLEYRRTGSTRRYHPGYECKWATNTVVHILENREYTGCLVNFKTEKPSYKVKHSVENPVEKQAIFENHHEPIIDRETWERVQELRKQRKRPNRYDEVGLFSGMLFCADCGHVMYQQRYQNKNRKQDCYICGSYKKRTRDCTAHFIRTDLLTAGVLSNLRQVTEYAAKHESRFVKLLIQQNEIGGKRKTAAATKQLEQAQERIAEVSRIIKRLYEDNVNGKISDERFMELSADYEQEQRELKDRAAALQAELDKSQAATVNAEKFMGIVRKHLAFEELTPTLLREMIEKIVVHECSYDENGTRRQDIEIYYSFVGKIDLPEA

SEQ ID NO: 3632 - DNA, 50 bp, Campylobacter coli
  source 1..50: mol_type = genomic DNA
ttacttctttatcgcacatcagtaaatgctcatgtacggtaaagaagcaa

SEQ ID NO: 3633 - DNA, 40 bp, Campylobacter coli
  source 1..40: mol_type = genomic DNA
ttattagaagccaagaaaaaacttataagggataaagctt

SEQ ID NO: 3634 - DNA, 50 bp, Campylobacter coli
  source 1..50: mol_type = genomic DNA
ttacttctttatcgcacatcagtagctgctcatgtacggtaaagaagcaa

SEQ ID NO: 3635 - DNA, 40 bp, Campylobacter coli
  source 1..40: mol_type = genomic DNA
taattagaacccaagaaaagctacctaagggaaaaacctt

SEQ ID NO: 3636 - protein, 539 aa, Campylobacter coli
MLRQATQNLITALYPRLSHEDELQGESNSISNQKRILEAFAKQNGFTNLRWYTDDGFSGANFQRPGFQAMLADIEAGKVGTVIVKDMSRLGRNYLQVGFYTEMLFPQKGVRFIAVNDNVDSANGGMDNDFTPLRNLFNEWLVRDTSKKIKAVKRAKGMSGKPVTSKPVYGYLMDEDENYLVDEETAPVVQQIYQLCLAGNGPTKIARMLTEQQIPTPGTLEYRRTGSTRRYHPGYECKWATNTVVHILENREYTGCLVNFKTEKPSYKVKHSVENPVEKQAIFENHHEPIIDREIWERVQELRKQRKRPNRYDEVGLFSGMLFCADCGHVMYQQRYQNKNRKQDCYICGSYKKRTRDCTAHFIRTDLLTAGVLSNLRQVTEYAAKHESRFVKLLIQQNEIGGKRKTAAATKQLEQAQERIAEVSRIIKRLYEDNVNGKISDERFMELSADYEQEQRELKDRAAALQAELDKSQAATVNAEKFMGIVRKHLAFEELTPTLLREMIEKIVVHECSYDENGTRRQDIEIYYSFVGKIDLPEA

SEQ ID NO: 3637 - DNA, 50 bp, Campylobacter coli; identical to SEQ ID NO: 3632
  source 1..50: mol_type = genomic DNA

SEQ ID NO: 3638 - DNA, 40 bp, Campylobacter coli; identical to SEQ ID NO: 3633
  source 1..40: mol_type = genomic DNA

SEQ ID NO: 3639 - DNA, 50 bp, Campylobacter coli; identical to SEQ ID NO: 3634
  source 1..50: mol_type = genomic DNA

SEQ ID NO: 3640 - DNA, 40 bp, Campylobacter coli; identical to SEQ ID NO: 3635
  source 1..40: mol_type = genomic DNA

SEQ ID NO: 3641 - protein, 539 aa, Campylobacter coli
MLRQATQNLITALYPRLSHEDELQGESNSISNQKRILEAFAKQNGFTNLRWYTDDGFSGANFQRPGFQAMLADIEAGKVGTVIVKDMSRLGRNYLQVGFYTEMLFPQKGVRFIAVNDNVDSANGGMDNDFTPLRNLFNEWLVRDTSKKIKAVKRAKGMSGKPVTSKPVYGYLMDEDENYLVDEETAPVVQQIYQLCLAGNGPTKIARMLTEQQIPTPGTLEYRRTGSTRRYHPGYECKWATNTVVHILENREYTGCLVNFKTEKPSYKVKHSVENPVEKQAIFENHHEPIIDRETWERVQELRKQRKRPNRYDEVGLFSGMLFCADCGHVMYQQRYQNKNRKQDCYICGSYKKRTRDCTAHFIRTDLLTAGVLSNLRQVTEYAAKHESRFVKLLIQQNEIGGKRKTAAATKQLEQAQERIAEVSRIIKRLYEDNVNGKISDERFMELSADYEQEQRELKDRAAALQAELDKSQAATVNAEKFMGIVRKHLAFEELTPTLLREMIEKIVVHECSYDENGTRRQDIEIYYSFVGKIDLPEA

SEQ ID NO: 3642 - DNA, 50 bp, Campylobacter coli; identical to SEQ ID NO: 3632
  source 1..50: mol_type = genomic DNA

SEQ ID NO: 3643 - DNA, 40 bp, Campylobacter coli; identical to SEQ ID NO: 3633
  source 1..40: mol_type = genomic DNA

SEQ ID NO: 3644 - DNA, 50 bp, Campylobacter coli; identical to SEQ ID NO: 3634
  source 1..50: mol_type = genomic DNA

SEQ ID NO: 3645 - DNA, 40 bp, Campylobacter coli; identical to SEQ ID NO: 3635
  source 1..40: mol_type = genomic DNA

SEQ ID NO: 3646 - protein, 548 aa, Roseburia hominis
MKKTKTKCYLYTRVSTSMQVDGYSLDAQRDKLRKYAEYEDMVVAGEYSDEGFSGKNIQGRHEFQRMLQDIQDGKDGVEYVLVFKLSRFGRNAADVLNSLQLMQDFGVNLICVEDGIDSSKDSGKLMISVLSAVAEIERENIRTQTMAGREQKAREGKWNGGFAPYGYRLEKGELLIAEDEVDVIRTIFDRYIHTNDGVSGVAKYLNRQGFVKKLRQNGTIPGFSASFVKSIIDNPVYMGKIAYGRRRTEKKIGTRNEMHVVEQSEFPVYEGKHEAIISEEDWNLAQEKRKVNAYRREKVNDPTHAHILSGILKCPCCGKSLYGNIAKAHSKDKKTRYYYYCKNTVTPTGHECTFRLNIEQTEMNRMVASIISAMVSDPRFADAIKAKIGSAVDTNDLEKQLEALQAQLRQTLGTKARLERQMDGLDVNDPYYDRKISDLQRRYDEQYGRIDEIEVQIDDVQSQIRSIRQEKISGNNIYRLLLAFDQVYEAASEVERKEFMRAFIERIELFPEKQPDGNWIRKIIFNFPVPVNGTEVTELPLENETMVE

SEQ ID NO: 3647 - DNA, 50 bp, Roseburia hominis
  source 1..50: mol_type = genomic DNA
cccttggaaaatgaaacaatggtcgagacggttgtcttgctttccaaggg

SEQ ID NO: 3648 - DNA, 40 bp, Roseburia hominis
  source 1..40: mol_type = genomic DNA
tccattcacgaaacatgtggaggcaatttgtcttttgtca

SEQ ID NO: 3649 - DNA, 50 bp, Roseburia hominis
  source 1..50: mol_type = genomic DNA
cccttggaaaatgaaacaatggtcgcgacggttgtcttgctttccaaggg

SEQ ID NO: 3650 - DNA, 40 bp, Roseburia hominis
  source 1..40: mol_type = genomic DNA
ttccttcacaaaataaatggcggcaacttgtcttatgtca

SEQ ID NO: 3651 - protein, 547 aa, Virgibacillus sp SK37
MENKKVIGLYIRVSTEKQSEHGFSLEAQQEEGTQAAQRTFGQDIVIENYVDSGISGKNIKDRPALNKMLKDVAEGTLDAIITYKVSRLSRSLSDSLKIVEEIHREKVRFISIKEGEYGTPHGNLQFNILASVAQYQREEIAENVQFGMSQRAREGKWNGGQLLGYNTVNKELVINQEETEIVKLIFDKYVNEGWGTKKISNYLNEIGKRTKKRKTFSIVSVSTILDNPAYKGYIRFNQVVNWETNRRKGKNPDHILTKGIHEPIIDEKTWNKAAELREKRRTGTPRQYSGTFPLTSIAKCPECGSYMTSSYGSKRKDGTKKRYYVCGQYHNKGKSVCEPNSIDAEWLEKAVFDRLTKALQSDSVIEDITERMNKQMEKHPMYAEQSKEVKILQSQLTKLEANKKRIQDSVETGSGIYTEEEAIERINGIRAEINEIQNKIFTLTENQPKNATSMKPVTSELVRQQLQEFFDLSTYLEPMQFRELLVASIVKIEAKKKNLKRIHFSFIAHMPEEESSNSIPSFIKHIIRKNNLYNKRIPLINYKGFIF

SEQ ID NO: 3652 - DNA, 50 bp, Virgibacillus sp SK37
  source 1..50: mol_type = genomic DNA
tccgctacttatttatggtacggttcaccgtaacgatttaaaggcaatga

SEQ ID NO: 3653 - DNA, 40 bp, Virgibacillus sp SK37
  source 1..40: mol_type = genomic DNA
ccactatttgtgatacggttcccccctatttatccgatac

SEQ ID NO: 3654 - DNA, 50 bp, Virgibacillus sp SK37
  source 1..50: mol_type = genomic DNA
tccgctacttatttatggtacggtttaccgtaacgatttaaaggcaatga

SEQ ID NO: 3655 - DNA, 40 bp, Virgibacillus sp SK37
  source 1..40: mol_type = genomic DNA
ccagtatttgtgctatggtttccctttatttacccaaaac

SEQ ID NO: 3656 - protein, 540 aa, Lachnospira eligens
MKQPYNTTIYNTALYLRLSRDDELQGESGSIQTQRMMLRQYAAEHGLTVVDEYIDDGWSGTNFERPSFQRMIDDIEDGKINCVVTKDLSRLGRNYILTGQYTEIYFPSKGVRYIAINDNVDTINGESELAPFLNILNEMHARQTSKKVKAAMRTRFANGAHYGAYAPLGYVKDPDKKGHLLIDPETRWIVEKIFDLAVHGRGAASITRILVEEKVPTPGWLNYERYGTFANIYAGVPAEKAYAWTIAQVKSILKEETYIGHSVHNKQSNISFKNKKKVRKPQEEWYRVENTHEAIISEEVFQKVQELIASRRRKRRNGTTQIFAGLIKCADCGWSLAYGENKQNKNPYGYYHCSKNGQGLRQCSMHYIRYDVLYAYVLARLQYWSMLAQKDEDKLLKRLLNASDRERNSAKKKQAAELKKAEKRKAEVDGLFAKMYEDWSAGRITEYNFNMLSEKYQNEQKELETKIRQLHETMEAAVQTAADAEKWIALMKQYVNPVELTAELLNTLIEKITVHEAVKGEDGSREQEVEIYYRFIGKID

SEQ ID NO: 3657 - DNA, 50 bp, Lachnospira eligens
  source 1..50: mol_type = genomic DNA
caatatctttaattaagggaaacgggagtttcccatagttaaagatacca

SEQ ID NO: 3658 - DNA, 40 bp, Lachnospira eligens
  source 1..40: mol_type = genomic DNA
aatttctagatgggaaaaaggtgacagttttccagatatc

SEQ ID NO: 3659 - DNA, 50 bp, Lachnospira eligens
  source 1..50: mol_type = genomic DNA
caatatctttaattaagggaaacgttagtttcccatagttaaagatacca

SEQ ID NO: 3660 - DNA, 40 bp, Lachnospira eligens
  source 1..40: mol_type = genomic DNA
aatttctagttgggaataatttgaatgtttactagttata

SEQ ID NO: 3661 - protein, 500 aa, Corynebacterium simulans
MWVWGTIGRMTATTAQRAAIYARISLDKQEEAGVKRQIHLATKHAEADEAKVVATYVDNNISAFSGDPRPDYNKLIHAIENREIDVVYVYALDRLTRRTKDTLALFELCEKHNVTVKANRGYNIDPSDPASRLTIVILGLIAEQESIDRAARIRAAYEDRARTGRPKTGGRRMFGYEADAETIIDEEAKAILDAAAMVIAGKTLRETVREVFHARSLTATSGRPMSAPTLRDILLNPRVRGLSTFNPTDPDTGKRLVKDRKIIGKGNWSAIIDEVTGEKLDAILRDPSRRLSHSGNAPRYFLASVLTCTCGEPMYSRSRRNKDGKPRRFYTCKRSEPGGTHVSIGAEVDDLIEAVILKRMEQPDAVDALRKALAPENNTLTERLLELSGRRNALLAKREQIENSAIDEEIDMPTFVRMSKKIEAQIAGLDGKMRELTTSHAADPLAVELADVPDFAKWWGGASVEDKRRLTRLLMEIHILPGKPGAKKFDPYRVKITWLQ

SEQ ID NO: 3662 - DNA, 50 bp, Corynebacterium simulans
  source 1..50: mol_type = genomic DNA
cgtacctataacccaggttctggtaatagggaatgtgggtttggggtacg

SEQ ID NO: 3663 - DNA, 40 bp, Corynebacterium simulans
  source 1..40: mol_type = genomic DNA
cggcgccactggcagcggcaagagcgagctccttcgaaca

SEQ ID NO: 3664 - DNA, 50 bp, Corynebacterium simulans
  source 1..50: mol_type = genomic DNA
cgtacctataacccaggttctggtagtagggaatgtgggtttggggtacg

SEQ ID NO: 3665 - DNA, 40 bp, Corynebacterium simulans
  source 1..40: mol_type = genomic DNA
cggcatcttgggcagcgggaggagagagctcctttgaaca

SEQ ID NO: 3666 - protein, 612 aa, Streptococcus constellatus
MIEYHNKITALYSRLSVGDEDRDGGESNSIVNQKAFLERYARGKKLINIRHYIDDDESGRFFDRSAYTQMISDVEQGKIGIVIMKDMTRWGRDYLQVGNEMEIFRRNNVRFIAINNGIDSIDQNTLEFAPFINIMSEWYARDISKKVKTGIKTKGANGKPVATEAPYGYIKDLKNKDYWIVDKEAAEVVKLIFRLFMEGKNRNQIAVYLKEKEILTPTFYMKQQDRGTAKSRPLNEENRYNWNKATITRILKRQEYCGDVVNFKTEKHYRDKRNHYVDKSKWQITENVHEPIIDRTTFENVERMLKNAPVKRPNGDGEIHALSGLMYCKDCGTKMHIRTIHKNKKVQHVTYCSEYAKGKAKHPKCNSPHRIDVDEVMENIAEVLRKIAQYSLENKAEFEKLVKESLYKEQTEEVKKNQKRMPQITDRMEQIERVMNKLYEDNALGNMDTERYEQLSRKYAEEYYTLKAEKEEIKERLSECENANQRAKKFIRLAESYSNFEELTPTIINEFISKIVVHERDVKRAKYVVQRIEVYFNYIGKFENELTKQIEPTKEEMLQMREEIEEAKREKSRAYHRAYSKEYRAKNIEKCREYEKLKAREYRAKKKLQATT

SEQ ID NO: 3667 - DNA, 50 bp, Streptococcus constellatus; identical to SEQ ID NO: 3477
  source 1..50: mol_type = genomic DNA

SEQ ID NO: 3668 - DNA, 40 bp, Streptococcus constellatus
  source 1..40: mol_type = genomic DNA
agagtatggctcagcaagatggggaacgaaaaaagatata

SEQ ID NO: 3669 - DNA, 50 bp, Streptococcus constellatus
  source 1..50: mol_type = genomic DNA
aaaggtacttgacaaaacgcttccgaggttgcataatattaactgaacag

SEQ ID NO: 3670 - DNA, 40 bp, Streptococcus constellatus
  source 1..40: mol_type = genomic DNA
agactctgtctcaaaaagagagggaaagaaaaaagactta

SEQ ID NO: 3671 - protein, 521 aa, Vibrio diabolicus
MECVAYLRVSSYSQKEKGDSIDGQRNSITEWIENRGDNIIKWYIDGGASAYKGRRNNFELMLHELESDIIKADGLIVYSLSRFSRNLLAQLEATKVLQKKGIHLVSATEALPKSYEDSYVMLSILGLMNEHYSMQNGKVVRDRLKDTAMKGYFTGGPIPFGYHSVTVSGVTSKCRRKLQILEEEAEIVIEIFNLPEKGINGKPLGVKSIAEMLNKRKCYRRGTKWNRNSVCRVLKNRSYIGEFIYNSRDSEPIVVNIPNIITKDQFYNVQAGLKSRDIFSFESRRIRSKCLLTGLLKCGVCGASMVVTSGKSGKYSYYQCSKQVRHAPDSCTSKRIRRDKAELLVKDKFMNELLSEAHLKTIHCQAKQRLKETSKLLSADKTKLSKRISNLETRYSRLITMVADGDLVPDVRINKTITDLSTQLDVLEAEMAKLAVRINLPVKNFGEARLVEVAAAVQKHLQQIDNEALKQLMLATVTSVKVVEATKKLIFEGSNMAVLYLTANAKTGTNFSVPAFITKWR

SEQ ID NO: 3672 - DNA, 50 bp, Vibrio diabolicus
  source 1..50: mol_type = genomic DNA
ttcccgctttcatcacaaagtggcgggctacatgggacgaatatgggaac

SEQ ID NO: 3673 - DNA, 40 bp, Vibrio diabolicus
  source 1..40: mol_type = genomic DNA
agctttctaaataagtggcggagagatagggatttgaacc

SEQ ID NO: 3674 - DNA, 50 bp, Vibrio diabolicus
  source 1..50: mol_type = genomic DNA
ttcccgctttcatcacaaagtggctagctacatgggacgaatatgggaac

SEQ ID NO: 3675 - DNA, 40 bp, Vibrio diabolicus
  source 1..40: mol_type = genomic DNA
agctttctgagtagggtgctatgagatagggattccaacc

SEQ ID NO: 3676 - protein, 560 aa, Hungatella hathewayi
MARRSRAIVETARPKYRVWRIAIYIRLSKEDMRCLDESESVTNQRQIIEDHIAGFNDGDEYIIVDEYVDDGISGTTDDEREDFQRMLSDIKRGRVNCVIVKDLARSFRNYSDQGYYLDDWFPRYNVRFISLYHQPLDSYKEPQNMRSIAVPIQGVLNENHCAETSDKVREVFDMKRRNGEHIGSFAAYGYVKDPNDKNALVIDEEAAAVVRDIYNMFLDGMSKNAIVRYLNEHGILSPAAYKRERLGLKYQNPSVDPAKPPLWCAMSVTTILKNRMYCGDMVQGRYRMKSYKVHVQEVVPEDEWYIVENTHEAIIDRETFEKVQRLLIRDTRTGPQQKKLYLFSGFLKCADCGKAMTRSKVGNVVYYYCRTYKDQSKTACTKHTIKHDRLEAAVLYAIQQQVYLAVDYTKTIERINRAPLVKSQSKKLMDAIEQKERELSKITRYKQAIYQDWKDGEISHSDYRHMKEDYERQAEALEEVIGKLRAEQAELENGIDTENPFLAAFRQYQNIDKLTRDILIELVDHIKIHEGGYISIVFRFADELRRIQEFIEVNTHNEAV

SEQ ID NO: 3677 - DNA, 50 bp, Hungatella hathewayi
  source 1..50: mol_type = genomic DNA
acctttcctaaataaagcgccccggtcggggcgatgttaaaaggaaagtg

SEQ ID NO: 3678 - DNA, 40 bp, Hungatella hathewayi
  source 1..40: mol_type = genomic DNA
agtagccccagtaggcccagtaggcccagtaggcccagta

SEQ ID NO: 3679 - DNA, 50 bp, Hungatella hathewayi
  source 1..50: mol_type = genomic DNA
acctttcctaaataaagcgccccggccggggcgatgttaaaaggaaagtg

SEQ ID NO: 3680 - DNA, 40 bp, Hungatella hathewayi
  source 1..40: mol_type = genomic DNA
agcagccccagcagccccagcagcccccgcagccccagca

SEQ ID NO: 3681 - protein, 502 aa, Aeromonas hydrophila
MLPAYIYSRISSKQQTSGVGLDRQLENAKAYCAANNLEIVDIQADVASAFHGKHVDGNLGAFLDAIKDKLIPVPSALVVESLDRLGREHELTALSRFIDIVKAGVEIHEISTGIVYNITDTHLLHVALSIMTRAYNESLIKSKRATDAIQRKLEEARKTNKVIGANIPAWIDNIDGEFHLNKHAETVKQIYDLYISGMTIRPIVRYMIEQKIEYPEPKIAKRGVNAGTYKWHSGRIMTILSSSSVYGTYTPLNGEPIEDYYPAVVDLATFMKVKVIRENRARKAVKVNDLLSIFGACCQCNLCKHSYISNQRILRNRSGEVKTVAMRCSGRLAGLDCKGVNVPNEDLEAYVLPLLPEIDISKLNRNKMRTLDTMKALRTLYTEQQDNLLDLVQMGNAKAKERFIALSADIEKLQEKIAKMETRIVPAVDLIIKDALDQNNIELRRKLNTQLCMMGLKIVIDCKQTGKAEISVFLKRTHIHTGVMTWTRKNRVGVKNTTEVEE

SEQ ID NO: 3682 - DNA, 50 bp, Aeromonas hydrophila
  source 1..50: mol_type = genomic DNA
gtgcgtagtattgtgttgtgtggcgagctgcactaaacaatactacgcgc

SEQ ID NO: 3683 - DNA, 40 bp, Aeromonas hydrophila
  source 1..40: mol_type = genomic DNA
gcgtgacagcctgctgggggaggtgcggatcaccgccccg

SEQ ID NO: 3684 - DNA, 50 bp, Aeromonas hydrophila
  source 1..50: mol_type = genomic DNA
gtgcgtagtattgtgttgtgtggcgtgctgcactaaacaatactacgcgc

SEQ ID NO: 3685 - DNA, 40 bp, Aeromonas hydrophila
  source 1..40: mol_type = genomic DNA
tcgtcactgccttctggtggtgctgcggatcaacgcccag

SEQ ID NO: 3686 - protein, 522 aa, Ruminococcus torques; identical to SEQ ID NO: 2566

SEQ ID NO: 3687 - DNA, 50 bp, Ruminococcus torques; identical to SEQ ID NO: 2562
  source 1..50: mol_type = genomic DNA

SEQ ID NO: 3688 - DNA, 40 bp, Ruminococcus torques
  source 1..40: mol_type = genomic DNA
cgtagtccgtgctttttgctctgctgcaagatcttcatga

SEQ ID NO: 3689 - DNA, 50 bp, Ruminococcus torques
  source 1..50: mol_type = genomic DNA
tgttgtctttatacaatcgcacccactggggcgacttcgtaagaacaaca

SEQ ID NO: 3690 - DNA, 40 bp, Ruminococcus torques
  source 1..40: mol_type = genomic DNA
tgtattcccggctttctgcactgcttccagttcttcatga

SEQ ID NO: 3691 - protein, 479 aa, Mycobacterium avium
MGKAKTPAQRVGARSAAIYARISADVEGTGLGVARQLEDCRKLAAERGWPIGDEYVDNDVSAYSGKPRREYARMLDDLKSGARDAVIVYNLDRLHRRPVELEDFVTLCESVGVRDVATVTADIDLGNDDGLFMARIFAAFAAKESGRKSARIRRKMLQNAEKGLPHGPARPFGYEPDKITLRPEEAKIVREMVDRYLAGASIRSLTIWLSDTGVAPPASKSWQTTTVRNILASGRIAGLREHHGEVIGAAAWPAIITAGERDRILARMTARSVTKTRAPRTYLLSGMLRCGRCGNRLFSQARHNNPTNRVRRYVCLKGPDHGGCGRLTVVALPVEELLTDAVLTRLDSPQLAGALAGRSSVDADVAALAAQLEADQARLDELAGLYAEGAVSAREWIAARDPITDRIARARRDIAKATDTSAVMDLVGCGEVLRGQWDDLDIDRQQAIIKSVLDHAVIAPGTPGSRKLDINRVQPHWRI

SEQ ID NO: 3692 - DNA, 50 bp, Mycobacterium avium
  source 1..50: mol_type = genomic DNA
agggtatattaggaacttgtcaccaagctgaaatatcgctaaactaccct

SEQ ID NO: 3693 - DNA, 40 bp, Mycobacterium avium
  source 1..40: mol_type = genomic DNA
cggccccaccgaactgtccaacctggtgctggtctgcccc

SEQ ID NO: 3694 - DNA, 50 bp, Mycobacterium avium
  source 1..50: mol_type = genomic DNA
agggtatattaggaacttgtcaccgcgctgaaatatcgctaaactaccct

SEQ ID NO: 3695 - DNA, 40 bp, Mycobacterium avium
  source 1..40: mol_type = genomic DNA
ctgccccacctctctctccgccatggtgccggtctgcacc

SEQ ID NO: 3696 - protein, 496 aa, Caldalkalibacillus thermarum
MKAALYIRVSTEEQAKEGFSITTQKERLTAFCESQGWEIYDYYIEDGKSAKDMDRPELQRLLSDVENEKLDIVLVYRLDRLTRSVRDLYELLQTFEQHNVKFKSATEVYDTTTAMGRLFITLVAALAQWERENLAERVRVNMEQMVYEGKRPGAPIPYGYDKDENVIPEEKETLRLLRKLYMDGHGTNTVAKKLNQMGRLKRGVEWNTFTVYYVLDNPYYAGLIRWGSKKKNGKYPSKKKEELVDTITVPGSHEPIFTVEEYEEHKAEMKRRSFKGYNIKNHYWFKGVAKCHKCGSAMTGREKRTKRQDGSVYSVLYYICSRKQSGLTCPMPLIRQELAEKLIMEHIAEIKLDKKEIDKHTVEKMIEQDDLKKELDKLNKQLEEIKKRRKKWQYAFVEDLITADELRERNTEEEEKERIINERIEEIRKEMEPVMSSEEIKNLMFTLPEVWEVLDDKEKNELIRTIFKRIEFDAPEKVTPRKGKFIPARLAKIEYN

SEQ ID NO: 3697 - DNA, 50 bp, Caldalkalibacillus thermarum
  source 1..50: mol_type = genomic DNA
cgtatcaattttgttatgtaagggaacccatacataataatttgacacca

SEQ ID NO: 3698 - DNA, 40 bp, Caldalkalibacillus thermarum
  source 1..40: mol_type = genomic DNA
gggatcatggtggtagggaaaagcatcttcctcatcaatg

SEQ ID NO: 3699 - DNA, 50 bp, Caldalkalibacillus thermarum
  source 1..50: mol_type = genomic DNA
cgtatcaattttgttatgtaagggtgcccatacataataatttgacacca

SEQ ID NO: 3700 - DNA, 40 bp, Caldalkalibacillus thermarum
  source 1..40: mol_type = genomic DNA
cggatcgctgagctagagatgaccatcttcctcatcaatg

SEQ ID NO: 3701 - protein, 556 aa, Streptococcus constellatus
MTNSTLTKQIPDWTKVEFEGLSEISVLYCRLSAEDANEGESNSISNQRLILSKLAERENLSNPIVFYDDGYSGSNAQRPAFQQALALVENNQVSNFVVKDLSRVSRDYLLSGNLLEVVFPSKNIRFISLQENIDSNKKSSQDAYLTPLVSLFNNWYSMQCSEKIKLSKHTKAKNGEKIGWITPYGYLNNPENRKEWLVDEYASEIVKRIFSEYISGRTPTEIAQGLRCDKILTPARYKKKLGISNYRILESDPCYWKTQMIWQILEKEEYIGSTINLKTAKISYKQRNCRLRPREDWLIFPDSHEAIISKEDFEIARKMMNHKRVVQRRNWKNKTGHENLFAGLLYCENEHKLSFCPQEKDGVNLDHYKCYHFKRAGDTCSGGHYLRKEVLENLILNELQELINSFQINEADLLQRLKDKFEIKETKKFSELKKQLTKNEQRMVELDIIIQKLYEKQLLGEITDDRFKKLCNSYEAEQAELKEKVQTATATLGVKMKYAHNIEKFITTIRKYTQLENLTSKIVNELIDKIIIHQPIGRGKNRQIKLEIHYRFIGDI

SEQ ID NO: 3702 - DNA, 50 bp, Streptococcus constellatus; identical to SEQ ID NO: 2747
  source 1..50: mol_type = genomic DNA

SEQ ID NO: 3703 - DNA, 40 bp, Streptococcus constellatus
  source 1..40: mol_type = genomic DNA
ccttgtattcatagaaaataaatgttacactctaaaagtt

SEQ ID NO: 3704 - DNA, 50 bp, Streptococcus constellatus
  source 1..50: mol_type = genomic DNA
ggactgctgagtgaagtgtggtatgctgtccacacctcacccagcagtcc

SEQ ID NO: 3705 - DNA, 40 bp, Streptococcus constellatus
  source 1..40: mol_type = genomic DNA
cattgtatgcaaataaaatgcacaatacactctaaaagtg

SEQ ID NO: 3706 - protein, 449 aa, Nocardia nova
MHAAIYLRQSLDRFGNMLAIGRQRGPCVDKCEERGWTYTEYVDNDRSASSGKRPEYLRMLTDIQEGKVEAVVVWDLDRLHRRPAELEEFIDLADKRGLMLVTITGDVDLSTHNGRMYARIKGAVARGEMDQKSMRQKAAHRQRAESGKPWGPRRIFGYTEDMQPHPVEAPVVREGFEQFLSGQSFGSIAAAWNDAGLTTTAGNKWRGPSVSKFVTNPKLAGLLAYNGEIVRAGDWPALVDEETWRAVCAIRSDPERRRPGAGGRKYLLTGLALCGKCGTALGSGQTAWKSTMYICRECHGIGRNQKMLDDHIIDAVVARLSRPDARELLVDRDREGVGELSAKAAVLRGKLEALEAEFAEDDDMTTSVYTKMVKRLTTQLGEVEARMADSQKARIFEGIIGADDVGEAFAAAGLDRQREMVAALMRVTVRPTRKGADFRPDDIHIDWFN

SEQ ID NO: 3707 - DNA, 50 bp, Nocardia nova
  source 1..50: mol_type = genomic DNA
atacgtgtttgagtgatgtgcatgccatagcagagtactaaaacacgtat

SEQ ID NO: 3708 - DNA, 40 bp, Nocardia nova
  source 1..40: mol_type = genomic DNA
gttcacgcaggtgtgcatgccgtaactgaagtagacgtag

SEQ ID NO: 3709 - DNA, 50 bp, Nocardia nova; identical to SEQ ID NO: 3707
  source 1..50: mol_type = genomic DNA

SEQ ID NO: 3710 - DNA, 40 bp, Nocardia nova
  source 1..40: mol_type = genomic DNA
gttcatgcagaagtacatgccgtaaatgatgtacacgtac

SEQ ID NO: 3711 - protein, 559 aa, Burkholderia cepacia
MKASRVYSYLRFSNAKQADGSSIERQLEYATRWAAERGMTLDASLTLRDEGLSAYHQKHVKKGALGTFLRAIEDGRIPAGSVLIVEGLDRLSRAEPVLAQAQLAQIINAGITVVTASDGREYNFKSLKAQPMDLVYSLLVMIRAHEESETKSTRVKAAIRRQCEGWLAGTYRGPISVGHDPRWLTRDVNRNFVIVDAHAATIRMVIDHFKQGLGGVHIMRLPGAQEMLAAAGISVSSRVYEILRNPALIGDKVVRLDDHAYTLKGYYPALLTDSEFAELQHLLTQRGRRPGKGAAPGIITGMRLAVCGYCGSPMVSQNNLTRNGRGNGRPYDGHRRILCSGSLAAKRCEAGGCSIVPIERAVMNFCSDEMHLDRLLKGRVPTAPLEAKLALARQRIETTRKQLARVTEALMTDETTAPAAFMQKARELEAQLARQQTEVDTLERELETMRGKGNPATAKAWARLAKGVEAFEPAARLQARQLIADTFSRIVVYRHGFQPEEQSGTIDLILVAKNGNARLLHIDRQTGEWRAGSAANLRAIQDAGIPKIDAKASTSRRAA

SEQ ID NO: 3712 - DNA, 50 bp, Burkholderia cepacia
  source 1..50: mol_type = genomic DNA
aatatattttgagtcgtctatggcttacctacggtaacagtatctatact

SEQ ID NO: 3713 - DNA, 40 bp, Burkholderia cepacia
  source 1..40: mol_type = genomic DNA
gagccgcagcagcgtcgacttccccgcgccgctgcggccg

SEQ ID NO: 3714 - DNA, 50 bp, Burkholderia cepacia
  source 1..50: mol_type = genomic DNA
aatatattttgagtcgtctatggcgcacctacggtaacagtatctatact

SEQ ID NO: 3715 - DNA, 40 bp, Burkholderia cepacia
  source 1..40: mol_type = genomic DNA
gagccgcgccagccccgccgccatcgcgccgcagcggccg

SEQ ID NO: 3716 - protein, 564 aa, Streptococcus suis
MDDGYSGTNFQRPSFQNMIKDIESGLINCVITKDLSRLGRNYLDCGLYLEVFFPEHNVRYIAVNDGVDTLNKSAMDITPFRNILNEMYAADISVKIKSAYRARFQQGKFMGTTAPYGYIKDPADHNHLLIDDKVAHVVKEIFDLALKGNGVAKICRHLNKQHILRPAAYAAERGETGFERHFEGNEDKRYIWSGNSVRSILRSPIYAGNLVGYKRIAANMKSKKRPSKLPEEWEVIPNTHEGIVTQEEFDIVQQLITSRRLPQNKGGFVNIFAGVIKCVDCGCALRAMNVHRRKRPEIIDCVQYSCNNYARNGRSECSAHNIEARDLFNAVLADINCFADMAVNDEKAVRAIEKRLTETDQSRAKALEKERKKLNKRLAELDRLFSSLYEDKVMERITERNFEMMSGKYQKEQLEIEARLKEVTETLNESYEKSRGIRDFLALIRNYQGLKELDATVINALIDKILVSEREKIADGTVKQEIKIYYKFIGFVDELHIIPTKRWAAMPAKNCTVCGVEYVPGSGASRYCPACAKKIRREKSNESKRRSREQKRIACMNCPQKMTD

SEQ ID NO: 3717 - DNA, 50 bp, Streptococcus suis
  source 1..50: mol_type = genomic DNA
gatgacacgaattaaagcagtaaaacttccaggactttaaaccttaaaaa

SEQ ID NO: 3718 - DNA, 40 bp, Streptococcus suis
  source 1..40: mol_type = genomic DNA
caatacccaaaacacctaaacaaaaggccattttaaatgt

SEQ ID NO: 3719 - DNA, 50 bp, Streptococcus suis
  source 1..50: mol_type = genomic DNA
gatgacacgaattaaagcagtaaaagttccaggactttaaaccttaaaaa

SEQ ID NO: 3720 - DNA, 40 bp, Streptococcus suis
  source 1..40: mol_type = genomic DNA
aaagacccaaaatacccaaagaaatgggcagtttcaatgt

SEQ ID NO: 3721 - protein, 567 aa, Streptococcus mitis
MNRTLTISDYRQVDTSKLSDITVVYCRLSQDDGLDGDSNSIINQKKILLDVVTRENLPNPILFVDDGFSGTNFDRPAISEALRLVENRQVSNFVVKDLSRLGRSYIKVGQLTEITFPSFDVRFIALNDGVDSNKPNESNSIFLPIKSLMDEMYAADTSKKIRAVVQSKARAGERVTVNPPYGYLKDSNNPKNWIIDPVASEVVKRIFKEAKNGKSLSEIAKGLENDKVFKPDRHRIEIGLKPISASSNVESLPYFWTRETLSNILGREEYLGHTVNLRTRKKSYKDKRKVDNPKEDWLVFKNTHEAIIDQETFDIVQKMRSHKRSNQRYKNRAGHENLFAGLVFCGSCGRKHYFCPQEKNGLNHDHYKCSGYRKPIDGCENPHYIQKSALIEIVSDKLRQTIQESHFDQEAFLKKLEQQSQAQFSKDNKRQRQQLQKDEHRFKEIDRIIQKLYEDNLFGKISDERFVKLSQSYEEEQHQLQASISNLTEKIANQQEDKLNISKFMTRISKYTELPELTVEIVNELIDKIVIHKPTGTKRKRIIQIDIYYNFIGKLNNEKSEPNELAR

SEQ ID NO: 3722 - DNA, 50 bp, Streptococcus mitis
  source 1..50: mol_type = genomic DNA
aaactgctaggtgtcaggtcagcaatagacagtctgacgctcagcactct

SEQ ID NO: 3723 - DNA, 40 bp, Streptococcus mitis
  source 1..40: mol_type = genomic DNA
tataaacagaaagcctaggattcctaggcttttttgtttt

SEQ ID NO: 3724 - DNA, 50 bp, Streptococcus mitis
  source 1..50: mol_type = genomic DNA
aaactgctaggtgtcaggtcagcaaaagacagtctgacgctcagcactct

SEQ ID NO: 3725 - DNA, 40 bp, Streptococcus mitis
  source 1..40: mol_type = genomic DNA
tataaactaaaagcctttgaatagtagacttttttttttt

SEQ ID NO: 3726 - protein, 575 aa, Anaerobutyricum hallii
MTATQKHDIIPICTTVLSADQPPKEDIMLDQQKITILYCRLSNEDAQEGESNSIANQREYLTRYARDHGYTNLKILVDDGYTGTNFNRPGVQEGFELVKQGLVGCWLVKDLSRFGRDYLTVGQYTDIIFPSYDVRFIAINDGVDSNRGDSEGFAAIRNLFNEWYPRDTSKKVRVSLRQRGTSGKHMGKPPYGYRCDPEDKDHWILDEEAAPVVKLIFDLCIDGKGPEQIARILEEKQIMTAKALYAKRKKKPMPERPYHWGNQSIAGILERQEYTGCTCNFKTYSKSYKLKKRIPNEPENMFYLPDTQEAIVSQAQFDRVQELRKNKRRPAKAERQGLFSGLLFCADCGGKLHFATSKSFEGKQDHYVCNNYKSNRGTCTAHYIREDVLREIVLERIRAVNEYIRSDVDGFQEEWLQCRRTDQERSIRDDKKKLEQAKKRLADLDVIIARLYEDYVLGNLNQDRYRKMSADYEAEQERLKLEIEVIEEWVEQREEMNDGLDAFIALTQKYVDVEELTQTIVNEYIKKIIVYAPDKSSGKRKQKVKIFFNFVDDVDIPVISEPIITQTTYEHRKTA

SEQ ID NO: 3727 - DNA, 50 bp, Anaerobutyricum hallii; identical to SEQ ID NO: 277
  source 1..50: mol_type = genomic DNA

SEQ ID NO: 3728 - DNA, 40 bp, Anaerobutyricum hallii
  source 1..40: mol_type = genomic DNA
gtgaaaagcccgcaaagccttgtatttagcgggtttcagg

SEQ ID NO: 3729 - DNA, 50 bp, Anaerobutyricum hallii
  source 1..50: mol_type = genomic DNA
atagttacttgtcactattaagccagggcttaacagtgataaggaactaa

SEQ ID NO: 3730 - DNA, 40 bp, Anaerobutyricum hallii
  source 1..40: mol_type = genomic DNA
gggaaaaggccacagagccagcgattttgagggtttcagg

SEQ ID NO: 3731 - protein, 548 aa, Blautia wexlerae
MLDQQKITILYCRLSNEDAQEGESNSIANQREYLTRYARDHGYTNLKILVDDGYTGTNFNRPGVQEGFELVKQGLVGCWLVKDLSRFGRDYLTVGQYTDIIFPSYDVRFIAINDGVDSNRGDSEGFAAIRNLFNEWYPRDTSKKVRVSLRQRGTSGKHMGKPPYGYRCDPEDKDHWILDEEAAPVVKLIFDLCIDGKGPEQIARILEEKQILTAKALYAKRKKKPMPERPYHWGNQSIVGILERQEYTGCTCNFKTYSKSYKLKKRIPNEPENMFYLPDTQEAIVSQAQFDRVQELRKNKRRPAKAERQGLFSGLLFCADCGGKLHFATSKNFEGKQDHYVCNNYKSNRGTCTAHYIREDVLREIVLERIRAVNEYIRSDVDGFQEEWLQCRRTDQERSIRDDKKKLEQAKKRLADLDVIIARLYEDYVLGNLNQDRYRKMSADYEAEQERLKLEIEVIEEWVEQREEMNDGLDAFIALTQKYVDVEELTQTIVNEYIKKIIVYAPDKSSGKRKQKVKIFFNFVDDVDIPVISEPIITQTTYEHRKTA

SEQ ID NO: 3732 - DNA, 50 bp, Blautia wexlerae; identical to SEQ ID NO: 277
  source 1..50: mol_type = genomic DNA

SEQ ID NO: 3733 - DNA, 40 bp, Blautia wexlerae; identical to SEQ ID NO: 3728
  source 1..40: mol_type = genomic DNA

SEQ ID NO: 3734 - DNA, 50 bp, Blautia wexlerae; identical to SEQ ID NO: 3729
  source 1..50: mol_type = genomic DNA

SEQ ID NO: 3735 - DNA, 40 bp, Blautia wexlerae; identical to SEQ ID NO: 3730
  source 1..40: mol_type = genomic DNA

SEQ ID NO: 3736 - protein, 560 aa, Clostridioides difficile
MPRIRKDKMARSYAEPFWKIGLYIRLSREDDNEDESESVINQEKILRDFVDSYFEPGTYVIVDVFADDGLTGTDTARPNFKRLEGCIVRKEVNCMIIKSLARGFRNLADQQKFLEEFIPINGARFICTGTPFIDTYANPHSASGLEVPIRGMFNEQFAATTSEEIRKTFKMKRERGEFIGAFAPYGYKKDPNDKNSLIVDEEAAEVVKSIYHWFVNEGYSKMGIAKRLNQMGEPNPEAYKKKKGFKYNNPNSDKNDGLWSASTIVRILQNEVYTGVMVQGRNRVISYKVHKQINVPEEEWFVVPNTHEAIIDRETFEKAQALHKRDTRTAPGKQEVYLMSGFVRCADCKKAMRRKTARDIAYYSCRSYTDKKICSKHSIRQDKLENAVLAALQMQIALVDRLAEEIERINNAPVINRESKRLSHSLKQAEKQLKQYNDASDSLYLDWKSGEITKEEYRRLKGKIAEQIQQLEANISYLKEEMQVMADGIGTDDPYLTAFLKYKNIQSLNRGIMVELVKAVWVHENGEITVDFNFADEYQRIIDYIENNHNVIRVIENKAI

SEQ ID NO: 3737 - DNA, 50 bp, Clostridioides difficile
  source 1..50: mol_type = genomic DNA
tgttgtgcataaataaacggctctactgctccgtcaatatatgcacaaca

SEQ ID NO: 3738 - DNA, 40 bp, Clostridioides difficile
  source 1..40: mol_type = genomic DNA
aacaggagcaacaggagcaacaggagcgacaggtccaaca

SEQ ID NO: 3739 - DNA, 50 bp, Clostridioides difficile
  source 1..50: mol_type = genomic DNA
tgttgtgcataaataaacggctctgctgctccgtcaatatatgcacaaca

SEQ ID NO: 3740 - DNA, 40 bp, Clostridioides difficile
  source 1..40: mol_type = genomic DNA
agcagcagcaacagcagcagcagcagcaacagcagcaaca

SEQ ID NO: 3741 - protein, 623 aa, Bacteroides faecis
MKAAFLIRCSTKNQDLDRQTRDLTRLAKSLGYEYDIENLVFGEKITGKDDVTIKNRESIDKLLRAAKEQKFDVVLVAEVSRMSRDPASGRVYVRQLINMSIPVYFRDIDTWTINPDNGKRVRDAEQVIGAAFDAAWKYLRSLKTQVASGRRNELDNNQISVGQPFFGYTRYGGKDKSKKNCWIVDEVAAEVVVFVFNEYIKDGSTLKSTALATTAKYGELLGKKFSVGSIEHILTYESYHTGIKKISLTDPDTEEIEVFDVKVPILVDTELFEKATAKRKNNRVKSEPYPKQTTYILSKLLKCPYCGYTMTPRTKGNDSKGKTTNERYRIINGRKALSWLCMSGINNATSCSNRISVANEKAEPIIWELVKKELIVFANLNNEERELKVEELTEKISHLASNIDNYNTHKSSLQKQLSKAYTVATMADESVLEMAMTEFNKTARTIRKEMSDCDSAIEQIKGEIENLANLKIFYSQPNLPSDIIEKAETDEAEKRKLVKELINKIVPYKITTFKKRHRDKGLVTLNFGVVLLEVYTVNGIYYVFYNANDRGDIRQAYYISGVFAKFQNSINKFDAYKEGEYFVISNADMVMETKEIDELITVNQMVEIAINNGWVLSYSYKQK

SEQ ID NO: 3742 - DNA, 50 bp, Bacteroides faecis
  source 1..50: mol_type = genomic DNA
tagtgaaagtgtttttggaattgctcgctatttgaaaaatacttgtatag

SEQ ID NO: 3743 - DNA, 40 bp, Bacteroides faecis
  source 1..40: mol_type = genomic DNA
tctgttaaattccggtagttcatccaaaaataaaactcca

SEQ ID NO: 3744 - DNA, 50 bp, Bacteroides faecis
  source 1..50: mol_type = genomic DNA
tagtgaaagtgtttttggaattgcacgctatttgaaaaatacttgtatag

SEQ ID NO: 3745 - DNA, 40 bp, Bacteroides faecis
  source 1..40: mol_type = genomic DNA
tttgtaaaattcctatgttacatgcaaaaataaaaatcca

SEQ ID NO: 3746 - protein, 628 aa, Campylobacter coli
MRKNEKITALYERLSRDDFGKDDDQQRESNSISNQKAMLEEFAARQGFTNIVHFTDDGISGTCFDRPGFLAMMKEVEAGNVEYLCIKDMSRMGRDYLKVGQIMEILRQRGVRLIAINDGVDSARGDDDFTPFRNIMNEYYARDTSRKIRSTFQSKGKSGKHLTGTVIYGYLWNEARDQWLVDPEAAEVVKRIFSMTIDGYGPYQIASKLKSEKVLIPSAYLAQHGEGVNKNKTFKDVYGWGSSTICNILEKREYLGHTINFKTRKHFKDKKSHYVPEDEWTIFENTHEPIIDQQTFDLVQKIRGNVRRYPDGWGEAAPLTGLLYCADCGGKMYVHRTNNGKRISQYTCSQYTKVPCGTLCKTQHRINEDVVLSLVSEMLKAIAEYAKHDRAEFVRVVQEAQSSQQTTEVRKQRTRLATAKQRVSELEVLLCKIYEDNILGKLSDSRYATLDAQYEKEQSELTAEISVLEEAVKSYEKHEKDADRFIALIDKYENFDKLTIAMLNEFIEKILVHERDCKGSIQTTQEVEIYFNFVGRFVPPAFGEVELTPEELEEIRKREERKDRLHQNYLKRKASGAQKRYEDKIKKRKKAEIEAKKAAIRAEDIAKGVFVPVSSLPQREPMKGVQTA

SEQ ID NO: 3747 - DNA, 50 bp, Campylobacter coli; identical to SEQ ID NO: 57
  source 1..50: mol_type = genomic DNA

SEQ ID NO: 3748 - DNA, 40 bp, Campylobacter coli
  source 1..40: mol_type = genomic DNA
taaagatggatttgcatagggtatttggatgaaatgcttt

SEQ ID NO: 3749 - DNA, 50 bp, Campylobacter coli
  source 1..50: mol_type = genomic DNA
aaaagtccttgacttttcgtctctgttgttgtatgctctaaaagacttct

SEQ ID NO: 3750 - DNA, 40 bp, Campylobacter coli
  source 1..40: mol_type = genomic DNA
ggaagatgtatttgcataggttaattcaatgacattcttt

SEQ ID NO: 3751 - protein, 628 aa, Campylobacter coli
MRKNEKITALYERLSRDDFGKDDDQQRESNSISNQKAMLEEFAARQGFTNIVHFTDDGISGTCFDRPGFLAMMKEVEAGNVEYLCIKDMSRMGRDYLKVGQIMEILRQRGVRLIAINDGVDSARGDDDFTPFRNIMNEYYARDTSRKIRSTFQSKGKSGKHLTGTVIYGYLWNEARDQWLVDPEAAEVVKRIFSMTIDGYGPYQIASKLKSEKVLIPSAYLAQHGEGVNKNKTFKDVYGWGSSTICNILEKREYLGHTINFKTRKHFKDKKSHYVPEDEWTIFENTHEPIIDQQTFDLVQKIRGNVRRYPDGWGEAAPLTGLLYCADCGGKMYVHRTNNGKRISQYTCSQYTKVPCGTLCKTQHRINEDVVLSLVSEMLKAIAEYAKHDRAEFVRVVQEAQSSQQTTEVRKQRTRLATAKQRVSELEVLLCKIYEDNILGKLSDSRYATLDAQYEKEQSELTAEISVLEKAVKSYEKHEKDADRFIALIDKYENFDKLTIAMLNEFIEKILVHERDRKGSIQTTQEVEIYFNFVGCFVPPAFGEVELTPEELEEIRKREERKDRLHQNYLKRKASGAQKRYEDKIKKRKKAEIEAKKAAIRAEDIAKGVFVPVSSLPQREPMKGVQTA

SEQ ID NO: 3752 - DNA, 50 bp, Campylobacter coli; identical to SEQ ID NO: 57
  source 1..50: mol_type = genomic DNA

SEQ ID NO: 3753 - DNA, 40 bp, Campylobacter coli; identical to SEQ ID NO: 3748
  source 1..40: mol_type = genomic DNA

SEQ ID NO: 3754 - DNA, 50 bp, Campylobacter coli; identical to SEQ ID NO: 3749
  source 1..50: mol_type = genomic DNA

SEQ ID NO: 3755 - DNA, 40 bp, Campylobacter coli; identical to SEQ ID NO: 3750
  source 1..40: mol_type = genomic DNA

SEQ ID NO: 3756 - protein, 628 aa, Campylobacter coli
MRKNEKITALYERLSRDDFGKDDDQQRESNSISNQKAMLEEFAARQGFTNIVHFTDDGISGTCFDRPGFLAMMKEVEAGNVEYLCIKDMSRMGRDYLKVGQIMEILRQRGVRLIAINDGVDSARGDDDFTPFRNIMNEYYARDTSRKIRSTFQSKGKSGKHLTGTVIYGYLWNEARDQWLVDPEAAEVVKRIFSMTIDGYGPYQIASKLKSEKVLIPSAYLAQHGEGVNKNKTFKDVYGWGSSTICNILEKREYLGHTINFKTRKHFKDKKSHYVPEDEWTIFENTHEPIIDQQTFDLVQKIRGNVRRYPDGWGEAAPLTGLLYCADCGGKMYVHRTNNGKRISQYTCSQYTKVPCGTLCKTQHRINEDVVLSLVSEMLKAIAEYAKHDRAEFVRVVQEAQSSQQTTEVRKQRTRLATAKQRVSELEVLLCKIYEDNILGKLSDSRYATLDAQYEKEQSELTAEISVLEEAVKSYEKHEKDADRFITLIDKYENFDKLTIAMLNEFIEKILVHERDRKGSIQTTQEVEIYFNFVGRFVPPAFGEVELTPEELEEIRKREERKDRLHQNYLKRKASGAQKRYEDKIKKRKKAEIEAKKAAIRAEDIAKGVFVPVSSLPQREPMKGVQTA

SEQ ID NO: 3757 - DNA, 50 bp, Campylobacter coli; identical to SEQ ID NO: 57
  source 1..50: mol_type = genomic DNA

SEQ ID NO: 3758 - DNA, 40 bp, Campylobacter coli; identical to SEQ ID NO: 3748
  source 1..40: mol_type = genomic DNA

SEQ ID NO: 3759 - DNA, 50 bp, Campylobacter coli; identical to SEQ ID NO: 3749
  source 1..50: mol_type = genomic DNA

SEQ ID NO: 3760 - DNA, 40 bp, Campylobacter coli; identical to SEQ ID NO: 3750
  source 1..40: mol_type = genomic DNA

SEQ ID NO: 3761 - protein, 628 aa, Campylobacter coli; identical to SEQ ID NO: 56

SEQ ID NO: 3762 - DNA, 50 bp, Campylobacter coli; identical to SEQ ID NO: 57
  source 1..50: mol_type = genomic DNA

SEQ ID NO: 3763 - DNA, 40 bp, Campylobacter coli; identical to SEQ ID NO: 3748
  source 1..40: mol_type = genomic DNA

SEQ ID NO: 3764 - DNA, 50 bp, Campylobacter coli; identical to SEQ ID NO: 3749
  source 1..50: mol_type = genomic DNA

SEQ ID NO: 3765 - DNA, 40 bp, Campylobacter coli; identical to SEQ ID NO: 3750
  source 1..40: mol_type = genomic DNA

SEQ ID NO: 3766 - protein, 628 aa, Campylobacter coli
MRKNEKITALYERLSRDDFGKDDDQQRESNSISNQKAMLEEFAARQGFTNIVHFTDDGISGTCFDRPGFLAMMKEVEAGNVEYLCIKDMSRMGRDYLKVGQIMEILRQRGVRLIAINDGVDSARGDDDFTPFRNIMNEYYARDTSRKIRSTFQSKGKSGKHLTGTVIYGYLWNEARDQWLVDPEAAEVVKRIFAMTIEGYGPYQIASKLKSEKVLIPSAYLAQHGEGVNKNKTFKDVYGWGSSTICNILEKREYLGHTINFKTRKHFKDKKSHYVPEDEWTIFENTHEPIIDQQTFDLVQKIRGNVRRYPDGWGEAAPLTGLLYCADCGGKMYVHRTNNGKRISQYTCSQYSKVPVGKLCTTQHRINEDVVLSLVSEMLKAIAEYAKHDRAEFVRVVQEAQSSQQTAEVKKQRIRLATAKQRVSELEVLLCKIYEDNILGKLSDSRYATLDAQYEKEQSELTAEISALEKAVKSYEKHEKDADRFIALIDKYENFDKLTIAMLNEFIEKILVHERDRKGSIQTTQEVEIYFNFVGRFVPPAFGEVELTPEELEEIRKREERKDRLHQNYLKRKASGAQKRYEDKIKGRKKAEIEAKKAAIRAEDIAKGVFVPVSSLPQREPQKGAQIA

SEQ ID NO: 3767 - DNA, 50 bp, Campylobacter coli; identical to SEQ ID NO: 57
  source 1..50: mol_type = genomic DNA

SEQ ID NO: 3768 - DNA, 40 bp, Campylobacter coli; identical to SEQ ID NO: 3748
  source 1..40: mol_type = genomic DNA

SEQ ID NO: 3769 - DNA, 50 bp, Campylobacter coli; identical to SEQ ID NO: 3749
  source 1..50: mol_type = genomic DNA

SEQ ID NO: 3770 - DNA, 40 bp, Campylobacter coli; identical to SEQ ID NO: 3750
  source 1..40: mol_type = genomic DNA

SEQ ID NO: 3771 - protein, 628 aa, Campylobacter coli
MRKNEKITALYERLSRDDFGKDDDQQRESNSISNQKAMLEEFAARQGFTNIVHFTDDGISGTCFDRPGFLAMMKEVEAGNVEYLCIKDMSRMGRDYLKVGQIMEILRQRGVRLIAINDGVDSARGDDDFTPFRNIMNEYYARDTSRKIRSTFQSKGKSGKHLTGTVIYGYLWNEARDQWLVDPEAAEVVKRIFSMTIDGYGPYQIASKLKSEKVLIPSAYLAQHGEGVNKNKTFKDVYGWGSSTICNILEKREYLGHTINFKTRKHFKDKKSHYVPEDEWTIFENTHEPIIDQQTFDLVQKIRGNVRRYPDGWGEAAPLTGLLYCADCGGKMYVHRTNNGKRISQYTCSQYTKVPCGTLCKTQHRINEDVVLSLVSEMLKAIAEYAKHDRAEFVRVVQEAQSSQQTTEVRKQRTRLATAKQRVSELEVLLCKIYEDNILGKLSDSRYATLDAQYEKEQSELTAEISVLEEAVKSYEKHEKDADRFIALIDKYENFDKLTIAMLNEFIEKILVHERDRKGSIQTTQEVEIYFNFVGRFVPPAFGEVELTPEELEEIRKREERKDRLHQNYLKRKASGAQKRYEDKIKKRKKAEIEAKKAAIRAEDIAKGVFVPVSSLPQREPMKGVQTA

SEQ ID NO: 3772 - DNA, 50 bp, Campylobacter coli; identical to SEQ ID NO: 57
  source 1..50: mol_type = genomic DNA

SEQ ID NO: 3773 - DNA, 40 bp, Campylobacter coli; identical to SEQ ID NO: 3748
  source 1..40: mol_type = genomic DNA

SEQ ID NO: 3774 - DNA, 50 bp, Campylobacter coli; identical to SEQ ID NO: 3749
  source 1..50: mol_type = genomic DNA

SEQ ID NO: 3775 - DNA, 40 bp, Campylobacter coli; identical to SEQ ID NO: 3750
  source 1..40: mol_type = genomic DNA

SEQ ID NO: 3776 - protein, 628 aa, Campylobacter coli; identical to SEQ ID NO: 3771

SEQ ID NO: 3777 - DNA, 50 bp, Campylobacter coli
  source 1..50: mol_type = genomic DNA
aaaagtccttgacttttcgtctctggtgttgtatactctaaaagacttct

SEQ ID NO: 3778 - DNA, 40 bp, Campylobacter coli; identical to SEQ ID NO: 3748
  source 1..40: mol_type = genomic DNA

SEQ ID NO: 3779 - DNA, 50 bp, Campylobacter coli
  source 1..50: mol_type = genomic DNA
aaaagtccttgacttttcgtctctgttgttgtatactctaaaagacttct

SEQ ID NO: 3780 - DNA, 40 bp, Campylobacter coli; identical to SEQ ID NO: 3750
  source 1..40: mol_type = genomic DNA

SEQ ID NO: 3781 - protein, 522 aa, Vibrio harveyi
MRFSRPEQAKGTSIERQSNFAEQYALEHGLELDKSLTMMDKGLSAFHGVHKTKGAFGQFLAAVTAGKVPSGSVLVVESLDRLSREDPLIAQAALTDLILSGITVVTAADNQVYSREEIQQNPFKLIMSLVVMIRANEESETKQRRSNAFLKSALNQYQANGKIRRLGSDPSWLDFNKDNDTYSFNERVEVIRRILNLYNQGIGSLKIARQLTEENIPTLSGKRSAWGQTTVANIVKSHALYGMKRINVQGVEYDLEDFYPALITKSKWLALQQHRTKRSKSMHGRGEVVHLITGHGKGFTTCGYCGGGLGAQTQKQYKRSGEYSRTVTRLHCLTHKETSSCCSSVFLEPIESAVLFAACIGVEPQSLVPTVNNVNYSALIDEVENKVKHIVEQVTAGAPWDLFKDAHDKLKLEKQKLIKERDSQKPDVNQSDVQKWVNKLVELADKARANDKEARLKCRTLINSICKSIVIKLRGHDLKSEPVVTITFVTDEQFEFKVGKNGAVQFVDNGMAVNRRLKPLLA

SEQ ID NO: 3782 - DNA, 50 bp, Vibrio harveyi
  source 1..50: mol_type = genomic DNA
tattcactgtacattcgctctccgtctaatgtatagtgataacttgcatt

SEQ ID NO: 3783 - DNA, 40 bp, Vibrio harveyi
  source 1..40: mol_type = genomic DNA
taaccaaaggcaccgtctgtccagtgaatgtcttgcatac

SEQ ID NO: 3784 - DNA, 50 bp, Vibrio harveyi
  source 1..50: mol_type = genomic DNA
tattcactgtacattcgctctccggttaatgtatagtgataacttgcatt

SEQ ID NO: 3785 - DNA, 40 bp, Vibrio harveyi
  source 1..40: mol_type = genomic DNA
acaccaatggcacagggtggtcagtgaatgtgttgcaaac

SEQ ID NO: 3786 - protein, 562 aa, Bradyrhizobium canariense
MNKAFSYIRFSSPEQARGDSFERQSEKAQKWAKKEGYEIAKTWKDLGVSSYRGANVKRGQFAEFLRDVAADELPKGSVLILENLDRMSRQEPEDALMVFLAIIKKGIGILTLSDQKLYTKATMKQDRSMLLMTLMVMTRANEESALKGERVAAAWVRKRLAAREKALPLTDRIPGWLKCTRDATGLRTFSVDDKKATVVRRIFEQTEQGLGRRAIVKNLNRGDVPSFLSKTGWQPSSVIKIIRSRTTIGEYQPHRRDEDGERIPDGEPIKGYYPAVIDEALWDRANAAVAVRRKNAGGRPSTEAANLLRGLAHCGCGKRMLFLNKGAPPKGGRYYVCSAAVREDKCDNKRLWNAKEVERHLLHQIDPKRVAEAFEPSEKRTGPSPLERCDMQIAELTARKQRELDRFVENQDSIIGPELKRRAESLIEQIEEKKRTREIIAKAERDRPRLSTAEASVNSIRALTAKLDGATDKERVALRVAFIQQMRAAYFEVVFRPHAIVGLIELPGKPRSRKGLLPSRFVEVRVIDNVERFFLYHRFFGDDPEELADLGGGKGIVSPRFA

SEQ ID NO: 3787 - DNA, 50 bp, Bradyrhizobium canariense
  source 1..50: mol_type = genomic DNA
gcttgagaattgtgccacctcctgctcagaagaggctacatttactgaag

SEQ ID NO: 3788 - DNA, 40 bp, Bradyrhizobium canariense
  source 1..40: mol_type = genomic DNA
cgccggcggccatcacctgctgatgatcggcgcgcccggc

SEQ ID NO: 3789 - DNA, 50 bp, Bradyrhizobium canariense
  source 1..50: mol_type = genomic DNA
gcttgagaattgtgccacctcctgcccagaagaggctacatttactgaag

SEQ ID NO: 3790 - DNA, 40 bp, Bradyrhizobium canariense
  source 1..40: mol_type = genomic DNA
cgccggccaccaccaccacccgacggccggcgcgcccggc

SEQ ID NO: 3791 - protein, 535 aa, Bradyrhizobium liaoningense
MDMQRPPRAYSYVRFSTPEQAKGHSLQRQTEAAQTWAAANGVVLDDELTFQDKGVSGFHGANRETGALGVFLDRVRDGTIPPGSWLLVENLDRISRQVARKAVRAIEDIVEAGITVVDMSDGGREYNAAALDSDPVLFLMMVLRFIRANEESATKGVRVAKAHAARRQKFAGTEKLTKPYTLRLPAWIRWSTEAASYELIEERAVLLRWMFEMADDGMGAHSIAAHLNETKEDTWGAGGWKAKYWHRSYIRKLLTNKAAIGIFVPHRVQKVEGQRAKQRVPLEPIAHRFPAAVDRELFERVNARLSTTEARGKNANAPVRSIFAGVMQCRHCDGTVTRVNKGDHVYLVCSAAHAKAGTHPYESVPYDQAVRAFKHNLKLTLDTAPRGNDTGDIERKIDQLMVEVDAGEERVSELLELTIGDNSRAARQALQRAEQELETVQEALRKATERLDTLTSTNVKKRLAAVEKAITAEPIDTEEANKALRGAVRNMIMRPQEGRLDILWHHAEEPQETLFMTSRFDWDVNEIEDQEQEEQ

SEQ ID NO: 3792 - DNA, 50 bp, Bradyrhizobium liaoningense
  source 1..50: mol_type = genomic DNA
cttgggcattgacgaaatcatttgttcatgtgattgcttcagtgcccacg

SEQ ID NO: 3793 - DNA, 40 bp, Bradyrhizobium liaoningense
  source 1..40: mol_type = genomic DNA
cgccggcggccatcacctgttgatgatcggcgcgcccggc

SEQ ID NO: 3794 - DNA, 50 bp, Bradyrhizobium liaoningense
  source 1..50: mol_type = genomic DNA
cttgggcattgacgaaatcatttgcccatgtgattgcttcagtgcccacg

SEQ ID NO: 3795 - DNA, 40 bp, Bradyrhizobium liaoningense; identical to SEQ ID NO: 3790
  source 1..40: mol_type = genomic DNA

SEQ ID NO: 3796 - protein, 474 aa, Mycobacterium sp VKM Ac-1817D
MRTSSDQHIERAVVYTRVSSDKAKGRSVAEQETECRAECERRGWPVADVLTDNDRSATRFATKDRPQYARLGKVLRPGDVLVVWEPSRAGRSLEHYVDLRRLCTERRVMLSYSGKLFDLDDGDDRFATGLDALIAEREAEDIRKRIVRAHRANLAAGKPHGKVSYGYRIVRDPQTGKSIGREPDPVRAPLLAQAARRVLSGQSFKSVLAWIATEDPEQKWSDVQLRRVLTSPTSAGLRTHRGTVTGPGTWEAILTEEQHADLVALFAGRRAAPRGPEARHLLSGIAICTVCERPMVRHTGGRLADGTRSVVYTCRQRHAARSLAVVDAAVLAVVDGILSSPEALAALAEPPAAPDVTAKSDLDDLKGQLQAIEDKLADLSMPADVGARVAARLTERIAELERATAPVFTSPVVHELATADDAVALWRDGLDLAAKREFIRAVLMVTVAPIGKGRGRWDGNKEEGINVTPRGVGG

SEQ ID NO: 3797 - DNA, 50 bp, Mycobacterium sp VKM Ac-1817D
  source 1..50: mol_type = genomic DNA
ttgcgggggtattcgcccattaagtggttaaacgttggtaaattgccatt

SEQ ID NO: 3798 - DNA, 40 bp, Mycobacterium sp VKM Ac-1817D
  source 1..40: mol_type = genomic DNA
cttggcggcgacgatggtgtggttgaaggtgatggccata

SEQ ID NO: 3799 - DNA, 50 bp, Mycobacterium sp VKM Ac-1817D
  source 1..50: mol_type = genomic DNA
ttgcgggggtattcgcccattaagttgttaaacgttggtaaattgccatt

SEQ ID NO: 3800 - DNA, 40 bp, Mycobacterium sp VKM Ac-1817D
  source 1..40: mol_type = genomic DNA
cttggcagtgatgatgatgttggtgatggtgatgacgata

SEQ ID NO: 3801 - protein, 555 aa, Streptococcus suis; identical to SEQ ID NO: 2376

SEQ ID NO: 3802 - DNA, 50 bp, Streptococcus suis; identical to SEQ ID NO: 2377
  source 1..50: mol_type = genomic DNA

SEQ ID NO: 3803 - DNA, 40 bp, Streptococcus suis
  source 1..40: mol_type = genomic DNA
ttgttttttcataagttaattatatcacaaatttagaagt

SEQ ID NO: 3804 - DNA, 50 bp, Streptococcus suis
  source 1..50: mol_type = genomic DNA
ggactgctgggggaggtgtggataacataccacaccccacccagcagtcc

SEQ ID NO: 3805 - DNA, 40 bp, Streptococcus suis
  source 1..40: mol_type = genomic DNA
tttttacttcagaaattaaacatatcacacatatagaaga

SEQ ID NO: 3806 - protein, 503 aa, Enterococcus faecium
MNNRIDAIYARQSVDKKDSISIESQIEFCKYELKGGNCKEYTDKGYSGKNTDRPKFQELVRDIKRGLIAKVVVYKLDRISRSILDFANMMELFQQYNVEFVSSTEKFDTSTPMGRAMLNICIVFAQLERETIQKRVTDAYYSRSQRGFKMGGKAPYGFHTEPIKMDGINTKKLVVNPDEAANIRLMFEMYAQPTTSYGDITRYFAEQGILFHGKELIRPTLAQMLRNPVYVQADLDVYEFFKSQGAVIVNDAADFTGMNGCYLYQGRDVKPSKKNDLKDQMLVLAPHEGIVPSDIWLTCRKKLMNNMKIQSARKATHTWLAGKIKCGNCGYALMSIFNPSGKQYLRCTKRLDNKSCPGCGKIITSELETVVYQQMVKKLASYKTLTGRKKAAKANPKIAALQVELAHVDSEIEKLVDSLTGANNVLLSYVNVKIAELDGRKQELLARIAELTVETISPEQVSQISGYLDTWENVSFDDKRRVVDLMITTIAATSDSLNITWKI

SEQ ID NO: 3807 - DNA, 50 bp, Enterococcus faecium
  source 1..50: mol_type = genomic DNA
gtgtagtcccttgtaaactgcactttaggtcagtttacaaggaactacac

SEQ ID NO: 3808 - DNA, 40 bp, Enterococcus faecium
  source 1..40: mol_type = genomic DNA
tttttgtttatctttctttttagagaacgccaaactactc

SEQ ID NO: 3809 - DNA, 50 bp, Enterococcus faecium
  source 1..50: mol_type = genomic DNA
gtgtagtcccttgtaaactgcacttgaggtcagtttacaaggaactacac

SEQ ID NO: 3810 - DNA, 40 bp, Enterococcus faecium
  source 1..40: mol_type = genomic DNA
tttttctttttcttttttttgagacagggtcacactactc

SEQ ID NO: 3811 - protein, 534 aa, Pseudomonas syringae
MKQAISYIRFSSARQEGGSSVERQEGMIAKWLLDHQDYELSKLNYSDLGKSGFHGEHVKEGGNFGKLLKAVMDGYIKRDDVVLVEAIDRTGRLPALQMLSDVIAPILRAGVSIITLDDNTTYTEASVGGPHLFMLVAKIQAAHEYSRTLSRRVEDSYKKRRKDAKEKGVAPKRMTPVWLNSDGTVREDVAPWIKTAFELYVSGVGKSTIAKRLRESGVERLAKASGPGVEGWLRNKAVIGKWETLIGTPEHHVIDDVYPLIIEPSLFYKAQVHAEKMKTQRPIKTAKHFLVGLVHCGECGKNYIMQNLHGKPHSMRCRTRQSQNNCSNSYVVPKAVLDAIYRYTSVTAALEAVQLQQLGVNEKEIVTREAELLTITKRVEGFVQAVNEAGPMPELLVALKQARIERESAENALVILRATVVTPPANQWREMGKVWSLEAEDAQRLAAMLRQVGYHITVGKGAIIKSSHSDVVYQYLGVDRVKDMYRVLANGEMKLIHKSQVDDYPYYEPFQGVVGEATMDEADKENLLLQYQSS

SEQ ID NO: 3812 - DNA, 50 bp, Pseudomonas syringae
  source 1..50: mol_type = genomic DNA
ctgtgttacttacaaaaaccttgctcccaacgttttcacatgtaacactg

SEQ ID NO: 3813 - DNA, 40 bp, Pseudomonas syringae
  source 1..40: mol_type = genomic DNA
catgcccatcaggccctggtcccagcccttgatgactcga

SEQ ID NO: 3814 - DNA, 50 bp, Pseudomonas syringae; identical to SEQ ID NO: 3812
  source 1..50: mol_type = genomic DNA

SEQ ID NO: 3815 - DNA, 40 bp, Pseudomonas syringae
  source 1..40: mol_type = genomic DNA
catgcccagcagcccctggtccatgcccttgatcagccaa

SEQ ID NO: 3816 - protein, 521 aa, Pseudomonas poae
MKQAISYVRFSSFRQHGGSSVERQTAMIAEWLTRNPEYLLSGLKFEDLAKSGYHGDHIKAGGGFGKLLGAVEAGAIKEGDVVLVEAIDRTGRMDTVDMLDLLTPILKAGVSIVTLDDGNTYNRASVNGSHIYMLMAKIQAANQYSEALSRRVTASYRIREEKAKAGEQVKRWTPAWLTVDGKVIDRIAKHVKTAFELYAVGVGKATISVRMRETGEPELAKCSSPTIEGWLRNRTVLGYWNDIPNAYPAIIEPDLFFRAQQRGKEAKTTRPVKTAKHLLVGLVKCGHCGGNYIMQNKDGRPHSMRCLNRQRLKDSGCDNTRTIPKPVLDYVRVATTMRAIETAFQRQQLTISQKRILAIQSELEAVKQKITDLATAIQTVGAIPEIISQLKARQAEREALEAELLIQERTESPIDRSAVVQIEDDLLDNDPVKLNALLKGVDYRITVHADGLMIVNAPDEIYPWLYGGSDRTAKKYLLHHLDDVIKIDPKPHLTTRVIETVEMDELIPTLQLLRRSLRRQP

SEQ ID NO: 3817 - DNA, 50 bp, Pseudomonas poae
  source 1..50: mol_type = genomic DNA
gagggtcacattgaaagttgttgctcccagcttcttcagatgtgacactg

SEQ ID NO: 3818 - DNA, 40 bp, Pseudomonas poae
  source 1..40: mol_type = genomic DNA
catgcccatcaggccctggtcccagcccttgatcacacgc

SEQ ID NO: 3819 - DNA, 50 bp, Pseudomonas poae; identical to SEQ ID NO: 3817
  source 1..50: mol_type = genomic DNA

SEQ ID NO: 3820 - DNA, 40 bp, Pseudomonas poae; identical to SEQ ID NO: 3815
  source 1..40: mol_type = genomic DNA

SEQ ID NO: 3821 - protein, 562 aa, Pseudomonas fluorescens
MPKAISYIRFSTGRQSLGSSHERQRQAVTRWLEKHPDYTLYDKPYDDLGRSGYSGDHVDNAFGHLLAAIEDGTIPKGSTILIEQIDRVGRMEPFEMFPLLSRIVNAGVDLVTLDDGITYNRQSVNNNHLFLLVAKVQAAWGYSKTLSERTKASYAIRREKAKNGEPIKRFAVAWLTTDGKLKSHLVPYVKQVFDLYISGVGKNTIANRLRASGMPELASISSPTIDAWLQNKTAIGFWNDIPGVYKPVVTPEVFMQAQKRRQEVKTQSRSRTSKNFLVGMVKCGVCNANYIIHNKEGKPNNMRCLTHHRLKDAGCTNSETIPYQVVHFIYLSSAPSWIDKAMKVIQLTDNEKRKLYLVTEREELTASILRMAKLLARTDSPELESEFDLANERRASIDIELSVLDRKADNGVESKSTSIFVGYEATLEHDRLAFHDPIQLSALLKQAGYSITVQPGRKLYVAESNVPWVYTGVARKGNTALGYRIQDGEMEYTISNVIPEAVDVQAYKNNPDGEMQHVADRSYKHVKSPTLLNPTGLRNTNVMTIEKFESANAAMQRLTSGV

SEQ ID NO: 3822 - DNA, 50 bp, Pseudomonas fluorescens
  source 1..50: mol_type = genomic DNA
tggtgtaacaagcgaattacttgggatcagatcatctgaatgttacactg

SEQ ID NO: 3823 - DNA, 40 bp, Pseudomonas fluorescens
  source 1..40: mol_type = genomic DNA
ccgcgtgatcaagggctgggatcaggggctgatgggcatg

SEQ ID NO: 3824 - DNA, 50 bp, Pseudomonas fluorescens; identical to SEQ ID NO: 3822
  source 1..50: mol_type = genomic DNA

SEQ ID NO: 3825 - DNA, 40 bp, Pseudomonas fluorescens
  source 1..40: mol_type = genomic DNA
ttggctgatcaagggcatggaccaggggctgctgggcatg

SEQ ID NO: 3826 - protein, 521 aa, Pseudomonas mohnii
MKQAISYVRFSSFRQHGGSSVERQTAMIAEWLTRNPEYRLSGLKFEDLAKSGYHGDHIKAGGGFGKLLGAVEAGAIKEGDVVLVEAIDRTGRMDTVDMLDLLTPILKAGVSIVTLDDGNTYNRASVNGSHIYMLMAKIQAANQYSEALSRRVTASYRIREEKAKAGEQVKRWTPAWLTVEGKVIERIAKHVKTAFELYAAGVGKATISVRMRETGEPELAKCSSPTIEGWLRNRTVLGYWNDIPNAYPAIIEPDLFFRAQQRGKEAKTTRPVKTAKHLLVGLVKCGHCGGNYIMQNKDGRPHSMRCLNRQRLKDSGCDNTRTIPKPVLDYVRVSTTMRAIETAFQRQQLTVSQKRILAIQSDLEAAKKKITDLATAIETVGAIPEIISQLKARQAEREALEAELLVQERTESPIDRLTVVRIEDDLLTNDPVKLNALLKGVDYRITVHADGLMIVNAPDEIYPWLYGGSDRTAKKYLLHHLGEAIKIDPKPHLTTRMVETVDMDELEPTLQLLRRTLRRQP

SEQ ID NO: 3827 - DNA, 50 bp, Pseudomonas mohnii
  source 1..50: mol_type = genomic DNA
aagggtcatactgcaaagtgttgctcccagcttcttcagatgtgacactg

SEQ ID NO: 3828 - DNA, 40 bp, Pseudomonas mohnii
  source 1..40: mol_type = genomic DNA
catgcccatcaggccctgatcccagcccttgatcacgcga

SEQ ID NO: 3829 - DNA, 50 bp, Pseudomonas mohnii; identical to SEQ ID NO: 3827
  source 1..50: mol_type = genomic DNA

SEQ ID NO: 3830 - DNA, 40 bp, Pseudomonas mohnii; identical to SEQ ID NO: 3815
  source 1..40: mol_type = genomic DNA

SEQ ID NO: 3831 - protein, 535 aa, Pseudomonas plecoglossicida
MPAAIPYIRFSSARQASGTSTERQHQMVMTWMGQNPDYTLSDLNYRDLGKSGYKGEHTKDGGGFAMLLDAVKTGGIKAGDVVLVEAIDRAGRLHPLIMLNEVITPILAAGVSIITLDDNTTYTIDSAAGGHLFLLVAKIQAAHGYSKQLSERVTASYEIRRQKAISGEPVKRWTPIWLTVDGVLKETIAPNIKNAFELYVSGVGKNTIANRLRATGVPELASCSGPTIEAWLRNKAAIGYWNEIPNVYPAVVSNELFMQAQLRKKQAATKPRERTSKHFLVGLVKCGTCGSNYVIHHKDGKPNNMRCVRHHRLKSAGCTNAETVPYQVVYKMYTATAHMSIGKALNAIRLTENDKRKLALTVERDEVIASFARLAKALAKYDSPAIEAELDEANERRKAIDEELSILDRVVEQPVRRQAFDIIHDSAVEHDRMFKDDPIQLSALLRQAEYAITVHEGRTLFVTGDDVPLIYVGTVRKGNQTLGYRVLEGGHEFVISPIIPEIPTAFNHDDKSNYVVSRSGKVLSMKLAVHEVDGE

SEQ ID NO: 3832 - DNA, 50 bp, Pseudomonas plecoglossicida
  source 1..50: mol_type = genomic DNA
tagtgtgacttacgaaaatgttgtgagcagcctctcggtaaatgacactg

SEQ ID NO: 3833 - DNA, 40 bp, Pseudomonas plecoglossicida
  source 1..40: mol_type = genomic DNA
ccgggtgatcaaaggctgggaccagggcctgatgggcatg

SEQ ID NO: 3834 - DNA, 50 bp, Pseudomonas plecoglossicida; identical to SEQ ID NO: 3832
  source 1..50: mol_type = genomic DNA

SEQ ID NO: 3835 - DNA, 40 bp, Pseudomonas plecoglossicida; identical to SEQ ID NO: 3825
  source 1..40: mol_type = genomic DNA

SEQ ID NO: 3836 - protein, 552 aa, Streptomyces atratus
MREDHATLVGLGLSPEELETLGLDKPATADPSGLMDAYLRRSNRKEDLATLRGHLRDVVRWAQANGLQIRHVWFEQLSASKTYVRRREFEKATQAIMDGKSKTLGVWKTDRFDRRGMGAVGRMLDEFDRRQSRLVSVSEGLDSSQGGRMVFAILSERAREEAKDIAKRVKIGHDSHKAEGRRGTGRPPFGLYSAPGSGKVEPHPDEYGTARRLADLLLDKKTTKDTAHQLNVEGYRTRSGATWSPTAVSKLAQSPLFAGMVPVRRRKTDEHGNPLDSWEGYGEPLRNEKGEVVMCGKGVVAPGEWFKIKALIAERTDERWAKGKPEAKYLGTGSYRCGQMRDKKGTGELEPCGGSMSHRGGRYRCEVRQTRGKSICEGVVTLADRIDHAVGQAWIHHITALEPGDPVVIEIARRWLAFADPETQAKKEEAQKALEAAQWRVKKLEDDFYVYGKMDEERFEELSEGQRAVIESTAATLEALDAEADLSPLTHIDTLREAWEAADMADKRMLLKCALGKKGIRVKPAARQGDHTPILERLEFDWLSKKDTTTKK

SEQ ID NO: 3837 - DNA, 50 bp, Streptomyces atratus
  source 1..50: mol_type = genomic DNA
ggtggacctttggtaccgcacttcgagaaagtagcggtctaaggtccacc

SEQ ID NO: 3838 - DNA, 40 bp, Streptomyces atratus
  source 1..40: mol_type = genomic DNA
gtgggtcgtaccgcacttcgagaagatgctctacgacaac

SEQ ID NO: 3839 - DNA, 50 bp, Streptomyces atratus; identical to SEQ ID NO: 3837
  source 1..50: mol_type = genomic DNA

SEQ ID NO: 3840 - DNA, 40 bp, Streptomyces atratus
  source 1..40: mol_type = genomic DNA
gtggcacgtccctcactttgagaagatgctctatgaccag

SEQ ID NO: 3841 - protein, 519 aa, Streptococcus parasanguinis
MKKIITIEAATVHSNKVEQPKFTKRRVAGYARVSTDHEEQATSYDAQMRYYTDYISSRLDWEFVKMYSDEGITGTNTKQRVGFNSMVNDALAGKIDLIITKSVSRFARNTVDSLSTVRKLKDAGVEIYFEKENIWTFDAKGELLITIMSSLAQEESRSISENVTWGKRKQYERGKVSIPFKNVLGFERGPNGELVVNEEEAKIVRYIFHEFLLGKNANSIAKALTEQGIPSPTGKEKWYYGTVRRMLQNEKYKGDALLQKSFTTNFLTKKTKVNEGELPQYYVENNHEAIIDKDTFDLVQYELKIRERRGSASQFSGMLVCATCGAVYGSKVWHSNSKYRRVIYRCNQKYEGEVKCDTPHVTDEEVKEWFVIATNKLIENKDEVIENMKVLLVMCSDTEDIQQEISASETRMVELTDLVDSLIYENSRVVQDQKTYQEKYDRYSQEYKELEQKLETLTNSLQKKKSQAKSIKEFIQHLSNRDLVSEFDGKLWYTMVEKVIIASKEEVDFHFKNGAVISI

SEQ ID NO: 3842 - DNA, 50 bp, Streptococcus parasanguinis
  source 1..50: mol_type = genomic DNA
ttgtattataaatatcttcttttcgaaataaggagaagttaattgataca

SEQ ID NO: 3843 - DNA, 40 bp, Streptococcus parasanguinis
  source 1..40: mol_type = genomic DNA
atatacatttttactttttgatttggaccataccttgttg

SEQ ID NO: 3844 - DNA, 50 bp, Streptococcus parasanguinis
  source 1..50: mol_type = genomic DNA
ttgtattataaatatcttcttttcctaataaggagaagttaattgataca

SEQ ID NO: 3845 - DNA, 40 bp, Streptococcus parasanguinis
  source 1..40: mol_type = genomic DNA
aaatgcatttttactttttcttttggatattgcatttttg

SEQ ID NO: 3846 - protein, 599 aa, Klebsiella spallanzanii
MKKKLYSYIRWSSAQQTSGTSLERQTAAAAEYAKTHDLEFVEILDAGVSAFRGKNATDGALAEFIAAVENGAIPSDSWLYVENLDRLSRATVRNALKLLLHITDLGVTVVTGMDGKIYSAETMDKDFTDLMISLLLFSRANEESKTKSDRVKEASMKALARVQAGLPATIKGGGADPFWIQRGGRETSPTQHPSHWLAIKKIVELSLQGIGCNRIRQVLNDDPTLYPPPRQKDTPRRRALLDAGLAPTGWNIHRIEDARRQPSLYGLKTITLSGHTYNLEGYYPAVCSEEEFHLIQNISASNRLKSGDIRNTITLLSGLNLCKCGSCGGWVTTFRKNGKLTYRCDAGHRKIHHCPTTWSLNALIIESATVRALIAGVAHNIIEDSQDLESVAGEIDNRRAEVVEIDRKRERLAVRIAEEDDDLLMQQLRQYNARKRDLLAEIGTLTQREALRSEEHNAAERLAEAQRLLTGEMVADIYTAERLAVRELIRKSVRQVSIWKRQDKSLKLECEFISGWRYSFEGVMDGSLKSFIEYQTSPDGINMLEIYGKLNAITAKVFSRVLGADDCVISPNLSHVQAYQDMAVRLGHSPLTGSQFFWK

SEQ ID NO: 3847 - DNA, 50 bp, Klebsiella spallanzanii
  source 1..50: mol_type = genomic DNA
ttgggttcctatttcttttacagccaggtgtagttaatataggtgcacca

SEQ ID NO: 3848 - DNA, 40 bp, Klebsiella spallanzanii
  source 1..40: mol_type = genomic DNA
ttcccgcccctgctccagccaggtgtaccaggtgacgcca

SEQ ID NO: 3849 - DNA, 50 bp, Klebsiella spallanzanii; identical to SEQ ID NO: 3847
  source 1..50: mol_type = genomic DNA

SEQ ID NO: 3850 - DNA, 40 bp, Klebsiella spallanzanii
  source 1..40: mol_type = genomic DNA
ttgccgccccacccccagccaggtgtacaaggtgcaccca

SEQ ID NO: 3851 - protein, 613 aa, Streptomyces venezuelae
MTQGVVTGVDTYAGAYDRQSRERENSSAASPATQRSANEDKAADLQREVERDGGRFRFVGHFSEAPGTSAFGTAERPEFERILNECRAGRLNMIIVYDVSRFSRLKVMDAIPIVSELLALGVTIVSTQEGVFRQGNVMDLIHLIMRLDASHKESSLKSAKILDTKNLQRELGGYVGGKAPYGFELVSETKEITRNGRMVNVVINKLAHSTTPLTGPFEFEPDVIRWWWREIKTHKHLPFKPGSQAAIHPGSITGLCKRMDADAVPTRGETIGKKTASSAWDPATVMRILRDPRIAGFAAEVIYKKKPDGTPTTKIEGYRIQRDPITLRPVELDCGPIIEPAEWYELQAWLDGRGRGKGLSRGQAILSAMDKLYCECGAVMTSKRGEESIKDSYRCRRRKVVDPSAPGQHEGTCNVSMAALDKFVAERIFNKIRHAEGDEETLALLWEAARRFGKLTEAPEKSGERANLVAERADALNALEELYEDRAAGAYDGPVGRKHFRKQQAALTLRQQGAEERLAELEAAEAPKLPLDQWFPEDADADPTGPKSWWGRASVDDKRVFVGLFVDKIVVTKSTTGRGQGTPIEKRASITWAKPPTDDDEDDAQDGTEDVAA

SEQ ID NO: 3852 - DNA, 50 bp, Streptomyces venezuelae
  source 1..50: mol_type = genomic DNA
gtagtgccccaactggggtaacctttgagttctctcagttgggggcgtag

SEQ ID NO: 3853 - DNA, 40 bp, Streptomyces venezuelae
  source 1..40: mol_type = genomic DNA
ggggtgccagggcgtgcccttgggctctccgggcgcgtac

SEQ ID NO: 3854 - DNA, 50 bp, Streptomyces venezuelae
  source 1..50: mol_type = genomic DNA
gtagtgccccaactggggtaacctcggagttctctcagttgggggcgtag

SEQ ID NO: 3855 - DNA, 40 bp, Streptomyces venezuelae
  source 1..40: mol_type = genomic DNA
ggtgttccagggcctgccgcggggctctctgggccggttc

SEQ ID NO: 3856 - protein, 432 aa, Oscillospiraceae bacterium
MWNYKRIILYGKYSNEWYVRDSSRKVRAVLKAKAERGERLGTRAPYGYKKDEADSKKLVVDEEAATVVRRIFAMCAAGSGPSQIARRLREEQILCPTTYAYLRFGVNHTALNTEKPCHWTSSTIASMLENELYLGNTINMKYSTKSYKDKRHVEHPKEECLVFEGTHPALVTQEVWDIVQRVRQNRRRPTKMNEQNKYSGLVVCADCGATMVLHRAHTMKPTWNNFTCRTYKKEGAEVCTAHYIRECVLDEVILEDLRRVTAMAREHTREFAEYIGGRQSAEIQREIRRLERELTAARKRGAELDAIFKRLYEDRVLGHLSVEQFQTLSSGYTEEQEKLVEEIPAKEAAIQKLRDTVSSTDGFIAKARRYTDITELTPELLRLFIQKIVVHEKSTKWSKKAMQTIEIHYNDIGCISGDIQQDKESPRQEISA

SEQ ID NO: 3857 - DNA, 50 bp, Oscillospiraceae bacterium
  source 1..50: mol_type = genomic DNA
agatacccctgtcaaggggggcccaagggccaccccgcataaggacatca

SEQ ID NO: 3858 - DNA, 40 bp, Oscillospiraceae bacterium
  source 1..40: mol_type = genomic DNA
aaaaaggaagagggaaacgaacccgtttccctcttccttt

SEQ ID NO: 3859 - DNA, 50 bp, Oscillospiraceae bacterium
  source 1..50: mol_type = genomic DNA
agatacccctgtcaaggggggccctggggccaccccgcataaggacatca

SEQ ID NO: 3860 - DNA, 40 bp, Oscillospiraceae bacterium
  source 1..40: mol_type = genomic DNA
aaaaataaagagggacacttgccctttcccctctcccttc

SEQ ID NO: 3861 - protein, 510 aa, Faecalibacterium sp
MKKYRIALYIRLSLEDAKTDSMSISSQRNILREYASELPEYANAELTEFVDNGYSGANFERPAVQELLDLVRANRIDCIMVKDFSRFGRNSLETGYFIERVFPLFHTRFISVNDDFDTQKLKGDTGGMEVAFKYLISEYYSRDMSVKTKTAKYLKFQRGEYQSKICPYGYRKGENGRMVPDPETSEVVQKIFEYAVNGMNATDIARELSRQQIPTPGEHKARKGIKTHDVSRTHGMWCNSTVLRILADERYMGTYVIGKREVTEIGGHKMRSKAESDWIKIPDHHIPLVNEEIFSKANASIQRFKIPNRKKHDYLLRGKVICGCCKHALHLANGTSYRCRFSSTIPSLDCYNIHIREKELNQLVYELLCKQFQVAFGIDSLADLRKVDTVAIRQADFDRQIFEMQEEKRKLYEALVSGRIPLLEYKDQKEQISEKLLEVQNTKAVVMARLEAEQEERQHQRQQMDISRMLTESDGLTSELVDLLIDKIYVYPDKRVDIAFKIRDSFTTHD

SEQ ID NO: 3862 - DNA, 50 bp, Faecalibacterium sp
  source 1..50: mol_type = genomic DNA
tttgtcgtggacttgacataagggtgccgttacggtataataacgacaaa

SEQ ID NO: 3863 - DNA, 40 bp, Faecalibacterium sp
  source 1..40: mol_type = genomic DNA
accatggctgacgcgagggtggcgtaggtcatgggcaggg

SEQ ID NO: 3864 - DNA, 50 bp, Faecalibacterium sp
  source 1..50: mol_type = genomic DNA
tttgtcgtggacttgacataagggagccgttacggtataataacgacaaa

SEQ ID NO: 3865 - DNA, 40 bp, Faecalibacterium sp
  source 1..40: mol_type = genomic DNA
accatggctgaggcgaaggaggcctgggtgatgggaagct

SEQ ID NO: 3866 - protein, 532 aa, Streptomyces sp 769
MTAEHVCTICGKTEPNAIDLYTRKSKKLRKDDHRREQSTDAQREQGHRWAHRNGYAVRKVWKDIQSAFKDVKRSDFDRALSALAGGEVPALWCYLIDRFSRKGAEDVLKVIGKARVIFEYDGLDSNESRDRRWIINRAEEAREYSENLSERVRDTKEEQRSKGLWVAGRALWGYMVSRDRVLSPDEEPYICHLASRTEWTRAGLLREMFRKIAEDGASGHDICRWLNGMGVPSPGGKSWGRGYLHRMTRNPAYSGWQVIQIRPGHPEPYRNAQGQRVRLKGTALVSPELQRKVQEALSTGHVVPIEQRAHDTRPKHLLTGLLRCEGCGRSMPKGGRSYLCQAAVGGTGCKTRAQAKMNAIEEFVFQAWLARLTHAAADDPVMLAVSERWTARMKPEETEEEQAARAALRAAEAGLKRLLDDRQAGVYDGAAARYFGPLLREANEAVEAARAEVGKYDGGGAVQLPFRSVSLEELTAAWDDASLPMKRDLLRLAIDRIMVRKAPRRGIRFNGHERLDIEWAQPAQQEDFTEAA

SEQ ID NO: 3867 - DNA, 50 bp, Streptomyces sp 769
  source 1..50: mol_type = genomic DNA
aggtgtctaagagtcctcctcgccgaggaggagtagccccttagacacct

SEQ ID NO: 3868 - DNA, 40 bp, Streptomyces sp 769
  source 1..40: mol_type = genomic DNA
catcaaggtgctgctggccgacgaccagacgctgctgcgc

SEQ ID NO: 3869 - DNA, 50 bp, Streptomyces sp 769
  source 1..50: mol_type = genomic DNA
aggtgtctaagagtcctcctcgccacggaggagtagccccttagacacct

SEQ ID NO: 3870 - DNA, 40 bp, Streptomyces sp 769
  source 1..40: mol_type = genomic DNA
catcgagcagcagctggccacggaccagatgctcctgcac

SEQ ID NO: 3871 - protein, 540 aa, Eubacterium rectale
MKQPYNTTIYNTALYMRLSRDDELQGESGSIQTQRMMLRQYAAEHGLNVIDEYIDDGWSGTNFDRPDFQRMIDDIEDGKINCVVTKDLSRLGRNYILTGQYTEIYFPSKGVRYIAVNDNVDTINGENELAPFLNILNEMHARQTSKKVKAAMRTRFANGAHYGAYAPLGYVKDPDKKGHLLIDPETRWIIEKIFDLAVHGRGAASITRILVEEKVPTPGWLNFQRYGTFANIYAGAPEEKAYAWTIAQVKSILKEETYIGHSVHNKQTNISFKNKKKVRKPKEEWYRVENTHEAIISEDVFRQVQEQICNRRRRQKNGTTQIFSGLVKCADCGWSLAYGMNSQNKNHYAHYHCSKYGQGLHQCSMHYIRYDVLYAYVLSRLQYWSVLVQQDGDKLLKRLLNASDKERNTARKRQTAELKKAEKRKAEVDTLFAKMYEDWSAGRITEYNFNMLSEKYQGEQRELDAKIERLHEAMEVAAQTAVDAEKWIGLMKQYVNPTELTAELLNTLIEKILVHEAVKSEDGSREQEVEIFYRFIGKIE

SEQ ID NO: 3872 - DNA, 50 bp, Eubacterium rectale
  source 1..50: mol_type = genomic DNA
agataggaattttgattatccggagcttgaaataaggtgtaaacttctca

SEQ ID NO: 3873 - DNA, 40 bp, Eubacterium rectale
  source 1..40: mol_type = genomic DNA
ttgaagtatgaaatactttgcttgtaatgtcaaagtaaat

SEQ ID NO: 3874 - DNA, 50 bp, Eubacterium rectale
  source 1..50: mol_type = genomic DNA
agataggaattttgattatccggaaattgaaataaggtgtaaacttctca

SEQ ID NO: 3875 - DNA, 40 bp, Eubacterium rectale
  source 1..40: mol_type = genomic DNA
aataagtaagaaatattttaattttaatttcaaaataaat

SEQ ID NO: 3876 - protein, 558 aa, Pseudomonas furukawaii
MPRAYAYVRWSTAEQGEEGRDSHDRQTTPLEAFTKATGIPVVETIIDKGVSAFKGANARIGQLKGLLDRIESGEIERGDYIIVESIDRLTRQKLNDSVDLIQSILKKGVRLHTVIDQKTYSHDDPSRDLETLLMVGVIAKRAHEESDTKSKRLKSSWLKKRDAAETTIIRKQCPYGLHYDEEAQAFAIVEDEAQEIRDIFENLKYMGILESIKRVNQYSKRRWTRKHIDELIKNKSPIGVLSLRRRNDEDGTKIFDRYVPGYYPKIIDETEFDAAVSAVKGRFNERKSGRRSPNNYNIFRHCIQCHEHKAGMLFNLQGLGVEKKRYAYLVCSNRAERVCDCDNRIRFDLVFGTFLAFVKQLSENRYIDERTDQKRKDFTWFSQDNYKQMDAVNDAFSRFFSVRDTSAPKEEIRAKKAQLTSEKTALEMLDASLAQFDGLIPKTFIKRIADTEARITALEVEIQNLEGSLAIEAETLEVTTYQDILDLYATEQGRLKLNTFFISRGITFEVNSDKESNMVGLQIRIKGDEKFKLYTSQFFTTKDPLTPFGIPDLSHIIK

SEQ ID NO: 3877 - DNA, 50 bp, Pseudomonas furukawaii
  source 1..50: mol_type = genomic DNA
ttattagaaaacgctagaccattgaacaacggaagggtattttctaataa

SEQ ID NO: 3878 - DNA, 40 bp, Pseudomonas furukawaii
  source 1..40: mol_type = genomic DNA
gccgtcgatggtgccgcggaacagcacctcgaaggccagc

SEQ ID NO: 3879 - DNA, 50 bp, Pseudomonas furukawaii
  source 1..50: mol_type = genomic DNA
ttattagaaaacgctagaccattgggcaacggaagggtattttctaataa

SEQ ID NO: 3880 - DNA, 40 bp, Pseudomonas furukawaii
  source 1..40: mol_type = genomic DNA
gccgccgacgatgccgcggggccgccccccgaagcccagg

SEQ ID NO: 3881 - protein, 544 aa, Streptomyces hygroscopicus
MSTQEDGAETLIDLVCRKSQAVKSKSGRREISVSAQEARGRRVAAEMGLTVRHVWREVGSASRFRRSKKVPKQDLALQALERGEVGALWVFRLDRWTRRGAGAILSIVEPRDGRPRRLLIDNGDPENPGIGLDSANPRDRSELIRRAEDAREETEVLSERVRNTKVFQRENGEWLNGHAPYGLRIVLVSAFDEDGEEIEERKLERDPETSAGIPGEPDVTKLDIARWVTYEAPIAKIAKRKISQMLNERGVPSPTGGTWAYSTVANMIDNPVYAGWQITGREEGKSKRVLYRNSAGEKVSVMVGPAVLTEDEYNEAQAASRGTGPPGDAESWRAKHVLTDLLECCGCGSSCTWRGTGYSCWRPGAGGVCPGPAFVAFKSAEEYVFNRWSTRMAALEPDDPLLAIAAERWKARQDPQSSEDEAAARAALADAEAALSRLWKDRRAGLYDGPSERFFAPSLAEANEAVLEAQRAVDESRDGGAVDISFLLDAQSLIEAWEDADDALKRDLLRLAIRRIKVRKAEYRGQQFNGDKRMEIIWHDDEAA

SEQ ID NO: 3882 - DNA, 50 bp, Streptomyces hygroscopicus
  source 1..50: mol_type = genomic DNA
tctactgccagtgtgcaaccaccctcagagtgttggtcagtagcagtagc

SEQ ID NO: 3883 - DNA, 40 bp, Streptomyces hygroscopicus
  source 1..40: mol_type = genomic DNA
catcagccggtaccggccctcggcgcgctggtagcagcac

SEQ ID NO: 3884 - DNA, 50 bp, Streptomyces hygroscopicus; identical to SEQ ID NO: 3882
  source 1..50: mol_type = genomic DNA

SEQ ID NO: 3885 - DNA, 40 bp, Streptomyces hygroscopicus
  source 1..40: mol_type = genomic DNA
caggagccggttctggccctctgtgcgcaggtagcagcag

SEQ ID NO: 3886 - protein, 554 aa, Comamonas terrigena
MGHAIENGLVYSYLRFSDPKQSAGGSTDRQLAYAAKWAAEHGLKLDTNLSLRDEGLSAYHQQHIKSGALGVFLRAVEDGRVPSGSVLIVEGLDRLSRAEPIQAQAQLAQIVNAGITVVTASDGKTYSRQRLKDNPMDLVYSLLVMIRAHEESDTKSKRVKASIRRLCEHWIDGTYKGRIRQGKDPHWVRELDEGWELVPERVAVIRRVLAMYQDGIGGLKIMESLEREGLQLLPGAVNNSQQVYRLIKQHALAGSKEVSVDGELFLLPDYYPAILTAEEWSELQRVAADSGRRRVKGELPHLITGLGITTCGYCARPMAGQNLATKPRLPDGRIRDGYRRLLCASAAAYGGGCPVPGSTSVAPVERAIMSYCSDIVNLQALYGTDRSEGPRKRVHAARQAVKELRDQLDKLTDAMLATASEGTPLVFARRARQLEADLEHAEKAAAQAERELANLARQDITGADARWAELAAGVEAQKVAPRLKARQLIADTFEKIVVYHHGLRPDPDSLQRDYHIDLLLVAKGGNTRMLRVDREGNWMAGEETSTIQSIHERK

SEQ ID NO: 3887 - DNA, 50 bp, Comamonas terrigena
  source 1..50: mol_type = genomic DNA
cgtatacataaacaatcgcatgggcacccgagtgataccatacctatacg

SEQ ID NO: 3888 - DNA, 40 bp, Comamonas terrigena
  source 1..40: mol_type = genomic DNA
gtcggtcagggccttggggcagcccagcgacacaaagccc

SEQ ID NO: 3889 - DNA, 50 bp, Comamonas terrigena
  source 1..50: mol_type = genomic DNA
cgtatacataaacaatcgcatggggtcccgagtgataccatacctatacg

SEQ ID NO: 3890 - DNA, 40 bp, Comamonas terrigena
  source 1..40: mol_type = genomic DNA
gtcggcctgggcgtcgggggtgcccagcggcacgacgccg

SEQ ID NO: 3891 - protein, 545 aa, Streptomyces sp CMB-StM0423
MVQRAHWGDLEGQRWAGLVRLSLEADDEVLPAPTSNEAPNLQAGSTQRWRPATGKDIKSRDEQEKDARRFVESRGGRYVHTYEEPDTSAWKRKRVRQPDGTVSYRVIRPVFEGALDDLKRGATPDGERLDGLIVYDIDRLTRDNRHLEDAIEVVENFHRPIIDITGTLDLLTDNGRTVARLLVTVANKSSADTARRVRRKHHALQQAGIPTGTTRPFGYRPDKRTLDPAEATALREAVERIITGASPRAIAADWNKKGITTTRGNTWSKQTVKQVLRNPRICGYRSRKVRDFNPETGTETVRVEPVYDADGEPVKGQWDPIISVEDWEAVTAAIGRNPQPGDTYNARKYLGTGTLRCDKDGCGTPLRAQKAPASRNKPKDFFYYTCPDKRSGYGCGGVRIPGPDTDEAIKMLVIAKYEEEAQERETMAVSEQWADEEALARVREDIADWTEQREQRLVSKERFFAFLAKAEAVERQLVNERSEWRRRALRAKGTPIDLRGEWDDLSFLERRAYVEKALLTVLVGPAVRPRGPVWNRLTPIFRSDG

SEQ ID NO: 3892 - DNA, 50 bp, Streptomyces sp CMB-StM0423
  source 1..50: mol_type = genomic DNA
tggttacatctctcaatgccttgcgacctgagcatctgcggacgtaacct

SEQ ID NO: 3893 - DNA, 40 bp, Streptomyces sp CMB-StM0423
  source 1..40: mol_type = genomic DNA
cggcgccgggatctccacggactccggcatccccgactac

SEQ ID NO: 3894 - DNA, 50 bp, Streptomyces sp CMB-StM0423
  source 1..50: mol_type = genomic DNA
tggttacatctctcaatgccttgcgccctgagcatctgcggacgtaacct

SEQ ID NO: 3895 - DNA, 40 bp, Streptomyces sp CMB-StM0423
  source 1..40: mol_type = genomic DNA
gggtgccggcatcagcactgcctctggcatccccgacttc

SEQ ID NO: 3896 - protein, 472 aa, Rhodococcus qingshengii
MDAVIYTRVSHDASGRGRSVDEQEKECRATAADHGWNVRQVVSDISIGASRHSAVKSRPGFEQLRHELRRGDVLVVWESSRLTRKLGEYLAMRELCESRHVLLCVGDEITDFSKSSDRSRSASEALAAEAEADKTSDRVRRNVRARATSGDAHSVLPFGYVRTYDPATGAKSWSLDPVNAPLVRDAVEGVLSGRTLYSIATDWNARGILTGNGNLWQPRTVKQLLRRPALAGLRQYQGQVIGAGNWPPIITTDQHERLLAVFTDPTRIVHRGHKPVHLLTGIATCSRCGDTMRYLRHSGKKDQYRCPGGCVGRSAGPVDDWVLSHMFRLIDLWRANVFLMQDDSPTSSPTASLDWAEARELQQRLDAFTDQAIDGTISNDQLARATKKLQPLIDAAKDRARRNTIHPLLKRLGESPNSIWESWDIEEQRQLIKNVISVVIHPTEKGRRSLDPETVKVTWRGDPIMPPDGISF

SEQ ID NO: 3897 - DNA, 50 bp, Rhodococcus qingshengii
  source 1..50: mol_type = genomic DNA
gtagtgccttttggtaccccgaccgaagtcgagatgcaataagagcgtag

SEQ ID NO: 3898 - DNA, 40 bp, Rhodococcus qingshengii
  source 1..40: mol_type = genomic DNA
gggcgccggcatctccaccgactccggaatcccggactac

SEQ ID NO: 3899 - DNA, 50 bp, Rhodococcus qingshengii
  source 1..50: mol_type = genomic DNA
gtagtgccttttggtaccccgaccgcagtcgagatgcaataagagcgtag

SEQ ID NO: 3900 - DNA, 40 bp, Rhodococcus qingshengii; identical to SEQ ID NO: 3895
  source 1..40: mol_type = genomic DNA

SEQ ID NO: 3901 - protein, 565 aa, Streptococcus suis
MNRTLTISDYRQVDTSRLSNITVVYCRLSQDDGLDGDSNSIINQKNILFDVVTREKLPNPVLFVDDGFSGTNFDRPAISEALRLVENGQVSNFIVKDLSRLGRSYIKVGQLTEITFPSFDVRFIALNDGIDSNKPNETNSIFLPIKSLMDEMYAADTSKKIRAVFQAKAKSGVPVTTNPPYGYLKDPSNPKNWIIDPVASEVVKRIFQEAKSGKSTNEISRMLEADQVEKPDAYRVKNGRKPLSGMKDSGYSPYYWSRETINRLLGREEYLGHTVNLRTRTKSYKDKKSIDLPREDWLIFKNTHEAIIDQETFDIVQKMRSHKRSNQRYKNRLGHENLFAGLVFCGTCGRKHYFCPFESKTGLNHDHYKCSGYRRPIDGCENPHYIQKSALIEIVSDKLRQTISEAQLDRENFLKKLEQQSQAQFSKDNKRQRQQLQKDEHRSKEIDRIIQQLYEDNLLGKISDERFVKLSQTYEEEQKQLQISISDLTEKLAKQQEDSLNISKFMTRISKYTQVSELTVEMINELIDKIVIHKPTGTKRNRIIQIDIYYNFIGKLNKEKASQAD

SEQ ID NO: 3902 - DNA, 50 bp, Streptococcus suis
  source 1..50: mol_type = genomic DNA
aaactgctaggtgtcagctcggcttaaagaagcatgacactcagcagtct

SEQ ID NO: 3903 - DNA, 40 bp, Streptococcus suis
  source 1..40: mol_type = genomic DNA
aaaaagaaagacggaggcctatggcccctgtttttccgct

SEQ ID NO: 3904 - DNA, 50 bp, Streptococcus suis
  source 1..50: mol_type = genomic DNA
aaactgctaggtgtcagctcggctccaagaagcatgacactcagcagtct

SEQ ID NO: 3905 - DNA, 40 bp, Streptococcus suis
  source 1..40: mol_type = genomic DNA
aaaaagaaagaaggaggcacctggctactgtattccacct

SEQ ID NO: 3906 - protein, 499 aa, Streptomyces caniscabiei
MKNTQTDGARTRAVIYCRISQDRTGAGLGIERQRQDCEALAQRNGWDVVEVYVDNDISAYSGKKRPGYRQMLADLDDGTATVVIVWHTDRLTRSIVELEEYIDLSERRGIATHTVQAGTVDLATPSGRMTARILGAVARQESEHKGHRVARARQQKALAGEWHGGIRPFGWGVPTGETRVKVDRQTGEEVEVPVLDMNQVVPEEAEALRHWTDTILAGGSIRGLVKWCADKGITSTRGNAVTHTDMRDMLMRPRNAGIAVYRGEEVGRGKWEPIVEEAKYRAVVAILTDPSRTTTPGAQPKWLGSLLYRCGRGECPRFVYVTQSGGRSYPSYRCQDGHGGGRRAEVVDQYVEDTIVSRLSEPDAHELLLPGPDDVDVAALQAEEELIRRRMKDLGGLFGAGELELEPFTEGMDTARAQLAGVTRQLARAATVDPLVALVGAPDVRKAWRALELDRQRTVLRSLVEVTLKTPRPGRMPDGGYFDYDAVVFTWKRGGTTFM

SEQ ID NO: 3907 - DNA, 50 bp, Streptomyces caniscabiei
  source 1..50: mol_type = genomic DNA
aggcgttctagagggctattggggttcccgaacctcagacagagacgcca

SEQ ID NO: 3908 - DNA, 40 bp, Streptomyces caniscabiei
  source 1..40: mol_type = genomic DNA
cgcgctcagcagcgtggtcttccccgtccccgtgccgccg

SEQ ID NO: 3909 - DNA, 50 bp, Streptomyces caniscabiei
  source 1..50: mol_type = genomic DNA
aggcgttctagagggctattggggtccccgaacctcagacagagacgcca

SEQ ID NO: 3910 - DNA, 40 bp, Streptomyces caniscabiei
  source 1..40: mol_type = genomic DNA
cgcgctcggcagcctcgcctccccccacctcctgccgccg

SEQ ID NO: 3911 - protein, 583 aa, Pseudomonas fluorescens
MGKVFSYIRFSSERQSAGDSYARQVKAAKKFCDEYELELADPREYLFFDAGRSAFKGKHLDDTGELARFLSFVEDGTIPPGSYLVVESLDRLSREKVRDALPRFLDLLAKGINVYTSTDRRLYTKDYNEIDLIISIISMSRAHEESALKGGRVSSAWRSKQKEARETGKPLGKLRPLWLDVTPDGYVLNPANVAVVRRIFDLSTKGHGSRIIAATLNQEGVASFSAGRKNFSGLWGFSTVRHILGSRAVLGEYQPHIFIDGKRTPDGEPIKGYFPAVLTEDEFYLAHAARSSRKTHTITKTTTNFNVLAGILYCYKCGALIHLQGQRGRKYYKCSKTTKGMCDAGIISAPRTEAVFKEILTKVDSLSLVQDSSGSLQKSLQILEGRIAELKSKQLEAEASHAEFPSRITARLLHELEANIGTLEAERTTLTEQLTADKVMSKENFFEKLDLVSFEGRVAANNLIKRLGLHIFASKHGRTDETYWVSKSNAVPTPFSEEAVNLLFYLMHKGSNIRFEAMYDEYVDLQVIQGELTEVGAILAKTESWDELPPELLAELKARDDQRKPYSFIQSDFLNKPPLVRVF

SEQ ID NO: 3912 - DNA, 50 bp, Pseudomonas fluorescens
  source 1..50: mol_type = genomic DNA
ggtaggtatttgtagcaataattgaagaagtgttgttacaattacctacc

SEQ ID NO: 3913 - DNA, 40 bp, Pseudomonas fluorescens
  source 1..40: mol_type = genomic DNA
cggcagtgggcagaagttcaagaagtgctgttccagttac

SEQ ID NO: 3914 - DNA, 50 bp, Pseudomonas fluorescens
  source 1..50: mol_type = genomic DNA
ggtaggtatttgtagcaataattggggaagtgttgttacaattacctacc

SEQ ID NO: 3915 - DNA, 40 bp, Pseudomonas fluorescens
  source 1..40: mol_type = genomic DNA
agacagtagccagaagtttgggaagcgctgctacagttac

SEQ ID NO: 3916 - protein, 537 aa, Clostridium perfringens
MKKAAIYTRKSKFTEKGDSIESQIKLCSKYLDNINIKDYCIYTDEGFSGKNTDRPEFQRMLSDAKAKKFDVIICYKFDRISRNVSDFSNLINKLNELNISFISVVEQFDTNSAIGRAMMYLCTVFSQLERETISQRITDNMYSLATKGYWLGGETPTGFRSEKKFFNSNNKQKMYSSLVPIKEELDLVKLIFNKYLEFNSISKIEKYLLSNNIKTKRNKDWSKASISLILRNPAYVKADEETFKYIESTGSKVYGNPDGKHGLLIYKKNKGRKGAKHDISEWIYAVSEHEGIIDSDIWVAIQKQIKKNAILAPALGTSNIALLTGLIRCAKCNSPMRVAYGKRNPKTNKKNYYYVCTLKTKSGKTRCDSKNLPGLDLDNLILDKLKEMSLDKNTLLKELNKYKDTIESNFHNDVLKNIQNNISKNNSMIDNLLNNVALSTDSELTAILLEKISKLKDENKLLTQKIDDLKSELEAQETLLNDCNSLITKLKYFSKFIDNSSIEEQKQLVSSVIEKVIADGDTGSIEIKFRPLLDFKI

SEQ ID NO: 3917 - DNA, 50 bp, Clostridium perfringens
  source 1..50: mol_type = genomic DNA
ggttgcaaaatggtaaacagaacatcaggtataacaaccattttgataac

SEQ ID NO: 3918 - DNA, 40 bp, Clostridium perfringens
  source 1..40: mol_type = genomic DNA
aatttctctcaatataacatcagctctaaatataaacatt

SEQ ID NO: 3919 - DNA, 50 bp, Clostridium perfringens
  source 1..50: mol_type = genomic DNA
ggttgcaaaatggtaaacagaacacaaggtataacaaccattttgataac

SEQ ID NO: 3920 - DNA, 40 bp, Clostridium perfringens
  source 1..40: mol_type = genomic DNA
aaattctctcataataacacatgctttaaaaataaaattt

SEQ ID NO: 3921 - protein, 565 aa, Eubacterium rectale
MARTKNRFNAVQIPEPVTADVPAKQRKSFRVALYARLSVELKSRPSESIANQLSILREFIRDKAEFAEYQEYVDSAVSGTSFDRPAFGQMMDDVREGKISCIIVKDMSRFGRDYIEASNYIETIFPFLGVRFISVSDHFDTEAEFNQNKALEIALKNLVNDMYAKDISKRVSVSRRLDMERGKFTGSNAPYGYKVDSGDAFRKYVIDRDAATVVRQIFELAADGVTLREIAKALQEYRLALPGDYLKTGNLYVEEGAEAKAWYPGTISNILKNQAYIGNMVQGKRRTSLYDNEARHATDENDWIVVENTHEAIVDKELFNKVRAVMDKKVEESIFTSGRGKNLPIKEDIFAGILFCGNCGRRIPLASRILEKDGVLERQYFYSCRYNYDFGGKQCGCTIMEQELIKVVNNLLTTQIAVMTDSARTEASMRGVMDRKMKNHDMRMQKLQKQIDRKNYEESKEYQSYVTGEITRADFKCRQEKNADAIMRLRGQISDEEASRRRVKRFCEKKIQWLKAIYRFQSEVTLDRNMIKILVDSIYLYPDKRLVINLNFKDEYARMTDGEEI

SEQ ID NO: 3922 - DNA, 50 bp, Eubacterium rectale
  source 1..50: mol_type = genomic DNA
tgacagacggagaggagatttaaaatgggacaggaaatagcaggtggaag

SEQ ID NO: 3923 - DNA, 40 bp, Eubacterium rectale
  source 1..40: mol_type = genomic DNA
agagttgttgatagcatatctggagcagatagcaatatat

SEQ ID NO: 3924 - DNA, 50 bp, Eubacterium rectale
  source 1..50: mol_type = genomic DNA
tgacagacggagaggagatttaaagggggacaggaaatagcaggtggaag

SEQ ID NO: 3925 - DNA, 40 bp, Eubacterium rectale
  source 1..40: mol_type = genomic DNA
agagttgttgatggcttaaggaaaggagatagagatatat

SEQ ID NO: 3926 - protein, 565 aa, Eubacterium rectale
MARTKNRFNAVQIPEAVTAGVPVKQRKSFRVALYARLSVELKSRPSESIANQLSILREFIKDKAEFAEYHEYVDSAVSGTSFDRPAFGQMMDDVREGKISCIIVKDMSRFGRDYIEASNYIETIFPFLGVRFISVSDHFDTEAEFNQNKALEIALKNLVNDMYAKDISKRVSVSRRLDMERGKFTGSNAPYGYKVDSGDALRKYVIDRDAAAVVRQIFELAADGVTLREIAKALQEYRLALPGDYLKTGNLYVEEGAEAKAWYPGTISNILKNQAYIGNMVQGKRRTSLYDNEARHATDENDWIVVENTHEAIVDKELFDRVRAVMDKKVEESIFTSGRGKNLPIKEDIFAGILFCGNCGRRIPLASRILEKDGVLERQYFYSCRYNYDFGGKQCGCTIMEQELIKVVHNLLTTQIAVLTDSARTEASMRGVMDRELKNHDVRIQKIQKQIDRKNYEESKAYQSYVTGEITKADFKYRQEKNADAIMRLRGQISDEEASRRRVKRFCEKKIQWLKAIYRFQSAVTLDRNMIKILVDSIYLYPDKRLVINLNFKDEYARMADGEEI

SEQ ID NO: 3927 - DNA, 50 bp, Eubacterium rectale
  source 1..50: mol_type = genomic DNA
tggcagacggagaggagatatagaatgggacaggaaatagcaggcgacag

SEQ ID NO: 3928 - DNA, 40 bp, Eubacterium rectale; identical to SEQ ID NO: 3923
  source 1..40: mol_type = genomic DNA

SEQ ID NO: 3929 - DNA, 50 bp, Eubacterium rectale
  source 1..50: mol_type = genomic DNA
tggcagacggagaggagatatagagggggacaggaaatagcaggcgacag

SEQ ID NO: 3930 - DNA, 40 bp, Eubacterium rectale; identical to SEQ ID NO: 3925
  source 1..40: mol_type = genomic DNA

SEQ ID NO: 3931 - protein, 569 aa, Yersinia enterocolitica
MRVSSEQQLSGDGLDRQESMLTRYFDDNASCYDFDPNYELIVDRGVSAFKGHHQRESAGLGGFFKKVRNGEVEKGSVLCVESLDRFSRENPFKCVEYISILDSYQIELHDVDKKLKIGRKYPNSLSFAVMIAERSYEESRLKSVRIQKGWDKRRKMAKEEGQYMIKNCPKWIDVVNDRYVLNENHIVIREIFDLYLSGIGSYTIAVMLNRDNKTIDGMKWNSTKICHVLRNRRCKGEYTSNRVIRNFDDDTVTSTFEILNIYPRIVSDDEFHEVSTRLEKFNYTGRIRHDLKRTVFNTLLKCELCGSALGVSSTSGYTYIKCDNARANGGCTGVLMAYMPFEKAILSHIKDIDISRVINIDSTISNIDILKTEIVELESYIQSFTAGIENLKQQGRLPTFDMLDGKAQAEERLQDVKKTLAAERDTANVSNLEFSSDIHKLENIIERSRLEVELRKVIKRIAVKANKTYITADISYYNDDNIKHILLIHKKKAIIEAMGEISQQGRWRTYSFLESGVQVFRVESNGDVWTLAAARNKSINEIQKYMTMMVGREPIDFDYIINEDMIDWL

SEQ ID NO: 3932 - DNA, 50 bp, Yersinia enterocolitica
  source 1..50: mol_type = genomic DNA
agtttgcgtaatgttcatggcattttgataccatatactttatacaaact

SEQ ID NO: 3933 - DNA, 40 bp, Yersinia enterocolitica; identical to SEQ ID NO: 833
  source 1..40: mol_type = genomic DNA

SEQ ID NO: 3934 - DNA, 50 bp, Yersinia enterocolitica
  source 1..50: mol_type = genomic DNA
agtttgcgtaatgttcatggcatttggataccatatactttatacaaact

SEQ ID NO: 3935 - DNA, 40 bp, Yersinia enterocolitica
  source 1..40: mol_type = genomic DNA
ctttatggggtcattattttgattgtcataaaggcaaagt

SEQ ID NO: 3936 - protein, 577 aa, Yersinia enterocolitica
MKKCYLYVRVSSEQQLSGDGLDRQESMLTRYFDDNASCYDFDPNYELIVDRGVSAFKGHHQRESAGLGGFFKKVRNGEVEKGSVLCVESLDRFSRENPFKCVEYISILDSYQIELHDVDKKLKIGRKYPNSLSFAVMIAERSYEESRLKSVRIQKGWDKRRKMAKEEGQYMIKNCPKWIDVVNDRYVLNENHIVIREIFDLYLSGIGSYTIAVMLNRDNKTIDGMKWNSTKICHVLRNRRCKGEYTSNRVIRNFDDDTVTSTFEILNIYPRIVSDDEFHEVSTRLEKFNYTGRIRHDLKRTVFNSLLKCELCGSALGVSSTSGYTYIKCDNARANGGCTGVLMAYMPFEKAILSHIKDIDISRVINIDSTISNIDILKTEIVELESYIQSFTAGIENLKKQGRLPTFDMLDGKAQAEERLQDVKKTLAAERDTANVSNLEFSSDIHKLENIIERSRLEVELRKVIKRIAVKANKTYITADISYYNDDNIKHILLIHKKKATIEAMGEISQQGRWRTYSFVESGVQVFRVESNGDVWTLSATRNKSINEIKKYMTMMVGREPIDFDFYINEDFIEWVE

SEQ ID NO: 3937 - DNA, 50 bp, Yersinia enterocolitica
  source 1..50: mol_type = genomic DNA
actttgtttaatgtttaatgtattttgataccatatactttatacaaact

SEQ ID NO: 3938 - DNA, 40 bp, Yersinia enterocolitica; identical to SEQ ID NO: 833
  source 1..40: mol_type = genomic DNA

SEQ ID NO: 3939 - DNA, 50 bp, Yersinia enterocolitica
  source 1..50: mol_type = genomic DNA
actttgtttaatgtttaatgtatttggataccatatactttatacaaact

SEQ ID NO: 3940 - DNA, 40 bp, Yersinia enterocolitica; identical to SEQ ID NO: 3935
  source 1..40: mol_type = genomic DNA

SEQ ID NO: 3941 - protein, 576 aa, Yersinia enterocolitica
MKKCYLYVRVSSEQQLSGDGLDRQESMLTRYFDDNASCYDFDPNYELIVDRGVSAFKGHHQRESAGLGGFFKKVRNGEVEKGSVLCVESLDRFSRENPFKCVEYISILDSYQIELHDVDKKLKIGRKYPNSLSFAVMIAERSYEESRLKSVRIQKGWDKRRKMAKEEGQYMIKNCPKWIDVVNDRYVLNENHIVIREIFDLYLSGIGSYTIAVMLNRDNKTIDGMKWNSTKICHVLRNRRCKGEYTSNRVIRNFDDDTVTSTFEILNIYPRIVSDDEFHEVSTRLEKFNYTGRIRHDLKRTVFNSLLKCELCGSALGVSSTSGYTYIKCDNARANGGCTGVLMAYMPFEKAILSHIKDIDISRVINIDSIISNIDILKTEIVELESYIQSFTAGIENLKQQGRLPTFDMLDGKAQAEERLQDVKKTLAAERDTANVSNLEFSSDIHRLENIIERSRLEVELRKVIKRIAVKANKTYITADISYYNDDNIKHILLIHKKKATIEAMGEISQQGRWRTYSFVESGIQVFRVESNGDVWTLSATRNKSINEIQKYMTMMVGREPIDFDYYINEDMIEWI

SEQ ID NO: 3942 - DNA, 50 bp, Yersinia enterocolitica
  source 1..50: mol_type = genomic DNA
agtttgtgtaatgttcatggtattttgataccatatactttatacaaact

SEQ ID NO: 3943 - DNA, 40 bp, Yersinia enterocolitica; identical to SEQ ID NO: 833
  source 1..40: mol_type = genomic DNA

SEQ ID NO: 3944 - DNA, 50 bp, Yersinia enterocolitica
  source 1..50: mol_type = genomic DNA
agtttgtgtaatgttcatggtatttggataccatatactttatacaaact

SEQ ID NO: 3945 - DNA, 40 bp, Yersinia enterocolitica; identical to SEQ ID NO: 3935
  source 1..40: mol_type = genomic DNA

SEQ ID NO: 3946 - protein, 577 aa, Yersinia enterocolitica
MKKCYLYVRVSSEQQLSGDGLDRQESMLIRYFDDNANCYDFDPNYELIVDRGVSAFKGHHQRESAGLGGFFKRVRDGDVEKGSVLCVESLDRFSRENPFRCVEYLSILDRHQIELHDVDKQLKIGRKYPNSLTFAIMIAERSYEESRLKSLRIQKGWDKRRKIAKEEGQYMIKNCPKWIDVVNNKYVLNEHHLIIRKIFDLYLSGIGSYTIAVMLNRDNKTIDGMKWNSTKICHVLRNRRCKGEYTSNRIIRNFEDDTVTSTFEILNIYPRIVSDDEFYEVSTRLERFNYTGRIRHDLKRTVFNGLLKCELCGSALGVSSTAGYTYIKCDNARANGGCAGVLMTYMPFEKGILSHIKDIDISKVINMDSKISNIDILKTEVVELESYIQSFIIGIENLKQQGRFPTFDMLDGKAQAEERLQDVKKTLAAEKDTSNISNLEFSSDIHKLENIIERSRLELELRKVIKRIAIKADKTYITADISYYNDDNIKHVLLIHKKKTTIEVMGEIVQKDGWRTYSFSEGSSLVFRVKSNGEIWTLSAAKNKSISEIQKYMTMMVGREPIDFDYYINEDFIEWVE

SEQ ID NO: 3947 - DNA, 50 bp, Yersinia enterocolitica; identical to SEQ ID NO: 3937
  source 1..50: mol_type = genomic DNA

SEQ ID NO: 3948 - DNA, 40 bp, Yersinia enterocolitica; identical to SEQ ID NO: 833
  source 1..40: mol_type = genomic DNA

SEQ ID NO: 3949 - DNA, 50 bp, Yersinia enterocolitica; identical to SEQ ID NO: 3939
  source 1..50: mol_type = genomic DNA

SEQ ID NO: 3950 - DNA, 40 bp, Yersinia enterocolitica; identical to SEQ ID NO: 3935
  source 1..40: mol_type = genomic DNA

SEQ ID NO: 3951 - protein, 576 aa, Yersinia enterocolitica
MKKCYLYVRVSSEQQLSGDGLDRQESMLTRYFDDNASCYDFDPNYELIVDRGVSAFKGHHQRESAGLGGFFKKVRNGEVEKGSVLCVESLDRFSRENPFKCVEYISILDSYQIELHDVDKKLKIGRKYPNSLSFAVMIAERSYEESRLKSVRIQKGWDKRRKMAKEEGQYMIKNCPKWIDVVNDRYVLNENHIVIREIFDLYLSGIGSYTIAVMLNRDNKTIDEMKWNSTKICHVLRNRRCKGEYTSNRVIRNFDDDTVTSTFEILNIYPRIVSDDEFHEVSTRLEKFNYTGRIRHDLKRTVFNSLLKCELCGSALGVSSTSGYTYIKCDNARANGGCTGVLMAYMPFEKAILSHIKDIDISRVINIDSTISNIDILKTEIVELESYIQSFTAGIENLKQQGRLPTFDMLDGKAQAEERLQDVKKTLAAERDTANVSNLEFSSDIHKLENIIERSRLEVELRKVIKRIAVKANKTYITADISYYNDDNIKHILLIHKKKAIIEAMGEISQQGRWRTYSFLESGVQVFRVESNGDVWTLAAARNKSINEIQKYMTMMVGREPIDFDYIINEDMIDWL

SEQ ID NO: 3952 - DNA, 50 bp, Yersinia enterocolitica
  source 1..50: mol_type = genomic DNA
agtttgcgtaatgttcatggtattttgataccatatactttatacaaaat

SEQ ID NO: 3953 - DNA, 40 bp, Yersinia enterocolitica; identical to SEQ ID NO: 833
  source 1..40: mol_type = genomic DNA

SEQ ID NO: 3954 - DNA, 50 bp, Yersinia enterocolitica
  source 1..50: mol_type = genomic DNA
agtttgcgtaatgttcatggtatttggataccatatactttatacaaaat

SEQ ID NO: 3955 - DNA, 40 bp, Yersinia enterocolitica; identical to SEQ ID NO: 3935
  source 1..40: mol_type = genomic DNA

SEQ ID NO: 3956 - protein, 446 aa, Streptococcus suis
MKSTTLQRTLTTKYSSLDRAEELTALYCRISNEDMNAGDSNSILNQKSILEKYAKDNRLGTYRFFIDDGYTGTNFSKRPAFQEMLELVNAGIVKTVVVKDLSRFGRNATEVGLYTDILFPKLDVRFIAINDNVDSANSNITDLDYSGFLNIFNEFHSKSTSAKVRSVLRSKAERGERIGGFAPFGYQLDPKDKNHLVIDEMAAEIVRRIFRLYLDGMTISKIANLLSSEKVPTVTKYRQKVVDPNCDWYRESVKNILSRPEYCGDLVLAKSYIKSYKDKRKILNDAKDWLVFKDRHEAIIPRDQFELVQTMLAKKRRRTKSNRHGLFSGLVYCHDCGYRHYFCTGKSISPNQERYICSGFQSKKVKCSDSHYIRELKLQEIVLSDLNDKIQYVKKHKQEFLQLLVSKTEKDSKKELKATERRLSECQKRTSQLDIIIKKLYEDCLR

SEQ ID NO: 3957 - DNA, 50 bp, Streptococcus suis; identical to SEQ ID NO: 232
  source 1..50: mol_type = genomic DNA

SEQ ID NO: 3958 - DNA, 40 bp, Streptococcus suis
  source 1..40: mol_type = genomic DNA
aaagaacaaaaagacagccaagtggctgacttttatctta

SEQ ID NO: 3959 - DNA, 50 bp, Streptococcus suis
  source 1..50: mol_type = genomic DNA
ttggtaggttagatagttctacctcagggtgatatatgcaaacctattaa

SEQ ID NO: 3960 - DNA, 40 bp, Streptococcus suis
  source 1..40: mol_type = genomic DNA
aaagaaaaaaaaaatagcccagtgggtgcctgtaatctca

SEQ ID NO: 3961 - protein, 544 aa, Streptococcus suis; identical to SEQ ID NO: 236

SEQ ID NO: 3962 - DNA, 50 bp, Streptococcus suis; identical to SEQ ID NO: 232
  source 1..50: mol_type = genomic DNA

SEQ ID NO: 3963 - DNA, 40 bp, Streptococcus suis; identical to SEQ ID NO: 3958
  source 1..40: mol_type = genomic DNA

SEQ ID NO: 3964 - DNA, 50 bp, Streptococcus suis; identical to SEQ ID NO: 3959
  source 1..50: mol_type = genomic DNA

SEQ ID NO: 3965 - DNA, 40 bp, Streptococcus suis; identical to SEQ ID NO: 3960
  source 1..40: mol_type = genomic DNA

SEQ ID NO: 3966 - protein, 544 aa, Streptococcus suis
MKSTTLQRTLTTKYSSLDRAEELTALYCRISNEDMNAGDSNSILNQKSILEKYAKDNRLGTYRFFIDDGYTGTNFSKRPAFQEMLELVNAGIVKTVVVKDLSRFGRNATEVGLYTDILFPKLDVRFIAINDNVDSANSNITDLDYSGFLNIFNEFHSKSTSAKVRSVLRSKAERGERIGGFAPFGYQLDPKDKNHLVIDEVAAEIVRRIFRLYLDGMTISKIANLLSSEKVPTVTKYRQKVVNPNCDWYRESVKNILSRPEYCGDLVLAKSYIKSYKDKRKILNDAKDWLVFKDRHEAIIPRDQFELVQTMLAKKRRRTKSNRHGLFSGLVYCHDCGYRHYFCTGKSISPNQERYICSGFQSKKVKCSDSHYIRELKLQEIVLSDLNDKIQYVKKHKQEFLQLLVSKTEKDSKKELKATERRLSECQKRTSQLDIIIKKLYEDNVLGKLSDERFMSLSKDYEHEQNLLKSEILEKSSYLSEQKDKLMDVNRFISIIDQYTTLTELNSSIVNELIERIEIHQPDKSSGKRVQQIDIFYTFVGKFN

SEQ ID NO: 3967 - DNA, 50 bp, Streptococcus suis; identical to SEQ ID NO: 232
  source 1..50: mol_type = genomic DNA

SEQ ID NO: 3968 - DNA, 40 bp, Streptococcus suis; identical to SEQ ID NO: 3958
  source 1..40: mol_type = genomic DNA

SEQ ID NO: 3969 - DNA, 50 bp, Streptococcus suis; identical to SEQ ID NO: 3959
  source 1..50: mol_type = genomic DNA

SEQ ID NO: 3970 - DNA, 40 bp, Streptococcus suis; identical to SEQ ID NO: 3960
  source 1..40: mol_type = genomic DNA

SEQ ID NO: 3971 - protein, 556 aa, Phocaeicola vulgatus
MKCILLVRVSTEAQSYEEQENELYDLAHFYGYKDKNISSIATKESAIKLDEEERFGLNRMKELLETGEYDCVFAWEISRIARRKKILFSILEYLTTKGIQLIIKEPRIRLLKDDRTIDEGAETIFTLYAQLAESEMRNKIARFSRAKKEGYNKGKYMGGKIKLGYKVSEDGYWEIDEEDSKLVRLIFDMYISGEYSLAELGKELKSRGYFKNLSITNVKAEMYGLLKNPIYRGIRTSNNIYPQIIDDDTWEKCRKKREENRTRPKAKTPHLLTPLIRCSCGASYSVNLMDATYSCRVKHNAVEKGLSHSPDININMIESLAWYVALQELHEDMINKRNNAKENYEKEIQVYNQKIAHSREVLESTMQRRSDLDENYFVHGRFTKEKYEELAQKQNDIIKVEQGNIRKYEAAILNMEKQIQADITFDDMIDSLNQSYETLKNGTDIETMRKITHRYITDIYIEPWEGKATSFWKKVTIKTIHDTDKKKKIEQFKEQGLDGIIFTLKDMFYVNTLHKKAYWNEDMMNCVPMVYIERITRKRGKRTKKKKMGIRECRKS

SEQ ID NO: 3972 - DNA, 50 bp, Phocaeicola vulgatus
  source 1..50: mol_type = genomic DNA
accacctaatagttaattaatgttgtaacataaatatacgatttggtggt

SEQ ID NO: 3973 - DNA, 40 bp, Phocaeicola vulgatus
  source 1..40: mol_type = genomic DNA
ccatcatacaatttcgcaagtagcaatggtaggtggcggc

SEQ ID NO: 3974 - DNA, 50 bp, Phocaeicola vulgatus
  source 1..50: mol_type = genomic DNA
accacctaatagttaattaatgttctaacataaatatacgatttggtggt

SEQ ID NO: 3975 - DNA, 40 bp, Phocaeicola vulgatus
  source 1..40: mol_type = genomic DNA
ctttccttcaatttcacagctagcaatggcaggtggcgtc

SEQ ID NO: 3976 - protein, 546 aa, Phocaeicola vulgatus
MKCILLVRVSTESQSYEEQEKELYDLAHFYGYKDKDISSIATKESAIKLDEEERFGLNRMKELLETDEYDCVFAWEISRIARRKKILFSILEYLTTKGIQLIIKEPRIRLLKDDRTIDEGAETIFTLYAQLAESEMRNKIARFSRAKKEGFNKGKYMGGKITLGYKVSEDGYWQIDEEGSKLVRLVFDMYISGEYSLTELGKELKARGYFKNLSITNVKAEIYGLLKNPIYRGIRTSNNIYPQIIDEKTWEKCREKREENRTRSKAKTPHLLTPLIRCSCGASYSVNLMDATYSCRVKHNAVEKGLLHSPDINVNVIESLAWYVTLQALHEDMICKRNDAKETYEEEIRIYNQKIAYSRGILESTMQRRSDLDENYFVHGRFTKEKYEELAKKQNDIIKTEQNNIRKYEAAILNIEKQIQADITFDDMIDSLNQSYETLKNGTDIETMRKITHRYITDIYIEPWEGKATSFWKKVTIKTIHDTDKEKKIEQFKEQGLDGIIFTLKDTFYVNTLHKKAYWDEDMMNCVPMVYIERITRKRGKSKEIE

SEQ ID NO: 3977 - DNA, 50 bp, Phocaeicola vulgatus
  source 1..50: mol_type = genomic DNA
accacctaatagttaattagtgttgtaacataaatatacgatttggtggt

SEQ ID NO: 3978 - DNA, 40 bp, Phocaeicola vulgatus; identical to SEQ ID NO: 3973
  source 1..40: mol_type = genomic DNA

SEQ ID NO: 3979 - DNA, 50 bp, Phocaeicola vulgatus
  source 1..50: mol_type = genomic DNA
accacctaatagttaattagtgttctaacataaatatacgatttggtggt

SEQ ID NO: 3980 - DNA, 40 bp, Phocaeicola vulgatus; identical to SEQ ID NO: 3975
  source 1..40: mol_type = genomic DNA

SEQ ID NO: 3981 - protein, 547 aa, Phocaeicola vulgatus
MKCILLVRVSTEAQSYEEQEKELYDLAHFYGYEDKDISSIATKESAIKLDEEERFGLNRMKELLETDEYDCVFAWEISRIARRKKILFSILEYLTTKGIQLIIKEPRIRLLKDDRTIDEGAETIFTLYAQLAESEMRNKIARFSRAKKEGYNKGKYMGGKIKLGYKVSEDGYWEIDEEDSKLIRLIFDMYISGEYSLAELGKELKSRGYFKNLSITNVKAEMYGLLKNPIYRGIRTSNNIYPQIIDDDTWEKCRKKREENRTRPKAKTPHLLTPLIRCSCGASYSVNLMDATYSCRVKHNAVEKGLSHSPDININMIESLAWYVALQELHEDMINKRNNAKENYEKEIQVYNQKIAHSRGVLESTMQRRSDLDENYFVHGRFTKEKYEELAQKQNDIIKTEQGNIRKYETAISNMEKQIQADITFDDMIDSLNQSYETLKNGTDIETMRKITHRYITDIYIEPWEGKATSFWKKVTIKTIHDTDKEKKIEQFKEQGLDSIIFTLKDMFYVNTFHKKAYWDKDMINCVPMVYIERITRKRKDTRTNKK

SEQ ID NO: 3982 - DNA, 50 bp, Phocaeicola vulgatus
  source 1..50: mol_type = genomic DNA
accacctaatagttaattagtgttgtaacataaatacacgatttggtggt

SEQ ID NO: 3983 - DNA, 40 bp, Phocaeicola vulgatus; identical to SEQ ID NO: 3973
  source 1..40: mol_type = genomic DNA

SEQ ID NO: 3984 - DNA, 50 bp, Phocaeicola vulgatus
  source 1..50: mol_type = genomic DNA
accacctaatagttaattagtgttctaacataaatacacgatttggtggt

SEQ ID NO: 3985 - DNA, 40 bp, Phocaeicola vulgatus; identical to SEQ ID NO: 3975
  source 1..40: mol_type = genomic DNA

SEQ ID NO: 3986 - protein, 521 aa, Undibacterium rugosum
MRATIYARFSTDKQRESSIEDQAVICRRLAASEGFTVVSVHGDDGVSGSTPVQQRSGGARLLADALADRFEVLIVESLDRLSRDQVEQERIVRRLEHRGILILGAADGYDSRMGGRKIMRGVRGLINELYIDDLRHKTHRGQAGQVGRGFVAGGKSYGYDIVKSESGSTYVINQQQAGWVRFIFTKYAEGLSVQRIAAELNKQGVASPRDSTWAVSAIYGCAKKGSGILNNELYVGRYVWNRSQWVKDPDSGKRQRIDRPQDEWSITDVPDLRVVDQETWGAVQARLAGNRLRNGGGRGSPSRTLFGGMMRCPYCGGAMVAINTRLYGCNNRKDRGEGVCKGISISREQTDKRLLATIRDELMSPAALIELEEQVQKVLAERKKMEVSGMSSGRARIRELTEEITRLVDAIAAVGMSDAIKTRLVAAEAEQKRVQAQLDQIAEPMVNAGAKEIKARIKRILMDLQATLDNDTQRARKIIADLFGDIKILKEEGGIYAEYDNATEKLLIAVGGVSTNVVAGA

SEQ ID NO: 3987 - DNA, 50 bp, Undibacterium rugosum
  source 1..50: mol_type = genomic DNA
cgtgtctacaaatgtggttgcgggggcacgcattgtacattgtagacagc

SEQ ID NO: 3988 - DNA, 40 bp, Undibacterium rugosum
  source 1..40: mol_type = genomic DNA
atgaaattctggttgcgggggcaggatttgaacctacgac

SEQ ID NO: 3989 - DNA, 50 bp, Undibacterium rugosum
  source 1..50: mol_type = genomic DNA
cgtgtctacaaatgtggttgcgggatcacgcattgtacattgtagacagc

SEQ ID NO: 3990 - DNA, 40 bp, Undibacterium rugosum
  source 1..40: mol_type = genomic DNA
atgaatgtctgggtgttggatcaggatttgaacccaggtc

SEQ ID NO: 3991 - protein, 625 aa, Brevibacterium casei
MTPKEQHRHTAESTPDQVCRAPQNIPEKGDFGLDFHGQPSVNREAMSTISPPQPATPGLAPGSPLVLPKAVIYLRVSTRDQATRGGREEGFSIPAQRDATKRKAAELGAFVAKEFVEGGVSGTTMNRPALKKMLAYIEERSDIQYVIVHKLDRLARNRHDDAIIFERLQSSGVKLISTTEVIDQGPIGGLVHGIIASVNQFYSENLRTEVLKGMNEKAASGGTVSRAPLGYLNKRGVAANGAETRYVEPDPERADLIRKAFELYATGEWTTDSLAEHLAARGLTTRPTPKRPAKPVTAKIIGATLTNPYYRGIVTWKGAEHPGNHEPLVDDGTWFKVQSVMASRRHGEYNRVHKHFLKSTVVCGRCGSRLIVQMTTSRSGDLYPYFVCVGRRSKRTDCDLKAVLIHEVEKQVERLYRNIRLTHDERAQLEQYLREEIALASTEQRERVTQLKATADDLKNQQRKLLQLHYQDAIPADLLKEEQDRLGAELARIKRELEGATADHDTLLTNLSDALTLAEDCDQLYKSAPEHIKRQLNQVFYEVVRINPDEHGQLHAQGELAEPFNQLLNPALRLHAAHAASQRTIPTNAKRPASKGEPLAHEPENREPTLTGIFHASGFTPGSMV

SEQ ID NO: 3992 - DNA, 50 bp, Brevibacterium casei
  source 1..50: mol_type = genomic DNA
ccagcggttttactccgggatcaatggtgggcctcggcggcgatcattac

SEQ ID NO: 3993 - DNA, 40 bp, Brevibacterium casei
  source 1..40: mol_type = genomic DNA
gtccggggccttcgccctgcggtggaggtaaggggattcg

SEQ ID NO: 3994 - DNA, 50 bp, Brevibacterium casei
  source 1..50: mol_type = genomic DNA
ccagcggttttactccgggatcaagtgtgggcctcggcggcgatcattac

SEQ ID NO: 3995 - DNA, 40 bp, Brevibacterium casei
  source 1..40: mol_type = genomic DNA
gccctgggccttctccttggtgtggtggtcaggggcttct

SEQ ID NO: 3996 - protein, 657 aa, Nocardia puris
MATRNTRNSQSPQRQSLSSHGPNMPPSDTPLGSEPFRSKLALVYLRVSTARQAKRDGEVEGYSIPAQRTSCHKRAHELDAAVEEFVDAGASARSADRPGLQALLARLADPSQPPVDYVIVHKLDRLARDRADDVAILLAIRQAGATLVSVSEMVDETPAGTLMHGIVASFAEYYSRNLSTEAKKGMSEKVKRGGTPGQAPIGYLNVVHRVDGTDIKSVVIDEVRGHHMAWAFEQYATGDWSIAALRDELEARGLRSRPTKKYVGTPLSRAQLHRLLSNPYYKGLIRFKGVLFEGKHPPLVDEITWQRVQDVLAGRRIAGDRSWKHGHYLKGSLRCERCGGRIGYGWSRGKGGRYDYFFCLGRHTGRSTCDLPYIPAGAIEDRVAERWSRIRFSDSEIADTRTQILSDAQVLRDQHTQLAEQQRRHLIQLERQKTKLIDAYMADAIPVEDLKTRQAAVMAEIADARRLIATADIELNELNTRLDVVLGLLTHARTLYDRADGTARQLLNSAMFAWLTIDSHDVLDASTRATGSSGWTPQEPELAGGELSEVVGAVLRYHPDVSGTTDTPQIHNNPHLGGLGTFRRALSAQPHHGDGMASGAATRPGGRTATGRDHGAVLAPETGTTRRNGQKYGNKAGHDETPAKLVFDRGSNVYYLA

SEQ ID NO: 3997 - DNA, 50 bp, Nocardia puris
  source 1..50: mol_type = genomic DNA
gggttccaacgtgtactacttggcggccctactgacacaacgttggaacg

SEQ ID NO: 3998 - DNA, 40 bp, Nocardia puris
  source 1..40: mol_type = genomic DNA
tcaggtcggagcctttggcggtggcggagggatttgaacc

SEQ ID NO: 3999 - DNA, 50 bp, Nocardia puris
  source 1..50: mol_type = genomic DNA
gggttccaacgtgtactacttggcccccctactgacacaacgttggaacg

SEQ ID NO: 4000 - DNA, 40 bp, Nocardia puris
  source 1..40: mol_type = genomic DNA
gcatgtccctgcctgtggccctggaggagggattggaacc

SEQ ID NO: 4001 - protein, 585 aa, Brucella intermedia
MDKENTKPLAYSYVRMSTEMQLKGNSLERQKEKSKEYAIRHDLQLVENFEDIGVSAFKGKNIKEGMLGDFISLIENKTVPAGSYLLIESLDRLSRENIFESIPLFIKILKSGIKIVTLIDEQVYGAENADFKDLLYPMVVLSRAHEESVAKSFRVGKAWANKRKNIHQRKLTKVCPAWLKLNTDSNSFEVIPGRDDVVKRIFDLADSGYGSYSIGRILNNEGVFPFSENSKGWHASYITRILNNRSVLGEFQPHKLVNGTAEPDGDIVPDYFPHLIDEEQFLRIKHARRKRLVEGAGRKGPVYRNLFSRIAKCAYCASPMRFVHKGQPPKGGQFLRCTNAERHFECSASNWRYDHFENVFLYFVHELDLIETLKRADEQSERYTLEQKLVSINENIRGKRELLNTTFDMLQTSNASKDFIQSKIEEISSEILELENQKGAVEAKLEKDAALAPVDDQQIKSLIKELQDADDGDLERKRRVVANRLQMMIKSLTLAPDGLRKDAEKLVLSQFGSSEALFDFFETGAQSGEASTGMSFSVVLLDGIMRRVTVSRREPLKVIQLIAVDKHGLIIETEQTHESQGEWKI

SEQ ID NO: 4002 - DNA, 50 bp, Brucella intermedia
  source 1..50: mol_type = genomic DNA
cttaatttaattagcccatatatcgacatgttgtggctaattaatttatc

SEQ ID NO: 4003 - DNA, 40 bp, Brucella intermedia
  source 1..40: mol_type = genomic DNA
gtccggcaggccgacgatggacatgcccatcttgcccggc

SEQ ID NO: 4004 - DNA, 50 bp, Brucella intermedia
  source 1..50: mol_type = genomic DNA
cttaatttaattagcccatatatcggcatgttgtggctaattaatttatc

SEQ ID NO: 4005 - DNA, 40 bp, Brucella intermedia
  source 1..40: mol_type = genomic DNA
gtcctgcaggccgccgctgggcgtgcccgcctcgccctgc

SEQ ID NO: 4006 - protein, 491 aa, Gordonia bronchialis
MTTAPSSYVHEPRRSPTRAVIYTRVSRDLASGRSVAEQETECRAVCDRNGWPVADVLTDNDRSATRFATKDRPQYARLSEVLHPGDVLVVWEPSRAGRSMEHYVDLRRLCTDRGVMLSYSGKLFDLDDGDDRFTTGLDALIAEREAEDIRKRIKRAHRENLAQGRPHGRIPYGYKIIRDPETGKSVGRTPDPDRAPLIQEAARRVLAGQSFGSVVRWIETQDPLGWNSAKLRRILTNATYAGYRTNSTTANGKRGPQEIHSKGTWEPILTDEQHHDLVALFAGRRTGPRGAPVKYLLSGIARCAVCGDHLWRARSGRRKDGSNYEVYQCKTHCVGRNMAAIDAVINSVVEGVLTSPESLAALAEEPATDPTAPARLAELRKRLDDVENEIAEGRMPAGTGARVATRLEAQIAEMEAKTAPVFTDPVVRELATAPDPVTTWRELPLESRREFIRATMTITVDRVGHRWHAPTEGIAITPVTPSHSTGIESQP

SEQ ID NO: 4007 - DNA, 50 bp, Gordonia bronchialis
  source 1..50: mol_type = genomic DNA
catggggtgtaatcggaactcaaatgtttatttgtcatatactcccctac

SEQ ID NO: 4008 - DNA, 40 bp, Gordonia bronchialis
  source 1..40: mol_type = genomic DNA
gtagcagacgtcgaaggcgtgtttgagcgcgccggagatg

SEQ ID NO: 4009 - DNA, 50 bp, Gordonia bronchialis
  source 1..50: mol_type = genomic DNA
catggggtgtaatcggaactcaaacgtttatttgtcatatactcccctac

SEQ ID NO: 4010 - DNA, 40 bp, Gordonia bronchialis
  source 1..40: mol_type = genomic DNA
gtagccggcgtcgaagtcgcgcatgagcgcgcggaagaag

SEQ ID NO: 4011 - protein, 495 aa, Virgibacillus massiliensis
MIALYGRVSTEEQATKGYSLRNQIEECRRKANTKEIVEYVDDGYSGEFLERPALTKLREDVKGNRITKVYCYDPDRLSRKLMNALIIDDEFRSKGVDIIYINGEYADSPEGKLFYSLRGAISEFEKAKITERMSSGRKRKAQEGKIVKNHKMYGYDYDKEKAMYVVNEHEASVVKMIFHKFVVEQIGMNSIAKELTAKGVKTKTGKDVWHRQVVRQILMNESYTGDYYQNKWNTEGMIRNKYTDNPDNKIKMRHRDKSEWIPINIPQIIERTQYEEAAELLKQSRRRYAKAAVNQYLLSGLLRCGTCGNTMVGTKTTWWGKPHFIYTDRKSHAGAKHPGCVLDIKMEKLDEEVWKDVEQFVYNPELLFKYDNTKDVSMELKQAEKLKEDIKKAEKGRKKLYSLFAISDDLDEEELKKEIVELQDKQRKAEERLMEVEKEINKNKNDRDIDSIKETINELISKEDRITFDVKKSLIRVLVKEVIVEGKEKININYF

SEQ ID NO: 4012 - DNA, 50 bp, Virgibacillus massiliensis
  source 1..50: mol_type = genomic DNA
tagctaggtaatgacataagtatttcaatcctaatgtcaatacctagcag

SEQ ID NO: 4013 - DNA, 40 bp, Virgibacillus massiliensis
  source 1..40: mol_type = genomic DNA
acgtaaatgcataagtatttcgttttcaatacaacgagct

SEQ ID NO: 4014 - DNA, 50 bp, Virgibacillus massiliensis
  source 1..50: mol_type = genomic DNA
tagctaggtaatgacataagtatttaaatcctaatgtcaatacctagcag

SEQ ID NO: 4015 - DNA, 40 bp, Virgibacillus massiliensis
  source 1..40: mol_type = genomic DNA
atttaaatgcagaattatttagttttcattgcaaaaagct

SEQ ID NO: 4016 - protein, 563 aa, Alistipes onderdonkii
MHKRLIISVMEKSKRVVGYARVSTEAQDITRQVELITAYCTERNYRLIKIIQEKISGARKDRKSINELLEVDDTVADMIIVSELSRLSREDDILSVLSTINELLKQGVDILFLDKQDRIYKAGTVLSLYDIITLSVEAKASADERYKIAGRMQTGLRSKLAEFTNMFTGGTVPFGYKVIHNPDYKLNLTPKNLLVVDAQEAEAVKYLFQQLIDGNTIRQTVRVYNKLYPYKLSYSGICRIIRNPKYKGEIYRRGKLYGQISELQIISPEDFDRANKQMRENELFQSNAPKYYNPLKGLIFCPCGCSLYMKPNHNSYLIYRCSSSYNDKQRCENFGIKCSYVLSAVWTCVKATLHTEEYLRFNSRRSQELQELNAQIRETITQKVNIADEQKAQSAALIDKIKRLTNSVLIGELEAEYNLLQNKLKQTEQEITELNGRIAENDAEIQKNVEQKDFSQMEQSALYKEKLQKVVYHSLSAMRGILEIIFKNGMIRYVLIKKHRNGGVFLLPEFWTVDISRAVIIVPTHPSVDPEHPYTLLPTIPREYTFDAIITERDMDEYRITVS

SEQ ID NO: 4017 - DNA, 50 bp, Alistipes onderdonkii
  source 1..50: mol_type = genomic DNA
tgcgacaatattgactattatgtgtacagaaagtaatcaattttgtcgct

SEQ ID NO: 4018 - DNA, 40 bp, Alistipes onderdonkii
  source 1..40: mol_type = genomic DNA
ggcttcgagggcatccttgtagaggtcgtcgaggatgaag

SEQ ID NO: 4019 - DNA, 50 bp, Alistipes onderdonkii
  source 1..50: mol_type = genomic DNA
tgcgacaatattgactattatgtgaacagaaagtaatcaattttgtcgct

SEQ ID NO: 4020 - DNA, 40 bp, Alistipes onderdonkii
  source 1..40: mol_type = genomic DNA
gtcttccaaggcatccttgaaaaggtagtccagaatcaag

SEQ ID NO: 4021 - protein, 549 aa, Eubacterium sulci
MNREGKKCVLYPRVSTEMQVDGYSLEGQKNSLKRFADREEMEVVGIYEDAGKSGKSIEGRPAFKKMLSDIKNGLEIEYILVYKLSRFGRNAADILNSLEFVQSYGINLICIEEGIDSSQTSGKLLISVLSAVAEIERENIIEQTMNGRREKARQGGWNGGFAPYGYYLKDNHLLIEEKEAEAIRIIFDKFGNSDIGLGGVAKYLNLQGIKKIPRQNGKLETWSNHLIRQILDNPVYCGKIAYGRRTREKVKGTKNEYKQVHTDDYILEDGQHEGIVSEELWQKVHAKRLATGIKQPSRIGKERSHLLTGVLKCPLCGSSMYTNKHAWTNKDGTYKEVYYYICGRNKQERGRHCDYKASLRKIDIEPLVVEAVKELVSDAYFAKEIEKRIGVQTDTSVVDKELANYENKLKEVDLNKARLENEIDNLPVDARFRERKIHDMTLRLDALYDTMVELEERIEDAKLRKSSIEMEAITLDNVYKIMQNFGKLYAIMSDEEKKNLITYLIKEIQIYPNGESKMPLKSIEFNFPIYIDGKEVRKVLWERGNTVET

SEQ ID NO: 4022 - DNA, 50 bp, Eubacterium sulci
  source 1..50: mol_type = genomic DNA
ttgtgggaaaggggtaataccgttgagacggttgtaatgctttcccacaa

SEQ ID NO: 4023 - DNA, 40 bp, Eubacterium sulci
  source 1..40: mol_type = genomic DNA
cccttggacgaagcatgtggagacggtctgtttgctgtca

SEQ ID NO: 4024 - DNA, 50 bp, Eubacterium sulci; identical to SEQ ID NO: 4022
  source 1..50: mol_type = genomic DNA

SEQ ID NO: 4025 - DNA, 40 bp, Eubacterium sulci
  source 1..40: mol_type = genomic DNA
cccctgggcagagcatgttgacaaggtctgtttgctgaca

SEQ ID NO: 4026 - protein, 471 aa, Enterococcus avium
MEQAEEGYSLDEQVDKLKKYCEIKGWNIYKIYRDGGFSGANTDRPGLSEMINDAKLRAFDTVLVYKLDRLSRSQKDTLYLIEDILAANDIAFVSLNENFDTSTAFGKAMIGILAVFAQLEREQIRDRLLMGKIGRAKSGKAMAWGIPPFGYVLPESNREKYEIVPVEAEIVKKIYHDYIAGKLVAKICDELNAEGHIGKREPWVHANMKRTLTNPVYAGFIRYRGEVFEANHEPIVSKETFDLVQEQIELRQTRAYQKFNNPRPFQAKYLLSGLIKCGICGARFEVIQYKPRADGSRIRYYKCVSYSPKNHAPSMWKNSDGCTSPKYYLDDLEKELLSELEKLRDDPSLITSYVSKTNQIDVSGLKKRLKTLNNQLKKLVTLFIDNDFPKDVIESKKKIIMDEKKLILDKINEAESIKPEVSTNEVIDELGQIKISMFDLDYEEQKRIARKLIKEIILYPDKMEIHWAFAI

SEQ ID NO: 4027 - DNA, 50 bp, Enterococcus avium
  source 1..50: mol_type = genomic DNA
taacaatattatctaacgttgttcacaataccagatagtcaatattgtca

SEQ ID NO: 4028 - DNA, 40 bp, Enterococcus avium
  source 1..40: mol_type = genomic DNA
attaggaatttctgtagtcactactccaataaaaccaatg

SEQ ID NO: 4029 - DNA, 50 bp, Enterococcus avium
  source 1..50: mol_type = genomic DNA
taacaatattatctaacgttgttctgaataccagatagtcaatattgtca

SEQ ID NO: 4030 - DNA, 40 bp, Enterococcus avium
  source 1..40: mol_type = genomic DNA
ataaggaatttcaaaagtctgttcttccataaaagcaatg

SEQ ID NO: 4031 - protein, 607 aa, Bacillus amyloliquefaciens
MRAALYYRVSTKMQEHKYSLKAQKQELRKYAESQNWIIAKEFRDVDSGAKLDKSGLNALLDFVEEGGCDVVLCIDQDRLSRLDTVSWEFLKSALRENNVRIAEPGSITDLDNEDDEFISDIKNLIARREKRAINRRMMRGKRQRTREGKGWGKTPIEYNYDKNTGTYSVNEKWSWVIPFIDDLYLNKGYSFKRIAKELNKITLTPTGKKWSDTVIASKLKNKAYHGIMRKTFSNGETIEIENIYPKLRSEESYEKLQEVRELKYQKKTRENEVPQLLRRTYMTCGLCGRKLTIHMSGTKEYGIHFYITHGRPERQKDDFKCDLSINMIRVEQNIVSAIKNIIKSEELARDHIQMDFDESDAARLRDEVKAAKKSLADAREKVDRLLPLYLDGKFPKEQLDKQHGFLMNEITTHEKRVKQLNAQLSIVESQQFNYDLILEYFKIAERFDTWLTQNEQMDMIGKLFPQTTVYSDHIVMAGELPNGAPLEISVKVDPNPYERRNGNQKDNRDPWGKYQKIQQMMKDNPGIPQSKIAAELNIAPSTIVRLRNKYGEFENQIKAIKHDPEGKRKILEEYVQKNPNASLRQISRDTGMSTTTVRRIKEKFDMQ

SEQ ID NO: 4032 - DNA, 50 bp, Bacillus amyloliquefaciens
  source 1..50: mol_type = genomic DNA
ggtgggtaagtgcataggtttattttaattaaactactcacttacccacc

SEQ ID NO: 4033 - DNA, 40 bp, Bacillus amyloliquefaciens
  source 1..40: mol_type = genomic DNA
aaatgtcgtcattttaatttttttaaatattgtcggaagt

SEQ ID NO: 4034 - DNA, 50 bp, Bacillus amyloliquefaciens
  source 1..50: mol_type = genomic DNA
ggtgggtaagtgcataggtttatttaaattaaactactcacttacccacc

SEQ ID NO: 4035 - DNA, 40 bp, Bacillus amyloliquefaciens
  source 1..40: mol_type = genomic DNA
aaatgttttaattttaatttattttaatattggaagaaga

SEQ ID NO: 4036 - protein, 539 aa, Streptococcus agalactiae
MSRTKKYVAGLYCRLSKDDGNSVESMSIWSQKVMLKQYAESNNIAIYDYYVDDGYSGTNFERPSFKKMITDIENGKINCVITKDLSRLGRNYLQSGAYIEMYFPQKNIRYIAITDGIDTLNSNQNDIMPFKNILNEMYAKDTSKKVKSAIQSRMREGTYIGSKAPFGYLKDPNNKRRLIIDEKTKPIIELIYKLCLEGKGTQLISQELMKRKIPRPSAFVENAEKLYGLTEENKYQWSHRMVLNVLRDPVYCGNMARNKRPTLSFKNSKRMYIPKSDYIYAKDTHEGIVSEEIWEQVQTMIDKRKCNNKKGLYYDNIFQGLVRCPKCGYALTPKTDYRLKKKELIDFVHFSCSTYKKYGVNACSSHRIEARDLYNIVLEDIQYHGSMALSAKEDFVEKIIEKIEVEKIDEGKELSNKLELKKNQLAELDRSYEQLYEDRLEGNITERNFNLMNVSISKKQDKLIEEIKVLEGDIEVSFETEDNYKKFMNNISKYAKIKSLNRYILNQIIDKIYVYDKEEIDGQISQKVEIHYKFIGKLN

SEQ ID NO: 4037 - DNA, 50 bp, Streptococcus agalactiae
  source 1..50: mol_type = genomic DNA
ttgaccacttcggactactcaccagatttggagcagttccaagtgggaca

SEQ ID NO: 4038 - DNA, 40 bp, Streptococcus agalactiae
  source 1..40: mol_type = genomic DNA
cgtcccatggagaccgtctgacctagagcagagaagtggt

SEQ ID NO: 4039 - DNA, 50 bp, Streptococcus agalactiae
  source 1..50: mol_type = genomic DNA
ttgaccacttcggactactcaccacctttggagcagttccaagtgggaca

SEQ ID NO: 4040 - DNA, 40 bp, Streptococcus agalactiae
  source 1..40: mol_type = genomic DNA
catcgaatggggaccccctcccctagagcatagcagtggt

SEQ ID NO: 4041 - protein, 547 aa, Aerococcus urinae
MGRTKKYVAGLYCRLSKDDGNSVESMSIWSQKVMLKQYAESNSIAIYDYYVDDGYSGTNFERPSFKKMITDIENGKINCVITKDLSRLGRNYLQSGAYIEMYFPQKNIRYIAITDGIDTLNSNQNDIMPFKNILNEMYAKDTSKKVKSAIQSRMREGTYIGSKAPFGYLKDPNNKRRLIIDEKTKPIIELIYKLCLEGKGTQLISQELMNRKIPRPSAFVENAEKLYGLTEENKYQWSHRMVLNVLRDPVYCGNMARNKRPTLSFKNSKRMYIPKSDYIYAKDTHEGIVSEEIWEQVQTMIDKRKCNNKKGLYYDNIFQGLVRCPKCGYALTPKTDYRLKKKELIDFVHFSCSTYKKYGVNACSSHRIEARDLYNIVLEDIQYHGSMALSAKEDFVEKIIEKIEVEKIDEGKELSNKLELKKNQLAELDRSYEQLYEDRLEGNITERNFNLMNVSISKKQDKLIEEIKVLEGDIEVSFETEDNYKKFMDNISKYAKIKSLNRYILNQIIDKIYVYDKEEIDGQISQKVEIHYKFIGKLNWPLRTTHQ

SEQ ID NO: 4042 - DNA, 50 bp, Aerococcus urinae
  source 1..50: mol_type = genomic DNA
ttgaccacttcggactactcaccagatttggagtagttccaagtgggaca

SEQ ID NO: 4043 - DNA, 40 bp, Aerococcus urinae
  source 1..40: mol_type = genomic DNA
cgtcccatggagaccgtctgacctagagcaaagaagtggt

SEQ ID NO: 4044 - DNA, 50 bp, Aerococcus urinae
  source 1..50: mol_type = genomic DNA
ttgaccacttcggactactcaccacctttggagtagttccaagtgggaca

SEQ ID NO: 4045 - DNA, 40 bp, Aerococcus urinae; identical to SEQ ID NO: 4040
  source 1..40: mol_type = genomic DNA

SEQ ID NO: 4046 - protein, 539 aa, Aerococcus sanguinicola
MSRTKKYVAGLYCRLSKDDGNSVESMSIWSQKVMLKQYAESNGIAIYDYYVDDGYSGTNFERPSFKKMITDIENGKINCVITKDLSRLGRNYLQSGAYIEMYFPQKNIRYIAITDGIDTLNSNQNDIMPFKNILNEMYAKDTSKKVKSAIQSRMREGTYIGSKAPFGYLKDPNNKRRLIIDEKTKPIIELIYKLCLEGKGTQLISQELMKRKIPRPSAFVENAEKLYGLTEENKYQWSHRMVLNVLRDPVYCGNMARNKRPTISFKNSKRLYIPKSDYIYARNTHEGIVSEEIWEQVQTMVDKRKCNNKKGLYYDNIFQGLVRCPKCGYALTPKTDYRLKKKELIDFVHFSCSTYKKYGVNACSSHRIEARDLYNIVLEDIQYHGSMALSAKEDFVEKIIEKIEVEKIDEGKELSNKLELKKNQLAELDRSYEQLYEDRLEGNITERNFNLMNVSISKKQDKLIEEIKVLEGDIEVSFETEDNYKKFMDNISKYAKIKSLNRYILNQVIDKIYVYDKEEIDGQISQKVEIHYKFIGKLN

SEQ ID NO: 4047 - DNA, 50 bp, Aerococcus sanguinicola; identical to SEQ ID NO: 4037
  source 1..50: mol_type = genomic DNA

SEQ ID NO: 4048 - DNA, 40 bp, Aerococcus sanguinicola; identical to SEQ ID NO: 4043
  source 1..40: mol_type = genomic DNA

SEQ ID NO: 4049 - DNA, 50 bp, Aerococcus sanguinicola; identical to SEQ ID NO: 4039
  source 1..50: mol_type = genomic DNA

SEQ ID NO: 4050 - DNA, 40 bp, Aerococcus sanguinicola; identical to SEQ ID NO: 4040
  source 1..40: mol_type = genomic DNA

SEQ ID NO: 4051 - protein, 576 aa, Roseburia faecis
MARAKNRGYQQSFSPSYTIRRWRLGIYIRLSKEDLKKGKDDSNSVKNQRDLLNDFYRRNIDEFESITEYVDDGHTGTDANREDFQRLLADVMSGKINCVIVKDLSRFARNYSDAGSLIDNLFVQMGVRFISLAENVDSYKNPDSVSNIIVPITNVMNDNYCYQTSKKIRQVFDYKRRNGQYIGAFAPYGYVKHPKDKHRLIVDPDAAENVKLIFTMLIQGSSKRAIALYLNEHGVPSPSAYKVQKGLPVSTRGYDDPMWGVRMIHSILTNPTYTGDLAQGRSRVKSYKVHQIEAVPREEWVEVAGTHEAIIDYETFDKVQALLQRDTRTSPKGREVHLFSGFLKCADCGRAITRCVGKNNNVYYSCSTYKNRSRTACTMHSIKHERLEAAVLFAVQHQVHLAVSYSEIVTQINSAPIKKSQSYRLDDLIAAKERELTKITRYKQSLYQDWKDGEITQQEYRDMKADYERQTSDISAVLTRLNAERAELANGVDNEHPALVAFMKYQNIEALNREILVELVDYIKVYENGNISVKFKFADELRKIAEYIEINTTEDTAVAGYPPLRTPLTVCFPNRR

SEQ ID NO: 4052 - DNA, 50 bp, Roseburia faecis
  source 1..50: mol_type = genomic DNA
tgttttcctaataggcgctaatcatatgattgtttcctattaggaacgct

SEQ ID NO: 4053 - DNA, 40 bp, Roseburia faecis
  source 1..40: mol_type = genomic DNA
gtttgtgattcaattaccatatgttggttaaattttaagt

SEQ ID NO: 4054 - DNA, 50 bp, Roseburia faecis; identical to SEQ ID NO: 4052
  source 1..50: mol_type = genomic DNA

SEQ ID NO: 4055 - DNA, 40 bp, Roseburia faecis
  source 1..40: mol_type = genomic DNA
gtttgttgtttaatttccatatattagtgaaattttcagt

SEQ ID NO: 4056 - protein, 451 aa, Leptotrichia hofstadii
MKAIIYARVSTEMQEEGRSLEFQIRKCEDFCKMSGYKLKEVIQDVESGGNDNREGFLKLQQEIKKKSFDVLVVYESSRISRITLTMLNFVLELQKSNIKFVSISQSEINTTTPTGMLFFQIFAVLADYERKQISMRVKSNKWARAKAGIWQGGNIPIGYKKDEHNNIVIDPETSEDVISIFNTYLNTKSISETASIFNRNISSIKWILQNEFYIGNLMYGRKENNINTGEVKINKEITIFKGNHQALISEDLFREVQRQMLFKQRVIRKEGKFLFTGILECTCGGKMFKNSVNYRCDKCKKAISMNKAEKFIIRKLLNLKELEFLNEKPNLEKYKRDRENIDKQIKKIDRERTKYLELFTKELINEFELNDKLEELKNRKRVFEDSLNDIDRIIKDKTISEEKLDNIKILKEVLENMDETDRYNLFLMFRMLIKRVKIKKYQPLEVLILLN

SEQ ID NO: 4057 - DNA, 50 bp, Leptotrichia hofstadii
  source 1..50: mol_type = genomic DNA
ttatgtggggttttatggtgcgaaagtacgcactaatcttaaccacacat

SEQ ID NO: 4058 - DNA, 40 bp, Leptotrichia hofstadii
  source 1..40: mol_type = genomic DNA
aagtttcaaatggtgcgaaaggtgggactcgaacccacat

SEQ ID NO: 4059 - DNA, 50 bp, Leptotrichia hofstadii
  source 1..50: mol_type = genomic DNA
ttatgtggggttttatggtgcgaaattacgcactaatcttaaccacacat

SEQ ID NO: 4060 - DNA, 40 bp, Leptotrichia hofstadii
  source 1..40: mol_type = genomic DNA
aagttgcaaaagtggcaaaatctgggactagaacccacac

SEQ ID NO: 4061 - protein, 697 aa, Acetivibrio thermocellus
MGKIAIYTRVSSEKQAAEDRYSLEVQKERCEALLKSQGYSEKDFIYFCDKGISGITIEQRDELKELLKLLQEPGSQIEGICCYDLSRISRSISHTLEIFKILKENNLRLFTCDGAFMGDINGQNAKIMVSIYSMLNELFIDQLRERVKAGLEKSVEAGNYYGGPAPLGYKYEFYSVSQQENKNFNSDKKTRKKDIKKRLVVDENEKPIIELIFHLFTVEKYSIKNVAQYLNLNGYRTRQNKQFATATVQKILENPVYCGRLFWAKRKQKKKTEQGVRIWEKISIYDIDFFDLPKGNHEAIISEEFFLETLERLRGRRKIRKNLNMAEAMSSITKQEYFDAHKKMFINILKCPHCGGNMTSSLQPGHKRTDGSIAEAKVYYKCSTFNAGKNLCNGYYSVQEERAFNLIKEDFFTRLKEAFILVKEYQNYLREKHGINEEMLFDKEINRIKGEIKNLEKNEMRLLTKLDNLINMQIEEEKGSLKYNRIEKMIKDTEKDIKEVKKLKEEQQNKIIQAIKRREALLSEAKEQEEFENIEEYFNSLPLLQKRQLLEKVYSKIVIGTVSNARYGPKRLTLKEVEYNQYSNIYGLCKVLGVQDFKSFNEYLKSKGRKELNLLLQHYGDIEEYVKDIEKQNVSSKFKEYISELQKEVENDEDREFMDDFINRNMNLDLQEFEEKFAEEYRKYREQKEKELCGVLN

SEQ ID NO: 4062 - DNA, 50 bp, Acetivibrio thermocellus
  source 1..50: mol_type = genomic DNA
gtcatgtattcggtgataaacggtgaaccgtatcatcgctaatacatgac

SEQ ID NO: 4063 - DNA, 40 bp, Acetivibrio thermocellus
  source 1..40: mol_type = genomic DNA
atttaagattatcaatggtgaaacgtatcacaaataaata

SEQ ID NO: 4064 - DNA, 50 bp, Acetivibrio thermocellus
  source 1..50: mol_type = genomic DNA
gtcatgtattcggtgataaacggttcaccgtatcatcgctaatacatgac

SEQ ID NO: 4065 - DNA, 40 bp, Acetivibrio thermocellus
  source 1..40: mol_type = genomic DNA
atttcagatttacaatagttcaatgtatcatcaatatata

SEQ ID NO: 4066 - protein, 540 aa, Massiliimalia timonensis
MKQPYNTTIYNTALYMRLSRDDENYGDSVSIETQRTILQQYAKEQGLHVVGEYVDDGWSGTNFERPDFQRMMDDVEAGKVNCIVTKDLSRFGREHVMMDYYLEFLFPEKRVRYIAVAENEDTEKGLSDFVPFKNLFNEWFAKDTSRKVKAAFKAKFATGQRIGAYAPIGYRKHPEIKNKLIIDEETRWIVEKIFDLAIHGRGAASITRILIEEKVPTPGFINFQRDGTFANIYAGAPEEKSYAWTIAQVKSIMKDETYIGHTIHYRETNISFKNKRRVRKPQSEWVRVENTQEPIISEQVFRQVQEQIANRRRKCKDGTTQIFSGLVKCADCGWSLSYGENRQNSKPYGHYHCSKYGQGTRQCSMHYIRYDVLYAYVLSRLQYWSGLVQHDEERLLKRLLNATDKGQAAARKKQAAELKKAEKRKAEVDTLFARMYEDWAAGCITEYNFSMLSGKYQSEQAELDTKIEQLQSAIATESQNAADAEKWIALMKECVNPTELTAELLNTLIEKIVVHEAVKGEDGSREQEVEIFYRFIGKID

SEQ ID NO: 4067 - DNA, 50 bp, Massiliimalia timonensis
  source 1..50: mol_type = genomic DNA
caatatctttaactatgtgataccggggtttcacttagataaagatacca

SEQ ID NO: 4068 - DNA, 40 bp, Massiliimalia timonensis
  source 1..40: mol_type = genomic DNA
tataacagaatgggaaacaggggtaaaaatatctgaaaaa

SEQ ID NO: 4069 - DNA, 50 bp, Massiliimalia timonensis
  source 1..50: mol_type = genomic DNA
caatatctttaactatgtgatacccaggtttcacttagataaagatacca

SEQ ID NO: 4070 - DNA, 40 bp, Massiliimalia timonensis
  source 1..40: mol_type = genomic DNA
tataacaaaaagggaaaagcaggcaaaagtttctgaaata

SEQ ID NO: 4071 - protein, 556 aa, Pseudomonas cichorii
MPAAYAYIRYSRAVQQTGDSEDRQFTALELFEHTVGMAIAEVVYDRGKSAFRGDNAKTGKFKEILNRIEQGGIQKGDYLVVESIDRITRQRVLDGVELLQGILKKGINIYTTTDQKTYSYNDPSKDFENLLMISLIAKRANEESETKSNRLLSSWKKRREKAKSGGIIITKGNSIPYGLRVVNGQFTIDEDEQKEINRLFESLLIYGLNTAVKKVNQSSKKVWHNATITKLISSKSVIGCLATNRMEYINGKAKKIPTGFIENYYPQLISPALFYQVIDKMKERKAKNYNGRRTEQDFNIFKNQIFCFSCGGKLYYDHRGSRYKGKIYPYFKCNTKRLNPRECGTDNIRFEYIFGLLLKSLEKLKKVADVWSLLDIDEGEAGINNLLNAQFSGLLRRPSSIDTNAQVEQKSVELGQFRTTYENLSISIRAFSGKIPLPVMQQLSEVETKIEELTEEIEVLEAASPSAAINIDDYKTIIDLFMTEEGRAKINAFFKENDIVFYAEHDKQSTLSQLKIARTVGDTSEELVHSSAFLPKKQILKAWNLTDLQDMFDLSV

SEQ ID NO: 4072 - DNA, 50 bp, Pseudomonas cichorii
  source 1..50: mol_type = genomic DNA
cctctataaaacgcacaccggatcataatcccgtggtatatttctccgag

SEQ ID NO: 4073 - DNA, 40 bp, Pseudomonas cichorii
  source 1..40: mol_type = genomic DNA
cccgcgccgcaaccggatcatcagcgggctgtctctgggt

SEQ ID NO: 4074 - DNA, 50 bp, Pseudomonas cichorii
  source 1..50: mol_type = genomic DNA
cctctataaaacgcacaccggatccaaatcccgtggtatatttctccgag

SEQ ID NO: 4075 - DNA, 40 bp, Pseudomonas cichorii
  source 1..40: mol_type = genomic DNA
tccgcgacggaaccggaaccacagctagctgcctctggga

SEQ ID NO: 4076 - protein, 503 aa, Subdoligranulum sp
MNNRIDAIYARQSVDKKDSISIESQIEFCKYELKGGNCKEYTDKGYSGKNTDRPKFQELVRDIKRGLIAKVVVYKLDRISRSILDFANMMELFQQYNVEFVSSTEKFDTSTPMGRAMLNICIVFAQLERETIQKRVIDAYYSRSQRGFKMGGKAPYGFHTEPIKMDGINTKKLVVNPNEAANIRLMFEMYAQPTTSYGDITRHFAEQGIMFNGKELIRPTLAQMLRNPVYVQADLDVYEFFKSQGTVIVNDAADFTGMNGCYLYQGRDVKPSKKNDLKDQMLVLAPHEGIVPSDIWLTCRKKLMNNMKIQSARKATHTWLAGKIKCGNCGYALMSINNPVGKQYLRCTKRLDNKSCAGCGKIITSELEAVVYQQMVKKLASYKTLTGRKKAAKANPKIAALQVELAHVDSEIEKLVDSLTGANNVLLSYVNVKIAELDGRKQELVKQIAELTVEAISPEQVSQISGYLDTWDNVSFDDKRRVVDLMITTIAATSDSLNITWKI

SEQ ID NO: 4077 - DNA, 50 bp, Subdoligranulum sp
  source 1..50: mol_type = genomic DNA
gtgtagttccttgtaaactgcactttaggtcagtttacaaggaactacac

SEQ ID NO: 4078 - DNA, 40 bp, Subdoligranulum sp
  source 1..40: mol_type = genomic DNA
ttgctattttcacttcatcttgctaaaatattaaaataat

SEQ ID NO: 4079 - DNA, 50 bp, Subdoligranulum sp
  source 1..50: mol_type = genomic DNA
gtgtagttccttgtaaactgcactcaaggtcagtttacaaggaactacac

SEQ ID NO: 4080 - DNA, 40 bp, Subdoligranulum sp
  source 1..40: mol_type = genomic DNA
ctgctatcatcacttcatgcagctgaaatattaagaaatt

SEQ ID NO: 4081 - protein, 474 aa, Lysinibacillus fusiformis
MRCALYVRVSTDEQAKHGYSILAQIEKLEAYCISQGWEIAGEPYVDDGYSAKDLNRPHFQRMITEVKKGDIDVVLVYRLDRLTRSVSDLYDILQELDKYNCKFKSATEVYDTTNAMGRLFITLVAAIAQWERENTAERVRMGLEKKVKLGLWKGGTPPYGYKVVDGELVVYEEEEKIVREIFKLSRTIGFYILAKQLTDRGIPTRRGGEWHVDTVRDIANNPTYAGYLSFSENPKDIKKPPRERKLFEGNHERIIDRDEFWELQDILDKRRTFGGKRETSDYYFSSILKCARCGHSMSGHRVGKKKNYRCSGKKVGKSCTSHMILEDNLVKTIFSQWDELIGDFSSSSGETEFPTEHLNKVKSELSNVQKLMRKKKVMYENDVIDIDELIQETEKLREKEKELQREIKNIEQNDNQNNEELRAIILNMDQLWLKANAYERKELMNLIFEQLVIDTKDEYKSSKQAREIIIVSAR

SEQ ID NO: 4082 - DNA, 50 bp, Lysinibacillus fusiformis
  source 1..50: mol_type = genomic DNA
aatatgtctttcataggtataggtacaccttcaccaatataagacatata

SEQ ID NO: 4083 - DNA, 40 bp, Lysinibacillus fusiformis
  source 1..40: mol_type = genomic DNA
catttgggttggtggcggaacattgattccttgggcatta

SEQ ID NO: 4084 - DNA, 50 bp, Lysinibacillus fusiformis
  source 1..50: mol_type = genomic DNA
aatatgtctttcataggtataggttgaccttcaccaatataagacatata

SEQ ID NO: 4085 - DNA, 40 bp, Lysinibacillus fusiformis
  source 1..40: mol_type = genomic DNA
tatttgggttgctagcatatggttgattctttgcgcatta

SEQ ID NO: 4086 - protein, 539 aa, Pseudomonas parafulva
MQKLCFSYVRYSSWTQRNSDSVKRQNEMVAKWLLQNPEYKLSDQRYDDHGKSGYHGDHLDNSFGRLLAAVETGDIPSGSKVLIEQIDRAGRLAPMEMLPLVSKIVNAGVDLVTLDDGITYNRESANSNHLFLLVAKVQQAYQYSDNLSRRLKAAYETKRQKAAAGEGATRRMPLWIRDGKLRDDIAPFVAMVFEDFAAGIGERRILGRLRGQHPDFETISPSTFRRWLRNPVAIGRWNDIEDVWPAVISKELWFRVQKRLNDSHTPRPAASKYLLSGLVKCARCGKNYCVGGQKGALSMLCVSRHRFGAGFGGCTNKRSIPYAVFDFIRSQTAHAALVRASQSQNLTANEKRQIEIDGELADLRKQSEHAAEGLVRYGMMKSITDVLDRITAQISLLEAEKVLLQTAPASFTIDDMVEIEENLLDDDTVKLNALLQGVGYTMFVDDLKITVNEASVYSNSTTQVYEYLGSDRVLGTYKLAINGERVADLPNLNSKVQKAEIAAHFGQEAKYECGGLVRKELRWNGTDFIESATGNLVEN

SEQ ID NO: 4087 - DNA, 50 bp, Pseudomonas parafulva
  source 1..50: mol_type = genomic DNA
attctcaaagctgctgatttctgtgctatgatgggtccaatgttatgatt

SEQ ID NO: 4088 - DNA, 40 bp, Pseudomonas parafulva
  source 1..40: mol_type = genomic DNA
ttcgagcatgccgatgactgcgttcatgggcgtgcggatt

SEQ ID NO: 4089 - DNA, 50 bp, Pseudomonas parafulva
  source 1..50: mol_type = genomic DNA
attctcaaagctgctgatttctgtgttatgatgggtccaatgttatgatt

SEQ ID NO: 4090 - DNA, 40 bp, Pseudomonas parafulva
  source 1..40: mol_type = genomic DNA
gtcgggcatgcggatgactgtgctcatggacttgcggacc

SEQ ID NO: 4091 - protein, 532 aa, Pseudomonas fulva
MTVKKSLPRAFADVFSDDETINVYSYIRFSSKAQSQGASETRQLEQLNTFFEQYQQARQIERYEDLGVSAFKGKNLKSGQLAKFVERIKSKEILPNALLLVESFDRISRVGGYDALELIISIIQADCAIYTLFDNRLYSKRKKDNSVDISLIQNILERANDESRAKSERISDAKARNLLKGESGGIVTKRCPFWISFVDNKFVLNEHAKAVKRMTELCFDYGFQAIAQQLNKEEHERKYTESTVGKVLHKHAIYGSFLSMRNDDEGNRTIVNKEIKNYYPAVISESEFHRISAKLKERQDPKLAGRKASDFKNILRGLVFCKCGSTFRFHAQKNFYVDLVCNASSVHKCEFAQKNKSVRYRYARVEEIFLAYQSLIPFHQIVSKNDDVKALEKEHQEVSGLIVLKEKALANHFAILESASDSSRKYITQRIDEVSADLDKLKNNEHELNQKIMSLHLASKTDLNSLEIYNLLITESGRIKINNFLHAQKIKLIITPVKKKFFTLDIFHNDKHIDTIDVTANDYTARNHTHLK

SEQ ID NO: 4092 - DNA, 50 bp, Pseudomonas fulva
  source 1..50: mol_type = genomic DNA
tttctacaatttccgcctgtgattgcaatgaccagagctttttgtataaa

SEQ ID NO: 4093 - DNA, 40 bp, Pseudomonas fulva; identical to SEQ ID NO: 4088
  source 1..40: mol_type = genomic DNA

SEQ ID NO: 4094 - DNA, 50 bp, Pseudomonas fulva
  source 1..50: mol_type = genomic DNA
tttctacaatttccgcctgtgattgtaatgaccagagctttttgtataaa

SEQ ID NO: 4095 - DNA, 40 bp, Pseudomonas fulva; identical to SEQ ID NO: 4090
  source 1..40: mol_type = genomic DNA

SEQ ID NO: 4096 - protein, 542 aa, Mammaliicoccus sciuri
MQQLKQKRVGIYVRVSTEIQSTEGYSIDGQINQIREYCDFNNFVVVDVYADRGISGKSMNRPELQRLLKDANEGQIDSVMVYKTNRLARNTSDLLKIVEDLHRQNVEFFSLSERMEVNTSSGKLMLQILASFSEFERNNIVENVFMGQTRRAQEGYYQGNLPLGYDKIPDSKHELMINQHEANIVKYIFESYAKGHGYRKIANALNHKGYVTKKGKPFSIGSVTYILSNPFYVGKIQFAKYKDWNEKRRKGLNDKPIIAEGKHSPIIIQDLWDKVQLRKKQVSQKPQVHGKGTNLLTGIVHCPQCGAPMAASNTTNTLKDGTKKRIRYYSCSNFRNKGSKVCSANSVRADVIEKYVMDQILEIVKSDKVINQVLERVNQENKVDIGALNHDIAYKQQQYDEVSGKLHNLVKTIEDNPDLTSALKATIHQYETQLNDITNQMNQLKQQQNQEKLSYDTKQIAALLQRIFQNIESMDKAQLKALYLTVIDRIDIRKDGNHKKQFYVTLKLNNEIIKQLFNNTPLDEVLLSTSSLFLPQTLFLQI

SEQ ID NO: 4097 - DNA, 50 bp, Mammaliicoccus sciuri
  source 1..50: mol_type = genomic DNA
tgaaaaattagcacaaggaacaattgatgctgaatcattcagaaaacaga

SEQ ID NO: 4098 - DNA, 40 bp, Mammaliicoccus sciuri
  source 1..40: mol_type = genomic DNA
aacttgccaaaggtatgattgatgtagaaacattcagaga

SEQ ID NO: 4099 - DNA, 50 bp, Mammaliicoccus sciuri
  source 1..50: mol_type = genomic DNA
tgaaaaattagcacaaggaacaatctatgctgaatcattcagaaaacaga

SEQ ID NO: 4100 - DNA, 40 bp, Mammaliicoccus sciuri
  source 1..40: mol_type = genomic DNA
aaatttccaaagttgtaatctatgtggacccattcagaga

SEQ ID NO: 4101 - protein, 578 aa, Serratia marcescens
MRWIMRKCFLYSRVSSDVQISGDGLGRQEDKLKQYLLQNALRLNLSVDDCEILVDSGVSGWKGSNMGDTAALGQLFHRVESGEIDGSVLIVESLDRFSRENPFRVAGYIAKLAEHSIDIIDVEQNLVIGTSNPWSSTIASIIANRAHEESTLKSKRIKAAWNSRRKKAEESGQYMIKNTPFWIDVLDDKYVANADASIVREIFDLYLQGYGSFTIAKKMNKAGKVIRNKRWSTPKICALLRNPRCNGDFISHSLERDYEKGTSTSVEHVIKGLYPKIVTDEEFALVLNRLNDGSKNKRVCNDRKVTILNGLLKCSICGGALTVRSAGAYRYVGCLKTIEKGGCYSKPIRYDALEKIVVNHIRNMDLGHVYESNDSQEVITKERIKTLMSHIEEYKAGITQLRERGKKPSFDMLTELQNSEDELELLKKALEQLSLSKIDLSEFAVGTELFDITQIALRTRLERTISSLLNKIKVYHTKDLSFSLIEMIYVNDVVKHVLVADKKGDVTGDVVIRRNGESTTYESCSVKIIKDEDGVFSLDCNISEVVLNDYLLLMNVVDFVDSEAKEFLNLHLNAVLAH

SEQ ID NO: 4102 - DNA, 50 bp, Serratia marcescens
  source 1..50: mol_type = genomic DNA
tttattttagtgttaaaacgtaatgtgatacattggaacactaagataaa

SEQ ID NO: 4103 - DNA, 40 bp, Serratia marcescens
  source 1..40: mol_type = genomic DNA
atttgtgatgtaacataatgtaaatattcatataaaaaac

SEQ ID NO: 4104 - DNA, 50 bp, Serratia marcescens
  source 1..50: mol_type = genomic DNA
tttattttagtgttaaaacgtaattggatacattggaacactaagataaa

SEQ ID NO: 4105 - DNA, 40 bp, Serratia marcescens
  source 1..40: mol_type = genomic DNA
atttgtggacatacataattgaaatattcacaaaagaaac

SEQ ID NO: 4106 - protein, 466 aa, Enterococcus gallinarum
MKKAGLYIRVSTPQQEKEGYSIEAQTEKLNAYAVAKDYKVFKTYTDAAFSGAKLERPALNEMIEDIESNKIDVVIVYKLDRLSRSQKNTMYLIEDVFLKNNVDFISMQESFDTTTSFGRAMIGILSVFAQLERDNITERMSMGKLERVKRGYYMGGGNVPFGYEYNQITGELEIQETQALAVKRMFELFLNGQAINKIVSVLKKEFPVFEDSFMDSTVRRRLQSHYYCGKQKYQNKIYDAKHEPIVSIKDFNKVQRLISNRPHSNAFNHSYLFSGLIICHKCGKPYNGYESVRTANGKKYKHKYYRCSCRTYKHKQKYGWTCSGKSYRCDFLDAAIMSEIKKRAENSKFALKEENNEVDNKPIIREIARLNAQQSKLLDLYLSDKISTNILDNKTDELKEKIEKLELQLNQTVSKKDKEEFEKSLEELVDRFEEMDFSTRRSLIENIIEKIEVVDDEITIYFYVTI

SEQ ID NO: 4107 - DNA, 50 bp, Enterococcus gallinarum
  source 1..50: mol_type = genomic DNA
tatgtgaccatttaagcaatcacttgcacatttgcttatttggacacaca

SEQ ID NO: 4108 - DNA, 40 bp, Enterococcus gallinarum
  source 1..40: mol_type = genomic DNA
catcgtgcctgcgatcacctgcatatttgctgggtgccgt

SEQ ID NO: 4109 - DNA, 40 bp, Enterococcus gallinarum
  source 1..40: mol_type = genomic DNA
catcgtgcctgcgatcacccacatatttgctgggtgccgt

SEQ ID NO: 4110 - DNA, 50 bp, Enterococcus gallinarum
  source 1..50: mol_type = genomic DNA
tatatgagcacaaaacccaacacacacacatttgcaaacagggacacaaa

SEQ ID NO: 4111 - protein, 532 aa, Rhizobium lentis
MASGKPGAVQVVTVPAGFVKAGDRIEKDPDRRIQEAIALVFNKVTELGSARQALLWFLEQGLDLPVRCANGDVIWRRPNYATIHRMIANPIYGGAYAYGKSRSVPGYDGRSGIRRKARDEWLALIPDAHEGYISWQRAEEIRKMVSDNVPASRHHGAPKHGDALLAGLFRCKRCGRKLTVRYTGANHNIPRYSCWRGLLDNGEPRCIAFGGLRVDDAIEEALLGVVEPGAIAAAVEAERNMASQRDQVQDALLRDLEAARYVADRAFRQYDAADPENRLVTSELEARWNRTLARVGEIETRIAKHRTVTPQPFLMSASQVTALAGNLRTVWTAPTTDARLKKRIVRTLINEVVADLDDGTSEIVLVIHWVGGVHTELRLPKRRRGQRNATPDDIVDAVRQLVLIANDDVIAGVLNRNGLTTGNGNRWTRERVTALRSYRKIPVFRPQIDGVEPWLNLGGAAKLLGITPKTLRLAAEAGDIEGVHPLPDGPWIFSRCKLATPQARQILDRARKNPRHPAGSPPDQENLFPSMA

SEQ ID NO: 4112 - DNA, 50 bp, Rhizobium lentis
  source 1..50: mol_type = genomic DNA
gatgggtgttatggaacaggattgtacaacacgacgacagaacacccacg

SEQ ID NO: 4113 - DNA, 40 bp, Rhizobium lentis
  source 1..40: mol_type = genomic DNA
gtgcggccggaagttgttgtaatcctccgcccattcggaa

SEQ ID NO: 4114 - DNA, 40 bp, Rhizobium lentis
  source 1..40: mol_type = genomic DNA
gtgcggccggaagttgttgatatcctccgcccattcggaa

SEQ ID NO: 4115 - DNA, 50 bp, Rhizobium lentis
  source 1..50: mol_type = genomic DNA
aatgagtgagaaataacagcgtagatcaacatgacgcggccacacccagg

SEQ ID NO: 4116 - protein, 558 aa, Phocaeicola dorei
MKRVIGYIRVSTDNQDLERQRVLIRKYCENKGYSLLRIEEDYAISGTVSNRNGLNSILNITNSVADMVVVSELSRLSRQDDIFETLTQIHTIIRNVDLVILDEPDKVYEAGKTIILSDFLMLAIKAYGAADERKKIVSRMTTGKDSKVQAFPLMLTDSNIPTGFKAVPNPNYIKGATPKMLLVEDEERMQLVRDIFNYVANGLSLGKTAEKLNMLGYRTARNKPFYEQSIRTIINDSIYNGVRYWKGMKLELPVKFISDEIWNLAHKKVQENKNYSGEAQKHYNPLKGIIKCPCGQTSMYGRTSSCITYRCLDRIKMGIKSPCTNVGIKAETLIYAVWKDVRLRTLDETYQAKSNEKIAEIEAENIKLTQSIKEKDSEIAKLQSDLKTVIDNVMASTNITIVKALNGKADSIDSQIKSIEAEKTAIDEEIASNNRRIADEIKSQSRKELDSLSLEGKGEMFRELLSKVVYYSVSLNSGFIVITYKNDLETIIAYHNRNKPFLWALPITFRFNKVKRTVIVPTLPEQPKMTSFVLERIKEKEYTFKQLQESFNLEEYKI

SEQ ID NO: 4117 - DNA, 50 bp, Phocaeicola dorei
  source 1..50: mol_type = genomic DNA
aggtataactttgaaaagtcaaataatgttaagttgttaaagttatacct

SEQ ID NO: 4118 - DNA, 40 bp, Phocaeicola dorei
  source 1..40: mol_type = genomic DNA
gggcatcaataactgacaaaaagtagatttacacttgccc

SEQ ID NO: 4119 - DNA, 40 bp, Phocaeicola dorei
  source 1..40: mol_type = genomic DNA
gggcatcaataactgacaattagtagatttacacttgccc

SEQ ID NO: 4120 - DNA, 50 bp, Phocaeicola dorei
  source 1..50: mol_type = genomic DNA
atgtataataaataaaagtacagttttgttaaattgtttcagttatatat

SEQ ID NO: 4121 - protein, 558 aa, Bacteroides uniformis
MKRVIGYIRVSTDNQDLERQRVLIRKYCENKGYSLLRIEEDYAISGTVSNRNGLNSILNITNSVADMVVVSELSRLSRQDDIFETLTQIHTIIRNVDLVILDEPDKVYEAGKTIILSDFLMLAIKAYGAADERKKIVSRMTTGKDSKVQAFPLMLTDSNIPTGFKAVPNPNYIKGATPKMLLVEDEERMQLVRDIFNYVANGLSLGKTAEKLNMLGYRTARNKPFYEQSVRTIINDSIYNGVRYWKGMKLELPVKFISDEIWNLAHKKVQENKNYSGEAQKHYNPLKGIIKCPCGQTSMYGRTSSCITYRCLDRIKMGIKSPCTNVGIKAETLIYAVWKDVRLRTLDETYQAKSNEKIAEIEAENIKLTQSIKEKDSEIAKLQSDLKTVIDNVMASTNITIVKALNGKADSIDSQIKSIEAEKKAIDEEIASNNRRIADEIKSQSRKELDSLSLEGKGEMFRELLSKVVYYSVSLNSGFIVITYKNDLETIIAYHNRNKPFLWALPITFRFNKVKRTVIVPTLPEQPKMTSFVLERIKEKEYTFKQLQESFNLEEYKI

SEQ ID NO: 4122 - DNA, 50 bp, Bacteroides uniformis; identical to SEQ ID NO: 4117
  source 1..50: mol_type = genomic DNA

SEQ ID NO: 4123 - DNA, 40 bp, Bacteroides uniformis
  source 1..40: mol_type = genomic DNA
tggcagcaggatgcggcagaaggtacttttacgatagcct

SEQ ID NO: 4124 - DNA, 40 bp, Bacteroides uniformis
  source 1..40: mol_type = genomic DNA
tggcagcaggatgcggcagttggtacttttacgatagcct

SEQ ID NO: 4125 - DNA, 50 bp, Bacteroides uniformis; identical to SEQ ID NO: 4120
  source 1..50: mol_type = genomic DNA

SEQ ID NO: 4126 - protein, 558 aa, Bacteroides uniformis; identical to SEQ ID NO: 4116

SEQ ID NO: 4127 - DNA, 50 bp, Bacteroides uniformis
  source 1..50: mol_type = genomic DNA
aggtataactttaaaaagtcaaataatgttaagttgttaaagttatacct

SEQ ID NO: 4128 - DNA, 40 bp, Bacteroides uniformis; identical to SEQ ID NO: 4123
  source 1..40: mol_type = genomic DNA

SEQ ID NO: 4129 - DNA, 40 bp, Bacteroides uniformis; identical to SEQ ID NO: 4124
  source 1..40: mol_type = genomic DNA

SEQ ID NO: 4130 - DNA, 50 bp, Bacteroides uniformis; identical to SEQ ID NO: 4120
  source 1..50: mol_type = genomic DNA

SEQ ID NO: 4131 - protein, 558 aa, Bacteroides faecis
MKRVIGYIRVSTDNQDLERQRVLIRKYCENKGYSLLRIEEDYAISGTVSNRNGLNSILNITNSVADMVVVSELSRLSRQDDIFETLTQIHTIIRNVDLVILDEPDKVYEAGKTIILSDFLMLAIKAYGAADERKKIVSRMTTGKDSKVQAFPLMLTDSNIPTGFKAVPNPNYIKGATPKMLLVEDEERMQLVRDIFNYVANGLSLGKTAEKLNMLGYRTARNKPFYEQSIRTIINDSIYNGVRYWKGMKLELPVKFISDEIWNLAHKKVQENKNYSGEAQKHYNPLKGIIKCPCGQTSMYGRTSSCITYRCLDRIKMGIKSPCTNVGIKAETLIYAVWKDVRLRTLDETYQAKSNEKIAEIEAENIKLTQSIKEKDSEIAKLQSDLKTVIDNVMASTNIAIVKALNGKADSIDSQIKSIEAKKKAIDEEIASNNRRIADEIKSQSRKELDSLSLEGKGEMFRELLSKVVYYSVSLNSGFIVITYKNDLETIIAYHNRNKPFLWALPITFRFNKVKRTVIVPTLPEQPKMTSFVLERITEKEYTFKQLQESFNLEEWKI

SEQ ID NO: 4132 - DNA, 50 bp, Bacteroides faecis; identical to SEQ ID NO: 4117
  source 1..50: mol_type = genomic DNA

SEQ ID NO: 4133 - DNA, 40 bp, Bacteroides faecis
  source 1..40: mol_type = genomic DNA
gggcatcagcaatcggcaaaaagtacttttactcaatccc

SEQ ID NO: 4134 - DNA, 40 bp, Bacteroides faecis
  source 1..40: mol_type = genomic DNA
gggcatcagcaatcggcaattagtacttttactcaatccc

SEQ ID NO: 4135 - DNA, 50 bp, Bacteroides faecis; identical to SEQ ID NO: 4120
  source 1..50: mol_type = genomic DNA

SEQ ID NO: 4136 - protein, 558 aa, Phocaeicola vulgatus; identical to SEQ ID NO: 4116

SEQ ID NO: 4137 - DNA, 50 bp, Phocaeicola vulgatus
  source 1..50: mol_type = genomic DNA
aggtataactttaaaaagtcaaattatgttaagttgttaaagttatacct

SEQ ID NO: 4138 - DNA, 40 bp, Phocaeicola vulgatus
  source 1..40: mol_type = genomic DNA
tggcagcaagatacggcaataagtggatttccggaatcct

SEQ ID NO: 4139 - DNA, 40 bp, Phocaeicola vulgatus
  source 1..40: mol_type = genomic DNA
tggcagcaagatacggcaattagtggatttccggaatcct

SEQ ID NO: 4140 - DNA, 50 bp, Phocaeicola vulgatus; identical to SEQ ID NO: 4120
  source 1..50: mol_type = genomic DNA

SEQ ID NO: 4141 - protein, 558 aa, Phocaeicola vulgatus
MKRVIGYIRVSTDNQDLERQRVLIRKYCENKGYSLLRIEEDYAISGTVSNRNGLNSILNITNSVADMVVVSELSRLSRQDDIFETLTQIHTIIRNVDLVILDEPDKVYEAGKTIILSDFLMLAIKAYGAADERKKIVSRMTTGKDSKVQAFPLMLTDSNIPTGFKAVPNPNYIKGATPKMLLVEDEERMQLVRDIFNYVANGLSLGKTAEKLNMLGYRTARNKPFYEQSIRTIINDSIYNGVRYWKGMKLELPVKFISNEIWNLAHKKVQENKNYSGEAQKHYNPLKGIIKCPCGQTSMYGRTSSCITYRCLDRIKMGIKSPCTNVGIKAETLIYAVWKDVRLRTLDETYQAKSNEKIAEIEAENIKLTQSIKEKDSEIAKLQSDLKTVIDNVMASTNITIVKALNGKADSIDSQIKSIEAEKTAIDEEIASNNRRIADEIKSQSRKELDSLSLEGKGEMFRELLSKVVYYSVSLNSGFIVITYKNDLETIIAYHNRNKPFLWALPITFRFNKVKRTVIVPTLPEQPKMTSFVLERIKEKEYTFKQLQESFNLEEYKI

SEQ ID NO: 4142 - DNA, 50 bp, Phocaeicola vulgatus
  source 1..50: mol_type = genomic DNA
gggtataactttaaaaagtaaaataatgttaagttgttaaagttatacct

SEQ ID NO: 4143 - DNA, 40 bp, Phocaeicola vulgatus
  source 1..40: mol_type = genomic DNA
gggcatcaacaactgacaaaaagtagatttacactttccc

SEQ ID NO: 4144 - DNA, 40 bp, Phocaeicola vulgatus
  source 1..40: mol_type = genomic DNA
gggcatcaacaactgacaattagtagatttacactttccc

SEQ ID NO: 4145 - DNA, 50 bp, Phocaeicola vulgatus; identical to SEQ ID NO: 4120
  source 1..50: mol_type = genomic DNA

SEQ ID NO: 4146 - protein, 558 aa, Phocaeicola vulgatus
MKRVIGYIRVSTDNQDLERQRVLIRKYCENKGYSLLRIEEDYAISGTVSNRNGLNSILNITNSVADMVVVSELSRLSRQDDIFETLTQIHTIIRNVDLVILDEPDKVYEAGKTIILSDFLMLAIKAYGAADERKKIVSRMTTGKDSKVQAFPLMLTDSNIPTGFKAVPNPNYIKGATPKMLLVEDEERMQLVRDIFNYVANGLSLGKTAEKLNMLGYRTARNKPFYEQSIRTIINDSIYNGVRYWKGMKLELPVKFISDEIWNLAHKKVQENKNYSGEAQKHYNPLKGIIKCPCGQTSMYGRTSSCITYRCLDRIKMGIKSPCTNVGIKAETLIYAVWKDVRLRTLDETYQAKSNEKIAEIEAENIKLTQNIKEKDSEIAKLQSDLKTVIDNVMASTNITIVKALNGKADSIDSQIKSIETEKKAIDEEIASNNRRIADEIKSQSRKELDSLSLEGKGEMFRELLSKVVYYSVSLNSGFIVITYKNDLETIIAYHNRNKPFLWALPITFRFNKVKRTVIVPTLPEQPKMTSFVLERIKEKEYTFKQLQESFNLEEYKI

SEQ ID NO: 4147 - DNA, 50 bp, Phocaeicola vulgatus; identical to SEQ ID NO: 4117
  source 1..50: mol_type = genomic DNA

SEQ ID NO: 4148 - DNA, 40 bp, Phocaeicola vulgatus
  source 1..40: mol_type = genomic DNA
gggcatcaacaactgacaaaaagtagatttacacttgccc

SEQ ID NO: 4149 - DNA, 40 bp, Phocaeicola vulgatus
  source 1..40: mol_type = genomic DNA
gggcatcaacaactgacaattagtagatttacacttgccc

SEQ ID NO: 4150 - DNA, 50 bp, Phocaeicola vulgatus; identical to SEQ ID NO: 4120
  source 1..50: mol_type = genomic DNA

SEQ ID NO: 4151 - protein, 558 aa, Phocaeicola vulgatus; identical to SEQ ID NO: 4116

SEQ ID NO: 4152 - DNA, 50 bp, Phocaeicola vulgatus; identical to SEQ ID NO: 4127
  source 1..50: mol_type = genomic DNA

SEQ ID NO: 4153 - DNA, 40 bp, Phocaeicola vulgatus; identical to SEQ ID NO: 4143
  source 1..40: mol_type = genomic DNA

SEQ ID NO: 4154 - DNA, 40 bp, Phocaeicola vulgatus; identical to SEQ ID NO: 4144
  source 1..40: mol_type = genomic DNA

SEQ ID NO: 4155 - DNA, 50 bp, Phocaeicola vulgatus; identical to SEQ ID NO: 4120
  source 1..50: mol_type = genomic DNA

SEQ ID NO: 4156 - protein, 558 aa, Phocaeicola vulgatus
MKRVIGYIRVSTDNQDLERQRVLIGKYCENKGYSLLRIEEDYAISGTVSNRNGLNSILNITNSVADMVVVSELSRLSRQDDIFETLTQIHTIIRNVDLVILDEPDKVYEAGKTIILSDFLMLAIKAYGAADERKKIVSRMTTGKDSKVQAFPLMLTDSNIPTGFKAVPNPNYIKGATPKMLLVEDEERMQLVRDIFNYVANGLSLGKTAEKLNMLGYRTARNKPFYEQSIRTIINDSIYNGVRYWKGMKLELPVKFISDEIWNLAHKKVQENKNYSGEAQKHYNPLKGIIKCPCGQTSMYGRTSSCITYRCLDRIKMGIKSPCTNVGIKAETLIYAVWKDVRLRTLDETYQAKSNEKIAEIEAENIKLTQSIKEKDSEIAKLQSDLKTVIDNVMASTNITIVKALNGKADSIDSQIKSIEAEKKAIDEEIASNNRRIADEIKSQSRKELDSLSLEGKGEMFRELLSKVVYYSVSLNSGFIVITYKNDLETIIAYHNRNKPFLWALPITFRFNKVKRTVIVPTLPEQPKMTSFVLERIKEKEYTFKQLQESFNLEEYKI

SEQ ID NO: 4157 - DNA, 50 bp, Phocaeicola vulgatus; identical to SEQ ID NO: 4117
  source 1..50: mol_type = genomic DNA

SEQ ID NO: 4158 - DNA, 40 bp, Phocaeicola vulgatus
  source 1..40: mol_type = genomic DNA
cggcatgatgctgcggcaaaaggtggacttgcgcgttccc

SEQ ID NO: 4159 - DNA, 40 bp, Phocaeicola vulgatus
  source 1..40: mol_type = genomic DNA
cggcatgatgctgcggcaattggtggacttgcgcgttccc

SEQ ID NO: 4160 - DNA, 50 bp, Phocaeicola vulgatus; identical to SEQ ID NO: 4120
  source 1..50: mol_type = genomic DNA

SEQ ID NO: 4161 - protein, 558 aa, Phocaeicola vulgatus; identical to SEQ ID NO: 4141

SEQ ID NO: 4162 - DNA, 50 bp, Phocaeicola vulgatus; identical to SEQ ID NO: 4117
  source 1..50: mol_type = genomic DNA

SEQ ID NO: 4163 - DNA, 40 bp, Phocaeicola vulgatus; identical to SEQ ID NO: 4158
  source 1..40: mol_type = genomic DNA

SEQ ID NO: 4164 - DNA, 40 bp, Phocaeicola vulgatus; identical to SEQ ID NO: 4159
  source 1..40: mol_type = genomic DNA

SEQ ID NO: 4165 - DNA, 50 bp, Phocaeicola vulgatus; identical to SEQ ID NO: 4120
  source 1..50: mol_type = genomic DNA

SEQ ID NO: 4166 - protein, 558 aa, Phocaeicola vulgatus; identical to SEQ ID NO: 4116

SEQ ID NO: 4167 - DNA, 50 bp, Phocaeicola vulgatus; identical to SEQ ID NO: 4127
  source 1..50: mol_type = genomic DNA

SEQ ID NO: 4168 - DNA, 40 bp, Phocaeicola vulgatus; identical to SEQ ID NO: 4158
  source 1..40: mol_type = genomic DNA

SEQ ID NO: 4169 - DNA, 40 bp, Phocaeicola vulgatus; identical to SEQ ID NO: 4159
  source 1..40: mol_type = genomic DNA

SEQ ID NO: 4170 - DNA, 50 bp, Phocaeicola vulgatus; identical to SEQ ID NO: 4120
  source 1..50: mol_type = genomic DNA

SEQ ID NO: 4171 - protein, 558 aa, Phocaeicola vulgatus
MKRVIGYIRVSTDNQDLERQRVLIRKYCENKGYSLLRIEEDYAISGTVSNRNGLNSILNITNSVADMVVVSELSRLSRQDDIFETLTQIHTIIRNVDLVILDEPDKVYEAGKTIILSDFLMLAIKAYGAADERKKIVSRMTTGKDSKVQAFPLMLTDSNIPTGFKAVPNPNYIKGATPKMLLVEDEERMQLVRDIFNYVANGLSLGKTAEKLNMLGYRTARNKPFYEQSIRIIINDSIYNGVRYWKGMKLELPVKFISDEIWNLAHKKVQENKNYSGEAQKHYNPLKGIIKCPCGQTSMYGRTSSCITYRCLDRIKMGIKSPCTNVGIKAETLIYAVWKDVRLRTLDETYQAKSNEKIAEIEAENIKLTQSIKEKDSEIAKLQSDLKTVIDNVMASTNITIVKALNGKADSIDSQIKSIEAEKKAIDEEIASNNRRIADEIKSQSRKELDSLSLEGKGEMFRELLSKVVYYSVSLNSGFIVITYKNDLETIIAYHNRNKPFLWALPITFRFNKVKRTVIVPTLPEQPKMTSFVLERIKEKEYTFKQLQESFNLEEYKI

SEQ ID NO: 4172 - DNA, 50 bp, Phocaeicola vulgatus; identical to SEQ ID NO: 4117
  source 1..50: mol_type = genomic DNA

SEQ ID NO: 4173 - DNA, 40 bp, Phocaeicola vulgatus; identical to SEQ ID NO: 4158
  source 1..40: mol_type = genomic DNA

SEQ ID NO: 4174 - DNA, 40 bp, Phocaeicola vulgatus; identical to SEQ ID NO: 4159
  source 1..40: mol_type = genomic DNA

SEQ ID NO: 4175 - DNA, 50 bp, Phocaeicola vulgatus; identical to SEQ ID NO: 4120
  source 1..50: mol_type = genomic DNA

SEQ ID NO: 4176 - protein, 558 aa, Parabacteroides distasonis; identical to SEQ ID NO: 4141

SEQ ID NO: 4177 - DNA, 50 bp, Parabacteroides distasonis; identical to SEQ ID NO: 4117
  source 1..50: mol_type = genomic DNA

SEQ ID NO: 4178 - DNA, 40 bp, Parabacteroides distasonis
  source 1..40: mol_type = genomic DNA
aggcatcagcgacttgcaaaaggtagacttctgacatcct

SEQ ID NO: 4179 - DNA, 40 bp, Parabacteroides distasonis
  source 1..40: mol_type = genomic DNA
aggcatcagcgacttgcaattggtagacttctgacatcct

SEQ ID NO: 4180 - DNA, 50 bp, Parabacteroides distasonis; identical to SEQ ID NO: 4120
  source 1..50: mol_type = genomic DNA

SEQ ID NO: 4181 - protein, 474 aa, Bacillus velezensis
MSLMDENTQKNVGIYVRVSTEEQAKEGYSISAQKEKLKAYCISQGWNSYKFYIDEGKSAKDIHRPSLELMLRHIEQGIIDTVLVYRLDRLTRSVRDLYSLLDYFDKYQAVFRSATEVYDTGSATGRLFITLVAAMAQWERENLGERVKMGQVEKARQGQFSAPAPFGFTKEGESLVKNPEEGEVLLDMIDKIKKGYSLRELADYLDESDAIPKRGYKWHIASILVILKNPVLYGGFRWAGEILEGAFEGYISKKEFEQLQKMLHDRQNFKRRETSSIFIFQAKILCPNCGSRLTCERSIYFRKKDNKNVESNHYRCQACALNKKPAIGISEKKFEKALIEYMQNANFKREPKIPQEKQQDYDKLHQKIISIEKQRKKYQKAWSMELMTDQEFEQLMAETKEALQKALAKLEQNDLHPIEKPLNIERAKELAKMFRENWSVLTGEEKRQTVQELIKHIEFEKKDNKARILDIHFY

SEQ ID NO: 4182 - DNA, 50 bp, Bacillus velezensis; identical to SEQ ID NO: 2632
  source 1..50: mol_type = genomic DNA

SEQ ID NO: 4183 - DNA, 40 bp, Bacillus velezensis
  source 1..40: mol_type = genomic DNA
tttggtatttaaatataaacagacaaaatgctcctgggtt

SEQ ID NO: 4184 - DNA, 40 bp, Bacillus velezensis
  source 1..40: mol_type = genomic DNA
tttggtatttaaatataaaatgacaaaatgctcctgggtt

SEQ ID NO: 4185 - DNA, 50 bp, Bacillus velezensis
  source 1..50: mol_type = genomic DNA
agaagggttctaggagagtttaaaattgtatatttaaataacatccaaat

SEQ ID NO: 4186 - protein, 498 aa, Raoultella ornithinolytica
MKQNGQAYSYIRFSSKKQEQGDSVRRQTELAEQYAHANNLILSDKNFQDLGISAFKEGNRPSLGDMLEAIEIGQIEQGSTIIIESLDRLSRRGIDVTQQIIKSILQNNVFIASLVDGLLLNRESTNDLVSVIRIALAADLAYKESEKKSQRLRETKGQQRQRALNGEVINKILPFWLERKQNKFVFSDKFDTVKRIIELRRKGLGTNKIAKTLNNEGHKPLRSAGWNHTTVGKTINSVALYGAYQTSETTKDRKVILLDIVENYYPAVISKEEFMLLQSDQKQNKPGYKSEHNAFTGILKHECGGALVRKFHVVSGKTYQYHVCANARDGKCNVTKNFKKIEIALYQIMKELKLEKKTNIDETLLLERNSVKAKIQELNDMLISLSKIPISVIQTINNLEEKLQGLEENIKQQNSMIISEQAFDFNLLQEIKDPQELNMMLKRVIEQIIVFNIGKRWRVKVMYKNKHSQSFIWDGEKISFISDTKKLLELFKSQTEEV

SEQ ID NO: 4187 - DNA, 50 bp, Raoultella ornithinolytica
  source 1..50: mol_type = genomic DNA
tgttattcactttgaaactatattgtgatattgttgcaaagaagcaaaat

SEQ ID NO: 4188 - DNA, 40 bp, Raoultella ornithinolytica
  source 1..40: mol_type = genomic DNA
cttactgccaaactgcatggtgacgttgctggatactagc

SEQ ID NO: 4189 - DNA, 40 bp, Raoultella ornithinolytica
  source 1..40: mol_type = genomic DNA
cttactgccaaactgcatggagacgttgctggatactagc

SEQ ID NO: 4190 - DNA, 50 bp, Raoultella ornithinolytica
  source 1..50: mol_type = genomic DNA
gggaatgcaaattaaaactataatgagatactattatccccaagcaaaat

SEQ ID NO: 4191 - protein, 540 aa, Intestinimonas butyriciproducens
MKQPYNTTIYNTALYMRLSRDDENYGDSVSIETQRTILQQYAKEQGLHVVGEYVDDGWSGTNFERPDFQRMMDDVEAGKVNCIVTKDLSRFGREHVMMDYYLEFLFPEKRVRYIAVAENEDTEKGLSDFVPFKNLFNEWFAKDTSRKVKAAFKAKFATGQRIGAYAPIGYRKHPEIKNKLIIDEETRWIVEKIFDLAIHGRGAASITRILIAEKVPTPGFINFQRDGTFANIYAGAPEEKSYAWTIAQVKSIMKDETYIGHTIHYRETNISFKNKRRIRKPQSEWVRVENTQEPIISEQVFRQVQEQIANRRRKCKDGTTQIFSGLVKCADCGWSLSYGENRQNSKPYGHYHCSKYGQGTRQCSMHYIRYDVLYAYVLSRLQYWSGLVQHDEERLLKRLLNANDKGQAAARKKQAAELNKAEKRKAEVDTLFARMYEDWAAGRITEYNFSMLSGKYQSEQAELDEKIERLQSAIATESQNAADAEKWIALMKECVNPTELTAELLNTLIEKIVVHEAVKGEDGSREQEVEIFYRFIGKID

SEQ ID NO: 4192 - DNA, 50 bp, Intestinimonas butyriciproducens
  source 1..50: mol_type = genomic DNA
caatatctttaactatgtgataccggagtttcccaaagttaaagatacca

SEQ ID NO: 4193 - DNA, 40 bp, Intestinimonas butyriciproducens
  source 1..40: mol_type = genomic DNA
gctctcgaagtgggaatccggcagcgccgtccctgacgcg

SEQ ID NO: 4194 - DNA, 40 bp, Intestinimonas butyriciproducens
  source 1..40: mol_type = genomic DNA
gctctcgaagtgggaatcctgcagcgccgtccctgacgcg

SEQ ID NO: 4195 - DNA, 50 bp, Intestinimonas butyriciproducens
  source 1..50: mol_type = genomic DNA
caaaagctttgtaaaggtgatacctgaatttcctaaattataaaattaca

SEQ ID NO: 4196 - protein, 540 aa, Intestinimonas butyriciproducens; identical to SEQ ID NO: 4191

SEQ ID NO: 4197 - DNA, 50 bp, Intestinimonas butyriciproducens; identical to SEQ ID NO: 4192
  source 1..50: mol_type = genomic DNA

SEQ ID NO: 4198 - DNA, 40 bp, Intestinimonas butyriciproducens
  source 1..40: mol_type = genomic DNA
gatatcgcagtgggaatccggcgcctccaagatcagctcc

SEQ ID NO: 4199 - DNA, 40 bp, Intestinimonas butyriciproducens
  source 1..40: mol_type = genomic DNA
gatatcgcagtgggaatcctgcgcctccaagatcagctcc

SEQ ID NO: 4200 - DNA, 50 bp, Intestinimonas butyriciproducens; identical to SEQ ID NO: 4195
  source 1..50: mol_type = genomic DNA

SEQ ID NO: 4201 - protein, 524 aa, Bacillus subtilis; identical to SEQ ID NO: 656

SEQ ID NO: 4202 - DNA, 50 bp, Bacillus subtilis
  source 1..50: mol_type = genomic DNA
atacagtcaataaaaaatgacatacctactgtgtttttaaaaataagtat

SEQ ID NO: 4203 - DNA, 40 bp, Bacillus subtilis; identical to SEQ ID NO: 648
  source 1..40: mol_type = genomic DNA

SEQ ID NO: 4204 - DNA, 40 bp, Bacillus subtilis; identical to SEQ ID NO: 649
  source 1..40: mol_type = genomic DNA

SEQ ID NO: 4205 - DNA, 50 bp, Bacillus subtilis; identical to SEQ ID NO: 650
  source 1..50: mol_type = genomic DNA

SEQ ID NO: 4206 - protein, 532 aa, Clostridioides difficile
MKAAIYSRKSRFTGKGDSIENQIQLCIDYAKSIGVKDFLIYEDEGFSGSNIDRPQFKKMMQDAKDKKFSYLVCYRLDRISRNVSDFSTLIEKLNELNISFISIKEQFDTSTPMGRAMMFISSVFAQLERETIAERIKDNMYELARSGRWLGGNTPHGFNSEKITFLDENLKERSMYKLQVNDEQMEIVKLIYNKYLELRSLSKLYKYVYNNGIRGPRGGKFDPSSLSRILRNPAYVKANDEILDYLKNSGMDVVGTPDRKCGILTYAKNTSNSIAAIAKHHGVIEPEIWLEVQNQLDKNRDKTPRISTGKTALLSGLIKCGKCGSNMRITYKGKKTDKDLKYYYICGTKKTLGSDSCNCKNLNGPLVESLVIDKIKNCKEESIISAFNSNNIKTDNVFNIFKSETNLLKNQILDKERLIKNLVIELAKNTGSTASDYIVSQIESLNNEISILKDKINILESSNINISSDSINIDIIVSNLKRFNDEVDNASLDDKRLLLSTIINSIVWDSSLGNLNIVYMGAEVDNSVSLSN

SEQ ID NO: 4207 - DNA, 50 bp, Clostridioides difficile
  source 1..50: mol_type = genomic DNA
cacttttttagctatagcagaagcaggtgtataaaagtgcaactttagaa

SEQ ID NO: 4208 - DNA, 40 bp, Clostridioides difficile
  source 1..40: mol_type = genomic DNA
cacatgatattggtgaagcaataagcatatcagataaggt

SEQ ID NO: 4209 - DNA, 40 bp, Clostridioides difficile
  source 1..40: mol_type = genomic DNA
cacatgatattggtgaagcagtaagcatatcagataaggt

SEQ ID NO: 4210 - DNA, 50 bp, Clostridioides difficile
  source 1..50: mol_type = genomic DNA
gacttttcttatcatagacaaatcagatgtatataattattactttagaa

SEQ ID NO: 4211 - protein, 474 aa, Ligilactobacillus salivarius
MKVAIYTRVSTIEQAEEGYSISEQQDKLKKYCDIKDWKVARVYTDPGFSGSNTNRPSLQQLISDCKNNMFDAVLVYKLDRLSRSQKDTLYLIEDVFNKNGVGFISLSENFDTSTAFGKAMIGILSVFAQLEREQITERMTLGRVGRAKAGKAMSWANCPFGYIIQKEIYEIDPFRAEIVKRIYRDYLSGVSITKITQNLNEEGHVGKNADWVYQTVKQILKNIAYAGYIKYKGEIYPGLHKPIVSISDYKKVQAELERRRITQAQLFNPRPFRAKYMLSGLMRCGYCNSVLQIATSQLKSGILSHRYRCPSSNPHKHSTNKRHDFDCGFKFVRKNEIESVIISEIKKLPLNMDKVINSQETKDNAKKIKAIKLELQQIEKKQDKMVDLYLLDNINVDELNKKNDELSKQKENLQKRLNNLTDDKKKEKIEDFIKNAKEAKNIDKLDYEKQKVIVRNLISGIKVFNDKVEINWNI

SEQ ID NO: 4212 - DNA, 50 bp, Ligilactobacillus salivarius
  source 1..50: mol_type = genomic DNA
taaaaaaatttagagaacgccatttcaatgtcatgtcctaaattttttta

SEQ ID NO: 4213 - DNA, 40 bp, Ligilactobacillus salivarius
  source 1..40: mol_type = genomic DNA
aaataagacaattgccatttcaattaaagtaaatcccaac

SEQ ID NO: 4214 - DNA, 40 bp, Ligilactobacillus salivarius
  source 1..40: mol_type = genomic DNA
aaataagacaattgccattaaaattaaagtaaatcccaac

SEQ ID NO: 4215 - DNA, 50 bp, Ligilactobacillus salivarius
  source 1..50: mol_type = genomic DNA
aaagaaaaaagaataaaagccactaaaatgtcatgttaagtattttagta

SEQ ID NO: 4216 - protein, 514 aa, Mammaliicoccus lentus
MGDAYYYEEVAPEQEIKKVAIYARKSRAEEGEKDLANHLFRLESRCKLNDWDYTIYKEIGSGGNLSERPKMLKLLDDITKGLYEAVVVVDIDRLSRGKGADLDRILGTFRNNSVKIVQESPYEIYDLTNSNHAQVLEMKMFFGNMELMQSKKRFKEGKRLALYLGKWVNGNPPFGYELDRKTKEIVINEEEAEIFNKMKEIFFETWNTTETAWRLNSEGYKTKTGTTFTGSRVAMHLKNEFYVGTFVYNKSEGNRKNSSEMYSSGIPYRKLDKSQWKRKEDNHPALLTKEEHQKIINHFSKTGKRSTNNKNVYPLTGLCVTPTGETYTLRNDKGFGSPNKLVINKRKYEEKTAYRSVEVDLVLNTIYTSIATLKEQIALKLEDNNNEEEIKMLNKKCYALEREINKITNAIEKIQEGFIFGLYDANEAKNLKTKQEGILQTKEEELNDLNIKINKLSNTSNLKLDRLRRVENFMEDIKQNHTDEKLNEIFKSIIKDIVVSKLDDSNVDIQVNFL

SEQ ID NO: 4217 - DNA, 50 bp, Mammaliicoccus lentus
  source 1..50: mol_type = genomic DNA
aatagttttctagaacagtgtcttgatagaagttgttgtaaataatgatt

SEQ ID NO: 4218 - DNA, 40 bp, Mammaliicoccus lentus
  source 1..40: mol_type = genomic DNA
gttcgtagaccatcagcacgatagaagttgttgtgttgaa

SEQ ID NO: 4219 - DNA, 40 bp, Mammaliicoccus lentus
  source 1..40: mol_type = genomic DNA
gttcgtagaccatcagcacattagaagttgttgtgttgaa

SEQ ID NO: 4220 - DNA, 50 bp, Mammaliicoccus lentus
  source 1..50: mol_type = genomic DNA
actagttatattttaaagtgtcttatttgtttatgtcacaaataatgatt

SEQ ID NO: 4221 - protein, 485 aa, Streptococcus pyogenes
MYKIGIYMRLSKEDYEKNEESNSIKNQRQLILSYIDKNFSDFCVDNKIEYIDDGYSGMNTNRPAFERLMEDIRDLNTNCIIVKDLSRFSRDYIETGNYLENIFPFLGIRFISINDGFDSKDNCNGTIEIDTQFKSLLYDYYSKELSEKIKLTLNSLKSKGKIINEAPFGYVKDPKNKYKIIKDDISAKVVRKAFDMILEGHSQGSIAKNFNKEKYLTGSERKRVLRGESLENYKKILWTTGQISRILRNESYTGTFLYNKTYKTPIRKSIPRPKEEWGRIENAFEPIIFKEEFNKVQDILNQRSFPAHNDARDVDSPLRLKVRCGVCGHKMKFDYRAVVGKNEKKYDCRFRCRVCSLNSKSNSISSKTVESYVLESLKRRGVKLEERKTIKSKKIDQGKVNALKFEIQKNYELYLDSKLTREEFLEIKNNINEQLSSLKKESETKDKLENITMCNTCLKLTNEIVESNIKEIIVDASKNIEIVYK

SEQ ID NO: 4222 - DNA, 50 bp, Streptococcus pyogenes
  source 1..50: mol_type = genomic DNA
ataagcaataacttgacacaatagggggagaatagtataatagtgacaga

SEQ ID NO: 4223 - DNA, 40 bp, Streptococcus pyogenes
  source 1..40: mol_type = genomic DNA
ggttggaccgacaggttctggaaagaccactattatgaac

SEQ ID NO: 4224 - DNA, 40 bp, Streptococcus pyogenes
  source 1..40: mol_type = genomic DNA
ggttggaccgacaggttctttaaagaccactattatgaac

SEQ ID NO: 4225 - DNA, 50 bp, Streptococcus pyogenes
  source 1..50: mol_type = genomic DNA
atgagtaacagcaagacagaatagttggagaaaaggagggcagagacagt

SEQ ID NO: 4226 - protein, 485 aa, Anaerococcus octavius
MYKIGIYMRLSKEDYEKNEESNSIKNQRQLILSYIDKNFSDFCVDNKIEYIDDGYSGMNTNRPAFERLMEDIRDLNTNCIIVKDLSRFSRDYIETGNYLENIFPFLGVRFISINDGFDSKDNCNGTIEIDTQFKSLLYDYYSKELSEKIKLTLNSLKSKGKIINEAPFGYVKDPKNKYKIIKDDISAKVVRKAFDMILEGHSQGSIAKNFNKEKYLTGSERKRVLRGESLENYKKILWTTGQISRILRNESYTGTFLYNKTYKTPIRKSIPRPKEEWGRIENAFEPIIFKEEFNKVQDILNQRSFPAHNDARDVDSPLRLKVRCGVCGHKMKFDYRAVVGKNEKKYDCRFRCRVCSLNSKSNSISSNTVESYVLESLKRRGVKLEERKTIKSKKIDQGKVNALKFEIQKNYELYLDSKLTREEFLEIKNNINEQLSSLKKESETKDKLENITMCNTDLKLTNEIVESNIKEIIVDASKNIEVIYK

SEQ ID NO: 4227 - DNA, 50 bp, Anaerococcus octavius; identical to SEQ ID NO: 4222
  source 1..50: mol_type = genomic DNA

SEQ ID NO: 4228 - DNA, 40 bp, Anaerococcus octavius
  source 1..40: mol_type = genomic DNA
ttcaggacccacaggttcaggtaaatctacttctctctac

SEQ ID NO: 4229 - DNA, 40 bp, Anaerococcus octavius
  source 1..40: mol_type = genomic DNA
ttcaggacccacaggttcatttaaatctacttctctctac

SEQ ID NO: 4230 - DNA, 50 bp, Anaerococcus octavius; identical to SEQ ID NO: 4225
  source 1..50: mol_type = genomic DNA

SEQ ID NO: 4231 - protein, 530 aa, Paeniclostridium sordellii
MIAAIYSRKSKFTGKGESIENQIQLCMDYAKNLGINEFLVYEDEGFSGKSMDRPKFKEMLKDAKDKKFDYLICYRLDRISRNVSDFSTLIEDLNKLNISFVSIKEQFDTSTPMGRAMMYISSVFAQLERETIAERVRDNMYELARTGRWLGGMPPYGFISTQINYYDENMNQRKMYKLKVDEDTIEIVKLIFDKYLELRSLSKLYKYMYENGIKGTRGGNLDPSALSLILKNPAYVKADKNVVDYLRKSNIDVMGDIDNIHGILTYAKNTDSPIAAVAKHKGVIDSDKWIEAQRLLNANKAKAPRAGTGSKALLSGLLKCSKCGSNMRITYKNSKSGTIYYYICGTKKSLGVSACDCRNIRSDKAESKVIDELKNKNIKSIMSSYKDSKLENAKDRKNIKTEINSINNQIKEKEIYIDNLVMQLAKVTESSASTFIINKLESLNNDLSNLKSQLESLNTMSRENKQVDININMLIDNLNKFNKEIDTSDINKKRLLLSTVVDYMTWDSDTDTIKVNLIGINSDNTIASGK

SEQ ID NO: 4232 - DNA, 50 bp, Paeniclostridium sordellii
  source 1..50: mol_type = genomic DNA
ataggaactttaatacatttatctgaagatatatgtattaaaatataact

SEQ ID NO: 4233 - DNA, 40 bp, Paeniclostridium sordellii
  source 1..40: mol_type = genomic DNA
agttacccatgatatatcagaagctatttctatgtcagat

SEQ ID NO: 4234 - DNA, 40 bp, Paeniclostridium sordellii
  source 1..40: mol_type = genomic DNA
agttacccatgatatatcaatagctatttctatgtcagat

SEQ ID NO: 4235 - DNA, 50 bp, Paeniclostridium sordellii
  source 1..50: mol_type = genomic DNA
atatgaacttagagccatttatatatatacatatatatgtatatataaca

SEQ ID NO: 4236 - protein, 599 aa, Bacillus pumilus
MKAALYYRVSTPGQATEDKYSLRSQKEELTKYAASQGWTVVGEFQDVGSGGKLEKKGLNQLLDFVEEGNCEVVLCIDQDRLSRLDSLGWEFLKSTLRENRVKIAEPGFITDLDNEDDEFISDLKNLIARREKKKIVLKMMRGKRQRTREGKGWGKTYWEYNYDKATGTYSINEDWAWVIPFIDKLYTEKNYSYREIAIELNKISLTPTGKEWNIVLVSTRLRSKAFHGVLEKNFKNEGAIRAEKLVYPPLRTLETYEKICKIRKEKFKRKKVEYHHFLRKVNFKCAECQKKLSVVHSKNSYETEGYFYLAHNRHYDCRVSINSIRFDKNITKAIKEILKSESMAKKYVKIDHTQKDLEDMEKQVKAERKNLTKVSEKKDLLLPLYLEGKFPKEQLDKQYTMLESQEEHHKKQVRSLEEKLHLIKSKMFNYNLITSYLSVAERFESLLTVKEQTEMISTLFPKGVVYENEILLEGFLSDNIPIEIAIPIDPDPFNVKNKWDRDPLGRYNRIQAYMNEHPNLTQKQIAEALDMAPSTIVRLRNKFGEYKNYTKVINHDPKGKAEILKEYYSKNPGASLRKTARDTGISTTTISRINKDYGL

SEQ ID NO: 4237 - DNA, 50 bp, Bacillus pumilus
  source 1..50: mol_type = genomic DNA
cttttgtttgaatacatatttattttaatttacatgtatacaaaacaaaa

SEQ ID NO: 4238 - DNA, 40 bp, Bacillus pumilus
  source 1..40: mol_type = genomic DNA
accggtacttagtcggatttttttaaaaatcgtcggcatt

SEQ ID NO: 4239 - DNA, 40 bp, Bacillus pumilus; identical to SEQ ID NO: 4238
  source 1..40: mol_type = genomic DNA

SEQ ID NO: 4240 - DNA, 50 bp, Bacillus pumilus
  source 1..50: mol_type = genomic DNA
attttattttattttatatttattttattttacatcatatttacataaaa

SEQ ID NO: 4241 - protein, 524 aa, Bacillus halotolerans
MIKKLENIQHVAIYLRISQEKKGENVETLENHRQILMEFCKENGYTFEEYGEVISGGKSEIDQRVALKRLLENIEKYDAIVCFELTRISRNGLISQTVKQYCVDYDKPILTPYQSYDLANSETDRLLFDVGSMISSHEHSTIGKRSKANKMQMSKAGLHVSGNVPFGYKRNNETKKLEIDEDSAATIRYIFELHSEGLGSFKIRDILNNEGYKSATGKAFNLPAIKRIIRNPAYKGTLVFNNRKKIKRNGKFEYDNIETITVENAHPAIIPPDVWEKANKDRKERAMRSERFREKPVSKSRTTLLKDLVFCGVCGRKMVIRKEHRNNEEYTIKRCEYLLPNGEKCPNSGKSLNVVAAKVLHGLLQFSEEMGKTEQELKNKNVDELHNRNQNKLKQIEKAIAENNQKQKNLIELAMDGLFSHDEIREKKQELVNELENLNIRKKEVLENINSVSIEDEIQTLRERRELIMDIINIDNEEQGNELLKQFVKKIYFTRVIPKDLLLKSTRNVERREYPFEVQIEFYD

SEQ ID NO: 4242 - DNA, 50 bp, Bacillus halotolerans
  source 1..50: mol_type = genomic DNA
atacatacaataaaaaacaacgtaccaactgtgttttttattgtatgtat

SEQ ID NO: 4243 - DNA, 40 bp, Bacillus halotolerans
  source 1..40: mol_type = genomic DNA
tacttcaggctacgcggtaccaacctttgtcgttgacgca

SEQ ID NO: 4244 - DNA, 40 bp, Bacillus halotolerans; identical to SEQ ID NO: 4243
  source 1..40: mol_type = genomic DNA

SEQ ID NO: 4245 - DNA, 50 bp, Bacillus halotolerans
  source 1..50: mol_type = genomic DNA
atacataaaaatctaaaaaatgtaccaagtgtgtgtgtatatatatatag

SEQ ID NO: 4246 - protein, 531 aa, Vibrio parahaemolyticus
MAIAYSYIRFSSSQQSQGDSLRRQTQLAEKYCIENNLTLSDTTFRDLGVSAFHSTNSQEDSGLGQFLSALNQGRISEGSYLLVESLDRLSRAKVQTALRQMLNIIELGVKIVTLMDNRIYDQESDTTDLIISLTIMERAHNESKTKSERIKAAWVHKRQNPTTTNRHSSTPFWLSLNADKKTYKLKEKYVEIVRKIYQLSIDGWGVIKIVRHLNESNIKAPKGGSWATTTVSRVLTSKAVLGHYEPMQNRKSLNLTIEDYYPSIIDEATYYLSRQRQNERSKPEAAGRKTNYPNPLSQIAKCKLCGSSMYYENKSKSLKYLTCREFKKGSCTNKPIRIELIYRFIYEVFNSPMYYQYQAKLVEKSNKKDNNKLEELEAKKTEQENALRGLLSMSNDFSNTIIQEEIKVRSERIESFKNHIENVKAEQAVEHTRSTHINFTEALQLAVNAFRFPLEKVQVEELSCEELFNTRVRLNRILKHAFNSLSIYHCGESERITIETEVMEGFSEGLKYETTRQSIKEPLSSRVWSVR

SEQ ID NO: 4247 - DNA, 50 bp, Vibrio parahaemolyticus
  source 1..50: mol_type = genomic DNA
taaaggttaatattgccatcaattactcttgttggtattatttacctttg

SEQ ID NO: 4248 - DNA, 40 bp, Vibrio parahaemolyticus
  source 1..40: mol_type = genomic DNA
taatggcatgcccggctttactctcgttgggttgccggag

SEQ ID NO: 4249 - DNA, 40 bp, Vibrio parahaemolyticus
  source 1..40: mol_type = genomic DNA
taatggcatgcccggctttagtctcgttgggttgccggag

SEQ ID NO: 4250 - DNA, 50 bp, Vibrio parahaemolyticus
  source 1..50: mol_type = genomic DNA
tcaaggttaaaatgaccagcaataagtcatgttgatatcatatacttttg

SEQ ID NO: 4251 - protein, 499 aa, Bacillus cereus
MEFVAIYMRLSRDSTQNGIEESLENHRLALTRICKTNGWKHDIYEEIASGVSPEREQLNLLLSRLNDYTAILTMDVDRIGRDPEHNEKVLKMLILNGIKIITPSGEYDFANENSQMLYRMQSMLSSFEYSAIRKRLGRGKFLEASKGNWVMNNIPLGYLKNPETKRLEIDENESKIIRYIFEKTIEGYSVNKISQDLDAFGWRSKKGKVLSTAHISQMRRNPLYYGVVRYERKNELGRVLEDCWVEDAHPGIVTKEEFLRCQELIKNNNNKKFKTHGKVKHILQGLIYCAKCGRKRYICVDRKDVPYIKADGAKIENVRCSDAGMALKPITDAVIEDVKKLKPELEEEIIKLKKRDITKSEKEISNKLIETESNKDKLNKKKKNLVEMRMNGEITKDEFLQFKDGLEEQIRHTDDMIQLLQIKLNNLRNTEDEVKKLEKVIWTIDNLDNLSVEKINSFLRSIIKKVLFSRNIESNPNTTKRDDVEPTVDIEWIEGIPIL

SEQ ID NO: 4252 - DNA, 50 bp, Bacillus cereus
  source 1..50: mol_type = genomic DNA
gtgtagtaaaaaataaatttcacaaaagtgaagttttatttttactacat

SEQ ID NO: 4253 - DNA, 40 bp, Bacillus cereus
  source 1..40: mol_type = genomic DNA
aaccgttgggaaaatcacaaatatgaaggttttagatgga

SEQ ID NO: 4254 - DNA, 40 bp, Bacillus cereus
  source 1..40: mol_type = genomic DNA
aaccgttgggaaaatcacaagtatgaaggttttagatgga

SEQ ID NO: 4255 - DNA, 50 bp, Bacillus cereus
  source 1..50: mol_type = genomic DNA
gtgtagaaattaaaataattctcaagaatgacttttaaaaattacaacat

SEQ ID NO: 4256 - protein, 499 aa, Bacillus wiedmannii
MEFVAIYMRLSRDSTQNGIEESLENHRLALTRICKTNGWKYDIYEEIASGVFPEREQLNLLLSRLNDYTAILTMDVDRIGRDPEHNEKVLKMLILNGIKIITPSGEYDFANENSQMLYRMQSMLSSFEYSAIRKRLGRGKFLEASKGHWVMNNIPLGYLKNPETKRLEIDENEAEIIRYIFEKTIEGYSVNKISQDLDAFGWRSKKGKVLSTAHISQMRRNPLYYGVVRYERKNELGRVLENCWVEDAHPGIVTKEEFLRCQEIIKNNNNKKFKTHGKVKHILQGLIYCAKCGRKRYICVDRNGTPYIKADGAKIENVRCSDAGMALKPVTDAVIEDIKNLKSDLEEEIIKLKKRDTTKLEKEISNKLIETESNKDKLNKKKKNLVEMRMNGEITKDEFLQFKDGLEKQIRHTDDMIQLLQMKLNNLSYTEDEVKKLEKVIWTIDNLDNLSVEKINSFLRSIIKKVLFSRNIESNPNTVKREKVEPTVDIDWIERIPMR

SEQ ID NO: 4257 - DNA, 50 bp, Bacillus wiedmannii
  source 1..50: mol_type = genomic DNA
gtgtagtaaaaataaaatttcacaaaagtgaagttttatttttactacat

SEQ ID NO: 4258 - DNA, 40 bp, Bacillus wiedmannii
  source 1..40: mol_type = genomic DNA
aaccgttggtaaaatcacaaatatgaaggttttagatgga

SEQ ID NO: 4259 - DNA, 40 bp, Bacillus wiedmannii
  source 1..40: mol_type = genomic DNA
aaccgttggtaaaatcacaagtatgaaggttttagatgga

SEQ ID NO: 4260 - DNA, 50 bp, Bacillus wiedmannii; identical to SEQ ID NO: 4255
  source 1..50: mol_type = genomic DNA

SEQ ID NO: 4261 - protein, 474 aa, Latilactobacillus curvatus
MKVGIYVRVSTLEQATEGYSIQEQTDKLKKFCDVKEWTVSEVYTDPGFSGSSLKRPGMQKLINDVEQQKIDAVLVYKLDRLSRSQKDTLYLIEDIFLKYNVHFVSLNENFDTSTPFGRASIGMMSVFAQLEREQITERMQMGKVGRAKAGYFHGGGTIPHGYDYNDGELIPNEKEGKIVNYIFDQYLDGWGVQSIAKHLNAKHISGKRSAKWSHKVVNEVLGNNLYIGKITWKNEIYDGTHAPIIDEDKFYRVQELMAKRKSTAAKNNQRPFKAKYMLTGITYCGVCGARMFTLQSYSSKQHKYIRKYGCYSQSTVQHMVKDPNCDNDKYDGPELETYVLQRVKKLSMNPKTIKRITNQTTSIVSTDGTKTQIKETEEQIERLLDLYQNGAITFAKIESRLDDLNAKKSNLEEQLKRLESEKLNNGSTTDVLDLLSTASDVVDSKDYDAQKRLIHALIQKITLKRDKVTIKWTF

SEQ ID NO: 4262 - DNA, 50 bp, Latilactobacillus curvatus
  source 1..50: mol_type = genomic DNA
taaaaatatttatgtacgaccatttcaatggcagttcactaatattttta

SEQ ID NO: 4263 - DNA, 40 bp, Latilactobacillus curvatus
  source 1..40: mol_type = genomic DNA
agctagcacaacgaccatttcgatcaatgtaaatgcattt

SEQ ID NO: 4264 - DNA, 40 bp, Latilactobacillus curvatus
  source 1..40: mol_type = genomic DNA
agctagcacaacgaccattatgatcaatgtaaatgcattt

SEQ ID NO: 4265 - DNA, 50 bp, Latilactobacillus curvatus
  source 1..50: mol_type = genomic DNA
taagaacatctaatttcaaacattataatggctgtcatcaaatatttttg

SEQ ID NO: 4266 - protein, 620 aa, Lacinutrix venerupis
MLGIYCRTSKNRAEKYTIENQREGGIKCAIELGLEYIIYIDDGISGTLDESVRDGLSDLFRDIRKNKITHIYCIDQSRIERDTRTWDFFVAECLNKEIKYYPNGSFFALDNPTNRMFASLMSVVNAYYAEITSKKVRLANARKAKEGKTHGIKPYGYTKGINNEYKIEENEAVHVKRMFKLSLDGIGAYTIANILNEEGIPTKFSKNFKGKIKRKDEYTGAITYHDKSTIKWRGNVISDILRNKIYKGIREWNRNEDKIENINGKPVKTKVKVELITSKVPHIIEPELWDKVQANLSVNKKNVGKKSQYNYLLNGLVKCHHCERLFVGKRRKGSRDNSYKCKGKVYPNSNCDKSRSININKLDTFIIKHLFISKSLKGHLDSLPKTESKHDRLKIKLDEEKSILKKIEKKLDKGYKLLFNEDSGFKDDEVVQSNVLKLKNKKKEKSEVVTKLEQELLLAESSFRDSRTERLLSEYTDESTFDDIKRIIHSLIDYIKIEHHKEEGKMGTFLLNIKYKGYDEVISFMTNWHANKWYWISKYRKGANTPQELEDDREMDKALLKQFGMNKDDIELTGFQKESGLTDDEIAKMNPFSSKYEGAETKEFIYDLIELKTEEIIDFN

SEQ ID NO: 4267 - DNA, 50 bp, Lacinutrix venerupis
  source 1..50: mol_type = genomic DNA
gatacacaaattacccgtatttatatgtaaatacaggtaatttgtgtgtt

SEQ ID NO: 4268 - DNA, 40 bp, Lacinutrix venerupis
  source 1..40: mol_type = genomic DNA
tgcagcaaaaagaattaacatgtttttacgctggatggta

SEQ ID NO: 4269 - DNA, 40 bp, Lacinutrix venerupis
  source 1..40: mol_type = genomic DNA
tgcagcaaaaagaattaactagtttttacgctggatggta

SEQ ID NO: 4270 - DNA, 50 bp, Lacinutrix venerupis
  source 1..50: mol_type = genomic DNA
taaatacagatgttctgtatttaatagtaaatacagatgttctgtatgtt

SEQ ID NO: 4271 - protein, 599 aa, Pseudomonas corrugata
MLSKPKAYSYVRFSTPEQARGDSRRRQYKKAIEYADKHGLELVKDSEYAFLDAGISAYRGNNITRITSSLGQFYEFVRSGKISAGSYLLVESLDRLSRDQVTEALPRFLELLNAGIIVVTFGDGTVYKKSTNVMQLVMSIFHMARAHEESAVKGSRVSDAWQNKQALARSERRPLGGACPQWLSFDGEAYRVIPERVLIVRRVFELTVQGYGQRAIVKMFNEEGVPAFGTTKRNKSGLWGNSSVAKILSNRSVLGEYQPNIWTDGKRRASGDPIMDYYPPVVDEELFYAALEGRKARDVTKATKPSINFNLWSKIAVCAYCQSPMHLVDKGKPPKGSKYLRCSKSARGACTNKLIRLERSEVVFKEMLAKLNMAALIKNDLRSLRGRVSELDGRMEEMRAKLNECSGLLMVHPSKTLAETIQRIETEMAEMQKSREQCMFDMSSEHVLDKSNFFERLDLVSYEGRYLANRQVQRLEVMVRMKHDEIRVQYNVMVAGLPKFVYMCDHGKDIVFVPFSMDMLKTSIRQDDMHATGLIFNHVKMLEAAMAGEDMAEFRGNLPENAVGMTFNFSNADNERAKKSMREWFDRTMNEEKKPRTTK

SEQ ID NO: 4272 - DNA, 50 bp, Pseudomonas corrugata
  source 1..50: mol_type = genomic DNA
gttttgttacacatagttaacaggttgtggtacattacacccatcaatac

SEQ ID NO: 4273 - DNA, 40 bp, Pseudomonas corrugata
  source 1..40: mol_type = genomic DNA
tggtccgctgaatagcaagttgtgcgctccggcggcagcg

SEQ ID NO: 4274 - DNA, 40 bp, Pseudomonas corrugata
  source 1..40: mol_type = genomic DNA
tggtccgctgaatagcaagtagtgcgctccggcggcagcg

SEQ ID NO: 4275 - DNA, 50 bp, Pseudomonas corrugata
  source 1..50: mol_type = genomic DNA
gttttgttagagggaagatacaggtagtgatacgttcaacaaatcaatag

SEQ ID NO: 4276 - protein, 629 aa, Cronobacter malonaticus
MKKCFIYHRVSSDLQLSGTGIERQEQNLNAYVERINLLAEMDDPEATIISDQGVSAFKGLNMSEGELGRWMDQVRAGMWDDSHLVLESIDRFSRQNPFQVVGYLAELDRHNITIHDVSLNMLINRGNSAMLPIVAMSAQRAYEESKIKSDRIRDGWRRKREQAFKQGTIVTNKRPQWIDIVEDKYELNDKVAIVREIFRLYQTGIGTPTIAKMLNERGSEWLFESGRLWRGESIHKLLRNKRVTGSIFISEIIRDYSSTSNPVDQKRYEMDVYPIAISKEEFNLVQELLKSRRPGAKVTGGKVLKKFYDPITNKPYLDRDGNVIELEVDTGKEIIQSNIFNGICRCARCGEAMYHNVVVAKRDSKKKGKFTEEYRYIRCIAERDGLCDNKALQYEVVEQFVIEHIKNLDFTQILKPNEINPEIELVRLKIEEEEAHIEDYKLNIERIRNTGKKIPFAVLVELEESEDRLKELKERQTTFTEVQVDTDYLKMVDPSVLFDVKNIEVRARMSAELSKILDSIQLYRTGKHYVITINYKKVEVLKHVLFVEAKKEPVLVSGVAIERFGDTVAYCTPSFSIVVEGVTSPRLINIEGEPLSIIDYSLLLNYVDAVDPNDAVGVWMRNQFNTLTA

SEQ ID NO: 4277 - DNA, 50 bp, Cronobacter malonaticus
  source 1..50: mol_type = genomic DNA
tttgtttacgttagccgttattcaaatgtatgatgtgttctacaaacaaa

SEQ ID NO: 4278 - DNA, 40 bp, Cronobacter malonaticus
  source 1..40: mol_type = genomic DNA
tccgcttgataatcatacaaataagtgccattacaacaaa

SEQ ID NO: 4279 - DNA, 40 bp, Cronobacter malonaticus
  source 1..40: mol_type = genomic DNA
tccgcttgataatcatacatataagtgccattacaacaaa

SEQ ID NO: 4280 - DNA, 50 bp, Cronobacter malonaticus
  source 1..50: mol_type = genomic DNA
tttatttacgaattcctttattaatatgtatcttgtgtggtggaaaaaaa

SEQ ID NO: 4281 - protein, 629 aa, Escherichia coli
MKKCFIYHRVSSDLQLSGTGIERQEQNLNAYVERINLLAEMDDPEATIISDQGVSAFKGLNMSEGELGRWMDQVRAGMWDDSHLVLESIDRFSRQNPFQVVGYLAELDRHNITIHDVSLNMLINRGNSAMLPIVAMSAQRAYEESKIKSDRIRDGWRRKREQAFNQGTIVTNKRPQWIDIVEDKYELNDKVAIVREIFRLYQTGIGTPTIAKMLNERGSEWLFESGRLWRGESIHKLLRNKRVTGSIFISEIIRDYSSTSNPVDQKRYEKDVYPIAISKEEFNLVQELLKSRRPGAKVTGGKVLKKFYDPITNKPYLDRDGNVIELEVDTGKEIIQSNIFNGICRCARCGEAMYHNVVVAKRDSKKKGKFTEEYRYIRCIAERDGLCDNKALQYEVVEQFVIEHIKNLDFTQILKPNEINPEIELVRLKIEEEEAHIEDYKLNIERIRNTGKKIPFAVLVELEESEDRLKELKERQTTFTEVQVDTDYLKMVDPSILFDVKNIEVRARMAAELSKILDSIQLYRTGKHYVITINYKKVEILKHVLFVEAKKEPVLVSGVAIERFGDTVAYCTPSFSIVVEGVTSPRLINIEGEPLSIIDYSLLLNYVDAVDPNDAVGVWMRNQFNTLTA

SEQ ID NO: 4282 - DNA, 50 bp, Escherichia coli
  source 1..50: mol_type = genomic DNA
tttgtttacattagccgttattcaaatgtatgatgtgttctacaaacaaa

SEQ ID NO: 4283 - DNA, 40 bp, Escherichia coli
  source 1..40: mol_type = genomic DNA
tttgcatgataatcatacaaataggtgccattacagcaaa

SEQ ID NO: 4284 - DNA, 40 bp, Escherichia coli
  source 1..40: mol_type = genomic DNA
tttgcatgataatcatacatataggtgccattacagcaaa

SEQ ID NO: 4285 - DNA, 50 bp, Escherichia coli; identical to SEQ ID NO: 4280
  source 1..50: mol_type = genomic DNA

SEQ ID NO: 4286 - protein, 555 aa, Pseudomonas weihenstephanensis
MPTAYSYIRFSSDQQQHGASLARQEDMVGKWLVAHPEYQRSTQRFEDLGISGFKGKHLDNAFGRLRAAVESGVIKPGDCILIEAIDRAGRLAPSIMLNLLTEIVNVGVSLVSLDDGIVYDSNPANSNNLFLLVAKVQQAHQYSDALSRRVKDAYARKRENASKGEFTERRTPLWLENTGTEVRLVEDVALFIVQIFQDYADGIGERRILARIRGQHPLLETLNPTTIKKWLKNPTAIGRWQPWPVDGVEQAPIEDVYPAVVSRELWYRVQKRLAAGAKIKSASKVYLLSGLVKCGRCGKNFGVVNTKRSPAVMLCMGRHRLGEAGCTNSRSIPYAVLDFIRSQTQQSAMLRATASQKLTVGERRQIEIDGELTELHKQESNAVALLVKYGEVASITAELEKVMGSIKKLEQERAFLNVAPSQDTLSDMVDMENILMDDDQQRLNALLQGAGYSIVCEGATITVGEEHLLTGGIHQVYEYKGSHRPTETYRLIENSHTEHHLDMPNSKRVAAESAAFLEQEARYESGELVQQHLQWNGEAFVDVTTGLVVDGVTSS

SEQ ID NO: 4287 - DNA, 50 bp, Pseudomonas weihenstephanensis
  source 1..50: mol_type = genomic DNA
catccccacattgccgactctttcgggatgaagtatgcaatgttatgatt

SEQ ID NO: 4288 - DNA, 40 bp, Pseudomonas weihenstephanensis
  source 1..40: mol_type = genomic DNA
aatcaacacacccatcagcggtgtggtggcattgaaaatg

SEQ ID NO: 4289 - DNA, 40 bp, Pseudomonas weihenstephanensis
  source 1..40: mol_type = genomic DNA
aatcaacacacccatcagctatgtggtggcattgaaaatg

SEQ ID NO: 4290 - DNA, 50 bp, Pseudomonas weihenstephanensis
  source 1..50: mol_type = genomic DNA
catcaacacacggccacctttttctagatgaagtatcccatcatttgatt

SEQ ID NO: 4291 - protein, 555 aa, Pseudomonas fragi
MPTAYSYIRFSSDQQQHGASLARQEDMVGKWLVAHPEYRRSTQRFEDLGISGFKGKHLDNAFGRLRAAVESGVIEPGDCILIEAIDRAGRLAPSIMLNLLTEIVNVGVSLVSLDDGIVYDSNPANSNNLFLLVAKVQQAHQYSDALSRRVRDAYARKRENASKGEFTERRTPLWLENTGTKVRLVEDIAPFIVQIFQDYADGIGERRILARIRGQHPLLETLNPTTIKKWLKNPTAIGRWQPWPVDGVEQAPIEDVYPAVVSRELWYRVQKRLAAGAKIKSASKVYLLSGLVKCGRCGKNFGVVNTKRSPAVMLCMGRHRLGEAGCTNSRSIPYAVLDFIRSRTMQSAMLRATASQKLTVGERRQIEIDGELTELHKQESNAVALLVKYGEVASITAELDKVMGSIKKLEQERAFLNVVPSQDTLSDMVDMENILMDDDQQRLNALLQGAGYSIVCEGPTITVGEEHLLTGGVHQVYEYRGSHRPTETYRLIENSHTEHHLDMPNSKRVAAESAALLEQEARYESGELVRQHLQWNGEAFVDVTTGLVVEGVTGS

SEQ ID NO: 4292 - DNA, 50 bp, Pseudomonas fragi; identical to SEQ ID NO: 4287
  source 1..50: mol_type = genomic DNA

SEQ ID NO: 4293 - DNA, 40 bp, Pseudomonas fragi
  source 1..40: mol_type = genomic DNA
tatcaacacgcccatcaatggcgtggtcgcgttgaaaatt

SEQ ID NO: 4294 - DNA, 40 bp, Pseudomonas fragi
  source 1..40: mol_type = genomic DNA
tatcaacacgcccatcaattacgtggtcgcgttgaaaatt

SEQ ID NO: 4295 - DNA, 50 bp, Pseudomonas fragi; identical to SEQ ID NO: 4290
  source 1..50: mol_type = genomic DNA

SEQ ID NO: 4296 - protein, 555 aa, Pseudomonas fragi; identical to SEQ ID NO: 4286

SEQ ID NO: 4297 - DNA, 50 bp, Pseudomonas fragi; identical to SEQ ID NO: 4287
  source 1..50: mol_type = genomic DNA

SEQ ID NO: 4298 - DNA, 40 bp, Pseudomonas fragi
  source 1..40: mol_type = genomic DNA
gatcaacacgcccatcaacggcgtggtggcgttgaaaatg

SEQ ID NO: 4299 - DNA, 40 bp, Pseudomonas fragi
  source 1..40: mol_type = genomic DNA
gatcaacacgcccatcaactacgtggtggcgttgaaaatg

SEQ ID NO: 4300 - DNA, 50 bp, Pseudomonas fragi; identical to SEQ ID NO: 4290
  source 1..50: mol_type = genomic DNA

SEQ ID NO: 4301 - protein, 560 aa, Pseudomonas fragi
MPTAYSYIRFSSDQQQHGASLARQEDMVGKWLVAHPEYQRSTQRFEDLGISGFKGKHLDNAFGRLRAAVESGVIEPGDCILIEAIDRAGRLAPSIMLNLLTEIVNVGVSLVSLDDGIVYDSNPANSNNLFLLVAKVQQAHQYSDALSRRVKDAYARKRENASKGEFTERRTPLWLENTGTEVRLVEAVAPFIAQIFQDYADGIGERRILARIRGQHPLLETLNPTTIKKWLKNPTAIGRWQPWPVDGVEQAPIEDVYPAVVSRELWYRVQKRLAAGAKIKSASKVYLLSGLVKCGRCGKNFGVVNTKRSPAVMLCMGRHRLGEAGCTNSRSIPYAVLDFIRSQTQQSAMLRATASQKLTVGERRQIEIDGELTELHKQESNAVALLVKYGEVASITAELEKVMGSIKKLEQEQAFLNVAPSQDTLSDMVDLEWTLFDDVEHGGDPQRLNALLQGAGYSIVCEGATITVGEEHLLTGGIHQVYEYKGSHRPTETYRLIENSHTEHHLDMPNSKRVAAESAAFLEQEARYESGELVQQHLQWNGEAFIDVATGLRVEGVAGS

SEQ ID NO: 4302 - DNA, 50 bp, Pseudomonas fragi; identical to SEQ ID NO: 4287
  source 1..50: mol_type = genomic DNA

SEQ ID NO: 4303 - DNA, 40 bp, Pseudomonas fragi
  source 1..40: mol_type = genomic DNA
gatcaatacgcccatcaacggtgtggtggcgttgaaaatc

SEQ ID NO: 4304 - DNA, 40 bp, Pseudomonas fragi
  source 1..40: mol_type = genomic DNA
gatcaatacgcccatcaactatgtggtggcgttgaaaatc

SEQ ID NO: 4305 - DNA, 50 bp, Pseudomonas fragi; identical to SEQ ID NO: 4290
  source 1..50: mol_type = genomic DNA

SEQ ID NO: 4306 - protein, 577 aa, Bacteroides thetaiotaomicron
MKKAAIYLRVSTTDQNYDRQEVELRTFAKMMDFEIIHVFEEKKSAVLKMDIREQLSEMRKLTKDDVDRIFIWDITRLSRRAIDFINLVNEFAEKGICLHFKERNIITLGDDGKLDALTGMYLYLLGVFAQMDAENRKAMMKSGKENALLKGHSYTNIAPFGYYLENKHLYIKEEEAKYVKQAFELYRDGKDTQYIADIFNANRVPLKSRRKDIVWVKGTISQLLKNTVYYGKGKLENIIKKKTEESPVEKKIRYFDAPAIIGKELYDECRNRAILNRSQQDKSKEIITLLRGLLVCGVCGKFYVIGNNNKQREYRDGDIRANVNNRVYCKNGSIKAEIADFIVWEAVKDVYTYNTFKEKCLEEKEKCKLELFQNETTILELQKDIANIIAQINRLGTAYLKELFSDEEFAEQKSSLISEKLRLEGIINEYKAKNLLLNDIIVADYDFSKYLIRDLSLGEKKEVCNQLIETILIYNYGTNRRLLHVKLKIGLRYNILVCTVSANKSYCIVDDATVTFNNPFKAPEIVRDLVNDFSVTSNNNNLFNEEIFGEYSYEDVWNIMDKYGYVKKLSSTKMVNN

SEQ ID NO: 4307 - DNA, 50 bp, Bacteroides thetaiotaomicron
  source 1..50: mol_type = genomic DNA
aaatgtacaatagtaattgagttttttctttcaattactattgtacattt

SEQ ID NO: 4308 - DNA, 40 bp, Bacteroides thetaiotaomicron
  source 1..40: mol_type = genomic DNA
atagtcgcacttactctttttcctttctatatgggcattt

SEQ ID NO: 4309 - DNA, 40 bp, Bacteroides thetaiotaomicron
  source 1..40: mol_type = genomic DNA
atagtcgcacttactctttaccctttctatatgggcattt

SEQ ID NO: 4310 - DNA, 50 bp, Bacteroides thetaiotaomicron
  source 1..50: mol_type = genomic DNA
aaatatatattttttattgattctacgctttcaagttgaggtatacattt

SEQ ID NO: 4311 - protein, 577 aa, Bacteroides thetaiotaomicron
MKKAAIYLRVSTTDQNYDRQEVELRTFAKMMDFEIIHVFEEKKSAVLKMDIREQLSEMRKLTKDDVDRIFIWDITRLSRRAIDFINLVNEFAEKGICLHFKERNIITLGDDGKLDALTGMYLYLLGVFAQMDAENRKAMMKSGKENALLKGHSYTNIAPFGYYLENKHLYIKEEEAKYVKQAFELYRDGKDTQYIADIFNANRVPLKSRRKDIVWVKGTISQLLKNTVYYGKGKLENIIKKKTEESPVEKKIRYFDAPAIIGKELYDECRNRAILNRSQQDKSKEIITLLRGLLVCGVCGKFYVIGNNNKQREYRDGDIRANVNNRVYCKNGSIKAEIADFIVWEAVKDVYTYNTFKEKCLEEKEKCKLELFQNETTILELQKDIANIIAQINRLGTAYLKELFSDEEFAEQKSSLISEKLRLEGIINEYKAKNLLLNDIIVADYDFSKYLIRDLSLGEKKEVCNQLIETILIYNYGTNRRLLHVKLKIGLRYNILVCTVSANKSYCIVDDATVTFNNPFKAPEIVRDLVNDFSVTSNNNNLFNEEIFGEYSYEDVWNIMDKYGYVKKLLSTKMVNN

SEQ ID NO: 4312 - DNA, 50 bp, Bacteroides thetaiotaomicron; identical to SEQ ID NO: 4307
  source 1..50: mol_type = genomic DNA

SEQ ID NO: 4313 - DNA, 40 bp, Bacteroides thetaiotaomicron; identical to SEQ ID NO: 4308
  source 1..40: mol_type = genomic DNA

SEQ ID NO: 4314 - DNA, 40 bp, Bacteroides thetaiotaomicron; identical to SEQ ID NO: 4309
  source 1..40: mol_type = genomic DNA

SEQ ID NO: 4315 - DNA, 50 bp, Bacteroides thetaiotaomicron; identical to SEQ ID NO: 4310
  source 1..50: mol_type = genomic DNA

SEQ ID NO: 4316 - protein, 532 aa, Pseudomonas helleri
MTNVNPLPRAFSEVFQGEDTINVYSYIRFSSKSQKLGFSEMRQLEQLNRFFEQYPQSRQVERYEDLGVSAFKGKNLKSGQLAKFVERIKSKEILPNALLLVESFDRISRVGGYDALELIISIIQADCSIYTLFDNRLYSRRKKDSSADISLIQNILERANDESRSKSERISDAKARNLIKGENGGVITRRCPFWISFADGKFILNEHANAVKRITELCFDMGFQSIAKELNKENHPRKYTDSIVGKVLHKHAIYGSFLAMKLDENGDRTVFNKEIKNYYPAVISEPEFHRISAKLKERQDPSLAGRKAQEFRNILRGLVFCKCGSTFRYHAQKSLYVDLVCHASTVGQCSYANPGKGVRHRYVLVESIFLAYQSLIPFHQIIVKTDDIKALEKEHEEISGLIILKEKALGNNFAILEQSSESAQKYILGRIDEVSQELDKLKEDEHRLNLKIISMHLASKSDFNVMEIYRLLLTEKGRIKINNFLHSQKIKLVINPIKKKFFELDIYHADKHLDTIDVTPDGYTARYKPHLK

SEQ ID NO: 4317 - DNA, 50 bp, Pseudomonas helleri
  source 1..50: mol_type = genomic DNA
tttctacaaatgaatccactcattgcaatcagtggaggtttttgtagaaa

SEQ ID NO: 4318 - DNA, 40 bp, Pseudomonas helleri
  source 1..40: mol_type = genomic DNA
aatccgcacaccgatgaacgccgtcatcggcatgcttgaa

SEQ ID NO: 4319 - DNA, 40 bp, Pseudomonas helleri
  source 1..40: mol_type = genomic DNA
aatccgcacaccgatgaacgacgtcatcggcatgcttgaa

SEQ ID NO: 4320 - DNA, 50 bp, Pseudomonas helleri
  source 1..50: mol_type = genomic DNA
aatctccaatctaacccattcattgaattcagtggctgtatttatagaaa

SEQ ID NO: 4321 - protein, 563 aa, Pseudomonas poae
MSKTIFPYVRFSSPEQMKGDSQRRQIEKIRHYAVSNGYQLNETLDLQDLGLSAYHAEHMEADAGLGRFLLAIESGLIPLDGTSYLCIEQLDRLSRQSIDQANELFKKILRANVNIITMMDSRVYTKDSLNNFMEIVYSLFLMEQAHQESAKKASRIKSVFNGRLAKLERGEKIQYAGQIPGWLKKTKVSGVFEIDETKANVVREIFTRKSNDESLKKIADDLNSRGVGRLRNKSDGSKLWTTGALSNLLKAESTYGVLIVKQTTKIKSLSGNRNEVTELGRFDSYYPTVISRELFMSAREKLREINTIKDYGRSTSKNLFSGLVYCGYCGERMYFDEDDKVLKSGRKYYRHLKCIGYLHKLCDKGKLKYDKFESVFPWSYAYDAEKGSAHTQAKISALSSERLNIEGELALNRDRLESLTAAFEASEDYDADFFLKTSSSISRKISAKQQELDSIITQISFFAGSVAEPLEFDLTNASDRDKAKIQLKRILAAIIVYPTESMGFLLFKNGNVQSIDAIARAKTDMKAFSYFARYAKDLKQKLESGSGDAKLKKIFDALRHWSD

SEQ ID NO: 4322 - DNA, 50 bp, Pseudomonas poae
  source 1..50: mol_type = genomic DNA
tttcccaaaagtgtgcagcttagcgtgatgagtgctaccctttagggaat

SEQ ID NO: 4323 - DNA, 40 bp, Pseudomonas poae
  source 1..40: mol_type = genomic DNA
ggcgggtgcaaggttgagggtgatccggcgcgacgggtat

SEQ ID NO: 4324 - DNA, 40 bp, Pseudomonas poae
  source 1..40: mol_type = genomic DNA
ggcgggtgcaaggttgaggaggatccggcgcgacgggtat

SEQ ID NO: 4325 - DNA, 50 bp, Pseudomonas poae
  source 1..50: mol_type = genomic DNA
taccccaaaatatggcactttagcaggctgagtgctttgaattaaagaaa

SEQ ID NO: 4326 - protein, 562 aa, Acetomicrobium mobile
MQPRAFSYIRFSSPEQEKGDSLRRQIQLSEEYCKQHGLILDDTLKLTDKGLSAYKGHHRTKGALGEFLRLVEEGKIPPGSVLLVENLDRLSREQILDALNQFTSIIKAGIKIVTLQDGMEYDQESINQNWAQLIISITYMARAHDESETKSKRISAVWENKRSKAGNGGKKLTAKAPAWLKLSQDRTKFILIPEAAKAVELIYRKKLAGKGTGRIERELNEDPNVWKPPKTGRNKTGGWRKSYITKILRTKAVIGEFQPHKLVDGKRQPIGDPIPDYFPPVIDKELFYQVQAQLQANAEKKGNAGGRTGKVSNLFTHVIKCGLCGYPMHFINKGKPPKSRKYLVCDASRRLKTCTAKPIRYEEFEQLFFDNFEELDISQLIPGEDETQARINELEKLLTVNRQRLLEIDSKVENFSDTIGRTKDSRIREQLEKKLSQAFDDKERLESENKKFEREITELRQQKAGLEKDIEQAKEIYQLLNSAQGETERIELRLRLRQQIQKSIEWIKIYPLQEPYQEIQETEEPGIVKIMKSKYIDKVRIKFRGSRDLRVLYLKNHAELSE

SEQ ID NO: 4327 - DNA, 50 bp, Acetomicrobium mobile
  source 1..50: mol_type = genomic DNA
atgcttaaaaccgtttataatattttaatgttatatatggttttatagta

SEQ ID NO: 4328 - DNA, 40 bp, Acetomicrobium mobile
  source 1..40: mol_type = genomic DNA
gtgcgtgggagataccaagttaatattgtggcaacccgtc

SEQ ID NO: 4329 - DNA, 40 bp, Acetomicrobium mobile
  source 1..40: mol_type = genomic DNA
gtgcgtgggagataccaagctaatattgtggcaacccgtc

SEQ ID NO: 4330 - DNA, 50 bp, Acetomicrobium mobile
  source 1..50: mol_type = genomic DNA
cttcttaaactcatttataattttctaattttatataccaagcaatatta

SEQ ID NO: 4331 - protein, 507 aa, Leuconostoc lactis
MLEFSNAWSVLVNYIRAPPFKEDFFMNKKVALYVRVSTLEQAESGYSIGEQIDKLRKYADIKEWHVYDVYEDGGFSGSNTTRPALERLISDAKRHTFDTVLVYKLDRLSRSQKDTLFLIEDVFKANEIDLVSLNENFDTSTAFGKAMIGILSVFAQLEREQIKERMKLGKIGRARSGKAMGWHVTPFGYLYDKQTGNFVVDDLAAGVVKMIFSDYLNGMSITKLRDKLNIAGHIGKDREWSYRTLRQTLDNQTYTGLVKYDGQVFEGNHEAIIDKKTFDAVLNELDIRQKKAYAFNNNPRPFQSKYMLSGIIRCGYCGAPLVSTLGNVRKDGTRLMKYQCTKRIIKKTRTTTVYNDNKKCDSGFYMMRNIESYVVNAVSELQASPELIESMMQSTAKQPKTNIKQLESELAKISSRLKKLSDLYLNDLISIDDLKKQTTELKENRKRIEDTIDNNKDNNDEKVGVLKSKLTGSDIKERDYQDQSTLVKAFVRKVSVTSDNIEISWNF

SEQ ID NO: 4332 - DNA, 50 bp, Leuconostoc lactis
  source 1..50: mol_type = genomic DNA
caaacatatttactatacgctatttcaatgaagtatatttaatatattta

SEQ ID NO: 4333 - DNA, 40 bp, Leuconostoc lactis
  source 1..40: mol_type = genomic DNA
aaaaaggataatcgctatttcaatagcgattgtccttttg

SEQ ID NO: 4334 - DNA, 40 bp, Leuconostoc lactis
  source 1..40: mol_type = genomic DNA
aaaaaggataatcgctattttaatagcgattgtccttttg

SEQ ID NO: 4335 - DNA, 50 bp, Leuconostoc lactis
  source 1..50: mol_type = genomic DNA
taataatatatagcatatgttattttaatgaagtataaatattatattag

SEQ ID NO: 4336 - protein, 605 aa, Escherichia coli
MKKCFIYHRVSSEFQLARTGIQRQEDSLQAYVERTNLLADMEDPEPTIISDRGISAFKTNENNFSIGELGRWMDQVRDGMWDGSALVLESIDRFSRQNPFTVVAYLSELVSHNITIHDVSLSMLINRTNSAMLPIVTMSAQRAYEESKLKSDRIRDGWRRRRENAFNNGTIVTNKRPRWIDVKNDKYVLNDKVAIVREIFRLYKKGIGTSTIAKILNTRGEKWLFESGRLWRSESVHKILKNKRVTGVIFISETIRDYNSTDKSIDRNTYEMDLYPIAISKEEYTLVQQLLKMRRTNNGRITNIKDTGELKKSNIFNRVFRCAKCGEAMYHNVVLANRDSKKRGKFKEEYRYIRCIGERDGLCDNKALRYEVVEQFVIEHIKGMDFTKILKPNEINPEIELVRVLIEEEKAHIQEYELGIERLKKQDKKIPFDVLTELQDSRDKLRTLEERQFSFADIKVDTDYIKSVDSSVIFDQTNIAIRSMVEHELIKIIDTIKLYRMGKHYVITLKYRSVGILKHVLIVEAKKIPTLISNIVIERTGKTVEYSTPSFSLVIADGDSPRLKTSDGVPISMIDYSLLLNYVDDVDRDDIVGVWMREKFNTLTS

SEQ ID NO: 4337 - DNA, 50 bp, Escherichia coli
  source 1..50: mol_type = genomic DNA
tgtttgtttacaatagccgtcatacaaatgtatattatgctatacaaaca

SEQ ID NO: 4338 - DNA, 40 bp, Escherichia coli; identical to SEQ ID NO: 1288
  source 1..40: mol_type = genomic DNA

SEQ ID NO: 4339 - DNA, 40 bp, Escherichia coli; identical to SEQ ID NO: 1289
  source 1..40: mol_type = genomic DNA

SEQ ID NO: 4340 - DNA, 50 bp, Escherichia coli
  source 1..50: mol_type = genomic DNA
tgtttgtttcaataagtctttataagtatctatatttcaagatggtaaca

SEQ ID NO: 4341 - protein, 605 aa, Escherichia coli
MKKCFIYHRVSSEFQLARTGIQRQEDSLQAYVERTNLLADMEDPEPTIISDRGISAFKTNENNFSIGELGRWMDQVRDGMWDGSALVLESIDRFSRQNPFTVVAYLSELVSHNITIHDVSLSMLINRTNSAMLPIVTMSAQRAYEESKLKSDRIRDGWRRRRENAFNNGTIVTNKRPRWIDVKNDKYVLNDKVAIVREIFRLYKKGIGTSTIAKILNTRGEKWLFESGRLWRSESVHKILKNKRVTGVIFISETIRDYNSTDKSIERNTYEMDLYPIAISKEEYALVQQLLKMRRTNNGRITNIKDTGELKKSNIFNRVFRCAKCGEAMYHNVVLANRDSKKRGKFKEEYRYIRCIGERDGLCDNKALRYEVVEQFVIEHIKGMDFTKILKPNEINPEIELVRVLIEEEKAHIQEYELGIERLKKQDKKIPFDVLTELQDSRDKLRTLEERQFSFADIKVDTDYIKSVDSSVIFDQTNIAIRSMVEHELIKIIDTIKLYRMGKHYVITLKYRSVGILKHVLIVEAKKIPTLISNIVIERTGKTVEYSTPSFSLVIADGDSPRLKTSDGVPISMIDYSLLLNYVDDVDRDDIVGVWMREKFNTLTS

SEQ ID NO: 4342 - DNA, 50 bp, Escherichia coli; identical to SEQ ID NO: 4337
  source 1..50: mol_type = genomic DNA

SEQ ID NO: 4343 - DNA, 40 bp, Escherichia coli; identical to SEQ ID NO: 1288
  source 1..40: mol_type = genomic DNA

SEQ ID NO: 4344 - DNA, 40 bp, Escherichia coli; identical to SEQ ID NO: 1289
  source 1..40: mol_type = genomic DNA

SEQ ID NO: 4345 - DNA, 50 bp, Escherichia coli; identical to SEQ ID NO: 4340
  source 1..50: mol_type = genomic DNA

SEQ ID NO: 4346 - protein, 491 aa, Bacillus cytotoxicus
MGLAAIYLRLSRNEEQLNIDEILLNHRNALTKLAKQQKLTYDIYQEISSGVNMERPQLNLLLSRLDDYDALLVMDIDRISRDNAHAEEIKKMLIIHDIKILTPQGAIDLSQESNEMLFSFQAMMANFEYKQIRKRLGRGRLAAAEQGKWTMSNRVPLGYKKNEEKRLEVVEEEAKIIRFIFQKTLERVSANEIAKQLDILGWRSRQGKVLTSAHISNMRRNVVYYGVVKACRKVNGRVVDKVFVENAHEPIVSKQIFFEVQKILEENSTGNFFNKRKVTRKLQNLIYCNCCGRKRYIQFDGNGVDYIKSCIYKVDNNKCRDRGYKYEPIEQFVLQKVKEKKPDFEQELQMLKSLDTIEIEKKLFIQRESLEKQITRFNKRQRNLKEMRMDGEITKSEFYEMREENEEQIKQVKQQMELIDVKLENLSNMDEEQARLQDAIKKLDKLEELNAEACNTFLKKFIKKVWFSSNTEANHDTTRSREGATIEIEWL

SEQ ID NO: 4347 - DNA, 50 bp, Bacillus cytotoxicus
  source 1..50: mol_type = genomic DNA
accaataaaaatagaaaaattaaaaatactaattttctatttttaaccaa

SEQ ID NO: 4348 - DNA, 40 bp, Bacillus cytotoxicus
  source 1..40: mol_type = genomic DNA
aaccgtgggtaaaattacaaatatgaaaatgctagacggt

SEQ ID NO: 4349 - DNA, 40 bp, Bacillus cytotoxicus
  source 1..40: mol_type = genomic DNA
aaccgtgggtaaaattacaattatgaaaatgctagacggt

SEQ ID NO: 4350 - DNA, 50 bp, Bacillus cytotoxicus
  source 1..50: mol_type = genomic DNA
ataaataaataagtaaaaaataaaattattacttttactgaatttcccaa

SEQ ID NO: 4351 - protein, 491 aa, Bacillus cytotoxicus
MGLAAIYLRLSRNEEQLNIDEILLNHRNALTKLAKQQKLTYDIYQEISSGVNMERPQLNLLLSRLDDYDALLVMDIDRISRDNAHAEEIKKMLIIHDIKILTPQGAIDLSQESNEMLFSFQAMMANFEYKQIRKRLGRGRLAAAEQGKWTMSNRVPLGYKKNEEKRLEVVEEEAKIIRFIFQKTLERVSANEIAKQLDILGWRSRQGKVLTSAHISNMRRNVVYYGVVKACRKVNGRVVDEVFVENAHEPIVSKQIFFEVQKILEENSTGNFFNKRKVTRKLQNLIYCNCCGRKRYIQFDGNGVDYIKSCIYKVDNNKCRDRGYKYEPIEQFVLQKVKEKKPDFEQELQMLKSLDTIEIEKKLFIQRESLEKQITRFNKRQRNLKEMRMDGEITKSEFYEMREENEEQIKQVKQQMELIDVKLENLSNMDEEQARLQDAIKKLDKLEELNAEACNTFLKKFIKKVWFSSNIEANHDTTRSREGATIEIEWL

SEQ ID NO: 4352 - DNA, 50 bp, Bacillus cytotoxicus; identical to SEQ ID NO: 4347
  source 1..50: mol_type = genomic DNA

SEQ ID NO: 4353 - DNA, 40 bp, Bacillus cytotoxicus
  source 1..40: mol_type = genomic DNA
aaccgtgggtaaaattacaaatataaaaatgctagacggt

SEQ ID NO: 4354 - DNA, 40 bp, Bacillus cytotoxicus
  source 1..40: mol_type = genomic DNA
aaccgtgggtaaaattacaattataaaaatgctagacggt

SEQ ID NO: 4355 - DNA, 50 bp, Bacillus cytotoxicus; identical to SEQ ID NO: 4350
  source 1..50: mol_type = genomic DNA

SEQ ID NO: 4356 - protein, 507 aa, Anaerotruncus colihominis
MIALYVRQSVERENSVSIETQLDYCRSMLRPDERETKIVEYIDEGCSGGNTNRSGFQKMMRDIQRNSIQKVIVYKLDRISRSLNDFVGILQIFKEHGVEFVSSQESFDTSTPYGDLILKILMVFAEFERTSIINRVRDAYAKRTDMGLYMGGRQQYGFELQETTLKGIPTKMYVPIPEAVEQLQYMFEVYAQGQVSLRQLQANLLEKGMKPTSGQDWTTAKLSALLRNPVYVKADSDIFDYFHAKGVRIVDDVRSFTGKRAAYLYGKTTHDKNLSDWSDMKLVLAQHEGIIPSEIWLRCQYKLEKNRQVGNSLSNKTSWLSGKLVCEKCGHTMTTIKSQRPDGSYRRYFNCTGRSHKKICSGTKTPIYADDIENIISQYIAEKLKDIGLAKRSVSTQANTQLNQLKLQLKELELQEEQLGDLLISGQLNQDTIQLANRKAETLKKKKQKLLEQIGQAQMQDSELETVIDLSRKWKKAKYQEKKAVAGVLIRSIVIKEDGSLEVIWNI

SEQ ID NO: 4357 - DNA, 50 bp, Anaerotruncus colihominis
  source 1..50: mol_type = genomic DNA
atttttaattgggggtggatcgcttcaccgatatgatctagttaaaaaca

SEQ ID NO: 4358 - DNA, 40 bp, Anaerotruncus colihominis
  source 1..40: mol_type = genomic DNA
ctgggtgatgcgcagcgcgtcgccgaaacgctggaagtgt

SEQ ID NO: 4359 - DNA, 40 bp, Anaerotruncus colihominis
  source 1..40: mol_type = genomic DNA
ctgggtgatgcgcagcgcgtggccgaaacgctggaagtgt

SEQ ID NO: 4360 - DNA, 50 bp, Anaerotruncus colihominis
  source 1..50: mol_type = genomic DNA
ttttttatttgattttggaaagcttgtccaatatcaaaggtttaaaaaca

SEQ ID NO: 4361 - protein, 462 aa, Listeria monocytogenes
MKRAGIYIRVSTQEQANEGYSIGAQTDRLTKYVEAKEYKLYKKYVDAGYSGSKIDRPAMKELIEDVCNNTLDVIIVYKLDRLSRSQKDTMYLIEDIFRPNNVELISMQESFDTSTAFGNATVGMLSVFAQLERKSISERMITGRVERAKKGMYHTGGQSRPPAGYEFQNKKLVVNEYEAAAIRDLFRLFNEGLGRRSISDYLQKNYPGRNKWLPCSIDRMLKNNLYIGKVKFSGESFEGIHKPIIDDVTFFKTQKEIKKRKANNSQKYDYVALLGGLCECGICGAKMANRRSVGRKGKVYRYYRCYSKKGSPKHMMKISDCPSSAQQQDFIDEAVITKLKTLDIDSEIKKRTTPKVNNESIEKQIENINNQINKLIELFQVDSIPMEVLTKKIDKLNLEKESMKALIDKSQTVNINEFRSRLKVLENFDWDNSEKSEKRKIIEMLIHKVIVYETHIEIILIE

SEQ ID NO: 4362 - DNA, 50 bp, Listeria monocytogenes
  source 1..50: mol_type = genomic DNA
gttttacaacattactctgaaatttcaaatacagataaatgttgtaaaaa

SEQ ID NO: 4363 - DNA, 40 bp, Listeria monocytogenes
  source 1..40: mol_type = genomic DNA
atgcgctacttcaccaatttcaaataaatcagtcgtcatt

SEQ ID NO: 4364 - DNA, 40 bp, Listeria monocytogenes
  source 1..40: mol_type = genomic DNA
atgcgctacttcaccaattacaaataaatcagtcgtcatt

SEQ ID NO: 4365 - DNA, 50 bp, Listeria monocytogenes
  source 1..50: mol_type = genomic DNA
ctttagagatacatctctgaaattacaaatagatatcaaatttataaaaa

SEQ ID NO: 4366 - protein, 547 aa, Faecalitalea cylindroides
MNRYGKRCVLYPRVSTEMQVDGYSLEGQKNMLTRFADREEMIVVDTYEDAGKSGKSIEGRPAFQKMLRDIEDGLDIDYILVYKLSRFGRNAADILNSLELVQSYGVNLICIEEGIDSSQTSGKLLISVLSAVAEIERENIIEQTMNGRREKARQGGWNGGFAPYGYTLEDNKLMIEETEAVAIRKIFELYTSSEIGLGGIANQLNLQGIRKIPRQNGTLEDWTGHFIKLILDNPVYCGKIAYGRRTKEKVKGTKNDYQMKRNDDYILTEGQHKGIVSEEVWEKAHAKRLRTGVKQPSKIGRDRVHLLSGLLKCPVCGSPMYTNKHAWTNKDGTYKEIYYYVCSRNRMVRGKHCEYKAMLKKTDIEPMVIEAIREIVRNEEYAQAIKKRIGVQIDTKAVDKELEGYQAKLKEVDLNKTRLEREIDSLPADAKYRERKLHDMTLRLDSLYDVIVELEEKIEDARLRRDAIKQQAITLENIYKIMVNFDCVYNIINDEEKRNVVTALIKEIEIYRNDESEYPLKRIGLNFPVFKDGGEVTELLWDKGNTV

SEQ ID NO: 4367 - DNA, 50 bp, Faecalitalea cylindroides
  source 1..50: mol_type = genomic DNA
ttgtgggacaaagggaataccgttgagacggtagttcttttatcccacaa

SEQ ID NO: 4368 - DNA, 40 bp, Faecalitalea cylindroides
  source 1..40: mol_type = genomic DNA
cccgtttactgaacatattgaaagcatctgtgttttaaca

SEQ ID NO: 4369 - DNA, 40 bp, Faecalitalea cylindroides
  source 1..40: mol_type = genomic DNA
cccgtttactgaacatattttaagcatctgtgttttaaca

SEQ ID NO: 4370 - DNA, 50 bp, Faecalitalea cylindroides
  source 1..50: mol_type = genomic DNA
ctgtgggaccttgtgaaagccgatttgccggtagctttcacatccaacat

SEQ ID NO: 4371 - protein, 549 aa, Intestinimonas massiliensis
MNRYGKRCVLYPRVSTEMQVDGYSLEGQKNMLTRFADREEMIVVDTYEDAGKSGKSIEGRPAFQKMLRDIEDGLDIDYILVYKLSRFGRNAADILNSLELVQSYGVNLICIEEGIDSSQTSGKLLISVLSAVAEIERENIIEQTMNGRREKARQGGWNGGFAPYGYTLEDNKLMIEETEAVAIRKIFELYTSSEIGLGGIANQLNLQGIRKIPRQNGTLEDWTGHFIKLILDNPVYCGKIAYGRRTKEKVKGTKNDYQMKRNDDYILTEGQHKGIVSEEVWEKAHAKRLRTGVKQPSKIGRDRVHLLSGLLKCPVCGSPMYTNKHAWTNKDGTYKEIYYYVCSRNRMVRGKHCEYKAMLKKTDIEPMVIEAIREIVRNEEYAQAIKKRIGVQIDTKAVDKELEGYQAKLKEVDLNKTRLEREIDSLPADAKYRERKLHDMTLRLDSLYDVIVELEEKIEDARFRRDAIKQQAITLENIYKIMVNFDCVYNIINDEEKRNVVTALIKEIEIYRNDESEYPLKRIGLNFPVFKDGGEVTELLWDKGNTVET

SEQ ID NO: 4372 - DNA, 50 bp, Intestinimonas massiliensis; identical to SEQ ID NO: 4367
  source 1..50: mol_type = genomic DNA

SEQ ID NO: 4373 - DNA, 40 bp, Intestinimonas massiliensis
  source 1..40: mol_type = genomic DNA
cccccgcactgcacacgtggagacggtctgccggctggag

SEQ ID NO: 4374 - DNA, 40 bp, Intestinimonas massiliensis
  source 1..40: mol_type = genomic DNA
cccccgcactgcacacgtgttgacggtctgccggctggag

SEQ ID NO: 4375 - DNA, 50 bp, Intestinimonas massiliensis; identical to SEQ ID NO: 4370
  source 1..50: mol_type = genomic DNA

SEQ ID NO: 4376 - protein, 547 aa, Ruthenibacterium lactatiformans
MNRYGKRCVLYPRVSTEMQVDGYSLEGQKNMLTRFADREEMIVVDTYEDAGKSGKSIEGRPAFQKMLRDIEDGLDIDYILVYKLSRFGRNAADILNSLELVQSYGVNLICIEEGIDSSQTSGKLLISVLSAVAEIERENIIEQTMNGRREKARQGGWNGGFAPYGYTLEDNKLMIEETEAVAIRKIFELYTSSEIGLGGIANQLNLQGIRKIPRQNGTLEDWTGHFIKLILDNPVYCGKIAYGRRTKEKVKGTKNDYQMKRNDDYILTEGQHKGIVSEEVWEKAHAKRLRTGVKQPSKIGRDRVHLLSGLLKCPVCGSPMYTNKHAWTNKDGTYKEIYYYVCSRNRMVRGKHCEYKAMLKKTDIEPMVIEAIREIVRNEEYAQAIKKRIGVQIDTKAVDKELEGYQAKLKEVDLNKTRLEREIDSLPADAKYRERKLHDMTLRLDSLYDVIVELEEKIEDAKLRRDAIKQQAITLENIYKIMVNFDCVYNIINDEEKRNVVTALIKEIEIYRNDESEYPLKRIGLNFPVFKDGGEVTELLWDKGNTV

SEQ ID NO: 4377 - DNA, 50 bp, Ruthenibacterium lactatiformans; identical to SEQ ID NO: 4367
  source 1..50: mol_type = genomic DNA

SEQ ID NO: 4378 - DNA, 40 bp, Ruthenibacterium lactatiformans
  source 1..40: mol_type = genomic DNA
tgctggcagtcattccgtcgaaccgcattgcttacatcat

SEQ ID NO: 4379 - DNA, 40 bp, Ruthenibacterium lactatiformans
  source 1..40: mol_type = genomic DNA
tgctggcagtcattccgtcttaccgcattgcttacatcat

SEQ ID NO: 4380 - DNA, 50 bp, Ruthenibacterium lactatiformans; identical to SEQ ID NO: 4370
  source 1..50: mol_type = genomic DNA

SEQ ID NO: 4381 - protein, 548 aa, Enterocloster bolteae
MNRYGKRCVLYPRVSTEMQVDGYSLEGQKNMLTRFADREEMIVVDTYEDAGKSGKSIEGRPAFQKMLRDIEDGLDIDYILVYKLSRFGRNAADILNSLELVQSYGVNLICIEEGIDSSQTSGKLLISVLSAVAEIERENIIEQTMNGRREKARQGGWNGGFAPYGYTLEDNKLMIEETEAVAIRKIFELYTSSEIGLGGIANQLNLQGIRKIPRQNGTLEDWTGHFIKLILDNPVYCGKIAYGRRTKEKVKGTKNDYQMKRNDDYILTEGQHKGIVSEEVWEKAHAKRLRTGVKQPSKIGRDRVHLLSGLLKCPVCGSPMYTNKHAWTNKDGTYKEIYYYVCSRNRMVRGKHCEYKAMLKKTDIEPMVIEAIREIVRNEEYAQAIKKRIGVQIDTKAVDKELEGYQAKLKEVDLNKTRLEREIDSLPADAKYRERKLHDMTLRLDSLYDVIVELEEKIEDARLRRDAIKQQAITLENIYKIMVNFDCVYNIINDEEKRNVVTALIKEIEIYRNDESEYPLKRIGLNFPVFKDGGEVTELLWDKGNTVE

SEQ ID NO: 4382 - DNA, 50 bp, Enterocloster bolteae; identical to SEQ ID NO: 4367
  source 1..50: mol_type = genomic DNA

SEQ ID NO: 4383 - DNA, 40 bp, Enterocloster bolteae
  source 1..40: mol_type = genomic DNA
tgacaggagcgttcatgatgagaaggctgcagtcctgggg

SEQ ID NO: 4384 - DNA, 40 bp, Enterocloster bolteae
  source 1..40: mol_type = genomic DNA
tgacaggagcgttcatgatttgaaggctgcagtcctgggg

SEQ ID NO: 4385 - DNA, 50 bp, Enterocloster bolteae; identical to SEQ ID NO: 4370
  source 1..50: mol_type = genomic DNA

SEQ ID NO: 4386 - protein, 471 aa, Streptococcus pyogenes
MRKVAIYSRVSTINQAEEGYSIQGQIEALTKYCEAMEWKIYKNYSDAGFSGGKLERPAITELIEDGKNNKFDTILVYKLDRLSRNVKDTLYLVKDVFTANNIHFVSLKENIDTSSAMGNLFLTLLSAIAEFEREQIKERMQFGVMNRAKSGKTTAWKTPPYGYRYNKDEKTLSVNELEAANVRQMFDMIISGCSIMSITNYARDNFVGNTWTHVKVKRILENETYKGLVKYREQTFSGDHQAIIDEKTYNKAQIALAHRTDTKTNTRPFQGKYMLSHIAKCGYCGAPLKVCTGRAKNDGTRRQTYVCVNKTESLARRSVNNYNNQKICNTGRYEKKHIEKYVIDVLYKLQHDKEYLKKIKKDDNIIDITPLKKEIEIIDKKINRLNDLYINDLIDLPKLKKDIEELNHLKDDYNKAIKLNYLDKKNEDSLGMLMDNIDIRKSSYDVQSRIVKQLIDRVEVTMDNIDIIFKF

SEQ ID NO: 4387 - DNA, 50 bp, Streptococcus pyogenes
  source 1..50: mol_type = genomic DNA
aagcattatttaggcactacaacgagtatagttgtacatgaaaaacgctg

SEQ ID NO: 4388 - DNA, 40 bp, Streptococcus pyogenes
  source 1..40: mol_type = genomic DNA
agatgcctttttaccgacgagtatagttgtacatgccatt

SEQ ID NO: 4389 - DNA, 40 bp, Streptococcus pyogenes
  source 1..40: mol_type = genomic DNA
agatgcctttttaccgacgactatagttgtacatgccatt

SEQ ID NO: 4390 - DNA, 50 bp, Streptococcus pyogenes
  source 1..50: mol_type = genomic DNA
aagcattacaggagcattacagggactataggggtatgagctaaactctg

SEQ ID NO: 4391 - protein, 471 aa, Streptococcus pyogenes
MRKVAIYSRVSTINQAEEGYSIQGQIEALTKYCEAMEWKIYKNYSDAGFSGGKLERPAITELIEDGKNNKFDTILVYKLDRLSRNVKDTLYLVKDVFTANNIHFVSLKENIDTSSAMGNLFLTLLSAIAEFEREQIKERMQFGVMNRAKSGKTTAWKTPPYGYRYNKDEKTLSVNELEAANVRQMFDMIISGCSIMSITNYARDNFVGNTWTHVKVKRILENETYKGLVKYREQTFSGDHQAIIDEKTYNKAQIALAHRTDTKTNTRPFQGKYMLSHIAKCGYCGAPLKVCTGRAKNDGTRRQTYVCVNKTESLARRSVNNYNNQKICNTGRYEKKHIEKYVIDVLYKLQHDKEYLKKIKKDDNIIDITPLKKEIEIIDKKINRLNDLYINDLIDLPKLKKDIEELKHLKDDYNKAIKLNYLDKKNEDSLGMLMDNIDIRKSSYDVQSRIVKQLIDRVEVTMDNIDIIFKF

SEQ ID NO: 4392 - DNA, 50 bp, Streptococcus pyogenes; identical to SEQ ID NO: 4387
  source 1..50: mol_type = genomic DNA

SEQ ID NO: 4393 - DNA, 40 bp, Streptococcus pyogenes; identical to SEQ ID NO: 4388
  source 1..40: mol_type = genomic DNA

SEQ ID NO: 4394 - DNA, 40 bp, Streptococcus pyogenes; identical to SEQ ID NO: 4389
  source 1..40: mol_type = genomic DNA

SEQ ID NO: 4395 - DNA, 50 bp, Streptococcus pyogenes; identical to SEQ ID NO: 4390
  source 1..50: mol_type = genomic DNA

SEQ ID NO: 4396 - protein, 623 aa, Enterococcus faecium
MSKQPEMVIARNPRATRNNDTTLNLDNQMYQQPVTSFQRVSNDAPLSEETKTAIQNTVLQFYVHSQPQEEAEGITACYERLSQEDKLDGESNSISNQKRILEKYCRDHGYTAIRHYDEDDGYSGTNFNRPGFQRMLADIKAGKIKRVVVKDMSRFGRNYLQVGMYTEMLFPEYGVHFIAVNDGVDSVRGDSEFTAIRNVFNEMYAKDTSKKIRATWQSKGRSGEHLTTIPPYGYKKDPENKKRWIVDEEAAAVVQKIFALCMDGMGPTQIAKWLQENKVLSPVAYCYENDLPTTSKRPTDPYKWATKTVVHILERLDYLGHTVNFKTSQQSFKSKKVLWNDPADWVIFENTQEPIIEESVFLIVQKIRQGRRRPTKMGDMGMFSGLLFCADCGGKMYLCRANHFKPEQEYYLCSTYRKDRTLCSTHSIRRVVLEEIVLRNLREAIQYVTQYEDDFVQRAADQSLRERDKELAQKKDTLTQSQKRIAELDVIIKRLYEDNISGKLSDERFIKLSRDYELEQTNLTSLVEHLRQEVKEQEKQKVNVRQFIAAVRKYTDMQQLDASVLREFVEKIYISEVYTPDENEPRIKVREIEIVYNFIGAFDFEEAREQSQAAQKEKKTGVA

SEQ ID NO: 4397 - DNA, 50 bp, Enterococcus faecium
  source 1..50: mol_type = genomic DNA
atgttttcttacggaaccacgcctttaaccgtggtgccataagaaaacat

SEQ ID NO: 4398 - DNA, 40 bp, Enterococcus faecium
  source 1..40: mol_type = genomic DNA
agcgaaaaaagaaagcagattagctgttttcttttttcgc

SEQ ID NO: 4399 - DNA, 40 bp, Enterococcus faecium
  source 1..40: mol_type = genomic DNA
agcgaaaaaagaaagcagactagctgttttcttttttcgc

SEQ ID NO: 4400 - DNA, 50 bp, Enterococcus faecium
  source 1..50: mol_type = genomic DNA
atgttttataacagaaacttgcctctaaccatggagacagtagattacat

SEQ ID NO: 4401 - protein, 623 aa, Angelakisella massiliensis
MSKQPEMVIARNPRATRNNDTTLNLDNQMYQQPVTSFQRVSNDAPLSEETKTAIQNTVLQFYVHSQPQEEAEGITACYERLSQEDKLDGESNSISNQKRILEKYCRDHGYTAIRHYDEDDGYSGTNFNRPGFQRMLADIKAGKIKRVVVKDMSRFGRNYLQVGMYTEMLFPEYGVHFIAVNDGVDSVRGDSEFTAIRNVFNEMYAKDTSKKIRATWQSKGRSGEHLTTIPPYGYKKDPENKKRWIVDEEAAAVVQKIFALCMDGMGPTQIAKWLQENKVLSPVAYCYENDLPTTSKRPTDPYKWATKTVVHILERLDYLGHTVNFKTSKQSFKSKKVLWNDPADWVIFENTQEPIIEESVFLIVQKIRQGRRRPTKMGDMGMFSGLLFCADCGGKMYLCRANHFKPEQEYYLCSTYRKDRTLCSTHSIRRVVLEEIVLRNLREAIQYVTQYEDDFVQRAADQSLRERDKELAQKKDTLAQSQKRIAELDVIIKRLYEDNISGKLSDERFIKLSRDYELEQTNLTNLVEHLRQEVKEQEKQKVNVRQFIAAVRKYTDMQQLDASILREFMDKIYISEVYTPDENEPRIKVREIEIVYNFIGAFDFEEAREQSQAAQKEKKTGVA

SEQ ID NO: 4402 - DNA, 50 bp, Angelakisella massiliensis; identical to SEQ ID NO: 4397
  source 1..50: mol_type = genomic DNA

SEQ ID NO: 4403 - DNA, 40 bp, Angelakisella massiliensis
  source 1..40: mol_type = genomic DNA
tgccaaaaaaggagggcctttatggataagcttttcagtt

SEQ ID NO: 4404 - DNA, 40 bp, Angelakisella massiliensis
  source 1..40: mol_type = genomic DNA
tgccaaaaaaggagggcctctatggataagcttttcagtt

SEQ ID NO: 4405 - DNA, 50 bp, Angelakisella massiliensis; identical to SEQ ID NO: 4400
  source 1..50: mol_type = genomic DNA

SEQ ID NO: 4406 - protein, 506 aa, Bacillus mycoides
MLIKTVAIYNRISRDNGESEDVLLNHRTINTRLCESKGYQYKLYEEIESGGKFEERKILLQLLRDIAQGLYDGLVVVELSRIARDNLYSQMIAKVLEDNNVPIITPNRIYNLSDESDRLMYDMESMISSKELRTITRRMRSGKLEGVRRGEWVQGIPPFGYKRGDNKKLIIVESEANLVRQIFNYAENGYGVPNIASKLKGYKTRAGNSFTDTAVYAILNNKTYMGSIIYNVKDKKGNITENIVARNAHEAIITREQFNSVQQAIKGRMSGDMETRNRSRGIVISMLKDLVYCKKCGLKIKFRKDSKQRNAVYITACKCGNRGIAEHQLLKSFMNEFYFLQGFYREEWEKALHTPQTVSKGVLVQQVEELDKTRNKLSMRLSKAKEAYLDGVFNKEEYLTTKDATENELKKISTAIDDLLQDIESMDKESLASQFESKMKKIEQFYKIYNKEDSHQHLAECNRILKLIINKVHYERVNERITITSPLEGYMEVEQGDFVDLSIDSK

SEQ ID NO: 4407 - DNA, 50 bp, Bacillus mycoides
  source 1..50: mol_type = genomic DNA
gaacaccctataaaaaaaatcatatgtatgtgtttttttataagtggtca

SEQ ID NO: 4408 - DNA, 40 bp, Bacillus mycoides
  source 1..40: mol_type = genomic DNA
gaccccctctcatcccatatgtatgaaaaaagagcttgta

SEQ ID NO: 4409 - DNA, 40 bp, Bacillus mycoides
  source 1..40: mol_type = genomic DNA
gaccccctctcatcccatatatatgaaaaaagagcttgta

SEQ ID NO: 4410 - DNA, 50 bp, Bacillus mycoides
  source 1..50: mol_type = genomic DNA
gaattccctgtccgaaagatcacatatctctgtttttctagaattggtcc

SEQ ID NO: 4411 - protein, 505 aa, Bacillus pseudomycoides
MKDKLNKIKNVAIYLRKSRKSDGLNVEESLKAHRDTLVRLANKYKWNYTIYEEVGSSMDMAIREELQRMLLEVERGIYDAVVVMDQDRLSRNRYDSAVIKKILLDTYTFIVTAEEECIDLRDASDSLMTDFKDIIASYEYRQTSKRLVRGKDASARKGNWAAGRVPLGYKYNRDTKKLDLEESEARIVREIYKLYLEGEGIREIAIKLNKAGYRSKTSKLFGNKGIWDILKNPIYKGIVRQRHYAFESKSHQYLRDESEWIVHKDIYPRIVSPEEWEEVRKLAEKRSRLPYKARARKHGLTGLITCGYCGQKHGIQWRAQKTKPYRTIKTCWKRSLETGELCRNKGLRYDEVLEYIISKISERRSIIREEISKISSDVSEFTKKKEEQKVKLKEELERVEKQLSRLNYMFINEILSEEEILKEKPPRMAEKEEIERKLFELEGETQESNVSELKFNLKSLERIIRDYRELPDKDLNDLLSNVITNVELFNYNGKDLEPRISIEFK

SEQ ID NO: 4412 - DNA, 50 bp, Bacillus pseudomycoides
  source 1..50: mol_type = genomic DNA
aagtatctttagtgaactttgtattcatacattgtttataaaagatatct

SEQ ID NO: 4413 - DNA, 40 bp, Bacillus pseudomycoides
  source 1..40: mol_type = genomic DNA
ttgcgcttgatacaagtattcatacaaataaatatgtcca

SEQ ID NO: 4414 - DNA, 40 bp, Bacillus pseudomycoides
  source 1..40: mol_type = genomic DNA
ttgcgcttgatacaagtatcaatacaaataaatatgtcca

SEQ ID NO: 4415 - DNA, 50 bp, Bacillus pseudomycoides
  source 1..50: mol_type = genomic DNA
aggtatgtaaatataaatttgtatcaatatcttctatcagtaagatatct

SEQ ID NO: 4416 - protein, 506 aa, Bacillus thuringiensis
MYKPFSQADYKPSDKPKALYIRKSKKSQGKTEIETIESHLKRLTDFCKDQGWNNYVIYNDYIAKSTDINRIEYNKMLNACLDGKHDLIVVVEESRLYRTVNEQTNVYEELKGTDIAILSIREGYIFPNDRNQFLTNIIRGAMNQQELENFAYRMNVKVLASAKEGKYVNKLPFGYFKDKDKLTPHPIESKTFRFIVDKVLEGYVIAEIIGQLNQLGYTTKSNKKWKDVGTITRMLANRVYLGESHYYSKMFDEDVIVRDTHQALLTIEEFQKISNMIRSRSRNPQGIRYTKINTVLDRLVVCGICGNRLPIHKSWTNKEGVTSYQVGKCQKVMGEYNEKKCPNKSISLKELLPHFYIAIESYKDSLREEIERVEIDTTSDMKIKVMEQIKDISKRIAEIQTEIQNAKSYLIKGVLSEADYVGLVPPLEKDLKDLNVALEDNERLLASLTDYDRSAVIQNAVDSLIYIENESIENQNRIYRLLFEHLELVNTVDEFEIRLKEKDVSN

SEQ ID NO: 4417 - DNA, 50 bp, Bacillus thuringiensis
  source 1..50: mol_type = genomic DNA
actttatattaaggggttttatctggtgataaagcatgttattataatgt

SEQ ID NO: 4418 - DNA, 40 bp, Bacillus thuringiensis
  source 1..40: mol_type = genomic DNA
acacggcatcgccttatctggagacttcgttattcaaggt

SEQ ID NO: 4419 - DNA, 40 bp, Bacillus thuringiensis
  source 1..40: mol_type = genomic DNA
acacggcatcgccttatctctagacttcgttattcaaggt

SEQ ID NO: 4420 - DNA, 50 bp, Bacillus thuringiensis
  source 1..50: mol_type = genomic DNA
aaattatattgacaggttttttctctggcaaaagcattttagtataattt

SEQ ID NO: 4421 - protein, 547 aa, Agrobacterium tumefaciens
MTKAYSYIRFSTPEQAQGDSLRRQTAKAEAWAQQRNLVLDSTLRDLGVSAFHGANRTTGALRSFLEMVEDGRIQRGSYLIVESLDRLSREAVMDATSRLLDLIRAGITVVTLSDGQEYSEDRLLTDWTPLMFSLIVMARAHEESRIKSERVGEAWRQKKEKAREQGKPLTPRCPEWLEVRDGAFVERPERVTLVRRVFQETIDGFGRREIVRRLNSEGVPTFRGGKGWHTSSIAKIVQSRAVLGEYQPHTGTHRNRNRRPDGDPISNYYPPIVDNGIFLRAQGATQGRRQNAAGRKGKSGSHLFQGIAKCAHCSGPMHIINKGKPPKGGIYLACSANIRNAGCDNDRRWRIDMLEPLLLAAIDMLDQTAFSGQDNDLTQLRAQTEALRTQIADFEKRQRTLIELVEFGDETATARSLELAKHIKRSRKELKVTEDQVAATVAEPDLAARVAAAATISQRLGESVDIEERRELRTRLREIIGAIVDRIECHQKFGATAFFHPREWFRINNKRSEHNFTFLTKEGIPRILLDQNVPDDIIDEWIGPWPF

SEQ ID NO: 4422 - DNA, 50 bp, Agrobacterium tumefaciens
  source 1..50: mol_type = genomic DNA
aatgaattaatgtatcataatgtcagcatattatgctacattattcaaac

SEQ ID NO: 4423 - DNA, 40 bp, Agrobacterium tumefaciens
  source 1..40: mol_type = genomic DNA
gccgggtgggccgaccatcagcagattatggccgccagca

SEQ ID NO: 4424 - DNA, 40 bp, Agrobacterium tumefaciens
  source 1..40: mol_type = genomic DNA
gccgggtgggccgaccatcatcagattatggccgccagca

SEQ ID NO: 4425 - DNA, 50 bp, Agrobacterium tumefaciens
  source 1..50: mol_type = genomic DNA
aatgaattagtatataataatttcatcatactttcattactcattcaaag

SEQ ID NO: 4426 - protein, 530 aa, Vibrio parahaemolyticus
MGIFMYTSEIYKSKQQLITPSSTRPLAFSYIRFSSKKQELGNSLQRQMEAAERWCAYNNVELSPITFDDLGVSAFKEGTRPALADMLEYIKTGIIPKGSFILLENSDRLSRRGFKHAVDIVHEIVNNDVYLVVLGNNPVVYDKHNIVDLSSMLSLLLDSDRGRQESARKSVLIKAAKKHLRSTREAKGKLPWWLSAVDGKAELNEFSAVIREMVDMKLQGVSAQKIATHFNNKGVLNAQGTAWKAVSINASFKNKLLYGTKVYYEVVGTNGRDCAPVEEVPNWAPAICSKREFDAIQPKKRVKGELTRTSAFTGLLRCPNCHGAMQQRKQYHKGKEYTYRRCLNYGEGRCTVKDNFKDVDVVAKAALQHLKVINTSSSNDELNQAIEQLNAAKNKLETQEASLAYIKIPEILGRTYDDIYKTQQEIAHLEASVQLLQTTSHEVNTISLFDLPNKEVNVELKKVIKAIYFFKLAPLTDKLIIQYVNDVKSTFVITHKRNGRSEATWKMQLVADSTKWDVADTREAWERDDS

SEQ ID NO: 4427 - DNA, 50 bp, Vibrio parahaemolyticus
  source 1..50: mol_type = genomic DNA
gattaatccaattaatatgatatcaaagtattatatcgattgtagataat

SEQ ID NO: 4428 - DNA, 40 bp, Vibrio parahaemolyticus
  source 1..40: mol_type = genomic DNA
atttggctggcatgtggtcaaggttctctacagaacatag

SEQ ID NO: 4429 - DNA, 40 bp, Vibrio parahaemolyticus
  source 1..40: mol_type = genomic DNA
atttggctggcatgtggtcttggttctctacagaacatag

SEQ ID NO: 4430 - DNA, 50 bp, Vibrio parahaemolyticus
  source 1..50: mol_type = genomic DNA
gattcagtcatcatgtatgactttttcgtattatatgtctagtagataat

SEQ ID NO: 4431 - protein, 562 aa, Coprothermobacter proteolyticus
MEPKAYSYIRFSSPEQEEGDSLRRQIQLSEEYCKQHGLILDDTLKLTDKGLSAYKGHHRTKGALGEFLRLVEEGKIPPGSVLLVENLDRLSREQILDALNQFTSIIKAGIKIVTLQDGMEYDQESINQNWAQLIISITYMARAHDESETKSKRISAVWENKRSKAGNGGKKLTAKAPAWLKLSQDRTKFILIPEVAKAIELIFRKKLAGKGAERIARELNDDPNIWKPPKVGPKKTGGWRSSYINKILRSRAVIGEFQPHNLVDGKRQPIGDPIPDYFPPVIDKELFYQVQAQLQANAEKKGNAGGRTGKVSNLFTHVIKCGLCGYPMHFINKGKPPKGGKYLVCDASRRLKTCTAKPIRYEEFEQLFFDNFEELDISQLIPGEDETQARINELEKLLTVNRQRLLEIDSKVENFSDTIGRTKDSRIREQLEKKLSQAFDDKERLESENKKFEREITELRQQKAGLEKDIEQAKEIYQLLNSVQGEAERIELRLRLRQQIQKSIEWIKIYPLQEPYQEIQETEEPGIVKIMKSKYIDKVRIKFRGSRDLRVLYLKNHAELSE

SEQ ID NO: 4432 - DNA, 50 bp, Coprothermobacter proteolyticus
  source 1..50: mol_type = genomic DNA
atgcttaaaaccgtttataacattctaatgttatatatggttttatcctt

SEQ ID NO: 4433 - DNA, 40 bp, Coprothermobacter proteolyticus
  source 1..40: mol_type = genomic DNA
tgctggttggcaccatgttctgctgatggggaaccccggg

SEQ ID NO: 4434 - DNA, 40 bp, Coprothermobacter proteolyticus
  source 1..40: mol_type = genomic DNA
tgctggttggcaccatgttttgctgatggggaaccccggg

SEQ ID NO: 4435 - DNA, 50 bp, Coprothermobacter proteolyticus
  source 1..50: mol_type = genomic DNA
attcttaaagtgatttatcatgctttcattttatattcatatttttcctt

SEQ ID NO: 4436 - protein, 518 aa, Kosakonia cowanii
MVPKGSPMNNNINEKQGIRRAAQYLRMSTLNQEFSLDNQAHFIRQYAQEHNYEILHTYDDAGKSGVTASGRHDFNKLINDILFKEISIDAVLVYDVSRFGRFEDPLEGIYYKYLVEKHGVKVIFCAEDIPENLMESPFFLLMLMYSAGSYSKNLSQKVLAGHINLVNRGYYQGGVPGYGLKRSLVDNNNQFKMPLNAGERKSLTTDRVVLSPGKKEEIQLVKRIFDTFIFKGLSEYLIAVNLNREGFRYSDGSYWNRSRIHAILINIRYTGKYLYNRTSSRLQSKRTKNPESQWVENKSLFKPIISLEKFRLAQEIINSRSRHLTDDEILTFLKKKLEENGKISGFIIDQDSSGPSSSVVANRFGGLINAYKLIGYTPEIDYSFLAINESLRNKHNILLKEIEEKITSKNIFITDKKLVSINKALTFSIVLSRCRKRGNEKYQWIVRLDRSLNADLNIVVRMNTLNSEPVDYYILPSLEKFEDELKIKEDNDMLFELYRFDNLDALLDMLTPSLMEAS

SEQ ID NO: 4437 - DNA, 50 bp, Kosakonia cowanii
  source 1..50: mol_type = genomic DNA
aagaatttactcgatgttctgaatctgaatatcgaatagtattaattatt

SEQ ID NO: 4438 - DNA, 40 bp, Kosakonia cowanii
  source 1..40: mol_type = genomic DNA
cttattcgatattctgaatctgctcgcgcatctgctcaat

SEQ ID NO: 4439 - DNA, 40 bp, Kosakonia cowanii
  source 1..40: mol_type = genomic DNA
cttattcgatattctgaataagctcgcgcatctgctcaat

SEQ ID NO: 4440 - DNA, 50 bp, Kosakonia cowanii
  source 1..50: mol_type = genomic DNA
aacaatttaacaaaagttctgaataaaataatcgacattaaaaaattatt

SEQ ID NO: 4441 - protein, 532 aa, Vibrio parahaemolyticus
MTSVSSTVKVHLYVRFSTVTQRKGFSLQRQTETWQSFIDSNNHQVGNQYIDDGISGFKTDADERPAFSEMMAHIKAGTIRRNDIIVFENLDRMGRQSVTKQMSLLLNIVSTGVRLYIATDKTLFDENATMVDLMMSLVAMQRANDESATKSFRGQKTWARKLKQFHDGILVTRNVPSWLIVNEGYGIGDKSLDAVGYHPTHAETVRRIFQLCIDGHGAQAICKVLNSETAPTFRSSARWIPTTVRHILKHRSTFGEWTFKEETKEGYYPAVISKETFLKAQSIIANRTQVGSVGLKTGRRVNLFSGLLRCHHCGSGITYANSNRKSHALRCNGNRQGFCEFNGSMPYKLFEQRMLECISEIEWDDEITDEAGQKLVLEAEIEEIDKRIANISKAISYGGDIPALVKQLTELNANKDDISIQLGELEVASTRLAIDIDETVDEVINGNLEIRNRAAQKIANAVKHIRIIHHKKYKRSNVNDIKAAVIQLRNGQTRQTFILREQYGPNKLLGNYNFGAIPDFEQYDEPERVNTD

SEQ ID NO: 4442 - DNA, 50 bp, Vibrio parahaemolyticus
  source 1..50: mol_type = genomic DNA
cttttattttatagacaaaatatcaagaatcattgtctataaaattataa

SEQ ID NO: 4443 - DNA, 40 bp, Vibrio parahaemolyticus
  source 1..40: mol_type = genomic DNA
aaatggcggacagaacgttaacaaggtagcgactgccata

SEQ ID NO: 4444 - DNA, 40 bp, Vibrio parahaemolyticus
  source 1..40: mol_type = genomic DNA
aaatggcggacagaacgtttgcaaggtagcgactgccata

SEQ ID NO: 4445 - DNA, 50 bp, Vibrio parahaemolyticus
  source 1..50: mol_type = genomic DNA
cttttgtttatttctcaaactttctgaaatcatagatcaccaaatcataa

SEQ ID NO: 4446 - protein, 526 aa, Flavonifractor plautii
MDEYCLYLRKSRIDLEAEANGQGDTLARHRADLLKLARKRGLNITGCYEEVRSGESIAERPEMQRLLNDVEAGRWTGVLVMEVERLARGNTTDQGVVADTFKYSDTKIVTPNKVYDPGDEFDEEYFEFGLFMSRREYKTINRRLQRGRRASLSEGKYIAGKATYGYERYKLSGEKGYSLRIIPEQAEIVRQIYDWYVNGELLPDGTLRPLGSYTIAKRLDARGIPSPTGGKWPPCTVKDILTNPTYIGKLRWSYRPTVKRMVDGELVKTRPVDRAVHLSDGRHEPILDEVLWHRAQLMLKNRSHAPVPKSTNIRNPLAGLLICSKCGRSMERRKFKHGRDTVACPNKDCNCKSSVLEEVEAGMLDSLRIWLSDYKIKLAQSQETISHTGPTAEQEITSLQRTLGTLQAQMDNLYNLVEQGVYSTDLFLQRSQALTARMAEVNQQIETTQAALTASRRIARNRFEIIPRIERVLALYPTLTDPREKNTILKEVLEKILYTKTTGSRWEASDMNLYVFPRVETDGEQL

SEQ ID NO: 4447 - DNA, 50 bp, Flavonifractor plautii
  source 1..50: mol_type = genomic DNA
tacagggggcttatatggttttatacttatagccaaataagttatatgtg

SEQ ID NO: 4448 - DNA, 40 bp, Flavonifractor plautii
  source 1..40: mol_type = genomic DNA
gacctatgagtggggctatacctatggtccgccgatggcg

SEQ ID NO: 4449 - DNA, 40 bp, Flavonifractor plautii
  source 1..40: mol_type = genomic DNA
gacctatgagtggggctataactatggtccgccgatggcg

SEQ ID NO: 4450 - DNA, 50 bp, Flavonifractor plautii
  source 1..50: mol_type = genomic DNA
tacatgatttttttgtggttttataaatataaccacatgttttatatgtg

SEQ ID NO: 4451 - protein, 498 aa, Raoultella ornithinolytica; identical to SEQ ID NO: 1416

SEQ ID NO: 4452 - DNA, 50 bp, Raoultella ornithinolytica
  source 1..50: mol_type = genomic DNA
ttttgttcactttgaaacaatattgtgatattgttgcaaagaagcaaaat

SEQ ID NO: 4453 - DNA, 40 bp, Raoultella ornithinolytica; identical to SEQ ID NO: 4188
  source 1..40: mol_type = genomic DNA

SEQ ID NO: 4454 - DNA, 40 bp, Raoultella ornithinolytica; identical to SEQ ID NO: 4189
  source 1..40: mol_type = genomic DNA

SEQ ID NO: 4455 - DNA, 50 bp, Raoultella ornithinolytica
  source 1..50: mol_type = genomic DNA
ttttgttataaatgaaccaatattgatacattgttattattaaccaaagt

SEQ ID NO: 4456 - protein, 518 aa, Klebsiella grimontii
MVPKGSPMNNNINEKQGIRRAAQYLRMSTLNQEFSLDNQAHFIRQYAQEHNYEILHTYDDAGKSGVTASGRHDFNKLINDILFKEISIDAVLVYDVSRFGRFEDPLEGIYYKYLVEKHGVKVIFCAEDIPENLMESPFFLLMLMYSAGSYSKNLSQKVLAGHINLVNRGYYQGGVPGYGLKRSLVDNNNQFKMPLNAGERKSLTTDRVVLSPGKKEEIQLVKRIFDTFIFKGLSEYLIAVNLNREGFRYSDGSYWNRSRIHAILINIRYTGKYLYNRTSSRLQSKRTKNPESQWVENKSLFKPIISLEKFRLAQEIINSRSRQLTDDEILTFLKKKLEENGKISGFIIDQDSSGPSSSVVANRFGGLINAYKLIGYTPEIDYSFLAINESLRNKHNILLKEIEEKITSKNIFITDKKLVSINKALTFSIVLSRCRKRGNEKYQWIVRLDRSLNADLNIVVRMNTLNSEPVDYYILPSLEKFEDELKIKEDNDMLFELYRFDNLDALLDMLTPSLMEAS

SEQ ID NO: 4457 - DNA, 50 bp, Klebsiella grimontii
  source 1..50: mol_type = genomic DNA
gttgaaagaatttattcgatgttttgaatctgaatattgattattataaa

SEQ ID NO: 4458 - DNA, 40 bp, Klebsiella grimontii
  source 1..40: mol_type = genomic DNA
aaaccgttactcgatgttctggatctgctcgcgcatttgt

SEQ ID NO: 4459 - DNA, 40 bp, Klebsiella grimontii
  source 1..40: mol_type = genomic DNA
aaaccgttactcgatgttcaggatctgctcgcgcatttgt

SEQ ID NO: 4460 - DNA, 50 bp, Klebsiella grimontii
  source 1..50: mol_type = genomic DNA
ggtgaaatgcacactgcgatgtttagaagcttaagaaatagcattataaa

SEQ ID NO: 4461 - protein, 558 aa, Yersinia intermedia
MISTNNRTSYCYARVSSETQGSGYGMSRQADSLLDYVKNYEDKEKLGFLLNCDQIVWLRAEGVSAFKGKNLADGSVLKSFITGVITGEIINACLLIENVDRFSRQNPIEAAQLFLSLINADCPIIEVENDIVHHKHSDLTLITAGLIRANKESARKQKLSQKNWDKRFDQALKKNDIVSGNHPNWLTIIDNKYEIVETDAMTYRKIFELFLNNYGPSLIRDYLVEQNLQANGRLLRSNEISRILRDRRLTGQYRSAKVNSRKVLDGQSIFPVIVQPADFNAVQNMLNTSVYSTHKQKIGKSSNNLFSTIALCEKCGSALTVNYASKNKSLYYYRCSASILRNKTPCDALGMRYDYIEKAIIQNIRHVDFSVNKRNDNNVQKRLNLLLKDLQHKTAYRDELLEDINALEIPDPSDRRILKNVIKKIAEIETEINNVRSIDTDTTNVDSVRSIISDEIFNRDNQELRIDLNSRLCKVLKRVEIERLSGVDIIIVNLNYFISDNTQFIFIDASNGRVTLQGYKDNKTKISYFEKDGKHMVLDYENMIYTNENGELINPLEW

SEQ ID NO: 4462 - DNA, 50 bp, Yersinia intermedia
  source 1..50: mol_type = genomic DNA
gtttgtatattagtttttactatgcttatagtttgaagtattatacaaac

SEQ ID NO: 4463 - DNA, 40 bp, Yersinia intermedia
  source 1..40: mol_type = genomic DNA
ggagggaataaaaaatacgcttatagtttgtacccaaatt

SEQ ID NO: 4464 - DNA, 40 bp, Yersinia intermedia
  source 1..40: mol_type = genomic DNA
ggagggaataaaaaatacgtatatagtttgtacccaaatt

SEQ ID NO: 4465 - DNA, 50 bp, Yersinia intermedia
  source 1..50: mol_type = genomic DNA
atatgtatatacatttttataatgtatatagtttgatcttgggttcaagc

SEQ ID NO: 4466 - protein, 498 aa, Klebsiella pneumoniae
MKQNGQAYSYIRFSSKKQEQGDSVRRQTELAEQYAHANSLILSDKNFQDLGISAFKEGNRPSLGDMLEAIEKGQIEQGSTIIIESLDRLSRRGIDVTQQIIKSILQNNVFIASLVDGLLLNRESTNDLVSVIRIALAADLAYKESEKKSQRLRETKGQQRQRALNGEVINKILPFWLERKQNKFVFSEKLDTVKRIIELRRKGLGTNKIAKTLNNEGHKPLRSAGWNHTTVGKTINSVALYGAYQTSETTKDRKVILLDIVEDYYPAVISKEEFMLLQSDQKQNKPGYKSEHNAFTGILKHECGGALVRKFHVVSGKTYQYHVCANARDGKCNVTKNFKNIEIALYQIMKELKLEKKTSIDETLLLERNSVKAKIQELNDMLLNVSKIPISVIQTINNLEEKQHGLEENIKQQNNMIISEQAFDFNLLQEIKDPQELNMMLKRVIEQIIVFNIGKRWRVKVMYRNKHSQSFIWDGEKISFISDTKKLLELFKSQTEEV

SEQ ID NO: 4467 - DNA, 50 bp, Klebsiella pneumoniae
  source 1..50: mol_type = genomic DNA
ttttattcactttgaaactatattgtgatattgttgcaaagaagcaaaat

SEQ ID NO: 4468 - DNA, 40 bp, Klebsiella pneumoniae; identical to SEQ ID NO: 1418
  source 1..40: mol_type = genomic DNA

SEQ ID NO: 4469 - DNA, 40 bp, Klebsiella pneumoniae
  source 1..40: mol_type = genomic DNA
cttactgccaaactgcatgcaaacgttgctggatactagc

SEQ ID NO: 4470 - DNA, 50 bp, Klebsiella pneumoniae
  source 1..50: mol_type = genomic DNA
ttttattcatctttcaactatatacacatatttctgtattatagaaacat

SEQ ID NO: 4471 - protein, 499 aa, Escherichia coli
MKQNGKAYSYIRFSSKKQEQGDSVRRQIALAEHYAHANNLILSDKNFQDLGISAFKEGNRPSLGDMLEAIEQGQIEQGSTIIIESLDRLSRRGIDVTQQIIKSILQKNVFIASLVDGLLLNRDSVNDLVSVIRIALAADLAYKESEKKSKRLRETKGQQRQRALKGEVINKILPFWLERKQNKYIFSSRLATVKRIIELRQKGLGTNKIAKILNEEGHKPLRSKGWNHTTVGKTINSVALYGAYQTSETTQDRKVILLDIVENYYPAVISKEEFMLLQSDHKQNKPGYKSEHNAFAGILKHECGGALVRKFHVASGKTYQYHVCANARDGKCNVTKNFKNIEVALYKIMKELKLEKKTSFDKTLLEERNSVKTKIQELNNILLELPKVPVSVLKTINNLEERLQDLEEKVKYQDNIITSEKSFDINVLKEIQDPQELNMMLKRVIENIIVFNIGKRWRIKILYRNKHSQSFIWDGNNITFVSDTKKLLELVKHTPEESK

SEQ ID NO: 4472 - DNA, 50 bp, Escherichia coli; identical to SEQ ID NO: 4467
  source 1..50: mol_type = genomic DNA

SEQ ID NO: 4473 - DNA, 40 bp, Escherichia coli
  source 1..40: mol_type = genomic DNA
cttactgccgaactgcatggtgacgttactggaaactaac

SEQ ID NO: 4474 - DNA, 40 bp, Escherichia coli
  source 1..40: mol_type = genomic DNA
cttactgccgaactgcatgcagacgttactggaaactaac

SEQ ID NO: 4475 - DNA, 50 bp, Escherichia coli; identical to SEQ ID NO: 4470
  source 1..50: mol_type = genomic DNA

SEQ ID NO: 4476 - protein, 499 aa, Escherichia coli
MKQNGKAYSYIRFSSKKQEQGDSVRRQIALAEHYAHANNLILSDKNFQDLGISAFKEGNRPSLGDMLEAIEQGQIEQGSTIIIESLDRLSRRGIDVTQQIIKSILQKNVFIASLVDGLLLNRDSVNDLVSVIRIALAADLAYKESEKKSKRLRETKGQQRQRALKGEVINKILPFWLERKQNKYIFSSRLATVKRIIELRQKGLGTNKIAKILNEEGHKPLRSKGWNHTTVGKTINSVALYGAYQTSETTQDRKVILLDIVENYYPAVISKEEFMLLQSDHKQNKPGYKSEHNAFAGILKHECGGALVRKFHVASGKTYQYHVCANARDGKCNVTKNFKNIEVALYKIMKELKLEKKTSFDKTLLEERNSVKTKIQDLNNILLELPKVPVSVLKTINNLEERLQDLEEKVKYQDNIITSEKSFDINVLKEIQDPQELNMMLKRVIENIIVFNIGRRWRIKILYRNKHSQSFIWDGNNITFVSDTKKLLELVKHTPEESK

SEQ ID NO: 4477 - DNA, 50 bp, Escherichia coli; identical to SEQ ID NO: 4467
  source 1..50: mol_type = genomic DNA

SEQ ID NO: 4478 - DNA, 40 bp, Escherichia coli; identical to SEQ ID NO: 4473
  source 1..40: mol_type = genomic DNA

SEQ ID NO: 4479 - DNA, 40 bp, Escherichia coli; identical to SEQ ID NO: 4474
  source 1..40: mol_type = genomic DNA

SEQ ID NO: 4480 - DNA, 50 bp, Escherichia coli; identical to SEQ ID NO: 4470
  source 1..50: mol_type = genomic DNA

SEQ ID NO: 4481 - protein, 499 aa, Escherichia coli
MKQNGKAYSYVRFSSKKQEQGDSVRRQIALAEHYAHANNLILSDKNFQDLGISAFKEGNRPSLGDMLEAIEQGQIEQGSTIIIESLDRLSRRGIDVTQQIIKSILQKNVFIASLVDGLLLNRDSVNDLVSVIRIALAADLAYKESEKKSKRLRETKGQQRQRALKGEVINKILPFWLERKQNKYIFSSRLATVKRIIELRQKGLGTNKIAKILNEEGHKPLRSKGWNHTTVGKTINSVALYGAYQTSETTQDRKVILLDIVENYYPAVISKEEFMLLQSDHKQNKPGYKSEHNAFAGILKHECGGALVRKFHVASGKTYQYHVCANARDGKCNVTKNFKNIEVALYKIMKELKLEKKTSFDKTLLEERNSVKTKIQELNNILLELPKVPVSVLKTINNLEERLQDLEEKVKYQDNIITSEKSFDINVLKEIQDPQELNMMLKRVIENIIVFNIGKRWRIKILYRNKHSQSFIWDGNNITFVSDTKKLLELVKHTPEESK

SEQ ID NO: 4482 - DNA, 50 bp, Escherichia coli; identical to SEQ ID NO: 4467
  source 1..50: mol_type = genomic DNA

SEQ ID NO: 4483 - DNA, 40 bp, Escherichia coli; identical to SEQ ID NO: 4473
  source 1..40: mol_type = genomic DNA

SEQ ID NO: 4484 - DNA, 40 bp, Escherichia coli; identical to SEQ ID NO: 4474
  source 1..40: mol_type = genomic DNA

SEQ ID NO: 4485 - DNA, 50 bp, Escherichia coli; identical to SEQ ID NO: 4470
  source 1..50: mol_type = genomic DNA

SEQ ID NO: 4486 - protein, 498 aa, Klebsiella pneumoniae; identical to SEQ ID NO: 4466

SEQ ID NO: 4487 - DNA, 50 bp, Klebsiella pneumoniae; identical to SEQ ID NO: 4467
  source 1..50: mol_type = genomic DNA

SEQ ID NO: 4488 - DNA, 40 bp, Klebsiella pneumoniae; identical to SEQ ID NO: 1423
  source 1..40: mol_type = genomic DNA

SEQ ID NO: 4489 - DNA, 40 bp, Klebsiella pneumoniae
  source 1..40: mol_type = genomic DNA
cttgctgccaaactgcatgcaaacgttgctggatactagc

SEQ ID NO: 4490 - DNA, 50 bp, Klebsiella pneumoniae; identical to SEQ ID NO: 4470
  source 1..50: mol_type = genomic DNA

SEQ ID NO: 4491 - protein, 423 aa, Escherichia coli
MKQNGKAYSYIRFSSKKQEQGDSVRRQIALAEHYAHANNLILSDKNFQDLGISAFKEGNRPSLGDMLEAIEQGQIEQGSTIIIESLDRLSRRGIDVTQQIIKSILQKNVFIASLVDGLLLNRDSVNDLVSVIRIALAADLAYKESEKKSKRLRETKGQQRQRALKGEVINKILPFWLERKQNKYIFSSRLATVKRIIELRQKGLGTNKIAKILNEEGHKPLRSKGWNHTTVGKTINSVALYGAYQTSETTQDRKVILLDIVENYYPAVISKEEFMLLQSDHKQNKPGYKSEHNAFAGILKHECGGALVRKFHVASGKTYQYHVCANARDGKCNVTKNFKNIEVALYKIMKELKLEKKTSFDKTLLEERNSVKTKIQELNNILLELPKVPVSVLKTINNLEERLQDLEEKVKYQDNIITSEKII

SEQ ID NO: 4492 - DNA, 50 bp, Escherichia coli; identical to SEQ ID NO: 4467
  source 1..50: mol_type = genomic DNA

SEQ ID NO: 4493 - DNA, 40 bp, Escherichia coli; identical to SEQ ID NO: 4473
  source 1..40: mol_type = genomic DNA

SEQ ID NO: 4494 - DNA, 40 bp, Escherichia coli; identical to SEQ ID NO: 4474
  source 1..40: mol_type = genomic DNA

SEQ ID NO: 4495 - DNA, 50 bp, Escherichia coli; identical to SEQ ID NO: 4470
  source 1..50: mol_type = genomic DNA

SEQ ID NO: 4496 - protein, 499 aa, Escherichia coli
MKQNGKAYSYIRFSSKKQEQGDSVRRQIALAEHYAHANNLILSDKNFQDLGISAFKEGNRPSLGDMLEAIEQGQIEQGSTIIIESLDRLSRRGIDVTQQIIKSILQKNVFIASLVDGLLLNRDSVNDLVSVIRIALAADLAYKESEKKSKRLRETKGQQRQRALKGEVINKILPFWLERKQNKYIFSSRLATVKRIIELRQKGLGTNKIAKILNEEGHKPLRSKGWNHTTVGKTINSVALYGAYQTSETTQDRKVILLDIVENYYPAVISKEEFMLLQSDHKQNKPGYKSEHNAFAGILKHECGGALVRKFHVASGKTYQYHVCANARDGKCNVTKNFKNIEVALYKIMKELKLEKKTSFDKTLLEERNSVKTKIQELNNILLELPKVPVSVLKTINNLEERLQDLEEKVKYQDNMITSEKSFDINVLKEIQDPQELNMMLKRVIENIIVFNIGKRWRIKILYRNKHSQSFIWDGNNITFVSDTKKLLELVKHTPEESK

SEQ ID NO: 4497 - DNA, 50 bp, Escherichia coli; identical to SEQ ID NO: 4467
  source 1..50: mol_type = genomic DNA

SEQ ID NO: 4498 - DNA, 40 bp, Escherichia coli; identical to SEQ ID NO: 4473
  source 1..40: mol_type = genomic DNA

SEQ ID NO: 4499 - DNA, 40 bp, Escherichia coli; identical to SEQ ID NO: 4474
  source 1..40: mol_type = genomic DNA

SEQ ID NO: 4500 - DNA, 50 bp, Escherichia coli; identical to SEQ ID NO: 4470
  source 1..50: mol_type = genomic DNA

SEQ ID NO: 4501 - protein, 499 aa, Escherichia coli
MKQNGKAYSYIRFSSKKQEQGDSVRRQIALAEHYAHANNLILSDKNFQDLGISAFKEGNRPSLGDMLEAIEQGQIEQGSTIIIESLDRLSRRGIDVTQQIIKSILQKNVFIASLVDGLLLNRDSVNDLVSVIRIALAADLAYKESEKKSKRLRETKGQQRQRALKGEVINKILPFWLERKQNKYIFSSRLATVKRIIELRQKGLGTNKIAKILNEEGHKPLRSKGWNHTTVGKKINSVALYGAYQTSETTQDRKVILLDIVENYYPAVISKEEFMLLQSDHKQNKPGYKSEHNAFAGILKHECGGALVRKFHVASGKTYQYHVCANARDGKCNVTKNFKNIEVALYKIMKELKLEKKTSFDKTLLEERNSVKTKIQELNNILLELPKVPVSVLKTINNLEERLQDLEEKVKYQDNIITSEKSFDINVLKEIQDPQELNMMLKRVIENIIVFNIGKRWRIKILYRNKHSQSFIWDGNNITFVSDTKKLLELVKHTPEESK

SEQ ID NO: 4502 - DNA, 50 bp, Escherichia coli; identical to SEQ ID NO: 4467
  source 1..50: mol_type = genomic DNA

SEQ ID NO: 4503 - DNA, 40 bp, Escherichia coli; identical to SEQ ID NO: 4473
  source 1..40: mol_type = genomic DNA

SEQ ID NO: 4504 - DNA, 40 bp, Escherichia coli; identical to SEQ ID NO: 4474
  source 1..40: mol_type = genomic DNA

SEQ ID NO: 4505 - DNA, 50 bp, Escherichia coli; identical to SEQ ID NO: 4470
  source 1..50: mol_type = genomic DNA

SEQ ID NO: 4506 - protein, 498 aa, Klebsiella oxytoca
MKQNGQAYSYIRFSSKKQEQGDSVRRQTELAEQYAHANSLILSDKNFQDLGISAFKEGNRPSLGDMLEAIEKGQIEQGSTIIIESLDRLSRRGIDVTQQIIKSILQNNVFIASLVDGLLLNRESTNDLVSVIRIALAADLAYKESEKKSQRLRETKGQQRQRALNGEVINKILPFWLERKQNKFVFSEKLDTVKRIIELRRKGLGTNKIAKTLNNEGHKPLRSAGWNHTTVGKTINSVALYGAYQTSETTKDRKVILLDIVEDYYPAVISKEEFMLLQSDQKQNKPGYKSEHNAFTGILRHECGGALVRKFHVFSGKTYQYHVCANARDGKCNVTKNFKNIEIALYQIMKELKLEKKTSIDETLLLERNSVKAKIQELNDMLLNVSKIPISVIQTINNLEEKQQGLEENIKQQNSMIISEQAFDFNLLQEIKDPQELNMMLKRVIEQIIVFNIGKRWRVKVMYRNKHSQSFIWDGEKISFISDTKKLLELFKSQTEEM

SEQ ID NO: 4507 - DNA, 50 bp, Klebsiella oxytoca; identical to SEQ ID NO: 4467
  source 1..50: mol_type = genomic DNA

SEQ ID NO: 4508 - DNA, 40 bp, Klebsiella oxytoca
  source 1..40: mol_type = genomic DNA
cttactgccgaactgcatggtgacgttgctggatactagc

SEQ ID NO: 4509 - DNA, 40 bp, Klebsiella oxytoca
  source 1..40: mol_type = genomic DNA
cttactgccgaactgcatgcagacgttgctggatactagc

SEQ ID NO: 4510 - DNA, 50 bp, Klebsiella oxytoca; identical to SEQ ID NO: 4470
  source 1..50: mol_type = genomic DNA

SEQ ID NO: 4511 - protein, 498 aa, Klebsiella michiganensis
MKQNGQAYSYIRFSSKKQEQGDSVRRQTELAEQYAHANSLILSDKNFQDLGISAFKEGNRPSLGDMLEAIEKGQIEQGSTIIIESLDRLSRRGIDVTQQIIKSILQNNVFIASLVDGLLLNRESTNDLVSVIRIALAADLAYKESEKKSQRLRETKGQQRQRALNGEVINKILPFWLERKQNKFVFSEKLDTVKRIIELRRKGLGTNKIAKTLNNEGHKPLRSAGWNHTTVGKTINSVALYGAYQTSETTKDRKVILLDIVEDYYPAVISKEEFMLLQSDQKQNKPGYKSEHNAFTGILRHECGGALVRKFHVVSGKTYQYHVCANARDGKCNVTKNFKNIEIALYQIMKELKLEKKTSIDETLLLERNSVKAKIQELNDMLLNVSKIPISVIQTINNLEEKQQGLEENIKQQNSMIISEQAFDFNLLQEIKDPQELNMMLKRVIEQIIVFNIGKRWRVKVMYRNKHSQSFIWDGEKISFISDTKKLLELFKSQTEEM

SEQ ID NO: 4512 - DNA, 50 bp, Klebsiella michiganensis; identical to SEQ ID NO: 4467
  source 1..50: mol_type = genomic DNA

SEQ ID NO: 4513 - DNA, 40 bp, Klebsiella michiganensis; identical to SEQ ID NO: 4508
  source 1..40: mol_type = genomic DNA

SEQ ID NO: 4514 - DNA, 40 bp, Klebsiella michiganensis; identical to SEQ ID NO: 4509
  source 1..40: mol_type = genomic DNA

SEQ ID NO: 4515 - DNA, 50 bp, Klebsiella michiganensis; identical to SEQ ID NO: 4470
  source 1..50: mol_type = genomic DNA

SEQ ID NO: 4516 - protein, 498 aa, Klebsiella quasipneumoniae
MKQNGQAYSYVRFSSKKQEQGDSVRRQTELAEQYAHANSLILSDKNFQDLGISAFKEGNRPSLGDMLEAIEKGQIEQGSTIIIESLDRLSRRGIDVTQQIIKSILQNNVFIASLVDGLLLNRESTNDLVSVIRIALAADLAYKESEKKSQRLRETKGQQRQRALNGEVINKILPFWLERKQNKFVFSEKLDTVKRIIELRRKGLGTNKIAKTLNNEGHKPLRSAGWNHTTVGKTINSVALYGAYQTSETTKDRKVILLDIVEDYYPAVISKEEFMLLQSDQKQNKPGYKSEHNAFTGILKHECGGALVRKFHVVSGKTYQYHVCANARDGKCNVTKNFKNIEIALYQIMKELKLEKKTSIDETLLLERNSVKAKIQELNDMLLNVSKIPISVIQTINNLEEKQHGLEENIKQQNNMIISEQAFDFNLLQEIKDPQELNMMLKRVIEQIIVFNIGKRWRVKVMYRNKHSQSFIWDGEKISFISDTKKLLELFKSQTEEV

SEQ ID NO: 4517 - DNA, 50 bp, Klebsiella quasipneumoniae; identical to SEQ ID NO: 4467
  source 1..50: mol_type = genomic DNA

SEQ ID NO: 4518 - DNA, 40 bp, Klebsiella quasipneumoniae; identical to SEQ ID NO: 1418
  source 1..40: mol_type = genomic DNA

SEQ ID NO: 4519 - DNA, 40 bp, Klebsiella quasipneumoniae; identical to SEQ ID NO: 4469
  source 1..40: mol_type = genomic DNA

SEQ ID NO: 4520 - DNA, 50 bp, Klebsiella quasipneumoniae; identical to SEQ ID NO: 4470
  source 1..50: mol_type = genomic DNA

SEQ ID NO: 4521 - protein, 499 aa, Escherichia coli
MKQNGKAYSYIRFSSKKQEQGDSVRRQIALAEHYAHANNLILSDKNFQDLGISAFKEGNRPSLGDMLEAIEQGQIEQGSTIIIESLDRLSRRGIDVTQQIIKSILQKNVFIASLVDGLLLNRDSVNDLVSVIRIALAADLAYKESEKKSKRLRETKGQQRQRALKGEVINKILPFWLERKQNKYIFSSRLATVKRIIELRQKGLGTNKIAKILNEEGHKPLRSKGWNHTTVGKTINSVALYGAYQTSETTQDRKVILLDIVENYYPAVISKEEFMLLQSDHKQNKPGYKSEHNAFAGILKHECGGALVRKFHVASGKTYQYHVCANARDGKCNVTKNFKNIEVALYKIMKELKLEKKTSFDKTLLEERNSVKTKIQELNNILLELPKVPVSVLKTINNLEERLQDLEEKVKYQDNIITSEKSFDINALKEIQDPQELNMMLKRVIENIIVFNIGKRWRIKILYRNKHSQSFIWDGNNITFVSDTKKLLELVKHTPEESK

SEQ ID NO: 4522 - DNA, 50 bp, Escherichia coli; identical to SEQ ID NO: 4467
  source 1..50: mol_type = genomic DNA

SEQ ID NO: 4523 - DNA, 40 bp, Escherichia coli; identical to SEQ ID NO: 4473
  source 1..40: mol_type = genomic DNA

SEQ ID NO: 4524 - DNA, 40 bp, Escherichia coli; identical to SEQ ID NO: 4474
  source 1..40: mol_type = genomic DNA

SEQ ID NO: 4525 - DNA, 50 bp, Escherichia coli; identical to SEQ ID NO: 4470
  source 1..50: mol_type = genomic DNA

SEQ ID NO: 4526 - protein, 499 aa, Escherichia coli
MKQNGKAYSYIRFSSKKQEQGDSVRRQIALAEHYAHANNLILSDKNFQDLGISAFKEGNRPSLGDMLEAIEQGQIEQGSTIIIESLDRLSRRGIDVTQQIIKSILQKNVFIASLVDGLLLNRDSVNDLVSVIRIALAADLAYKESEKKSKRLRETKGQQRQRALKGEVINKILPFWLERKQNKYIFSSRLATVKRIIELRQKGLGTNKIAKILNEEGHKPLRSKGWNHTTVGKTINSVALYGAYQTSETTQDRKVILLDIVENYYPAVISKEEFMLLQSDHKQNKPGYKSEHNAFAGILKHECGGALVRKFHVASGKTYQYHVCANARDGKCNVTKNFKNIEVALYKIMKELKLEKKTSFDKTLLEERNSVKTKIQELNNILLELPKVPVSVLKTINNLEERLQDLEEKVKYQDNIITSEKLFDINVLKEIQDPQELNMMLKRVIENIIVFNIGKRWRIKILYRNKHSQSFIWDGNNITFVSDTKKLLELVKHTPEESK

SEQ ID NO: 4527 - DNA, 50 bp, Escherichia coli; identical to SEQ ID NO: 4467
  source 1..50: mol_type = genomic DNA

SEQ ID NO: 4528 - DNA, 40 bp, Escherichia coli; identical to SEQ ID NO: 4473
  source 1..40: mol_type = genomic DNA

SEQ ID NO: 4529 - DNA, 40 bp, Escherichia coli; identical to SEQ ID NO: 4474
  source 1..40: mol_type = genomic DNA

SEQ ID NO: 4530 - DNA, 50 bp, Escherichia coli; identical to SEQ ID NO: 4470
  source 1..50: mol_type = genomic DNA

SEQ ID NO: 4531 - protein, 499 aa, Escherichia coli
MKQNGKAYSYIRFSSKKQEQGDSVRRQIALAEHYAHANNLILSDKNFQDLGISAFKEGNRPSLGDMLEAIEQGQIEQGSTIIIESLDRLSRRGIDVTQQIIKSILQKNVFIASLVDGLLLNRDSVNDLVSVIRIALAADLAYKESEKKSKRLRETKGQQRQRALKGEVINKILPFWLERKQNKYIFSSRLATVKRIIELRQKELGTNKIAKILNEEGHKPLRSKGWNHTTVGKTINSVALYGAYQTSETTQDRKVILLDIVENYYPAVISKEEFMLLQSDHKQNKPGYKSEHNAFAGILKHECGGALVRKFHVASGKTYQYHVCANARDGKCNVTKNFKNIEVALYKIMKELKLEKKTSFDKTLLEERNSVKTKIQELNNILLELPKVPVSVLKTINNLEERLQDLEEKVKYQDNIITSEKSFDINVLKEIQDPQELNMMLKRVIENIIVFNIGKRWRIKILYRNKHSQSFIWDGNNITFVSDTKKLLELVKHTPEESK

SEQ ID NO: 4532 - DNA, 50 bp, Escherichia coli; identical to SEQ ID NO: 4467
  source 1..50: mol_type = genomic DNA

SEQ ID NO: 4533 - DNA, 40 bp, Escherichia coli; identical to SEQ ID NO: 4473
  source 1..40: mol_type = genomic DNA

SEQ ID NO: 4534 - DNA, 40 bp, Escherichia coli; identical to SEQ ID NO: 4474
  source 1..40: mol_type = genomic DNA

SEQ ID NO: 4535 - DNA, 50 bp, Escherichia coli; identical to SEQ ID NO: 4470
  source 1..50: mol_type = genomic DNA

SEQ ID NO: 4536 - protein, 499 aa, Escherichia coli
MKQNGKAYSYIRFSSKKQEQGDSVRRQIALAEHYAHANNLILSDKNFQDLGISAFKEGNRPSLGDMLEAIEQGQIEQGSTIIIESLDRLSRRGIDVTQQIIKSILQKNVFIASLVDGLLLNRDSVNDLVSVIRIALAADLAYKESEKKSKRLRETKGQQRQRAIKGEVINKILPFWLERKQNKYIFSSRLATVKRIIELRQKGLGTNKIAKILNEEGHKPLRSKGWNHTTVGKTINSVALYGAYQTSETTQDRKVILLDIVENYYPAVISKEEFMLLQSDHKQNKPGYKSEHNAFAGILKHECGGALVRKFHVASGKTYQYHVCANARDGKCNVTKNFKNIEVALYKIMKELKLEKKTSFDKTLLEERNSVKTKIQELNNILLELPKVPVSVLKTINNLEERLQDLEEKVKYQDNIITSEKSFDINVLKEIQDPQELNMMLKRVIENIIVFNIGKRWRIKILYRNKHSQSFIWDGNNITFVSDTKKLLELVKHTPEESK

SEQ ID NO: 4537 - DNA, 50 bp, Escherichia coli; identical to SEQ ID NO: 4467
  source 1..50: mol_type = genomic DNA

SEQ ID NO: 4538 - DNA, 40 bp, Escherichia coli; identical to SEQ ID NO: 4473
  source 1..40: mol_type = genomic DNA

SEQ ID NO: 4539 - DNA, 40 bp, Escherichia coli; identical to SEQ ID NO: 4474
  source 1..40: mol_type = genomic DNA

SEQ ID NO: 4540 - DNA, 50 bp, Escherichia coli; identical to SEQ ID NO: 4470
  source 1..50: mol_type = genomic DNA

SEQ ID NO: 4541 - protein, 499 aa, Escherichia coli
MKQNGKAYSYIRFSSKKQEQGDSVRRQIALAEHYAHANNLILSDKNFQDLGISAFKEGNRPSLGDMLEAIEQGQIEQGSTIIIESLDRLSRRGIDVTQQIIKSILQKNVFIASLVDGLLLNRDSVNDLVSVIRIALAADLAYKESEKKSKRLRETKGQQRQRALKGEVINKILPFWLERKQNKYIFSSRLATVKRIIELRQKGLGTNKIAKILNEEGHKPLRSKGWNHTTVGKTINSVALYGAYQTSETTQDRKVILLDIVENYYPAVISKEEFMLLQSDHKQNKPGYKSEHNAFAGILKHECGGALVRKFHVASGKTYQYHVCANARDGKCNVTKNFKNIEVALYKIMKELKLEKKTSFDKTLLEERNSVKTKIQELNNILLELPKVPVSVLKTINNLEERLQDLEEKVKYQDNIITSEKSFDINVLKEIQDPQELNMMLKRVIENIIVFNIGKRWRIKILYRNKHSQSFIWDGNNITFVSDTKKLLELVKHTPDESK

SEQ ID NO: 4542 - DNA, 50 bp, Escherichia coli; identical to SEQ ID NO: 4467
  source 1..50: mol_type = genomic DNA

SEQ ID NO: 4543 - DNA, 40 bp, Escherichia coli; identical to SEQ ID NO: 4473
  source 1..40: mol_type = genomic DNA

SEQ ID NO: 4544 - DNA, 40 bp, Escherichia coli; identical to SEQ ID NO: 4474
  source 1..40: mol_type = genomic DNA

SEQ ID NO: 4545 - DNA, 50 bp, Escherichia coli; identical to SEQ ID NO: 4470
  source 1..50: mol_type = genomic DNA

SEQ ID NO: 4546 - protein, 498 aa, Klebsiella pneumoniae; identical to SEQ ID NO: 4511

SEQ ID NO: 4547 - DNA, 50 bp, Klebsiella pneumoniae; identical to SEQ ID NO: 4467
  source 1..50: mol_type = genomic DNA

SEQ ID NO: 4548 - DNA, 40 bp, Klebsiella pneumoniae; identical to SEQ ID NO: 1423
  source 1..40: mol_type = genomic DNA

SEQ ID NO: 4549 - DNA, 40 bp, Klebsiella pneumoniae; identical to SEQ ID NO: 4489
  source 1..40: mol_type = genomic DNA

SEQ ID NO: 4550 - DNA, 50 bp, Klebsiella pneumoniae; identical to SEQ ID NO: 4470
  source 1..50: mol_type = genomic DNA

SEQ ID NO: 4551 - protein, 499 aa, Escherichia coli
MKQNGKAYSYIRFSSKKQEQGDSVRRQIALAEHYAHANNLILSDKNFQDLGISAFKEGNRPSLGDMLEAIEQGQIEQGSTIIIESLDRLSRRGIDVTQQIIKSILQKNVFIASLVDGLLLNRDSVNDLVSVIRIALAADLAYKESEKKSKRLRETKGQQRQRALKGEVINKILPFWLERKQNKYIFSSRLATVKRIIELRQKGLGTNKIAKILNEEGHKPLRSKGWNHTTVGKTINSVALYGAYQTSETTQDRKVILLDIVENYYPAVISKEEFMLLQSDHKQNKPGYKSEHNAFAGILKHECGGALVRKFHVASGKTYQYHVCANARDGKCNVTKNFKNIEVALYKIMKELKLEKKTSFDKTLLEERNSVKTKIQELNHILLELPKVPVSVLKTINNLEERLQDLEEKVKYQDNIITSEKSFDINVLKEIQDPQELNMMLKRVIENIIVFNIGKRWRIKILYRNKHSQSFIWDGNNITFVSDTKKLLELVKHTPEESK

SEQ ID NO: 4552 - DNA, 50 bp, Escherichia coli; identical to SEQ ID NO: 4467
  source 1..50: mol_type = genomic DNA

SEQ ID NO: 4553 - DNA, 40 bp, Escherichia coli; identical to SEQ ID NO: 4473
  source 1..40: mol_type = genomic DNA

SEQ ID NO: 4554 - DNA, 40 bp, Escherichia coli; identical to SEQ ID NO: 4474
  source 1..40: mol_type = genomic DNA

SEQ ID NO: 4555 - DNA, 50 bp, Escherichia coli; identical to SEQ ID NO: 4470
  source 1..50: mol_type = genomic DNA

SEQ ID NO: 4556 - protein, 563 aa, Bacteroides congonensis
MKRAALLLRCSTNIQDYNRQKLELEKVANRFKLKVAKVFGEHVTGKDDIRKGNRKSVDELINACENDEIDVVLISEVSRLTRNFLYGVTLVDKFNRDYSIPIYFRDKRKWTIDVETGEVNLEFEKELRKAFEQAEEELASIRFRMASGKRDSAGLGQWFAGFPPFGYTRQKNGYLVKNEYAPIVKEMFDKYLEEGQALITTTRYIYGKYPDIKKLKSIGNTKFILNNRAYTGRAEANIYDEIDKVTDTFYFDIPAIIDEETYNKVQKKLANNRTTTPYPRATKYLLQKLIKCSICGAFYTRLHSNKRDTVHFKCTSDKNSLTGCKSQVYLNERIVNPIIWNFVKEQLFYVGKMNAEQRLEAIAGENDNKSKAIEEQEALKISYKEQENKLTRLEDLYLDNDIDKNRYKERKSKIEKELSSIKAQMDRLTDRIRLSDFNIKRFNSTDFTEQYFKEVEADLEKQMKVLREYVKGIYPLYIDKVYCFLKVDTIEGMFNIFYEPRKAQQKCAYFIKDTLAQYHPDIRNFYTPNNTLLTDSDEVDAYYTLEEMKEICSRNGFEVRYRE

SEQ ID NO: 4557 - DNA, 50 bp, Bacteroides congonensis
  source 1..50: mol_type = genomic DNA
aatcaagaatgtttttagtttaattaattaaactaataacttttatgatt

SEQ ID NO: 4558 - DNA, 40 bp, Bacteroides congonensis
  source 1..40: mol_type = genomic DNA
tggtcaaactcatccatattaatcagcaggaaacggttca

SEQ ID NO: 4559 - DNA, 40 bp, Bacteroides congonensis
  source 1..40: mol_type = genomic DNA
tggtcaaactcatccatatatatcagcaggaaacggttca

SEQ ID NO: 4560 - DNA, 50 bp, Bacteroides congonensis
  source 1..50: mol_type = genomic DNA
agccaagcattgctttaaattaatattttaaaataagtatagttatgatt

SEQ ID NO: 4561 - protein, 563 aa, Bacteroides cellulosilyticus; identical to SEQ ID NO: 4556

SEQ ID NO: 4562 - DNA, 50 bp, Bacteroides cellulosilyticus
  source 1..50: mol_type = genomic DNA
aatcaagaatgtttttagtttaatcaattaaactaataacttttatgatt

SEQ ID NO: 4563 - DNA, 40 bp, Bacteroides cellulosilyticus
  source 1..40: mol_type = genomic DNA
tgggacgtttctttctgatcaacatcgacgagttcgacca

SEQ ID NO: 4564 - DNA, 40 bp, Bacteroides cellulosilyticus
  source 1..40: mol_type = genomic DNA
tgggacgtttctttctgatatacatcgacgagttcgacca

SEQ ID NO: 4565 - DNA, 50 bp, Bacteroides cellulosilyticus; identical to SEQ ID NO: 4560
  source 1..50: mol_type = genomic DNA

SEQ ID NO: 4566 - protein, 563 aa, Parabacteroides goldsteinii
MKRAALLLRCSTNIQDYNRQKLELEKVASKFGLEVAKVFGEHVTGKDDIRKGNRKSVDELINACENDEIDVVLISEVSRLTRNFLYGVTLVDKFNRDYSIPIYFRDKRKWTIDVETGEVNLEFEKELRKAFEQAEEELASIRFRMASGKRDSAGLGQWFAGFPPFGYTRQKNGYLVKNEYAPIVKEMFDKYLEEGQALITTTRYIYGKYPDIKKLKSIGNTKFILNNRAYTGRAEANIYDEIDKVTDTFYFDIPAIIDEETYNKVQEKLANNRTTTPYPRATKYLLQKLIKCSICGAFYTRLHSNKRDTVHFKCTSDKNSLTGCKSQVYLNERIVNPIIWNFVKEQLFYVGKMNAEQRLEAIAGENDNKSKAIEEQEALKISYKEQETKLTRLEDLYLDNDIDKNRYKERKSKIEKELSSIKAQMDRLTDRIRLSDFNIKRFNSTDFTEQYFKEVEADLEKQMKVLREYVKGIYPLYIDKVYCFLKVDTIEGMFNIFYEPRKAQQKCAYFIKDTLAQYHPDIRNFYTPNNTLLTDSDEVDAYYTLEEMKEICSRNGFEVRYRE

SEQ ID NO: 4567 - DNA, 50 bp, Parabacteroides goldsteinii
  source 1..50: mol_type = genomic DNA
aatcaagaatgtttttagcttaattgattaaactaataacttttatgatt

SEQ ID NO: 4568 - DNA, 40 bp, Parabacteroides goldsteinii
  source 1..40: mol_type = genomic DNA
ttatcaaattcatccatattgatcaagccgaattccgtca

SEQ ID NO: 4569 - DNA, 40 bp, Parabacteroides goldsteinii
  source 1..40: mol_type = genomic DNA
ttatcaaattcatccatatatatcaagccgaattccgtca

SEQ ID NO: 4570 - DNA, 50 bp, Parabacteroides goldsteinii; identical to SEQ ID NO: 4560
  source 1..50: mol_type = genomic DNA

SEQ ID NO: 4571 - protein, 472 aa, Streptococcus suis
MKTANKVAIYVRVSTTSQAEEGYSIDEQRDKLSSYCNIKDWSIYNIYTDGGFSGSNTERPALEQLIKDAKKQKFDTVLVYKLDRLSRSQKDTLYLIEDIFLENKIDFVSLLENFDTSTPFGKAMVGILSVFAQLEREQIKERMQLGKLGRAKAGYSMMWMSPPFGYRISKGDKVVSINPTQAVIVSRIYSEYISGKPISKILSNLNAEGHVGRDKPWSLTTIKDILKNPTYCGKIRFRGELYDGMHDSIISEEDFELAQIELQRRQVETYSRTNNPRPFQSKYMLSGLLKCAYCQSTLRIYVAHKRKDGTYPPLKYQCANRFNKDLSKRCDSKQYDKNELEMAVISKLCDLKFESGVDNLKIEPVDKNELKRELQSVLSKIDRLTELYIDGFVEREEFANRKRSLEKQKGLIEDELTIDHEELAKKRKQAILDELDNINLLNSSYEDQTNIVRKVVKAINVKPGTVDIQLDL

SEQ ID NO: 4572 - DNA, 50 bp, Streptococcus suis
  source 1..50: mol_type = genomic DNA
tagcagtatttactcaaaactatcaaaataactttgactaaattacatat

SEQ ID NO: 4573 - DNA, 40 bp, Streptococcus suis
  source 1..40: mol_type = genomic DNA
ggccgtcaagcgaccgattaaaattgttttattatacata

SEQ ID NO: 4574 - DNA, 40 bp, Streptococcus suis
  source 1..40: mol_type = genomic DNA
ggccgtcaagcgaccgatttcaattgttttattatacata

SEQ ID NO: 4575 - DNA, 50 bp, Streptococcus suis
  source 1..50: mol_type = genomic DNA
tagtattaaaaaatgtaaaatatctcaataattttgatatcattacatgt

SEQ ID NO: 4576 - protein, 587 aa, Streptococcus dysgalactiae
MVKQIEVIRAQENVRRNHGKIEISQKRVAAYCRVSTDSEDQKNSYESQVKHYKEYISQRSDWQLVDIYADEGITGTQVGKRQDFQRLITDCLNGEIDYIVTKAIARFARNTLDTLKYVRMLKDKQIGVYFEEENIDTLTMDGELLLTILSSVAQQEVENISAHVKKGLKMKMQRGELVGDPRCLGYDFDWETRQITVNQEEAKIVRYIFDRYLEGIGGRVIARELEEMGVTSPRGNKSWAETTILGVIKNEKYKGDVLQGKTFTVDPISKRRLDNYGEEDQYYIKGNHEPIVTEEEFNQAQEIRLRRSGRRGRIGSTSGKRQRFSRMYAFSSMLECGFCQSVLSRRSWHSGTIYHKVIWHCQVAIKKGKRHCQHSKGISESAIEKAFLESFRLLYQNNDKIIDLFLQTVEEEISDNSLELELQSIEKKLIKLKQQERDIIQMKLDGRISDDLYDEKFHAIIKDKEKLSASKVNLEVRLRTDSGVKERLESFRKLLKSKQLISEFDRAIFESLVEKVIIGGISDDGVVDPAKITFIYKSGDETSLNSKNFKDKRKNESKKSENASSELCSNDTNNDEKLSPQSTDTTD

SEQ ID NO: 4577 - DNA, 50 bp, Streptococcus dysgalactiae
  source 1..50: mol_type = genomic DNA
cagtccacggacaccacggactgaggctgtagtgaagctacaaaagaagg

SEQ ID NO: 4578 - DNA, 40 bp, Streptococcus dysgalactiae
  source 1..40: mol_type = genomic DNA
ctcatacggcaaggaccgaggcggttgtgaaattgtccaa

SEQ ID NO: 4579 - DNA, 40 bp, Streptococcus dysgalactiae
  source 1..40: mol_type = genomic DNA
ctcatacggcaaggaccgaagcggttgtgaaattgtccaa

SEQ ID NO: 4580 - DNA, 50 bp, Streptococcus dysgalactiae
  source 1..50: mol_type = genomic DNA
aagtccaagatgaatacggaatgaaggtgtagagaagataaaaaagaatc

SEQ ID NO: 4581 - protein, 508 aa, Rossellomorea vietnamensis
MTVTNMIKNVGVYLRISRESGEGRDTLLTHRTIAERFCSEKGYSFKIYEEVISGAKDIEERQSLHHLLNDIHLYEAIFVISTDRISRDNYYTQYVAKVLADNEVYILTPEKLYDLNGDDRLMFDMLGAMSSQEFRIIAKRQKRGKREGAMRGEWVQGVPPLGYIRGKNKKLKVIESEARLVKMIFNYAESGYGIQNIVSKLDGYKTKAGNSFTNTAIYTILNNKTYTGSIIYNIKDKKGKITETISMKNAHEAIITKEQFKSVKEAIKGRMSGDMETRNRSRGKVLSMLKDLLYCKGCGLKMGFRKDSKQKHAIYLKSCKCGTRGIAEPHLLTSFMSEFDFLQGFFRDEWEKALISSQSVSKDTLLQQVAELNKTQGKLSKRLSRAKNAYLDGVFNKEEYLKSKNDIENELTNISNTINDLQEQIESTNKDSISSEYKSKIEKIEQFYKLYNKEDSQQFLEECNRILKLIINKVYYARVDEKVTITSPLEGYIEAEQGDFVDLFIESK

SEQ ID NO: 4582 - DNA, 50 bp, Rossellomorea vietnamensis
  source 1..50: mol_type = genomic DNA
aaaccccttataagaaatatcatatttatgaaattacttatagatatatg

SEQ ID NO: 4583 - DNA, 40 bp, Rossellomorea vietnamensis
  source 1..40: mol_type = genomic DNA
aaccccctttcatctcatatttatgaaatgaaaaggagtt

SEQ ID NO: 4584 - DNA, 40 bp, Rossellomorea vietnamensis
  source 1..40: mol_type = genomic DNA
aaccccctttcatctcatatatatgaaatgaaaaggagtt

SEQ ID NO: 4585 - DNA, 50 bp, Rossellomorea vietnamensis
  source 1..50: mol_type = genomic DNA
agacccatttggaggaatatcatatattggtcatttattcaagatatatg

SEQ ID NO: 4586 - protein, 502 aa, Clostridium perfringens
MNNKICMYLRKSRADEELEKTLGEGETLSKHRSALLKFAKEKKLNIVEIKEEIVSGESLFFRPKMLELLKEVEAKKYDGVLIMDMQRLGRGDMKDQGIILETLKNSNTKIITPQKTYDLNNDFDEEYTEFEAFMSRKELKMINRRMQGGRVRSVEEGNYIATNPPYGYDIGFIDKSRVLKVNEYESNAIKLIFKLYLDGNGASFIANELNNLGYKTKLGNNFSNSSVLTIIKNPVYIGKIAWKRKDIKKSRTPGKVKDTKTRDKSDWIIADGKHEAIIDMNTWDKTQEILKGKYHIPYQLTNSPANPFAGLITCGVCGKKMVMRKARGINRLMCIYKCGNKSTRFDLVESDCFEALKEHLKNYTAEVENEIIEENTNIYTSQISQLKKELTTLNNQRLKLFDLLERNLYDEDTFLERSKNINDRIETVSSTLKSIEKLLKKKSKSSYQEDIQFFQSVLDAYNETEDIAKKNSLLKSILYKIEYTKLNGSKEHVIKVFPKLRK

SEQ ID NO: 4587 - DNA, 50 bp, Clostridium perfringens
  source 1..50: mol_type = genomic DNA
tacatacaacacgttagatatatttcattacattcaatatgttgtatgta

SEQ ID NO: 4588 - DNA, 40 bp, Clostridium perfringens; identical to SEQ ID NO: 178
  source 1..40: mol_type = genomic DNA

SEQ ID NO: 4589 - DNA, 40 bp, Clostridium perfringens; identical to SEQ ID NO: 714
  source 1..40: mol_type = genomic DNA

SEQ ID NO: 4590 - DNA, 50 bp, Clostridium perfringens; identical to SEQ ID NO: 715
  source 1..50: mol_type = genomic DNA

SEQ ID NO: 4591 - protein, 624 aa, Enterococcus faecium
MQEKLTALYERLSHDDDLMGESNSISNQKQMLSEYAESHGLTPYIHFTDDGISGTRFDRPGFVSMMDAIKAGQIGTVIIKDMSRLGRDYLMVGQIQEMLRQKQVRLIAINDGHDSLNGDDDFLPFRNIMNEWYAKDTSKKIRSTFKAKGNSGKHVASTTPYGYLKDPDNKEHWIVDEEAAQVVRRIFQMTMDGYGPYQIAKKLKEDQVEIPAVHMARHGAGLWQGRVDEIKDPYAWGSSTVAGILKKREYLGHTVNFKTRKHFKDKKSHYVSEDNWTVFEDTQEAIIDQETFDNVQRIRKNVRRYPDGWGEAHPLTGLMYCADCGAKMYVHRVNNGKRIPQYTCSAYSKIPVGTLCPTQHRINADIVMELIKDLLKAIAEYSHLNREEFIETVKTTQSSQQSSEIVRLKNRLAEAKKRLQELEKLICRIYEDNILGKLPDERYAVLDGQYSKEQKELKAEISELEAEIAGYENGRRSVERFIALVDKYQNFDELTTYMLNEFVEKILVHERDRKGSQQTTQEIEIYFNFVGRYLPPHFGEVQLTPEEEEELRKREARKDRLHQNYLRRKANGKQKEYEDKVKEKRKAEIEAKKEAIRQEDIAKGVFVPVSMLPAAEPKKGVASV

SEQ ID NO: 4592 - DNA, 50 bp, Enterococcus faecium
  source 1..50: mol_type = genomic DNA
aaaaactattgacattttgtttcaggtgttataagcttgaagagacttct

SEQ ID NO: 4593 - DNA, 40 bp, Enterococcus faecium
  source 1..40: mol_type = genomic DNA
aacgtttattcggaataagggggatgtgacacgtcttttg

SEQ ID NO: 4594 - DNA, 40 bp, Enterococcus faecium
  source 1..40: mol_type = genomic DNA
aacgtttattcggaataagtaggatgtgacacgtcttttg

SEQ ID NO: 4595 - DNA, 50 bp, Enterococcus faecium
  source 1..50: mol_type = genomic DNA
taaaaccaactttattttgttttatatgttatcacccctgggaggctttt

SEQ ID NO: 4596 - protein, 624 aa, Blautia obeum
MQEKLTALYERLSHDDDLMGESNSISNQKQMLSEYAESHGLTPYIHFTDDGISGTRFDRPGFVSMMDAIKAGQIGTVIIKDMSRLGRDYLMVGQIQEMLRQKQVRLIAINDGHDSLNGDDDFLPFRNIMNEWYAKDTSKKIRSTFKAKGNSGKHVASTTPYGYLKDPENKEHWIVDEEAAQVVRRIFQMTMDGYGPYQIAKKLKEDQVEIPAVHMARHGAGLWQGRVDEIKDPYAWGSSTVAGILRKREYLGHTVNFKTRKHFKDKKSHYVSEDNWTVFEDTQEAIIDQETFDNVQRIRKNVRRYPDGWGEAHPLTGLMYCADCGAKMYVHRVNNGKRIPQYTCSAYSKVPVGTLCPTQHRINADIVMELIKDLLKAIAEYSHLNREEFIETVKTTQNSQQSSEIVRLKNRIAEAKKRLQELEKLICRIYEDNILGKLPDERYAVLDGQYSKEQKELTAEISELEAEVAGYENGRRSAERFIALVDKYQNFDELTTYMLNEFVEKILVHERDRKGSQQTTQEIEIYFNFVGRYLPPHFGEVQLTPEEEEELRKREARKDRLHQNYLRRKANGKQKEYEDKVKEKRKAEIEAKKEAIRQEDITKGVFVPVSMLPAAEPKKGVVNT

SEQ ID NO: 4597 - DNA, 50 bp, Blautia obeum; identical to SEQ ID NO: 4592
  source 1..50: mol_type = genomic DNA

SEQ ID NO: 4598 - DNA, 40 bp, Blautia obeum
  source 1..40: mol_type = genomic DNA
aaaatacaagctggctgccggtaagacagcaaaatctatt

SEQ ID NO: 4599 - DNA, 40 bp, Blautia obeum
  source 1..40: mol_type = genomic DNA
aaaatacaagctggctgcctataagacagcaaaatctatt

SEQ ID NO: 4600 - DNA, 50 bp, Blautia obeum; identical to SEQ ID NO: 4595
  source 1..50: mol_type = genomic DNA

SEQ ID NO: 4601 - protein, 537 aa, Clostridium perfringens
MKKAAIYTRKSKFTEKGDSIESQIKLCSKYLDNINIKDYCIYTDEGFSGKNTDRPEFQRMLSDAKAKKFDVIICYKFDRISRNVSDFSNLINKLNELNISFISVVEQFDTNSAIGRAMMYLCTVFSQLERETISQRITDNMYSLATKGYWLGGETPTGFRSEKKFFNSNNKQKMYSSLVPIKEELDLVKLIFNKYLEFNSISRIEKYLLSNNIKTKRNKDWSKASISLILRNPAYVKADEETFKYIESTGSKVYGNPDGKHGLLIYKKNKGRKGAKHDISEWIYAVSEHEGIIDSDIWVAIQKQIKKNAILAPALGTSNIALLTGLIRCAKCNSPMRVAYGKRNPKTNKKNYYYVCTLKTKSGKTRCNSKNLPGLDLDNLILDKLKEMSLDKNTLLKELNKYKDTIESNFHNDVLKNIQNNISKNNSMIDNLLNNVALSTDSEVTAILLEKISKLKDENKLLTQKIDDLKAELEAQETLLNDCNSLITKLKYFSKFIDNSSIEEQKQLVSSVIEKVIANGDTGSIEIKFRPLLDFKI

SEQ ID NO: 4602 - DNA, 50 bp, Clostridium perfringens; identical to SEQ ID NO: 3917
  source 1..50: mol_type = genomic DNA

SEQ ID NO: 4603 - DNA, 40 bp, Clostridium perfringens
  source 1..40: mol_type = genomic DNA
aatttctctcaatataacatcagctctaaatatgaacatt

SEQ ID NO: 4604 - DNA, 40 bp, Clostridium perfringens
  source 1..40: mol_type = genomic DNA
aatttctctcaatataacaatagctctaaatatgaacatt

SEQ ID NO: 4605 - DNA, 50 bp, Clostridium perfringens
  source 1..50: mol_type = genomic DNA
gggcggcaacaaagaaacagaacaataggtagaaaagctgattggttaac

SEQ ID NO: 4606 - protein, 537 aa, Clostridium perfringens
MKKAAIYTRKSKFTEKGDSIESQIKLCSKYLDNINIKDYCIYTDEGFSGKNTDRPEFQKMLSDAKAKKFDVIICYKFDRISRNVSDFSNLINKLNELNISFISVVEQFDTNSAIGRAMMYLCTVFSQLERETISQRITDNMYSLATKGYWLGGETPTGFRSEKKFFNSNNKQKMYSSLVPIKEELDLVKLIFNKYLEFNSISKIEKYLLSNNIKTKRNKDWSKASISLILRNPAYVKADEETFKYIESTGSKVYGNPDGKHGLLIYKKNKGRKGAKHDISEWIYAVSEHEGIIDSDIWVAIQKQIKKNAILAPALGTSNIALLTGLIRCAKCNSPMRVAYGKRNPKTNKKNYYYVCTLKTKSGKTRCDSKNLPGLDLDNLILDKLKEMSLDKNTLLKELNKYKDTIESNFHNDVLKNIQNNISKNNSMIDNLLNNVALSTDSEVTAILLEKISKLKDENKLLTQKIDDLKSELEAQEILLNDCNSLITKLKYFSKFIDNSSIEEQKQLVSSVIEKVIADGDTGSIEIKFRPLLDFKI

SEQ ID NO: 4607 - DNA, 50 bp, Clostridium perfringens; identical to SEQ ID NO: 3917
  source 1..50: mol_type = genomic DNA

SEQ ID NO: 4608 - DNA, 40 bp, Clostridium perfringens
  source 1..40: mol_type = genomic DNA
aatttctctcaatataacatcagctctaaatatgaatatt

SEQ ID NO: 4609 - DNA, 40 bp, Clostridium perfringens
  source 1..40: mol_type = genomic DNA
aatttctctcaatataacaatagctctaaatatgaatatt

SEQ ID NO: 4610 - DNA, 50 bp, Clostridium perfringens; identical to SEQ ID NO: 4605
  source 1..50: mol_type = genomic DNA

SEQ ID NO: 4611 - protein, 537 aa, Clostridium perfringens
MKKAAIYTRKSKFTEKGDSIESQIKLCSKYLDNINIKDYCIYTDEGFSGKNTDRPEFQRMLSDAKAKKFDVIICYKFDRISRNVSDFSNLINKLNELNISFISVVEQFDTNSAIGRAMMYLCTVFSQLERETISQRITDNMYSLATKGYWLGGEAPTGFRSEKKFFNSNNKQKMYSSLVPIKEELDLVKLIFNKYLEFNSISKIEKYLLSNNIKTKRNKDWSKASISLILRNPAYVKANEETFKYIESTGSKVYGNPDGKHGLLIYKKNKGRKGAKHDISEWIYAVSEHEGIIDSDIWVAIQKQIKKNAILAPALGTSNIALLTGLIRCAKCNSPMRVAYGKRNPKTNKKNYYYVCTLKTKSGKTRCDSKNLPGLDLDNLILDKLKEMSLDKNTLLKELNKYKDTIESNFHNDVLKNIQNNISKNNSMIDNLLNNVALSTDSEVTSILLEKISKLKDENKLLTQKIDDLKSELEAQETLLNDCNSLITKLKYFSKFIDNSSIEEQKQLVSSVIEKVIADGDTGSIEIKFRPLLDFKI

SEQ ID NO: 4612 - DNA, 50 bp, Clostridium perfringens; identical to SEQ ID NO: 3917
  source 1..50: mol_type = genomic DNA

SEQ ID NO: 4613 - DNA, 40 bp, Clostridium perfringens; identical to SEQ ID NO: 4603
  source 1..40: mol_type = genomic DNA

SEQ ID NO: 4614 - DNA, 40 bp, Clostridium perfringens; identical to SEQ ID NO: 4604
  source 1..40: mol_type = genomic DNA

SEQ ID NO: 4615 - DNA, 50 bp, Clostridium perfringens; identical to SEQ ID NO: 4605
  source 1..50: mol_type = genomic DNA

SEQ ID NO: 4616 - protein, 537 aa, Clostridium perfringens
MKKAAIYTRKSKFTEKGDSIESQIKLCSKYLDNINIKDYCIYTDEGFSGKNTDRPEFQRMLSDAKAKKFDVIICYKFDRISRNVSDFSNLINKLNELNISFISVVEQFDTNSAIGRAMMYLCTVFSQLERETISQRITDNMYSLATKGYWLGGETPTGFRSEKKFFNSNNKPKMYSSLVPIKEELDLVKLIFNKYLEFNSISKIEKYLLSNNIKTKRNKDWSKASISLILRNPAYVKADEETFKYIESTGSKVYGNPDGKHGLLIYKKNKGRKGAKHDISEWIYAVSEHEGIIDSDIWVAIQKQIKKNAILAPALGTSNIALLTGLIRCAKCNSPMRVAYGKRNPKTNKKNYYYVCTLKTKSGKTRCDSKNLPGLDLDNLILDKLKEMSLDKNTLLKELNKYKDTIESNFHNDVLKNIQNNISKNNSMIDNLLNNVALSTDSEVTAILLDKISKLKDENKLLTQKIDDLKSELEAQETLLNDCNSLITKLKYFSKFIDNSSIEEQKQLVSSVIEKVIADGDTGSIEIKFRPLLDFKI

SEQ ID NO: 4617 - DNA, 50 bp, Clostridium perfringens; identical to SEQ ID NO: 3917
  source 1..50: mol_type = genomic DNA

SEQ ID NO: 4618 - DNA, 40 bp, Clostridium perfringens; identical to SEQ ID NO: 4603
  source 1..40: mol_type = genomic DNA

SEQ ID NO: 4619 - DNA, 40 bp, Clostridium perfringens; identical to SEQ ID NO: 4604
  source 1..40: mol_type = genomic DNA

SEQ ID NO: 4620 - DNA, 50 bp, Clostridium perfringens; identical to SEQ ID NO: 4605
  source 1..50: mol_type = genomic DNA

SEQ ID NO: 4621 - protein, 537 aa, Clostridium perfringens
MKKAAIYTRKSKFTEKGDSIESQIKLCSKYLDNINIKDYCIYTDEGFSGKNTDRPEFQRMLSDAKAKKFDVIICYKFDRISRNVSDFSNLINKLNELNISFISVVEQFDTNSAIGRAMMYLCTVFSQLERETISQRITDNMYSLATKGYWLGGETPTGFRSEKKFFNSNNKQKMYSSLVPIKGELDLVKLIFNKYLEFNSISKIEKYLLSNNIKTKRNKDWSKASISLILRNPAYVKADEETFKYIESTGSKVYGNPDGKHGLLIYKKNKGRKGAKHDISEWIYAVSEHEGIIDSDIWVAIQKQIKKNAILAPALGTSNIALLTGLIRCAKCNSPMRVAYGKRNPKTNKKNYYYVCTLKTKSGKTRCDSKNLPGLDLDNLILDKLKEMSLDKNTLLKELNKYKDTIESNFHNDVLKNIQNNISKNNSMIDNLLNNVALSTDSEVTAILLEKISKLKDENKLLTQKIDDLKSELEAQETLLNDCNSLITKLKYFSKFIDNSSIEEQKQLVSSVIEKVIADGDTGSIEIKFRPLLDFKI

SEQ ID NO: 4622 - DNA, 50 bp, Clostridium perfringens; identical to SEQ ID NO: 3917
  source 1..50: mol_type = genomic DNA

SEQ ID NO: 4623 - DNA, 40 bp, Clostridium perfringens
  source 1..40: mol_type = genomic DNA
aatttctcttaatataacatcagctctaaatatgaacatt

SEQ ID NO: 4624 - DNA, 40 bp, Clostridium perfringens
  source 1..40: mol_type = genomic DNA
aatttctcttaatataacaatagctctaaatatgaacatt

SEQ ID NO: 4625 - DNA, 50 bp, Clostridium perfringens; identical to SEQ ID NO: 4605
  source 1..50: mol_type = genomic DNA

SEQ ID NO: 4626 - protein, 537 aa, Clostridium perfringens
MKKAAIYTRKSKFTEKGDSIESQIKLCSKYLDNINIKNYCIYTDEGFSGKNTDRPEFQRMLSDAKAKKFDVIICYKFDRISRNVSDFSNLINKLNELNISFISVVEQFDTNSAIGRAMMYLCTVFSQLERETISQRITDNMYSLATKGYWLGGETPTGFRSEKKFFNSNNKQKMYSSLVPIKEELDLVKLIFNKYLEFNSISKIEKYLLSNNIKTKRNKDWSKASISLILRNPAYVKADEETFKYIESTGSKVYGNPDGKHGLLIYKKNKGRKGAKHDISEWIYAVSEHEGIIDSDIWVAIQKQIKKNAILAPALGTSNIALLTGLIRCEKCNSPMRVAYGKRNPKTNKKNYYYVCTLKTKSGKTRCDSKNLPGLDLDNLILDKLKEMSLDKNTLLKELNKYKDTIESNFHNDVLKNIKNNISKNNSMIDNLLNNVALSTDSEVTAILLEKISKLKDENKLLTQKIDDLKSELEAQETLLNDCNSLITKLKYFSKFIDNSSIEEQKQLVSSVIEKVIADGDTGSIEIKFRPLLDFKI

SEQ ID NO: 4627 - DNA, 50 bp, Clostridium perfringens; identical to SEQ ID NO: 3917
  source 1..50: mol_type = genomic DNA

SEQ ID NO: 4628 - DNA, 40 bp, Clostridium perfringens; identical to SEQ ID NO: 4603
  source 1..40: mol_type = genomic DNA

SEQ ID NO: 4629 - DNA, 40 bp, Clostridium perfringens; identical to SEQ ID NO: 4604
  source 1..40: mol_type = genomic DNA

SEQ ID NO: 4630 - DNA, 50 bp, Clostridium perfringens; identical to SEQ ID NO: 4605
  source 1..50: mol_type = genomic DNA

SEQ ID NO: 4631 - protein, 537 aa, Clostridium perfringens
MKKAAIYTRKSKFTEKGDSIESQIKLCSKYLDNINIKDYCIYTDEGFSGKNTDRPEFQRMLSDAKAKKFDVIICYKFDRISRNVSDFSNLINKLNELNISFISVVEQFDTNSAIGRAMMYLCTVFSQLERETISQRITDNMYSLATKGYWLGGETPTGFRSEKKFFNSNNKQKMYSSLVPIKEELDLVKLIFNKYLEFNSISKIEKYLLSNNIKTKRNKDWSKASISLILRNPAYVKADEETFKYIESTGSKVYGNPDGKHGLLIYKKNKGRKGAKHDISEWIYAVSEHEGIIDSDIWVAIQKQIKKNAILAPALGTSNIALLTGLIRCSKCNSPMRVAYGKRNPKTNKKNYYYVCTLKTKSGKTRCDSKNLPGLDLDNLILDKLKEMSLDKNTLLKELNKYKDTIESNFHNDVLKNIQNNISKNNSMIDNLLNNVALSTDFEVTAILLEKISKLKDENKLLTQKIDDLKSELEAQETLLNDCNSLITKLKYFSKFIDNSSIEEQKQLVSSVIEKVIADGDTGSIEIKFRPLLDFKI

SEQ ID NO: 4632 - DNA, 50 bp, Clostridium perfringens; identical to SEQ ID NO: 3917
  source 1..50: mol_type = genomic DNA

SEQ ID NO: 4633 - DNA, 40 bp, Clostridium perfringens; identical to SEQ ID NO: 4603
  source 1..40: mol_type = genomic DNA

SEQ ID NO: 4634 - DNA, 40 bp, Clostridium perfringens; identical to SEQ ID NO: 4604
  source 1..40: mol_type = genomic DNA

SEQ ID NO: 4635 - DNA, 50 bp, Clostridium perfringens; identical to SEQ ID NO: 4605
  source 1..50: mol_type = genomic DNA

SEQ ID NO: 4636 - protein, 537 aa, Clostridium perfringens
MKKAAIYTRKSKFTEKGDSIESQIKLCSKYLDNINIKDYCIYTDEGFSGKNTDRPEFQKMLSDAKAKKFDVIICYKFDRISRNVSDFSNLINKLNELNISFISVVEQFDTNSAIGRAMMYLCTVFSQLERETISQRITDNMYSLATKGYWLGGETPTGFRSEKKFFNSNNKQKMYSSLVPIKEELDLVKLIFNKYLEFNSISKIEKYLLSNNIKTKRNKDWSKASISLILRNPAYVKADEETFKYIESTGSKVYGNPDGKHGLLIYKKNKGRKGAKHDISEWIYAVSEHEGIIDSDIWVAIQKQIKKNAILAPALGTSNIALLTGLIRCAKCNSPMRVAYGKRNPKTNKKNYYYVCTLKTKSGKTRCDSKNLPGLDLDNLILDKLKEMSLDKNTLLKELNKYKDTIESNFHNDVLKNIQNNISKNNSMIDNLLNNVALSTDSEVTAILLEKISKLKDENKLLTQKIDDLKSELETQETLLNDCNSLITKLKYFSKFIDNSSIEEQKQLVSSVIEKVIADGDTGSIEIKFRPLLDFKI

SEQ ID NO: 4637 - DNA, 50 bp, Clostridium perfringens; identical to SEQ ID NO: 3917
  source 1..50: mol_type = genomic DNA

SEQ ID NO: 4638 - DNA, 40 bp, Clostridium perfringens; identical to SEQ ID NO: 4603
  source 1..40: mol_type = genomic DNA

SEQ ID NO: 4639 - DNA, 40 bp, Clostridium perfringens; identical to SEQ ID NO: 4604
  source 1..40: mol_type = genomic DNA

SEQ ID NO: 4640 - DNA, 50 bp, Clostridium perfringens; identical to SEQ ID NO: 4605
  source 1..50: mol_type = genomic DNA

SEQ ID NO: 4641 - protein, 537 aa, Clostridium perfringens
MKKAAIYTRKSKFTEKGDSIESQIKLCSKYLDNINIKDYCIYTDEGFSGKNTDRPEFQRMLSDAKAKKFDVIICYKFDRISRNVSDFSNLINKLNELNISFISVVEQFDTNSAIGRAMMYLCTVFSQLERETISQRITDNMYSLATKGYWLGGETPTGFRSEKKFFNSNNKQKMYSSLVPIKEELDLVKLIFNKYLEFNSISKIEKYLLSNNIKTKRNKDWSKASISLILRNPAYVKADEETFKYIESTGSKVYGNPDGKHGLLIYKKNKGRKGAKHDISEWIYAVSEHEGIIDSDIWVAIQKQIKKNAILAPALGTSNIALLTGLIRCAKCNSPMRVAYGKRNPKTNKKNYYYVCTLKTKSGKTRCDSKNLPGLDLDNLILDKLKEMSLDKNTLLKELNKYKDTIESNFHNDVLKNIQNNISKNNSMIDNLLNNVALSTDSEVTAILLEKISKLKDENKLLTQKIDDLKSELEAQETLLNDCNSLITKLKYFSKFIDNSSIEEQKQLVSSVIEKVIADGDTGSIEIKFRPLLDFKI

SEQ ID NO: 4642 - DNA, 50 bp, Clostridium perfringens; identical to SEQ ID NO: 3917
  source 1..50: mol_type = genomic DNA

SEQ ID NO: 4643 - DNA, 40 bp, Clostridium perfringens; identical to SEQ ID NO: 4603
  source 1..40: mol_type = genomic DNA

SEQ ID NO: 4644 - DNA, 40 bp, Clostridium perfringens; identical to SEQ ID NO: 4604
  source 1..40: mol_type = genomic DNA

SEQ ID NO: 4645 - DNA, 50 bp, Clostridium perfringens; identical to SEQ ID NO: 4605
  source 1..50: mol_type = genomic DNA

SEQ ID NO: 4646 - protein, 537 aa, Clostridium perfringens
MKKAAIYTRKSKFTEKGDSIESQIKLCSKYLDNINIKDYCIYTDEGFSGKNTDRPEFQRMLSDAKAKKFDVIICYKFDRISRNVSDFSNLINKLNELNISFISVVEQFDTNSAIGRAMMYLCTVFSQLERETISQRITDNMYSLATKGYWLGGETPTGFRSEKKFFNSNNKQKMYSSLVPIKEELDLVKLIFNKYLEFNSISKIEKYLLSNNIKTKRNKDWSKASISLILRNPAYVKADEETFKYIESTGSKVYGNPDGKHGLLIYKKNKGRKGAKHDISEWIYAVSEHEGIIDSDIWVAIQKQIKKNAILAPALGTSNIALLTGLIRCAKCNSPMRVAYGKRNPKTNKKNYYYVCTLKTKSGKTRCDSKNLPGLDLDNLILDKLKEMSLDKNTLLKELNKYKDTIESNFHNDVLKNIQNNISKNNSMIDNLLNNVALSTDSEVTAILLEKISKLKDENKLLTQKIDDLKSELEAQETLLNDCNSLITKLKYFSKFIDNSSIEEQKQLVSSVIEKVIANGDTGSIEIKFRPLLDFKI

SEQ ID NO: 4647 - DNA, 50 bp, Clostridium perfringens; identical to SEQ ID NO: 3917
  source 1..50: mol_type = genomic DNA

SEQ ID NO: 4648 - DNA, 40 bp, Clostridium perfringens; identical to SEQ ID NO: 4603
  source 1..40: mol_type = genomic DNA

SEQ ID NO: 4649 - DNA, 40 bp, Clostridium perfringens; identical to SEQ ID NO: 4604
  source 1..40: mol_type = genomic DNA

SEQ ID NO: 4650 - DNA, 50 bp, Clostridium perfringens; identical to SEQ ID NO: 4605
  source 1..50: mol_type = genomic DNA

SEQ ID NO: 4651 - protein, 537 aa, Clostridium perfringens
MKKAAIYTRKSKFTEKGDSIESQIKLCSKYLDNINIKDYCIYTDEGFSGKNTDRPEFQKMLSDAKAKKFDVIICYKFDRISRNVSDFSNLINKLNELNISFISVVEQFDTNSAIGRAMMYLCTVFSQLERETISQRITDNMYSLATKGYWLGGETPTGFRSEKKFFNSNNKQKMYSSLVPIKEELDLVKLIFNKYLEFNSISKIEKYLLSNNIKTKRNKDWSKASISLILRNPAYVKADEETFKYIESTGSKVYGNPDGKHGLLIYKKNKGRKGAKHDISEWIYAVSEHEGIIDSDIWVAIQKQIKKNAILAPALGTSNIALLTGLIRCAKCNSPMRVAYGKRNPKTNKKNYYYVCTLKTKSGKTRCDSKNLPGLDLDNLILDKLKEMSLDKNTLLKELNKYKDTIESNFHNDVLKNIQNNISKNNSMIDNLLNNVALSTDSEVTAILLEKISKLKDENKLLTQKIDDLKSELEAQETLLNDCNSLITKLKYFSKFIDNSSIEEQKQLVSSVIEKVIANGDTGSIEIKFRPLLDFKI

SEQ ID NO: 4652 - DNA, 50 bp, Clostridium perfringens; identical to SEQ ID NO: 3917
  source 1..50: mol_type = genomic DNA

SEQ ID NO: 4653 - DNA, 40 bp, Clostridium perfringens; identical to SEQ ID NO: 4603
  source 1..40: mol_type = genomic DNA

SEQ ID NO: 4654 - DNA, 40 bp, Clostridium perfringens; identical to SEQ ID NO: 4604
  source 1..40: mol_type = genomic DNA

SEQ ID NO: 4655 - DNA, 50 bp, Clostridium perfringens; identical to SEQ ID NO: 4605
  source 1..50: mol_type = genomic DNA

SEQ ID NO: 4656 - protein, 537 aa, Clostridium perfringens; identical to SEQ ID NO: 4636

SEQ ID NO: 4657 - DNA, 50 bp, Clostridium perfringens; identical to SEQ ID NO: 3917
  source 1..50: mol_type = genomic DNA

SEQ ID NO: 4658 - DNA, 40 bp, Clostridium perfringens; identical to SEQ ID NO: 4623
  source 1..40: mol_type = genomic DNA

SEQ ID NO: 4659 - DNA, 40 bp, Clostridium perfringens; identical to SEQ ID NO: 4624
  source 1..40: mol_type = genomic DNA

SEQ ID NO: 4660 - DNA, 50 bp, Clostridium perfringens; identical to SEQ ID NO: 4605
  source 1..50: mol_type = genomic DNA

SEQ ID NO: 4661 - protein, 537 aa, Clostridium perfringens
MKKAAIYTRKSKFTEKGDSIESQIKLCSKYLDNINIKDYCIYTDEGFSGKNTDRPEFQKMLSDAKAKKFDVIICYKFDRISRNVSDFSNLINKLNELNISFISVVEQFDTNSAIGRAMMYLCTVFSQLERETISQRITDNMYSLATKGYWLGGETPTGFRSEKKFFNSNNKKKMYSSLVPIKEELDLVKLIFNKYLEFNSISKIEKYLLSNNIKTKRNKDWSKASISLILRNPAYVKADEETFKYIESTGSKVYGNPDGKHGLLIYKKNKGRKGAKHDISEWIYAVSEHEGIIDSDIWVAIQKQIKKNAILAPALGTSNIALLTGLIRCAKCNSPMRVAYGKRNPKTNKKNYYYVCTLKTKSGKTRCDSKNLPGLDLDNLILDKLKEMSLDKNTLLKELNKYKDTIESNFHNDVLKNIQNNISKNNSMIDNLLNNVALSTDSEVTAILLEKISKLKDENKLLTQKIDDLKSELEAQETLLNDCNSLITKLKYFSKFIDNSSIEEQKQLVSSVIEKVIADGDTGSIEIKFRPLLDFKI

SEQ ID NO: 4662 - DNA, 50 bp, Clostridium perfringens; identical to SEQ ID NO: 3917
  source 1..50: mol_type = genomic DNA

SEQ ID NO: 4663 - DNA, 40 bp, Clostridium perfringens; identical to SEQ ID NO: 4603
  source 1..40: mol_type = genomic DNA

SEQ ID NO: 4664 - DNA, 40 bp, Clostridium perfringens; identical to SEQ ID NO: 4604
  source 1..40: mol_type = genomic DNA

SEQ ID NO: 4665 - DNA, 50 bp, Clostridium perfringens; identical to SEQ ID NO: 4605
  source 1..50: mol_type = genomic DNA

SEQ ID NO: 4666 - protein, 537 aa, Clostridium perfringens
MKKAAIYTRKSKFTEKGDSIESQIKLCSKYLDNINIKDYCIYTDEGFSGKNTDRPEFQKMLSDAKAKKFDVIICYKFDRISRNVSDFSNLINKLNELNISFISVVEQFDTNSAIGRAMMYLCTVFSQLERETISQRITDNMYSLATKGYWLGGETPTGFRSEKKFFNSNNKQKMYSSLVPIKEELDLVKLIFNKYLEFNSISKIEKYLLSNNIKTKRNKDWSKASISLILRNPAYVKADEETFKYIESTGSKVYGNPDGKHGLLIYKKNKGRKGAKHDISEWIYAVSEHEGIIDSDIWVAIQKQIKKNAILAPALGTSNIALLTGLIRCAKCNSPMRVAYGKRNPKTNKKNYYYVCTLKTKSGKTRCDSKNLPGLDLDNLILDKLKEMSLDKNTLLKELNKYKDTIESNFHNDVLKNIQNNISKNNSMIDNLLNNVALSTDSEVTAILLEKISKLKDENKLLTQKIDDLKSELEAQETLLNDCNSLITKLKYFSKFIDNSSIEEQKQLVSSVIEKVIADGDTGSIEIKFRPLLDFKI

SEQ ID NO: 4667 - DNA, 50 bp, Clostridium perfringens; identical to SEQ ID NO: 3917
  source 1..50: mol_type = genomic DNA

SEQ ID NO: 4668 - DNA, 40 bp, Clostridium perfringens; identical to SEQ ID NO: 4603
  source 1..40: mol_type = genomic DNA

SEQ ID NO: 4669 - DNA, 40 bp, Clostridium perfringens; identical to SEQ ID NO: 4604
  source 1..40: mol_type = genomic DNA

SEQ ID NO: 4670 - DNA, 50 bp, Clostridium perfringens; identical to SEQ ID NO: 4605
  source 1..50: mol_type = genomic DNA

SEQ ID NO: 4671 - protein, 537 aa, Clostridium perfringens
MKKAAIYTRKSKFTEKGDSIESQIKLCSKYLDNINIKDYCIYTDEGFSGKNTDRPEFQRMLSDAKAKKFDVIICYKFDRISRNVSDFSNLINNLNELNISFISVVEQFDTNSAIGRAMMYLCTVFSQLERETISQRITDNMYSLATKGYWLGGETPTGFRSEKKFFNSNNKQKMYSSLVPIKEELDLVKLIFNKYLEFNSISKIEKYLLSNNIKTKRNKDWSKASISLILRNPAYVKADEETFKYIESTGSKVYGNPDGKHGLLIYKKNKGRKGAKHDISEWIYAVSEHEGIIDSDIWVAIQKQIKKNAILAPALGTSNIALLTGLIRCAKCNSPMRVAYGKRNPKTNKKNYYYVCTLKTKSGKTRCDSKNLPGLDLDNLILDKLKEMSLDKNTLLKELNKYKDTIESNFHNDVLKNIQNNISKNNSMIDNLLNNVALSTDSEVTAILLEKISKLKDENKLLTQKIDDLKAELETQETLLNDCNSLITKLKYFSKFIDNSSIEEQKQLVSSVIEKVIADGDTGSIEIKFRPLLDFKI

SEQ ID NO: 4672 - DNA, 50 bp, Clostridium perfringens; identical to SEQ ID NO: 3917
  source 1..50: mol_type = genomic DNA

SEQ ID NO: 4673 - DNA, 40 bp, Clostridium perfringens; identical to SEQ ID NO: 4603
  source 1..40: mol_type = genomic DNA

SEQ ID NO: 4674 - DNA, 40 bp, Clostridium perfringens; identical to SEQ ID NO: 4604
  source 1..40: mol_type = genomic DNA

SEQ ID NO: 4675 - DNA, 50 bp, Clostridium perfringens; identical to SEQ ID NO: 4605
  source 1..50: mol_type = genomic DNA

SEQ ID NO: 4676 - protein, 570 aa, Pseudomonas sihuiensis
MARLISYLRMSTSEQLRGFSLERQRKLIAEFAAKNGLSVEEENTLEDIGRSSFSDDAQQKELAKFFENLNAGKYEPGDVFALENIDRLTRRGPVDAILKVNQIISKGLKLAIISGNEQRIIEDVNDVFTIINLSIDASRANKESKNKSDKGLSNWQEKRNLAATHKIAMTAQAPAWLDTEIFYIFDEEKKKNIKRRKYVLNEEKAEAVRLIFNLYSSGNGALKIKNILNERNIPTFKGAEYWEPSIITKILKNPATFGLYQPKKQGTGKRDLIAAGEPINDYFPPVITRDLFEQCERIREGNGTRKGRKGKLFTNLFTGLLKCVDCGGPVHLLNPGIDKRNKVQKSIYYLVCKRAKFTKECTTKRVRYDDFETALLKAIQEINLADILNENNPLETLIKKQRSKETEINKKKKLIENFQRQFLENDGDLPSFMISQAKDAEISIKELEEDQRAIASEIAQLNIYNSNVDNAIEELKENADYGTRSKINLLFHEIIKNISLDTENQFYTVRFKNGVMRVITAAGFIATTEEQTPADINQILQSIEGPSIPREIATDAEKLIEYLKAREVIE

SEQ ID NO: 4677 - DNA, 50 bp, Pseudomonas sihuiensis
  source 1..50: mol_type = genomic DNA
tacaggttaaacctgtacgacttgatcaagtccggtctataatacctgta

SEQ ID NO: 4678 - DNA, 40 bp, Pseudomonas sihuiensis
  source 1..40: mol_type = genomic DNA
ccagggatgcgcggacttgatcagcaccgcattgccaggc

SEQ ID NO: 4679 - DNA, 40 bp, Pseudomonas sihuiensis
  source 1..40: mol_type = genomic DNA
ccagggatgcgcggacttggccagcaccgcattgccaggc

SEQ ID NO: 4680 - DNA, 50 bp, Pseudomonas sihuiensis
  source 1..50: mol_type = genomic DNA
tacatattaagatagcaagactaggccaggtgtggtggctcatacctgta

SEQ ID NO: 4681 - protein, 554 aa, Pseudomonas aeruginosa
MARLISYLRMSTSEQLRGFSLERQRKLIADFAAKNGLSVEEENTLEDIGRSSFSDDAQQKELTRFFENLNAGKYEAGDVFALENIDRLTRRGPVDAILKVNQIISKGLKLAIISGNEQRIIEDVNDVFTIINLSIDASRANKESKNKSDKGLSNWQEKRNLAASQKIAMTAQAPAWLDTEIFYIFDEEKKKNIKRRKYILNEEKADAVRLIFDLYSSGNGALKIKNILNERNIPTFKGAPYWEPSIITKILKNPATFGLYQPKKQGTGKRDLIAAGEPINDYFPTVITRELFEQCERIREGNGTRKGRKGKLFTNLFTGLLKCVDCGGPVHLLNPGIDKRNKVQKSIYYLVCKRAKFTKECTTKRVRYDDFETALLKAIQEINLADILNENNPLEILIKKQRSKETEINKKKKLIENFQRQFLENDGDLPAFMISQAKEAEISIKELEEEQREISSEIAQLNVYNSNVDNAIEELKNDGTYETRAKINLVLHEIIKNINIDFELVDFAIIFKNGVKRFVNDGIVQNVYTTKSGSDQYYSEIEEILNHSITPPEK

SEQ ID NO: 4682 - DNA, 50 bp, Pseudomonas aeruginosa; identical to SEQ ID NO: 4677
  source 1..50: mol_type = genomic DNA

SEQ ID NO: 4683 - DNA, 40 bp, Pseudomonas aeruginosa
  source 1..40: mol_type = genomic DNA
ccagggatggccggacttgatcagcaccgcattgcccggc

SEQ ID NO: 4684 - DNA, 40 bp, Pseudomonas aeruginosa
  source 1..40: mol_type = genomic DNA
ccagggatggccggacttggccagcaccgcattgcccggc

SEQ ID NO: 4685 - DNA, 50 bp, Pseudomonas aeruginosa; identical to SEQ ID NO: 4680
  source 1..50: mol_type = genomic DNA

SEQ ID NO: 4686 - protein, 570 aa, Pseudomonas aeruginosa
MARLISYLRMSTSEQLRGFSLERQRKLIAEFAAKNGLSVEEENTLEDIGRSSFSDDAQQKELAKFFENLNAGKYEPGDVFALENIDRLTRRGPVDAILKVNQIISKGLKLAIISGNEQRIIEDVNDVFTIINLSIDASRANKESKNKSDKGLSNWQEKRNLAASQKIAMTAQAPAWLDTEIFYIFDEEKKKNIKRRKYVLNKEKAEAVRLIFDLYSSGNGALKIKNILNEREIKTFKGAPYWEPSIITKILKNPATFGLYQPKKQGTGKRDLIAAGEPINDYFPAVITRELFEQCERIREGNGTRKGRKGKLFTNLFTGLLTCSKCGGPVHLINPGIDKRNKVQKSIYYLVCKRAKFTKECTTKRVRYDDFEIALLKAIQEINLADILNENNPLEILVKKQRSKETEINKKKKLIENFQRQFLENDGNLPSFMISEANAAEISIKELEEEQREIASEIAQLNVYNSNVDNAIEELKEKPDYETRSKINLLFHEIIKNISLDTENQFYTVRFKNGVMRLISAAGFVLTTEEQTQADINAILQSIEGPSIPREIATDAEKLIEYLKAREVIE

SEQ ID NO: 4687 - DNA, 50 bp, Pseudomonas aeruginosa
  source 1..50: mol_type = genomic DNA
tacaggttaaacctgtacgacttggtcaagtccggtctataatacctgta

SEQ ID NO: 4688 - DNA, 40 bp, Pseudomonas aeruginosa; identical to SEQ ID NO: 4683
  source 1..40: mol_type = genomic DNA

SEQ ID NO: 4689 - DNA, 40 bp, Pseudomonas aeruginosa; identical to SEQ ID NO: 4684
  source 1..40: mol_type = genomic DNA

SEQ ID NO: 4690 - DNA, 50 bp, Pseudomonas aeruginosa; identical to SEQ ID NO: 4680
  source 1..50: mol_type = genomic DNA

SEQ ID NO: 4691 - protein, 554 aa, Pseudomonas aeruginosa
MARLISYLRMSTSEQLRGFSLERQRKLIADFAAKNGLSVEEENTLEDIGRSSFSDDAQQKELTRFFENLNAGKYESGDVFALENIDRLTRRGPVDAILKVNQIISKGLKLAIISGNEQRIIEDVNDVFTIINLSIDASRANKESKNKSDKGLSNWQEKRNLAASQKIAMTAQAPAWLDTEIFYIFDEEKKKNIKRRKYVLNEEKAETVRLIFDLYSSGNGALKIKNILNERNIPTFKGAEYWEPSIITKILKNPATFGLYQPKKQGTGKRDLIAAGEPINDYFPPVITRDLFEQCERIREGNGTRKGRKGKLFTNLFTGLLKCADCGGPVHLLNPGIDKRNKVQKSTYYLVCKRAKFTKECTTKRVRYDDFETALLKAIQEINLADILNENNPLEILIKKQRSKEIEINKKKKLIENFQRQFLENDGDLPAFMISQAKEAEISIKELEEEQREISSEIAQLNVYNSNVDNAIEELKNDGTYETRAKINLVLHEIIKNINIDFELVDFAIIFKNGVKRFVNDEIVQNVYTTKTGSDQYYSEIEEILNHSITPPEK

SEQ ID NO: 4692 - DNA, 50 bp, Pseudomonas aeruginosa; identical to SEQ ID NO: 4677
  source 1..50: mol_type = genomic DNA

SEQ ID NO: 4693 - DNA, 40 bp, Pseudomonas aeruginosa
  source 1..40: mol_type = genomic DNA
gccgggcaatgcggtgctgatcaagtccggccatccctgg

SEQ ID NO: 4694 - DNA, 40 bp, Pseudomonas aeruginosa
  source 1..40: mol_type = genomic DNA
gccgggcaatgcggtgctggccaagtccggccatccctgg

SEQ ID NO: 4695 - DNA, 50 bp, Pseudomonas aeruginosa; identical to SEQ ID NO: 4680
  source 1..50: mol_type = genomic DNA

SEQ ID NO: 4696 - protein, 554 aa, Pseudomonas aeruginosa
MARLISYLRMSTSEQLRGFSLERQRKLIADFAAKNGLSVEEENTLEDIGRSSFSDDAQQKELTRFFENLNAGKYEAGDVFALENIDRLTRRGPVDAILKVNQIISKGLKLAIISGNEQRIIEDVNDVFTIINLSIDASRANKESKNKSDKGLSNWQEKRNLAASQKIAMTAQAPAWLDTEIFYIFDEEKKKNIKRRKYVLNEEKAEAVRLIFDLYSSGNGALKIKNILNEREIKTFKGAPYWEPSIITKILKNPATFGLYQPKKQGTGKRDLIAAGEPINDYFPPVITRELFEQCERIREGNGTRKGRKGKLFTNLFTGLLKCVDCGGPVHLLNPGIDKRNKVQKSIYYLVCKRAKFTKECTTKRVRYDDFETALLKAIQEINLADILNENNPLETLIKKQRSKETEISKKKKLIENFQRQFLENDGDLPSFMISQAKDAEISIKELEDQQREISSEIAQLNVYNSNVDNAIEELKNDGTYETRAKINLVLHEIIKNINIDFELVDFAIIFKNGVKRFVNDGIVQNVYTTKSGSDQYYSEIEEILNHSITPPEK

SEQ ID NO: 4697 - DNA, 50 bp, Pseudomonas aeruginosa; identical to SEQ ID NO: 4677
  source 1..50: mol_type = genomic DNA

SEQ ID NO: 4698 - DNA, 40 bp, Pseudomonas aeruginosa; identical to SEQ ID NO: 4693
  source 1..40: mol_type = genomic DNA

SEQ ID NO: 4699 - DNA, 40 bp, Pseudomonas aeruginosa; identical to SEQ ID NO: 4694
  source 1..40: mol_type = genomic DNA

SEQ ID NO: 4700 - DNA, 50 bp, Pseudomonas aeruginosa; identical to SEQ ID NO: 4680
  source 1..50: mol_type = genomic DNA

SEQ ID NO: 4701 - protein, 570 aa, Pseudomonas aeruginosa
  SITE 475: note = misc_feature - Xaa can be any naturally occurring amino acid
MARLISYLRMSTSEQLRGFSLERQRKLIADFAAKNGLSVEEENTLEDIGRSSFSDDAQQKELTRFFENLNAGKYEAGDVFALENIDRLTRRGPVDAILKVNQIISKGLKLAIISGNEQRIIEDVNDVFTIINLSIDASRANKESKNKSDKGLSNWQEKRNLAASQKIAMTAQAPAWLDTEIFYIFDEEKKKNIKRRKYILNEEKADAVRLIFDLYSSGNGALKIKNILNERNIPTFKGAPYWEPSIITKILKNPATFGLYQPKKQGTGKRDLIAAGEPINDYFPTVITRELFEQCERIREGNGTRKGRKGKLFTNLFTGLLKCVDCGGPVHLLNPGIDKRNKVQKSIYYLVCKRAKFTKECTTKRVRYDDFETALLKAIQEINLADILNENNPLEILIKKQRSKETEINKKKKLIENFQRQFLENDGNLPSFMISEANAAEISIKELEEEQREIASEIAQLNVYNSNVDNAIEEXKEKPDYETRSKINLLFHEIIKNISLDTENQFYTVRFKNGVMRLISAAGFVLTTEEQTQADINAILQSIEGPSIPREIATDAEKLIEYLKAREVIE

SEQ ID NO: 4702 - DNA, 50 bp, Pseudomonas aeruginosa; identical to SEQ ID NO: 4677
  source 1..50: mol_type = genomic DNA

SEQ ID NO: 4703 - DNA, 40 bp, Pseudomonas aeruginosa; identical to SEQ ID NO: 4693
  source 1..40: mol_type = genomic DNA

SEQ ID NO: 4704 - DNA, 40 bp, Pseudomonas aeruginosa; identical to SEQ ID NO: 4694
  source 1..40: mol_type = genomic DNA

SEQ ID NO: 4705 - DNA, 50 bp, Pseudomonas aeruginosa; identical to SEQ ID NO: 4680
  source 1..50: mol_type = genomic DNA

SEQ ID NO: 4706 - protein, 570 aa, Pseudomonas aeruginosa
MARLISYLRMSTSEQLRGFSLERQRKLIAEFAAKNGLSVEEENTLEDIGRSSYGDDADQKQLARFFENLNAGKYEPGDVFALENIDRLTRRGPIDALMKVNQIISKGLKLAIISEKEQRILEEIDVFSIITLSIDASRANKESQVKSEKGLFNWQEKRNLAASQKIAMTSQAPAWLDTEIFYIFDEEKKKNIKRRKYILNEEKAEAVRLIFDLYSSGNGALKIKNILNERSIPTFKGAEYWEPSIITKILKNPATFGLYQPKKQGTGKRDLIAAGEPINDYFPPVITRETFEQCERIREGNGTRKGRKGKLFTNLFTGLLTCSKCGGPVHLINPGIDKRNKVQKSIYYLVCKRAKFTKECTTKRVRYDDFETALLKAIQEINLADILNENNPLEILIKKQRSKETEINKKKKLIENFQRQFLENDGDLPSFMISQAKEAEISIKELEEEQREIASEIAQLNVYNSNVDNAIEELKEKPDYETRSKINLLFHEIIKSISLDTENQFYAIRFKNGVLRVVTAAGFIATTEHQTTAEMAEIMRIEGTQDIPAEIANDPEKLIEYLRQFDFVDH

SEQ ID NO: 4707 - DNA, 50 bp, Pseudomonas aeruginosa
  source 1..50: mol_type = genomic DNA
tacaggttaaacctgtacgacttgaccaagtcgggtctataatacctgta

SEQ ID NO: 4708 - DNA, 40 bp, Pseudomonas aeruginosa; identical to SEQ ID NO: 4683
  source 1..40: mol_type = genomic DNA

SEQ ID NO: 4709 - DNA, 40 bp, Pseudomonas aeruginosa; identical to SEQ ID NO: 4684
  source 1..40: mol_type = genomic DNA

SEQ ID NO: 4710 - DNA, 50 bp, Pseudomonas aeruginosa; identical to SEQ ID NO: 4680
  source 1..50: mol_type = genomic DNA

SEQ ID NO: 4711 - protein, 570 aa, Pseudomonas aeruginosa
MARLISYLRMSTSEQLRGFSLERQRKLIADFAAKNGLSVEEENTLEDIGRSSFSDDAQQKELTRFFENLNAGKYEPGDVFALENIDRLTRRGPVDAILKVNQIISKGLKLAIISGNEQRIIEDVNDVFTIINLSIDASRANKESKNKSDKGLSNWQEKRNLASTYKIAMTAQAPAWLDTEIFYIFDEEKKKNTKRRKYVLNEEKAEAVRLIFDLYSNGNGALKIKNILNERNIPTFKGAPYWEPSIITKILKNPATFGLYQPKKQGTGKRDLIAAGEPINDYFPPVITRDLFEQCEHIREGNSTRKGRKGKLFTNLFTGLLTCSKCGGPVHLINPGIDKRNKVQKSIYYLVCKRAKFTKECTTKRVRYDDFEIALLKAIQEINLADILNENNPLEILVKKQRSKETEINKKRKLIENFQRQFLENDGDLPSFMISQAKDAEISIKELEEDQREIASEIAQLNIYNSNVDNAIEELKENADYGTRSKINLLFHEIIKNISLDTENQFYTVRFKNGVMRVITAAGFIATTEEQTQADINAILQSIEGPRIPREIATDAEKLIEYLKAREVIE

SEQ ID NO: 4712 - DNA, 50 bp, Pseudomonas aeruginosa
  source 1..50: mol_type = genomic DNA
tacaggttaaacctgtacgacttgatcaagtccggtatataatacctgta

SEQ ID NO: 4713 - DNA, 40 bp, Pseudomonas aeruginosa; identical to SEQ ID NO: 4683
  source 1..40: mol_type = genomic DNA

SEQ ID NO: 4714 - DNA, 40 bp, Pseudomonas aeruginosa; identical to SEQ ID NO: 4684
  source 1..40: mol_type = genomic DNA

SEQ ID NO: 4715 - DNA, 50 bp, Pseudomonas aeruginosa; identical to SEQ ID NO: 4680
  source 1..50: mol_type = genomic DNA

SEQ ID NO: 4716 - protein, 570 aa, Pseudomonas aeruginosa
MARLISYLRMSTSEQLRGFSLERQRKLIADFAAKNGLSVEEENTLEDIGRSSFSDDAQQKELTRFFENLNAGKYEPGDVFALENIDRLTRRGPVDAILKVNQIISKGLKLAIISGNEQRIIEDVNDVFTIINLSIDASRANKESKNKSDKGLSNWQEKRNLASTHKIAMTAQAPAWLDTEIFYIFDEEKKKNIKRRKYVLNEEKAEAVRLIFDLYLSGNGALKIKNILNERNIPTFKGAEYWEPSIITKILKNPATFGLYQPKKQGTGKRDLIAAGEPINDYFPAVITRELFEQCERIREGNGTRKGRKGKLFTNLFTGLLKCVDCGGPVHLLNPGIDKRNKVQKSIYYLVCKRAKFTKECTTKRVRYDDFETALLKAIQEINLADILNENNPLEILIKKQRSKETEINKKKKLIENFQRQFIENDGDLPAFMISQAKEAEISIKELEDQQREIASEIAQLNIYNSNVDNAIDELKEKPDYETRSKINLLFHEIIKNISLDTENQFYTVRFKNGVMRLISASGFVLTTDEQTPADINEILQSIEGPSIPRDIATDPEKLIEYLKARTPIV

SEQ ID NO: 4717 - DNA, 50 bp, Pseudomonas aeruginosa; identical to SEQ ID NO: 4677
  source 1..50: mol_type = genomic DNA

SEQ ID NO: 4718 - DNA, 40 bp, Pseudomonas aeruginosa; identical to SEQ ID NO: 4693
  source 1..40: mol_type = genomic DNA

SEQ ID NO: 4719 - DNA, 40 bp, Pseudomonas aeruginosa; identical to SEQ ID NO: 4694
  source 1..40: mol_type = genomic DNA

SEQ ID NO: 4720 - DNA, 50 bp, Pseudomonas aeruginosa; identical to SEQ ID NO: 4680
  source 1..50: mol_type = genomic DNA

SEQ ID NO: 4721 - protein, 548 aa, Clostridium beijerinckii
MRAAIYSRKSKFTEKGESIENQINLCIQYAKNIGIYEYDIYEDEGFSGGNTNRPEFQKLMKDLKSKKFTHLICYRLDRISRNVADFAGTIEILNKYNVAFISIREQFDTSSAMGRAMMNVSATFAQLERETIAERIKDNLRELSKTGRWLGGPPPLGYKSIEVKNNDSNGKSRKKHILEINKNEINIPKMVFDLFIKHKSFQKVSRLLESQGIYSRKGTVFSRELVKQTINNPVYCIADKVLLNYFRNLGSEVYEIGNINGSNGIMPYNRRKDNGSFAPIEDWIISIGEHPGVINSSTWIKCQEINKEIKDHASNRQCTSQESLLSGLIVCAECGSGMAPRQNKSSKYHYRYYSCNLRNKAASRCNNDALNAYDAEEYVVNTLKCLTRDDMIKNYKELQKKNSSKLANKNLVVDYSKDIEINKKSISKLVMKMAYLDDDPILLEPFKLEIKKLTEKNDELKRTIEKLNFANEEISNTHETLDEILAILDNFKQFYDFTEDFEEKKRLIKSLVKYAIWNSRTRTLELILIGSDKERPKQGYLPLSDSNR

SEQ ID NO: 4722 - DNA, 50 bp, Clostridium beijerinckii
  source 1..50: mol_type = genomic DNA
atttacctttaagtgatagtaacagatgctccaattacataaaggtaaaa

SEQ ID NO: 4723 - DNA, 40 bp, Clostridium beijerinckii
  source 1..40: mol_type = genomic DNA
attaacagatatcggtacagaagaaatggcccatgtagaa

SEQ ID NO: 4724 - DNA, 40 bp, Clostridium beijerinckii
  source 1..40: mol_type = genomic DNA
attaacagatatcggtacaatagaaatggcccatgtagaa

SEQ ID NO: 4725 - DNA, 50 bp, Clostridium beijerinckii
  source 1..50: mol_type = genomic DNA
atttacctttctctgatattctcaattgctccaagttaaaaaataaaaag

SEQ ID NO: 4726 - protein, 563 aa, Parabacteroides goldsteinii
MKRAALLLRCSTNIQDYNRQKLELEKVANRFKLKVAKVFGEHVTGKDDIRKGNRKSVDELINACENNEIDVVLISEVSRLTRNFLYGVTLVDKFNRDYSIPIYFRDKRKWTIDVETGEVNLEFEKELRKAFEQAEEELASIRFRMASGKRDSAGLGQWFAGFPPFGYTRQKNGYLVKNEYAPIVKEMFDKYLEEGQALITTTRYIYGKYPDIKKLKSIGNTKFILNNKAYTGRAEANIYDEIDKVTDTFYFDIPAIIDEETYNKVQKKLANNRTTTPYPKAAKYLLQKLIKCSICGAFYTRLHSNKRDTVHFKCTSDKNSLTGCKSQVYLNERIVNPIIWNFVKEQLFYVGKMNAEQRLEAIAGENDNKSKAIEEQEALKISYKEQENKLTRLEDLYLDNDIDKNRYKERKSKIEKELSSIKAQMDRLTDRIRLSDFNIKRFNSTDFTEQYFKEVEADLEKQMKVLREYVKGIYPLYIDKVYCFLKVDTIEGMFNIFYEPRKAQQKCAYFIKDTLAQYHPDIRNFYTPNNTLLTDSDEVDAYYTLEEMKEICSRNGFEVRYRE

SEQ ID NO: 4727 - DNA, 50 bp, Parabacteroides goldsteinii
  source 1..50: mol_type = genomic DNA
aatcaataatgtttttagtttaatcaattaaactaataacttttatgatt

SEQ ID NO: 4728 - DNA, 40 bp, Parabacteroides goldsteinii
  source 1..40: mol_type = genomic DNA
tgacggaattcggcttgatcaatatggatgaatttgataa

SEQ ID NO: 4729 - DNA, 40 bp, Parabacteroides goldsteinii
  source 1..40: mol_type = genomic DNA
tgacggaattcggcttgatatatatggatgaatttgataa

SEQ ID NO: 4730 - DNA, 50 bp, Parabacteroides goldsteinii
  source 1..50: mol_type = genomic DNA
agttattacttgcctcaatttaaaatattaaactcagagaatttatgatt

SEQ ID NO: 4731 - protein, 475 aa, Bacillus wiedmannii
MKCVIYRRVSTDMQAEEGFSLEAQKMRLEAYAQSQGWDVIDDYMDDGYSAKNMDRPELQRMLKDAKDRKFEIILVYKLDRLCRSTRDLNDMIEEFEENKVKFKSATEVLDTTTATGRLFINLIGTLAQWEREQTAERVTETMYNRAARGYINGGPVPYGYKRDNKKTVINEDEAKIVKMIFKDALSHGTHWICKKLNDSGIKSKTGKHWSKLTVIQMLRNPIYCGYVRYAYTTDNETIQTKIQEEGFTPIISEDFYNKVQISMDHRSKKSSKPRKNRYHYFSTILVCPHCQGRLSGVSNIAKGKEYRYYRCLNSLRGDVVCPGIRLRSEDVDKAFLDKIDIVIDDISIDTVNENNIDLDLINNQLDKLKVKKARVKELYIDGIIDKGEFQKRNNEISSEEAELIKKTEVEYEEISKEAIIDTLKNLKDNWSIFSDEVKAQAIGSLFDTISIEVTYKDKNRKRLVELFEIVGYKFR

SEQ ID NO: 4732 - DNA, 50 bp, Bacillus wiedmannii
  source 1..50: mol_type = genomic DNA
gttttacttatggtatatgataggaatctattaattactataggtaaaac

SEQ ID NO: 4733 - DNA, 40 bp, Bacillus wiedmannii
  source 1..40: mol_type = genomic DNA
attcgtaattaataaagccaacgaataactccccacaaag

SEQ ID NO: 4734 - DNA, 40 bp, Bacillus wiedmannii
  source 1..40: mol_type = genomic DNA
attcgtaattaataaagccgacgaataactccccacaaag

SEQ ID NO: 4735 - DNA, 50 bp, Bacillus wiedmannii
  source 1..50: mol_type = genomic DNA
tttctattacttttaagtgatagggatctctttattcattcaggtaaaac

SEQ ID NO: 4736 - protein, 638 aa, Enterobacter hormaechei
MKPKLYSYVRFSSVKQREGNSLERQQDTALKIAARYNLELDTTAFHDLGMSAFKGKNAHEGKLSEFIKQIGGKVPVGSWLVVENLDRISRDDAWSALDIFKNILSKGIVVVTGMDEKVYKYADVKNNPTDLIISLLMFTRAHDESLTKKNRVEAQARSLIRHNLTREPGTPAKAIESVGQNVWWVDTKSGFVTPHPIYFTAAQKIIELKQNGETLLGIQRYLNEHYPAPKKRVYKDQTGQALKPKTEQWGKHLIRTFLNPTVHGQKTFTLDKRDESGAIIYDSESDEPLKEIFIIPDYYPALMPEVDYLTLSKLDRHRAITRNSSKYPAGNPEPEIPLLSGIGILFCGKCGSFMFKSGSCENKYRYICGSKIVQGKPCGKKGFTAYQLEHTVLQLIADHVWNNHKEDKTAWYEYEIEKASEAVKKLLKLATLTDELEELADQINANKQKKITLEREFQQYKISRSEIQTAGWEQFRNFDVHDTKNPDRKRIRLKVKQAIKRIDCYDIDRRHGHFEVTFADETKQRIVIKFNRNRSPGVAYVEVQTVNDHDLLKMQGLVLHSFIDELISPDKFAQYIKEKHEVSLLNPTYITELENGTSQDEGNGMAIIVDGSTSKTYATVNGTKYEINSLEDLEKLSH

SEQ ID NO: 4737 - DNA, 50 bp, Enterobacter hormaechei
  source 1..50: mol_type = genomic DNA
actgcgaataattgactattaggcttgcctaacatataattattcactgt

SEQ ID NO: 4738 - DNA, 40 bp, Enterobacter hormaechei
  source 1..40: mol_type = genomic DNA
gcagcgggtattggcaggcttgccctccggcatgcctgga

SEQ ID NO: 4739 - DNA, 40 bp, Enterobacter hormaechei
  source 1..40: mol_type = genomic DNA
gcagcgggtattggcaggccagccctccggcatgcctgga

SEQ ID NO: 4740 - DNA, 50 bp, Enterobacter hormaechei
  source 1..50: mol_type = genomic DNA
actgcaaagaagccaccaagaggccaggctgacattttataattcactgt

SEQ ID NO: 4741 - protein, 638 aa, Enterobacter asburiae
MKPKLYSYVRFSSVKQREGNSLERQQDTALKIAARYNLELDTTAFHDLGMSAFKGRNAHEGKLSEFIKQIGVKVPVGSWLVVENLDRISRDDAWTALDIFKSILSKGIVVVTGMDEKVYKYADVKNNPTDLIISLLMFTRAHDESLTKKNRVEAQARSLIRYNLTRKAGTPAKAIESVGQNVWWVDTKSGYVTPHPMYFPAAQKIIELKQNGETLLGIQRYLNEHYPAPKKRIYKDQTGQALKPKTEQWGKHLIRTFLNPTVYGQKVFTLDKRDESGVVIYDPDSEHPLKETFVIPDYYPALISEIDYLTLSKLDRHRAVTRSSSKYPEGNPEPEIPLLSGIGILFCGKCGSFMFKSGSNENKYRYICGSKIVQGKPCGKKGFTSYQLEHTILQLIADHVWNNHQEDKTAWYESEIEKASESIDKLLKLATLTDSLEELAEQIRSYKHKKATLEREFQQYKISRSEIQTTGWDQFRNFDIHDTKNPDRKRIRLKIKQAIKRINCYDIDGRHGHFEVTFADEAKQRIVIKFNRNRSPGVSYVEAQTVNDHDLLKMQGFVMHSFIDELISPDKFAQQIKDKHEVSILNPTFITKLEDGVNRDEGNGLAIKVDSTTSKSYATVNGIKYEINSLEDLEKLSQ

SEQ ID NO: 4742 - DNA, 50 bp, Enterobacter asburiae
  source 1..50: mol_type = genomic DNA
actgcgaatgattgactattaggcttgcctaacatataattattcactgt

SEQ ID NO: 4743 - DNA, 40 bp, Enterobacter asburiae
  source 1..40: mol_type = genomic DNA
gcagcgggtattggcaggcttgccctccggcattcctgga

SEQ ID NO: 4744 - DNA, 40 bp, Enterobacter asburiae
  source 1..40: mol_type = genomic DNA
gcagcgggtattggcaggccagccctccggcattcctgga

SEQ ID NO: 4745 - DNA, 50 bp, Enterobacter asburiae; identical to SEQ ID NO: 4740
  source 1..50: mol_type = genomic DNA

SEQ ID NO: 4746 - protein, 638 aa, Enterobacter hormaechei
MKPKLYSYVRFSSVKQREGNSLERQQDTALKIAARYNLELDTTAFHDLGMSAFKGRNAHEGKLSEFIKQIGVKVPVGSWLVVENLDRISRDDAWTALDIFKSILSKGIVVVTGMDEKVYKYADVKNNPTDLIISLLMFTRAHDESLTKKNRVEAQARSLIQYNLTRKAGTPAKAIESVGQNVWWVDTKSGYVTPHPMYFSAAQKIIELKQNGETLLGIQRYLNEHYPAPKKRIYKDQTGQALKPKTEQWGKHLIRTFLNPTVYGQKVFTLDKRDKSGAVIYEPDSEQPLKETFVIPDYYPALISEIDYLTLSKLDRHRAVTRSSSKYPEGNPEPEIPLLSGIGILFCGKCGSFMFKSGSNENKYRYICGSKIVQGKPCGKKGFTAYQLEHTVLQLIADHVWNNHQEDKTAWYESEIEKTSESIDKLLKLATLTDSLEELAEQIRSYKHKKATLEREFQQYKISRSEIQTTGWDQFRNFDVHDTKNPDRKRIRLKVKQAIKRINCYDIDGRHGHFEVTFADETKQRIVIKFNRNRSPGVSYVEAQTVNDHDLLKMQGFVMHSFIDELISPDKFAQQIKDKHEVSILNPTFITKLEDGVNRDESNGLAIKVDSTTSKSYVTVNGIKYEINSLEDLEKLLQ

SEQ ID NO: 4747 - DNA, 50 bp, Enterobacter hormaechei; identical to SEQ ID NO: 4737
  source 1..50: mol_type = genomic DNA

SEQ ID NO: 4748 - DNA, 40 bp, Enterobacter hormaechei; identical to SEQ ID NO: 4738
  source 1..40: mol_type = genomic DNA

SEQ ID NO: 4749 - DNA, 40 bp, Enterobacter hormaechei; identical to SEQ ID NO: 4739
  source 1..40: mol_type = genomic DNA

SEQ ID NO: 4750 - DNA, 50 bp, Enterobacter hormaechei; identical to SEQ ID NO: 4740
  source 1..50: mol_type = genomic DNA

SEQ ID NO: 4751 - protein, 638 aa, Enterobacter ludwigii
MKPKLYSYVRFSSVKQREGNSLERQQDTALKIAARYNLELDTTAFHDLGMSAFKGKNAHEGKLSEFIKQIGVKVPVGSWLVVENLDRISRDDAWSALDIFKNILSKGIIVVTGMDEKVYKYADVKNNPTDLIISLLMFTRAHDESLTKKNRVEAQARSLIRHNLAREPGTPAKAIESVGQNVWWVDTKSGYVTPHPIYFTAAQKIIELKQNGETLLGIQRYLNEHYPAPKKRVYKDQTGQALTPKTEQWGKHLIRTFLNPTVHGQKIFRLDKRDESGAIIYDSESDEPLKETFIIPDYYPALMSEVDYLTLSKLERHRAITRNSSKYPTGNPEPEIPLLSGIGILFCGKCGSFMFKSGSSENKYRYICGSKIVQGKPCGKKGFTSYQLEHTVLQLIADHVWNNHQEDKTAWYESEIEKASEAVKKLLKLATLTDELEELADQINATNQKKIVLAREFQQYKISRSEIQTTGWDQFRNFDVHDTKNPDRKRIRLKVKQAIKRIDCYDIDGRHGHFEVTFADETKQRIVIKFNRNRSPGVSYVEAQTVNDHDLLKMQGFVMHSFIDELISPDKFAQHIKEKHEVSLLNPTYITELENGTSREEGKGMAIIVDGSTSKTYATVNGTKYEINSLEDLENLSH

SEQ ID NO: 4752 - DNA, 50 bp, Enterobacter ludwigii; identical to SEQ ID NO: 4737
  source 1..50: mol_type = genomic DNA

SEQ ID NO: 4753 - DNA, 40 bp, Enterobacter ludwigii
  source 1..40: mol_type = genomic DNA
acagcgggtattagcaggtttgccgtccggcatgccagga

SEQ ID NO: 4754 - DNA, 40 bp, Enterobacter ludwigii
  source 1..40: mol_type = genomic DNA
acagcgggtattagcaggtcagccgtccggcatgccagga

SEQ ID NO: 4755 - DNA, 50 bp, Enterobacter ludwigii; identical to SEQ ID NO: 4740
  source 1..50: mol_type = genomic DNA

SEQ ID NO: 4756 - protein, 638 aa, Cronobacter malonaticus
MKPKLYSYVRFSSVKQREGNSLERQQDTALKIAARYNLELDTMAFHDLGMSAFKGKNAHEGKLSEFIKQIGAKVPVGSWLVVENLDRISRDDAWSALDIFKNILSRGIVVVTGMDEKVYKYADVKNNPTDLIISLLMFTRAHDESLTKKNRVEAQARSLIRHNLTRESGTPAKAIESVGQNVWWVDTKSGYVIPHPIYFTAAQKIIELKQNGETLLGIQRYLNEHYPAPKKRVYKDQTGQALTPKTEQWGKHLIRTFLNPTVHGQKTFTLDKRDESGVIIYDSESDEPLKETFIIPDYYPALMSEVDYLTLSKLDRHRAITRNSSKYPVGNPEPEIPLLSGIGILFCGKCGSFMFKSGSSENKYRYICGSKIVQGKPCGKKGFTSYQLEHTVLQLIADHVWNNHQEDKTAWYETEIEKASEAVKKLLKLATLTDELEELADQINANNQKKITLEREFQQYKIRRSKIQTTGWDQFRNFDVHDTKNPDRKRIRLKVKQAIKRIDCYDIDGRHGHFEVTFADETKQRIVIKFNRNRSPGVSYVEAQTVNDHDLLKMQGLVLHSFIDELISPEKFAQHIKDKHEISILNPSFITKLEDGVKQDEGNGLAIKVDSTRSKSYATVNGIKYEINSLEDLEKLSQ

SEQ ID NO: 4757 - DNA, 50 bp, Cronobacter malonaticus; identical to SEQ ID NO: 4742
  source 1..50: mol_type = genomic DNA

SEQ ID NO: 4758 - DNA, 40 bp, Cronobacter malonaticus
  source 1..40: mol_type = genomic DNA
gcagggcgtattggccggtttgccgtcgggcatgcccggg

SEQ ID NO: 4759 - DNA, 40 bp, Cronobacter malonaticus
  source 1..40: mol_type = genomic DNA
gcagggcgtattggccggtcagccgtcgggcatgcccggg

SEQ ID NO: 4760 - DNA, 50 bp, Cronobacter malonaticus; identical to SEQ ID NO: 4740
  source 1..50: mol_type = genomic DNA

SEQ ID NO: 4761 - protein, 638 aa, Enterobacter asburiae
MKPKLYSYVRFSSVKQREGNSLERQQDTALKIAARYNLELDTTAFHDLGMSAFKGRNAHEGKLSEFIKQIGVKVPVGSWLVVENLDRISRDDAWTALDIFKSILSKGIVVVTGMDEKVYKYADVKNNPTDLIISLLMFTRAHDESLTKKNRVEAQARSLIRYNLTRKAGTPAKAIESVGQNVWWVDTKSGYVTPHPMYFPAAQKIIELKQNGETLLGIQRYLNEHYPAPKKRIYKDQTGQALKPKTEQWGKHLIRTFLNPTVYGQKVFTLDKRDESGVVIYGPDSEQPLKETFVIPDYYPALISEIDYLTLSKLDRHRAVTRSSSKYPEGNPEPEIPLLSGIGILFCGKCGSFMFKSGSNENKYRYICGSKIVQGKPCGKKGFTSYQLEHTILQLIADHVWNNHQEDKTAWYESEIEKASESIDKLLKLATLTDSLEELAEQIRSYKHKKATLEREFQQYKISRSEIQTTGWDQFRNFDVHDTKNPDRKRIRLKIKQAIKRINCYDIDGRHGHFEVTFADEAKQRIVIKFNRNRSPGVSYVEAQTVNDHDLLKMQGFVMHSFIDELISPDKFAQQIKDKHEVSILNPTFITKLEDGVNRDEGNGLAIKVDSTTSKSYATVNGIKYEINSLEDLEKLSQ

SEQ ID NO: 4762 - DNA, 50 bp, Enterobacter asburiae; identical to SEQ ID NO: 4742
  source 1..50: mol_type = genomic DNA

SEQ ID NO: 4763 - DNA, 40 bp, Enterobacter asburiae; identical to SEQ ID NO: 4743
  source 1..40: mol_type = genomic DNA

SEQ ID NO: 4764 - DNA, 40 bp, Enterobacter asburiae; identical to SEQ ID NO: 4744
  source 1..40: mol_type = genomic DNA

SEQ ID NO: 4765 - DNA, 50 bp, Enterobacter asburiae; identical to SEQ ID NO: 4740
  source 1..50: mol_type = genomic DNA

SEQ ID NO: 4766 - protein, 506 aa, Bacillus cereus
MYKPFSQADYKPSDKPKALYIRKSKKSQGKTEIETIESHLKRLTDFCKDQGWNNYVIYNDYVAKSTDINRIEYNKMLNACLDGKHDLIVVVEESRLYRTVNEQTNVYEELKGTDIAILSIREGYIFPNDRNQFLTNIIRGAMNQQELENFAYRMNVKVLASAKEGKYVNKLPFGYFKDKDKLTPHPIESKTFRFIVDKVLEGYVIAEIIGKLNQLGYTTKSNKKWKDVGTITRMLANRVYLGESHYYSKMFEEDVIVRDTHPALLTIEEFQKISNMIRSRSRNPQGIRYTKINTVLDRLVVCGICGNRLPIHKSWTNKEGVTSYQVGKCQKVMGEYNEKKCPNKSISLKELLPHFYIAIESYKDSLREEIEGVEIDTTSDMKIKVMEQIKDISKRIAEIQIEIQNAKSYLIKGVLSEADYVGLVPPLAKDLKDLNVALEDNERLLASLTDYDRSAVIQNAVDSLINIENESIENQNRVYRLLFEHLELVNTVDEFEIRLKEKDVSN

SEQ ID NO: 4767 - DNA, 50 bp, Bacillus cereus
  source 1..50: mol_type = genomic DNA
actttacattaaggggttttatctcctgataaagtatgttattataatgt

SEQ ID NO: 4768 - DNA, 40 bp, Bacillus cereus
  source 1..40: mol_type = genomic DNA
accttgaataacgaagtcgccggataaagcaattccgtgt

SEQ ID NO: 4769 - DNA, 40 bp, Bacillus cereus
  source 1..40: mol_type = genomic DNA
accttgaataacgaagtcgctggataaagcaattccgtgt

SEQ ID NO: 4770 - DNA, 50 bp, Bacillus cereus
  source 1..50: mol_type = genomic DNA
acttcacatgcaagttttttatatcttgaaaaagtattttttcattatat

SEQ ID NO: 4771 - protein, 506 aa, Bacillus cereus
MYKPFSQADYKPSDKPKALYIRKSKKSQGKTEIETIESHLKRLTDFCKDQGWNNYVIYNDYVAKSTDINRIEYNKMLNACLDGKHDLIVVVEESRLYRTVNEQTNVYEELKGTDIAILSIREGYIFPNDRNQFLTNIIRGAMNQQELENFAYRMNVKVLASAKEGKYVNKLPFGYFKDKDKLTPHPIESKTFRFIVDKVLEGYVIAEIIGKLNQLGYTTKSNKKWKDVGTITRMLANRVYLGESHYYSKMFEEDVIVRDTHPALLTIEEFQKISNMIRSRSRNPQGIRYTKINTVLDRLVVCGICGNRLPIHKSWTNKEGVTSYQVGKCQKVMGEYNEKKCPNKSISLKELLPHFYIAIESYKDSLREEIESVEIDTTSDMKIKVMEQIKDISKRIAEIQIEIQNAKSYLIKGVLSEADYVGLVPPLAKDLKDLNVALEDNERLLASLTDYDRSAVIQNAVDSLINIENESIENQNRVYRLLFEHLELVNTVDEFEIRLKEKDVSN

SEQ ID NO: 4772 - DNA, 50 bp, Bacillus cereus; identical to SEQ ID NO: 4767
  source 1..50: mol_type = genomic DNA

SEQ ID NO: 4773 - DNA, 40 bp, Bacillus cereus; identical to SEQ ID NO: 4768
  source 1..40: mol_type = genomic DNA

SEQ ID NO: 4774 - DNA, 40 bp, Bacillus cereus; identical to SEQ ID NO: 4769
  source 1..40: mol_type = genomic DNA

SEQ ID NO: 4775 - DNA, 50 bp, Bacillus cereus; identical to SEQ ID NO: 4770
  source 1..50: mol_type = genomic DNA

SEQ ID NO: 4776 - protein, 506 aa, Bacillus cereus
MYKPFSQADYKPSDKPKALYLRKSKKSKGKTEAETVESQLKRLTEFCKEQGWNNYVIYNDYVAKSTDVNREEYRKMLKACLDGKHDLIIVVEESRLYRTVNEQTNVYEELKGTDIAILSIREGYIFPNDRNQFLTNIIRGAMNQQELENFAYRMNVKVLASAKEGVYVNKTPFGYFKDKDKLIPHPMESKTFRFIVDKVLEGYVIAEIIGQLNQLGYPTKSNKKWKDVGTITRMLANRVYLGESHYYSKMFDEDVIVRDTHQPLLTIEEFQKISNMIRSRSRNPQGIRYTKVNTVLDRLVVCGICGSRLPLHKSWTNKEGITSFQIGKCQKVIGEYNEKKCPNKSMSLNELLPHFYNAIESYKDSLREEIEGVEIDTTNDKKITVMNQIKDIKIRIAEIQTEIQNAKSYLIKGILSEADYVGLVPPLEKDIKELNETLEDNERLLTSLTDYDRSAVIQNAVDSLNNIENESIENQNRIYRLLFEHLELVNTVNEFEIRLTEKDVSN

SEQ ID NO: 4777 - DNA, 50 bp, Bacillus cereus
  source 1..50: mol_type = genomic DNA
actttacattaagaggttttatctcctgataaagtatgttattataatgt

SEQ ID NO: 4778 - DNA, 40 bp, Bacillus cereus
  source 1..40: mol_type = genomic DNA
gccttgtataacgaagtcgccggataaagcaatcccatga

SEQ ID NO: 4779 - DNA, 40 bp, Bacillus cereus
  source 1..40: mol_type = genomic DNA
gccttgtataacgaagtcgctggataaagcaatcccatga

SEQ ID NO: 4780 - DNA, 50 bp, Bacillus cereus; identical to SEQ ID NO: 4770
  source 1..50: mol_type = genomic DNA

SEQ ID NO: 4781 - protein, 506 aa, Bacillus toyonensis
MYKPFSQADYKPSDKPKALYIRKSKKSQGKTEIETIESHLKRLTDFCKDQGWNNYVIYNDYVAKSTDINRIEYNKMLNACLDGKHDLIVVVEESRLYRTVNEQTNVYEELKGTDIAILSIREGYIFPNDRNQFLTNIIRGAMNQQELENFAYRMNVKVLASAKEGKYVNKLPFGYFKDKDKLTPHPIESKTFRFIVDKVLEGYVIAEIIGQLNQLGYTTKSNKKWKDVGTITRMLANRVYLGESHYYSKMFEEDVIVRDTHPALLTIEEFQKISNMIRSRSRNPQGIRYTKINTVLDRLVVCGICGNRLPIHKSWTNKEGVTSYQVGKCQKVMGEYNEKKCPNKSISLKELLPHFYIAIESYKDSLREEIESVEIDTTSDMKIKVMEQIKDISKRIAEIQIEIQNAKSYLIKGVLSEADYVGLVPPLAKDLKDLNVALEDNERLLASLTDYDRSAVIQNAVDSLINIENESIENQNRVYRLLFEHLELVNTVDEFEIRLKEKDVSN

SEQ ID NO: 4782 - DNA, 50 bp, Bacillus toyonensis; identical to SEQ ID NO: 4767
  source 1..50: mol_type = genomic DNA

SEQ ID NO: 4783 - DNA, 40 bp, Bacillus toyonensis; identical to SEQ ID NO: 4768
  source 1..40: mol_type = genomic DNA

SEQ ID NO: 4784 - DNA, 40 bp, Bacillus toyonensis; identical to SEQ ID NO: 4769
  source 1..40: mol_type = genomic DNA

SEQ ID NO: 4785 - DNA, 50 bp, Bacillus toyonensis; identical to SEQ ID NO: 4770
  source 1..50: mol_type = genomic DNA

SEQ ID NO: 4786 - protein, 480 aa, Anaerotruncus rubiinfantis
MRMGAAYIRVSTDQQMELSPESQRGEIEKYAKANDIVLSEEFIFEEDEGRSGRKSANRPEFQRMIGMAKAQPKPFDVILVWKYSRFARNQEESIVYKSMLRSKCGIDIISVSEPLVDGPFGSLIERIIEWMDEYYSIRLSGEVVRGMTEKAQRGGVVGSPAFGYKVVNGTFVPVQEEAEIVRMVFEKFVNEQVAMRELATMLNTLGVRTKKGSQMENRTVEYMLHNPVYIGKIRWSRSGKIDRNYDKEDVVLVDGHHEPIISEELFNQAQEKLATRKKMYARHAHEASHKQEYMLRGLVRCSNCGSTLIYVPQNGGLQCHSYAKGSCKESHYISAAQANIRVVDLIEKCFQEQNFSLEHRNRAPAGNDQKLIEAQIQRERQKLARVKAAYEDGIDSLEEYKANKEKILRTIEKLNSKMEIGKQVDERSSLKEFIESHKDLVKDLRNPELTDDVKNVILRSCLDHVVFDRAKNRFQAFFYD

SEQ ID NO: 4787 - DNA, 50 bp, Anaerotruncus rubiinfantis
  source 1..50: mol_type = genomic DNA
agttatatctttatggtgttaggtccacctaacttcttaaagatataact

SEQ ID NO: 4788 - DNA, 40 bp, Anaerotruncus rubiinfantis
  source 1..40: mol_type = genomic DNA
tccgatttctccgtcaggtccgccgagttggctgataatc

SEQ ID NO: 4789 - DNA, 40 bp, Anaerotruncus rubiinfantis
  source 1..40: mol_type = genomic DNA
tccgatttctccgtcaggtatgccgagttggctgataatc

SEQ ID NO: 4790 - DNA, 50 bp, Anaerotruncus rubiinfantis
  source 1..50: mol_type = genomic DNA
agttgtatgaaaccagtgttaggtatatgtaacgtcacagaaataaaact

SEQ ID NO: 4791 - protein, 540 aa, Vibrio vulnificus
MKKYHLYHRVSKLVQSEDGQGIQRQEQGCEIWITDYNKRLLDDGKQPFSKGLVYEDHGKSAYTAENFKRGQLGTLMKDIGKGTIAKGDLIVIELIDRFSRADVDFVRKKFQSILDSGVKIAITKWNIVFEEKMDGIAGVSARMLLEIGMYLAHQESSQKSARIKATRVLLEDSGKKSIAKPPFWLARNPDLKSYTVIEENADLVRKIFDLKLNYNYGPQRIIKHIGDVNIYRYKFDDEGNLIKTTQNSSLSESTVNALIRNPNVIGMLKGKNYYPRIIDDKTYYAVQRRTGENKGGANDVFKNVFLGVGKCGCDIKNISELGCISFNKCGYTMAYSSRKVKNPVKGMYLRCNNKSKKNKCTAKNIDYYKAQQKVYKVLKSIKFDESKSVDIAHLEERIHNLDKEISRVRELMAQYTDDFEWERQYKVKRDERKKIENEIINSKSMISSKISSLDLDFNVEKDRVLFNQILKDNRVIVYFKENGMDIKVGSLNNIGIRVGYEEGDIEVDDVLENLSKGSFKAIEIVDKKRKRFWFSSMFDD

SEQ ID NO: 4792 - DNA, 50 bp, Vibrio vulnificus
  source 1..50: mol_type = genomic DNA
atgttgttaaacatgcagttgactaatgacaaatgtatgatagactacat

SEQ ID NO: 4793 - DNA, 40 bp, Vibrio vulnificus; identical to SEQ ID NO: 1353
  source 1..40: mol_type = genomic DNA

SEQ ID NO: 4794 - DNA, 40 bp, Vibrio vulnificus; identical to SEQ ID NO: 1354
  source 1..40: mol_type = genomic DNA

SEQ ID NO: 4795 - DNA, 50 bp, Vibrio vulnificus; identical to SEQ ID NO: 740
  source 1..50: mol_type = genomic DNA

SEQ ID NO: 4796 - protein, 603 aa, Citrobacter koseri
MKKVFVYHRVSSDQQLDGSGIARQAELLEGYLDRTGICSEMDDPIPVVLSDQGVSAFKGLNISEGELGAWMEEVRNGMWDSSILVVESIDRFSRQNPFDVMGYINALMAHNVAIHDVMANIVISRSNSKDLPFVMMNAQRAYDESKYKSDRIRKGWAKKREQAFNKGTIVTNKRPQWIDVEDDKYVLNHKAAVIKEIFELYKTGLGCPTIAKELQKKEGERYKFNRAWTGELVHKILTNRRVTGKIFISETIRNHDDLDNPVTQKKYQMDVYPVVVNEDEFELVQQLLKSRRPNSGRVTVKKTENEEVLIKSNLFSGIARCTECGGSMYHNVVRAKRTPKKGEPKVDEYRYIRCLNERDGLCENKAMTYETVERFVVEHIIGMNLSTVMKEQEFNPEVEVLRVQIDQVKDQITNYENGIERRKSSGKAVSFEMREELDDAKLELEELLARQASLATVHVDVPVLQDVNVTELYDVYNVDMRTRYENELNKIVSNVRLKRNGNYYSIDITYKQNELKRHVLFVEHKKKEQTLISEVIIEDVDSSTFYSTPSFMIRATKGEIRFQQTNEDLSIIDYSLMMNYVDTLEGADTVAVWMRHNMNFLFT

SEQ ID NO: 4797 - DNA, 50 bp, Citrobacter koseri
  source 1..50: mol_type = genomic DNA
ttgttgtaatagacactacatattcaaatgtgttatgtttatacaaataa

SEQ ID NO: 4798 - DNA, 40 bp, Citrobacter koseri
  source 1..40: mol_type = genomic DNA
tttttgcttgataatcatacaagtaagtgccattacagca

SEQ ID NO: 4799 - DNA, 40 bp, Citrobacter koseri
  source 1..40: mol_type = genomic DNA
tttttgcttgataatcataggagtaagtgccattacagca

SEQ ID NO: 4800 - DNA, 50 bp, Citrobacter koseri
  source 1..50: mol_type = genomic DNA
aagttataatatttactaaattttggaatgtcttatattttttaaaataa

SEQ ID NO: 4801 - protein, 603 aa, Citrobacter koseri; identical to SEQ ID NO: 4796

SEQ ID NO: 4802 - DNA, 50 bp, Citrobacter koseri; identical to SEQ ID NO: 4797
  source 1..50: mol_type = genomic DNA

SEQ ID NO: 4803 - DNA, 40 bp, Citrobacter koseri
  source 1..40: mol_type = genomic DNA
tttttgcttgataatcatacaagtaagtgccgttacagca

SEQ ID NO: 4804 - DNA, 40 bp, Citrobacter koseri
  source 1..40: mol_type = genomic DNA
tttttgcttgataatcataggagtaagtgccgttacagca

SEQ ID NO: 4805 - DNA, 50 bp, Citrobacter koseri; identical to SEQ ID NO: 4800
  source 1..50: mol_type = genomic DNA

SEQ ID NO: 4806 - protein, 519 aa, Staphylococcus delphini
MNNIMSGYYDELDNQESQIQNVAIYARKSRADEGEKDLANHLLRLKARCDLNEWRYEIYKEIGSGSTIDDRPEMIRLLNDVQTGVYDAVVVVDLDRLSRGKGADLDRILGIFRNNNVKIVQESPYEVYNLANSDHAQMLEMKMFFGNMELMQSKKRFREGRRLARHLGKWVSGQAPLGYDIDRKTTKLVINEKEKEIIDLMKELYLVANYNGVEIAEELNSKGYKTKRGKLFTSSSVYKTLKNETYTGTTVYNKSRGNHRNSKDLYSSGLPFERLDESEWKRNYNTHEPIISKQEYQQIIEKINENKYVREDKGRRSALSGLCYTPEGLLYTNGNYDRHTKMPKNITVKNRKATEAENYIAVPIMLVESVILESLKILEEEIMEMLDSDDNTKLVEQLESRAEKISKEVIKIEDEIMRIQDGFLSGLFDAKEAKEIKEKKLKIITKKKSEIEGIKGEIDKVSKSKNITKLERINNFYNKIETTTDVNELNQIYKRLINKIIVSRTVNNPNVVNIKVNFK

SEQ ID NO: 4807 - DNA, 50 bp, Staphylococcus delphini
  source 1..50: mol_type = genomic DNA
aagcataaaatgtttcgttaatatggatattaataaaacattttatgctt

SEQ ID NO: 4808 - DNA, 40 bp, Staphylococcus delphini
  source 1..40: mol_type = genomic DNA
taggggcaactattaatatggacggaacagcgatcatgca

SEQ ID NO: 4809 - DNA, 40 bp, Staphylococcus delphini
  source 1..40: mol_type = genomic DNA
taggggcaactattaatatagacggaacagcgatcatgca

SEQ ID NO: 4810 - DNA, 50 bp, Staphylococcus delphini
  source 1..50: mol_type = genomic DNA
aggcttaaaatctacctttaatatagattttaatataatactttaagttt

SEQ ID NO: 4811 - protein, 461 aa, Listeria grandensis
MTVGIYIRVSTEEQAKEGFSISAQREKLQAYCIAQGWGEFKFYVDEGLSAKNMERPLLKALLKHIETGLIDTVLVYKLDRLTRSVVDLHNMLNFFDKYDCSFKSATEVYDTSSAMGRFFITIISSVAQFERENTSERVSFGMEERARQGKYIPAAPFGFTKGDDGYLIPNEEAAEPLRDVISKIMRGYSLRQCAAYLDNLGVRPRRSKDVWKANTLKLILTNPALYGATKWADKVFENTHQGIITKDEFESLKKIIDDRSSKGTYRSPALTHIFSGKIICEKCGYRMSITRTKYKDRFNNDYRCSNCKVYHTHTSISERKMLKAFDDYIYEFKLVQFDISKETKTVNKQTRVEKQIVSLTKKREKYQKGWALDLIEDDEFSKLMKDTQIELEELEMELQKYTAITEQKFDKIAIKNIVKNIKENWSELSIEERKDFVNMFIKDIHYVKNDGIATITKIDFY

SEQ ID NO: 4812 - DNA, 50 bp, Listeria grandensis
  source 1..50: mol_type = genomic DNA
ttctgtatatatgataagtaaagagaactgtacttatcatatatacagaa

SEQ ID NO: 4813 - DNA, 40 bp, Listeria grandensis
  source 1..40: mol_type = genomic DNA
ttctaaattagaataaccagaactgtatttgtaacccatt

SEQ ID NO: 4814 - DNA, 40 bp, Listeria grandensis; identical to SEQ ID NO: 4813
  source 1..40: mol_type = genomic DNA

SEQ ID NO: 4815 - DNA, 50 bp, Listeria grandensis
  source 1..50: mol_type = genomic DNA
tactgtatatattctatatatatagaactgtacatattctatatatataa

SEQ ID NO: 4816 - protein, 555 aa, Streptococcus equi
MNKSTLTIEDIKTQNLDSLPDRITALYCRLSAEDANEGESNSISNQKQILSQVAIRENLPNPFFFVDDGFSGSNAQRPDFQKMMSLVETGKIQAVVVKDLSRLSRDYLLTGQLTEITFPSKNIRFISLNENLDSNKRNSQDACLAPLVSLFNNWYSLQCSEKIKLSKHTKAKTGEKIGWVAPYGYIKNPENPKEWLVDDYASQIVKRVFKEYLSGKPIASIAGGLRKDKILTPANYKKKLGISNYRVLETDPYHWKSQMICQMIEKEEYTGATINLKTAKISYKQRGHRMRPREDWLIFPDTHEAIISQEDFEMARKMLGHKRVTPKNRWKNTAGHENLFAGLVFCENGHKLSFCPQQKNHLNLDHYKCYHYRRAGDTCSGSHYLRKEILEELVLRDLQQLTSSVQLDEEKLLEKLKSSFDIRENQKQDSIRKQLTRFTKRSKELDTIIQKLYEKQLLDDISDERFRKLADSYEGEQAELNQKIQELQEVLINQTESEESIDKFMRTIRQYTNLEILSTQLVNELIDKIVVHQPIGRGKNCQVTIELHYRFIGEL

SEQ ID NO: 4817 - DNA, 50 bp, Streptococcus equi
  source 1..50: mol_type = genomic DNA
ggactgctcggtgaggtgtaaatattataccacagacctgtaagcagtcc

SEQ ID NO: 4818 - DNA, 40 bp, Streptococcus equi
  source 1..40: mol_type = genomic DNA
aattacttccatagctttattataccaaaagtctaacaaa

SEQ ID NO: 4819 - DNA, 40 bp, Streptococcus equi
  source 1..40: mol_type = genomic DNA
aattacttccatagctttactataccaaaagtctaacaaa

SEQ ID NO: 4820 - DNA, 50 bp, Streptococcus equi
  source 1..50: mol_type = genomic DNA
cgactgctcttaatcatgaaaatgctattccactgactttatagcagtcc

SEQ ID NO: 4821 - protein, 550 aa, Enterobacter roggenkampii
MGIKTAFCYCRVSSGRQKTEKGGFGMSRQQALLTTYVEEYEDKDGLGYELSVDNIVFLKAEGVSGFSGKNIEQGSVLHSFIADYKSGKIKNAVLIIENIDRFSRANPNEAAELFLGLINKGCDVHEIDTETVHHRCSDLNQISAGLTRSHKESLRKQKLSIKNWDERFERTVKKHIPLTGRCPGWLKVENNQYQEIPENVAPIRLIFEWYNNGYGQAFIRDRLNSEGYKYNGKTWSNWSVHRVLKDERVTGKHRTQSTLRNNFDGIMMYPTIVTELQFKRAEQRLTKPGRDKKINRRANTLFSGVLVCGLCKAGHILINNENGNRFGRCSHAIAGNKRCVANGFKYNVVENTLLKYLRHLDFGSLSNSSHAAEVENLSSELIHYSNYLANVQRTVDSVDIPTETDYKVLKNLEAKIRELQGKIDDLKALENVSVSYEDIVKKINYELLDVSNIEVRQDFNIKIRKIIREIQILKIQKNIVLVSVSFYVSTDLQWLTISLKEGFLLSNTYVENKTLVVTLGDDVMTYDIEKEQYFLNSKPISNEEAYELFG

SEQ ID NO: 4822 - DNA, 50 bp, Enterobacter roggenkampii
  source 1..50: mol_type = genomic DNA
tactataaaataactttactaatcaccattatgtgtgttattatatagta

SEQ ID NO: 4823 - DNA, 40 bp, Enterobacter roggenkampii; identical to SEQ ID NO: 848
  source 1..40: mol_type = genomic DNA

SEQ ID NO: 4824 - DNA, 40 bp, Enterobacter roggenkampii
  source 1..40: mol_type = genomic DNA
cgcaataatgccgatgacctacatcagctcaataagagtg

SEQ ID NO: 4825 - DNA, 50 bp, Enterobacter roggenkampii
  source 1..50: mol_type = genomic DNA
taatataaactgcatattcatatgtacagtatatgtacacatatatagta

SEQ ID NO: 4826 - protein, 450 aa, Enterococcus hirae
MKRVALYMRVSTEQQAKHGDSLREQKETLYEYIEQHKDLKVVNEYVDGGISGQKINRDEFQKLLQDVKENKIDLILFTKLDRWFRNLRHYLNTQEILEKHNVSWNAVSQQYYDTTTAYGRTFIAQVMSFAELEAQIDSERIKAVMANKIAQGEVVSGKTPLGYSIENKKLVINDDAPIVIDIFNYFLSSGSLRKTVYYLGSQYGIVRDYQSVKNMLTNKKYIGELRNNKNYCPPIIDKKLFYAVQKALPKNLKTNAKRDYIFKGLLKCSDCQGSVAGQTIKARYKKKDGTESIYERTCYRCVKRRNNKLRCTNKRAFYEKNLERYIFEATKQKFEQIQINYSKKQPKIIKKKNSKKNIENKLDRLKKAYLNEVIDLEEYKKDREALMKELNEIEVEPAKIDIKNVEFILSKEFDEIYKESSKEEKNALWRSIIDNIIVFPDGNITVNFLL

SEQ ID NO: 4827 - DNA, 50 bp, Enterococcus hirae
  source 1..50: mol_type = genomic DNA
atgtgtactaacttatatattccagaaggataatataagttagcacacat

SEQ ID NO: 4828 - DNA, 40 bp, Enterococcus hirae
  source 1..40: mol_type = genomic DNA
agatggaagaacattccccgatggatgattatgaactaaa

SEQ ID NO: 4829 - DNA, 40 bp, Enterococcus hirae
  source 1..40: mol_type = genomic DNA
agatggaagaacattcccctctggatgattatgaactaaa

SEQ ID NO: 4830 - DNA, 50 bp, Enterococcus hirae
  source 1..50: mol_type = genomic DNA
aattgttttaaatcatattgtccatcagtaaaatattttcgagcacacat

SEQ ID NO: 4831 - protein, 481 aa, Streptococcus mitis
MITTNKVAIYVRVSTTSQAEEGYSIEEQRDKLEAYCKIKDWSVYDVYTDGGFSGSNTNRPAIERLIKDAKNKKFDTILVYKLDRLSRSQKDTLYLIEDIFIKNNIAFLSLQENFDTSTPFGKAMIGLLSVFAQLEREQIKERMQLGKLGRAKSGKSMMWAKTSYGYNYHKETGTVTINPAQALAVKFIFKSYLAGRSITKLRDDLNEKFPKEIAWNYRAVRNILDNPVYCGYNQYLGEIYKGNHESIISKEDYDKTQNELKIRQRTAAENVNPRPFQAKYILSGIGQCGYCGAPLKIMLGVKRKDGSRLKKYQCHQRHPRTLRGITTYNDNKKCDSGFYYKDDLETYVLTEISKLQNDTNYLEQIFSEDNTETIDRDSYQKQIDELSKKLGRLNDLYIDDRITLEELQTKSAEFTSMRASLETKLGNDPALKQKDRKKGMINILNQRDILTMNYEEQKVVVRSLIDKVQVTAEDIVIKWKI

SEQ ID NO: 4832 - DNA, 50 bp, Streptococcus mitis
  source 1..50: mol_type = genomic DNA
taagtaattttagtaaccaacatctcaataaaggatagtaaaattatttc

SEQ ID NO: 4833 - DNA, 40 bp, Streptococcus mitis
  source 1..40: mol_type = genomic DNA
gagcaagaccaccaacatctccacaagtgtgaaagccttc

SEQ ID NO: 4834 - DNA, 40 bp, Streptococcus mitis
  source 1..40: mol_type = genomic DNA
gagcaagaccaccaacatctacacaagtgtgaaagccttc

SEQ ID NO: 4835 - DNA, 50 bp, Streptococcus mitis
  source 1..50: mol_type = genomic DNA
taagtaaataaataaacaaacaaataaataatgtattctaaaatgattta

SEQ ID NO: 4836 - protein, 547 aa, Vibrio parahaemolyticus
MRTAYSYVRLSSKKQIQGYGQERQWQAIQAAALAHGWELSEKTFSDLGVSGWKGANIETGALSQFLQCVEDGYIEKGSVLIVENVDRLSRAGVQRAVSLLMQLLASGISIYTFTDSKLYEPDSHNPLMDLMAWALSAQRAFEESERKSQMILNAKAKAREKARLTGEIITRRCPSWLRVNQDKTAFELIPERVETVRKIFDLYVNGYGTPRIGRLLTEEGRKPLTGRAWYPRSISRILQYRAVLGEYQPTLNGKPEGDAIKNYYPAIIDEDRFSEVQAVLKEGGAGKGRRGKEMRNYFAGLLRCSCGEGMHIVSSCVKGKRYYQLRCLQYRISCFGSSWNFYKLSSFVLFALRRLPILEVMGSQDNNNIKELNAKERELTFLLEDTRRQLDNTINAIAALGLNDQLQSKFRELKTSVTNIEKQLSNVKTELETSQGKLVIQKQDSEMLTGRFLELIDSTKDIDGRIKLNQVLRRYLSKIEMHADKKEEYRYIKIYRKDGDELVSIQCDHSLKGALFESKDGLETFELLPATDAKRNEISNTLLCTPK

SEQ ID NO: 4837 - DNA, 50 bp, Vibrio parahaemolyticus
  source 1..50: mol_type = genomic DNA
ttttgtctttaagaaaacataactaaggtattgtatcggttatgacataa

SEQ ID NO: 4838 - DNA, 40 bp, Vibrio parahaemolyticus; identical to SEQ ID NO: 4428
  source 1..40: mol_type = genomic DNA

SEQ ID NO: 4839 - DNA, 40 bp, Vibrio parahaemolyticus; identical to SEQ ID NO: 4429
  source 1..40: mol_type = genomic DNA

SEQ ID NO: 4840 - DNA, 50 bp, Vibrio parahaemolyticus
  source 1..50: mol_type = genomic DNA
ttttttcttttatgtatcatacttttggtgttgtatttaaaatgtcatca

SEQ ID NO: 4841 - protein, 547 aa, Vibrio parahaemolyticus
MRTAYSYVRLSSKKQIQGYGQERQWQAIQAAALAHGWELSEKTFSDLGVSGWKGANIETGALSQFLQCVEDGYIEKGSVLIVENVDRLSRAGVQRAVSLLMQLLASGISIYTFTDSKLYEPDSHNPLMDLMAWALSAQRAFEESERKSQMILNAKAKAREKARLTGEIITRRCPSWLRVNQDKTAFELIPERVETVRKIFDLYVNGYGTPRIGRLLTEEGRKPLTGRAWYPRSISRILQYRAVLGEYQPTLNGKPEGDAIKNYYPAIIDEDQFNEVQAVLKEGGAGKGRRGKEMRNYFAGLLRCSCGEGMHIVSSCVKGKRYYQLRCLQYRISCFGSSWNFYKLSSFVLFALRRLPILEVMGSQDNNNIKELNAKERELTFLLEDTRRQLDNTINAIAALGLNDQLQSKFRELKTSVTNIEKQLSNVKTELETSQGKLVIQKQDSEMLTGRFLELIDSTKDIDGRIKLNQVLRRYLSKIEMHADKKEEYRYIKIYRKDGDELVSIQCDHSLKGALFESKDGLETFELLPATDAKRNEISNTLLCTPK

SEQ ID NO: 4842 - DNA, 50 bp, Vibrio parahaemolyticus; identical to SEQ ID NO: 4837
  source 1..50: mol_type = genomic DNA

SEQ ID NO: 4843 - DNA, 40 bp, Vibrio parahaemolyticus; identical to SEQ ID NO: 4428
  source 1..40: mol_type = genomic DNA

SEQ ID NO: 4844 - DNA, 40 bp, Vibrio parahaemolyticus; identical to SEQ ID NO: 4429
  source 1..40: mol_type = genomic DNA

SEQ ID NO: 4845 - DNA, 50 bp, Vibrio parahaemolyticus; identical to SEQ ID NO: 4840
  source 1..50: mol_type = genomic DNA

SEQ ID NO: 4846 - protein, 547 aa, Vibrio parahaemolyticus; identical to SEQ ID NO: 4836

SEQ ID NO: 4847 - DNA, 50 bp, Vibrio parahaemolyticus; identical to SEQ ID NO: 4837
  source 1..50: mol_type = genomic DNA

SEQ ID NO: 4848 - DNA, 40 bp, Vibrio parahaemolyticus
  source 1..40: mol_type = genomic DNA
atttggctggcatgtggtcaaggttctatacagaacatag

SEQ ID NO: 4849 - DNA, 40 bp, Vibrio parahaemolyticus
  source 1..40: mol_type = genomic DNA
atttggctggcatgtggtcttggttctatacagaacatag

SEQ ID NO: 4850 - DNA, 50 bp, Vibrio parahaemolyticus; identical to SEQ ID NO: 4840
  source 1..50: mol_type = genomic DNA

SEQ ID NO: 4851 - protein, 461 aa, Listeria booriae
MTVGIYIRVSTEEQAKEGFSISAQREKLQAYCIAQGWNEFKFYVDEGLSAKNMERPLLKSLLKHIETGLIDTVLVYKLDRLTRSVVDLHNMLNFFDKYDCSFKSATEVYDTSSAMGRFFITIISSVAQFERENTSERVSFGMEERARQGKYIPSPPFGYKKGENGVLVIYEEEAALVLELVARLQKGYSVRQCCTYLDNLGVKTRRSNSVWKNTTLRRILGNHALYGATSWSGKVFKNTHTGILTEAEFLELQSILKARTGHVSSRKRALTHVFAGKIVCPNCSYRMTCVRTKYKERYNNDYRCSNCKIHYTHTSVSERKLLKAFDEYIDSYRLTSYDIKKESKKENNQMKIERQIVNLSKKREKYQKGWALDLIDDHEFSKLMKETQLELNQLESKLETDKYSSEKTFNQTAINNIVKNIKMNWSELTIEERKDFVNMFLKDIHYVKVAGIAKITKIDFY

SEQ ID NO: 4852 - DNA, 50 bp, Listeria booriae
  source 1..50: mol_type = genomic DNA
ctctgtatttatgataactatagactactgtacttatcataagtacagtt

SEQ ID NO: 4853 - DNA, 40 bp, Listeria booriae
  source 1..40: mol_type = genomic DNA
ttccaagttggagtagccgctgctgtatttataacccatc

SEQ ID NO: 4854 - DNA, 40 bp, Listeria booriae
  source 1..40: mol_type = genomic DNA
ttccaagttggagtagccgcagctgtatttataacccatc

SEQ ID NO: 4855 - DNA, 50 bp, Listeria booriae
  source 1..50: mol_type = genomic DNA
ctctgtgtaacccataaatatatacaactgtaatttgtcgatgtacaatt

SEQ ID NO: 4856 - protein, 599 aa, Bacillus altitudinis
MKAALYYRVSTPGQATEDKYSLRSQKEELTKYAASQGWTVVGEFQDVGSGGKLEKKGLNQLLDFVEEGKCEVVLCIDQDRLSRLDSLGWEFLKSTLRENRVKIAEPGFITDLDNEDDEFISDLKNLIARREKKKIVLKMMRGKRQRTREGKGWGKTFWEYNYDKATGTYSINEDWAWVIPFIDKLYIDKKYSYKAIAKELNKISLTPTGKAWNSELVGIRLKSKAFHGVLEKNFKNEGAISADVPVYPPLRTLETYERICKLRKEKFKRKKIKYPHFLRKVHFKCAECQRKLSIAHSKNSYETEGYFYLAHGRHIDCKVSINSIRFDKNITKAIKEILKSESMAKKYVKIDHTQKDLEDMEMQVKAERKNLKKVSEKKDLLLPLYLDGKFPKEQLDKQYSMLESQEDHHSKQVRSLEEKLHLIKSKMFNYDLITSYLSVAERFESLLTVEEQTEMISTLFPKGIVYEKEILLEGFLSENVPIEIAIPIEPDPFNVKNKWDRDPIGRYNKIQEYMNEHPHLTQKQIAEALDIAPSTIVRLRDKFGEYKNYTKVINHDPKGKAEILKEYYLKNPEASLRKTARDTGISTTTIRRIKKDYGI

SEQ ID NO: 4857 - DNA, 50 bp, Bacillus altitudinis
  source 1..50: mol_type = genomic DNA
cttttgtttgaatagatatttattttaataaacatacatacaaaagaaag

SEQ ID NO: 4858 - DNA, 40 bp, Bacillus altitudinis
  source 1..40: mol_type = genomic DNA
accggttgataatcgaatttttttgaaaatggtcggcatt

SEQ ID NO: 4859 - DNA, 40 bp, Bacillus altitudinis
  source 1..40: mol_type = genomic DNA
accggttgataatcgaatttatttgaaaatggtcggcatt

SEQ ID NO: 4860 - DNA, 50 bp, Bacillus altitudinis
  source 1..50: mol_type = genomic DNA
gtttttttaatttaaatatttatttaaatgaatatttcttcaatagaaag

SEQ ID NO: 4861 - protein, 528 aa, Vibrio parahaemolyticus
MYTPQSLSEHYSQITTPQTEQPLAILYSRFSSRNQVGNDSINRQLEGAQKFCEYHNLKLSEANYSDLGISAYKDNVREGLELLLNAVRDGTIPANSWILCHTTCRLSRKGFQHVLKLVSELVATGCKFCTINDNQVYDSTNINKLSSALPLIISADLAFSESEKKSLMIKHAKEQTRKNRKIVGKQPYWITLQDGKPVLNDFSTIVKTIIDLRLKGYSAQRIAKQLNADGHLSPTGKSWGAAAIRKTIDNHVLYGAKEYSEMKDGKLVPVEIVEDLYPALCSKSIWLQIKYEKGTKEVGKRSKSSPFSKLLRCACCGSAMTTRSTYQKGVKYDYRVCIRSTEGSCDQKSRFRDLDNIILGELKHLKYEVKTHATVEVDSIKVFQDKLTLLNQTKELLQSNPTALAAIYADIAKTEQELHEAKRTKELLESQPNEVNFQAIVDVEDQSQRNVLLRRIIESIEVKRIDKEKLVSQVRVVVRFKNSHTQTFVVCYRYRGYDIKWLTDTEKYKEQLNAFVNDAVKQLEEWEK

SEQ ID NO: 4862 - DNA, 50 bp, Vibrio parahaemolyticus
  source 1..50: mol_type = genomic DNA
gttaatacaatatggtccatacttaaagttttgtaccgtatttaattaat

SEQ ID NO: 4863 - DNA, 40 bp, Vibrio parahaemolyticus
  source 1..40: mol_type = genomic DNA
atttggttggcatgtggtcaaggttctctacagaacatag

SEQ ID NO: 4864 - DNA, 40 bp, Vibrio parahaemolyticus
  source 1..40: mol_type = genomic DNA
atttggttggcatgtggtcagggttctctacagaacatag

SEQ ID NO: 4865 - DNA, 50 bp, Vibrio parahaemolyticus
  source 1..50: mol_type = genomic DNA
tttagcacactgttgtccataaatagagctgtatacttgctttaattaat

SEQ ID NO: 4866 - protein, 506 aa, Yersinia enterocolitica
MTLAYSYVRFSSKTQATGASLQRQLEASELFCLKHGLTLSDVSFRDLGVSAFKEKIRASLEDMLTAIENGTIPKGSYILIEALDRLSRKGISHTQDILKSILRQGVSVAFVGEDARTLSGMVLTEASLDDLTSVIMVSLAADLAHKESLRKAKLVQDAKARTREKAKQGIPIARRLPFWLQYQDGTYIFNDKVSVIREIVSLRQQGQGPRRIATYLNLSEIDAPAGRGWSHTTVSHILTAPYLCGDYQTYRTIDDKLVPDTLVKDYFPAVVCRDEWLLLKADQKYSSKGKVAKDNPFAGVLKCKCGGGLVYSLKKMRGKSKESYYEYHHCSNSKLGLCDQKGYIRDLIPLLKRVMNKLEIKTIKNDRSSIIQASMDEANDKIRHLNRLLLELASPPLSVLQSILELEAKVETAKSELHQVMHANIGLSSSDVDRLASISDAAEYNMHIKRLVERIAVSHSSKQNYSVRIKKRDGHTQSFIVLNGEIKLMSDSEKLKNWLQEHGQSN

SEQ ID NO: 4867 - DNA, 50 bp, Yersinia enterocolitica
  source 1..50: mol_type = genomic DNA
aatttccagatatgaaaatttactgtgatatgttttcatatatggaaaaa

SEQ ID NO: 4868 - DNA, 40 bp, Yersinia enterocolitica
  source 1..40: mol_type = genomic DNA
tgccggagccaggctgacggtgatccgtttggctggaaag

SEQ ID NO: 4869 - DNA, 40 bp, Yersinia enterocolitica
  source 1..40: mol_type = genomic DNA
tgccggagccaggctgacgttgatccgtttggctggaaag

SEQ ID NO: 4870 - DNA, 50 bp, Yersinia enterocolitica
  source 1..50: mol_type = genomic DNA
aatttccttatttccaaatttattttaatattttttagtctatggagtaa

SEQ ID NO: 4871 - protein, 506 aa, Yersinia mollaretii; identical to SEQ ID NO: 4866

SEQ ID NO: 4872 - DNA, 50 bp, Yersinia mollaretii; identical to SEQ ID NO: 4867
  source 1..50: mol_type = genomic DNA

SEQ ID NO: 4873 - DNA, 40 bp, Yersinia mollaretii
  source 1..40: mol_type = genomic DNA
tgccggggccagactgacggtgatccgtttcgcgggaaaa

SEQ ID NO: 4874 - DNA, 40 bp, Yersinia mollaretii
  source 1..40: mol_type = genomic DNA
tgccggggccagactgacgttgatccgtttcgcgggaaaa

SEQ ID NO: 4875 - DNA, 50 bp, Yersinia mollaretii; identical to SEQ ID NO: 4870
  source 1..50: mol_type = genomic DNA

SEQ ID NO: 4876 - protein, 506 aa, Bacillus toyonensis
MYKPFSQADYKPSDKPKALYIRKSKKSQGKTEIETIESHLKRLTDFCKDQGWNNYVIYNDYVAKSTDINRVEYNKMLNACLDGKHDLIVVVEESRLYRTVNEQTNVYEELKGTDIAILSIREGYIFPNDRNQFLTNIIRGAMNQQELENFAYRMNVKVLASAKEGKYVNKLPFGYFKDKDKLTPHPIESRTFRFIVDKVLEGYVIAEIIGQLNQLGYTTKSNKKWKDVGTITRMLANRVYLGESHYYSKMFDEDVIVRDTHPALLTIEEFQKINNMIRSRSRNPQGIRYTKINTVLDRLVVCGICGNRLPIHKSWTNKEGVTSYQVGKCQKVMGEYNEKKCPNKSISLKELLPHFYIAIESYKDSLREEIEGVEIDTTSDMKIKVMEQIKDMSKRIAEIQTEIQNAKSYLIKGILSEADYVGLVPPLEKDLKDLNVALEDNERLLASLTDYDRSAVIQNAVDSLINIENESIENQNRIYRLLFEHLELVNTVDEFEIRLKEKDVSN

SEQ ID NO: 4877 - DNA, 50 bp, Bacillus toyonensis
  source 1..50: mol_type = genomic DNA
actttacattaggagattttatctccagataaagtatgttattataatgt

SEQ ID NO: 4878 - DNA, 40 bp, Bacillus toyonensis; identical to SEQ ID NO: 4768
  source 1..40: mol_type = genomic DNA

SEQ ID NO: 4879 - DNA, 40 bp, Bacillus toyonensis
  source 1..40: mol_type = genomic DNA
accttgaataacgaagtcgtcggataaagcaattccgtgt

SEQ ID NO: 4880 - DNA, 50 bp, Bacillus toyonensis
  source 1..50: mol_type = genomic DNA
acttgacagactgtgattttctcttctgatgcagtactctattgtaaagt

SEQ ID NO: 4881 - protein, 547 aa, Vibrio parahaemolyticus
MRTAYSYVRLSSKKQIQGYGQERQWQAIQAAALAHCWELSEKTFSDLGVSGWKGANIETGALSQFLQCVEDGYIEKGSVLIVENVDRLSRAGVQRAVSLLMQLLASGISIYTFTDSKLYEPDSHNPLMDLMAWALSAQRAFEESERKSQMILNAKAKAREKARLTGEIITRRCPSWLRVNQDKTAFELIPERVETVRKIFDLYVNGYGTPRIGRLLTEEGRKPLTGRAWYPRSISRILQYRAVLGEYQPTLNGKPEGDAIKNYYPAIIDEDRFNEVQAVLKEGGAGKGRRGKEMRNYFAGLLRCSCGEGMHIVSSCVKGKRYYQLRCLQYRISCFGSSWNFYKLSSFVLFALRRLPILEVMGSQDNNNIKELNAKERELTFLLEDTRRQLDNTINAIAALGLNDQLQSKFRELKTSVTNIEKQLSNVKTELETSQGKLVIQKQDSEMLTGRFLELIDSTKDIDGRIKLNQVLRRYLSKIEMHADKKEEYRYIKIYRKDGDELVSIQCDHSLKGALFESKDGLETFELLPATDAKRNEISNTLLCTPK

SEQ ID NO: 4882 - DNA, 50 bp, Vibrio parahaemolyticus
  source 1..50: mol_type = genomic DNA
ttatgtctttaagaaaacataactaaggtattgtatcggttatgacataa

SEQ ID NO: 4883 - DNA, 40 bp, Vibrio parahaemolyticus; identical to SEQ ID NO: 4428
  source 1..40: mol_type = genomic DNA

SEQ ID NO: 4884 - DNA, 40 bp, Vibrio parahaemolyticus
  source 1..40: mol_type = genomic DNA
atttggctggcatgtggtcatggttctctacagaacatag

SEQ ID NO: 4885 - DNA, 50 bp, Vibrio parahaemolyticus
  source 1..50: mol_type = genomic DNA
ttatttctttaagggatcatacctatggtatcctatctaaaatgacattt

SEQ ID NO: 4886 - protein, 547 aa, Vibrio parahaemolyticus
MRTAYSYVRLSSKKQIQGYGQERQWQAIQAAALAHGWELSEKTFSDLGVSGWKGANIETGALSQFLQCVEDGYIEKGSVLIVENVDRLSRAGVQRAVSLLMQLLASGISIYTFTDSKLYEPDSHNPLMDLMAWALSAQRAFEESERKSQMILNAKAKAREKARLTGEIITRRCPSWLRVNQDKTAFELIPERVETVRKIFDLYVNGYGTPRIGRLLTEEGRKPLTGRAWYPRSISRILQYRAVLGEYQPTLNGKPEGDAIKNYYPAIIDEDRFNEVQAVLKEGGAGKGRRGKEMRNYFAGLLRCSCGEGMHIVSSCVKGKRYYQLRCLQYRISCFGSSWNFYKLSSFVLFALRRLPILEVMGSQDNNNIKELNAKERELTFLLEDTRRQLDNTINAIAALGLNDQLQSKFRELKTSVTNIEKQLSNVKTELETSQGKLVIQKQDSEMLTGRFLELIDSTKDIDGRIKLNQVLRRYLSKIEMHADKKEEYRYIKIYRKDGDELVSIQCDHSLKGALFESKDGLETFELLPATDAKRNEISNTLLCTPK

SEQ ID NO: 4887 - DNA, 50 bp, Vibrio parahaemolyticus; identical to SEQ ID NO: 4882
  source 1..50: mol_type = genomic DNA

SEQ ID NO: 4888 - DNA, 40 bp, Vibrio parahaemolyticus; identical to SEQ ID NO: 4428
  source 1..40: mol_type = genomic DNA

SEQ ID NO: 4889 - DNA, 40 bp, Vibrio parahaemolyticus; identical to SEQ ID NO: 4884
  source 1..40: mol_type = genomic DNA

SEQ ID NO: 4890 - DNA, 50 bp, Vibrio parahaemolyticus; identical to SEQ ID NO: 4885
  source 1..50: mol_type = genomic DNA

SEQ ID NO: 4891 - protein, 547 aa, Vibrio parahaemolyticus; identical to SEQ ID NO: 4841

SEQ ID NO: 4892 - DNA, 50 bp, Vibrio parahaemolyticus; identical to SEQ ID NO: 4882
  source 1..50: mol_type = genomic DNA

SEQ ID NO: 4893 - DNA, 40 bp, Vibrio parahaemolyticus; identical to SEQ ID NO: 4863
  source 1..40: mol_type = genomic DNA

SEQ ID NO: 4894 - DNA, 40 bp, Vibrio parahaemolyticus
  source 1..40: mol_type = genomic DNA
atttggttggcatgtggtcatggttctctacagaacatag

SEQ ID NO: 4895 - DNA, 50 bp, Vibrio parahaemolyticus; identical to SEQ ID NO: 4885
  source 1..50: mol_type = genomic DNA

SEQ ID NO: 4896 - protein, 607 aa, Streptococcus agalactiae
MRNFEKITALYERLSRDDELQGESNSIINQKKILEEYASKNNLSNIIHFTDDGISGTQFDRPGFMAMMNGVNQGNIGCIIVKDMSRLGRDYLKVGQCMEILRQKGVRLIAINDNVDSFYREDDFTPFRNIMNEWYARDTSRKIQSTFRSKGESGKHTASTPPYGYIKDEKDKNKWIVDEKAAEIVRRIFNLTMQGNGPYRIAKILESEKVDIPAYHQQKLGYGLYQSKNFEHPYRWCSSTIASILKKQEYLGHTVNFKTRKHFKDKKSKYVSEDNWLIFENTHEPIIDQETFDNVQRIRGNVKRYPDGWGEYHPLTGLMYCADCGSKMYVHRTSNYKNIPYYTCSAYTKTPCGTLCPSAHRIKAEAVLNLIRETLKDIKKYLDEDNEAFIRSIQNEMEEKEKMEIEKKRTRLIDSKGRLQELERLMCRIYEDMILNKIPNSRYEILNNQYETEQVALSKEIKDLEQQVSRYEKETDRARKFISLISRYENFDELTTTMINEFVEKIIVHERDRKGSQTSKQKIEIYFNFIGNYELPQAELSEEEKQKLEEEERKIKERKDKLHQNYLKRKASGKQKEYEDKYKARREQKKQEKLKVLKRVGIPLCEM

SEQ ID NO: 4897 - DNA, 50 bp, Streptococcus agalactiae; identical to SEQ ID NO: 1872
  source 1..50: mol_type = genomic DNA

SEQ ID NO: 4898 - DNA, 40 bp, Streptococcus agalactiae
  source 1..40: mol_type = genomic DNA
gaaatataagctggcagcaggaaaaactgccaagtcaatt

SEQ ID NO: 4899 - DNA, 40 bp, Streptococcus agalactiae
  source 1..40: mol_type = genomic DNA
gaaatataagctggcagcagaaaaaactgccaagtcaatt

SEQ ID NO: 4900 - DNA, 50 bp, Streptococcus agalactiae
  source 1..50: mol_type = genomic DNA
aaaagtactaaaagagtacttaaagaagtagtagaaggtgtgaagacaat

SEQ ID NO: 4901 - protein, 617 aa, Aerococcus urinae
MRNFEKITALYERLSRDDELEGESNSIVNQKKILEEYASKNNLTNIIHFTDDGISGTQFDRPGFMEMMNGVNTGNIGCIIVKDMSRLGRDYLKVGQCMEILRQKGVRLIAINDNVDSFYREDDFTPFRNIMNEWYARDTSRKIQSTFRSKGESGKHTASTPPYGYIKDEKDKDKWVVDEKAAEIVRRIFNLTMDGAGPYKIAKILEADKIDIPAYHQQKMGYGLHQSKNFEYPYRWCSSTIASILKKKEYLGHTVNFKTRKHFKDKKSKYVSEDKWLIFENTHEAIIDQETFDNVQRIRGNVKRYPDGWGEYHPLTGLMYCADCGSKMYVHRTNNYKNIPYYVCSNYKKVPCGTLCPSAHRIKAEVVLNLIQETLKDIKNYLDEDNEAFLHSIQNEMEETEKMEMEKKKTRLTDSKNRLQELERLMCRIYEDMILEKIPNTRYEILNNQYETEQRELSKEIDGLEKAIKRYEKETDRAKKFIRLIERYDNFDELTPTIINEFVEKILVHERDRKGSQTANQKVEIYFNFIGNYEPPKEELSEEEMQKLTEEEEKERARKDRLHQNYLKRKANGKQKEYEERYKARREEKKTGEAKGFEKTMKKHKITRLKSIDNLSV

SEQ ID NO: 4902 - DNA, 50 bp, Aerococcus urinae; identical to SEQ ID NO: 1872
  source 1..50: mol_type = genomic DNA

SEQ ID NO: 4903 - DNA, 40 bp, Aerococcus urinae
  source 1..40: mol_type = genomic DNA
gaaatataaactggcagcaggaaaaactgccaagtcaatt

SEQ ID NO: 4904 - DNA, 40 bp, Aerococcus urinae
  source 1..40: mol_type = genomic DNA
gaaatataaactggcagcagaaaaaactgccaagtcaatt

SEQ ID NO: 4905 - DNA, 50 bp, Aerococcus urinae; identical to SEQ ID NO: 4900
  source 1..50: mol_type = genomic DNA

SEQ ID NO: 4906 - protein, 608 aa, Streptococcus pyogenes
MRNFEKITALYERLSRDDELEGESNSIVNQKKILEEYASKNNLTNIIHFTDDGISGTQFDRPGFMEMMNGVNTGNIGCIIVKDMSRLGRDYLKVGQCMEILRQKGVRLIAINDNVDSFYREDDFTPFRNIMNEWYARDTSRKIQSTFRSKGESGKHTASTPPYGYIKDEKDKDKWIVDEKAAQIVRRIFNLTMDGAGPYKIAKILEADKIDIPAYHQQKMGYGLHQSKNFEYPYRWCSSTIASILKKKEYLGHTVNFKTRKHFKDKKSKYVSEDKWLIFENTHEAIIDQETFDNVQRIRGNVKRYPDGWGEYHPLTGLMYCADCGSKMYVHRTNNYKNIPYYVCSNYKKVPCGTLCPSAHRIKAEVVLNLIQETLKDIKNYLGEDNEAFIRSIENEMEEKEKAHIEKKKIRLTESQNRLQELERLMCRIYEDMILNKIPNNRYEILNNQYETEQITLSKEIKDLEQQVSRYEKETDRAKKFISLISRYENFDELTTTMINEFVEKIIVHERDRKGSQTSKQKIEIYFNFIGNYELPQAELSDEEKQKLEEEERKIEERKDKLHQNYLKRKASGKQKEYEDKYKARREQKKQEKLKVLKREGIPARDFQ

SEQ ID NO: 4907 - DNA, 50 bp, Streptococcus pyogenes; identical to SEQ ID NO: 1872
  source 1..50: mol_type = genomic DNA

SEQ ID NO: 4908 - DNA, 40 bp, Streptococcus pyogenes
  source 1..40: mol_type = genomic DNA
tttatctgctgtcgttgctggtattacaaaagctgattta

SEQ ID NO: 4909 - DNA, 40 bp, Streptococcus pyogenes
  source 1..40: mol_type = genomic DNA
tttatctgctgtcgttgctgatattacaaaagctgattta

SEQ ID NO: 4910 - DNA, 50 bp, Streptococcus pyogenes; identical to SEQ ID NO: 4900
  source 1..50: mol_type = genomic DNA

SEQ ID NO: 4911 - protein, 615 aa, Enterobacter ludwigii
MLIQTKIRRSPMKKVFVYHRVSSDQQLDGSGIARQAELLEGYLERTGICAEMDDPAPVVLSDQGVSAFKGLNISEGELGAWMEQVRNGMWDSSILVVESIDRFSRQNPFDVMGYINALMAHNVAIHDVMANIVISRSNSKDLPFVMMNAQRAYDESKYKSDRIRKGWAKKREQAFNKGTIVTNKRPQWIEVENDKYVVNEKAAVVKEIFALYQTGMGCPTIAKQLQKKEGEQYKFNRPWTGELVHKILTNRRVTGKIFISEIIRNHDDIDNPVTQKKYDMDVYPVVINEEEFELVQELLKSRRPNAGRITVKKEGQEEVLIKSNLFSCIARCTECGGSMYHNVVRAKRTPKKGDPKIEEYRYIRCLNERDGLCENKAMTYETVERFVVEHLLGMDLNTVIKEQEFNPEIEVIRIQIDQVKDQITNYENGIERRKSAGKAVSFEMREELDDAKLELEQLLARQASLATVQVDVPVLQDVNVTELYNVNNVDIRTRYENELNKIVSNIRLKRNGTSYTIDINYKQNELKRHVLFVENKKKEQTLISEVIIEDVDGGKFYYTPSFMIRLKDGEIRFQQTNEDLSIVDYSLLLNYVDAIDRNDAVGVWMRNNMSFLFTK

SEQ ID NO: 4912 - DNA, 50 bp, Enterobacter ludwigii
  source 1..50: mol_type = genomic DNA
atgttgtaataagcgttacacattcaagtgtgttatgcttatacaaacaa

SEQ ID NO: 4913 - DNA, 40 bp, Enterobacter ludwigii
  source 1..40: mol_type = genomic DNA
tttttgcctgataatcatacaaataagtgccattacaaca

SEQ ID NO: 4914 - DNA, 40 bp, Enterobacter ludwigii
  source 1..40: mol_type = genomic DNA
tttttgcctgataatcataacaataagtgccattacaaca

SEQ ID NO: 4915 - DNA, 50 bp, Enterobacter ludwigii
  source 1..50: mol_type = genomic DNA
atgttatatttttagtaatacattacattgttttaactaaatacaaataa

SEQ ID NO: 4916 - protein, 569 aa, Clostridium perfringens
MKTVAIYSRKSRFTGKGDSIENQIEMCKEHIKKFVSPKVEFLIYEDEGFSGGNTNRPAFQRLINDIKYGNIDLLICYRLDRISRNVADFSSVLDVLQEYKVDFISIKEQFDTSSPMGRAMIYIASVFAQLERETIAERIKDNMLEMAKKGKWTGGKLPLGFTSKKIAYIDEEGKKRFKVTLEHDSKDLEFVKFLYEKYLKLGSLHKLETYTHENNIRSASGKIFEKSTLKIILQNPIYVKADENVFNYFENKGWSVYGEPDGLHSLLSYNKTETAKKDGKLTKRNKDESESLVAVSDVKGFIDSSLWLKVQYQFKKNKNTFPRLGKTHNALLVGKLFCGNCGTRMIIQHGRTSTKTGIKTFYYVCSLKKTSKKKLCSAHNVKTDFLENLVLDSLEKLYYKKDFINDSLKINLKENKDNIKEINTTKKLIELNKNKINSLIEKLSLDFDNVLSDILIPQIKKIKIENDVLESKLEELKLKKQESEMNRIEIDLITSLLNKCKNIKDLTRTEQKQIIDCLVDSIYYYSNDNGNDKIKIKFINDIDSINTLLSDEEKRQFEKLSFYSHSMSS

SEQ ID NO: 4917 - DNA, 50 bp, Clostridium perfringens
  source 1..50: mol_type = genomic DNA
agttgtctttttattcacacagcatgttcagtatgaataaaaaaacaaca

SEQ ID NO: 4918 - DNA, 40 bp, Clostridium perfringens
  source 1..40: mol_type = genomic DNA
agtagtcataagcttagcatgtccagtatctaataaaaca

SEQ ID NO: 4919 - DNA, 40 bp, Clostridium perfringens
  source 1..40: mol_type = genomic DNA
agtagtcataagcttagcacatccagtatctaataaaaca

SEQ ID NO: 4920 - DNA, 50 bp, Clostridium perfringens
  source 1..50: mol_type = genomic DNA
agctgccttgttgaacacacttgacattcagtatgaactccagaaaaaca

SEQ ID NO: 4921 - protein, 569 aa, Clostridium perfringens
MKTVAIYSRKSRFTGKGDSIENQIEMCKEHIKKFVSPKVEFLIYEDEGFSGGNTNRPAFQRLINDIKYGNIDLLICYRLDRISRNVADFSSVLDVLQEYKVDFISIKEQFDTSSPMGRAMIYIASVFAQLERETIAERIKDNMLEMAKKGKWTGGKLPLGFTSKKIAYIDEEGKKRFKVTLEHDSKDLEFVKFLYEKYLELGSLHKLETYTHENNIRSASGKIFEKSTLKIILQNPIYVKADENVFNYFENKGWSVYGEPDGLHSLLSYNKTETAKKDGKLTKRNKDESESLVAVSDVKGFIDSSLWLKVQYQFKKNKNTFPRLGKTHNALLVGKLFCGNCGTRMIIQHGRTSTKTGIKTFYYVCSLKKTSKKKLCSAHNVKTDFLENLVLDSLEKLYYKKDFINDSLKINLKENKDNIKEINTTKKLIELNKNKINSLIEKLSLDFDNVLSDILIPQIKKIKIENDVLESKLEELKLKKQESEMNRIEIDLITSLLNKCKNIKDLTRTEQKQIIDCLVDSIYYYSNDNGNDKIKIKFINDIDSINTLLSDEEKRQFEKLSFYSHSMSS

SEQ ID NO: 4922 - DNA, 50 bp, Clostridium perfringens; identical to SEQ ID NO: 4917
  source 1..50: mol_type = genomic DNA

SEQ ID NO: 4923 - DNA, 40 bp, Clostridium perfringens
  source 1..40: mol_type = genomic DNA
agtagtcataagtttagcatgtccagtatctaataaaaca

SEQ ID NO: 4924 - DNA, 40 bp, Clostridium perfringens
  source 1..40: mol_type = genomic DNA
agtagtcataagtttagcacatccagtatctaataaaaca

SEQ ID NO: 4925 - DNA, 50 bp, Clostridium perfringens; identical to SEQ ID NO: 4920
  source 1..50: mol_type = genomic DNA

SEQ ID NO: 4926 - protein, 604 aa, Phocaeicola plebeius
MTKIIGYARVSTTKQDLSRQKLKIKEFCEKNNYELIEIIEDFGISGVVANRKGYLELQCKTYKDADMIVISELSRLSRQEDVTETVYNIQQIINKGLSVILLDSPNKIYEANKLLDITEILILTIKAWAAAQERLDIKKKNQDGKQALFQANPYAVVDQKIPYGYRAIPNPNGKRPKYILEEVPEEVENIKKLFDLVNSGKTLGAVARYFNERNITFRGYYSTVAILSNYIHSDIYRGIRRRTQKLGREEPYTIEVRIKPIISEEDFMMAQELVKRNYKSTPTGKVNHNPLKGILRCRCGRAMTVKDKKPAAGISKLTYRCSCVERKSHPDFCKYNIDEVSYDLTNEILYSLFKSMHTAEYINFFKNQTDYKITELQEEITGIEKRLTTLYLDKENLSNESKENVKKFLTTTNSTLLKSIQEQQNIIDEKIKSIDKEIAKYQKSQSKKIADIERIKDYNAKEKLQNLTIEEQGELYHKYLERVNYIPVTTMKGYYIVQFLNGVKFYIAITKVRSIAMASLLLDNWTIDEKGIVTANYYTFKSNDMKNFNMEMINKTKTMTIQEYLKSDLAKERALHLDLSYRERYLEKLHEAGLDGRVRTLKKE

SEQ ID NO: 4927 - DNA, 50 bp, Phocaeicola plebeius
  source 1..50: mol_type = genomic DNA
ttgggtttttctgttttattatactcacttaacaaaacaaacttgcccaa

SEQ ID NO: 4928 - DNA, 40 bp, Phocaeicola plebeius
  source 1..40: mol_type = genomic DNA
cggaacctgcaaacagtattcaaaaaaagcaatggcccaa

SEQ ID NO: 4929 - DNA, 40 bp, Phocaeicola plebeius; identical to SEQ ID NO: 4928
  source 1..40: mol_type = genomic DNA

SEQ ID NO: 4930 - DNA, 50 bp, Phocaeicola plebeius
  source 1..50: mol_type = genomic DNA
ttgtggtttcaatctatcttatattcaattaacaaaacaatctttccaaa

SEQ ID NO: 4931 - protein, 541 aa, Bacteroides thetaiotaomicron
MKCILLVRVSTESQSFNEQEKELYDLAYSHGYKNNDIVSIATKESAIKLKEEERYGLNRMKELVETGEYNCVFAWEISRIARRKKILFSILEYLVERKVQLIIKEPRIHLLKDDKTIDEGAETMFTLYAQLAESEMRNKMSRFERAKKEGYNKGKYMGGKVKLGYKIDENGFWAIDENDSKLIQLMFDLYNSGEYSLAGLGKELKSRGYFKNLSITNVKAEIYHMLKDPLYKGERTSNNIYPQIIDNETWEKCRVKRQENRVRSKQNGSHLLTPLIRCSCGASYSVNLMDGSYSCRVKHNAVEKGLIHSPDINVNMIESLVWYVALQELHEDMVCKRSDAKKTYEEEINIYNQKIAYSRELVDSTMKRRSDLDENYFVHGRFTKEKYEELTQKQNDIIKNEQSNIRKFEAAINNLQQQIQADITFDDMMNSLSSSYDNLKNGTDLETMRKIIHRYIVEVNIEPWIGKATCFWKKVIIKTIHEVENKEKIKFLQKQGLNNIAFAFVNAFYVNTFHKKAYWDENMKNCVPMVYIPRLERKRGK

SEQ ID NO: 4932 - DNA, 50 bp, Bacteroides thetaiotaomicron
  source 1..50: mol_type = genomic DNA
gccacctaatagttaattagtactactatataagtatacgatttggtggt

SEQ ID NO: 4933 - DNA, 40 bp, Bacteroides thetaiotaomicron
  source 1..40: mol_type = genomic DNA
tccgcctcccaccattgcaacttgcgatatcgtatgatgg

SEQ ID NO: 4934 - DNA, 40 bp, Bacteroides thetaiotaomicron
  source 1..40: mol_type = genomic DNA
tccgcctcccaccattgcattttgcgatatcgtatgatgg

SEQ ID NO: 4935 - DNA, 50 bp, Bacteroides thetaiotaomicron
  source 1..50: mol_type = genomic DNA
gccacctaatttttaaaatttatttttatatatgtactttttttagaggt

SEQ ID NO: 4936 - protein, 491 aa, Bacillus pseudomycoides; identical to SEQ ID NO: 776

SEQ ID NO: 4937 - DNA, 50 bp, Bacillus pseudomycoides
  source 1..50: mol_type = genomic DNA
ccgaataaaaatagaaaaacaacaaatgttaattttctatttttattcgg

SEQ ID NO: 4938 - DNA, 40 bp, Bacillus pseudomycoides; identical to SEQ ID NO: 778
  source 1..40: mol_type = genomic DNA

SEQ ID NO: 4939 - DNA, 40 bp, Bacillus pseudomycoides; identical to SEQ ID NO: 779
  source 1..40: mol_type = genomic DNA

SEQ ID NO: 4940 - DNA, 50 bp, Bacillus pseudomycoides; identical to SEQ ID NO: 775
  source 1..50: mol_type = genomic DNA

SEQ ID NO: 4941 - protein, 491 aa, Bacillus pseudomycoides
MGLAAIYLRLSRNEEQLDIDEILSSHRNALTKLAKQQKLTYDMYQEISSGVNTDRPQLNLLLSRLDDYDALLVMDIDRISRDNAHAEEIKKMLILHDIKILTPQGAIDLSQESNEMLFSFQAMMANFEYKQIRKRLGRGRLAAAEQGKWTMSNRVPLGYKKNEEKRLEIVEDEAKIIRFIFQKTLERVSANEIAKQLDTLGWRSRNGKVLTSAHISQVRRNVVYYGVVQACRRVNGRVVDEVFVENAHEPIISKQTFLEVQEILAENTTGNFFNKAKSIRKLQGLIYCNCCKRKRYIQCDGHGVDFVKSCIYKVDNNNCRDRGHKYAPIEQFVLQKVKEKKSAFEQELRMLKSLDTVEVENKLLIQKESLEKQLDKFNKRQRNLKEMRMDGEITKVEFYEMRDRNEEQIKQVRQQMELIDIRLENLSNTDEEQKRLEDAIKKLDMLEELNDEVCNAFLKKFIKKIWFSSNTEANHDTTRERVEATVEIEWL

SEQ ID NO: 4942 - DNA, 50 bp, Bacillus pseudomycoides; identical to SEQ ID NO: 4937
  source 1..50: mol_type = genomic DNA

SEQ ID NO: 4943 - DNA, 40 bp, Bacillus pseudomycoides; identical to SEQ ID NO: 778
  source 1..40: mol_type = genomic DNA

SEQ ID NO: 4944 - DNA, 40 bp, Bacillus pseudomycoides; identical to SEQ ID NO: 779
  source 1..40: mol_type = genomic DNA

SEQ ID NO: 4945 - DNA, 50 bp, Bacillus pseudomycoides; identical to SEQ ID NO: 775
  source 1..50: mol_type = genomic DNA

SEQ ID NO: 4946 - protein, 549 aa, Pectobacterium brasiliense
MEKVAYCYCRVSQRTQRTENGGYGMTRQQNLLLRYIGEYTDTERLGYVLNPENVVYLNAEGVSGFSGKNIENGSVLMDFINDVESGRIKNAVLCIENIDRFSRTNPQKAAMLFLRLIDAGCNIHEAENEIVHHPSSDLNLISSGLIRSNRESLRKQKLSLKNWDRRFDETIKSQVALTARCPYWLDVNDGQYIAVEEHIRAIRFVFEKYNNGYGQAYIRDELNKRGWLCNGQKWSAWSVHRSLNDIRLTGRHKSSREEYDGMLMYPTIISDIEFQTAQQRLKSKNRGQKINKRANNIFAGLLICGICKKSYVGVRFDTKSNRRYARCIQAVDGHCSGAGFSYEALESAILEYVRNVEVKANTDNGNEIIKLEQELVHAINYRNEVQSDIDKQNIPDPSDRRILKNLQAKVYDIELKINNLKNSESIGYEIKNISDQINEGLLNVENIEIRNEFNSRLRKVIQRIYITRYNNNILSIGVNYFANAGNDVQWLLANSHDGTVYKNMFIEGKRVVCCVGDDIVEYDGYKERYLLNDQIVSKDVVIEALSKHC

SEQ ID NO: 4947 - DNA, 50 bp, Pectobacterium brasiliense
  source 1..50: mol_type = genomic DNA
aactttattttagcattgataatcatcattagtcatgctaaaataaagta

SEQ ID NO: 4948 - DNA, 40 bp, Pectobacterium brasiliense
  source 1..40: mol_type = genomic DNA
tacgctgattgagctgatgatcgttattgcgatcgtcgcc

SEQ ID NO: 4949 - DNA, 40 bp, Pectobacterium brasiliense
  source 1..40: mol_type = genomic DNA
tacgctgattgagctgatgcacgttattgcgatcgtcgcc

SEQ ID NO: 4950 - DNA, 50 bp, Pectobacterium brasiliense
  source 1..50: mol_type = genomic DNA
aagtttattggctaattggtaatccattttatttgtataaaaataaaata

SEQ ID NO: 4951 - protein, 549 aa, Pectobacterium aroidearum
MEKVAYCYCRVSQRTQRTENGGYGMTRQQNLLLRYIGEYTDTERLGYVLNPENVVYLNAEGVSGFSGKNIENGSVLMDFINDVESGRIKNAVLCIENIDRFSRTNPQKAAMLFLRLIDAGCNIHEAENEIVHHPSSDLNLISSGLIRSNRESLRKQKLSLKNWDRRFDETIKSQVALTARCPYWLDVNDGQYIAVEEHIRAIRFVFEKYNNGYGQAYIRDELNKRGWLCNGQKWSAWSVHRSLNDIRLTGRHKSSREEYDGMLMYPTIISDIEFQTAQQRLKSKNRGQKINKRANNIFAGLLICGICKKSYVGVRFDTKSNRRYARCIQAVDGHCSGAGFSYEALESAILEYVRNVEVKANTDNGNEIIKLEQELVHAINYRNEVQIDIDKQNIPDPSDRRILKNLQAKVYDIELKINNLKNSESIGYEIKNISDQINEGLLNVENIEIRNEFNSRLRKVIQRIYITRYNNNILSIGVNYFANAGNDVQWLLANSHDGTVYKNMFIEGKRVVCCVGDDIVEYDGYKERYLLNDQIVSKDVVIEALSKHC

SEQ ID NO: 4952 - DNA, 50 bp, Pectobacterium aroidearum
  source 1..50: mol_type = genomic DNA
aactttattttagcattgataatcatcattaatcatgctaaaataaagta

SEQ ID NO: 4953 - DNA, 40 bp, Pectobacterium aroidearum
  source 1..40: mol_type = genomic DNA
cacactgattgaactgatgatcgtcattgcgatcgtcgcc

SEQ ID NO: 4954 - DNA, 40 bp, Pectobacterium aroidearum
  source 1..40: mol_type = genomic DNA
cacactgattgaactgatgcacgtcattgcgatcgtcgcc

SEQ ID NO: 4955 - DNA, 50 bp, Pectobacterium aroidearum; identical to SEQ ID NO: 4950
  source 1..50: mol_type = genomic DNA

SEQ ID NO: 4956 - protein, 549 aa, Pectobacterium odoriferum
MEKVAYCYCRVSQRTQRTENGGYGMTRQQNLLLRYIGEYTDTERLGYVLNPENVVYLNAEGVSGFSGKNIENGSVLMDFINDVESGRIKNAVLCIENIDRFSRTNPQKAAMLFLRLIDAGCNIHEAENEIVHHPSSDLNLISSGLIRSNRESLRKQKLSLKNWDRRFDETIKSQVALTARCPYWLDVNDGQYIAVEEHIRAIRFVFEKYNNGYGQAYIRDELNKRGWLCNGQKWSAWSVHRSLNDIRLTGRHKSSREEYDGMLMYPTIISDIEFQTAQQRLKSKNRGQKINKRANNIFAGLLICGICKKSYVGVRFDTKSNRRYARCIQAVDGHCSGAGFSYEALESAILEYVRNVEVKANTDNGNEIIKLEQELVHAINYRNEVQSDIDKQNIPDPSDRRILKNLQAKVYDIELKINNLKNSESIGYEIKNISDKINEGLLNVENIEIRNEFNSRLRKVIQRIYITRYNNNILSIGVNYFANAGNDVQWLLANSHDGTVYKNMFIEGKRVVCCVGDDIVEYDGYKERYLLNDQIVSKDVVIEALSKHC

SEQ ID NO: 4957 - DNA, 50 bp, Pectobacterium odoriferum; identical to SEQ ID NO: 4952
  source 1..50: mol_type = genomic DNA

SEQ ID NO: 4958 - DNA, 40 bp, Pectobacterium odoriferum
  source 1..40: mol_type = genomic DNA
tacgctgattgagctgatgatcgtcattgcgatcgtcgcc

SEQ ID NO: 4959 - DNA, 40 bp, Pectobacterium odoriferum
  source 1..40: mol_type = genomic DNA
tacgctgattgagctgatgcacgtcattgcgatcgtcgcc

SEQ ID NO: 4960 - DNA, 50 bp, Pectobacterium odoriferum; identical to SEQ ID NO: 4950
  source 1..50: mol_type = genomic DNA

SEQ ID NO: 4961 - protein, 493 aa, Enterobacter hormaechei
MKQNGKAYSYIRFSSKKQDQGDSVRRQTELAEQYALANNLILSDKNFQDLGISAFKEGNRPSLGDMLEAIEKGQIEQGSTIIIESLDRLSRRGIDVTQQIIKSILQNNVFIASLVDGLLLNRESVNDLVSVIRIALAADLAHKESEKKSQRLRETKGQQRQRALNGEVINKVLPFWLERKQDKFVFSERLDTVKRIIELRRKGYGTHKIAKMLNDECYRPLRSAGWNHTTIGKTINSVALYGAYQTSETTKDRKVILLDIVENYYPPIINKEEFMLLQADHKRNKSGYKSESNPFAGLLKHECGGALVRKFHIAYGKTYQYHICANARDGKCNITKNFKNIEIALFRIMKELKIEKTTQYDESLLVEKNIIKTKIQELNDMILTLPKIPMSIIQTINNLEEKLKVLEDKIKEQNSIIISEKAFNIKLFNEIKEPQELNMMLKRVIEKIIVFNIAKKWRIKILYRNKHSQSFIWDGESISFLSDTKKLLELSKT

SEQ ID NO: 4962 - DNA, 50 bp, Enterobacter hormaechei
  source 1..50: mol_type = genomic DNA
aattagttactttgaaacaatatcgtgatattgttgcaaagaagcaaaat

SEQ ID NO: 4963 - DNA, 40 bp, Enterobacter hormaechei
  source 1..40: mol_type = genomic DNA
cttactgccaaactgcatagtgacgttgctggtaactaac

SEQ ID NO: 4964 - DNA, 40 bp, Enterobacter hormaechei
  source 1..40: mol_type = genomic DNA
cttactgccaaactgcataatgacgttgctggtaactaac

SEQ ID NO: 4965 - DNA, 50 bp, Enterobacter hormaechei
  source 1..50: mol_type = genomic DNA
aattaatgttattgaaacaatatcatgatgtgcttgggcataaataaaat

SEQ ID NO: 4966 - protein, 501 aa, Kluyvera ascorbata
MKQNGKAYSYIRFSSKKQEQGDSVRRQTELAEQYAHANNLIISDKNFQDLGISAFKEGNRPSLGDMLEAIEKGQIEQGSTIIIESLDRLSRRGIDVTQQIIKSILQNNVFIASLVDGLLLNRESVNDLVSVIRIALAADLAHKESEKKSQRLRETKGQQRQRALNGEVINKVLPFWLQRKEDKYVFSEKLDTVKRIIELRKKGLGTNKIAKTLNDEGHEPLRSTGWNHTTIGKTINSVALYGAYQTSETTKDRKVILLDIIENYYPAVISKDEFILLQSDQKQNKPGYKSEHNAFAGILKHECGGALVRKFHVVSGKTYQYHVCANARDGKCNVTKNFKNIEVALYRIMKELKLEKKTSIDETLLLERNSVKAKIQELNDMLLNLSKIPISVIQTINNLEEKLLQLEENIKQQNSIIISEQAFDFKLLQEIKEPQELNMMLKRIIEQITVFNIGKRWRIKVLYRNKHSQSFIWDGENASFISDTKKLLEIFKSQIGKNNLS

SEQ ID NO: 4967 - DNA, 50 bp, Kluyvera ascorbata; identical to SEQ ID NO: 4962
  source 1..50: mol_type = genomic DNA

SEQ ID NO: 4968 - DNA, 40 bp, Kluyvera ascorbata
  source 1..40: mol_type = genomic DNA
cttactgccaaactgcatggtaacgttgctagtaactaac

SEQ ID NO: 4969 - DNA, 40 bp, Kluyvera ascorbata
  source 1..40: mol_type = genomic DNA
cttactgccaaactgcatgataacgttgctagtaactaac

SEQ ID NO: 4970 - DNA, 50 bp, Kluyvera ascorbata; identical to SEQ ID NO: 4965
  source 1..50: mol_type = genomic DNA

SEQ ID NO: 4971 - protein, 501 aa, Erwinia persicina
MKQNGKAYSYIRFSSKKQEQGDSVRRQTELAEQYAHANNLILSDKNFQDLGISAFKEGNRPSLGDMLEAIEKGQIEQGSTIIIESLDRLSRRGIDVTQQIIKSILQNNVFIASLVDGLLLNRESVNDLVSVIRIALAADLAHKESEKKSQRLRETKGQQRQRALNGEVINKVLPFWLQRKEDKYVFSEKLDTVKRIIELRQKGFGTNKIAKTLNDEGHEPLRSTGWNHTTIGKTINSVALYGAYQTSETTKDRKVILLDIIENYYPAVISKDEFILLQSDQKQNKPGYKSEHNAFAGILKHECGGALVRKFHVVSGKTYQYHVCANARDGKCNVTKNFKNIEVALYRIMKELKLEKKTSIDETLLLERNSVKAKIEELNDMLLNLSKIPISVIQTINNLEEKLLQLEENIKQQNSIIISEQAFDFKLLQEIKEPQELNMMLKRIIEQITVINIGKRWRIKVLYRNKHSQSFIWDGENASFISDTKKLLEISKSQIGKNNLS

SEQ ID NO: 4972 - DNA, 50 bp, Erwinia persicina
  source 1..50: mol_type = genomic DNA
aattagttgctttgaaacaatatcgtgatattgttgcaaagaagcaaaat

SEQ ID NO: 4973 - DNA, 40 bp, Erwinia persicina
  source 1..40: mol_type = genomic DNA
cttactgccaaactgcatggtgacgttgctggaaactagc

SEQ ID NO: 4974 - DNA, 40 bp, Erwinia persicina
  source 1..40: mol_type = genomic DNA
cttactgccaaactgcatgatgacgttgctggaaactagc

SEQ ID NO: 4975 - DNA, 50 bp, Erwinia persicina; identical to SEQ ID NO: 4965
  source 1..50: mol_type = genomic DNA

SEQ ID NO: 4976 - protein, 481 aa, Streptococcus pneumoniae
MKTTNKVAIYVRVSTTSQVEEGYSIDEQKAKLSSYCDIKDWNVYKVYTDGGFSGSNTDRPALEGLIKDAKKRKFDTVLVYKLDRLSRSQKDTLYLIEDIFIKNNIAFLSLQENFDTSTPFGKAMIGLLSVFAQLEREQIKERMQLGKIGRAKAGKSMMWARTSYGYDYHRETGTITINPAQALAVKFIFESYLRGRSITKLRDDLNEKYPKHVPWSYRSVRAILDNPVYCGFNQFKGEVYPGNHEPIITEEVYNKTKEELKIRQRTAAENVNPRPFQAKYILSGIAQCGYCGAPLKILMGVVRKDGTRFIRYECHQRHPRKTKGVTVYNNNEKCDSGFYEKDDIENYVLTEISKLQDDAGYLDKIFSDDNAETLDRESYKKQIEELSKKLSRLNDLYIDDRITLEELQNKSAEFISMRATLETELENDPALGKDKRKADMRELLNAEKVFSMDYESQKVLVRGLINKVRVTAEDIVIKWKI

SEQ ID NO: 4977 - DNA, 50 bp, Streptococcus pneumoniae
  source 1..50: mol_type = genomic DNA
atataaataattttagtaacctacatctcaattaaggatagtaaaattat

SEQ ID NO: 4978 - DNA, 40 bp, Streptococcus pneumoniae
  source 1..40: mol_type = genomic DNA
aatcagcaagaccaccaacatttccaccaatgtaaaagct

SEQ ID NO: 4979 - DNA, 40 bp, Streptococcus pneumoniae; identical to SEQ ID NO: 4978
  source 1..40: mol_type = genomic DNA

SEQ ID NO: 4980 - DNA, 50 bp, Streptococcus pneumoniae
  source 1..50: mol_type = genomic DNA
agataaatatggtatttaaattatatctcaataaagatgcttaaaaatat

SEQ ID NO: 4981 - protein, 627 aa, Ruminococcus torques
MTEKQGFMTALYERLSRDDELNGESNSISNQKKLLEQYAKEHGFTNLVHFTDDGISGTRFDRPGFLAMMKEVESGKVRTILIKDMSRMGRDYLKVGQYMELLRQKNVRLIAVNENVDSFREDDDFTPFRNIMNEWYARDTSKKIKSTFKAKGKSGKHVASTTPYGYLKDKDDPNVWIVDEEAAVVVRRIFHMTMDGYGPYQIARALKEDKVEIPAVHMAKKDAGLWKGRVEEIKDPYGWGSSTVAGILKKREYLGHTVNFKTRKHFKDKKSHYVSEDNWTVFENTQEAIIDQETFDNVQRIRSNVRRYPDGWGEAHPLTGLMYCADCGSKMYVHRVNNGKRVPQYTCSAYSKVPVGTLCQTQHRINADVVMELIKELLKAVAEYSQLNREEFLETVKKAQTSQQSSEITRLKNRLAEAKKRVQELEKLICRIYEDNILGKLPDERYTILDGQYSKEQKDLSAEIADMEAELSGYEEGRRSAEKFIALVDKYQNFEELTTYMLNEFVEKIVVHERDRKGSIETTQEVEIYFNFIGKYLPPHFGEVEMTPEEIEEMKKREARKDRLHQNYLKRKANGKQQEYYERTKAKKKAEMDAKKEEIRQEDIAKGVFVPVSLLPPAEPKKGVASA

SEQ ID NO: 4982 - DNA, 50 bp, Ruminococcus torques; identical to SEQ ID NO: 2552
  source 1..50: mol_type = genomic DNA

SEQ ID NO: 4983 - DNA, 40 bp, Ruminococcus torques
  source 1..40: mol_type = genomic DNA
catttacaagcaggcggcaggaaagaccgcaaagtccatc

SEQ ID NO: 4984 - DNA, 40 bp, Ruminococcus torques
  source 1..40: mol_type = genomic DNA
catttacaagcaggcggcataaaagaccgcaaagtccatc

SEQ ID NO: 4985 - DNA, 50 bp, Ruminococcus torques
  source 1..50: mol_type = genomic DNA
aaaaattatacttttatatttacttatgtagttagttttacaagtgttct

SEQ ID NO: 4986 - protein, 627 aa, Ruminococcus torques
MTEKQGFMTALYERLSRDDELNGESNSISNQKKLLEQYAKEHGFTNLVHFTDDGISGTRFDRPGFLAMMKEVESGKVGTILIKDMSRMGRDYLKVGQYMELLRQKNVRLIAVNENVDSFREDDDFTPFRNIMNEWYARDTSKKIKSTFKAKGKSGKHVASTTPYGYLKDKDDPNVWIVDEEAAVVVRRIFHMTMDGYGPYQIAKALKEDKVEIPAVHMAKKDAGLWKGRVEEIKDPYGWGSSTVAGILKKREYLGHTVNFKTRKHFKDKKSHYVSEDNWTVFENTQEAIIDQETFDNVQRIRSNVRRYPDGWGEAHPLTGLMYCADCGSKMYVHRVNNGKRVPQYTCSAYSKVPVGTLCQTQHRINADVVMELIKELLKAVAEYSQLNREEFLETVKKAQTSQQSSEITRLKSRLAEAKKRVQELEKLICRIYEDNILGKLPDERYAILDGQYSKEQKDLSAEIADMEAELSGYEEGRRSAEKFIALVDKYQNFEELTTYMLNEFVEKIVVHERDRKGSIETTQEVEIYFNFIGKYLPPHFGEVEMTPEEIEEMKKREARKDRLHQNYLKRKANGKQQEYYERTKAKKKAEMDAKKEEIRQEDIAKGVFVPVSLLPPAEPKKGVASA

SEQ ID NO: 4987 - DNA, 50 bp, Ruminococcus torques; identical to SEQ ID NO: 2552
  source 1..50: mol_type = genomic DNA

SEQ ID NO: 4988 - DNA, 40 bp, Ruminococcus torques; identical to SEQ ID NO: 4983
  source 1..40: mol_type = genomic DNA

SEQ ID NO: 4989 - DNA, 40 bp, Ruminococcus torques; identical to SEQ ID NO: 4984
  source 1..40: mol_type = genomic DNA

SEQ ID NO: 4990 - DNA, 50 bp, Ruminococcus torques; identical to SEQ ID NO: 4985
  source 1..50: mol_type = genomic DNA

SEQ ID NO: 4991 - protein, 627 aa, Blautia obeum
MPEKQGFMTALYERLSRDDELNGESNSISNQKKLLEQYAKEHGFTNLVHFTDDGISGTRFDRPGFLAMMKEVESGKVGTILIKDMSRMGRDYLKVGQYMELLRQNNVRLIAVNENVDSFREDDDFTPFRNIMNEWYARDTSKKIKSTFKAKGKSGKHVASTTPYGYLKDKDDPNVWIVDEEAAVVVRRIFHMTMDGYGPYQIARTLKEDKVEIPAVHMAKKDAGLWKGRVEEIKDPYGWGSSTVAGILKKREYLGHTVNFKTRKHFKDKKSHYVSEDNWTVFENTQEAIIDQETFDNVQRIRSNVRRYPDGWGEAHPLTGLMYCADCGSKMYVHRVNNGKRVPQYTCSAYSKVPVGTLCQTQHRINADVVMELIKELLKAVAEYSQLNREEFLETVKKAQTSQQSSEITRLKNRLAEAKKRVQELEKLICRIYEDNILGKLPDERYTILDGQYSKEQKNLSAEIADMEAELSGYEEGRRSAEKFIALVDKYQNFDELTTYMLNEFVEKIVVHERDRKGSIETTQEVEIYFNFIGKYLPPHFGEVEMTPEEIEEMKKREARKDRLHQNYLKRKANGKQQEYYERTKAKKKAEMDAKKEEIRQEDIAKGVFIPVSLLPPAEPKKGVASA

SEQ ID NO: 4992 - DNA, 50 bp, Blautia obeum; identical to SEQ ID NO: 2552
  source 1..50: mol_type = genomic DNA

SEQ ID NO: 4993 - DNA, 40 bp, Blautia obeum
  source 1..40: mol_type = genomic DNA
gaaatataaactggcggcaggaaaaacagcaaagagtatt

SEQ ID NO: 4994 - DNA, 40 bp, Blautia obeum
  source 1..40: mol_type = genomic DNA
gaaatataaactggcggcataaaaaacagcaaagagtatt

SEQ ID NO: 4995 - DNA, 50 bp, Blautia obeum; identical to SEQ ID NO: 4985
  source 1..50: mol_type = genomic DNA

SEQ ID NO: 4996 - protein, 627 aa, Blautia obeum
MTEKQGFMTALYERLSRDDELNGESNSISNQKKLLEQYAKEHGFTNLVHFTDDGISGTRFDRPGFLAMMKEVESGKVRTILIKDMSRMGRDYLKVGQYMELLRQKNVRLIAVNENVDSFREDDDFTPFRNIMNEWYARDTSKKIKSTFKAKGKSGKHVASTTPYGYLKDKDDPNVWIVDEEAAVVVRRIFHMTMDGYGPYQIARALKEDKVEIPAVHMAKKDAGLWKGRVEEIKDPYGWGSSTVAGILKKREYLGHTVNFKTRKHFKDKKSHYVSEDNWTVFENTQEAIINQETFDNVQRIRSNVRRYPDGWGEAHPLTGLMYCADCGSKMYVHRVNNGKRVPQYTCSAYSKVPVGTLCQTQHRINADVVMELIKELLKAVAEYSQLNREEFLETVKKAQTSQQSSEITRLKNRLAEAKKRVQELEKLICRIYEDNILGKLPDERYTILDGQYSKEQKDLSAEIADMEAELSGYEEGRRSAEKFIALVDKYQNFEELTTYMLNEFVEKIVVHERDRKGSIETTQEVEIYFNFIGKYLPPHFGEVEMTPEEIEEMKKREARKDRLHQNYLKRKANGKQQEYYERTKAKKKAEMDAKKEEIRQEDIAKGVFVPVSLLPPAEPKKGVASA

SEQ ID NO: 4997 - DNA, 50 bp, Blautia obeum; identical to SEQ ID NO: 2552
  source 1..50: mol_type = genomic DNA

SEQ ID NO: 4998 - DNA, 40 bp, Blautia obeum
  source 1..40: mol_type = genomic DNA
aaaatacaagttggctgccggtaagacagcaaaatctatt

SEQ ID NO: 4999 - DNA, 40 bp, Blautia obeum
  source 1..40: mol_type = genomic DNA
aaaatacaagttggctgcctataagacagcaaaatctatt

SEQ ID NO: 5000 - DNA, 50 bp, Blautia obeum; identical to SEQ ID NO: 4985
  source 1..50: mol_type = genomic DNA

SEQ ID NO: 5001 - protein, 577 aa, Vibrio parahaemolyticus
MSKYFLYHRVSKKIQSTDGQGMERQTEATEKWIEIHNESRISEGLKPYIYGRRYEDKGRSGYTEENIKKGQLGKLFCDIENGRIEPGDIIVFELIDRFSRAEPGIVREHLEKIMKAGVKVAITKWNIVFSSEMQGPLGLSARIMLEIGLYLANEESRIKSERIQATIRQLERQGIKSVAKTPIWLHRTKDRRDYRLIDENVKVIQKIFELRKLGLGAKRIINEIGPVELPRYRYDENGDLITTTSNKPLCESAVNRYLRDEAVLGYRDGKKIYDAIVDEKTFNSCQQKISKTKGGKVTVVKNVLSGIVYCDHCNKKMAFGGEQVSKFGKVRSYIKCNGKTKANGCNAKDIKYAPLESSVYNLLKHIEDKQETTVDINALESEMHAASLKAKRAMTFMLDYDYDSQWKDVYEEQHKIINELKSKLSQAKAERAGKLTELDLDLSQHKEKAKFNQILKDYDVKAYLGHDPVTKAPYVRLIIGAWNDFEARTTIGKDVNAKRVKAGMRLGAKGINFDIRERGHIEFHEPEVIADEDLAMQLRIERGANLMLKVLTDEQKKDLVNRVKSQSKDADIKSESD

SEQ ID NO: 5002 - DNA, 50 bp, Vibrio parahaemolyticus
  source 1..50: mol_type = genomic DNA
gagtggtttattatttacttttctaaagacaactgtatgataaacaactc

SEQ ID NO: 5003 - DNA, 40 bp, Vibrio parahaemolyticus
  source 1..40: mol_type = genomic DNA
aggcaagccacagttggcaaatgaaacaaacgggccacgt

SEQ ID NO: 5004 - DNA, 40 bp, Vibrio parahaemolyticus
  source 1..40: mol_type = genomic DNA
aggcaagccacagttggcatttgaaacaaacgggccacgt

SEQ ID NO: 5005 - DNA, 50 bp, Vibrio parahaemolyticus
  source 1..50: mol_type = genomic DNA
gtgttttttaatatttacttttctttacataactgtttcaaataaaaatc

SEQ ID NO: 5006 - protein, 574 aa, Vibrio rotiferianus
MGRYFLYHRVSKKIQSIEGQGVERQVEATQQWIDIHNELRVKEGKEPYTFGRRYEDKGKSGYTQENIRKGQLGKLFADIEKGIIVPGDIIVFELIDRFSRAEPNVVRSHFENIMKAEIKVAVTKWNTVFETNMSGPSGLSARIMLEVGLHLANEESRVKSERILATNKLLADQGIKTTAKTPIWLHRTKDRKELKVVRKNADVIRRIFELRKKGFGAKRIINELGPIKLARYTYNEEGVLIPSSYNRPLSESSVNRYLRDQTVTGYRDGVYYCEPIVEEKLFHACQQKIRKSKGGKVTKIKNVLSGLAYCEKCGKKMAFGGESISPKGKIRSYIKCNNKAKTGGCDAKSIRYEPLEQCVYNLLHTLNDREEITVDIGQLEMELASAQEQAANAQSYMIRYPNDNSWVGIYEEQKAKVYELNNLIADAKAERSGRLTEMNLDLTKHENKALFNQILKDYDVKAVLGHESTSDKPRVKLVIGAWGDFVVSATVDKSVSSRRVRAAMKLGAEGIDFDQRDRGHIQFKEPEKFASDDAKRMAFIDSLAKTFSQTMSDEEKQLILDKVQQQNTHQGSED

SEQ ID NO: 5007 - DNA, 50 bp, Vibrio rotiferianus
  source 1..50: mol_type = genomic DNA
gagtggtttattatttacttttctaatgataactgtataataaacaactc

SEQ ID NO: 5008 - DNA, 40 bp, Vibrio rotiferianus
  source 1..40: mol_type = genomic DNA
tggcaaaccacagtttgcgaaagaaacaaatggaccgcgt

SEQ ID NO: 5009 - DNA, 40 bp, Vibrio rotiferianus
  source 1..40: mol_type = genomic DNA
tggcaaaccacagtttgcgttagaaacaaatggaccgcgt

SEQ ID NO: 5010 - DNA, 50 bp, Vibrio rotiferianus; identical to SEQ ID NO: 5005
  source 1..50: mol_type = genomic DNA

SEQ ID NO: 5011 - protein, 577 aa, Vibrio parahaemolyticus; identical to SEQ ID NO: 5001

SEQ ID NO: 5012 - DNA, 50 bp, Vibrio parahaemolyticus; identical to SEQ ID NO: 5002
  source 1..50: mol_type = genomic DNA

SEQ ID NO: 5013 - DNA, 40 bp, Vibrio parahaemolyticus; identical to SEQ ID NO: 1343
  source 1..40: mol_type = genomic DNA

SEQ ID NO: 5014 - DNA, 40 bp, Vibrio parahaemolyticus; identical to SEQ ID NO: 1344
  source 1..40: mol_type = genomic DNA

SEQ ID NO: 5015 - DNA, 50 bp, Vibrio parahaemolyticus; identical to SEQ ID NO: 5005
  source 1..50: mol_type = genomic DNA

SEQ ID NO: 5016 - protein, 481 aa, Streptococcus pneumoniae
MITTNKVAIYVRVSTTNQVEEGYSIDEQKDKLSSYCDIKDWNVYKVYTDGGFSGSNTDRPALESLIKDAKKRKFDTVLVYKLDRLSRSQKDTLHLIEDVFIKNGIEFLSLQENFDTSTPFGKAMIGLLSVFAQLEREQIKERMQLGKLGRAKSGKSMMWAKTSYGYDYHKETGTVTINPAQALAIKFIFESYLRGRSITKLRDDLNEKYPKHVPWSYRAVRTILDNPVYCGFNQYKGEIYPGNHEPIISKEEYDKTQSELKIRQRTAAENVNPRPFQAKYILSGIAQCGYCGAPLKIMLGVKRKDGSRLKKYECHQRHPRTLRGVTTYNDNKKCDSGFYYKDKLEASVLKEISKLQDDADYLDKIFSGDNAETIDRESYKKQIEELSKKLSRLNDLYIDDRITLEELQSKSAEFISMRGTLETELENDPALRKNKRKADMRKLLNAEKVFSMDYENQKVLVRRLINKVKVTAEDIVINWKI

SEQ ID NO: 5017 - DNA, 50 bp, Streptococcus pneumoniae
  source 1..50: mol_type = genomic DNA
aaatataaataattttagtaacctacatctcaatcaaggatagtaaaact

SEQ ID NO: 5018 - DNA, 40 bp, Streptococcus pneumoniae
  source 1..40: mol_type = genomic DNA
ataatcagcaagaccaccaacatttccaccaatgtaaaag

SEQ ID NO: 5019 - DNA, 40 bp, Streptococcus pneumoniae
  source 1..40: mol_type = genomic DNA
ataatcagcaagaccaccaggatttccaccaatgtaaaag

SEQ ID NO: 5020 - DNA, 50 bp, Streptococcus pneumoniae
  source 1..50: mol_type = genomic DNA
aaatagaaaactgtgtggcagcctggatatcaattaaggctattaaaact

SEQ ID NO: 5021 - protein, 481 aa, Streptococcus pneumoniae
MITTNKVAIYVRVSTTNQVEEGYSIDEQKDKLSSYCDIKDWNVYKVYTDGGFSGSNTDRPALESLIKDAKKRKFDTVLVYKLDRLSRSQKDTLHLIEDVFIKNGIEFLSLQENFDTSTPFGKAMIGLLSVFAQLEREQIKERMQLGKLGRAKSGKSMMWAKTSYGYDYHKETGTVTINPAQALTIKFIFESYLRGRSITKLRDDLNEKYPKHVPWSYRAVRTILDNPVYCGFNQYKGEIYPGNHEPIISKEEYDKTQSELKIRQRTAAENVNPRPFQAKYILSGIAQCGYCGAPLKIMLGVKRKDGSRLKKYECHQRHPRTLRGVTTYNDNKKCDSGFYYKDKLEAYVLKEISKLQDDADYLDKIFSGDNAETIDRESYKKQIEELSKKLSRLNDLYIDDRITLEELQSKSAEFISMRGTLETELENDPALRKNKRKADMRKLLNAEKVFSMDYENQKVLVRRLINKVKVTAEDIVINWKI

SEQ ID NO: 5022 - DNA, 50 bp, Streptococcus pneumoniae; identical to SEQ ID NO: 5017
  source 1..50: mol_type = genomic DNA

SEQ ID NO: 5023 - DNA, 40 bp, Streptococcus pneumoniae; identical to SEQ ID NO: 5018
  source 1..40: mol_type = genomic DNA

SEQ ID NO: 5024 - DNA, 40 bp, Streptococcus pneumoniae; identical to SEQ ID NO: 5019
  source 1..40: mol_type = genomic DNA

SEQ ID NO: 5025 - DNA, 50 bp, Streptococcus pneumoniae; identical to SEQ ID NO: 5020
  source 1..50: mol_type = genomic DNA

SEQ ID NO: 5026 - protein, 481 aa, Streptococcus pneumoniae
MITTNKVAIYVRVSTTNQVEEGYSIDEQKDKLSSYCDIKDWNVYKVYTDGGFSGSNTDRPALESLIKDAKKRKFDTVLVYKLDRLSRSQKDTLHLIEDVFIKNGIEFLSLQENFDTSTPFGKAMIGLLSVFAQLEREQIKERMQLGKLGRAKSGKSMMWAKTSYGYDYHKETGTVTINPAQALAIKFIFESYLRGRSITKLRDDLNEKYPKHVPWSYRAVRTILDNPVYCGFNQYKGEIYPGNHEPIISKEEYDKTQSELKIRQRTAAENVNPRPFQAKYILSGIAQCGYCGAPLKIMLGVKRKDGSRLKKYECHQRHPRTLRGVTTYNDNKKCDSGFYYKDKLEAYVLKEISKLQDDADYLDKIFSGDNAETIDRESYKKQIEELSKKLSRLNDLYIDDRITLEELQSKSAEFISMRGTLETELENDPALRKNKRKADMRKLLNAEKVFSMDYENQKVLVRRLINKVKVTAEDIVINWKI

SEQ ID NO: 5027 - DNA, 50 bp, Streptococcus pneumoniae; identical to SEQ ID NO: 5017
  source 1..50: mol_type = genomic DNA

SEQ ID NO: 5028 - DNA, 40 bp, Streptococcus pneumoniae; identical to SEQ ID NO: 5018
  source 1..40: mol_type = genomic DNA

SEQ ID NO: 5029 - DNA, 40 bp, Streptococcus pneumoniae; identical to SEQ ID NO: 5019
  source 1..40: mol_type = genomic DNA

SEQ ID NO: 5030 - DNA, 50 bp, Streptococcus pneumoniae; identical to SEQ ID NO: 5020
  source 1..50: mol_type = genomic DNA

SEQ ID NO: 5031 - protein, 481 aa, Streptococcus pneumoniae
MITTNKVAIYVRVSTTNQVEEGYSIDEQKDKLSSYCDIKDWNVYKVYTDGGFSGSNTDRPALESLIKDAKKRKFDTVLVYKLDRLSRSQKDTLHLIEDVFIKNGIEFLSLHENFDTSTPFGKAMIGLLSVFAQLEREQIKERMQLGKLGRAKSGKSMMWAKTSYGYDYHKETGTVTINPAQALAIKFIFESYLRGRSITKLRDDLNEKYPKHVPWSYRAVRTILDNPVYCGFNQYKGEIYPGNHEPIISKEEYDKTQSELKIRQRTAAENVNPRPFQAKYILSGIAQCGYCGAPLKIMLGVKRKDGSRLKKYECHQRHPRTLRGVTTYNDNKKCDSGFYYKDKLEASVLKEISKLQDDADYLDKIFSGDNAETIDRESYKKQIEELSKKLSRLNDLYIDDRITLEELQSKSAEFISMRGTLETELENDPALRKNKRKADMRKLLNAEKVFSMDYENQKVLVRRLINKVKVTAEDIVINWKI

SEQ ID NO: 5032 - DNA, 50 bp, Streptococcus pneumoniae; identical to SEQ ID NO: 5017
  source 1..50: mol_type = genomic DNA

SEQ ID NO: 5033 - DNA, 40 bp, Streptococcus pneumoniae; identical to SEQ ID NO: 5018
  source 1..40: mol_type = genomic DNA

SEQ ID NO: 5034 - DNA, 40 bp, Streptococcus pneumoniae; identical to SEQ ID NO: 5019
  source 1..40: mol_type = genomic DNA

SEQ ID NO: 5035 - DNA, 50 bp, Streptococcus pneumoniae; identical to SEQ ID NO: 5020
  source 1..50: mol_type = genomic DNA

SEQ ID NO: 5036 - protein, 481 aa, Streptococcus pneumoniae
MITTNKVAIYVRVSTTNQVEEGYSIDEQKDKLSSYCDIKDWNVYKVYTDGGFSGSNTDRPALESLIKDAKKRKFDTVLVYKLDRLSRSQKDTLHLIEDVFIKNGIEFLSLQENFDTSTPFGKAMIGLLSVFAQLEREQIKERMQLGKLGRAKSGKSMMWAKTSYGYDYHKETGTVTINPAQALTIKFIFESYLRGRSITKLRDDLNEKYPKHVPWSYRAVRTILDNPVYCGFNQYKGEIYPGNHEPIISKEEYDKTQSELKIRQRTAAENVNPRPFQAKYILSGIAQCGYCGAPLKIMLGVKRKDGSRLKKYECHQRHPRTLRGVTTYNDNKKCDSGFYYKDKLEAYVLKEISKLQDDADYLDKIFSGDNAETIDRESYKKQIEELSKKLSRLNDLYIDDRITLEELQSKSAEFISMRGTLETELENDPALRKNKRKADMRKLLNAEKVFSMDYESQKVLVRRLINKVKVTAEDIVINWKI

SEQ ID NO: 5037 - DNA, 50 bp, Streptococcus pneumoniae; identical to SEQ ID NO: 5017
  source 1..50: mol_type = genomic DNA

SEQ ID NO: 5038 - DNA, 40 bp, Streptococcus pneumoniae; identical to SEQ ID NO: 5018
  source 1..40: mol_type = genomic DNA

SEQ ID NO: 5039 - DNA, 40 bp, Streptococcus pneumoniae; identical to SEQ ID NO: 5019
  source 1..40: mol_type = genomic DNA

SEQ ID NO: 5040 - DNA, 50 bp, Streptococcus pneumoniae; identical to SEQ ID NO: 5020
  source 1..50: mol_type = genomic DNA

SEQ ID NO: 5041 - protein, 481 aa, Streptococcus pneumoniae
MITTNKVAIYVRVSTTNQVEEGYSIDEQKDKLSSYCDIKDWNVYKVYTDGGFSGSNTDRPALESLIKDAKKRKFDTVLVYKLDRLSRSQKDTLHLIEDVFIKNGIEFLSLQENFDTSTPFGKAMIGLLSVFAQLEREQIKERMQLGKLGRAKSGKSMMWAKTSYGYDYHKETGTVTINPAQALTIKFIFESYLRGRSITKLRDDLNEKYPKHVPWSYRAVRTILDNPVYCGFNQYKGEIYPGNHEPIISKEEYDKTQSELKIRQRTAAENVNPRPFQAKYILSGIAQCGYCGAPLKIMLGVKRKDGSRLKKYECHQRHPRTLRGVTTYNDNKKCDSGFYYKDKLEAYVLKEISKLQDDADYLDNIFLGDNAETIDRESYKKQIEELSKKLSRLNDLYIDDRITLEELQSKSAEFISMRATLETELENDPALRKNKIKADMRKLLNAEKVFSMDYEGQKVLVRRLINKVKVTAEDIVINWKI

SEQ ID NO: 5042 - DNA, 50 bp, Streptococcus pneumoniae
  source 1..50: mol_type = genomic DNA
aaatataaataattttagtaacctacatttcaatcaaggatagtaaaact

SEQ ID NO: 5043 - DNA, 40 bp, Streptococcus pneumoniae
  source 1..40: mol_type = genomic DNA
ataatcagcaagaccaccaacatctccaccaatgtaaaag

SEQ ID NO: 5044 - DNA, 40 bp, Streptococcus pneumoniae
  source 1..40: mol_type = genomic DNA
ataatcagcaagaccaccaggatctccaccaatgtaaaag

SEQ ID NO: 5045 - DNA, 50 bp, Streptococcus pneumoniae; identical to SEQ ID NO: 5020
  source 1..50: mol_type = genomic DNA

SEQ ID NO: 5046 - protein, 481 aa, Streptococcus pneumoniae
MITTNKVAIYVRVSTTNQVEEGYSIDEQKDKLSSYCDIKDWNVYKVYTDGGFSGSNTDRPALESLIKDAKKRKFDTVLVYKLDRLSRSQKDTLHLIEDVFIKNGIEFLSLQENFDTSTPFGKAMIGLLSVFAQLEREQIKERMQLGKLGRAKSGKSMMWAKTSYGYDYHKETGTVTINPAQALTIKFIFESYLRGRSITKLRDDLNEKYPKHVPWSYRAVRTILDNPVYCGFNQYKGEIYPGNHEPIISKEEYDKTQSELKIRQRTAAENVNPRPFQAKYILSGIAQCGYCGAPLKIMLGVKRKDGSRLKKYECHQRHPRTLRGVTTYNDNKKCDSGFYYKDKLEAYVLKEISKLQDDADYLDKIFLGDNAETIDRESYKKQIEELSKKLSRLNDLYIDDRITLEELQSKSAEFISMRGTLETELENDPALRKNKRKADMRKLLNAEKVFSMDYESQKVLVRRLINKVKVTAEDIVINWKI

SEQ ID NO: 5047 - DNA, 50 bp, Streptococcus pneumoniae; identical to SEQ ID NO: 5017
  source 1..50: mol_type = genomic DNA

SEQ ID NO: 5048 - DNA, 40 bp, Streptococcus pneumoniae; identical to SEQ ID NO: 5018
  source 1..40: mol_type = genomic DNA

SEQ ID NO: 5049 - DNA, 40 bp, Streptococcus pneumoniae; identical to SEQ ID NO: 5019
  source 1..40: mol_type = genomic DNA

SEQ ID NO: 5050 - DNA, 50 bp, Streptococcus pneumoniae; identical to SEQ ID NO: 5020
  source 1..50: mol_type = genomic DNA

SEQ ID NO: 5051 - protein, 481 aa, Streptococcus pneumoniae
MKTTNKVAIYVRVSTTSQVEEGYSIEEQKDKLESYCKIKDWSVYKVYTDGGFSGSNTDRPALESLIKDAKKRKFDTVLVYKLDRLSRSQKDTLHLIEDVFIKNGIEFLSLQENFDTSTPFGKAMIGLLSVFAQLEREQIKERMQLGKIGRAKAGKSMMWAKTSYGYDYHRETGTITINPAQALAIKFIFESYLRGRSITKLRDDLNEKYPKHVPWSYRAVRTILDNPVYCGFNQYKGEIYPGNHEPIISKEEYDKTQSELKIRQRTAAENVNPRPFQAKYILSGIAQCGYCGAPLKIMLGVKRKDGSRLKKYECHQRHPRTLRGVTTYNDNKKCDSGFYYKDKLEAYVLTEISKLQDNAGYLDKIFSGDNAETIDRESYKKQIEELSKKLSRLNDLYIDDRITLEELQSKSAEFISMRGTLETELENDPALRKNKRKADMRKLLNAEKIFSMDYEGQKVLVRGLINKVQVTAEDIVINWKI

SEQ ID NO: 5052 - DNA, 50 bp, Streptococcus pneumoniae; identical to SEQ ID NO: 5017
  source 1..50: mol_type = genomic DNA

SEQ ID NO: 5053 - DNA, 40 bp, Streptococcus pneumoniae; identical to SEQ ID NO: 5018
  source 1..40: mol_type = genomic DNA

SEQ ID NO: 5054 - DNA, 40 bp, Streptococcus pneumoniae; identical to SEQ ID NO: 5019
  source 1..40: mol_type = genomic DNA

SEQ ID NO: 5055 - DNA, 50 bp, Streptococcus pneumoniae; identical to SEQ ID NO: 5020
  source 1..50: mol_type = genomic DNA

SEQ ID NO: 5056 - protein, 481 aa, Streptococcus pneumoniae
MITTNKVAIYVRVSTTNQVEEGYSIDEQKDKLSSYCDIKDWNVYKVYTDGGFSGSNTDRPALESLIKDAKKRKFDTVLVYKLDRLSRSQKDTLHLIEDVFIKNGIEFLSLQENFDTSTPFGKAMIGLLSVFAQLEREQIKERMQLGKLGRAKSGKSMMWAKTSYGYDYHKETGTVTINPAQALTIKFIFESYLRGRSITKLRDDLNEKYPKHVPWSYRAVRTILDNPVYCGFNQYKGEIYPGNHEPIISKEEYDKTQSELKIRQRTAAENVNPRPFQAKYILSGIAQCGYCGAPLKIMLGVKRKDGSRLKKYECHQRHPRTLRGVTTYNDNKKCDSGFYYKDKLEASVLKEISKLQDDADYLDKIFSGDNAETIDRESYKKQIEELSKKLSRLNDLYIDDRITLEELQSKSAEFISMRGTLETELENDPALRKNKRKADMRKLLNAEKVFSMNYENQKVLVRRLINKVKVTAEDIVINWKI

SEQ ID NO: 5057 - DNA, 50 bp, Streptococcus pneumoniae; identical to SEQ ID NO: 5017
  source 1..50: mol_type = genomic DNA

SEQ ID NO: 5058 - DNA, 40 bp, Streptococcus pneumoniae; identical to SEQ ID NO: 5018
  source 1..40: mol_type = genomic DNA

SEQ ID NO: 5059 - DNA, 40 bp, Streptococcus pneumoniae; identical to SEQ ID NO: 5019
  source 1..40: mol_type = genomic DNA

SEQ ID NO: 5060 - DNA, 50 bp, Streptococcus pneumoniae; identical to SEQ ID NO: 5020
  source 1..50: mol_type = genomic DNA

SEQ ID NO: 5061 - protein, 481 aa, Streptococcus pneumoniae
MIATNKVAIYVRVSTTNQVEEGYSIDEQKDKLSSYCDIKDWNVYKVYTDGGFSGSNTDRPALESLIKDAKKRKFDTVLVYKLDRLSRSQKDTLHLIEDVFIKNGIEFLSLQENFDTSTPFGKAMIGLLSVFAQLEREQIKERMQLGKLGRAKSGKSMMWAKTSYGYDYHKETGTVTINPAQALTIKFIFESYLRGRSITKLRDDLNEKYPKHVPWSYRAVRTILDNPVYCGFNQYKGEIYPGNHEPIISKEEYDKTQSELKIRQRTAAENVNPRPFQAKYILSGIAQCGYCGAPLKIMLGVKRKDGSRLKKYECHQRHPRTLRGVTTYNDNKKCDSGFYYKDKLEAYVLKEISKLQDDADYLDKIFSGDNAETIDRESYKKQIEELSKKLSRLNDLYIDDRITLEELQSKSAEFISMRGTLETELENDPALRKNKRKADMRKLLNAEKVFSMDYENQKVLVRRLINKVKVTAEDIVINWKI

SEQ ID NO: 5062 - DNA, 50 bp, Streptococcus pneumoniae; identical to SEQ ID NO: 5017
  source 1..50: mol_type = genomic DNA

SEQ ID NO: 5063 - DNA, 40 bp, Streptococcus pneumoniae; identical to SEQ ID NO: 5018
  source 1..40: mol_type = genomic DNA

SEQ ID NO: 5064 - DNA, 40 bp, Streptococcus pneumoniae; identical to SEQ ID NO: 5019
  source 1..40: mol_type = genomic DNA

SEQ ID NO: 5065 - DNA, 50 bp, Streptococcus pneumoniae; identical to SEQ ID NO: 5020
  source 1..50: mol_type = genomic DNA

SEQ ID NO: 5066 - protein, 481 aa, Streptococcus pneumoniae; identical to SEQ ID NO: 2171

SEQ ID NO: 5067 - DNA, 50 bp, Streptococcus pneumoniae; identical to SEQ ID NO: 5017
  source 1..50: mol_type = genomic DNA

SEQ ID NO: 5068 - DNA, 40 bp, Streptococcus pneumoniae; identical to SEQ ID NO: 5018
  source 1..40: mol_type = genomic DNA

SEQ ID NO: 5069 - DNA, 40 bp, Streptococcus pneumoniae; identical to SEQ ID NO: 5019
  source 1..40: mol_type = genomic DNA

SEQ ID NO: 5070 - DNA, 50 bp, Streptococcus pneumoniae; identical to SEQ ID NO: 5020
  source 1..50: mol_type = genomic DNA

SEQ ID NO: 5071 - protein, 481 aa, Streptococcus pneumoniae
MKTMNKVAIYVRVSTTNQVEEGYSIDEQKDKLSSYCDIKDWNVYKVYTDGGFSGSNTDRPALESLIKDAKKRKFDTVLVYKLDRLSRSQKDTLHLIEDVFIKNGIEFLSLQENFDTSTPFGKAMIGLLSVFAQLEREQIKERMQLGKIGRAKAGKSMMWAKTSYGYDYHRDTGTITINPAQALAIKFIFESYLRGRSITKLRDDLNEKYPKHVPWSYRAVRTILDNPVYCGFNQYKGEIYPGNHEPIISKEEYDKTQSELKIRQRTAAENVNPRPFQAKYILSGIAQCGYCGAPLKIMLGVKRKDGSRLKKYECHQRHPRTLRGVTTYNDNKKCDSGFYYKDKLEAYVLKEISKLQDDADYLDKIFSGDNAETIDRESYKKQIEELSKKLSRLNDLYIDDRITLEELQSKSAEFISMRGTLETELENDPALRKNKRKADMRKLLNAEKVFSMDYENQKVLVRRLINKVKVTAEDIVINWKI

SEQ ID NO: 5072 - DNA, 50 bp, Streptococcus pneumoniae; identical to SEQ ID NO: 5017
  source 1..50: mol_type = genomic DNA

SEQ ID NO: 5073 - DNA, 40 bp, Streptococcus pneumoniae; identical to SEQ ID NO: 5018
  source 1..40: mol_type = genomic DNA

SEQ ID NO: 5074 - DNA, 40 bp, Streptococcus pneumoniae; identical to SEQ ID NO: 5019
  source 1..40: mol_type = genomic DNA

SEQ ID NO: 5075 - DNA, 50 bp, Streptococcus pneumoniae; identical to SEQ ID NO: 5020
  source 1..50: mol_type = genomic DNA

SEQ ID NO: 5076 - protein, 481 aa, Streptococcus pneumoniae; identical to SEQ ID NO: 2226

SEQ ID NO: 5077 - DNA, 50 bp, Streptococcus pneumoniae; identical to SEQ ID NO: 5017
  source 1..50: mol_type = genomic DNA

SEQ ID NO: 5078 - DNA, 40 bp, Streptococcus pneumoniae; identical to SEQ ID NO: 5018
  source 1..40: mol_type = genomic DNA

SEQ ID NO: 5079 - DNA, 40 bp, Streptococcus pneumoniae; identical to SEQ ID NO: 5019
  source 1..40: mol_type = genomic DNA

SEQ ID NO: 5080 - DNA, 50 bp, Streptococcus pneumoniae; identical to SEQ ID NO: 5020
  source 1..50: mol_type = genomic DNA

SEQ ID NO: 5081 - protein, 484 aa, Leuconostoc carnosum
MKKKVALYVRVSTLEQAESGYSIGEQIDKLKKFADIKDWHVYEVYEDGGWSGSNTNRPALERLINDAKRHLFDTILVYKLDRLSRSQKDTLFLIEDIFKANNIDFVSLNENFDTSTAFGTAMIGILSVFAQLEREQIRERMKLGLVGRAKSGKAMGWHMTPFGYTYDKQSGNFIINNLTASIVREIFNDYLSGISITKLRDKLNESGHIGKDRNWSYRTLRQTLDNPTYTGVVKYDHKIYAGNHEPIIENDVFQAVQIELSKRQQLAYQKNNNPRPFQSKYMLSGIIKCGYCGSPMVSTLGNKRKDGTRLKKYQCVNRHVRKSSGVTIYNNNIKCDSGFYMMVDIENYVINTVSDLQASPESVQKLFNKNNNNIEKINIDEIKKEISKLSSRLKKLSDLYMNDLLSLDELKEKTSELKSTRLLLENKISEDKNNSDREIKERIINNMNKKSIQKMSYQEQTNLVKSLINKVSVTREMIEISWNF

SEQ ID NO: 5082 - DNA, 50 bp, Leuconostoc carnosum
  source 1..50: mol_type = genomic DNA
caaacatatttactatatctgatttcaattaagtatattaaatatgttga

SEQ ID NO: 5083 - DNA, 40 bp, Leuconostoc carnosum; identical to SEQ ID NO: 788
  source 1..40: mol_type = genomic DNA

SEQ ID NO: 5084 - DNA, 40 bp, Leuconostoc carnosum; identical to SEQ ID NO: 789
  source 1..40: mol_type = genomic DNA

SEQ ID NO: 5085 - DNA, 50 bp, Leuconostoc carnosum; identical to SEQ ID NO: 785
  source 1..50: mol_type = genomic DNA

SEQ ID NO: 5086 - protein, 484 aa, Leuconostoc carnosum
MKKKVALYVRVSTLEQAESGYSIGEQIDKLKKFADIKDWHVYEVYEDGGWSGSNTNRPALERLINDAKRHLFDTILVYKLDRLSRSQKDTLFLIEDIFKANNIDFVSLNENFDTSTAFGTAMIGILSVFAQLEREQIRERMKLGLVGRAKSGKAMGWHMTPFGYTYDKQSGNFIINNLTASIVREIFNDYLSGISITKLRDKLNESGHIGKDRNWSYRTLRQTLDNPTYTGVVKYDHKIYAGNHEPIIENDVFQAVQIELSKRQQLAYQKNNNPRPFQSKYMLSGIIKCGYCGSPMVSTLGNKRKDGTRLKKYQCVNRHVRKSSGVTIYNNNIKCDSGFYMMVDIENYVINTVSDLQASPESVQKLFNKNNNNIEKVNIDEIKKEISKLSSRLKKLSDLYMNDLLSLDELKEKTSELKSTRVLLENKISEDENNSDLEIKERIINNMNKKSIQKMSYQEQTNLVKSLINKVSVTREMIEISWNF

SEQ ID NO: 5087 - DNA, 50 bp, Leuconostoc carnosum; identical to SEQ ID NO: 5082
  source 1..50: mol_type = genomic DNA

SEQ ID NO: 5088 - DNA, 40 bp, Leuconostoc carnosum; identical to SEQ ID NO: 788
  source 1..40: mol_type = genomic DNA

SEQ ID NO: 5089 - DNA, 40 bp, Leuconostoc carnosum; identical to SEQ ID NO: 789
  source 1..40: mol_type = genomic DNA

SEQ ID NO: 5090 - DNA, 50 bp, Leuconostoc carnosum; identical to SEQ ID NO: 785
  source 1..50: mol_type = genomic DNA

SEQ ID NO: 5091 - protein, 587 aa, Bacteroides finegoldii
MRGAIYSRVSTEIQDYGKQTDELKDYAARNNIEVKYIFEEKVSGFKDDRTEFKKLEKLTKNDIDIILVWELSRLSRRSIFIQQTVKNFANKGICIFTKKEGLYTLNDDGTENKNAMFTIGVISMIAEQEIETLKERTISSKRRYILKEGHSYTPIAPYGYNYNLTTKQLTINEDEAEVVRRMYQLSIDGVSTNRISKILTSEGIKTKKGNPNWSLATVRDILHNPVYKGVPKYTMTIRNKKVVELVSAPPIVSEEVFEQSEKELTERRNRSKSEMVNKPLLRALIFCTDCGRRYICSSGKSIYACQTRFDNIRANYVADCHSAGISATNIEPIIWNLVERLFKSTIASSKAQERIEPYQEQLSKLSESKNNFEMQRDKINKDAAKLFDTLLLIRDTNPTVFTSKMEDFNKMSTEANDYQKEIDIIESKKQAIQRRIKAIEEIKDIDITDESEKYDILHKVIEAIKIYSVKTNQKVFTVLFASGLEYNVLYNVNKPKFRIEYAFVSDETITFNKKDKLLINKLYSSVRDILPDFSITAGNNDMFDNDVCGDYSFQEVWKLLEKYNKTEVLREWKPDYTKRAINRRNKK

SEQ ID NO: 5092 - DNA, 50 bp, Bacteroides finegoldii
  source 1..50: mol_type = genomic DNA
agtattatgtgtaagtgaaaataggataataaacatttgcacataatact

SEQ ID NO: 5093 - DNA, 40 bp, Bacteroides finegoldii
  source 1..40: mol_type = genomic DNA
cgttcattggagaggtacagataaaatgcacgcgaacaac

SEQ ID NO: 5094 - DNA, 40 bp, Bacteroides finegoldii
  source 1..40: mol_type = genomic DNA
cgttcattggagaggtacatttaaaatgcacgcgaacaac

SEQ ID NO: 5095 - DNA, 50 bp, Bacteroides finegoldii
  source 1..50: mol_type = genomic DNA
attattatgtatcatttaaaatattttatttaacataattatataatatt

SEQ ID NO: 5096 - protein, 504 aa, Serratia fonticola
MPQQNNGIAYSYVRFSSKRQELGDSLRRQTEMAEDYATKNGLKLSSKNFQDLGISAFREGKRASLVDMLAAIEEGQISAGSTIIIEALDRLSRRGIDATLETVKEILRKEVQVVSLSDGLLLTKSSLNDLQSVIRIAVAADLAHKESERKAVRLRETKGQQRQAALAGKPINKVLPFWLQRTTDGYELGDKAEIARQIVRLKQEGKGSNMIAKTLNKQGTAGIRASQWNHASITKMLKNPALYGAYQTGETTKERELVKLDLVEGYYPSLISKEDWLLLQSDQSKSKRGRRSADNPYSGLLRCECGGALVKRKHTVKGKLYVYHGCLNAKDGRCSQNISIKGLDTALTTILGRLEFKKKPTLDQSIHQERQLLEKRISDLNSKLQTLDNIPLSVIKSIGTMENRVKEITEQITKDAREQRGIDAVQNEKLSSITDGLELNLLLKRVLKNITVTRSGNGWVVKILHLSGHKQNFLMVNGEIKFMSDTIALQKLLAGFREEEETAK

SEQ ID NO: 5097 - DNA, 50 bp, Serratia fonticola
  source 1..50: mol_type = genomic DNA
taattttacatatgaaacaacattgtgatattgttacttaatagcaaagg

SEQ ID NO: 5098 - DNA, 40 bp, Serratia fonticola
  source 1..40: mol_type = genomic DNA
cttactgccgaactgcatagtgatgttgttagtgcttaac

SEQ ID NO: 5099 - DNA, 40 bp, Serratia fonticola
  source 1..40: mol_type = genomic DNA
cttactgccgaactgcatacagatgttgttagtgcttaac

SEQ ID NO: 5100 - DNA, 50 bp, Serratia fonticola
  source 1..50: mol_type = genomic DNA
tacatttagaagaaaaataagaatcagatattgttaaattctagtaaaga

SEQ ID NO: 5101 - protein, 503 aa, Serratia marcescens
MPQRNNGIAYSYVRFSSKRQELGDSLRRQTEMAEEYAIKNGLKLSSKNFQDLGISAFREGKRASLVDMLAAIEEGQITAGSTIIIEALDRLSRRGIDATLETVKEILRKDVQVVSLSDGLLLTKNSLNDLQSVIRIAVAADLAHKESERKALRLRETKGQQREAALSGKPINKILPFWLQRTEAGYAFSDKAGVARQIVQLKQEGKGSNMIAKTLNRLGIAGVRTAQWNHASITKMLKNPALYGAYQTGETTKDRELIKLELVEAYYPALINKEEWLLLQSDQSKSKRGRRSANNPYSGLLRCECGGALVKRQHTVKGKLYVYHGCLNAKDGRCKQNISIKGLDGALTTILGRLEFKKKQTLSQSIHQERQQLEARINDLNSKLQVLDDIPLSVIKSIGAMESRLKEITDQIAKDEREQRGIEAVKSEKLSSITDGLELNLLLKRVLKSITVFRSGNGWAVKVLHLSGHKQNFLMVDGEIKFLSDTIALQNLLAGFREATENS

SEQ ID NO: 5102 - DNA, 50 bp, Serratia marcescens
  source 1..50: mol_type = genomic DNA
tatttttacatatgaaacaatactgtgatattgttacttaatagcaaagg

SEQ ID NO: 5103 - DNA, 40 bp, Serratia marcescens
  source 1..40: mol_type = genomic DNA
cttgctgccgaactgcatggtgatgttgttggtgcttaac

SEQ ID NO: 5104 - DNA, 40 bp, Serratia marcescens
  source 1..40: mol_type = genomic DNA
cttgctgccgaactgcatgcagatgttgttggtgcttaac

SEQ ID NO: 5105 - DNA, 50 bp, Serratia marcescens; identical to SEQ ID NO: 5100
  source 1..50: mol_type = genomic DNA

SEQ ID NO: 5106 - protein, 503 aa, Serratia plymuthica
MPQRNNGIAYSYVRFSSKRQELGDSLRRQTEMAEEYAIKNGLKLSSKNFQDLGISAFREGKRASLVDMLAAIEEGQITAGSTIIIEALDRLSRRGIDATLDTVKEILRKDVQVVSLSDGLLLTKNSLNDLQSVIRIAVAADLAHKESERKAIRLRETKGQQRQAALSGKPINKILPFWLQRTETGYAFSDKAGVARQIVQLKQEGKGSNMIAKALNKLGIAGVRTAQWNHASITKMLKNPALYGAYQTGETTKDRELIKLELVEAYYPALISKEEWLLLQSDQSKSKRGRRSADNPYSGLLRCECGGALVKRKHTVKEKLYVYHGCLNAKDGRCTQNISIKGLDGALTTILGRLEFKKRQTLDQSIHQERQQLEARINDLNSKLQVLDDIPLSVIKSIGTMESRLKEITEQIAKDEREQRGIEAVKSEKLSSITDGLELNLLLKRVLKSITVIRSGNGWAVKVLHLSGHKQNFLMVDGEIKFLSDTIALQNLLAGFREATENN

SEQ ID NO: 5107 - DNA, 50 bp, Serratia plymuthica
  source 1..50: mol_type = genomic DNA
tatttttacatatgaaacaacactgtgatattgttacttaatagcaaagg

SEQ ID NO: 5108 - DNA, 40 bp, Serratia plymuthica
  source 1..40: mol_type = genomic DNA
cttactgccaaactgcatagtgatgttgttagtgcttaac

SEQ ID NO: 5109 - DNA, 40 bp, Serratia plymuthica
  source 1..40: mol_type = genomic DNA
cttactgccaaactgcatacagatgttgttagtgcttaac

SEQ ID NO: 5110 - DNA, 50 bp, Serratia plymuthica; identical to SEQ ID NO: 5100
  source 1..50: mol_type = genomic DNA

SEQ ID NO: 5111 - protein, 462 aa, Bacillus cereus
MKCAIYRRVSTDMQAEKGSSLEAQKERLNAFAVSQGWEAANDYVDEGYSAKDMNRPALQRMLSDMRDKQFDIILVYKLDRLCRSVRDLNDMIKEFEICNVKFKSSTESLDTTTATGRMMINIIGTLAQWEREQTAERVSMIMNERSKKGLWNGGPMPYGYILKNDKVSIIEGEAKLVNFCFNKAITHGAQAIARTLNEQGYRTRDGHKWIMRSILRMLHNPLYKGYVTYESDGKVQLTKAKIKGFEPIISEDLFDKVQYIIKKRTISPTRVKSDSIFPFSGILVCPKCNGKMSGTTITAKGVQYKYYRCSKVVHGICDQQLINEKIIDSEFSKTLIMISENLKIAPVSNDMDKNSVEKQLKAIEGQQARTKELYIEGELKRHEYNDKIRILNDKKETLILSLEHANNKISQEEILHIINEMKKSWRVFPDEAKAKIVRGIFDEIHFKQESKRELRITDYKFI

SEQ ID NO: 5112 - DNA, 50 bp, Bacillus cereus
  source 1..50: mol_type = genomic DNA
tttttgcttaaagagacatttattccttaacatgtcttattaagctaatt

SEQ ID NO: 5113 - DNA, 40 bp, Bacillus cereus
  source 1..40: mol_type = genomic DNA
attttgccaaccagttaatccccctccagccgtataaaat

SEQ ID NO: 5114 - DNA, 40 bp, Bacillus cereus
  source 1..40: mol_type = genomic DNA
attttgccaaccagttaatttccctccagccgtataaaat

SEQ ID NO: 5115 - DNA, 50 bp, Bacillus cereus
  source 1..50: mol_type = genomic DNA
tttttccttaaagtggcatttattttttaacttattaaaataacttattt

SEQ ID NO: 5116 - protein, 452 aa, Listeria monocytogenes
MKAAIYIRVSTQEQIENYSIQAQTEKLTALCRSKDWDVYDIFIDGGYSGSNMNRPALNEMLSKLHEIDAVVVYRLDRLSRSQRDTITLIEEYFLKNNVEFVSLSETLDTSSPFGRAMIGILSVFAQLERETIRDRMVMGKIKRIEAGLPLTTAKGRTFGYDVIDTKLYINEEEAKQLQMIYDIFEEEKSITTLQKRLKKLGFKVKSYSSYNNWLTNDLYCGYVSYADKVHTKGVHEPIISEEQFYRVQEIFSRMGKNPNMNRDSASLLNNLVVCGKCGLGYVHRRKDTVSRGKKYHYRYYSCKTYKHTHELEKCGNKIWRADKLEELIIDRVNNYSFASRNVDKEDELDSLNEKLKTEHAKKKRLFDLYISGSYEVSELDGMMADIDAQINYYEAQIEANEELKKNKKIQENLADLATVDFDSLEFREKQLYLKSLINKIYIDGEQVTIEWL

SEQ ID NO: 5117 - DNA, 50 bp, Listeria monocytogenes
  source 1..50: mol_type = genomic DNA
tttagtacctcatttcctctcgttggaagaagaagaaacgagataccaaa

SEQ ID NO: 5118 - DNA, 40 bp, Listeria monocytogenes
  source 1..40: mol_type = genomic DNA
tttcggatcaagctatgagggacgcaaagagggaaccaaa

SEQ ID NO: 5119 - DNA, 40 bp, Listeria monocytogenes
  source 1..40: mol_type = genomic DNA
tttcggatcaagctatgagctacgcaaagagggaaccaaa

SEQ ID NO: 5120 - DNA, 50 bp, Listeria monocytogenes
  source 1..50: mol_type = genomic DNA
ttcactaacaattttcttctttttctaagaataagaaattatataccaaa

SEQ ID NO: 5121 - protein, 480 aa, Enterococcus casseliflavus
MKFAIYVRVSTLEQAEEGYSIEEQIDKLIKYCEVKNWDIFKVYKDGGFSGSTTDRPGLSSLITDSKRKKFQGVLVYKLDRLSRSQKDTLYLIEDIFTANDISFVSLNENFDTSSAFGKAMIGILAVFAQLEREQIKERMVMGKVGRAKSGKAMSWSKVPFGYIYENDTYVAHPIQAPIVKQIFDDYMSGISITKLKEKLNDEGHIGKEISWSYRTIRQTLANPIYAGINRYNGELFEGNHEGIITKDYFEKVQSELKVRQVAAYEKNNNPRPFQSKYMLSGIIRCGLCGASLSVGMRAKRKDGSRHRYYRCYSKSKKKNLTMTKDPNGCSSPNYSMDELEKHILSQIEKIRLNPELIDVLSANDSVVDLSSYNKRIDELDLSLEKIVNLFIDDAIPKDILEARMEKIKQEKDSLENKIDSLKIKRPILAPIDAKDILSKLTDNIWNLSYEDQKSIVMELISKILVYPDKLEIHWKFANNQ

SEQ ID NO: 5122 - DNA, 50 bp, Enterococcus casseliflavus
  source 1..50: mol_type = genomic DNA
tcagtaaatttaatatacttcatttcaatgaaagatacctaatatactta

SEQ ID NO: 5123 - DNA, 40 bp, Enterococcus casseliflavus
  source 1..40: mol_type = genomic DNA
taataaaacgactagcatttcaaccaatgtaaagcctttt

SEQ ID NO: 5124 - DNA, 40 bp, Enterococcus casseliflavus
  source 1..40: mol_type = genomic DNA
taataaaacgactagcattggaaccaatgtaaagcctttt

SEQ ID NO: 5125 - DNA, 50 bp, Enterococcus casseliflavus
  source 1..50: mol_type = genomic DNA
tcagtaaatatatcatattgaagtggaaagatagctatagaataaactta

SEQ ID NO: 5126 - protein, 509 aa, Dehalococcoides mccartyi
MENCDKRVAIYARVSSDKQDVDLSISAQLKAIREYAKNNGYEVVREFVDEAETGRTTARPAFREMISLARHPQKPFDVILVWKYSRFARSREDSIVYKAMLRKSDVHVISINEPFDDTPTGRLLEAIIESLDEFYSDNLGEEVTRGMRESAARGFYLSSKPPYGYQKIRFKDGEKERTKLEIDPTQASIVSSMFTTVLKGKGLTEIAKDLNKKGIASPRGKGWGKTAVRTILSNEAYAGTFVWGRNSKRGLTPIRVENACPAIVSRKVFDNAQELIRERAPKITHPKRTGSRFLLSGFTFCGHCGKAMIGQDAKSGKFSYYVCGTLNKKGAGSCPSHYFNSRIFEETVVKVIRENILTEEHLKRLVDMVNQEMDDSSRVYQDELDTVLEEMAETNRRLERLYDAVETGKIPLADLAPRIRDLRQRIEKLQERKVQITNQLSDRKVELASPEIVKSYVKDMRQVLEESELTGKRAFLKGFIKKIEVIDRQGIIHYLLPINGILEERIGVL

SEQ ID NO: 5127 - DNA, 50 bp, Dehalococcoides mccartyi
  source 1..50: mol_type = genomic DNA
gggatattggaagaaaggataggagttctgctcatggaacagaatggtgg

SEQ ID NO: 5128 - DNA, 40 bp, Dehalococcoides mccartyi
  source 1..40: mol_type = genomic DNA
aaacggggtggagaaacaagttctgcctatcgtacagtat

SEQ ID NO: 5129 - DNA, 40 bp, Dehalococcoides mccartyi; identical to SEQ ID NO: 5128
  source 1..40: mol_type = genomic DNA

SEQ ID NO: 5130 - DNA, 50 bp, Dehalococcoides mccartyi
  source 1..50: mol_type = genomic DNA
ggtagattgggaacaagcaaaggagttggggtcatggcagggaatagtgg

SEQ ID NO: 5131 - protein, 460 aa, Ligilactobacillus agilis
MIRVATYTRVSTLEQAEEGYSINEQQDKLEKYCELKDWTITQRYSDPGFSGSNIKRPGISELVAAAKQGDFDLVLVYKLDRLSRSQKDTLYLIEDVFQANQVEFVSLSENFDTSTPFGKAMIGILSVFAQLEREQIKERMTMGKIGRAKSGKAMGWSKIPFGYNLVDDVYEVDEFQATVVKRIFSDYLSGESPATIAKVLNGEGHLGKGKPWSWKTVKDVLMNVIYTGYISFKGELYPGMHKPIIDMETYKKTQTQIEIRRVNADNPRPFRAKYMLSGLLKCHYCGATLRIAVSVNQRTKARSYRYNCPSSHPRRASTYKTKAVCPFKLVYKDEMEKRVIAEIEKLPKNFKQEKESVVDLDAIKKQIKLIKAKQSKLMDLYLVDGIDMEELNRRNGEFNKQIKGLEKELSSTPSKLDVSEMLNRAKNISELTYDEQKKLVKLLINEIEVANNSIKIHWRF

SEQ ID NO: 5132 - DNA, 50 bp, Ligilactobacillus agilis
  source 1..50: mol_type = genomic DNA
taaataactttagaaactacgatttcaatgatagtttctaaaattactct

SEQ ID NO: 5133 - DNA, 40 bp, Ligilactobacillus agilis
  source 1..40: mol_type = genomic DNA
aaatagtaccactgccatttcaatcagggtaaaagctgat

SEQ ID NO: 5134 - DNA, 40 bp, Ligilactobacillus agilis
  source 1..40: mol_type = genomic DNA
aaatagtaccactgccatttgaatcagggtaaaagctgat

SEQ ID NO: 5135 - DNA, 50 bp, Ligilactobacillus agilis
  source 1..50: mol_type = genomic DNA
ctagtaagtacaaaaactaagatttgaatgaaaggtcccaaatttactct

SEQ ID NO: 5136 - protein, 604 aa, Butyricimonas sp
MKKGALLLRVSTEQQEFESQKNELIPIAEGLGYKISDDLIFGQFITGKDDYRGRERESITALKEACRSGKVDAIFIWEVSRLSRSSIAGRMFINEFNEMKIPIYFKDRNIWTLDPETLEEDNTTKMIIGLFFDFAEAELKTMRNRMMRGKRRNASDGLATGGYLNYGYEKELETGKIQICEEEAIFVKDLFQKYSTGQYSLGDLVRYANSTPNLPRYKKNSKRGEFTTNTGRLKSISTVHWNKAVIRGMLKNLIYIGKSHFQDITKSVPAIVDKNLFDQVQERLAKNPKTKEKSRKHTHLLQKLMICGFCNNMFYGHYSYKGNHYICSSFNTTHLNCGNSSLGYEKVESIIWDFVKKHTYIFNKIEEKEKEEFKKELMTQKEELIKDRNRTEQEINKQAKAIDNLLDMVANGVFTMQDIQRKKKSIDQDIEKYNNDLAKIESSLTLIEIKLNKIDNQLLTEDDILELEQSRQKMKDIINLAIENIKVYRINRSNVVLQIALVNKVVNILYMYRARKHFRYYYIDDDVATFLPHNEIPEFVKHKIVDVCFEVTSNNNSVFGEEIFGNYSYSQMCEILERYNQYEDYKPFEKMIVYTKKDKSIPSF

SEQ ID NO: 5137 - DNA, 50 bp, Butyricimonas sp
  source 1..50: mol_type = genomic DNA
tcatacaaattagtaattcctattgcaatagaaattattattttgtatgt

SEQ ID NO: 5138 - DNA, 40 bp, Butyricimonas sp
  source 1..40: mol_type = genomic DNA
agcggcgagtatgccaatagccaacggtaagtcgaaagat

SEQ ID NO: 5139 - DNA, 40 bp, Butyricimonas sp
  source 1..40: mol_type = genomic DNA
agcggcgagtatgccaatatacaacggtaagtcgaaagat

SEQ ID NO: 5140 - DNA, 50 bp, Butyricimonas sp
  source 1..50: mol_type = genomic DNA
tcaaccaaattttaatttattatttaaataataattgagcattggtatgt

SEQ ID NO: 5141 - protein, 604 aa, Butyricimonas synergistica; identical to SEQ ID NO: 5136

SEQ ID NO: 5142 - DNA, 50 bp, Butyricimonas synergistica
  source 1..50: mol_type = genomic DNA
tcatacaaattagtaattcctattgcaatagaaattactattttgtatgt

SEQ ID NO: 5143 - DNA, 40 bp, Butyricimonas synergistica
  source 1..40: mol_type = genomic DNA
accctacagaaatcctattgcaatagggtttctgtagggt

SEQ ID NO: 5144 - DNA, 40 bp, Butyricimonas synergistica
  source 1..40: mol_type = genomic DNA
accctacagaaatcctatttaaatagggtttctgtagggt

SEQ ID NO: 5145 - DNA, 50 bp, Butyricimonas synergistica; identical to SEQ ID NO: 5140
  source 1..50: mol_type = genomic DNA

SEQ ID NO: 5146 - protein, 482 aa, Bacillus thuringiensis
MGTIKDVAIYLRKSRKEEGLTDAEALSNHREILTGLADRNNWKYTIYTEVASSMDAENRPELQTLLKNLYTFNALLVMDIDRLSRNRYDSAKIMQSLKLNDIKIVTSDGKIIDLNDEQEEVMTGMQEVFANYEYNQIKKRLHRGKVSSAKQGNWVSGRVPLGYYYDRTSKKLVRQEEEARTVELIFSYYTQEMLSLREIAIKLNQTGLRGKRGQPFNAKSVQRILVNDVYQGTTSQHGFTTENTHEPLISKKMFSKAQELNSQRSIKGSRAKEQKHSLSGIVKCGFCGYSLAIQVRQTAKGEARRVKGCGRRDLVSGETCRNKTTSYDLVLNATIDSLSPHRQEILKKMEELIQFNDKFALDKNNEKEHLEDALNKADKKLMKIARMVLEDEGNEQIFNQMKKEILGEKEHIIKRLEDLSHLTVTDQLEDYERIVDIIDKLLHQEKKLTEKDLNSLLLRVIMRVDLFNKEGHEKNIKIIFKD

SEQ ID NO: 5147 - DNA, 50 bp, Bacillus thuringiensis
  source 1..50: mol_type = genomic DNA
ttgtatatttaaaagacttatgacttatatattgacttctaagtatacgt

SEQ ID NO: 5148 - DNA, 40 bp, Bacillus thuringiensis
  source 1..40: mol_type = genomic DNA
tggaaatgtatcttatgacttatataaagatacagaaaaa

SEQ ID NO: 5149 - DNA, 40 bp, Bacillus thuringiensis
  source 1..40: mol_type = genomic DNA
tggaaatgtatcttatgacaaatataaagatacagaaaaa

SEQ ID NO: 5150 - DNA, 50 bp, Bacillus thuringiensis
  source 1..50: mol_type = genomic DNA
ttgtatatttatatgccttttgagaaatatatttatatatatgtataatt

SEQ ID NO: 5151 - protein, 529 aa, Parvibaculum sp
MIPAAIYARFSTELQSERSIADQIALCEDFAAREGLEVVARYDDAARSGGSMLGRDGLTALMADARGGRFAVVIVEALDRLSRDMEDLAGLHKRLTFAGVEIRAVHEGRVDTMLVGLRGLIGQLYREDNAHKIRRGMAGRVGDGLFAGGLTYGYRPVPGEKGRRVIVEEEAAIVRRVFAAFAAGRSPRDIAARLNAEGVKPPRGSRWNASTINGSASRGNGILRNPVYAGRIVWNRVRMIRDPDTGRRLSRVNPRAAWREAEAPELAIVEPALFDRVQEMKAGRAARRPERQRRPKHILSGLLRCAGCGGGLSVYGADRSGRRRLRCTRQAESATCPAPATFYLDSVERAVLDRLGAELRHPEAIAEFVREYHAERRRLAAGAGARRASLERAEAQAAREVARLVEAIAQGQGDPALLGPRATEAETRRKALAAEVAALAEAAPVVTLHPAVLERYAAQLARLDRALGRALEAGEAEAAEALRELVESVTVAPDPARPGGLYIAVTGRLNALLGAGAFPGGVRGSMVAE

SEQ ID NO: 5152 - DNA, 50 bp, Parvibaculum sp
  source 1..50: mol_type = genomic DNA
tgtgaggggatcgatggtagcggaggcccgctacggccgattcccacggt

SEQ ID NO: 5153 - DNA, 40 bp, Parvibaculum sp
  source 1..40: mol_type = genomic DNA
aaagagaaatggtagcggaggacggatttgaaccgccgac

SEQ ID NO: 5154 - DNA, 40 bp, Parvibaculum sp
  source 1..40: mol_type = genomic DNA
aaagagaaatggtagcggattacggatttgaaccgccgac

SEQ ID NO: 5155 - DNA, 50 bp, Parvibaculum sp
  source 1..50: mol_type = genomic DNA
tgtgaggggcatcatggtggaggattccccctgtgggctggagccagggt

SEQ ID NO: 5156 - protein, 481 aa, Streptococcus equi
MFTTNKVAIYVRVSTTNQAEEGYSIEEQKDKLSSYCNIKDWSIYNIYTDGGFSGSNTARPALENLIKDAKKKKFDTVLVYKLDRLSRSQKDTLYLIEEVFIKNGIEFLSLQENFDTSTPFGKAMIGLLAVFAQLEREQIKERMQLGKLGRAKSGKPMMWSKPAYGYIYHKESGELIVNELEAIVVREIFKSYLEGMSITKLRDKVNEKYPKTPAWHYRIIRGILANPVYCGYNQYKGQVFPGNHEPIISEEVFNKTQEELKIRQQTAAEKFNPRPFQAKYMLSGIAQCGYCHAPLTIIMGMIRKDGTRFIRYECKQRYPRKTKGVTVYNNNEKCHSGAYEKSDIEEYVLKEISKLQNDKDYLDEIFSDSNTETIDRESYQKQIEELSKKLSKLNDLYIDDRITLEDLKKKSSEFTSMRTLLETELENDPALKKQKRKDDMRKILSAEDIFLMDYEGQKIMVRGLINKVQVTANDVFIKWKI

SEQ ID NO: 5157 - DNA, 50 bp, Streptococcus equi
  source 1..50: mol_type = genomic DNA
taaagaattttactatcctgtatttcaataaaagatactaaaattctttg

SEQ ID NO: 5158 - DNA, 40 bp, Streptococcus equi
  source 1..40: mol_type = genomic DNA
taacaaaaccagaagcatttccagtaaagtgaaggcctga

SEQ ID NO: 5159 - DNA, 40 bp, Streptococcus equi
  source 1..40: mol_type = genomic DNA
taacaaaaccagaagcattctcagtaaagtgaaggcctga

SEQ ID NO: 5160 - DNA, 50 bp, Streptococcus equi
  source 1..50: mol_type = genomic DNA
tcagaatttgcaaaatgctgtatactattaaaagatccttaacttctttg

SEQ ID NO: 5161 - protein, 547 aa, Vibrio parahaemolyticus; identical to SEQ ID NO: 4841

SEQ ID NO: 5162 - DNA, 50 bp, Vibrio parahaemolyticus
  source 1..50: mol_type = genomic DNA
ttatgtctttaagaaaacctaactaaggtattgtatcggttatgacataa

SEQ ID NO: 5163 - DNA, 40 bp, Vibrio parahaemolyticus; identical to SEQ ID NO: 4863
  source 1..40: mol_type = genomic DNA

SEQ ID NO: 5164 - DNA, 40 bp, Vibrio parahaemolyticus
  source 1..40: mol_type = genomic DNA
atttggttggcatgtggtcttggttctctacagaacatag

SEQ ID NO: 5165 - DNA, 50 bp, Vibrio parahaemolyticus
  source 1..50: mol_type = genomic DNA
ttgtttctttcatgaaacctaactttggtatggcatctaaatacacatca

SEQ ID NO: 5166 - protein, 615 aa, Leclercia adecarboxylata
MKKCFMYYRVSSDKQLGGTGIERQEENLRAYVKRLNLCNQMDVPLPIELSDPGVSAFKGLNMSEGNLGKWMKEVATGIHDGSALVIESIDRFSRQNPFTVMKYLSTLDEHDISIHDVSLGLVINRSNSSMLPIVAMSAQRAYEESKYKSTRISDGWQRKRITAFEKGTVVTNKRPLWIDVVDDYYVLNEKAEIVREIFRLYKTGIGCPTIAKILQAKGDEWRLASPKNRGGWRAESVYKVLTNKRVTGVIFITQIVRDFDKYDTDAVQKKYERNVYPEVISMEEFELVQKMLESRNPKNNQKTIGRVSQKNEDGAPLIKSNIFTSVFRCGKCHEGMYHNVVTRERFAKRVGETVTSEYRYIRCIAERDKLCDNKSLRYEVLEQFIIEHIKNLNFTQIIKSGELKPEIELLQMKIKEEQEHISDYEQGIEKLKSKGKKVPFDALVELEESQTNLKAMQERLNGIKDVSIDTEVLTEIDISKVFDVENIELRSRIEYEISKVIDRIELVTESNHYICTLYYKDVDVLKHVLIIQSGKKPKLASSVSISREVDETHYKTPSFELIVKDNEFTLTVLQNVIVFTDYALLLNYVDTLPGSKVLGVWMREHFNEVLANSVL

SEQ ID NO: 5167 - DNA, 50 bp, Leclercia adecarboxylata
  source 1..50: mol_type = genomic DNA
tgtttgtataatattaaagtcattcaaacaatatgacagctatacaaaca

SEQ ID NO: 5168 - DNA, 40 bp, Leclercia adecarboxylata
  source 1..40: mol_type = genomic DNA
ttttagcttgataatcatacaaataggtgccattacaaca

SEQ ID NO: 5169 - DNA, 40 bp, Leclercia adecarboxylata
  source 1..40: mol_type = genomic DNA
ttttagcttgataatcataccaataggtgccattacaaca

SEQ ID NO: 5170 - DNA, 50 bp, Leclercia adecarboxylata
  source 1..50: mol_type = genomic DNA
tttttctataaatctaaaggtattccaaaaataaaagttttatacacaca

SEQ ID NO: 5171 - protein, 619 aa, Bifidobacterium boum
MDAKEDNAMTQYNKITALYSRLSVGDEDRDGGESNSIVNQKAFLERYARQEKLTNIRHYIDDDESGRFFDRSAYVRMMDDVESGKIGIVVMKDMTRWGRDYLQVGNAMEIFRRNRVRFIAVNNGIDSEKPDTLEFAPFINIMSEWYAKDISKKVKTGIKTKGMSGKPIATEAPYGYMKDPDNKDYWIIDEEAAAVVRLIFSLFLEGKNRNQIAVYLENEEVLTPTFYLKYHDRGTSKSRNLNEENRYNWNKATLTRILTRQEYCGDVVNFKTAKHYRDKRNHYVDKNEWQIFENVHEPIIDRNTFENVQRILENAPVRRPNGDGEIHPLSGLLFCKDCGAKMHIRIDYRYSGKRHVAFCSEYRKGKSKNPKCHSPHNIDADLLLQTVADVLRKIADYSISNRADFEALVKKSLAIQQTDKVKKQQKRIPQITARLEQIDTVLNKLYEDIALGRIEQDRYEQMSQKYSEEYYTLKTELAEIKEQLSEFENADGRAQRFMKLTERYAAFTELTPAILNEFISKILVHERDVKRSKYAVHRIEVYFNHIGRFENELTAQLEPTEQECERMRAEIEEAKREKSRAYHRAYYKEYRKKNLERCREYERMKAREYRAKKKLQAAT

SEQ ID NO: 5172 - DNA, 50 bp, Bifidobacterium boum
  source 1..50: mol_type = genomic DNA
aaaagcacttgacaaaacgcttcatggggtgcaaactatcaactgtaagg

SEQ ID NO: 5173 - DNA, 40 bp, Bifidobacterium boum
  source 1..40: mol_type = genomic DNA
ccggacaagcgcggcccggtgggcggcgtggccgtacgct

SEQ ID NO: 5174 - DNA, 40 bp, Bifidobacterium boum
  source 1..40: mol_type = genomic DNA
ccggacaagcgcggcccggggggcggcgtggccgtacgct

SEQ ID NO: 5175 - DNA, 50 bp, Bifidobacterium boum
  source 1..50: mol_type = genomic DNA
ttaagcacagctataaacccttcaggaggtgcaatcaaataactttaaag

SEQ ID NO: 5176 - protein, 550 aa, Vibrio owensii
MTTPLAYSYVRFSSLEQAKGDSFRRQTEAAQKYCYEQNLELADFTLRDLGLSAYHGNHVKEGALGEFINAVQQGQIPKGSYLLVESMDRLSRERISIALQRFMHLLELGINIVTLQDNRVFTVESLDNIGDLMMSLVLMMRAHEESETKSKRLREAHKEKRRLARENLKPTRYNNPHWIKLTSNGYELIPERVAIIKRIFQMTINGMGATSIHRRFNEEGLEPWGRSKTGWHSTYIKKILRARTVLGEYQPHRNEGGKRVEDGDPILGFYPQAIDVSTFKKAQLAIASRTNKTSGIRKSLINNLFTGFVKCKNCGASMNYVDKGRGSKGGQYLVCSRAKKKTHYDGIKCQYASMRYVVVEAAILNVAATLDLKLHSSPNQEELSRARERFDSIYREKVAVEESIARLVDYLDSSSGSKALLTKLDQREAQLKELEKQSSILEKQVDQLELGPASSNIWKELRITLATLRKDAADKSNVPLRAKINSQLSQCIDSIQFDAINKLVTITVDESREVLLKFDKRQNSYVVKPSWDMREFLPATYIVKETLRKR

SEQ ID NO: 5177 - DNA, 50 bp, Vibrio owensii
  source 1..50: mol_type = genomic DNA
tggggtgataccagttacagtcagttattagagtgtctggaataacccca

SEQ ID NO: 5178 - DNA, 40 bp, Vibrio owensii
  source 1..40: mol_type = genomic DNA
agcaggcaatcacaatctattgtttcttggcccacctggt

SEQ ID NO: 5179 - DNA, 40 bp, Vibrio owensii; identical to SEQ ID NO: 5178
  source 1..40: mol_type = genomic DNA

SEQ ID NO: 5180 - DNA, 50 bp, Vibrio owensii
  source 1..50: mol_type = genomic DNA
gggggcagtgttactcacagtcctttcttagagtgtatgacataacccca

SEQ ID NO: 5181 - protein, 550 aa, Vibrio alginolyticus; identical to SEQ ID NO: 5176

SEQ ID NO: 5182 - DNA, 50 bp, Vibrio alginolyticus
  source 1..50: mol_type = genomic DNA
tggggtgataccagttacagtcagctattagagtgtctggaataacccca

SEQ ID NO: 5183 - DNA, 40 bp, Vibrio alginolyticus
  source 1..40: mol_type = genomic DNA
cgctggaaaccacaacttacttttccttggcccgccaggt

SEQ ID NO: 5184 - DNA, 40 bp, Vibrio alginolyticus
  source 1..40: mol_type = genomic DNA
cgctggaaaccacaacttatttttccttggcccgccaggt

SEQ ID NO: 5185 - DNA, 50 bp, Vibrio alginolyticus; identical to SEQ ID NO: 5180
  source 1..50: mol_type = genomic DNA

SEQ ID NO: 5186 - protein, 507 aa, Escherichia coli
MKRVISYIRFSSERQAKGDSLRRQSKMVTDWLKAHPEYYLDESLTFRDLGVSGFTGKHLKGGLGDFLTAIEKGLVKAGDTLLIESLDRLSRQDVDQASELLRNILRSGVDVVTLSDGEHYTRESLKDPLALIKSILIMQRAHEESLRKAERIQAAWNRKKELISEGIKISKRCPAWLKLNDDRKSFSVIPDKVETVKRCFQLRLEGKSIWEIVRTLNAEGHRSMNQYKPGKFGQTSVQDLLKNRSVIGYFTPKGCGEIAGYYPSVIDETTFYKVQQLSYSRYGRKPASDKPLSVNLFKGVIRCSECGHALIITGFSDTRSGIYRCPLRNENRCSAKGLSRKQTDGTLLTLLSRLDRFDSDMTNTIDTLKLHREHISSNIEKLVQLSLEIEDLNAITNKLKQLKNELSQVDADIEKETQRLKSIDTGSLSDCDLSTKAGRIEAQLIIKSAVKEVVLNTAKRRCKVTFHNGRAITLPITENPSKDVTEAIQSLSEVTERGLIDVDEVII

SEQ ID NO: 5187 - DNA, 50 bp, Escherichia coli
  source 1..50: mol_type = genomic DNA
aggtgtatttagacattgctaatcttcatcagacacgtttaaatacacca

SEQ ID NO: 5188 - DNA, 40 bp, Escherichia coli
  source 1..40: mol_type = genomic DNA
cggcgttaatcgggtgattttagacagccgcccggttcat

SEQ ID NO: 5189 - DNA, 40 bp, Escherichia coli
  source 1..40: mol_type = genomic DNA
cggcgttaatcgggtgattagagacagccgcccggttcat

SEQ ID NO: 5190 - DNA, 50 bp, Escherichia coli
  source 1..50: mol_type = genomic DNA
cggagcattaaacaatagctgatcagcatcagacacaaataaatggtcca

SEQ ID NO: 5191 - protein, 507 aa, Escherichia coli
MKRVISYIRFSSERQAKGDSLRRQSKMVNDWLKAHPEYYLDESLTFRDLGVSGFTGKHLKGGLGDFLTAIEKGLVKAGDTLLIESLDRLSRQDVDQASELLRNILRSGVDVVTLSDGEHYTRESLKDPLALIKSILIMQRSHEESLRKSERIQAAWNRKKELISEGIKISKRCPAWLKLNDDRKSFSVIPEKVETVKRCFQLRLEGKSIWEIVRTLNDEGHQTLNQYKAGSFGQTSVQDLLKNRSVIGYFTPKGCEEIADYYPAIIDETTFYKVQQLSYARYGRKPASDKPMAVNLFKGVIRCSECGHALIITGFSDTRNGIYRCPLRNENRCSAKGLSRKQTDGTLLTLLSRLDRFDSDTTNTIDTLKLHREHISSNIEKLVQLSLEIEDLSAITSKLKQLKNELSQVDADIEKETQRLKSIDVGCLSDCDLTTKAGRIEAQLIIKSAVKEVVLNTAKRRCKVTFHNGKVIDLPITENPSDNVTEAIQSLSEVTERGLIDVDEVII

SEQ ID NO: 5192 - DNA, 50 bp, Escherichia coli
  source 1..50: mol_type = genomic DNA
aggtgcatttagaccttgctaatcttcatcagacacgtttaaatacacca

SEQ ID NO: 5193 - DNA, 40 bp, Escherichia coli; identical to SEQ ID NO: 5188
  source 1..40: mol_type = genomic DNA

SEQ ID NO: 5194 - DNA, 40 bp, Escherichia coli; identical to SEQ ID NO: 5189
  source 1..40: mol_type = genomic DNA

SEQ ID NO: 5195 - DNA, 50 bp, Escherichia coli; identical to SEQ ID NO: 5190
  source 1..50: mol_type = genomic DNA

SEQ ID NO: 5196 - protein, 507 aa, Escherichia coli; identical to SEQ ID NO: 5191

SEQ ID NO: 5197 - DNA, 50 bp, Escherichia coli; identical to SEQ ID NO: 5192
  source 1..50: mol_type = genomic DNA

SEQ ID NO: 5198 - DNA, 40 bp, Escherichia coli
  source 1..40: mol_type = genomic DNA
cggcgttaatcaggtgattttagacagccgcccggttcat

SEQ ID NO: 5199 - DNA, 40 bp, Escherichia coli
  source 1..40: mol_type = genomic DNA
cggcgttaatcaggtgattagagacagccgcccggttcat

SEQ ID NO: 5200 - DNA, 50 bp, Escherichia coli; identical to SEQ ID NO: 5190
  source 1..50: mol_type = genomic DNA

SEQ ID NO: 5201 - protein, 507 aa, Escherichia coli
MKRVISYIRFSSERQAKGDSLRRQSKMVNDWLKAHPEYYLDQDLSFRDLGVSGFTGKHLKGGLGDFLTAIEKGLVKAGDTLLIESLDRLSRQDVDQASELLRNILRSGVDVVTLSDGEHYTRESLKDPLALIKSILIMQRSHEESLRKSERIQAAWNRKKELISEGIKISKRCPAWLKLNDDRKSFSVIPEKVETVKRCFQLRLEGKSIWEIVRTLNDEGHQTLNQYKAGSFGQTSVQDLLKNRSVIGYFTPKGCEEIAGYYPAIIDETTFYKVQQLSYSRYGRKPASDKPMAVNLFKGVIRCSECGHALIITGFSDTRSGIYRCPLRNENRCSAKGLSRKQTDGTLLTLLSRLDRFDSDMTNTIDTLKLHREHISSNIEKLVQLSLEIEDLSAITIKLKQLKGELSQVDADIEKETQRLKSIDVGCLSDCDLTTKAGRIEAQLIIKSAVKEVVLNTAKRRCKVSFHNGKVIDLPITENPSDNVTEAIQSLSEVTERGLIDVDEVII

SEQ ID NO: 5202 - DNA, 50 bp, Escherichia coli
  source 1..50: mol_type = genomic DNA
aggagtatttagaccttgctaatcttcatcagacacgtttaaatacacca

SEQ ID NO: 5203 - DNA, 40 bp, Escherichia coli; identical to SEQ ID NO: 5188
  source 1..40: mol_type = genomic DNA

SEQ ID NO: 5204 - DNA, 40 bp, Escherichia coli; identical to SEQ ID NO: 5189
  source 1..40: mol_type = genomic DNA

SEQ ID NO: 5205 - DNA, 50 bp, Escherichia coli; identical to SEQ ID NO: 5190
  source 1..50: mol_type = genomic DNA

SEQ ID NO: 5206 - protein, 446 aa, Clostridium estertheticum
MEYNIRYVAIYLRKSRGEEEDLQKHQIVLKEICSKNDWKYVEFKEIGTSDSVEMRPVMQKLLSDIEEDIFDAVLVVDYDRLSRGDMGQQDRIKKIFRKSNTLIITPNKVYDLSNDSDDMYTDFAGLIARQEYKMITKRLRQGKKVGSMIGNWTNGSPPFPYVYEKYKDKFNEKGLVIDDEKLKIYKYIVEKALQGVPPYEIAWELNRQSIPSPRGKTWSNVTIYRLLKDETHLGKIISNKQKGDGHKIKKSDSEEFRRLPKNEWVVIENCHEPVISEFEFCKIEDMMSKRAIVPVSARAGKNDLSGILKCSICGYSMSLYRKKDGKLYIKPCSHTDEYGNKCVNKGQKADDLYENIKKAIIQYRDEVLENLENSNSKELQSTKNNLELKYKEVDKYSKVLEKVNDSYDIGDYSRDEWLNRKSKWESKLGQIEEDITILNKSIKIQD

SEQ ID NO: 5207 - DNA, 50 bp, Clostridium estertheticum
  source 1..50: mol_type = genomic DNA
tgtttacttgtcattggtgtcatgtccataaaagatattgcacattaatt

SEQ ID NO: 5208 - DNA, 40 bp, Clostridium estertheticum
  source 1..40: mol_type = genomic DNA
atttgtcaatggtgtcatgttatggaaagggagtcatttg

SEQ ID NO: 5209 - DNA, 40 bp, Clostridium estertheticum
  source 1..40: mol_type = genomic DNA
atttgtcaatggtgtcatgctatggaaagggagtcatttg

SEQ ID NO: 5210 - DNA, 50 bp, Clostridium estertheticum
  source 1..50: mol_type = genomic DNA
tttttattttgtcttcatgtcaggctgataatagattattaaaattaatt

SEQ ID NO: 5211 - protein, 451 aa, Enterococcus casseliflavus
MQRVAIYMRVSTDQQAKHGDSLREQQETLDEYIKRNKNLKVVDKYIDGGISGQKLNRDEFQRLLDDVKNDQIDLILFTKLDRWFRNLRHYLNTQEILEKHNVSWNAVSQQYYDTTTAYGRTFIAQVMSFAELEAQMTSERIKSVFSNKIQQGEVVSGKVPLGYKIENKRLVPTPDKDIVIDLFDYYVRVGSLRKTTTYLEEKHGIVRDYQSVRKLLTNEKYIGKLRNNTNYCEPIIDKDVFETVQLRLSQNVKTSGSHDYIFRGLVRCADCNGSMSCSTLKSKYIKKTDGEVSYYIRSCYRCTRRRNNPTRCKNKKTYYERALERYLLDNIQTNIAMRVRTLKKEVTKKDSVKRKKDALFVKIERLKKAYLNEIIELDEYKRDREMLENEIASLKEPKINKNIAPLKKVLSDDFFEKYEKASINQKNELWRSIIESIEVSVDGNITVNFLP

SEQ ID NO: 5212 - DNA, 50 bp, Enterococcus casseliflavus
  source 1..50: mol_type = genomic DNA
tgtgcctaactgatactttccgctggggtgataataattagtactacaaa

SEQ ID NO: 5213 - DNA, 40 bp, Enterococcus casseliflavus
  source 1..40: mol_type = genomic DNA
aggcttggggactgccgctgggatggttgtggacgacgat

SEQ ID NO: 5214 - DNA, 40 bp, Enterococcus casseliflavus
  source 1..40: mol_type = genomic DNA
aggcttggggactgccgctaggatggttgtggacgacgat

SEQ ID NO: 5215 - DNA, 50 bp, Enterococcus casseliflavus
  source 1..50: mol_type = genomic DNA
tgtgcctgacaggaactttccactagagtgttagcaacaacaactacaga

SEQ ID NO: 5216 - protein, 519 aa, Bacillus subtilis
MRATAKDIKHVAMYLRISREKKDKNVDTLENHRVKLLEKIQEEGLTHEEFGEVVSGGSSELEKRPKLQELLERIEEFDAILCFEISRLSRNGLVSHTVKQYCIDYDKPIITNEGIYDLANSSDDRLWFDVESMFSSQEHSKIGKRSKMNKIQMAKAGLDIAGGVPFGYKRNKETKKLEIYEPEAEIVRYIFKLHGQGLGSFKIRDILNEKGIKPARGNHWNLPAIKRIIRNEKYKGWNFFNDRKRIKRNGKFTYEIVDTITVEDAHPPIISPEEWDNANIERERRAKVASRIKHKKTVSMVSDLLYCGICGRKLSIREDRKTKKVHVKTCDYLMHENGSKCRNNGVLLEKVEEEVLKTIKRYKKDLQEIIDQLSEADTSNVEQDIKSEISSLQRQQSELNSQKKNLIKAVASGVLTGEDIRSEKEVIEAKQNAVTSKLEELESQLQTLDIDAIIEVNKRAIEALKDFERHSPENQNNTLKRVISRILYTRDMPDEIKALTTRNPLRREYPFTLEIEYLT

SEQ ID NO: 5217 - DNA, 50 bp, Bacillus subtilis
  source 1..50: mol_type = genomic DNA
atacatcatataaaaaacttagtacctactacatttgttacatgatgtat

SEQ ID NO: 5218 - DNA, 40 bp, Bacillus subtilis; identical to SEQ ID NO: 648
  source 1..40: mol_type = genomic DNA

SEQ ID NO: 5219 - DNA, 40 bp, Bacillus subtilis
  source 1..40: mol_type = genomic DNA
tacctcaggctatgcggtttatacctttgtcgttgacgca

SEQ ID NO: 5220 - DNA, 50 bp, Bacillus subtilis
  source 1..50: mol_type = genomic DNA
atatatcatatataaaacataatatatattatatataaaacataatatat

SEQ ID NO: 5221 - protein, 468 aa, Bacillus infantis
MTVGIYIRVSTLEQANEGYSIAAQKERLTAYCAAQGWVDFKYYVDEGVSAKDTNRPQLQLLLDHVKTDKIRTILVYRLDRFTRSVIDLYNLLNLLEKHNCTFKSATEIYDTSSAMGRMFIGLVALLAQWERENLSERVKMALEEKVSSGERVGNVPFGFDLNKDEKLVANDHAPVVLDMINKVRNGMSASQLVSFLNKTDSSRIWYPQGVLRVLRNPAIYGATRWNDKVFEGTHEGLITKKEFLKLQAVLEERTVHHKREVKSYYLFQGKLICPKCGKPLSVNRYVRKRNDGSQYQGCVYRCQNCWKKEKNMLTIGEQRFEDALYEYMKDVEIKDIQPVETKDERSPLLKQLEQVERMREKYQVAWAKDKMTEEEFDKRMDETLEIYKDLKRKLAELKTPASIDTEAIKKIISTFNENFTALNQEEKSIFLSRFVKRIEFKVIPQPPKQPHKHKRGKDLVVITNVEFY

SEQ ID NO: 5222 - DNA, 50 bp, Bacillus infantis
  source 1..50: mol_type = genomic DNA
attagtgtttatataacgctaggcgtggagagtgtacagttaatacaatt

SEQ ID NO: 5223 - DNA, 40 bp, Bacillus infantis
  source 1..40: mol_type = genomic DNA
agttgtttttccgctgccggtcggcccggtaaacaggacc

SEQ ID NO: 5224 - DNA, 40 bp, Bacillus infantis
  source 1..40: mol_type = genomic DNA
agttgtttttccgctgccgcccggcccggtaaacaggacc

SEQ ID NO: 5225 - DNA, 50 bp, Bacillus infantis
  source 1..50: mol_type = genomic DNA
attagtgattctggaatgaaaggcccagagattgaaatctgaaaacaatt

SEQ ID NO: 5226 - protein, 484 aa, Streptococcus infantarius
MQPKKVAIYVRVSSLHQAIEGYSIGQQQDALTKYCEAMNWAIYNVYTDAGFSGGKIDRPAMQKLITDAKTGKFDTVLVYKLDRLSRSVQDTLFLVRDIFNENNIGFVSLQENIDTSTAMGNLFLTLLSAIAEFEREQIKERMQMGRYGRAKSGKSMMWNLTSYGYRYNKETQSMDVVPSEALIVKRIYKEYLSGKSISRIKDGLNNEGHITRDKPWAYKRISHILTSIVYTGVTEFKGEIYEGLHEAIIDKETFELAQAEFKKRQQQTKQNKNNPRPFQAKYMLSGMIRCGYCGAPLKMRKGPVRKDGTRLMAYDCHNRWKRKHSYLTVYNNNEQCTQSGRYLKEDVEGYVINEIKKLQENPDELNKYLKQPEETKVDTKKIESQIKKIDKQITKLNDLYLNDLITIEDLKSKADKLKSEKNILEVQLKKDENSILKLKAENVRKNLSVKDIDKMTYEEQRNLAKTLIKKVDVTKEDIKIIFDF

SEQ ID NO: 5227 - DNA, 50 bp, Streptococcus infantarius
  source 1..50: mol_type = genomic DNA
tagaggattttagtgccattgattcaaatacaggaaactaaaatactcta

SEQ ID NO: 5228 - DNA, 40 bp, Streptococcus infantarius
  source 1..40: mol_type = genomic DNA
tctagattttccatgtaaccaattcatgaaccaagctcct

SEQ ID NO: 5229 - DNA, 40 bp, Streptococcus infantarius
  source 1..40: mol_type = genomic DNA
tctagattttccatgtaactaattcatgaaccaagctcct

SEQ ID NO: 5230 - DNA, 50 bp, Streptococcus infantarius
  source 1..50: mol_type = genomic DNA
tagaggatcacactggcattgatatagatatagaaatagtgtgtactcta

SEQ ID NO: 5231 - protein, 484 aa, Streptococcus infantarius
MQTKKVAIYVRVSSLHQAIEGYSIGQQQDALTKYCEAMNWAIYNVYTDAGFSGGKIDRPAMQKLITDAKTGKFDTVLVYKLDRLSRSVQDTLFLVRDIFNENNIGFVSLQENIDTSTAMGNLFLTLLSAIAEFEREQIKERMQMGRYGRAKSGKSMMWNLTSYGYRYNKETQSMDVVPSEALIIKRIYKEYLSGKSISRIKDGLNDEGHVTRDKPWAYKRISHILTSIVYTGVTEFKGEIYEGLHEAIIDKETFELAQAEFKKRQQQTKQNKNNPRPFQAKYMLSGMIRCGYCGAPLKMRKGPVRKDGTRLMAYDCHNRWKRKHTYLTVYNNNEQCTQSGRYLKEDVEGYVINEIKKLQENPDELNKYLKQPEETKVDTKKIESQIKKIDKQIAKLNDLYLNDLITIEDLKSKADKFKSEKNILEAQLKKDENSILKLKAENVRKNLSVKDIDKMTYEEQRNLAKTLIKKVDVTKEDIKIIFDF

SEQ ID NO: 5232 - DNA, 50 bp, Streptococcus infantarius
  source 1..50: mol_type = genomic DNA
tagaggattttagtgtcattgattcaaatgtaggaaactaaaatactcta

SEQ ID NO: 5233 - DNA, 40 bp, Streptococcus infantarius; identical to SEQ ID NO: 5228
  source 1..40: mol_type = genomic DNA

SEQ ID NO: 5234 - DNA, 40 bp, Streptococcus infantarius; identical to SEQ ID NO: 5229
  source 1..40: mol_type = genomic DNA

SEQ ID NO: 5235 - DNA, 50 bp, Streptococcus infantarius; identical to SEQ ID NO: 5230
  source 1..50: mol_type = genomic DNA

SEQ ID NO: 5236 - protein, 532 aa, Vibrio parahaemolyticus
MGIFMYTSEIYKSKQQLITPSSTRPLAFSYIRFSSKKQELGNSLQRQMEAAERWCAYNNVELSPITFDDLGVSAFKEGTRPALADMLEYIKTGIIPKGSFILLENSDRLSRRGFKHAVDIVHEIVNNDVYLVVLGNNPVVYDKHNIVDLSSMLSLLLDSDRGRQESARKSVLIKAAKKHLRSTREAKGKLPWWLSAVDGKAELNEFSAVIREMVDMKLQGVSAQKIATHFNNKGVLNAQGTAWKAVSINASFKNKLLYGTKVYYEVVGTNGRDCAPVEEVPNWAPAICSKREFDAIQPKKRVKGELTRTSAFTGLLRCPNCHGAMQQRKQYHKGKEYTYRRCLNYGEGRCAVKDNFKDVDVVAKAALQHLKVINTSSSNDELNQAIEQLNAAKNKLETQEASLAYIKIPEILGRTYDDIYKTQQEIAHLEASVQLLQTTSHEVNTISLFDLPNKEVNVELKKVIKAIYFFKLAPLTDKLIIQYVNDVKSTFVITHKRNGRSEATWKMQLVADSTKWDVADTREAWERDDLNN

SEQ ID NO: 5237 - DNA, 50 bp, Vibrio parahaemolyticus
  source 1..50: mol_type = genomic DNA
gattagtccaattaatacaatatcaaagtattatatcgattgtagataat

SEQ ID NO: 5238 - DNA, 40 bp, Vibrio parahaemolyticus; identical to SEQ ID NO: 4863
  source 1..40: mol_type = genomic DNA

SEQ ID NO: 5239 - DNA, 40 bp, Vibrio parahaemolyticus
  source 1..40: mol_type = genomic DNA
atttggttggcatgtggtctaggttctctacagaacatag

SEQ ID NO: 5240 - DNA, 50 bp, Vibrio parahaemolyticus
  source 1..50: mol_type = genomic DNA
aattagtcattatcatacattatctaagtattatactaatattaaaatat

SEQ ID NO: 5241 - protein, 610 aa, Dorea formicigenerans
MKRPDNNKIVALYERLSRDDELNGDSNSIVNQKKMLEKYAKEQGFTNLAHYTDDGYSGTNFDRPDWKRLTADIEEGKIGCVIVKDMSRIGRNYLEVGFYTEVLFREKGVRFIAISNGVDSSHSESNEFAPFLNIMNEWYVRDTSRKIKSVLRNKGMEGKHLTSNAIYGYKKDPENNNHWLVDEEAAAVVRRIFQLIIEGNGPMQVARILTNEKVERPSYYLAKQGLGTCRGNCDMTRPYSWTATTITDLVSKPEYMGHTVNFRTFKESYKDKHSQYTNPEDWLIFRDTQEAIVDEDTWYMVQKIRKTKHRPIAQGKANPLTGLMFCADCGAKMFNHRTKGYEKKDKDGNPTGKYTNAQNNYTCSTYSKAKGHFENKCSQHHVRTDVVRDLILTTLQYTASYVKEHEDEFLEKVRKSSVLKQEADTKALTKKIAKSEKRVAELDHLIKRIYEDNVSGKLTDKRFEMLSADYEKEQAELEEFLTSAREQLATAKEEASNVDKFIALVHKYTDFSELTTPMIHEFIDRIEVHEADKSTGERTQEIDIYLKYVGKLDVPMPELTPEELAEEERKRRKRAWNRTYNRRKAEKERAEKEKAALEAATDTDKSKKGA

SEQ ID NO: 5242 - DNA, 50 bp, Dorea formicigenerans
  source 1..50: mol_type = genomic DNA
aaatatccctatgaaagttaaacatgagtttgacttcctgagggataata

SEQ ID NO: 5243 - DNA, 40 bp, Dorea formicigenerans
  source 1..40: mol_type = genomic DNA
ttgcatcaataacctttgctgcttctggctcttctcctgc

SEQ ID NO: 5244 - DNA, 40 bp, Dorea formicigenerans
  source 1..40: mol_type = genomic DNA
ttgcatcaataacctttgcgacttctggctcttctcctgc

SEQ ID NO: 5245 - DNA, 50 bp, Dorea formicigenerans
  source 1..50: mol_type = genomic DNA
aattagggagattataattaaacagaagtttgactttctatgtgataata

SEQ ID NO: 5246 - protein, 481 aa, Streptococcus pyogenes; identical to SEQ ID NO: 2431

SEQ ID NO: 5247 - DNA, 50 bp, Streptococcus pyogenes; identical to SEQ ID NO: 2432
  source 1..50: mol_type = genomic DNA

SEQ ID NO: 5248 - DNA, 40 bp, Streptococcus pyogenes
  source 1..40: mol_type = genomic DNA
atcttagacaacttgaatgtcaatgttgatgagtttctct

SEQ ID NO: 5249 - DNA, 40 bp, Streptococcus pyogenes
  source 1..40: mol_type = genomic DNA
atcttagacaacttgaatgtaaatgttgatgagtttctct

SEQ ID NO: 5250 - DNA, 50 bp, Streptococcus pyogenes
  source 1..50: mol_type = genomic DNA
tatacaatgatgtattcctttttttaaaaaaaagccagatgaattgttgg

SEQ ID NO: 5251 - protein, 481 aa, Streptococcus anginosus
MMTTNKVAIYVRVSTTNQVEEGYSIDEQKDKLSSYCHIKDWSIYNIYTDGGFSGSNTERPALEQLIKDAKKKLFDTVLVYKLDRLSRSQKDTLYLIEEIFIKNGIEFLSLQENFDTSTPFGKAMIGLLAVFAQLEREQIKERMQLGKLGRAKSGKSMMWARTSYGYDYHKETGTVTINELEAIAIRDIFNSYLAGMSITKLRDKLNDKYPKTPNWHYRIIRGILANPVYCGYNQYKGQIFLGNHEPIISEKTFNKTQDELKARQIAAAQFSNNPRPFRAKYMLSGIAQCGYCGAPLQITLGTIRKDGSRNIRYQCKNRFPRTTKGVTIYNDNKKCDSRFYEKSDVEENVIQQISKLQNDPKVIDGLFADLETTIDRDACIKQIEVLSRKVSRLNDLYIDGLIALDELQTKNAEIINQRSLLEKELENDPAIKHQERKRDMRQTLSIDDIFTMDYEQQKVIVRALINKVQVTAESIKIKWKI

SEQ ID NO: 5252 - DNA, 50 bp, Streptococcus anginosus; identical to SEQ ID NO: 2432
  source 1..50: mol_type = genomic DNA

SEQ ID NO: 5253 - DNA, 40 bp, Streptococcus anginosus
  source 1..40: mol_type = genomic DNA
aagaagcacgactaacatttctactaaagtaaaaccttta

SEQ ID NO: 5254 - DNA, 40 bp, Streptococcus anginosus
  source 1..40: mol_type = genomic DNA
aagaagcacgactaacatttatactaaagtaaaaccttta

SEQ ID NO: 5255 - DNA, 50 bp, Streptococcus anginosus; identical to SEQ ID NO: 5250
  source 1..50: mol_type = genomic DNA

SEQ ID NO: 5256 - protein, 635 aa, Salmonella enterica; identical to SEQ ID NO: 1121

SEQ ID NO: 5257 - DNA, 50 bp, Salmonella enterica
  source 1..50: mol_type = genomic DNA
tttttgtataaagtgcaacatatacaaatgagttgatcaaaatacaaaaa

SEQ ID NO: 5258 - DNA, 40 bp, Salmonella enterica; identical to SEQ ID NO: 1123
  source 1..40: mol_type = genomic DNA

SEQ ID NO: 5259 - DNA, 40 bp, Salmonella enterica
  source 1..40: mol_type = genomic DNA
ttttagcttgataatcataaaaataggtgccgttgcagca

SEQ ID NO: 5260 - DNA, 50 bp, Salmonella enterica
  source 1..50: mol_type = genomic DNA
tttttggatgattagaaaaatataaaaatgagtaaaagaattttcaataa

SEQ ID NO: 5261 - protein, 413 aa, Citrobacter freundii
MRSVITYLRFSSAIQGAEGADSTRRQNDLFKQWLKKNNDAQVVASFSDEGLSGYKGKHLSGQFGDMLSRIESGEFPEGTILLVEAIDRIGRLEHLETEALMNRIIAHGIEIHTLQDGLIYTRDALSDDLGISIIQRVKSYVAHQESKQKSFRVSQKWKQRAKLALAGEQRLTRNVPGWIDPDTLKINEHAETVRLIFKLLLDGESLHNIARHLQSNGIKSFSRRKDANGFSVHSVRTVLRSESVIGTLPASQRNDRPAIPNYYEAAIDASTFNKAQEILGKNRTGRTPASDNPLTINIFKGLFRCQCGASVHPTGTKNKYAGVYRCNNYLDGRCDVPPLKRKPFDKWMIDNFLGMIDVGNDGESERKIAALQHEVEIVTSRIKKATALLLEMDDITELKAQVKECSGLLNLAT

SEQ ID NO: 5262 - DNA, 50 bp, Citrobacter freundii
  source 1..50: mol_type = genomic DNA
aaaccgaatagacttaaatcaatggtcattgtattgtagctattcggcat

SEQ ID NO: 5263 - DNA, 40 bp, Citrobacter freundii
  source 1..40: mol_type = genomic DNA
gcgacgaggtaaatcaagggtcattgaagtcataatcgtt

SEQ ID NO: 5264 - DNA, 40 bp, Citrobacter freundii
  source 1..40: mol_type = genomic DNA
gcgacgaggtaaatcaagggccattgaagtcataatcgtt

SEQ ID NO: 5265 - DNA, 50 bp, Citrobacter freundii
  source 1..50: mol_type = genomic DNA
aaaacgaaaaaaggaaaaacaatggccattgttttttgtaactttggcat

SEQ ID NO: 5266 - protein, 519 aa, Leclercia adecarboxylata
MRQVLTYLRFSSKPQERGDSIRRQTNLFERWLKDNPDAEVIDNFKDEGQSAFHGKHLKGDFGRMLRNIEDGKYIAGKTILLVESEDRLNRQKARNTENLVDLITGKGIDVICLASGKIYNAENIEELGTSIQLKIAAHIAYKQSKDKSDKVSAAWETRAKLAQEGKQQLTRMVPGWIDPDTRKLNEHAQTVKNIFNLLLAGGSLHNIARHLQENGTKSFSRRKDANGFSVHSVRTILRSESTIGTLAASQHNDRPAIPNYYEAAVDVATFNKAQEILSKNRKGRTPASDNPITINLFKGLMRCICGASVHPTGVKNTYQGVYRCNNAVDGRCKLPTIKRRAFDTRMINNVVGMLNHSENNDTERKKAELQYQIDILNKSISKGYDYLLDPTTEATPELRERLNKLNHQRKQTQTELDTLNQRESFSDKALPHLADIDLNTKEGRVEAQLLLSKYVKEITLRGSTFDILLTNGNRFENLSVAPNELYPEEEASSIKNKMNQLLDDELALLEPDLKGKMTY

SEQ ID NO: 5267 - DNA, 50 bp, Leclercia adecarboxylata
  source 1..50: mol_type = genomic DNA
aaaccgaatagattaaaatcaagggtcattgtattgtagctattcggcat

SEQ ID NO: 5268 - DNA, 40 bp, Leclercia adecarboxylata
  source 1..40: mol_type = genomic DNA
gcggcgagggagttcaagggtcattgaagtcataatcgtt

SEQ ID NO: 5269 - DNA, 40 bp, Leclercia adecarboxylata
  source 1..40: mol_type = genomic DNA
gcggcgagggagttcaagggccattgaagtcataatcgtt

SEQ ID NO: 5270 - DNA, 50 bp, Leclercia adecarboxylata; identical to SEQ ID NO: 5265
  source 1..50: mol_type = genomic DNA

SEQ ID NO: 5271 - protein, 498 aa, Paraliobacillus ryukyuensis
MIKQHNKYDVLNYIKNVGIYIRRSRGDIEEDLVKHKKVIDEFVAERKWKFVEYKEIGTGSSISERIEIKQLLKDVEEGLFDAVIVFDYDRLGRGSATDEETIQKTFRLSDTIVISMNPFELYDFNNESDEEMIDFKGFLARREYKLISKRLQMGKKIGARMGNWVFSTTPYGYDYNPELKGLVINQEESNIFRRMLDAYISGDSLNKIATDLNTDNIPSPRGKIWNGNTIKNILTNESYLGWIVSNKTSGVRDSQNPDKIKKPFKEHPRDEWIIVKNCHEPLMTEDEINEVKYILSQKTRHRSGNNVNSLSGIVKCAKCEKTLTIQKNKSSILLKKCSNCGNMGGEAYLVEDLIKHQLKMVKKVLVEKKKKQKSDNLSNNIDSQVESINTQIKKQQQAIENIEEAFEDGLYDVEKTKEKLMKRRNKISELEDQKKYLLSKKKKSNKKENKIKAIEKFYSEIDQASNPSDINKLYKTVIDKVEWLRKDKDNINVKIYFK

SEQ ID NO: 5272 - DNA, 50 bp, Paraliobacillus ryukyuensis
  source 1..50: mol_type = genomic DNA
tgatgtatgtgttataaattcaatgcaacaaacttataatagatacactt

SEQ ID NO: 5273 - DNA, 40 bp, Paraliobacillus ryukyuensis
  source 1..40: mol_type = genomic DNA
aaacgtcgctacattattagcagctgttttggttacgtag

SEQ ID NO: 5274 - DNA, 40 bp, Paraliobacillus ryukyuensis
  source 1..40: mol_type = genomic DNA
aaacgtcgctacattattataagctgttttggttacgtag

SEQ ID NO: 5275 - DNA, 50 bp, Paraliobacillus ryukyuensis
  source 1..50: mol_type = genomic DNA
agatgcatgatagatatattcaattaatcaaaaataagatggaaacattt

SEQ ID NO: 5276 - protein, 472 aa, Streptococcus infantarius
MQTKRKVAIYSRVSTLHQAEEGYSIGQQIEALTKYCQAMGWAIYDNYSDGGFSGGKLERPAMQKMIQDAESGKFDTVVVYKLDRLSRNVRDTLYLVKDVFNANNVDFVSLQENIDTKSAMGNLFITLLSAIAEFEREQIKERMQLGVKGRAKSGKTTSWTTPPFGYEYNTNTQLMTINHYQAEIVRDMFDKIISGWSIMGITTHLRKTNSKKWTHVRVKRILENVAYIGKVKYRDEIFDGEHAPILTEEVFYKAQKALEERTNKKDNTRPFQGLYMLSNIAKCGYCGTPLKIDSYKPRKDGTRKRTYTCINRNPKRIKTAIYNDGKQCKESGRYDVKDVEKYVLTEISKLQLNPKSIESLYRDKPEENITAHQERLKKLETKLSKLNDLYINELISMEVLKQKSAELLKEKSSLETFINNNKRKTNNKPAFEKVAKMDDIFKMSYDDQKRIVKTLIKRVEVKRDEINVIFKL

SEQ ID NO: 5277 - DNA, 50 bp, Streptococcus infantarius
  source 1..50: mol_type = genomic DNA
ttaggagcacctactaatatagttgtgcatgaatcagaactttttaccat

SEQ ID NO: 5278 - DNA, 40 bp, Streptococcus infantarius
  source 1..40: mol_type = genomic DNA
tttgccgactaatatagttgtacatgccatagcaaatatt

SEQ ID NO: 5279 - DNA, 40 bp, Streptococcus infantarius
  source 1..40: mol_type = genomic DNA
tttgccgactaatatagttttacatgccatagcaaatatt

SEQ ID NO: 5280 - DNA, 50 bp, Streptococcus infantarius
  source 1..50: mol_type = genomic DNA
ttaggctcaggaaagaatagatctttgcattaatcaatgaatcttaccat

SEQ ID NO: 5281 - protein, 453 aa, Enterocloster clostridioformis
MIKGACYVRVSTDNQLENYSIEEQTDRLKAYCKAKDIQIVKIYTDGGYSGGNINRPALQQMLQDIGKGLIDSVIVYKLDRLSRSQKDTLMLIEDCFLAKNVDFVSVNENFDTSTPFGRAMIGILSVFAQLEKDQITERFTMGRIGRAKNGYFHGGGNAPTGYDYIDGELIINDYEALQVKDLYNRFLKGYSIHNCWQYMHQKYGGWSNEVSVRNVLKNELYIGKVKFKGVAYQGNHQPIISEEIFRQVQDLFNSSRRTSDTFKRSPFKANTLLSSLVYCGKCGARFHGEHGNYSCYSRTKGDKKYIVDPNCKNKKWKIEELNKLVLDYITRLDFSKLQNSHPAPVPVTDYSLRLTEIDKQIEKLIDLYQVSGIPLESIQKKMDALTKEKEALLNVSKPKNVPITTLTEMITARDTLMSLADTGSLDEKRACLTMIIDRITIDDDNVNIKLKHL

SEQ ID NO: 5282 - DNA, 50 bp, Enterocloster clostridioformis
  source 1..50: mol_type = genomic DNA
atttgcaagttttcaaatactatgtgtatagagtttataaacttgcaaat

SEQ ID NO: 5283 - DNA, 40 bp, Enterocloster clostridioformis
  source 1..40: mol_type = genomic DNA
caaacaggctttaaccatgtgtatgggattcggatgcaac

SEQ ID NO: 5284 - DNA, 40 bp, Enterocloster clostridioformis
  source 1..40: mol_type = genomic DNA
caaacaggctttaaccatgtatatgggattcggatgcaac

SEQ ID NO: 5285 - DNA, 50 bp, Enterocloster clostridioformis
  source 1..50: mol_type = genomic DNA
atttggaagcaaaaacataatatctataaagattttgcagcattgcacat

SEQ ID NO: 5286 - protein, 513 aa, Lactonifactor longoviformis
MRIGIYPRKSVYRDNSESIAVQIKMCKDYANIVFADQPLEFRIYDKDEGFSGKNTKRPSFQELMEDVKSNKLDLVMVYRLDRISRNVNEFSEMYEIMHSHNVGFLSIKEAFDTNTSIGRTVMYILSAFSQFERENTSERVTDNMQALGASGKWTGGKLPAGMKSIRKEMGGKEHSYLLVDDEKIKLVKMIYNMFLEGNSITKIERYCRDHGIKSERGKYLSTSQIYCMLSNPVYCSNEMSAYYYFLEKGYTLPDSHLFDGTRGLIGYGRTRQNDKVIANNKWTIGVGIHTPVIPANEWISVQKRFGENKFFRSNKYEIGLLKGVLKCKCGSRMDVRTYSKNDKLFSYYYCATMQRKGKQYCNSGYIRVADIDNAFLDILLQIKSNPEMIRLRKEELSYTDVDILKKELKSIQQSIDNLTNTLMDNIGSTASSYIVKQIENLDKDKRKLESSLVTAEMNNSIAKSDAETKEVIYDYICCLLNNFESLSYQEKNELIKKAVKTCTYDNGNMHIIF

SEQ ID NO: 5287 - DNA, 50 bp, Lactonifactor longoviformis
  source 1..50: mol_type = genomic DNA
tcattctatatgttattcttattggtgtaccgataagaaaaatatattga

SEQ ID NO: 5288 - DNA, 40 bp, Lactonifactor longoviformis
  source 1..40: mol_type = genomic DNA
gactccactgccacaattggtgtgcccacctgccccatca

SEQ ID NO: 5289 - DNA, 40 bp, Lactonifactor longoviformis
  source 1..40: mol_type = genomic DNA
gactccactgccacaattgttgtgcccacctgccccatca

SEQ ID NO: 5290 - DNA, 50 bp, Lactonifactor longoviformis
  source 1..50: mol_type = genomic DNA
tcattttgatagaaaatcttatttttgaacccataaagagaatatgttga

SEQ ID NO: 5291 - protein, 507 aa, Escherichia coli
MKRAISYMRFSTEKQIKGDSIRRQSKLVTDWLSKNPDYFLDESLSFKDLGKSAFSGKHLRAGLGDFLTAIKEGLVKAGDTLLIESLDRLSRQDVDQASELLRGILRSGVDVVTLSDGEHYTAESLKDPLSLIKSILIMQRAYEESLRKSERVAAAWNRKKDIISEGIKVSKRCPAWLKLNDDRRGFSIIPEKVEIVKKVFTLRLQGLSFWAITRALNDGGYLSLNQYKPQGWSDTSVKTLLRNRSVIGCFTPAGREEVKDYYPAIISESLFYKVQQLNTGQYGRASTSDNPLSVNLFRGIIKCSECGSSVVVGGYAKRRYGMYRCPKNSSHQCHAKAISRKQTDETLLFMLSLVDRMEPDITNQIDSLNLRKSDLETKISKLLELAIELDDMAMVTDKLRDLKKELGQVKHQIEEETKRVRAISTGNLKDIDRSTKEGMIEAQLLIKGVVKSIIIDSAKRRCRVTLHNGKVIGLPISKNPSEELTSALTSMFEGTERGLLSLDEVEL

SEQ ID NO: 5292 - DNA, 50 bp, Escherichia coli
  source 1..50: mol_type = genomic DNA
tagtgcattaagatagcatatatgagtataataccttcctaaatacacta

SEQ ID NO: 5293 - DNA, 40 bp, Escherichia coli
  source 1..40: mol_type = genomic DNA
gtggtccggtattgtcttcagcattacatttttattttcg

SEQ ID NO: 5294 - DNA, 40 bp, Escherichia coli
  source 1..40: mol_type = genomic DNA
gtggtccggtattgtcttcgtcattacatttttattttcg

SEQ ID NO: 5295 - DNA, 50 bp, Escherichia coli
  source 1..50: mol_type = genomic DNA
aactgcattgggatagcaattatggttattacaactctgaaaatatacta

SEQ ID NO: 5296 - protein, 507 aa, Escherichia coli
MKRAISYMRFSTEKQIKGDSIRRQSKLVTDWLSKNPDYFLDESLSFKDLGKSAFSGKHLRAGLGDFLTAIKEGLVKAGDTLLIESLDRLSRQDVDQASELLRGILRSGVDVVTLSDGEHYTAESLKDPLSLIKSILIMQRAYEESLRKSERVAAAWNRKKDIISEGIKVSKRCPAWLKLNDDRRGFSIIPEKVEIVKKVFALRLQGLSFWAITRALNDGGYLSLNQYKPQGWSDTSVKTLLRNRSVIGCFTPAGREEVKDYYPAIISESLFYKVQQLNTGQYGRASTSDNPLSVNLFRGIIKCSECGSSVVVGGYAKRRYGMYRCPKNSSHQCHAKAISRKQTDETLLFMLSLVDRMEPDITNQIDSLNLRKSDLETKISKLLELAIELDDMAMVTDKLRDLKKELGQVKHQIEEETKRVRAISTGNLKDIDRSTKEGMIEAQLLIKGVVKSIIIDSAKRRCRVTLHNGKVIGLPISKTPSEELTSALTSMFEGTERGLLSLDEVEL

SEQ ID NO: 5297 - DNA, 50 bp, Escherichia coli; identical to SEQ ID NO: 5292
  source 1..50: mol_type = genomic DNA

SEQ ID NO: 5298 - DNA, 40 bp, Escherichia coli; identical to SEQ ID NO: 5293
  source 1..40: mol_type = genomic DNA

SEQ ID NO: 5299 - DNA, 40 bp, Escherichia coli; identical to SEQ ID NO: 5294
  source 1..40: mol_type = genomic DNA

SEQ ID NO: 5300 - DNA, 50 bp, Escherichia coli; identical to SEQ ID NO: 5295
  source 1..50: mol_type = genomic DNA

SEQ ID NO: 5301 - protein, 570 aa, Yersinia intermedia
MRVSSEQQLSGDGLDRQESMLIRYFDDNASCYDFDPNYELIVDRGVSAFKGHHQRESAGLGGFFKRIRDGEVEKGSVLCVESLDRFSRENPFKCVEYISILDSYQIELHDVDKKLKIGRKYPNSLSFAVMIAERSYEESRLKSDRIQKGWDKRRKIAKEKGQYMIKNCPKWIDVVNNKYVLNEHHLIIREIFDLYRSGIGSYTIAVMLNRDNKTIDGMKWNSTKICHVLRNRRCKGEYTSNRIIRNFEDDTVTSTFEILNIYPRIVTDDEFYEVSTRLEKFNYTGRIRHDLKRTVFNGLLKCELCGSALGVSSTSGYTYIKCDNARAKGGCTGVLMAYMPFEKGILSHIKDIDISKVINMDSTISNIDILKTEVVELESYIQSFIIGIENLKQQGRFPTFDMLDGKAQAEERLQDVKKTLAAEKDTFNVSNLEFSSDIHKLENIIERSKLELELRKVIKRIAIKADKTYITADISYYNDDNIKHVLLIHKKKTTIEVMGEIVQQDGWRTYSFSEGGSLVFRVKSNGEIWTLSAAKNKSISEIQKYMTMMVGRESIDFDFYINEDFIEWIE

SEQ ID NO: 5302 - DNA, 50 bp, Yersinia intermedia
  source 1..50: mol_type = genomic DNA
actttgtttaatgttttatatattttgataccatatattttatacaaact

SEQ ID NO: 5303 - DNA, 40 bp, Yersinia intermedia
  source 1..40: mol_type = genomic DNA
ttttatggtatcgcaatttttaatgccataaaggcgcaat

SEQ ID NO: 5304 - DNA, 40 bp, Yersinia intermedia
  source 1..40: mol_type = genomic DNA
ttttatggtatcgcaatttgtaatgccataaaggcgcaat

SEQ ID NO: 5305 - DNA, 50 bp, Yersinia intermedia; identical to SEQ ID NO: 835
  source 1..50: mol_type = genomic DNA

SEQ ID NO: 5306 - protein, 577 aa, Yersinia intermedia
MKKCYLYVRVSSEQQLSGDGLDRQESMLIRYFDDNASCYDFDPNYELIVDRGVSAFKGHHQRESAGLGGFFKRVRDGDVEKGSVLCVESLDRFSRENPFRCVEYLSILDRHQIELHDVDKQLKIGRKYPNSLTFAIMIAERSYEESRLKSLRIQKGWDKRRKIAKEEGQYMIKNCPKWIDVVNNKYVLNEHHLIIREIFNLYLSGIGSYTIAVMLNRDNKTIDGMKWNSTKICHVLRNRRCKGEYISNRIIRNFEDDTVTSTFEILNIYPRIVSDDEFYEVSTRLEKFNYTGRIRHDLKRTVFNGLLKCELCGSALGVSSTAGYTYIKCDNARANGGCAGVLMTYMPFEKGILSHIKDIDISKVINMDSTISNIDILKTEVVELESYIQSFIIGIENLKQQGRFPTFDMLDGKAQAEERLQDVKKTLAAEKDTFNVSNLEFSSDIHKLENIIERSKLELELRKVIKRISIKADKTYITADISYYNDDNVKHVLLIHKKKTTIEVMGEIVQQDGWRTYSFSEGGSLVFRVKSNGEIWTLSAAKNKSISEIQKYMTMMVGREPIDFDFYINEDFIEWVE

SEQ ID NO: 5307 - DNA, 50 bp, Yersinia intermedia; identical to SEQ ID NO: 3937
  source 1..50: mol_type = genomic DNA

SEQ ID NO: 5308 - DNA, 40 bp, Yersinia intermedia; identical to SEQ ID NO: 5303
  source 1..40: mol_type = genomic DNA

SEQ ID NO: 5309 - DNA, 40 bp, Yersinia intermedia; identical to SEQ ID NO: 5304
  source 1..40: mol_type = genomic DNA

SEQ ID NO: 5310 - DNA, 50 bp, Yersinia intermedia; identical to SEQ ID NO: 835
  source 1..50: mol_type = genomic DNA

SEQ ID NO: 5311 - protein, 553 aa, Roseburia hominis
MSKRARTLLRVSSRQQLHDDDIPIQRAEAEQFIAKQKDWVFDKEYLEKGISAYHNGVEDRAVLQEIMQDAKQGEFEILLAYMSDRIGRQEEYSFYVAELNRMGIEVWTIKDGQLKTEEHIDKLLNYIRFWQNEGESKKTGMRVHDTMVEMVKDGRFVGGKAPYGYKLVLSGKISNHGRALHKLVIVPEQAEVVRQIFGYAVNQGMGFQKIAKTLNENGVPAPILEQWKNGTVRSILTNPIYMGVVAYNRRKNGHANSTRLDRKEWTYAREQNPEIAIVSQELWERAQEIREARKNKINAARQATNELYMEQYNVPFSTRGRLALTGMVYCGYCGKRLKNTGYANHWTCKKTGEKKVSYVGRYGCPNGCKPRSTYSQEYLESIVFATVETYLENLKKIDISKELEDMQAQQTKDIKREIKDLEKTIKSLTADIETLEEKLPEAIRGEFAFSVDKLSAIISDKETSKKEIEANKSRLQKQLDEVSVESNELLAYVDAMPKWSEIFKDSDIQTKQMILSTLIDKIIVKDDDITIKFKIRLDNFLDEKLLESSGVDV

SEQ ID NO: 5312 - DNA, 50 bp, Roseburia hominis
  source 1..50: mol_type = genomic DNA
ttacttgaatccagtggtgtggatgtaggtaggcaaatagtttcaagtaa

SEQ ID NO: 5313 - DNA, 40 bp, Roseburia hominis
  source 1..40: mol_type = genomic DNA
atcgtgtatacacggagtggtaccgcaacaaaggctatag

SEQ ID NO: 5314 - DNA, 40 bp, Roseburia hominis
  source 1..40: mol_type = genomic DNA
atcgtgtatacacggagtgaaaccgcaacaaaggctatag

SEQ ID NO: 5315 - DNA, 50 bp, Roseburia hominis
  source 1..50: mol_type = genomic DNA
ttacttgaattttttggtgtggagaaaagtagtcagtgattttgaggata

SEQ ID NO: 5316 - protein, 519 aa, Desulfotomaculum nigrificans
MERVLMHLRKSRADLEAEARGEGETLAKHRNILLKLAKERNLNIVKIREEVGISGESLIHRPEMLETLKEVEEGLYDAVLCMDIDRLGRGNTKEQGIILEAFKNSNTKIITPLKTYDLNNEFDEEYAEFGAFMARREFKFITRRLQRGRVATVEEGNYIAPRPPYGYIIEKNNKERYLIPHPEQAPIVKMIFDWYTHDDPNVRMGASKIANELNKFCKSPTGIAWKGSTVLSILKNAVYAGRIQWRKKEEKKSITPGKKKDVRMRPKEQWIDVEGKHEPLVSMETYLKAQEILERKYHVPYQIQNGITNPLAGLVKCGICGSSMVYRPYTHQRHPHLICYNRYCTNKSSRFEYVESKIIQGLHQLLAQYKADWFKHQRPKVNDDSVDLRQKALHRLEKELNDLYKQKDNLHNLLEKGVYSIDTFLERSNILAERIDDTKKAIHDAEKALAEEVQRNKVKKDIIPTVENVLELYYKTQDPAKKNNLLKSVLDYAVYRKEKHQRDDDFTLVLYPKLPQINS

SEQ ID NO: 5317 - DNA, 50 bp, Desulfotomaculum nigrificans
  source 1..50: mol_type = genomic DNA
cacagataaacagttaatggtaatgaaataacattaactgtttatctgtg

SEQ ID NO: 5318 - DNA, 40 bp, Desulfotomaculum nigrificans
  source 1..40: mol_type = genomic DNA
tgtagacaaggaaggtaatgaaataagtttgatagatatt

SEQ ID NO: 5319 - DNA, 40 bp, Desulfotomaculum nigrificans; identical to SEQ ID NO: 5318
  source 1..40: mol_type = genomic DNA

SEQ ID NO: 5320 - DNA, 50 bp, Desulfotomaculum nigrificans
  source 1..50: mol_type = genomic DNA
cacagataaacatttaatggtatggaaataagttcagtcatttatttgac

SEQ ID NO: 5321 - protein, 481 aa, Streptococcus mitis
MITTNKVAIYVRVSTTSQAEEGYSIEEQKDKLSSYCDIKDWSVYKIYTDGGFSGSNTDRPALEGLIKDAKKRKFDTVLVYKLDRLSRSQKDTLYLIEDIFIKNNIAFLSLQENFDTSTPFGKAMIGLLSVFAQLEREQIKERMQLGKIGRAKAGKSMMWAKTSYGYDYHKETGTITINPAQAVAVKFIFESYIRGRSITKLRDDLNEKYPKHVPWSYRAVRTILDNPVYCGFNQYKGEIYPGNHEPIISKEEYDKTQSELKIRQRTAAENVNPRPFQAKYILSGIAQCGYCGAPLKIILGVKRKDGSRFKKYECHQRHPRTLRGVTTYNDNKKCDSGFYYKDKLEAYVLEEISKLQDNADYLDKIFSGDNADTIDRESYKKQIEELSKKLSRLNDLYIDDRITLEELQSKSAEFISMRATLETELENDPALRKNKRKADMRKLLNAEKVFSMDYESQKMLVRGIINKVQVTAEDIVINWKI

SEQ ID NO: 5322 - DNA, 50 bp, Streptococcus mitis
  source 1..50: mol_type = genomic DNA
taaataattttagtaacctacatttcaataaaggatagtaaaattatttc

SEQ ID NO: 5323 - DNA, 40 bp, Streptococcus mitis
  source 1..40: mol_type = genomic DNA
gagcaagaccaccaacatctccacaagtgtaaaagctttt

SEQ ID NO: 5324 - DNA, 40 bp, Streptococcus mitis
  source 1..40: mol_type = genomic DNA
gagcaagaccaccaacatcaacacaagtgtaaaagctttt

SEQ ID NO: 5325 - DNA, 50 bp, Streptococcus mitis
  source 1..50: mol_type = genomic DNA
aaaaaaattaaattaaattaaattaaaaaaaaggatggaaaatctatttc

SEQ ID NO: 5326 - protein, 512 aa, Leisingera methylohalidivorans
MFDKHQKQKRNKCVIYCRVSSIKQTMDGAGLSSQERSCRDYAQQCGMQVEDVFTDVISGASSNRPGMNLLLDFLNRVDARDYMVIVDDVSRFARDVGAHTELRNKIMTAGAAIDSPKTKFGVDAESRFLEMLWALLASRDREKNAELSKTRTIARLKNGYWTFSAPVGYQYTKAPGGGKLLVPKEPEASIIREALEGFASGRFQSQAEVKRFLDDTPEFPRPRGAKEVKFDRVTGLLTRVVYAGYLEKPEWGIPLTKAQHEPLIPYETYLINQDRLNGRKVAPARKDIDREFVLRGFLTCSECGYSLTSCWSKSGTGKRYPYYLCHHKGCSQRGKSIARDKLEAEFEHVLKGLAPTAKTFELAGRMFRDAWDRRCSNSKEEASRHKTHLRQIETEVSSLIDRAARTQHDETARAYETRIAELRSETAVLQEKMANQELPEGNFDKMFELSMEFLANPWNIWEKSSYELKRTVLRLAFAAPLNVCRETGLRTAETTLPFKALRFLSTSKSQMV

SEQ ID NO: 5327 - DNA, 50 bp, Leisingera methylohalidivorans
  source 1..50: mol_type = genomic DNA
tttctgtccacttccaaaagtcaaatggtgcacctgaaaggagaaagctc

SEQ ID NO: 5328 - DNA, 40 bp, Leisingera methylohalidivorans
  source 1..40: mol_type = genomic DNA
ttcaattgtatttcggggaatggtgcccaggagaggactc

SEQ ID NO: 5329 - DNA, 40 bp, Leisingera methylohalidivorans
  source 1..40: mol_type = genomic DNA
ttcaattgtatttcggggattggtgcccaggagaggactc

SEQ ID NO: 5330 - DNA, 50 bp, Leisingera methylohalidivorans
  source 1..50: mol_type = genomic DNA
tgtctgtcttgccgtacaagtcaattgatacacttggccttagaaagccc

SEQ ID NO: 5331 - protein, 537 aa, Clostridioides difficile
MKQQIYNTALYLRLSRDDELQGESSSITTQKSMLRLYAKEHHLNVIDEYIDDGWSGTNFERPSFQRMIEDIEAGKINCVVTKDLSRFGRNYIMTGQYTELYFPSHNVRYIAIDDGVDSEKGESEIAPFKNIINEWVARDTSRKVKSAFRTKFAEGAHYGAYAPLGYKKHPDIKGKLLIDDETKWIVEKIFSLAYQGYGSAKITKILREEKVPTASWLNFTRYGTFAHIFEGKPESKRYEWTIAHVKAILKSEVYIGNSVHNMQSTVSFKSKKKVRKPESEWFRVENTHEPIIDKEVFYRVQEQIKSRRRQTKEKATPIFAGLVKCADCGWSMRFGTNTANKTPYSYYACSFYGQFSKGYCSMHYIRYDVLYQAILERLQYWAKAVQQDEEKVLHKIQKAGNAERIREKKKKASALKKAENRQNEIDRLFAKMYEDRACEKITERNFVMLSGKYQKEQIELEQQITSLREELSKMEQDMIGAEKWVELIKEYSVPKELTAPLLNAMIEKILIHEATTNEDNERIQEIEIYYRFIGKVD

SEQ ID NO: 5332 - DNA, 50 bp, Clostridioides difficile; identical to SEQ ID NO: 3167
  source 1..50: mol_type = genomic DNA

SEQ ID NO: 5333 - DNA, 40 bp, Clostridioides difficile
  source 1..40: mol_type = genomic DNA
agtatctaagtgggagagtggaaattcttacccagatata

SEQ ID NO: 5334 - DNA, 40 bp, Clostridioides difficile
  source 1..40: mol_type = genomic DNA
agtatctaagtgggagagtagaaattcttacccagatata

SEQ ID NO: 5335 - DNA, 50 bp, Clostridioides difficile
  source 1..50: mol_type = genomic DNA
tcatgtatttaataaagtgaaaggagagttacacttcctacaaaatttgg

SEQ ID NO: 5336 - protein, 537 aa, Clostridioides difficile; identical to SEQ ID NO: 3171

SEQ ID NO: 5337 - DNA, 50 bp, Clostridioides difficile; identical to SEQ ID NO: 3167
  source 1..50: mol_type = genomic DNA

SEQ ID NO: 5338 - DNA, 40 bp, Clostridioides difficile; identical to SEQ ID NO: 5333
  source 1..40: mol_type = genomic DNA

SEQ ID NO: 5339 - DNA, 40 bp, Clostridioides difficile; identical to SEQ ID NO: 5334
  source 1..40: mol_type = genomic DNA

SEQ ID NO: 5340 - DNA, 50 bp, Clostridioides difficile; identical to SEQ ID NO: 5335
  source 1..50: mol_type = genomic DNA

SEQ ID NO: 5341 - protein, 537 aa, Clostridioides difficile; identical to SEQ ID NO: 3171

SEQ ID NO: 5342 - DNA, 50 bp, Clostridioides difficile; identical to SEQ ID NO: 3167
  source 1..50: mol_type = genomic DNA

SEQ ID NO: 5343 - DNA, 40 bp, Clostridioides difficile
  source 1..40: mol_type = genomic DNA
aatagcaaaatgggaaagtggagaatctattcctgatata

SEQ ID NO: 5344 - DNA, 40 bp, Clostridioides difficile
  source 1..40: mol_type = genomic DNA
aatagcaaaatgggaaagtagagaatctattcctgatata

SEQ ID NO: 5345 - DNA, 50 bp, Clostridioides difficile; identical to SEQ ID NO: 5335
  source 1..50: mol_type = genomic DNA

SEQ ID NO: 5346 - protein, 438 aa, Clostridioides difficile
MYFPSHNVRYIAIDDGVDSEKGESEIAPFKNIINEWVARDTSRKVKSAFRTKFAEGAHYGAYAPLGYKKHPDIKGKLLIDDETKWIVEKIFSLAYQGYGSAKITKILREEKVPTASWLNFTRYGTFAHIFEGKPESKRYEWTIAHVKAILKSEVYIGNSVHNMQSTVSFKSKKKVRKPESEWFRVENTHEPIIDKEVFYRVQEQIKSRRRQTKEKATPIFAGLVKCADCGWSMRFGTNTANKTPYSYYACSFYGQFGKGYCSMHYIRYDVLYQAILERLQYWAKAVQQDEEKVLHKIQKAGNAERIREKKKKASALKKAENRQNEIDRLFAKMYEDRACEKITERNFVMLSGKYQKEQIELEQQITSLREELSKMEQDMIGAEKWVELIKEYSVPKELTAPLLNAMIEKILIHEATTNEDNERIQEIEIYYRFIGKVD

SEQ ID NO: 5347 - DNA, 50 bp, Clostridioides difficile; identical to SEQ ID NO: 3167
  source 1..50: mol_type = genomic DNA

SEQ ID NO: 5348 - DNA, 40 bp, Clostridioides difficile; identical to SEQ ID NO: 5343
  source 1..40: mol_type = genomic DNA

SEQ ID NO: 5349 - DNA, 40 bp, Clostridioides difficile; identical to SEQ ID NO: 5344
  source 1..40: mol_type = genomic DNA

SEQ ID NO: 5350 - DNA, 50 bp, Clostridioides difficile; identical to SEQ ID NO: 5335
  source 1..50: mol_type = genomic DNA

SEQ ID NO: 5351 - protein, 438 aa, Clostridioides difficile; identical to SEQ ID NO: 5346

SEQ ID NO: 5352 - DNA, 50 bp, Clostridioides difficile; identical to SEQ ID NO: 3167
  source 1..50: mol_type = genomic DNA

SEQ ID NO: 5353 - DNA, 40 bp, Clostridioides difficile; identical to SEQ ID NO: 5333
  source 1..40: mol_type = genomic DNA

SEQ ID NO: 5354 - DNA, 40 bp, Clostridioides difficile; identical to SEQ ID NO: 5334
  source 1..40: mol_type = genomic DNA

SEQ ID NO: 5355 - DNA, 50 bp, Clostridioides difficile; identical to SEQ ID NO: 5335
  source 1..50: mol_type = genomic DNA

SEQ ID NO: 5356 - protein, 537 aa, Clostridioides difficile
MKQQIYNTALYLRLNRDDELQGESSSITTQKSMLRLYAKEHHLNVIDEYIDDGWSGTNFERPSFQRMIEDIEAGKINCVVTKDLSRFGRNYIMTGQYTELYFPSHNVRYIAIDDGVDSEKGESEIAPFKNIINEWVARDTSRKVKSAFRTKFAEGAHYGAYAPLGYKKHPDIKGKLLIDDETKWIVEKIFSLAYQGYGSAKITKILREEKVPTASWLNFTRYGTFAHIFEGKPESKRYEWTIAHVKAILKSEVYIGNSVHNMQSTVSFKSKKKVRKPESEWFRVENTHEPIIDKEVFYRVQEQIKSRRRQTKEKATPIFAGLVKCADCGWSMRFGTNTANKTPYSYYACSFYGQFGKGYCSMHYIRYDVLYQAILERLQYWAKAVQQDEEKVLHKIQKAGNAERIREKKKKASALKKAENRQNEIDRLFAKMYEDRACEKITERNFVMLSGKYQKEQIELEQQITSLREELSKMEQDMIGAEKWVELIKEYSVPKELTAPLLNAMIEKILIHEATTNEDNERIQEIEIYYRFIGKVD

SEQ ID NO: 5357 - DNA, 50 bp, Clostridioides difficile; identical to SEQ ID NO: 3167
  source 1..50: mol_type = genomic DNA

SEQ ID NO: 5358 - DNA, 40 bp, Clostridioides difficile; identical to SEQ ID NO: 5343
  source 1..40: mol_type = genomic DNA

SEQ ID NO: 5359 - DNA, 40 bp, Clostridioides difficile; identical to SEQ ID NO: 5344
  source 1..40: mol_type = genomic DNA

SEQ ID NO: 5360 - DNA, 50 bp, Clostridioides difficile; identical to SEQ ID NO: 5335
  source 1..50: mol_type = genomic DNA

SEQ ID NO: 5361 - protein, 513 aa, Adlercreutzia mucosicola
MYSTMPSDWLCCGYLRKSREDELRDREIETDTLKRHQSIIEDLAEENGHAIRQWYREVVSGETIAGRPEMTALINDVAKGLWNAVYVVEASRLGRGGGSDQEKIVNAFRYTGTWLITESDGVYDPDSKADMKRLRNDLRKSEDELDDITTRLIRGKAKAVKEGIWLATGRAPYGWRAVRVKGLWQLEPDENHSNMLRIYDMLEAGDGFATIAATFNREGIPTLRGGEHWTPSSIQNIARNPANCGYVVYGVHKTRRIFDPDTFEVRKIKEKNNKPLIYKGLHFEKGGITPERFERIIGRKAHDARIHKDRQLRNPLATLLRCGKCGKCMTVHLLNAHKPSKAYYFMHKPDKRYTGTCTGVKGVKVDMIMELLADALEDMCNNIEIQLSDDREDDYEERRAQIIREQEKAIKARDRAMEAFEAGIYTLDDFAERKRSIEERIARLDEALAQCKPREPKEDTIVNLKECIRAIKDDSLSIKAKNDLLKSFIDHIDYYNGETRPRHHDIRIEVFLR

SEQ ID NO: 5362 - DNA, 50 bp, Adlercreutzia mucosicola
  source 1..50: mol_type = genomic DNA
aacatctatcattatgaaaagcacccatgctttatacgatggtaggtgtt

SEQ ID NO: 5363 - DNA, 40 bp, Adlercreutzia mucosicola
  source 1..40: mol_type = genomic DNA
gcaacggtgccagaagcaccccataacgaaaatggccttc

SEQ ID NO: 5364 - DNA, 40 bp, Adlercreutzia mucosicola
  source 1..40: mol_type = genomic DNA
gcaacggtgccagaagcacttcataacgaaaatggccttc

SEQ ID NO: 5365 - DNA, 50 bp, Adlercreutzia mucosicola
  source 1..50: mol_type = genomic DNA
aaaatttgtagcaagtaaaagcacttatgcttaagaacactgtagatgtt

SEQ ID NO: 5366 - protein, 545 aa, Faecalibacterium sp
MSGATNKITALYCRLSQEDARLGESLSIENQKAILLEYAKKNHFPNPVFFVDDGYSGTNYDRPGFQSMLTEIEAGHIEIVITKDLSRLGRNSALTGLYTNFTFPQYGVRYIAINDNYDTIDPNSVNNDFAGIKNWFNEFYARDTSRKIRAVQKAKGERGVPLTVNVPYGYVKDPENLKHWLVDPEAAAIVKRIFSMCMEGRGPTQIANQLWVDKVLTPTAYKLSHGLSTNSPAPEDPYRWDKRAVSSILERLEYTGCTVNFKTYTNSIWDKKRHLNPVENQAIFPDTHERIIDDDVFEKVREIRSQRHRMTRTGKSSIFSGMVYCADCGSKMQYGSSNHRDFSQDFFDCSLHKKNGSKCKGHFIRVKVLEGRVLSHVQRVTDYILCHEDYFRKVMEEQLRVESTEKLTVLKKQLARNEKRIADLKRLFMKIYEDNASGKLSDERFDMMSQSYDAEQKHLEEEALSIQQEIEVQEQQIENIEKFVQKAHKYVHIEELTPYALRELVSAIYVDAPNKSSGKRVQHIHIKYDGLGYIPLDELEAKEKA

SEQ ID NO: 5367 - DNA, 50 bp, Faecalibacterium sp
  source 1..50: mol_type = genomic DNA
atactgttttatgggaactctgctcttgctgggtattcgtaaaacagttt

SEQ ID NO: 5368 - DNA, 40 bp, Faecalibacterium sp
  source 1..40: mol_type = genomic DNA
ttaaatgcgacctcatgttctgaacagcaccctgtttttg

SEQ ID NO: 5369 - DNA, 40 bp, Faecalibacterium sp
  source 1..40: mol_type = genomic DNA
ttaaatgcgacctcatgttgcgaacagcaccctgtttttg

SEQ ID NO: 5370 - DNA, 50 bp, Faecalibacterium sp
  source 1..50: mol_type = genomic DNA
atactctttgtgatagactcttcagctgatgtgtatttaaataacagttt

SEQ ID NO: 5371 - protein, 545 aa, Faecalibacterium prausnitzii
MSGATNKITALYCRLSQEDARLGESLSIENQKAILLEYAKKNYFPNPVFFVDDGYSGTNYDRPGFQSMLTEIEAGHIGIVITKDLSRLGRNSALTGLYTNFTFPQYGVRYIAINDNYDTIDPNSVNNDFAGIKNWFNEFYARDTSRKIRAVQKAKGERGVPLTVNVPYGYVKDPENPKHWLVDSEAAAVVKRIFSMCMEGRGPTQIANQLWVDKVLTPTAYKLSHGRSTNAPAPEDPYRWDKRAVSLILERREYTGCTVNFKTYTNSIWDKKKHLNPVKNQAIFSDTHERIIDDDVFEKVQEIRNQRHRMTRTGKSSIFSGVVYCADCGSKMQYGSSNNRDFSQDFFDCSLHRKNGSRCKGHFIRVKVLEGRVLNHIQQVTDYILCHEDYFRKVMEEQLRVESSEKLTVLKKQLARNEKRIADLKRLFMKIYEDNASGKLSDERFDMMSQSYDAEQKQLEEDVLSIQQEIEVQEQQIENIEKFVQKAHKYVHIEELTPYALRELVSAIYVYAPDKSSGKRVQHIHIKYDGLGYIPLDELDAKEKA

SEQ ID NO: 5372 - DNA, 50 bp, Faecalibacterium prausnitzii
  source 1..50: mol_type = genomic DNA
atactgttttatgggaactctgctcctgctgggtattcgtaaaacagttt

SEQ ID NO: 5373 - DNA, 40 bp, Faecalibacterium prausnitzii
  source 1..40: mol_type = genomic DNA
caaaaacagggtgcgcccacccggacgcaccctgcaaaaa

SEQ ID NO: 5374 - DNA, 40 bp, Faecalibacterium prausnitzii
  source 1..40: mol_type = genomic DNA
caaaaacagggtgcgcccagccggacgcaccctgcaaaaa

SEQ ID NO: 5375 - DNA, 50 bp, Faecalibacterium prausnitzii; identical to SEQ ID NO: 5370
  source 1..50: mol_type = genomic DNA

SEQ ID NO: 5376 - protein, 545 aa, Faecalibacterium prausnitzii
MSGATNKITALYCRLSQEDARLGESLSIENQKAILLEYAKKNHFPNPVFFVDDGYSGTNYDRPGFQSMLTEIEAGHIGIVITKDLSRLGRNSALTGLYTNFTFPQYGVRYIAINDNYDTIDPNSINNDFAGIKNWFNEFYARDTSRKIRAVQKAKGERGVPLTVNVPYGYVKDPENPKHWLVDPEAAAVVKRIFSMCMEGRGPTQIANQLWVDKVLTPTAYKLSHGRSTNAPAPEDPYRWDKRAVSLILERREYTGCTVNFKTYTNSIWDKKKHLNPVKNQAIFSDTHERIIDDDVFEKVQEIRSQRHRMTRTGKSSIFSGMVYCADCGSKMQYGSSNNRDFSQDFFDCSLHKKNGSRCKGHFIRVKVLEGRVLNHIQQVTDYILCHEDYFRKVMEEQLRVESSEKLTVLKKQLARNEKRIADLKRLFMKIYEDNASGKLSDARFDMMSQSYDAEQKQLEEDVLSFQQEVEVQEQQIENIEKFVQKAHKYVHIEELTPYALRELVSAIYVDAPDKSSGKRVQHIHIKYDGLGYIPLDELEAKEKA

SEQ ID NO: 5377 - DNA, 50 bp, Faecalibacterium prausnitzii
  source 1..50: mol_type = genomic DNA
atactgttttatgggaactctgctggtgctgggtattcgtaaaacagttt

SEQ ID NO: 5378 - DNA, 40 bp, Faecalibacterium prausnitzii
  source 1..40: mol_type = genomic DNA
tttttgcagggtgcgtccgggtgggcgcaccctgtttttg

SEQ ID NO: 5379 - DNA, 40 bp, Faecalibacterium prausnitzii
  source 1..40: mol_type = genomic DNA
tttttgcagggtgcgtccggctgggcgcaccctgtttttg

SEQ ID NO: 5380 - DNA, 50 bp, Faecalibacterium prausnitzii; identical to SEQ ID NO: 5370
  source 1..50: mol_type = genomic DNA

SEQ ID NO: 5381 - protein, 545 aa, Faecalibacterium prausnitzii
MSGATNKITALYCRLSQEDARLGESLSIENQKAILLEYAKKNHFPNPVFFVDDGYSGTSYDRPGFQSMLTEIEAGHIGIVITKDLSRLGRNSALTGLYTNFTFPQCGVRYIAINDNYDTIDPNSVNNDFAGIKNWFNEFYARDTSRKIRAVQKAKGERGVPLTVNVPYGYVKDPENPKHWLVDPEAAAVVKRIFSMCMEGRGPTQIANQLWVDKVLTPTAYKLSHGRSTNAPAPEDPYRWDKRAVSLILERREYTGCTVNFKTYTNSIWDKKKHLNPVKNQAIFSDTHERIIDDDVFEKVQKIRNQRHRMTRTGKSSIFSGMVYCADCGSKMQYGSSNNRDFSQDFFDCSLHKKNGSRCKGHFIRVKVLEGRVLNHIQQVTDYILCHEDYFRKVMEEQLRVESSEKLTVLKKQLARNEKRIADLKRLFMKIYEDNASGKLSDARFDMMSQSYDAEQKQLEEDGLSIQQEIEVQEQQIENIEKFVQKAHKYVHIEELTPYALRELVSAIYVDAPDKSSGKRVQHIHIKYDGLGYIPLDELEAKEKA

SEQ ID NO: 5382 - DNA, 50 bp, Faecalibacterium prausnitzii; identical to SEQ ID NO: 5377
  source 1..50: mol_type = genomic DNA

SEQ ID NO: 5383 - DNA, 40 bp, Faecalibacterium prausnitzii
  source 1..40: mol_type = genomic DNA
aaaaaacagcacgccgttcggtttcggcgtgctgtttttg

SEQ ID NO: 5384 - DNA, 40 bp, Faecalibacterium prausnitzii
  source 1..40: mol_type = genomic DNA
aaaaaacagcacgccgttcgctttcggcgtgctgtttttg

SEQ ID NO: 5385 - DNA, 50 bp, Faecalibacterium prausnitzii; identical to SEQ ID NO: 5370
  source 1..50: mol_type = genomic DNA

SEQ ID NO: 5386 - protein, 465 aa, Vibrio coralliirubri
MIEKVDRLTRLSISESQSLINDLLRYVDIHEYEGNLHLIEESKDDLASVLLLAVKIDSANQYTKMLSERVKQGLSKKRADAVHVSPKPPQWVKKTPEGYEFNERVEIVRLMLELRLQGLAFNKIALKINNQGFTKPNGSAWQTGNVSSICKNKAVIGICSTKYGDIKDVYPPVITEADFNEINKEKLNHFATGKKSSFEQNLFADLGKCHLCNSAISKQTKESYVCSGRYHGNNCHNQSIPLKALEHAVIQIMFNQLEQNQIFSTSNESELQKLRLDLSKFEHEYNELEHYIDSQASVSPRLLIELDKRQKELEELKTKINVQDSAIVSEFTELQVNYRDILSDKALRVKAKKLLRRLLDKVTYEKHDKLKFYVVLHFKTTSEAMLIEVSGYQEKHKFGQGQRPISYHYKLMHFEQDIETSIAWYNASTATIGFIRYSDIEQFSDVEKNLCMEAFKLEKQSKKTS

SEQ ID NO: 5387 - DNA, 50 bp, Vibrio coralliirubri
  source 1..50: mol_type = genomic DNA
aaaaatgataatgtacattttatctaagataactttacattaacatagtt

SEQ ID NO: 5388 - DNA, 40 bp, Vibrio coralliirubri
  source 1..40: mol_type = genomic DNA
cgatcttgatcacttcagcgaagacaactttaccaaagac

SEQ ID NO: 5389 - DNA, 40 bp, Vibrio coralliirubri
  source 1..40: mol_type = genomic DNA
cgatcttgatcacttcagcttagacaactttaccaaagac

SEQ ID NO: 5390 - DNA, 50 bp, Vibrio coralliirubri
  source 1..50: mol_type = genomic DNA
aaaaatgtttgtacatattttgtctttgataattttgcagcaactttctt

SEQ ID NO: 5391 - protein, 498 aa, Klebsiella pneumoniae
MKQNGQAYSYIRFSSKKQEQGDSVRRQTELAEQYAHANNLILSDKNFQDLGISAFKEGNRPSLGDMLEAIEKGQIEQGSTIIIESLDRLSRRGIDVTQQIIKSILQNNVFIASLVDGLLLNRESTNDLVSVIRIALAADLAYKESEKKSQRLRETKGQQRQRALNGEVINKILPFWLERKQNKFVFSDKLDTVKRIIELRRKGLGTNKIAKTLNNEGYKPLRSAGWNHTTIGKTINSVALYGAYQTSETTKDRKIILLDIVEDYYPAVISKEEFMLLQSDQKQNKPGYKSEHNAFAGILKHECGGALVRKFHAVSGKTYQYHVCANARDGKCNVTKNFKNIEIALYRIMKELKLEKKTNIDETLILERNSVKAKIQDLNDMLLNLSKIPVSVIQTINNLEEKLQRLEEKIKEQNSMIISEQAFDLNLLQEIKDPQELNMMLKRVIEQIIVFNIGKRWRVKVMYRNKHSQNFIWDGEKISFISDTKKLLELFKSQTEQT

SEQ ID NO: 5392 - DNA, 50 bp, Klebsiella pneumoniae
  source 1..50: mol_type = genomic DNA
ttttattcactttgaaacaatattgtgatattgttgcaaagaagcaaaat

SEQ ID NO: 5393 - DNA, 40 bp, Klebsiella pneumoniae; identical to SEQ ID NO: 1418
  source 1..40: mol_type = genomic DNA

SEQ ID NO: 5394 - DNA, 40 bp, Klebsiella pneumoniae
  source 1..40: mol_type = genomic DNA
cttactgccaaactgcatgggaacgttgctggatactagc

SEQ ID NO: 5395 - DNA, 50 bp, Klebsiella pneumoniae
  source 1..50: mol_type = genomic DNA
ttttcttctttttaaatcaattttgggatataatttacataaaacaaaat

SEQ ID NO: 5396 - protein, 498 aa, Klebsiella grimontii
MKQNGQAYSYIRFSSKKQEQGDSVRRQTELAEQYAHANNLILSDKNFQDLGISAFKEGNRPSLGDMLEAIEKGQIEQGSTIIIESLDRLSRRGIDVTQQIIKSILQNNVFIASLVDGLLLNRESTNDLVSVIRIALAADLAYKESEKKSQRLRETKGQQRQRALNGEVINKILPFWLERKQNKFVFSDKLDTVKRIIELRRKGLGTNKIAKTLNNEGYKPLRSAGWNHTTIGKTINSVALYGAYQTSETTKDRKIILLDIVEDYYPAVISKEEFMLLQSDQKQNKPGYKSEHNAFAGILKHECGGALVRKFHAVSGKTYQYHVCANARDGKCNVTKNFKNIEIALYRIMKELKLEKKTNIDETLILERNSVKAKIQDLNDMLLNLSKIPVSVIQTINNLEEKLQRLEEKIKEQNSMIISEQAFDLNLLQEIKDPQELNMMLKRVIEQIIVFNIGKRWRVKVMYRNKHSQNFIWDGEKISFISDTKKLLELFKSQKEQT

SEQ ID NO: 5397 - DNA, 50 bp, Klebsiella grimontii; identical to SEQ ID NO: 5392
  source 1..50: mol_type = genomic DNA

SEQ ID NO: 5398 - DNA, 40 bp, Klebsiella grimontii; identical to SEQ ID NO: 4508
  source 1..40: mol_type = genomic DNA

SEQ ID NO: 5399 - DNA, 40 bp, Klebsiella grimontii
  source 1..40: mol_type = genomic DNA
cttactgccgaactgcatggggacgttgctggatactagc

SEQ ID NO: 5400 - DNA, 50 bp, Klebsiella grimontii; identical to SEQ ID NO: 5395
  source 1..50: mol_type = genomic DNA

SEQ ID NO: 5401 - protein, 498 aa, Klebsiella pneumoniae; identical to SEQ ID NO: 5391

SEQ ID NO: 5402 - DNA, 50 bp, Klebsiella pneumoniae; identical to SEQ ID NO: 5392
  source 1..50: mol_type = genomic DNA

SEQ ID NO: 5403 - DNA, 40 bp, Klebsiella pneumoniae; identical to SEQ ID NO: 1423
  source 1..40: mol_type = genomic DNA

SEQ ID NO: 5404 - DNA, 40 bp, Klebsiella pneumoniae
  source 1..40: mol_type = genomic DNA
cttgctgccaaactgcatgggaacgttgctggatactagc

SEQ ID NO: 5405 - DNA, 50 bp, Klebsiella pneumoniae; identical to SEQ ID NO: 5395
  source 1..50: mol_type = genomic DNA

SEQ ID NO: 5406 - protein, 507 aa, Escherichia coli
MKRVISYIRFSSERQAKGDSLRRQSKMVTDWLKAHPEYYLDQDLSFRDLGVSGFTGKHLKGGLGDFLTAIEKGLVKAGDTLLIESLDRLSRQDIDIASELLRRILRAGVDVVTLSDGEHYTKESLKDPLALIKSILIMQRAHEESLRKAERIQAAWDAKKEAAKAGIKVSKRCPAWLKLNDDRKSFSVIPEKVETVKRCFQLRLEGKSIWEIVRTLNDEGRQTLNQHKAGSFGQSSVQDLLKNRSVIGYFTPKGCEEIAGYYPAIIDETTFYKVQQLSYARYGRKPASDKPLSVNLFKGVIRCSECGHALIITGFSDTRSGIYRCPLRNENRCSAKGLSRKQTDGTLLALLSRLDRFDSDTTNIIDTLKLHREHISSNIEKLVQLSLEIEDLNAITNKLKQLKNELSQVDADIEKETQRLKSIDVGCLSDCDLTTKAGRIEAQLIIKSAVKEVVLNTAKRRCKVTFHNGKVIDLPITENPSEDVTEAIQSLSEVTERGLIDVDEVII

SEQ ID NO: 5407 - DNA, 50 bp, Escherichia coli
  source 1..50: mol_type = genomic DNA
agtgtatttagaccttgctgtttttttcatcagacacgtttaaatacacc

SEQ ID NO: 5408 - DNA, 40 bp, Escherichia coli
  source 1..40: mol_type = genomic DNA
gcggcgttaatcgggtgattttagacagccgcccggttca

SEQ ID NO: 5409 - DNA, 40 bp, Escherichia coli; identical to SEQ ID NO: 5408
  source 1..40: mol_type = genomic DNA

SEQ ID NO: 5410 - DNA, 50 bp, Escherichia coli
  source 1..50: mol_type = genomic DNA
agtttatttcatgtaggcagtttatttcatcacaaaggcagaaataaacc

SEQ ID NO: 5411 - protein, 502 aa, Robertmurraya siralis
MKTFYNSEKALKAIKNVALYLRKSRGDIDEDLKKHSLIMKEICEKNEWNYVEYSEIGSGESIEDRVEMKKLLKDVEEGLYDAVVCFQFDRLGRGSGTDQDTIRWTFKNSDTLIITANPFEILDPNDERDEETMDFKGFLARREYKIITKRLSSGRKIGLRMGRWSNGQAPWGYRYNKELKKLTPHPEESEIYKTLIVQEFLDGKSTYDIAWNLNKKKIPSPRNGLWHSNTVNNLLKSEVHLGHIVFNKTEGVRESQKKSKDKKTFKRLPKEEWMIVKNCHIPLKTEEQHMRILHLMGIKKSHVKGGNINALSGLVKCFNCQSTLTIQKNKNGIFFKKCSKCKECKGGHIDLAYDAIQDSVLFLRDKLTQINNSYSNDNEKQIILNKIKTIEEELDKNEEALERIEDAYEMGMYSAEKAKVKSKARQERILELEDELKIQKKKIESFSIVTNEERIKRIDKFLEDVKTISDPEKLNVIYKSIIDNIQWKRTDTYEVKITVNFL

SEQ ID NO: 5412 - DNA, 50 bp, Robertmurraya siralis
  source 1..50: mol_type = genomic DNA
aaaaatatcactaataaattctatgtatgaaatgttttaataataccatt

SEQ ID NO: 5413 - DNA, 40 bp, Robertmurraya siralis
  source 1..40: mol_type = genomic DNA
aaaagtggcgatattacttgtatgcgtttttgtcacattt

SEQ ID NO: 5414 - DNA, 40 bp, Robertmurraya siralis; identical to SEQ ID NO: 5413
  source 1..40: mol_type = genomic DNA

SEQ ID NO: 5415 - DNA, 50 bp, Robertmurraya siralis
  source 1..50: mol_type = genomic DNA
aaaaatatcatttctaaattccttgtatgtaatacttacacaatagtttt

SEQ ID NO: 5416 - protein, 485 aa, Streptococcus canis
MAEKRKVAIYCRVSSMHQAIEGYSIEQQRDSLTKYCEAMEWNIYDIYIDAGFSGGKLERPAMDKLIREAEAGKFDTVAVYKLDRLSRSVQDTLHLIRDVFKEHDIDFVCLQENIDTKSAMGNLFLTLLSAIAEFEREQITERMAMGRHGRAKSGKSMMWARPAYGYRYDRESQTVSVVQSEAMIVKRIYKEYLEGKSVSQIKNDLNSEGHITKEKPWVYKRITYILQSRVYTGVNEYKGEIYDGKHEAIIDTETFELTQMEFAKRQQQTKDKKNNPRPFQAKYMLSGLARCGYCKAPLKLRLGAVRKDGTRAMVYDCHNRWNRKVTYLTIYNDNKQCTESGRYQKADLEAYVLDKIKELQLNPDTIREKMDLNEKPTANTEEIKKQIAKINQQIDKLNDLYLNDLITVEKLKERAGKLKKERELLEVELSKNSDHLFKAKKKQLNDLLMNKDIDSMTYEEQRNLVKMLIYKVDVTKEDINIIFDF

SEQ ID NO: 5417 - DNA, 50 bp, Streptococcus canis
  source 1..50: mol_type = genomic DNA
tagtgttttttagtgtcttgtattcaaatgcaagatactaaaattcttcc

SEQ ID NO: 5418 - DNA, 40 bp, Streptococcus canis
  source 1..40: mol_type = genomic DNA
cctagactttccctgcaatcagtttttaaatcaagctcct

SEQ ID NO: 5419 - DNA, 40 bp, Streptococcus canis
  source 1..40: mol_type = genomic DNA
cctagactttccctgcaatgagtttttaaatcaagctcct

SEQ ID NO: 5420 - DNA, 50 bp, Streptococcus canis
  source 1..50: mol_type = genomic DNA
cagtcatttacaatgtcttccatagaaatgaaagaagaatgaattcttcc

SEQ ID NO: 5421 - protein, 580 aa, Klebsiella variicola
MKLYSYQRWSSAVQADGTSKSRQSHAAEQYAAANNLELVEIVDAGISGFKSLNSKKGALSQFLDAVDAGLIIKNSYLYVESLDRITRDEIDIALELFMGILRRGITIVTGMDNKIYTHEGIKGNPIDLLTSLILFTRAHEESKTKQQRTNGNALALIRRFQNGLPTTIKSIGSHPWWIDASTDKYEAVRKHPILWKCAYDAVNLFLEGNSVFKVTQYLNDKYPNAFKNKAWSIANVRKLRFNKAVYGLRVINVDGKTYKLENYFPPLITEGQFLRLEKIRETTKYIGKVGEKTNNINLLAGMKIFRCGHCSGTMMAMRDGDSIRYLCEKGRGYNHDCKTWSLPGILVEHTLMLVTTIAYINMQRKGRVDKEDYTHQIQNIEELIIDVGNKISRMTKLVTNGLGDIDEVIKEMTNLDKVRKQYILELEVLQRKQLLSQDNTFESLMMDFFTYAQYGVLQDPVHEYRNKLRDIVYSSIGEVKAWKIDRRLMVSFQIKGDDEYYTFSAGDEPYNYIFYYGSPVTLGEDLSPMGTYELPEEVKRRIRDYSGLYEATMNVLKEANNMLSVINYPPLDGKMFWPRK

SEQ ID NO: 5422 - DNA, 50 bp, Klebsiella variicola
  source 1..50: mol_type = genomic DNA
aaatgtgtagaaaatcattttggaaatccaagagtaatttctacacatta

SEQ ID NO: 5423 - DNA, 40 bp, Klebsiella variicola
  source 1..40: mol_type = genomic DNA
tatgattagccatccgggtaatccgaaattcccggtggat

SEQ ID NO: 5424 - DNA, 40 bp, Klebsiella variicola
  source 1..40: mol_type = genomic DNA
tatgattagccatccgggttttccgaaattcccggtggat

SEQ ID NO: 5425 - DNA, 50 bp, Klebsiella variicola
  source 1..50: mol_type = genomic DNA
aaatgtgtaaatgtttagtttgcatttacaagaatatatcacaaatatta

SEQ ID NO: 5426 - protein, 612 aa, Bacteroides ovatus; identical to SEQ ID NO: 2426

SEQ ID NO: 5427 - DNA, 50 bp, Bacteroides ovatus; identical to SEQ ID NO: 2427
  source 1..50: mol_type = genomic DNA

SEQ ID NO: 5428 - DNA, 40 bp, Bacteroides ovatus
  source 1..40: mol_type = genomic DNA
tcggttgaattccggtaactcatctaaaaaaagtactcca

SEQ ID NO: 5429 - DNA, 40 bp, Bacteroides ovatus
  source 1..40: mol_type = genomic DNA
tcggttgaattccggtaactaatctaaaaaaagtactcca

SEQ ID NO: 5430 - DNA, 50 bp, Bacteroides ovatus
  source 1..50: mol_type = genomic DNA
aggttaaatgaggttgagaatacttacataatattaagaatctcccacaa

SEQ ID NO: 5431 - protein, 612 aa, Bacteroides caccae; identical to SEQ ID NO: 2426

SEQ ID NO: 5432 - DNA, 50 bp, Bacteroides caccae; identical to SEQ ID NO: 2427
  source 1..50: mol_type = genomic DNA

SEQ ID NO: 5433 - DNA, 40 bp, Bacteroides caccae
  source 1..40: mol_type = genomic DNA
tctattaaactccggcagttcatctaggaataaaattccg

SEQ ID NO: 5434 - DNA, 40 bp, Bacteroides caccae
  source 1..40: mol_type = genomic DNA
tctattaaactccggcagttaatctaggaataaaattccg

SEQ ID NO: 5435 - DNA, 50 bp, Bacteroides caccae; identical to SEQ ID NO: 5430
  source 1..50: mol_type = genomic DNA

SEQ ID NO: 5436 - protein, 474 aa, Latilactobacillus curvatus
MKVGIYVRVSTLEQATEGYSIQEQTDKLKKFCDVKEWTVSDIYTDPGFSGSSLKRPGMQKLINDVEQQKIDAVLVYKLDRLSRSQKDTLYLIEDVFLKYNVHFVSLNENFDTSSPFGRASIGMMSVFAQLEREQITERMQMGKVGRAKAGYFHGGGTIPHGYDYKDGELIPNEKEAKIVNYIFDQYLDGWGVQSIAKHLNAKHISGKRSAKWSHKVVNEVLDNNLYIGKITWKNEIYDGTHAPIIDEDKFYKVQELMAKRKSTAAKNNQRPFKAKYMLTGLAYCGVCGARMFTLQSYSNKQRKYIRKYGCYSQSTVQHMVKDPNCDNDKYDGPELETYVLQRVKKLSMNPKTIKRITNQTASIVSTDGTKAQIKETEEQIERLLDLYQNGAITFAKIESRLDDLNAKKSNLEEQLKRLESEKLNNGSTTDVLDLLSTASDVVDSKDYDAQKRLVHALIQKITLKRDKVTIKWTF

SEQ ID NO: 5437 - DNA, 50 bp, Latilactobacillus curvatus
  source 1..50: mol_type = genomic DNA
taaaaatatttatgtacgtccatttcaattgcagttcactaatattttta

SEQ ID NO: 5438 - DNA, 40 bp, Latilactobacillus curvatus; identical to SEQ ID NO: 4263
  source 1..40: mol_type = genomic DNA

SEQ ID NO: 5439 - DNA, 40 bp, Latilactobacillus curvatus; identical to SEQ ID NO: 4263
  source 1..40: mol_type = genomic DNA

SEQ ID NO: 5440 - DNA, 50 bp, Latilactobacillus curvatus
  source 1..50: mol_type = genomic DNA
taaaaatacattattatcttcttttcaatttcagtttgcgaatatgtgta

SEQ ID NO: 5441 - protein, 481 aa, Streptococcus pneumoniae; identical to SEQ ID NO: 2261

SEQ ID NO: 5442 - DNA, 50 bp, Streptococcus pneumoniae
  source 1..50: mol_type = genomic DNA
aaatataaataattttagtaacctacatctcaatcaaggatagtaaaatt

SEQ ID NO: 5443 - DNA, 40 bp, Streptococcus pneumoniae; identical to SEQ ID NO: 5018
  source 1..40: mol_type = genomic DNA

SEQ ID NO: 5444 - DNA, 40 bp, Streptococcus pneumoniae; identical to SEQ ID NO: 5019
  source 1..40: mol_type = genomic DNA

SEQ ID NO: 5445 - DNA, 50 bp, Streptococcus pneumoniae
  source 1..50: mol_type = genomic DNA
acatataaaacactgaagtaatcaggatctcattcaacatcagtacagtt

SEQ ID NO: 5446 - protein, 481 aa, Streptococcus pneumoniae
MITTNKVAIYVRVSTTNQVEEGYSIDEQKDKLSSYCDIKDWNVYKVYTDGGFSGSNTDRPALESLIKDAKKRKFDTVLVYKLDRLSRSQKDTLHLIEDVFIKNGIEFLSLQENFDTSTPFGKAMIGLLSVFAQLEREQIKERMQLGKLGRAKSGKSMMWAKTSYGYDYHKETGTVTINPAQALTIKFIFESYLRGRSITKLRDDLNEKYPKHVPWSYRAVRTILDNPVYCGFNQYKGEIYPGNHEPIISKEEYDKTQSELKIRQRTAAENVNPRPFQAKYILSGIAQCGYCGAPLKIMLGVKRKDGSRLKKYECHQRHPRTLRGVTTYNDNKKCDSGFYYKDKLEASVLKEISKLQDDADYLDKIFSGDNAETIDRESYKKQIEELSKKLSRLNDLYIDDRITLEELQSKSAEFISMRGTLETELENDPALRKNKRKADMRKLLNAEKVFSMDYESQKVLVRRLINKVKVTAEDIVINWKI

SEQ ID NO: 5447 - DNA, 50 bp, Streptococcus pneumoniae; identical to SEQ ID NO: 5442
  source 1..50: mol_type = genomic DNA

SEQ ID NO: 5448 - DNA, 40 bp, Streptococcus pneumoniae; identical to SEQ ID NO: 5018
  source 1..40: mol_type = genomic DNA

SEQ ID NO: 5449 - DNA, 40 bp, Streptococcus pneumoniae; identical to SEQ ID NO: 5019
  source 1..40: mol_type = genomic DNA

SEQ ID NO: 5450 - DNA, 50 bp, Streptococcus pneumoniae; identical to SEQ ID NO: 5445
  source 1..50: mol_type = genomic DNA

SEQ ID NO: 5451 - protein, 481 aa, Streptococcus pneumoniae; identical to SEQ ID NO: 5061

SEQ ID NO: 5452 - DNA, 50 bp, Streptococcus pneumoniae; identical to SEQ ID NO: 5442
  source 1..50: mol_type = genomic DNA

SEQ ID NO: 5453 - DNA, 40 bp, Streptococcus pneumoniae; identical to SEQ ID NO: 5018
  source 1..40: mol_type = genomic DNA

SEQ ID NO: 5454 - DNA, 40 bp, Streptococcus pneumoniae; identical to SEQ ID NO: 5019
  source 1..40: mol_type = genomic DNA

SEQ ID NO: 5455 - DNA, 50 bp, Streptococcus pneumoniae; identical to SEQ ID NO: 5445
  source 1..50: mol_type = genomic DNA

SEQ ID NO: 5456 - protein, 481 aa, Streptococcus pneumoniae; identical to SEQ ID NO: 2191

SEQ ID NO: 5457 - DNA, 50 bp, Streptococcus pneumoniae; identical to SEQ ID NO: 5442
  source 1..50: mol_type = genomic DNA

SEQ ID NO: 5458 - DNA, 40 bp, Streptococcus pneumoniae; identical to SEQ ID NO: 5018
  source 1..40: mol_type = genomic DNA

SEQ ID NO: 5459 - DNA, 40 bp, Streptococcus pneumoniae; identical to SEQ ID NO: 5019
  source 1..40: mol_type = genomic DNA

SEQ ID NO: 5460 - DNA, 50 bp, Streptococcus pneumoniae; identical to SEQ ID NO: 5445
  source 1..50: mol_type = genomic DNA

SEQ ID NO: 5461 - protein, 481 aa, Streptococcus pneumoniae
MKTMNKVAIYVRVSTTNQVEEGYSIDEQKDKLSSYCDIKDWNVYKVYTDGGFSGSNTDRPALESLIKDAKKRKFDTVLVYKLDRLSRSQKDTLHLIEDVFIKNGIEFLSLQENFDTSTPFGKAMIGLLSVFAQLEREQIKERMQLGKIGRAKAGKSMMWAKTSYGYDYHRETGTITINPAQALAIKFIFESYLRGRSITKLRDDLNEKYPKHVPWSYRAVRTILDNPVYCGFNQYKGEIYPGNHEPIISKEEYDKTQSELKIRQRTAAENVNPRPFQAKYILSGIAQCGYCGAPLKIMLGVKRKDGSRLKKYECHQRHPRTLRGVTTYNDNKKCDSGFYYKDKLEAYVLKEISKLQDDADYLDKIFSGDNAETIDRESYKKQIEELSKKLSRLNDLYIDDRITLEELQSKSAEFISMRGTLETELENDPALRKNKRKADMRKLLNAEKVFSMDYENQKVLVRRLINKVKVTAEDIVINWKI

SEQ ID NO: 5462 - DNA, 50 bp, Streptococcus pneumoniae; identical to SEQ ID NO: 5442
  source 1..50: mol_type = genomic DNA

SEQ ID NO: 5463 - DNA, 40 bp, Streptococcus pneumoniae; identical to SEQ ID NO: 5018
  source 1..40: mol_type = genomic DNA

SEQ ID NO: 5464 - DNA, 40 bp, Streptococcus pneumoniae; identical to SEQ ID NO: 5019
  source 1..40: mol_type = genomic DNA

SEQ ID NO: 5465 - DNA, 50 bp, Streptococcus pneumoniae; identical to SEQ ID NO: 5445
  source 1..50: mol_type = genomic DNA

SEQ ID NO: 5466 - protein, 481 aa, Streptococcus oralis
MKTTNKVAIYVRVSTTSQVEEGYSIDEQKAKLSSYCDIKDWNVYKIYTDGGFSGANTDRPALESLIKDAKKRKFDTVLVYKLDRLSRSQKDTLYLIEDIFIKNNIAFLSLQENFDTSTPFGKAMIGLLSVFAQLEREQIKERMQLGKIGRAKAGKSMMWARTSYGYDYHRGTGTITVNPAQALAVKFIFESYLRGRSITKLRDDLNENYPKHVPWSYRAVRAILDNPVYCGFNQFKGEVYPGNHEPIITEEVYNKTQAELKVRQRTAAENVNPRPFQAKYILSGIAQCGYCLAPLKIIMGGKRKDGTRLTRYECHQRHPRTVRGVTTYNDNKKCDSGAYMKDDLEAYVLTEISKLQDDAGYLDKIFSDDNSETLDRESYKKQIEELSKKLSRLNDLYIDDRITLEELQNKSAEFISMRATLETELENDPALGKDKRKANMRELLNAEKVFSMDYESQKVLVRGLINKVRVTAEDIVIKWKI

SEQ ID NO: 5467 - DNA, 50 bp, Streptococcus oralis; identical to SEQ ID NO: 5442
  source 1..50: mol_type = genomic DNA

SEQ ID NO: 5468 - DNA, 40 bp, Streptococcus oralis
  source 1..40: mol_type = genomic DNA
atgataagcaaaaccactaacatttctaccaaagtgaaag

SEQ ID NO: 5469 - DNA, 40 bp, Streptococcus oralis
  source 1..40: mol_type = genomic DNA
atgataagcaaaaccactaggatttctaccaaagtgaaag

SEQ ID NO: 5470 - DNA, 50 bp, Streptococcus oralis; identical to SEQ ID NO: 5445
  source 1..50: mol_type = genomic DNA

SEQ ID NO: 5471 - protein, 481 aa, Streptococcus pneumoniae
MIATNKVAIYVRVSTTNQVEEGYSIDEQKDKLSSYCDIKDWNVYKVYTDGGFSGSNTDRPALESLIKDAKKRKFDTVLVYKLDRLSRSQKDTLHLIEDVFIKNEIEFLSLQENFDTSTPFGKAMIGLLSVFAQLEREQIKERMQLGKLGRAKSGKSMMWAKTSYGYDYHKETGTVTINPAQALTIKFIFESYLRGRSITKLRDDLNEKYPKHVPWSYRAVRTILDNPVYCGFNQYKGEIYPGNHEPIISKEEYDKTQSELKIRQRTAAENVNPRPFQAKYILSGIAQCGYCGAPLKIMLGVKRKDGSRLKKYECHQRHPRTLRGVTTYNDNKKCDSGFYYKDKLEASVLKEISKLQDDADYLDKIFSGDNAETIDRESYKKQIEELSKKLSRLNDLYIDDRITLEELQSKSAEFISMRGTLETELENDPALRKNKRKADMRKLLNAEKVFSMDYESQKVLVRRLINKVKVTAEDIVINWKI

SEQ ID NO: 5472 - DNA, 50 bp, Streptococcus pneumoniae
  source 1..50: mol_type = genomic DNA
aaatataaataattttagtaaccaacatctcaatcaaggatagtaaaact

SEQ ID NO: 5473 - DNA, 40 bp, Streptococcus pneumoniae; identical to SEQ ID NO: 5043
  source 1..40: mol_type = genomic DNA

SEQ ID NO: 5474 - DNA, 40 bp, Streptococcus pneumoniae; identical to SEQ ID NO: 5044
  source 1..40: mol_type = genomic DNA

SEQ ID NO: 5475 - DNA, 50 bp, Streptococcus pneumoniae; identical to SEQ ID NO: 5445
  source 1..50: mol_type = genomic DNA

SEQ ID NO: 5476 - protein, 514 aa, Vibrio parahaemolyticus
MNNNKALAVLYVRFSTKKQEAGDSQRRQIESAEQWCERNNAELSAQTYEDLGVSAFKEGGKRPALEDLINAIRMGKIPRDSYLLIEDHDRLSRRGWRYTQDLVYQLVQLGVRLVMLKTGVVYDANNINNIADNIVLMISAERAHQESERKSHLIKASREKARRDKKVTGKLPAWISRDGDGFTFNDKKATIQELINCKLSGKSHQSTAKHLNSLKMTTGNDSAWSASGVRAIVQNHALYGAKAYFDTGKDGRMNKEPIEIVSDIFPALITYEQYQVLNKRQQAGRTSKRGAYSRLLKCGACGGAMTTRTSNYKGKPRAYKMCVKATEGSCNQVERIREPEVYLNEALHYLKYESSSTLYISRTSEYQQRLETLNATVDLLTKNGSIEALARVYTDIKEVSDLIEGSKVLDQNNVDVKVDFSLISSIEDVEQRNIELRKVLREIRFYCIEKVGQTSKWKVVIEQINGIKKYLVLDQKYGFGNTVVDYASLLKQGTEDNREPWEIEDSEEWESYSY

SEQ ID NO: 5477 - DNA, 50 bp, Vibrio parahaemolyticus
  source 1..50: mol_type = genomic DNA
gtgcattgaaatgaacatattactaaagtattatacagattatgatgtac

SEQ ID NO: 5478 - DNA, 40 bp, Vibrio parahaemolyticus; identical to SEQ ID NO: 4428
  source 1..40: mol_type = genomic DNA

SEQ ID NO: 5479 - DNA, 40 bp, Vibrio parahaemolyticus
  source 1..40: mol_type = genomic DNA
atttggctggcatgtggtctcggttctctacagaacatag

SEQ ID NO: 5480 - DNA, 50 bp, Vibrio parahaemolyticus
  source 1..50: mol_type = genomic DNA
gtgcaatgactattagatattatttcaatattatattttaaataatgcat

SEQ ID NO: 5481 - protein, 547 aa, Vibrio vulnificus
MRTAYSYVRLSSKKQIQGYGQERQWEAIQAAALAHGWSLSEKTFSDLGVSGWKGANIETGALSQFLQCVEDGYIEKGSVLIVENVDRLSRAGVQRAVSLLMQLLASGISIYTFTDSKLYEPDSHNPLMDLMAWALSAQRAFEESERKSQMILNAKAKAREKARLTGEIITRRCPSWLRVNQDKTEFELIPERVETVRKIFDLYVNGYGTPRIGRLLTEEGRKPLTGRAWYPRSISRILQYRAVLGEYQPTLHGKPEGEAIKNYYPAIIDEDQFNEVQAVLKEGGAGKGRRGKEMRNYFAGLLRCSCGEGMHIVSSCVKGKRYYQLRCLQYRISCFDSPWNFYRLSSFVLFALRRLPILEVMGSQDNNNIKELNAKERELTFLLEDTRRQLDNTINAIAALGLNDQLQSKFRELKTSVTNIEKQLSNVKTELETSQGKLVIQKQDSEMLTGRFLELIDSTKDIDGRIKLNQVLRRYLSKIEMHADKKEEYRYIKIYRKDGDELVSIQCDHSLKGALFESKDGLETFELLPATDAKRNEISNTLLCTPK

SEQ ID NO: 5482 - DNA, 50 bp, Vibrio vulnificus
  source 1..50: mol_type = genomic DNA
ttatgtctttaagaaaacctaactaaagtattgtatcggttatgacataa

SEQ ID NO: 5483 - DNA, 40 bp, Vibrio vulnificus
  source 1..40: mol_type = genomic DNA
gttcggttggcacgtgttgaaggtgttgtacagaacctaa

SEQ ID NO: 5484 - DNA, 40 bp, Vibrio vulnificus; identical to SEQ ID NO: 5483
  source 1..40: mol_type = genomic DNA

SEQ ID NO: 5485 - DNA, 50 bp, Vibrio vulnificus
  source 1..50: mol_type = genomic DNA
ttatgtcttgagaaaaaccaaagaaaaataatgtacatccaaggacaaaa

SEQ ID NO: 5486 - protein, 538 aa, Oscillospiraceae bacterium
MIRQQTMQAPITALYCRLSRDDELQGESNSISNQKRILESYAREHSLMPYQFFVDDGWSGANFQRPGFTEMMDAVESGAVKTVVTKDLSRLGRNYLQVGLFTEITFPKKGVRFIAINDGVDSAQGDNDMSALRNLFNEWMVRDTSKKIKAVFRAKGMSGKPITSQPVYGYLKGENGEFIIDPEAAPVVKQIFSLCLAGNGPTKIARMLTEQNIPTPGTMEYRRTGSTRRYYPDYPCKWSSNTVAHILERREYLGHTVNFKTEKVSYKVKTSVLNPEEKVMVFEHTHEAIIDEATWERVQELRKQRKRPNRYGEVGLFSGLLFCADCGSVMYQQRYETDKRRQDCYICGSYKKRTADCTAHFIRTDLLTVGVTENLRKVTSYAAKHEARFMKLLMAQNEDGGKRKNAARRRELEAAQKRIGELSGIFKRLYEDSVSGRITDERFMELSADYEQEQATLKARVAELQVELGQAQEAAVNVEKFMAVVRKYTSFEELTPTLLREFVEKIVVHECWKDEQGTRHQDIEIYYSFVGKVDLPDD

SEQ ID NO: 5487 - DNA, 50 bp, Oscillospiraceae bacterium
  source 1..50: mol_type = genomic DNA
ttgcttctttatccgtagtgagctaatgctcatgtgcggtaaagtatcac

SEQ ID NO: 5488 - DNA, 40 bp, Oscillospiraceae bacterium
  source 1..40: mol_type = genomic DNA
cgcttccatgcccggagcgaatgctcatggcgttgaagca

SEQ ID NO: 5489 - DNA, 40 bp, Oscillospiraceae bacterium
  source 1..40: mol_type = genomic DNA
cgcttccatgcccggagcgactgctcatggcgttgaagca

SEQ ID NO: 5490 - DNA, 50 bp, Oscillospiraceae bacterium
  source 1..50: mol_type = genomic DNA
atgggtaatttaatgtagagagcaactgctcatttggagataagtatcac

SEQ ID NO: 5491 - protein, 561 aa, Paenibacillus polymyxa
MEEVEYKNVEETLKLPVVAYCRVSTNKQEQESSYENQHRFFKERATKTENEVLVKIYADKGISATSLKKREEFKQMLYDAGINEYRGRDEFTYEIDHKRKPKFRKIYVRNTSRFTRDASIITILRALLKNGVHVHFLDIDLIYDDTSKEFMLNMFINFAQQESIDKSKKVKDGNVVMASVGSIRVGGYGIYGYEYSSFTKKLSIIKKEADVVCKIYELYLKGYGVRRILNYLQDNGIKPRSGKERFSINSVRRILTNEKYYGCNVRNKYDSGSVFAKHYPKLKDKEEWIYHEGVIPPIIRKDTFLKAQEIGNNKVHKISQKGVYKGTSEFAGLITCPKCKASYTRNVDKGRVFYNCSTKKSKGVHACDNINISEDKINEGINKLLETGVKKKFDKYKETMTQLLKDMVRSKILAQIDKDNEAEVRVIQEQVDKLTRQKNRLIELYLDENMDKVLLDEKANSINIELEILNKKINELSKSNQEIYDELHEFDCMIDEIKQIQISEVSNREELLQLIHIKIERHSENSKKPVAKIFFKYDEPIKKLSSKYKILEGISSVILHT

SEQ ID NO: 5492 - DNA, 50 bp, Paenibacillus polymyxa
  source 1..50: mol_type = genomic DNA
tgttttacatacgtgataatgttgcataatattttaaaaatgggatacat

SEQ ID NO: 5493 - DNA, 40 bp, Paenibacillus polymyxa
  source 1..40: mol_type = genomic DNA
catcgctgcagccgggatgcataatatcttgcttatggga

SEQ ID NO: 5494 - DNA, 40 bp, Paenibacillus polymyxa
  source 1..40: mol_type = genomic DNA
catcgctgcagccgggatggttaatatcttgcttatggga

SEQ ID NO: 5495 - DNA, 50 bp, Paenibacillus polymyxa
  source 1..50: mol_type = genomic DNA
tgttttaaattctttataaggttggtttattttttagctagagtagacat

SEQ ID NO: 5496 - protein, 504 aa, Clostridium tertium
MKRKKVAFFSRVSTDLQHSSMENQEKIFQQWLERNPDCVFYKLYEDEGISGSKGYKRVNWLQMLEDGKDGLYDVVVAKSFSRFGRNQTETLQAIKELRLKGIRCVFLEDSLDSEKDMSKFGLFAWLAEQEAQKSSERIKMVWDSFNQQGKVHVTLAPYGYFYDKEIKNFIVNEIEANTVRRIFNLYLEGYGFNNIALTLTNEGVPTKRGGKWAGATVRGILTNEFYIGTLVQGKTRTLDATMKESIKIDEAEWYKHQDNHEAIIEVEVFEKVNQQIQERSSRAKGTYTKEHGNSKRNSNKSLFSNLLLCGECKATMTIKRKKKDDYKPFYQCIEYDKHSLKCGHSSNRVNESFLIEIVKDELNSLSSNNFERLKAIDASRKENKNNIKLQKELDAIERKIDEQIQLANNLLLLYTQGKITELQYGLQNESLNKVLNSFMERKRNLFEQIHQDTTKEQTEAIYGGIERILNKPVEEWSNSQLKEVIDSIIIYTDKTIKINIKYFN

SEQ ID NO: 5497 - DNA, 50 bp, Clostridium tertium
  source 1..50: mol_type = genomic DNA
taatacttttaagttaatcaagatacttcttacttaacttaaaagtataa

SEQ ID NO: 5498 - DNA, 40 bp, Clostridium tertium
  source 1..40: mol_type = genomic DNA
agacccaaataaccaagatacttctattttaactggatca

SEQ ID NO: 5499 - DNA, 40 bp, Clostridium tertium
  source 1..40: mol_type = genomic DNA
agacccaaataaccaagataattctattttaactggatca

SEQ ID NO: 5500 - DNA, 50 bp, Clostridium tertium
  source 1..50: mol_type = genomic DNA
tcatacattttatttaatcaaaataattcttaagtgtttcaaaaatatta

SEQ ID NO: 5501 - protein, 475 aa, Bacillus subtilis
MELMEANSLKNVGIYVRVSTEEQAKEGYSIAAQKEKLKAYCVSQGWANYKFYIDEGKSAKDIHRPSLELMLRHIEQGIINTVLVYRLDRLTRSVRDLYSLLDYFDKYNAVFRSATEVYDTGSATGRLFITLVAAMAQWERENLGERVKMGQVEKARQGQYSAPAPFGFTKEGEYLVKNPQEGEILLDMVDKIKKGYSLRELADYLDESDAMPRRGYKWHIASILVMLKNPVLYGAFRWGDELIEDAFEGYISKEEFKQLQKILHDRQNFKKRETYSIFIFQTKIICPNCGNRLTSERSKYFRKRDNKHVESNHYRCQACLLNKRPTIGGSEKKFERALIEYMQNVKPRLEPKIPEEKQQDFDKLHQKILSIEKQRKKYQKAWSMDLMTDQEFEQLMAETKDALQKAQTALEQEQTFHKPKNPIDIKRAKEIVTMFNKSWSVLTSEEKRQIVQELIKQIEFEKKDRKIKILDIQFY

SEQ ID NO: 5502 - DNA, 50 bp, Bacillus subtilis
  source 1..50: mol_type = genomic DNA
tttattagtgtttatgtaaagtataaacatgtgaaatagacataaataca

SEQ ID NO: 5503 - DNA, 40 bp, Bacillus subtilis
  source 1..40: mol_type = genomic DNA
gttttttgtatttaagtataagcagacaaaatgctcctgg

SEQ ID NO: 5504 - DNA, 40 bp, Bacillus subtilis
  source 1..40: mol_type = genomic DNA
gttttttgtatttaagtatacgcagacaaaatgctcctgg

SEQ ID NO: 5505 - DNA, 50 bp, Bacillus subtilis
  source 1..50: mol_type = genomic DNA
tgtattagtaaaagtttaatgtaaacacatgtaaaacaacaataaaaatt

SEQ ID NO: 5506 - protein, 510 aa, Bacillus toyonensis
MLIKTVAIYNRISRDNGESEDILLNHRTINTRLCESKGYQYKLYEEIESGGKFEERKILLQLLRDIAQGLYDGLVVVELSRIARDTLYSQMIAKVLEENDVPIITTNRIYNLSDESDRLMYDMESMISSKELRTITRRMRGGKLEGARRGEWVQGIPPFGYKRGDNKKLIIVESEANLVRQIFNYAENGYGVPSITNKLTGYKTRAGNSFTDTAVYAILNNKTYTGSIIYNVKDKKGNITEGIVTRNAHDAIITKEKFNSVHQAIKGRMSGDMETRNRSRGIVLSTLKDLVYCTSCKLKMGFRKDSKQVNAIYLNPCKCGNRGISEARLLDAFQKKFRFLEQFYKEEWQKALKTTETISKDTLAQQVEQLQKQRDKLNKKLKDNRSAYLEEVFTKEEYLNEKTDIESELRRISASIDDLLQDINSLDKESITSQYEAKIEKIKKIKSIYNKEVSYNDMVEVNRLLKLILDKVYYRRLTEKVTGINASRDGLSVEKGDYIEILIASKDVHK

SEQ ID NO: 5507 - DNA, 50 bp, Bacillus toyonensis
  source 1..50: mol_type = genomic DNA
taacatcttataaaaaaaatcatatgtatgtgtttttttataggtggtta

SEQ ID NO: 5508 - DNA, 40 bp, Bacillus toyonensis; identical to SEQ ID NO: 858
  source 1..40: mol_type = genomic DNA

SEQ ID NO: 5509 - DNA, 40 bp, Bacillus toyonensis
  source 1..40: mol_type = genomic DNA
gacctcctctcatcccatatttatgaaaaaagagcttgta

SEQ ID NO: 5510 - DNA, 50 bp, Bacillus toyonensis
  source 1..50: mol_type = genomic DNA
taagatcttaggtaaaaagtcattttaatgtgtttgaggcaaagtgattt

SEQ ID NO: 5511 - protein, 630 aa, Klebsiella variicola
MPQLYSYIRWSTDRQDKGTTRNRQLAAAKVYAAEAGLEMVEIEDPGVSAFRGKNTNTGKLGDFIDAVKQGAIASDSWLYVENLDRITRQNVTTAQKLFIELLELGLTLVTGMDKRVYTLDSVNKNPTELMISLLLFSRANEESETKSNRTIGNVVALVERHQAGLPVNIKSVGRHPFWIDDSGSQYEAVKEHPVYWSIAREAIDMFLDGNGIYTVKRYLDEKYPNGLKDKEWDYQVLKKMRDNRALIGERTINVGGATYKLDNYYPWLCNDEAEFLTLAERKQQNNYKAKKDKTEEIKLLSGLQVLRCSKCGGTMHSFMNHGSARYICTNGVHLQKNCSGWSISAQLVEHCTMISLLIGYMDKSRKDGIDTTAIEEEISRKEILITDLESRIANMAQAIAIAPDVSALAVQLNTFDLERKKTVLEVDKLKERLHSLKGKGSLEVDITDFLMLIQWSVFTNMEDADRNKIRKIISSIIESIIVEKADGCITIKIKCHHKDEWLVFGGVNRKPFWAFTIEYSTNDAKEIEGGDSSNFVSNPLFQKAVEQLDSIKQSYLKLFETANTMLGVVGYSDIRGASFWPNTGQYERANVEYDGITYSIAMNGRVSKAITAALEATGLSRKDFIERYKV

SEQ ID NO: 5512 - DNA, 50 bp, Klebsiella variicola
  source 1..50: mol_type = genomic DNA
taatttttattttgattttttgggcaccctaatgatataaatccaatctt

SEQ ID NO: 5513 - DNA, 40 bp, Klebsiella variicola
  source 1..40: mol_type = genomic DNA
gtccacgagatttttcgggcagcccagggagacgaagccg

SEQ ID NO: 5514 - DNA, 40 bp, Klebsiella variicola
  source 1..40: mol_type = genomic DNA
gtccacgagatttttcggggggcccagggagacgaagccg

SEQ ID NO: 5515 - DNA, 50 bp, Klebsiella variicola
  source 1..50: mol_type = genomic DNA
tattttttaacatcattttttggggggcctaaaacactccttcctatctg

SEQ ID NO: 5516 - protein, 630 aa, Klebsiella pneumoniae
MPQLYSYIRWSTDRQDKGTTRNRQLAAAKVYAAEAGLEMVEIEDPGVSAFRGKNTNTGKLGDFIDAVKQGAIASDSWLYVENLDRITRQNVTTAQKLFIELLELGLTLVTGMDKRVYTLDSVNKNPTELMISLLLFSRANEESETKSNRTIGNVVALVERHQAGLPVNIKSVGRHPFWIDDSGSQYEAVKEHPVYWSIAREAIDMFLDGNGIYTVKRYLDEKYPNGLKDKEWDYQVLKKMRDNRALIGERTINVRGATYKLDNYYPWLCKDEAEFLTLAERKQQNNYKAKKDKTEEIKLLSGLQVLRCSKCGGTMHSFMNHGSARYICTNGVHLQKNCSGWSISAQLVEHCTMISLLIGYMDKSRKDGIDTTAIEEEISRKEILIIDLESRIANMAQAIAIAPDVSALAVQLNTFDLERKKTVLEVDKLKERLHSLKGKGSLEVDITDFLMLIQWSVFTNMEDADRNKIRKIISSIIESIIVEKADGCITIKIKCHHKDEWLVFGGVNRKPFWAFTIEYSTNDAKEIEGGDSSNFVSNPLFQKAVEQLDSIKQSYLKLFETANTMLGVVGYSDIRGASFWPNTGQYERANVEYDGITYSIAMNGRVSKAITAALEATGLSRKDFIERYKV

SEQ ID NO: 5517 - DNA, 50 bp, Klebsiella pneumoniae; identical to SEQ ID NO: 5512
  source 1..50: mol_type = genomic DNA

SEQ ID NO: 5518 - DNA, 40 bp, Klebsiella pneumoniae
  source 1..40: mol_type = genomic DNA
gtccacgaggtttttcgggcagcccagggagacgaagccg

SEQ ID NO: 5519 - DNA, 40 bp, Klebsiella pneumoniae
  source 1..40: mol_type = genomic DNA
gtccacgaggtttttcggggggcccagggagacgaagccg

SEQ ID NO: 5520 - DNA, 50 bp, Klebsiella pneumoniae; identical to SEQ ID NO: 5515
  source 1..50: mol_type = genomic DNA

SEQ ID NO: 5521 - protein, 630 aa, Klebsiella pneumoniae
MPQLYSYIRWSTDRQDKGTTRNRQLAAAKVYAAEAGLEMVEIEDPGVSAFRGKNTNTGKLGDFIDAVKQGAIASDSWLYVENLDRITRQNVTTAQKLFIELLELGLTLVTGMDKRVYTLDSVNKNPTELMISLLLFSRANEESETKSNRTIGNVVALVERHQAGLPVNIKSVGRHPFWIDDSGSQYEAVKEHPVYWSIAREAIDMFLDGNGIYTVKRYLDEKYPNGLKDKEWDYQVLKKMRDNRALIGERTINVRGATYKLDNYYPWLCKDEAEFLTLAERKQQNNYKAKKDKTEEIKLLSGLQVLRCSKCGGTMHSFMNHGSARYICTNGVHLQKNCSGWSISAQLVEHCTMISLLIGYMDKSRKDGIDTTAIEEEISRKEILIIDLESRIANMAQAIAIAPDVSALAVQLNTFDLERKKTVLEVDKLKERLHSLKGKGSLEVDITDFLMLIQWSVFTNMEDADRNKIRKIISSIIESIIVEKADGCITIKIKCHHKDEWLVFGGVNRIPFWAFTIEYSTNDAKEIEGGDSSNFVSNPLFQKAVEQLDSIKQSYLKLFETANTMLGVVGYSDIRGASFWPNTGQYERANVEYDGITYSIAMNGRVSKAITAALEATGLSRKDFIERYKV

SEQ ID NO: 5522 - DNA, 50 bp, Klebsiella pneumoniae; identical to SEQ ID NO: 5512
  source 1..50: mol_type = genomic DNA

SEQ ID NO: 5523 - DNA, 40 bp, Klebsiella pneumoniae; identical to SEQ ID NO: 5518
  source 1..40: mol_type = genomic DNA

SEQ ID NO: 5524 - DNA, 40 bp, Klebsiella pneumoniae; identical to SEQ ID NO: 5519
  source 1..40: mol_type = genomic DNA

SEQ ID NO: 5525 - DNA, 50 bp, Klebsiella pneumoniae; identical to SEQ ID NO: 5515
  source 1..50: mol_type = genomic DNA

SEQ ID NO: 5526 - protein, 592 aa, Klebsiella pneumoniae
MVEIEDPGVSAFRGKNTNTGKLGDFIDAVKQGAIASDSWLYVENLDRITRQNVTTAQKLFIELLELGLTLVTGMDKRVYTLDSVNKNPTELMISLLLFSRANEESETKSNRTIGNVVALVERHQAGLPVNIKSVGRHPFWIDDSGSQYEAVKEHPVYWSIAREAIDMFLDGNGIYTVKRYLDEKYPNGLKDKEWDYQVLKKMRDNRALIGERTINVGGATYKLDNYYPWLCKDEAEFLTLAERKQQNNYKAKKDKTEEIKLLSGLQVLRCSKCGGTMHSFMNHGSARYICTNGVHLQKNCSGWSISAQLVEHCTMISLLIGYMDKSRKDGIDTTAIEEEISRKEILIIDLESRIANMAQAIAIAPDVSALAVQLNTFDLERKKTVLEVDKLKERLHSLKGKGSLEVDITDFLMLIQWSVFTNMEDADRNKIRKIISSIIESIIVEKADGCITIKIKCHHKDEWLVFGGVNRKPFWAFTIEYSTNDAKEIEGGDSSNFVSNPLFQKAVEQLDSIKQSYLKLFETANTMLGVVGYSDIRGASFWPNTGQYERANVEYDGITYSIAMNGRVSKAITAALEATGLSRKDFIERYKV

SEQ ID NO: 5527 - DNA, 50 bp, Klebsiella pneumoniae; identical to SEQ ID NO: 5512
  source 1..50: mol_type = genomic DNA

SEQ ID NO: 5528 - DNA, 40 bp, Klebsiella pneumoniae; identical to SEQ ID NO: 5518
  source 1..40: mol_type = genomic DNA

SEQ ID NO: 5529 - DNA, 40 bp, Klebsiella pneumoniae; identical to SEQ ID NO: 5519
  source 1..40: mol_type = genomic DNA

SEQ ID NO: 5530 - DNA, 50 bp, Klebsiella pneumoniae; identical to SEQ ID NO: 5515
  source 1..50: mol_type = genomic DNA

SEQ ID NO: 5531 - protein, 535 aa, Aliivibrio fischeri
MKTPAYSYIRFSSSHQASGDSLRRQTMMAQQYCDNENLELQPISYHDLGVSAFHARNIKEDSGLGQFLKALDENLIPKGSFLLVESLDRLSRSAVQTALRQLLSILEYGIKVVTLIDNRIYDNKSDSTDLIISLAIMERAYNESKTKSERLKAVWQHKRNNPHSTVKTKTCPFWLELQSDKKTFKVNEDKAHVVRQVFQLCIDGYGVQKIMNWLNEQDFPSGFGKQWGLSSVSYLLNSRAVIGQYEPHIYEGKKRISTNIFIENFYPHILTDEVYYLAQSRRSERRRPEAAGRKGNFSNIFNQIAKCQICGASMHYVSKGSDTKYLRCRESLRKNCTNKSIRMDLLERFIIERYLSPQHYKQWSNYASMPKVQPVDLSALNNKLESQREALKELLKLTNDFSNSVIQESIKIRSEAIQKLETEIKEYRIDSADTEASIHLNFKEASQLVSDALQIPVNRATPNKLNEEQLFTARSKLNRQLKQTFSTIKILHHPESGDRIIETSIFKYIADHEAKTARVKNFIWYALPINTEKGA

SEQ ID NO: 5532 - DNA, 50 bp, Aliivibrio fischeri
  source 1..50: mol_type = genomic DNA
aatggtttaatttgacagtgatacttgttcatatgtatgattaaaccttt

SEQ ID NO: 5533 - DNA, 40 bp, Aliivibrio fischeri
  source 1..40: mol_type = genomic DNA
aatggttatccaatgctttttgttcatatgatagcctcgt

SEQ ID NO: 5534 - DNA, 40 bp, Aliivibrio fischeri
  source 1..40: mol_type = genomic DNA
aatggttatccaatgctttctgttcatatgatagcctcgt

SEQ ID NO: 5535 - DNA, 50 bp, Aliivibrio fischeri
  source 1..50: mol_type = genomic DNA
atttgtttaaatttacagagatacctgtatatatattaatttaaaaattt

SEQ ID NO: 5536 - protein, 643 aa, Coprococcus comes
MNAGYVRLSRDDDKRNYVSIENQKLIINQYAADHGMVIDRWYEDDGISGYIFDRPGFQQMMADLDKDIDAVYVKDFSRLGRHNAKVLLLLDEFQERGKHLVVIDDNYDSMDSSDDTIGIKTWFNERYVKDTSKKIKRAIGARQKEGTLITRPPFGYRRNEKDKTILEIVAKEAEYIKQIYDLYLSGSGYRKIAIYLTEQGAPTPSMIQREREIEEGRLSKRKVASKWSDAMIKEILDNDFYIGTFRLKKRARNTVHGKDKRVPKEEQCIFENHHPAIIDKATFTLVQELKEKRNRTNYRGSRGQWLGSEIPNPFGSCLFCKDCGSRLTPIKRQTSSRERKYYICTTYNTKGRRYCSKAHLIEEDDLMKDVLTYIKMCRNALCEVISTYDLKDFEAEKKTIEEKRQELHIAINERKSQLKVLLTQKVKDLAVAAGNEDLINETYDSMQKDLFAQIHGLEMQIKELNETAIETPEVKDKLKNALEVVDKIIAGGSLDRRDIELLIEKIVVDEYGMPEITLKYGLSNLISYSPADEMNRRENTIIAIVMKLIAEDERGYTSAKYLSEHISDLGFKKTKQSILPYIELMKELGILESTDNPLKPYNIVKTKEAIEQLVKDYLPDISTEITAKQLSDNYLHGIYDDRW

SEQ ID NO: 5537 - DNA, 50 bp, Coprococcus comes
  source 1..50: mol_type = genomic DNA
atttacatggtatttatgacgacaggtggcgtacatatatcaatgtaaat

SEQ ID NO: 5538 - DNA, 40 bp, Coprococcus comes
  source 1..40: mol_type = genomic DNA
cgttcttggcggaagaaaaggtggcatgccggaaatggtc

SEQ ID NO: 5539 - DNA, 40 bp, Coprococcus comes
  source 1..40: mol_type = genomic DNA
cgttcttggcggaagaaaatttggcatgccggaaatggtc

SEQ ID NO: 5540 - DNA, 50 bp, Coprococcus comes
  source 1..50: mol_type = genomic DNA
atttacatgttgtctatgactacttttgtgctacaactgctgaggtaaat

SEQ ID NO: 5541 - protein, 460 aa, Clostridioides difficile
MDKIKRVALYIRVSTEEQVLHGDSIRTQTEALEQYAKDNNFVIVDKYIDEGYSATNLKRPNLQRMIEDVKNNKIDLVMITKIDRLSRGVKNYYKIMEILEKHKCDWKTILENYDSSTAAGRLHINIMLSVAENEASQTSERIKFVFNNKIRRGEVISGSTPFGYKIVDKHLVIDEEKAEIVRECFTSYEKLTSMIKVLQHINNSFNANFSYNFIYKLLKNNIYTGTYIHNNLAVENFCDAIISSEQFNTVQKLLSKNTKVYNNKYLNSLGMQYIFSSMVICKCGRKMSGTYCLSSDKKIYKYYRCHVSQTTKKCNNTKRLSEKKLEDFLLKNVRRQLEEIAFGYESNNNKSKSKNNNNQLKNKIKKQINKLQDLYFDDLIDKEDYKLKYQKLNTQLIKLEKNNSEEKKSIINLKNIRSFLEINFEKIYSDLSDQEKRTLWTSIIDTIVIDENKNLTINFL

SEQ ID NO: 5542 - DNA, 50 bp, Clostridioides difficile
  source 1..50: mol_type = genomic DNA
ttttgtactaatatatcattacctgatggcaatataatattagtacaaaa

SEQ ID NO: 5543 - DNA, 40 bp, Clostridioides difficile
  source 1..40: mol_type = genomic DNA
tgtagattttcctgcacctgatggtcctaaaaatcctagt

SEQ ID NO: 5544 - DNA, 40 bp, Clostridioides difficile
  source 1..40: mol_type = genomic DNA
tgtagattttcctgcaccttctggtcctaaaaatcctagt

SEQ ID NO: 5545 - DNA, 50 bp, Clostridioides difficile
  source 1..50: mol_type = genomic DNA
ttttgtactttttaatcattatattctgggattatatctcaaataaacca

SEQ ID NO: 5546 - protein, 506 aa, Bacillus mycoides
MYKPFSQADYKPSDKPKALYIRKSKKSQGKTEIETIESHLKRLTDFCKDQGWNNYVIYNDYVAKSTDINRIEYNKMLNSCLDGKHDLIVVVEESRLYRTVNEQTNVYEELKGTDIAILSIREGYIFPNDRNQFLTNIIRGAMNQQELENFAYRMNVKVLASAKEGKYVNKLPFGYFKDKDKLTPHPIESKTFRFIVDKVLEGYVIAEIIGQLNQLGYTTKSNKKWKDVGTITRMLANRVYLGESHYYSKMFDEDVIVRDTHPALLTIEEFQKISNMIRSRSRNPQGIRYTKINTVLDRLVVCGICGNRLPIHKSWTNKEGVTSYQVGKCQKVMGEYNEKKCPNKSISLKELLPHFYIAIESYKGSLREEIESVEIDTTNDMKIKIMEQIKDISKRIAGIQTEIQNAKSYLIKGVLSEADYVGLVPPLEKDLKDLNVALEDNERLLASLTDYDRSAVIQNAVDSLINIENESIENQNRVYRLLFEHLELVNTVNEFEIRLKEKDVSN

SEQ ID NO: 5547 - DNA, 50 bp, Bacillus mycoides
  source 1..50: mol_type = genomic DNA
actttatattaagaggttttatctccagataaagtatgatattataatgt

SEQ ID NO: 5548 - DNA, 40 bp, Bacillus mycoides
  source 1..40: mol_type = genomic DNA
accttgaataacgaagtcaccagataaggcgatgccgtgt

SEQ ID NO: 5549 - DNA, 40 bp, Bacillus mycoides
  source 1..40: mol_type = genomic DNA
accttgaataacgaagtcagcagataaggcgatgccgtgt

SEQ ID NO: 5550 - DNA, 50 bp, Bacillus mycoides
  source 1..50: mol_type = genomic DNA
actttatatacagagggtatatgtgcagatttgttacatgggtataatgt

SEQ ID NO: 5551 - protein, 647 aa, Enterobacter hormaechei
MLRPISYERVSTFQQVEMGKGLVDQRSSLTAFLDKNADKFTEDRIFITDEGVSAFKNANIAPESSLGKFLQDIRDKKYGKGDALIVTSLDRLSRRSSWSENTIQFIVAAGIVIYDISTDVVLRDDDSFSKILMEIILQRSHNESLMKSVRAKVAWQNKVMRAAANGEVVSNRMPFWLENIDNKYSVKEDQAALIVKCFELYKSGFSTGEIVKRIDDPKWQMVRVSRLIRDRRLLGEHKRYNDEVISNVYPKIIDDELFLTANRMMDTVMTDKKKPAEDLLLEPSVVKQIFSLSESGLGSGAIVKRLQKGWSTVNVLRVLRDKKVVEMKIIDNLTFERVNAKLTANGVANRIRKDVTIAQDDYITNLFPRILKCGCCGGNIAIHYNHVRTKYVICRTREEKKRCDAKSIQYTRIEKNILSVVMNVDFGKVLSEDSTKKDKVLEALKVELSALRKEENTYQLKIDERKKSGKKTSLPLMEGLTDVQDRIEETLEQISRSSTINELPKFDYDINCLLDPMNVELRAKVRKELKHVISKVTYQVIDKYILVRLHYYTDVLSHVLIIDNKRGGGDIVSQIAIYTKDSTTIYTTPSFALTTSNDEIPRIHFMENVPLNQIDYELLLISADYVECSDSVTSWMRHNHNFLFANN

SEQ ID NO: 5552 - DNA, 50 bp, Enterobacter hormaechei
  source 1..50: mol_type = genomic DNA
aatgttcccattgattgatgtatgcgtccttttgtataatctgggaacat

SEQ ID NO: 5553 - DNA, 40 bp, Enterobacter hormaechei
  source 1..40: mol_type = genomic DNA
gaatatattcatggcatgccgtcctttcgttttttagcac

SEQ ID NO: 5554 - DNA, 40 bp, Enterobacter hormaechei
  source 1..40: mol_type = genomic DNA
gaatatattcatggcatgcattcctttcgttttttagcac

SEQ ID NO: 5555 - DNA, 50 bp, Enterobacter hormaechei
  source 1..50: mol_type = genomic DNA
aatgttctctacatttgatgttgtattccttttgtttcataatgtaacat

SEQ ID NO: 5556 - protein, 479 aa, Leuconostoc fallax
MAAYVRVSTLEQAESGYSIGEQIDKLKKFADIKDWHLYNVYEDGGFSGSNTTRPALERLISDAKRHLFDTVLVYKLDRLSRSQKDTLFLIEDVFKPNDIDFVSLNENFDTSTAFGTAMIGILSVFAQLEREQIKERMKLGRVGRAKSGKAMGWHMTPFGYTYDKISGNFIIEPVAAKVVKNIFTDYLQGMSISKLRDKLNENGHIAKDIKWSYRTLRQTLDNPTYAGMIKYNNTVYQGNHEPLISKETFDQVQIELDKRQKQAYAQNNNPRPFQAKYMLSGLVRCGYCHAPLTVTLGNKHKDGTRLKKYQCLNRKNKNFNPVTVYNKGKTCQSGFYMMEDLESFVIQAISDIQLNPEKRKDIVSHEEPDTVDINFLQAELLQITKRVKKLSDLYMNDLLSLDELKIKTAELKNKRQLIENQIEENANNNVTQLKLAQLSSILGGSNIADIPYDQQRDICKQLIKKVNVTDEEITIEWLF

SEQ ID NO: 5557 - DNA, 50 bp, Leuconostoc fallax
  source 1..50: mol_type = genomic DNA
taaacatatttactatactctatttcaattaagaatagtaaacttgttta

SEQ ID NO: 5558 - DNA, 40 bp, Leuconostoc fallax
  source 1..40: mol_type = genomic DNA
gaaaagtacaatagctgcctcaattaacgtaaaaccggca

SEQ ID NO: 5559 - DNA, 40 bp, Leuconostoc fallax
  source 1..40: mol_type = genomic DNA
gaaaagtacaatagctgcctgaattaacgtaaaaccggca

SEQ ID NO: 5560 - DNA, 50 bp, Leuconostoc fallax
  source 1..50: mol_type = genomic DNA
tacaaatgtgttaaatacactatttgaattaagactcgaattcattttta

SEQ ID NO: 5561 - protein, 547 aa, Vibrio parahaemolyticus; identical to SEQ ID NO: 4841

SEQ ID NO: 5562 - DNA, 50 bp, Vibrio parahaemolyticus
  source 1..50: mol_type = genomic DNA
ttgtgtctttatgaaaacacaatcaaagtattgtatcggttatgacataa

SEQ ID NO: 5563 - DNA, 40 bp, Vibrio parahaemolyticus; identical to SEQ ID NO: 4863
  source 1..40: mol_type = genomic DNA

SEQ ID NO: 5564 - DNA, 40 bp, Vibrio parahaemolyticus; identical to SEQ ID NO: 4894
  source 1..40: mol_type = genomic DNA

SEQ ID NO: 5565 - DNA, 50 bp, Vibrio parahaemolyticus
  source 1..50: mol_type = genomic DNA
ttttatattcaaagaaacagaaacatagtcatgtatattaaatgaaataa

SEQ ID NO: 5566 - protein, 547 aa, Vibrio parahaemolyticus; identical to SEQ ID NO: 4841

SEQ ID NO: 5567 - DNA, 50 bp, Vibrio parahaemolyticus; identical to SEQ ID NO: 5562
  source 1..50: mol_type = genomic DNA

SEQ ID NO: 5568 - DNA, 40 bp, Vibrio parahaemolyticus
  source 1..40: mol_type = genomic DNA
atttggctggcacgtggtcaaggttctctacagaacatag

SEQ ID NO: 5569 - DNA, 40 bp, Vibrio parahaemolyticus
  source 1..40: mol_type = genomic DNA
atttggctggcacgtggtcatggttctctacagaacatag

SEQ ID NO: 5570 - DNA, 50 bp, Vibrio parahaemolyticus; identical to SEQ ID NO: 5565
  source 1..50: mol_type = genomic DNA

SEQ ID NO: 5571 - protein, 547 aa, Vibrio parahaemolyticus; identical to SEQ ID NO: 5481

SEQ ID NO: 5572 - DNA, 50 bp, Vibrio parahaemolyticus; identical to SEQ ID NO: 5562
  source 1..50: mol_type = genomic DNA

SEQ ID NO: 5573 - DNA, 40 bp, Vibrio parahaemolyticus; identical to SEQ ID NO: 4428
  source 1..40: mol_type = genomic DNA

SEQ ID NO: 5574 - DNA, 40 bp, Vibrio parahaemolyticus; identical to SEQ ID NO: 4884
  source 1..40: mol_type = genomic DNA

SEQ ID NO: 5575 - DNA, 50 bp, Vibrio parahaemolyticus; identical to SEQ ID NO: 5565
  source 1..50: mol_type = genomic DNA

SEQ ID NO: 5576 - protein, 547 aa, Vibrio parahaemolyticus
MRTAYSYVRLSSKKQIQGYGQERQWEAIQAAALAHGWSLSEKTFSDLGVSGWKGANIETGALSQFLQCVEDGYIEKGSVLIVENVGRLSRAGVQRAVSLLMQLLASGISIYTFTDSKLYEPDSHNPLMDLMAWALSAQRAFEESERKSQMILNAKAKAREKARLTGEIITRRCPSWLRVNQDKTEFELIPERVETVRKIFDLYVNGYGTPRIGRLLTEEGRKPLTGRAWYPRSISRILQYRAVLGEYQPTLHGKPEGEAIKNYYPAIIDEDQFNEVQAVLKEGGAGKGRRGKEMRNYFAGLLRCSCGEGMHIVSSCVKGKRYYQLRCLQYRISCFDSPWNFYRLSSFVLFALRRLPILEVMGSQDNNNIKELNAKERELTFLLEDTRRQLDNTINAIAALGLNDQLQSKFRELKTSVTNIEKQLSNVKTELETSQGKLVIQKQDSEMLTGRFLELIDSTKDIDGRIKLNQVLRRYLSKIEMHADKKEEYRYIKIYRKDGDELVSIQCDHSLKGALFESKDGLETFELLPATDAKRNEISNTLLCTPK

SEQ ID NO: 5577 - DNA, 50 bp, Vibrio parahaemolyticus; identical to SEQ ID NO: 5562
  source 1..50: mol_type = genomic DNA

SEQ ID NO: 5578 - DNA, 40 bp, Vibrio parahaemolyticus; identical to SEQ ID NO: 4428
  source 1..40: mol_type = genomic DNA

SEQ ID NO: 5579 - DNA, 40 bp, Vibrio parahaemolyticus; identical to SEQ ID NO: 4884
  source 1..40: mol_type = genomic DNA

SEQ ID NO: 5580 - DNA, 50 bp, Vibrio parahaemolyticus; identical to SEQ ID NO: 5565
  source 1..50: mol_type = genomic DNA

SEQ ID NO: 5581 - protein, 547 aa, Vibrio parahaemolyticus; identical to SEQ ID NO: 4841

SEQ ID NO: 5582 - DNA, 50 bp, Vibrio parahaemolyticus; identical to SEQ ID NO: 5562
  source 1..50: mol_type = genomic DNA

SEQ ID NO: 5583 - DNA, 40 bp, Vibrio parahaemolyticus; identical to SEQ ID NO: 4848
  source 1..40: mol_type = genomic DNA

SEQ ID NO: 5584 - DNA, 40 bp, Vibrio parahaemolyticus
  source 1..40: mol_type = genomic DNA
atttggctggcatgtggtcatggttctatacagaacatag

SEQ ID NO: 5585 - DNA, 50 bp, Vibrio parahaemolyticus; identical to SEQ ID NO: 5565
  source 1..50: mol_type = genomic DNA

SEQ ID NO: 5586 - protein, 534 aa, Pseudoflavonifractor sp An184
MPELYDIYLRKSRADRDAEANGGGDTLLRHRTALLELARKMDLTIYHIFEEVVSGETIANRPEMQKLLAEVETGEIAGVLVMEVERLARGNTRDQGIVAETFQYSNTKIITPLKTYDPADESDQEYFEFGLFMSRREYKTINRRLQRGRMASLQEGKYIAGAAPYGYERVKIKGAKGYTLVIIEDKAEVVRHIYDLYLNGLPQSNGSLKHVGSSVIAKQLDLEGIPSPSGGRWAPYTVRDILNNPTYAGYVRWSWRPTVRKVVDGVLTETRPVNKSMSLTEGIHPPIIDRASWQRAQDIMASRAYLPMPGNKTIVNPLAGLLYCSQCGRSLVRTKGRRGNAKDMLFCPNKDCTCKGSTLDAVEAALKLSLEQWLQDYKVSVKPNKRTPRKSSTAPLEKSLEALNRERDTLVGQKGRLYDLLEQGVYSIEVFTQRQFDLATRISQTEEAIQRAQEQLDNERYMNTMRLAIIPRVEHLLDVYDQLETPQEKNEMLKACLEKVIYTKTEGGRYTESNMQLQLYPRITHISKGHTHIS

SEQ ID NO: 5587 - DNA, 50 bp, Pseudoflavonifractor sp An184
  source 1..50: mol_type = genomic DNA
catatatcttagatgtacttatacctatacatatcatccttagagataag

SEQ ID NO: 5588 - DNA, 40 bp, Pseudoflavonifractor sp An184
  source 1..40: mol_type = genomic DNA
cctacgagtggggctatacctacggtccgcctatggcggt

SEQ ID NO: 5589 - DNA, 40 bp, Pseudoflavonifractor sp An184; identical to SEQ ID NO: 5588
  source 1..40: mol_type = genomic DNA

SEQ ID NO: 5590 - DNA, 50 bp, Pseudoflavonifractor sp An184
  source 1..50: mol_type = genomic DNA
gatatatctgtaatgtagatatacctatacatttcactatgtaagatcat

SEQ ID NO: 5591 - protein, 620 aa, Anaerobutyricum hallii
MSSEKIIVLYERLSREDENLGESYSISNQKKLLEDYCREKGWTRFRHFTDDGISGTTFDRPSFKAMIQLVEDGEVETIILKDMSRLGRDYLVVGQLREFFRKKGVRLIAINDNHDSYNGDDDFLVFRDVMNEMYAKDISKKIKSTFKSKGKSGKHVASVTPYGYLKDENDGNHWIVDEEAAEIVRLIFKWTIDGLGPYQIAKLLQEKKVEIPAVHMARFGQGNNRNKKVKDPYGWGSSTVVGILKKREYLGHTVNFKTQKHFKDKKSHYVSEDNWVIFENTQEPIIDQQTFDTVQKLRENVRRYPDGWGEHHVLTGLMYCADCGAKMYVHRTSNGKRIAQYTCSAYTKVPCGTLCKTQHRINESVVLELIGDTLRAIFEYAKYDRSEFIDTITMAQSTQEDAEVKKVRARIAVAGNRCEELEKLICRIYEDNILGKLPDSRYEVLDKQYAREKAELDAEIKELEAKLTEYEKSRNSAGKFIALIDKYEKFEELTPAMVNEFVDKVLVHERDRKGSIQTTQEIEIYFNFVGRYVPPAMMTEPTAEEQAEIDRINRIKDRRHQQYLRRKESGWQRKYEERVKNEKRAKMQAMKEEIRRQDRENGVYATAGSLALEPTIGMPE

SEQ ID NO: 5592 - DNA, 50 bp, Anaerobutyricum hallii
  source 1..50: mol_type = genomic DNA
aaaagtctttgacattttgtttcaggtgtaataagatgaaagagactttt

SEQ ID NO: 5593 - DNA, 40 bp, Anaerobutyricum hallii
  source 1..40: mol_type = genomic DNA
aaaatataaattagccgccggcaaaacagcgaagtcgatt

SEQ ID NO: 5594 - DNA, 40 bp, Anaerobutyricum hallii
  source 1..40: mol_type = genomic DNA
aaaatataaattagccgccttcaaaacagcgaagtcgatt

SEQ ID NO: 5595 - DNA, 50 bp, Anaerobutyricum hallii
  source 1..50: mol_type = genomic DNA
aaaaatcttacatattttgtttcatttttaataaaatattataaattata

SEQ ID NO: 5596 - protein, 620 aa, Lachnospiraceae bacterium; identical to SEQ ID NO: 5591

SEQ ID NO: 5597 - DNA, 50 bp, Lachnospiraceae bacterium; identical to SEQ ID NO: 5592
  source 1..50: mol_type = genomic DNA

SEQ ID NO: 5598 - DNA, 40 bp, Lachnospiraceae bacterium
  source 1..40: mol_type = genomic DNA
aaaatacaaaatggcggctggcaaaacggcgaagtcgatt

SEQ ID NO: 5599 - DNA, 40 bp, Lachnospiraceae bacterium
  source 1..40: mol_type = genomic DNA
aaaatacaaaatggcggctttcaaaacggcgaagtcgatt

SEQ ID NO: 5600 - DNA, 50 bp, Lachnospiraceae bacterium; identical to SEQ ID NO: 5595
  source 1..50: mol_type = genomic DNA

SEQ ID NO: 5601 - protein, 565 aa, Roseburia intestinalis
MNNRYMSNNIERNATWRVGVYCRLSKDDELTGESASISNQRDILVNYCQSQGWQVVDVFQDDGYTGLNTDRPDLQRLLKACEKGLVNLVITKDQSRLGRNHVQTGFLMEEFFPKHGVRYIALYDNVDTFAGDNEIAPFKNVLNEMYSRDISKKVHASYHLQATKGKFTGVVPPLGYQKDPEEKGHLLIDDETAPIVRKIFQWAVDGHGINFISRELERQQIPCPSWWHRKRGLRTYYTKWEKKDPENGKYVWDESYLKSLLMNPVYCGDMASQKRYYRFKIGNQGDKAPEDWITVRDTHEAIIPQDVFDLVQAKMKGRKRQTEQGEYSMFAGLLRCAECGGALTLKKTHTKDQHEVYTCSTYIHKGKAHCTQHRVDADDLYDAVLTRIQECAKAVTGDGTELENRVKELCEEDTQGHRESLEKLVSKQKDRLETLDRLIAKLYDDLINDKITESVFDKMLEKTQKEQTDIKKELFQNESVLNTEEKLDAQSQQWIDDISEYADIKELDANLLNRLISKIVISEPQEKDGTENYCRTPETVTMEIHFNLKPIPELGTIERGSGSHK

SEQ ID NO: 5602 - DNA, 50 bp, Roseburia intestinalis
  source 1..50: mol_type = genomic DNA
caaatattttctcataaaagacataaagcacttaatgtcttctatgtgaa

SEQ ID NO: 5603 - DNA, 40 bp, Roseburia intestinalis
  source 1..40: mol_type = genomic DNA
aagcaaaatcacagggcatcaaacagcttatgagtggcgg

SEQ ID NO: 5604 - DNA, 40 bp, Roseburia intestinalis
  source 1..40: mol_type = genomic DNA
aagcaaaatcacagggcataaaacagcttatgagtggcgg

SEQ ID NO: 5605 - DNA, 50 bp, Roseburia intestinalis
  source 1..50: mol_type = genomic DNA
aaaatatatattaaaaaaaaagaaaaagccattaatggctactatgtgaa

SEQ ID NO: 5606 - protein, 470 aa, Enterococcus faecalis
MKGESELDKKAAIYIRVSTQEQATEGYSIQAQTDRLIKYVEAKDFILYKKYIDAGYSASKLERPAMQDLIQDVQSKKVDVVIVYKLDRLSRSQKDTMYLIEDIFRPNDVELISMQESFDTSTAFGSATVGMLSVFAQLERKSISERMITGRVERAKKGFYHTGGQDRPPAGYQFNSDNQLIINEYEAAAIKDLFRLYNDGLGKSSISEYLKKNYPGKNKWLPSSIDRMLKNSLYIGKVKFSGAEYDGIHEPIIDEVTFYKTQKEIARRKQTNTKRYNYVALLGGLCECGICGAKMANRRAVGRKGKVYRYYRCYSKKGSPKHMMKTDGCSSKAQQQFIIDEAVINNLKNIDVEAELKRRSAPQTNTSLISSQIESIDKQINKLIDLFQVDSMPLDVISEKIDKLNKEKQSMEKLLERKNKLDKTELQHRFDVLKSFDWDNSSIESKRVVIEMLVQKVIIHDNSIEIILVE

SEQ ID NO: 5607 - DNA, 50 bp, Enterococcus faecalis
  source 1..50: mol_type = genomic DNA
gatgtacaacattactctttattttcaaatacagaataatgttgcatata

SEQ ID NO: 5608 - DNA, 40 bp, Enterococcus faecalis; identical to SEQ ID NO: 1388
  source 1..40: mol_type = genomic DNA

SEQ ID NO: 5609 - DNA, 40 bp, Enterococcus faecalis
  source 1..40: mol_type = genomic DNA
atgcgccacttccgaaatttgaaaaagatcagtggtcaaa

SEQ ID NO: 5610 - DNA, 50 bp, Enterococcus faecalis
  source 1..50: mol_type = genomic DNA
gatgaataaagcaacacttaattttgaaataaagaattggttttcttatt

SEQ ID NO: 5611 - protein, 464 aa, Enterococcus faecalis
MDKKAAIYIRVSTQEQATEGYSIQAQTDRLTKYVEAKDFILYKKYIDAGYSASKLERPAMQELIQDVQSKKVDVVIVYKLDRLSRSQKDTMYLIEDIFRPNDVELISMQESFDTSTAFGSATVGMLSVFAQLERKSISERMITGRVERAKKGFYHTGGQDRPPAGYQFNSDNQLIINEYEAAAIKDLFRLYNDGLGKSSISEYLKKNYPGKNKWLPSSIDRMLKNSLYIGKVKFSGTEYDGIHEPIIDEVTFYKTQKEIARRKQTNTKRYNYVALLGGLCECGICGAKMANRRAVGRKGKVYRYYRCYSKKGSPKHMMKTDGCSSKAQQQFIIDEAVINNLKNIDVEAELKRRSAPQTNTSLISSQIESIDKQINKLIDLFQVDSMPLDVISEKIDKLNKEKQSMEKLLERKNKLDKTELQHRFDVLKSFDWDNSSIESKRVVIEMLVQKVIIHDNSIEIILVE

SEQ ID NO: 5612 - DNA, 50 bp, Enterococcus faecalis
  source 1..50: mol_type = genomic DNA
gatgtacaacattgctctttattttcaaatacagaataatgttgcatata

SEQ ID NO: 5613 - DNA, 40 bp, Enterococcus faecalis; identical to SEQ ID NO: 1388
  source 1..40: mol_type = genomic DNA

SEQ ID NO: 5614 - DNA, 40 bp, Enterococcus faecalis; identical to SEQ ID NO: 5609
  source 1..40: mol_type = genomic DNA

SEQ ID NO: 5615 - DNA, 50 bp, Enterococcus faecalis; identical to SEQ ID NO: 5610
  source 1..50: mol_type = genomic DNA

SEQ ID NO: 5616 - protein, 470 aa, Enterococcus faecalis
MKGESELDKKAAIYIRVSTQEQATEGYSIQAQTDRLTKYVEAKDFILYKKYIDAGYSASKLERPAMQELIQDVKSKKVDVVIVYKLDRLSRSQKDTMYLIEDIFRPNDVELISMQESFDTSTAFGSATVGMLSVFAQLERKSISERMITGRVERAKKGFYHTGGQDRPPAGYQFNSDNQLIINEYEAAAIKDLFRLYNDGLGKSSISEYLKKNYPGKNKWLPSSIDRMLKNSLYIGKVKFSGAEYDGIHEPIIDEVTFYKTQKEIARRKQTNTKRYNYVALLGGLCECGICGAKMANRRAVGRKGKVYRYYRCYSKKGSPKHMMKTDGCSSKAQQQFIIDEAVINNLKNIDVEAELKRRSAPQTNTSLISSQIESIDKQINKLIDLFQVDSMPLDVISEKIDKLNKEKQSMEKLLERKNKLDKTELQHRFDVLKSFDWDNSSIESKRVVIEMLVQKVIIHDNSIEIILVE

SEQ ID NO: 5617 - DNA, 50 bp, Enterococcus faecalis; identical to SEQ ID NO: 5607
  source 1..50: mol_type = genomic DNA

SEQ ID NO: 5618 - DNA, 40 bp, Enterococcus faecalis; identical to SEQ ID NO: 1388
  source 1..40: mol_type = genomic DNA

SEQ ID NO: 5619 - DNA, 40 bp, Enterococcus faecalis; identical to SEQ ID NO: 5609
  source 1..40: mol_type = genomic DNA

SEQ ID NO: 5620 - DNA, 50 bp, Enterococcus faecalis; identical to SEQ ID NO: 5610
  source 1..50: mol_type = genomic DNA

SEQ ID NO: 5621 - protein, 470 aa, Enterococcus faecalis
MKGESELDKKAAIYIRVSTQEQATEGYSIQAQTDRLTKYVEAKDFILYKKYIDAGYSASKLERPAMQELIQDVQSKKVDVVIVYKLDRLSRSQKDTMYLIEDIFRPNDVELISMQESFDTSTAFGSATVGMLSVFAQLERKSISERMITGRVERAKKGFYHTGGQDRPPAGYQFNSDNQLIINEYEAAAIKDLFRLYNDGLGKSSISEYLKKNYPGKNKWLPSSIDRMLKNSLYIGKVKFSGAEYDGIHEPIIDEVTFYKTQKEIARRKQSNTKRYNYVALLGGLCECGICGAKMANRRSVGRKGKVYRYYRCYSKKGSPKHMMKTDGCSSKAQQQFIIDEAVINNLKNIDVEAELKRRSAPQTNTSLISSQIESIDKQINKLIDLFQVDSMPLDVISEKIDKLNKEKQSMEKLLERKNRLDKTELQHRFDILKSFDWDNSSIESKRAVIEMLVQKVIIHDNSIEIILVE

SEQ ID NO: 5622 - DNA, 50 bp, Enterococcus faecalis; identical to SEQ ID NO: 5612
  source 1..50: mol_type = genomic DNA

SEQ ID NO: 5623 - DNA, 40 bp, Enterococcus faecalis; identical to SEQ ID NO: 1388
  source 1..40: mol_type = genomic DNA

SEQ ID NO: 5624 - DNA, 40 bp, Enterococcus faecalis; identical to SEQ ID NO: 5609
  source 1..40: mol_type = genomic DNA

SEQ ID NO: 5625 - DNA, 50 bp, Enterococcus faecalis; identical to SEQ ID NO: 5610
  source 1..50: mol_type = genomic DNA

SEQ ID NO: 5626 - protein, 464 aa, Enterococcus faecalis
MDKKAAIYIRVSTQEQATEGYSIQAQTDRLTKYVEAKDFILYKKYIDAGYSASKLERPAMQELIQDVQSKKVDVVIVYKLDRLSRSQKDTMYLIEDIFRPNDVELISMQESFDTSTAFGSATVGMLSVFAQLERKSISERMITGRVERAKKGFYHTGGQDRPPAGYQFNSDSQLIINEYEAAAIKDLFRLYNDGLGKSSISEYLKKNYPGKNKWLPSSIDRMLKNSLYIGKVKFSGTEYDGIHEPIIDEVTFYKTQKEIARRKQTNTKRYNYVALLGGLCECGICGAKMANRRAVGRKGKVYRYYRCYSKKGSPKHMMKTDGCSSKAQQQFIIDEAVINNLKNIDVEAELKRRSAPQTNTSLISSQIESIDKQINKLIDLFQVDSMPLDVISEKIDKLNKEKQSMEKLLERKNKLDKTELQHRFDVLKSFDWDNSSIESKRVVIEMLVQKVIIHDNSIEIILVE

SEQ ID NO: 5627 - DNA, 50 bp, Enterococcus faecalis; identical to SEQ ID NO: 5612
  source 1..50: mol_type = genomic DNA

SEQ ID NO: 5628 - DNA, 40 bp, Enterococcus faecalis
  source 1..40: mol_type = genomic DNA
atgcgctacttccgaaatttcaaaaagatcagtggtcaaa

SEQ ID NO: 5629 - DNA, 40 bp, Enterococcus faecalis
  source 1..40: mol_type = genomic DNA
atgcgctacttccgaaatttgaaaaagatcagtggtcaaa

SEQ ID NO: 5630 - DNA, 50 bp, Enterococcus faecalis; identical to SEQ ID NO: 5610
  source 1..50: mol_type = genomic DNA

SEQ ID NO: 5631 - protein, 470 aa, Enterococcus faecalis
MKGESELDKKAAIYIRVSTQEQATEGYSIQAQTDRLTKYVEAKDFILYKKYIDAGYSASKLERPAMQELIQDVQSKKVDVVIVYKLDRLSRSQKDTMYLIEDIFRPNDVELISMQESFDTSTAFGSATVGMLSVFAQLERKSISERMITGRVERAKKGFYHTGGQDRPPAGYQFNSDNQLIINEYEAAAIKDLFRLYNDGLGKSSISEYLKKNYPGKNKWLPSSIDRMLKNSLYIGKVKFSGAEYDGIHEPIIDEVTFYKTQKEIARRKQSNTKRYNYVALLGGLCECGICGAKMANRRAVGRKGKVYRYYRCYSKKGSPKHMMKTDGCSSKAQQQFIIDEAVINNLKNIDVEAELKRRSAPQTNTSLISSQIESIDKQINKLIDLFQVDSMPLDVISEKIDKLNKEKQSMEKLLERKNKLDKTELQHRFDVLKSFDWDNSSIESKRVVIEMLVQKVIIHDNSIEIILVE

SEQ ID NO: 5632 - DNA, 50 bp, Enterococcus faecalis; identical to SEQ ID NO: 5612
  source 1..50: mol_type = genomic DNA

SEQ ID NO: 5633 - DNA, 40 bp, Enterococcus faecalis; identical to SEQ ID NO: 1388
  source 1..40: mol_type = genomic DNA

SEQ ID NO: 5634 - DNA, 40 bp, Enterococcus faecalis; identical to SEQ ID NO: 5609
  source 1..40: mol_type = genomic DNA

SEQ ID NO: 5635 - DNA, 50 bp, Enterococcus faecalis; identical to SEQ ID NO: 5610
  source 1..50: mol_type = genomic DNA

SEQ ID NO: 5636 - protein, 470 aa, Enterococcus faecalis
MKGESELDKKAAIYIRVSTQEQATEGYSIQAQTDRLTKYVEAKDFILYKKYIDAGYSASKLERPAMQELIQDVQSKKVDVVIVYKLDRLSRSQKDTMYLIEDIFRPNDVELISMQESFDTSTAFGSATVGMLSVFAQLERKSISERMITGRVERAKKGFYHTGGQDRPPAGYQFNSDNHLIINEYEAAAIKDLFRLYNDGLGKSSISEYLKKNYPGKNKWLPSSIDRMLKNSLYIGKVKFSGVEYDGIHEPIIDEVTFYKTQKEIARRKQSNTKRYNYVALLGGLCECGICGAKMANRRAVGRKGKVYRYYRCYSKKGSPKHMMKTDGCSSKAQQQFIIDEAVINNLKNIDVEAELKRRSAPQTNTSLISSQIESIDKQINKLIDLFQVDSMPLDVISEKIDKLNKEKQSMEKLLERKNRLDKTELQHRFDILKSFDWDNSSIESKRAVIEMLVQKVIIHDNSIEIILVE

SEQ ID NO: 5637 - DNA, 50 bp, Enterococcus faecalis; identical to SEQ ID NO: 5612
  source 1..50: mol_type = genomic DNA

SEQ ID NO: 5638 - DNA, 40 bp, Enterococcus faecalis; identical to SEQ ID NO: 1383
  source 1..40: mol_type = genomic DNA

SEQ ID NO: 5639 - DNA, 40 bp, Enterococcus faecalis
  source 1..40: mol_type = genomic DNA
atgcgccacttctgaaatttgaaaaagatcagtggtcaaa

SEQ ID NO: 5640 - DNA, 50 bp, Enterococcus faecalis; identical to SEQ ID NO: 5610
  source 1..50: mol_type = genomic DNA

SEQ ID NO: 5641 - protein, 464 aa, Enterococcus faecalis; identical to SEQ ID NO: 1381

SEQ ID NO: 5642 - DNA, 50 bp, Enterococcus faecalis; identical to SEQ ID NO: 5612
  source 1..50: mol_type = genomic DNA

SEQ ID NO: 5643 - DNA, 40 bp, Enterococcus faecalis; identical to SEQ ID NO: 1383
  source 1..40: mol_type = genomic DNA

SEQ ID NO: 5644 - DNA, 40 bp, Enterococcus faecalis; identical to SEQ ID NO: 5639
  source 1..40: mol_type = genomic DNA

SEQ ID NO: 5645 - DNA, 50 bp, Enterococcus faecalis; identical to SEQ ID NO: 5610
  source 1..50: mol_type = genomic DNA

SEQ ID NO: 5646 - protein, 470 aa, Enterococcus faecalis
MKGESKLDKKAAIYIRVSTQEQATEGYSIQAQTDRLTKYVEAKDFILYKKYIDAGYSASKLERPAMQELIQDVQSKKVDVVIVYKLDRLSRSQKDTMYLIEDIFRPNDVELISMQESFDTSTAFGSATVGMLSVFAQLERKSISERMITGRVERAKKGFYHTGGQDRPPAGYQFNSDNQLIINEYEAAAIKDLFRLYNDGLGKSSISEYLKKNYPGKNKWLPSSIDRMLKNSLYIGKVKFSGVEYDGIHEPIIDEVTFYKTQKEIARRKQSNTKRYNYVALLGGLCECGICGAKMANRRAVGRKGKVYRYYRCYSKKGSPKHMMKTDGCSSKAQQQFIIDEAVINNLKNIDVEAELKRRSAPQTNTSLISSQIESIDKQINKLIDLFQVDSMPLDVISEKIDKLNKEKQSMEKLLERKNRLDKTELQHRFDILKSFDWDNSSIESKRAVIEMLVQKVIIHDNSIEIILVE

SEQ ID NO: 5647 - DNA, 50 bp, Enterococcus faecalis; identical to SEQ ID NO: 5612
  source 1..50: mol_type = genomic DNA

SEQ ID NO: 5648 - DNA, 40 bp, Enterococcus faecalis
  source 1..40: mol_type = genomic DNA
atgtgccacttccgaaatttcaaaaagatcagtggtcaga

SEQ ID NO: 5649 - DNA, 40 bp, Enterococcus faecalis
  source 1..40: mol_type = genomic DNA
atgtgccacttccgaaatttgaaaaagatcagtggtcaga

SEQ ID NO: 5650 - DNA, 50 bp, Enterococcus faecalis; identical to SEQ ID NO: 5610
  source 1..50: mol_type = genomic DNA

SEQ ID NO: 5651 - protein, 464 aa, Enterococcus faecalis
MDKKAAIYIRVSTQEQATEGYSIQAQTDRLTKYAEAKDFILYKKYIDAGYSASKLERPAMQELIQDVQSKKVDVVIVYKLDRLSRSQKDTMYLIEDIFRPNDVELISMQESFDTSTAFGSATVGMLSVFAQLERKSISERMITGRVERAKKGFYHTGGQDRPPAGYQFNSDNQLIINEYEAAAIKDLFRLYNDGLGKSSISEYLKKNYPGKNKWLPSSIDRMLKNSLYIGKVKFSGAEYDGIHEPIIDEVTFYKTQKEIARRKQTSTKRYNYVALLGGLCECGICGAKMANRRAVGRKGKVYRYYRCYSKKGSPKHMMKTDGCSSKAQQQFIIDEAVINNLKNIDVEAELKRRSAPQTNTSLISSQIKSIDKQINKLIDLFQVDSMPLDVISEKIEKLNKEKQSMEKLLERKNKLDKTELQHRFDVLKSFDWDNSSIESKRVVIEMLVQKVIIHDNSIEIILVE

SEQ ID NO: 5652 - DNA, 50 bp, Enterococcus faecalis; identical to SEQ ID NO: 5612
  source 1..50: mol_type = genomic DNA

SEQ ID NO: 5653 - DNA, 40 bp, Enterococcus faecalis; identical to SEQ ID NO: 1388
  source 1..40: mol_type = genomic DNA

SEQ ID NO: 5654 - DNA, 40 bp, Enterococcus faecalis; identical to SEQ ID NO: 5609
  source 1..40: mol_type = genomic DNA

SEQ ID NO: 5655 - DNA, 50 bp, Enterococcus faecalis; identical to SEQ ID NO: 5610
  source 1..50: mol_type = genomic DNA

SEQ ID NO: 5656 - protein, 470 aa, Enterococcus faecalis
MKGESELDKKAAIYIRVSTQEQATEGYSIQAQTDRLTKYVEAKDFILYKKYIDAGYSASKLERPAMQELIQDVQSKKVDVIIVYKLDRLSRSQKDTMYLIEDIFRPNDVELISMQESFDTSTAFGSATVGMLSVFAQLERKSISERMITGRVERAKKGFYHTGGQDRPPAGYQFNSDNQLIINEYEAAAIKDLFRLYNDGLGKSSISEYLKKNYPGKNKWLPSSIDRMLKNSLYIGKVKFSGAEYDGIHEPIIDEVTFYKTQKEIARRKQSNTKRYNYVALLGGLCECGICGAKMANRRAVGRKGKVYRYYRCYSKKGSPKHMMKTDGCSSKAQQQFIIDEAVINNLKNIDVEAELKRRSAPQTNTSLISSQIESIDKQINKLIDLFQVDSMPLDVISEKIDKLNKEKQSMEKLLERKNKLDKTELQHRFDVLKSFDWDNSSIESKRVVIEMLVQKVIIHDNSIEIILVE

SEQ ID NO: 5657 - DNA, 50 bp, Enterococcus faecalis; identical to SEQ ID NO: 5612
  source 1..50: mol_type = genomic DNA

SEQ ID NO: 5658 - DNA, 40 bp, Enterococcus faecalis; identical to SEQ ID NO: 1388
  source 1..40: mol_type = genomic DNA

SEQ ID NO: 5659 - DNA, 40 bp, Enterococcus faecalis; identical to SEQ ID NO: 5609
  source 1..40: mol_type = genomic DNA

SEQ ID NO: 5660 - DNA, 50 bp, Enterococcus faecalis; identical to SEQ ID NO: 5610
  source 1..50: mol_type = genomic DNA

SEQ ID NO: 5661 - protein, 470 aa, Enterococcus faecalis
MKGESELDKKAAIYIRVSTQEQATEGYSIQAQTDRLTKYVEAKDFILYKKYIDAGYSASKLERPAMQELIQDVQSKKVDVIIVYKLDRLSRSQKDTMYLIEDIFRPNDVELISMQESFDTSTAFGSATVGMLSVFAQLERKSISERMITGRVERAKKGFYHTGGQDRPPAGYQFNSDNQLIINEYEAAAIKDLFRLYNDGLGKSSISEYLKKNYPGKNKWLPSSIDRMLKNSLYIGKVKFSGAEYDGIHEPIIDEVTFYKTQKEIARRKQSNTKRYNYVALLGGLCECGICGAKMANRRAVGRKGKVYRYYRCYSKKGSPKHMMKTDGCSSKAQQQFIIDEAVINNLKNIDVEAELKRRSAPQTNTSLISSQIESIDKQINKLIDLFQVDSMPLDVISKKIDKLNKEKQSMEKLLERKNKLDKTELQHRFDVLKSFDWDNSSIESKRVVIEMLVQKVIIHDNSIEIILVE

SEQ ID NO: 5662 - DNA, 50 bp, Enterococcus faecalis; identical to SEQ ID NO: 5612
  source 1..50: mol_type = genomic DNA

SEQ ID NO: 5663 - DNA, 40 bp, Enterococcus faecalis; identical to SEQ ID NO: 1388
  source 1..40: mol_type = genomic DNA

SEQ ID NO: 5664 - DNA, 40 bp, Enterococcus faecalis; identical to SEQ ID NO: 5609
  source 1..40: mol_type = genomic DNA

SEQ ID NO: 5665 - DNA, 50 bp, Enterococcus faecalis; identical to SEQ ID NO: 5610
  source 1..50: mol_type = genomic DNA

SEQ ID NO: 5666 - protein, 469 aa, Staphylococcus hominis
MYYERSYLRSCQVSSYEQATEGYSIHEQERKLKAFCEVQNWHDFKVFTDAGVSGGSMNRPALKRIMDNLEYYDLVLVYKLDRLTRNVKDLLEMLETFEKYNVAFKSATEVFDTTTAIGKLFITMVGAMAEWERATIRERALFGSRAAVREGNYIREAPFCYDNVDGKLVPNKHKWVIDYLVEQFKHGVSGNEIARQMNLKKVNVPKVKKWNRTSIIRLMKNPVLRGHTKYGDMYIENTHESVLSESDYKRIIDVIENKTHRSKVKHHAIFRGVLTCPQCHNKLHLYAGKITDKKGYSYEVRRYKCDTCSKDKNVQTISFNESEVEDKFIELLKTYDMNKFKVDIVEESTPKLDYDIDKIMKQREKLTRSWSLGYIEDDEYFSLMDETKEILDEVERANVEVESTQTVTNEQLNMIDNILIKGWSKLNVEQKEELILSTVKEIAFDFVPRKYNENGKVNTLNIREITFKF

SEQ ID NO: 5667 - DNA, 50 bp, Staphylococcus hominis
  source 1..50: mol_type = genomic DNA
aatagtagtagtgttacagggtaggtagtgcttgtaacactatttttatg

SEQ ID NO: 5668 - DNA, 40 bp, Staphylococcus hominis
  source 1..40: mol_type = genomic DNA
cataaatggcacgactaatgtagcaccggtacccccccat

SEQ ID NO: 5669 - DNA, 40 bp, Staphylococcus hominis
  source 1..40: mol_type = genomic DNA
cataaatggcacgactaataaagcaccggtacccccccat

SEQ ID NO: 5670 - DNA, 50 bp, Staphylococcus hominis
  source 1..50: mol_type = genomic DNA
aatatcattttggcttcagcctagaaagtgattgtattaaaattttcatg

SEQ ID NO: 5671 - protein, 465 aa, Staphylococcus hominis
MKVAIYTRVSSYEQATEGYSIHEQERKLKAFCEVQNWHDFKVFTDAGVSGGSMNRPALKRIMDNLEYYDLVLVYKLDRLTRNVKDLLEMLETFEKYNVAFKSATEVFDTTTAIGKLFITMVGAMAEWERATIRERALFGSRAAVREGNYIREAPFCYDNVDGKLIPNKHKWVIDYLVEQFKHGLSGNEIARQMNLKKVNVPKIKKWNRTSIIRLMKNPVLRGHTKYGDMYIENTHEPVLSESDYKRIIDVIENKTHRSKVKHHAIFRGVLTCPQCHNKLHLYAGKITDKKGYSYEVRRYKCDTCSKNKNIQTISFNESEVEDKFIELLKTYDMNKFKVDIVEESIPEIDYDIDKIMKQREKLTRSWSLGYIEDDEYFSLMDETKEILDKVERASVEVESTQTVTNEQLNMIDNILIKGWSKLNVEQKEELILSTVKEIAFDFVPRKYNENGKVNTLNIREITFKF

SEQ ID NO: 5672 - DNA, 50 bp, Staphylococcus hominis; identical to SEQ ID NO: 5667
  source 1..50: mol_type = genomic DNA

SEQ ID NO: 5673 - DNA, 40 bp, Staphylococcus hominis
  source 1..40: mol_type = genomic DNA
cataaatggcacaactaatgtagcaccggtaccccccata

SEQ ID NO: 5674 - DNA, 40 bp, Staphylococcus hominis
  source 1..40: mol_type = genomic DNA
cataaatggcacaactaataaagcaccggtaccccccata

SEQ ID NO: 5675 - DNA, 50 bp, Staphylococcus hominis; identical to SEQ ID NO: 5670
  source 1..50: mol_type = genomic DNA

SEQ ID NO: 5676 - protein, 469 aa, Staphylococcus epidermidis
MYYERSYLRSCQVSSYEQATEGYSIHEQERKLKAFCEVQNWHDFKVFTDAGVSGGSMNRPALKRIMDNLEYYDLVLVYKLDRLTRNVKDLLEMLETFEKYNVAFKSATEVFDTTTAIGKLFITMVGAMAEWERATIRERALFGSRAAVREGNYIREAPFCYDNVDGKLIPNKHKWVIDYLVEQFKHGVSGNEIARQMNVKKVNVPKIKKWNRTSIIRLMKNPVLRGHTKYGDMYIENTHEPVLSESDYKRIIDVIENKTHRSKVKHHAIFRGVLTCPQCHNKLHLYAGKITDKKGYSYEVRRYKCDTCSKDKNVQTISFNESEVEDKFIELLKTYDMNKFKVDIVEESTPKLDYDIDKIMKQREKLTRSWSLGYIKDDEYFSLMDETKEILDEVERAGTEVESTQTVTNEQLNMIDDILIKGWSKLNVEQKEELILSTVKEIVFDFVPRKYNENGKVNTLNIREITFKF

SEQ ID NO: 5677 - DNA, 50 bp, Staphylococcus epidermidis; identical to SEQ ID NO: 5667
  source 1..50: mol_type = genomic DNA

SEQ ID NO: 5678 - DNA, 40 bp, Staphylococcus epidermidis
  source 1..40: mol_type = genomic DNA
cataaatggaacaactaatgttgcaccggttcctcccata

SEQ ID NO: 5679 - DNA, 40 bp, Staphylococcus epidermidis
  source 1..40: mol_type = genomic DNA
cataaatggaacaactaataatgcaccggttcctcccata

SEQ ID NO: 5680 - DNA, 50 bp, Staphylococcus epidermidis; identical to SEQ ID NO: 5670
  source 1..50: mol_type = genomic DNA

SEQ ID NO: 5681 - protein, 481 aa, Streptococcus pneumoniae; identical to SEQ ID NO: 2186

SEQ ID NO: 5682 - DNA, 50 bp, Streptococcus pneumoniae
  source 1..50: mol_type = genomic DNA
aaatataaataattttagtaacttacatctcaatcaaggatagtaaaact

SEQ ID NO: 5683 - DNA, 40 bp, Streptococcus pneumoniae; identical to SEQ ID NO: 5018
  source 1..40: mol_type = genomic DNA

SEQ ID NO: 5684 - DNA, 40 bp, Streptococcus pneumoniae
  source 1..40: mol_type = genomic DNA
ataatcagcaagaccaccaaaatttccaccaatgtaaaag

SEQ ID NO: 5685 - DNA, 50 bp, Streptococcus pneumoniae
  source 1..50: mol_type = genomic DNA
aaataacaatggaaatagaaatttaaatttcaaacatattgtgtaaaact

SEQ ID NO: 5686 - protein, 559 aa, Serratia fonticola
MIRKTYGYCRVSSGKQLDGNGMSRQQKMLLKYIQNYKDTKNLGYQLSIDDFSWILQPGQSAFKGYNLEEGVLAEFIKEAIAGKHKNSCLLIENIDRFSRATPAKSALNFLAVTNAGVHVHEVETGEVFTDILNLELLASSITRANRESVRKQNLSNDNWEERYEAAKKGTAVLTKRVPKWIEVVDNNYQLTSESYIINFIFDKFCEGIGSTTIARELNTKRMLIGNAEWYPQNVNRLLSDKRVTGWLISTNKNRQDVRLYPQVITDEQFSRVQNIKNSSQPLVKHKPTENMNNLFNGISSCGLCGAAVGVIKQTYKGKITYKRLYCSKRKEIKTCTAISIQYGFVEKAIYNHVLNFNWNEFLSQESSEDISDEIRNDLISKKNYADNIRKIVDESEMPDLSIIRKLNDINNKIASLESQLATIKIKPQEFDISGFDIENREDRLKYNLALRKVVSTIKLTRHPFIDSFVSIEFHYHISSLKHLILMDSMNGDILSNIACSETEEALHYITNVMSITCNKRTHHVEIEGLYVSEDLALMLLFMEQQGVDKNLIEKTRKFL

SEQ ID NO: 5687 - DNA, 50 bp, Serratia fonticola
  source 1..50: mol_type = genomic DNA
ttaaattggagacattatgttgatgattagctaaaatatccctaaattgc

SEQ ID NO: 5688 - DNA, 40 bp, Serratia fonticola
  source 1..40: mol_type = genomic DNA
ggtgagcgaccatgttgatgaatgatgagtaccaatccat

SEQ ID NO: 5689 - DNA, 40 bp, Serratia fonticola
  source 1..40: mol_type = genomic DNA
ggtgagcgaccatgttgattaatgatgagtaccaatccat

SEQ ID NO: 5690 - DNA, 50 bp, Serratia fonticola
  source 1..50: mol_type = genomic DNA
tcaacttgctttctttatgttgcttattatcttagtccttactaaattgc

SEQ ID NO: 5691 - protein, 505 aa, Klebsiella pneumoniae
MTLAFSYVRFSTKHQASGTSLERQVNASKLFCSQNGLTLSNQSYHDLGISGFKNVRRPELEQMLEAIQTGDIPSGSYILIEAIDRLSRKGISHTQDILKKILQYDVKVAFVGEDAKTLQGHILNKDSLNDLSSVILVALAADLAHKESLRKSKLVKASKAIAREKAADGEILPGKSVFYLDYDKKNKKYVFNKRVDLARKIIQMRLEGKGPRKIARLLNEENIPGPTGKQWYQMSVKRLLKSPVLYGAYQTHQIIEEKYIPVSLIENYYPALIDYQTFSQIQFDDKRVSKGRPSRHKFSGVLYCECGAVLCRKVNTSVTKKGIKEYQYFNCFGSFEGRCKNNKAIRDLHIPLEKAIDKLQIKTRSVKNIKNEQIIAKREKIDQLNKMLLELEMPPVSVLKTISTLEKELQELLEQPDVQPPKSADVKTLVAIKDAEQYNLYLKRLVKRITIFQLNGPKNIRIKIEKTDGHYQSFIVNNGKIMFNADTKALQEHLRKLKEGTSDED

SEQ ID NO: 5692 - DNA, 50 bp, Klebsiella pneumoniae
  source 1..50: mol_type = genomic DNA
ttttgtcaaaatgaaactgttcttcgggtaatagtatcattttacaaaaa

SEQ ID NO: 5693 - DNA, 40 bp, Klebsiella pneumoniae; identical to SEQ ID NO: 883
  source 1..40: mol_type = genomic DNA

SEQ ID NO: 5694 - DNA, 40 bp, Klebsiella pneumoniae; identical to SEQ ID NO: 884
  source 1..40: mol_type = genomic DNA

SEQ ID NO: 5695 - DNA, 50 bp, Klebsiella pneumoniae; identical to SEQ ID NO: 885
  source 1..50: mol_type = genomic DNA

SEQ ID NO: 5696 - protein, 480 aa, Lactobacillus curvatus
MEDYQSMKVGIYVRVSTLEQATEGYSIQEQTDKLKKFCDVKEWSIGEVYTDPGFSGSSLKRPGMQKLINDVEQQKIDAVLVYKLDRLSRSQKDTLYLIEDVFLKYNVHFVSLNENFDTSTPFGRASIGMMSVFAQLEREQITERMQMGKVGRAKAGYFHGGGTIPHGYDYNDGGLIPNEKEAKIVNYIFDQYLDGWGAQSIAKHLNAKHISGKRSAKWSHKVVNEVLCNNLYIGKITWKNEIYDGTHAPIIDEDKFYKVQELMAKRKSTAAKNNQRPFKAKYMLTGLAYCGVCGARMFTLQSYSSKQHKYIRKYGCYSQSTVQHMIKDANCDNDKYDGPELETYVLQRVRKLSMNPKTIKRITNQTTSIVSTDGTKAQIKETEEQIERLLDLYQNGAITFAKIESRLDDLNAKKSNLEEQLKRLESEKLNNGSTTDVLDLLSTASDVVDSKDYDAQKRLVHALIQKITLKRDKVTIKWTF

SEQ ID NO: 5697 - DNA, 50 bp, Lactobacillus curvatus
  source 1..50: mol_type = genomic DNA
taaaaatatttatgtacgtccatttcaattgaagttcacgaatattttta

SEQ ID NO: 5698 - DNA, 40 bp, Lactobacillus curvatus; identical to SEQ ID NO: 4263
  source 1..40: mol_type = genomic DNA

SEQ ID NO: 5699 - DNA, 40 bp, Lactobacillus curvatus
  source 1..40: mol_type = genomic DNA
agctagcacaacgaccattcagatcaatgtaaatgcattt

SEQ ID NO: 5700 - DNA, 50 bp, Lactobacillus curvatus
  source 1..50: mol_type = genomic DNA
taaaaatattgtcatactttgagccaaattgaaattaacctggattttta

SEQ ID NO: 5701 - protein, 549 aa, Faecalibacterium prausnitzii
MNRYERLNEERKIIEKRKRVAAYCRVSTDNEDQANSFESQQRYFRQYIERNPDWELYEIFADEGISGTSTKKRKEFNRMIACAKNGDFDLIITKEISRFARNTLDSIYYTRDLKKHGVGVIFMNDNINTLDGDAELRLAIMSSIAQEESRKTSERVKWGQKRQMEQGVVFGRSMLGYDVKDGKMTINEEGAKIVRLIFHKFVNEGKGTHVIARELREEGIEPMRVKEWQNTVILRVIRNEKYCGDLVQKKTYTPDFLSHEKKYNRGQEEFVIIKDHHEPIVSRELFEEANRILDERSLSQEGKAKHSNRYPFSGKIKCGHCGASYVARYKTRKDGSKYKAWRCQEAAKHGSPHTDKAGNQIGCTGASIRNEDATHIMFLVTKELKLRQTKITKNLTSIIESIIAMDTTGTDIEKLKTQIATIEDKRTKLIDIYMSGDISKDEFSAARSKCDAEIAELQSVIDSIDKQQAMIRQQQELVQEIRDAINEIVCGVEYDDEFYKHILDKMVVNDKDNIDVYLNLLPMKWSYTVAKASKKALAPERNISGASVP

SEQ ID NO: 5702 - DNA, 50 bp, Faecalibacterium prausnitzii
  source 1..50: mol_type = genomic DNA
aggaacatttcaggggcttctgtacctacagaagcaacggaaatgttcca

SEQ ID NO: 5703 - DNA, 40 bp, Faecalibacterium prausnitzii
  source 1..40: mol_type = genomic DNA
atgagctaactcttctgtgcctatatctgtcaatattgct

SEQ ID NO: 5704 - DNA, 40 bp, Faecalibacterium prausnitzii
  source 1..40: mol_type = genomic DNA
atgagctaactcttctgtgtttatatctgtcaatattgct

SEQ ID NO: 5705 - DNA, 50 bp, Faecalibacterium prausnitzii
  source 1..50: mol_type = genomic DNA
gggaagtttcaaatagcttttctatttacagaagcagcctcaatgcccca

SEQ ID NO: 5706 - protein, 548 aa, Clostridioides difficile
MNRYERLNEERKIIDTRKRVAAYCRVSTDNEDQANSFESQQRYFKQYIERNPDWELYEIFADEGISGTSTKKRKEFNRMIACAKNGDFDLIITKEISRFARNTLDSIYYTRDLKKHGVGVIFMNDNINTLDGDAELRLAIMSSIAQEESRKTSERVKWGQKRQMEQGVVFGRSMLGYDVKDGKMTINEEGAKIVRLIFHKFVNEGKGTHVIARELREEGIEPMRVKEWQNTVILRVIRNEKYCGDLVQKKTYTPDFLSHEKKYNRGQEEFVIIKDHHEPIVSRELFEEANRILDERSLSQEGKAKHSNRYPFSGKIKCGHCGASYVARYKTRKDGSKYKAWRCQEAAKHGSPHTDKAGNQIGCTGASIRNEDATHIMFLVTKELKLRQTKITKNLTSIIESIIAMDTTGTDIEKLKTQIATIEDKRTKLIDIYMSGDISKDEFSAARSKCDAEIAELQSVIDSIDKQQAMIRQQQELVQEIRDAINEIVCGVEYDDEFYKHILDKMVVNDKDNIDVYLNLLPMKWSYTVAKASKKALAPERNISGASV

SEQ ID NO: 5707 - DNA, 50 bp, Clostridioides difficile; identical to SEQ ID NO: 5702
  source 1..50: mol_type = genomic DNA

SEQ ID NO: 5708 - DNA, 40 bp, Clostridioides difficile
  source 1..40: mol_type = genomic DNA
gtgagctagctcttctgtaccaatatctgttaaaagtgca

SEQ ID NO: 5709 - DNA, 40 bp, Clostridioides difficile
  source 1..40: mol_type = genomic DNA
gtgagctagctcttctgtattaatatctgttaaaagtgca

SEQ ID NO: 5710 - DNA, 50 bp, Clostridioides difficile; identical to SEQ ID NO: 5705
  source 1..50: mol_type = genomic DNA

SEQ ID NO: 5711 - protein, 552 aa, Pseudomonas taiwanensis
MARLISYLRMSTSEQLKGFSLERQRKLIADFAAKNGLSLDESHSIEDIGRSSFSDDAEQKQLARFFEDLDVGKFSPGDVFALENIDRLTRRGPIDALLKVNTILSKGLKLAIISDKEQRILEEIDVFSIITLSIDASRANKESQVKSDKGLENWAFKRELAASHGVAMTAQAPAWLDTETFYLMDETKGKQVKRRRYVLNPEKAETVKLIFELFQNGNGSLKIKNILNERNIPTFKGAEYWEPSIISKILRNPATHGFYQPKKQGTGKRDLIPAGEPIEDYFPAIVSRETFEQCQRITAANSTRKGRKGKVFTNLFTGLLKCVDCGGPVHLLNPGIDKRAKVPKSVNYIVCKKGKFTRECVLKRLRYDDFEATMLKAIQEINLADVLNENNPLERLIKQIRAIEARIEKNNTMLENFRVAFRESGTLPSFMIEEANNAENDNKALEIERTELQAQMAQLNVYNTNIDNAIEELKNNGTYETRAKINLVLHEIIKNINIDFELVEFAIIFKNGVKRFINDGIVQNVYITKTGSEKYYSEIEEILNHTATPPTK

SEQ ID NO: 5712 - DNA, 50 bp, Pseudomonas taiwanensis
  source 1..50: mol_type = genomic DNA
tacaggttaaacgcttccgtcttgatcaagtccggcatataatacctgta

SEQ ID NO: 5713 - DNA, 40 bp, Pseudomonas taiwanensis
  source 1..40: mol_type = genomic DNA
ccacggatagcccgacttgatcagcaccgcattgcctgga

SEQ ID NO: 5714 - DNA, 40 bp, Pseudomonas taiwanensis
  source 1..40: mol_type = genomic DNA
ccacggatagcccgacttggccagcaccgcattgcctgga

SEQ ID NO: 5715 - DNA, 50 bp, Pseudomonas taiwanensis
  source 1..50: mol_type = genomic DNA
tacaagttaagaattgcattcttggccagatgcggtggctcatacctgta

SEQ ID NO: 5716 - protein, 518 aa, Cronobacter sakazakii; identical to SEQ ID NO: 941

SEQ ID NO: 5717 - DNA, 50 bp, Cronobacter sakazakii
  source 1..50: mol_type = genomic DNA
tacagtaatttactgttaatgactaccatgatatacttctttttactgtt

SEQ ID NO: 5718 - DNA, 40 bp, Cronobacter sakazakii
  source 1..40: mol_type = genomic DNA
ggcgatgatgccgatcaccaccatcagttcaatgagtgta

SEQ ID NO: 5719 - DNA, 40 bp, Cronobacter sakazakii
  source 1..40: mol_type = genomic DNA
ggcgatgatgccgatcacctacatcagttcaatgagtgta

SEQ ID NO: 5720 - DNA, 50 bp, Cronobacter sakazakii; identical to SEQ ID NO: 920
  source 1..50: mol_type = genomic DNA

SEQ ID NO: 5721 - protein, 518 aa, Enterobacter hormaechei
MKKTVYCYARVSSRGQAKDGFGISRQQKMLNDYVSTYDDSLHKRGYELGAVNWLFAEGISAYSGKNIEDGSVLKSFIDDVLDRKIINAVLVIENLDRFSRAEPIKAANLFLNLITAGCDIHEVETETIHHSSSDLSIITGGLQRAHNESKRKARLSIKNWDERIKNAIDGKAVLTHRVPSWLEVKDNGYVIKEGEKEKYNLIFQMYADGFGPAAIRDVLKERNMLINDSEPTIAHLNKIIKDERLIGKFNSTGRKKLSGLVIYPVVVDLSLFHIVDQLRKQRNPVGKIHRKANNLFAGLCICMECGRYVQVNSIEPNGESYFRCGGSLVKSDRCQERGFKYKFFENALLQHIRNFDFSSLNANESEVQIKVNHLSLELLAHIKYRDEILQDIEKEDIPDPIDRRILKNLQKKIGDVESEISNLKRLNVNVSAFDELKQYSEELRDPLNADIRLDFNIKIKRVIKSIIIKRYSDTIFLVINYIAINEKQAIVINSKNGEVMYMGVQNDDLKTVEHLIGN

SEQ ID NO: 5722 - DNA, 50 bp, Enterobacter hormaechei
  source 1..50: mol_type = genomic DNA
tacagtaatttactgttaattaccaccatgatatacttctttttactgtt

SEQ ID NO: 5723 - DNA, 40 bp, Enterobacter hormaechei
  source 1..40: mol_type = genomic DNA
ggcaataatgccaatgaccaccattagctcaatcagggta

SEQ ID NO: 5724 - DNA, 40 bp, Enterobacter hormaechei
  source 1..40: mol_type = genomic DNA
ggcaataatgccaatgacctacattagctcaatcagggta

SEQ ID NO: 5725 - DNA, 50 bp, Enterobacter hormaechei; identical to SEQ ID NO: 920
  source 1..50: mol_type = genomic DNA

SEQ ID NO: 5726 - protein, 518 aa, Enterobacter roggenkampii
MKKTVYCYARVSSRGQAKDGFGMSRQQKMLNDYVSTYDDSLHKRGYELGAVNWLFAEGISAYSGKNIEDGSVLKSFIDDVLDRKIINAVLVIENLDRFSRAEPIKAANLFLNLITAGCDIHEVETETIHHSSSDLSIITGGLQRAHNESKRKARLSIKNWDERIKNAIEGKAVLTHRVPSWLEVKDNGYVIKEGEKEKYNLIFQMYADGFGPAAIRDVLKERNMLINDSEPTIAHLNKIIKDERLIGKFNSTGRKKLSGLVIYPVVVDLSLFHIVDQLRKQRNPVGKIHRKANNLFAGLCICMECGRYVQVNSIEPNGESYFRCGGSLVKSDRCQERGFKYKFFENALLQHIRNFDFSSLNANESEVQIKVNHLSMELLAHIKYRDEILQDIEKEDIPDPIDRRILKNLQKKIGEIESEISNLKRLNVNVSTFDELKQYSEELRDPLNADIRLDFNIKIKRVIKNIIIKRYSDAIFLVINYIAINEKQAIVINSKNGEVLYMGVQNDDLKTVEHLIGN

SEQ ID NO: 5727 - DNA, 50 bp, Enterobacter roggenkampii; identical to SEQ ID NO: 5717
  source 1..50: mol_type = genomic DNA

SEQ ID NO: 5728 - DNA, 40 bp, Enterobacter roggenkampii; identical to SEQ ID NO: 848
  source 1..40: mol_type = genomic DNA

SEQ ID NO: 5729 - DNA, 40 bp, Enterobacter roggenkampii; identical to SEQ ID NO: 4824
  source 1..40: mol_type = genomic DNA

SEQ ID NO: 5730 - DNA, 50 bp, Enterobacter roggenkampii; identical to SEQ ID NO: 920
  source 1..50: mol_type = genomic DNA

SEQ ID NO: 5731 - protein, 518 aa, Pluralibacter gergoviae; identical to SEQ ID NO: 941

SEQ ID NO: 5732 - DNA, 50 bp, Pluralibacter gergoviae; identical to SEQ ID NO: 5717
  source 1..50: mol_type = genomic DNA

SEQ ID NO: 5733 - DNA, 40 bp, Pluralibacter gergoviae
  source 1..40: mol_type = genomic DNA
ggcaataatgcctatcaccaccatcagttcaatcagggta

SEQ ID NO: 5734 - DNA, 40 bp, Pluralibacter gergoviae
  source 1..40: mol_type = genomic DNA
ggcaataatgcctatcacctacatcagttcaatcagggta

SEQ ID NO: 5735 - DNA, 50 bp, Pluralibacter gergoviae; identical to SEQ ID NO: 920
  source 1..50: mol_type = genomic DNA

SEQ ID NO: 5736 - protein, 518 aa, Escherichia coli; identical to SEQ ID NO: 941

SEQ ID NO: 5737 - DNA, 50 bp, Escherichia coli; identical to SEQ ID NO: 5717
  source 1..50: mol_type = genomic DNA

SEQ ID NO: 5738 - DNA, 40 bp, Escherichia coli; identical to SEQ ID NO: 918
  source 1..40: mol_type = genomic DNA

SEQ ID NO: 5739 - DNA, 40 bp, Escherichia coli; identical to SEQ ID NO: 919
  source 1..40: mol_type = genomic DNA

SEQ ID NO: 5740 - DNA, 50 bp, Escherichia coli; identical to SEQ ID NO: 920
  source 1..50: mol_type = genomic DNA

SEQ ID NO: 5741 - protein, 525 aa, Vibrio vulnificus
MNIAYSYIRFSSAVQAKGDSLRRQTQLAQDYCLKHSLTLSDQSFTDLGVSAFRSANTNEDNGLGQFLKALQQGVIPRGSFLLVESLDRLSRASVMTAMRQLFNIIEYGITVVTLIDNRTYNSESETTDLIISLTVMERAHNESKTKSERLKAVWANKRANPNTTTRHSNTPFWLSLNEDKRTYSIIESKADIVRRIFQMSIDGRGAVSTCRILNEEGLKAPKGGTWATTSIKKILGSKAAIGHHTHIINNKVQSSTVPDFYPPIISEETYYLSQAKMKERHKPNSAGRKSTFPNVLSQVAVCGSCGSHMLYDPKSPQWIYLTCREFKKNACTNKPLRIELINRFIIEQYLHPQHFEKHLDLVKKGSTSTDQINVIESKIESEKEALKQLIELTSNFSNSVIQDGIKTRSESIQSLEKQLEEAKALSVESVTSIHMNYREACQLVADALQVQVFDKKPATLSREELFKVRVKLNRSLKQTFSEITVSHCPDTKKASITANDFTYEAHKSAMKTGFNNHTWYAVPQN

SEQ ID NO: 5742 - DNA, 50 bp, Vibrio vulnificus
  source 1..50: mol_type = genomic DNA
aatacaggtaaatattgcaaagtagcagcgtcctatgtaccatttaccta

SEQ ID NO: 5743 - DNA, 40 bp, Vibrio vulnificus
  source 1..40: mol_type = genomic DNA
gtcccaggaggccctaaaaacaacaaattgtgattacctg

SEQ ID NO: 5744 - DNA, 40 bp, Vibrio vulnificus
  source 1..40: mol_type = genomic DNA
gtcccaggaggccctaaaagtaacaaattgtgattacctg

SEQ ID NO: 5745 - DNA, 50 bp, Vibrio vulnificus
  source 1..50: mol_type = genomic DNA
agtagtggtatttattgcaaagtagttgcttctgatgatatatataccta

SEQ ID NO: 5746 - protein, 507 aa, Escherichia coli
MKRVISYIRFSSEKQAKGDSLRRQSKMVTDWLKAHPEYYLDESLTFRDLGVSGFTGKHLKGGLGDFLTAIEKGLVKAGDTLLIESLDRLSRQDIDIASELLRNILRSGVDVVTLSDGEHYTKESLRDPLSLIKSILIMQRAHEESLRKSERIQAAWDAKKEAAKAGIKVSKRCPAWLKLNDDRKSFSVIPEKVETVKRCFQLRLEGKSIWEIVRTLNDEGHQTLNQYKAGKFGQTSVQDLLKNRSVIGYFTPKGCEEISGYYPAIIDETTFYKVQQLSYARYGRKPASDKPMAVNLFKGVIRCSECGHALIITGFSDTRNGIYRCPLRNENRCSAKGLSRKQTDGTLLALLSRLDRFDSDMTNTIDTLKLHREHISSNIEKLVQLSLEIEDLSAITSKLRQLKNELSQVDADIEKETQRLKSIDVGCLSDCDLTTKAGRIEAQLIIKSAVKEVVLNTAKRRCKVTFHNGKTITLPITENPSDNVTEAIQSLSEVTERGLIDVDEVII

SEQ ID NO: 5747 - DNA, 50 bp, Escherichia coli
  source 1..50: mol_type = genomic DNA
tagtgtatttagaccttgatgatttttattagacacgtttaaataaacta

SEQ ID NO: 5748 - DNA, 40 bp, Escherichia coli; identical to SEQ ID NO: 5188
  source 1..40: mol_type = genomic DNA

SEQ ID NO: 5749 - DNA, 40 bp, Escherichia coli
  source 1..40: mol_type = genomic DNA
cggcgttaatcgggtgattaaagacagccgcccggttcat

SEQ ID NO: 5750 - DNA, 50 bp, Escherichia coli
  source 1..50: mol_type = genomic DNA
cagtgtatgatttcattgatgaataattttagacaatgcaaactaatcta

SEQ ID NO: 5751 - protein, 442 aa, Coprobacillus cateniformis
MRKISNNIGLDDCSKKLRIAVYCRVSSREQALYGYGIDAQKSKIDAYLSLFDVEVEEVNYYIDEGISAKNLNRPEVKRLIKDVKEDKVDAIYIYKLDRLSRSVIDIYNMIEMLIDHKCNLVAVMDNIDINSANGRLFVGILAIIAQWERETIIERTNDGLEEMVRQGKWPYASKPFGYNKNEDLILSVNEKEKKILYDIVVQMKSGMTIKEIERYLLKEYDITMSSLQIRKMLKREWYYGLFHYKGKTYTNICPKIYNEEDAEEIQKMISKRHRADNYDSRYYFRNKIKCVCGEILDLSSTKKGNKQYFYYVCPKCKMRINQDYIIEQSLYAISSEVSLKEIKNNTNKALRKYHSINRKIQDIHNKYINNKMDLNVYLTSLYRLEFDKKEQMAKIKTDKLIDFIRWEQMTDLERGSFVNNHIARIIVDVHAKIVVKVEYIHK

SEQ ID NO: 5752 - DNA, 50 bp, Coprobacillus cateniformis
  source 1..50: mol_type = genomic DNA
cgagttaattagccataaaggcaccatttgatttttgtaaaaaaatgtca

SEQ ID NO: 5753 - DNA, 40 bp, Coprobacillus cateniformis
  source 1..40: mol_type = genomic DNA
cgagtccgacctcgggcaccaagatataaatgagctttaa

SEQ ID NO: 5754 - DNA, 40 bp, Coprobacillus cateniformis
  source 1..40: mol_type = genomic DNA
cgagtccgacctcgggcacttagatataaatgagctttaa

SEQ ID NO: 5755 - DNA, 50 bp, Coprobacillus cateniformis
  source 1..50: mol_type = genomic DNA
caaattaatatatgaaaaaggaagtttttagtttctatttcaaaatgtca

SEQ ID NO: 5756 - protein, 492 aa, Bacillus cereus
MLFNNEDIRHVAIYLRLSRDEENLGIEQILDNHRQTLIGLCNENNWSYEIFEEVASSSTIIKREQMVKLLDRVQQDYFDAVVVMDIDRLSRDEYDASDIKRILYQTETFIVTPYKMYDLSKDDDSLLLGITNLIASGEYKQILKRMRRGKEYAQKQGHWTNGIAPLGYTKDTKTKKLVPNERAKDIQFIFSEIIRGTTIPSLIRQLNNMGIKTRQGYDFKYNSIVRIVNNEAYKGTIAGNKTIGQYKPRPKEEWLMVHNVHPAIVDEATWDSANRIVNEYSFKAPRSKNRIYPTSSLIYCANCGKIQGCNNHKRLNKIYIKHCKCGNRSFYYNPVLAIIKEEVLGYKENILKALETLEEGKREDDAQYRKEKLFSQLNKSKRALNKINILFEEDEIDIITYRERKAKRQEEIKLIEEQMTALEREDKSVKIETLQEQIKSIEKLVDKWELLDGEGYSDEQVNRLLHGLISGILWSFKKGAESPTLTIIYNEG

SEQ ID NO: 5757 - DNA, 50 bp, Bacillus cereus
  source 1..50: mol_type = genomic DNA
aagttatacccaaaaactgaacaaactagttgagttgttagggacaacta

SEQ ID NO: 5758 - DNA, 40 bp, Bacillus cereus
  source 1..40: mol_type = genomic DNA
acttgtgtttactggaccgactggatctgggaagacgacg

SEQ ID NO: 5759 - DNA, 40 bp, Bacillus cereus
  source 1..40: mol_type = genomic DNA
acttgtgtttactggaccgtctggatctgggaagacgacg

SEQ ID NO: 5760 - DNA, 50 bp, Bacillus cereus
  source 1..50: mol_type = genomic DNA
aagcaaaacatgttaactgaacagtcaagttcagttaactgggaaatcta

SEQ ID NO: 5761 - protein, 492 aa, Bacillus tropicus
MLFNNEDIRHVAIYLRLSRDEENLGIEQILDNHRQTLIALCNENNWSYEIFEEVASSSTIIKREQMVKLLDRVQQDYFDAVVVMDIDRLSRDEYDASDIKRILYQTETFIVTPYKMYDLSKDDDSLLLGITNLIASGEYKQILKRMRRGKEYAQKQGHWTNGIAPLGYTKDTKTKKLVPNERAKDIQFIFSEIIRGTTIPSLIRQLNNMGIKTRQGYDFKYNSIVRIVNNEAYKGTIAGNKTIGQYKPRPKEEWVMVHNVHPAIVDEATWDSANRIVNEYSFKAPRSKNRIYPTSSLIYCANCGKIQGCNNHKRLNKIYIKHCKCGNRSFYYNSILAIIKEEVLGYKENILKALETLEEGKREDDSQYRKEKLFSQLNKSKRALNKINILFEEDEIDIITYRERKAKRQEEIKLIEEQMTALEREDKSVKIETLQEQIKSIEKLVDKWELLDGEGYSDEQVNRLLHGLISGILWSFKKGAESPVLTIIYNEG

SEQ ID NO: 5762 - DNA, 50 bp, Bacillus tropicus; identical to SEQ ID NO: 5757
  source 1..50: mol_type = genomic DNA

SEQ ID NO: 5763 - DNA, 40 bp, Bacillus tropicus
  source 1..40: mol_type = genomic DNA
actcgtatttactggaccgactggttcggggaagacaaca

SEQ ID NO: 5764 - DNA, 40 bp, Bacillus tropicus
  source 1..40: mol_type = genomic DNA
actcgtatttactggaccgtctggttcggggaagacaaca

SEQ ID NO: 5765 - DNA, 50 bp, Bacillus tropicus; identical to SEQ ID NO: 5760
  source 1..50: mol_type = genomic DNA

SEQ ID NO: 5766 - protein, 565 aa, Listeria innocua
MGFEEAISMARIRKSQQNVSTTQHRKWKVAIYVRLSHEDGNNESLSITNQKKIIQSYLDEQFQDAFQVVQTYIDDGISAVNAYNRPAFQEMIADVKSGRVDTIICKSLSRAFRNSGDQTEYLRKLFPEYNTRFISIDTPYIDTYLEPRKVYQMDVSIFGSFNESYPLMISEEIHKTFREKRNRGEFIGAFAPYGYRKNPENKNHFLIDDEPAEIVRLIFKWYVVEGLSIRKIVARLNQQGVSSPSVYKKEQGQALFSKHTNPSGLWGLSTVSRILRNQVYLGTMVQGRAKTVSPIVHKIIPVAEEDWVIIKDTHEAIVSEKVFEHAQRLNAQNRRVSKKRNAYDLFSGLLKCADCQQGMSKKASSRKSKRTGEVLERVYYGCTTYLYRSKESCSYHGIKLELLEDAVLQAVQAQIAKVSNLEQMMTKVSKETVVLEKTNYLNDQKIKLKSEITKLERVTSDLYMDWKTEVLTRDEYVQLKSEFSQKTTQVKAQFQQVMTELALQDSKEETIQPYFEHFRKHGNITKLNRQILQDLIETIYIHENKEITIKFRFAEQEQEIVQLVK

SEQ ID NO: 5767 - DNA, 50 bp, Listeria innocua
  source 1..50: mol_type = genomic DNA
tgttttctttaaatgttagtagctaatggtgctagtatttatagaaaaca

SEQ ID NO: 5768 - DNA, 40 bp, Listeria innocua
  source 1..40: mol_type = genomic DNA
catcgggcttcttggtcctaatggcgcgggaaaaacaact

SEQ ID NO: 5769 - DNA, 40 bp, Listeria innocua
  source 1..40: mol_type = genomic DNA
catcgggcttcttggtcctgctggcgcgggaaaaacaact

SEQ ID NO: 5770 - DNA, 50 bp, Listeria innocua
  source 1..50: mol_type = genomic DNA
tgttttttacataagttagtagcagctggaactagggctgttaaagaaca

SEQ ID NO: 5771 - protein, 481 aa, Streptococcus pneumoniae
MITTNKVAIYVRVSTTNQVEEGYSIDEQKAKLSSYCDIKDWNVYKIYTDGGFSGANTDRPALESLIKDAKKRKFDTVLVYKLDRLSRSQKDTLYLIEDIFIKNNIAFLSLQENFDTSTPFGKAMIGLLSVFAQLEREQIKERMQLGKIGRAKAGKSMMWAKTSYGYDYHRETGTITINPAQALAIKFIFDSYLRGRSITKLRDDLNEKFPKGIDWSYRAVRAILDNPVYCGFNQFKGEIYPGNHEPIITEEVYNKTKEELKIRQRTAVENVNPRPFQAKYILSGIGQCGYCGAPLKIILGVKRKDGSRFKKYECHQRHPRTLRGITTYNDNKKCESGFYYKDDLEAYVLTEISKLQDDAGYLDKIFSEDSAETIDRESYKKQIEELSKKLSRLNDLYIDDRITLEELQSKSAEFISMRGTLETELENDPALGKDKRKADMRELLNAEKVFSMDYEGQKVLVRNLINKVQVTAEDIVIKWKI

SEQ ID NO: 5772 - DNA, 50 bp, Streptococcus pneumoniae
  source 1..50: mol_type = genomic DNA
taaataattttagtaacctacatttcaatcaaagatactaaaattattga

SEQ ID NO: 5773 - DNA, 40 bp, Streptococcus pneumoniae; identical to SEQ ID NO: 1573
  source 1..40: mol_type = genomic DNA

SEQ ID NO: 5774 - DNA, 40 bp, Streptococcus pneumoniae; identical to SEQ ID NO: 1573
  source 1..40: mol_type = genomic DNA

SEQ ID NO: 5775 - DNA, 50 bp, Streptococcus pneumoniae
  source 1..50: mol_type = genomic DNA
aaatcaattatgtaagcctatatctcaataaaagataagcaaattataga

SEQ ID NO: 5776 - protein, 481 aa, Streptococcus pseudopneumoniae
MITTNKVAIYVRVSTTSQAEEGYSIEEQKAKLSSYCDIKDWSVYKIYTDGGFSGSNTDRPALEGLIKDAKKRKFDTVLVYKLDRLSRSQKDTLYLIEDIFIKNNIAFLSLQENFDTSTPFGKAMIGLLSVFAQLEREQIKERMQLGKLGRAKAGKSMMWAKTSYGYDYHRETGTITINPAQALAVKFIFESYIRGRSITKLRDDLNEKYPKHVPWSYRAVRAILDNPVYCGFNQFKGEIYPGNHEPIITEEVYNKTKEELKIRQRTAAENVNPRPFQAKYILSGIGQCGYCGAPLKIILGVKRKDGSRFKKYECHQRHPRTLRGITTYNDNKKCDSGFYYKDDLEAYVLTEISKLQDDAGYLDKIFSEDSAETIDRKSYKKQIEELSKKLSRLNDLYIDDRITLEELQNKSTEFISMRATLETELENDPALGKDKRKADMRELLNAEKVFSMDYEGQKVLVRGLINKVKVTAEDIIINWKI

SEQ ID NO: 5777 - DNA, 50 bp, Streptococcus pseudopneumoniae
  source 1..50: mol_type = genomic DNA
taaataattttagtaacctacatttcaataaaggatagtaaaattattga

SEQ ID NO: 5778 - DNA, 40 bp, Streptococcus pseudopneumoniae
  source 1..40: mol_type = genomic DNA
gagcaagaccaccaacatctccacaagtgtgaaagcttta

SEQ ID NO: 5779 - DNA, 40 bp, Streptococcus pseudopneumoniae; identical to SEQ ID NO: 5778
  source 1..40: mol_type = genomic DNA

SEQ ID NO: 5780 - DNA, 50 bp, Streptococcus pseudopneumoniae; identical to SEQ ID NO: 5775
  source 1..50: mol_type = genomic DNA

SEQ ID NO: 5781 - protein, 559 aa, Bacillus pumilus
MLILKKDEKLPSEEIMNLIGKINGLIYVRVSTNDQAEKGYSIESQIEMCKERAIKKFGYKENELIVLVEPGGMGDDPNRPALNHALFLLEKGLGKKIFILHPDRLTRDNTLQGVVSRKIWNMGVDIEFIEFEVDPTDPESMLMYNIQGSIAQYNKAKILANSKRGRTAKAKKGEFPSFKRLYGYTFNKETDKPEINEDEKSVLIKMKDMLLYEDMSSNEIAKHLSRKGIPAPEGEAWHQATVSRMFNNLDYTGDFYYGKTQVVQVNGEKKQVPRPREEWILIKIPQIWSHETRESILEALKKNTKNSGRKSNNYLLKGVVKCGRCGGTCGSGITSKNKSGVYRYYSCSNKRRKTYINGVKIINCEGKNWRVDLVDEVLWKWIVKLLKNPEFFVEEFVNKTGSAQKITQLTATISENEKRLSQIEQEITNYVLLFGKGKIDEAMFDNLTSSLNEKKTHLQEDLTLLTNTLESLKDSTDKKEKILKYIKSINKLLNTEMETRDKQRIIELLIEKVILNENDTIQIILKNNSANSPNALDDHQGSYKVATSNNQHKNQNIIQ

SEQ ID NO: 5782 - DNA, 50 bp, Bacillus pumilus
  source 1..50: mol_type = genomic DNA
aacataaaaaccaaaacatcattcaagaacagggtttaggtttttatgcg

SEQ ID NO: 5783 - DNA, 40 bp, Bacillus pumilus
  source 1..40: mol_type = genomic DNA
agccattgatacccttgtaaaacatatggaggataagcag

SEQ ID NO: 5784 - DNA, 40 bp, Bacillus pumilus
  source 1..40: mol_type = genomic DNA
agccattgatacccttgtaatacatatggaggataagcag

SEQ ID NO: 5785 - DNA, 50 bp, Bacillus pumilus; identical to SEQ ID NO: 985
  source 1..50: mol_type = genomic DNA

SEQ ID NO: 5786 - protein, 559 aa, Bacillus tequilensis
MLILKGDQKLSTDNIMHLIGKINALIYARVSTTDQANKGFSIESQIERCKNRAISKFGYKESEIIALIEPGGMGDDPNRPALNHALYLLEKGLGKKFIVLHPDRLTRDNTLQGVVSRRIWGMGVDIEFIEFEVNPHDPESMLMYNIQGSIAQYNKAKIHANSKRGRFAKAKKGEFPSFKRLYGYKFNTVTDLPEYNEEEKEILIEMKDMLLNKKMSSNEIAKELSRRGVAAPNGKTWYQATVSRMLQNEDYTGDFYYGKSKVVQINGKKKQVPTNQDEWILIKIPPMWDKATREQIIERLKSNFKGRSRATKDYLLKNKAKCGRCGGACGSGITSKTKSGVYKYYSCRAKTAKGYQNGKKVVTCEGKNWRVDIVDDIFWNWFMKVMKNPEDFLESFLEETSDQKKIDELKARVSQLEKQLNELDEEIANYVILFGKGKIKESMFDQLSQPLEQNKDHIENEIKIINSQLAANKQTEDKKQKLLKYISSFSKMIKNEITIEEKRHFLDFFIEKVTLFDDDHMEVVWKSKTLNNENSHVDFLNGEQGGEFSNSHKRLNRIQ

SEQ ID NO: 5787 - DNA, 50 bp, Bacillus tequilensis
  source 1..50: mol_type = genomic DNA
cgcataaaagattaaaccgtattcaagaacaaggttttaacttttatgcc

SEQ ID NO: 5788 - DNA, 40 bp, Bacillus tequilensis
  source 1..40: mol_type = genomic DNA
agcgattgacacactcgtgaagcatatggaagacaaacag

SEQ ID NO: 5789 - DNA, 40 bp, Bacillus tequilensis
  source 1..40: mol_type = genomic DNA
agcgattgacacactcgtgatgcatatggaagacaaacag

SEQ ID NO: 5790 - DNA, 50 bp, Bacillus tequilensis; identical to SEQ ID NO: 985
  source 1..50: mol_type = genomic DNA

SEQ ID NO: 5791 - protein, 559 aa, Bacillus vallismortis
MLILKGDQKLSTDNIMHLIGKINALIYARVSTTDQANKGFSIESQIERCKERAISKFGYKESEIIALVEPGGMGDDPNRPALNHALYLLEKGLGKKFIVLHPDRLTRDNTLQGVVSRRIWGMGVDIEFIEFEVNPHDPESMLMYNIQGSIAQYNKAKIHANSKRGRLAKAKKGEFPSFKRLYGYKFNTVTDLPEYNEEEKQILLEMKDMLLNKKMSSNEIAKELSRRGVPAPNGKTWYQATVSRMLQNEDYTGDFYYGKSKVVQVNSKKKQVPTNRDEWILIKIPPMWDKATREQIIERLKSNFKGRSRTTKDYLLKNKAKCGRCGGACGSGITSKTKSGVYKYYSCRAKTAKGYQNGKKVVSCEGKNWRVDIVDEVFWNWFIKLMKNPEKFLDSFLEEASDQKKIDELKAKASRLENQLSEIDEEIANYVILFGKGKIKESMFDQLSQPLEQNKEHIENEIKIINSQLAANKQTEDKKQKMIEYMGSFSKMIKNEITMEEKRQFLDFFIEKVTLFDDDHMEVVWKSSSLINENSHVDFLNGEQGGEFRNSHKRLNYVQ

SEQ ID NO: 5792 - DNA, 50 bp, Bacillus vallismortis
  source 1..50: mol_type = genomic DNA
cgcataaaagattaaactatgttcaagaacaaggttttaacttttatgtt

SEQ ID NO: 5793 - DNA, 40 bp, Bacillus vallismortis
  source 1..40: mol_type = genomic DNA
agcgatcgacacgctcgtcaagcatatggaagataaacag

SEQ ID NO: 5794 - DNA, 40 bp, Bacillus vallismortis
  source 1..40: mol_type = genomic DNA
agcgatcgacacgctcgtcatgcatatggaagataaacag

SEQ ID NO: 5795 - DNA, 50 bp, Bacillus vallismortis
  source 1..50: mol_type = genomic DNA
tgcagaaaataataaactttgttcatgaatactgtttattatttcatttt

SEQ ID NO: 5796 - protein, 516 aa, Bacillus cereus
MYRPESLDVCIYLRKSRKDVEEERRALEEGNNYNALERHRKRLFAIAKAENHNIIDIFEEVASGESIQERPQMQQLLRKLDGNEIDGVLVIDLDRLGRGDMLDAGMIDRAFRYSSTKIITPTDVYDPDDESWELVFGIKSLISRQELKSITKRLQNGRIDSVKEGKHIGKKPPYGYLKDENLRLYPDPEKAWVVKKIFELMCDGKGRQLIAAELDKLGVDPPVTKRGAWDASTITSIIKNEVYTGVIVWGKFKHKKRNGKYTRQKTPQDKWIVYENAHEPIVSKELFDTANEAHSSRHKPAVISSKELTNPLAGILKCKLCGYTMLIQTRKDRPHNYLRCNNPACKGKQKQSVFNLVEEKLLYSLQQIVDEYQAQKIEEVEVDDSKLISFKEKAIISKEKELKELQNQKGNLHDLLEQGIYTVEIFLERQKNLVERITSIENDIEVLQKEIEIEQVKEHNKTEFIPALKTVIESYYKTTNITLKNQLLKTILSTVTYYRHPDWKTNEFEIQVYFKI

SEQ ID NO: 5797 - DNA, 50 bp, Bacillus cereus
  source 1..50: mol_type = genomic DNA
tgtacacatgatagtgtattaaactggtttaattctctaccatatacact

SEQ ID NO: 5798 - DNA, 40 bp, Bacillus cereus
  source 1..40: mol_type = genomic DNA
tgtactgtggcgattgtactgattcacttctccataccca

SEQ ID NO: 5799 - DNA, 40 bp, Bacillus cereus
  source 1..40: mol_type = genomic DNA
tgtactgtggcgattgtacttattcacttctccataccca

SEQ ID NO: 5800 - DNA, 50 bp, Bacillus cereus
  source 1..50: mol_type = genomic DNA
tgtacacataagacagtattaaagttgtaaaatactatagtagatccacc

SEQ ID NO: 5801 - protein, 527 aa, Clostridium leptum
MAITISNPMDYKVALYVRLSKEDGDKQESESVSNQRAILEQFAEDNKLNVFAVYVDDGFSGANFDRPDFKRMTDDIENGKINMIVVKDLSRFGRNRVEQEFFVYKYSEDYDVRFIAVNDDFDTDKDDNELLIMMKNWSNEQFLRDTSKKIKTTKRFKQQKGLFIGGKAPYGYKKSPTEKNVIVIDEDTAPIVRDIFHLALDGKSCRQIAMILNERQIPTPAVHAKINSTRKGPYSGKWSSERVSFMLQNEVYIGNMVQGRSQKISYKSKKCRKIPREDWIVVENTHEPIIDRETFEKVAMLIASRNLTRSRTYEYLLKGLIFCHECGYPLGVINRRLAGNREMLYFICRTYQRFTKYETCTCHCVRVDDVTNAVLEQIHRVCRQYSEQLNLEQITDKAQKMLREEKRRQGKDIAGAKARLAEIQSKIDKSYEDRLSGIVDEDVFQRVYQKLKDEQTTLRKKLQKLERSDHEIELDKAKVKALVERFLNAEEYSRELLVSLIERIELTKEKEILIYFKFKELDVASRL

SEQ ID NO: 5802 - DNA, 50 bp, Clostridium leptum
  source 1..50: mol_type = genomic DNA
cgtttataataagcgatatgaacagtctatttaatagcttattataaatg

SEQ ID NO: 5803 - DNA, 40 bp, Clostridium leptum
  source 1..40: mol_type = genomic DNA
gaagatctctcgctcttatgtttcacgcattgagaaaaaa

SEQ ID NO: 5804 - DNA, 40 bp, Clostridium leptum
  source 1..40: mol_type = genomic DNA
gaagatctctcgctcttatagttcacgcattgagaaaaaa

SEQ ID NO: 5805 - DNA, 50 bp, Clostridium leptum
  source 1..50: mol_type = genomic DNA
tgtttataaacacataaatgtataaggtaattaatagactctaataaatg

SEQ ID NO: 5806 - protein, 502 aa, Yersinia aldovae
MPQQNNGIAYSYVRFSSKRQEQGDSVRRQTEMAEKYALEKGLTLSSKNFQDLGISAFKEGKRPSLVDMLDTIENGQITAGSTIIIEALDRLSRRGIDATLETVKDILRKDVQVVSLSDGLLLTKNSLNDLQSIIRIAVAADLAHKESERKSSRLRETKGQQRQAALAGKAINKILPFWLQRASERYEFSDKAHIAREIIRLKQEGKGSNMIAKTLNKQGVAGIRSSQWNHASITKMLKHPALYGAYQTGETTKERELIKLDLIENYYPALISKEDWLLIQSDQSKSTRGRRTTDNPYSGLLRCGCGGALVKRQTTVKNKLYVYHGCLNAKDGRCEQNISIKGLDQALKTILGRLEFKKRPTPDQSIHHERKQLEDRISNLNNKLLTLDDIPVSVIKTIGTLEERLKTVTDLILQNEREQRGIDAVQSETLSSITDGLELNLLLKRVLKSITVSASGNGWAVRVLHLSGHKQNFLMVDGKIKFLSDTIALQKLLASFKETTEK

SEQ ID NO: 5807 - DNA, 50 bp, Yersinia aldovae
  source 1..50: mol_type = genomic DNA
tattttcacatatgaaactacattgtgatattgttacttaatagcaaagg

SEQ ID NO: 5808 - DNA, 40 bp, Yersinia aldovae
  source 1..40: mol_type = genomic DNA
cttgctgccgaattgcatggtgatattgttagtacttagc

SEQ ID NO: 5809 - DNA, 40 bp, Yersinia aldovae
  source 1..40: mol_type = genomic DNA
cttgctgccgaattgcatgaagatattgttagtacttagc

SEQ ID NO: 5810 - DNA, 50 bp, Yersinia aldovae
  source 1..50: mol_type = genomic DNA
tattttaacacaaaaaaatacactaagattttgttaaaaagaagaaaaaa

SEQ ID NO: 5811 - protein, 503 aa, Serratia inhibens
MPQRNNGIAYSYVRFSSKRQELGDSLRRQTEMAEEYAIKNGLKLSSKNFQDLGISAFREGKRASLVDMLAAIEEGQITAGSTIIIEALDRLSRRGIDATLETVKEILRKDVQVVSLSDGLLLTKNSLNDLQSVIRIAVAADLAHKESERKAIRLRETKGQQRQAALSGKPINKILPFWLQRTETGYAFSDKAGVARQIVQLKQEGKGSNMIAKALNKLGIAGVRTAQWNHASITKMLKNPALYGAYQTGETTKDRELIKLELVEAYYPALISKEEWLLLQSDQSKSKRGRRSADNPYSGLLRCECGGALVKRKHTVKEKLYVYHGCLNAKDGRCTQNISIKGLDGALTTILGRLEFKKKQTLDQSIHQERQQLEARINDLNSKLQVLDDIPLSVIKSIGTMESRLKEITDQIAKDEREQRGIEAVKSEKLSSITDGLELNLLLKRVLKSITVIRSGNGWAVKVLHLSGHKQNFLMVDGKIKFLSDTIALQNLLAGFREPTENS

SEQ ID NO: 5812 - DNA, 50 bp, Serratia inhibens
  source 1..50: mol_type = genomic DNA
tatttttacatatgaaacaacactgtgatgttgttacttaatagcaaagg

SEQ ID NO: 5813 - DNA, 40 bp, Serratia inhibens; identical to SEQ ID NO: 5108
  source 1..40: mol_type = genomic DNA

SEQ ID NO: 5814 - DNA, 40 bp, Serratia inhibens
  source 1..40: mol_type = genomic DNA
cttactgccaaactgcataaagatgttgttagtgcttaac

SEQ ID NO: 5815 - DNA, 50 bp, Serratia inhibens; identical to SEQ ID NO: 5810
  source 1..50: mol_type = genomic DNA

SEQ ID NO: 5816 - protein, 604 aa, Escherichia coli
MKKVFVYHRVSSDQQLDGSGIARQAELLEGYLERTGICSEMHDPIPVVLSDQGVSAFKGLNISEGELGAWMEEVRKGMWDSSILVVESIDRFSRQNPFDVMGYINALMAHNVAIHDVMANIVISRSNSKDLPFVMMNAQRAYDESKYKSDRIRKGWAKKREQAFNKGTIVTNKRPQWIDVKDDKYIINHKATVIKEIFELYKTGLGCPTIAKELQKKEGEQYKFNRAWTGELVHKILTNRRVTGKIFISETIRNHDDLDNPVTQKKYQMNVYPVIVNEDEFELVQDLLKSRRPNAGRVTVKKTDNEEVLIKSNLFSGIARCMDCGGPMYHNVVRAKRTPKKGEPKVEEYRYIRCLSERDGLCNNKAMTYETVERFVVEHLIGMDISTVIKEQEFNPELEVIRIQIDQVKDQIANYENGIERRKSVGKVISFEMREELDDARLQLEELLARKASLATVNVDIPVLKNVDVNELFNVNNVDIRTRYENELNKIVSTVRLKRVDDSYIIDIKYKNNDLKRHVIFVEHKKKEQKLIGDVIIENIDGTILYSTSSFWIRVKDGAILFKQTKDDLSIIDYHILLNYVDGLERDNMVAVWMRHNINFLFGK

SEQ ID NO: 5817 - DNA, 50 bp, Escherichia coli
  source 1..50: mol_type = genomic DNA
tttttgtaataagcgttacacactcaaatgtgttatgattatacaaacaa

SEQ ID NO: 5818 - DNA, 40 bp, Escherichia coli; identical to SEQ ID NO: 1288
  source 1..40: mol_type = genomic DNA

SEQ ID NO: 5819 - DNA, 40 bp, Escherichia coli
  source 1..40: mol_type = genomic DNA
tttttgcatgataatcataataataggtgccattacagca

SEQ ID NO: 5820 - DNA, 50 bp, Escherichia coli
  source 1..50: mol_type = genomic DNA
tctttgttattttagttacacaatataatgttttatttttataataggaa

SEQ ID NO: 5821 - protein, 481 aa, Streptococcus pneumoniae; identical to SEQ ID NO: 5061

SEQ ID NO: 5822 - DNA, 50 bp, Streptococcus pneumoniae; identical to SEQ ID NO: 2192
  source 1..50: mol_type = genomic DNA

SEQ ID NO: 5823 - DNA, 40 bp, Streptococcus pneumoniae
  source 1..40: mol_type = genomic DNA
cagcaagaccaccaacatttccaccaatgtaaaagcttta

SEQ ID NO: 5824 - DNA, 40 bp, Streptococcus pneumoniae
  source 1..40: mol_type = genomic DNA
cagcaagaccaccaacattaacaccaatgtaaaagcttta

SEQ ID NO: 5825 - DNA, 50 bp, Streptococcus pneumoniae
  source 1..50: mol_type = genomic DNA
tgactgatttgcagagcatacattaaaatcaaggatgtttaattcatcac

SEQ ID NO: 5826 - protein, 481 aa, Streptococcus pneumoniae; identical to SEQ ID NO: 2226

SEQ ID NO: 5827 - DNA, 50 bp, Streptococcus pneumoniae; identical to SEQ ID NO: 2192
  source 1..50: mol_type = genomic DNA

SEQ ID NO: 5828 - DNA, 40 bp, Streptococcus pneumoniae; identical to SEQ ID NO: 1573
  source 1..40: mol_type = genomic DNA

SEQ ID NO: 5829 - DNA, 40 bp, Streptococcus pneumoniae; identical to SEQ ID NO: 1574
  source 1..40: mol_type = genomic DNA

SEQ ID NO: 5830 - DNA, 50 bp, Streptococcus pneumoniae; identical to SEQ ID NO: 5825
  source 1..50: mol_type = genomic DNA

SEQ ID NO: 5831 - protein, 481 aa, Streptococcus pneumoniae; identical to SEQ ID NO: 5061

SEQ ID NO: 5832 - DNA, 50 bp, Streptococcus pneumoniae; identical to SEQ ID NO: 2192
  source 1..50: mol_type = genomic DNA

SEQ ID NO: 5833 - DNA, 40 bp, Streptococcus pneumoniae; identical to SEQ ID NO: 1573
  source 1..40: mol_type = genomic DNA

SEQ ID NO: 5834 - DNA, 40 bp, Streptococcus pneumoniae; identical to SEQ ID NO: 1574
  source 1..40: mol_type = genomic DNA

SEQ ID NO: 5835 - DNA, 50 bp, Streptococcus pneumoniae; identical to SEQ ID NO: 5825
  source 1..50: mol_type = genomic DNA

SEQ ID NO: 5836 - protein, 481 aa, Streptococcus pneumoniae
MITTNKVAIYVRVSTTNQVEEGYSIDEQKDKLSSYCDIKDWNVYKVYTDGGFSGSNTDRPALESLIKDAKKRKFDTVLVYKLDRLSRSQKDTLHLIEDVFIKNGIEFLSLQENFDTSTPFGKAMIGLLSVFAQLEREQIKERMQLGKIGRAKAGKSMMWAKTSYGYDYHKETGTVTINPAQALTIKFIFESYLRGRSITKLRDDLNEKYPKHVPWSYRAVRTILDNPVYCGFNQYKGEIYPGNHEPIISKEEYDKTQSELKIRQRTAAENVNPRPFQAKYILSGIAQCGYCGAPLKIMLGVKRKDGSRLKKYECHQRHPRTLRGVTTYNDNKKCDSGFYYKDKLEASVLKEISKLQDDADYLDKIFSGDNAETIDRESYKKQIEELSKKLSRLNDLYIDDRITLEELQSKSAEFISMRGTLETELENDPALRKNKRKADMRKLLNAEKVFSMDYENQKVLVRRLINKVKVTAEDIVINWKI

SEQ ID NO: 5837 - DNA, 50 bp, Streptococcus pneumoniae; identical to SEQ ID NO: 2192
  source 1..50: mol_type = genomic DNA

SEQ ID NO: 5838 - DNA, 40 bp, Streptococcus pneumoniae; identical to SEQ ID NO: 1573
  source 1..40: mol_type = genomic DNA

SEQ ID NO: 5839 - DNA, 40 bp, Streptococcus pneumoniae; identical to SEQ ID NO: 1574
  source 1..40: mol_type = genomic DNA

SEQ ID NO: 5840 - DNA, 50 bp, Streptococcus pneumoniae; identical to SEQ ID NO: 5825
  source 1..50: mol_type = genomic DNA

SEQ ID NO: 5841 - protein, 481 aa, Streptococcus pneumoniae; identical to SEQ ID NO: 5461

SEQ ID NO: 5842 - DNA, 50 bp, Streptococcus pneumoniae; identical to SEQ ID NO: 2192
  source 1..50: mol_type = genomic DNA

SEQ ID NO: 5843 - DNA, 40 bp, Streptococcus pneumoniae; identical to SEQ ID NO: 1573
  source 1..40: mol_type = genomic DNA

SEQ ID NO: 5844 - DNA, 40 bp, Streptococcus pneumoniae; identical to SEQ ID NO: 1574
  source 1..40: mol_type = genomic DNA

SEQ ID NO: 5845 - DNA, 50 bp, Streptococcus pneumoniae; identical to SEQ ID NO: 5825
  source 1..50: mol_type = genomic DNA

SEQ ID NO: 5846 - protein, 481 aa, Streptococcus pneumoniae
MITTNKVAIYVRVSTTNQVEEGYSIDEQKDKLSSYCDIKDWNVYKVYTDGGFSGSNTDRPALESLIKDAKKRKFDTVLVYKLDRLSRSQKDTLHLIEDVFIKNGIEFLSLQENFDTSTPFGKAMIGLLSVFAQLEREQIKERMQLGKLGRAKSGKSMMWTKTSYGYDYHKETGTVTINPAQALTIKFIFESYLRGRSITKLRDDLNEKYPKHVPWSYRAVRTILDNPVYCGFNQYKGEIYPGNHEPIISKEEYDKTQSELKIRQRTAAENVNPRPFQAKYILSGIAQCGYCGAPLKIMLGVKRKDGSRLKKYECHQRHPRTLRGVTTYNDNKKCDSGFYYKDKLEASVLKEISKLQDDADYLDKIFSGDNAETIDRESYKKQIEELSKKLSRLNDLYIDDRITLEELQSKSAEFISMRGTLETELENDPALRKNKRKADMRKLLNAEKVFSMDYENQKVLVRRLINKVKVTAEDIVINWKI

SEQ ID NO: 5847 - DNA, 50 bp, Streptococcus pneumoniae; identical to SEQ ID NO: 2192
  source 1..50: mol_type = genomic DNA

SEQ ID NO: 5848 - DNA, 40 bp, Streptococcus pneumoniae; identical to SEQ ID NO: 1573
  source 1..40: mol_type = genomic DNA

SEQ ID NO: 5849 - DNA, 40 bp, Streptococcus pneumoniae; identical to SEQ ID NO: 1574
  source 1..40: mol_type = genomic DNA

SEQ ID NO: 5850 - DNA, 50 bp, Streptococcus pneumoniae; identical to SEQ ID NO: 5825
  source 1..50: mol_type = genomic DNA

SEQ ID NO: 5851 - protein, 481 aa, Streptococcus pneumoniae
MITTNKVAIYVRVSTTNQVEEGYSIDEQKDKLSSYCDIKDWNVYKVYTDGGFSGSNTDRPALESLIKDAKKRKFDTVLVYKLDRLSRSQKDTLHLIEDVFIKNGIEFLSLQENFDTSTPFGKAMIGLLSVFAQLEREQIKERMQLGKLGRAKSGKSMMWAKTSYGYDYHKETGTVTINPAQALTIKFIFESYLRGRSITKLRDDLNEKYPKHVPWSYRAVRTILDNPVYCGFNQYKGEIYPGNHEPIISKEEYDKTQSELKIRQRTAAENVNPRPFQAKYILSGIAQCGYCGAPLKIMLGVKRKDGSRLKKYECHQRHPRTLRGVTTYNDNKKCDSGFYYKDKLEAYVLTEISKLQDNAGYLDKIFSGDNAETIDRESYKKQIEELSKKLSRLNDLYIDDRITLEELQSKSAEFISMRGTLETELENDPALRKNKRKADMRKLLNAEKIFSMDYEGQKVLVRGLINKVQVTAEDIVINWKI

SEQ ID NO: 5852 - DNA, 50 bp, Streptococcus pneumoniae; identical to SEQ ID NO: 2192
  source 1..50: mol_type = genomic DNA

SEQ ID NO: 5853 - DNA, 40 bp, Streptococcus pneumoniae; identical to SEQ ID NO: 1573
  source 1..40: mol_type = genomic DNA

SEQ ID NO: 5854 - DNA, 40 bp, Streptococcus pneumoniae; identical to SEQ ID NO: 1574
  source 1..40: mol_type = genomic DNA

SEQ ID NO: 5855 - DNA, 50 bp, Streptococcus pneumoniae; identical to SEQ ID NO: 5825
  source 1..50: mol_type = genomic DNA

SEQ ID NO: 5856 - protein, 481 aa, Streptococcus pneumoniae
MITTNKVAIYVRVSTTNQVEEGYSIDEQKDKLSSYCDIKDWNVYKVYTDGGFSGSNTDRPALESLIKDAKKRKFDTVLVYKLDRLSRSQKDTLHLIEDVFIKNGIEFLSLQENFDTSTPFGKAMIGLLSVFAQLEREQIKERMQLGKIGRAKAGKSMMWAKTSYGYDYHRETGTITINPAQALAVKFIFESYLRGRSITKLRDDLNEKYPKHVPWSYRAVRTILDNPVYCGFNQYKGEIYPGNHESIISKEEYDKTQSELKIRQRTAAENVNPRPFQAKYILSGIAQCGYCGAPLKIMLGVKRKDGSRLKKYECHQRHPRTLRGVTTYNDNKKCDSGFYYKDKLEAYVLTEISKLQDNAGYLDKIFSGDNAETIDRESYKKQIEELSKKLSRLNDLYIDDRITLEELQSKSAEFISMRGTLETELENDPALRKNKRKADMRKLLNAEKIFSMDYEGQKVLVRGLINKVQVTAEDIVINWKI

SEQ ID NO: 5857 - DNA, 50 bp, Streptococcus pneumoniae; identical to SEQ ID NO: 2192
  source 1..50: mol_type = genomic DNA

SEQ ID NO: 5858 - DNA, 40 bp, Streptococcus pneumoniae; identical to SEQ ID NO: 1573
  source 1..40: mol_type = genomic DNA

SEQ ID NO: 5859 - DNA, 40 bp, Streptococcus pneumoniae; identical to SEQ ID NO: 1574
  source 1..40: mol_type = genomic DNA

SEQ ID NO: 5860 - DNA, 50 bp, Streptococcus pneumoniae; identical to SEQ ID NO: 5825
  source 1..50: mol_type = genomic DNA

SEQ ID NO: 5861 - protein, 481 aa, Streptococcus pneumoniae
MITTNKVAIYVRVSTTNQVEEGYSIDEQKDKLSSYCDIKDWNVYKVYTDGGFSGSNTDRPALESLIKDAKKRKFDTVLVYKLDRLSRSQKDTLHLIEDVFIKNGIEFLSLQENFDTSTPFGKAMIGLLSVFAQLEREQIKERMQLGKIGRAKAGKSMMWAKTSYGYDYHRETGTITINPAQALAIKFIFESYLRGRSITKLRDDLNEKYPKHVPWSYRAVRTILDNPVYCGFNQYKGEIYPGNHESIISKEEYDKTQSELKIRQRTAAENVNPRPFQAKYILSGIAQCGYCGTPLKIMLGVKRKDGSRLKKYECHQRHPRTLRGVTTYNDNKKCDSGFYYKDKLEAYVLTEISKLQDNAGYLDKIFSGDNAETIDRESYKKQIEELSKKLSRLNDLYIDDRITLEELQSKSAEFISMRGTLETELENDPALRKNKRKADMRKLLNAEKIFSMDYEGQKVLVRGLINKVQVTAEDIVINWKI

SEQ ID NO: 5862 - DNA, 50 bp, Streptococcus pneumoniae; identical to SEQ ID NO: 2192
  source 1..50: mol_type = genomic DNA

SEQ ID NO: 5863 - DNA, 40 bp, Streptococcus pneumoniae; identical to SEQ ID NO: 1573
  source 1..40: mol_type = genomic DNA

SEQ ID NO: 5864 - DNA, 40 bp, Streptococcus pneumoniae; identical to SEQ ID NO: 1574
  source 1..40: mol_type = genomic DNA

SEQ ID NO: 5865 - DNA, 50 bp, Streptococcus pneumoniae; identical to SEQ ID NO: 5825
  source 1..50: mol_type = genomic DNA

SEQ ID NO: 5866 - protein, 481 aa, Streptococcus pneumoniae; identical to SEQ ID NO: 2261

SEQ ID NO: 5867 - DNA, 50 bp, Streptococcus pneumoniae; identical to SEQ ID NO: 2192
  source 1..50: mol_type = genomic DNA

SEQ ID NO: 5868 - DNA, 40 bp, Streptococcus pneumoniae; identical to SEQ ID NO: 1573
  source 1..40: mol_type = genomic DNA

SEQ ID NO: 5869 - DNA, 40 bp, Streptococcus pneumoniae; identical to SEQ ID NO: 1574
  source 1..40: mol_type = genomic DNA

SEQ ID NO: 5870 - DNA, 50 bp, Streptococcus pneumoniae; identical to SEQ ID NO: 5825
  source 1..50: mol_type = genomic DNA

SEQ ID NO: 5871 - protein, 481 aa, Streptococcus pneumoniae; identical to SEQ ID NO: 5071

SEQ ID NO: 5872 - DNA, 50 bp, Streptococcus pneumoniae; identical to SEQ ID NO: 2192
  source 1..50: mol_type = genomic DNA

SEQ ID NO: 5873 - DNA, 40 bp, Streptococcus pneumoniae; identical to SEQ ID NO: 1573
  source 1..40: mol_type = genomic DNA

SEQ ID NO: 5874 - DNA, 40 bp, Streptococcus pneumoniae; identical to SEQ ID NO: 1574
  source 1..40: mol_type = genomic DNA

SEQ ID NO: 5875 - DNA, 50 bp, Streptococcus pneumoniae; identical to SEQ ID NO: 5825
  source 1..50: mol_type = genomic DNA

SEQ ID NO: 5876 - protein, 481 aa, Streptococcus pneumoniae; identical to SEQ ID NO: 2191

SEQ ID NO: 5877 - DNA, 50 bp, Streptococcus pneumoniae; identical to SEQ ID NO: 2192
  source 1..50: mol_type = genomic DNA

SEQ ID NO: 5878 - DNA, 40 bp, Streptococcus pneumoniae; identical to SEQ ID NO: 1573
  source 1..40: mol_type = genomic DNA

SEQ ID NO: 5879 - DNA, 40 bp, Streptococcus pneumoniae; identical to SEQ ID NO: 1574
  source 1..40: mol_type = genomic DNA

SEQ ID NO: 5880 - DNA, 50 bp, Streptococcus pneumoniae; identical to SEQ ID NO: 5825
  source 1..50: mol_type = genomic DNA

SEQ ID NO: 5881 - protein, 449 aa, Bacillus subtilis
MKAALYIRVSTQEQVENYSIESQRERLKAHCVSKDWSVYDTYVDGGYSGATTERPALQKMLKDLDKFDAVVVYKLDRLSRSQRDTLELIEEYFLKNNVEFVSVTETLDTSTPFGKAMIGILSVFAQLERETIAERMRIGHIKRAEAGLRVMGGDYDPAGFKRHNGDLIPIEVEKKHIQDAFNLYEELHSITKVQGELKRLGYDVWRFRRYRDILSNPLYAGYVTFAGKTYKGQHEQFISEEQFQRVQTLLSRHKGHNAHKAKKSLLSGLIVCKKCGENYHTYQSNDKGRTYRYYICRARRFPSEYENKCMNKTWNYKKLESLILDQIHNLSYTKQLVKIATPKINYDKQLKKLDSKIEKLIDLYSEDKIAKEILDKQIDKIDLEKRQIYEAINAQDRLFENEISAEQLNEYFIDLTTSDFEKKQAIIEKLIKQISIDGDNVDITWNFNL

SEQ ID NO: 5882 - DNA, 50 bp, Bacillus subtilis
  source 1..50: mol_type = genomic DNA
cttatgtattcataattggcagtgcaaataacacaaaatgaatacataaa

SEQ ID NO: 5883 - DNA, 40 bp, Bacillus subtilis
  source 1..40: mol_type = genomic DNA
ttctgttttgccagcgccgcaaaccgcccagatgaggagc

SEQ ID NO: 5884 - DNA, 40 bp, Bacillus subtilis
  source 1..40: mol_type = genomic DNA
ttctgttttgccagcgccggtaaccgcccagatgaggagc

SEQ ID NO: 5885 - DNA, 50 bp, Bacillus subtilis
  source 1..50: mol_type = genomic DNA
tttaagtacagtatattgatagaggtaataacatatatgtaatacataaa

SEQ ID NO: 5886 - protein, 567 aa, Streptomyces pseudogriseolus
MSDKPRALGVVRLSVGNENQTGEETQRTRISKRADAEEMELVDFAVDIDVSASISPWVRPSLGDWLNNKKDQFDHIIILKIDRIARSVRHLSDIIEWCEANGKGLISCEEGFDLSKPWGKTIAKILAVVAEAELDAIKARNKASRETMRKTGRWPGGLVPFGRRAVKGDAGFTLELDPEYGPTLIEMIRRFIEKPSFSAVADWLNEQGVPTAQDIARIRAAAGESTTRLADPKPRGARWTPTTVQAVLVSRSLLGEYVRANGAVVRNDDGTPVMRSEPVLNEEEWAKLSEAVASVKYKKQKGSTSPTVGVTFCMLCGSSLYFVKGDPAKGKRERYRCHGNKSKGIQACPKQRFWAEDLYPWLESALLGEIGHLERMESKTTIDDSRAAKLAVIDGKMNQLLKELQQDEISAVAYASQVASLAQDREKVTSQEGPKPVTVWTGTGESYAEWWVRSSVDERREFLKKHKVKAHFRPDALAIDPGDLIENIRQQGVSWWVTPVKASQVLAPITPVSLPGKPYEKPTTLTGAEWEIVSRWEDFEAERAAQQAKAEEEAKGAGEAEKVTAPV

SEQ ID NO: 5887 - DNA, 50 bp, Streptomyces pseudogriseolus
  source 1..50: mol_type = genomic DNA
ctggagggaactacctgaacagtgggcacggtctgtagacttccctcctt

SEQ ID NO: 5888 - DNA, 40 bp, Streptomyces pseudogriseolus
  source 1..40: mol_type = genomic DNA
gtcggggaacagcacggtcggcaccgtctggttgccgccg

SEQ ID NO: 5889 - DNA, 40 bp, Streptomyces pseudogriseolus
  source 1..40: mol_type = genomic DNA
gtcggggaacagcacggtcaacaccgtctggttgccgccg

SEQ ID NO: 5890 - DNA, 50 bp, Streptomyces pseudogriseolus
  source 1..50: mol_type = genomic DNA
ctggagtgacccctctgaacaatgaaactggtcttgccaagtccctgctt

SEQ ID NO: 5891 - protein, 525 aa, Paeniclostridium sordellii
MIAAIYSRKSKFTGKGESIENQIQLCMDYAKNLGINEFLVYEDEGFSGKSTDRPKFKEMLKDSKNKKFDYLICYRLDRISRNVSDFSTLIEDLNKLNISFVSIKEQFDTSTPMGRAMMYISSVFAQLERETIAERIRDNMYELAKTGRWLGGMPPYGFNSTQINYYDDGMNQKKMYKLQIDKDTMEIVKIIFDKYLELRSLSKLYKYMYENGIKGTRGGNLDPSALSLILKNPAYVKANKNVIDYLKSIDMEVIGDVDDTHGILTYAKNTDNPIAAVAKHEGVIDADKWIEVQNLLNANKSKAPRAGTGSKALLSGLLKCSKCGSNMRITYKNSKKGTIYYYICGTKKSLGLSACDCRNIRSDKAESKVIEELKNKSVESVISNYKNAQLENTKDSKDIKAHINSIKNQIKEKETYIDNLVMQLAKVTDSSASTFIIRKLEDLNNELSELKLKLNSLDTLSLENKKLDIDINMLIDNIDKFNKEIDTSDINKKRLLLSTIVDSMYWNSDEETIKVNLIGINSNRN

SEQ ID NO: 5892 - DNA, 50 bp, Paeniclostridium sordellii
  source 1..50: mol_type = genomic DNA
ttaggaacttttttccatatagcagaagctatataaataaaaatataact

SEQ ID NO: 5893 - DNA, 40 bp, Paeniclostridium sordellii
  source 1..40: mol_type = genomic DNA
agtaacccatgatatatctgaagctatatccatgtcagat

SEQ ID NO: 5894 - DNA, 40 bp, Paeniclostridium sordellii
  source 1..40: mol_type = genomic DNA
agtaacccatgatatatcttcagctatatccatgtcagat

SEQ ID NO: 5895 - DNA, 50 bp, Paeniclostridium sordellii
  source 1..50: mol_type = genomic DNA
ttaggaactgaagtacagttagtatcagctaaaaaaagacgaatatggct

SEQ ID NO: 5896 - protein, 591 aa, Serratia plymuthica
MEQGRKTKLYSYIRWSSDRQAKGTTLKRQTAKARQYANTNGLEYVEILDAGVSAFRGKNTSPESALGGFIEAVKNGAIPSNSVLYVESLDRLSRRTVRAASRLFDSLLELGLTIVTGMDGKVYTAKDVDENFPDFLMSLFLFSRANEESQTKSKRVKANAAALVKRHNSGLPTTIKSAGSHVFWVDASGHHTEAVKPDPIYWQAARKIIEFYLSGYTTHKICDYLDEHYPPPPVKLNRRSVVGAVRRWSYQLVRRMKTSEALIGNRTLVLDKNTKPPTTTTLEGYYPALCTPDEYGRLIDMAKNNRISQGKHKRRITLLSGMGIARCGHCGGAMTFFVSLGTIRYLCANGKDRVSDCKAWSVRGDIFEHTAIHALVRGYASMMSREKKWVEDLHSEIERKEGELTAVNKQLVQLGETILLVGNTETLINLMIRAEANKRELTTEVKQLRHRQIVADSKEGDIDHLSDFIGLLSNDLLEDVTHPHRANIREAIRAVISSARVTKRQNNSLSIVFDIHDGTRHTFEGGEERNTYIEFVQDLDTDGNPITYPDTEEVREAISKRQELESRLFAAVSASLEAMPPIDPSRFWSKR

SEQ ID NO: 5897 - DNA, 50 bp, Serratia plymuthica
  source 1..50: mol_type = genomic DNA
taagttatctaaaaatcattggtgttcactggtgtaaaatagattacaat

SEQ ID NO: 5898 - DNA, 40 bp, Serratia plymuthica
  source 1..40: mol_type = genomic DNA
gaatttatagtcatcaattttgcccagcagccacgcattc

SEQ ID NO: 5899 - DNA, 40 bp, Serratia plymuthica; identical to SEQ ID NO: 5898
  source 1..40: mol_type = genomic DNA

SEQ ID NO: 5900 - DNA, 50 bp, Serratia plymuthica
  source 1..50: mol_type = genomic DNA
gatgtaatcattttatacttggtcttcactgatgtagtgttaattacaat

SEQ ID NO: 5901 - protein, 498 aa, Paenibacillus pabuli
MRVAGYIRVSTEEQAKEGYSLDAQREKLSNFCRSQDGWDLIDIYPEEGKSAKDLNRPELQRLLQDAEQKKFDVILVYRLDRLTRSVSDLYDLLKTFEKNNIMFRSSTEIYDTTTAMGKLFITIVAAMAQWERENLSERVRFGMEELVRKGNWHGGPVPYGYNWEDKEMHSITDEFKVLKKLREIYMSGEGLGSTAKKLNALGYLRRGSNWSAQTVWYVLDNPFYAGRIRYGEKKKNGKYASRKKEDLVNVIWSETGFPAVYSWDEYLEHKERMKRKEFYGHSKKREYRFTGVLRCARCGATLIGRPYRNKKKDGSPGEPYYNYICSSRSLSKGCDLPLLKQDLAEALIREYIGRMDFDSNKVPIMESEINYNEEIETLQKELRGVFERRKKWQYMYVEDLINGEDLRERKKEEDDKETIIQDRLMILENSHGDNKQKEHIQRVFGLPDVWDVMDDPDKREFMQMIFKEIVIECSVKNGKTASGKGKTLPFYIKSHEFN

SEQ ID NO: 5902 - DNA, 50 bp, Paenibacillus pabuli
  source 1..50: mol_type = genomic DNA
aatttactatttatatcataagggaatgcatatatactgaatagtatata

SEQ ID NO: 5903 - DNA, 40 bp, Paenibacillus pabuli
  source 1..40: mol_type = genomic DNA
gggatcattgtggtagggaaatgcgtcaagctcgtcgata

SEQ ID NO: 5904 - DNA, 40 bp, Paenibacillus pabuli
  source 1..40: mol_type = genomic DNA
gggatcattgtggtagggatatgcgtcaagctcgtcgata

SEQ ID NO: 5905 - DNA, 50 bp, Paenibacillus pabuli
  source 1..50: mol_type = genomic DNA
aaattatgtatttgaacataaaggtatttatatatataatatagtatata

SEQ ID NO: 5906 - protein, 462 aa, Mycobacterium kansasii
MPCNNMAMPSIRRAAIYLRISLDQTGEGLAIARQRDECTRIISERGWKPVREFVDNSISASDARKNRPGYDALVSSYEAGEFDALVCYDLDRLTRQPRQLEDWIDAAEGRGLALVTANGEADLTTDGGRLFARIKLAVAKGEVDRKSRRQRDAASQRAKLGRPPLGVRLTGYTVTGDIVSEEADTVRRIFKLFHSGESLRSICRTLGDEGATTRRGKPWNPSTIRGILVNPRYAGRAIYQGRPTGELGNWEPLVSGDVFDLVQARINDPGRITNRQGTDRRHLGSGLFVCAECDQPVSGWSQGRYRCKDRHVNRARGPVDTWVREVIAARLRREDMAELLAPAEAELAPLIAEKDRLHDRLRRIGADYDAERIDGFRFQSATERVRAELAAIEQQMAARTTGMALAEILSAPDPAAAFLDASVMAQRAVINALCVVRLRKGARYSRTFDKDTVEVRPRRWTK

SEQ ID NO: 5907 - DNA, 50 bp, Mycobacterium kansasii
  source 1..50: mol_type = genomic DNA
gttgttgctccgtgtcggaactccaccaaattacaatgccgtgcaacaat

SEQ ID NO: 5908 - DNA, 40 bp, Mycobacterium kansasii
  source 1..40: mol_type = genomic DNA
gacgttgaaccggaactccaccacgtccccgtcggccatc

SEQ ID NO: 5909 - DNA, 40 bp, Mycobacterium kansasii
  source 1..40: mol_type = genomic DNA
gacgttgaaccggaactcccccacgtccccgtcggccatc

SEQ ID NO: 5910 - DNA, 50 bp, Mycobacterium kansasii
  source 1..50: mol_type = genomic DNA
tttgttacttcaattagtaactcccccaaattgcaaatgatccaaacaat

SEQ ID NO: 5911 - protein, 467 aa, Lentibacillus cibarius
MIAIYLRVSTLEQVKDGYSIDAQRERLVAFCTAQGWNDYRFYVDQGVSAKDTERPELKQMFKDIKKGKISMILVYRLDRFTRRVIDLHEMLEEMEKYNCKFKSATEPYDTTTAMGRMFITIVAALAQWENENLSERIKMALEEKVSGGERVGGVPYGFDMTEDRKLIKNDKAPIVLDMINKIKSGMSAMALADFLNKTNNDKPVWRAQTVLRILKNPALYGATRWNDKVYENTHEGIISKDEFMKLQLILNDRTQHRRRDVTNTYIFQGVIACPSCGHPLSVNRYIRKRKDGSEHQFAMYRCQPCEKEKKFTKSINEHKIIDALYDYMRNVNIDNIETIEDTSESIYTDQLNQIEKKREKYQRAWASDLISDDEFKKLMDETKETFEYLKKKVNEYEYPVVVDKEALKQIVFTFNDNFRLLTLDEKRAFVSTFIRKIEIQVIPQPPKRPDKSKRGLYSIEITNVDFY

SEQ ID NO: 5912 - DNA, 50 bp, Lentibacillus cibarius
  source 1..50: mol_type = genomic DNA
agttgtatttacataacgagcccaacaggtgatgttatgtaaatacaacc

SEQ ID NO: 5913 - DNA, 40 bp, Lentibacillus cibarius
  source 1..40: mol_type = genomic DNA
catattgttcacaggtcctacaggaagtggcaaaacaacg

SEQ ID NO: 5914 - DNA, 40 bp, Lentibacillus cibarius
  source 1..40: mol_type = genomic DNA
catattgttcacaggtcctataggaagtggcaaaacaacg

SEQ ID NO: 5915 - DNA, 50 bp, Lentibacillus cibarius
  source 1..50: mol_type = genomic DNA
agttttattaatgtaactagctcaatagttgttgttagtagaatataatt

SEQ ID NO: 5916 - protein, 495 aa, Aeromonas hydrophila
MKAWLYARFSSSQQADGDSINRQVKAAQQWCSANGVELQQTSFRDLGVSGWKSIKRPMFEQLIKAMQEGKIPRGSYVLFESTDRLSRRGWRHTQELIRTITCVYDCKLVILDKGQVYTKENVNDVVQNILLMVAADMAEKESQRKSDLVAAAYKSKRQDGDVSRWPFWIDKTDSGFVLNENAETIRLIIALRLKGVGALGIASELNRRGIKSSRGGNWGHTSIRVVLSNSALYGTKDFYSMKTIKQFDEHGEEIKVTDNQLVSSMPDVFPPLCDFTTWQQIQIKGEKPGRKGQSSPFHNMLFCECGAAMGLQIGSAGERYRKCTRSKVGSCSQKMIRNFDETLIECLGRITYESSETQKDELPELQARLAKLEGVKDALMAAGAVDALVDVYKDIAKAKDAVANAQKIAVVPTTELKDVFAGSVDEQRVALKRVISKVVVNRVKNTASIKVHLTNGHLKIFGVSIGVKKQSGVNRFFSETDTEKFLAEVVALNCD

SEQ ID NO: 5917 - DNA, 50 bp, Aeromonas hydrophila
  source 1..50: mol_type = genomic DNA
ttaattgacattgtaacttgttcatgtgtacaatctgcaagtcagattct

SEQ ID NO: 5918 - DNA, 40 bp, Aeromonas hydrophila
  source 1..40: mol_type = genomic DNA
ttccagtgctgcttattcatgtgccagcccggtttgacct

SEQ ID NO: 5919 - DNA, 40 bp, Aeromonas hydrophila
  source 1..40: mol_type = genomic DNA
ttccagtgctgcttattcaagtgccagcccggtttgacct

SEQ ID NO: 5920 - DNA, 50 bp, Aeromonas hydrophila
  source 1..50: mol_type = genomic DNA
ttaatttacttctgaacttagtcaagtgtacaaagtttttctcagataag

SEQ ID NO: 5921 - protein, 526 aa, Cohnella xylanilytica
MARQELEDGEYWMYLRKSRADMEAEARGEGETLSKHRTALLRLAKEHNITITRIFFEVESGESIFHRPEMVKMLAAMETNPPKGVLVMDIDRLGRGDKIDQGIIERAFKESRTLIITPGEIYDMNQESGEFSVEVKSFLARLELKQTTKRLQGGRIRSVENDRNYIGTRPPYGYRILKDKEGRTLIPDPEQAPIVRLIFELYTHDDPAQRMGSNKIAYRLNQMPNARTYTGKPWEPSTVLNILKNAVYAGRIQWKKKEQKKSKTPGKKRDTRTRPRDEWIDVEGRHEPLVSPELFNKAQDLLKGKYHVPYNPANGVTNPLSGLIKCGKCGMSMIYRPYTSQPAHLMCYNQLCSNKSSRFEYVERVLLTHLDEWLKRYKSEWSKRKPTDAAVKTDTVSLKEQAHKALVKELEELTAQKRNLHDLLERKIYDEETFLERSQDLASRIASKNIAIEEMKADIELEKKRQRAQHEVIPNVESALKLYRKSKDPAEKNAALKSVMQYAVYEKEKWQRNDEFTLSIFPRLSR

SEQ ID NO: 5922 - DNA, 50 bp, Cohnella xylanilytica
  source 1..50: mol_type = genomic DNA
tacagataaggagcggatgttaatgaattaacacttagtgtttatctgta

SEQ ID NO: 5923 - DNA, 40 bp, Cohnella xylanilytica
  source 1..40: mol_type = genomic DNA
aaccgacaaggaaggcaacgagattacgttgcaggatata

SEQ ID NO: 5924 - DNA, 40 bp, Cohnella xylanilytica
  source 1..40: mol_type = genomic DNA
aaccgacaaggaaggcaacttgattacgttgcaggatata

SEQ ID NO: 5925 - DNA, 50 bp, Cohnella xylanilytica
  source 1..50: mol_type = genomic DNA
tacagatataacatggatgttatattaatgacaatttataatttactgta

SEQ ID NO: 5926 - protein, 626 aa, Vibrio splendidus
MSLNLSSSNTPKIYNYARVSSTKQLKGVGLETQQQKQVLDQLSNEHDLPVSEEQFIDRGVSAFHGDHKDGAFGVVLERIQTGVISRGSILVVFSLDRLSRETVNIALEQLLSIINRGVRVYTHIDGKLFDANSANLSADLIVSVITMERANEESRTKSKRVIQAAKEGLKRFKATGLPQSSLGRVPFWIDQSTNTHNVNAKGVLKAIEMYLGGDGVLKISQHLRENYEYIPVRNKNMSRTKEDNWDISSLFQTFGRPSLIGEKHISIEGTKHKLENYYPPLIDLETFQRLQDVKGLKGGRAPLKGTTHLLKGLAKCGVCGGAMVFVDKGRGNQAINYVCSNAAKGKHERENYSVQMLELAAIRLCSDELLRVNNSEGTYEAERAQLVKEKRDLEEELIDLKERYTKKKRQSFFDLIEQAEDKLEVVISELEGQRRTDTESAFKYLSGVNFNEDVMNDFTHPKRGELRNNLIQVIDKIEISRRKENSQSTKSKDVNCLAVNVLFKNGQRRVLKSKPFEYIVDGREQSIFIGYEYEYDVPFDEYSRNGQLIPDLINELHSYDLLHKLYPSKGRYNWKGKSIELGNIEFGATNLLSALDYITTPDSWDQAIEKHYEKGIMYTRVDKNTV

SEQ ID NO: 5927 - DNA, 50 bp, Vibrio splendidus
  source 1..50: mol_type = genomic DNA
gaaggaagtttgttattttatagctcgctaataaaaaacagtttccttcg

SEQ ID NO: 5928 - DNA, 40 bp, Vibrio splendidus
  source 1..40: mol_type = genomic DNA
gaagaatatttgctgtggttcgataaaaagggattcccgt

SEQ ID NO: 5929 - DNA, 40 bp, Vibrio splendidus; identical to SEQ ID NO: 5928
  source 1..40: mol_type = genomic DNA

SEQ ID NO: 5930 - DNA, 50 bp, Vibrio splendidus
  source 1..50: mol_type = genomic DNA
gaaggaagttagttattctatagttctcttatgtaacatcatttccttta

SEQ ID NO: 5931 - protein, 596 aa, Aeromonas caviae
MTEPKIYPYSRISSKRQETGQGLTMQEEATALALLSERYNLPVYNRMTDSGKSAFHGDHIKNGALGQFLKAVESGDVAPGSILVVSNLDRFSRQGVTDAAADLLAILRKKIGVHAVMENMTFCDPHGDRARDMVDIQMATLFLERAHGESLTKQKRTNARAELDIARHLRGERHPSGYAYAIEVVGNNTSWVDTTDGSVKPHPIYHETYRQIALRLIDGESPESIAKSLNATGPKAPIKRSDKRAPGTWSAYMIRELHKQRALVGEKILKNQLLLDYYPRVLSDDEYHRLVHARTQNQQPRANSKASAINLFAGLKNVVCAHCGAGIHLTKVPGGHRYYCSQHRYELHCPGWRKDRKMLEEVLLKICVAQSWKESEQKSVSRVPVIVQQLTELKRKIAALTEQAEEQDFPRSLVAKLKELEKKEDSLRIELEQSKVEDATNQVRSPAVLQARWREVTDDVLDIHNDNARRYMRDLLRDSIDQITIGHPSYAFYDKRKQAIDAGIWIGEEKPKGSERFKLVMLISLRGGVDRFVAFNKTGPEMLMSLNEKRLSVAERELLASINTTGFNMYRPAKEEDLPWLETMLQEHQRQDEHDV

SEQ ID NO: 5932 - DNA, 50 bp, Aeromonas caviae
  source 1..50: mol_type = genomic DNA
aaaatgtctcattgtaattttgggttcccatatcctcaatgaacaactta

SEQ ID NO: 5933 - DNA, 40 bp, Aeromonas caviae
  source 1..40: mol_type = genomic DNA
gccatggtggcgatatgggttccctaaccccattaaccaa

SEQ ID NO: 5934 - DNA, 40 bp, Aeromonas caviae
  source 1..40: mol_type = genomic DNA
gccatggtggcgatatgggtaccctaaccccattaaccaa

SEQ ID NO: 5935 - DNA, 50 bp, Aeromonas caviae
  source 1..50: mol_type = genomic DNA
aaatgtttttggtataattatgggtacccatatcacaactgaacaactaa

SEQ ID NO: 5936 - protein, 506 aa, Bacillus thuringiensis
MTNKLDSIQSAAIYLRKSRVNDGMNEEESLETHKQILLRIANKYNWSYSLFEEIGSSASMDSRKELLKMLDAIQDGDFDAVLVMDQDRLSRDRYDSVIIKKTLSENDTYIVTANEECIDLNDRKDSLVTDIKSMAASWEYEQIAERMEHGKQASALKGNWVAGTVPLGYEYDRRTKKLILEDREVGIVKEIFRAYMELGSFEKVAIHVNRLGYKTRKGLSFVAESISTIIRNPTYKGVVYLRKYKMVGKKKKKRILRDPSEWIKHENIYPAIIDGETWDKANEMAKKRKTMPPRARQQKYALTKLVHCGYCGKVQGIQLHKRQKGDYKIIKYCWRKNHLGELCTNRGLHYDPVLEEVISEIRKRRDFLAEEISKVSSDTLEFFKRKEEKLLRLKSDLVRIEKQLEKINHMYINDMLTDEELSREKPPRLAEREGILNQIKELEEETQEDNVSELKIMVSHLDDILENHRELSDRDLNDLLSSVINRIVLYNYKDKDVEPRIVIEFK

SEQ ID NO: 5937 - DNA, 50 bp, Bacillus thuringiensis
  source 1..50: mol_type = genomic DNA
atctatcttttagaaaaatcatatggatatggtttctttataagatagat

SEQ ID NO: 5938 - DNA, 40 bp, Bacillus thuringiensis
  source 1..40: mol_type = genomic DNA
ttattattcaaggtcatatggatatggtttgcgaaaaaaa

SEQ ID NO: 5939 - DNA, 40 bp, Bacillus thuringiensis
  source 1..40: mol_type = genomic DNA
ttattattcaaggtcatatccatatggtttgcgaaaaaaa

SEQ ID NO: 5940 - DNA, 50 bp, Bacillus thuringiensis
  source 1..50: mol_type = genomic DNA
atgtatgttttcctaaatttataaccatatgaattcaccttaatatagat

SEQ ID NO: 5941 - protein, 506 aa, Bacillus cereus
MTNKLDSIQSAAIYLRKSRVNDGMNEEESLETHKQILLRIANKYNWGYSLFEEIGSSASMDSRKELLKMLDAIQDGDFDAVLVMDQDRLSRDRYDSVIIKKTLSENDTYIVTANEECIDLNDRKDSLVTDIKSMAASWEYEQIAERMEHGKQASALKGNWVAGTVPLGYEYDRRTKKLILEDREVGIVKEIFRSYMELGSFEKAAIHVNRLGYKTRKGLSFVAESISTIIRNPTYKGVVYLRKYKMVGKKKKKRILRDPSEWIKHENIYPVIIDEETWDKANEMAKKRKTMPPRARQQKYALTKLVHCGYCGKVQGIQLHKRQKGDYKIIKYCWRKNHLGELCTNRGHHYDPVLEKVIAEIKKRRDFLSEEISKVSSDTLEFLKRKEEKLSRLKSDLVRIEKQLEKINHMYINDMLTDEELSREKPSRVTEKERVLNQIKELEEETQEDNISELKLGLAYLDDIVEKHKELSDRDLNDLFSNVINRIVLYNYKDKDVKPRIVIEFK

SEQ ID NO: 5942 - DNA, 50 bp, Bacillus cereus
  source 1..50: mol_type = genomic DNA
atctatcttttagaaaagtcatatggatatggtttctttataagatagat

SEQ ID NO: 5943 - DNA, 40 bp, Bacillus cereus; identical to SEQ ID NO: 5938
  source 1..40: mol_type = genomic DNA

SEQ ID NO: 5944 - DNA, 40 bp, Bacillus cereus; identical to SEQ ID NO: 5939
  source 1..40: mol_type = genomic DNA

SEQ ID NO: 5945 - DNA, 50 bp, Bacillus cereus; identical to SEQ ID NO: 5940
  source 1..50: mol_type = genomic DNA

SEQ ID NO: 5946 - protein, 506 aa, Bacillus cereus
MTNKLDSIHSAAIYLRKSRVNDGMNEEESLETHKQILLRIANKYNWSYSLFEEIGSSASMDSRKELLKMLDAIQDGDFDAVLVMDQDRLSRDRYDSVIIKKTLSENDTYIVTANEECIDLNDRKDSLVTDIKSMAASWEYEQIAERMEHGKQASALKGNWVAGTVPLGYEYDRRTKKLTLDDREVEIVKEIFRAYMELGSFEKVAIHVNRLGYKTRKGLSFVAESISTIIRNHTYKGVVYLRKYKMVGKKKKKRILRDPSEWIKHENIYPVIIDEETWGKANEMAKKRKTMPPRARQQKYALTKLVHCGYCGKVQGIQLHKRQKGDYKVIKYCWRKNHLGEICSNRGHHYDPVFEKVISEIGKRRDFIEGEISKVSSDTIEFLKRKEEKLSRLNSDLTRIEKQLEKINYMYINDMLTDEELSREKPSRVSEKERILNQIKELEEETQEDNVSELKVGLIRLDEILKNYDKMSDKRLNDLLSNVINRIVLYNYKDKDMEPRIDIEFK

SEQ ID NO: 5947 - DNA, 50 bp, Bacillus cereus; identical to SEQ ID NO: 5937
  source 1..50: mol_type = genomic DNA

SEQ ID NO: 5948 - DNA, 40 bp, Bacillus cereus; identical to SEQ ID NO: 5938
  source 1..40: mol_type = genomic DNA

SEQ ID NO: 5949 - DNA, 40 bp, Bacillus cereus; identical to SEQ ID NO: 5939
  source 1..40: mol_type = genomic DNA

SEQ ID NO: 5950 - DNA, 50 bp, Bacillus cereus; identical to SEQ ID NO: 5940
  source 1..50: mol_type = genomic DNA

SEQ ID NO: 5951 - protein, 506 aa, Bacillus cereus
MTNKLDSIQSAAIYLRKSRVNDGMNEEESLETHKQILLRIANKYNWSYSLFEEIGSSASMDSRKELLKMLDAIQDGNFDAVLVMDQDRLSRDRYDSVIIKKTLSENETYIVTANEECIDLNDRKDSLVTDIKSMAASWEYEQIAERMEHGKQASALKGNWVAGTVPLGYEYDRRTKKLILEDREVGIVKEIFRAYMDLGSFEKAAIHVNRLGYKTRKGLSFVAESISTIIRNPTYKGVVYLRKYKMVGKKKKKRILRDPSEWIKHENIYPVIIDEETWDKANEMAKKRKTMPPRARQQKYALTKLIHCGYCGKVQGIQLHKRQKGDYKIIKYCWRKNHLGEICSNRGLHYDPVFEKVILSIKKRRDFIEDEISKVSSDTLEFLKRKEEKLSRLKSDLVRIEKQLEKINYMYINDMLTDEELSREKPSRVSEKEKILNHIKELEDETQEDNVSELKISLGRFDEILDKYNEMSDKRLNDLLSNVINRIVLYNYKDKDLEPRIDIEFK

SEQ ID NO: 5952 - DNA, 50 bp, Bacillus cereus
  source 1..50: mol_type = genomic DNA
atctatcttttagaaaaactatatggatatggtttctttataagatagat

SEQ ID NO: 5953 - DNA, 40 bp, Bacillus cereus; identical to SEQ ID NO: 5938
  source 1..40: mol_type = genomic DNA

SEQ ID NO: 5954 - DNA, 40 bp, Bacillus cereus; identical to SEQ ID NO: 5939
  source 1..40: mol_type = genomic DNA

SEQ ID NO: 5955 - DNA, 50 bp, Bacillus cereus; identical to SEQ ID NO: 5940
  source 1..50: mol_type = genomic DNA

SEQ ID NO: 5956 - protein, 568 aa, Pseudomonas haemolytica
MTDEQFQRPAYIYCRYSSEMQSQGDSLRRQFQRCNEAIKKHNLYVKEQITDEAFSGFHGDNLISGKLKDFIDRAVAGDIEKDAFLIVENLDRITRLQPSKAVNVITQILSSGLEIYQTSPECLFTFKNKKDEAMTIIMITLFAQRAHEESDTKSYRIKEAWISRIERILKGEQKILMDKPPYWLDVVEKDFDVNGVTKRLKCYEVNKERTDEVLLVLEYLKSMGIKESCKMMNAESSGKKWTVKAVQRLLESKTLYGELDLKLSVREDGKKDLQSRGLEMPQIYPPIISKPDFDEILELIKLRASGRGGGRKSTQFHNIFAKILYCAHCGGAYRYMHKREYSYLVCYNSEVHTCKYEKVLSLRFYDVQNAILAYGGYFDFNVLYRGVELKEYSVDLAEKQAELEAKRAAFSNMFNSIMQKNNGIISSMYQTSLDMTEKNIDELEKEIETLKQKDILNPIKRIKANGGALLLDPALLSTAVGRAKLNSHLKRMVERIDLSHHKVTKDSYNVLSVKFFGVEDLLKIRFMGTKRIYLDVGNDFSKVFDDDADRFIDEAEWNKQTSMMDDYF

SEQ ID NO: 5957 - DNA, 50 bp, Pseudomonas haemolytica
  source 1..50: mol_type = genomic DNA
tttctcaaaacgcttcccttcatttcattttacgggtatgatttgtgaaa

SEQ ID NO: 5958 - DNA, 40 bp, Pseudomonas haemolytica
  source 1..40: mol_type = genomic DNA
acgcccatagccgtagatatcgttgaacggcttgaaactg

SEQ ID NO: 5959 - DNA, 40 bp, Pseudomonas haemolytica
  source 1..40: mol_type = genomic DNA
acgcccatagccgtagatatggttgaacggcttgaaactg

SEQ ID NO: 5960 - DNA, 50 bp, Pseudomonas haemolytica
  source 1..50: mol_type = genomic DNA
tttctcaaagacaatccctggacctgattttgtgggtatgtttcatgaaa

SEQ ID NO: 5961 - protein, 549 aa, Pseudomonas carnis
MQSQGDSLRRQFQRCNEAIKKHNLYVKERITDEAFSGFHGDNLINGKLKDFIDRAIAGDIEKNAFLIVENLDRITRLQPSKAVNVITQILSSGLEIYQTSPECLFTFKNKKDEAMTIIMITLFAQRAHEESDTKSYRIKEAWISRIERILKGEQKILMDKPPYWLDVVEKDFDVNGKTKRLKCYQVNQTRTDEVLLILEYLKSMGIKESCKMMNAESTGKKWTVKAVQRLLQSKTLYGELDLKLSVREDGKKELQSRGLEMPQIYPAIISKPEFDEILELIKIRASGRGGGRKSTQFHNIFSKILFCAHCGGAYRYMHKREYSYLVCYNSEVHTCKYEKVLSLRFYDVQNAILAYGGYFDFNVLFKGVELKEYAADITDKQAELDAKREAFSNMFNSIMLKNNGIISSMYQSSLDMTERSIDELEKEIEALKQKDILNPSKRIKANGGALLLDPALLSTAFGRAKLNAHLKRMVERIELSHNKVTNDGYNLLKVKFIGVETVLEIKFQGTKRIFDDGGQDFSKIFDDDSDGFIDEEEWNKQSSMLNDMF

SEQ ID NO: 5962 - DNA, 50 bp, Pseudomonas carnis; identical to SEQ ID NO: 5957
  source 1..50: mol_type = genomic DNA

SEQ ID NO: 5963 - DNA, 40 bp, Pseudomonas carnis
  source 1..40: mol_type = genomic DNA
gcgcccgtagccgtagatatcgttgaacggtttgaaactg

SEQ ID NO: 5964 - DNA, 40 bp, Pseudomonas carnis
  source 1..40: mol_type = genomic DNA
gcgcccgtagccgtagatatggttgaacggtttgaaactg

SEQ ID NO: 5965 - DNA, 50 bp, Pseudomonas carnis; identical to SEQ ID NO: 5960
  source 1..50: mol_type = genomic DNA

SEQ ID NO: 5966 - protein, 549 aa, Pseudomonas aeruginosa; identical to SEQ ID NO: 5961

SEQ ID NO: 5967 - DNA, 50 bp, Pseudomonas aeruginosa; identical to SEQ ID NO: 5957
  source 1..50: mol_type = genomic DNA

SEQ ID NO: 5968 - DNA, 40 bp, Pseudomonas aeruginosa
  source 1..40: mol_type = genomic DNA
gcgggcgtagccgtagagatcgttgaagggtttgaagctg

SEQ ID NO: 5969 - DNA, 40 bp, Pseudomonas aeruginosa
  source 1..40: mol_type = genomic DNA
gcgggcgtagccgtagagatggttgaagggtttgaagctg

SEQ ID NO: 5970 - DNA, 50 bp, Pseudomonas aeruginosa; identical to SEQ ID NO: 5960
  source 1..50: mol_type = genomic DNA

SEQ ID NO: 5971 - protein, 510 aa, Bacillus velezensis
MALHENSKIAVYSRKSREDRDSEDTLAKHRNELEYLIKRENFKNVQWFEEVVSGETIDERPMFSMLLPKIENGEFDAVCAVAMDRLSRGSQIDSGRILEAFKQSGTLFITPKKTYDLSIEGDEMLSEFESIIARSEYRAIKRRTINGKKNATREGRLHSGSVPYGYKWDKNLKAAVVVEEKKKIYRMMIKWFLEEEHSCTVIAKMLNELKVPSPSGRSIWYGEVVSEILSNDFHRGYVWFGKYKKSKSSNSIVQNKNLDEVLIAKGHHETMKTDEEHALILNRIEKLRTYKVAGRRLNMNTHKLSGIVRCPYCHKAQAIEQPKGRKKHVRKCLRKSATRTKECEQTKGIHEEVLFQSIMREIKKYNEALFSPAEQDVNDDSYTTQLIGLREKAVKKAKGRIERIKEMYLDGDISKTEYKEKLKISQETLQKAENDLAELIASTEFQNALSAETKKEKWSHHKVQEMIVSTDGMSNSEINLILKMLISHVTYTVEDLGDGTKNLNIKVYYN

SEQ ID NO: 5972 - DNA, 50 bp, Bacillus velezensis
  source 1..50: mol_type = genomic DNA
tgtcgtactcaatcaataatcgttacaagcattatagtttaagtataaca

SEQ ID NO: 5973 - DNA, 40 bp, Bacillus velezensis
  source 1..40: mol_type = genomic DNA
ggtcatcccgataatcgtcacgacagatccggttacgaca

SEQ ID NO: 5974 - DNA, 40 bp, Bacillus velezensis
  source 1..40: mol_type = genomic DNA
ggtcatcccgataatcgtcttgacagatccggttacgaca

SEQ ID NO: 5975 - DNA, 50 bp, Bacillus velezensis
  source 1..50: mol_type = genomic DNA
tgtcatactgggtaactaataggattaagtattatagagaaaatatgaca

SEQ ID NO: 5976 - protein, 510 aa, Bacillus amyloliquefaciens
MALHENSRIAVYSRKSREDRDSEDTLAKHRNELEYLIKRENFKNVQWFEEVVSGETIDERPMFSVLLPRIENGEFDAVCAVAMDRLSRGSQIDSGRILEAFKQSGTLFITPKKTYDLSIEGDEMLSEFESIIARSEYRAIKRRTINGKKNATREGRLHSGSVPYGYKWDKNIKAAVVVEEKKKIYRMMIKWFLEEEHSCTVIAEMLNELKVPSPSGRSIWYGEVVSEILSNDFHRGYVWFGKYKKSKSSNSIIQNKNLDEVLIAKGHHETMKTDEEHALILNRIEKLRTYKVAGRRLNMNTHRLSGIVRCPYCHKAQAIEQPKGRRKHVRKCLRKSAARTKECEQTKGIHEEVLFQSIMREIKKYNEALFSPTEQDVNDDSYTTQLIGLREKAVKKAKGRIERIKEMYLDGDISKTEYKEKLKISQETLQKAENDLAELIASTEFQNALSAETKKEKWSHHKVQEMIESTDGMSNSEINLILKMLISHVTYTVEDLGDGTKNLNIKVYYN

SEQ ID NO: 5977 - DNA, 50 bp, Bacillus amyloliquefaciens
  source 1..50: mol_type = genomic DNA
tgtcgtactcaatcaataatcgtcacaagcattatagtttaagtataaca

SEQ ID NO: 5978 - DNA, 40 bp, Bacillus amyloliquefaciens; identical to SEQ ID NO: 5973
  source 1..40: mol_type = genomic DNA

SEQ ID NO: 5979 - DNA, 40 bp, Bacillus amyloliquefaciens; identical to SEQ ID NO: 5974
  source 1..40: mol_type = genomic DNA

SEQ ID NO: 5980 - DNA, 50 bp, Bacillus amyloliquefaciens; identical to SEQ ID NO: 5975
  source 1..50: mol_type = genomic DNA

SEQ ID NO: 5981 - protein, 510 aa, Bacillus velezensis
MALHENSKIAVYSRKSREDRDSEDTLAKHRNELEYLIKRENFKNVQWFEEVVSGETIDERPMFSMLLPKIENGEFDAVCAVAMDRLSRGSQIDSGRILEAFKQSGTLFITPKKTYDLSIEGDEMLSEFESIIARSEYRAIKRRTINGKKNATREGRLHSGSVPYGYKWDKNIKAAVVVEEKKKIYRMMIKWFLEEEHSCTVIAEMLNELKVPSPSGRSIWYGEVVSEILSNDFHRGYVWFGKYKKSKSNNSIVQNKNLDEVLIAKGHHETMKTDEEHALILNRIEKLRTYKLAGRRLNMNTHKLSGIVRCPYCHKAQAIEQPKGRKKHVRKCLRKSATRTKECEQTKGIHEEVLFQSIMREIKKYNEALFSPTEQDVNDDTYTTQLIGLREKAVKKAKGRIERIKEMYLDGDISKTEYKEKLKISQETLQKAENDLAELIASTEFQNALSAETKKEKWSHHKVQEMIESTDGMSNSEINLMLKMLISHVTYAVEDLGDGTKNLNIKVYYN

SEQ ID NO: 5982 - DNA, 50 bp, Bacillus velezensis
  source 1..50: mol_type = genomic DNA
tgtcgtactcaatcaataatcgttacaagcattatagtataagtataaca

SEQ ID NO: 5983 - DNA, 40 bp, Bacillus velezensis; identical to SEQ ID NO: 5973
  source 1..40: mol_type = genomic DNA

SEQ ID NO: 5984 - DNA, 40 bp, Bacillus velezensis; identical to SEQ ID NO: 5974
  source 1..40: mol_type = genomic DNA

SEQ ID NO: 5985 - DNA, 50 bp, Bacillus velezensis; identical to SEQ ID NO: 5975
  source 1..50: mol_type = genomic DNA

SEQ ID NO: 5986 - protein, 498 aa, Enterobacter chuandaensis
MKQNGKAYSYIRFSSKKQEQGDSVRRQIELAEQYAHANSLILSDKNFQDLGISAFKEGNRPSLGDMLEAIENGQIEQGSTIIIESLDRLSRRGIDVTQQIIKSILQNNVFIASLVDGLLLNRESVNDLVSVIRIALAADLAHKESEKKSQRLRETKAQQRKRALNGEVINKVLPFWLERKQDKFVFSERLDTVKRIIELRRKGYGTHKIAKILNNECHKPLRSTGWNHTTVGKTINSVALYGAYQTSETTKNREVILLDIVENYYPSVISKEEFMLLQADHKKNKSGYKSENNPFTGLLKHSCGGALVRKFHIASGKTYQYHVCANARDGNCNVTRNFKNIEIALYRIMKELRMEKKTSFDKSLLAEKETIKTKIQELNNMLLNLSKIPMSVIQTISNLEDKLQITEEKINQQNSIVVSEKAFNFNLLQEIKDPQELNMMLKRVIEKIIIFNSGEKWRIKVLYRNRHSQNFLWDGENISFRSDTNKLLEFTKSLANED

SEQ ID NO: 5987 - DNA, 50 bp, Enterobacter chuandaensis
  source 1..50: mol_type = genomic DNA
tttttttcactttgaaactacattgtgatattgttgcaaagaagcaaaat

SEQ ID NO: 5988 - DNA, 40 bp, Enterobacter chuandaensis; identical to SEQ ID NO: 4963
  source 1..40: mol_type = genomic DNA

SEQ ID NO: 5989 - DNA, 40 bp, Enterobacter chuandaensis
  source 1..40: mol_type = genomic DNA
cttactgccaaactgcataacgacgttgctggtaactaac

SEQ ID NO: 5990 - DNA, 50 bp, Enterobacter chuandaensis
  source 1..50: mol_type = genomic DNA
ttttttgaaataaaaagctacattactataatgttgatgttaaggaaacc

SEQ ID NO: 5991 - protein, 498 aa, Enterobacter hormaechei
MKQNGKAYSYIRFSSKKQEQGDSVRRQTELAEQYAHANDLILSDKNFQDLGISAFKEGNRPSLGDMLEAIEKGQIEQGSTIIIESLDRLSRRGIDVTQQIIKSILQNNVFIASLVDGLLLNRESVNDLVSVIRIALAADLAHKESEKKSQRLRETKAQQRKRALNGEAIKKVLPFWLERKQDKFVFSERLDTVKRIIELRRKGYGTHKIAKILNDECHAPLRSTGWNHTTVGKTINSVALYGAYQTSETTKNREVIFLDIIENYYPSIINKEEFILLQADNKRNKPGYKSGNNPFAGLLKHECGGALVRKFHTASGKTYEYHVCANARDGKCVATKNFKNIETALYRIMKEFRMEKSTNYDESLLAEKKALKVKINELNDLLIKLSKTPISVIQTISNLEEKLQVVEEKIKQQNNIIASEKAVDFNLLQEIKDPQELNMMLKRVIEKIIIFNSNDIWRIKVLYRNRHSQNFLWDGEKISFRSDTNKLLEFTKKLANEE

SEQ ID NO: 5992 - DNA, 50 bp, Enterobacter hormaechei
  source 1..50: mol_type = genomic DNA
aattagttactttgaaactatatcgtgatattgttgcaaagaagcaaaat

SEQ ID NO: 5993 - DNA, 40 bp, Enterobacter hormaechei; identical to SEQ ID NO: 4963
  source 1..40: mol_type = genomic DNA

SEQ ID NO: 5994 - DNA, 40 bp, Enterobacter hormaechei
  source 1..40: mol_type = genomic DNA
cttactgccaaactgcatatagacgttgctggtaactaac

SEQ ID NO: 5995 - DNA, 50 bp, Enterobacter hormaechei
  source 1..50: mol_type = genomic DNA
aagaagttatcttgaaactatatttagatatttctcaaaaaaagaaaaaa

SEQ ID NO: 5996 - protein, 430 aa, Enterobacter hormaechei
MKQNGKAYSYIRFSSKKQEQGDSVRRQTELAEQYAHANDLILSDKNFQDLGISAFKEGNRPSLGDMLEAIEKGQIEQGSTIIIESLDRLSRRGIDVTQQIIKSILQNNVFIASLVDGLLLNRESVNDLVSVIRIALAADLAHKESEKKSQRLRETKAQQRKRALNGEAIKKVLPFWLERKQDKFVFSERLDTVKRIIELRRKGYGTHKIAKILNDECHAPLRSTGWNHTTVGKTINSVALYGAYQTSETTKNREVIFLDIIENYYPSIINKEEFILLQADNKRNKPGYKSGNNPFAGLLKHECGGALVRKFHTASGKTYEYHVCANARDGKCVATKNFKNIETALYRIMKEFRMEKSTNYDESLLAEKKALKVKINELNDLLIKLSKTPISVIQTISNLEEKLQVVEEKSNNKTILSLRKRQLILIYYRR

SEQ ID NO: 5997 - DNA, 50 bp, Enterobacter hormaechei; identical to SEQ ID NO: 5992
  source 1..50: mol_type = genomic DNA

SEQ ID NO: 5998 - DNA, 40 bp, Enterobacter hormaechei; identical to SEQ ID NO: 4963
  source 1..40: mol_type = genomic DNA

SEQ ID NO: 5999 - DNA, 40 bp, Enterobacter hormaechei; identical to SEQ ID NO: 5994
  source 1..40: mol_type = genomic DNA

SEQ ID NO: 6000 - DNA, 50 bp, Enterobacter hormaechei; identical to SEQ ID NO: 5995
  source 1..50: mol_type = genomic DNA

SEQ ID NO: 6001 - protein, 480 aa, Bacillus cereus
MINNVAIYLRKSRKEDGLTDAETLKNHRQTLTSLADSKGWDYVIYQEVGSSASLDRPQLQILLERLPDYEAILVMDIDRLSRDRYDSAILMREFKRYNLKIVTADGRITDLNDDTDSILTGMQEVFADYEYKQISKRLIRGRRASAKAGNWASGRVPLGYNYVRETKRLAINEEEASIVRDMYSMYIEENASLRDIAISMNKRGRRGKNGKVFNTKTTQHILSNEVYIGVTAQIGHYVANTHDSIINKETFEKAQEIMRRRSQKGSRAKQALHGLSGIIHCGYCGKSHTVQTRTYAGGITARRVKGCYHRDILTGELCKNRQVPYDEMLQDILSQVEAYKKKLFIKIQKAIENKESVNNTRTTKLNSLNIDLEDIQKRIAKLNRLVLADALSEEEFIPLKKDLDGRKTRVTSLIEDLENADPYDVISEWEEMHDTLTQLSSGEVMSEKGLNTLLSNAILKVELFNRADRDEKPRIHIHWR

SEQ ID NO: 6002 - DNA, 50 bp, Bacillus cereus
  source 1..50: mol_type = genomic DNA
ttgtgtatttaaaaaactttacatttatgtattgactgctagatatacgt

SEQ ID NO: 6003 - DNA, 40 bp, Bacillus cereus
  source 1..40: mol_type = genomic DNA
cgaagttgtaacaattgatttattcaacactacagtacca

SEQ ID NO: 6004 - DNA, 40 bp, Bacillus cereus
  source 1..40: mol_type = genomic DNA
cgaagttgtaacaattgatatattcaacactacagtacca

SEQ ID NO: 6005 - DNA, 50 bp, Bacillus cereus
  source 1..50: mol_type = genomic DNA
ttgtgttttaagagttctttatatatatgtatatacatatatatatacat

SEQ ID NO: 6006 - protein, 524 aa, Roseburia faecis
MRNDPILSLSHVIIYLRKSRADDPNMSVEDVLASHERQLQEYATKTFGSVIPESQIYREVVSGETISDRPVVQQVLRLIESEDIRAVLVIEPQRLSRGDLENCGRIINLFRYSQTYVLTPMVSYDLCDEYDRKFFEMELTRGNDYLEYTKRILLRGRLAAVKQGDYIGNVAPYGYRKAVIADGKKRHHTLEIVPEEADAVKIMFAMYADGTGFPTIAHHLDDLGIIPRNGDHWKVATLKDMLENPVYIGKIRWNWKKTRKVVEDGEIRKIRRRDENCLLFDGLHPAIIDKDLYDRANAIRKSRPHVRKNSQLSNPFAGLLFCECGTAMSMKRYVNHGRSGDRVLYSMICNDQTYCHTKSVSYSDFLDRVISVLRDAIKDFEVKLSDDCTGATIALEAHIRALESNLNQLRKKDERQKDAYENGVYSLSDYIARNAKIQDQIRKTTAALDTAKSTPLPSVDYSGKIVKFQACIDSLLDDSVSAVEKNRLLKECIERIDYHNDMPSLPGVGRHVDNIFDLKISLRL

SEQ ID NO: 6007 - DNA, 50 bp, Roseburia faecis
  source 1..50: mol_type = genomic DNA
aacccccatgatggatgttataatgaattatatcatccatcatggatatt

SEQ ID NO: 6008 - DNA, 40 bp, Roseburia faecis
  source 1..40: mol_type = genomic DNA
taccgacatcggaaccgaggaacttgctcacctcgaaatg

SEQ ID NO: 6009 - DNA, 40 bp, Roseburia faecis
  source 1..40: mol_type = genomic DNA
taccgacatcggaaccgagcaacttgctcacctcgaaatg

SEQ ID NO: 6010 - DNA, 50 bp, Roseburia faecis
  source 1..50: mol_type = genomic DNA
gacaccaataatatatgtaataatcaaatatattatcccaattggatata

SEQ ID NO: 6011 - protein, 603 aa, Ralstonia mannitolilytica
MPVAYSYIRFSTAEQKKGDSLRRQAELSEAYAAQHGLTLDTSLHLRDLGLSAFDRSNVVRGALGGFLEAINRGRIAAGSYLLVESLDRLSRAQVLDALKVFISILEKGITIVTLADGMVYNTESVGSNFGSLMFSITIMARAHEESATKSRRLKAAWTSKRKNIGTKKLTGQCPRWMGLNADKTEFELVPDRVALVREILSLARDGIGQAQIAKRLNERGVQPFSRHGKGWHGSYVHKIITSTALYGEMQPHALVDGKLVPQGDPVPNYYPALITKDEFHFLQSARSQRMVGGAKARKGTDVPNILSGVAKCGYCGSSMIMAGASVRKRQADETTPQKKVANKVLVCDGGRRGLGCYAVQWSYKDFEKSFLTFCRSLDLRQLLGSVDINAEERLVQLTVGDQLHSVQSSIAESRKRMDRLMEALELGDVPATVLSRIRELEAEIAAASEREKALKAQLQAVESSSRYRSVEMETVRELVGQIESLTGDQLFRVRAALAEHIRRLIEVVKVYPAGFLETPERIEQLRAELIGSGFSAERADAYIADTFRTEPKRQGRGVRGRYASRRDMGRHFLVKAKTGGFRVVYPDFDDPSQVTVEMGGNGG

SEQ ID NO: 6012 - DNA, 50 bp, Ralstonia mannitolilytica
  source 1..50: mol_type = genomic DNA
ttatgtattcatagacacaatatcaggataactgggctatgaatacatag

SEQ ID NO: 6013 - DNA, 40 bp, Ralstonia mannitolilytica
  source 1..40: mol_type = genomic DNA
cggcatcagccatctggtcagtatttcgggcctgcacatc

SEQ ID NO: 6014 - DNA, 40 bp, Ralstonia mannitolilytica
  source 1..40: mol_type = genomic DNA
cggcatcagccatctggtcaatatttcgggcctgcacatc

SEQ ID NO: 6015 - DNA, 50 bp, Ralstonia mannitolilytica
  source 1..50: mol_type = genomic DNA
ttatgtattaggtaacacaacctcaaaatatatggaggaaaaatcaatag

SEQ ID NO: 6016 - protein, 518 aa, Enterobacter cloacae
MVPKGSPMNNNINEKQGIRRAAQYLRMSTLNQEFSLDNQAHFIRQYAQEHNYEILHTYDDAGKSGVTASGRHDFNKLINDILFKEISIDAVLVYDVSRFGRFEDPLEGIYYKYLVEKHGVKVIFCAEDIPENLMESPFFLLMLMYSAGSYSKNLSQKVLAGHINLVNRGYYQGGVPGYGLKRSLVDNNNQFKMPLNAGERKSLTTDRVVLSPGKKEEIQLVKRIFDTFIFKGLSEYLIAVSLNREGFRYSDGSYWNRSRIHAILINIRYTGKYLYNRTSSRLQSKRTKNPESQWVENKSLFKPIISLEKFRLAQEIINSRSRHLTDDEILTFLKKKLEENGKISGFIIDQDSSGPSSSVVANRFGGLINAYKLIGYTPEIDYSFLAINESLRNKHNILLKEIEEKITSKNIFITDKKLVSINKALTFSIVLSRCRKRGNEKYQWIVRLDRSLNADLNIVVRMNTLNSEPVDYYILPSLEKFEDELKIKEDNDMLFELYRFDNLDALLDMLTPSLMEAS

SEQ ID NO: 6017 - DNA, 50 bp, Enterobacter cloacae
  source 1..50: mol_type = genomic DNA
aagaatctattcgatgttttggatctgaatattgattgaaataaattatt

SEQ ID NO: 6018 - DNA, 40 bp, Enterobacter cloacae
  source 1..40: mol_type = genomic DNA
gttactcgatattctggatctgctcgcgcatctgctcaat

SEQ ID NO: 6019 - DNA, 40 bp, Enterobacter cloacae
  source 1..40: mol_type = genomic DNA
gttactcgatattctggatgggctcgcgcatctgctcaat

SEQ ID NO: 6020 - DNA, 50 bp, Enterobacter cloacae
  source 1..50: mol_type = genomic DNA
aaaaatctatactattctttggagggcaatttagttttatctaaattatt

SEQ ID NO: 6021 - protein, 402 aa, Clostridioides difficile
MARDTSRKVKSAFKVKFAEGAYYGAYAPLGYRKDPENKGKLLIDEETRWIVEKIFQLASQGCGGAKIAKQLISEEVPTPSWINFQKYGTFAHIFADEPESKRYAWTIAQVKTILKNEVYIGNSVHYKQSTISFKSKKKVRKPESEWFRVEDTHEPIIEKEVFYQVQEQIKARRRKRKDSTTQIFAGLVKCADCGWSMRYGTNKANKNPYSYFACSFYGQFGKGYCSMHYIRYDVLYQAVLERLQYWAKAVRQDEEKVLKKIQKAGNVERIHAKKKAVSALKKAENRQKEVDRLFMKMYEDRANEKITERNFVMLSSRYQQEQMELEEQITSLRDKLQKMEQEMVGAEKWIELFKEYSVPKELTAPLLNAMIEKILIHAPQADENGERTQEIEIYYRFIGKVD

SEQ ID NO: 6022 - DNA, 50 bp, Clostridioides difficile
  source 1..50: mol_type = genomic DNA
tgatatttttaactaagggaaactggagtttcacatagttaaggatattg

SEQ ID NO: 6023 - DNA, 40 bp, Clostridioides difficile
  source 1..40: mol_type = genomic DNA
tgtatctaaatgggaaactggacaaagttatcttgacata

SEQ ID NO: 6024 - DNA, 40 bp, Clostridioides difficile
  source 1..40: mol_type = genomic DNA
tgtatctaaatgggaaactgaacaaagttatcttgacata

SEQ ID NO: 6025 - DNA, 50 bp, Clostridioides difficile
  source 1..50: mol_type = genomic DNA
ccatcttttatggaaggggaaactgaaggttcacattatcaagaatcttc

SEQ ID NO: 6026 - protein, 463 aa, Bacillus mycoides
MTVGIYIRVSTEEQARDGFSISAQREKLKAYCVAQDWDNFKFYVDEGVSAKDTNRPQLGIMLDHIKQGLITTVLVYRLDRLTRSVMDLYKLLDEFDKYNCAFKSATEVYDTSTAMGRMFITIVAALAQWERENLGERVRMGQLEKARQGEYSAKAPFGFDKDEHSKLVINDIESKVVLDMARKIEEGYSIRQLATHLDSYIKPIRGYKWHIRTILDILSNHAMYGAIRWSNEIIEDAHQGIITKDRFTKLQKILSSRQNRKKRQTSSIFIYQMKLICPNCGNHLTSERSMYYRKKDDQHVESNQYRCQPCALNKKKAFATSEKKVEKAFLDYISALHFEKVTPLKKKDDESETLKKQIAKVERQREKFQKAWSNDLMTDDEFAARMKETKHILDSVKENLHLLKPNNNKDVNNDVIKEIVNNIKNNWPVLPSEEKKRFMSMFIENIKIDKKEGSTEVLDIEFY

SEQ ID NO: 6027 - DNA, 50 bp, Bacillus mycoides
  source 1..50: mol_type = genomic DNA
attagtatttatggtatgtttacacatgtaaagttctcgcaaatacgaaa

SEQ ID NO: 6028 - DNA, 40 bp, Bacillus mycoides
  source 1..40: mol_type = genomic DNA
tttcgtattcaaatataaacaaacaaaatgctcctgttgc

SEQ ID NO: 6029 - DNA, 40 bp, Bacillus mycoides
  source 1..40: mol_type = genomic DNA
tttcgtattcaaatataaagtaacaaaatgctcctgttgc

SEQ ID NO: 6030 - DNA, 50 bp, Bacillus mycoides
  source 1..50: mol_type = genomic DNA
atgtgcatttttattatgtttactgttttaaatttagctgcaataccaaa

SEQ ID NO: 6031 - protein, 525 aa, Pseudoclavibacter helvolus
MGQEQQEQATGSGSSTRAVVHVRISDDPEGTERGVDRQEADCRAYAAAHGWEVVAVFRENDTSAFKQRTITLPSGERVRRVIRPQFRAMLKRLADGQAQVMVAYDLDRAVRDPRDLEDLIDAKVLGGFGVCSVTGSLRLDTDSDVAMARVLVAMANKSSADTARRVARAAKQQAIEGAWHGGRVPFGYRAESGVLVIDPVTGPLVVEAMQRVLAGDSLYRIRKDWNERGVLTTHGCAWSDRTLKLMLRNPSNKGVREYRPVLPDGSRAKSSQMQVEAAWPAIVDEDTWQQVSDVLDARKKARNFHQPGSGVAKRMYPFSGLIRCSKCGTAMIHRGDVYQCIQPTRGGCNRSIRSAEIAKLVEEAVLATFEQITLHPTKRNESGTDLAARVGLAATLDADRERLARLDDDYYDGLIDKAMWVRQRARIAERIERTRREHTAAMPEQHAGPSIDVTTVAAEWKGRTPMWQYQATSLILQAVLIHARPADMMTAVPKRRNETYEAFHSRRDAHRVDVLARRVEFIWRA

SEQ ID NO: 6032 - DNA, 50 bp, Pseudoclavibacter helvolus
  source 1..50: mol_type = genomic DNA
tgagtgcctttgcagtacctcggctagccgaggttctgtaaacgcaccta

SEQ ID NO: 6033 - DNA, 40 bp, Pseudoclavibacter helvolus
  source 1..40: mol_type = genomic DNA
cacgctcgtgctcctcgactactccgtcgcgacgcacatg

SEQ ID NO: 6034 - DNA, 40 bp, Pseudoclavibacter helvolus
  source 1..40: mol_type = genomic DNA
cacgctcgtgctcctcgacgcctccgtcgcgacgcacatg

SEQ ID NO: 6035 - DNA, 50 bp, Pseudoclavibacter helvolus
  source 1..50: mol_type = genomic DNA
tgcgggcctgtttagcacctcggtgctcgggggttcttcaagcgcaccta

SEQ ID NO: 6036 - protein, 479 aa, Lactococcus lactis
MKKVAIYCRVSTLSQAEDGYSIGEQQDKLNKYCEIMGWEVSEVYTDAGFSGSTIERPAMKKLLRDAENHTFNTILVYKLDRLSRSTSDNLYLIKEVFKKNDIEFVSLNEKIDTSDAMGEFFFTLLAAVAEMERKTITERMALGRLGRAKSGKTMAFSTPPYGYKRTPGQDILEIVPQEAKIVQKIFTDYMGGKSVATIRQELNEKGYCSRKGKWPFSTIRNMLENTVYIAKGKFKGKTYEQEHKKIISEELFWAVQDELKKRQIKQVELTNVARPFRAKYMLSGLLKCGYCGGHITSLTGPKRLDGTSAVRYECVRRKDYRKRLSDNQKKCDSGYYHRLDLEEHVIEYLANLPTKETELKKFLSHDKSEAFNFEAVKKELQSVNKKIDKENYLFRNDYIDEVELQKNVKNLLGVKKQLENQLNENKEGKINHDKNNRVLELLKSGDIRTMDYEQQKKIVKTCISKILLTSDEITIILNF

SEQ ID NO: 6037 - DNA, 50 bp, Lactococcus lactis
  source 1..50: mol_type = genomic DNA
actatgtattaagtccattctgctttaatagacttcactaaatacatagt

SEQ ID NO: 6038 - DNA, 40 bp, Lactococcus lactis
  source 1..40: mol_type = genomic DNA
ttatcgattccattctgcttttatcgcatgatagctagct

SEQ ID NO: 6039 - DNA, 40 bp, Lactococcus lactis
  source 1..40: mol_type = genomic DNA
ttatcgattccattctgctgttatcgcatgatagctagct

SEQ ID NO: 6040 - DNA, 50 bp, Lactococcus lactis
  source 1..50: mol_type = genomic DNA
actttgtttcaactcctttctgctgttattgacatatatatatacatatt

SEQ ID NO: 6041 - protein, 494 aa, Paenibacillus polymyxa
MRVAIYIRVSTDMQVEDGFSIEGQRTRLTSYAASQDWEIHDFYIDEGQSAKDLKRPEMERMLSDMEEHKFDVVLVYKLDRLTRSVSDLHDLLKRFDKHSVKFKSATEIFDTTTAMGRLFITIVAAMAEWERGTISERVRFGIEQMILEGKRPGGVMPYGYTQDGELIEEEAEIIRYARKLYMSGLGYQSVAVRLNREGKLRRGKLWTAATVAYTLENPFYAGILRLGSKLPGGNYVNHGRDDRVKCLYGDGDHPVIFTRLEYEETKEYMKRRTNGGFSRVQTYWFSGVLRCGRCGASMFGKMSNKRKRTDGSLVRTPYYICSNKHANKSCDMPIFRQVHVEHLFMEYIKQVTTDQETVKQVAATMQNDEVKIVDEIALAKKELKKIAERREKWQYMFVEGLITKDQIRKRIMEEDAAEEEIKKHLAENKNMMSAVPKSDDLKELDQLWPEMDDEEKKDMIFTLCSKIVLCTDETNVKGVKNKFFDAYIGEVLYN

SEQ ID NO: 6042 - DNA, 50 bp, Paenibacillus polymyxa
  source 1..50: mol_type = genomic DNA
gactaccacattgtattgtatagagatccatctaatataaaatggtattg

SEQ ID NO: 6043 - DNA, 40 bp, Paenibacillus polymyxa
  source 1..40: mol_type = genomic DNA
cgcatgaccggttgacaacgatccatcgtgtcctgtgttc

SEQ ID NO: 6044 - DNA, 40 bp, Paenibacillus polymyxa
  source 1..40: mol_type = genomic DNA
cgcatgaccggttgacaaccatccatcgtgtcctgtgttc

SEQ ID NO: 6045 - DNA, 50 bp, Paenibacillus polymyxa
  source 1..50: mol_type = genomic DNA
tagtatcactacagattgtatagacatcaaagtattacaaaagggtattg

SEQ ID NO: 6046 - protein, 489 aa, Clostridium perfringens
MKRVAKFIRTSTLDQHTSIDNQSEILDNWIAQNNCILYKTYNDEGISGTKKKFRVQWLQMLEDAKNKEFDILICKSYSRFGRNQIETLQAIKELRENKIRIVFLEDGLDSMIDDSRFGLMAWLSEEESKRTSKRIKGVFSHFKEVGKIYNCIAPFGYDYDINKKNFVINKDESEVVKRVFRLYLLGNGTNKIANILESEGVPTKNGGKWRGNTIKNMIRNEVYLGTLVQNKSSNIEVTNSKRNFHNEDEYIKHLNNHEAIVNEETFIKANEIFKKNSDKVKNRSVGVRASNTSLFSNLLRCGSCNSSMSIRRKSKRKPFYNCIEYERLGLKCGHNSNFIQEEFLIEYIEQKLNELIENNFENIKIIEKNDIKKTLENDLKNIQKKIDEQINLANNLLKLYNNKMINDIQFKLQNESISNMLNSLIENKKIIEEKINNLPKKNNEFKKDVNNVVSLPIAQWSNAMLKKIIDKITVGVDGTIKIDWKINKM

SEQ ID NO: 6047 - DNA, 50 bp, Clostridium perfringens
  source 1..50: mol_type = genomic DNA
agacctatatagttatataaaacaactgcaatatatatatatataggtct

SEQ ID NO: 6048 - DNA, 40 bp, Clostridium perfringens
  source 1..40: mol_type = genomic DNA
tgaacctgctaataaagaaactgcaacctgcataggtctt

SEQ ID NO: 6049 - DNA, 40 bp, Clostridium perfringens
  source 1..40: mol_type = genomic DNA
tgaacctgctaataaagaaggtgcaacctgcataggtctt

SEQ ID NO: 6050 - DNA, 50 bp, Clostridium perfringens
  source 1..50: mol_type = genomic DNA
agacctatataacataatatgacaggtggaatatatgatgatattcatct

SEQ ID NO: 6051 - protein, 560 aa, Colwellia polaris
MKKKAYLYQRFSSDQQIGNSSIYRQSFKQHQWLEAHPEFECEGEYVDESKSASKGEHLKRGELGDLVSEIEQGKVEKGSYILVEGFSRLSRLDTPETEELLRKIWKAGITIVTVQNGQEYPPDTESNFGLRIQLLVEVNGAYLESKIRSERIKGSYDRRESQAKEGKTIKIKKPFWLDEDGKLNDGKYIIKNIFNWYVREGLGQQRIYQRLKEQYPDYEPFKNLAPSTVIRWIKSKSAIGYWVRFAGMENEREYKVFEAAVGLKIFYKAASINIHRHYKNIKPDSNMALHGLLECGHCGGGITVQKSYHKNGMPLLRCSRQARYGKQHCGFKSTYPYSIAYYLYENIVYNEMIGMLSEQNLRPIEEQELNKIEHQLSSAEKKYNKLKDRMLNLDDDSDDDAITDLMSELSTKRKQLKTRKNQLEKNLDDRPPYIDDDIRELEKNPKELNLNFNQLQKKIIIKDKTVFFESDSRYEITYDGYSQREKGYQITRNFLIISKDLSNPEIVHKYADLYDGEGSLESNDPDDPYQQYMRELSEKPHEEVKITEFLKTTDICKKVK

SEQ ID NO: 6052 - DNA, 50 bp, Colwellia polaris
  source 1..50: mol_type = genomic DNA
agtttgcacactcaatatgtttgtgaacaaacatgttgagtacacatacg

SEQ ID NO: 6053 - DNA, 40 bp, Colwellia polaris
  source 1..40: mol_type = genomic DNA
aattgatcatcttatttgtgagctaaaggccgcacaatca

SEQ ID NO: 6054 - DNA, 40 bp, Colwellia polaris
  source 1..40: mol_type = genomic DNA
aattgatcatcttatttgtaggctaaaggccgcacaatca

SEQ ID NO: 6055 - DNA, 50 bp, Colwellia polaris
  source 1..50: mol_type = genomic DNA
aatatgcctagatgatatgtgtgtagacaaacatatctcacacacacaca

SEQ ID NO: 6056 - protein, 475 aa, Bacillus subtilis; identical to SEQ ID NO: 2581

SEQ ID NO: 6057 - DNA, 50 bp, Bacillus subtilis
  source 1..50: mol_type = genomic DNA
attagtatttatgtaaagtatgagcatgtgaaatagacacaaatacagaa

SEQ ID NO: 6058 - DNA, 40 bp, Bacillus subtilis
  source 1..40: mol_type = genomic DNA
ttttgtatttaagtataaacagacaaaatgctcctgggtt

SEQ ID NO: 6059 - DNA, 40 bp, Bacillus subtilis
  source 1..40: mol_type = genomic DNA
ttttgtatttaagtataaatcgacaaaatgctcctgggtt

SEQ ID NO: 6060 - DNA, 50 bp, Bacillus subtilis
  source 1..50: mol_type = genomic DNA
aatagttttttaaaaatgtattagtctctgaaattgtgtagaaaacaaaa

SEQ ID NO: 6061 - protein, 550 aa, Enterobacter asburiae
MGIKTAFCYCRVSSGRQKTEKGGFGMSRQQALLTTYVEEYEDKDGLGYELNVDNIVFLKAEGVSGFSGKNIEKGSVLHSFIADYKSGKIKNAVLIIENIDRFSRANPNEAAELFLGLINKGCDVHEIDTETVHHRCSDLNQISAGLTRSHKESLRKQKLSIKNWDERFEKTVKKHVPLTGRCPGWLKVENDLYQEIPERVAPIRLIFEWYNNGYGQAYIRDRLNSEGYKYNGKTWSNWSVHRVLKDERVTGKHRTQSTLRNNFDGIMMYPAIITELQFKRAEQRLTKPGRDKKINRRANTLFSGVLICGLCKAGHILINNENGNRFGRCSHAIAGNKRCVANGFKYNVVENTLIKYLRHLDFGSLNNSSHAVELENLSSELIHYSNYLANVQRTVDSVDIPSETDYKVLKNLEAKVRELQGKIDDIKALENVSVSYEEIVKKINNELMDVSNIEVRQEFNIKIRKIIREIQILKIQKNIVLVSVSFYVSNDVQWITISLKEGLLLSNTYVENKVLVVTLGNEIMTYDIESKQYYLNSKPISNEDAYALFD

SEQ ID NO: 6062 - DNA, 50 bp, Enterobacter asburiae
  source 1..50: mol_type = genomic DNA
tactatataataactacactaatcaccattatacgtgttattatatagta

SEQ ID NO: 6063 - DNA, 40 bp, Enterobacter asburiae
  source 1..40: mol_type = genomic DNA
cgcaatgatgccaatgaccaccatcagctcaatgagtgtg

SEQ ID NO: 6064 - DNA, 40 bp, Enterobacter asburiae
  source 1..40: mol_type = genomic DNA
cgcaatgatgccaatgacctacatcagctcaatgagtgtg

SEQ ID NO: 6065 - DNA, 50 bp, Enterobacter asburiae
  source 1..50: mol_type = genomic DNA
tattatatacaatatatacatatatacataatacatatatgtatatatta

SEQ ID NO: 6066 - protein, 567 aa, Shewanella algae
MTSQQPKVHSYVRFSSKIQEMGASVARQMEITRRWAESKGLEMSDLRFNDLGISGFKNVSRPGLEELQGAIKVGAIRVGDWVAIERLDRLSRGTLSDVQGIIVSILKQNVNIVAVADGLELTRNSLDQLADVIRLATLSDIAHKQSVEKSLRVRDAKRRQCDAARNGAKAVRRRLPLWLERRPDDSGYTFNNYKDTVELIIKLRQRGRGWHGIATQLNEEHRAARWGKGWSDTTVRTIITNHALYGAWRTGKQNIDTDNKFFHGEIIPDHYPALISKYEWLELQPKPKSKNQPAGGRSRVNPIAHVARCAGCGGALIYKKSTRKSGDSTREYHSWVCRNAADGRCDVAGKSGFRDLGKFVIQAVSQFQHITPNRINVSEAQEKIQNEIVQYKERLAELRSALSKPRAGSVSALLDGIEDAERALELLYKQLDGLVVEDSTAEDIVRLGTLADDPELFNNLLRKLVKQILVTRKGRLSYSFTVEQVNGFTFRVEVIRVKQRGEPEVTYWTEGSLYPEKLFDSELREGIADLDDEGYLQQERIKALKSSRTGRLYTKQQRPQRFAFHRV

SEQ ID NO: 6067 - DNA, 50 bp, Shewanella algae
  source 1..50: mol_type = genomic DNA
attgccattaataaaaaattgatggtgatcaatattggtttaagtgaaat

SEQ ID NO: 6068 - DNA, 40 bp, Shewanella algae
  source 1..40: mol_type = genomic DNA
ggccggtgccagattgatggtgatcctgcgcatggggaat

SEQ ID NO: 6069 - DNA, 40 bp, Shewanella algae
  source 1..40: mol_type = genomic DNA
ggccggtgccagattgatgcagatcctgcgcatggggaat

SEQ ID NO: 6070 - DNA, 50 bp, Shewanella algae
  source 1..50: mol_type = genomic DNA
attgccattttgtgacaatttatgcagagcactactacagcaggtgacac

SEQ ID NO: 6071 - protein, 608 aa, Burkholderia pseudomallei
MPATPTPKAYSYIRFSTPEQQKGDSSRRQTELSQQYAEAHGLTLDENLTYRDLGVSAFDKSNIRNGELGAFLRAIDSGAVEPGSYLLVESLDRLSRAKVTDALEVFMSIINRGIRLVTLADGREYSKERINEQFTDLIISIVVMSRAHEESQTKSKRLKEAWKAKRGRIGDAKLTEMAPAWLKLNDERTAYSLIPDRVELVQRVFQLSKDGIGSESIARRLNQQGIPTWGTRKADQWHASYIKKVLDNRAVLGEFQPHILVSGKRVPEGDPAPDYFPRIISDEDFVLAKVARQSRRTNSAGRKGQTFSNVFSGILRCGYCNGSMVYVNKGHSGPRAKLLVCARAKAGKGCHYVPWEYPQFERSVLTYCKGLDFDAFLQTRDTVKSELAALSARIAVLESSITDNEQKQANILEAIESGAKFQQFEARMVELEQNRMKFNAELDETRQKYDLRANAKVDVTAVRASIDELLQRLSELEGDELYDVRARLSQHIKRLIARIAMYPGGYIEKPFFVEKLRAHLVSKGSDTNAADEYIASRLKLTPNVSERFFTMISRSDAVRMIRPDLENPELLHLEVPDGGHLIAHAATIGAMLEKLAAMAQSSSHEARS

SEQ ID NO: 6072 - DNA, 50 bp, Burkholderia pseudomallei
  source 1..50: mol_type = genomic DNA
ttgggtttaattggctataaattaaggaaataaggccaaataaaccctgt

SEQ ID NO: 6073 - DNA, 40 bp, Burkholderia pseudomallei
  source 1..40: mol_type = genomic DNA
gcccggcggcccgatcatcagcatgtggtggccgcccgcg

SEQ ID NO: 6074 - DNA, 40 bp, Burkholderia pseudomallei
  source 1..40: mol_type = genomic DNA
gcccggcggcccgatcatcttcatgtggtggccgcccgcg

SEQ ID NO: 6075 - DNA, 50 bp, Burkholderia pseudomallei
  source 1..50: mol_type = genomic DNA
ttgggtggatagtccaataatttatttaaataaggcttttaaaaacattt

SEQ ID NO: 6076 - protein, 521 aa, Pseudomonas lundensis
MPTAFSYARFSSATQKKGSSLERQQAMVANWFLHHPEYSLSELKFQDLGKSGWKGEHIKEGGGFAELLAAVEAGVIQKGDAVLVEAVDRTGRLPVLDMLTIIVSPILRAGVSIVTLEDGIVFTESSLNEGGHIYILVGKIQAARQYSDNLSRRLKGSYDSRRRLATEGKTPKRNTPAWLTSKGEVIPEVAAQVKLAFELYASGLGKAVIAKRMRESGVEALVKCSGPGVEGWLRNEAAIGRWNGAHVYEPIIDLSLYHLAQLEGQTRKTSVKIKTAAHFYVGLIKCGCCGHNFIMRTIKGVQVSMRCRKRQELNGCDNKKVIPKEIIDAVYRDTSVSAALRVVERDRTGVNDKAIIAAEAKLLEISKQIQHYAEAIGALGTIPELLEPLQRLKDEREATERKLAVLKATMVPVAGRYWEKQGRVWALEKDDPQRLSAMLRGAGYSITIHPDGRLVPDSGTVYQYGGVDRKSNQYKLLAGDKLMLIQKGSDEDDLYWEPFEEIAGTATWDDADYENLRLQYE

SEQ ID NO: 6077 - DNA, 50 bp, Pseudomonas lundensis
  source 1..50: mol_type = genomic DNA
tttgtgtacattagaaatagttgcttataaatatttcatatgtttacaat

SEQ ID NO: 6078 - DNA, 40 bp, Pseudomonas lundensis
  source 1..40: mol_type = genomic DNA
tttttgcatgagtcttttcttgtaagtgctcacggttttg

SEQ ID NO: 6079 - DNA, 40 bp, Pseudomonas lundensis; identical to SEQ ID NO: 6078
  source 1..40: mol_type = genomic DNA

SEQ ID NO: 6080 - DNA, 50 bp, Pseudomonas lundensis
  source 1..50: mol_type = genomic DNA
tttttgtattaaatatatattaccttatcaatatttataacatttacaat

SEQ ID NO: 6081 - protein, 478 aa, Streptococcus suis
MSKMALYLRLSVDEDGTDESNSITNQRYLLNQYLDQSSDFNHWERLEFVDDGFSGTSLNRPAFQRLMADVKSGIIRHIIVKDLSRFMRDYLELGNYLENIFPFLGVRFIAINDQYDSLTSEQNGLDIDVPFRNLLNDFYAKDVSEKVKSAMNSMKRSGKNMSWLPPFGYLKDPEDRFKIIIDETVAPIVRRIFTLYLDGNSYQTIARLLNEEQVITPAERKMQISQARYAKSLRLTTEQKRNVWSSTTVGQILKNEAYKGTYLFNTRTYVRGKHVFRPKSEWERIENNHEAIISSELFEQVARLKAKKVIQKKHYHTPKIPSILTGLIRCEHCDHSLIGSYNHQGYQYFSCRYCKGQGEKMKSCRADKIEQAIKEKLGYEEDKSRPKASKTRVLREIERLKRQKLSFFQDYKDSLMTREDYITKKMVIDKTVRNLEEQLKEVNTFQLLSNDRLTKEIVSTHIEKVVVDCLGFFTVIYK

SEQ ID NO: 6082 - DNA, 50 bp, Streptococcus suis
  source 1..50: mol_type = genomic DNA
gtgtcagttacttgacataagagggggggattgtgtcataataatgacag

SEQ ID NO: 6083 - DNA, 40 bp, Streptococcus suis
  source 1..40: mol_type = genomic DNA
ggtgttgcctttccaggtggacatattgaagaaggcgaga

SEQ ID NO: 6084 - DNA, 40 bp, Streptococcus suis
  source 1..40: mol_type = genomic DNA
ggtgttgcctttccaggtgaccatattgaagaaggcgaga

SEQ ID NO: 6085 - DNA, 50 bp, Streptococcus suis
  source 1..50: mol_type = genomic DNA
gtgtgtgttcccgtgcatgagaagactggattgtatctcactgatgacag

SEQ ID NO: 6086 - protein, 508 aa, Megasphaera elsdenii
MSSTTTAKAVIYARFSSDKQREESIDGQIRECTKFAEDQGLEVIGTYIDRAMSARSDNRPDFLRMIADSARGQFQYVIVYQLDRFSRSRYDSAVYKNKLKKNGVRVLSAKECIGDDPSSIILESMLEGYAEYYSAELSQKVKRGMTENVLEHKWTGGYVPLGYCLAPDKTLQIDPVGAEAVKIIYDKWLAGCRIMEIIRYLNDHNYVTSRKAKFRYSSLNRILTNPIYTGLYQWGSIEVADYAPAIITQKQFALAQEKIHHIKAHPRAKRRSANYALTGMIYCGVCGSPMTGQSGHSKSGALYHYYRCSTKNNYHDRGKKLNIKCTNRNISREKLEDLVLQTTINILMNPEAVHMIAKQAVAVQQKDPASMELDRIKEDKKIIQKKLNNSIKAVEAGIISTTLAANISQYEKEIADLDIKMEKIKLLSTPVKIDEIAVEFFLKSLLLNKKEHDKYRLDMFQTFIRRVIVYPDKVEIQYNYTATPHILENPVTKMMTGNPGCSRCERLV

SEQ ID NO: 6087 - DNA, 50 bp, Megasphaera elsdenii
  source 1..50: mol_type = genomic DNA
ctgggtgttcgcgttgcgaacgtttggtgaaccagaacgatattaatgcg

SEQ ID NO: 6088 - DNA, 40 bp, Megasphaera elsdenii
  source 1..40: mol_type = genomic DNA
atgtgacagtccctttatgtggtgacccggtagggattcg

SEQ ID NO: 6089 - DNA, 40 bp, Megasphaera elsdenii; identical to SEQ ID NO: 6088
  source 1..40: mol_type = genomic DNA

SEQ ID NO: 6090 - DNA, 50 bp, Megasphaera elsdenii
  source 1..50: mol_type = genomic DNA
ctgggagttgcacatgagaatgtgtgctgagccagaatgctattgatgtg

SEQ ID NO: 6091 - protein, 471 aa, Listeria welshimeri
MTVGIYIRVSTEEQVKEGFSISAQKEKLKAYCTAQGWKDFKFYVDEGKSAKDMNRPLLQEMITHIKKGLIDTVLVYKLDRLTRSVVDLHNLLSVFDEHNCAFKSATEVYDTSSAMGRFFITIISSVAQFERENTSERVSFGMAEKVRQGEYIPLAPFGYVKGADGKLIVNKIEKEIFLQVVEMVSTGYSLRQTCEYLTNIGLKTRRSNDVWKVSTLIWMLKNPAVYGAIKWNNEIYENTHEPLIDKATFNKVAKILSIRSKSTTSRRGHVHHIFKNRLICPACGKRLSGLRTKYVNKDKETFYNNNYRCATCKEHRRPSINISEQKIEKAFIDYISNYTLHKASISSKKLDNNWRKQEIIQKEIISLQRKREKYQKAWAADLIKDDEFSKLMIDTKMEIDAAEDRQKEFDVSLFLSPEDIAKRNNILRELKINWTSLSPAEKIDFISMFIEGIEYVKDDANKAVITKIRFL

SEQ ID NO: 6092 - DNA, 50 bp, Listeria welshimeri
  source 1..50: mol_type = genomic DNA
tataggctttttgtcaaatatagtgatatgtactttacaaaaacactata

SEQ ID NO: 6093 - DNA, 40 bp, Listeria welshimeri
  source 1..40: mol_type = genomic DNA
ttctatattactataacccgatgtatatttatatcccatt

SEQ ID NO: 6094 - DNA, 40 bp, Listeria welshimeri
  source 1..40: mol_type = genomic DNA
ttctatattactataaccctatgtatatttatatcccatt

SEQ ID NO: 6095 - DNA, 50 bp, Listeria welshimeri
  source 1..50: mol_type = genomic DNA
tatatgcctattgtcaggcatagttatatgtactttttctagacactttc

SEQ ID NO: 6096 - protein, 495 aa, Enterobacter kobei
MKQNGKAYSYIRFSSKKQEQGDSVRRQTELAEQYAHVHGLILSDKNFQDLGISAFKEGNRPSLGDMLEAIEKGQIEPGSTIIIESLDRLSRRGIDVTQQIIKSILQHNVFIASLVDGLLLNRESVNDLVSVIRIALAADLAHKESEKKSQRLRETKSQQRQRALSGEVINKILPFWLKRKEDKFVFSDKVDTVRRIIQLRREGFGTNKIAKVLNDEGHKPLRSAGWNHTTVRKTINSVALYGAYQTSETTKDRKVILLDIIDDYYPAVISKEEFMLLQSDQKQNKPGYKSEHNAFAGILKHECGGSLVRKFHVASGKTYQYHVCANARDGKCNITKNFKNIEIALFRIMKKLKLEKKTSFDGALLLEQETIKKKIQELNDMLLTASKIPTSVIQTINNLEDKLQEVEEKIKQQNSMIISERAFDLKLLQDIKDPQELNMMLKRIIESIIVYNIGKKWRIKVQYRNEHVQSFLWDGENITFITDTKEILDLVNSWG

SEQ ID NO: 6097 - DNA, 50 bp, Enterobacter kobei
  source 1..50: mol_type = genomic DNA
taattccccctttgaaactatatggtaatattgttgcaaagaagcaaaat

SEQ ID NO: 6098 - DNA, 40 bp, Enterobacter kobei; identical to SEQ ID NO: 4963
  source 1..40: mol_type = genomic DNA

SEQ ID NO: 6099 - DNA, 40 bp, Enterobacter kobei
  source 1..40: mol_type = genomic DNA
cttactgccaaactgcataaagacgttgctggtaactaac

SEQ ID NO: 6100 - DNA, 50 bp, Enterobacter kobei
  source 1..50: mol_type = genomic DNA
tgatacccttttttaaactatataaaaataataatgtaactaagaaaaat

SEQ ID NO: 6101 - protein, 560 aa, Bacillus nakamurai
MLILKGDQRLTTEQIMTLIGKVNALIYARVSTTDQAKKGFSIESQLERCKERALSKFGYKESELVALIEPGGMGDDPNRPALNHALYLLEKGLGKKFLVLHPDRLTRDNTLQGVVSRRIWGMGVDLEFIEFEVDPNNPESMLMYNIQGSIAQYNKAKILANSKRGRLTKAKKGEFPSFKRLYGYKFNTVTDLPEYNEEEKEILLEMKDMLLSKKMSSNEIAKELSRRGVAAPNGKTWFQSTVSRMLQNEDYTGDFYYGKSKVVQLNGKKKQISTPEEEWILIKIPPIWDHDTRDQIIKQLKANFKGRSRSTRDYLLKGKARCGRCGGACGSGITSKTKSGVYKYYSCRNKNAKAYQNGREIYKCQGKNWRVDIVDDAFWKWFKKLIKNPQKFLEQFLEETSNEKSIEEIKNKVARLEKQLEDIDSEMANYVILFGKGKIKESMFDELTKPLELNKEHLENELDILQSQLNTNKKAEDKNQKTIEYMSSFAEMVDKDLSMAEKRQFLDFFIEKVTLYDDDHMEVVWRSSSLNDENNQSVDFNKADRGAESDNQHKRLNHLQ

SEQ ID NO: 6102 - DNA, 50 bp, Bacillus nakamurai
  source 1..50: mol_type = genomic DNA
aacataaaagattaaaccatcttcaagaacaaggttttaatttttatgtt

SEQ ID NO: 6103 - DNA, 40 bp, Bacillus nakamurai
  source 1..40: mol_type = genomic DNA
agcgattgacacccttgttaagcatatggaagataagcag

SEQ ID NO: 6104 - DNA, 40 bp, Bacillus nakamurai
  source 1..40: mol_type = genomic DNA
agcgattgacacccttgttatgcatatggaagataagcag

SEQ ID NO: 6105 - DNA, 50 bp, Bacillus nakamurai
  source 1..50: mol_type = genomic DNA
aaaataaaaataaaaatcttcttcatgaacaaagttacttttatttggat

SEQ ID NO: 6106 - protein, 544 aa, Cutibacterium avidum
METTTDDASATPELLAVSYLRVSTREQAERGGTEEGFSIPAQREANARKAAELGARIVREFVDAGESARSADRPALQGMLAFIAATRVQVCLVHKVDRLARNRLDDVHIQQALLEAGVTLVSATESIDETPSGMLVHGIMSSIAEFYSRNLATEVTKGMTQKVAQGGTPMRAPIGYLNVRSTDDQGREVRTVEIDPERAPLIRWAFETYATGETSVVQLLRDLTARGLLTVPSPKRPSKPLGRNTLYKLLTNPYYAGIIRYKGALHPGAHEPLIEPALFDQVQSLLKARNAHATRHVQHSHHLKGLLYCGTCGSRMLLDYATNPRGTTYAYFVCSGRAAKKTTCTRRAVPVQVAERLVEDSYASITISEADYQALAADIDAAFDQRSAGRDQELADLTSNRARLEAESDKLLAAHFADAIDLPTLKRHQDRIRAGLADIDQRLATHTEQYAGGRAFLHDSLSLLTDAHRMYVHCDDTNRRLACQAFYERLEITDDEHLRPHLAEPFATLISNDTSTGTSENPGNAKREHPASSDVECSRKELLV

SEQ ID NO: 6107 - DNA, 50 bp, Cutibacterium avidum
  source 1..50: mol_type = genomic DNA
gtgttcccgtaaggaacttctggtgggcctgagtgagcgctgcgggaaca

SEQ ID NO: 6108 - DNA, 40 bp, Cutibacterium avidum
  source 1..40: mol_type = genomic DNA
cgattttctcttcttacgtggagcataggggattcgaacc

SEQ ID NO: 6109 - DNA, 40 bp, Cutibacterium avidum
  source 1..40: mol_type = genomic DNA
cgattttctcttcttacgtcaagcataggggattcgaacc

SEQ ID NO: 6110 - DNA, 50 bp, Cutibacterium avidum
  source 1..50: mol_type = genomic DNA
ctgtgcctgtcataaacttctggtcagcctgaggcacccatcagggatca

SEQ ID NO: 6111 - protein, 489 aa, Clostridium perfringens
MKKVAKFIRTSTLDQHTSIDNQDKILDNWIEQNNCILYKTYNDEGISGTKKKFRVQWLKMLEDAKNKKFDILICKSYSRFGRNQIETLQAIKELRENKIRIVFLEDGLDSMIDSSRFGLMAWLAEEESKRTSKRIKDVFSHFKEVGKIYNCVPPYGYIYDTNKKNFVVDKNESKVVKRIFKLYLQGNGTNKIANILESEGIPTKNGGKWRGNTITNIIKNEAYLGTLVQNKTSGIEVTILKRNCHNKDEYIKHLNNHESIINEEIFIKANEIFKKNSDKVKNRSVGVRASNASLFSNLLKCGCCGSSMTIRKKKNRKPFYNCIEYEKIGLKCGHISNFIQEEFLSEYIEGKLNNLIENNFENIKIVENNSIRISLKSELNNIQKQIEKQIQLSNNLLKLYTDGIVKDIQFKLQNESISNMINSLIENKKIVEDKINSLPKENNEFKKDVISIVKIPVNKWSNAMLKEVIDKITVGVDGTIKIDWKINKI

SEQ ID NO: 6112 - DNA, 50 bp, Clostridium perfringens
  source 1..50: mol_type = genomic DNA
agacctatatacttatataaagaaactgcaatatatatctatataggtct

SEQ ID NO: 6113 - DNA, 40 bp, Clostridium perfringens
  source 1..40: mol_type = genomic DNA
tgaacctgctaataaagaaactgcaacctgtataggtctt

SEQ ID NO: 6114 - DNA, 40 bp, Clostridium perfringens; identical to SEQ ID NO: 6113
  source 1..40: mol_type = genomic DNA

SEQ ID NO: 6115 - DNA, 50 bp, Clostridium perfringens
  source 1..50: mol_type = genomic DNA
ggacccatatgaacacagaaagagactgaaatatatatgcttatatttct

SEQ ID NO: 6116 - protein, 502 aa, Pseudomonas alkylphenolica
MPIAVPYVRFSSERQSYGSSLDRQETLVANWLAHHPDYTRYERKFEDLGVSGSSGKHVEAGEMGKLLTAIDDGHFPAGTVVLVEAMDRFSRLPPMDTLNHLRSIVEAGIDLVTLDDGQRYDAKSLTSNSLLYLAMKAQAAHEFATRLSDFTVGSYAERAKEAKAGNSIKRRNPFWLTSDGELKQDGSPEALEQVFTAFSNGTPLRALAVQYAQYFGNRQSLKHALRNPAAIGHWQRTLTVEVDGKKKRILGELIPSVFKPAVSEELFYQVQKLLDNLADQPPTVARKFPLAGLLQCAECGANMVLLRQNARQQTDAVRCYRRMQSNDKCTNQKTIPVPVVGWFYWETRKPHALRAYQRTKLPENTRQRIKLEGHIALLEKRQSALWQLVSMDPDNKDAVASYGALTAEKNGCKAELASLPIVGDTPVVSMLAFYRFLNGDAFAIANLLQQDGYRIICHRDGTLEVNRSADDNPAGKVKYVGYARKYKKWTIEHPEGGTSLVP

SEQ ID NO: 6117 - DNA, 50 bp, Pseudomonas alkylphenolica
  source 1..50: mol_type = genomic DNA
tcactgcacaagttgaaattcagcctgtggaagtgtaagctatgcagtga

SEQ ID NO: 6118 - DNA, 40 bp, Pseudomonas alkylphenolica
  source 1..40: mol_type = genomic DNA
tccgatggacaagttccgcctgctgcgcgaccaccttatc

SEQ ID NO: 6119 - DNA, 40 bp, Pseudomonas alkylphenolica
  source 1..40: mol_type = genomic DNA
tccgatggacaagttccgcgtgctgcgcgaccaccttatc

SEQ ID NO: 6120 - DNA, 50 bp, Pseudomonas alkylphenolica
  source 1..50: mol_type = genomic DNA
tcacggcaggctgccacatttagggtgtggaattgtctaacatgcaggga

SEQ ID NO: 6121 - protein, 503 aa, Serratia marcescens
MPQRNNGIAYSYVRFSSKRQELGDSLRRQTEMAEEYAIKNGLKLSSKNFQDLGISAFREGKRASLVDMLAAIEEGQITAGSTIIIEALDRLSRRGIDATLETVKEILRKDAQVVSLSDGLLLTKKSLNDLQSVIRIAVAADLAHKESERKALRLRETKGQQREAALSGKPINKILPFWLQRTEAGYAFSDKAGVARQIVQLKQEGKGSNMIAKTLNRLGIAGVRTAQWNHASITKMLKNPALYGAYQTGETTKDRELIKLELVEAYYPALINKEEWLLLQSDQSKSKRGRRSANNPYSGLLRCECGGALVKRQHTVKGKLYVYHGCLNAKDGRCTQNISIKGLDGALTTILGRLEFKKKQTLSQSIHQERQQLEARINDLNSKLQVLDDIPLSVIKSIGTMESRLKEITDQIAKDEREQRGIEAVKSEKLSSITDGLELNLLLKRVLKSITVIRSGNGWAVKVLHLSGHKQNFLMVDGEIKFLSDTIALQNLLAGFREATENN

SEQ ID NO: 6122 - DNA, 50 bp, Serratia marcescens
  source 1..50: mol_type = genomic DNA
actttttaaatatgaaacaatactgtgatattgttacttaatagcaaagg

SEQ ID NO: 6123 - DNA, 40 bp, Serratia marcescens; identical to SEQ ID NO: 5103
  source 1..40: mol_type = genomic DNA

SEQ ID NO: 6124 - DNA, 40 bp, Serratia marcescens
  source 1..40: mol_type = genomic DNA
cttgctgccgaactgcatgccgatgttgttggtgcttaac

SEQ ID NO: 6125 - DNA, 50 bp, Serratia marcescens
  source 1..50: mol_type = genomic DNA
cttttcaaaacaggatacaatactccgataatgtttctgattagcaaatg

SEQ ID NO: 6126 - protein, 462 aa, Listeria monocytogenes
MKRAGIYIRVSTQEQANEGYSIGAQTDRLTKYVEAKEYKLYKKYVDAGYSGSKIDRPAMKELIEDVCNNTLDVIIVYKLDRLSRSQKDTMYLIEDIFRPNNVELISMQESFDTSTAFGNATVGMLSVFAQLERKSISERMITGRVERAKKGMYHTGGQSRPPAGYEFQNKKLVVNEYEAAAIRDLFRLFNEGLGRRSISDYLQKNYPGRNKWLPCSIDRMLKNDLYIGKVKFSGESFEGIHKPIIDDVTFFKTQKEIKKRKANNSQKYDYVALLGGLCECGICGAKMANRRSVGRKGKVYRYYRCYSKKGSPKHMMKISDCPSSAQQQDFIDEAVITKLKTLDIDSEIKKRTTPKVNNESIEKQIENINNQINKLIELFQVDSIPMEVLTKKIDKLNLEKESMKALIDKSQTVNINEFRSRLKVLENFDWDNSEKSEKRKIIEMLIHKVIVYETHIEIILIE

SEQ ID NO: 6127 - DNA, 50 bp, Listeria monocytogenes
  source 1..50: mol_type = genomic DNA
gttttacaacattactctgagatttcaaatacagataaatgttgtaaaaa

SEQ ID NO: 6128 - DNA, 40 bp, Listeria monocytogenes
  source 1..40: mol_type = genomic DNA
atgcgctacttcaccaatttcaaataaatcagtcgtcatc

SEQ ID NO: 6129 - DNA, 40 bp, Listeria monocytogenes
  source 1..40: mol_type = genomic DNA
atgcgctacttcaccaattaaaaataaatcagtcgtcatc

SEQ ID NO: 6130 - DNA, 50 bp, Listeria monocytogenes
  source 1..50: mol_type = genomic DNA
cttttaaaaggaaactctgagataaaaaatacgaagttctcttcaaaaaa

SEQ ID NO: 6131 - protein, 462 aa, Listeria monocytogenes
MKRAGIYIRVSTQEQANEGYSIGAQTDRLTKYVEAKEYKLYKKYVDAGYSGSKIDRPAMKELIEDVCNNTLDVIIVYKLDRLSRSQKDTMYLIEDIFRPNNVELISMQESFDTSTAFGNATVGMLSVFAQLERKSISERMITGRVERAKKGMYHTGGQSRPPAGYEFQNKKLVVNEYEAAAIRDLFRLFNEGLGRRSISDYLQKNYPGRNKWLPCSIDRMLKNDLYIGKVKFSGESFEGIHKPIIDDVTFFKTQKEIKKRKANNSQKYDYVALLGGLCECGICGAKMANRRSVGRKGKVYRYYRCYSKKGSPKHMMKISDCPSSAQQQDFIDEAVITKLKTLDIDSEIKKRTTSKVNNESIEKQIDNINNQINKLIELFQVDSIPMEVLTKKIDKLNSEKESMKALIDKSQTVNINEFRSRLKVLENFDWDNSEKSEKRKIIEMLIHKVIVYERHIEIILIE

SEQ ID NO: 6132 - DNA, 50 bp, Listeria monocytogenes; identical to SEQ ID NO: 6127
  source 1..50: mol_type = genomic DNA

SEQ ID NO: 6133 - DNA, 40 bp, Listeria monocytogenes; identical to SEQ ID NO: 6128
  source 1..40: mol_type = genomic DNA

SEQ ID NO: 6134 - DNA, 40 bp, Listeria monocytogenes; identical to SEQ ID NO: 6129
  source 1..40: mol_type = genomic DNA

SEQ ID NO: 6135 - DNA, 50 bp, Listeria monocytogenes; identical to SEQ ID NO: 6130
  source 1..50: mol_type = genomic DNA

SEQ ID NO: 6136 - protein, 462 aa, Listeria monocytogenes
MKRAGIYIRVSTQEQANEGYSIGAQTDRLTKYVEAKEYKLYKKYVDAGYSGSKIDRPAMKELIEDVCNNTLDVIIVYKLDRLSRSQKDTMYLIEDIFRPNNVELISMQESFDTSTAFGNATVGMLSVFAQLERKSISERMITGRVERAKKGMYHTGGQSRPPAGYEFQNKKLVVNEYEAAAIRDLFRLFNEGLGRRSISDYLQKNYPGRNKWLPCSIDRMLKNDLYIGKVKFSGESFEGIHKPIIDDVTFFKTQKEIKKRKANNSQKYDYVALLGGLCECGICGAKMANRRSVGRKGKVYRYYRCYSKKGSPKHMMKISDCPSSAQQQDFIDEAVITKLKTLDIDSEIKKRTTPKVNNESIEKQIENINNQINKLIELFQVDSIPMEVLTKKIDKLNSEKESMKALIDKSQTVNINEFRSRLKVLENFDWDNSEKSEKRKIIEMLIHKVIVYETHIEIILIE

SEQ ID NO: 6137 - DNA, 50 bp, Listeria monocytogenes; identical to SEQ ID NO: 6127
  source 1..50: mol_type = genomic DNA

SEQ ID NO: 6138 - DNA, 40 bp, Listeria monocytogenes; identical to SEQ ID NO: 4363
  source 1..40: mol_type = genomic DNA

SEQ ID NO: 6139 - DNA, 40 bp, Listeria monocytogenes
  source 1..40: mol_type = genomic DNA
atgcgctacttcaccaattaaaaataaatcagtcgtcatt

SEQ ID NO: 6140 - DNA, 50 bp, Listeria monocytogenes; identical to SEQ ID NO: 6130
  source 1..50: mol_type = genomic DNA

SEQ ID NO: 6141 - protein, 612 aa, Azospirillum oryzae
MTLAFSYIRMSTPEQLKGDSLRRQLERSRRLAEARGWTLDETFRDLGKSAYRGTHIESGAFGEFLERVRAGKVPTGSVLIVESLDRLSRETVPVALQTFLGIINAGLVLVTLDSEPPREFRADSANVTFDLMLSILELSRAHAESRRKSDLLKPAWENKRRQAREDKKPLTRRLPMWIRIVDGQFEIIPERAEVVREIFELSVAGIGREKLVKLLNGRGIPAPGGGEWGKSGISHILDTPAVIGRFQPSETYYENGRKLRRPVGDIIEGYFPPVIPVDLYNRAHAARQSRSLGYGGRTGWTFSNIFRGLCYCGACGGKMEYFNKGNNLEKGGRYFMCASVKRGSGCQERVTYRYVHFERAFLDNCHHFDFSRLNAAAASDLQHVRERIAELALEQTDLNKRYATILELAETNGLSDRIRTRVAELETALDLNAAEQDKLRVKEATLAHSGQSDTIRQLLEVRGRMETATGEDLYRIRAQLSAMIREFTVGIVFWNGIATVAVGNSGMATPFMALYMFNKAGKLLIRTGLEFGPSTDQHAVPVGDIGTGTPEELQERLRAVDATLKAVSALKARMEPTIPEAERETGMERFKARWGDMDPLPASASLVLEAPG

SEQ ID NO: 6142 - DNA, 50 bp, Azospirillum oryzae
  source 1..50: mol_type = genomic DNA
aagggtgatatcggccagaacatgttgacgtgctggcctattccacccca

SEQ ID NO: 6143 - DNA, 40 bp, Azospirillum oryzae
  source 1..40: mol_type = genomic DNA
gaccgccgtctccgtcttgttgacgtgctggccgccgggg

SEQ ID NO: 6144 - DNA, 40 bp, Azospirillum oryzae
  source 1..40: mol_type = genomic DNA
gaccgccgtctccgtcttgtggacgtgctggccgccgggg

SEQ ID NO: 6145 - DNA, 50 bp, Azospirillum oryzae
  source 1..50: mol_type = genomic DNA
aagggttataatgtccatagcaggtggatgggctggggtgacccacccta

SEQ ID NO: 6146 - protein, 628 aa, Bacteroides uniformis
MKAAFLIRCSTKNQDLNRQTRDLTRLAKSMGYEYDLENLVYGEKITGKDDVTKKNRDSIDRLLRAAKEQRFNVVLVSEVSRMSRDPASGRIYVRLLINMNIPVYFKDIDLWTINPETGKKVRDAELVIGAAFDAAWKYLKSMKTQIASARRNELDNNRISIGQPYFGYKRYEGTDKSKKNQIVVNEEEAEVVQAVYNEYLKEGATLKSTALAITNMYGEKLNRKFSLGTIEHILTYESYATGIKKVNLKDPDTDEVEVFDVSTPIIIDKELYEAATNKRKKNRVKDEPYPNQQVYLLSKLIKCPDCGYTLTPRRKAGEFGQTYRLVNGKPAVSWLCMSGINNITDCTNRTSIANEKLEPIIWELVKKELIGYANMNDEKREEQIRECEEKIEYQNYSIQNFTKEIDKLKKRLSTAYQFSINAAEMAGDDEDMRTMAMEEFNRTAKGVRQEMKNFEKSIEQAKGELEKLRDLKTFYSQPTLPKDYLEQIEGNFTEKRNLVKQLITKIVPYRITTFKKKERESGVKTCNKMITVKNGAVLLEVYTIGGVYNVFYNANSKFQVKTAYYVHGEYATFQNGIRKYPAYDEGEYFVISNANMVMETDDIDEVVTVNEFVDIAIANNWVIEYQYQ

SEQ ID NO: 6147 - DNA, 50 bp, Bacteroides uniformis
  source 1..50: mol_type = genomic DNA
tggttaaagtgtttattctgttgttcaatataaagaaatcacttgcatag

SEQ ID NO: 6148 - DNA, 40 bp, Bacteroides uniformis
  source 1..40: mol_type = genomic DNA
acggctgtactctggcagttcatcaagatataaaattccg

SEQ ID NO: 6149 - DNA, 40 bp, Bacteroides uniformis
  source 1..40: mol_type = genomic DNA
acggctgtactctggcagtgaatcaagatataaaattccg

SEQ ID NO: 6150 - DNA, 50 bp, Bacteroides uniformis
  source 1..50: mol_type = genomic DNA
tgaataaaggtgacaatctttggtgaaatctaaagagctattgtgcatag

SEQ ID NO: 6151 - protein, 628 aa, Phocaeicola vulgatus
MKAAFLIRCSTKNQDLNRQTRDLTRLAKSMGYEYDLENLVYGEKITGKDDVTKKNRDSIDRLLRAAKEQRFNVVLVSEVSRMSRDPASGRIYVRLLINMNIPVYFKDIDLWTINPETGKKVRDAELVIGAAFDAAWKYLKSMKTQIASARRNELDNNRISIGQPYFGYKRYEGTDKSKKNQIVVNEEEAEVVQAVYNEYLKEGATLKSTALAITNMYGEKLNRKFSLGTIEHILTYESYATGIKKVNLKDPDTDEVEVFDVSTPIIIDKELYEAATNKRKKNRVKDEPYPNQQVYLLSKLIKCPDCGYTLTPRRKAGEFGQTYRLVNGKPAVSWFCMSGINNITNCTNRTSIANEKLEPIIWELVKKELIGYANMNDEKREEQIRECEEKIEYQNYSIQNFTKEIDKLKKRLSTAYQFSINAAEMAGDDEDMRTMAMEEFNRTAKGVRQEMKNFEKSIEQAKGELEKLRDLKTFYSQPTLPKDYLEQIEGNFTEKRNLVKQLITKIVPYRITTFKKKERESGVKTCNKMITVKNGAVLLEVYTIGGVYNVFYNANSKFQVKTAYYVHGEYATFQNGIRKYPAYNEGEYFVISNANMVMETDDIDEVVTVNEFVDIAIANNWVIEYQYI

SEQ ID NO: 6152 - DNA, 50 bp, Phocaeicola vulgatus; identical to SEQ ID NO: 6147
  source 1..50: mol_type = genomic DNA

SEQ ID NO: 6153 - DNA, 40 bp, Phocaeicola vulgatus
  source 1..40: mol_type = genomic DNA
tctgttaaattccggcaactcgtctagaaagagcaaaccg

SEQ ID NO: 6154 - DNA, 40 bp, Phocaeicola vulgatus
  source 1..40: mol_type = genomic DNA
tctgttaaattccggcaacgagtctagaaagagcaaaccg

SEQ ID NO: 6155 - DNA, 50 bp, Phocaeicola vulgatus; identical to SEQ ID NO: 6150
  source 1..50: mol_type = genomic DNA

SEQ ID NO: 6156 - protein, 570 aa, Pseudomonas aeruginosa
MPRLISYLRMSTSEQLRGFSLERQRKLIAEFAAKNDLSVEEENTLEDIGRSSFSDDAQQKELTRFFENLNAGKYEPGDVFALENIDRLTRRGPIDALMKVNQIISKGLKLAIISDKEQRILEEIDVFSIITLSIDASRANKESQVKSDKGLFNWQEKRNLAASQKLAMTAQAPAWLDTEIFYIFDEEKKKNIKRRKYVLNEEKAETVRLIFDLYLSGNGALKIKNILNERNISTFKNAPYWEPSIITKILKNPATYGLYQPKKQGTGKRDLIAAGEPINDYFPPVITREIFEQCERIREGNGTRKGRKGKLFTNLFTGLLTCQKCSGPIHLINPGIDKRNKVQKSIYYLVCKRAKFTKECSTKRVRYDDFETALLKAIQEINLADVLNENNPLETLIKKQRSKETEINKKKKLIENFQRQFLENDGDLPAFMISQAKDAEISIKELEDQQREIASEIAQLNIYNSNVDNAIEELKEKPDYETRSKINLLFHEIIKNISLDVENQFYTIRFKNGVLRVVTAAGFVVTTEHQTTAEMAEIMRIEGTQDIPAEIANDPEKLIEYLRQFDFVDH

SEQ ID NO: 6157 - DNA, 50 bp, Pseudomonas aeruginosa
  source 1..50: mol_type = genomic DNA
tacaggttaaatgtgtacaacttgatcaagtcgggtctataatacctgta

SEQ ID NO: 6158 - DNA, 40 bp, Pseudomonas aeruginosa; identical to SEQ ID NO: 4683
  source 1..40: mol_type = genomic DNA

SEQ ID NO: 6159 - DNA, 40 bp, Pseudomonas aeruginosa; identical to SEQ ID NO: 4684
  source 1..40: mol_type = genomic DNA

SEQ ID NO: 6160 - DNA, 50 bp, Pseudomonas aeruginosa
  source 1..50: mol_type = genomic DNA
tataggaaaaggtagtaaaacttggccaggtgtggtggcttacacctgta

SEQ ID NO: 6161 - protein, 570 aa, Pseudomonas aeruginosa
MARLISYLRMSTSEQLRGFSLERQRKLIAEFAAKNGLSVEEENTLEDIGRSSFSDDAQQKELAKFFENLNAGKYEPGDVFALENIDRLTRRGPVDAILKVNQIISKGLKLAIISGNEQRIIEDVNDVFTIINLSIDASRANKESKNKSDKGLSNWQEKRNLAASQKIAMTAQAPAWLDTEIFYIFDEEKKKNIKRRKYVLNEEKAEAVRLIFDLYLSGNGALKIKNILNERSIPTFKGAEYWEPSIITKIIKNPATFGLYQPKKQGTGKRDLIAAGEPINDYFPAVITRDLFEQCERIREGNGTRKGRKGKLFTNLFTGLLTCSKCDGPVHLINPGIDKRNKVQKSIYYLVCKRAKFTKECTTKRVRYDDFETALLKAIQEINLADILNENNPLEILIKKQRSKETEINKKKKLIENFQRQFLENDGDLPAFMISQAKDAEISIKELEEEQREIAGEIAQLNVYNSNVENAIEELKENADYETRSKINLLFHEIIKNISLDTENQFYAIRFKNGVLRLISAAGFVLTTDEQTQADINAILQSIEGPDIPREIATDAEKLIEYLKAREVVE

SEQ ID NO: 6162 - DNA, 50 bp, Pseudomonas aeruginosa
  source 1..50: mol_type = genomic DNA
tacaggttaaatgtgtacaacttgatcaagtccggtctataatacctgta

SEQ ID NO: 6163 - DNA, 40 bp, Pseudomonas aeruginosa; identical to SEQ ID NO: 4693
  source 1..40: mol_type = genomic DNA

SEQ ID NO: 6164 - DNA, 40 bp, Pseudomonas aeruginosa; identical to SEQ ID NO: 4694
  source 1..40: mol_type = genomic DNA

SEQ ID NO: 6165 - DNA, 50 bp, Pseudomonas aeruginosa; identical to SEQ ID NO: 6160
  source 1..50: mol_type = genomic DNA

SEQ ID NO: 6166 - protein, 554 aa, Pseudomonas aeruginosa
MARLISYLRMSTSEQLRGFSLERQRKLIADFAAKNGLSVEEENTLEDIGRSSFSDDAQQKELTRFFENLNAGKYEPGDVFALENIDRLTRRGPVDAILKVNQIISKGLKLAIISGNEQRIIEDVNDVFTIINLSIDASRANKESKNKSDKGLSNWQEKRNLAASQKIAMTAQAPAWLDTEIFYIFDEEKKKNIKRRKYVLNEEKAEAVRLIFDLYLSGNGALKIKNILNERSIPTFKGAEYWEPSIITKILKNPATFGLYQPKKQGTGKRDLIAAGEPINDYFPAVITREIFEQCERIREGNGTRKGRKGKLFTNLFTGLLKCVDCGGPVHLLNPGIDKRNKVQKSIYYLVCKRAKFTKECTTKRVRYDDFETALLKAIQEINLADILNENNPLETLIKKQRSKETEISKKKKLIENFQRQFLENDGDLPAFMISQAKEAEISIKELEEEQREISSEIAQLNVYNSNVDNAIEELKNDGTYETRAKINLVLHEIIKNINIDFELVDFAIIFKNGVKRFVNDGIVQNVYTTKSGSDQYYSEIEEILNHSITPPEK

SEQ ID NO: 6167 - DNA, 50 bp, Pseudomonas aeruginosa; identical to SEQ ID NO: 6162
  source 1..50: mol_type = genomic DNA

SEQ ID NO: 6168 - DNA, 40 bp, Pseudomonas aeruginosa; identical to SEQ ID NO: 4683
  source 1..40: mol_type = genomic DNA

SEQ ID NO: 6169 - DNA, 40 bp, Pseudomonas aeruginosa; identical to SEQ ID NO: 4684
  source 1..40: mol_type = genomic DNA

SEQ ID NO: 6170 - DNA, 50 bp, Pseudomonas aeruginosa; identical to SEQ ID NO: 6160
  source 1..50: mol_type = genomic DNA

SEQ ID NO: 6171 - protein, 571 aa, Pseudomonas aeruginosa
MARLISYLRMSTSEQLRGFSLERQRKLIADFAAKNGLSVEEENTLEDIGRSSFSDDAQQKELTRFFENLNAGKYEPGDVFALENIDRLTRRGPVDAILKVNQIISKGLKLAIISGNEQRIIEDVNDVFTIINLSIDASRANKESKNKSDKGLSNWQEKRNLASTHKIAMTAQAPAWLDTEIFYIFDEEKKKNIKRRKYVLNEEKAEAVRLIFDLYSSGNGALKIKNILNERNIPTFKGAEYWEPSIITKILKNPATFGLYQPKKQGTGKRDLIAAGEPINDYFPAVITREIFEQCERIREGNGTRKGRKGKLFTNLFTGLLTCSKCGGPVHLINPGIDKRNKVQKSIYYLVCKRAKFTKECTTKRVRYDDFEIALLKAIQEINLADILNENNPLEILVKKHRSKETEINKKKKLIENFQRQFLENDGNLPSFMISEANAAEISIKELEEEQREIASEIAQLNVYNSNVDNAIEELKEKPDYETRSKINLLFHEIIKNISLDTENQFYTVRFKNGVMRVITAAGFIATTEHQTTAEMAEIMRIEGTQDIPAEIANDPEKLIEYLRQFDFIDQ

SEQ ID NO: 6172 - DNA, 50 bp, Pseudomonas aeruginosa; identical to SEQ ID NO: 6162
  source 1..50: mol_type = genomic DNA

SEQ ID NO: 6173 - DNA, 40 bp, Pseudomonas aeruginosa; identical to SEQ ID NO: 4693
  source 1..40: mol_type = genomic DNA

SEQ ID NO: 6174 - DNA, 40 bp, Pseudomonas aeruginosa; identical to SEQ ID NO: 4694
  source 1..40: mol_type = genomic DNA

SEQ ID NO: 6175 - DNA, 50 bp, Pseudomonas aeruginosa; identical to SEQ ID NO: 6160
  source 1..50: mol_type = genomic DNA

SEQ ID NO: 6176 - protein, 475 aa, Streptococcus pneumoniae; identical to SEQ ID NO: 1481

SEQ ID NO: 6177 - DNA, 50 bp, Streptococcus pneumoniae
  source 1..50: mol_type = genomic DNA
ttagtcaaagtaattataatatttatgataagttagagttagtaacagta

SEQ ID NO: 6178 - DNA, 40 bp, Streptococcus pneumoniae
  source 1..40: mol_type = genomic DNA
atgatagaacctcctaataatattatagcacattttgtaa

SEQ ID NO: 6179 - DNA, 40 bp, Streptococcus pneumoniae
  source 1..40: mol_type = genomic DNA
atgatagaacctcctaataaaattatagcacattttgtaa

SEQ ID NO: 6180 - DNA, 50 bp, Streptococcus pneumoniae
  source 1..50: mol_type = genomic DNA
gtaggcaaaatatttataatgttcaaaatatgttagaccatggaacatta

SEQ ID NO: 6181 - protein, 555 aa, Enterobacter hormaechei
MCVAIGYMRYSSKLQGAGSTIHRQKSLINKWVEDQKTHHGKVYEVKFYTDKGLSGWTGENLLAGALGRLIEEVEAGGYPEGTPIILESIDRLSRQGHEEATAILRRLTSTGCVVHSILDRQVIQRSDLKTFIGAMQIIAVAERGREESDIKSERVSSSKERNYELAKLGKKLVTRNLPGWIYLDQKGKMQIDPAKQKLVKEIFEMRLAGHTYQGIAETMTNRGEPVLNERKGAQRWLPNSIRTLLHSRSVIGVLPASKVNDKYKEIEDYFPSAITKDLFYAVNDLNVPAVRSREKKQYPETVFLFKGLVKCRYCKGNVFLNGAKPGYWGRIRCIGHHDKVCDAPSLPRYDFEQSLITRMFPLLKSMDVSTEENPVAVLQAKIDHLTNILEGYYDDLEEIPREDKPRRKSINERISKRANEKEEYERQLVVVRRKMEVRTENTLSDLNYDDYSDRLKMQLVISRNIERIVLDSLFDKVHIKLVNGNALMNFPLYGDVDGSRLVITAKENTGITDVERILGLDDAMPTVYNLAPSSGEFMDDREFPEVEPDYPNEEQ

SEQ ID NO: 6182 - DNA, 50 bp, Enterobacter hormaechei
  source 1..50: mol_type = genomic DNA
aaaatactatgattcatctaaaagaagtcttagaatcattatagtattta

SEQ ID NO: 6183 - DNA, 40 bp, Enterobacter hormaechei
  source 1..40: mol_type = genomic DNA
acccggtgttttctaaaagaagttttcgtcatggtatttt

SEQ ID NO: 6184 - DNA, 40 bp, Enterobacter hormaechei
  source 1..40: mol_type = genomic DNA
acccggtgttttctaaaagatgttttcgtcatggtatttt

SEQ ID NO: 6185 - DNA, 50 bp, Enterobacter hormaechei
  source 1..50: mol_type = genomic DNA
aaaatacaatcataaatctaaaagatattatagaattagactattttata

SEQ ID NO: 6186 - protein, 567 aa, Enterobacter cancerogenus
MPSIRRFERFKAMCVAIGYMRYSSKLQGGGSTIHRQKSLINKWVEDQKTHHGKVYEVKFYTDKGLSGWTGENLLAGALGRLIEEVETGGYPEGTPIILESIDRLSRQGHEEATAILRRLTSTGCVVHSILDRQVIHRSDLKTFIGAMQIIAVAERGREESDIKSERVSSSKKRNYELAKLGKKLVTKNLPGWIYLDQKGKMQIDPVKQKLVQEIFEMRLAGHTYQGIAEAMTNRGEPVLNERKGAQRWLPNSIRTLLHSRSVIGVLPASKVNEEYKEIEDYFPSAITKDLFYAVNDLNVPAVRSREKKQYPETVFLFKGLVKCRYCKGNVFMNGAKPGYWGRIRCIGHHDKVCDAPSLPRYDFEQSLITRIFPLLKSMDVRTEKNPVAVLQAKIDHLTNILEGYYDDLEEIPREDKPRRKTINERISKRANEKEEYERQLVVVRRKMEVRIANTLSDLNYDDYSDRLKMQLVISRNIERIVLDSLFDKVHIKLVNGNALMNFPLYGDVDGSRLVITAKENTGITDVERILGLDDAMPTVYNLAPSSGEFMDDREFPEVEPDYPNEEQ

SEQ ID NO: 6187 - DNA, 50 bp, Enterobacter cancerogenus
  source 1..50: mol_type = genomic DNA
aaaatactatgatttatctaaaagaagtcttagaatcattatagtattta

SEQ ID NO: 6188 - DNA, 40 bp, Enterobacter cancerogenus
  source 1..40: mol_type = genomic DNA
acccggtgttttctaaaagaagttttcttcatggtatttt

SEQ ID NO: 6189 - DNA, 40 bp, Enterobacter cancerogenus
  source 1..40: mol_type = genomic DNA
acccggtgttttctaaaagatgttttcttcatggtatttt

SEQ ID NO: 6190 - DNA, 50 bp, Enterobacter cancerogenus; identical to SEQ ID NO: 6185
  source 1..50: mol_type = genomic DNA

SEQ ID NO: 6191 - protein, 459 aa, Clostridium sporogenes
MIVKDLSRLSRNYTDAGSLIENLFVQMNVRFISLAEGVDSYLNPDSVSSILVPITNVMNDQYCYQTSKKIRQVFDYKKRNGEFIGSYAPMVHQRPNDKHALLVDHEAAEVVKKIFSMCLSGMTVRAIVNHLNDHGVMCPSVYKQSQGLKYKCPNGQTQPMWSTITISNMLKNPVYVGDMAQGRNRVKSYKIHKIEAVPEKDWIVVPNTHEPIIDREAFEKVKQLLKRDTRTSPKQKQLYLFSGFLRCADCGRAMSRIASKELYVYYQCGTYKSLSKKACTMHSIKSTRLEAAVLYAIRQQVHLAVSYSAIVSKINLAPLKKSQSIRLNELITAKEKELTKIMRYKQALYQDWKDGHITHNDYRHMSEDYEQQNEAIGTVIANLKKERDELENGIDTENPFLATFRKYENIDKLTREILIELVDHIKVYEGGDISIRFKFADELRRIIQYIEVNSHLQVG

SEQ ID NO: 6192 - DNA, 50 bp, Clostridium sporogenes; identical to SEQ ID NO: 2717
  source 1..50: mol_type = genomic DNA

SEQ ID NO: 6193 - DNA, 40 bp, Clostridium sporogenes
  source 1..40: mol_type = genomic DNA
aatctggtgcgtatagacttatattaataagaccctatag

SEQ ID NO: 6194 - DNA, 40 bp, Clostridium sporogenes
  source 1..40: mol_type = genomic DNA
aatctggtgcgtatagactgttattaataagaccctatag

SEQ ID NO: 6195 - DNA, 50 bp, Clostridium sporogenes
  source 1..50: mol_type = genomic DNA
ggctttcctttctgttgacactcagttcagcccagaagtacaggaaaagt

SEQ ID NO: 6196 - protein, 559 aa, Clostridium sporogenes
MARTKNRETNTAVSQFSYNPTRWNLAKYIRLSKEDLNRGKDDSNSVTNQKKLLDDYYRQHLDEFESAETYVDDGCTGTDTNRADFQRLLADIYAKKVNCVIVKDLSRLSRNYTDAGSLIENLFVQMNVRFISLAEGVDSYLNPDSVSSILVPITNVMNDQYCYQTSKKIRQVFDYKKRNGEFIGSYAPYGYIKDPNDKHALLVDHEAAEVVKKIFSMCLSGMTVRAIVNHLNDHGVMCPSVYKQSQGLKYKCPNGQTQPMWSTITISNMLKNPVYVGDMAQGRNRVKSYKIHKIEAVPEKDWIVVPNTHEPIIDREAFEKVKQLLKRDTRTSPKQKQLYLFSGFLRCADCGRAMSRIASKELYVYYQCGTYKSLSKKACTMHSIKSTRLEAAVLYAIRQQVHLAVSYSAIVSKINLAPLKKSQSIRLNELITAKEKELTKIMRYKQALYQDWKDGHITHNDYRHMSEDYEQQNEAIGTVIANLKKERDELENGIDTENPFLATFRKYENIDKLTREILIELVDHIKVYEGGDISIRFKFADELRRIIQYIEVNSHLQVG

SEQ ID NO: 6197 - DNA, 50 bp, Clostridium sporogenes; identical to SEQ ID NO: 2717
  source 1..50: mol_type = genomic DNA

SEQ ID NO: 6198 - DNA, 40 bp, Clostridium sporogenes; identical to SEQ ID NO: 6193
  source 1..40: mol_type = genomic DNA

SEQ ID NO: 6199 - DNA, 40 bp, Clostridium sporogenes; identical to SEQ ID NO: 6194
  source 1..40: mol_type = genomic DNA

SEQ ID NO: 6200 - DNA, 50 bp, Clostridium sporogenes; identical to SEQ ID NO: 6195
  source 1..50: mol_type = genomic DNA

SEQ ID NO: 6201 - protein, 559 aa, Veillonellaceae bacterium; identical to SEQ ID NO: 2716

SEQ ID NO: 6202 - DNA, 50 bp, Veillonellaceae bacterium; identical to SEQ ID NO: 2717
  source 1..50: mol_type = genomic DNA

SEQ ID NO: 6203 - DNA, 40 bp, Veillonellaceae bacterium
  source 1..40: mol_type = genomic DNA
tgttagtcccgtattacaatatagaaacaatgacaaattt

SEQ ID NO: 6204 - DNA, 40 bp, Veillonellaceae bacterium
  source 1..40: mol_type = genomic DNA
tgttagtcccgtattacaagttagaaacaatgacaaattt

SEQ ID NO: 6205 - DNA, 50 bp, Veillonellaceae bacterium; identical to SEQ ID NO: 6195
  source 1..50: mol_type = genomic DNA

SEQ ID NO: 6206 - protein, 559 aa, Clostridium sporosphaeroides; identical to SEQ ID NO: 6196

SEQ ID NO: 6207 - DNA, 50 bp, Clostridium sporosphaeroides; identical to SEQ ID NO: 272
  source 1..50: mol_type = genomic DNA

SEQ ID NO: 6208 - DNA, 40 bp, Clostridium sporosphaeroides
  source 1..40: mol_type = genomic DNA
attcttgatggtgcggtaatatggtgataacagaaaatct

SEQ ID NO: 6209 - DNA, 40 bp, Clostridium sporosphaeroides
  source 1..40: mol_type = genomic DNA
attcttgatggtgcggtaagttggtgataacagaaaatct

SEQ ID NO: 6210 - DNA, 50 bp, Clostridium sporosphaeroides; identical to SEQ ID NO: 6195
  source 1..50: mol_type = genomic DNA

SEQ ID NO: 6211 - protein, 426 aa, Clostridium botulinum
MARTKNRETNTAVSQFSYNPTRWNLAKYIRLSKEDLNRGKDDSNSVTNQKKLLDDYYRQHLDEFESAETYVDDGCTGTDTNRADFQRLLADIYAKKVNCVIVKDLSRLSRNYTDAGSLIENLFVQMNVRFISLAEGVDSYLNPDSVSSILVPITNVMNDQYCYQTSKKIRQVFDYKKRNGEFIGSYAPYGYIKDPNDKHALLVDHEAAEVVKKIFSMCLSGMTVRAIVNHLNDHGVMCPSVYKQSQGLKYKCPNGQTQPMWSTITISNMLKNPVYVGDMAQGRNRVKSYKIHKIEAVPEKDWIVVPNTHEPIIDREAFEKVKQLLKRDTRTSPKQKQLYLFSGFLRCADCGRAMSRIASKELYVYYQCGTYKSLSKKPALCTLLKAQGLKRLYSMQSGNRYILQSAIPPLYQKLTWLRSKKASRYG

SEQ ID NO: 6212 - DNA, 50 bp, Clostridium botulinum; identical to SEQ ID NO: 2717
  source 1..50: mol_type = genomic DNA

SEQ ID NO: 6213 - DNA, 40 bp, Clostridium botulinum; identical to SEQ ID NO: 6193
  source 1..40: mol_type = genomic DNA

SEQ ID NO: 6214 - DNA, 40 bp, Clostridium botulinum; identical to SEQ ID NO: 6194
  source 1..40: mol_type = genomic DNA

SEQ ID NO: 6215 - DNA, 50 bp, Clostridium botulinum; identical to SEQ ID NO: 6195
  source 1..50: mol_type = genomic DNA

SEQ ID NO: 6216 - protein, 518 aa, Escherichia coli
MKKAVYCYARVSSRGQAKDGYGMSRQQTMLRDYVAAYDDSLHNRGYELGSVNWLFAEGISAYSGKNIEDGSVLKSFIDDVLERKIINAVLVIENLDRFSRAEPIKAANLFLNLITAGCDIHEVETETIHHSSSDLSIITGGLQRAHNESKRKARLSIKNWDERIKNAIDGKAVLTNRVPSWLEVKNNGYVIKEGEKEKYNLIFQMYADGFGPAAIRDVLKERSMLINDSEPTIAHLNKIIKDERLIGKFNSTGRKKLSGLVIYPVVVDLSLFHIVDQLRKQRNPIGKIHRKANNLFAGLCICMECGRYVQVNSIESNGESYFRCGGSLVKIDRCQERGFKYKFFENALLQHIRNFDFSSLNANESEVQIRVNHLSMELLTHIKYKDEILQDIEKEDIPDPNDRRILKNLQKKIGEIESEISNLKHLNVNVSAFDELKQYSEELRDPTNVDIRLDFNIKIRRVIKNIIVKRYSDAIFLVVNYIAINEKQAIVINSKNGEILYMGVQNDDLKTVEHLIGN

SEQ ID NO: 6217 - DNA, 50 bp, Escherichia coli
  source 1..50: mol_type = genomic DNA
tacagtaataaactaactatcatcaccatgatatactgctttttactgta

SEQ ID NO: 6218 - DNA, 40 bp, Escherichia coli; identical to SEQ ID NO: 918
  source 1..40: mol_type = genomic DNA

SEQ ID NO: 6219 - DNA, 40 bp, Escherichia coli; identical to SEQ ID NO: 919
  source 1..40: mol_type = genomic DNA

SEQ ID NO: 6220 - DNA, 50 bp, Escherichia coli
  source 1..50: mol_type = genomic DNA
tacaattttcattaatctatcatctacgtgatattcacaatattattgta

SEQ ID NO: 6221 - protein, 518 aa, Cronobacter sakazakii; identical to SEQ ID NO: 6216

SEQ ID NO: 6222 - DNA, 50 bp, Cronobacter sakazakii; identical to SEQ ID NO: 6217
  source 1..50: mol_type = genomic DNA

SEQ ID NO: 6223 - DNA, 40 bp, Cronobacter sakazakii; identical to SEQ ID NO: 5718
  source 1..40: mol_type = genomic DNA

SEQ ID NO: 6224 - DNA, 40 bp, Cronobacter sakazakii; identical to SEQ ID NO: 5719
  source 1..40: mol_type = genomic DNA

SEQ ID NO: 6225 - DNA, 50 bp, Cronobacter sakazakii; identical to SEQ ID NO: 6220
  source 1..50: mol_type = genomic DNA

SEQ ID NO: 6226 - protein, 518 aa, Citrobacter koseri; identical to SEQ ID NO: 6216

SEQ ID NO: 6227 - DNA, 50 bp, Citrobacter koseri; identical to SEQ ID NO: 6217
  source 1..50: mol_type = genomic DNA

SEQ ID NO: 6228 - DNA, 40 bp, Citrobacter koseri
  source 1..40: mol_type = genomic DNA
ggcgataatgccgatcaccaccatcagttcgataagcgta

SEQ ID NO: 6229 - DNA, 40 bp, Citrobacter koseri
  source 1..40: mol_type = genomic DNA
ggcgataatgccgatcacctacatcagttcgataagcgta

SEQ ID NO: 6230 - DNA, 50 bp, Citrobacter koseri; identical to SEQ ID NO: 6220
  source 1..50: mol_type = genomic DNA

SEQ ID NO: 6231 - protein, 516 aa, Bacillus cereus
MYRPESLDVCIYLRKSRKDVEEERRAIEEGSSYNALERHRKRLFAIAKAENHNIIDIFEEVASGESIQERPQMQQLLRKLEGNEIDGVLVIDLDRLGRGDMLDAGMIDRAFRYSSTKIITPTDVYDPDDESWELVFGIKSLISRQELKSITKRLQNGRIDSVKEGKHIGKKPPYGYLKDENLRLYPDPEKAWIVKKIFELMCDGKGRQMIAAELDRLGIDPPVTKRGAWDSSTITSIIKNEVYTGVIVWGKFKHKKRNGKYTRHKNPQEKWIMYENAHEPIISKELFDAANEAHSSRHKPAVITSKKLTNPLAGILKCKLCGYTMLIQTRKDRPHNYLRCNNPACKGKQKQSVFNLVEEKLLYSLQQIVDEYQAQKVEEVEIDDSKLISFKEKAIISKEKELKELQTQKGNSHDLLEQGIYTVEIFLERQKNLVERITSIENDIEVLQKEIEMEQVKEHNKTEFIPALKTVIESYHKTTNVELKNQLLKTILSTVTYYRHPDWKTNEFEIQVYFKI

SEQ ID NO: 6232 - DNA, 50 bp, Bacillus cereus
  source 1..50: mol_type = genomic DNA
cgtgtacatggtggagtattaaactggtttaactctctaccatatataca

SEQ ID NO: 6233 - DNA, 40 bp, Bacillus cereus
  source 1..40: mol_type = genomic DNA
tgtactgtggcgattgtactgattcacttccccataccca

SEQ ID NO: 6234 - DNA, 40 bp, Bacillus cereus
  source 1..40: mol_type = genomic DNA
tgtactgtggcgattgtactaattcacttccccataccca

SEQ ID NO: 6235 - DNA, 50 bp, Bacillus cereus
  source 1..50: mol_type = genomic DNA
cttgtagatcccaaagtattacagtattttaaatatcaactatatttaca

SEQ ID NO: 6236 - protein, 501 aa, Clostridium chromiireducens
MIAIYARQSVDKKDSISIESQIDFCKKEIIENEEIKVYIDKGFSGKNTERPQFQSMLDDIKSGIISRVIVYKLDRVSRNLLDFSNIIETFKKYNIGFTSCNEKFDTTTAMGNAMLSITMVFAQLERETIQKRITDSYYSRGSKGFYMGGKIPFGFDKVEARIDGKKTSMFEVNSEQAPITEKMYELYANTNMSLGEISRYFNEKNILSAEGKAWDNGKISRMLRNPIYVNADADIYLYYKNKGCIISNEISDFIGTNGLYLYGKRDRNKNKYNNVENQTISLALHKGIVDSNTFLLCQYKLDNNKQIKNSGKGKHTWLSGIIKCGYCGYAVSAVTNYKGQKYFNCRGKTNLNICSGHSRTLYVEDIESMIEEEIFSKADELRNTKMKVAKENKETNEIKLKILDIDNKIENLFNALEEGNSLTIQYINERITKLQNTKNLLMEESKKIIIVNNAKKSTEEILKNIDNWNELDFDAKKQVSRLFINKILLKDDEIKIEWNEI

SEQ ID NO: 6237 - DNA, 50 bp, Clostridium chromiireducens
  source 1..50: mol_type = genomic DNA
ttgtttactattgtatctactgttgattctgtggatataaaagtaaacta

SEQ ID NO: 6238 - DNA, 40 bp, Clostridium chromiireducens
  source 1..40: mol_type = genomic DNA
ggctatccaatggaatgttgattctgttgattggaaggag

SEQ ID NO: 6239 - DNA, 40 bp, Clostridium chromiireducens
  source 1..40: mol_type = genomic DNA
ggctatccaatggaatgttctttctgttgattggaaggag

SEQ ID NO: 6240 - DNA, 50 bp, Clostridium chromiireducens
  source 1..50: mol_type = genomic DNA
ttttttacttcctaatctcctgttctttgtgttgatgacttccaaaatta

SEQ ID NO: 6241 - protein, 501 aa, Clostridium perfringens
MKRIAIYSRKSVYIEGSISIETQINMCKEYMLKKFKDCEFKIFEDEGFSGGNTNRPAFQKMLKLAALKQIDVVVCYKIDRIARNTLDFLNILEMFKKSSVELISITEGFDPNTQMGKVMLTLLASFAEMERSNIQQRVKDSMFSLAQKGKWTGGAPPLGFKVKESGGIEIDNKNLILDVFNMKFKKYKNTEIIEYIESKYNHKFVNTTLASTLRKAIYVKSSKEVSIYLKSKGYKILREENNINSYHTYKNDNIDYAIVNNIEGFIEPNIWIAVNKSMDENSNGETNRFSENFWLTKTLRCKYCGKTYCGQTKIVKSKYTTKDGVIKEYTGNYEYYMCRDMLKGRLKTCENTKRIKRETLEVKIEELIYMLQDKKFFEKHYGNKQIDTNFELKEIESKIGKINKTIDNLTNKISLLSNDAAMIFIDKIESLVEEKKILNNRIIELELQSLNNLNSKEDFIYENILKFNKNLSVEQKRNIAMNIFKKIIYDYKTDKFEVSFN

SEQ ID NO: 6242 - DNA, 50 bp, Clostridium perfringens
  source 1..50: mol_type = genomic DNA
tttgtttaatttaaaattaatgcacttccactaatattcattttaacaaa

SEQ ID NO: 6243 - DNA, 40 bp, Clostridium perfringens
  source 1..40: mol_type = genomic DNA
tttcatatccattgaaacacttccaccagtagcgtggaag

SEQ ID NO: 6244 - DNA, 40 bp, Clostridium perfringens
  source 1..40: mol_type = genomic DNA
tttcatatccattgaaacaactccaccagtagcgtggaag

SEQ ID NO: 6245 - DNA, 50 bp, Clostridium perfringens
  source 1..50: mol_type = genomic DNA
tttttttatacacatagtaatgcaactccgctataagattctttaagaaa

SEQ ID NO: 6246 - protein, 501 aa, Clostridium perfringens
MKRIAIYSRKSVYIEGSISIETQINMCKEYMLKKFKDCEFKIFEDEGFSGGNTNRPAFQKMLKLAALKQIDVVVCYKIDRIARNTLDFLNILEMFKKSSVELISITEGFDPNTQMGKVMLTLLASFAEMERSNIQQRVKDSMFSLAQKGKWTGGAPPLGFKVKESGGIEIDNKNLILDVFNMKFKKYKNTEIIEYIESKYNHKFVNTTLASTLRKPIYVKSSKEVSIYLKSKGYKILREENNINSYHTYKNDNIDYAIVNNIEGFIEPNIWIAVNKSMDENSNGETNRFSENFWLTKTLRCKYCGKTYCGQTKIVKSKYTTKDGVIKEYTGNYEYYMCRDMLKGRLKTCENTKRIKRETLEVKIEELIYMLQDKKFFEKHYGNKQIDTNFELKEIESKICKINKTIDNLTNKISLLSNDAAMIFIDKIESLVEEKKILNNRIIELELQSLNNLNSKEDFIYENILKFNKNLSVEQKRNIAMNIFKKIIYDYKTDKFEVSFN

SEQ ID NO: 6247 - DNA, 50 bp, Clostridium perfringens; identical to SEQ ID NO: 6242
  source 1..50: mol_type = genomic DNA

SEQ ID NO: 6248 - DNA, 40 bp, Clostridium perfringens; identical to SEQ ID NO: 6243
  source 1..40: mol_type = genomic DNA

SEQ ID NO: 6249 - DNA, 40 bp, Clostridium perfringens; identical to SEQ ID NO: 6244
  source 1..40: mol_type = genomic DNA

SEQ ID NO: 6250 - DNA, 50 bp, Clostridium perfringens; identical to SEQ ID NO: 6245
  source 1..50: mol_type = genomic DNA

SEQ ID NO: 6251 - protein, 523 aa, Clostridium perfringens
MSIALKVSNKKIKYKNNLGGSCMKRIAIYSRKSVYIEGSISIETQINMCKEYMLKKFKDCEFKIFEDEGFSGGNTNRPAFQKMLKLAALKQIDVVVCYKIDRIARNTLDFLNILEMFKKSSVELISITEGFDPNTQMGKVMLTLLASFAEMERSNIQQRVKDSMFSLAQKGKWTGGAPPLGFKVKESGGIEIDNKNLILDVFNMKFKKYKNTEIIEYIESKYNHKFVNTTLASTLRKPIYVKSSKEVSIYLKSKGYKILREENNINSYHTYKNDNIDYAIVNNIEGFIEPNIWIAVNKSMDENSNGETNRFSENFWLTKTLRCKYCGKTYCGQTKIVKSKYTTKDGVIKEYTGNYEYYMCRDMLKGRLKTCENTKRIKRETLEVKIEELIYMLQDKKFFEKHYGNKQIDTNFELKEIESKICKINKTIDNLTNKISLLSNDAAMIFIDKIESLVEEKKILNNRIIELELQSLNNLNSKEDFIYENILKFNKNLSVEQKRNIAMNIFKKIIYDYKTDKFEVSFN

SEQ ID NO: 6252 - DNA, 50 bp, Clostridium perfringens; identical to SEQ ID NO: 6242
  source 1..50: mol_type = genomic DNA

SEQ ID NO: 6253 - DNA, 40 bp, Clostridium perfringens; identical to SEQ ID NO: 6243
  source 1..40: mol_type = genomic DNA

SEQ ID NO: 6254 - DNA, 40 bp, Clostridium perfringens; identical to SEQ ID NO: 6244
  source 1..40: mol_type = genomic DNA

SEQ ID NO: 6255 - DNA, 50 bp, Clostridium perfringens; identical to SEQ ID NO: 6245
  source 1..50: mol_type = genomic DNA

SEQ ID NO: 6256 - protein, 520 aa, Klebsiella pneumoniae
MRTAYAYIRFSSEKQSAGDSVRRQQSLIDSWVKNNPDYILSQKTYKDEGLSAFTGKHAAGDLGRLMNDISNGSITAGDVILIESLDRLSRENISTATDRLKAILIHGVNVVTLTDQKQYTPESLNSPMDLIMSILTAQRAHEESQSKSKRMREVWAKKRTEAEESGKVITKSCPRWLTVNSDRTGFEPIPEHVESIRLMFEMRLSGKGFAGIAQALNESGRLTLTGRSKGWNQSSVQQLLSNKALIGYKIPSRKAVVNYIEIPDYFPSVIPLEQFQQVQLIGADKQGQRAANDRPMNVNLFRGVMKCAECGATVIVSGVDDKRAGYYSCSFRRLGRCNTSKPMNRGMVDEALIKGLLYSLDRLTTQGQGENPLMKLEAKRADLTERSQKLLAALEIADDVSAIATRLKAVTDEIRAIETQIKTCKDLEQVHTVQSVQGMDLTVKSQREEVQLLVKKTFREINLDGIRKTVNVYLHNGLTLLNVPVNQIVDAGEWIELLPVIGGDTVDFKDISFKAPRYLD

SEQ ID NO: 6257 - DNA, 50 bp, Klebsiella pneumoniae
  source 1..50: mol_type = genomic DNA
ggcttgcatacttattgtgaacattggtcatggttacatgattagtatgc

SEQ ID NO: 6258 - DNA, 40 bp, Klebsiella pneumoniae
  source 1..40: mol_type = genomic DNA
ccgagcacggtacggatgttggtcatcgtcaggttgacga

SEQ ID NO: 6259 - DNA, 40 bp, Klebsiella pneumoniae
  source 1..40: mol_type = genomic DNA
ccgagcacggtacggatgtttgtcatcgtcaggttgacga

SEQ ID NO: 6260 - DNA, 50 bp, Klebsiella pneumoniae
  source 1..50: mol_type = genomic DNA
tgcttgcttgttgatggtgaatatttttcttgcttaaaaaattagtttgc

SEQ ID NO: 6261 - protein, 526 aa, Klebsiella pneumoniae
MYRKFIMRTAYAYIRFSSEKQSAGDSVRRQQSLIDSWVKNNPDYILSQKTYKDEGLSAFTGKHAAGDLGRLMNDISNGSITAGDVILIESLDRLSRENISTATDRLKAILIHGVNVVTLTDQKQYTPESLNSPMDLILSILTAQRAHEESQSKSKRMREVWAKKRTEAEESGKVITKSCPRWLTVNSDRTGFEPIPEHVESIRLMFEMRLSGKGFAGIAQALNESGRLTLTGRSKGWNSSSVQQLLSNKALIGYKIPSRKAVVNYIEIPDYFPSVIPLEQFQQVQLIGADKQGQRAANDRPMNVNLFRGVMKCAECGATVIVSGVDDKRAGYYSCSFRRLGRCNTSKPMNRGMVDEALIKGLLYSLDRLTTQGQGENPLMKLEAKRADLTERSQKLLAALEIADDVSAIATRLKAVTDEIRAIETQIKTCKDLEQVHTVQSVQGMDLTVKSQREEVQLLVKKTFREINLDGIRKTVNVYLHNGLTLLNVPVNQIVDAGEWIELLPVIGGDTVDFKDINFKAPRYLD

SEQ ID NO: 6262 - DNA, 50 bp, Klebsiella pneumoniae; identical to SEQ ID NO: 6257
  source 1..50: mol_type = genomic DNA

SEQ ID NO: 6263 - DNA, 40 bp, Klebsiella pneumoniae; identical to SEQ ID NO: 6258
  source 1..40: mol_type = genomic DNA

SEQ ID NO: 6264 - DNA, 40 bp, Klebsiella pneumoniae; identical to SEQ ID NO: 6259
  source 1..40: mol_type = genomic DNA

SEQ ID NO: 6265 - DNA, 50 bp, Klebsiella pneumoniae; identical to SEQ ID NO: 6260
  source 1..50: mol_type = genomic DNA

SEQ ID NO: 6266 - protein, 526 aa, Klebsiella quasipneumoniae
MYRKFIMRTAYAYIRFSSEKQSAGDSVRRQQSLIDSWVKNNPDYILSQKTYKDEGLSAFTGKHAAGDLGRLMNDISNGSITAGDVILIESLDRLSRENISTATDRLKAILIHGVNVVTLTDQKQYTPESLNSPMDLIMSILTAQRAHEESQSKSKRMREVWAKKRTEAEESGKIITKSCPRWLTVNSDRTGFEPIPEHVESIRLMFEMRLSGKGFAGIAQALNESGRLTLTGRSKGWNQSSVQQLLSNKALIGYKIPSRKAVVNYIEIPDYFPSVIPLEQFQQVQLIGADKQGQRAANDRPMNVNLFRGVMKCAECGATVIVSGVDDKRAGYYSCSFRRLGRCNTSKPMNRGMVDEALIKGLLYSLDRLTTQGQGENPLMKLEAKRADLTERSQKLLAALEIADDVSAIATRLKAVTDEIRAIETQIKTCKDLEQVHTVQSVQGMDLTVKSQREEVQLLVKKTFREINLDGIRKTVNVYLHNGLTLLNVPVNQIVDAGEWIELLPVIGGDTVDFKDISFKAPRYLD

SEQ ID NO: 6267 - DNA, 50 bp, Klebsiella quasipneumoniae; identical to SEQ ID NO: 6257
  source 1..50: mol_type = genomic DNA

SEQ ID NO: 6268 - DNA, 40 bp, Klebsiella quasipneumoniae; identical to SEQ ID NO: 6258
  source 1..40: mol_type = genomic DNA

SEQ ID NO: 6269 - DNA, 40 bp, Klebsiella quasipneumoniae; identical to SEQ ID NO: 6259
  source 1..40: mol_type = genomic DNA

SEQ ID NO: 6270 - DNA, 50 bp, Klebsiella quasipneumoniae; identical to SEQ ID NO: 6260
  source 1..50: mol_type = genomic DNA

SEQ ID NO: 6271 - protein, 620 aa, Escherichia coli
MLFSDIILSLSEQIIMMIQSIDADSKNVKPLVQVTIYCRVSSLMQTDGYGLQRQQDAIRAYLEDFDVPKELGYEIDRDNYVLLEDAGKSAYHGYHFSKGQLGQFRQKVLDGEITCGLFIIENVDRFCRMEEYLAIQEFTNLINNGIDILEVDTGEIFSRKVRKSLNKLTVSIERAYAESERKSRISTRSWKNRKRKSLEEGIAINNNTPDWLSLSEDKQSYIVNKERVEILNEIFKMYAEGFGGTAIVNKLNKEKRYYNKTSWSTNKFYHLLRNRRLIGYLGDERHYPAVIDSILFEQVQSLLNGNVRKGKKAGTMMRSIFNGIAKCGFCGNGMICQTMTSSASYLRCIAERSKTTKCTHAKLIRYKESEQIILEHLCNINWDELKKGNSTHRDDIDVLKTQMSIITDKLQKLDLLIQETEDDDDKISLINIKNKNRKELAAIDEKISALTTNLEIPDLEVIASLKEIQDLENVELRQKVYSLLSKTVSSIECTRTDTPDPFYIFNINYIGAREKHLLIVELKNNCKVTRFVEKISDDLVTYYTPSFVVAYSNNWESGLPEIRGLQDCNGITIKAELMDCMHLFSILDRTNRGEAKVIRDWLVIPKVQEFFFHTSAYEGD

SEQ ID NO: 6272 - DNA, 50 bp, Escherichia coli
  source 1..50: mol_type = genomic DNA
agatgtaaaaatattcaaaacttcttcaagcgttgcataaaaatacatgt

SEQ ID NO: 6273 - DNA, 40 bp, Escherichia coli
  source 1..40: mol_type = genomic DNA
gtgcagcgtcaatggcttcttcaagcgttgcgtacatggt

SEQ ID NO: 6274 - DNA, 40 bp, Escherichia coli
  source 1..40: mol_type = genomic DNA
gtgcagcgtcaatggcttctgcaagcgttgcgtacatggt

SEQ ID NO: 6275 - DNA, 50 bp, Escherichia coli
  source 1..50: mol_type = genomic DNA
agatttaaagaagctcaaagcttctgcaatatatgcaatataatagctgt

SEQ ID NO: 6276 - protein, 620 aa, Escherichia coli
MLFSDIILSLSEQIIMMIQSIDADSKNVKPLVQVTIYCRVSSLMQTDGYGLQRQQDAIRAYLEDFDVPKELGYEIDRDNYVLLEDAGKSAYHGYHFSKGQLGQFRQKVLDGEITCGLFIIENVDRFCRMEEYLAIQEFTNLINNGIDILEVDTGEIFSRKVRKSLNKLTVSIERAYAESERKSRISTRSWKNRKRKSLEEGIAINNNTPDWLSLSEDKQSYIVNKERVEILNEIFKMYAEGFGGTAIVNKLNKEKRYYNKTSWSTNKFYHLLRNRRLIGYLGDERHYPAVIDSILFEQVQSLLNGNVRKGKKAGTMMRSIFNGIAKCGFCGNGMICQTMTSSASYLRCIAERSKTTKCTHAKLIRYKESEQIILEHLCNINWDELKKGNSTHRDDIDVLKTQMSIITDKLQKLDLLIQETEDDDDKISLINIKNKNRKELAAIDEKISALTTNLEIPDLEVIASLKEIQDLENVELRQKVYSLLSKTVSSIECTRTDTPDPFYIFNINYIGAREKHLLIVELKNNCKVTRFVEKISDDLVTYYTPSFVVAYSNNWESGLPEIRGLQDCNGITIKAELMDCMHLFSILDRTSRGEAKVIRDWLVIPKVQEFFFHTSAYEGD

SEQ ID NO: 6277 - DNA, 50 bp, Escherichia coli; identical to SEQ ID NO: 6272
  source 1..50: mol_type = genomic DNA

SEQ ID NO: 6278 - DNA, 40 bp, Escherichia coli; identical to SEQ ID NO: 6273
  source 1..40: mol_type = genomic DNA

SEQ ID NO: 6279 - DNA, 40 bp, Escherichia coli; identical to SEQ ID NO: 6274
  source 1..40: mol_type = genomic DNA

SEQ ID NO: 6280 - DNA, 50 bp, Escherichia coli; identical to SEQ ID NO: 6275
  source 1..50: mol_type = genomic DNA

SEQ ID NO: 6281 - protein, 503 aa, Klebsiella michiganensis
MIEAFSYVRFSTKSQATGTSLERQLNASRLFCTQHGLRLSNQSYHDLGISGFKNVRRPELEQMFEAIQTGVIPAGSFILIEAIDRLSRKGISHTQDILKKILQHDIKVAFVGEDAKTLQGQVLNKDSLNDLSSVIMVALAADLAHKESLRKSKLVRESKAIAREKAQNGVILPGKSMFWLDYDKEQRHYVLNDRATIAKEIIELRLLGHGPRKIAKILNERQIPGPTGKEWYQPSIKRIITSPVLYGAYQSHQVIEGQYIPVALVENYYPALIDYNLFSQIQFDNKNASKGRPSRVNPFGGVFYCECGNAICFKKSYSKTAKKVKNEYHYHYCIAAREGRCKNTKAIPNFTPILINLLDKLEIKSTSTKNIRTESIISKRNKIEQLNEMLLKLDSPPVSVLKTISNLEKELQTLLEQPEITAPKQEDIVVLSTIKDPLKYNMHLKRLVKRITVYQINGPKSLRIKVDKTDGHYQNFLIQNGKTIFKSDTERLKKLLAGFKDGF

SEQ ID NO: 6282 - DNA, 50 bp, Klebsiella michiganensis
  source 1..50: mol_type = genomic DNA
aattgtttaaatgaaactatttcacagataacagtttcatttaaacaaat

SEQ ID NO: 6283 - DNA, 40 bp, Klebsiella michiganensis; identical to SEQ ID NO: 683
  source 1..40: mol_type = genomic DNA

SEQ ID NO: 6284 - DNA, 40 bp, Klebsiella michiganensis
  source 1..40: mol_type = genomic DNA
taggggcaggtatgttagggtgataataattccacctgca

SEQ ID NO: 6285 - DNA, 50 bp, Klebsiella michiganensis
  source 1..50: mol_type = genomic DNA
acttatttactataaagtcattcagtaaaaacagttctgataaaacaaat

SEQ ID NO: 6286 - protein, 511 aa, Klebsiella oxytoca
MKKRVLISMIEAFSYVRFSTKSQATGTSLERQLNASRLFCTQQGLRLSNQSYHDLGISGFKNVRRPELEQMFEAIQTGVIPAGSFILIEAIDRLSRKGISHTQDILKKILQHDIKVAFVGEDAKTLQGQVLNKDSLNDLSSVIMVALAADLAHKESLRKSKLVRESKAIAREKVQNGVILPGKSMFWLDYDKEQRHYVLNDRATIAKEIIELRLLGHGPRKIAKILNERQIPGPTGKEWYQPSIKRIITSPVLYGAYQSHQVIEGQYIPVALVENYYPALIDYNLFSQIQFDNKNASKGRPSRVNPFGGVFYCECGNAICFKKSYSKTAKKVKNEYHYHYCIAAREGRCKNTKAIPNFTPILINLLDKLEIKSTSTKNIRSESIISKRNKIEQLNEMLLKLDSPPVSVLKTISNLEKELQTLLERPEIIPPKQEDIVVLSTIQDPSKYNMYLKRLVKRITVYQIDGPKNLRIKVDKTDGHYQSFLIKDGETIFKSDTERLKKLLAGFKDGF

SEQ ID NO: 6287 - DNA, 50 bp, Klebsiella oxytoca; identical to SEQ ID NO: 6282
  source 1..50: mol_type = genomic DNA

SEQ ID NO: 6288 - DNA, 40 bp, Klebsiella oxytoca; identical to SEQ ID NO: 683
  source 1..40: mol_type = genomic DNA

SEQ ID NO: 6289 - DNA, 40 bp, Klebsiella oxytoca; identical to SEQ ID NO: 6284
  source 1..40: mol_type = genomic DNA

SEQ ID NO: 6290 - DNA, 50 bp, Klebsiella oxytoca; identical to SEQ ID NO: 6285
  source 1..50: mol_type = genomic DNA

SEQ ID NO: 6291 - protein, 511 aa, Klebsiella oxytoca
MKKRVLISMIEAFSYVRFSTKSQATGTSLERQLNASRLFCTQQGLRLSNQSYHDLGISGFKNVRRPELEQMFEAIQTGVIPAGSFILIEAIDRLSRKGISHTQDILKKILQHDIKVAFVGEDAKTLQGQVLNKDSLNDLSSVIMVALAADLAHKESLRKSKLVRESKAIARERVQNGVILPGKSMFWLDYDKEQRHYVLNDRATIAKEIIELRLLGHGPRKIAKILNERQIPGPTGKEWYQPSIKRIITSPVLYGAYQSHQVIEGQYIPVALVENYYPALIDYNLFSQIQFDNKNASKGRPSRVNPFGGVFYCECGNAICFKKSYSKTAKKVKNEYHYHYCIAAREGRCKNTKAIPNFTPILINLLDKLEIKSTSTKNIRSESIISKRNKIEQLNEMLLKLDSPPVSVLKTISNLEKELQTLLERPEIIPPKQEDIVVLSTIQDPSKYNMYLKRLVKRITVYQIDGPKNLRIKVDKTDGHYQNFLIKDGETIFKSDTERLKKLLAGFKDGF

SEQ ID NO: 6292 - DNA, 50 bp, Klebsiella oxytoca; identical to SEQ ID NO: 6282
  source 1..50: mol_type = genomic DNA

SEQ ID NO: 6293 - DNA, 40 bp, Klebsiella oxytoca; identical to SEQ ID NO: 683
  source 1..40: mol_type = genomic DNA

SEQ ID NO: 6294 - DNA, 40 bp, Klebsiella oxytoca; identical to SEQ ID NO: 6284
  source 1..40: mol_type = genomic DNA

SEQ ID NO: 6295 - DNA, 50 bp, Klebsiella oxytoca; identical to SEQ ID NO: 6285
  source 1..50: mol_type = genomic DNA

SEQ ID NO: 6296 - protein, 484 aa, Streptococcus dysgalactiae
MNKVAIYVRVSTTMQAEEGYSIDEQIDKLTSYCKIKDWTVYDIYKDGGFSGGNIERPAMERLISDANRKRFDTVLVYKLDRLSRSQKDTLYLIEEIFGKNDISFLSLNESFDTSTPFGKAMIGILSVFAQLEREQIKERMLLGKIGRAKSGKSMMVSKVSFGYTYDKLKGELIVNQAEALVVRKIFDEYLGGRSLIKLRDYLNSNGIYRGDKYWNYRGLLLILSNPVYIGMIRYRGEIYPGNHQPIIDTEVFNKTQEEIKKRQIEALEFNNNPRPFRAKYMLSGLAKCGYCGTPLKIILGYKRKDGSRSMRYQCINRFPRNTKGITIYNDNKKCDSGFYEKADIEEFVIAQIRGLQLNSYKLDNMFDKQPIIDVEGIEKQITLLDNKLKRLNDLYLNDMIELDDLKKQTQSLRKQKTMLEDELINNPAIMQDKNKNHFKEILGTKDITTLDYETQKSIVNNLVNKVFVKAGHIKIEWKIPFKKV

SEQ ID NO: 6297 - DNA, 50 bp, Streptococcus dysgalactiae; identical to SEQ ID NO: 2462
  source 1..50: mol_type = genomic DNA

SEQ ID NO: 6298 - DNA, 40 bp, Streptococcus dysgalactiae
  source 1..40: mol_type = genomic DNA
tgatagcgttaataagctttcaagcattgtgaaagcttta

SEQ ID NO: 6299 - DNA, 40 bp, Streptococcus dysgalactiae
  source 1..40: mol_type = genomic DNA
tgatagcgttaataagcttgaaagcattgtgaaagcttta

SEQ ID NO: 6300 - DNA, 50 bp, Streptococcus dysgalactiae
  source 1..50: mol_type = genomic DNA
gtgacaatttatgttagtcttttagaaagcaatgtatactgacatatttg

SEQ ID NO: 6301 - protein, 475 aa, Carnobacterium maltaromaticum
MEINKLKAALYVRVSTTEQANEGYSIQAQTERLKNYAKAKDYFIIKTYTDPGFSGAKLDRPALQEMIKDIENNQIDIVLVYKLDRLSRSQKNTLFLIEDVFLKNNVDFVSMQESFDTTSAFGRAMIGILSVFAQLERDTITERMGMGRTERAKEGYFHGGGSARIPVGYDYIDGLLQVNEYEAEIVRSIFELYNSGKGVNSISNEIRDKFPSKRKFGVSLIRSILTNNLYVGLIKFNDGVYEGKHEPIISKDIFDKAQNEFKRRTTGKLKLFTSKYLLTGITYCGHCGARVKGTGSSKLKDGTRLSYYSCYSRAGSPSHMVKDLNCPSKINRTEILDEYVISQMKEITKTDISIEIDSEFTDDSDTDNTVIQNEIKSIEDRINKLLELYQFGNVPLDVLNSKINSLNSEKSKLNEIINESATEIIDDTIDKVEIFNNLKKVDWNTITHEETKTIISKSIEKITIFNEKIEIEWKF

SEQ ID NO: 6302 - DNA, 50 bp, Carnobacterium maltaromaticum
  source 1..50: mol_type = genomic DNA
gttaacaaactacaagattccacatgaatggaatgttcatgtttattaaa

SEQ ID NO: 6303 - DNA, 40 bp, Carnobacterium maltaromaticum
  source 1..40: mol_type = genomic DNA
taatgtcacactctccacatggcttgtttgagggaataaa

SEQ ID NO: 6304 - DNA, 40 bp, Carnobacterium maltaromaticum
  source 1..40: mol_type = genomic DNA
taatgtcacactctccacagcgcttgtttgagggaataaa

SEQ ID NO: 6305 - DNA, 50 bp, Carnobacterium maltaromaticum
  source 1..50: mol_type = genomic DNA
gttaaaaaaatacaatattcaaaagcaatggaaattgtacttgtcttaaa

SEQ ID NO: 6306 - protein, 475 aa, Carnobacterium maltaromaticum
MEINKLKAALYVRVSTTEQANEGYSIQAQTERLKNYAKAKDYFIIKTYTDPGFSGAKLDRPALQEMITDIENNQLDIVLVYKLDRLSRSQKNTLFLIEDVFLKNNVDFVSMQESFDTTSAFGRAMIGILSVFAQLERDTITERMGMGRTERAKEGYFHGGGSARIPVGYDYVDGLLQVNEYEAEIVRSIFELYNSGKGVNSISNAIRDKFPSKRKFGVSLTRSILTNNLYVGLIKFNDGVYEGKHEPIISKDIFDKAQYEFKRRTTGKLKLFTSKYLLTGTTYCGHCGARVKGTGSSKLKDGTRLSYYSCYSRAGSPAHMVKDLNCPSKINRTEILDEYVISQMKEITKTDISIEIDSEFTDDSDIDNTVIQNEIKSIEERINKLLELYQFGNVPLDVLNSKINSLNSEKAKLNEILNESTTEIIDDTIDKVEIFNNLKKVDWNTITHEEIKAIISQSIEKITIFNEKIEIEWKF

SEQ ID NO: 6307 - DNA, 50 bp, Carnobacterium maltaromaticum; identical to SEQ ID NO: 6302
  source 1..50: mol_type = genomic DNA

SEQ ID NO: 6308 - DNA, 40 bp, Carnobacterium maltaromaticum
  source 1..40: mol_type = genomic DNA
taatgttacactctccacatggcttgtttgagggaataaa

SEQ ID NO: 6309 - DNA, 40 bp, Carnobacterium maltaromaticum
  source 1..40: mol_type = genomic DNA
taatgttacactctccacagcgcttgtttgagggaataaa

SEQ ID NO: 6310 - DNA, 50 bp, Carnobacterium maltaromaticum; identical to SEQ ID NO: 6305
  source 1..50: mol_type = genomic DNA

SEQ ID NO: 6311 - protein, 475 aa, Carnobacterium maltaromaticum
MEINKLKAALYVRVSTTEQANEGYSIQAQTERLKNYAKAKDYFIIKTYTDPGFSGAILDRPALQEMITDIENNQLDIVLVYKLDRLSRSQKNTLFLIEDVFLKNNVDFVSMQESFDTTSAFGRAMIGILSVFAQLERDTITERMGMGRTERAKEGYFHGGGSARIPVGYDYVDGLLQVNEYEAEIVRSIFELYNSGKGVNSISNAIRDKFPSKRKFGVSLTRSILTNNLYVGLIKFNDGVYEGKHEPIISKDIFDKAQYEFKRRTTGKLKLFTSKYLLTGTTYCGHCGARVKGTGSSKLKDGTRLSYYSCYSRAGSPAHMVKDLNCPSKINRTEILDEYVISQMKEITKTDISIEIDSEFTDDSDIDNTVIQNEIKSIEERINKLLELYQFGNVPLDVLNSKINSLNSEKAKLNEILNESTTEIIDDTIDKVEIFNNLKKVDWNTITHEEIKAIISQSIEKITIFNEKIEIEWKF

SEQ ID NO: 6312 - DNA, 50 bp, Carnobacterium maltaromaticum; identical to SEQ ID NO: 6302
  source 1..50: mol_type = genomic DNA

SEQ ID NO: 6313 - DNA, 40 bp, Carnobacterium maltaromaticum; identical to SEQ ID NO: 6308
  source 1..40: mol_type = genomic DNA

SEQ ID NO: 6314 - DNA, 40 bp, Carnobacterium maltaromaticum; identical to SEQ ID NO: 6309
  source 1..40: mol_type = genomic DNA

SEQ ID NO: 6315 - DNA, 50 bp, Carnobacterium maltaromaticum; identical to SEQ ID NO: 6305
  source 1..50: mol_type = genomic DNA

SEQ ID NO: 6316 - protein, 475 aa, Carnobacterium maltaromaticum
MEINKLKAALYVRVSTTEQANEGYSIQAQTERLKNYAKAKDYFIIKTYTDPGFSGAKLDRPALQEMITDIENNQLDIVLVYKLDRLSRSQKNTLFLIEDVFLKNNVDFVSMQESFDTTSAFGRAMIGILSVFAQLERDTITERMGMGRTERAKEGYFHGGGSARIPVGYDYVDGLLQVNEYEAEIVRSIFELYNSGKGVNSISNAIRDKFPSKRKFGVSLTRSILTNNLYVGLIKFNDGVYEGKHEPIISKDIFDKAQYEFKRRTTGKLKLFTSKYLLTGTTYCGHCGARVKGTGSSKLKDGTRLSYYSCYSRAGSPAHMVKDLNCPSKINRTEILDEYVISQMKEITKTDISIEIDSEFTDDSDIDNTVIQNEIKSIEERINKLLELYQFGNVPLDVLNSKINSLNSEKAKLNEILNESTTEIIDDTIDKVEIFNNLKKVDWNTITHKEIKAIISQSIEKITIFNEKIEIEWKF

SEQ ID NO: 6317 - DNA, 50 bp, Carnobacterium maltaromaticum; identical to SEQ ID NO: 6302
  source 1..50: mol_type = genomic DNA

SEQ ID NO: 6318 - DNA, 40 bp, Carnobacterium maltaromaticum; identical to SEQ ID NO: 6308
  source 1..40: mol_type = genomic DNA

SEQ ID NO: 6319 - DNA, 40 bp, Carnobacterium maltaromaticum; identical to SEQ ID NO: 6309
  source 1..40: mol_type = genomic DNA

SEQ ID NO: 6320 - DNA, 50 bp, Carnobacterium maltaromaticum; identical to SEQ ID NO: 6305
  source 1..50: mol_type = genomic DNA

SEQ ID NO: 6321 - protein, 507 aa, Heyndrickxia oleronia
MYKPFSQADYKPSDKPKALYLRKSKKASGKTEIETIESHLKQLTNFCEEQGWNDYVIYNDYVAKSTDLTRKEYKKMLKACLEGKHDLIIVTEESRLYRSVNEQTNVYEELKGTDIVILSLREGYIFPNDRNQFLPNIIRGAMNQQELENFAYRMNVKVLASAKEGKYVNKPPFGYFKDKDELIPHPIESKTFRFIVDKVLEGYVIAEIIGQLNQLGYTTKSGKKWKDVGTITRMLANRVYLGESHYYSKMFDEDIIRRDTHQPLLTIEEFQEVQNMIKSRSRNPQGIRYTKINTVLDRLVVCGICGNRLPLHKSWTNKEGVTSYQIGKCQKVIGEYNEKKCPNKSISLNELLPHFYNAIESYKEALREEIKSVDIDTTNDKKISVMNQIKDIKSRLAEIQTEIQNAKSYLIKGILSESDYVDLVPPLEKDTKELNVKLEDNERLLASLNDYDRSTVIQNAIDLLGNIENESIEDQNRIYRLLFESLELVNTADEFEIRLKEKDVSHH

SEQ ID NO: 6322 - DNA, 50 bp, Heyndrickxia oleronia
  source 1..50: mol_type = genomic DNA
actttataataataggttttatcaggagaaaaagtatgttattataaagt

SEQ ID NO: 6323 - DNA, 40 bp, Heyndrickxia oleronia
  source 1..40: mol_type = genomic DNA
acacggagtcgcgttatcaggagattacattattcaagga

SEQ ID NO: 6324 - DNA, 40 bp, Heyndrickxia oleronia
  source 1..40: mol_type = genomic DNA
acacggagtcgcgttatcaagagattacattattcaagga

SEQ ID NO: 6325 - DNA, 50 bp, Heyndrickxia oleronia
  source 1..50: mol_type = genomic DNA
attttaaactataaggctctatccagacaaaaagcatctttttataaagt

SEQ ID NO: 6326 - protein, 506 aa, Bacillus amyloliquefaciens
MYKPFSQADYKPSDKPKALYLRKSKKSKGMTDAETIESHLKRLTDFCKEQGWKDYVIYNDYVAKSTNVKREEYKKMLKACLDGKHDLIIVVEESRLYRTVHEQTNVYEELKGTEIAILSIREGYIFPNDRNQFLTNIIRGAMNQQELENFAYRMNVKVLASAKEGIYVNKSPFGYFKDKDKLIPHPIESKTFRFIVDKVLEGYVIAEIIGQLNQLGYTTKSGKKWKDVGTITRMLANRVYLGESHYYSKMFGEDVIVRDTHQPLLTIEEFQEVHNMIKSRSRNPQGIRYTKINTVLDRLVVCGICGNRLPIHKSWTNKEGVTSYQIGKCQKVIGEYNEKKCPNKSISMKELLPHFYIAVESYKEALREEIKSVDIDTTNDKKISVMNQIKDIKSRMGEIQTEIQNAKSYLIKGILSEADYVGLVPPLEKDAKELKVKLEDNERLLASLNDYDRSSVIQNAVDSLNNIENESIENQNRIYRLLFEHLELVNTVDEFEIRLKEKDVSN

SEQ ID NO: 6327 - DNA, 50 bp, Bacillus amyloliquefaciens; identical to SEQ ID NO: 6322
  source 1..50: mol_type = genomic DNA

SEQ ID NO: 6328 - DNA, 40 bp, Bacillus amyloliquefaciens
  source 1..40: mol_type = genomic DNA
ccacggattcgctttatcgggggattacgtcattcaggcg

SEQ ID NO: 6329 - DNA, 40 bp, Bacillus amyloliquefaciens
  source 1..40: mol_type = genomic DNA
ccacggattcgctttatcgagggattacgtcattcaggcg

SEQ ID NO: 6330 - DNA, 50 bp, Bacillus amyloliquefaciens; identical to SEQ ID NO: 6325
  source 1..50: mol_type = genomic DNA

SEQ ID NO: 6331 - protein, 488 aa, Clostridium perfringens
MKKIAIYIRKSIKGDENSISLDAQIEVIKNYFKEDCNFTIYKDDGFSGGNTNRPAFKKLMIDASVNKFDTVACYKLDRIARNTLDFLTTFNTLSDYGIDLICVEDKYDPTTPSGRLMMTLLASLAEIERENIKQRVKDSMLKLAKEGRWTGGTAPFGYKIVTIDCGKYLELVDEANIKYIFNEFVSGKGILKLSKEFNCNKQNISRILRSITYLKSTEEANKYLEKFLNYEVIGVPNGCGYLPYGNYKNVNGKKVKNNDSKLATVSKHKAVIDLDTFIKVQNRLKTFEGNPAPRISSKTFLAQMVKCKCGSNMNVILGKKKKDGSRKIYFACPKKCGNTFCDVSKIENDVLNTLKDVDLFNKIIKSSNPINKDYSKIKEPLLKEIDEKKKILDGLVCKLALANDSLTKILLDKIESLDLDINSIQEKINEIEKEEISKKVNENDIKIREMNRVNLIKNFDKMDMKERQSSIKKVINKIVWLGDAVLIK

SEQ ID NO: 6332 - DNA, 50 bp, Clostridium perfringens
  source 1..50: mol_type = genomic DNA
tactataatttgaataaacctcctttaccaagtgtatttaaattatagca

SEQ ID NO: 6333 - DNA, 40 bp, Clostridium perfringens
  source 1..40: mol_type = genomic DNA
tattattggctttattcctttaccaggtttaacagtatcc

SEQ ID NO: 6334 - DNA, 40 bp, Clostridium perfringens
  source 1..40: mol_type = genomic DNA
tattattggctttattccttcaccaggtttaacagtatcc

SEQ ID NO: 6335 - DNA, 50 bp, Clostridium perfringens
  source 1..50: mol_type = genomic DNA
ttctatatttcttctactcctccttcaccaactatagcactattattaca

SEQ ID NO: 6336 - protein, 510 aa, Clostridium paraputrificum
MDTDIFAIYLRKSRKDLENKDYDVLKRHRKILLDFAKSKNIVIHEEDIYEEVVSGETIQDRPVIQNLLKKIEVGYYKAVLVMEIERLARGNTIDQGIIAQAFQLTNTLIITPQKTYDTRNEFDNEFLEFGLFMSRREYKAISRRIQTGRIQSCKEGNYVGSVTPYGYGKEKLKGEKGYKLTPNDEAENVKLIFDLFLDGLGTSTLAFKLNDLNIKSRTGKPWTPAMVRNILTNKIYIGILTWGKRANVKKLDNNLISKTRPVNHNCIESKGKHDPIIDELTFYKAQTLLKSNSSKKVPKDKALKNPLAGIIVCKKCGTNMIRRPLKNIPDTILCKNHYCDNISSYLYLIEKRLLDSLHTTLLEYYYYLDNYEKEDLKSKKNYDIQIKKIDKDINTLKKQHVRTCELLELGVYSLELFKERSTSINEQVDALIKQKDELIRLNKDNKTEKIIQAIPKIENCLKTYHTLSIEDKNKLLKSIIKKAYYLKNATGGRWNKEAQDNFSIELELNL

SEQ ID NO: 6337 - DNA, 50 bp, Clostridium paraputrificum
  source 1..50: mol_type = genomic DNA
aacatacatcataaatgctctaaagaaatggttcatttgtgatataagta

SEQ ID NO: 6338 - DNA, 40 bp, Clostridium paraputrificum
  source 1..40: mol_type = genomic DNA
aactgatattggtacagaggaaatggctcatgtagagatg

SEQ ID NO: 6339 - DNA, 40 bp, Clostridium paraputrificum
  source 1..40: mol_type = genomic DNA
aactgatattggtacagagtaaatggctcatgtagagatg

SEQ ID NO: 6340 - DNA, 50 bp, Clostridium paraputrificum
  source 1..50: mol_type = genomic DNA
aacatgcatgtcataggctctttatacttgtttcatgtgtaatataaata

SEQ ID NO: 6341 - protein, 468 aa, Niallia circulans
MTVGIYIRVSTQEQANEGYSIGAQKERLIAYCAAQGWNDFKFYIDEGISAKDMNRPELQRLLDDVKNRRISMILVYRLDRFTRRVKDLYEMLEMLEKHNCSFKSATELYDTSNAMGRMFIGLVALLAQWETENLSERIKVALEQKVSDGERVGAIPYGFDLTEDEKLIKNEKSKVVYDMIEKTFNGMSATQLANYLNKTNDDRTWHVKGVLRILKNPAIYGATRWNDKVYENTHEGIISKSQYKKLQEILNDRSKHHRREVAGNYLFQGKLSCPTCKKPLAVNRYLRKRKDGTEYQSTIYKCSSCYLKGKKIKQIGEKRFLDALYIYMKNIDLKGIDITEEPDETKHLTDQLKSLEKKREKYQRAWASDLISDSEFEQRMLETRDLFEELKRKLSEKEEPIQVDIEEIKNVVFTFNQTFHFLTQEEKRMFISRFIKKIDYELIPQPPQRPDRCKYGKDLVTITDVLFY

SEQ ID NO: 6342 - DNA, 50 bp, Niallia circulans
  source 1..50: mol_type = genomic DNA
attaatatttacgtaacgttatcagttggtagcgttacgtaaatataatt

SEQ ID NO: 6343 - DNA, 40 bp, Niallia circulans
  source 1..40: mol_type = genomic DNA
tgttgtcttgccagacccagttggaccggtcagaattatt

SEQ ID NO: 6344 - DNA, 40 bp, Niallia circulans
  source 1..40: mol_type = genomic DNA
tgttgtcttgccagacccacttggaccggtcagaattatt

SEQ ID NO: 6345 - DNA, 50 bp, Niallia circulans
  source 1..50: mol_type = genomic DNA
attaattttctgaaaatgttaatacttggtaacataaacttaatatagtt

SEQ ID NO: 6346 - protein, 502 aa, Paenibacillus odorifer
MEQYTMKGWNTMAIKRVAIYCRKSREADDKTTTSIDGQANSLIELCEKRGYTYDLYSETGSSQEWDRPEFQKLLSKIKHYEYDAIVCTEQSRLTRNTKHYEEVKEIMIKSGCVLVTPTSMTDYTNEDQMFSGDIIALIEKREWQTTRKRLMRGSRESAKKGNWMGKKVPFGYRYNRDTKNLEIVPEEAEIIVRMFNEYVSGKSTTTIAYDFTNAGITNMQWSSSSVARMIANIAYTGHSSYGRTKQYKQDGKRVTERTSKEDQILIKDTHQPIVPQELFDMAQRIRNERNSRPAALKVGKHIFSGLVRCGVCGSIHSFQTAHGKKRITSCTTRTYKEDGTYITCTNGGTYIDNFKVLFHEYFVQYVDQIEQYVHLMTDNEIQNFDEEIKRIEKQIEKLNKDIKRVQQGFVMEIFTPDEARKQIASFKEQIITLEEQIKTITAENNMSEHDKVSARLENMRRFLTHSDNIPENEANDILREFIDTIIYTKEGNEINLKIIMKE

SEQ ID NO: 6347 - DNA, 50 bp, Paenibacillus odorifer
  source 1..50: mol_type = genomic DNA
tgttgcaattaataaattgtttataaacaaacagaagcttaaatgcaatc

SEQ ID NO: 6348 - DNA, 40 bp, Paenibacillus odorifer
  source 1..40: mol_type = genomic DNA
gattgccacgatgatctacaagctgacaaaggatgcttcg

SEQ ID NO: 6349 - DNA, 40 bp, Paenibacillus odorifer; identical to SEQ ID NO: 6348
  source 1..40: mol_type = genomic DNA

SEQ ID NO: 6350 - DNA, 50 bp, Paenibacillus odorifer
  source 1..50: mol_type = genomic DNA
tgtagcaatttgaaaaatgcctaaaaacaaaaggaagaaaaaatgaaatc

SEQ ID NO: 6351 - protein, 498 aa, Salmonella enterica
MKQNGKAYSYIRFSSKKQEQGDSVRRQTELAEQYAHANNLILSDKNFQDLGISAFKEGNRPSLGDMLEAIEKGQIEQGSTIIIESLDRLSRRGIDVTQQIIKSILQNNVFIASLVDGLLLNRESVNDLVSVIRIALAADLAHKESEKKSQRLRETKAQQRKRALNGEVINKVLPFWLKRKQDKFVFSERLDTVKRIIELRRKGYGTHKIAKILNDERHAPLRSTGWNHTTVGKTINSVALYGAYQTSETTKNREVILLDIIDNYYPSIITKEEFMLLQADNKRSKAGYKSENNPFAGLLKHECGGALVRKFHTASGKTYQYHVCASARDGKCNVTRNFKNIETALYQIMKELRMENKTNFDESLLAERETIKTKIKELNDMLLKLSKIPVSVIQTISNLEEKLQITEEKIKHQNNLIISEKSFDFRLLQDIKNPQELNLMLKRVIDKIIIFNSGQKWRIKVAYRNKHSQNFLWDGEKISFSSDTKKLLDFIKTHTNAD

SEQ ID NO: 6352 - DNA, 50 bp, Salmonella enterica
  source 1..50: mol_type = genomic DNA
agctattcactttgaaacaatactgtgatattgttgcaaagaagcaaaat

SEQ ID NO: 6353 - DNA, 40 bp, Salmonella enterica
  source 1..40: mol_type = genomic DNA
cttactgccgaactgcatggtaacgttgctggaaactaac

SEQ ID NO: 6354 - DNA, 40 bp, Salmonella enterica
  source 1..40: mol_type = genomic DNA
cttactgccgaactgcatgttaacgttgctggaaactaac

SEQ ID NO: 6355 - DNA, 50 bp, Salmonella enterica
  source 1..50: mol_type = genomic DNA
atatatgcagaaccaaacaatactttgatattctggtctggaaagagaat

SEQ ID NO: 6356 - protein, 514 aa, Escherichia albertii
MKKVYSYIRFSSTKQAFGDSHRRQSKAIQDWLASHPDHILDESLSFEDLGRSAFHGDHLKEGGALRAFLEAVKQGLIPSDSVLLVESLDRVSRQSISHAQETIRAILEQGITVVTLSDGETYNRQSLDDSLALIRMIILQERSHNESVIKSDRIKKVWSHKRQQFEQDGTKITGNCPGWLKLNSDGKSFSLIPHHVETIHRIFDEKVSGKSLHAIARDLNLENIPTITNKKVDTGWTPTRVRDLLLKESLIGVAYGVSDYFPPAISKEKFHAVQMIRGQGKGKKPTSRQPSSIDILKGICKCAECGSTLRQRNTKKTPEGRYPRGYLECRNRQLGRCNSKAFNRSLIEDILVQKVFPTLQYLSLESNGDNISVTTLKADITSLEKGINNLISLAERGLGDLDTLAQRITNNRVELESKKKDLRQAEAIQSLRSDNDIQDSDRKTVEGRIKLQLAIKSFIKEIIFDYYKQEITIRLLNGKSCSGISVAREDKDFDHSSMFEALQKSLLDIDEVHL

SEQ ID NO: 6357 - DNA, 50 bp, Escherichia albertii
  source 1..50: mol_type = genomic DNA
agggtgcataagaaagtgaagattatgattttcacttcctaaaacaccct

SEQ ID NO: 6358 - DNA, 40 bp, Escherichia albertii
  source 1..40: mol_type = genomic DNA
acagtccatatcgacatgaatgattttacgcattgctcac

SEQ ID NO: 6359 - DNA, 40 bp, Escherichia albertii
  source 1..40: mol_type = genomic DNA
acagtccatatcgacatgacagattttacgcattgctcac

SEQ ID NO: 6360 - DNA, 50 bp, Escherichia albertii
  source 1..50: mol_type = genomic DNA
tggtttcatatactagtgaagattcagtttctgaataccttaaaccccct

SEQ ID NO: 6361 - protein, 514 aa, Escherichia albertii
MKKVYSYIRFSSTKQAFGDSHRRQSKAIQDWLANHPDHILDESLSFEDLGRSAFHGDHLKEGGALRAFLEAVKQGLIPPDSVLLVESLDRVSRQSISHAQETIRGILEQGITVVTLSDGETYNRQSLDDSLALIRMIILQERSHNESVIKSDRIKKAWSHKRQQFEQDGTKITGNCPGWLKLNSDKKSFSLIPHHIETIHRIFDEKLSGKSLHAIARDLNLENIPTITNKRVDTGWTPTRVRDLLLKESLIGVAYGVSDYFPPAISKEKFHAVQMIRGQGKGKKPTSRQPSSIDILKGICKCAECGSTLRQRNTKKTPEGRYPRGYLECRNRQLGRCNSKAFNRSLIEDILIQKVFPTLQYLSLKSNGDNISVTTLKADITSLEKGINNLISLAEKGLGDLDTLAQRITNNRVELESKKKDLRQAEAILSLRSDNDIQDSDRKTVEGRIKLQLAIKSFVKEIIFDYDKQEITIRLLNGKSFSGISVAREDKDFDHSSMFEVLQKSLLDVDGVCL

SEQ ID NO: 6362 - DNA, 50 bp, Escherichia albertii; identical to SEQ ID NO: 6357
  source 1..50: mol_type = genomic DNA

SEQ ID NO: 6363 - DNA, 40 bp, Escherichia albertii; identical to SEQ ID NO: 6358
  source 1..40: mol_type = genomic DNA

SEQ ID NO: 6364 - DNA, 40 bp, Escherichia albertii; identical to SEQ ID NO: 6359
  source 1..40: mol_type = genomic DNA

SEQ ID NO: 6365 - DNA, 50 bp, Escherichia albertii; identical to SEQ ID NO: 6360
  source 1..50: mol_type = genomic DNA

SEQ ID NO: 6366 - protein, 514 aa, Escherichia coli
MKKVYSYIRFSSTKQAFGDSHRRQSKAIQDWLANHPDHILDESLSFEDLGRSAFHGDHLKEGGALRAFLEAVKQGLIPSDSVLLVESLDRVSRQSISHAQETIRGILEQGITVVTLSDGETYNRQSLDDSLALIRMIILQERSHNESVIKSDRIKKAWSHKRQQFEQDGTKITGNCPGWLKLNSDKKSFSLIPHHIETIHRIFDEKLSGKSLHAIARDLNLENIPTITNKRVDTGWTPTRVRDLLLKESLIGVAYGVSDYFPPAISKEKFHAVQMIRGQGKGKKPTSRQPSSIDILKGICKCAECGSTLRQRNTKKTPEGRYPRGYLECRNRQLGRCNSKAFNRSLIEDILIQKVFPTLQYLSLKSNGDNISVTTLKADITSLEKGINNLISLAEKGLGDLDTLAQRITNNRVELESKKKDLRQAEAILSLRSDNDIQDSDRKTVEGRIKLQLAIKSFVKEIIFDYDKQEITIRLLNGKSFSGISVAREDKDFDHSSMFEVLQKSLLDVDGVCL

SEQ ID NO: 6367 - DNA, 50 bp, Escherichia coli; identical to SEQ ID NO: 6357
  source 1..50: mol_type = genomic DNA

SEQ ID NO: 6368 - DNA, 40 bp, Escherichia coli
  source 1..40: mol_type = genomic DNA
gtgagcaatgcgtaaaatcattcatgtggatatggactgc

SEQ ID NO: 6369 - DNA, 40 bp, Escherichia coli
  source 1..40: mol_type = genomic DNA
gtgagcaatgcgtaaaatccatcatgtggatatggactgc

SEQ ID NO: 6370 - DNA, 50 bp, Escherichia coli; identical to SEQ ID NO: 6360
  source 1..50: mol_type = genomic DNA

SEQ ID NO: 6371 - protein, 514 aa, Escherichia coli; identical to SEQ ID NO: 6366

SEQ ID NO: 6372 - DNA, 50 bp, Escherichia coli; identical to SEQ ID NO: 6357
  source 1..50: mol_type = genomic DNA

SEQ ID NO: 6373 - DNA, 40 bp, Escherichia coli
  source 1..40: mol_type = genomic DNA
gcagtccatatccacatgaatgattttacgcattactcac

SEQ ID NO: 6374 - DNA, 40 bp, Escherichia coli
  source 1..40: mol_type = genomic DNA
gcagtccatatccacatgacagattttacgcattactcac

SEQ ID NO: 6375 - DNA, 50 bp, Escherichia coli; identical to SEQ ID NO: 6360
  source 1..50: mol_type = genomic DNA

SEQ ID NO: 6376 - protein, 514 aa, Escherichia coli; identical to SEQ ID NO: 6366

SEQ ID NO: 6377 - DNA, 50 bp, Escherichia coli; identical to SEQ ID NO: 6357
  source 1..50: mol_type = genomic DNA

SEQ ID NO: 6378 - DNA, 40 bp, Escherichia coli
  source 1..40: mol_type = genomic DNA
gcagtccatatccacatgaatgattttacgcattgctcac

SEQ ID NO: 6379 - DNA, 40 bp, Escherichia coli
  source 1..40: mol_type = genomic DNA
gcagtccatatccacatgacagattttacgcattgctcac

SEQ ID NO: 6380 - DNA, 50 bp, Escherichia coli; identical to SEQ ID NO: 6360
  source 1..50: mol_type = genomic DNA

SEQ ID NO: 6381 - protein, 514 aa, Shigella dysenteriae
MKKVYSYIRFSSTKQAFGDSHRRQSKAIQDWLANHPDHILDESLSFEDLGRSAFHGDHLKEGGALRAFLEAVKQGLIPPDSVLLVESLDRVSRQSISHAQETIRGILEQGITVVTLSDGETYNRQSLDDSLALIRMIILQERSHNESVIKSDRIKKAWSHKRQQFEQDGTKITGNCPGWLKLNSDKKSFSLIPHHIETIHRIFDEKLSGKSLHAIARDLNLENIPTITNKKVDTGWTPTRVRDLLLKESLIGVAYGVSDYFPPAISKEKFHAVQMIRGQGKGKKPTSRQPSSIDILKGICKCAECGSTLRQRNTKKTPEGRYPRGYLECRNRQLGRCNSKAFNRSLIEDILIQKVFPTLQYLSLKSNGDNISVTTLKADITSLEKGINNLISLAEKGLGDLDTLAQRITNNRVELESKKKDLRQAEAILSLRSDNDIQDSDRKTVEGRIKLQLAIKSFVKEIIFDYDKQEITIRLLNGKSFSGISVAREDKDFDHSSMFEVLQKSLLDVDGVCL

SEQ ID NO: 6382 - DNA, 50 bp, Shigella dysenteriae; identical to SEQ ID NO: 6357
  source 1..50: mol_type = genomic DNA

SEQ ID NO: 6383 - DNA, 40 bp, Shigella dysenteriae
  source 1..40: mol_type = genomic DNA
ggtatacatgcccgcacgaataatcttcagcatactccct

SEQ ID NO: 6384 - DNA, 40 bp, Shigella dysenteriae
  source 1..40: mol_type = genomic DNA
ggtatacatgcccgcacgacaaatcttcagcatactccct

SEQ ID NO: 6385 - DNA, 50 bp, Shigella dysenteriae; identical to SEQ ID NO: 6360
  source 1..50: mol_type = genomic DNA

SEQ ID NO: 6386 - protein, 514 aa, Escherichia coli
MKKVYSYIRFSSTKQAFGDSHRRQSKAIQDWLANHPDHILDESLSFEDLGRSAFHGDHLKEGGALRAFLEAVKQGLIPSDSVLLVESLDRVSRQSISHAQETIRGILEQGITVVTLSDGETYNRQSLDDSLALIRMIILQERSHNESVIKSDRIKKAWSHKRQQFEQDGTKITGNCPGWLKLNSDKKSFSLIPHHIETIHRIFDEKLSGKSLHAIARDLNLENIPTITNKRVDTGWTPTRVRDLLLKESLIGVAYGVSDYFPPAISKEKFHAVQMIRGQGKGKKPTSRQPSSIDILKGICKCAECGSTLRQRNTKKTPEGRYPRGYLECRNRQLGRCNSKAFNRSLIEDILIQKVFPTLQYLSLKSNGDNISVTTLKADVTSLEKGINNLISLAEKGLGDLDTLAQRITNNRVELESKKKDLRQAEAILSLRSDNDIQDSDRKTVEGRIKLQLAIKSFVKEIIFDYDKQEITIRLLNGKSFSGISVAREDKDFDHSSMFEVLQKSLLDVDGVCL

SEQ ID NO: 6387 - DNA, 50 bp, Escherichia coli; identical to SEQ ID NO: 6357
  source 1..50: mol_type = genomic DNA

SEQ ID NO: 6388 - DNA, 40 bp, Escherichia coli; identical to SEQ ID NO: 6373
  source 1..40: mol_type = genomic DNA

SEQ ID NO: 6389 - DNA, 40 bp, Escherichia coli; identical to SEQ ID NO: 6374
  source 1..40: mol_type = genomic DNA

SEQ ID NO: 6390 - DNA, 50 bp, Escherichia coli; identical to SEQ ID NO: 6360
  source 1..50: mol_type = genomic DNA

SEQ ID NO: 6391 - protein, 514 aa, Escherichia coli
MKKVYSYIRFSSTKQAFGDSHRRQSKAIQDWLANHPDHILDESLSFEDLGRSAFHGDHLKEGGALRAFLEAVKQGLIPPDSVLLVESLDRVSRQSISHAQETIRGILEQGITVVTLSDGETYNRQSLDDSLVLIRMIILQERSHNESVIKSDRIKKAWSHKRQQFEQDGTKITGNCPGWLKLNSDKKSFSLIPHHIETIHRIFDEKLSGKSLHAIARDLNLENIPTITNKRVDTGWTPTRVRDLLLKESLIGVAYGVSDYFPPAISKEKFHAVQMIRGQGKGKKPTSRQPSSIDILKGICKCAECGSTLRQRNTKKTPEGRYPRGYLECRNRQLGRCNSKAFNRSLIEDILIQKVFPTLQYLSLKSNGDNISVTTLKADITSLEKGINNLISLAEKGLGDLDTLAQRITNNRVELESKKKDLRQAEAILSLRSDNDIQDSDRKTVEGRIKLQLAIKSFVKEIIFDYDKQEITIRLLNGKSFSGISVAREDKDFDHSSMFEVLQKSLLDVDGVCL

SEQ ID NO: 6392 - DNA, 50 bp, Escherichia coli; identical to SEQ ID NO: 6357
  source 1..50: mol_type = genomic DNA

SEQ ID NO: 6393 - DNA, 40 bp, Escherichia coli; identical to SEQ ID NO: 6373
  source 1..40: mol_type = genomic DNA

SEQ ID NO: 6394 - DNA, 40 bp, Escherichia coli; identical to SEQ ID NO: 6374
  source 1..40: mol_type = genomic DNA

SEQ ID NO: 6395 - DNA, 50 bp, Escherichia coli; identical to SEQ ID NO: 6360
  source 1..50: mol_type = genomic DNA

SEQ ID NO: 6396 - protein, 514 aa, Escherichia coli; identical to SEQ ID NO: 6361

SEQ ID NO: 6397 - DNA, 50 bp, Escherichia coli; identical to SEQ ID NO: 6357
  source 1..50: mol_type = genomic DNA

SEQ ID NO: 6398 - DNA, 40 bp, Escherichia coli; identical to SEQ ID NO: 6378
  source 1..40: mol_type = genomic DNA

SEQ ID NO: 6399 - DNA, 40 bp, Escherichia coli; identical to SEQ ID NO: 6379
  source 1..40: mol_type = genomic DNA

SEQ ID NO: 6400 - DNA, 50 bp, Escherichia coli; identical to SEQ ID NO: 6360
  source 1..50: mol_type = genomic DNA

SEQ ID NO: 6401 - protein, 514 aa, Escherichia coli; identical to SEQ ID NO: 6366

SEQ ID NO: 6402 - DNA, 50 bp, Escherichia coli; identical to SEQ ID NO: 6357
  source 1..50: mol_type = genomic DNA

SEQ ID NO: 6403 - DNA, 40 bp, Escherichia coli
  source 1..40: mol_type = genomic DNA
gaagtccatatccacatgaatgattttacgcattgctcac

SEQ ID NO: 6404 - DNA, 40 bp, Escherichia coli
  source 1..40: mol_type = genomic DNA
gaagtccatatccacatgacagattttacgcattgctcac

SEQ ID NO: 6405 - DNA, 50 bp, Escherichia coli; identical to SEQ ID NO: 6360
  source 1..50: mol_type = genomic DNA

SEQ ID NO: 6406 - protein, 514 aa, Escherichia coli; identical to SEQ ID NO: 6366

SEQ ID NO: 6407 - DNA, 50 bp, Escherichia coli; identical to SEQ ID NO: 6357
  source 1..50: mol_type = genomic DNA

SEQ ID NO: 6408 - DNA, 40 bp, Escherichia coli
  source 1..40: mol_type = genomic DNA
gtgagtaatgcgtaaaatcattcatgtggatatggactgc

SEQ ID NO: 6409 - DNA, 40 bp, Escherichia coli
  source 1..40: mol_type = genomic DNA
gtgagtaatgcgtaaaatccatcatgtggatatggactgc

SEQ ID NO: 6410 - DNA, 50 bp, Escherichia coli; identical to SEQ ID NO: 6360
  source 1..50: mol_type = genomic DNA

SEQ ID NO: 6411 - protein, 514 aa, Escherichia coli
MKKVYSYIRFSSTKQAFGDSHRRQSKAIQDWLANHPDHILDESLSFEDLGRSAFHGDHLKEGGALRAFLEAVKQGLIPPDSVLLVESLDRVSRQSISHAQETIRGILEQGITVVTLSDGETYNRQSLDDSLALIRMIILQERSHNESVIKSDRIKMAWSHKRQQFEQDGTKITGNCPGWLKLNSDKKSFSLIPHHIETIHRIFDEKLSGKSLHAIARDLNLENIPTITNKRVDTGWTPTRVRDLLLKESLIGVAYGVSDYFPPAISKEKFHAVQMIRGQGKGKKPTSRQPSSIDILKGICKCAECGSTLRQRNTKKTPEGRYPRGYLECRNRQLGRCNSKAFNRSLIEDILIQKVFPTLQYLSLKSNGDNISVTTLKADITSLEKGINNLISLAEKGLGDLDTLAQRITNNRVELESKKKDLRQAEAILSLRSDNDIQDSDRKTVEGRIKLQLAIKSFVKEIIFDYDKQEITIRLLNGKSFSGISVAREDKDFDHSSMFEVLQKSLLDVDGVCL

SEQ ID NO: 6412 - DNA, 50 bp, Escherichia coli
  source 1..50: mol_type = genomic DNA
agggtgcataaaaaagtgaagattatgattttcacttcctaaaacaccct

SEQ ID NO: 6413 - DNA, 40 bp, Escherichia coli; identical to SEQ ID NO: 6373
  source 1..40: mol_type = genomic DNA

SEQ ID NO: 6414 - DNA, 40 bp, Escherichia coli; identical to SEQ ID NO: 6374
  source 1..40: mol_type = genomic DNA

SEQ ID NO: 6415 - DNA, 50 bp, Escherichia coli; identical to SEQ ID NO: 6360
  source 1..50: mol_type = genomic DNA

SEQ ID NO: 6416 - protein, 514 aa, Escherichia coli
MKKVYSYIRFSSTKQAFGDSHRRQSKAIQDWLANHPDHILDESLSFEDLGRSAFHGDHLKEGGALRAFLEAVKQGLIPPDSVLLVESLDRVSRQSISHAQETIRGILEQGITVVTLIDGETYNRQSLDDSLALIRMIILQERSHNESVIKSDRIKMAWSHKRQQFEQDGTKITGNCPGWLKLNSDKKSFSLIPHHIETIHRIFDEKLSGKSLHAIARDLNLENIPTITNKRVDTGWTPTRVRDLLLKESLIGVAYGVSDYFPPAISKEKFHAVQMIRGQGKGKKPTSRQPSSIDILKGICKCAECGSTLRQRNTKKTPEGRYPRGYLECRNRQLGRCNSKAFNRSLIEDILIQKVFPTLQYLSLKSNGDNISVTTLKADITSLEKGINNLISLAEKGLGDLDTLAQRITNNRVELESKKKDLRQAEAILSLRSDNDIQDSDRKTVEGRIKLQLAIKSFVKEIIFDYDKQEITIRLLNGKSFSGISVAREDKDFDHSSMFEVLQKSLLDVDGVCL

SEQ ID NO: 6417 - DNA, 50 bp, Escherichia coli; identical to SEQ ID NO: 6412
  source 1..50: mol_type = genomic DNA

SEQ ID NO: 6418 - DNA, 40 bp, Escherichia coli; identical to SEQ ID NO: 6373
  source 1..40: mol_type = genomic DNA

SEQ ID NO: 6419 - DNA, 40 bp, Escherichia coli; identical to SEQ ID NO: 6374
  source 1..40: mol_type = genomic DNA

SEQ ID NO: 6420 - DNA, 50 bp, Escherichia coli; identical to SEQ ID NO: 6360
  source 1..50: mol_type = genomic DNA

SEQ ID NO: 6421 - protein, 514 aa, Escherichia coli
MKKVYSYIRFSSTKQAFGDSHRRQSKAIQDWLANHPDHILDESLSFEDLGRSAFHGDHLKEGGALRAFLEAVKQGLIPSDSVLLVESLDRVSRQSISHAQETIRGILEQGITVVTLSDGETYNRQSLDDSLALIRMIILQERSHNESVIKSDRIKKAWSHKRQQFEQDGTKITGNCPGWLKLNSDKKSFSLIPHHIETIHRIFDEKLSGKSLHAIARDLNLENIPTITNKRVDTGWTPTRVRDLLLKESLIGVAYGVSDYFPPAISKEKFHAVQMIRGQGKGKKPTSRQPSSIDILKGICKCAECGSTLRQRNTKKTPEGRYPRGYLECRNRQLRRCNSKAFNRSLIEDILIQKVFPTLQYLSLKSNGDNISVTTLKADITSLEKGINNLISLAEKGLGDLDTLAQRITNNRVELESKKKDLRQAEAILSLRSDNDIQDSDRKTVEGRIKLQLAIKSFVKEIIFDYDKQEITIRLLNGKSFSGISVAREDKDFDHSSMFEVLQKSLLDVDGVCL

SEQ ID NO: 6422 - DNA, 50 bp, Escherichia coli; identical to SEQ ID NO: 6357
  source 1..50: mol_type = genomic DNA

SEQ ID NO: 6423 - DNA, 40 bp, Escherichia coli; identical to SEQ ID NO: 6373
  source 1..40: mol_type = genomic DNA

SEQ ID NO: 6424 - DNA, 40 bp, Escherichia coli; identical to SEQ ID NO: 6374
  source 1..40: mol_type = genomic DNA

SEQ ID NO: 6425 - DNA, 50 bp, Escherichia coli; identical to SEQ ID NO: 6360
  source 1..50: mol_type = genomic DNA

SEQ ID NO: 6426 - protein, 514 aa, Escherichia coli
MKKVYSYIRFSSTKQAFGDSHRRQSKAIQDWLANHPDHILDESLSFEDLGRSAFHGDHLKEGGALRAFLEAVKQGLIPSDSVLLVESLDRVSRQSISHAQETIRGILEQGITVVTLSDGETYNRQSLDDSLALIRMIILQERSHNESVIKSDRIKKAWSHKRQQFEQDGTKITGNCPGWLKLNSDKKSFSLIPHHIETIHRIFDEKLSGKSLHAIARDLNLENIPTITNKRVDTGWTPTRVRDLLLKESLIGVAYGVSDYFPPAISKEKFHAVQMIRGQGKGKKPTSRQPSSIDILKGICKCAECGSTLRQRNTKKTPEGRYPRGYLECRNRQLGRCNSKAFNRSLIEDILIQKVFPTLQYLGLKSNGDNISVTTLKADITSLEKGINNLISLAEKGLGDLDTLAQRITNNRVELESKKKDLRQAEAILSLRSDNDIQDSDRKTVEGRIKLQLAIKSFVKEIIFDYDKQEITIRLLNGKSFSGISVAREDKDFDHSSMFEVLQKSLLDVDGVCL

SEQ ID NO: 6427 - DNA, 50 bp, Escherichia coli; identical to SEQ ID NO: 6357
  source 1..50: mol_type = genomic DNA

SEQ ID NO: 6428 - DNA, 40 bp, Escherichia coli; identical to SEQ ID NO: 6373
  source 1..40: mol_type = genomic DNA

SEQ ID NO: 6429 - DNA, 40 bp, Escherichia coli; identical to SEQ ID NO: 6374
  source 1..40: mol_type = genomic DNA

SEQ ID NO: 6430 - DNA, 50 bp, Escherichia coli; identical to SEQ ID NO: 6360
  source 1..50: mol_type = genomic DNA

SEQ ID NO: 6431 - protein, 514 aa, Escherichia coli; identical to SEQ ID NO: 6411

SEQ ID NO: 6432 - DNA, 50 bp, Escherichia coli; identical to SEQ ID NO: 6412
  source 1..50: mol_type = genomic DNA

SEQ ID NO: 6433 - DNA, 40 bp, Escherichia coli; identical to SEQ ID NO: 6408
  source 1..40: mol_type = genomic DNA

SEQ ID NO: 6434 - DNA, 40 bp, Escherichia coli; identical to SEQ ID NO: 6409
  source 1..40: mol_type = genomic DNA

SEQ ID NO: 6435 - DNA, 50 bp, Escherichia coli; identical to SEQ ID NO: 6360
  source 1..50: mol_type = genomic DNA

SEQ ID NO: 6436 - protein, 514 aa, Escherichia coli; identical to SEQ ID NO: 6421

SEQ ID NO: 6437 - DNA, 50 bp, Escherichia coli; identical to SEQ ID NO: 6357
  source 1..50: mol_type = genomic DNA

SEQ ID NO: 6438 - DNA, 40 bp, Escherichia coli; identical to SEQ ID NO: 6378
  source 1..40: mol_type = genomic DNA

SEQ ID NO: 6439 - DNA, 40 bp, Escherichia coli; identical to SEQ ID NO: 6379
  source 1..40: mol_type = genomic DNA

SEQ ID NO: 6440 - DNA, 50 bp, Escherichia coli; identical to SEQ ID NO: 6360
  source 1..50: mol_type = genomic DNA

SEQ ID NO: 6441 - protein, 514 aa, Escherichia coli; identical to SEQ ID NO: 6421

SEQ ID NO: 6442 - DNA, 50 bp, Escherichia coli; identical to SEQ ID NO: 6357
  source 1..50: mol_type = genomic DNA

SEQ ID NO: 6443 - DNA, 40 bp, Escherichia coli; identical to SEQ ID NO: 6368
  source 1..40: mol_type = genomic DNA

SEQ ID NO: 6444 - DNA, 40 bp, Escherichia coli; identical to SEQ ID NO: 6369
  source 1..40: mol_type = genomic DNA

SEQ ID NO: 6445 - DNA, 50 bp, Escherichia coli; identical to SEQ ID NO: 6360
  source 1..50: mol_type = genomic DNA

SEQ ID NO: 6446 - protein, 514 aa, Escherichia coli; identical to SEQ ID NO: 6421

SEQ ID NO: 6447 - DNA, 50 bp, Escherichia coli; identical to SEQ ID NO: 6357
  source 1..50: mol_type = genomic DNA

SEQ ID NO: 6448 - DNA, 40 bp, Escherichia coli; identical to SEQ ID NO: 6408
  source 1..40: mol_type = genomic DNA

SEQ ID NO: 6449 - DNA, 40 bp, Escherichia coli; identical to SEQ ID NO: 6409
  source 1..40: mol_type = genomic DNA

SEQ ID NO: 6450 - DNA, 50 bp, Escherichia coli; identical to SEQ ID NO: 6360
  source 1..50: mol_type = genomic DNA

SEQ ID NO: 6451 - protein, 514 aa, Escherichia albertii
MKKVYSYIRFSSTKQAFGDSHRRQSKAIQDWLASHPDHILDESLSFEDLGRSAFHGDHLKEGGALRAFLEAVKQGLIPSDSVLLVESLDRVSRQSISHAQETIRAILEQGITVVTLSDGETYNRQSLDDSLALIRMIILQERSHNESVIKSDRIKKVWSHKRQQFEQDGTKITGNCPGWLKLNSDKKSFSLIPHHVETIHRIFDEKLSGKSLHAIARDLNLENIPTITNKRVDTGWTPTRVRDLLLKESLIGVAYGVSDYFPPAISKEKFHAVQMIRGQGKGKKPTSRQPSSIDILKGICKCAECGSTLRQRNTKKTPEGRYPRGYLECRNRQLGRCNSKAFNRSLIEDILIQKVFPTLQYLSLESNGDNISVTTLKADITSLEKGIDNLISLAEKGLGDLDTLAQRITNNRVELESKKKDLRQAEAILSLRSDNDIQDSDRKTVEGRIKLQLAIKSFVKEIIFDYDKQEIAIRLLNGKSFSGISVAREDKDFDHSSMFEALQKSLLDIDEVYL

SEQ ID NO: 6452 - DNA, 50 bp, Escherichia albertii; identical to SEQ ID NO: 6357
  source 1..50: mol_type = genomic DNA

SEQ ID NO: 6453 - DNA, 40 bp, Escherichia albertii; identical to SEQ ID NO: 6358
  source 1..40: mol_type = genomic DNA

SEQ ID NO: 6454 - DNA, 40 bp, Escherichia albertii; identical to SEQ ID NO: 6359
  source 1..40: mol_type = genomic DNA

SEQ ID NO: 6455 - DNA, 50 bp, Escherichia albertii; identical to SEQ ID NO: 6360
  source 1..50: mol_type = genomic DNA

SEQ ID NO: 6456 - protein, 514 aa, Escherichia coli
MKKVYSYIRFSSTKQAFGDSHRRQSKAIQDWLANHPDHILDESLSFEDLGRSAFHGDHLKEGGALRAFLEAVKQGLIPPDSVLLVESLDRVSRQSISHAQETIRGILEQGITVVTLSDGETYNRQSLDDSLALIRMIILQERSHNESVIKSDRIKMAWSHKRQQFEQDGTKITGNCPGWLKLNSDKKSFSLIPHHIETIHRIFDEKLSGKSLHAIARDLNLENIPTITNKRVDTGWTPTRVRDLLLKESLIGVAYGVSDYFPPAISKEKFHAVQMIRGQGKGKKPTSRQPSSIDILKGICKCAECGSTLRQRNTKKTPEGRYPRGYLECRNRQLGRCNSKAFNRSLIEDILIQKVFPTLQYLSLKSNGDNISVTTLKADITSLEKGINNLISLAEKGLGDLDTLAQRITNNRVELESKKKDLRQAEAILSLMSDNDIQDSDRKTVEGRIKLQLAIKSFVKEIIFDYDKQEITIRLLNGKSFSGISVAREDKDFDHSSMFEVLQKSLLDVDGVCL

SEQ ID NO: 6457 - DNA, 50 bp, Escherichia coli; identical to SEQ ID NO: 6412
  source 1..50: mol_type = genomic DNA

SEQ ID NO: 6458 - DNA, 40 bp, Escherichia coli; identical to SEQ ID NO: 6368
  source 1..40: mol_type = genomic DNA

SEQ ID NO: 6459 - DNA, 40 bp, Escherichia coli; identical to SEQ ID NO: 6369
  source 1..40: mol_type = genomic DNA

SEQ ID NO: 6460 - DNA, 50 bp, Escherichia coli; identical to SEQ ID NO: 6360
  source 1..50: mol_type = genomic DNA

SEQ ID NO: 6461 - protein, 514 aa, Escherichia coli
MKKVYSYIRFSSTKQAFGDSHRRQSKAIQDWLANHPDHILDESLSFEDLGRSAFHGDHLKEGGALRAFLEAVKQGLISPDSVLLVESLDRVSRQSISHAQETIRGILEQGITVVTLSDGETYNRQSLDDSLALIRMIILQERSHNESVIKSDRIKKAWSHKRQQFEQDGTKITGNCPGWLKLNSDKKSFSLIPHHIETIHRIFDEKLSGKSLHAIARDLNLENIPTITNKRVDTGWTPTRVRDLLLKESLIGVAYGVSDYFPPAISKEKFHAVQMIRGQGKGKKPTSRQPSSIDILKGICKCAECGSTLRQRNTKKTPEGRYPRGYLECRNRQLGRCNSKAFNRSLIEGILIQKVFPTLQYLSLKSNGDNISVTTLKADITSLKKGINNLISLAEKGLGDLDTLAQRITNNRVELESKKKDLRQAEAILSLRSDNDIQDSDRKTVEGRIKLQLAIKSFVKEIIFDNDKQEITIRLLNGKSFSGISVAREDKDFDHSSMFEVLQKSLLDVDGVCL

SEQ ID NO: 6462 - DNA, 50 bp, Escherichia coli; identical to SEQ ID NO: 6357
  source 1..50: mol_type = genomic DNA

SEQ ID NO: 6463 - DNA, 40 bp, Escherichia coli; identical to SEQ ID NO: 6408
  source 1..40: mol_type = genomic DNA

SEQ ID NO: 6464 - DNA, 40 bp, Escherichia coli; identical to SEQ ID NO: 6409
  source 1..40: mol_type = genomic DNA

SEQ ID NO: 6465 - DNA, 50 bp, Escherichia coli; identical to SEQ ID NO: 6360
  source 1..50: mol_type = genomic DNA

SEQ ID NO: 6466 - protein, 514 aa, Escherichia coli
MKKVYSYIRFSSTKQAFGDSHRRQSKAIQDWLANHPDHILDESLSFEDLGRSAFHGDHLKEGGALRAFLEAVKQGLIPPDSVLLVESLDRVSRQSISHAQETIRGILEQGITVVTLSDGETYNRQSLDDSLALIRMIILQERSHNESVIKSDRIKKAWSHKRQQFEQDGTKITGNCPGWLKLNSDKKSFSLIPHHIETIHRIFDEKLSGKSLHAIARDLNLENIPTITNKRVDTGWTPTRVRDLLLKESLIGVAYRVSDYFPPAISKEKFHAVQMIRGQGKGKKPTSRQPSSIDILKGICKCAECGSTLRQRNTKKTPEGRYPRGYLECRNRQLGRCNSKAFNRSLIEDILIQKVFPTLQYLSLKSNGDNISVTTLKADITSLEKGINNLISLAEKGLGDLDTLAQRITNNRVELESKKKDLRQAEAILSLRSDNDIQDSDRKTVEGRIKLQLAIKSFVKEIIFDYDKQEITIRLLNGKSFSGISVAREDKDFDHSSMFEVLQKSLLDVDGVCL

SEQ ID NO: 6467 - DNA, 50 bp, Escherichia coli; identical to SEQ ID NO: 6357
  source 1..50: mol_type = genomic DNA

SEQ ID NO: 6468 - DNA, 40 bp, Escherichia coli; identical to SEQ ID NO: 6408
  source 1..40: mol_type = genomic DNA

SEQ ID NO: 6469 - DNA, 40 bp, Escherichia coli; identical to SEQ ID NO: 6409
  source 1..40: mol_type = genomic DNA

SEQ ID NO: 6470 - DNA, 50 bp, Escherichia coli; identical to SEQ ID NO: 6360
  source 1..50: mol_type = genomic DNA

SEQ ID NO: 6471 - protein, 514 aa, Escherichia coli; identical to SEQ ID NO: 6426

SEQ ID NO: 6472 - DNA, 50 bp, Escherichia coli; identical to SEQ ID NO: 6357
  source 1..50: mol_type = genomic DNA

SEQ ID NO: 6473 - DNA, 40 bp, Escherichia coli; identical to SEQ ID NO: 6408
  source 1..40: mol_type = genomic DNA

SEQ ID NO: 6474 - DNA, 40 bp, Escherichia coli; identical to SEQ ID NO: 6409
  source 1..40: mol_type = genomic DNA

SEQ ID NO: 6475 - DNA, 50 bp, Escherichia coli; identical to SEQ ID NO: 6360
  source 1..50: mol_type = genomic DNA

SEQ ID NO: 6476 - protein, 514 aa, Escherichia coli; identical to SEQ ID NO: 6411

SEQ ID NO: 6477 - DNA, 50 bp, Escherichia coli; identical to SEQ ID NO: 6412
  source 1..50: mol_type = genomic DNA

SEQ ID NO: 6478 - DNA, 40 bp, Escherichia coli; identical to SEQ ID NO: 6368
  source 1..40: mol_type = genomic DNA

SEQ ID NO: 6479 - DNA, 40 bp, Escherichia coli; identical to SEQ ID NO: 6369
  source 1..40: mol_type = genomic DNA

SEQ ID NO: 6480 - DNA, 50 bp, Escherichia coli; identical to SEQ ID NO: 6360
  source 1..50: mol_type = genomic DNA

SEQ ID NO: 6481 - protein, 514 aa, Escherichia coli
MKKVYSYIRFSSTKQAFGDSHRRQSKAIQDWLANHPDHILDESLSFEDLGRSAFHGDHLKEGGALRAFLEAVKQGLIPSDSVLLVESLDRVSRQSISHAQETIRGILEQGITVVTLSDGETYNRQSLDDSLALIRMIILQERSHNESVIKSDRIKKAWSHKRQQFEQDGTKITGNCPGWLKLNSDKKSFSLIPHHIETIHRIFDEKLSGKSLHAIARDLNLENIPTITNKRVDTGWTPTRVRDLLLKESLIGVAYGVSDYFPPAISKEKFHAVQMIRGQGKGKKPTSRQPSSIDILKGICKCAECGSTLRQRNTKKTPEGRYPRGYLECRNRQLGRCNSKAFNRSLIEDILIQKIFPTLQYLSLKSNGDNISVTTLKADITSLEKGINNLISLAEKGLGDLDTLAQRITNNRVELESKKKDLRQAEAILSLRSDNDIQDSDRKTVEGRIKLQLAIKSFVKEIIFDYDKQEITIRLLNGKSFSGISVAREDKDFDHSSMFEVLQKSLLDVDGVCL

SEQ ID NO: 6482 - DNA, 50 bp, Escherichia coli; identical to SEQ ID NO: 6357
  source 1..50: mol_type = genomic DNA

SEQ ID NO: 6483 - DNA, 40 bp, Escherichia coli; identical to SEQ ID NO: 6373
  source 1..40: mol_type = genomic DNA

SEQ ID NO: 6484 - DNA, 40 bp, Escherichia coli; identical to SEQ ID NO: 6374
  source 1..40: mol_type = genomic DNA

SEQ ID NO: 6485 - DNA, 50 bp, Escherichia coli; identical to SEQ ID NO: 6360
  source 1..50: mol_type = genomic DNA

SEQ ID NO: 6486 - protein, 514 aa, Escherichia coli
MKKVYSYIRFSSTKQAFGDSHRRQSKAIQDWLANHPDHILDESLSFEDLGRSAFHGDHLKEGGALRAFLEAVKQGLIPPDSVLLVESLDRVSRQSISHAQETIRGILEQGITVVTLSDGETYNRQSLDDSLVLIRMIILQERSHNESVIKSDRIKKAWSHKRQQFEQDGTKITGNCPGWLKLNSDKKSFSLIPHHIETIHRIFDEKLSGKSLHAIARDLNLENIPTITNKKVDTGWTPTRVRDLLLKESLIGVAYGVSDYFPPAISKEKFHAVQMIRGQGKGKKPTSRQPSSIDILKGICKCAECGSTLRQRNTKKTPEGRYPRGYLECRNRQLGRCNSKAFNRSLIEDILIQKVFPTLQYLSLKSNGDNISVTTLKADITSLEKGINNLISLAEKGLGDLDTLAQRITNNRVELESKKKDLRQAEAILSLRSDNDIQDSDRKTVEGRIKLQLAIKSFVKEIIFDYDKQEITIRLLNGKSFSGISVAREDKDFDHSSMFEVLQKSLLDVDGVCL

SEQ ID NO: 6487 - DNA, 50 bp, Escherichia coli; identical to SEQ ID NO: 6357
  source 1..50: mol_type = genomic DNA

SEQ ID NO: 6488 - DNA, 40 bp, Escherichia coli; identical to SEQ ID NO: 6378
  source 1..40: mol_type = genomic DNA

SEQ ID NO: 6489 - DNA, 40 bp, Escherichia coli; identical to SEQ ID NO: 6379
  source 1..40: mol_type = genomic DNA

SEQ ID NO: 6490 - DNA, 50 bp, Escherichia coli; identical to SEQ ID NO: 6360
  source 1..50: mol_type = genomic DNA

SEQ ID NO: 6491 - protein, 514 aa, Escherichia coli
MKKVYSYIRFSSTKQAFGDSHRRQSKAIQDWLANHPDHILDESLSFEDLGRSAFHGDHLKEGGALRAFLEAVKQGLIPSDSVLLVESLDRVSRQSISHAQETIRGILEQGITVVTLSDGETYNRQSLDDSLALIRMIILQERSHNESVIKSDRIKKAWSHKRQQFEQDGTKITGNCPGWLKLNSDKKSFSLIPHHIETIHRIFDEKLSGKSLHAIARDLNLENIPTITNKRVDTGWTPTRVRDLLLKESLIGVAYGVSDYFPPAISKEKFHAVQMIRGQGKGKKPTSRQPSSIDILKGICKCAECGSTLRQRNTKKTPEGRYPRGYLECRNRQLGRCNSKAFNRSLIEDILIQKVFPTLQYLSLKSNGDNISVTTLKADITSLEKGINNLISLAEKGLGDLDTLAQRITNNRVELESKKKDLRQAEAILSLRLDNDIQDSDRKTVEGRIKLQLAIKSFVKEIIFDYDKQEITIRLLNGKSFSGISVAREDKDFDHSSMFEVLQKSLLDVDGVCL

SEQ ID NO: 6492 - DNA, 50 bp, Escherichia coli; identical to SEQ ID NO: 6357
  source 1..50: mol_type = genomic DNA

SEQ ID NO: 6493 - DNA, 40 bp, Escherichia coli; identical to SEQ ID NO: 6373
  source 1..40: mol_type = genomic DNA

SEQ ID NO: 6494 - DNA, 40 bp, Escherichia coli; identical to SEQ ID NO: 6374
  source 1..40: mol_type = genomic DNA

SEQ ID NO: 6495 - DNA, 50 bp, Escherichia coli; identical to SEQ ID NO: 6360
  source 1..50: mol_type = genomic DNA

SEQ ID NO: 6496 - protein, 514 aa, Escherichia coli
MKKVYSYIRFSSTKQAFGDSHRRQSKAIQDWLANHPDHILDESLSFEDLGRSAFHGDHLKEGGALRAFLEAVKQGLIPSDSVLLVESLDRVSRQSISHAQETIRGILEQGITVVTLSDGETYNRQSLDDSLALIRMIILQERSHNESVIKSDRIKKAWSHKRQQFEQDGTKITGNCPGWLKLNSDKKSFSLIPHHIETIHRIFDEKLSGKSLHAIARDLNLENIPTITNKRVDTGWTPTRVRDLLLKESLIGVSYGVSDYFPPAISKEKFHAVQMIRGQGKGKKPTSRQPSSIDILKGICKCAECGSTLRQRNTKKTPEGRYPRGYLECRNRQLGRCNSKAFNRSLIEDILIQKVFPTLQYLSLKSNGDNISVTTLKADITSLEKGINNLISLAEKGLGDLDTLAQRITNNRVELESKKKDLRQAEAILSLRSDNDIQDSDRKTVEGRIKLQLAIKSFVKEIIFDYDKQEITIRLLNGKSFSGISVAREDKDFDHSSMFEVLQKSLLDVDGVCL

SEQ ID NO: 6497 - DNA, 50 bp, Escherichia coli; identical to SEQ ID NO: 6357
  source 1..50: mol_type = genomic DNA

SEQ ID NO: 6498 - DNA, 40 bp, Escherichia coli; identical to SEQ ID NO: 6378
  source 1..40: mol_type = genomic DNA

SEQ ID NO: 6499 - DNA, 40 bp, Escherichia coli; identical to SEQ ID NO: 6379
  source 1..40: mol_type = genomic DNA

SEQ ID NO: 6500 - DNA, 50 bp, Escherichia coli; identical to SEQ ID NO: 6360
  source 1..50: mol_type = genomic DNA

SEQ ID NO: 6501 - protein, 461 aa, Mycobacteroides abscessus
MSVKAVIYTRISEDQTGEQEGVTRQLEDCVKLADQLGWEVVAHYDDNDLSAFNGKLRPGFETLLKAMASGEFTALLVWHPDRLYRSPKDLERIIEIADARRVKIATVRAGDMDLSTPAGRMVARILGSVARQESEHKGDRQRRANEQRAAEGKWYTANRCFGYTHDGVPLEPEATAVRTAVADVLAGKSIRKVGMEWNEQGLKTTLGTSWNSPRVRRLLVNPRYAALRTYRGVVVGPGAWEPLIDADTHRGLVAFLSDPTRIKCTSFERKYIGSGVYRCGKCEGGLMKAAQPGGRKNRAYVCRDHAHVLRAGEPVDAYVEALVLEYLSRPDAKLVLDDGRDVDVAELQAQRAGLQARLDELASLFADGAIDGSQLRRGTNELRSRLAVLDSQLADLARTNPVADLLGAGDQLAEKWTALSKDMQGKIVSELMVVTILPAPRGRRAFDPDYIQIDWRTGKAA

SEQ ID NO: 6502 - DNA, 50 bp, Mycobacteroides abscessus
  source 1..50: mol_type = genomic DNA
aggtacccaacctaaagggtcttgcccaagaccccctagttgagatacct

SEQ ID NO: 6503 - DNA, 40 bp, Mycobacteroides abscessus
  source 1..40: mol_type = genomic DNA
cagcgaattgtgttgaccgccaaggagcgtggctgcacct

SEQ ID NO: 6504 - DNA, 40 bp, Mycobacteroides abscessus
  source 1..40: mol_type = genomic DNA
cagcgaattgtgttgaccgggaaggagcgtggctgcacct

SEQ ID NO: 6505 - DNA, 50 bp, Mycobacteroides abscessus
  source 1..50: mol_type = genomic DNA
aggtagccacacacaaggatctggggaaagagcaccgggcagagagacca

SEQ ID NO: 6506 - protein, 518 aa, Salinicoccus roseus
MAQNKRGEAQDQQGLQNLQACIYLRISRDKGEDVDSLRNHRDRLTALAEKEGYNHTVYADGVASSVDGDRAEYNRMIQDIKQGHYSRLYVHDIDRLSRSSANLLSLAEILEDHCSIVVTPTAEYDLKQDSSALLFGLGSVLASAEYRQIKKRLMLGKLAGTKEGRFQNSVTPFGYKKDTEGKLVPDEAETQTYREIIDMALNGMSYNAIVNKLEKRGITRRTGTKFHPNAIKRLIDKPVYRGILEYSNTMGSVRAQSAHTALLSEAEYQLLQEMAHNRATSYNRTRQSTPYITSAMLICAECGTRLTMNSTYNPVYKDGQVISKRRCDVIRPCKGCGMHGNSLEMVEQALLGALKNYAEAVEDELRKLKLEDSTQLVQKYHSRIKETERSISKVEDKIDNLVSLAVDGLINRETFKQRQDKLTEEKENLQELMQSYEANLLQMDSSTYEQRLKHILSNLTKIRTTKEIYSDNSMTKEEQREQISNINTFFKSVISRVEYKKEGKGVKHIPQISIEWTE

SEQ ID NO: 6507 - DNA, 50 bp, Salinicoccus roseus
  source 1..50: mol_type = genomic DNA
aattgtagttacatatcagcctatacatagagagtcacataactacaata

SEQ ID NO: 6508 - DNA, 40 bp, Salinicoccus roseus
  source 1..40: mol_type = genomic DNA
gacgatattcactccgcacacgacggccggaatcacgatc

SEQ ID NO: 6509 - DNA, 40 bp, Salinicoccus roseus
  source 1..40: mol_type = genomic DNA
gacgatattcactccgcacctgacggccggaatcacgatc

SEQ ID NO: 6510 - DNA, 50 bp, Salinicoccus roseus
  source 1..50: mol_type = genomic DNA
cattgtagatgggcatcagccaatctattgagggaccgaatacaacaaaa

SEQ ID NO: 6511 - protein, 532 aa, Rhizobium leguminosarum
MKPKAYSYIRMSTDVQLKGDSLRRQSEESRRYADENDLDLVEDFRLEDIGVSAFHGKNVAQGALGEFLVLCEQQIIQAGSYLIVESLDRISRQNPQVATSLFLQILGAGINIVTLTDRHVYRAGSSDFTDIIVSVVIMSRAYEESRTKSLRVGAAWENKRRNIHDKKLTQVAPIWLRLSADRTAFETVPERVAVLRWIFDEADQGKGSLQISRALNQQGVPTFAPSKGWYESYVSKVLTNRAVLGEFQPHRYIDGKRMRSGEPIQNYFPAIVTREQFERIQVGRAVRRVRGAGRKGQNNINLFQGVATCGYCSARMMIVNKGTGPKGGVYLRCDRARRSADCSASGWPLDHFEGAFLWFVEELDIGAIVQGAASEEARKALEGQAATISADLETQKKIRERAFDLLGEPTSATAFVRGKIDDASMKIDELERKLASIKEATMIAAASQKRPLEEVRLMIKEIGGWQTADGDSRSRVADWIKRNVRELLLFTNGLDQSDQVAADAKLRQFSVTLTGGEFRTGLSGILCGGPVH

SEQ ID NO: 6512 - DNA, 50 bp, Rhizobium leguminosarum
  source 1..50: mol_type = genomic DNA
cgaattttaatccacctcaaaatccaaatgttgaggtggattaattaatg

SEQ ID NO: 6513 - DNA, 40 bp, Rhizobium leguminosarum
  source 1..40: mol_type = genomic DNA
gcccggcaaggtcggcatgcagatcgtcggcctgcccgac

SEQ ID NO: 6514 - DNA, 40 bp, Rhizobium leguminosarum
  source 1..40: mol_type = genomic DNA
gcccggcaaggtcggcatgctgatcgtcggcctgcccgac

SEQ ID NO: 6515 - DNA, 50 bp, Rhizobium leguminosarum
  source 1..50: mol_type = genomic DNA
tgaattttatgacccctcaaaattcttatgttgaaatctaatgaccaatg

SEQ ID NO: 6516 - protein, 504 aa, Clostridium thermobutyricum
MENVCIYLRKSRADEEMEKTLGHGETLSKHRKALLKIAKEKNLHIVEIKEEIVSGESLFFRPKMLELLKEVEDKKYNGVLVMDMQRLGRGDMKEQGIILETFKNAKTKIITPNKIYDLNNDFDEEYSEFEAFMSRKELKMITRRMQGGRVRSVEDGNYIASAPPYGYDIDYILKSRTLKINEHEAEGVKIIFDSYINGNGASAISEKLNNLGFKTKLGNNFSPSSVLTIIKNPVYIGKVTWKKKEIKKSKTLGKVKDTRTRDKSEWIIANGKHKPIISEEVWNNTQEVLKNKYHIPYQLTNAPINPLAGLLVCGVCGKAMVMRPSRGILRVMCVHKCGNKSVRFDYVEKAIIDSLEQYYSNKKLEVKKQKTIQNTSNEEKELILLENELSTLNKQRLSLFDFLERGIYTEDVFLERSKNIDSRINLVESEMKKISEKIKFKKTKKDTKALLQTLNNAIENYKSSSDVITKNSYLKSILNDITYIKTPEQKRNSFSITLNPKLRF

SEQ ID NO: 6517 - DNA, 50 bp, Clostridium thermobutyricum
  source 1..50: mol_type = genomic DNA
tacatacatcatattgagtgttattcattacatactatatgttgtatgta

SEQ ID NO: 6518 - DNA, 40 bp, Clostridium thermobutyricum
  source 1..40: mol_type = genomic DNA
aacatctattaaacaaatttcatttccttctttatcaacc

SEQ ID NO: 6519 - DNA, 40 bp, Clostridium thermobutyricum
  source 1..40: mol_type = genomic DNA
aacatctattaaacaaatttaatttccttctttatcaacc

SEQ ID NO: 6520 - DNA, 50 bp, Clostridium thermobutyricum
  source 1..50: mol_type = genomic DNA
tacatacatatatatgagtgtatatatatacatacatatatgtgtatata

SEQ ID NO: 6521 - protein, 617 aa, Escherichia coli
MLIQTKTRRLPMKKVFVYHRVSSDQQLDGSGIARQAELLEAYLKRTNILAEMDDPEPVIITESGGVSAFKGHNMLITSGLGAWMQEVRAAMWDGSHLVYENGDRFSRQNPFTVIGYINDLINHNITIHDATMNIIISRQNSAMLPMVLMNAQRAYDESKYKSDRIRKGWAKKREQAFNKGTIVTNKRPQWIEVEKDKYVLNEKAAVVKEIFALYQTGMGCPTIAKKLQGKEGEQYKFNRPWTGELVHKILTNRRVTGKIFISETIRNHADIENPVTQKKYDMDVYPVVINEEEFELVQELLKSRRPNAGRVTVKKDGQEEVLIKSNLFSGIARCTECGGPMYHNVVRAKRTPKKGDPKIEEYRYIRCLNERDGLCENKAMTYETVERFVVEHLLGMDLITVMKEQEFNPEIEVLRIQIDQVKEQITNYENGIERRKSAGKIITFDMREDLDDAKSELERLLARQASLATVQVDVAVLQDVNVTELYNVNNVDIRTRYENELNKIVSTIRLKRNGTSYTIDISYKQNELKRHVLFVENKKKEQTLISEVIIEDVDGGKFYYTPSFMIRLEDGEIRFQHTNEDLSIVDYSLLLNYVDAVDRNDTVGVWMRNQFNFLTSN

SEQ ID NO: 6522 - DNA, 50 bp, Escherichia coli
  source 1..50: mol_type = genomic DNA
atattgtaattagcaatacacactcaaatgtgttatgcttatacaaacaa

SEQ ID NO: 6523 - DNA, 40 bp, Escherichia coli; identical to SEQ ID NO: 1288
  source 1..40: mol_type = genomic DNA

SEQ ID NO: 6524 - DNA, 40 bp, Escherichia coli
  source 1..40: mol_type = genomic DNA
tttttgcatgataatcatataaataggtgccattacagca

SEQ ID NO: 6525 - DNA, 50 bp, Escherichia coli
  source 1..50: mol_type = genomic DNA
atattgtaaagaggtaaacaaacttagaggtgttatttagaggtaaacaa

SEQ ID NO: 6526 - protein, 617 aa, Escherichia coli
MLIQTKIKRLPMKKVFVYHRVSSDQQLDGSGIARQAELLEAYLKRTNILAEMDDPEPVIITESGGVSAFKGHNMLITSGLGAWMQEVRAAMWDGSHLVYENGDRFSRQNPFMVIGYINDLINHNITIHDATMNIIISRQNSAMLPMVLMNAQRAYDESKYKSDRIRKGWAKKREQAFNKGTIVTNKRPQWIEVEKDKYVLNEKAAVVKEIFALYQTGMGCPTIAKKLQGKEGEQYKFNRPWTGELVHKILTNRRVTGKIFISEIIRNHADIENPVTQKKYDRDVYPVVINEEEFELVQELLKSRRPNAGRVTVKKDGQEEVLIKSNLFSGIARCTECGGPMYHNVVRAKRTPKKGDPKIEEYRYIRCLNERDGLCENKAMTYETVERFVVEHLLGMDLSTVMEEQEFNPEIEVLRIQIDQVKEQITNYENGIERRKSAGKIITFDMREDLDDAKSELERLLARQASLATVQVDVAVLQDVNVTELYNVNNVDIRTRYENELNKIVSTIRLKRNGTSYTIDISYKQNELKRHVLFVENKKKEQTLISEVIIEDVDGGKFYYTPSFMIRLEDGEIRFQHTNEDLSIVDYSLLLNYVDAVDRNDTVGVWMRNQFNFLTSN

SEQ ID NO: 6527 - DNA, 50 bp, Escherichia coli; identical to SEQ ID NO: 6522
  source 1..50: mol_type = genomic DNA

SEQ ID NO: 6528 - DNA, 40 bp, Escherichia coli; identical to SEQ ID NO: 1288
  source 1..40: mol_type = genomic DNA

SEQ ID NO: 6529 - DNA, 40 bp, Escherichia coli; identical to SEQ ID NO: 6524
  source 1..40: mol_type = genomic DNA

SEQ ID NO: 6530 - DNA, 50 bp, Escherichia coli; identical to SEQ ID NO: 6525
  source 1..50: mol_type = genomic DNA

SEQ ID NO: 6531 - protein, 617 aa, Escherichia coli
MLIQTKTRRLPMKKVFVYHRVSSDQQLDGSGIARQAELLEAYLKRTNILAEMDDPEPVIITESGGVSAFKGHNMLITSGLGAWMQEVRAAMWDGSHLVYENGDRFSRQNPFTVIGYINDLINHNITIHDATMNIIISRQNSAMLPMVLMNAQRAYDESKYKSDRIRKGWAKKREQAFNKGTIVTNKRPQWIEVVKDKYVLNEKAAVVKEIFALYQTGMGCPTIAKKLQGKEGEQYKFNRPWTGELVHKILTNRRVTGKIFISETIRNHADIENPVTQKKYDMDVYPVVINEEEFELVQELLKSRRPNAGRVTVKKDGQEEVLIKSNLFSGIARCTECGGPMYHNVVRAKRTPKKGDPKIEEYRYIRCLNERDGLCENKAMTYETVERFVVEHLLGMDLITVMKEQEFNPEIEVLRIQIDQVKEQITNYENGIERRKSAGKIITFDMREDLDDAKSELERLLARQASLATVQVDVAVLQDVNVTELYNVNNVDIRTRYENELNKIVSTIRLKRNGTSYTIDISYKQNELKRHVLFVENKKKEQTLISEVIIEDVDGGKFYYTPSFMIRLEDGEIRFQHTNEDLSIVDYSLLLNYVDAVDRNDTVGVWMRNQFNFLTSN

SEQ ID NO: 6532 - DNA, 50 bp, Escherichia coli; identical to SEQ ID NO: 6522
  source 1..50: mol_type = genomic DNA

SEQ ID NO: 6533 - DNA, 40 bp, Escherichia coli; identical to SEQ ID NO: 1288
  source 1..40: mol_type = genomic DNA

SEQ ID NO: 6534 - DNA, 40 bp, Escherichia coli; identical to SEQ ID NO: 6524
  source 1..40: mol_type = genomic DNA

SEQ ID NO: 6535 - DNA, 50 bp, Escherichia coli; identical to SEQ ID NO: 6525
  source 1..50: mol_type = genomic DNA

SEQ ID NO: 6536 - protein, 617 aa, Escherichia coli
MLIQTKTRRLPMKKVFVYHRVSSDQQLDGSGIARQAELLEAYLKRTNILAEMDDPEPVIITESGGVSAFKGHNMLITSGLGAWMQEVRAAMWDGSHLVYENGDRFSRQNPFTVIGYINDLINHNITIHDATMNIIISRQNSAMLPMVLMNAQRAYDESKYKSDRIRKGWAKKREQAFNKGTIVTNKRPQWIEVEKDKYVLNEKAAVVKEIFALYQTGMGCPTIAKKLQGKEGEQYKFNRPWTGELVHKILTNRRVTGKIFISETIRNHADIENPVTQKKYDMDVYPVVINEEEFELVQELLKSRRPNAGRVTVKKDGQEEVLIKSNLFSGIARCTECGGPMYHNVVRAKRTPKKGDPKIEEYRYIRCLNERDGLCENKAMTYETVERFVVEHLLGMDLITVMKEQEFNPEIEVLRIQIDQVKEQITNYENGIERRKSAGKIITFDMREDLDDAKSELERLLARQASLATVQVDVAVLQDVNVTELYNVNNVDIRTRYENELNKIVSTIRLKRNGTSYTIDISYKQNELKRHVLFVENKKKEQTLISELIIEDVDGGKFYYTPSFMIRLEDGEIRFQHTNEDLSIVDYSLLLNYVDAVDRNDTVGVWMRNQFNFLTSN

SEQ ID NO: 6537 - DNA, 50 bp, Escherichia coli; identical to SEQ ID NO: 6522
  source 1..50: mol_type = genomic DNA

SEQ ID NO: 6538 - DNA, 40 bp, Escherichia coli; identical to SEQ ID NO: 1288
  source 1..40: mol_type = genomic DNA

SEQ ID NO: 6539 - DNA, 40 bp, Escherichia coli; identical to SEQ ID NO: 6524
  source 1..40: mol_type = genomic DNA

SEQ ID NO: 6540 - DNA, 50 bp, Escherichia coli; identical to SEQ ID NO: 6525
  source 1..50: mol_type = genomic DNA

SEQ ID NO: 6541 - protein, 500 aa, Escherichia coli
MKKVFVYHRVSSDQQLDGSGIARQAELLEAYLKRTNILAEMDDPEPVIITESGGVSAFKGHNMLITSGLGAWMQEVRAAMWDGSHLVYENGDRFSRQNPFTVIGYINDLINHNITIHDATMNIIISRQNSAMLPMVLMNAQRAYDESKYKSDRIRKGWAKKREQAFNKGTIVTNKRPQWIEVEKDKYVLNEKAAVVKEIFALYQTGMGCPTIAKKLQGKEGEQYKFNRPWTGELVHKILTNRRVTGKIFISETIRNHADIENPVTQKKYDMDVYPVVINEEEFELVQELLKSRRPNAGRVTVKKDGQEEVLIKSNLFSGIARCTECGGPMYHNVVRAKRTPKKGDPKIEEYRYIRCLNERDGLCENKAMTYETVERFVVEHLLGMDLSTVMKEQEFNPEIEVLRIQIDQVKEQITNYENGIERRKSAGKIITFDMREDLDDAKSELERLLARQASLATVQVDVAVLQDVNVTELYNVNNVDIRTRYENELNKIVSTIRLK

SEQ ID NO: 6542 - DNA, 50 bp, Escherichia coli
  source 1..50: mol_type = genomic DNA
atattgtaattagcaatacacactcaaatgtgttatgtttatacaaacaa

SEQ ID NO: 6543 - DNA, 40 bp, Escherichia coli; identical to SEQ ID NO: 1288
  source 1..40: mol_type = genomic DNA

SEQ ID NO: 6544 - DNA, 40 bp, Escherichia coli; identical to SEQ ID NO: 6524
  source 1..40: mol_type = genomic DNA

SEQ ID NO: 6545 - DNA, 50 bp, Escherichia coli; identical to SEQ ID NO: 6525
  source 1..50: mol_type = genomic DNA

SEQ ID NO: 6546 - protein, 617 aa, Escherichia coli
MLIQTKTRRLPMKKVFVYHRVSSDQQLDGSGIARQAELLEAYLKRTNILAEMDDPEPVIITESGGVSAFKGHNMLITSGLGAWMQEVRAAMWDGSHLVYENGDRFSRQNPFTVIGYINDLINHNITIHDATMNIIISRQNSAMLPMVLMNAQRAYDESKYKSDRIRKGWAKKREQAFNKGTIVTNKRPQWIEVEKDKYVLNEKATVVKEIFALYQTGMGCPTIAKKLQGKEGEQYKFNRPWTGELVHKILTNRRVTGKIFISETIRNHADIENPVTQKKYNMDVYPVVINEEEFELVQELLKSRRPNAGRVNVKKDGQEEVLIKSNLFSGIARCTECGGPMYHNVVRAKRTPKKGDPKIEEYRYIRCLNERDGLCENKAMTYETVERFVVEHLLGMDLSTVMKEQEFNPEIEVLRIQIDQVKEQITNYENGIERRKSAGKIITFDMREDLDDAKSELERLLARQASLATVQVDVAVLQDVNVTELYNVNHVDIRTRYENELNKIVSTIRLKRNGTSYTIDISYKQNELKRHVLFVENKKKEQTLISEVIIEDVDGGKFYYTPSFMIRLEDGEIRFQHTNEDLSIVDYSLLLNYVDAVDRNDTVGVWMRNQFNFLTSN

SEQ ID NO: 6547 - DNA, 50 bp, Escherichia coli; identical to SEQ ID NO: 6522
  source 1..50: mol_type = genomic DNA

SEQ ID NO: 6548 - DNA, 40 bp, Escherichia coli; identical to SEQ ID NO: 1288
  source 1..40: mol_type = genomic DNA

SEQ ID NO: 6549 - DNA, 40 bp, Escherichia coli; identical to SEQ ID NO: 6524
  source 1..40: mol_type = genomic DNA

SEQ ID NO: 6550 - DNA, 50 bp, Escherichia coli; identical to SEQ ID NO: 6525
  source 1..50: mol_type = genomic DNA

SEQ ID NO: 6551 - protein, 617 aa, Escherichia coli
MLIQTKTRRLPMKKVFVYHRVSSDQQLDGSGIARQAELLEAYLKRTNILAEMDDPEPVIITESGGVSAFKGHNMLITSGLGAWMQEVRAAMWDGSHLVYENGDRFSRQNPFTVIGYINDLINHNITIHDATMNIIISRQNSAMLPMVLMNAQRAYDESKYKSDRIRKGWAKKREQAFNKGTIVTNKRPQWIEVEKDKYVLNEKAAVVKEIFALYQTGMGCPTIAKKLQGKEGEQYKFNRPWTGELVHKILTNRRVTGKIFISETIRNHADIENPVTQKKYNMDVYPVVINEEEFELVQELLKSRRPNAGRVNVKKDGQEEVLIKSNLFSGIARCTECGGPMYHNVVRAKRTPKKGDPKIEEYRYIRCLNERDGLCENKAMTYETVERFVVEHLLGMDLSTVMKEQEFNPEIEVLRIQIDQVKEQITNYENGIERRKSAGKIITFDMREDLDDAKSELERLLARQASLATVQVDVAVLQDVNVTELYNVNHVDIRTRYENELNKIVSTIRLKRNGTSYTIDISYKQNELKRHVLFVENKKKEQTLISEVIIEDVDGGKFYYTPSFMIRLEDGEIRFQHTNEDLSIVDYSLLLNYVDAVDRNDTVGVWMRNQFNFLTSN

SEQ ID NO: 6552 - DNA, 50 bp, Escherichia coli; identical to SEQ ID NO: 6522
  source 1..50: mol_type = genomic DNA

SEQ ID NO: 6553 - DNA, 40 bp, Escherichia coli; identical to SEQ ID NO: 1288
  source 1..40: mol_type = genomic DNA

SEQ ID NO: 6554 - DNA, 40 bp, Escherichia coli; identical to SEQ ID NO: 6524
  source 1..40: mol_type = genomic DNA

SEQ ID NO: 6555 - DNA, 50 bp, Escherichia coli; identical to SEQ ID NO: 6525
  source 1..50: mol_type = genomic DNA

SEQ ID NO: 6556 - protein, 525 aa, Mobiluncus curtisii
MSTLARSVTAIPATKKPGHNVTACNPLFKRKVAAYARVSTDLEEQATSYQTQINYYTTHIQSRSDWEFAGIYTDEGISATSTKHRQGFQNMITDALNGKIDLILTKSVSRFARNTVDSLTTVRQLKDAGVEVYFEKENIWTLDSKGELLITIMSSLAQEESRSISENVTWGHRKRFQNGKVMVPYSSLLGYKKGADGNLVIDETQAPTVRLIYQLFLSGLSITEIRKELQHRGILTPRGKTKWSTSTVRSILSNEKYKGDALLQKTFTADFLTKRIEENQGQLPQYYVTGNHEPIIDPKVWDQVQYELATRHATNTAKIGLFASRLKCADCGSWYGRKTWASNTKYKHTIWRCNQKYDHPRPCQTATLRDQQIQTAFLSALGRLAKNYRGKDHLPQAITEMFNTNQLEAESSRLDDKIRALANQIEELIAENQRRAQDQEQYLATYTQLDAKYQKTLAEKHAVNAQIAAKNAKATAIKTSYSQLADKPIEHFQACQWNALIDHAIIGANQIQFIFRTGKEITVNL

SEQ ID NO: 6557 - DNA, 50 bp, Mobiluncus curtisii
  source 1..50: mol_type = genomic DNA
cttatcaaatccgacgtctaagtggatacttagacgtcgaaaatgataaa

SEQ ID NO: 6558 - DNA, 40 bp, Mobiluncus curtisii
  source 1..40: mol_type = genomic DNA
gcccggcttttagtcaatggagcgggcgacgggaatcgaa

SEQ ID NO: 6559 - DNA, 40 bp, Mobiluncus curtisii
  source 1..40: mol_type = genomic DNA
gcccggcttttagtcaatgcagcgggcgacgggaatcgaa

SEQ ID NO: 6560 - DNA, 50 bp, Mobiluncus curtisii
  source 1..50: mol_type = genomic DNA
cttatcaaaagttatgtctaacttcatactaaaacaagcaaaatgaacaa

SEQ ID NO: 6561 - protein, 605 aa, Citrobacter freundii
MKKCFIYHRVSSECQLAGTGIQRQADNLQAYVERTNLLAEMEDPEATIISDKGISAFKTNQNNLSIGELGRWMEQVRECMWDGSALVLESIDRFSRQNPFTVVAYLSELVNHNITIHDVSLNMLINRTNSAMLPIVTMSAQRAYEESKIKSDRIRDGWRRKRENAFNNGTIVTNKRPQWIDVQDDKYVLNDKVAIVREIFRLYQTGIGTPTIAKVLNAKGDEWLFESGRLWRGESVHKILKNKRVTGTIFISEIIRDYNSTSNPVEQKTYEMDVYPIAIPKEEFDLVQQLMKTRRPNNGRITTSKDTEELKKSNIFNSVCRCARCGEAMYHNVVLANRDSKKNGKFTEEYRYIRCIGERDGFCDNKALRYEVVEKFVIEHIKGMDFTQILKPNNNNPEIELVRRHIEEEKAHIQEYELGIERLKNQDKKIPFDVLTELQESRDKLKELEEHQSTFTEVQVDTDYLKTVDPSVLFDQTNIEVRSRIEQELSKIIDTIQLYRTGKHYVITLKYRNVDVLKHVLFVEAKKLPLLISGVAIERMGDTIVYSTPSFSIYMVDGDLPRLTNIEGEPLNIIDNSLLLNYVDAVDMNDTVEVWMRNKFNTLMQ

SEQ ID NO: 6562 - DNA, 50 bp, Citrobacter freundii
  source 1..50: mol_type = genomic DNA
tgtttgtttactatagccgtaattcaagtgtatactctgttcaacaaaca

SEQ ID NO: 6563 - DNA, 40 bp, Citrobacter freundii
  source 1..40: mol_type = genomic DNA
tttttgcttgataatcatacaaataggtaccgttacagca

SEQ ID NO: 6564 - DNA, 40 bp, Citrobacter freundii
  source 1..40: mol_type = genomic DNA
tttttgcttgataatcatatcaataggtaccgttacagca

SEQ ID NO: 6565 - DNA, 50 bp, Citrobacter freundii
  source 1..50: mol_type = genomic DNA
tttttttttttgcccgcaggaagttcagtgtctactagaggcaacagaca

SEQ ID NO: 6566 - protein, 537 aa, Enterococcus faecium
MKQQIYNTALYLRLSRDDELQGESSSITTQRSMLRLYAKEHHLNVIDEYIDDGWSGTNFDRPSFQRMIEDIEAGKINCVVTKDLSRLGRNYIMTGQYTELYFPSHNVRYIAIDDGVDSEKGESEIAPFKNIINEWVARDTSRKVKSAFKTKFAEGAYYGAYAPLGYKKHPDIKGKLLVDEETKWIVEKIFSLAYQGYGSAKITKILREEKVPTASWLNFTRYGTFAHIFEGKPESKRYEWTIAHVKAILKSEVYIGNSVHNRQSTVSFKSKKKVRKPESEWFRVENTHEPIIDKEVFYRVQEQIKSRRRQTKEKATPIFAGLVKCADCGWSMRFATNKANKTPYSYYSCSFYGQFGKGYCSMHYIRYDVLYQAVLERLQYWAKAVQQDEEKVLNKIQKVGNAERIREKKKKASALKKAENRQNEIDRLFAKMYEDRACEKITERNFIMLSGKYQKEQIELEQQITNLREELSKMEQDMIGAEKWIELIKEYSVPKELTAPLLNAMIEKILIHEATTNEENERIQEIEIYYRFIGKVD

SEQ ID NO: 6567 - DNA, 50 bp, Enterococcus faecium; identical to SEQ ID NO: 2592
  source 1..50: mol_type = genomic DNA

SEQ ID NO: 6568 - DNA, 40 bp, Enterococcus faecium
  source 1..40: mol_type = genomic DNA
tgtcccatgatgggatagcggctgtggagttcaagagatt

SEQ ID NO: 6569 - DNA, 40 bp, Enterococcus faecium
  source 1..40: mol_type = genomic DNA
tgtcccatgatgggatagcatctgtggagttcaagagatt

SEQ ID NO: 6570 - DNA, 50 bp, Enterococcus faecium
  source 1..50: mol_type = genomic DNA
tgttttccttccataaggcaaactatagtttcacaaactttaggatatat

SEQ ID NO: 6571 - protein, 537 aa, Enterococcus faecium; identical to SEQ ID NO: 6566

SEQ ID NO: 6572 - DNA, 50 bp, Enterococcus faecium; identical to SEQ ID NO: 2592
  source 1..50: mol_type = genomic DNA

SEQ ID NO: 6573 - DNA, 40 bp, Enterococcus faecium
  source 1..40: mol_type = genomic DNA
gacttcataccgagaaactggcttttgaacaccgtttact

SEQ ID NO: 6574 - DNA, 40 bp, Enterococcus faecium
  source 1..40: mol_type = genomic DNA
gacttcataccgagaaactatcttttgaacaccgtttact

SEQ ID NO: 6575 - DNA, 50 bp, Enterococcus faecium; identical to SEQ ID NO: 6570
  source 1..50: mol_type = genomic DNA

SEQ ID NO: 6576 - protein, 537 aa, Enterococcus faecium; identical to SEQ ID NO: 6566

SEQ ID NO: 6577 - DNA, 50 bp, Enterococcus faecium; identical to SEQ ID NO: 2592
  source 1..50: mol_type = genomic DNA

SEQ ID NO: 6578 - DNA, 40 bp, Enterococcus faecium
  source 1..40: mol_type = genomic DNA
gacttactactgagaaactggcttttgaacaccgtttatc

SEQ ID NO: 6579 - DNA, 40 bp, Enterococcus faecium
  source 1..40: mol_type = genomic DNA
gacttactactgagaaactatcttttgaacaccgtttatc

SEQ ID NO: 6580 - DNA, 50 bp, Enterococcus faecium; identical to SEQ ID NO: 6570
  source 1..50: mol_type = genomic DNA

SEQ ID NO: 6581 - protein, 537 aa, Enterococcus faecium
MKQQIYNTALYLRLSRDDELQGESSSITTQRSMLRLYAKEHHLNVIDEYIDDSWSGTNFERPSFQRMIEDIEAGKINCVVTKDLSRLGRNYIMTGQYTELYFPSHNVRYIAIDDGVDSEKGESEIAPFKNIINEWVARDTSRKVKSAFKTKFAEGAYYGAYAPLGYKKHPDIKGKLLVDEETKWIVEKIFSLAYQGYGSAKITKVLREEKVPTASWLNFTRYGTFAHIFEGKPDSKRYEWTIAHVKAILKSEVYIGNSVHNRQSTVSFKSKKKVRKPESEWFRVENTHEPIIDKEVFYRVQEQIKSRRRQTKEKATPIFAGLVKCADCGWSMRFATNKANKTPYSYYACSYYGQFGKGTCSMHYIRYDVLYQAVLERLQYWAKAVQQDEEKVLNKIQKAGNAERIREKKKKASALKKAENRQNEIDRLFAKMYEDRACEKITERNFIMLSGKYQKEQIELEQQITNLREELSKMEQDMIGAEKWIELIKEYSVPKELTAPLLNAMIEKILIHEATTNEDNERIQEIEIYYRFIGKVD

SEQ ID NO: 6582 - DNA, 50 bp, Enterococcus faecium; identical to SEQ ID NO: 2592
  source 1..50: mol_type = genomic DNA

SEQ ID NO: 6583 - DNA, 40 bp, Enterococcus faecium
  source 1..40: mol_type = genomic DNA
gattgacggcttagcaccaggagtgtatcagctggtagaa

SEQ ID NO: 6584 - DNA, 40 bp, Enterococcus faecium
  source 1..40: mol_type = genomic DNA
gattgacggcttagcaccaatagtgtatcagctggtagaa

SEQ ID NO: 6585 - DNA, 50 bp, Enterococcus faecium; identical to SEQ ID NO: 6570
  source 1..50: mol_type = genomic DNA

SEQ ID NO: 6586 - protein, 537 aa, Clostridioides difficile
MKQQIYNTALYLRLSRDDELQGESSSITTQRSMLRLYAKEHHLNVIDEYIDDGWSGTNFERPSFQRMIEDIEAGKINCVVTKDLSRLGRNYIMTGQYTELYFPSHNVRYIAIDDGVDSEKGESEIAPFKNIINEWVARDTSRKVKSAFKTKFAEGAYYGAYAPLGYKKHPDIKGKLLVDEETKWIVEKIFSLAYQGYGSAKITKVLREEKVPTASWLNFTRYGTFAHIFEGKPDSKRYEWTIAHVKAILKSEVYIGNSVHNRQSTVSFKSKKKVRKPESEWFRVENTHEPIIDKEVFYRVQEQIKSRRRQTKEKATPIFAGLVKCADCGWSMRFATNKANKTPYSYYACSYYGQFGKGTCSMHYIRYDVLYQAVLERLQYWAKAVQQDEEKVLNKIQKAGNAERIREKKKKASALKKAENRQNEIDRLFAKMYEDRACEKITERNFIMLSGKYQKEQIELEQQITNLREELSKMEQDMIGAEKWIELIKEYSVPKELTAPLLNAMIEKILIHEATTNEDNERIQEIEIYYRFIGKVD

SEQ ID NO: 6587 - DNA, 50 bp, Clostridioides difficile; identical to SEQ ID NO: 2592
  source 1..50: mol_type = genomic DNA

SEQ ID NO: 6588 - DNA, 40 bp, Clostridioides difficile
  source 1..40: mol_type = genomic DNA
agtatccaaatgggagagtggaaattcttatccagatata

SEQ ID NO: 6589 - DNA, 40 bp, Clostridioides difficile
  source 1..40: mol_type = genomic DNA
agtatccaaatgggagagtataaattcttatccagatata

SEQ ID NO: 6590 - DNA, 50 bp, Clostridioides difficile; identical to SEQ ID NO: 6570
  source 1..50: mol_type = genomic DNA

SEQ ID NO: 6591 - protein, 537 aa, Clostridioides difficile; identical to SEQ ID NO: 2591

SEQ ID NO: 6592 - DNA, 50 bp, Clostridioides difficile; identical to SEQ ID NO: 2592
  source 1..50: mol_type = genomic DNA

SEQ ID NO: 6593 - DNA, 40 bp, Clostridioides difficile; identical to SEQ ID NO: 5333
  source 1..40: mol_type = genomic DNA

SEQ ID NO: 6594 - DNA, 40 bp, Clostridioides difficile
  source 1..40: mol_type = genomic DNA
agtatctaagtgggagagtataaattcttacccagatata

SEQ ID NO: 6595 - DNA, 50 bp, Clostridioides difficile; identical to SEQ ID NO: 6570
  source 1..50: mol_type = genomic DNA

SEQ ID NO: 6596 - protein, 537 aa, Clostridioides difficile
MKQQIYNTALYLRLSRDDELQGESSSITTQRSMLRLYAKEHHLNVIDEYIDDGWSGTNFERPSFQRMIEDIEAGKINCVVTKDLSRLGRNYIMTGQYTELYFPSHNVRYIAIDDGVDSEKGESEIAPFKNIINEWVARDTSRKVKSAFKTKFAEGAYYGAYAPLGYKKHPDIKGKLLVDEETKWIVEKIFSLAYQGYGSAKITKVLREEKVPTASWLNFTRYGTFAHIFEGKPESKRYEWTIAHVKAILKSEVYIGNSVHNRQSTVSFKSKKKVRKPESEWFRVENTHEPIIDKEVFYRVQEQIKSRRRQTKEKATPIFAGLVKCADCGWSMRFATNKANKTPYSYYACSYYGQFGKGTCSMHYIRYDVLYQAVLERLQYWAKAVQQDEEKVLNKIQKAGNAERIREKKKKASALKKAENRQNEIDRLFAKMYEDRACEKITERNFIMLSGKYQKEQIELEQQITNLREELSKMEQDMIGAERWIELIKEYSVPKELTAPLLNAMIEKILIHEATTNEENERIQEIEIYYRFIGKVD

SEQ ID NO: 6597 - DNA, 50 bp, Clostridioides difficile; identical to SEQ ID NO: 2592
  source 1..50: mol_type = genomic DNA

SEQ ID NO: 6598 - DNA, 40 bp, Clostridioides difficile; identical to SEQ ID NO: 6588
  source 1..40: mol_type = genomic DNA

SEQ ID NO: 6599 - DNA, 40 bp, Clostridioides difficile; identical to SEQ ID NO: 6589
  source 1..40: mol_type = genomic DNA

SEQ ID NO: 6600 - DNA, 50 bp, Clostridioides difficile; identical to SEQ ID NO: 6570
  source 1..50: mol_type = genomic DNA

SEQ ID NO: 6601 - protein, 537 aa, Clostridioides difficile; identical to SEQ ID NO: 6596

SEQ ID NO: 6602 - DNA, 50 bp, Clostridioides difficile; identical to SEQ ID NO: 2592
  source 1..50: mol_type = genomic DNA

SEQ ID NO: 6603 - DNA, 40 bp, Clostridioides difficile; identical to SEQ ID NO: 5333
  source 1..40: mol_type = genomic DNA

SEQ ID NO: 6604 - DNA, 40 bp, Clostridioides difficile; identical to SEQ ID NO: 6594
  source 1..40: mol_type = genomic DNA

SEQ ID NO: 6605 - DNA, 50 bp, Clostridioides difficile; identical to SEQ ID NO: 6570
  source 1..50: mol_type = genomic DNA

SEQ ID NO: 6606 - protein, 537 aa, Clostridioides difficile; identical to SEQ ID NO: 6596

SEQ ID NO: 6607 - DNA, 50 bp, Clostridioides difficile; identical to SEQ ID NO: 2592
  source 1..50: mol_type = genomic DNA

SEQ ID NO: 6608 - DNA, 40 bp, Clostridioides difficile; identical to SEQ ID NO: 5343
  source 1..40: mol_type = genomic DNA

SEQ ID NO: 6609 - DNA, 40 bp, Clostridioides difficile
  source 1..40: mol_type = genomic DNA
aatagcaaaatgggaaagtatagaatctattcctgatata

SEQ ID NO: 6610 - DNA, 50 bp, Clostridioides difficile; identical to SEQ ID NO: 6570
  source 1..50: mol_type = genomic DNA

SEQ ID NO: 6611 - protein, 471 aa, Clostridioides difficile
MIEDIEAGKINCVVTKDLSRLGRNYIMTGQYTELYFPSHNVRYIAIDDGVDSEKGESEIAPFKNIINEWVARDTSRKVKSAFKTKFAEGAYYGAYAPLGYKKHPDIKGKLLVDEETKWIVEKIFSLAYQGYGSAKITKVLREEKVPTASWLNFTRYGTFAHIFEGKPESKRYEWTIAHVKAILKSEVYIGNSVHNRQSTVSFKSKKKVRKPESEWFRVENTHEPIIDKEVFYRVQEQIKSRRRQTKEKATPIFAGLVKCADCGWSMRFATNKANKTPYSYYACSYYGQFGKGTCSMHYIRYDVLYQAVLERLQYWTKAVQQDEEKVLNKIQKAGNAERIRAKKKKASALKKAENRQNEIDRLFAKMYEDRACEKITERNFIMLSGKYQKEQIELEQQITNLREELSKMEQDMIGAEKWIELIKEYSVPKELTAPLLNAMIEKILIHEATTNEDNERIQEIEIYYRFIGKVD

SEQ ID NO: 6612 - DNA, 50 bp, Clostridioides difficile; identical to SEQ ID NO: 2592
  source 1..50: mol_type = genomic DNA

SEQ ID NO: 6613 - DNA, 40 bp, Clostridioides difficile; identical to SEQ ID NO: 5343
  source 1..40: mol_type = genomic DNA

SEQ ID NO: 6614 - DNA, 40 bp, Clostridioides difficile; identical to SEQ ID NO: 6609
  source 1..40: mol_type = genomic DNA

SEQ ID NO: 6615 - DNA, 50 bp, Clostridioides difficile; identical to SEQ ID NO: 6570
  source 1..50: mol_type = genomic DNA

SEQ ID NO: 6616 - protein, 537 aa, Clostridioides difficile
MKQQIYNTALYLRLSRDDELQGESSSITTQRSMLRLYAKEHHLNVIDEYIDDGWSGTNFERPSFQRMIEDIEAGKINCVVTKDLSRLGRNYIMTGQYTELYFPSHNVRYIAIDDGVDSEKGESEIAPFKNIINEWVARDTSRKVKSAFKTKFAEGAHYGAYAPLGYKKHPDIKGKLLVDDETKWIVEKIFSLAYQGYGSAKITKVLREEKVPTASWLNFTRYGTFAHIFEGKPESKRYEWTIAHVKAILKSEVYIGNSVHNMQSTVSFKSKKKVRKPESEWFRVENTHEPIIDKEVFYRVQEQIKSRRRQTKEKATPIFAGLVKCADCGWSMRFATNTANKTPYSYYACSYYGQFGKGTCSMHYIRYDVLYQAVLKRLQYWAKAVQQDEEKVLNKIQKAGNAERIREKKKKASAFKKAENRQNEIDRLFAKMYEDRACEKITERNFVMLSSKYQKEQIELEQQITNLREELSKMEQDMIGAEKWIELIKEYSVPKELTAPLLNAMIEKILIHEAITNEDNERIQEIEIYYRFIGKVD

SEQ ID NO: 6617 - DNA, 50 bp, Clostridioides difficile; identical to SEQ ID NO: 2592
  source 1..50: mol_type = genomic DNA

SEQ ID NO: 6618 - DNA, 40 bp, Clostridioides difficile
  source 1..40: mol_type = genomic DNA
aatagcaaaatgggaaagtggagaatctattcctgatatg

SEQ ID NO: 6619 - DNA, 40 bp, Clostridioides difficile
  source 1..40: mol_type = genomic DNA
aatagcaaaatgggaaagtatagaatctattcctgatatg

SEQ ID NO: 6620 - DNA, 50 bp, Clostridioides difficile; identical to SEQ ID NO: 6570
  source 1..50: mol_type = genomic DNA

SEQ ID NO: 6621 - protein, 537 aa, Clostridioides difficile
MKQQIYNTALYLRLSRDDELQGESSSITTQRSMLRLYAKEHHLNVIDEYIDDGWSGTNFERPSFQRMIEDIEAGKINCVVTKDLSRLGRNYIMTGQYTELYFPSHNVRYIAIDDGVDSEKGESEIAPFKNIINEWVARDTSRKVKSAFKTKFAEGAYYGAYAPLGYKKHPDIKGKLLVDEETKWIVEKIFSLAYQGYGSAKITKILREEKVPTASWVNFTRYGTFAHIFEGKPESKRYEWTIAHVKAILKSEVYIGNSVHNRQSTVSFKSKKKVRKPESEWFRVENTHEPIIDKEMFYRVQEQIKSRRRQTKEKATPIFAGLVKCADCGWSMRFATNKANKTPYSYYSCSFCGQFGKGYCSMHYIRYDVLYQAVLERLQYWAKAVQQDEEKVLNKIQKVGNAERMREKKKKANALKKAENRQNEIDRLFAKMYEDRACEKITERNFIMLSGKYQKEQIELEQQITSLREELSKMEQDMVGAEKWIELIKEYSVPKELTAPLLNAMIEKILIHEATTNEDNERIQEIEIYYRFIGKVD

SEQ ID NO: 6622 - DNA, 50 bp, Clostridioides difficile; identical to SEQ ID NO: 2592
  source 1..50: mol_type = genomic DNA

SEQ ID NO: 6623 - DNA, 40 bp, Clostridioides difficile; identical to SEQ ID NO: 5343
  source 1..40: mol_type = genomic DNA

SEQ ID NO: 6624 - DNA, 40 bp, Clostridioides difficile; identical to SEQ ID NO: 6609
  source 1..40: mol_type = genomic DNA

SEQ ID NO: 6625 - DNA, 50 bp, Clostridioides difficile; identical to SEQ ID NO: 6570
  source 1..50: mol_type = genomic DNA

SEQ ID NO: 6626 - protein, 537 aa, Clostridioides difficile; identical to SEQ ID NO: 6616

SEQ ID NO: 6627 - DNA, 50 bp, Clostridioides difficile; identical to SEQ ID NO: 2592
  source 1..50: mol_type = genomic DNA

SEQ ID NO: 6628 - DNA, 40 bp, Clostridioides difficile; identical to SEQ ID NO: 5343
  source 1..40: mol_type = genomic DNA

SEQ ID NO: 6629 - DNA, 40 bp, Clostridioides difficile; identical to SEQ ID NO: 6609
  source 1..40: mol_type = genomic DNA

SEQ ID NO: 6630 - DNA, 50 bp, Clostridioides difficile; identical to SEQ ID NO: 6570
  source 1..50: mol_type = genomic DNA

SEQ ID NO: 6631 - protein, 537 aa, Clostridioides difficile
MKQQIYNTALYLRLSRDDELQGESSSITTQRSMLRLYAKEHHLNVIDEYIDDGWSGTNFERPSFQRMIEDIEAGKINCVVTKDLSRLGRNYIMTGQYTELYFPSHNVRYIAIDDGVDSEKGESEIAPFKNIINEWVARDTSRKVKSAFKTKFAEGAHYGAYAPLGYKKHPDIKGKLLVDDETKWIVEKIFSLAYQGYGSAKITKVLREEKVPTASWLNFTRYGTFAHIFEGKPESKRYEWTIAHVKAILKSEVYIGNSVHNMQSTVSFKSKKKVRKPESEWFRVENTHEPIIDKEVFYRVQEQIKSRRRQTKEKATPIFAGLVKCADCGWSMRFATNTANKTPYSYYACSYYGQFGKGTCSMHYIRYDVLYQAVLKRLQYWAKAVQQDEEKVLNKIQKAGNAERIREKKKKASAFKKAENRQNEIDRLFAKMYEDRACEKITERNFVMLSSKYQKEQIELEQQITNLREELSKMEQDMIGAEKWIELIKEYSVPKELTAPLLNAMIEKILIHEATTNEENERIQEIEIYYRFIGKVD

SEQ ID NO: 6632 - DNA, 50 bp, Clostridioides difficile; identical to SEQ ID NO: 2592
  source 1..50: mol_type = genomic DNA

SEQ ID NO: 6633 - DNA, 40 bp, Clostridioides difficile; identical to SEQ ID NO: 5343
  source 1..40: mol_type = genomic DNA

SEQ ID NO: 6634 - DNA, 40 bp, Clostridioides difficile; identical to SEQ ID NO: 6609
  source 1..40: mol_type = genomic DNA

SEQ ID NO: 6635 - DNA, 50 bp, Clostridioides difficile; identical to SEQ ID NO: 6570
  source 1..50: mol_type = genomic DNA

SEQ ID NO: 6636 - protein, 537 aa, Clostridioides difficile; identical to SEQ ID NO: 6566

SEQ ID NO: 6637 - DNA, 50 bp, Clostridioides difficile; identical to SEQ ID NO: 2592
  source 1..50: mol_type = genomic DNA

SEQ ID NO: 6638 - DNA, 40 bp, Clostridioides difficile
  source 1..40: mol_type = genomic DNA
tgtatctaaatgggaaactggacaaagctatcctgacata

SEQ ID NO: 6639 - DNA, 40 bp, Clostridioides difficile
  source 1..40: mol_type = genomic DNA
tgtatctaaatgggaaactatacaaagctatcctgacata

SEQ ID NO: 6640 - DNA, 50 bp, Clostridioides difficile; identical to SEQ ID NO: 6570
  source 1..50: mol_type = genomic DNA

SEQ ID NO: 6641 - protein, 537 aa, Clostridioides difficile; identical to SEQ ID NO: 6586

SEQ ID NO: 6642 - DNA, 50 bp, Clostridioides difficile; identical to SEQ ID NO: 2592
  source 1..50: mol_type = genomic DNA

SEQ ID NO: 6643 - DNA, 40 bp, Clostridioides difficile; identical to SEQ ID NO: 6638
  source 1..40: mol_type = genomic DNA

SEQ ID NO: 6644 - DNA, 40 bp, Clostridioides difficile; identical to SEQ ID NO: 6639
  source 1..40: mol_type = genomic DNA

SEQ ID NO: 6645 - DNA, 50 bp, Clostridioides difficile; identical to SEQ ID NO: 6570
  source 1..50: mol_type = genomic DNA

SEQ ID NO: 6646 - protein, 537 aa, Clostridioides difficile; identical to SEQ ID NO: 6586

SEQ ID NO: 6647 - DNA, 50 bp, Clostridioides difficile; identical to SEQ ID NO: 2592
  source 1..50: mol_type = genomic DNA

SEQ ID NO: 6648 - DNA, 40 bp, Clostridioides difficile; identical to SEQ ID NO: 6023
  source 1..40: mol_type = genomic DNA

SEQ ID NO: 6649 - DNA, 40 bp, Clostridioides difficile
  source 1..40: mol_type = genomic DNA
tgtatctaaatgggaaactatacaaagttatcttgacata

SEQ ID NO: 6650 - DNA, 50 bp, Clostridioides difficile; identical to SEQ ID NO: 6570
  source 1..50: mol_type = genomic DNA

SEQ ID NO: 6651 - protein, 481 aa, Clostridioides difficile
MAFLLLHNYTDFIDIEAGKINCVVTKDLSRLGRNYIMTGQYTELYFPSHNVRYIAIDDGVDSEKGESEIAPFKNIINEWVARDTSRKVKSAFKTKFAEGAYYGAYAPLGYKKHPDIKGKLLVDEETKWIVEKIFSLAYQGYGSAKITKVLREEKVPTASWLNFTRYGTFAHIFEGKPDSKRYEWTIAHVKAILKSEVYIGNSVHNRQSTISFKSKKKVRKPESEWFRVENTHEPIIDKEVFYRVQEQIKSRRRQTKEKATPIFAGLVKCADCGWSMRFATNKANKTPYSYYACSYYGQFGKGTCSMHYIRYDVLYQAVLERLQYWTKAVQQDEEKVVNKIQKAGNAERIRAKKKKASALKKAENRQNEIDRLFAKMYEDRACEKITERNFIMLSGKYQKEQIELEQQITNLREELSKMEQDMIGAEKWIELIKEYSVPKELTAPLLNAMIEKILIHEATTNEDNERIQEIEIYYRFIGKVD

SEQ ID NO: 6652 - DNA, 50 bp, Clostridioides difficile; identical to SEQ ID NO: 2592
  source 1..50: mol_type = genomic DNA

SEQ ID NO: 6653 - DNA, 40 bp, Clostridioides difficile; identical to SEQ ID NO: 6638
  source 1..40: mol_type = genomic DNA

SEQ ID NO: 6654 - DNA, 40 bp, Clostridioides difficile; identical to SEQ ID NO: 6639
  source 1..40: mol_type = genomic DNA

SEQ ID NO: 6655 - DNA, 50 bp, Clostridioides difficile; identical to SEQ ID NO: 6570
  source 1..50: mol_type = genomic DNA

SEQ ID NO: 6656 - protein, 537 aa, Clostridioides difficile; identical to SEQ ID NO: 6596

SEQ ID NO: 6657 - DNA, 50 bp, Clostridioides difficile; identical to SEQ ID NO: 2592
  source 1..50: mol_type = genomic DNA

SEQ ID NO: 6658 - DNA, 40 bp, Clostridioides difficile; identical to SEQ ID NO: 6638
  source 1..40: mol_type = genomic DNA

SEQ ID NO: 6659 - DNA, 40 bp, Clostridioides difficile; identical to SEQ ID NO: 6639
  source 1..40: mol_type = genomic DNA

SEQ ID NO: 6660 - DNA, 50 bp, Clostridioides difficile; identical to SEQ ID NO: 6570
  source 1..50: mol_type = genomic DNA

SEQ ID NO: 6661 - protein, 537 aa, Clostridioides difficile
MKQQIYNTALYLRLSRDDELQGESSSITTQRSMLRLYAKEHHLNVIDEYIDDGWSGTNFERPSFQRMIEDIEAGKINCVVTKDLSRLGRNYIMTGQYTELYFPSHNVRYIAIDDGVDSEKGESEIAPFKNIINEWVARDTSRKVKSAFKTKFAEGAYYGAYAPLGYKKHPDIKGKLLVDEETKWIVEKIFSLAYQGYGSAKITKVLREEKVPTASWLNFTRYGTFAHIFEGKPESKRYEWTIAHVKAILKSEVYIGNSVHNRQSTVSFKSKKKVRKPESEWFRVENTHEPIIDKEVFYRVQEQIKSRRRQTKEKATPIFAGLVKCADCGWSMRFATNKANKTPYSYYACSYYGQFGKGTCSMHYIRYDVLYQAVLERLQYWTKAVQQDEEKVLNKIQKAGNAERIRAKKKKASALKKAENRQNEIDRLFAKMYEDRACEKITERNFIMLSGKYQKEQIELEQQITNLREELSKMEQDMIGAEKWIELIKEYSVPKELTAPLLNAMIEKILIHEATTNEDNERIQEIEIYYRFIGKVD

SEQ ID NO: 6662 - DNA, 50 bp, Clostridioides difficile; identical to SEQ ID NO: 2592
  source 1..50: mol_type = genomic DNA

SEQ ID NO: 6663 - DNA, 40 bp, Clostridioides difficile; identical to SEQ ID NO: 6638
  source 1..40: mol_type = genomic DNA

SEQ ID NO: 6664 - DNA, 40 bp, Clostridioides difficile; identical to SEQ ID NO: 6639
  source 1..40: mol_type = genomic DNA

SEQ ID NO: 6665 - DNA, 50 bp, Clostridioides difficile; identical to SEQ ID NO: 6570
  source 1..50: mol_type = genomic DNA

SEQ ID NO: 6666 - protein, 537 aa, Clostridioides difficile
MKQQIYNTALYLRLSRDDELQGESSSITTQRSMLRLYAKEHHLNVIDEYIDDGWSGTNFERPSFQRMIEDIEAGKINCVVTKDLSRLGRNYIMTGQYTELYFPSHNVRYIAIDDGVDSEKGESEIAPFKNIINEWVARDTSRKVKSAFKTKFAEGAYYGAYAPLGYKKHPDIKGKLLVDEETKWIVEKIFSLAYQGYGSAKITKVLREEKVPTASWLNFTRYGTFAHIFEGKPESKRYEWTIAHVKAILKSEVYIGNSVHNRQSTVSFKSKKKVRKPESEWFRVENTHEPIIDKEVFYRVQEQIKSRRRQTKEKATPIFAGLVKCADCGWSMRFATNKANKTPYSYYACSYYGQFGKGTCSMHYIRYDVLYQAVLERLQYWAKAVQQDEEKVLNKIQKAGNAERIREKKKKASALKKAENRQNEIDRLFAKMYEDRACEKITERNFIMLSGKYQKEQIELEQQITNLREELSKMEQDMIGAEKWIELIKEYSVPKELTAPLLNAMIEKILIHEATTNEENERIQEIEIYYRFIGKVD

SEQ ID NO: 6667 - DNA, 50 bp, Clostridioides difficile; identical to SEQ ID NO: 2592
  source 1..50: mol_type = genomic DNA

SEQ ID NO: 6668 - DNA, 40 bp, Clostridioides difficile; identical to SEQ ID NO: 6638
  source 1..40: mol_type = genomic DNA

SEQ ID NO: 6669 - DNA, 40 bp, Clostridioides difficile; identical to SEQ ID NO: 6639
  source 1..40: mol_type = genomic DNA

SEQ ID NO: 6670 - DNA, 50 bp, Clostridioides difficile; identical to SEQ ID NO: 6570
  source 1..50: mol_type = genomic DNA

SEQ ID NO: 6671 - protein, 402 aa, Clostridioides difficile
MARDTSRKVKSAFKTKFAEGAHYGAYAPLGYKKHPDIKGKLLVDDETKWIVEKIFSLAYQGYGSAKITKVLREEKVPTASWLNFTRYGTFAHIFEGKPESKRYEWTIAHVKAILKSEVYIGNSVHNMQSTVSFKSKKKVRKPESEWFRVENTHEPIIDKEVFYRVQEQIKSRRRQTKEKATPIFAGLVKCADCGWSMRFATNTANKTPYSYYACSYYGQFGKGTCSMHYIRYDVLYQAVLKRLQYWAKAVQQDEEKVLNKIQKAGNAERIREKKKKASAFKKAENRQNEIDRLFAKMYEDRACEKITERNFVMLSSKYQKEQIELEQQITNLREELSKMEQDMIGAEKWIELIKEYSVPKELTAPLLNAMIEKILIHEAITNEDNERIQEIEIYYRFIGKVD

SEQ ID NO: 6672 - DNA, 50 bp, Clostridioides difficile; identical to SEQ ID NO: 2592
  source 1..50: mol_type = genomic DNA

SEQ ID NO: 6673 - DNA, 40 bp, Clostridioides difficile; identical to SEQ ID NO: 5343
  source 1..40: mol_type = genomic DNA

SEQ ID NO: 6674 - DNA, 40 bp, Clostridioides difficile; identical to SEQ ID NO: 6609
  source 1..40: mol_type = genomic DNA

SEQ ID NO: 6675 - DNA, 50 bp, Clostridioides difficile; identical to SEQ ID NO: 6570
  source 1..50: mol_type = genomic DNA

SEQ ID NO: 6676 - protein, 471 aa, Clostridioides difficile
MIEDIEAGKINCVVTKDLSRLGRNYIMTGQYTELYFPSHNVRYIAIDDGVDSEKGESEIAPFKNIINEWVARDTSRKVKSAFKTKFAEGAYYGAYAPLGYKKHPDIKGKLLVDEETKWIVEKIFSLAYQGYGSAKITKVLREEKVPTASWLNFTRYGTFAHIFEGKPDSKRYEWTIAHVKAILKSEVYIGNSVHNRQSTVSFKSKKKVRKPESEWFRVENTHEPIIDKEVFYRVQEQIKSRRRQTKEKATPIFAGLVKCADCGWSMRFATNKANKTPYSYYACSYYGQFGKGTCSMHYIRYDVLYQAVLERLQYWAKAVQQDEEKVLNKIQKAGNAERIREKKKKASALKKAENRQNEIDRLFAKMYEDRACEKITERNFIMLSGKYQKEQIELEQQITNLREELSKMEQDMIGAEKWIELIKEYSVPKELTAPLLNAMIEKILIHEATTNEDNERIQEIEIYYRFIGKVD

SEQ ID NO: 6677 - DNA, 50 bp, Clostridioides difficile; identical to SEQ ID NO: 2592
  source 1..50: mol_type = genomic DNA

SEQ ID NO: 6678 - DNA, 40 bp, Clostridioides difficile; identical to SEQ ID NO: 5343
  source 1..40: mol_type = genomic DNA

SEQ ID NO: 6679 - DNA, 40 bp, Clostridioides difficile; identical to SEQ ID NO: 6609
  source 1..40: mol_type = genomic DNA

SEQ ID NO: 6680 - DNA, 50 bp, Clostridioides difficile; identical to SEQ ID NO: 6570
  source 1..50: mol_type = genomic DNA

SEQ ID NO: 6681 - protein, 537 aa, Clostridioides difficile
MKQQIYNTALYLRLSRDDELQGESSSITTQRSMLRLYAKEHHLNVIDEYIDDGWSGTNFERPSFQRMIEDIEAGKINCVVTKDLSRLGRNYIMTGQYTELYFPSHNVRYIAIDDGVDSEKGESEIAPFKNIINEWVARDTSRKVKSAFKTKFAEGAHYGAYAPLGYKKHPDIKGKLLVDDETKWIVEKIFSLAYQGYGSAKITKVLREEKVPTASWLNFTRYGTFAHIFEGKPESKRYEWTIAHVKAILKSEVYIGNSVHNMQSTVSFKSKKKVRKPESEWFRVENTHEPIIDKEVFYRVQEQIKSRRRQTKEKATPIFAGLVKCADCGWSMRFATNTANKTPYSYYACSYYGQFGKGTCSMHYIRYDVLYQAVLKRLQYWAKAVQQDEEKVLNKIQKAGNAERIREKKKKASAFKKAENRQNEIDRLFAKMYEDRACEKITERNFVMLSSKYQKEQIELEQQITNLREELSKMEQDMIGAEKWIELIKEYSVPKELTAPLLNAMIEKILIHEAITNEDNERIQEIEVYYRFIGKVD

SEQ ID NO: 6682 - DNA, 50 bp, Clostridioides difficile; identical to SEQ ID NO: 2592
  source 1..50: mol_type = genomic DNA

SEQ ID NO: 6683 - DNA, 40 bp, Clostridioides difficile; identical to SEQ ID NO: 5343
  source 1..40: mol_type = genomic DNA

SEQ ID NO: 6684 - DNA, 40 bp, Clostridioides difficile; identical to SEQ ID NO: 6609
  source 1..40: mol_type = genomic DNA

SEQ ID NO: 6685 - DNA, 50 bp, Clostridioides difficile; identical to SEQ ID NO: 6570
  source 1..50: mol_type = genomic DNA

SEQ ID NO: 6686 - protein, 537 aa, Clostridioides difficile; identical to SEQ ID NO: 6566

SEQ ID NO: 6687 - DNA, 50 bp, Clostridioides difficile; identical to SEQ ID NO: 2592
  source 1..50: mol_type = genomic DNA

SEQ ID NO: 6688 - DNA, 40 bp, Clostridioides difficile; identical to SEQ ID NO: 5343
  source 1..40: mol_type = genomic DNA

SEQ ID NO: 6689 - DNA, 40 bp, Clostridioides difficile; identical to SEQ ID NO: 6609
  source 1..40: mol_type = genomic DNA

SEQ ID NO: 6690 - DNA, 50 bp, Clostridioides difficile; identical to SEQ ID NO: 6570
  source 1..50: mol_type = genomic DNA

SEQ ID NO: 6691 - protein, 471 aa, Clostridioides difficile
MIEDIEAGKINCVVTKDLSRLGRNYIMTGQYTELYFPSHNVRYIAIDDGVDSEKGESEIAPFKNIINEWVARDTSRKVKSAFKTKFAEGAYYGAYAPLGYKKHPDIKGKLLVDDETKWIVEKIFSLAYQGYGSAKITKILREEKVPTASWLNFTRYGTFAHIFEGKPESKRYEWTIAHVKALLKSEVYIGNSVHNRQSTVSFKSKKKVRKPESEWFRVENTHEPIIDKEVFYRVQEQIKSRRRQTKEKATPIFAGLVKCADCGWSMRFATNKANKTPYSYYACSYYGQFGKGTCSMHYIRYDVLYQAVLERLQYWTKAVQQDEEKVLNKIQKAGNAERIRAKKKKASALKKAENRQNEIDRLFAKMYEDRACEKITERNFIMLSGKYQKEQIELEQQITSLREELSKMEQDMIGAEKWIELIKEYSVPKELTAPLLNAMIEKILIHEATTNEDNERIQEIEIYYRFIGKVD

SEQ ID NO: 6692 - DNA, 50 bp, Clostridioides difficile; identical to SEQ ID NO: 2592
  source 1..50: mol_type = genomic DNA

SEQ ID NO: 6693 - DNA, 40 bp, Clostridioides difficile; identical to SEQ ID NO: 5333
  source 1..40: mol_type = genomic DNA

SEQ ID NO: 6694 - DNA, 40 bp, Clostridioides difficile; identical to SEQ ID NO: 6594
  source 1..40: mol_type = genomic DNA

SEQ ID NO: 6695 - DNA, 50 bp, Clostridioides difficile; identical to SEQ ID NO: 6570
  source 1..50: mol_type = genomic DNA

SEQ ID NO: 6696 - protein, 537 aa, Clostridioides difficile; identical to SEQ ID NO: 6586

SEQ ID NO: 6697 - DNA, 50 bp, Clostridioides difficile; identical to SEQ ID NO: 2592
  source 1..50: mol_type = genomic DNA

SEQ ID NO: 6698 - DNA, 40 bp, Clostridioides difficile; identical to SEQ ID NO: 5333
  source 1..40: mol_type = genomic DNA

SEQ ID NO: 6699 - DNA, 40 bp, Clostridioides difficile; identical to SEQ ID NO: 6594
  source 1..40: mol_type = genomic DNA

SEQ ID NO: 6700 - DNA, 50 bp, Clostridioides difficile; identical to SEQ ID NO: 6570
  source 1..50: mol_type = genomic DNA

SEQ ID NO: 6701 - protein, 537 aa, Clostridium innocuum; identical to SEQ ID NO: 6566

SEQ ID NO: 6702 - DNA, 50 bp, Clostridium innocuum; identical to SEQ ID NO: 2592
  source 1..50: mol_type = genomic DNA

SEQ ID NO: 6703 - DNA, 40 bp, Clostridium innocuum
  source 1..40: mol_type = genomic DNA
taacaccggatgtgtatctggacatcctgtatctgatgaa

SEQ ID NO: 6704 - DNA, 40 bp, Clostridium innocuum
  source 1..40: mol_type = genomic DNA
taacaccggatgtgtatctatacatcctgtatctgatgaa

SEQ ID NO: 6705 - DNA, 50 bp, Clostridium innocuum; identical to SEQ ID NO: 6570
  source 1..50: mol_type = genomic DNA

SEQ ID NO: 6706 - protein, 537 aa, Coprobacillus cateniformis; identical to SEQ ID NO: 6586

SEQ ID NO: 6707 - DNA, 50 bp, Coprobacillus cateniformis; identical to SEQ ID NO: 2592
  source 1..50: mol_type = genomic DNA

SEQ ID NO: 6708 - DNA, 40 bp, Coprobacillus cateniformis
  source 1..40: mol_type = genomic DNA
tatttcaaaatgggaatcaggtagaggatatccaagcatt

SEQ ID NO: 6709 - DNA, 40 bp, Coprobacillus cateniformis
  source 1..40: mol_type = genomic DNA
tatttcaaaatgggaatcaattagaggatatccaagcatt

SEQ ID NO: 6710 - DNA, 50 bp, Coprobacillus cateniformis; identical to SEQ ID NO: 6570
  source 1..50: mol_type = genomic DNA

SEQ ID NO: 6711 - protein, 537 aa, Anaerostipes caccae
MKQQIYNTALYLRLSRDDELQGESSSITTQRSMLRLYAKEHHLNVIDEYIDDGWSGTNFERPSFQRMIEDIEAGKINCVVTKDLSRLGRNYIMTGQYTELYFPSHNVRYIAIDDGVDSEKGESEIAPFKNIINEWVARDTSRKVKSAFKTKFAEGAYYGAYAPLGYKKHPDIKGKLLVDEETKWIVEKIFSLAYQGYGSAKITKVLREEKVPTASWLNFTRYGTFAHIFEGKPDSKRYEWTIAHVKAILKSEVYIGNSVHNRQSTISFKSKKKVRKPESEWFRVENTHEPIIDKEVFYRVQEQIKSRRRQTKEKATPIFAGLVKCADCGWSMRFATNKANKTPYSYYACSYYGQFGKGTCSMHYIRYDVLYQAVLERLQYWTKAVQQDEEKVVNKIQKAGNAERIRAKKKKASALKKAENRQNEIDRLFAKMYEDRACEKITERNFIMLSGKYQKEQIELEQQITNLREELSKMEQDMIGAEKWIELIKEYSVPKELTAPLLNAMIEKILIHEATTNEDNERIQEIEIYYRFIGKVD

SEQ ID NO: 6712 - DNA, 50 bp, Anaerostipes caccae; identical to SEQ ID NO: 2592
  source 1..50: mol_type = genomic DNA

SEQ ID NO: 6713 - DNA, 40 bp, Anaerostipes caccae
  source 1..40: mol_type = genomic DNA
ggtatctaagtgggagaccgggcagagctacccggatatt

SEQ ID NO: 6714 - DNA, 40 bp, Anaerostipes caccae
  source 1..40: mol_type = genomic DNA
ggtatctaagtgggagaccatgcagagctacccggatatt

SEQ ID NO: 6715 - DNA, 50 bp, Anaerostipes caccae; identical to SEQ ID NO: 6570
  source 1..50: mol_type = genomic DNA

SEQ ID NO: 6716 - protein, 537 aa, Ruthenibacterium lactatiformans; identical to SEQ ID NO: 6711

SEQ ID NO: 6717 - DNA, 50 bp, Ruthenibacterium lactatiformans; identical to SEQ ID NO: 2592
  source 1..50: mol_type = genomic DNA

SEQ ID NO: 6718 - DNA, 40 bp, Ruthenibacterium lactatiformans
  source 1..40: mol_type = genomic DNA
cgtcagcaaatgggagcgcggactgaattatccggatatt

SEQ ID NO: 6719 - DNA, 40 bp, Ruthenibacterium lactatiformans
  source 1..40: mol_type = genomic DNA
cgtcagcaaatgggagcgcatactgaattatccggatatt

SEQ ID NO: 6720 - DNA, 50 bp, Ruthenibacterium lactatiformans; identical to SEQ ID NO: 6570
  source 1..50: mol_type = genomic DNA

SEQ ID NO: 6721 - protein, 537 aa, Clostridium innocuum; identical to SEQ ID NO: 6566

SEQ ID NO: 6722 - DNA, 50 bp, Clostridium innocuum; identical to SEQ ID NO: 2592
  source 1..50: mol_type = genomic DNA

SEQ ID NO: 6723 - DNA, 40 bp, Clostridium innocuum
  source 1..40: mol_type = genomic DNA
aatcagtaagtgggagcgtggcgtaggctatccggacatt

SEQ ID NO: 6724 - DNA, 40 bp, Clostridium innocuum
  source 1..40: mol_type = genomic DNA
aatcagtaagtgggagcgtatcgtaggctatccggacatt

SEQ ID NO: 6725 - DNA, 50 bp, Clostridium innocuum; identical to SEQ ID NO: 6570
  source 1..50: mol_type = genomic DNA

SEQ ID NO: 6726 - protein, 537 aa, Clostridium innocuum; identical to SEQ ID NO: 6586

SEQ ID NO: 6727 - DNA, 50 bp, Clostridium innocuum; identical to SEQ ID NO: 2592
  source 1..50: mol_type = genomic DNA

SEQ ID NO: 6728 - DNA, 40 bp, Clostridium innocuum
  source 1..40: mol_type = genomic DNA
gatatccaagtgggaaaatggtactgccaatccagatatg

SEQ ID NO: 6729 - DNA, 40 bp, Clostridium innocuum
  source 1..40: mol_type = genomic DNA
gatatccaagtgggaaaatattactgccaatccagatatg

SEQ ID NO: 6730 - DNA, 50 bp, Clostridium innocuum; identical to SEQ ID NO: 6570
  source 1..50: mol_type = genomic DNA

SEQ ID NO: 6731 - protein, 537 aa, Clostridium innocuum
MKQQIYNTALYLRLSRDDELQGESSSITTQRSMLRLYAKEHHLNVIDEYIDDGWSGTNFDRPSFQRMIEDIEAGKINCVVTKDLSRLGRNYIMTGQYTELYFPSHNVRYIAIDDGVDSEKGESEIAPFKNIINEWVARDTSRKVKSAFKTKFAEGAYYGAYAPLGYKKHPDIKGKLLVDEETKWIVEKIFSLAYQGYGSAKITKILREEKVPTASWLNFTRYGTFAHIFEGKPESKRYEWTIAHVKAILKSEVYIGNSVHNRQSTVSFKSKKKVRKPESEWFRVENTHEPIIDKEMFYRVQEQIKSRRRQTKEKATPIFAGLVKCADCGWSMRFATNKANKTPYSYYSCSFYGQFGKGYCSMHYIRYDVLYQAVLERLQYWAKAVQQDEEKVLNKIQKVGNAERIREKKKKASALKKAENRQNEIDRLFAKMYEDRACEKITERNFIMLSGKYQKEQIELEQQITNLREELSKMEQDMIGAEKWIELIKEYSVPKELTAPLLNAMIEKILIHEATTNEENERIQEIEIYYRFIGKVD

SEQ ID NO: 6732 - DNA, 50 bp, Clostridium innocuum; identical to SEQ ID NO: 2592
  source 1..50: mol_type = genomic DNA

SEQ ID NO: 6733 - DNA, 40 bp, Clostridium innocuum; identical to SEQ ID NO: 6703
  source 1..40: mol_type = genomic DNA

SEQ ID NO: 6734 - DNA, 40 bp, Clostridium innocuum; identical to SEQ ID NO: 6704
  source 1..40: mol_type = genomic DNA

SEQ ID NO: 6735 - DNA, 50 bp, Clostridium innocuum; identical to SEQ ID NO: 6570
  source 1..50: mol_type = genomic DNA

SEQ ID NO: 6736 - protein, 471 aa, Clostridium innocuum
MIEDIEAGKINCVVTKDLSRLGRNYIMTGQYTELYFPSHNVRYIAIDDGVDSEKGESEIAPFKNIINEWVARDTSRKVKSAFKTKFAEGAYYGAYAPLGYKKHPDIKGKLLVDEETKWIVEKIFSLAYQGYGSAKITKILREEKVPTASWLNFTRYGTFAHIFEGKPESKRYEWTIAHVKAILKSEVYIGNSVHNRQSTVSFKSKKKVRKPESEWFRVENTHEPIIDKEVFYRVQEQIKSRRRQTKEKATPIFAGLVKCADCGWSMRFATNKANKTPYSYYSCSFYGQFGKGYCSMHYIRYDVLYQAVLERLQYWAKAVQQDEEKVLNKIQKVGNAERIREKKKKASALKKAENRQNEIDRLFAKMYEDRACEKITERNFIMLSGKYQKEQIELEQQITNLREELSKMEQDMIGAEKWIELIKEYSVPKELTAPLLNAMIEKILIHEATTNEENERIQEIEIYYRFIGKVD

SEQ ID NO: 6737 - DNA, 50 bp, Clostridium innocuum; identical to SEQ ID NO: 2592
  source 1..50: mol_type = genomic DNA

SEQ ID NO: 6738 - DNA, 40 bp, Clostridium innocuum; identical to SEQ ID NO: 6703
  source 1..40: mol_type = genomic DNA

SEQ ID NO: 6739 - DNA, 40 bp, Clostridium innocuum; identical to SEQ ID NO: 6704
  source 1..40: mol_type = genomic DNA

SEQ ID NO: 6740 - DNA, 50 bp, Clostridium innocuum; identical to SEQ ID NO: 6570
  source 1..50: mol_type = genomic DNA

SEQ ID NO: 6741 - protein, 537 aa, Clostridioides difficile
MKQQIYNTALYLRLSRDDELQGESSSITTQRSMLRLYAKEHHLNVIDEYIDDGWSGTNFERPSFQRMIEDIEAGKINCVVTKDLSRLGRNYIMTGQYTELYFPSHNVRYIAIDDGVDSEKGESEIAPLKNIINEWVERDTSRKVKSAFKTKFAEGAYYGAYAPLGYKKHPDIKGKLLVDEETKWIVEKIFSLAYQGYGSAKITKVLREEKVPTASWLNFTRYGTFAHIFEGKPESKRYEWTIAHVKAILKSEVYIGNSVHNRQSTVSFKSKKKVRKPESEWFRVENTHEPIIDKEVFYRVQEQIKSRRRQTKEKATPIFAGLVKCADCGWSMRFATNKANKTPYSYYACSYYGQFGKGTCSMHYIRYDVLYQAVLERLQYWAKAVQQDEEKVLNKIQKAGNAERIREKKKKASALKKAENRQNEIDRLFAKMYEDRACEKITERNFIMLSGKYQKEQIELEQQITNLREELSKMEQDMIGAERWIELIKEYSVPKELTAPLLNAMIEKILIHEATTNEENERIQEIEIYYRFIGKVD

SEQ ID NO: 6742 - DNA, 50 bp, Clostridioides difficile; identical to SEQ ID NO: 2592
  source 1..50: mol_type = genomic DNA

SEQ ID NO: 6743 - DNA, 40 bp, Clostridioides difficile; identical to SEQ ID NO: 5343
  source 1..40: mol_type = genomic DNA

SEQ ID NO: 6744 - DNA, 40 bp, Clostridioides difficile; identical to SEQ ID NO: 6609
  source 1..40: mol_type = genomic DNA

SEQ ID NO: 6745 - DNA, 50 bp, Clostridioides difficile; identical to SEQ ID NO: 6570
  source 1..50: mol_type = genomic DNA

SEQ ID NO: 6746 - protein, 537 aa, Clostridioides difficile
MKQQIYNTALYLRLSRDDELQGESSSITTQRSMLRLYAKEHHLNVIDEYIDDGWSGTNFERPSFQRMIEDIEAGKINCVVTKDLSRLGRNYIMTGQYTELYFPSHNVRYIAIDDGVDSEKGESEIAPFKDIINEWVARDTSRKVKSAFKTKFAEGAYYRAYAPLGYKKHPDIKGKLLVDEETKWIVEKIFSLAYQGYGSAKITKVLREEKVPTASWLNFTRYGTFAHIFEGKPESKRYEWTIAHVKAILKSEVYIGNSVHNMQSTVSFKSKKKVRKPESEWFRVENTHEPIIDKEVFYRVQEQIKSRRRQTKEKATPIFAGLVKCADCGWSMRFATNTANKTPYSYYACSYYGQFGKGTCSMHYIRYDVLYQAVLKRLQYWAKAVQQDEEKVLNKIQKAGNAERIREKKKKASAFKKAENRQNEIDRLFAKMYEDRACEKITERNFVMLSSKYQKEQIELEQQITNLREELSKMEQDMIGAEKWIELIKEYSVPKELTVPLLNAMIEKILIHEAITNEDNERIQEIEIYYRFIGKVD

SEQ ID NO: 6747 - DNA, 50 bp, Clostridioides difficile; identical to SEQ ID NO: 2592
  source 1..50: mol_type = genomic DNA

SEQ ID NO: 6748 - DNA, 40 bp, Clostridioides difficile; identical to SEQ ID NO: 5343
  source 1..40: mol_type = genomic DNA

SEQ ID NO: 6749 - DNA, 40 bp, Clostridioides difficile; identical to SEQ ID NO: 6609
  source 1..40: mol_type = genomic DNA

SEQ ID NO: 6750 - DNA, 50 bp, Clostridioides difficile; identical to SEQ ID NO: 6570
  source 1..50: mol_type = genomic DNA

SEQ ID NO: 6751 - protein, 402 aa, Clostridioides difficile
MARDTSRKVKSAFKTKFAEGAHYGAYAPLGYKKHPDIKGKLLVDDETKWIVEKIFSLAYQGYGSAKITKVLREEKVPTASWLNFTRYGTFAHIFEGKPESKRYEWTIAHVKAILKSEVYIGNSVHNMQSTVSFKSKKKVRKPESEWFRVENTHEPIIDKEVFYRVQEQIKSRRRQTKEKATPIFAGLVKCADCGWSIRFATNTANKTPYSYYACSYYGQFGKGTCSMHYIRYDVLYQAVLKRLQYWAKAVQQDEEKVLNKIQKAGNAERIREKKKKASAFKKAENRQNEIDRLFAKMYEDRACEKITERNFVMLSSKYQKEQIELEQQITNLREELSKMEQDMIGAEKWIELIKEYSVPKELTAPLLNAMIEKILIHEAITNEDNERIQEIEIYYRFIGKVD

SEQ ID NO: 6752 - DNA, 50 bp, Clostridioides difficile; identical to SEQ ID NO: 2592
  source 1..50: mol_type = genomic DNA

SEQ ID NO: 6753 - DNA, 40 bp, Clostridioides difficile; identical to SEQ ID NO: 5343
  source 1..40: mol_type = genomic DNA

SEQ ID NO: 6754 - DNA, 40 bp, Clostridioides difficile; identical to SEQ ID NO: 6609
  source 1..40: mol_type = genomic DNA

SEQ ID NO: 6755 - DNA, 50 bp, Clostridioides difficile; identical to SEQ ID NO: 6570
  source 1..50: mol_type = genomic DNA

SEQ ID NO: 6756 - protein, 537 aa, Clostridioides difficile
MKQQIYNTALYLGLSRDDELQGESSSITTQRSMLRLYAKEHHLNVIDEYIDDGWSGTNFERPSFQRMIEDIEAGKINCVVTKDLSRLGRNYIMTGQYTELYFPSHNVRYIAIDDGVDSEKGESEIAPFKNIINEWVARDTSRKVKSAFKTKFAEGAHYGAYAPLGYKKHPDIKGKLLVDDETKWIVEKIFSLAYQGYGSAKITKVLREEKVPTASWLNFTRYGTFAHIFEGKPESKRYEWTIAHVKAILKSEVYIGNSVHNMQSTVSFKSKKKVRKPESEWFRVENTHEPIIDKEVFYRVQEQIKSRRRQTKEKATPIFAGLVKCADCGWSMRFATNTANKTPYSYYACSYYGQFGKGTCSMHYIRYDVLYQAVLKRLQYWAKAVQQDEEKVLNKIQKAGNAERIREKKKKASAFKKAENRQNEIDRLFAKMYEDRACEKITERNFVMLSSKYQKEQIELEQQITNLREELSKMEQDMIGAEKWIELIKEYSVPKELTVPLLNAMIEKILIHEAITNEDNERIQEIEIYYRFIGKVD

SEQ ID NO: 6757 - DNA, 50 bp, Clostridioides difficile; identical to SEQ ID NO: 2592
  source 1..50: mol_type = genomic DNA

SEQ ID NO: 6758 - DNA, 40 bp, Clostridioides difficile; identical to SEQ ID NO: 5343
  source 1..40: mol_type = genomic DNA

SEQ ID NO: 6759 - DNA, 40 bp, Clostridioides difficile; identical to SEQ ID NO: 6609
  source 1..40: mol_type = genomic DNA

SEQ ID NO: 6760 - DNA, 50 bp, Clostridioides difficile; identical to SEQ ID NO: 6570
  source 1..50: mol_type = genomic DNA

SEQ ID NO: 6761 - protein, 535 aa, Flavonifractor sp An306
MKQPYNTALYMRLSRDDENYGDSVSIETQRTILQQYAKEHGLSVYGEYVDDGWSGTNFERPSFQRMMDDVEAGKVNCIVTKDLSRFGREHVMMDYYLEFVFPEKQIRYIAVAENEDTEKGLSDFVPFKNLFNEWFAKDTSRKVKTALRAKFAAGERTFAYAPLGYIRHPEVKNTLAIDEETRWIIEKIFDLAFHGAGAAKITKALIAEKVPTAGWLNYQRYGTFANIYANAPEEKSYAWTIAQVKSILQDETYIGNSVHNKQTNISYKNKKKVRKPKEEWIRVENTHEAIISRDVFEQVQKQITSRRRQQKDATTQIFAGLVKCADCGWSMRFGTNRQNKTPYSHFTCSQYGQMGTQCSAHYIRYDTLYVYVLSRIQYWSHRAQLSEEKLLQQILKNGDRERMTVAKRQESELKRAEKRKAEVDGKFVRMYEDWSAGRITEYNFNLLTKKYQAEQLELEERISRLQAELSAEQQTALDAEKWVALIKQYANPTELTAELLNTLIEKIVIHEATKGEDGMREQEIEIYYRFIGKID

SEQ ID NO: 6762 - DNA, 50 bp, Flavonifractor sp An306
  source 1..50: mol_type = genomic DNA
ccatatccttaactttgggaaacagaagtttcccatagttaaggatacca

SEQ ID NO: 6763 - DNA, 40 bp, Flavonifractor sp An306
  source 1..40: mol_type = genomic DNA
catctcaaaatgggagaccgacgagacccttccagacatc

SEQ ID NO: 6764 - DNA, 40 bp, Flavonifractor sp An306
  source 1..40: mol_type = genomic DNA
catctcaaaatgggagaccatcgagacccttccagacatc

SEQ ID NO: 6765 - DNA, 50 bp, Flavonifractor sp An306
  source 1..50: mol_type = genomic DNA
atatatcctaaagtttgtgaaactatagtttgccttatggaaggaaaaca

SEQ ID NO: 6766 - protein, 537 aa, Blautia producta
MKQQIYNTALYLRLSRDDELQGESSSITTQRSMLRLYAKEHHLNVIDEYIDDGWSGTNFERPSFQRMIEDIEAGKINCVVTKDLSRLGRNYIMTGQYTELYFPSHNVRYIAIDDGVDSEKGESEIAPFKNIINEWVARDTSRKVKSAFKTKFVEGAYYGAYAPLGYKKHPDIKGKLLVDEETKWIVEKIFSLAYQGYGSAKITKILREEKVPTASWLNFTRYGTFAHIFEGKPESKRYEWTIAHVKAILKSEVYIGNSVHNRQSTVSFKSKKKVRKPESEWFRVENTHEPIIDKEVFYRVQEQIKSRRRQTKEKATPIFAGLVKCADCGWSMRFATNKANKTPYSYYACSYYGQFGKGNCSMHYIRYDVLYQAVLERLQYWAKAVQQDEEKVLNKIQKVGNAERIREKKKKASALKKAENRQNEIDRLFAKMYEDRACEKITERNFIMLSGKYQKEQIELEQQITNLREELSKMEQDMIGAEKWIELIKEYSVPKELTAPLLNAMIEKILIHEATTNEDNERIQEIEIYYRFIGKVD

SEQ ID NO: 6767 - DNA, 50 bp, Blautia producta; identical to SEQ ID NO: 2592
  source 1..50: mol_type = genomic DNA

SEQ ID NO: 6768 - DNA, 40 bp, Blautia producta
  source 1..40: mol_type = genomic DNA
aatttctaaatgggaggcaggcacatcctatccggagatg

SEQ ID NO: 6769 - DNA, 40 bp, Blautia producta
  source 1..40: mol_type = genomic DNA
aatttctaaatgggaggcaatcacatcctatccggagatg

SEQ ID NO: 6770 - DNA, 50 bp, Blautia producta; identical to SEQ ID NO: 6570
  source 1..50: mol_type = genomic DNA

SEQ ID NO: 6771 - protein, 537 aa, Mediterraneibacter glycyrrhizinilyticus; identical to SEQ ID NO: 2591

SEQ ID NO: 6772 - DNA, 50 bp, Mediterraneibacter glycyrrhizinilyticus; identical to SEQ ID NO: 2592
  source 1..50: mol_type = genomic DNA

SEQ ID NO: 6773 - DNA, 40 bp, Mediterraneibacter glycyrrhizinilyticus
  source 1..40: mol_type = genomic DNA
cagtacggagccttttcccggtggatcacatccagataaa

SEQ ID NO: 6774 - DNA, 40 bp, Mediterraneibacter glycyrrhizinilyticus
  source 1..40: mol_type = genomic DNA
cagtacggagccttttcccattggatcacatccagataaa

SEQ ID NO: 6775 - DNA, 50 bp, Mediterraneibacter glycyrrhizinilyticus; identical to SEQ ID NO: 6570
  source 1..50: mol_type = genomic DNA

SEQ ID NO: 6776 - protein, 537 aa, Clostridium paraputrificum; identical to SEQ ID NO: 6586

SEQ ID NO: 6777 - DNA, 50 bp, Clostridium paraputrificum; identical to SEQ ID NO: 2592
  source 1..50: mol_type = genomic DNA

SEQ ID NO: 6778 - DNA, 40 bp, Clostridium paraputrificum
  source 1..40: mol_type = genomic DNA
agtatcaaagtgggaaagtgggagtacttatccagatatt

SEQ ID NO: 6779 - DNA, 40 bp, Clostridium paraputrificum
  source 1..40: mol_type = genomic DNA
agtatcaaagtgggaaagtatgagtacttatccagatatt

SEQ ID NO: 6780 - DNA, 50 bp, Clostridium paraputrificum; identical to SEQ ID NO: 6570
  source 1..50: mol_type = genomic DNA

SEQ ID NO: 6781 - protein, 537 aa, Ruminococcus gnavus; identical to SEQ ID NO: 6596

SEQ ID NO: 6782 - DNA, 50 bp, Ruminococcus gnavus; identical to SEQ ID NO: 2592
  source 1..50: mol_type = genomic DNA

SEQ ID NO: 6783 - DNA, 40 bp, Ruminococcus gnavus
  source 1..40: mol_type = genomic DNA
aatctgcagatgggaaaacggctcaagatgcccggatttg

SEQ ID NO: 6784 - DNA, 40 bp, Ruminococcus gnavus
  source 1..40: mol_type = genomic DNA
aatctgcagatgggaaaacatctcaagatgcccggatttg

SEQ ID NO: 6785 - DNA, 50 bp, Ruminococcus gnavus; identical to SEQ ID NO: 6570
  source 1..50: mol_type = genomic DNA

SEQ ID NO: 6786 - protein, 537 aa, Ruminococcus gnavus; identical to SEQ ID NO: 6766

SEQ ID NO: 6787 - DNA, 50 bp, Ruminococcus gnavus; identical to SEQ ID NO: 2592
  source 1..50: mol_type = genomic DNA

SEQ ID NO: 6788 - DNA, 40 bp, Ruminococcus gnavus
  source 1..40: mol_type = genomic DNA
gatatcaaaatgggaacgtggactgagtctcccggatatc

SEQ ID NO: 6789 - DNA, 40 bp, Ruminococcus gnavus
  source 1..40: mol_type = genomic DNA
gatatcaaaatgggaacgtatactgagtctcccggatatc

SEQ ID NO: 6790 - DNA, 50 bp, Ruminococcus gnavus; identical to SEQ ID NO: 6570
  source 1..50: mol_type = genomic DNA

SEQ ID NO: 6791 - protein, 457 aa, Bacillus cereus; identical to SEQ ID NO: 2466

SEQ ID NO: 6792 - DNA, 50 bp, Bacillus cereus; identical to SEQ ID NO: 2467
  source 1..50: mol_type = genomic DNA

SEQ ID NO: 6793 - DNA, 40 bp, Bacillus cereus
  source 1..40: mol_type = genomic DNA
tttaggattatcaaattcactatgatacgcccttccgaaa

SEQ ID NO: 6794 - DNA, 40 bp, Bacillus cereus
  source 1..40: mol_type = genomic DNA
tttaggattatcaaattcaagatgatacgcccttccgaaa

SEQ ID NO: 6795 - DNA, 50 bp, Bacillus cereus
  source 1..50: mol_type = genomic DNA
ttttggagtggattgctatttcctagagtaaatttggaccaaatccacaa

SEQ ID NO: 6796 - protein, 457 aa, Bacillus cereus
MRCAIYRRVSTDEQAEKGFSLENQKLRLESFATSQGWEVVEDYVDDGFSGKDTNRPALQRMFSNVDKFDVILVYKLDRFTRSVKDLNEMLETIKENEIAFKSATESIDTTTATGRMILNMMGTTAQWERETISERIKDVFGKLRENGIFSTGHPPYGYRCSGNKSIEIVEEQAEIVRYIYELSKTMGLFKISVELNRKGIKTRRNNKFGQSAVKRILHNPFYCGYMEVNNKWVPIKNEGYIPIISEEEFKTTQKILTKRNKAQTRSRSVSYYPFSGIVLCPECQRAMRGDRAKYGDYYYRYYRCVYGRENINCTNRKRIRAEQVDKAFAEYISGSFENTTIKLDSKDIKSNIEYELKHLDSKIERLSDIYIEGDITKSKYNEKMNSLLNEKEKLKKDLTSCKENVDAEFVRDQINKLESIWHLIDDKTKSESIRSIFDTIKIKQDKNKVTIMDHTLL

SEQ ID NO: 6797 - DNA, 50 bp, Bacillus cereus
  source 1..50: mol_type = genomic DNA
ttttgggttaatggtccatttcctctagtaaatgttttattaacccaaaa

SEQ ID NO: 6798 - DNA, 40 bp, Bacillus cereus
  source 1..40: mol_type = genomic DNA
tttaggactatcaaattcactatgatacgcccttccgaat

SEQ ID NO: 6799 - DNA, 40 bp, Bacillus cereus
  source 1..40: mol_type = genomic DNA
tttaggactatcaaattcaagatgatacgcccttccgaat

SEQ ID NO: 6800 - DNA, 50 bp, Bacillus cereus; identical to SEQ ID NO: 6795
  source 1..50: mol_type = genomic DNA

SEQ ID NO: 6801 - protein, 457 aa, Bacillus cereus; identical to SEQ ID NO: 2466

SEQ ID NO: 6802 - DNA, 50 bp, Bacillus cereus; identical to SEQ ID NO: 2467
  source 1..50: mol_type = genomic DNA

SEQ ID NO: 6803 - DNA, 40 bp, Bacillus cereus
  source 1..40: mol_type = genomic DNA
cttcggattatcaaattcactatgatatgccctgctgaaa

SEQ ID NO: 6804 - DNA, 40 bp, Bacillus cereus
  source 1..40: mol_type = genomic DNA
cttcggattatcaaattcaagatgatatgccctgctgaaa

SEQ ID NO: 6805 - DNA, 50 bp, Bacillus cereus; identical to SEQ ID NO: 6795
  source 1..50: mol_type = genomic DNA

SEQ ID NO: 6806 - protein, 457 aa, Bacillus cereus
MRCAIYRRVSTDEQAEKGFSLENQKLRLESFATSQGWEVVEDYVDDGFSGKDTNRPALQRMFSNVDKFDVILVYKLDRFTRSVKDLNEMLETIKENEIAFKSATESIDTTTATGRMILNMMGTTAQWERETISERIKDVFGKLRENGIFSTGHPPYGYRCSGNKSIEIVEEQAEIVRYIYEISKTMGLFKISVELNRKGIKTRRNNKFGQSAVKRILHNPFYCGYMEVNNKWVPIKNEGYIPIISEEEFKTTQKILTKRNKAQTRSRSVSYYPFSGIVLCPECQRAMRGDRAKYGDYYYRYYRCVYGRENINCTNRKRIRAEQVDKAFAEYISGSFENTTIKLDSKDIKSDIEYELKHLDSKIERLSDIYIEGDITKSKYNEKMNSLLNEKEKLKKDLTSCKENVDAEFVRDQINKLESIWHLIDDKTKSESIRSIFDTIKIKQDKNKVTIMDHTLL

SEQ ID NO: 6807 - DNA, 50 bp, Bacillus cereus; identical to SEQ ID NO: 2467
  source 1..50: mol_type = genomic DNA

SEQ ID NO: 6808 - DNA, 40 bp, Bacillus cereus; identical to SEQ ID NO: 6798
  source 1..40: mol_type = genomic DNA

SEQ ID NO: 6809 - DNA, 40 bp, Bacillus cereus; identical to SEQ ID NO: 6799
  source 1..40: mol_type = genomic DNA

SEQ ID NO: 6810 - DNA, 50 bp, Bacillus cereus; identical to SEQ ID NO: 6795
  source 1..50: mol_type = genomic DNA

SEQ ID NO: 6811 - protein, 457 aa, Bacillus cereus; identical to SEQ ID NO: 2466

SEQ ID NO: 6812 - DNA, 50 bp, Bacillus cereus; identical to SEQ ID NO: 2467
  source 1..50: mol_type = genomic DNA

SEQ ID NO: 6813 - DNA, 40 bp, Bacillus cereus
  source 1..40: mol_type = genomic DNA
tttagaactatcaaattcactatgatacgcccttccgaaa

SEQ ID NO: 6814 - DNA, 40 bp, Bacillus cereus
  source 1..40: mol_type = genomic DNA
tttagaactatcaaattcaagatgatacgcccttccgaaa

SEQ ID NO: 6815 - DNA, 50 bp, Bacillus cereus; identical to SEQ ID NO: 6795
  source 1..50: mol_type = genomic DNA

SEQ ID NO: 6816 - protein, 457 aa, Bacillus cereus; identical to SEQ ID NO: 2466

SEQ ID NO: 6817 - DNA, 50 bp, Bacillus cereus; identical to SEQ ID NO: 6797
  source 1..50: mol_type = genomic DNA

SEQ ID NO: 6818 - DNA, 40 bp, Bacillus cereus; identical to SEQ ID NO: 6798
  source 1..40: mol_type = genomic DNA

SEQ ID NO: 6819 - DNA, 40 bp, Bacillus cereus; identical to SEQ ID NO: 6799
  source 1..40: mol_type = genomic DNA

SEQ ID NO: 6820 - DNA, 50 bp, Bacillus cereus; identical to SEQ ID NO: 6795
  source 1..50: mol_type = genomic DNA

SEQ ID NO: 6821 - protein, 457 aa, Bacillus cereus; identical to SEQ ID NO: 2466

SEQ ID NO: 6822 - DNA, 50 bp, Bacillus cereus; identical to SEQ ID NO: 2467
  source 1..50: mol_type = genomic DNA

SEQ ID NO: 6823 - DNA, 40 bp, Bacillus cereus; identical to SEQ ID NO: 6798
  source 1..40: mol_type = genomic DNA

SEQ ID NO: 6824 - DNA, 40 bp, Bacillus cereus; identical to SEQ ID NO: 6799
  source 1..40: mol_type = genomic DNA

SEQ ID NO: 6825 - DNA, 50 bp, Bacillus cereus; identical to SEQ ID NO: 6795
  source 1..50: mol_type = genomic DNA

SEQ ID NO: 6826 - protein, 457 aa, Bacillus cereus
MRCAIYRRVSTDEQAEKGFSLENQKLRLESFATSQGWEVVEDYVDDGFSGKDTNRPALQRMFSNVDKFDVILVYKLDRFTRSVKDLNEMLETIKENEIAFKSATESIDTTTATGRMILNMMGTTAQWERETISERIKDVFGKLRENGIFSTGHPPYGYRCSGNKSIEIVEEQAEIVRYIYELSKTMGLFKISVELNRKGIKTRRNNKFGQSAVKRILHNPFYCGYMEVNNKWVPIKNEGYIPIISEEEFKTTQKILTKRNKAQTRSRSVSYYPFSGIVLCPECQRAMRGDRAKYGDYYYRYYRCVYGRENINCTNRKRIRAEQVDKAFAEYISGSFENTTIKLDSKDIKSNIEYELKHLDSKIERLSDIYIEGDITKSKYNEKMNSLLNEKEKLKKDLTSCKENVDAEFVRDQINKLESIWDLIDDKTKSESIRSIFDTIKIKQDKNKVTIMDHTLL

SEQ ID NO: 6827 - DNA, 50 bp, Bacillus cereus; identical to SEQ ID NO: 6797
  source 1..50: mol_type = genomic DNA

SEQ ID NO: 6828 - DNA, 40 bp, Bacillus cereus; identical to SEQ ID NO: 6798
  source 1..40: mol_type = genomic DNA

SEQ ID NO: 6829 - DNA, 40 bp, Bacillus cereus; identical to SEQ ID NO: 6799
  source 1..40: mol_type = genomic DNA

SEQ ID NO: 6830 - DNA, 50 bp, Bacillus cereus; identical to SEQ ID NO: 6795
  source 1..50: mol_type = genomic DNA

SEQ ID NO: 6831 - protein, 457 aa, Bacillus cereus; identical to SEQ ID NO: 2466

SEQ ID NO: 6832 - DNA, 50 bp, Bacillus cereus; identical to SEQ ID NO: 6797
  source 1..50: mol_type = genomic DNA

SEQ ID NO: 6833 - DNA, 40 bp, Bacillus cereus
  source 1..40: mol_type = genomic DNA
tttcggattatcaaattcactatgatatgccctgctgaaa

SEQ ID NO: 6834 - DNA, 40 bp, Bacillus cereus
  source 1..40: mol_type = genomic DNA
tttcggattatcaaattcaagatgatatgccctgctgaaa

SEQ ID NO: 6835 - DNA, 50 bp, Bacillus cereus; identical to SEQ ID NO: 6795
  source 1..50: mol_type = genomic DNA

SEQ ID NO: 6836 - protein, 457 aa, Bacillus cereus; identical to SEQ ID NO: 6796

SEQ ID NO: 6837 - DNA, 50 bp, Bacillus cereus; identical to SEQ ID NO: 2467
  source 1..50: mol_type = genomic DNA

SEQ ID NO: 6838 - DNA, 40 bp, Bacillus cereus; identical to SEQ ID NO: 6798
  source 1..40: mol_type = genomic DNA

SEQ ID NO: 6839 - DNA, 40 bp, Bacillus cereus; identical to SEQ ID NO: 6799
  source 1..40: mol_type = genomic DNA

SEQ ID NO: 6840 - DNA, 50 bp, Bacillus cereus; identical to SEQ ID NO: 6795
  source 1..50: mol_type = genomic DNA

SEQ ID NO: 6841 - protein, 457 aa, Bacillus cereus
MRCAIYRRVSTDEQAEKGFSLENQKLRLESFATSQGWEVVEDYVDDGFSGKDTNRPALQRMFSNVDKFDVILVYKLDRFTRSVKDLNEMLETIKENEIAFKSATESIDTTTATGRMILNMMGTTAQWERETISERIKDVFGKLRENGIFSTGHPPYGYRCSGNKSIEIVEEQAETVRYIYELSKTMGLFKISVELNRKGIKTRRNNKFGQSAVKRILHNPFYCGYMEVNNKWVPIKNEGYIPIISEEEFKTTQKILTKRNKAQTRSRSVSYYPFSGIVLCPECQRAMRGDRAKYGDYYYRYYRCVYGRENINCTNRKRIRAEQVDKAFAEYISGSFENTTIKLDSRNIKSDIEYELNHLDSKIERLSDIYIEGDITKSKYNEKMNSLLNEKEKLKKDLTSCKENVDAQFVRDQINKLESIWHLIDDKTKSESIRSIFDTIKIKQDKNKVTIMDHTLL

SEQ ID NO: 6842 - DNA, 50 bp, Bacillus cereus; identical to SEQ ID NO: 2467
  source 1..50: mol_type = genomic DNA

SEQ ID NO: 6843 - DNA, 40 bp, Bacillus cereus; identical to SEQ ID NO: 6798
  source 1..40: mol_type = genomic DNA

SEQ ID NO: 6844 - DNA, 40 bp, Bacillus cereus; identical to SEQ ID NO: 6799
  source 1..40: mol_type = genomic DNA

SEQ ID NO: 6845 - DNA, 50 bp, Bacillus cereus; identical to SEQ ID NO: 6795
  source 1..50: mol_type = genomic DNA

SEQ ID NO: 6846 - protein, 457 aa, Bacillus toyonensis
MRCAIYRRVSTDEQAEKGFSLENQKLRLESFATSQGWEVVEDYVDDGFSGKDTNRPALQRMFSNVDKFDVILVYKLDRFTRSVKDLNEMLETIKENEIAFKSATESIDTTTATGRMILNMMGTTAQWERETISERIKDVFGKLRENGIFSTGHPPYGYRYSGNKSIEIVEEQAKMVRYIYELSKTMGLFKISVELNRKGIKTRRNNKFGQSAVKRILHNPFYCGYMEVNNKWVPIKNESYIPIISEEEFKTTQKILTKRNKAQTRSRSVSYYPFSGIVLCPECQRAMRGDRAKYGDYYYRYYRCVYGRENINCTNRKRIRAEQVDKAFAEYISGSFENTTIKLDSRNIKSDIEYELNHLDSKIERLSDIYIEGDITKSKYNEKMNSLLNEKEKLKKDLTSCKENVDAQFVRDQINKLESIWHLIDDKTKSESIRSIFDTIKIKQDKNKVTIMDHTLL

SEQ ID NO: 6847 - DNA, 50 bp, Bacillus toyonensis; identical to SEQ ID NO: 2467
  source 1..50: mol_type = genomic DNA

SEQ ID NO: 6848 - DNA, 40 bp, Bacillus toyonensis; identical to SEQ ID NO: 6793
  source 1..40: mol_type = genomic DNA

SEQ ID NO: 6849 - DNA, 40 bp, Bacillus toyonensis; identical to SEQ ID NO: 6794
  source 1..40: mol_type = genomic DNA

SEQ ID NO: 6850 - DNA, 50 bp, Bacillus toyonensis; identical to SEQ ID NO: 6795
  source 1..50: mol_type = genomic DNA

SEQ ID NO: 6851 - protein, 570 aa, Vibrio crassostreae
MVTAYSYVRFSTPDQAYGDSETRQLKLAIKYCKDNNLTLSDRTFKDLGISGYSGKVRPSLFEMFDCIESGEIKRGDYLLIETFDRLSRRGFDDTHQLIRQIVKAGVIVVSVQDNLVINEESLNDSMTIVRLAISADLAHKESLRKSVRISESKTSLKQKLLEGQKVTISSNVPFWLNIENGVPTADEQQVELVNMIYDLSLDGNGFTKILNVLNSSGIKAPKGGQWGKSTLAKLLSNRAVLGEYQPYKSQSNGSRAIDPDYGVIHGYYPQIITEDKFIQVQVAKNKRKTYQSGNKGKEGLFPNLFQQFAKCSTCESSLEIVNKGKTPKGGKYLVCSSAKRKGSCKKNKHFRYSELEKILNSLVMKGVISLESDKAQSKKAVELSKLEHELIKAKQKFEKFLMLDLGDDMDLVRRSSNHHKKVIAGLEKAISNLNYEVHDGISNASFNEAGNLLKLNNNTAENATLRSRFNLALIKKYGICSIGTVGSYTFVEFKNSEDIIFISPNYKWYFPSAYQFTPLPIMVGVKSRLRISQTELKRQAETLLDCISQTNIEGLTLHSNTLKETISNIK

SEQ ID NO: 6852 - DNA, 50 bp, Vibrio crassostreae
  source 1..50: mol_type = genomic DNA
tttagggaaaggtagcgtagtttattagtgttgtgataccattccctgaa

SEQ ID NO: 6853 - DNA, 40 bp, Vibrio crassostreae
  source 1..40: mol_type = genomic DNA
tgctgggaatcataacttattgtttcttggcccacccgga

SEQ ID NO: 6854 - DNA, 40 bp, Vibrio crassostreae
  source 1..40: mol_type = genomic DNA
tgctgggaatcataacttaaagtttcttggcccacccgga

SEQ ID NO: 6855 - DNA, 50 bp, Vibrio crassostreae
  source 1..50: mol_type = genomic DNA
tttactgaaatctatcatagtttaaaagttttgtgagcgtcatctcttaa

SEQ ID NO: 6856 - protein, 475 aa, Lactobacillus fermentum
MKIAVYVRVSTLEQAESGYSIGEQTEKLKSYCKIKDWDIAKIYTDPGFSGSSLDRPAMQQLISDCKLGVFDAVLVYKLDRLSRSQKDTLYLIEDVFNAYNIHFMSLSENFDTSTPFGKAMIGLLSVFAQLEREQIKERMQMGKLGRVKAGKISAWSNVPFGYTKIKDSYDVDPLRAGIVRRIYADYLAGKSITKIMKELNREGHIGKGVAWSYRTVRQVLGNVTYTGRIIFKGQVYDGLHTGIISKADWDEVQRVLKIRQLDQAKKSNNPRPFQAQHMLSGLLKCYYCGATLAIAKSHTKNGPLWRYVCPTRHASKYHRNNAARYRIPPVNCELTYKYKDDLEKAVLREVKKVALDPDAVVARQDDGQPTIDKQAIKAQLAKIKRQQAKLVDLYLLSDDLNVDQLHDRAEKLKVQADALQAQLIHDNKKADAFKKTATDAAQIDQLDYEHQTAIVRMLIDHINVSNTGLDIYWQI

SEQ ID NO: 6857 - DNA, 50 bp, Lactobacillus fermentum
  source 1..50: mol_type = genomic DNA
taaaaagatttagagagtgccatttcaaccacaatctctaaatcttttct

SEQ ID NO: 6858 - DNA, 40 bp, Lactobacillus fermentum
  source 1..40: mol_type = genomic DNA
gaacaagacaatcgtcatttccaccagggtaaagcccttg

SEQ ID NO: 6859 - DNA, 40 bp, Lactobacillus fermentum
  source 1..40: mol_type = genomic DNA
gaacaagacaatcgtcatttacaccagggtaaagcccttg

SEQ ID NO: 6860 - DNA, 50 bp, Lactobacillus fermentum
  source 1..50: mol_type = genomic DNA
taaaatgataagtacagtgcagtttaaactacagtccaaaaagcttctct

SEQ ID NO: 6861 - protein, 458 aa, Staphylococcus condimenti
MKVAIYTRVSTLEQANEGYSIGEQERKLKQFCDINDWKVVDVYVDAGISGGSLKRPSLQKLLNDIDKFDMVLVYKLDRLTRSVRDLLDLLEIFDQNNVAFRSATEVYDTTNAMGRLFVTLVGAMAEWERATITERTLYGKEGALESGKFLGHVPFYYDLVDNKLIPNENRKYVDYIIKRLKENISATQIGKELSNMKDTPVKFNKTMVIQILHSPTAHGHTKYGKFFKENTHEPVITQEDYNTAIKILSTRRHTYKQNHASIFRGKIECPNNCGRFLHLNVNKIKRADGSYYLRQYYKCDKCSREKKPSTIIRYDMMQEAFMKYLNNLSFDTIEPPENNDDEEEFEIDITKVMRQREKYQKAWAMDLMTDDEFKARMKETDKLLEEASEKEVENNELEFEQVIKIQKLLQKSWNNLSEDKKEDLIAATIDKIQIELIRGNKTVNSPNEVKIKDVSFLL

SEQ ID NO: 6862 - DNA, 50 bp, Staphylococcus condimenti
  source 1..50: mol_type = genomic DNA
gtgtgtggtattagcattttgattgtaatatattgtccttgaacataagc

SEQ ID NO: 6863 - DNA, 40 bp, Staphylococcus condimenti
  source 1..40: mol_type = genomic DNA
accaggcgggaatgcacctgtgatatttctaccaatacag

SEQ ID NO: 6864 - DNA, 40 bp, Staphylococcus condimenti
  source 1..40: mol_type = genomic DNA
accaggcgggaatgcacctctgatatttctaccaatacag

SEQ ID NO: 6865 - DNA, 50 bp, Staphylococcus condimenti
  source 1..50: mol_type = genomic DNA
gtgcgtgtttttattattttgattctgatctgttgtcgcacaacacaaga

SEQ ID NO: 6866 - protein, 518 aa, Cronobacter sakazakii
MKKTVYCYARVSSRGQAKDGYGMSRQQTMLRDYVAAYDDSLHNRGYELGSVYWLYAEGISAYSGKNIEDGSVLKSFIDDVLERKIINAVLVIENLDRFSRAEPIKAANLFLNLITAGCDIHEVETETIHHSSSDLSIITGGLQRAHNESKRKARLSIKNWDERIKNAIDGKAVLTNRVPSWLEVKDNGYVIKEGEKEKYNLIFQMYADGFGPAAIRDVLKERNMLINDSEPTIAHLNKIIKDERLIGKFNSTGRKKLSGLVIYPVVVDLSLFHIVDQLRKQRNPVGKIHRKANNLFAGLCICMECGRYVQVNSVEPSGESYFRCGGSLVKIDRCQERGFKYKLFENALLQHIRNFDFSSLNANESEVQIRVNHLSIELLTHIKYRDEILQDIEKEDIPDPNDRRILKNIQKKIGEIESEISNLKRLNVNVSTFDELKKYSEELSDPLNVDLRLDFNIKVKRVIKSIIIKRYSDTIFLVINYIAINEKQAIVINSKNGEVLYMGVQNDDLKTVEHLIRN

SEQ ID NO: 6867 - DNA, 50 bp, Cronobacter sakazakii
  source 1..50: mol_type = genomic DNA
tacagtaatttactgttaatgaccacaatgatatactgaattttactgtc

SEQ ID NO: 6868 - DNA, 40 bp, Cronobacter sakazakii; identical to SEQ ID NO: 5718
  source 1..40: mol_type = genomic DNA

SEQ ID NO: 6869 - DNA, 40 bp, Cronobacter sakazakii
  source 1..40: mol_type = genomic DNA
ggcgatgatgccgatcaccaacatcagttcaatgagtgta

SEQ ID NO: 6870 - DNA, 50 bp, Cronobacter sakazakii
  source 1..50: mol_type = genomic DNA
taaagtaatgctaaagtagagcccaaaatgatatacatacatttagtggc

SEQ ID NO: 6871 - protein, 518 aa, Escherichia coli; identical to SEQ ID NO: 6866

SEQ ID NO: 6872 - DNA, 50 bp, Escherichia coli; identical to SEQ ID NO: 6867
  source 1..50: mol_type = genomic DNA

SEQ ID NO: 6873 - DNA, 40 bp, Escherichia coli; identical to SEQ ID NO: 918
  source 1..40: mol_type = genomic DNA

SEQ ID NO: 6874 - DNA, 40 bp, Escherichia coli
  source 1..40: mol_type = genomic DNA
ggcaatgatgccaataaccaacatcagttcgataagtgta

SEQ ID NO: 6875 - DNA, 50 bp, Escherichia coli; identical to SEQ ID NO: 6870
  source 1..50: mol_type = genomic DNA

SEQ ID NO: 6876 - protein, 518 aa, Cronobacter sakazakii
MKKTVYCYARVSSRGQAKDGYGMSRQQTMLRDYVAAYDDSLHNRGYELGSVYWLYAEGISAYSGKNIEDGSVLKSFIDDVLERKIINAVLVIENLDRFSRAEPIKAANLFLNLITAGCDIHEVETETIHHSSSDLSIITGGLQRAHNESKRKARLSIKNWDERIKNAIDGKAVLTNRVPSWLEVKDNGYVIKEGEKEKYNLIFQMYADGFGPAAIRDVLKERNMLINDCEPTIAHLNKIIKDERLIGKFNSTGRKKLSGLVIYPVVVDLSLFHIVDQLRKQRNPVGKIHRKANNLFAGLCICMECGRYVQVNSVEPSGESYFRCGGSLVKIDRCQERGFKYKLFENALLQHIRNFDFSSLNANESEVQIRVNHLSIELLTHIKYRDEILQDIEKEDIPDPNDRRILKNIQKKIGEIESEISNLKRLNVNVSTFDELKKYSEELSDPLNVDLRLDFNIKVKRVIKSIIIKRYSDTICLVINYIAINEKQAIVINSKNGEVLYMGVQNDDLKTVEHLIRN

SEQ ID NO: 6877 - DNA, 50 bp, Cronobacter sakazakii; identical to SEQ ID NO: 6867
  source 1..50: mol_type = genomic DNA

SEQ ID NO: 6878 - DNA, 40 bp, Cronobacter sakazakii
  source 1..40: mol_type = genomic DNA
ggcgatgatgcctatcaccaccatcagttcaatgagtgta

SEQ ID NO: 6879 - DNA, 40 bp, Cronobacter sakazakii
  source 1..40: mol_type = genomic DNA
ggcgatgatgcctatcaccaacatcagttcaatgagtgta

SEQ ID NO: 6880 - DNA, 50 bp, Cronobacter sakazakii; identical to SEQ ID NO: 6870
  source 1..50: mol_type = genomic DNA

SEQ ID NO: 6881 - protein, 518 aa, Cronobacter malonaticus; identical to SEQ ID NO: 6866

SEQ ID NO: 6882 - DNA, 50 bp, Cronobacter malonaticus; identical to SEQ ID NO: 6867
  source 1..50: mol_type = genomic DNA

SEQ ID NO: 6883 - DNA, 40 bp, Cronobacter malonaticus
  source 1..40: mol_type = genomic DNA
ggcgatgatgcctatcaccaccattagttcgattagtgtg

SEQ ID NO: 6884 - DNA, 40 bp, Cronobacter malonaticus
  source 1..40: mol_type = genomic DNA
ggcgatgatgcctatcaccaacattagttcgattagtgtg

SEQ ID NO: 6885 - DNA, 50 bp, Cronobacter malonaticus; identical to SEQ ID NO: 6870
  source 1..50: mol_type = genomic DNA

SEQ ID NO: 6886 - protein, 514 aa, Citrobacter freundii
MYCYARVSSRGQAKDGYGMSRQQTMLRDYVAAYDDSLHNRGYELGSVYWLYAEGISAYSGKNIEDGSVLKSFIDDVLERKIINAVLVIENLDRFSRAEPIKAANLFLNLITAGCDIHEVETETIHHSSSDLSIITGGLQRAHNESKRKARLSIKNWDERIKNAIDGKAVLTNRVPSWLEVKDNGYVIKEGEKEKYNLIFQMYADGFGPAAIRDVLKERNMLINDSEPTIAHLNKIIKDERLIGKFNSTGRKKLSGLVIYPVVVDLSLFHIVDQLRKQRNPVGKIHRKANNLFAGLCICMECGRYVQVNSVEPSGESYFRCGGSLVKIDRCQERGFKYKLFENALLQHIRNFDFSSLNANESEVQIRVNHLSIELLTHIKYRDEILQDIEKEDIPDPNDRRILKNIQKKIGEIESEISNLKRLNVNVSTFDELKKYSEELSDPLNVDLRLDFNIKVKRVIKSIIIKRYSDTIFLVINYIAINEKQAIVINSKNGEVLYMGVQNDDLKTVEHLIRN

SEQ ID NO: 6887 - DNA, 50 bp, Citrobacter freundii; identical to SEQ ID NO: 6867
  source 1..50: mol_type = genomic DNA

SEQ ID NO: 6888 - DNA, 40 bp, Citrobacter freundii
  source 1..40: mol_type = genomic DNA
ggcaataatgccaatcaccaccatgagttcgataagcgta

SEQ ID NO: 6889 - DNA, 40 bp, Citrobacter freundii
  source 1..40: mol_type = genomic DNA
ggcaataatgccaatcaccaacatgagttcgataagcgta

SEQ ID NO: 6890 - DNA, 50 bp, Citrobacter freundii; identical to SEQ ID NO: 6870
  source 1..50: mol_type = genomic DNA

SEQ ID NO: 6891 - protein, 557 aa, Candidatus Galacturonibacter soehngenii
MARTKNRGFEEKTSAPQIIRWKLAQYIRLSKEDINRGKDDSNSVTNQKALLDDYYQQHIDEFESTQPPYVDDGYTGTDTNRDSFQRLLSDIYAKKVNCVIVKDLSRLSRNYTDAGSLIENLFVQMNVRFISLTEGIDSYLNPDSISNLIVPITNVINDNFCYQTSKKIRQVFDMKRRNGEFIGGFAAYGYKKNPKDKNALIVDEEAAEIVKNIYEWFLDGMSKNAIVHNLNDRGILCPSEYKKSKGLNYQNPSGSERPLWSSKTVSDILKNRLYVGDMVQGRQRVKSYKIHTQEQVPENEWYIVENTHEPIIERPIFEKVQELLKRDTRTAPQKKKLYLFSGFLRCADCGKAMSRSQVKGTVYYFCRTYKDQSKTACTKHSVKHNRLEAAVLYAIQQQVYLAVHYANTLEYISTAPLQKSQSIRIEALIDAKEKERSKIMRYKQSIYQDWKDGEITHSDYRHMSEDYERQIAALGEVLKNLHAEREELQNGITAESPCLVVFKKFENIDKLTREVLVELVDHIKVHENGNISVKFKFADELRRIMEYIEINTQSEAV

SEQ ID NO: 6892 - DNA, 50 bp, Candidatus Galacturonibacter soehngenii
  source 1..50: mol_type = genomic DNA
aatattaccgggtcaacaggtccaacaggccccgtgatttaaggaaaact

SEQ ID NO: 6893 - DNA, 40 bp, Candidatus Galacturonibacter soehngenii
  source 1..40: mol_type = genomic DNA
cacaggagccacaggtccaacgggtccaataggtccaata

SEQ ID NO: 6894 - DNA, 40 bp, Candidatus Galacturonibacter soehngenii
  source 1..40: mol_type = genomic DNA
cacaggagccacaggtccagagggtccaataggtccaata

SEQ ID NO: 6895 - DNA, 50 bp, Candidatus Galacturonibacter soehngenii
  source 1..50: mol_type = genomic DNA
catgtcacccttccaacagttccagaaggcccagtgcagaaagagagact

SEQ ID NO: 6896 - protein, 499 aa, Bacillus cereus
MEFVAIYMRLSRDSTQNGIEESLENHRLALTRICKTNGWKHDIYEEIASGVSPEREQLNLLLSRLNDYTAILTMDVDRIGRDPEHNEKVLKMLILNGIKVITPSGEYDFSNENSQMLYRMQSMLSSFEYSTIRKRLGRGKFLEASKGHWVMNNIPLGYLKNPETKRLEIDDNESKIIRYIFEKTIEGYSANKISQDLDAFGWRSKKGKVLSTAHISQMRRNPLYYGVVRYERKNELGRVLENCWVEDAHPGIVTKEEFLMCQELIKNNNNKKFKTHGKINHLLQGLIYCGKCGRKRYICIDRNGTPYIKADGAKIENVRCSDAGMALKPVTDAVIEEVKKLKPGLEEEIINFKKRDTIKLEKEMNNKLIETEANKDKLNKKKRNLVEMRMNGEITKEEFLQFRDSLDEQIRNVDDMIQLLQMKLNNLINTEDEVKKLEQIISIINNLDNLSVEKVNAFLRSIIKKVLFSRNIESNPNTAKRDSVEPTVDIEWIEGIPLL

SEQ ID NO: 6897 - DNA, 50 bp, Bacillus cereus
  source 1..50: mol_type = genomic DNA
atgtagtaaaaaataaatttcacaaaagtgaaattatatttttactacac

SEQ ID NO: 6898 - DNA, 40 bp, Bacillus cereus; identical to SEQ ID NO: 4253
  source 1..40: mol_type = genomic DNA

SEQ ID NO: 6899 - DNA, 40 bp, Bacillus cereus; identical to SEQ ID NO: 4253
  source 1..40: mol_type = genomic DNA

SEQ ID NO: 6900 - DNA, 50 bp, Bacillus cereus
  source 1..50: mol_type = genomic DNA
atgtgttaaagtataattttcacaaaagtaaaattatttctctcatacaa

SEQ ID NO: 6901 - protein, 532 aa, Brevibacillus formosus
MRLAVYARTSSDDQAERGTIENQLEFARKYADLHQLEIVKWYKDDGVTGTIPLEARPAGRELLKDAKNKEIDLLLIYRLDRLGRSARIILNSVHELESDGVKIRSMTEPFDTGDPSGRFLLTILAGVADLERETILERLWYGANRAARSGKWLGGIVPYGYRVDSEGYLEICEDLLPQSDMTEAGVVRLIFHMVANQGYSCIKVSDYLNALGVPTAYAKDDRKVTRGKRKENTAGIWRPSRIRGIITNTSYKGVHFYGKRSTRKRDVIEREVPAIVDVDTWEKAQKVLRNNQIEAMRNTKNQYLLRSLLKCQCCGLTYVGIHYPGSKRALKGFYVCTGKQAYKGPMQGKCTSKNLPQDWIEDLVWRDCLAFINQPGEALQEIAAAREVKQTEKVDLESEITLIQKSIDDKDIERQSILDLFRKSIITFTDLEKQIQKINQEKEILEQRIKEIRTSLQVDRDYSTKVMNAFQLLTSLRNKLDDNPSFETRREIVKALVQRIQVHTTPSVGSKRPRASVTVQYCFAKDIIYTDK

SEQ ID NO: 6902 - DNA, 50 bp, Brevibacillus formosus
  source 1..50: mol_type = genomic DNA
tgccaaggatattatctacacggacaaggctgaagataatatccttggaa

SEQ ID NO: 6903 - DNA, 40 bp, Brevibacillus formosus
  source 1..40: mol_type = genomic DNA
accgaagaatccgcacggacaaggattgcacgaaccaatc

SEQ ID NO: 6904 - DNA, 40 bp, Brevibacillus formosus
  source 1..40: mol_type = genomic DNA
accgaagaatccgcacggatgaggattgcacgaaccaatc

SEQ ID NO: 6905 - DNA, 50 bp, Brevibacillus formosus
  source 1..50: mol_type = genomic DNA
tccccaggaccgcttctgcccaaatgaggctgaagagcctcgccatggaa

SEQ ID NO: 6906 - protein, 517 aa, Clostridium scindens
MKVAIYCRLSEEDRNKQFETDDSNSIQNQKSMLLQYAMEQGWELYNIYSDDDYTGSDRRRPEFNRLLKDAEQHKFDIILCKTQSRFTRELELVEKYIHGLFPIWGIRFISIVDNADTANKGNKKSRQINGLVNEWYLEDMSENIRSVLTNRRENGFHIGAFALYGYKKDPDQKGHLIIDEEAATVVREVFTLFSQGYGKTAIARMLNDRGIPNPTEYKRLHGLRYQQPKTKNSTLWKYFAISDMLINEIYIGNMVQGKYGSVSYKTKQNKPRPKEQWYRVEGTHEPIIDRELWDRVQALIKQRAKPFDVGTIGLFARKARCANCGYTMRSSKNHNKHYLQCSNRHVAKDACIGSFISVDKLERLVIDELNRLSAEYLDKDELEQNIEFCDNLQGQKNRLLSDIAAYEKKVAEYSKGIRELYMDKVKGLLSESDYVAMSKDFTTERDRLERVIADGEKQLSELEEKIAAGDNRRELIEQYTNLEHLTREIVETLIDYISVGKRIPGTRDVPIEIHWNF

SEQ ID NO: 6907 - DNA, 50 bp, Clostridium scindens
  source 1..50: mol_type = genomic DNA
aatgaaaagttgttcttatatgattgcagcagatggtacgactgcgtaag

SEQ ID NO: 6908 - DNA, 40 bp, Clostridium scindens
  source 1..40: mol_type = genomic DNA
ccgatctgcacgaagacatggcagcagagcagaaagcaag

SEQ ID NO: 6909 - DNA, 40 bp, Clostridium scindens
  source 1..40: mol_type = genomic DNA
ccgatctgcacgaagacattacagcagagcagaaagcaag

SEQ ID NO: 6910 - DNA, 50 bp, Clostridium scindens
  source 1..50: mol_type = genomic DNA
aaaaaaaaggaatgatattatgaatacagcacatggcttgcatgcgtaag

SEQ ID NO: 6911 - protein, 480 aa, Mycobacteroides chelonae
MDVSAGKTTPFDRPQLGKWLKRPGEFDVIVVFRVDRIVRALFDLADLIKWCQEHRVALVSATEAFIDLTAPFGDIVALLVAKVAEMELAAISERNRSAAQHNLRAGKYRGGPAPFGYMPVHTEGEGWKLVQDAEQVAVIHEVVERVLAGEPLRSVAHDLNERGVLTARDRFAQLRGREVKGYAWHPGGLKRTLTSPTLLGRIAVTDTSIGAQDRPEASLVVSDDGTPFVRAEPILDRDKFDRVGVELAGRENRKEPTKRTTSLLLGIIHCGVCGKPAYKLKGGAGRKPRYRCASSQYKNPCSNRSIPLEYAEDEVESKIMRAFGFHPRMVRVWSPGSDSSSDLAEVNAALADLTDQLGTPAFRRGTPQRARLDAKIDALATRQAELSSKPTQPAGWTYEATDELVIEWWATATNEERNVWLRQLDIRVEWRSHSEGTRTVVDEFKMSGGVDALERFVEDGEWTFDVGTTVDIESLTAGRG

SEQ ID NO: 6912 - DNA, 50 bp, Mycobacteroides chelonae
  source 1..50: mol_type = genomic DNA
tgatggcaaaacgaagcattcgcgtatgcgaatgttgggcttttatgccc

SEQ ID NO: 6913 - DNA, 40 bp, Mycobacteroides chelonae
  source 1..40: mol_type = genomic DNA
cggcatgtccaccgtcgaatacgcgatcggaacgatcgcg

SEQ ID NO: 6914 - DNA, 40 bp, Mycobacteroides chelonae; identical to SEQ ID NO: 6913
  source 1..40: mol_type = genomic DNA

SEQ ID NO: 6915 - DNA, 50 bp, Mycobacteroides chelonae
  source 1..50: mol_type = genomic DNA
tggtgggaattctcaggactcgcgtatgctactgttagcattttatgagc

SEQ ID NO: 6916 - protein, 502 aa, Clostridium sporogenes
MNKICIYLRKSRADEELEKALGEGETLNKHRKALLKFAKEKKLNIIEIKEELVSADSIFFRPKMVELLKEVETKKYTGVLVMDIQRLGRGDTEDQGIITRIFKESHTKIITPQKTYDLDDDLDEDYFEFESFMGRKEYKMIKKRMQGGRVRSIEDGNYIATNAPYGYDISHVNRCRILKPNPQESEIVKLIYAMYCEGNGAGSIAKYLNNLGYKTKFGNDFSRSSIIFILKNPVYIGKITWKKKDIRKSKDPNKVKDTRTRDKSEWIIADGKHKSIIDKKTWNIVQEILNNKYHIPYQLVNGPTNPLAGVIICSKCKNKMVGRTSKSGYRLICKNNKCDTVSHKFDVVEKAILNSLENYLKEHKLNITKDKRPSNLKLYERQLNNLNKELIILNEQRLKLFDFLETGIYTEDIFLERSKNLDKRISETTSGIKKINEVIDKENNKSKKEDVVKYEKFLDGYKKTRDIKLKNESMKSLVFKIEYTKNKKGNDFKIELFPKFKP

SEQ ID NO: 6917 - DNA, 50 bp, Clostridium sporogenes
  source 1..50: mol_type = genomic DNA
gatatataacatgtctaaggcaattcattacatcatacatgttatacaca

SEQ ID NO: 6918 - DNA, 40 bp, Clostridium sporogenes
  source 1..40: mol_type = genomic DNA
tatatccataagagaaatttcatttccttctttgtctact

SEQ ID NO: 6919 - DNA, 40 bp, Clostridium sporogenes
  source 1..40: mol_type = genomic DNA
tatatccataagagaaattttatttccttctttgtctact

SEQ ID NO: 6920 - DNA, 50 bp, Clostridium sporogenes
  source 1..50: mol_type = genomic DNA
aatatataatgtaaatatatgtatttattacataatatatattatacaca

SEQ ID NO: 6921 - protein, 607 aa, Bacillus paralicheniformis
MRAALYYRVSTKMQEHKYSLKAQKEELRKYAEAQGWTIAAEFKDVETGGKLDKSGLNALLDFIEEGSCDVVLCIDQDRLSRLDTVAWEFLKSALRDNNVKIAEPGSITDLDNEDEEFVSDIKNLMARREKRKIVRRMMRGKRQRTREGKGWGKTPMEYNYDKNTGTYSINSKWSWIIPFIDDLYLNKGYSYKKIAKELNKITPTPNGKKWSDTAVKSKLRSKAYHGVMEKTFANGETISKSDIYPKLRTEETYDRIQEMRKEKFTRKTKENENPQLLRRTFMTCGLCGRKLTIHMSGTKKYGIHFYITHGRPERQRDNFKCDLSINVIRVEKNIVSAIKNIIKSEELAKEHIKMDFDENDASQLKKDIKEVKKLIADVNEKKDRLLPLYLDGQFPKEQLDKQHNFLTNELKTHEKRLKQLKTQLTIVESKQLNYDLILEYFKVAERFDTWLTKEEQMNMIGQLFPKATVFEEEIIMHGELPNGAPLEINVPIDPNPFDHGATRPDREIDPWGKYQKIQEMMRNNPGMPQSKIAEKLNIAPSTIVRLKKKFGEFEGQVKAIEHDPEGKREKLEQYLKKNPNASLRQTARDTGMSTTTVRRIKEKFGLK

SEQ ID NO: 6922 - DNA, 50 bp, Bacillus paralicheniformis
  source 1..50: mol_type = genomic DNA
aatgtgtttatcagtatgtttattttaataaacatactcactgtaacatc

SEQ ID NO: 6923 - DNA, 40 bp, Bacillus paralicheniformis
  source 1..40: mol_type = genomic DNA
atgcgtttcaaattttattttcttaaaaatcgtcgctttt

SEQ ID NO: 6924 - DNA, 40 bp, Bacillus paralicheniformis
  source 1..40: mol_type = genomic DNA
atgcgtttcaaattttattgccttaaaaatcgtcgctttt

SEQ ID NO: 6925 - DNA, 50 bp, Bacillus paralicheniformis
  source 1..50: mol_type = genomic DNA
aatgttttattccttttgatcattgcaataaaataataaaatgtaacatc

SEQ ID NO: 6926 - protein, 566 aa, Virgibacillus halodenitrificans
MLGAGIFMTKAKAVVYARVSTNHEEQKHSLKSQKEYYNEYAEKNGYDLIETYFDSGLTGTSFKRKYFLQMMYDAGLDVTIKNHSGILTFDTSNREPLFKYIILKDVSRFARNTDAIEVVKQLRYKGVYIIFENLNFSSEDDDWEFRFGLLVLFAQQESVDRSIKGKKAYGIRSENGKFHMTNVLLGYKRNPETKEYEIDEDKAHIVRFVFDLYVNKGKGTKEIASICNEKGFKTSKGKRFAGDSIIRLIKNEKYKGQVITGRYTHTDITGQHKRIELPRDQWNVFDNLIPAIIPTKVFDEAQAIMNRRVMNTKNYGRKGIKVPKSEFHKKIFCGKCGADYVRISSVKKRVNSEDITEYFYSCRNRRYSLRTGQKCDNAGISHNVLVRELTEISKKLHFSFNTTQIKYEKEELDKILKDLDYKLDNAESEKEKIKESISNLDKEIVNVIKSIRQGASETVKKVLNDEIEKIENEKAELNLKILEFDTLTIENKKQEYLDKYQEVLKFSQKKSFTYDDVLELIEGIHILEHREALVDLRTPTIFDADQIYKGENGSEYAMFPFTFKLP

SEQ ID NO: 6927 - DNA, 50 bp, Virgibacillus halodenitrificans
  source 1..50: mol_type = genomic DNA
agtgtgttttagtctatgctaacatttgttgttaaggttcaaaacacacc

SEQ ID NO: 6928 - DNA, 40 bp, Virgibacillus halodenitrificans
  source 1..40: mol_type = genomic DNA
cacctgggcctgtaccacattcacaagtgcttcgcatcct

SEQ ID NO: 6929 - DNA, 40 bp, Virgibacillus halodenitrificans
  source 1..40: mol_type = genomic DNA
cacctgggcctgtaccacagacacaagtgcttcgcatcct

SEQ ID NO: 6930 - DNA, 50 bp, Virgibacillus halodenitrificans
  source 1..50: mol_type = genomic DNA
agtgtggtttgttcttagctaaaagatgttattaatgcaagaaactctcc

SEQ ID NO: 6931 - protein, 522 aa, Chryseobacterium gleum
MKKNFSSKIADLYIRVSTDEQADKGYSQRDQAERLQVYCAKYGIAVENVIFEDHSAKNFDRPEWSKYLKNLKKRNRSDREPRLILFTKWDRFSRNIGEAYHMISVLEGLEVDPQAIEQPLDLKIPENKIVLAIYLSTPEVENDRRALNVFYGMRRARKEGRIMGIPPYGYVNRCTEDGTKYIGVKHPEAENIVWAFEEIAKGELPSEHVRKLMNKREGKDLTRNAFMVAVRNPVYTGKVFISEFENEAAHYVKGKHVPLITEELFDRVQKVLEGKSRRNNSEQGENRVLHNESFPLRGVLICPRCGNTLTASTSKGNTKRYSYYHCNSKCGFRHNSDAVNEKFIENLREFEILPEYRDTLKVILLKNYRKHCSNVDGERQAITEEIDKITQKLSKARDLFLTDRLDEEDYAQVKLECKHKVDELEETLKGLTKASKDQDVPGKLSAALDSISNIAKRYIDASVKDRRNIASSIYYHKLEFDGRRFRTPKSNAFLNLIKLSKNDLDKQKKSHQNLKNPDDHEV

SEQ ID NO: 6932 - DNA, 50 bp, Chryseobacterium gleum
  source 1..50: mol_type = genomic DNA
tctaaaaaatcctgatgaccatgaagtgaacttggaaggattatcattga

SEQ ID NO: 6933 - DNA, 40 bp, Chryseobacterium gleum
  source 1..40: mol_type = genomic DNA
taaaaattatgaggttttttgtgagcgcgaaaggattcga

SEQ ID NO: 6934 - DNA, 40 bp, Chryseobacterium gleum
  source 1..40: mol_type = genomic DNA
taaaaattatgaggtttttagtgagcgcgaaaggattcga

SEQ ID NO: 6935 - DNA, 50 bp, Chryseobacterium gleum
  source 1..50: mol_type = genomic DNA
ttcaaaaaacatcgatgacaataaagtcaatttgaaaggactatgattga

SEQ ID NO: 6936 - protein, 590 aa, Vibrio diabolicus
MAHEVQLRGKITVITAYSYLRLSTKEQIKGDGVRRQMEATERACKENGWQLSKTTFRDLGRSAYHGHHLKHGDFGTILQLIKEGVIASGSVLILENVDRMSRQDPQESVYMMLDIIRAGVKIYTLHDKRLHEREGKDNFMNLMVWALAAERAHDESRVKSERVRQAKAEKRKQAREEGKAIVGRVPSWIRKVTPKGGEPYYELDEERAEVVRLIFQLKLDGYGLGAITNELIKRGIPPMGNRNVRKDLDPKWQVSTVRKWLRSPTVYGQYQPHIRVDGKKVPEGDPIDNFYPAAVDRETFLKVQTILGKHSRGRTAEEGENMLRGLLRCACGGNLSLHITKRGDKRYKYLRCNHDFMDTCQSKRFDYDGIESLIVRAVHSIDWADVLNVQSGKNKETIKTLKERRDVLIADLEETNKRMLNLSNQLEVMDEPSTFLLNRLSELEKGAKQKQIDLDTVESELHSVERVEEEAGSKFRSSFEIVELIGFNTTQVEKEDMVKKRVKMNAVLRREIDHILVTKVDNQDWWLWSAVTTGGVPLFDLKINAKASKGIIDSEYSTMPELSYYKIDRRKYNKVNRKQVGFVDSVELKS

SEQ ID NO: 6937 - DNA, 50 bp, Vibrio diabolicus
  source 1..50: mol_type = genomic DNA
tttttactaattgttgatttcttcaagaataaatccgcatttggtaaaac

SEQ ID NO: 6938 - DNA, 40 bp, Vibrio diabolicus
  source 1..40: mol_type = genomic DNA
cgttgccgttgatttcttcaatatgggcgcaatggaaaac

SEQ ID NO: 6939 - DNA, 40 bp, Vibrio diabolicus; identical to SEQ ID NO: 6938
  source 1..40: mol_type = genomic DNA

SEQ ID NO: 6940 - DNA, 50 bp, Vibrio diabolicus; identical to SEQ ID NO: 1080
  source 1..50: mol_type = genomic DNA

SEQ ID NO: 6941 - protein, 569 aa, Vibrio cholerae
MTIAYSYLRLSTKEQIKGDGARRQFEATIKACEEHGWQLSSTTFKDLGRSAYHGHHLKHGDFGVILESIREGIIPSGSVLVLENVDRMSRQDPQESVYLMLDIIRAGVKIYTLHDRRLHEKESKDSFMNLMVWALAAERAHDESRVKSERVRQAKAERRRQAREEGKAIVGRVPSWIRKVTPKGGEPYYELDEERAEVVRLIFQLKLDGHGLGAITNELVRRGIPPMGNRKLSTGEMKWQVSTIRKWLSSPTVYGQYQPHIRVDGKKVPEGDPIDNFYPAAVDRETFLKVQAILGKHNRGRTAEEGENMLRGLLRCECGGNLSLHITKRGDRRYKYLRCNHDFMDSCTSKRFDYDGVESLLLQTLQSIDWSSVLGVQSDKNKDAMSTLKERKVVLDEDLNETNKRMTNLSNQLEALDEPSMFLLNRLSELEKHATALLQELGEVNEELEGLEHAVENSSNSFKQGSEIIAFLGLPIRSIDPEELVKKRVKMNAILRREIDHVYVSKLNEDLWRWSVVATGGEPLFDLDINGKCTRGSIESAHTGLWGVDYEKVDRRKFNRVKKDSIEFS

SEQ ID NO: 6942 - DNA, 50 bp, Vibrio cholerae
  source 1..50: mol_type = genomic DNA
tttttactaattgttgatttcttcaagaataaatccacatttggtaaaac

SEQ ID NO: 6943 - DNA, 40 bp, Vibrio cholerae
  source 1..40: mol_type = genomic DNA
cgtggcggtggatttcttcaatatgggcgcaatggaaaac

SEQ ID NO: 6944 - DNA, 40 bp, Vibrio cholerae; identical to SEQ ID NO: 6943
  source 1..40: mol_type = genomic DNA

SEQ ID NO: 6945 - DNA, 50 bp, Vibrio cholerae; identical to SEQ ID NO: 1080
  source 1..50: mol_type = genomic DNA

SEQ ID NO: 6946 - protein, 569 aa, Vibrio fluvialis
MTIAYSYLRLSTKEQIKGDGARRQFEATIKACEEHGWQLSSTTFKDLGRSAYHGHHLKHGDFGVILESIREGIIPSGSVLVLENVDRMSRQDPQESVYLMLDIIRAGVKIYTLHDRRLHEKESKDSFMNLMVWALAAERAHDESRVKSERVRQAKAERRRQAREEGKAIVGRVPSWIRKVTPKGGEPYYELDEERAEVIRLIFQLKLDGHGLGAITNELVRRGIPPMGNRKLSTGEMKWQVSTIRKWLLSPTVYGQYQPHIRVDGKKVPEGDPIDNFYPAAVDRETFLKVQAVLGKHNRGRTAEEGENMLRGLLRCECGGNLSLHITKRGDRRYKYLRCNHDFMDSCTSKRFDYDGVESLLLQTLQSIDWSSVLGIQSDKNKDAMSTLKERKVVLDEDLNETNKRMTNLSKQLEALDEPSMFLLNRLSELEKHATALLQELGEVSEELEGLEHAVETSSNSFKQGSEIIAFLGLPIRSIDPEELVKKRVKMNAILRREIDHIYVSKLNEDLWRWSVVATGGESLFDLDINGKCTDGDIASAHTGLCGVQYKKVDRRKFNRVKKNSIEFS

SEQ ID NO: 6947 - DNA, 50 bp, Vibrio fluvialis; identical to SEQ ID NO: 6942
  source 1..50: mol_type = genomic DNA

SEQ ID NO: 6948 - DNA, 40 bp, Vibrio fluvialis
  source 1..40: mol_type = genomic DNA
tgtggcggttgatttcttcaacatgggcgcaatggaaaat

SEQ ID NO: 6949 - DNA, 40 bp, Vibrio fluvialis; identical to SEQ ID NO: 6948
  source 1..40: mol_type = genomic DNA

SEQ ID NO: 6950 - DNA, 50 bp, Vibrio fluvialis; identical to SEQ ID NO: 1080
  source 1..50: mol_type = genomic DNA

SEQ ID NO: 6951 - protein, 569 aa, Vibrio fluvialis
MTIAYSYLRLSTKEQIKGDGARRQFEATIKACEEHGWQLSSTTFKDLGRSAYHGHHLKHGDFGVILESIREGIIPSGSVLVLENVDRMSRQDPQESVYLMLDIIRAGVKIYTLHDRRLHEKESKDSFMNLMVWALAAERAHDESRVKSERVRQAKAERRRQAREEGKAIVGRVPSWIRKVTPKGGEPYYELDEERAEVVRLIFQLKLDGHGLGAITNELVRRGIPPMGNRKLSTGEMKWQVSTIRKWLSSPTVYGQYQPHIRVDGKKVPEGDPIDNFYPAAVDRETFLKVQAILGKHNRGRTAEEGENMLRGLLRCECGGNLSLHITKRGDRRYKYLRCNHDFMDSCTSKRFDYDGVESLLLQTLQSIDWSSVLGVQSDKNKDAMSTLKERKVVLDEDLNETNKRMTNLSNQLEALDEPSMFLLNRLSELEKHATALLQELGEVNEELEGLEHAVENSSNSFKQGSEIIAFLGLPIRSIDPEELVKKRVKMNAILRREIDHIHVAKLNEDLWRWSVVATGGEPLFDLDINGKCTRGSIESAHTGLWGVDYEKVDRRKFNRVKKDSIEFS

SEQ ID NO: 6952 - DNA, 50 bp, Vibrio fluvialis; identical to SEQ ID NO: 6942
  source 1..50: mol_type = genomic DNA

SEQ ID NO: 6953 - DNA, 40 bp, Vibrio fluvialis; identical to SEQ ID NO: 6948
  source 1..40: mol_type = genomic DNA

SEQ ID NO: 6954 - DNA, 40 bp, Vibrio fluvialis; identical to SEQ ID NO: 6948
  source 1..40: mol_type = genomic DNA

SEQ ID NO: 6955 - DNA, 50 bp, Vibrio fluvialis; identical to SEQ ID NO: 1080
  source 1..50: mol_type = genomic DNA

SEQ ID NO: 6956 - protein, 569 aa, Vibrio vulnificus
MTIAYSYLRLSTKEQIKGDGARRQFEATIKACEEHGWQLSSTTFKDLGRSAYHGHHLKHGDFGVILESIREGIIPSGSVLVLENVDRMSRQDPQESVYLMLDIIRAGVKIYTLHDRRLHEKESKDSFMNLMVWALAAERAHDESRVKSERVRQAKAERRRQAREEGKAIVGRVPSWIRKVTPKGGEPYYELDEERAEVVRLIFQLKLDGHGLGAITNELVRRGIPPMGNRKLSTGEMKWQVSTVRKWLSSPTVYGQYQPHIRVDGKKVPEGDPIDNFYPAAVDRETFLKVQAILGKHNRGRTAEEGENMLRGLLRCECGGNLSLHITKRGDRRYKYLRCNHDFMDSCTSKRFDYDGVESLLLQTLQSIDWSSVLGVQSDKNKDAMSTLKERKVVLDEDLNETNKRMTNLSNQLEALDEPSMFLLNRLSELEKHATALLQELGEVNEELEGLEHAVENSSNSFKQGSEIIAFLGLPIRSIDPEELVKKRVKMNAILRREIDHIHVAKLNEDLWRWSVVATGGEPLFDLDINGKCTRGSIESAHTGLWGVDYEKVDRRKFNRVKKDSIEFS

SEQ ID NO: 6957 - DNA, 50 bp, Vibrio vulnificus; identical to SEQ ID NO: 6942
  source 1..50: mol_type = genomic DNA

SEQ ID NO: 6958 - DNA, 40 bp, Vibrio vulnificus
  source 1..40: mol_type = genomic DNA
cgtcgctgttgatttcttcaacatgggtgcgatggaaaac

SEQ ID NO: 6959 - DNA, 40 bp, Vibrio vulnificus; identical to SEQ ID NO: 6958
  source 1..40: mol_type = genomic DNA

SEQ ID NO: 6960 - DNA, 50 bp, Vibrio vulnificus; identical to SEQ ID NO: 1080
  source 1..50: mol_type = genomic DNA

SEQ ID NO: 6961 - protein, 590 aa, Vibrio parahaemolyticus
MAHEVQLRGKITVITAYSYLRLSTKEQIKGDGVRRQMEATERACKENGWQLSKTTFRDLGRSAYHGHHLKHGDFGTILQLIKEGVIASGSVLILENVDRMSRQDPQESVYMMLDIIRAGVKIYTLHDKRLHEREGKDNFMNLMVWALAAERAHDESRVKSERVRQAKAEKRKQAREEGKAIVGRVPSWIRKVTPKGGEPYYELDEERAEVVRLIFQLKLDGYGLGAITNELIKRGIPPMGNRNVRKDLAPKWQVSTVRKWLRSPTVYGQYQPHIRVDGKKVPEGDPIDNFYPAAVDRETFLKVQSILGKHSRGRTAEEGENVLRGLLRCACGGNLSLHITKRGERRYKYLRCNHDFMDSCQSKRFDYDGVESLLLRAVDSLNWKEILNVQSGKNLDTIKALKERRDVLEADLAETNKRMLNLSNQLELMDEPSAFLLNRLSELEKGAKEKQDELEGLRGELSSVERIEKEAGEKVEKNSGFIEYLSYGATLIDSEELVKKRLKINAALRKELDHVLVTKVDGEDWWLWSAVSTSGLHLFDLKINAKASHGVTHSKYSTNADMTYYKTDKRKYNIVKRKQVGLVDSVELKF

SEQ ID NO: 6962 - DNA, 50 bp, Vibrio parahaemolyticus; identical to SEQ ID NO: 6942
  source 1..50: mol_type = genomic DNA

SEQ ID NO: 6963 - DNA, 40 bp, Vibrio parahaemolyticus
  source 1..40: mol_type = genomic DNA
cgtagcggttgatttcttcaatatgggcgcaatggaaaac

SEQ ID NO: 6964 - DNA, 40 bp, Vibrio parahaemolyticus; identical to SEQ ID NO: 6963
  source 1..40: mol_type = genomic DNA

SEQ ID NO: 6965 - DNA, 50 bp, Vibrio parahaemolyticus; identical to SEQ ID NO: 1080
  source 1..50: mol_type = genomic DNA

SEQ ID NO: 6966 - protein, 569 aa, Vibrio parahaemolyticus; identical to SEQ ID NO: 6956

SEQ ID NO: 6967 - DNA, 50 bp, Vibrio parahaemolyticus; identical to SEQ ID NO: 6942
  source 1..50: mol_type = genomic DNA

SEQ ID NO: 6968 - DNA, 40 bp, Vibrio parahaemolyticus
  source 1..40: mol_type = genomic DNA
cgtggcggttgatttcttcaatatgggcgcaatggaaaac

SEQ ID NO: 6969 - DNA, 40 bp, Vibrio parahaemolyticus; identical to SEQ ID NO: 6968
  source 1..40: mol_type = genomic DNA

SEQ ID NO: 6970 - DNA, 50 bp, Vibrio parahaemolyticus; identical to SEQ ID NO: 1080
  source 1..50: mol_type = genomic DNA

SEQ ID NO: 6971 - protein, 569 aa, Vibrio parahaemolyticus
MTIAYSYLRLSTKEQIKGDGARRQFEATIKACEEHGWQLSSTTFKDLGRSAYHGHHLKHGDFGVILESIREGIIPSGSVLVLENVDRMSRQDPQESVYLMLDIIRAGVKIYTLHDRRLHEKESKDSFMNLMVWALAAERAHDESRVKSERVRQAKAERRRQAREEGKAIVGRVPSWIRKVTPKGGEPYYELDEERAEVVRLIFQLKLDGHGLGAITNELVRRGIPPMGNRKLSTGEMKWQVSTVRKWLSSPSVYGQYQPHIRVDGKKVPEGDPIDNFYPAAVDRETFLKVQAILGKHNRGRTAEEGENMLRGLLRCECGGNLSLHITKRGDRRYKYLRCNHDFMDSCTSKRFDYDGVESLLLQTLQSIDWSSVLGVQSDKNKDAMSTLKERKVVLDEDLNETNKRMTNLSNQLEALDEPSMFLLNRLSELEKHATALLQELGEVNEELEGLEHAVENSNNSFKQGSEIIAFLGLPIRSIDPEELVKKRVKMNAILRREIDHIHVAKLNEDLWRWSVVATGGEHLFDLDINGKCTRGSIESAHTGLWGVDYEKVDRRKFNRVKKDSIEFS

SEQ ID NO: 6972 - DNA, 50 bp, Vibrio parahaemolyticus; identical to SEQ ID NO: 6942
  source 1..50: mol_type = genomic DNA

SEQ ID NO: 6973 - DNA, 40 bp, Vibrio parahaemolyticus; identical to SEQ ID NO: 6968
  source 1..40: mol_type = genomic DNA

SEQ ID NO: 6974 - DNA, 40 bp, Vibrio parahaemolyticus; identical to SEQ ID NO: 6968
  source 1..40: mol_type = genomic DNA

SEQ ID NO: 6975 - DNA, 50 bp, Vibrio parahaemolyticus; identical to SEQ ID NO: 1080
  source 1..50: mol_type = genomic DNA

SEQ ID NO: 6976 - protein, 569 aa, Vibrio parahaemolyticus; identical to SEQ ID NO: 6946

SEQ ID NO: 6977 - DNA, 50 bp, Vibrio parahaemolyticus; identical to SEQ ID NO: 6942
  source 1..50: mol_type = genomic DNA

SEQ ID NO: 6978 - DNA, 40 bp, Vibrio parahaemolyticus
  source 1..40: mol_type = genomic DNA
cgtggcggttgatttcttcaacatgggcgctatggagaac

SEQ ID NO: 6979 - DNA, 40 bp, Vibrio parahaemolyticus; identical to SEQ ID NO: 6978
  source 1..40: mol_type = genomic DNA

SEQ ID NO: 6980 - DNA, 50 bp, Vibrio parahaemolyticus; identical to SEQ ID NO: 1080
  source 1..50: mol_type = genomic DNA

SEQ ID NO: 6981 - protein, 569 aa, Vibrio parahaemolyticus
MTIAYSYLRLSTKEQIKGDGARRQFEATIKACEEHGWQLSSTTFKDLGRSAYHGHHLKHGDFGVILESIREGIIPSGSVLVLENVDRMSRQDPQESVYLMLDIIRAGVKIYTLHDRRLHEKESKDSFMNLMVWALAAERAHDESRVKSERVRQAKAERRRQAREEGKAIVGRVPSWIRKVTPKGGEPYYELDEERAEVVRLIFQLKLDGHGLGAITNELVRRGIPPMGNRKLSTGEMKWRVSTVRKWLSSPTVYGQYQPHIRVDGKKVPEGDPIDNFYPAAVDRETFLKVQAILGKHNRGRTAEEGENMLRGLLRCECGGNLSLHITKRGDRRYKYLRCNHDFMDSCTSKRFDYDGVESLLLQTLQSIDWSSVLGIQSDKNKDAMSTLKERKVVLDEDLNETNKRMTNLSKQLEALDEPSMFLLNRLSELEKHATALLQELGEVSEELEGLEHAVETSSNSFKQGSEIIAFLGLPIRSIDPEELVKKRVKMNAILRREIDHIYVSKLNEDLWRWSVVAMGGEPLFDLDINGKCTRGSIESAHTGLWGVEYEKVDRRKFNRVKKNSIEFS

SEQ ID NO: 6982 - DNA, 50 bp, Vibrio parahaemolyticus; identical to SEQ ID NO: 6942
  source 1..50: mol_type = genomic DNA

SEQ ID NO: 6983 - DNA, 40 bp, Vibrio parahaemolyticus; identical to SEQ ID NO: 6978
  source 1..40: mol_type = genomic DNA

SEQ ID NO: 6984 - DNA, 40 bp, Vibrio parahaemolyticus; identical to SEQ ID NO: 6978
  source 1..40: mol_type = genomic DNA

SEQ ID NO: 6985 - DNA, 50 bp, Vibrio parahaemolyticus; identical to SEQ ID NO: 1080
  source 1..50: mol_type = genomic DNA

SEQ ID NO: 6986 - protein, 590 aa, Vibrio parahaemolyticus
MAHEVQLRGKITVITAYSYLRLSTKEQIKGDGVRRQMEATERACKENGWQLSKTTFRDLGRSAYHGHHLKHGDFGTILQLIKEGVIASGSVLILENVDRMSRQDPQESVYMMLDIIRAGVKIYTLHDKRLHEREGKDNFMNLMVWALAAERAHDESRVKSERVRQAKAEKRKQAREEGKAIVGRVPSWIRKVTPKGAEPYYELDEERAEVVRLIFQLKLDGYGLGAITNELIKRGIPPMGNRNVRKDLAPKWQVSTVRKWLRSPTVYGQYQPHIRVDGKKVPEGDPIDNFYPAAIDRETFLKVQSMLGKHSRGRTAEEGENMLRGLLRCACGGNLSLHITKRGDKRYKYLRCNHDFMESCQSKRFDYDGIESLIVRAVHSIDWADVLNVQSGKNKDTIKTLKERRDVLIADLEETNKRMLNLSNQLEVMDEPSTFLLNRLSELEKGAKQKQIDLDAVESELHSVERVEEEADSKFRNSFEIVELVGFNTTQVEKEDMVKKRVKMNAVLRREIDHILVTKVDNQDWWLWSAVTTGGVPLFDLKINAKASKGIIDSEYSTMPELSYYKIDRRKYNRVNRKQVGLVDSMELKS

SEQ ID NO: 6987 - DNA, 50 bp, Vibrio parahaemolyticus; identical to SEQ ID NO: 6942
  source 1..50: mol_type = genomic DNA

SEQ ID NO: 6988 - DNA, 40 bp, Vibrio parahaemolyticus
  source 1..40: mol_type = genomic DNA
cgtggcggttgatttcttcaacatgggcgcaatggaaaac

SEQ ID NO: 6989 - DNA, 40 bp, Vibrio parahaemolyticus; identical to SEQ ID NO: 6988
  source 1..40: mol_type = genomic DNA

SEQ ID NO: 6990 - DNA, 50 bp, Vibrio parahaemolyticus; identical to SEQ ID NO: 1080
  source 1..50: mol_type = genomic DNA

SEQ ID NO: 6991 - protein, 569 aa, Vibrio parahaemolyticus
MTIAYSYLRLSTKEQIKGDGARRQFEATIKACEEHGWQLSSTTFKDLGRSAYHGHHLKHGDFGVILESIREGIIPSGSVLVLENVDRMSRQDPQESVYLMLDIIRAGVKIYTLHDRRLHEKESKDSFMNLMVWALAAERAHDESRVKSERVRQAKAERRRQAREEGKAIVGRVPSWIRKVTPKGGEPYYELDEERAEVVRLIFQLKLDGHGLGAITNELVRRGIPPMGNRKLSTGEMKWQVSTVRKWLSSPTVYGQYQPHIRVDGKKVPEGDPIDNFYPAAVDRETFLKVQAILGKHNRGRTAEEGENMLRGLLRCECGGNLSLHITKRGDRRYKYLRCNHDFMDSCTSKRFDYDGVESLLLQTLQSIDWSSVLGVQSDKNKDTMSTLKERKVVLDEDLNETNKRMTNLSNQLEALDEPSMFLLNRLSELEKHATALLQELGEVNEELEGLEHAVENSSNSFKQGSEIIAFLGLPIRSIDPEELVKKRVKMNAILRREIDHIHVAKLNEDLWRWSVVATGGEPLFDLDINGKCTRGSIESAHTGLWGVDYEKVDRRKFNRVKKNSIEFS

SEQ ID NO: 6992 - DNA, 50 bp, Vibrio parahaemolyticus; identical to SEQ ID NO: 6942
  source 1..50: mol_type = genomic DNA

SEQ ID NO: 6993 - DNA, 40 bp, Vibrio parahaemolyticus; identical to SEQ ID NO: 6978
  source 1..40: mol_type = genomic DNA

SEQ ID NO: 6994 - DNA, 40 bp, Vibrio parahaemolyticus; identical to SEQ ID NO: 6978
  source 1..40: mol_type = genomic DNA

SEQ ID NO: 6995 - DNA, 50 bp, Vibrio parahaemolyticus; identical to SEQ ID NO: 1080
  source 1..50: mol_type = genomic DNA

SEQ ID NO: 6996 - protein, 578 aa, Vibrio parahaemolyticus
MIIAYSYLRLSTKEQIKGDGVRRQMEATEAVCKENGWQLSPTTFRDLGLSAFSAENLKKGDFGIILQLIKEGSISSGSVLILENVDRMSRQNPQESVYTMLDIIRAGVRIYTIHDRRLHEKDSQDSFMNLMLWALAAERAHEESLTKSRRVREAKAKARQKAREEGKAIIGRVPSWIRKVTPKGGEPYYELDEERAEVVRLIFQLKLDGYGLGAITNELIKRGIPPMGNRNVRKDLAPKWQVSTVRKWLRSPTVYGQYQPHIRVDGKKVPEGDPIDNFYPAAVDRETFLKVQSILGKHSRGRTAEEGENVLRGLLRCACGGNLSLHITKRGERRYKYLRCNHDFMDSCQSKRFDYEGVESLLLRAVDSLNWKEILNVQSGKNLDTIKTLKERRDVLEADLEETNKRMLNLSNQLELMDEPSAFLLNRLSELEKGAKEKQDELEELRGELSSVERIEKEAGEKVEKNSDFIEYLSYGATLINSEELVKKRLKINAALRKELDHVLVTKVDGEDWWLWSAVSASGLHLFDLKINAKASHGVTHSKYSTNADMTYYKTDQRKYNRVKRKQVGLVDSVELKS

SEQ ID NO: 6997 - DNA, 50 bp, Vibrio parahaemolyticus; identical to SEQ ID NO: 6942
  source 1..50: mol_type = genomic DNA

SEQ ID NO: 6998 - DNA, 40 bp, Vibrio parahaemolyticus
  source 1..40: mol_type = genomic DNA
cgtggcggttgagttcttcaacatgggcgctatggagaac

SEQ ID NO: 6999 - DNA, 40 bp, Vibrio parahaemolyticus; identical to SEQ ID NO: 6998
  source 1..40: mol_type = genomic DNA

SEQ ID NO: 7000 - DNA, 50 bp, Vibrio parahaemolyticus; identical to SEQ ID NO: 1080
  source 1..50: mol_type = genomic DNA

SEQ ID NO: 7001 - protein, 569 aa, Vibrio parahaemolyticus
MTIAYSYLRLSTKEQIKGDGARRQFEATIKACEEHGWQLSSTTFKDLGRSAYHGHHLKHGDFGVILESIREGIIPSGSVLVLENVDRMSRQDPQESVYLMLDIIRAGVKIYTLHDRRLHEKESKDSFMNLMVWALAAERAHDESRVKSERVRQAKAERRRQAREEGKAIVGRVPSWIRKVTPKGGEPYYELDEERAEVVRLIFQLKLDGHGLGAITNELVRRGIPPMGNRKLSTGEMKWQVSTVRKWLSSPTVYGQYQPHIRVDGKKVPEGDPIDNFYPAAVDRETFLKVQAILGKHNRGRTAEEGENMLRGLLRCECGGNLSLHITKRGDRRYKYLRCNHDFMDSCTSKRFDYDGVESLLLQTLQSIDWSSVLGVQSDKNKDAMSTLKERKVVLDEDLNETNKRMTNLSNQLEALDEPSMFLLNRLSELEKHATALLQELGEVNEELEGLEHAVENSSNSFKQGSEIIAFLGLPIRSIDPEELVKKRVKMNAILRREIDHIHVAKLNEDLWRWSVVATGGEPLFDLDINGKCTRGSIESAHTGLWGVEYEKVDRRKFNRVKKNSIEFS

SEQ ID NO: 7002 - DNA, 50 bp, Vibrio parahaemolyticus; identical to SEQ ID NO: 6942
  source 1..50: mol_type = genomic DNA

SEQ ID NO: 7003 - DNA, 40 bp, Vibrio parahaemolyticus; identical to SEQ ID NO: 6978
  source 1..40: mol_type = genomic DNA

SEQ ID NO: 7004 - DNA, 40 bp, Vibrio parahaemolyticus; identical to SEQ ID NO: 6978
  source 1..40: mol_type = genomic DNA

SEQ ID NO: 7005 - DNA, 50 bp, Vibrio parahaemolyticus; identical to SEQ ID NO: 1080
  source 1..50: mol_type = genomic DNA

SEQ ID NO: 7006 - protein, 569 aa, Vibrio parahaemolyticus
MTIAYSYLRLSTKEQIKGDGARRQFEATIKACEEHGWQLSSTTFKDLGRSAYHGHHLKHGDFGVILESIREGIIPSGSVLVLENVDRMSRQDPQESVYLMLDIIRAGVKIYTLHDRRLHEKESKDSFMNLMVWALAAERAHDESRVKSERVRQAKAERRRQAREEGKAIVGRVPSWIRKVTPKGGEPYYELDEERAEVVRLIFQLKLDGHGLGAITNELVRRGIPPMGNRKLSTGEMKWQVSTVRKWLSSPTVYGQYQPHIRVDGKKVPEGDPIDNFYPAAVDRETFLKVQAILGKHNRGRTAEEGENMLRGLLRCECGGNLSLHITKRGDRRYKYLRCNHDFMDSCTSKRFDYDGVESLLLQTLQSIDWSSVLGVQSDKNKDAMSTLKERKVVLDEDLNETNKRMTNLSNQLEALDEPSMFLLNRLSELEKHATALLQELGEVNEELEGLEHAVENSSNSFKQGSEIIAFLGLPIRSIDPEELVKKRVKMNAILRREIDHIHVAKLNEDLWRWSVVATGGEPLFDLDINGKCTRGSIESAHTGLWGVEYEKVDRRKFNQAKKNSIEFS

SEQ ID NO: 7007 - DNA, 50 bp, Vibrio parahaemolyticus; identical to SEQ ID NO: 6942
  source 1..50: mol_type = genomic DNA

SEQ ID NO: 7008 - DNA, 40 bp, Vibrio parahaemolyticus; identical to SEQ ID NO: 6968
  source 1..40: mol_type = genomic DNA

SEQ ID NO: 7009 - DNA, 40 bp, Vibrio parahaemolyticus; identical to SEQ ID NO: 6968
  source 1..40: mol_type = genomic DNA

SEQ ID NO: 7010 - DNA, 50 bp, Vibrio parahaemolyticus; identical to SEQ ID NO: 1080
  source 1..50: mol_type = genomic DNA

SEQ ID NO: 7011 - protein, 569 aa, Vibrio parahaemolyticus; identical to SEQ ID NO: 7001

SEQ ID NO: 7012 - DNA, 50 bp, Vibrio parahaemolyticus; identical to SEQ ID NO: 6942
  source 1..50: mol_type = genomic DNA

SEQ ID NO: 7013 - DNA, 40 bp, Vibrio parahaemolyticus; identical to SEQ ID NO: 6963
  source 1..40: mol_type = genomic DNA

SEQ ID NO: 7014 - DNA, 40 bp, Vibrio parahaemolyticus; identical to SEQ ID NO: 6963
  source 1..40: mol_type = genomic DNA

SEQ ID NO: 7015 - DNA, 50 bp, Vibrio parahaemolyticus; identical to SEQ ID NO: 1080
  source 1..50: mol_type = genomic DNA

SEQ ID NO: 7016 - protein, 590 aa, Vibrio parahaemolyticus
MAHEVQLRGKITVIIAYSYLRLSTKEQIKGDGVRRQMEATEAVCKENGWQLSPTTFRDLGLSAFSAENLKKGDFGIILQLIKEGSISSGSVLILENVDRMSRQNPQESVYTMLDIIRAGVRIYTIHDRRLHEKDSQDSFMNLMLWALAAERAHEESLTKSRRVREAKAKARQKAREEGKAIIGRVPSWIRKVTPKGGEPYYELDEERAEVVRLIFQLKLDGYGLGAITNELIKRGIPPMGNRNVRKDLAPKWQVSTVRKWLRSPTVYGQYQPHIRVDGKKVPEGDPIDNFYPAAVDRETFLKVQSILGKHSRGRTAEEGENVLRGLLRCACGGNLSLHITKRGERRYKYLRCNHDFMDSCQSKRFDYDGVESLLLRAVDSLNWKEILNVQSGKNLDTIKALKERRDVLEADLEETNKRMLNLSNQLELMDEPSAFLLNRLSELEKGAKEKQDELEELRGELSSVERIEKEAGEKVEKNSDFIEYLSYGATLIDSEELVKKRLKINAALRKELDHVLVTKVDGEDWWLWSAVSTSGLHLFDLKINAKASNGVTHSKYSTNADMTYYKTDQRKYNRVKRKQVGLVDTVELKF

SEQ ID NO: 7017 - DNA, 50 bp, Vibrio parahaemolyticus; identical to SEQ ID NO: 6942
  source 1..50: mol_type = genomic DNA

SEQ ID NO: 7018 - DNA, 40 bp, Vibrio parahaemolyticus; identical to SEQ ID NO: 6968
  source 1..40: mol_type = genomic DNA

SEQ ID NO: 7019 - DNA, 40 bp, Vibrio parahaemolyticus; identical to SEQ ID NO: 6968
  source 1..40: mol_type = genomic DNA

SEQ ID NO: 7020 - DNA, 50 bp, Vibrio parahaemolyticus; identical to SEQ ID NO: 1080
  source 1..50: mol_type = genomic DNA

SEQ ID NO: 7021 - protein, 590 aa, Vibrio parahaemolyticus
MAHEVQLRGKITVIIAYSYLRLSTKEQIKGDGVRRQMEATEAVCKENGWQLSPTTFRDLGLSAFSAENLKKGDFGIILQLIKEGSISSGSVLILENVDRMSRQNPQESVYTMLDIIRAGVRIYTIHDKRLHEKDSQDSFMNLMLWALAAERAHEESLTKSRRVREAKAKARQKAREEGKAIIGRVPSWIRKVTPKGGEPYYELDEERAEVVRLIFQLKLDGHGLGAITNELVKRGIPPMGNRNVRKDLAPKWQVSTIRKWLLSPTVYGQYQPHIRVDGKKVPEGDPIDNFYPAAVDRETFLKVQTMLGKHSRGRTAEEGENMLRGLLRCACGGNLSLHITKRGDKRYKYLRCNHDFMESCQSKRFDYDGIESLIVRAVHSIDWADVLNVQSGKNKDTIKTLKERRDVLIADLEETNKRMLNLSNQLEVMDEPSTFLLNRLSELEKGAKQKQIDLDTVESELHSVERVEEEAGSKFRSSFEIVELIGFNTTQVEKEDMVKKRVKMNAVLRREIDHILVTKVDNQDWWLWSAVTTGGVPLFDLKINAKASKGIIDSEYSTMPELSYYKIDRRKYNRVNRKQVDLVDSVELKS

SEQ ID NO: 7022 - DNA, 50 bp, Vibrio parahaemolyticus; identical to SEQ ID NO: 6942
  source 1..50: mol_type = genomic DNA

SEQ ID NO: 7023 - DNA, 40 bp, Vibrio parahaemolyticus; identical to SEQ ID NO: 6978
  source 1..40: mol_type = genomic DNA

SEQ ID NO: 7024 - DNA, 40 bp, Vibrio parahaemolyticus; identical to SEQ ID NO: 6978
  source 1..40: mol_type = genomic DNA

SEQ ID NO: 7025 - DNA, 50 bp, Vibrio parahaemolyticus; identical to SEQ ID NO: 1080
  source 1..50: mol_type = genomic DNA

SEQ ID NO: 7026 - protein, 578 aa, Vibrio alginolyticus
MIIAYSYLRLSTKEQIKGDGVRRQMEATEAVCKENGWQLSPTTFRDLGLSAFSAENLKKGDFGIILQLIKEGSISSGSVLILENVDRMSRQNPQESVYTMLDIIRAGVRIYTIHDRRLHEKDSQDSFMNLMLWALAAERAHEESLTKSRRVREAKAKARQKAREEGKAIIGRVPSWIRKVTPKGGEPYYELDEERAEVVRLIFQLKLDGYGLGAITNELIKRGIPPMGNRNVRKDLAPKWQVSTVRKWLRSPTVYGQYQPHIRVDGKKVPEGDPIDNFYPAAVDRETFLKVQSILGKHSRGRTAEEGENVLRGLLRCACGGNLSLHITKRGERRYKYLRCNHDFMDSCQSKRFDYEGVESLLLRAVDSLNWKEILNVQSGKNLDTIKTLKERRDVLEADLEETNKRMLNLSNQLELMDEPSAFLLNRLSELEKGAKEKQDELEELRGELSSVERIEKEAGEKVEKNSDFIEYLSYGATLINSEELVKKRLKINAALRKELDHVLVTKVDGEDWWLWSAVSTSGLHLFDLKINAKASHGVTHSKYSTNADMTYYKTDQRKYNRVKRKQVGLVDSVELKS

SEQ ID NO: 7027 - DNA, 50 bp, Vibrio alginolyticus
  source 1..50: mol_type = genomic DNA
tttttactaattgttgatttcttcaagaataaatatacatttggtaaaac

SEQ ID NO: 7028 - DNA, 40 bp, Vibrio alginolyticus
  source 1..40: mol_type = genomic DNA
cgttgctgttgatttcttcaacatgggtgcaatggaaaac

SEQ ID NO: 7029 - DNA, 40 bp, Vibrio alginolyticus; identical to SEQ ID NO: 7028
  source 1..40: mol_type = genomic DNA

SEQ ID NO: 7030 - DNA, 50 bp, Vibrio alginolyticus; identical to SEQ ID NO: 1080
  source 1..50: mol_type = genomic DNA

SEQ ID NO: 7031 - protein, 590 aa, Vibrio alginolyticus
MAHEVQLRGKITVITAYSYLRLSTKEQIKGDGVRRQMEATEAVCKENGWQLSPTTFRDLGLSAFSAENLKKGDFGIILQLIKEGSISSGSVLILENVDRMSRQNPQESVYTMLDIIRAGVRIYTIHDKRLHEKDSQDSFMNLMLWALAAERAHEESLTKSRRVREAKAKARQKAREEGKAIIGRVPSWIRKVTPKGGEPYYELDEERAEVVRLIFQLKLDGHGLGAITNELVKRGIPPMGNRNVRKDLAPKWQVSTIRKWLLSPTVYGQYQPHIRVDGKKVPEGDPIDNFYPAAVDRETFLKVQTMLGKHSRGRTAEEGENMLRGLLRCACGGNLSLHITKRGDKRYKYLRCNHDFMESCQSKRFDYDGIESLIVRAVHSIDWADVLNVQSGKNKDTIKTLKERRDVLIADLEETNKRMLNLSNQLEVMDEPSTFLLNRLSELEKGAKQKQIDLDMVESELHSVERVEEEAGSKFRSSFEIVELIGFNTTQVEKEDMVKKRVKMNAVLRREIDHILVTKVDNQDWWLWSAVTTGGVPLFDLKINAKASKGIIDSEYSTMPELSYYKIDRRKYNRVKRKQVGLVDSVELKS

SEQ ID NO: 7032 - DNA, 50 bp, Vibrio alginolyticus
  source 1..50: mol_type = genomic DNA
tttttactaattgttgatttcttcaagaataaatacacatttggtaaaac

SEQ ID NO: 7033 - DNA, 40 bp, Vibrio alginolyticus; identical to SEQ ID NO: 7028
  source 1..40: mol_type = genomic DNA

SEQ ID NO: 7034 - DNA, 40 bp, Vibrio alginolyticus; identical to SEQ ID NO: 7028
  source 1..40: mol_type = genomic DNA

SEQ ID NO: 7035 - DNA, 50 bp, Vibrio alginolyticus; identical to SEQ ID NO: 1080
  source 1..50: mol_type = genomic DNA

SEQ ID NO: 7036 - protein, 590 aa, Vibrio alginolyticus
MAHEVQLRGKITVITAYSYLRLSTKEQIKGDGVRRQMEATEAVCKENGWQLSPTTFRDLGLSAFSAENLKKGDFGIILQLIKEGSISSGSVLILENVDRMSRQNPQESVYTMLDIIRAGVRIYTIHDKRLHEKDSQDSFMNLMLWALAAERAHEESLTKSRRVREAKAKARQKAREEGKAIIGRVPSWIRKVTPKGGEPYYELDEERAEVVRLIFQLKLDGYGLGAITNELIKRGIPPMGNRNVRKDLAPKWQVSTVRKWLRSPTVYGQYQPHIRVDGKKVPEGDPIDNFYPAAVDRETFLKVQSILGKHSRGRTAEEGENVLRGLLRCACGGNLSLHITKRGERRYKYLRCNHDFMDSCQSKRFDYDGVESLLLRAVDSLNWKEILNVQSGKNLDTIKALKERRDVLEADLAETNKRMLNLSNQLELMDEPSAFLLNRLSELEKGAKEKQDELEGLRGELSSVERIEKEASEKVKKNSDFIEYLSYGATLIDSEELVKKRLKINAALRKELDHVLVTKVDGEDWWLWSAVSTSGLHLFDLKINAKASNGVTHSKYSTNADMTYYKTDQRKYNRVKRKQVGLVDSVELKF

SEQ ID NO: 7037 - DNA, 50 bp, Vibrio alginolyticus; identical to SEQ ID NO: 6942
  source 1..50: mol_type = genomic DNA

SEQ ID NO: 7038 - DNA, 40 bp, Vibrio alginolyticus; identical to SEQ ID NO: 7028
  source 1..40: mol_type = genomic DNA

SEQ ID NO: 7039 - DNA, 40 bp, Vibrio alginolyticus; identical to SEQ ID NO: 7028
  source 1..40: mol_type = genomic DNA

SEQ ID NO: 7040 - DNA, 50 bp, Vibrio alginolyticus; identical to SEQ ID NO: 1080
  source 1..50: mol_type = genomic DNA

SEQ ID NO: 7041 - protein, 569 aa, Vibrio fluvialis; identical to SEQ ID NO: 6956

SEQ ID NO: 7042 - DNA, 50 bp, Vibrio fluvialis; identical to SEQ ID NO: 6942
  source 1..50: mol_type = genomic DNA

SEQ ID NO: 7043 - DNA, 40 bp, Vibrio fluvialis
  source 1..40: mol_type = genomic DNA
tgtggcggtcgatttcttcaacatgggcgcaatggaaaat

SEQ ID NO: 7044 - DNA, 40 bp, Vibrio fluvialis; identical to SEQ ID NO: 7043
  source 1..40: mol_type = genomic DNA

SEQ ID NO: 7045 - DNA, 50 bp, Vibrio fluvialis; identical to SEQ ID NO: 1080
  source 1..50: mol_type = genomic DNA

SEQ ID NO: 7046 - protein, 590 aa, Vibrio diabolicus
MAHEVQLRGKITVIIAYSYLRLSTKEQIKGDGVRRQMEATEAVCKENGWQLSPTTFRDLGLSAFSAENLKKGDFGIILQLIKEGSISSGSVLILENVDRMSRQNPQESVYTMLDIIRAGVRIYTIHDRRLHEKDSQDSFMNLMLWALAAERAHEESLTKSRRVREAKAKARQKAREEGKAIIGRVPSWIRKVTPKGGEPYYELDEERAEVVRLIFQLKLDGYGLGAITNELIKRGIPPMGNRNVRKDLAPKWQVSTVRKWLRSPTVYGQYQPHIRVDGKKVPEGDPIDNFYPAAVDRETFLKVQSILGKHSRGRTAEEGENVLRGLLRCACGGNLSLHITKRGERRYKYLRCNHDFMDSCQSKRFDYDGVESLLLRAVDSLNWKEILNVQSGKNLDTIKALKERRDVLEADLAETNKRMLNLSNQLELMDEPSAFLLNRLSELEKGAKEKQDELEELRGELSSVERIEKEAGEKVEKNSDFIEYLSYGATLIDSEELVKKRLKINAALRKELDHVLVTKVDGEDWWLWSAVSASGLHLFDLKINAKASHGVTHSKYSTNADMTYYKTDQRKYNRVKRKQVGLVDSVELKS

SEQ ID NO: 7047 - DNA, 50 bp, Vibrio diabolicus
  source 1..50: mol_type = genomic DNA
tttttactaattgttgatttcttcaagaataaattcacatttggtaaaac

SEQ ID NO: 7048 - DNA, 40 bp, Vibrio diabolicus; identical to SEQ ID NO: 6938
  source 1..40: mol_type = genomic DNA

SEQ ID NO: 7049 - DNA, 40 bp, Vibrio diabolicus; identical to SEQ ID NO: 6938
  source 1..40: mol_type = genomic DNA

SEQ ID NO: 7050 - DNA, 50 bp, Vibrio diabolicus; identical to SEQ ID NO: 1080
  source 1..50: mol_type = genomic DNA

SEQ ID NO: 7051 - protein, 569 aa, Vibrio vulnificus; identical to SEQ ID NO: 6956

SEQ ID NO: 7052 - DNA, 50 bp, Vibrio vulnificus; identical to SEQ ID NO: 6942
  source 1..50: mol_type = genomic DNA

SEQ ID NO: 7053 - DNA, 40 bp, Vibrio vulnificus; identical to SEQ ID NO: 1088
  source 1..40: mol_type = genomic DNA

SEQ ID NO: 7054 - DNA, 40 bp, Vibrio vulnificus; identical to SEQ ID NO: 1088
  source 1..40: mol_type = genomic DNA

SEQ ID NO: 7055 - DNA, 50 bp, Vibrio vulnificus; identical to SEQ ID NO: 1080
  source 1..50: mol_type = genomic DNA

SEQ ID NO: 7056 - protein, 602 aa, Faecalibacterium prausnitzii
MQKTPNKDVIAIYSRKSRFTGKGESVGNQVELCRSYIRSAYGDSCAASAVVYEDEGFSGGNLNRPGFKQMMKAARQRQFRAVVVYRLDRISRNISDFSGLIEELNRLSIDFVSIRESFDTSSPMGRAMMYIASVFSQLERETIAERIRDNMHELAKTGRWLGGTTPTGYTSEAVKTVTVDGKSKRACKLKLIPEEADIVRTIYQLYSETDSLTMTEAELLRRRILTKTGRYFTRFSIKTILQNPVYLIADQDAWQYFTDRQAELFSRPEEFDRVHGILAYNRTDQEKGRATIYLPVNQWIVSVGQHPGLIPGKTWVHIQESLERNKSKAYRKPRNNEALLTGLLWCACGNRMYPKLSKRLTPEGKPVYTYVCKLKEHSQRALCNRRNASGNLLDAAVIEQVKHLADDDSTLIQQLERSKRFYTGGRDAYASQLEDLRGQQAEIEHKINALIDSLADFAHSDAAVHVKKRIEELHAQQASLDTRISELEGLTSQHELSSAEFDIMRQLLVTFQSSIDNMSVEQKRTAIRTVVRKVIWDGEYAHLILFGAVEDQPDAPVLSGGDATDEDPASLKAFADIEYEESDAETQSDSAAKTSWGEDSKC

SEQ ID NO: 7057 - DNA, 50 bp, Faecalibacterium prausnitzii
  source 1..50: mol_type = genomic DNA
aaacctcttggggagaggatagcaaatgcgaccctctcgccaaggccctt

SEQ ID NO: 7058 - DNA, 40 bp, Faecalibacterium prausnitzii
  source 1..40: mol_type = genomic DNA
tgccagccgctgcattgaaaatgctatcctcaccaaacag

SEQ ID NO: 7059 - DNA, 40 bp, Faecalibacterium prausnitzii
  source 1..40: mol_type = genomic DNA
tgccagccgctgcattgaagctgctatcctcaccaaacag

SEQ ID NO: 7060 - DNA, 50 bp, Faecalibacterium prausnitzii
  source 1..50: mol_type = genomic DNA
aaacctcctaaagagaggagagctgctgccaccatcggatccagacactt

SEQ ID NO: 7061 - protein, 568 aa, Pseudomonas putida
MKPKAYSYTRFSTPEQAKGDSYRRQKVAAEEYCAANGLELADTREYRFFDNGRSAYKAKHLNDTGDFGRFLNYVDEGKIPAGSYLIVESLDRLSREEVKDALPRFLDLLKKGIRIYTSIDNHLYTENYNLTDLIISVISMSRAHEESSTKGSRVAAAWREKRGLARSDKKVPLGAACPYWLKLVEGAYVKVDERVEVIRRIFDMTIAGYGQAVISRRLNEDGVAVFGSTRSTKEKPRNKSGLWGTSSVQKILHNRALLGEYQPTCLVGRVRQNDGDPIQGYYPEIITPEVFLQAKAARAQRQTSGSTKQSKNFNIWQGIAKCRLCGDAMHLINKGRPPKGYTYLQCYSAKKGQCRNGSIRIEQTEAAFKEILTNVDSMSLINGKSAEIRKSLEVAEGHFRVVADKLQQATEVYTAVATIAGAKRIQELESEHAQCLAARDELRGQLASHRVINKEDYFKQLDLVTYEGRSAANSLLKRLGIQVQLKRDTPSRFQCRVLDKSNEAVSDELQQMLFGVLYEDDHATTQPLDPDIYDRQVEQGLITAAVAIREQEQDGIGWQWFGGKLKRS

SEQ ID NO: 7062 - DNA, 50 bp, Pseudomonas putida
  source 1..50: mol_type = genomic DNA
caatattggtggatatggttacaacctgtttatgttgtgtgacaatacac

SEQ ID NO: 7063 - DNA, 40 bp, Pseudomonas putida
  source 1..40: mol_type = genomic DNA
cggcggctggggcgcacaacctgttgttcaccggcccacc

SEQ ID NO: 7064 - DNA, 40 bp, Pseudomonas putida
  source 1..40: mol_type = genomic DNA
cggcggctggggcgcacaaattgttgttcaccggcccacc

SEQ ID NO: 7065 - DNA, 50 bp, Pseudomonas putida
  source 1..50: mol_type = genomic DNA
caatatattgcagtatggttacaaattgtttctatctataaaaaatacat

SEQ ID NO: 7066 - protein, 540 aa, Clostridium tetani
MKAAIYSRKSVFTGKGESVENQIQMCKEYGEKNLGIKEFVIYEDEGFSGGNTKRPKFQELLRDVKKKKFDTLICYRLDRISRNVADFSTTLELLQDNNISFVSIKEQFDTSTPMGKAMVYIASVFAQLERETIAERIRDNMLELAKTGRWLGGQTPLGFKSEKISYFDAEMKERTMYKLSPENKELELVKLIYNKYLETGSIHLTLKYLLSNSIKGKNGGEFASMSINDILRNPVYVRSNQMVIDYLKDKGMNVCGTANGNGILIYNKRNSKYKKKDINEWIAAVSKHKGIIPANTWIEVQKTLDKNSSKSTPRQGTSKKSILSGVLKCSRCSSPMRVTYGRKRKDGTSIYYYTCTMKAHSGKTRCDNPNVRGDYLEKAIIKKLQNLNSDVVIKELEEYKKQLAATTENSIIKNISKEIEEKKKEMDSLLKQLSKVESPVASEFIISKVDSLGTEIKDLEISLTKTNSKKKENSNIELNIEIVLQSLKEFNTFFNSVESLKTDELTIQRKRYLLERAVDEITIDGETKKIGIDLWGSKKK

SEQ ID NO: 7067 - DNA, 50 bp, Clostridium tetani
  source 1..50: mol_type = genomic DNA
tatcgcaattacataaagcatgtacatgcatggtttatagtattgcaacc

SEQ ID NO: 7068 - DNA, 40 bp, Clostridium tetani
  source 1..40: mol_type = genomic DNA
agattttccagggcataatcatgcatggctatatgatgtg

SEQ ID NO: 7069 - DNA, 40 bp, Clostridium tetani
  source 1..40: mol_type = genomic DNA
agattttccagggcataattatgcatggctatatgatgtg

SEQ ID NO: 7070 - DNA, 50 bp, Clostridium tetani
  source 1..50: mol_type = genomic DNA
ttacaccatatctcaaagtatatatatgcatgatttctctcattgaaacc

SEQ ID NO: 7071 - protein, 529 aa, Streptomyces agglomeratus
MPQLPIAGRARTLRAIIYIRVSTEREEMQSPEQQLFSCKEYADRNNITIVGEPVEDLDLTGRSFARRQIAAVIERIRNGEADVVLVWKWSRFGRNNYESQVNLRELEKAGGRLIAVTEDFDTTTYHGRFSRDNMLLVADLQSGIIGATWQEAHDRRHRNGLPHTGQARFGYMRCPECRRKEDSPQEYLSCAACAGVLMVDPVRGPALAEAYERFADGESVAGIAADMAERGIRSLQGKVMKATQWQVVMDSGFGAGLIRWRGPEYRARHGRQSKKPSTYDNWVEGKQEPVIGLATWERYKRRREGSKSIPWSTSAKYSCSGLLRCQAINAEGQLCDRRLVASAVLRSNGGDTKIFRCPDIAVKTCKGVTVTLRRVDDAILAWLMERGTGEDMGVMAMKRAARRTRAASDIPTVERELTGKRSEGERLLDLYLKALISEEDFRNKREELDAEIASLESRLEVLRLDSGEGVIPSADDFAKLADLWPRMQPAKQRAALGKVVGRINIVKTPGKQYNRIEIIPAWEMDQAAS

SEQ ID NO: 7072 - DNA, 50 bp, Streptomyces agglomeratus
  source 1..50: mol_type = genomic DNA
gtatgggtctgacgacatgcaatgcacagggcatggcgcaaaacacaaac

SEQ ID NO: 7073 - DNA, 40 bp, Streptomyces agglomeratus
  source 1..40: mol_type = genomic DNA
gttgtgcgccatcccgacccacagggccgcgaagttgtac

SEQ ID NO: 7074 - DNA, 40 bp, Streptomyces agglomeratus
  source 1..40: mol_type = genomic DNA
gttgtgcgccatcccgacctccagggccgcgaagttgtac

SEQ ID NO: 7075 - DNA, 50 bp, Streptomyces agglomeratus
  source 1..50: mol_type = genomic DNA
gtatgattctgtttacacgaaatgtccagagcatggtaatcaaccgagac

SEQ ID NO: 7076 - protein, 516 aa, Clostridioides difficile
MRVAIYARKSKHVSQSESIKNQIDLCKSYCENNFNYTKTEEYWDDGFTGKNTTRPSFQRLLNDIKDSKIDIILVYRVDRLCRNTKDFYSILDLLDSHNIQLKPISENFDLDSTTGRAMAVMYSIFAQFERECISERIKDNMYELAKSGRWLGGPAPFGYKFNKIVKDNKTLSYLVEDEVQSETVKLLYNKFIKLGSLTKVRKYAYENSITGPQGNILDLSSLSKILRNPLYAKSTPDIISFLENKNMNVIGDADHVNGFFTYGKNNTSSIQPIATISNHNGIIDGDTWLKVQNLLLVNSTKFPREKTGKKSLLSGLLKCKLCGSNMRISYKKPNTNGIQHSYYICGSKKTFGAKACSCSNLNANYVDRLVINYINKIDLKTLIELFRSDNLFKSNFDTTSAEFFLLKKNIEIKNKSLANLTNSLSMTSDSTIINTIIKKMETISLEIDNLNKHFDTITSISSDINSSVTESINHYLNNFNDFLENETLESRLNFINLIVSKIEWDSSTNDINIIFK

SEQ ID NO: 7077 - DNA, 50 bp, Clostridioides difficile
  source 1..50: mol_type = genomic DNA
taaacataaataaagtagccttatatttaaataaggctactttatttata

SEQ ID NO: 7078 - DNA, 40 bp, Clostridioides difficile
  source 1..40: mol_type = genomic DNA
gcacgttttaatagtgtataatcaaaactaaagttaataa

SEQ ID NO: 7079 - DNA, 40 bp, Clostridioides difficile
  source 1..40: mol_type = genomic DNA
gcacgttttaatagtgtatggtcaaaactaaagttaataa

SEQ ID NO: 7080 - DNA, 50 bp, Clostridioides difficile
  source 1..50: mol_type = genomic DNA
taaaaataaccctattaactttatggttatataagtaatacttctttatt

SEQ ID NO: 7081 - protein, 635 aa, Salmonella enterica
MRLYRYRGVVIMIKTFIYSRVSSQEQLSGGGLDRQETDVREYVTRNGLDQYEIVAMVDRGISGYDGSNMRDGELGKWYKDAITGMYWGSHLVLEAIDRFSRRDPMLAMEDFTVLVNKGGIKVHIVKFNTFINGDNLPMLSMMMNLAHSESKQKSDRISKGWQRRRRMALDNGTAITARTPYWIDVRDNEYRLNNSSIAVVEAFAMYKQGLSCGLIAKKLNELKHYFPYMWTKTAVQHIVDGLNTSGIIDAPRAIKTIKAFYKSGFSVEDIAKKMNAEFQFMKEWNAPAVHKLLQNKSVTGLVEIQKRKLIQEFDSDGKPLELRTKSEGEKYFESIYPQIISIDDFELIQKLLESNRKVDTKTGKGQTTGGTVTQNEDGELVKQFILSSLCRCYKCGGAMFNNIVRSKRKNGKVDTYSYLRCLNERDAHCDVKALNYPVIERAIIEHVKGLNFDTMFKGTNNSELELLKTREVELLRDIATYEDAIAARKAAGKNTSPVLVTSLVDAQDDLEALQKKIRAISGVTVNAGELTSLNESVFDVAEYELRNMVELELQKIIKRITFNCTEKNIYFITIQYNTGTVLQHGLKVDKKKGVIETYELHEGNKGYVSNGEVITPALIEAAESKNIGIFEGKVM

SEQ ID NO: 7082 - DNA, 50 bp, Salmonella enterica
  source 1..50: mol_type = genomic DNA
tttttgtataaagtgcaacctatacaaattagttgatcaaaatacaaaaa

SEQ ID NO: 7083 - DNA, 40 bp, Salmonella enterica; identical to SEQ ID NO: 1123
  source 1..40: mol_type = genomic DNA

SEQ ID NO: 7084 - DNA, 40 bp, Salmonella enterica
  source 1..40: mol_type = genomic DNA
ttttagcttgataatcatagtaataggtgccgttgcagca

SEQ ID NO: 7085 - DNA, 50 bp, Salmonella enterica
  source 1..50: mol_type = genomic DNA
ttttggttttagttacaaactatagtaattagttatgtgaaacacaaaca

SEQ ID NO: 7086 - protein, 635 aa, Salmonella enterica; identical to SEQ ID NO: 1121

SEQ ID NO: 7087 - DNA, 50 bp, Salmonella enterica; identical to SEQ ID NO: 7082
  source 1..50: mol_type = genomic DNA

SEQ ID NO: 7088 - DNA, 40 bp, Salmonella enterica; identical to SEQ ID NO: 1123
  source 1..40: mol_type = genomic DNA

SEQ ID NO: 7089 - DNA, 40 bp, Salmonella enterica; identical to SEQ ID NO: 7084
  source 1..40: mol_type = genomic DNA

SEQ ID NO: 7090 - DNA, 50 bp, Salmonella enterica; identical to SEQ ID NO: 7085
  source 1..50: mol_type = genomic DNA

SEQ ID NO: 7091 - protein, 522 aa, Vibrio parahaemolyticus
MRFSRPEQAKGTSIERQSSFAEQYALEHGLELDKSLTMMDKGLSAFHGVHKTKGAFGQFLAAVTAGKVPSGSVLVVESLDRLSREDPLIAQAALTDLILSGITVVTAADNQVYSREEIQQNPFKLIMSLVVMIRANEESETKQRRSNAFLKSALNQYQANGKIRRLGSDPSWLDFNKDNDTYSFNERVEVIRRILNLYNQGIGSLKIARQLTEERIPTLSGKRSAWGQTTVANIVKSNALYGMKRINVQGVEYDLEDFYPALITKSKWLALQQHRTKRSKSMHGRGEVVHLITGHGKGFTTCGYCGGGLGAQTQKQYKRSGVYSKTVTRLHCLTHKETSSCCSSVFLEPIESAVLFAACIGVEPQSLVPTVNNVNYSALIDEVENKVKHIVEQVTAGAPWDLFKDAHDRLKLEKQKLIKERDSQKPEVNQSDLQKWVNKLVELADKARANDKEARLKCRTLINSICKSIVIKLRGHDLKSEPVVTITFVTDEQFEFKVGKNGAVQFVDNGMAVNRRLKPLLA

SEQ ID NO: 7092 - DNA, 50 bp, Vibrio parahaemolyticus
  source 1..50: mol_type = genomic DNA
tagttatgcactgtacatttgctttctgtctaatgtatagtgataacttg

SEQ ID NO: 7093 - DNA, 40 bp, Vibrio parahaemolyticus
  source 1..40: mol_type = genomic DNA
gaaataaccaaaagagccgtcagtccaatagatgtcttgc

SEQ ID NO: 7094 - DNA, 40 bp, Vibrio parahaemolyticus
  source 1..40: mol_type = genomic DNA
gaaataaccaaaagagccgggagtccaatagatgtcttgc

SEQ ID NO: 7095 - DNA, 50 bp, Vibrio parahaemolyticus
  source 1..50: mol_type = genomic DNA
tacttattcaataaacatttgcttggtgtccactgtgcacctatagtgtg

SEQ ID NO: 7096 - protein, 522 aa, Vibrio parahaemolyticus; identical to SEQ ID NO: 7091

SEQ ID NO: 7097 - DNA, 50 bp, Vibrio parahaemolyticus; identical to SEQ ID NO: 7092
  source 1..50: mol_type = genomic DNA

SEQ ID NO: 7098 - DNA, 40 bp, Vibrio parahaemolyticus
  source 1..40: mol_type = genomic DNA
gaaataaccaaaagagccgtcagtccaatggatgtcttgc

SEQ ID NO: 7099 - DNA, 40 bp, Vibrio parahaemolyticus
  source 1..40: mol_type = genomic DNA
gaaataaccaaaagagccgggagtccaatggatgtcttgc

SEQ ID NO: 7100 - DNA, 50 bp, Vibrio parahaemolyticus; identical to SEQ ID NO: 7095
  source 1..50: mol_type = genomic DNA

SEQ ID NO: 7101 - protein, 522 aa, Vibrio parahaemolyticus
MRFSRPEQAKGTSIERQSSFAEQYALEHGLELDKSLTMMDKGLSAFHGVHKTKGAFGQFLAAVTAGKVPSGSVLVVESLDRLSREDPLIAQAALTDLILSGITVVTAADNQVYSREEIQQNPFKLIMSLVVMIRANEESETKQRRSNAFLKSALNQYQANGKIRRLGSDPSWLDFNKDNDTYSFNERVEVIRRILNLYNQGIGSLKIARQLTEESIPTLSGKRSAWGQTTVANIVKSHALYGMKRINVQGVEYDLEDFYPALITKSKWLALQQHRTKRSKSMHGRGEVVHLITGHGKGFTTCGYCGGGLGAQTQKQYKRSGEYSKTVTRLHCLTHKETSSCCSSVFLEPIESAVLFAACIGVEPQSLVPTVNNVNYSALIDEVENKVKHIVEQVTAGAPWNLFKDAHDRLMLEKQKLIKERDSQKPDVNQSDVQKWVNKLVELADKARANDKEARLKCRTLINSICKSIVIKLRGHDLKSEPVVTITFVTDEQFEFKVGKNGAVQFVDNGMAVNRRLKPLLA

SEQ ID NO: 7102 - DNA, 50 bp, Vibrio parahaemolyticus; identical to SEQ ID NO: 7092
  source 1..50: mol_type = genomic DNA

SEQ ID NO: 7103 - DNA, 40 bp, Vibrio parahaemolyticus; identical to SEQ ID NO: 7098
  source 1..40: mol_type = genomic DNA

SEQ ID NO: 7104 - DNA, 40 bp, Vibrio parahaemolyticus; identical to SEQ ID NO: 7099
  source 1..40: mol_type = genomic DNA

SEQ ID NO: 7105 - DNA, 50 bp, Vibrio parahaemolyticus; identical to SEQ ID NO: 7095
  source 1..50: mol_type = genomic DNA

SEQ ID NO: 7106 - protein, 481 aa, Streptococcus pneumoniae
MKTMNKVAIYVRVSTTNQVEEGYSIDEQKDKLSSYCDIKDWNVYKVYTDGGFSGSNTDRPALESLIKDAKKRKFDTVLVYKLDRLSRSQKDTLHLIEDVFIKNGIEFLSLQENFDTSTPFGKAMIGLLSVFAQLEREQIKERMQLGKLGRAKSGKSMMWAKTSYGYDYHRDTGTITINPAQALAIKFIFESYLRGRSITKLRDDLNEKYPKHVPWSYRAVRTILDNPVYCGFNQYKGEIYPGNHEPIISKEEYDKTQSELKIRQRTAAENVNPRPFQAKYILSGIAQCGYCGAPLKIMLGVKRKDGSRLKKYECHQRHPRTLRGVTTYNDNKKCDSGFYYKDKLEASVLKEISKLQDNANYLDKIFSGDNDETIDRESYKKQIEELSKKLSRLNDLYIDDRITLEELQSKSAEFISMRATLETELENDPALRKNKRKADMRKLLNAEKVFSMDYEGQKVLVRGLINKVQVTAEDIVIKWKI

SEQ ID NO: 7107 - DNA, 50 bp, Streptococcus pneumoniae
  source 1..50: mol_type = genomic DNA
aaatataaataattttagtaaccaacatttcaatcaaggatagtaaaact

SEQ ID NO: 7108 - DNA, 40 bp, Streptococcus pneumoniae; identical to SEQ ID NO: 5018
  source 1..40: mol_type = genomic DNA

SEQ ID NO: 7109 - DNA, 40 bp, Streptococcus pneumoniae
  source 1..40: mol_type = genomic DNA
ataatcagcaagaccaccatcatttccaccaatgtaaaag

SEQ ID NO: 7110 - DNA, 50 bp, Streptococcus pneumoniae
  source 1..50: mol_type = genomic DNA
aaacatgaacttctttagttcccatcatttcagtcagaaaaatcaaagct

SEQ ID NO: 7111 - protein, 476 aa, Thermoactinomyces vulgaris
MKASIYIRVSTAEQAAEGFSLAAQQQRCTDFIKSQGWELGEVYKDDGYSAKDLNRPSMQRLIQDVKSKKFDVLVVYRLDRLVRSVLDLHQLLNIFDEHNIMFKSVTEVFDTTTAMGRLFISIVGAMAQWERENLSERVKMGLERKFLEGKRIGGPAFGYRIDEDGKMVIDKEKAQIVRWIFNSAKKMGINKIAKILNKQGIDSPKGGNWTGSKVAYLLRNPTYTGKIRYLVNRNGYGEKETIDSNHPALISEEEYNEVQEILKKRHGGRKKAHTSDYPFSTILFCTRCGSPYSGARQENKSGVTYYYRCNGTARGICQASTVLEERLVDELLNKINLIIEESEVTLESEKGETDNEFRLKQIEAELQRIKKRRRKWQEAFANDAISLEELKERMNEEKKKEEALMEELEAFNTVPNETDVSKDEIIVALKNLKEIWYHLSRKEQKEILNMIFSRIYIKTEGERPHIKPIITDYELL

SEQ ID NO: 7112 - DNA, 50 bp, Thermoactinomyces vulgaris
  source 1..50: mol_type = genomic DNA
gactgttttttaatcagaataactacactcattttaactaaacaacagta

SEQ ID NO: 7113 - DNA, 40 bp, Thermoactinomyces vulgaris
  source 1..40: mol_type = genomic DNA
gaccggcattatgttcattaccgtcgtcggcaccgctgtc

SEQ ID NO: 7114 - DNA, 40 bp, Thermoactinomyces vulgaris; identical to SEQ ID NO: 7113
  source 1..40: mol_type = genomic DNA

SEQ ID NO: 7115 - DNA, 50 bp, Thermoactinomyces vulgaris
  source 1..50: mol_type = genomic DNA
gacactgtgagagacagaaagactacactcatattactttcataacagta

SEQ ID NO: 7116 - protein, 481 aa, Streptococcus pneumoniae; identical to SEQ ID NO: 5471

SEQ ID NO: 7117 - DNA, 50 bp, Streptococcus pneumoniae
  source 1..50: mol_type = genomic DNA
taaataattttagtaaccaacatctcaatcaaggatagtaaaactctcac

SEQ ID NO: 7118 - DNA, 40 bp, Streptococcus pneumoniae; identical to SEQ ID NO: 5823
  source 1..40: mol_type = genomic DNA

SEQ ID NO: 7119 - DNA, 40 bp, Streptococcus pneumoniae
  source 1..40: mol_type = genomic DNA
cagcaagaccaccaacattctcaccaatgtaaaagcttta

SEQ ID NO: 7120 - DNA, 50 bp, Streptococcus pneumoniae
  source 1..50: mol_type = genomic DNA
aaaacaatgataaaaactaaaatcctaatcaaagatggttcaactttcaa

SEQ ID NO: 7121 - protein, 564 aa, Anaerotruncus rubiinfantis
MREVEILKKKQLKCYIYTRVSTSMQVDGYSLDAQRDKLRKYAAYEDMVIAGEYSDEGFSGKNIQGRQDFQRMLNDIQDCKDGVSYVLVFKLSRFGRNAADVLNSLQLMQDFGVNLICVEDGIDSSKDAGKLMISVLSAVAEIERENIRTQTMAGREQKAREGKWNGGFAPYGYKLENGDLVIAEDEVEVIRVIYDRYIHTNEGVAGVAKYLNRNGFIKKLRQNNTIPGFSRNFVQDVLDNPVYMGKIAYGRRRTEKKQGTRNEMHVVEQSEFPIYEGQHEAIISEEDWYLAQEKRKINSFKREKVNNPDHAHILSGILKCPCCGKSMYGNIARAHSKDKKTRYYYYCKNTVTPTGHECSFRLNIEQTEINKFVAKIISAMVNNPRFVEAIQAKIGSAVDTEDMEKQIAVLQGQLKQAFGTKSRLERQMDTLDINDAHYDRKILDLQRRYDEQYDTIEDIEVQIGELQGQIRSIQQEKISGNNIYRLLLAFDEVYHSATEAEQKEFMKAFIERIEMFPEKRKDGSWIRKIVFNFPVPVDGEEVKELPLETETTVESVSLLCREST

SEQ ID NO: 7122 - DNA, 50 bp, Anaerotruncus rubiinfantis
  source 1..50: mol_type = genomic DNA
ctggcttttgtttttccggaatagatggtataataaaacgtaaaagctcc

SEQ ID NO: 7123 - DNA, 40 bp, Anaerotruncus rubiinfantis
  source 1..40: mol_type = genomic DNA
caccgcgcgcttcgcgcgtgtggtataatagccgcagagc

SEQ ID NO: 7124 - DNA, 40 bp, Anaerotruncus rubiinfantis
  source 1..40: mol_type = genomic DNA
caccgcgcgcttcgcgcgtatggtataatagccgcagagc

SEQ ID NO: 7125 - DNA, 50 bp, Anaerotruncus rubiinfantis
  source 1..50: mol_type = genomic DNA
caagcttttggttattagtaatagatggtaaaataatagcttaatgctcc

SEQ ID NO: 7126 - protein, 583 aa, Butyricicoccus pullicaecorum
MTQTQIHATISPCTPILSADPTVKEDAMLDQQKITILYCRLSNEDALDGESNSIQNQKEFLTRYAAEHGYTNLKILVDDGYTGTNFDRPGVQEGFALVKQGLVGCWLVKDLSRFGRDYLTVGQYTDIIFPSYDVRFIAVNDGVDSERGDSDGFAAIRNLFNEWYPRDTSKKVRVVFRQKGTSGKHLGKPPYGYRTDPADKDHWIIDEDAAPVVKRIFDLAIGGKGPEQIARILEKDKVLTTKALYAKQSENHPDPKKRKKMPERPYHWIGQSVVGILERMEYTGCTCNFKTYSKSYKLKKRIPNAIEDMCIFPDTQEAIVSQAQWDRVQELRKNKRRPTKAERQGLFSGLLFCPDCGNKLHFATCKSFDGKQDHYLCSSYKSGRGTCSAHYIREDVLRELVLERIRAVNAYIRQDVEGFQEEWLQCRRSDQERNICEDRKRVEQAKKRLADLDVLLSRLYEDFVLGDLSKERYKKMTADYEAEQERLKLEIEVTEEWLETQETMSADVDAFVALTQKYVDVPELTPTIVNEYIKKIEVFAPDKSSGKRVQKVKIYFNFVDDVEIPVISEPVVAKSTPGRRKTA

SEQ ID NO: 7127 - DNA, 50 bp, Butyricicoccus pullicaecorum
  source 1..50: mol_type = genomic DNA
atcactattaagccttgttttgggtgcttttttcatgcctgaaagtatgt

SEQ ID NO: 7128 - DNA, 40 bp, Butyricicoccus pullicaecorum
  source 1..40: mol_type = genomic DNA
ccaaaacgcttgttttgggtgcttttttcatacagtattt

SEQ ID NO: 7129 - DNA, 40 bp, Butyricicoccus pullicaecorum
  source 1..40: mol_type = genomic DNA
ccaaaacgcttgttttgggaacttttttcatacagtattt

SEQ ID NO: 7130 - DNA, 50 bp, Butyricicoccus pullicaecorum
  source 1..50: mol_type = genomic DNA
ataaatattaagtattattttggcaacctttttcattttataaactctgc

SEQ ID NO: 7131 - protein, 531 aa, Vibrio parahaemolyticus
MAIAYSYIRFSSSQQSQGDSLRRQTQLAEKYCIENNLTLSDTTFRDLGVSAFHSTNSQEDSGLGQFLSALNQGRINEGSYLLVESLDRLSRAKVQTALRQMLNIIELGVKIVTLMDNRIYDQESDTTDLIISLTIMERAHNESKTKSERIKAAWVHKRQNPTTTNRHSSTPFWLSLNPDKKTYKLKEKYVEIVRKIYQLSIDGWGVIKIVRHLNESNIKAPKGGSWATTTVSRVLTSKAVLGHYEPMQNRKSLNLTIEDYYPSIIDEATYYLSRQRQNERSKPEAAGRKTNYPNPLSQIAKCKLCGSSMYYENKSKSLKYLTCREFKKGSCTNKPIRIELIYRFVCEVFNSPMYYQYQAKLVEKSNKKDNNKLEELEAKQTEQENALRALLSMSNDFSNTIIQEEIKVRSERIESFKKHIENVKAEQAVEHTRSTHINFTEALQLAVNAFRFPLEKVQVEELSREELFNTRVRLNRILKHAFNSLSIYHCGESERITIETEVMEGFSEGLKYETTRQSIKEPLSSRVWSVC

SEQ ID NO: 7132 - DNA, 50 bp, Vibrio parahaemolyticus
  source 1..50: mol_type = genomic DNA
aaaaggttaatattgccgttagttactcttgttggtattatttacctttt

SEQ ID NO: 7133 - DNA, 40 bp, Vibrio parahaemolyticus; identical to SEQ ID NO: 4248
  source 1..40: mol_type = genomic DNA

SEQ ID NO: 7134 - DNA, 40 bp, Vibrio parahaemolyticus
  source 1..40: mol_type = genomic DNA
taatggcatgcccggcttttttctcgttgggttgccggag

SEQ ID NO: 7135 - DNA, 50 bp, Vibrio parahaemolyticus
  source 1..50: mol_type = genomic DNA
aaatggttagttttggggttagtttttgttgtttgtttgttttttgtttt

SEQ ID NO: 7136 - protein, 481 aa, Streptococcus pneumoniae
MITTNKVAIYVRVSTTNQVEEGYSIDEQKDKLSSYCDIKDWNVYKIYTDGGFSGSNTDRPALESLIKDAKKRKFDTVLVYKLDRLSRSQKDTLYLIEDIFIKNNIAFLSLQENFDTSTPFGKAMIGLLSVFAQLEREQIKERMQLGKLGRAKAGKSMMWAITSYGYDYHRGTGDVTVNPAQAVAVKFIFEQYLSGRSITKLRDDLNEKFPKEIDWSYRAVRAILDNPVYCGYNKYSGKIYKGNHEPIISKEDYDKTQAELKVRQRTAAENVNPRPFQAKYILSGIAQCGYCGAPLKIILGVKRKDGSRFKKYECHQRHPRTLRGVTTYNDNKKCDSGFYYKDKLEAYVLKEISKLQDDAGYLDKIFSEDNAETIDRESYKRQIEELSKKLSRLNDLYIDDRITLEELQSKSAEFISMRGTLEAELENDPALGKDKRKADMRKLLNAEKVFSMDYEGQKVLVRGLINKVQVTAEDIVIKWKI

SEQ ID NO: 7137 - DNA, 50 bp, Streptococcus pneumoniae
  source 1..50: mol_type = genomic DNA
taaataattttagtaacctacatttcaatcaaggatactaaattttttga

SEQ ID NO: 7138 - DNA, 40 bp, Streptococcus pneumoniae; identical to SEQ ID NO: 1573
  source 1..40: mol_type = genomic DNA

SEQ ID NO: 7139 - DNA, 40 bp, Streptococcus pneumoniae
  source 1..40: mol_type = genomic DNA
cagcaagaccaccaacatcttcaccaatgtaaaagcttta

SEQ ID NO: 7140 - DNA, 50 bp, Streptococcus pneumoniae
  source 1..50: mol_type = genomic DNA
gaaataattttattaacctttatattcattaaggataactaatttttaaa

SEQ ID NO: 7141 - protein, 544 aa, Pseudomonas aeruginosa
MLNTSIFGSFSAMTVKKSLPRAFADVFSDDETINVYSYIRFSSKAQSAGAGEVRQLEQLNSFFEQYPQARQVERYQDLGVSAFKGKNLKSGQLAKFVERIKSKEILSNALLLVESFDRISRVGGYDALELIISIIQADCAIYTLFDNRLYSKRKKDSSVDISLIQNILERANDESRAKSERISDAKARNLIKGENGEIITKRCPFWISFVDNKFVLNEHASAVKRMTELCFEVGFQAIAQELNKEGHSRKYTESTVGKVLHKHAIYGSFLSMKNDEYGNRTIINKEIKNYYPALVSEAEFHRISAKLKERQDPKLAGRKASDFKNILRGLVFCKCGSTFRFHAQKNFYVDLVCNASSVHKCEFAQKNKSVRYRYARVEEIFLAYQSLIPFHQIVSKNDDVKALEKEHQEIIGLIVLKEKALSNHFAILESASDSSRKYITQRIDEVSEELDKLKSDEHKLNQKIMSLHLASKTDLNSIEIYNLLITEQGRIKINNFLHAQKIKLIITPVKKKFFTLDIFHNDKHIDTIDVTANDYTARNHTHLK

SEQ ID NO: 7142 - DNA, 50 bp, Pseudomonas aeruginosa
  source 1..50: mol_type = genomic DNA
tttctactattcccgcctatgattgcaatgaccagcgctttttgtataaa

SEQ ID NO: 7143 - DNA, 40 bp, Pseudomonas aeruginosa
  source 1..40: mol_type = genomic DNA
ttgcagcatgcccagcacggcattcatcggcgtgcggatc

SEQ ID NO: 7144 - DNA, 40 bp, Pseudomonas aeruginosa
  source 1..40: mol_type = genomic DNA
ttgcagcatgcccagcacgcgattcatcggcgtgcggatc

SEQ ID NO: 7145 - DNA, 50 bp, Pseudomonas aeruginosa
  source 1..50: mol_type = genomic DNA
tttagaatattcttccctctgattcgaatgtccagctttctttttaaaaa

SEQ ID NO: 7146 - protein, 481 aa, Streptococcus pneumoniae; identical to SEQ ID NO: 7136

SEQ ID NO: 7147 - DNA, 50 bp, Streptococcus pneumoniae
  source 1..50: mol_type = genomic DNA
aaatataaataattttagtaacctacatctcaatcaaggatactaaattt

SEQ ID NO: 7148 - DNA, 40 bp, Streptococcus pneumoniae; identical to SEQ ID NO: 5018
  source 1..40: mol_type = genomic DNA

SEQ ID NO: 7149 - DNA, 40 bp, Streptococcus pneumoniae; identical to SEQ ID NO: 5684
  source 1..40: mol_type = genomic DNA

SEQ ID NO: 7150 - DNA, 50 bp, Streptococcus pneumoniae
  source 1..50: mol_type = genomic DNA
aaatataaaaagaaatagaaaactaaatcccaaataaaataacacaattt

SEQ ID NO: 7151 - protein, 483 aa, Leuconostoc gelidum
MNKKVAIYVRVSTLEQAESGYSIGEQIDKLKKFADIKEWQVYDVYEDGGFSGSNTTRPALERMINDAKRKLFDTVLVYKLDRLSRSQKDTLFLIEDVFKVNNIDFVSLNENFDTSTAFGTAMIGILSVFAQLEREQIRERMKLGLVGRAKSGKAMGWHMTPFGYTYDKKSGNFIIDEVAASVVKMIFDDYLSGISITKLRDKLNAEGHIGKDRNWSYRTLRQTLDNPTYTGVVKYDGKTFPGNHEPILKNETFQSVQYELDVRQKQAYLKNNNSRPFQSKYILSGIAKCGYCGAPLVSILGNKRKDGTRLLKYQCANRIIRKAHPVTTYNDNKQCDSGFYMMQNIEAYVINSISELQTSPQKIQEIIKLDNGQPAIDTIYLESELAKISSRLKKLSDLYMNDLMTLDDLKNRTEELKQTRKNIEAKIFSEENKHGHTKSDIFRSRIDGNNITELDYDQQSMLAKSLIRKVSVTSETIEVSWDF

SEQ ID NO: 7152 - DNA, 50 bp, Leuconostoc gelidum
  source 1..50: mol_type = genomic DNA
taaacataatgactataagccgtttcaatcaagtataataaatatatttt

SEQ ID NO: 7153 - DNA, 40 bp, Leuconostoc gelidum
  source 1..40: mol_type = genomic DNA
gaaaagcacaattgctgcttcaatcagagtaaatgcttgt

SEQ ID NO: 7154 - DNA, 40 bp, Leuconostoc gelidum
  source 1..40: mol_type = genomic DNA
gaaaagcacaattgctgctataatcagagtaaatgcttgt

SEQ ID NO: 7155 - DNA, 50 bp, Leuconostoc gelidum
  source 1..50: mol_type = genomic DNA
taaaaattaaacttataagttgttataacaaagtattaaacaaatattta

SEQ ID NO: 7156 - protein, 483 aa, Leuconostoc inhae; identical to SEQ ID NO: 7151

SEQ ID NO: 7157 - DNA, 50 bp, Leuconostoc inhae; identical to SEQ ID NO: 7152
  source 1..50: mol_type = genomic DNA

SEQ ID NO: 7158 - DNA, 40 bp, Leuconostoc inhae
  source 1..40: mol_type = genomic DNA
gaaaagcacaattgctgcttcaattagagtaaatgcttgt

SEQ ID NO: 7159 - DNA, 40 bp, Leuconostoc inhae
  source 1..40: mol_type = genomic DNA
gaaaagcacaattgctgctataattagagtaaatgcttgt

SEQ ID NO: 7160 - DNA, 50 bp, Leuconostoc inhae; identical to SEQ ID NO: 7155
  source 1..50: mol_type = genomic DNA

SEQ ID NO: 7161 - protein, 474 aa, Bacillus amyloliquefaciens
MNLMDENTQKNVGIYVRVSTEEQAKEGYSISAQKEKLKAYCISQGWDSYKFYIDEGKSAKDIHRPSLELMLRHIEQGIIDTVLVYRLDRLTRSVRDLYSLLDYFDKYQAVFRSATEVYDTGSATGRLFITLVAAMAQWERENLGERVKMGQVEKARQGQFSAPAPFGFTKEGESLVKNPEEGEVLLDMIDKIKKGYSLRELADYLDQSDAIPKRGYKWHIASILVILKNPVLYGGFRWAGEILEGAFEGYISKKEFEQLQKVLHDRQNFKRRETSSIFIFQAKILCPNCGNRLTCERSIYFRKKDNKNVESNHYRCQACALNKKPAIGISEKKFEKALIEFMQNANFKREPKIPQEKQQDYDKLHQKIISIEKQRKKYQKAWSMELMTDQEFEQLMAETKEALQKALAKLEQNDLHPIEKPLNIERAKELAKMFRENWSVLTGEEKRQTVQELIKHIEFEKKDNKARILDIHFY

SEQ ID NO: 7162 - DNA, 50 bp, Bacillus amyloliquefaciens
  source 1..50: mol_type = genomic DNA
attagggtttatgtaaagtataagcatgaaaacttgacacaaatacgaaa

SEQ ID NO: 7163 - DNA, 40 bp, Bacillus amyloliquefaciens
  source 1..40: mol_type = genomic DNA
tttggtatttaaatataaacagacaaaatgctcttgggat

SEQ ID NO: 7164 - DNA, 40 bp, Bacillus amyloliquefaciens; identical to SEQ ID NO: 7163
  source 1..40: mol_type = genomic DNA

SEQ ID NO: 7165 - DNA, 50 bp, Bacillus amyloliquefaciens
  source 1..50: mol_type = genomic DNA
attacgtatatataaaagtaggtgcatgaaaacttggaaccaatatcaaa

SEQ ID NO: 7166 - protein, 474 aa, Bacillus velezensis; identical to SEQ ID NO: 2626

SEQ ID NO: 7167 - DNA, 50 bp, Bacillus velezensis; identical to SEQ ID NO: 2622
  source 1..50: mol_type = genomic DNA

SEQ ID NO: 7168 - DNA, 40 bp, Bacillus velezensis; identical to SEQ ID NO: 4183
  source 1..40: mol_type = genomic DNA

SEQ ID NO: 7169 - DNA, 40 bp, Bacillus velezensis; identical to SEQ ID NO: 4183
  source 1..40: mol_type = genomic DNA

SEQ ID NO: 7170 - DNA, 50 bp, Bacillus velezensis; identical to SEQ ID NO: 7165
  source 1..50: mol_type = genomic DNA

SEQ ID NO: 7171 - protein, 572 aa, Tepidanaerobacter syntrophicus
MEKKRVVCLYRVSTKMQVDPTGDISMQEKACREFIAQRPDWEFLYDYSEKGISGFTKSVDEREILQKIKEDAYNKKFDVLLVFMFDRIGRREIETLLFVEELTKLGIEIWSAQEKEQLDLMNPEARLISFIKYWKAGSESSQTSMRVAEKHRQMTLEGLYRGGEPPYGYRLVDSGIVNKKGKLIKKLAINEKEVEVVKLIYDLALNYGMGGHRIAKYLNEHGIKPRKGDEWNSAVINYMLRNPIYKGHLTSGKTKRKGSKHRRVSPKEWVLSEKPLEELIIIPEDIWNQVQLVRNSRTPEKYRLDNLDYSQYPLQTKSPLLFTGFIYCGSCGSKLSTGYVKHEWTTKDGKTHKKSRNVYKCIRKTSGGTKCTGRSIYYPEMIEEPVMDEIYKYLDTLKDLDLSQEIDRISKQNLQSSEKRIKELKETIAKNEKYLAVLKEEVPKSILGESQFSPEILNESIRDTADKLEKAYKELEEAQKEYERYKLELDDIIKMQKTVPYWREELEKAPTEVKKMILSEIIDKVVVYSNKGEKNCSIEIELNIEIEAFLRLADGRNREPNDLHEQNILKRR

SEQ ID NO: 7172 - DNA, 50 bp, Tepidanaerobacter syntrophicus
  source 1..50: mol_type = genomic DNA
atgagcaaaatatactcaaacgtcgagccaccaacataggttttgctaac

SEQ ID NO: 7173 - DNA, 40 bp, Tepidanaerobacter syntrophicus
  source 1..40: mol_type = genomic DNA
ggttttccagcccggtgaagaaactcttgaaggtgcaaaa

SEQ ID NO: 7174 - DNA, 40 bp, Tepidanaerobacter syntrophicus
  source 1..40: mol_type = genomic DNA
ggttttccagcccggtgaaagaactcttgaaggtgcaaaa

SEQ ID NO: 7175 - DNA, 50 bp, Tepidanaerobacter syntrophicus
  source 1..50: mol_type = genomic DNA
atcaacaaactgatatcaaaaggcaggcctccaaaacaccttttgataac

SEQ ID NO: 7176 - protein, 563 aa, Caldanaerobacter subterraneus
MSNKLRVVAYARVSTNTKDQENSFENQKNYFEREIAKNPEWELVEIYADKGLTGTTINKRKEFLRMIYDAGIDIKEHKGEQVYIVSDRKPKFDLILVKNTSRFARNINVVELLRKLRQKGVYVNFLDIGKSTQNEADFVFIEMLMVFDENESRDKSRKVRFGHMEGALKGVLMTNSRLYGYRRIDKFTLEVIPEEAEMIKFIFEKYAEGYGMRQLVKLLDEKGYKTREGKSFNVNTIKKILSNPIYMGHVVRNRYTTGTIFVDKSSPKLLPKEKWIIHKHRVPPIISEELFYKCEQIRKGRVSIYNSGKNTGTSLFAGKIFCGKCGSPYHHNVDKGRPFYNCSLKKKKGTQACDNPNISEERLIELVEEQVKDMLLLLNRKKTKIKELVSEIINVLQDKINSNDLEDKFDNEELDLLDLEELKNKENKEKLLLELENITLKEKKLLDLYLDGGISKEIFERKKKELENERSIIENKINQEEYVKRMYENRINLLKKYIEWLDENLPNNTENINIKDYLDFIQRIIVYNKDNIDVKFSWELNFDTKTLLEFANNIGYNSIELGL

SEQ ID NO: 7177 - DNA, 50 bp, Caldanaerobacter subterraneus
  source 1..50: mol_type = genomic DNA
tacttgactttgtgttattgtgtgctaaaattatattacaaagtcatatt

SEQ ID NO: 7178 - DNA, 40 bp, Caldanaerobacter subterraneus
  source 1..40: mol_type = genomic DNA
ggcgggttcccataacgtgctcatgataggaccgccaggt

SEQ ID NO: 7179 - DNA, 40 bp, Caldanaerobacter subterraneus
  source 1..40: mol_type = genomic DNA
ggcgggttcccataacgtgttcatgataggaccgccaggt

SEQ ID NO: 7180 - DNA, 50 bp, Caldanaerobacter subterraneus
  source 1..50: mol_type = genomic DNA
tacatgacattactttattctatattaaaattaaaccctagagtcttatt

SEQ ID NO: 7181 - protein, 471 aa, Listeria monocytogenes
MTVGIYIRVSTDEQVKEGFSISAQKEKLKAYCTAQGWEDFKFYVDEGKSAKDMHRPLLQEMITHIKKGLIDTVLVYKLDRLTRSVVDLHNLLSIFDEYNCAFKSATEVYDTSSAMGRFFITIISSVAQFERENTSERVSFGMAEKVRQGEYIPLAPFGYVKGPAGKLIVNEAEKEIFLHVVNMVSTGYSLRQTCEYLTNIGLKTRRSNDVWKVSTLIWMLKNPAVYGAIKWNNEIYENKHEPLINKATFNKLANILSIRSKSTTSRRGHVHHVFKGRLICPQCGKRLSGLRTKYVNKNKETFYNNNYRCATCKEHRRPAIQISEQKIEKAFIDYISNYTLNKADISSKKIDNNLRKQEMIQKEIVSLQRKREKFQKAWAADLMSDDEFSKLMIDTKMEIDVAEDRKKEYDVSLFVSPEDIAKRNNILRELKINWTSLSPTEKTDFISMFIEGIEYVKNDENKAVITKIRFL

SEQ ID NO: 7182 - DNA, 50 bp, Listeria monocytogenes
  source 1..50: mol_type = genomic DNA
tatagactttttgtcaaatatagtgatgtgtacttaacaaaaacactata

SEQ ID NO: 7183 - DNA, 40 bp, Listeria monocytogenes
  source 1..40: mol_type = genomic DNA
ttcaatgttactgtatcctgatgtgtacctatagcccatc

SEQ ID NO: 7184 - DNA, 40 bp, Listeria monocytogenes
  source 1..40: mol_type = genomic DNA
ttcaatgttactgtatcctaatgtgtacctatagcccatc

SEQ ID NO: 7185 - DNA, 50 bp, Listeria monocytogenes
  source 1..50: mol_type = genomic DNA
aatagactagattccaaatatggtaaagtctacttatatacaattatata

SEQ ID NO: 7186 - protein, 532 aa, Photobacterium phosphoreum
MRLSVMNKPKAIPYIRFSSLIQGNGSSVARQQDYINKWLKSNPDVLLSDLQFKDLGKSGYSGKHLKHDLGKLLFAVKSGHIKAGDFILIEAMDRLGRLPELEMISIIQQIISAGIKIVTLQDNTEYSTDSIAANSGLLYVLVGKVQGAHQYSKSLSDRLSKAWEDKKRKAIEGLGVKRKTPWWITWDDLTKRYDKVTDDDKYILNSVYNLYLGGFGERRILNRLREKYPEKFGTTDPASVKRWLKNKTAIGYWGDIPNVYPPAIPESLFYAAQAELKNRGAGKSQTPRSGRFLCGLVKCGCCGGNYAIRSNPHSKDAMLCSQSNKRKDKCNNKKTIPYQVLDWVRSQTYLDALARIATRSQKTDIDEKLIVIDGELDSLKSQRDNLLELGSKVGFNDSLTNKYTILEQQIDKLENSRVGIIQTVTEPKDIDSSMLPELENDLFEDVEAFGQLLQKVGYKIVVRGRKIECEGTVFEYLKWSRTNDTYHILVNGVDFVELSVIRDVTDEEIKDIQETETNSFLITEDNVCDFTL

SEQ ID NO: 7187 - DNA, 50 bp, Photobacterium phosphoreum
  source 1..50: mol_type = genomic DNA
gttatcatccagacagcgaacattacaatgcaatttgcatagtagctaat

SEQ ID NO: 7188 - DNA, 40 bp, Photobacterium phosphoreum
  source 1..40: mol_type = genomic DNA
gatttcaacagctaatatcacaatgcaatttggcgataag

SEQ ID NO: 7189 - DNA, 40 bp, Photobacterium phosphoreum
  source 1..40: mol_type = genomic DNA
gatttcaacagctaatatcataatgcaatttggcgataag

SEQ ID NO: 7190 - DNA, 50 bp, Photobacterium phosphoreum
  source 1..50: mol_type = genomic DNA
gttatcatcagggaactgaaaattataattcaatgtcctctgtacatagt

SEQ ID NO: 7191 - protein, 527 aa, Photobacterium phosphoreum
MNKPKAIPYIRFSSLIQGNGSSVARQQDYINKWLKSNPDVLLSDLQFKDLGKSGYSGKHLKHDLGKLLFAVKSGHIKAGDFILIEAMDRLGRLPELEMISIIQQIISAGIKIVTLQDNTEYSTDSIAANSGLLYVLVGKVQGAHQYSKSLSDRLSKAWEDKKRKAIEGLGVKRKTPWWITWDDLTKRYDKVTDDDKYILNSVYNLYLGGFGERRILNRLREKYPEKFGTTDPASVKRWLKNKTAIGYWGDIPNVYPPAIPESLFYAAQAELKNRGAGKSQTPRSGRFLCGLVKCGCCGGNYAIRSNPHSKDAMLCSQSNKRKDKCNNKKTIPYQVLDWVRSQTYLDALARIATRSQKTDIDEKLIVIDGELDSLKSQRDNLLELGSKVGFNDSLTNKYTILEQQIDKLENSRVGIIQTVTEPKDIDSSMLPELENDLFEDVEAFGQLLQKVGYKIVVRGRKIECEGTVFEYLKWSRTNDTYHILVNGVDFVELSVIRDVTDEEIKDIQETETNSFLITEDNVCDFTL

SEQ ID NO: 7192 - DNA, 50 bp, Photobacterium phosphoreum; identical to SEQ ID NO: 7187
  source 1..50: mol_type = genomic DNA

SEQ ID NO: 7193 - DNA, 40 bp, Photobacterium phosphoreum
  source 1..40: mol_type = genomic DNA
gatatctaccgcaaacattacaatgcaatttggcgctgag

SEQ ID NO: 7194 - DNA, 40 bp, Photobacterium phosphoreum
  source 1..40: mol_type = genomic DNA
gatatctaccgcaaacattataatgcaatttggcgctgag

SEQ ID NO: 7195 - DNA, 50 bp, Photobacterium phosphoreum; identical to SEQ ID NO: 7190
  source 1..50: mol_type = genomic DNA

SEQ ID NO: 7196 - protein, 622 aa, Vibrio europaeus
MKNSPKIYNYARVSSVKQLKGVGLETQQQRSVLERLSHEHNLPIHTENYVDEGLSAYHGKHKEGALGGVLEKIDDGTISSGSILVVFSLDRLSRETVNIAMEQLLSIINKGVRVYTHIDDTLFDVHSRNITADLILSLLTMQRANEESRTKSIRIKAAAKQALKKWKDTGEPQGALGRAPLWIDQPTNSLNKNADGVKAAVELFLQGESTLKVKQYLDNNYPYYRTRKTQIKSAKTWDFSVLNQLWEKHSLYGEKRLSIDGLEYKLPNYYPALIDKATFKALQAIRKKKKGRASSKGNIHFLKGLLRCGECGASMVFVDKGGRRKSYVCSLSLKGEQQHARELFNAEMLELVVLSLCKDQYALKQTELTSNDGQRENLELEIEQEQQELDDLLKSYRTKARASILTLIEEKEDRLEYLKEKLEDDDSGIPDEFFELLRNEMYTDEIRLDFTHPKRKEFANIVSSIISEVKLFRTTEDSLFSKTGKVNCIRVRIRFKDGLMRELKAKPFAYVKANDRELLRISFEYVYDVPVKEVSRNPDLIPDLINELHNVDLLNKLYPSKGKHQWAKKLLEPIEVDSQVLDLMPLPSKIDRKSVLEFLKDPYKSGIKRRDICFNSKSKLPV

SEQ ID NO: 7197 - DNA, 50 bp, Vibrio europaeus
  source 1..50: mol_type = genomic DNA
tgaagagttttgtttttttatactttgccaataaaaaacagtttccctca

SEQ ID NO: 7198 - DNA, 40 bp, Vibrio europaeus
  source 1..40: mol_type = genomic DNA
gaagagtacttactttggtttgataaaaagggctttccga

SEQ ID NO: 7199 - DNA, 40 bp, Vibrio europaeus
  source 1..40: mol_type = genomic DNA
gaagagtacttactttggtcagataaaaagggctttccga

SEQ ID NO: 7200 - DNA, 50 bp, Vibrio europaeus
  source 1..50: mol_type = genomic DNA
agatgagttctcagcttttattctcagttaataaactgaattttccatca

SEQ ID NO: 7201 - protein, 534 aa, Sphingomonas koreensis
MTTTRPRAAIYARFSTDLQNARSAEDQARVCREYASRHGFDVAEVHSDLAISGTTNQRPGLNALLARAEAGAFELVIAEALDRVARDQADIATIFKRLQFAGVELRTVSEGEIGELHVGVLGTMNALFVKELGNKIRRGAKGAVSRGRVPGGICYGYEPSPVLLQDGTIERGHRRIVEGEAAVIRRIFADYLAGISPKAIAHQLNREGVPAPRSAEWRANTITGARGRQNGILYNPAYDGRIVYGRVRMKKNPNTRKRVSRVTEAAERVEEAAPHLRIVDPATWAAVQAKQDANAAVPYNRQQRARHIFSGLVRCGVCGGAYTIVTKDRWGCIRRRESGTCINGRRIGTAELESRVLGGLQQKLLAPEVVSSVVKRYHDRRAQQRSKMAAGLRAAEARVDELKVEIGRLVDALAAGAALEEIKTAIDSRKESLAIAEAQLREHQALPAIVLHPQIVEAYRRKVKMLGAAIVKGEQARKFAPTVRSLIETIAITDDPTAPAKARVEVTGSLDAVLAIAGGDAPAARPRTMQVVAE

SEQ ID NO: 7202 - DNA, 50 bp, Sphingomonas koreensis
  source 1..50: mol_type = genomic DNA
ccggactatgcaagtggtagcggaggaccgctaccgcttggacagtccgc

SEQ ID NO: 7203 - DNA, 40 bp, Sphingomonas koreensis
  source 1..40: mol_type = genomic DNA
aatgaggattggtagcggaggagggacttgaacccccgac

SEQ ID NO: 7204 - DNA, 40 bp, Sphingomonas koreensis
  source 1..40: mol_type = genomic DNA
aatgaggattggtagcggaacagggacttgaacccccgac

SEQ ID NO: 7205 - DNA, 50 bp, Sphingomonas koreensis
  source 1..50: mol_type = genomic DNA
ccagactgtgagcctggcagcccaactccgccaccgacagcacaggccgc

SEQ ID NO: 7206 - protein, 505 aa, Paeniclostridium sordellii
MKTAIYLRKSRADEESEIKEGHETLSRHRSTLLKIAREQNLNIVEIKEELVSGESVQYRPKMLELLDEVKQGLYDAVLVMDIDRLGRGNMQDQGLILETFKKSKTKIVTPRKIYDLTNEFDEEYSEFEAFMARKELKLITRRMQRGRVKSVEEGKYIASQAPFGYKFTFDSNGKKSMIIDDEKAYIVKMIFDLYLNRGYGGRKIASHLNALGLKTSRGRTWYDKGVRDIIKNKTYAGYVVWNKVERGKTTSRTRPLDERVEAKGIHEAIISETDWNKAQMLLSRNEIPRNKKDTTIRNPLAGLVICSNCGYKMVAQQSTYQGGAIVRFIKCTECGANRGIRLDILEDEVINQLNSWVNSYDLSFDNESNAKENSILKNYKKLLKTLESESNTLNMQKENLHNLLEQGVYDIDTYLDRSKVLAEKIDFNKSSIKKIKNDIEKESNSTMNLDAIIPEVKKVLDSYYQIEVNKERNELLKTIIDHIDYYREPGKRLSKPIINIYPKLQ

SEQ ID NO: 7207 - DNA, 50 bp, Paeniclostridium sordellii
  source 1..50: mol_type = genomic DNA
aacagatatcatggaactgataatcaataatcagttctatgatatcagtt

SEQ ID NO: 7208 - DNA, 40 bp, Paeniclostridium sordellii
  source 1..40: mol_type = genomic DNA
aaatgtccgtacagatgttcaattcaacgttttatcaggt

SEQ ID NO: 7209 - DNA, 40 bp, Paeniclostridium sordellii
  source 1..40: mol_type = genomic DNA
aaatgtccgtacagatgttttattcaacgttttatcaggt

SEQ ID NO: 7210 - DNA, 50 bp, Paeniclostridium sordellii
  source 1..50: mol_type = genomic DNA
aagaaatatatcaaatcaaataatttataatcagtgaaaaaatttcattt

SEQ ID NO: 7211 - protein, 446 aa, Paraclostridium bifermentans
MKTAIYLRKSRADEESEIKEGHETLSRHRSTLLKIAREQNLNIVEIKEELVSGESVQYRPKMLELLDEVKQGLYDAVLVMDIDRLGRGNMQDQGLILETFKKSKTKIVTPRKIYDLTNEFDEEYSEFEAFMARKELKLITRRMQRGRVKSVEEGKYIASQAPFGYKFTFDSNGKKSMIIDDEKAYIVKMIFDLYLNRGYGGRKIASHLNALGLKTSRGRTWYDKGVRDIIKNKTYAGYVVWNKVERGKTTSRTRPLDERVEAKGIHEAIISETDWNKAQMLLSRNEIPRNKKDTTIRNPLAGLVICSNCGYKMVAQQSTYQGGAIVRFIKCTECGANRGIRLDILEDEVINQLNSWVNSYDLSFDNESNAKENSILKNYKKLLKTLESESNTLNMQKENLHNLLEQGVYDIDTYLDRSKVLAEKIDFNKSSIKKLKMTLKKNLILL

SEQ ID NO: 7212 - DNA, 50 bp, Paraclostridium bifermentans; identical to SEQ ID NO: 7207
  source 1..50: mol_type = genomic DNA

SEQ ID NO: 7213 - DNA, 40 bp, Paraclostridium bifermentans; identical to SEQ ID NO: 7208
  source 1..40: mol_type = genomic DNA

SEQ ID NO: 7214 - DNA, 40 bp, Paraclostridium bifermentans; identical to SEQ ID NO: 7209
  source 1..40: mol_type = genomic DNA

SEQ ID NO: 7215 - DNA, 50 bp, Paraclostridium bifermentans; identical to SEQ ID NO: 7210
  source 1..50: mol_type = genomic DNA

SEQ ID NO: 7216 - protein, 505 aa, Paraclostridium bifermentans
MKTAIYLRKSRADEESEIKEGHETLSRHRSTLLKIAREQNLNIVEIKEELVSGESVQYRPKMLELLDEVKQGLYDAVLVMDIDRLGRGNMQDQGLILETFKKSKTKIVTPRKIYDLTNEFDEEYSEFEAFMARKELKLITRRMQRGRVKSVEEGKYIASQAPFGYKFTFDSNGKKSMIIDDEKAYIVKMIFDLYLNRGYGGRKIASHLNALGLKTSRGRTWYDKGVRDIIKNKTYAGYVVWNKVERGKTTSRTRPLDERVEAKGIHEAIISETDWNKAQMLLSRNEIPRNKKDTTIRNPLAGLVICSNCGYKMVAQQSTYQGGAIVRFIKCTECGANRGIRLDILEDEIINQLNSWVNSYDLSFDNESNAKENSVLKNYKKLLKTLESESNTLNMQKENLHNLLEQGVYDIDTYLDRSKVLAEKIDFNKSSIKKIKNDIEKESNSTMNLDAIIPEVKKVLDSYYQIEVNKERNELLKTIIDHIDYYREPGKRLSKPIIKIYPKLQ

SEQ ID NO: 7217 - DNA, 50 bp, Paraclostridium bifermentans
  source 1..50: mol_type = genomic DNA
aacagatatcatggaactgataatcaataatcagttctatgatgtcagtt

SEQ ID NO: 7218 - DNA, 40 bp, Paraclostridium bifermentans; identical to SEQ ID NO: 7208
  source 1..40: mol_type = genomic DNA

SEQ ID NO: 7219 - DNA, 40 bp, Paraclostridium bifermentans; identical to SEQ ID NO: 7209
  source 1..40: mol_type = genomic DNA

SEQ ID NO: 7220 - DNA, 50 bp, Paraclostridium bifermentans; identical to SEQ ID NO: 7210
  source 1..50: mol_type = genomic DNA

SEQ ID NO: 7221 - protein, 545 aa, Clostridium botulinum
MIAAIYSRKSKFTEKGESVENQIEMCKDYLKRNFTSIEDIKIYEDEGFSGKDTNRPKFKKMMGDAKNKKFSILICYRLDRISRNVADFSNTIEELQKYSIDFISLKEQFDTSSPMGRAMMNIAAVFAQLERETIAERIKDNMLELSKTGRWLGGTAPLGYKSEIIEYWNEDGKNKKMYKLATVENEIDIVKLIYKLYLKKRGFSSVATYLCKNKYKGKNGGEFSRETVRQIVINPVYCTADNKIFKWFKNKGATVCGTPDGIHGLMVYNKREGGKKEKPISEWVIAIGKHDGIISSDIWLKCQNIIEENKSKISPRSGTGEKFLLSGMIICGECGSGMSSWSHFNKKTNFMERYYRCNLRNRASNRCSNKMLNAYKAEEYISDYLKELDIDTLKEKYLKNKKSMATYDSSKQELAKLKNVLENNNKLIRGLIRKLALLDDDIEIVTILKNEIENIKKENNEINNNINKIKSSLEESDRENKFLKELEESLLNFKKFYDFVDTSEKRVLIKSLISTLVWYSKDEILELNPIGIKPNISQGVIKRRT

SEQ ID NO: 7222 - DNA, 50 bp, Clostridium botulinum
  source 1..50: mol_type = genomic DNA
acttgtgtttttgaaatggttgatgataaaaccatttcaaaaacacaagt

SEQ ID NO: 7223 - DNA, 40 bp, Clostridium botulinum
  source 1..40: mol_type = genomic DNA
ttccactggacaaggtgctgataaaactatgcagcaagtt

SEQ ID NO: 7224 - DNA, 40 bp, Clostridium botulinum
  source 1..40: mol_type = genomic DNA
ttccactggacaaggtgctgctaaaactatgcagcaagtt

SEQ ID NO: 7225 - DNA, 50 bp, Clostridium botulinum
  source 1..50: mol_type = genomic DNA
acatttgttcatttacttgttgatgctacaacccttaattaaacaaaagc

SEQ ID NO: 7226 - protein, 565 aa, Eubacterium rectale; identical to SEQ ID NO: 3926

SEQ ID NO: 7227 - DNA, 50 bp, Eubacterium rectale
  source 1..50: mol_type = genomic DNA
cagacggagaggagatatagaatgggacaggaaatagcaggcgacagtgc

SEQ ID NO: 7228 - DNA, 40 bp, Eubacterium rectale
  source 1..40: mol_type = genomic DNA
gttgttgatagcatatctggagcagatagcaatatatttg

SEQ ID NO: 7229 - DNA, 40 bp, Eubacterium rectale
  source 1..40: mol_type = genomic DNA
gttgttgatagcatatctgttgcagatagcaatatatttg

SEQ ID NO: 7230 - DNA, 50 bp, Eubacterium rectale
  source 1..50: mol_type = genomic DNA
cagacagatccagaatatagaatgttatagaagataactggcctcattgc

SEQ ID NO: 7231 - protein, 635 aa, Salmonella enterica
MRLYRYRGVVIMIKTFIYSRVSSQEQLSGGGLDRQETDVREYVTRNGLDQYEIVAMVDRGISGYDGSNMRDGELGKWYKDAITGMYWGSHLVLEAFDRFSRRDPMLAMEDFTVLVNKGGIKVHIVKFNTFINGDNLPMLSMMMNLAHSESKQKSDRISKGWQRRRRMALDNGTAITARTPYWIDVRDNEYRLNNSSIAVVEAFAMYKQGLSCGLIAKKLNELKHYFPYMWTKTAVQHIVDGLNTSGIIDAPRAIKTIKAFYKSGFSVEDIAKKMNAEFQFMKEWNAPAVHKLLQNKSVTGLVEIQKRKLIQEFDSDGKPLELRTKSEGEKYFESIYPQIISIDDFELIQKLLESNRKVDTKTGKGQTTGGTVTQNEDGELVKQFILSSLCRCYKCGGAMFNNIVRSKRKNGKVDTYSYLRCLNERDAHCDVKALNYPVIERAIIEHVKGLNFDTMFKGTNNSELELLKTREVELLRDIATYEDAIAARKAAGKNTSPVLVTSLVDAQDDLEALQKKIRAISGVTVNAEELTSLNESVFDVAEYELRNMVELELQKIIKRITFNCTEKNIYFITIQYNTGTVLQHGLKVDKKKGVIETYELHEGNKGYVSNGEVITPALIEAAESKNIGIFEGKVM

SEQ ID NO: 7232 - DNA, 50 bp, Salmonella enterica
  source 1..50: mol_type = genomic DNA
tttttgtataaagtgcaacctatacaaatgagttgatcaaaatacaaaaa

SEQ ID NO: 7233 - DNA, 40 bp, Salmonella enterica; identical to SEQ ID NO: 1123
  source 1..40: mol_type = genomic DNA

SEQ ID NO: 7234 - DNA, 40 bp, Salmonella enterica; identical to SEQ ID NO: 1124
  source 1..40: mol_type = genomic DNA

SEQ ID NO: 7235 - DNA, 50 bp, Salmonella enterica; identical to SEQ ID NO: 1125
  source 1..50: mol_type = genomic DNA

SEQ ID NO: 7236 - protein, 635 aa, Salmonella enterica; identical to SEQ ID NO: 1121

SEQ ID NO: 7237 - DNA, 50 bp, Salmonella enterica; identical to SEQ ID NO: 7232
  source 1..50: mol_type = genomic DNA

SEQ ID NO: 7238 - DNA, 40 bp, Salmonella enterica; identical to SEQ ID NO: 1123
  source 1..40: mol_type = genomic DNA

SEQ ID NO: 7239 - DNA, 40 bp, Salmonella enterica; identical to SEQ ID NO: 1124
  source 1..40: mol_type = genomic DNA

SEQ ID NO: 7240 - DNA, 50 bp, Salmonella enterica; identical to SEQ ID NO: 1125
  source 1..50: mol_type = genomic DNA

SEQ ID NO: 7241 - protein, 635 aa, Salmonella enterica; identical to SEQ ID NO: 7081

SEQ ID NO: 7242 - DNA, 50 bp, Salmonella enterica; identical to SEQ ID NO: 7232
  source 1..50: mol_type = genomic DNA

SEQ ID NO: 7243 - DNA, 40 bp, Salmonella enterica; identical to SEQ ID NO: 1123
  source 1..40: mol_type = genomic DNA

SEQ ID NO: 7244 - DNA, 40 bp, Salmonella enterica; identical to SEQ ID NO: 1124
  source 1..40: mol_type = genomic DNA

SEQ ID NO: 7245 - DNA, 50 bp, Salmonella enterica; identical to SEQ ID NO: 1125
  source 1..50: mol_type = genomic DNA

SEQ ID NO: 7246 - protein, 635 aa, Salmonella enterica; identical to SEQ ID NO: 1121

SEQ ID NO: 7247 - DNA, 50 bp, Salmonella enterica; identical to SEQ ID NO: 7232
  source 1..50: mol_type = genomic DNA

SEQ ID NO: 7248 - DNA, 40 bp, Salmonella enterica
  source 1..40: mol_type = genomic DNA
ttttcgcttgataatcatacaaataggtgccgttgcagca

SEQ ID NO: 7249 - DNA, 40 bp, Salmonella enterica
  source 1..40: mol_type = genomic DNA
ttttcgcttgataatcatattaataggtgccgttgcagca

SEQ ID NO: 7250 - DNA, 50 bp, Salmonella enterica; identical to SEQ ID NO: 1125
  source 1..50: mol_type = genomic DNA

SEQ ID NO: 7251 - protein, 617 aa, Salmonella enterica
MRLYRYRGVVIMIKTFIYSRVSSQEQLSGGGLDRQETDVREYVTRNGLDQYEIVAMVDRGISGYDGSNMRDGELGKWYKDAITGMYWGSHLVLEAIDRFSRRDPMLAMEDFTVLVNKGGIKVHIVKFNTFINGDNLPMLSMMMNLAHSESKQKSDRISKGWQRRRRMALDNGTAITARTPYWIDVRDNEYRLNNSSIAVVEAFAMYKQGLSCGLIAKKLNELKHYFPYMWTKTAVQHIVDGLNTSGIIDAPRAIKTIKAFYKSGFSVEDIAKKMNAEFQFMKEWNAPAVHKLLQNKSVTGLVEIQKRKLIQEFDSDGKPLELRTKSEGEKYFESIYPQIISIDDFELIQKLLESNRKVDTKTGKGQTTGGTVTQNEDGELVKQFILSSLCRCYKCGGAMFNNIVRSKRKNGKVDTYSYLRCLNERDAHCDVKALNYPVIERAIIEHVKGLNFDTMFKGTNNSELELLKTREVELLRDIATYEDAIAARKAAGKNTSPVLVTSLVDAQDDLEALQKKIRAISGVTVNAEELTSLNESVFDVAEYELRNMVELELQKIIKRITFNCTEKNIYFITIQYNTGTVLQHGLKVDKKKGVIETYELHEGNKGYVSNGEVITPA

SEQ ID NO: 7252 - DNA, 50 bp, Salmonella enterica; identical to SEQ ID NO: 7232
  source 1..50: mol_type = genomic DNA

SEQ ID NO: 7253 - DNA, 40 bp, Salmonella enterica; identical to SEQ ID NO: 1123
  source 1..40: mol_type = genomic DNA

SEQ ID NO: 7254 - DNA, 40 bp, Salmonella enterica; identical to SEQ ID NO: 1124
  source 1..40: mol_type = genomic DNA

SEQ ID NO: 7255 - DNA, 50 bp, Salmonella enterica; identical to SEQ ID NO: 1125
  source 1..50: mol_type = genomic DNA

SEQ ID NO: 7256 - protein, 635 aa, Salmonella enterica
MRLYRYRGVVIMIKTFIYSRVSSQEQLSGGGLDRQETDVREYVTRNGLDQYEIVAMVDRGISGYDGSNMRDGELGKWYKDAITGMYWGSHLVLEAIDRFSRRDPMLAMEDFTVLVNKGGIKVHIVKFNTFINGDNLPMLSMMMNLAHSESKQKSDRISKGWQRRRRMALDNGTAITARTPYWIDVRDNEYRLNNSSIAVVEAFAMYKQGLSCGLIAKKLNELKHYFPYMWTKTAVQHIVDGLNTSGIIDAPRAIKTIKAFYKSGFSVEDIAKKMNAEFQFMKEWNAPAVHKLLQNKSVTGLVEIQKRKLIQEFDSDGKPLELRTKSEGEKYFESIYPQIISIDDFELIQKLLESNRKVDTKTGKGQTTGGTVTQNEDGELVKQFILSSLCRCYKCGGAMFNNIVRSKRKNGKVDTYSYLRCLNERDAHCDVKALNYPVIERAIIEHVKGLNFDTMFKGTNNSELELLKTREVELLRDIATYENAIAARKAAGKNTSPVLVTSLVDAQDDLEALQKKIRAISGVTVNAEELTSLNESVFDVAEYELRNMVELELQKIIKRITFNCTEKNIYFITIQYNTGTVLQHGLKVDKKKGVIETYELHEGNKGYVSNGEVITPALIEAAESKNIGIFEGKVM

SEQ ID NO: 7257 - DNA, 50 bp, Salmonella enterica; identical to SEQ ID NO: 7232
  source 1..50: mol_type = genomic DNA

SEQ ID NO: 7258 - DNA, 40 bp, Salmonella enterica; identical to SEQ ID NO: 1123
  source 1..40: mol_type = genomic DNA

SEQ ID NO: 7259 - DNA, 40 bp, Salmonella enterica; identical to SEQ ID NO: 1124
  source 1..40: mol_type = genomic DNA

SEQ ID NO: 7260 - DNA, 50 bp, Salmonella enterica; identical to SEQ ID NO: 1125
  source 1..50: mol_type = genomic DNA

SEQ ID NO: 7261 - protein, 635 aa, Salmonella enterica
MRLYRYRGVVIMIKTFIYSRVSSQEQLSGGGLDRQETDVREYVTRNGLDQYEIVAMVDRGISGYDGSNMRDGELGKWYKDAITGMYWGSHLVLEAIDRFSRRDPMLAMEDFTVLVNKGGIKVHIVKFNTFINGDNLPMLSMMMNLAHSESKQKSDRISKGWQRRRRMALDNGTAITARTPYWIDVRDNEYRLNNSSIAVVEAFAMYKQGLSCGLIAKKLNELKHYFPYMWTKTAVQHIVDGLNTSGIIDAPRAIKTIKAFYKSGFSVEDIAKKMNAEFQFMKEWNAPAVHKLLQNKSVTGLVEIQKRKLIQEFDSDGKPLELRTKSEGEKYFESIYPQIISIDDFELIQKLLESNRKVDTKTGKGQTTGGTVTQNEDGELVKQFILSSLCRCYKCGGAMFNNIVRSKRKNGKVDTYSYLRCLNERDAHCDVKALNYPVIERAIIEHVKGLNFDTMFKGTNNSELELLKTREVELLRDIATYEDAIAARKAAGKNTSPVLVTSLVDAQDDLEALQKKIRAISGVNVNAEELTSLNESVFDVAEYELRNMVELELQKIIKRITFNCTEKNIYFITIQYNTGTVLQHGLKVDKKKGVIETYELHEGNKGYVSNGEVITPALIEAAESKNIGIFEGKVM

SEQ ID NO: 7262 - DNA, 50 bp, Salmonella enterica; identical to SEQ ID NO: 7232
  source 1..50: mol_type = genomic DNA

SEQ ID NO: 7263 - DNA, 40 bp, Salmonella enterica; identical to SEQ ID NO: 1123
  source 1..40: mol_type = genomic DNA

SEQ ID NO: 7264 - DNA, 40 bp, Salmonella enterica; identical to SEQ ID NO: 1124
  source 1..40: mol_type = genomic DNA

SEQ ID NO: 7265 - DNA, 50 bp, Salmonella enterica; identical to SEQ ID NO: 1125
  source 1..50: mol_type = genomic DNA

SEQ ID NO: 7266 - protein, 635 aa, Salmonella enterica; identical to SEQ ID NO: 1121

SEQ ID NO: 7267 - DNA, 50 bp, Salmonella enterica; identical to SEQ ID NO: 7232
  source 1..50: mol_type = genomic DNA

SEQ ID NO: 7268 - DNA, 40 bp, Salmonella enterica
  source 1..40: mol_type = genomic DNA
ttttagcttgataatcgtacaaataggtgccgttgcagca

SEQ ID NO: 7269 - DNA, 40 bp, Salmonella enterica
  source 1..40: mol_type = genomic DNA
ttttagcttgataatcgtattaataggtgccgttgcagca

SEQ ID NO: 7270 - DNA, 50 bp, Salmonella enterica; identical to SEQ ID NO: 1125
  source 1..50: mol_type = genomic DNA

SEQ ID NO: 7271 - protein, 635 aa, Salmonella enterica
MRLYRYRGVVIMIKTFIYSRVSSQEQLSGGGLDRQETDVREYVTRNGLDQYEIVAMVDRGISGYDGSNMRDGELGKWYKDAITGMYWGSHLVLEAIDRFSRRDPMLAMEDFTVLVNKGGIKVHIVKFNTFINGDNLPMLSMMMNLAHSESKQKSDRISKGWQRRRRMALDNGTAITARTPYWIDVRDNEYRLNNSSIAVVEAFAMYKQGLSCGLIAKKLNELKHYFPYMWTKTAVQHIVDGLNTSGIIDAPRAIKTIKAFYKSGFSVEDIAKKMNAEFQFMKEWNAPAVHKLLQNKSVTGLVEIQKRKLIQEFDSDGKPLELRTKSEGEKYFESIYPQIISIDDFELIQKLLESNRKVDTKTGKGQTTGGTVTQNEDGELVKQFILSSLCRCYKCGGAMFNNIVRSKRKNGKVDTYSYLRCLNERDAHCDVKALNYPVIERAIIEHVKGLNFDTMFKGTNNSELELLKTREVELLRDIATYEDAIAARKAAGKNTSPVLVTSLVDAQDDLEALQKKIRAISGVTVNAEELTSLNESVFDVAEYELRNMVELELQKIIKRITFNCTEKNIYFITIQYNTGTVLQHGLKVDKKKGVIETYELHEGNKGYVSNGEVITPALIEAAESNNIGIFEGKVM

SEQ ID NO: 7272 - DNA, 50 bp, Salmonella enterica; identical to SEQ ID NO: 7232
  source 1..50: mol_type = genomic DNA

SEQ ID NO: 7273 - DNA, 40 bp, Salmonella enterica; identical to SEQ ID NO: 1123
  source 1..40: mol_type = genomic DNA

SEQ ID NO: 7274 - DNA, 40 bp, Salmonella enterica; identical to SEQ ID NO: 1124
  source 1..40: mol_type = genomic DNA

SEQ ID NO: 7275 - DNA, 50 bp, Salmonella enterica; identical to SEQ ID NO: 1125
  source 1..50: mol_type = genomic DNA

SEQ ID NO: 7276 - protein, 635 aa, Salmonella enterica
MRLYRYRGVVIMIKTFIYSRVSSQEQLSGGGLDRQETDVREYVTRNGLDQYEIVAMVDRGISGYDGSNMRDGELGKWYKDAITGMYWGSHLVLEAIDRFSRRDPMLAMEDFTVLVNKGGIKVHIVKFNTFINGDNLPMLSMMMNLAHSESKQKSDRISKGWQRRRRMALDNGTAITARTPYWIDVRDNEYRLNNSSIAVVEAFAMYKQGLSCGLIAKKLNELKHYFPYMWTKTAVQHIVDGLNTSGIIDAPRAIKTIKAFYKSGFSVEDIAKKMNAEFQFMKEWNAPAVHKLLQNKSVTGLVEIQKRKLIQEFDSDGKPLELRTKSEGEKYFESIYPQIISIDDFELIQKLLESNRKVDTKTGKGQTTGGTVTQNEDGELVKQFILSSLCRCYKCGGAMFNNIVRSKRKNGKVDTYSYLRCLNERDAHCDVKALNYPVIERAIIEHVKGLNFDTMFKGTDNSELELLKTREVELLRDIATYEDAIAARKAAGKNTSPVLVTSLVDAQDDLEALQKKIRAISGVTVNAEELTSLNESVFDVAEYELRNMVELELQKIIKRITFNCTEKNIYFITIQYNTGTVLQHGLKVDKKKGVIETYELHEGNKGYVSNGEVITPALIEAAESKNIGIFEGKVM

SEQ ID NO: 7277 - DNA, 50 bp, Salmonella enterica; identical to SEQ ID NO: 7232
  source 1..50: mol_type = genomic DNA

SEQ ID NO: 7278 - DNA, 40 bp, Salmonella enterica; identical to SEQ ID NO: 1123
  source 1..40: mol_type = genomic DNA

SEQ ID NO: 7279 - DNA, 40 bp, Salmonella enterica; identical to SEQ ID NO: 1124
  source 1..40: mol_type = genomic DNA

SEQ ID NO: 7280 - DNA, 50 bp, Salmonella enterica; identical to SEQ ID NO: 1125
  source 1..50: mol_type = genomic DNA

SEQ ID NO: 7281 - protein, 635 aa, Salmonella enterica
MRLYRYRGVVIMIKTFIYSRVSSQEQLSGGGLDRQETDVREYVTRNGLDQYEIVAMVDRGISGYDGSNMRDGELGKWYKDAITGMYWGSHLVLEAIDRFSRRDPMLAMEDFTVLVNKGGIKVHIVKFNTFINGDNLPMLSMMMNLAHSESKQKSDRISKGWQRRRRMALDNGTAITARTPYWIDVRDNEYRLNNSSIAVVEAFAMYKQGLSCGLIAKKLNELKHYFPYMWTKTAVQHIVDGLNTSGIIDAPRAIKTIKAFYKSGFSVEDIAKKMNAEFQFMKEWNAPAVHKLLQNKSVTGLVEIQKRKLIQEFDSDGKPLELRTKSEGEKYFESIYPQIISIDDFELIQKLLESNRKVDTKTAKGQTTGGTVTQNEDGELVKQFILSSLCRCYKCGGAMFNNIVRSKRKNGKVDTYSYLRCLNERDAHCDVKALNYPVIERAIIEHVKGLNFDTMFKGTNNSELELLKTREVELLRDIATYEDAIAARKAAGKNTSPVLVTSLVDAQDDLEALQKKIRAISGVTVNAEELTSLNESVFDVAEYELRNMVELELQKIIKRITFNCTEKNIYFITIQYNTGTVLQHGLKVDKKKGVIETYELHEGNKGYVSNGEVITPALIEAAESKNIGIFEGKVM

SEQ ID NO: 7282 - DNA, 50 bp, Salmonella enterica; identical to SEQ ID NO: 7232
  source 1..50: mol_type = genomic DNA

SEQ ID NO: 7283 - DNA, 40 bp, Salmonella enterica; identical to SEQ ID NO: 1123
  source 1..40: mol_type = genomic DNA

SEQ ID NO: 7284 - DNA, 40 bp, Salmonella enterica; identical to SEQ ID NO: 1124
  source 1..40: mol_type = genomic DNA

SEQ ID NO: 7285 - DNA, 50 bp, Salmonella enterica; identical to SEQ ID NO: 1125
  source 1..50: mol_type = genomic DNA

SEQ ID NO: 7286 - protein, 635 aa, Salmonella enterica; identical to SEQ ID NO: 1121

SEQ ID NO: 7287 - DNA, 50 bp, Salmonella enterica; identical to SEQ ID NO: 7232
  source 1..50: mol_type = genomic DNA

SEQ ID NO: 7288 - DNA, 40 bp, Salmonella enterica
  source 1..40: mol_type = genomic DNA
ttttcgcttgataatcatacaaataggtgccattgcagca

SEQ ID NO: 7289 - DNA, 40 bp, Salmonella enterica
  source 1..40: mol_type = genomic DNA
ttttcgcttgataatcatattaataggtgccattgcagca

SEQ ID NO: 7290 - DNA, 50 bp, Salmonella enterica; identical to SEQ ID NO: 1125
  source 1..50: mol_type = genomic DNA

SEQ ID NO: 7291 - protein, 635 aa, Salmonella enterica
MRLYRYRGVVIMIKTFIYSRVSSQEQLSGGGLDRQETDVREYVTRNGLDQYEIVAMVDRGISGYDGSNMRDGELGKWYKDAITGMYWGSHLVLEAIDRFSRRDPMLAMEDFTVLVNKGGIKVHIVKFNTFINGDNLPMLSMMMNLAHSESKQKSDRISKGWQRRRRMALDNGTAITARTPYWIDVRDNEYRLNNSSIAVVEAFAMYKQGLSCGLIAKKLNELKHYFPYMWTKTAVQHIVDGLNTSGIIDAPRAIKTIKAFYKSGFSVEDIAKKMNAEFQFMKEWNAPAVHKLLQNKSVTGLVEIQKRKLIQEFDSDGKPLELRTKSEGEKYFESIYPQIISIDDFELIQKLLESNRKVDTKTGKGQTTGGTVTQNEDGELVKQFILSSLCRCYKCGGAMFNNIVRSKRKNGKVDTYSYLRCLNERNAHCDVKALNYPVIERAIIEHVKGLNFDTMFKGTNNSELELLKTREVELLRDIATYEDAIAARKAAGKNTSPVLVTSLVDAQDDLEALQKKIRAISGVTVNAEELTSLNESVFDVAEYELRNMVELELQKIIKRITFNCTEKNIYFITIQYNTGTVLQHGLKVDKKKGVIETYELHEGNKGYVSNGEVITPALIEAAESKNIGIFEGKVM

SEQ ID NO: 7292 - DNA, 50 bp, Salmonella enterica; identical to SEQ ID NO: 7232
  source 1..50: mol_type = genomic DNA

SEQ ID NO: 7293 - DNA, 40 bp, Salmonella enterica; identical to SEQ ID NO: 1123
  source 1..40: mol_type = genomic DNA

SEQ ID NO: 7294 - DNA, 40 bp, Salmonella enterica; identical to SEQ ID NO: 1124
  source 1..40: mol_type = genomic DNA

SEQ ID NO: 7295 - DNA, 50 bp, Salmonella enterica; identical to SEQ ID NO: 1125
  source 1..50: mol_type = genomic DNA

SEQ ID NO: 7296 - protein, 635 aa, Salmonella enterica
MRLYRYRGVVIMIKIFIYSRVSSQEQLSGGGLDRQETDVREYVTRNGLDQYEIVAMVDRGISGYDGSNMRDGELGKWYKDAITGMYWGSHLVLEAIDRFSRRDPMLAMEDFTVLVNKGGIKVHIVKFNTFINGDNLPMLSMMMNLAHSESKQKSDRISKGWQRRRRMALDNGTAITARTPYWIDVRDNEYRLNNSSIAVVEAFAMYKQGLSCGLIAKKLNELKHYFPYMWTKTAVQHIVDGLNTSGIIDAPRAIKTIKAFYKSGFSVEDIAKKMNAEFQFMKEWNAPAVHKLLQNKSVTGLVEIQKRKLIQEFDSDGKPLELRTKSEGEKYFESIYPQIISIDDFELIQKLLESNRKVDTKTGKGQTTGGTVTQNEDGELVKQFILSSLCRCYKCGGAMFNNIVRSKRKNGKVDTYSYLRCLNERDAHCDVKALNYPVIERAIIEHVKGLNFDTMFKGTNNSELELLKTREVELLRDIATYEDAIAARKAAGKNTSPVLVTSLVDAQDDLEALQKKIRAISGVTVNAEELTSLNESVFDVAEYELRNMVELELQKIIKRITFNCTEKNIYFITIQYNTGTVLQHGLKVDKKKGVIETYELHEGNKGYVSNGEVITPALIEAAESKNIGIFEGKVM

SEQ ID NO: 7297 - DNA, 50 bp, Salmonella enterica; identical to SEQ ID NO: 7232
  source 1..50: mol_type = genomic DNA

SEQ ID NO: 7298 - DNA, 40 bp, Salmonella enterica; identical to SEQ ID NO: 1123
  source 1..40: mol_type = genomic DNA

SEQ ID NO: 7299 - DNA, 40 bp, Salmonella enterica; identical to SEQ ID NO: 1124
  source 1..40: mol_type = genomic DNA

SEQ ID NO: 7300 - DNA, 50 bp, Salmonella enterica; identical to SEQ ID NO: 1125
  source 1..50: mol_type = genomic DNA

SEQ ID NO: 7301 - protein, 635 aa, Salmonella enterica
MRLYRYRGVVIMIKTFIYSRVSSQEQLSGGGLDRQETDVREYVTRNGLDQYEIVAMVDRGISGYDGSNMRDGELGKWYKDAITGMYWGSHLVLEAIDRFSRHDPMLAMEDFTVLVNKGGIKVHIVKFNTFINGDNLPMLSMMMNLAHSESKQKSDRISKGWQRRRRMALDNGTAITARTPYWIDVRDNEYRLNNSSIAVVEAFAMYKQGLSCGLIAKKLNELKHYFPYMWTKTAVQHIVDGLNTSGIIDAPRAIKTIKAFYKSGFSVEDIAKKMNAEFQFMKEWNAPAVHKLLQNKSVTGLVEIQKRKLIQEFDSDGKPLELRTKSEGEKYFESIYPQIISIDDFELIQKLLESNRKVDTKTAKGQTTGGTVTQNEDGELVKQFILSSLCRCYKCGGAMFNNIVRSKRKNGKVDTYSYLRCLNERDAHCDVKALNYPVIERAIIEHVKGLNFDTMFKGTNNSELELLKTREVELLRDIATYEDAIAARKAAGKNTSPVLVTSLVDAQDDLEALQKKIRAISGVTVNAEELTSLNESVFDVAEYELRNMVELELQKIIKRITFNCTEKNIYFITIQYNTGTVLQHGLKVDKKKGVIETYELHEGNKGYVSNGEVITPALIEAAESKNIGIFEGKVM

SEQ ID NO: 7302 - DNA, 50 bp, Salmonella enterica; identical to SEQ ID NO: 7232
  source 1..50: mol_type = genomic DNA

SEQ ID NO: 7303 - DNA, 40 bp, Salmonella enterica; identical to SEQ ID NO: 1123
  source 1..40: mol_type = genomic DNA

SEQ ID NO: 7304 - DNA, 40 bp, Salmonella enterica; identical to SEQ ID NO: 1124
  source 1..40: mol_type = genomic DNA

SEQ ID NO: 7305 - DNA, 50 bp, Salmonella enterica; identical to SEQ ID NO: 1125
  source 1..50: mol_type = genomic DNA

SEQ ID NO: 7306 - protein, 624 aa, Salmonella enterica
MIKTFIYSRVSSQEQLSGGGLDRQETDVREYVTRNGLDQYEIVAMVDRGISGYDGSNMRDGELGKWYKDAITGMYWGSHLVLEAIDRFSRRDPMLAMEDFTVLVNKGGIKVHIVKFNTFINGDNLPMLSMMMNLAHSESKQKSDRISKGWQRRRRMALDNGTAITARTPYWIDVRDNEYRLNNSSIAVVEAFAMYKQGLSCGLIAKKLNELKHYFPYMWTKTAVQHIVDGLNTSGIIDAPRAIKTIKAFYKSGFSVEDIAKKMNAEFQFMKEWNAPAVHKLLQNKSVTGLVEIQKRKLIQEFDSDGKPLELRTKSEGEKYFESIYPQIISIDDFELIQKLLESNRKVDTKTGKGQTTGGTVTQNEDGELVKQFILSSLCRCYKCGGAMFNNIVRSKRKNGKVDTYSYLRCLNERDAHCDVKALNYPVIERAIIEHVKGLNFDTMFKGTNNSELELLKTREVELLRDIATYEDAIAARKAAGKNTSPVLVTSLVDAQDDLEALQKKIRAISGVTVNAEELTSLNESVFDVAEYELRNMVELELQKIIKRITFNCTEKNIYFITIQYNTGTVLQHGLKVDKKKGVIETYELHEGNKGYVSNGEVITPALIEAAESKNIGIFEGKVM

SEQ ID NO: 7307 - DNA, 50 bp, Salmonella enterica; identical to SEQ ID NO: 7232
  source 1..50: mol_type = genomic DNA

SEQ ID NO: 7308 - DNA, 40 bp, Salmonella enterica; identical to SEQ ID NO: 1123
  source 1..40: mol_type = genomic DNA

SEQ ID NO: 7309 - DNA, 40 bp, Salmonella enterica; identical to SEQ ID NO: 1124
  source 1..40: mol_type = genomic DNA

SEQ ID NO: 7310 - DNA, 50 bp, Salmonella enterica; identical to SEQ ID NO: 1125
  source 1..50: mol_type = genomic DNA

SEQ ID NO: 7311 - protein, 635 aa, Salmonella enterica
MRLYRYRGVVIMIKTFIYSRVSSQEQLSGGGLDRQETDVREYVTRNGLDQYEIVAMVDRGISGYDGSNMRDGELGKWYKDAITGMYWGSHLVLEAIDRFSRRDPMLAMEDFTVLVNKGGIKVHIVKFNTFINGDNLPMLSMMMNLAHSESKQKSDRISKGWQRRRRMALDNGTAITARTPYWIDVRDNEYRLNNSSIAVVEAFAMYKQGLSCGLIAKKLNELKHYFPYMWTKTAVQHIVDGLNTSGIIDAPRAIKTIKAFYKSGFSVEDIAKKMNAEFQFMKEWNAPAVHKLLQNKSVTGLVEIQKRKLIQEFDSDGKPLELRTKSEGEKYFESIYPQIISIDDFELIQKLLESNRKVDTKTGKGQTTGGTVTQNEDGELVKQFILSSLCRCYKCGGAMFNNIVRSKRKNGKVDTYSYLRCLNERDAHCDVKALNYPVIERAIIEHVKGLNFDTMFKGTNNSELELLKTREAELLRDIATYEDAIAARKAAGKNTSPVLVTSLVDAQDDLEALQKKIRAISGVTVNAEELTSLNESVFDVAEYELRNMVELELQKIIKRITFNCTEKNIYFITIQYNTGTVLQHGLKVDKKKGVIETYELHEGNKGYVSNGEVITPALIEAAESKNIGIFEGKVM

SEQ ID NO: 7312 - DNA, 50 bp, Salmonella enterica; identical to SEQ ID NO: 7232
  source 1..50: mol_type = genomic DNA

SEQ ID NO: 7313 - DNA, 40 bp, Salmonella enterica; identical to SEQ ID NO: 1123
  source 1..40: mol_type = genomic DNA

SEQ ID NO: 7314 - DNA, 40 bp, Salmonella enterica; identical to SEQ ID NO: 1124
  source 1..40: mol_type = genomic DNA

SEQ ID NO: 7315 - DNA, 50 bp, Salmonella enterica; identical to SEQ ID NO: 1125
  source 1..50: mol_type = genomic DNA

SEQ ID NO: 7316 - protein, 635 aa, Salmonella enterica
MRLYRYRGVVIMIKTFIYSRVSSQEQLSGGGLDRQETDVREYVTRNGLDQYEIVAMVDRGISGYDGSNMRDGELGKWYKDAITGMYWGSHLVLEAIDRFSRRDPMLAMEDFTVLVNKGGIKVHIVKFNTFINGDNLPMLSMMMNLAHSESKQKSDRISKGWQRRRRMALDNGTAITARTPYWIDVRDNEYRLNNSSIAVVEAFAMYKQGLSCGLIAKKLNELKHYFPYMWTKTAVQHIVDGLNTSGIIDAPRAIKTIKAFYKSGFSVEDIAKKMNAEFQFMKEWNAPAVHKLLQNKSVTGLVEIQKRKLIQEFDSDGKPLELRTKSEGEKYFESIYPQIISIDDFELIQKLLESNRKVDTKTGKGQTTGGTVTQNEDGELVKQFILSSLCRCYKCGGAMFNNIVRSKRKNGKVDTYSYLRCLNERDAHCDVKALNYPVIERAIIEHVKGLNFDTMFKSTNNSELELLKTREVELLRDIATYEDAIAARKAAGKNTSPVLVTSLVDAQDDLEALQKKIRAISGVTVNAEELTSLNESVFDVAEYELRNMVELELQKIIKRITFNCTEKNIYFITIQYNTGTVLQHGLKVDKKKGVIETYELHEGNKGYVSNGEVITPALIEAAESKNIGIFEGKVM

SEQ ID NO: 7317 - DNA, 50 bp, Salmonella enterica; identical to SEQ ID NO: 7232
  source 1..50: mol_type = genomic DNA

SEQ ID NO: 7318 - DNA, 40 bp, Salmonella enterica; identical to SEQ ID NO: 1123
  source 1..40: mol_type = genomic DNA

SEQ ID NO: 7319 - DNA, 40 bp, Salmonella enterica; identical to SEQ ID NO: 1124
  source 1..40: mol_type = genomic DNA

SEQ ID NO: 7320 - DNA, 50 bp, Salmonella enterica; identical to SEQ ID NO: 1125
  source 1..50: mol_type = genomic DNA

SEQ ID NO: 7321 - protein, 635 aa, Salmonella enterica
MRLYRYRGVVIMIKTFIYSRVSSQEQLSGGGLDRQETDVREYVTRNGLDQYEIVAMVDRGISGYDGSNMRDGELGKWYKDAITGMYWGSHLVLEAIDRFSRRDPMLAMEDFTVLVNKGGIKVHIVKFNTFINGDNLPMLSMMMNLAHSESKQKSDRISKGWQRRRRMALDNGTAITARTPYWIDVRDNEYRLNNSSIAVVEAFAMYKQGLSCGLIAKKLNELKHYFPYMWTKTAVQHIVDGLNTSGIIDAPRAIKTIKAFYKSGFSVEDIAKKMNAEFQFMKEWNAPAVHKLLQNKSVTGLVEIQKRKLIQEFDSDGKPLELRTKSEGEKYFESIYPQIISIDDFELIQKLLESNRKVDTKTGKGQTTGGTVTQNEDGELVKQFILSSLCRCYKCGGAMFNNIVWSKRKNGKVDTYSYLRCLNERDAHCDVKALNYPVIERAIIEHVKGLNFDTMFKGTNNSELELLKTREVELLRDIATYEDAIAARKAAGKNTSPVLVTSLVDAQDDLEALQKKIRAISGVTVNAEELTSLNESVFDVAEYELRNMVELELQKIIKRITFNCTEKNIYFITIQYNTGTVLQHGLKVDKKKGVIETYELHEGNKGYVSNGEVITPALIEAAESKNIGIFEGKVM

SEQ ID NO: 7322 - DNA, 50 bp, Salmonella enterica; identical to SEQ ID NO: 7232
  source 1..50: mol_type = genomic DNA

SEQ ID NO: 7323 - DNA, 40 bp, Salmonella enterica; identical to SEQ ID NO: 1123
  source 1..40: mol_type = genomic DNA

SEQ ID NO: 7324 - DNA, 40 bp, Salmonella enterica; identical to SEQ ID NO: 1124
  source 1..40: mol_type = genomic DNA

SEQ ID NO: 7325 - DNA, 50 bp, Salmonella enterica; identical to SEQ ID NO: 1125
  source 1..50: mol_type = genomic DNA

SEQ ID NO: 7326 - protein, 635 aa, Salmonella enterica
MRLYRYRGVVIMIKTFIYSRVSSQEQLSGGGLDRQETDVREYVTRNGLDQYEIVAMVDRGISGYDGSNMRDGELGKWYKDAITGMYWGSHLVLEAIDRFSRRDPMLAMEDFTVLVNKGGIKVHIVKFNTFINGYNLPMLSMMMNLAHSESKQKSDRISKGWQRRRRMALDNGTAITARTPYWIDVRDNEYRLNNSSIAVVEAFAMYKQGLSCGLIAKKLNELKHYFPYMWTKTAVQHIVDGLNTSGIIDAPRAIKTIKAFYKSGFSVEDIAKKMNAEFQFMKEWNAPAVHKLLQNKSVTGLVEIQKRKLIQEFDSDGKPLELRTKSEGEKYFESIYPQIISIDDFELIQKLLESNRKVDTKTGKGQTTGGTVTQNEDGELVKQFILSSLCRCYKCGGAMFNNIVRSKRKNGKVDTYSYLRCLNERDAHCDVKALNYPVIERAIIEHVKGLNFDTMFKGTNNSELELLKTREVELLRDIATYEDAIAARKAAGKNTSPVLVTSLVDAQDDLEALQKKIRAISGVTVNAEELTSLNESVFDVAEYELRNMVELELQKIIKRITFNCTEKNIYFITIQYNTGTVLQHGLKVDKKKGVIETYELHEGNKGYVSNGEVITPALIEAAESKNIGIFEGKVM

SEQ ID NO: 7327 - DNA, 50 bp, Salmonella enterica; identical to SEQ ID NO: 7232
  source 1..50: mol_type = genomic DNA

SEQ ID NO: 7328 - DNA, 40 bp, Salmonella enterica; identical to SEQ ID NO: 1123
  source 1..40: mol_type = genomic DNA

SEQ ID NO: 7329 - DNA, 40 bp, Salmonella enterica; identical to SEQ ID NO: 1124
  source 1..40: mol_type = genomic DNA

SEQ ID NO: 7330 - DNA, 50 bp, Salmonella enterica; identical to SEQ ID NO: 1125
  source 1..50: mol_type = genomic DNA

SEQ ID NO: 7331 - protein, 635 aa, Salmonella enterica
MRLYRYRGVVIMIKTFIYSRVSSQEQLSGGGLDRQETDVREYVTRNGLDQYEIVAMVDRGISGYDGSNMRDGELGKWYKDAITGMYWGSHLVLEAIDRFSRRDPMLAMEDFTVLVNKGGIKVHIVKFNTFINGDNLPMLSMMMNLAHSESKQKSDRISKGWQRRRRMALDNGTAITARTPYWIDVRDNEYRLNNSSIAVVEAFAMYKQGLSCGLIAKKLNELKHYFPYMWTKTAVQHIVDRLNTSGIIDAPRAIKTIKAFYKSGFSVEDIAKKMNAEFQFMKEWNAPAVHKLLQNKSVTGLVEIQKRKLIQEFDSDGKPLELRTKSEGEKYFESIYPQIISIDDFELIQKLLESNRKVDTKTGKGQTTGGTVTQNEDGELVKQFILSSLCRCYKCGGAMFNNIVRSKRKNGKVDTYSYLRCLNERDAHCDVKALNYPVIERAIIEHVKGLNFDTMFKGTNNSELELLKTREVELLRDIATYEDAIAARKAAGKNTSPVLVTSLVDAQDDLEALQKKIRAISGVTVNAEELTSLNESVFDVAEYELRNMVELELQKIIKRITFNCTEKNIYFITIQYNTGTVLQHGLKVDKKKGVIETYELHEGNKGYVSNGEVITPALIEAAESKNIGIFEGKVM

SEQ ID NO: 7332 - DNA, 50 bp, Salmonella enterica; identical to SEQ ID NO: 7232
  source 1..50: mol_type = genomic DNA

SEQ ID NO: 7333 - DNA, 40 bp, Salmonella enterica; identical to SEQ ID NO: 1123
  source 1..40: mol_type = genomic DNA

SEQ ID NO: 7334 - DNA, 40 bp, Salmonella enterica; identical to SEQ ID NO: 1124
  source 1..40: mol_type = genomic DNA

SEQ ID NO: 7335 - DNA, 50 bp, Salmonella enterica; identical to SEQ ID NO: 1125
  source 1..50: mol_type = genomic DNA

SEQ ID NO: 7336 - protein, 635 aa, Salmonella enterica
MRLYRYRGVVIMIKTFIYSRVSSQEQLSGGGLDRQETDVREYVTRNGLDQYEIVAMVDRGISGYDGSNMRDGELGKWYKDAITGMYWGSHLVLEAIDRFSRRDPMLAMEDFTVLVNKGGIKVHIVKFNTFINGDNLPMLSMMMNLAHSESKQKSDRISKGWQRRRRMALDNGTAITARTPYWIDVRDNEYRLNNSSIAVEEAFAMYKQGLSCGLIAKKLNELKHYFPYMWTKTAVQHIVDGLNTSGIIDAPRAIKTIKAFYKSGFSVEDIAKKMNAEFQFMKEWNAPAVHKLLQNKSVTGLVEIQKRKLIQEFDSDGKPLELRTKSEGEKYFESIYPQIISIDDFELIQKLLESNRKVDTKTGKGQTTGGTVTQNEDGELVKQFILSSLCRCYKCGGAMFNNIVRSKRKNGKVDTYSYLRCLNERDAHCDVKALNYPVIERAIIEHVKGLNFDTMFKGTNNSELELLKTREVELLRDIATYEDAIAARKAAGKNTSPVLVTSLVDAQDDLEALQKKIRAISGVTVNAEELTSLNESVFDVAEYELRNMVELELQKIIKRITFNCTEKNIYFITIQYNTGTVLQHGLKVDKKKGVIETYELHEGNKGYVSNGEVITPALIEAAESKNIGIFEGKVM

SEQ ID NO: 7337 - DNA, 50 bp, Salmonella enterica; identical to SEQ ID NO: 7232
  source 1..50: mol_type = genomic DNA

SEQ ID NO: 7338 - DNA, 40 bp, Salmonella enterica; identical to SEQ ID NO: 1123
  source 1..40: mol_type = genomic DNA

SEQ ID NO: 7339 - DNA, 40 bp, Salmonella enterica; identical to SEQ ID NO: 1124
  source 1..40: mol_type = genomic DNA

SEQ ID NO: 7340 - DNA, 50 bp, Salmonella enterica; identical to SEQ ID NO: 1125
  source 1..50: mol_type = genomic DNA

SEQ ID NO: 7341 - protein, 635 aa, Salmonella enterica; identical to SEQ ID NO: 1121

SEQ ID NO: 7342 - DNA, 50 bp, Salmonella enterica; identical to SEQ ID NO: 7232
  source 1..50: mol_type = genomic DNA

SEQ ID NO: 7343 - DNA, 40 bp, Salmonella enterica
  source 1..40: mol_type = genomic DNA
ttttagcctgataatcatacaaataggtgccgttgcagca

SEQ ID NO: 7344 - DNA, 40 bp, Salmonella enterica
  source 1..40: mol_type = genomic DNA
ttttagcctgataatcatattaataggtgccgttgcagca

SEQ ID NO: 7345 - DNA, 50 bp, Salmonella enterica; identical to SEQ ID NO: 1125
  source 1..50: mol_type = genomic DNA

SEQ ID NO: 7346 - protein, 635 aa, Salmonella enterica
MRLYRYRGVVIMIKTFIYSRVSSQEQLSGGGLDRQETDVREYVTRNGLDQYEIVAMVDRGISGYDGSNMRDGELGKWYKDAITGMYWGSHLVLEAIDRFSRRDPMLAMEDFTVLVNKGGIKVHIVKFNTFINGDNLPMLSMMMNLAHSESKQKSDRISKGWQRRRRMALDNGTAITARTPYWIDVRDNEYRLNNSSIAVVEAFAMYKQGLSCGLIAKKLNELKHYFPYMWTKTAVQHIVDGLNTSGIIDAPRAIKTIKAFYKSGFSVEDIAKKMNAEFQFMKEWNAPAVHKLLQNKSVTGLVEIQKRKLIQEFDSDGKPLELRTKSEGEKYFESIYPQIISIDDFELIQKLLESNRKVDTKTGKGQTTGGTVTQNEDGELVKQFILSSLCRCYKCGGAMFNNIVRSKRKNGKVDTYSYLRCLNERDAHCDVKALNYPVIERAIIEHVKGLNFDTMFKGTNNSELELLKTREVELLCDIATYEDAIAARKAAGKNTSPVLVTSLVDAQDDLEALQKKIRAISGVTVNAEELTSLNESVFDVAEYELRNMVELELQKIIKRITFNCTEKNIYFITIQYNTGTVLQHGLKVDKKKGVIETYELHEGNKGYVSNGEVITPALIEAAESKNIGIFEGKVM

SEQ ID NO: 7347 - DNA, 50 bp, Salmonella enterica; identical to SEQ ID NO: 7232
  source 1..50: mol_type = genomic DNA

SEQ ID NO: 7348 - DNA, 40 bp, Salmonella enterica; identical to SEQ ID NO: 1123
  source 1..40: mol_type = genomic DNA

SEQ ID NO: 7349 - DNA, 40 bp, Salmonella enterica; identical to SEQ ID NO: 1124
  source 1..40: mol_type = genomic DNA

SEQ ID NO: 7350 - DNA, 50 bp, Salmonella enterica; identical to SEQ ID NO: 1125
  source 1..50: mol_type = genomic DNA

SEQ ID NO: 7351 - protein, 635 aa, Salmonella enterica; identical to SEQ ID NO: 1121

SEQ ID NO: 7352 - DNA, 50 bp, Salmonella enterica; identical to SEQ ID NO: 7232
  source 1..50: mol_type = genomic DNA

SEQ ID NO: 7353 - DNA, 40 bp, Salmonella enterica
  source 1..40: mol_type = genomic DNA
ttttagcttgataatcatacaaataggtgccgttgtagca

SEQ ID NO: 7354 - DNA, 40 bp, Salmonella enterica
  source 1..40: mol_type = genomic DNA
ttttagcttgataatcatattaataggtgccgttgtagca

SEQ ID NO: 7355 - DNA, 50 bp, Salmonella enterica; identical to SEQ ID NO: 1125
  source 1..50: mol_type = genomic DNA

SEQ ID NO: 7356 - protein, 452 aa, Salmonella enterica
MRLYRYRGVVIMIKTFIYSRVSSQEQLSGGGLDRQETDVREYVTRNGLDQYEIVAMVDRGISGYDGSNMRDGELGKWYKDAITGMYWGSHLVLEAIDRFSRRDPMLAMEDFTVLVNKGGIKVHIVKFNTFINGDNLPMLSMMMNLAHSESKQKSDRISKGWQRRRRMALDNGTAITARTPYWIDVRDNEYRLNNSSIAVVEAFAMYKQGLSCGLIAKKLNELKHYFPYMWTKTAVQHIVDGLNTSGIIDAPRAIKTIKAFYKSGFSVEDIAKKMNAEFQFMKEWNAPAVHKLLQNKSVTGLVEIQKRKLIQEFDSDGKPLELRTKSEGEKYFESIYPQIISIDDFELIQKLLESNRKVDTKTGKGQTTGGTVTQNEDGELVKQFILSSLCRCYKCGGAMFNNIVRSKRKNGKVDTYSYLRCLNERDAHCDVKALNYPVIERAIIEHVKGLNF

SEQ ID NO: 7357 - DNA, 50 bp, Salmonella enterica; identical to SEQ ID NO: 7232
  source 1..50: mol_type = genomic DNA

SEQ ID NO: 7358 - DNA, 40 bp, Salmonella enterica; identical to SEQ ID NO: 1123
  source 1..40: mol_type = genomic DNA

SEQ ID NO: 7359 - DNA, 40 bp, Salmonella enterica; identical to SEQ ID NO: 1124
  source 1..40: mol_type = genomic DNA

SEQ ID NO: 7360 - DNA, 50 bp, Salmonella enterica; identical to SEQ ID NO: 1125
  source 1..50: mol_type = genomic DNA

SEQ ID NO: 7361 - protein, 635 aa, Salmonella enterica
MRLYRYRGVVIMIKTFIYSRVSSQEQLSGGGLDRQETDVREYVTRNGLDQYEIVAMVDRGISGYDGSNMRDGELGKWYKDAITGMYWGSHLVLEAIDRFSRRDPMLAMEDFTVLVNKGGIKVHIVKFNTFINGDNLPMLSMMMNLAHSESKQKSDRISKGWQRRRRMALDNGTAITARTPYWIDVRDNEYRLNNSSIAVVEAFAMYKQGLSCGLIAKKLNELKHYFPYMWTKTAVQHIVDGLNTSGIIDAPRAIKTIKAFYKSGFSVEDIAKKMNAEFQFMKEWNAPAVHKLLQNKSVTGLVEIQKRKLIQEFDSDGKPLELRTKSEGEKYFESIYPQIISIDDFELIQKLLESNRKVDTKTGKGQTTGGTVTQNEDGELVKQFILSSLCRCYKCGGAMFNNIVRSKRKNGKVDTYSYLRCLNERDAHCDVKALNYPVIERAIIEHVKGLNFDTMFKGTNNSELELLKTREVELLRDIATYEDAIAARKAAGKNTSPVLVTSLVDAQDDLEALQKKIRAISGVTVNAEELTSLNESVFDVAEYELRNMVELELQKIIKRITFNCTEKNIYFITIQYNTGTVLQHGLKVDKKKGVIETYELHEGNKGYVSNEEVITPALIEAAESKNIGIFEGKVM

SEQ ID NO: 7362 - DNA, 50 bp, Salmonella enterica; identical to SEQ ID NO: 7232
  source 1..50: mol_type = genomic DNA

SEQ ID NO: 7363 - DNA, 40 bp, Salmonella enterica; identical to SEQ ID NO: 1123
  source 1..40: mol_type = genomic DNA

SEQ ID NO: 7364 - DNA, 40 bp, Salmonella enterica; identical to SEQ ID NO: 1124
  source 1..40: mol_type = genomic DNA

SEQ ID NO: 7365 - DNA, 50 bp, Salmonella enterica; identical to SEQ ID NO: 1125
  source 1..50: mol_type = genomic DNA

SEQ ID NO: 7366 - protein, 519 aa, Pseudomonas koreensis
MPTAFAYARFSSVTQKRGSSLERQRGMVASWLVSHPEYSLSELTFQDLGRSGWKGEHIKEGGAFANLLAAVEAGKIESGDAVLVEAIDRAGRLDVLDMLTRVIAPILRADVSIITLDDGMVYTRESLNGGHIYILLGKIQAARQYSDNLSRRLKGSFASRRRLAAEGQTPKRITPVWLTSHGAVIPEIAVQVKLAFELYVSGLGKAVIAKRMRESGIAALAKTSGPGVEGWLRNEAAIGRWNGFQVYEPIVDISLFQLAQIEGEKRKTAPRAKTATHFLVGLVKCGCCGGNFIMRTIKGVQVSMRCRRRQELKGCDNKKVIPKEIVDTVYNYTSVRAALEAVRLEHSGVNEKAVIAAEAKLLDISKQMQELSSAILAVGAIPEVLSRLQQAQEAREATEQELAVLKATVVPSAKGWSQQGRVWDLERSDPQRLSAMLRRVGYSITIHVDGRLVSDSGVTYRYAGVDRKTNRYKLVQGDKVFLILKGSDEDYPYWEPFDEVGGETMWSEEDYENLRKQYE

SEQ ID NO: 7367 - DNA, 50 bp, Pseudomonas koreensis
  source 1..50: mol_type = genomic DNA
gaggtgtacatctgaaattgttgcttgtaagtatttcgtatgtatagaat

SEQ ID NO: 7368 - DNA, 40 bp, Pseudomonas koreensis
  source 1..40: mol_type = genomic DNA
tttctgcatcaggcgttttttataagtgctgacagtcttg

SEQ ID NO: 7369 - DNA, 40 bp, Pseudomonas koreensis
  source 1..40: mol_type = genomic DNA
tttctgcatcaggcgttttcgataagtgctgacagtcttg

SEQ ID NO: 7370 - DNA, 50 bp, Pseudomonas koreensis
  source 1..50: mol_type = genomic DNA
aaggtgcattagagaaagtgttgccgttaagtatttatattttacacaat

SEQ ID NO: 7371 - protein, 481 aa, Streptococcus pneumoniae; identical to SEQ ID NO: 7106

SEQ ID NO: 7372 - DNA, 50 bp, Streptococcus pneumoniae
  source 1..50: mol_type = genomic DNA
taaataattttagtaaccaacatttcaatcaaggatagtaaaactctcac

SEQ ID NO: 7373 - DNA, 40 bp, Streptococcus pneumoniae; identical to SEQ ID NO: 1573
  source 1..40: mol_type = genomic DNA

SEQ ID NO: 7374 - DNA, 40 bp, Streptococcus pneumoniae
  source 1..40: mol_type = genomic DNA
cagcaagaccaccaacatcctcaccaatgtaaaagcttta

SEQ ID NO: 7375 - DNA, 50 bp, Streptococcus pneumoniae
  source 1..50: mol_type = genomic DNA
ttaataaatgcaaaaaccaacactctacacaagtatttcccagctcacac

SEQ ID NO: 7376 - protein, 481 aa, Streptococcus pneumoniae
MITTNKVAIYVRVSTTNQVEEGYSIDEQKDKLSSYCDIKDWNVYKVYTDGGFSGSNTDRPALESLIKDAKKRKFDTVLVYKLDRLSRSQKDTLHLIEDVFIKNGIEFLSLQENFDTSTPFGKAMIGLLSVFAQLEREQIKERMQLGKIGRAKAGKSMMWAKTSYGYDYHRETGTITINPAQALAIKFIFESYLRGRSITKLRDDLNEKYPKHVPWSYRAVRTILDNPVYCGFNQYKGEIYPGNHEPIISKEEYDKTQSELKIRQRTAAENVNPRPFQAKYILSGIAQCGYCGAPLKIMLGVKRKDGSRLKKYECHQRHPRTLRGVTTYNDNKKCDSGFYYKDKLEAYVLKEISKLQDDADYLDKIFSGDNAETIDRESYKKQIEELSKKLSRLNDLYIDDRITLEELQSKSAEFISMRATLETELENDPALRKNKRKADMRKLLNAEKVFSMDYEGQKVLVRGLINKVQVTAEDIVIKWKI

SEQ ID NO: 7377 - DNA, 50 bp, Streptococcus pneumoniae; identical to SEQ ID NO: 7372
  source 1..50: mol_type = genomic DNA

SEQ ID NO: 7378 - DNA, 40 bp, Streptococcus pneumoniae; identical to SEQ ID NO: 1573
  source 1..40: mol_type = genomic DNA

SEQ ID NO: 7379 - DNA, 40 bp, Streptococcus pneumoniae; identical to SEQ ID NO: 7374
  source 1..40: mol_type = genomic DNA

SEQ ID NO: 7380 - DNA, 50 bp, Streptococcus pneumoniae; identical to SEQ ID NO: 7375
  source 1..50: mol_type = genomic DNA

SEQ ID NO: 7381 - protein, 593 aa, Dysgonomonas mossii
MLKAAAYLRVSTKDQNEDTQFPDIKQQAQRDNAELIEKYIFRDRISGLKDKNHRDGLNELLKLTNKDIDIVYIWEVSRLSRDPLYFDELLNTFKRKRINICFLKPMCLYLYDKDTKEEDVVSSLALNIFSKFALFEIRQKTQRTQRGKKEAILTRNESYTYKPSYGYKIENKKLVINDSDIISEKEGYKTEKEVIESIFKLYVSGKTITQIKEILNQYKIPTRSHTFLKKDTLQISDKIELPKDKIEWNRRSIHNILINSVYCGYKDSKINIKIGKDENNFDIVRTEINRINTPIIVSEEIFLSAQKQMINNKVVADKSYKNEFLIRGVIKCGYCENQYLGSGSKGKNYYLCADKTHRRSNTFIGCKNINLNTDNIDIVIWNIVKDSYISLKSTKEIDNSKNKINNNIVELGKEIEYKLNYITQIETELNTIAKRMVIADDIVFDNLNNEAKDRRRLKEKIEKEILVCKDKIAIETARISSLEKVKMNNLIIGQISNSFDLKKEAIREFIEYINVFKYDTIAILQIKYITGFINNVIYKPLTKEYLILSDMFYPFDKSNSTFLVQSYRAGEYPISHNPEYFLNTYKKEIKSIL

SEQ ID NO: 7382 - DNA, 50 bp, Dysgonomonas mossii
  source 1..50: mol_type = genomic DNA
ttttcaaagattgttcaatttgtcatgaggtaatgaacaatctttggaga

SEQ ID NO: 7383 - DNA, 40 bp, Dysgonomonas mossii
  source 1..40: mol_type = genomic DNA
agcaggaggtcacaatctcattatgatcggccctcccggt

SEQ ID NO: 7384 - DNA, 40 bp, Dysgonomonas mossii
  source 1..40: mol_type = genomic DNA
agcaggaggtcacaatctcagtatgatcggccctcccggt

SEQ ID NO: 7385 - DNA, 50 bp, Dysgonomonas mossii
  source 1..50: mol_type = genomic DNA
tttttaaattttagtcattttgtgagtaggtaatgatacctcattagagt

SEQ ID NO: 7386 - protein, 519 aa, Streptococcus suis
MKKIITIEPATVHSNKVEQPKFTKRRVAGYARVSTDHEEQATSYEAQMRYYTDYISSRLDWEFVKMYSDEGITGTNTKQRVGFNSMVDDALAGKIDLIITKSVSRFARNTVDSLSTVRKLKDAGVEIYFEKENIWTFDAKGELLITIMSSLAQEESRSISENVTWGKRKQYERGKVSIPFKNVLGFERGPNGELVVNEEEAKIVRYIFHEFLLGKNANCIAKDLTEKGIPSPTGKKKWYYGTVRRMLQNEKYKGDALLQKSFTTNFLTKKTKVNEGELPQYYVENNHEAIIDKETFDLVQFELKKRERRGSASLFSGMLVCGTCGSVYGSKVWHSNSKYRRVIYRCNQKYEGEAKCETPHVTDEEVKEWFISAINKLIENKDEVIENMKVLLEICSDTKSIQEEISASKSRMVELSDLVDSLVYENAKVAQDQTAYQKKYDKYSQEYKELEERVDTLITDLQKKKSQSKSIQEFIHHLSDKDLVTDFDEKLWYTMVDKVVISSKEEVNFHFKNGAVISK

SEQ ID NO: 7387 - DNA, 50 bp, Streptococcus suis
  source 1..50: mol_type = genomic DNA
ttgtattataaatatcttctattcgaaatttgtagaagttaaatgataca

SEQ ID NO: 7388 - DNA, 40 bp, Streptococcus suis
  source 1..40: mol_type = genomic DNA
atataaacacttactctttgatcttgaccatactcttctt

SEQ ID NO: 7389 - DNA, 40 bp, Streptococcus suis
  source 1..40: mol_type = genomic DNA
atataaacacttactctttaatcttgaccatactcttctt

SEQ ID NO: 7390 - DNA, 50 bp, Streptococcus suis
  source 1..50: mol_type = genomic DNA
tccttttattataatcttttgttcaaaatttgtagcaaagaaatgattaa

SEQ ID NO: 7391 - protein, 559 aa, Cellulophaga lytica
MLGIYIRKSVEREREKSINEQILLGQEFALENNMEYKLYNEGIISGQKNKENRPKFSELLKDIENKKITSVFIWDSSRIARNEGAWYEFAKLLSDMGALLYDNGVKADFRDENTFLFYTITSGMNAHFARVTAKKIKTVLKRNAIGGLVHGIAPYGFTADKQSKWTTHKDEVENVKTIFDLYEKGYGYIRIANYLNEMGINARYKTGWTPATIRYMIYNKTYSGRAKFNNIEIKVPQIIDPIRHDKLIASIGNRYKKPGAKSKRYILNEVLVCGKCGTRYTVSQRKRHSYYRCLSEVNRGVPKCFSKAVRSEHIDKLILEKVLLGNELYELAEQTYLEGGNVEQKKELEKKLSYHNSRIKKLEGELKRSYQVYVKGGVELDLFMSEKKRIDRQLLKTQDAIDNLNVDLERIKDTNRLLEDMSLDFNIDLPDIWKGETNPSMKFLKENAIKQAIRANRLEKNKETMVETMPFDEKVAMVEKYIKQIKVDYHNLPLKLTIEFNIPVPPMQLIMESRYYAAMDIKTKRMHLLKDLGKKPSFIYKRTKQELEENIKRLDINTL

SEQ ID NO: 7392 - DNA, 50 bp, Cellulophaga lytica
  source 1..50: mol_type = genomic DNA
cttacataattagagtagttaacccctgttattaacattaattttgtaac

SEQ ID NO: 7393 - DNA, 40 bp, Cellulophaga lytica
  source 1..40: mol_type = genomic DNA
tgacatcatttaatcctccccagttattccattgaggtct

SEQ ID NO: 7394 - DNA, 40 bp, Cellulophaga lytica
  source 1..40: mol_type = genomic DNA
tgacatcatttaatcctccaaagttattccattgaggtct

SEQ ID NO: 7395 - DNA, 50 bp, Cellulophaga lytica
  source 1..50: mol_type = genomic DNA
tttacctaacactgatcatttcccaatgctattaactgttgttttgtaac

SEQ ID NO: 7396 - protein, 481 aa, Streptococcus mitis
MITTNKVAIYVRVSTTSQAEEGYSIEEQKAKLSSYCDIKDWSVYKIYTDGGFSGSNTDRPALEGLIKDAKKRKFDTVLVYKLDRLSRSQKDTLYLIEDIFIKNNIAFLSLQENFDTSTPFGKAMIGLLSVFAQLEREQIKERMQLGKIGRAKAGKSMMWAKTSYGYDYHRETGTITINPAQALAVKFIFESYLRGRSITKLRDDLNEKYPKHVPWSYRAVRTILDNPVYCGFNQYKGEIYPGNHEPIISKEEYDKTQSELKIRQRTAAENVNPRPFQAKYILSGIAQCGYCGAPLKIMLGVKRKDGSRLKKYECHQRHPRTLRGVTTYNDNKKCDSGFYYKDKLEAYVLEEISKLQDNADYLDKIFSGDNADTIDRESYKKQIEELSKKLSRLNDLYIDDHITLEELQSKSAEFISMRVTLETELENDPALRKNKRKADMRQLLNAEKVFSMDYEKQKVLVRGLINKVQVTAEDIVIKWKI

SEQ ID NO: 7397 - DNA, 50 bp, Streptococcus mitis
  source 1..50: mol_type = genomic DNA
tcagtaattttactaaccttcatttcaatcaacgatactaaaattattga

SEQ ID NO: 7398 - DNA, 40 bp, Streptococcus mitis
  source 1..40: mol_type = genomic DNA
cagcaagaccaccaacatctccacaagcgtgaaagccttc

SEQ ID NO: 7399 - DNA, 40 bp, Streptococcus mitis
  source 1..40: mol_type = genomic DNA
cagcaagaccaccaacatctacacaagcgtgaaagccttc

SEQ ID NO: 7400 - DNA, 50 bp, Streptococcus mitis
  source 1..50: mol_type = genomic DNA
tcagtaattggtagatccttgatttaattcagctaactagaaattttgga

SEQ ID NO: 7401 - protein, 561 aa, Raoultella ornithinolytica
MVKAYIYTRVSSLQQSDGFGIERQVHTLMDFLEDAELPKELGYQLDPHDYEVLEQDAGLSGFKGHNFTKGSIGKFKNRVASGEITSGCLLIESVDRFSRKQGYDAIDEFTFLIKRNIDIIEVETGQIFSYKLDHKLTQLSTSIERAYQESKRKSRMAVKSWANIKRKAVEEGIAISRNVPYWLEVKNNEYLTRTEHVNKIKRVFDMYINGVGVTSIVRELNKEGGKHDGGVYSTNFINMMLRDRRLLGWQRGKKKANETQEEREKRAIKIYPVIIGTDIFDLVQRKIDANKVTKSVRTSSKQKSLFNGLVRCEICGEALVGHFSERGNYLRCIGKRSKVGSCDSRLIKYSTFEESMLVNLKGIDFKEIYTNKNVSDDHVNNLRNELAVVNAEYDEIEGLLNTSGSTIEIVALSKALREKNKDKDKLQSELTTLTNNNVIEDVEIDVSKLTNQNNVELREKYNIYLKKVIKEIRVKRVDDILYVMVQYFTDVISHLFIIDGKDGTLLSRSHISNDLVFESDMMTIDMLKGEWELKKNNMSQWDELALDIWQSVVESAVKSIK

SEQ ID NO: 7402 - DNA, 50 bp, Raoultella ornithinolytica
  source 1..50: mol_type = genomic DNA
gtttgtaattgtgttttgatttgggtatacatagtactattaatacaaac

SEQ ID NO: 7403 - DNA, 40 bp, Raoultella ornithinolytica
  source 1..40: mol_type = genomic DNA
aatctgcacaatggcatgggtatatggctcggttcagggc

SEQ ID NO: 7404 - DNA, 40 bp, Raoultella ornithinolytica
  source 1..40: mol_type = genomic DNA
aatctgcacaatggcatggttatatggctcggttcagggc

SEQ ID NO: 7405 - DNA, 50 bp, Raoultella ornithinolytica
  source 1..50: mol_type = genomic DNA
gttagtaaatacatttgtctttggtttcacatagtataaaaaatactaac

SEQ ID NO: 7406 - protein, 516 aa, Staphylococcus hyicus
MSNIMEGYYDDINTQESRIDTVAIYARKSRADEGEKDLNNHLMRLKARSELNEWSYEVYKEIGSGASIEDRPVMRQLLSDVEKGEFDAVVVVDLDRLSRGKGADLDRILGTFRNNDVKIVQESPYEVYDLTNSDHAQMLEMKMFFGNMELMQTKKRFREGRRLSIHLGKWVYGQAPFGYQIDKKTKKLVFNEKEKEAFLKMKELFFEGYNTVDIAWNLNKEGYTKRSGRPFESKSISRILKNEIYTGTTVYNKSIGSKRNKNDLYSSGLPFKRLDKSEWKRKYNTHPALVTMEEHELIVKHFQNVPHRAHSRSKVPYSLFGLCRTPKGEHYHIYTYNTKGQPTHIGIKKSKYEDKSEYISVPIKLVESVILESIKLLESELELLLEDNDNQKEVALLEKRAKKINKEIEQLEGEIDRIQEGFLAGLFNAEEAAQIKKKKNSEVDVKENELLEVNKSIDKVSNSTNLTRLDRWQNIYKMINDSSNPTKLNEIYKSIINDIVVSRTVFDEIDVQVNFL

SEQ ID NO: 7407 - DNA, 50 bp, Staphylococcus hyicus
  source 1..50: mol_type = genomic DNA
tggacggtacagcaatcatgcaaggtgttgcaacagtgtttattgcacaa

SEQ ID NO: 7408 - DNA, 40 bp, Staphylococcus hyicus
  source 1..40: mol_type = genomic DNA
ggcacagccattttacaaggtgttgctacgatattcattg

SEQ ID NO: 7409 - DNA, 40 bp, Staphylococcus hyicus
  source 1..40: mol_type = genomic DNA
ggcacagccattttacaaggagttgctacgatattcattg

SEQ ID NO: 7410 - DNA, 50 bp, Staphylococcus hyicus
  source 1..50: mol_type = genomic DNA
tggaccgtacttgtcaaatggaaggagtcgcaaaaatttcgattgcacaa

SEQ ID NO: 7411 - protein, 407 aa, Clostridium baratii
MNKIKSCLYCRVSTQNEEQNTSYKHQQNISVKGYDIIKVYADRGTGTNIKRKNFQQMLYDCGVDIKEIEGNVLFIASDRKAMFESIIVTHTSRFLRNQLLMKLCIKALKKKNVEIYFSDMNKSSLDNDIEFVLNILFLLDEQESRNTSQKIKKGLERSRKDKKYIQVPNRLWGYDYIKKENKLIINKDGKIIKEIFDMYLNGLGYRKICLNLKEKYNIEKNSTDIKNLLNNSRYCGYNFYNKWTVSRLDGIKKKNKDYDIFPSDKIEPIVSYEDWCKVQNIIKSKSNGRQGLKHNMYPLSQKIKCESCGCSYVRKREKRGNYVRVFWSCKTKFFKQKGECINPNITERIIVKHLLDKDLGIKSYIRAIELELKKSLNDIKGIDIKEIDDLILKVENKRKKLLDIYTT

SEQ ID NO: 7412 - DNA, 50 bp, Clostridium baratii
  source 1..50: mol_type = genomic DNA
accattcttatgctataagatttaatagaattttataacataagaagtgt

SEQ ID NO: 7413 - DNA, 40 bp, Clostridium baratii
  source 1..40: mol_type = genomic DNA
aacgacaatagaagatcctatagaatgtgaaattagtggt

SEQ ID NO: 7414 - DNA, 40 bp, Clostridium baratii
  source 1..40: mol_type = genomic DNA
aacgacaatagaagatccttgagaatgtgaaattagtggt

SEQ ID NO: 7415 - DNA, 50 bp, Clostridium baratii
  source 1..50: mol_type = genomic DNA
agcattaatgtttaagatgatttgtgaaaattttagaaaataagaagtgt

SEQ ID NO: 7416 - protein, 475 aa, Limosilactobacillus fermentum
MKVAIYVRVSTLEQAESGYSISEQTEKLTAYCQIKDWQVAKIYTDPGFSGSSLDRPAMQQLISDCKLGVFDAVLVYKLDRLSRSQKDTLYLIEDVFNAYNIHFMSLSENFDTSTPFGKAMIGLLSVFAQLEREQIKERMQMGKLGRVKAGKISAWSNVPFGYTKVKDSYDVDPLRAGIVKRIYADYLAGKSITKITKELNREGHIGKGVNWSYRTVRQILGNVTYTGRIIFKGQVYDGLHTGIISKADWDEVQRVLKIRQLDQAKKSNNPRPFQAQYMLSGLLKCHYCGATLAIAKSHTRNGPLWRYVCPTRHANKYHRNNAARYRIPPVNCELMYKYKDDLEKAVLREVKKVALDPDAVVASQDDGQSTIDKQAIKAQLAKIKRQQAKLVDLYLLSDDLNVDQLRDRSKKLKVQADTLQAQLIHDTKKADAFKKTATDAKQIDQLDYEQQTAIVRMLIDHISVSNTGLDIYWQI

SEQ ID NO: 7417 - DNA, 50 bp, Limosilactobacillus fermentum
  source 1..50: mol_type = genomic DNA
aaaaaagatttagagagtgccatttcaataaccatctctaaatcttttct

SEQ ID NO: 7418 - DNA, 40 bp, Limosilactobacillus fermentum; identical to SEQ ID NO: 6858
  source 1..40: mol_type = genomic DNA

SEQ ID NO: 7419 - DNA, 40 bp, Limosilactobacillus fermentum
  source 1..40: mol_type = genomic DNA
gaacaagacaatcgtcattgacaccagggtaaagcccttg

SEQ ID NO: 7420 - DNA, 50 bp, Limosilactobacillus fermentum
  source 1..50: mol_type = genomic DNA
aaaaaatataaattgaattccattgaaattaacatctttttgtgttttca

SEQ ID NO: 7421 - protein, 480 aa, Latilactobacillus curvatus
MEDYQSMKVGIYVRVSTLEQATEGYSIQEQTDKLKKFCDVKEWSVGEVYTDPGFSGSSLKRPGMQKLINDVEQQKIDAVLVYKLDRLSRSQKDTLYLIEDVFLKYNVHFVSLNENFDTSTPFGRASIGMMSVFAQLEREQITERMQMGKVGRAKAGYFHGGGTIPHGYDYNDGELIPNEKEAKIVNYIFDQYLDGWGVQSIAKHLNAKHISGKRSAKWSHKVINEVLCNNLYIGKITWKNEIYDGTHTPIIDEDKFYKVQELMAKRKSTAAKNNQRPFKAKYMLTGIAYCGVCGARMFTLQSYSSKQHKYIRKYGCYSQSTIQHMVKDPNCDNDKYDGPELETYVLQRVKKLSMNPKTIKRITNQTTSIVSTDGTKAQIKETEEQIERLLDLYQNGAITFAKIESRLDDLNAKKSNLEEQLKRLESEKLNNGSTTDVLDLLSTASDVVDSKDYGAQKRLVHALIQKITLKRDKVTIKWTF

SEQ ID NO: 7422 - DNA, 50 bp, Latilactobacillus curvatus
  source 1..50: mol_type = genomic DNA
taaaaatatttatgtacgtccatttcaattgtagttcacgaatattttta

SEQ ID NO: 7423 - DNA, 40 bp, Latilactobacillus curvatus; identical to SEQ ID NO: 4263
  source 1..40: mol_type = genomic DNA

SEQ ID NO: 7424 - DNA, 40 bp, Latilactobacillus curvatus; identical to SEQ ID NO: 4264
  source 1..40: mol_type = genomic DNA

SEQ ID NO: 7425 - DNA, 50 bp, Latilactobacillus curvatus
  source 1..50: mol_type = genomic DNA
taataatatctttatatttcatttataattatatttatgatatatttata

SEQ ID NO: 7426 - protein, 583 aa, Clostridioides difficile
MKEVEIINKNDHLENRRRGKYIDRKRVAAYCRVSTDSEDQLNSYKSQVSYYTDLINNNIEWCMVDIYADEAITGTQVNKREEFQRMINDCMNNEIDMIITKSISRFARNTLDTLKYVRMLKEKSIAVYFEDEKINTLTMDGELLLVVLSSVAQQEVENISANVKKGLKMKMRRGELVGFQGCLGYDYHKEDKTLTINEKEAEIVRYIFNRYIEGAGGSIIGQELENLGYKTKYGSTTWSNSTVLGIIKNEKYIGDVLLGKTFTVDPISKRRLDNLGEEEKYYVKNNHEPIISREIFDKAHEILNRRSKNRGKYEEEVKKREKYSRKYAFSCMMECGFCGGTLTRRNWHSGSEYSKVIWQCVVATKKGKKYCPESKGISERVIENAFVESYRLLCDEKKSVLEELLSRINDTVESSEVNNKIRKIEKELSAIEKKINNLVDMRLEDIIEKETYEIKYQELIDNQEKLLNERNKLNIVVKNEKSMKQRLKEFKKTLEENEVLDKFDRSVFESVVEKVIIGEKNKDGENDPTKITFIYKTGFKNTLSSNKFKIPRKNAKGRHKRKELCLHGNNEVESLYSHSSSNT

SEQ ID NO: 7427 - DNA, 50 bp, Clostridioides difficile
  source 1..50: mol_type = genomic DNA
tttatattcacatagtagttcaaacacaggaagaaatgtatatcttaaac

SEQ ID NO: 7428 - DNA, 40 bp, Clostridioides difficile
  source 1..40: mol_type = genomic DNA
atattggatatagtttagatacatgtggaaactgtagcta

SEQ ID NO: 7429 - DNA, 40 bp, Clostridioides difficile
  source 1..40: mol_type = genomic DNA
atattggatatagtttagagtcatgtggaaactgtagcta

SEQ ID NO: 7430 - DNA, 50 bp, Clostridioides difficile
  source 1..50: mol_type = genomic DNA
tttataatctcttagttgttcttagtaatgaagaaaagaatctattaaac

SEQ ID NO: 7431 - protein, 615 aa, Leclercia adecarboxylata
MKKCFMYYRVSSDKQLGGTGIERQEENLRAYVKRLNLCSQMDVPLPIELSDPGVSAFKGLNMSEGNLGKWMKEVATGIHDGSLLVLESIDRFSRQNPFTVMKYLSTLDEHDISIHDVSLGLVINRSNSSMLPIVAMSAQRAYEESKYKSTRISDGWQRKRITAFEKGTVVTNKRPLWIDVVDDYYVLNEKAEIVREIFRLYQTGIGCPTIAKILQAKGDEWRLASPKNRGGWRAESVYKVLTNKRVTGVIFITQIVRDFDKYDTDAVQKKYERNVYPEVISMEEFELVQKMLESRNPKNNQKTIGRVSQKNDDGAPLIKSNIFTSVFRCGRCHEGMYHNVVTRERFAKRVGEIVTSEYRYIRCIAERDKLCDNKSLRYEVLEQFIIEYIKNLNFTQIIKSGELKPEIELLQMKIKEEQEHISDYEQGIEKLKSKGKKVPFDALVELEESQTNLKAMQERLNGIKDVSIDTEVLTEIDIATVFDVENIELRSRIEYEISKVIDRIELVTESNHYICTLHYKDVDVLKHVLIIQSGKKPKLASSVSISREVDETHYKTPSFELIVKDNEFTLTVLQNVIVFTDYALLLNYVDTLPGSKVLGVWMREHFNEVLANSVL

SEQ ID NO: 7432 - DNA, 50 bp, Leclercia adecarboxylata
  source 1..50: mol_type = genomic DNA
tgtttgtataatatttaagtcattcaaataagatggcagctatacaaaca

SEQ ID NO: 7433 - DNA, 40 bp, Leclercia adecarboxylata
  source 1..40: mol_type = genomic DNA
ttttagcttgataatcatacaaataagtgccattacaaca

SEQ ID NO: 7434 - DNA, 40 bp, Leclercia adecarboxylata
  source 1..40: mol_type = genomic DNA
ttttagcttgataatcatattaataagtgccattacaaca

SEQ ID NO: 7435 - DNA, 50 bp, Leclercia adecarboxylata
  source 1..50: mol_type = genomic DNA
agttggtatattccttgagtcatgttaataagaggaagtttatacactca

SEQ ID NO: 7436 - protein, 498 aa, Klebsiella pneumoniae; identical to SEQ ID NO: 1416

SEQ ID NO: 7437 - DNA, 50 bp, Klebsiella pneumoniae
  source 1..50: mol_type = genomic DNA
ttttattcactttgaaactacaacgtgatattgttgcaaagaagcaaaat

SEQ ID NO: 7438 - DNA, 40 bp, Klebsiella pneumoniae; identical to SEQ ID NO: 1418
  source 1..40: mol_type = genomic DNA

SEQ ID NO: 7439 - DNA, 40 bp, Klebsiella pneumoniae
  source 1..40: mol_type = genomic DNA
cttactgccaaactgcatgaaaacgttgctggatactagc

SEQ ID NO: 7440 - DNA, 50 bp, Klebsiella pneumoniae
  source 1..50: mol_type = genomic DNA
ttttattattttctaaaacacaacaagatattgtttgttggatacaaact

SEQ ID NO: 7441 - protein, 494 aa, Clostridium saudiense
MLKVATFSRTSTDNISQSKSIGNQEDVYKSWIEKNNCVLYKNYIDEGISGTKGRYRVEWKELIQDGKEKKYDILLSKSYSRFGRNMVETLSAIKELREAGIRIIFIEDNLDSTKDTTNFGLFSWLAEMESKKTSERIKTVFDNFKEKGKIYNCIAPWGYDYDIEKKNFVINEVEASIIRRIFKLYVQGNGTTRIANILTSEGIKGKNGGVIRGNTIKNTILNEVYVGTLVQGKSEGIDVTISKRNKIEQEKWIKHLNNHEAIITYETFIEANKIFKVNSEKAKKHRYSIKGIERSSNASLFSNLLICSNCGASITIRRKKGKKIHYNCSEYEKVGVSVGHTSNRIDEDFLVEYILFRLNELIERDFDIININANVDIKKELENQLQAVEKSINEQMKKTRNLINLYDEKVISMNQFKLENETISNTLDSLMKNKEILEDKIKNIPQETGSFKKDVESVLKIPVEQWNNSMLKTIIKKIYVNNDGTINVQWIIEG

SEQ ID NO: 7442 - DNA, 50 bp, Clostridium saudiense
  source 1..50: mol_type = genomic DNA
aaacctaaaaggttatatttggcaactgctatatataactaattaggtta

SEQ ID NO: 7443 - DNA, 40 bp, Clostridium saudiense
  source 1..40: mol_type = genomic DNA
tgagcctgaaaataaagaaactgctacttgtataggatta

SEQ ID NO: 7444 - DNA, 40 bp, Clostridium saudiense
  source 1..40: mol_type = genomic DNA
tgagcctgaaaataaagaaagtgctacttgtataggatta

SEQ ID NO: 7445 - DNA, 50 bp, Clostridium saudiense
  source 1..50: mol_type = genomic DNA
aactctgaagaaaaatattttggaagtgccatataggatcgatcaggtta

SEQ ID NO: 7446 - protein, 475 aa, Faecalibacterium prausnitzii
MEAGIVKRVIIKDMSRFGRDYLQVGMYTEIMFPEHDVHFIAVNDGVDSTQGDNEFTPFRNIINEWYAKDTSKKIRAVMKVKGNAGEHLTTNAPYGYMKDPDDSKHWIPDREAADVVYEIGLYVMDGFGPSQIARKLRERKILTPAAYYESKGITCNVKKQGDPYDWDNTTIAHIMDRWREYLGHTVNFKTTKKSYKSKKKIKNPESEWVIFENTHEPIWTEAIAEAVKQARQSRRRPTKMGEMGMFSGMMYCADCGSILYQCRATGFRKDQEYYICSGYRKGKQVCSTPHSIRTVILEELILQNLREIVSFARSHENRFVQMVMDMDVKERNKGLAKKRKLLSESEKRITELDTIFKRLYEDNISGKLTDERFHKLSTDYEAEQASLQTQAAILREEIEEEEGKSANVDRFLSVVRQYTDIPELTPRILHEFVEKIVIHAATDPHSKINRRQEVDIYYKGIGILEMSKVFDSRQK

SEQ ID NO: 7447 - DNA, 50 bp, Faecalibacterium prausnitzii
  source 1..50: mol_type = genomic DNA
atgttttcttaactggacacacctaatggtagcaccagataagaaaacat

SEQ ID NO: 7448 - DNA, 40 bp, Faecalibacterium prausnitzii
  source 1..40: mol_type = genomic DNA
caaaaagggacgatgccgcaaaagcatcgtccctttttgg

SEQ ID NO: 7449 - DNA, 40 bp, Faecalibacterium prausnitzii
  source 1..40: mol_type = genomic DNA
caaaaagggacgatgccgctgaagcatcgtccctttttgg

SEQ ID NO: 7450 - DNA, 50 bp, Faecalibacterium prausnitzii
  source 1..50: mol_type = genomic DNA
attttctctatcatggacgcacattgtggtgacaccaagagagaacagat

SEQ ID NO: 7451 - protein, 480 aa, Streptococcus mutans
MIATNKVAIYIRVSTTNQAEEGYSIEEQQEKLKAYCAIKDWSIYDVYIDGGFTGSNTDRPELKRLVKEAKNKKFDTVLVYKLDRLSRSQKDTLYLIEEVFTKNNIAFLSLLENFDTSSAFGKAMIGILSVFAQLEREQIKERMQLGKVGRAKSGKSMMWAKPSYGYIYHQETGEMTVDEYESIAIKFIFSSYLAGRSITKLRDDLNKKYPKKFAWNYKTVRHILDNPVYCGNIRFKDEIYPGNHEAIISKEDFEKVQEELAIRQRTAAENSNPRPFQAKYMLSGIAQCGYCKAPLKIIMGAIRKDGTRFIRYECYQRHPRKIKGVTVYNDNKKCNSGYYDKKELEQYVLKEVSKLQEDKEYLESLFNVPDKSIERDKLQGQVNILEKKISRLNDLYVDDRISLDELKIKSDNFLKMKAVLETELENDPAIKQQTKKENMKKILKTKDILSMNYEQQKAVIRALITKVQVTAESIIIKWKI

SEQ ID NO: 7452 - DNA, 50 bp, Streptococcus mutans
  source 1..50: mol_type = genomic DNA
tataaagaattttactatctttcatttctataagcgtaaaagctttaatt

SEQ ID NO: 7453 - DNA, 40 bp, Streptococcus mutans; identical to SEQ ID NO: 1308
  source 1..40: mol_type = genomic DNA

SEQ ID NO: 7454 - DNA, 40 bp, Streptococcus mutans
  source 1..40: mol_type = genomic DNA
attgccaaagtcactaaacagtctataagcgtaaaagccc

SEQ ID NO: 7455 - DNA, 50 bp, Streptococcus mutans
  source 1..50: mol_type = genomic DNA
tagaaagaggttttctttttttccagtctatatgagctgaatctttaatt

SEQ ID NO: 7456 - protein, 480 aa, Streptococcus mutans
MIATNKVAIYIRVSTTNQAEEGYSIEEQQEKLKAYCAIKDWSIYDVYIDGGFTGSNTDRPELKRLVKEAKNKKFDTVLVYKLDRLSRSQKDTLYLIEEVFTKNNIAFLSLLENFDTSSAFGKAMIGILSVFAQLEREQIKERMQLGKVGRAKSGKSMMWAKPSYGYIYHQETGEMTVDEYESIAIKFIFSSYLAGRSITKLRDDLNKKYPKKIAWNYKMVRHILDNPVYCGDIRFKDEIYSGNHEAIISKEDFEKVQEELAIRQRTAAENSNPRPFQAKYMLSGIAQCGYCKAPLKIIMGAIRKDGTRFIRYECYQRHPRKIKGVTVYNDNKKCNSGYYDKKELEQYVLKEVSKLQEDKEYLESLFNVPDKSIERDKIQEQVNILEKKISRLNDLYVDDRISLNELKIKSDNFLKMKAVLETELENDPSIKQQKKKENMKKILKTKDILSMNYEQQKAVIRALITKVQVTAESIIIKWKI

SEQ ID NO: 7457 - DNA, 50 bp, Streptococcus mutans; identical to SEQ ID NO: 7452
  source 1..50: mol_type = genomic DNA

SEQ ID NO: 7458 - DNA, 40 bp, Streptococcus mutans; identical to SEQ ID NO: 1308
  source 1..40: mol_type = genomic DNA

SEQ ID NO: 7459 - DNA, 40 bp, Streptococcus mutans; identical to SEQ ID NO: 7454
  source 1..40: mol_type = genomic DNA

SEQ ID NO: 7460 - DNA, 50 bp, Streptococcus mutans; identical to SEQ ID NO: 7455
  source 1..50: mol_type = genomic DNA

SEQ ID NO: 7461 - protein, 480 aa, Streptococcus mutans
MIATNKVAIYIRVSTTNQAEEGYSIEEQQEKLKAYCAIKDWSIYDVYIDGGFTGSNTDRPELKRLVKEAKNKKIDTVLVYKLDRLSRSQKDTLYLIEEVFTKNNIAFLSLLENFDTSSAFGKAMIGILSVFAQLEREQIKERMQLGKVGRAKSGKSMMWAKPSYGYIYHQKTGEMTVDEYESIAIKFIFSSYLAGRSITKLRDDLNKKYPKKIAWNYKMVRHILDNPVYCGNIRFKDEIYSGNHEAIISKEIFEKVQEELAIRQRTAAENSNPRPFQAKYMLSGIAQCGYCKAPLKIIMGAIRKDGTRFIRYECYQRHPRKIKGVTVYNDNKKCNSGYYDKKELEQYVLKEVSKLQEDKEYLESLFNVLDKSIERDKLQGQVNILEKKISRLNDLYVDDRISLDELKIKSDNFLKMKAVLETELENDPAIKQQTKKENMKKILKTKDILSMNYEQQKAVIRALITKVQVTAESIIIKWKI

SEQ ID NO: 7462 - DNA, 50 bp, Streptococcus mutans; identical to SEQ ID NO: 7452
  source 1..50: mol_type = genomic DNA

SEQ ID NO: 7463 - DNA, 40 bp, Streptococcus mutans; identical to SEQ ID NO: 1308
  source 1..40: mol_type = genomic DNA

SEQ ID NO: 7464 - DNA, 40 bp, Streptococcus mutans; identical to SEQ ID NO: 7454
  source 1..40: mol_type = genomic DNA

SEQ ID NO: 7465 - DNA, 50 bp, Streptococcus mutans; identical to SEQ ID NO: 7455
  source 1..50: mol_type = genomic DNA

SEQ ID NO: 7466 - protein, 480 aa, Streptococcus mutans
MIATNKVAIYIRVSTTNQAEEGYSIEEQQEKLKAYCAIKDWSIYDVYIDGGFTGSNTDRPELKRLVKEAKNKKFDTVLVYKLDRLSRSQKDTLYLIEEVFTKNNIAFLSLLENFDTSSAFGKAMIGILSVFAQLEREQIKERMQLGKVGRAKSGKSMMWAKPSYGYIYHKETGEMTVDEYESIAIKFIFSSYLAGRSITKLRDDLNKKYPKEIAWNYKMVRHILDNPVYCGNIRFKDEIYSGNHEAIISKEDFEKVQEELAIRQRTAAENSNPRPFQAKYMLSGIAQCGYCKAPLKIIMGAIRKDGTRFIRYECYQRHPRKIKGVTVYNDNKKCNSGYYDKKELEQYVLKEVSKLQEDKEYLESLFNVPDKSIERDKIQGQVNILENKISRLNDLYVDDRISLDELKIKSDNFLKMKAALETELENDPAIKQQKKKENMKKILKTKDILSMNYEQQKAVIRALITKVQVTAESIIIKWKI

SEQ ID NO: 7467 - DNA, 50 bp, Streptococcus mutans; identical to SEQ ID NO: 7452
  source 1..50: mol_type = genomic DNA

SEQ ID NO: 7468 - DNA, 40 bp, Streptococcus mutans; identical to SEQ ID NO: 1308
  source 1..40: mol_type = genomic DNA

SEQ ID NO: 7469 - DNA, 40 bp, Streptococcus mutans; identical to SEQ ID NO: 7454
  source 1..40: mol_type = genomic DNA

SEQ ID NO: 7470 - DNA, 50 bp, Streptococcus mutans; identical to SEQ ID NO: 7455
  source 1..50: mol_type = genomic DNA

SEQ ID NO: 7471 - protein, 480 aa, Streptococcus mutans
MIATNKVAIYIRVSTTNQAEEGYSIEEQQEKLKAYCAIKDWSIYDVYIDGGFTGSNTDRPELKRLVKEAKNKKFDTVLVYKLDRLSRSQKDTLYLIEEVFTKNNIAFLSLLENFDTSSAFGKAMIGILSVFAQLEREQIKERMQLGKVGRAKSGKSMMWAKPSYGYIYHQETGEMTVDEYESIAIKFIFSSYLAGRSITKLRDDLNKKYPKKIAWNYKMVRHILDNPVYCGNIRFKSEIYSGNHEAIISKEDFEKVQEELAIRQRTAAENSNPRPFQAKYMLSGIAQCGYCKAPLKIIMGAIRKDGTRFIRYECYQRHPRKIKGVTVYNDNKKCNSGYYDKKELEQYVLKEVSKLQEDKEYLESLFNVPDKSIERDKIQGQVNILEKKISRLNDLYVDDRISLDELKIKSDNFLKMKAVLETELENDPAIKQQKKKENMKKILKTKDILSMNYEQQKAVIRALITKVQVTAESIIIKWKI

SEQ ID NO: 7472 - DNA, 50 bp, Streptococcus mutans; identical to SEQ ID NO: 7452
  source 1..50: mol_type = genomic DNA

SEQ ID NO: 7473 - DNA, 40 bp, Streptococcus mutans; identical to SEQ ID NO: 1308
  source 1..40: mol_type = genomic DNA

SEQ ID NO: 7474 - DNA, 40 bp, Streptococcus mutans; identical to SEQ ID NO: 7454
  source 1..40: mol_type = genomic DNA

SEQ ID NO: 7475 - DNA, 50 bp, Streptococcus mutans; identical to SEQ ID NO: 7455
  source 1..50: mol_type = genomic DNA

SEQ ID NO: 7476 - protein, 480 aa, Streptococcus mutans
MIATNKVAIYIRVSTTNQAEEGYSIEEQQEKLKAYCAIKDWSIYDVYIDGGFTGSNTDRPELKRLVKEAKNKKFDTVLVYKLDRLSRSQKDTLYLIEEVFTKNNIAFLSLLENFDTSSAFGKAMIGILSVFAQLEREQIKERMQLGKVGRAKSGKSMMWAKPSYGYIYHQETGEMTVDEYESIAIKFIFSSYLAGRSITKLRDDLNKKYPKKIAWNYKMVRHILDNPVYCGNIRFKDEIYSGNHEAIISKEDFEKVQEELVIRQRTAAENSNPRPFQAKYMLSGIAQCGYCKAPLKIIMGAIRKDGTRFIRYECYQRHPRKIKGVTVYNDNKKCNSGYYDKKELEQYVLKEVSKLQEDKEYLESLFNVPDKSIERDKIQGQVNILEKKISRLNDLYVDDRISLDELKIKSDNFFKMKAVLETELENDPAIKQQKKKENMKKILKTKDILSMNYEQQKAIIRALITKVKVTAESIIIKWKI

SEQ ID NO: 7477 - DNA, 50 bp, Streptococcus mutans; identical to SEQ ID NO: 7452
  source 1..50: mol_type = genomic DNA

SEQ ID NO: 7478 - DNA, 40 bp, Streptococcus mutans; identical to SEQ ID NO: 1308
  source 1..40: mol_type = genomic DNA

SEQ ID NO: 7479 - DNA, 40 bp, Streptococcus mutans; identical to SEQ ID NO: 7454
  source 1..40: mol_type = genomic DNA

SEQ ID NO: 7480 - DNA, 50 bp, Streptococcus mutans; identical to SEQ ID NO: 7455
  source 1..50: mol_type = genomic DNA

SEQ ID NO: 7481 - protein, 480 aa, Streptococcus mutans
MIATNKVAIYIRVSTTNQAEEGYSIEEQQEKLKAYCAIKDWSIYDVYIDGGFTGSNTDRPELKRLVKEAKNKKFDTVLVYKLDRLSRSQKDTLYLIEEVFTKNNIAFLSLLENFDTSSAFGKAMIGILSVFAQLEREQIKERMQLGKVGRAKSGKSMMWAKPSYGYIYHQETGEMTVDEYESIAIKFIFSSYLAGRSITKLRDDLNKKYPKEIAWNYKMVRHILDNPVYCGNIRFKGKIYSGNHEAIISKEDFEKVQEELVIRQRTAAKNSNPRPFQAKYMLSGIVQCGYCKAPLKIIMGAIRKDGTRFIRYECYQRHPRKIKGVTVYNDNKKCNSGYYDKKELEQYVLKEVSKLQEDKEYLESLFNVPNKSIERDKIQGQINILEKKISRLNDLYVDDRISLDELKIKSDNFLKMKAVLEIELENDPAIKQQKKKENMKKILKTKDILSMNYEQQKAVIRALITKVQVTAESIIIKWKI

SEQ ID NO: 7482 - DNA, 50 bp, Streptococcus mutans; identical to SEQ ID NO: 7452
  source 1..50: mol_type = genomic DNA

SEQ ID NO: 7483 - DNA, 40 bp, Streptococcus mutans
  source 1..40: mol_type = genomic DNA
attaccaaagtcactaaactttctataagcgtaaaagccc

SEQ ID NO: 7484 - DNA, 40 bp, Streptococcus mutans
  source 1..40: mol_type = genomic DNA
attaccaaagtcactaaacagtctataagcgtaaaagccc

SEQ ID NO: 7485 - DNA, 50 bp, Streptococcus mutans; identical to SEQ ID NO: 7455
  source 1..50: mol_type = genomic DNA

SEQ ID NO: 7486 - protein, 480 aa, Streptococcus mutans
MIATNKVAIYIRVSTTNQAEEGYSIEEQQEKLKAYCAIKDWSIYDVYIDGGFTGSNTDRPELKRLVKEAKNKKFDTVLVYKLDRLSRSQKDTLYLIEEVFTKNNIAFLSLLENFDTSSAFGKAMIGILSVFAQLEREQIKERMQLGKVGRAKSGKSMMWAKPSYGYIYHQETGEMTVDEYESIAIKFIFSSYLSGRSITKLRDDLNKKYPKKIAWNYKMVRHILDNPVYCGNIRFKSEIYSGNHEAIISKEDFEKVQEELAIRQRTAAENSNPRPFQAKYMLSGIAQCGYCKAPLKIIMGAIRKDGTRFIRYECYQRHPRTTKGVTVYNDNKKCNSGYYDKKELEQYVLKEVSKLQEDKEYLESLFNVPDKSIERDKIQGQVNILENKISRLNDLYVDDRISLNELKIKSDNFLKMKAVLETELENDPAIKQQKKKENMEKILKTKDILSMNYEQQKAVIRALITKVQVTAESIIIKWKI

SEQ ID NO: 7487 - DNA, 50 bp, Streptococcus mutans; identical to SEQ ID NO: 7452
  source 1..50: mol_type = genomic DNA

SEQ ID NO: 7488 - DNA, 40 bp, Streptococcus mutans; identical to SEQ ID NO: 7483
  source 1..40: mol_type = genomic DNA

SEQ ID NO: 7489 - DNA, 40 bp, Streptococcus mutans; identical to SEQ ID NO: 7484
  source 1..40: mol_type = genomic DNA

SEQ ID NO: 7490 - DNA, 50 bp, Streptococcus mutans; identical to SEQ ID NO: 7455
  source 1..50: mol_type = genomic DNA

SEQ ID NO: 7491 - protein, 480 aa, Streptococcus mutans
MIATNKVAIYIRVSTTNQAEEGYSIEEQQEKLKAYCAIKDWSIYDVYIDGGFTGSNTDRPELKRLVREAKNKKFDTVLVYKLDRLSRSQKDTLYLIEEVFTKNNIAFLSLLENFDTSSAFGKAMIGILSVFAQLEREQIKERMQLGKVGRAKSGKSMMWAKPSYGYIYHQETGEMTVDEYESIAIKFIFSSYLAGRSITKLRDDLNKKYPKKIAWNYKMVRHILDNPVYCGNIRFKSKIYSGNHKAIISKEDFEKVQEELAIRQRTAAENSNPRPFQAKYMLSGIAQCGYCKAPLKIIMGAIRKDGTRFIRYECYQRHPRKIKGVTVYNDNKKCNSGYYDKKELEQYVLKEVSKLQEDKEYLESLFNVPDKSIERDKIQGQVNILENKISRLNDLYVDDRISLDELKIKSDNFLKMKAVLETELENDPVTKQQKKKENMEKILKTKDILSMNYEQQKAVIRALITKVQVTTESIIIKWKI

SEQ ID NO: 7492 - DNA, 50 bp, Streptococcus mutans; identical to SEQ ID NO: 7452
  source 1..50: mol_type = genomic DNA

SEQ ID NO: 7493 - DNA, 40 bp, Streptococcus mutans
  source 1..40: mol_type = genomic DNA
attgccaaagtcactaaactttctataagtgtaaaagccc

SEQ ID NO: 7494 - DNA, 40 bp, Streptococcus mutans
  source 1..40: mol_type = genomic DNA
attgccaaagtcactaaacagtctataagtgtaaaagccc

SEQ ID NO: 7495 - DNA, 50 bp, Streptococcus mutans; identical to SEQ ID NO: 7455
  source 1..50: mol_type = genomic DNA

SEQ ID NO: 7496 - protein, 480 aa, Streptococcus mutans
MIATNKVAIYIRVSTTNQAEEGYSIEEQQEKLKAYCAIKDWSIYDVYIDGGFTGSNTDRPELKRLVKEAKNKKFDTVLVYKLDRLSRSQKDTLYLIEEVFTKNNIAFLSLLENFDTSSAFGKAMIGILSVFAQLEREQIKERMQLGKVGRAKSGKSMMWAKPSYGYIYHQETGEMTVDEYESIAIKFIFSSYLAGRSITKLRDDLNKKYPKKFAWNYKMVRHILDNPVYCGNIRFKDEIYSGNHEAIISKEDFEKVQEELAIRQRTAAENSNPRPFQAKYMLSGIAQCGYCKAPLKIIMGAIRKDGTRFIRYECYQRHPRTTKGVTVYNDNKKCNSGYYDKKELEQYVLKEVSKLQEDKEYLESLFNVPDKSIERDKIQGQVNILENKISRLNDLYVDDRISLDELKIKSDNFLKMKAVLETELENDPAIKQQNKKENMKKILKTKDILSMNYEQQKAVIRALITKVQVTAESIIIKWKI

SEQ ID NO: 7497 - DNA, 50 bp, Streptococcus mutans; identical to SEQ ID NO: 7452
  source 1..50: mol_type = genomic DNA

SEQ ID NO: 7498 - DNA, 40 bp, Streptococcus mutans; identical to SEQ ID NO: 7483
  source 1..40: mol_type = genomic DNA

SEQ ID NO: 7499 - DNA, 40 bp, Streptococcus mutans; identical to SEQ ID NO: 7484
  source 1..40: mol_type = genomic DNA

SEQ ID NO: 7500 - DNA, 50 bp, Streptococcus mutans; identical to SEQ ID NO: 7455
  source 1..50: mol_type = genomic DNA

SEQ ID NO: 7501 - protein, 681 aa, Colwellia psychrerythraea
MYRKYAISYIRFSTAEQSLGDSYNRQFEEAERFCFENNIKIVKDYKDLGKSAYKSVNLAPESGLNYFLNALKRGEISNPKETHLLVESLDRLSRAQVTTSMHLFLGILKQGISILTLADGKVYEQGCELSDIVTSVMMLAKAHQESVDKSYRIGKVWKRKKEAARADAKNKAGTDKKVTALTKMCPFWLKIVKENDRFVYEIKEIEVNTVKLIFDLATGDAIDNEVELSISVENTKFSSIEIARILNNENIPIIKSGKRKRTDYWHASNINRIITNKAVYGIYQPKLLVKKEYTHHDDFNESYPVEKPYFENDGEAIEEFFPVIISKDKFDRATHQREEKFKGKRGKKGKRFSNLFNGLALCRKCQSSMVHSDKGTSKKGKRWVYLQCSNARIKGGCSATSINYSILEYNVLQFVQGTNFSELISNIQLPSVGEISQQQNIIDIVEANLNKISKQFHKYMEFDDDNDPDFADEIKLKLIELRKEKRTLNSKWSNEKVKLGNMLTRTSSVNLDEMSFKKLIKEIDISNQSKENDDVYFKRQKVNSLLTSLISHVYVDTLRLKALIFYKSNVIQLVDIKDEIATGTIFSTVRLPSFKFSSKIESSYQDAFKDAFYDLVMMLIDGKMNMSATSLNESENEGLLNLEKNFSHVMSYPKILADSFKAGGNDFSVKFNEEQYWFEVS

SEQ ID NO: 7502 - DNA, 50 bp, Colwellia psychrerythraea
  source 1..50: mol_type = genomic DNA
atgggtataatatatcttgatattaaaatattaagtgttataatacccat

SEQ ID NO: 7503 - DNA, 40 bp, Colwellia psychrerythraea
  source 1..40: mol_type = genomic DNA
ccctggctatcatatgaataagcgcttgtggaatacaatc

SEQ ID NO: 7504 - DNA, 40 bp, Colwellia psychrerythraea
  source 1..40: mol_type = genomic DNA
ccctggctatcatatgaatgtgcgcttgtggaatacaatc

SEQ ID NO: 7505 - DNA, 50 bp, Colwellia psychrerythraea
  source 1..50: mol_type = genomic DNA
atgggtgtagaaattctgaaaattgtaagattaagcaaaagaataaacat

SEQ ID NO: 7506 - protein, 522 aa, Vibrio parahaemolyticus
MRFSRPEQAKGTSIERQSNFAEQYALEHGLELDKSLTMMDKGLSAFHGVHKTKGAFGQFLAAVTAGKVPSGSVLVVESLDRLSREDPLIAQAALTDLILSGITVVTAADNQVYSREEIQQNPFKLIMSLVVMIRANEESETKQRRSNAFLKSALNQYQANGKIRRLGSDPSWLDFNKDNDTYSFNERVEVIRRILNLYNQGIGSLKIARQLTEENIPTLSGKRSAWGQTTVANIVKSHALYGMKRINVQGVEYDLEDFYPALITKSKWLALQQHRTKRSKSMHGRGEVVHLITGHGKGFTTCGYCGGGLGAQTQKQYKRSGEYSRTVTRLHCLTHKETSSCCSSVFLEPIESAVLFAACIGVEPQSLVPTVNNVNYSALIDEVENKVKHIVEQVTAGAPWGLFKDAHDKLKLEKQKLIKERDSQKPDVNQSDVQKWVNKLVELADKARANDKEARLKCRTLINSICKSIVIKLRGHDLKSEPVVTITFVTDEQFEFKVGKNGAVQFVDNGMAVNRRLKPLLT

SEQ ID NO: 7507 - DNA, 50 bp, Vibrio parahaemolyticus
  source 1..50: mol_type = genomic DNA
tagttatgcactgtacattttctttctgtctaatgtatagtgaaaactta

SEQ ID NO: 7508 - DNA, 40 bp, Vibrio parahaemolyticus; identical to SEQ ID NO: 7098
  source 1..40: mol_type = genomic DNA

SEQ ID NO: 7509 - DNA, 40 bp, Vibrio parahaemolyticus
  source 1..40: mol_type = genomic DNA
gaaataaccaaaagagccgccagtccaatggatgtcttgc

SEQ ID NO: 7510 - DNA, 50 bp, Vibrio parahaemolyticus
  source 1..50: mol_type = genomic DNA
taattttgtgtcctactttttattcctgtataatatactctgaaaacttt

SEQ ID NO: 7511 - protein, 537 aa, Bifidobacterium bifidum; identical to SEQ ID NO: 6566

SEQ ID NO: 7512 - DNA, 50 bp, Bifidobacterium bifidum
  source 1..50: mol_type = genomic DNA
tcatatctttaactaagggaaactggtgtttcccaaacaaaaagatatta

SEQ ID NO: 7513 - DNA, 40 bp, Bifidobacterium bifidum
  source 1..40: mol_type = genomic DNA
tgcttcaggaaaagcacttggaaattccctctcggatgcg

SEQ ID NO: 7514 - DNA, 40 bp, Bifidobacterium bifidum
  source 1..40: mol_type = genomic DNA
tgcttcaggaaaagcacttttaaattccctctcggatgcg

SEQ ID NO: 7515 - DNA, 50 bp, Bifidobacterium bifidum
  source 1..50: mol_type = genomic DNA
tcaaatcttttaagtagggaaacatttttttcctcatacccaacataata

SEQ ID NO: 7516 - protein, 507 aa, Citrobacter freundii
MKRVISYIRFSSEKQAKGDSLRRQSKMVTDWLKAHPEYYLDESLTFRDLGVSGFTGKHLQGGLGDFLTAIEKGLVKAGDTLLIESLDRLSRQDVDQASELLRNILRSGVDVVTLSDGEHYTKESLKDPLALIKSILIMQRAHEESLRKSERIQAAWDAKKEEAKAGIKISKRCPAWLKLNDDRKSFSVIPEKVETVKRCFQLRLEGKSIWDIVRTLNAEGHQTLNQYKAGSFGQTSVQDLLKNRSVIGYFTPKGCEEIAGYYPSIIPETDFYRVQQLSYSRYGRKPVSENPMAVNLFKGVIRCSECGHTLIINGFTEKRHGIYRCPCKQENRCNAKGLSRKQTDGTLLTLLSRIDRFEPEQINVIDTLKLQREGILKNIEKLVELSLIIDDMTAITSKFKQLKSDLSLIESDIEKENQRIKSIDTGSLSDCDLSTKAGRIEAQLIIRGVVKEAVLDTTNKRCKVVFHNGKVIDLPITENPSEAVTEAIQSLTEIASKGLLDIDEFSL

SEQ ID NO: 7517 - DNA, 50 bp, Citrobacter freundii
  source 1..50: mol_type = genomic DNA
aggtgtatttagaccttgctaatgctagatagacacgtttaaatacacta

SEQ ID NO: 7518 - DNA, 40 bp, Citrobacter freundii
  source 1..40: mol_type = genomic DNA
tggagtaaaccgggtgattctggacagccgcccggtacat

SEQ ID NO: 7519 - DNA, 40 bp, Citrobacter freundii
  source 1..40: mol_type = genomic DNA
tggagtaaaccgggtgattacggacagccgcccggtacat

SEQ ID NO: 7520 - DNA, 50 bp, Citrobacter freundii
  source 1..50: mol_type = genomic DNA
aggtgtattgatctgtggctattgacatgtgtacactcaaaaatacaata

SEQ ID NO: 7521 - protein, 507 aa, Citrobacter freundii
MKRVISYIRFSSEKQAKGDSLRRQSKMVTDWLKAHPEYYLDESLTFRDLGVSGFTGKHLQGGLGDFLTAIEKGLVKAGDTLLIESLDRLSRQDVDQASELLRNILRSGVDVVTLSDGEHYTKESLKDPLALIKSILIMQRAHEESLRKSERIQAAWDAKKEEAKAGIKISKRCPAWLKLNDDRKSFSVIPEKVETVKRCFQLRLEGKSIWDIVRTLNAEGHQTLNQYKAGSFGQTSVQDLLKNRSVIGYFTPKGCEEIAGYYPSIIPETDFYRVQQLSYSRYGRKPVSENPMAVNLFKGVIRCSECGHTLIINGFTEKRHGIYRCPCKQENRCNAKGLSRKQTDGTLLTLLSRIDRFEPEQINVIDTLKLQREGILKNIEKLVELSLIIDDMTAITSKLKQLKSDLSLIESDIEKENQRIKSIDTGSLSDCDLSTKAGRIEAQLIIRGVVKEAVLDTTNKRCKVVFHNGKVIDLPITENPSEAVTEAIQSLTEIASKGLLDIDEFSL

SEQ ID NO: 7522 - DNA, 50 bp, Citrobacter freundii; identical to SEQ ID NO: 7517
  source 1..50: mol_type = genomic DNA

SEQ ID NO: 7523 - DNA, 40 bp, Citrobacter freundii; identical to SEQ ID NO: 7518
  source 1..40: mol_type = genomic DNA

SEQ ID NO: 7524 - DNA, 40 bp, Citrobacter freundii; identical to SEQ ID NO: 7519
  source 1..40: mol_type = genomic DNA

SEQ ID NO: 7525 - DNA, 50 bp, Citrobacter freundii; identical to SEQ ID NO: 7520
  source 1..50: mol_type = genomic DNA

SEQ ID NO: 7526 - protein, 507 aa, Escherichia coli
MKRVISYIRFSSEKQSRGDSLRRQSKMVTDWLKAHPEYYLDQDLSFRDLGVSGFTGKHLKGGLGDFLTAIEKGLVKAGDTLLIESLDRLSRQNVDRASELLRNILRSGVDVVTLSDGEHYTRESLKDPLALIKSILIMQRSHEESLRKSERIQAAWNRKKELISEGIKISKRCPAWLKLNDDRKSFSVIPDKVETVKRCFQLRLEGKSIWEIVRTLNAEGHRSMNQYKPGKFGQTSVQDLLKNRSVIGYFTPKGCEEISGYYPAIIDETTFYKVQQLSYARYGRKPASDKPMAVNLFKGVIRCSECGHALIITGFSDTRNGIYRCPLRNENRCSAKGLSRKQTDGTLLALLSRLDRFDSDMTNTIDTLKLHREHISSNIEKLVQLSLEIEDLSAITSKLRQLKNELSQVDADIEKETQRLKSIDVGCLSDCDLTTKAGRIEAQLIIKSAVKEVVLNTAKRRCKVTFHNGKAITLPITETPSEDVTEAIQSLSEVTERGLIDVDEVII

SEQ ID NO: 7527 - DNA, 50 bp, Escherichia coli
  source 1..50: mol_type = genomic DNA
tagtgtatttagaccttgctgatttttattagacacgtttaaatacacta

SEQ ID NO: 7528 - DNA, 40 bp, Escherichia coli; identical to SEQ ID NO: 5188
  source 1..40: mol_type = genomic DNA

SEQ ID NO: 7529 - DNA, 40 bp, Escherichia coli; identical to SEQ ID NO: 5749
  source 1..40: mol_type = genomic DNA

SEQ ID NO: 7530 - DNA, 50 bp, Escherichia coli
  source 1..50: mol_type = genomic DNA
caatgtaatatatgcatgctgattaattttagacactgatgaacaaaata

SEQ ID NO: 7531 - protein, 694 aa, Sinorhizobium fredii
MSTDNAMKISADHLRRDAFLYVRQSSLRQVFENTESTKRQYALRDRAVALGWPIERVHVIDNDLGLSGAQSQDRDGFQRLVTEVAMGHAGIVLGLEVSRLARNNADWHRLLELAAMSRTLIMDEDGVYDAASFNDRILLGLKGTMSEAELHILKSRLQGGILNKARRGELELPLPIGLVYTPDMRVVLDPDRQIQDTVRMLFDTFREVGSACAVVRRLRSEKILFPRRIRRGIGKGDVLWSAIDHSRVIQILHNPRYAGAFAYGRTRTIYNAKLKSVQQKMPRSDWQVLIPQAHEGYISWDEFERNQTSLEQNAVGFSPGLRGRMPRQGNGLLQGRVLCGRCGARMRVHYEQFEGNLRPYYICNEAVVRHAGKVCQWARGPAIDEAVSALLLEAMAPTAIEVALAVQEEISQRVEQAASLRDKQLQRARYEAELARRRYLKVDPDNRLVADALEADWNGKLRDLDTLQREHERQNDTDQSLLDGAMQERIRALAADFPRIWNNERTSPVERKRMLGLLIEDVTLLVDEQINMHIRWRGGRTQSLAVARPRPMAVIRKTPEAVVALINELLETDNDQQIASRLNALGHRNWRGEAFTLKKVMLVRRAYGLKTRFERLRESGMLTGEEVARRFGVSATTVHQLGRDGVLKRHRYATNHRYLYEPPGNVRLAKGVGGRYGSRQPRLMDAQQIQQGAS

SEQ ID NO: 7532 - DNA, 50 bp, Sinorhizobium fredii
  source 1..50: mol_type = genomic DNA
acaaggtgcatcgtgatgtctgctccttctttcaagtcctggtctgcagt

SEQ ID NO: 7533 - DNA, 40 bp, Sinorhizobium fredii
  source 1..40: mol_type = genomic DNA
acggcgttctcaaccttcgccttgtccttcgggcggcgcg

SEQ ID NO: 7534 - DNA, 40 bp, Sinorhizobium fredii
  source 1..40: mol_type = genomic DNA
acggcgttctcaaccttcgagttgtccttcgggcggcgcg

SEQ ID NO: 7535 - DNA, 50 bp, Sinorhizobium fredii; identical to SEQ ID NO: 1205
  source 1..50: mol_type = genomic DNA

SEQ ID NO: 7536 - protein, 537 aa, Clostridium perfringens; identical to SEQ ID NO: 4646

SEQ ID NO: 7537 - DNA, 50 bp, Clostridium perfringens
  source 1..50: mol_type = genomic DNA
ggttgcaaaatggtaaacagaacatcagatataacaaccattttgataac

SEQ ID NO: 7538 - DNA, 40 bp, Clostridium perfringens; identical to SEQ ID NO: 4603
  source 1..40: mol_type = genomic DNA

SEQ ID NO: 7539 - DNA, 40 bp, Clostridium perfringens; identical to SEQ ID NO: 4604
  source 1..40: mol_type = genomic DNA

SEQ ID NO: 7540 - DNA, 50 bp, Clostridium perfringens
  source 1..50: mol_type = genomic DNA
aggtggaaacaaggaaacagaacaatagaaaaaaaacctgattggttaac

SEQ ID NO: 7541 - protein, 537 aa, Clostridium perfringens; identical to SEQ ID NO: 4646

SEQ ID NO: 7542 - DNA, 50 bp, Clostridium perfringens
  source 1..50: mol_type = genomic DNA
ggttgcaaaatggtaaacagaacatcagatataataaccattttgataac

SEQ ID NO: 7543 - DNA, 40 bp, Clostridium perfringens; identical to SEQ ID NO: 4603
  source 1..40: mol_type = genomic DNA

SEQ ID NO: 7544 - DNA, 40 bp, Clostridium perfringens; identical to SEQ ID NO: 4604
  source 1..40: mol_type = genomic DNA

SEQ ID NO: 7545 - DNA, 50 bp, Clostridium perfringens; identical to SEQ ID NO: 7540
  source 1..50: mol_type = genomic DNA

SEQ ID NO: 7546 - protein, 537 aa, Clostridium perfringens
MKKAAIYTRKSKFTEKGDSIESQIKLCSKYLDNINIKDYCIYTDEGFSGKNTDRPEFQRMLSDAKAKKFDVIICYKFDRISRNVSDFSNLINKLNELNISFISVVEQFDTNSAIGRAMMYLCTVFSQLERETISQRITDNMYSLATKGYWLGGETPTGFRSEKKFFNSNNKQKMYSSLVPIKEELDLVKLIFNKYLEFNSISKIEKYLLSNNIKTKRNKDWSKASISLILRNPAYVKADEETFKYIESTGSKVYGNPDGKHGLLIYKKNKGRKGAKHDISEWIYAVSEHEGIIDSDIWVAIQKQIKKNAILAPALGTSNIALLTGLIRCAKCNSPMRVAYGKRNPKTNKKNYYYVCTLKTKSGKTRCDSKNLPGLDLDNLILDKLKEMSLDKNTLLKELNKYKDTIESNFHNDVLKNIQNNISKNNSMIDNLLNNVALSTDSEVTTILLEKISKLKDENKLLTQKIDDLKSELEAQETLLNDCNSLITKLKYFSKFIDNSSIEEQKQLVSSVIEKVIANGDTGSIEIKFRPLLDFKI

SEQ ID NO: 7547 - DNA, 50 bp, Clostridium perfringens; identical to SEQ ID NO: 7537
  source 1..50: mol_type = genomic DNA

SEQ ID NO: 7548 - DNA, 40 bp, Clostridium perfringens; identical to SEQ ID NO: 4603
  source 1..40: mol_type = genomic DNA

SEQ ID NO: 7549 - DNA, 40 bp, Clostridium perfringens; identical to SEQ ID NO: 4604
  source 1..40: mol_type = genomic DNA

SEQ ID NO: 7550 - DNA, 50 bp, Clostridium perfringens; identical to SEQ ID NO: 7540
  source 1..50: mol_type = genomic DNA

SEQ ID NO: 7551 - protein, 537 aa, Clostridium perfringens
MKKAAIYTRKSKFTEKGDSIESQIKLCSKYLDNINIKDYCIYTDEGFSGKNTDRPEFQRMLSDAKAKKFDVIICYKFDRISRNVSDFSNLINKLNELNISFISVVEQFDTNSAIGRAMMYLCTVFSQLERETISQRITDNMYSLATKGYWLGGETPTGFKSEKKFFNSNNKQKMYSSLVPIKEELDLVKLIFNKYLEFNSISKIEKYLLSNNIKTKRNKDWSKASISLILRNPAYVKADEETFKYIESTGSKVYGNPDGKHGLLIYKKNKGRKGAKHDISEWIYAVSEHEGIIDSDIWVAIQKQIKKNAILAPALGTSNIALLTGLIRCAKCNSPMRVAYGKRNPKTNKKNYYYVCTLKTKSGKTRCDSKNLPGLDLDNLILDKLKEMSLDKNTLLKELNKYKDTIESNFHNDVLKNIQNNISKNNSMIDNLLNNVALSTDSEVTAILLEKISKLKDENKLLTQKIDDLKSELEAQETLLNDCNSLITKLKYFSKFIDNSSIEEQKQLVSSVIEKVIADGDTGSIEIKFRPLLDFKI

SEQ ID NO: 7552 - DNA, 50 bp, Clostridium perfringens; identical to SEQ ID NO: 7537
  source 1..50: mol_type = genomic DNA

SEQ ID NO: 7553 - DNA, 40 bp, Clostridium perfringens; identical to SEQ ID NO: 4603
  source 1..40: mol_type = genomic DNA

SEQ ID NO: 7554 - DNA, 40 bp, Clostridium perfringens; identical to SEQ ID NO: 4604
  source 1..40: mol_type = genomic DNA

SEQ ID NO: 7555 - DNA, 50 bp, Clostridium perfringens; identical to SEQ ID NO: 7540
  source 1..50: mol_type = genomic DNA

SEQ ID NO: 7556 - protein, 537 aa, Clostridium perfringens
MKKAAIYTRKSKFTEKGDSIESQIKLCSKYLDNINIKNYCIYTDEGFSGKNTDRPEFQRMLSDAKAKKFDVIICYKFDRISRNVSDFSNLINKLNELNISFISVVEQFDTNSAIGRAMMYLCTVFSQLERETISQRITDNMYSLATKGYWLGGETPTGFRSEKKFFNSNNKQKMYSSLVPIKEELDLVKLIFNKYLEFNSISKIEKYLLSNNIKTKRNKDWSKASISLILRNPAYVKADEETFKYIESTGSKVYGNPDGKHGLLIYKKNKGRKGAKHDISEWIYAVSEHEGIIDSDIWVAIQKQIKKNAILAPALGTSNIALLTGLIRCAKCNSPMRVAYGKRNPKTNKKNYYYVCTLKTKSGKTRCDSKNLPGLDLDNLILDKLKEMSLDKNTLLKELNKYKDTIESNFHNDILKNIQNNISKNNSMIDNLLNNVALSTDSEVTAILLEKISKLKDENKLLTQKIDDLKSELEAQETLLNDCNSLITKLKYFSKFIDNSSIEEQKQLVSSVIEKVIADGDTGSIEIKFRPLLDFKI

SEQ ID NO: 7557 - DNA, 50 bp, Clostridium perfringens; identical to SEQ ID NO: 7537
  source 1..50: mol_type = genomic DNA

SEQ ID NO: 7558 - DNA, 40 bp, Clostridium perfringens; identical to SEQ ID NO: 4623
  source 1..40: mol_type = genomic DNA

SEQ ID NO: 7559 - DNA, 40 bp, Clostridium perfringens; identical to SEQ ID NO: 4624
  source 1..40: mol_type = genomic DNA

SEQ ID NO: 7560 - DNA, 50 bp, Clostridium perfringens; identical to SEQ ID NO: 7540
  source 1..50: mol_type = genomic DNA

SEQ ID NO: 7561 - protein, 552 aa, Vibrio splendidus
MTDHKRKVISYARFSSVNQTGNSSIQRQLALASEYCLRNDYELDTALSIQDEGLSAYKGKHITEGALGTFLDALKDGVIQFNQRPILLIEKVDRLTRLSISESQSLINDLLRYADIHEYEGNLHLTEESKDDLASVLLLAVKIDSANQYTKTLSERVKQGLSKKRADAVHVSPKPPQWVNKTPDGYKFNERVEIVRLILELRLQGLAFNKIALELNNQGFIKPNGSAWQTGSVSSICKNKAVIGICSTKYGDIKDVYPSVITEADFNEINKEKLNHFATGKKAPFEQNLFADLGKCHLCNSAVSRQTTESYVCSGRYHGNNCDNQSIPLKALEPAVIQIMFNQLEQNQIFSTTNESELQKLRLDLSKSEHEYNELEQYIDSQATVSSRLLIELDKRQKELEDLKGRINAQDSAIVSEFTELQVNYRDILSDKALRVKAKKLLRRLLDKVTYEKHDKLKFHVVLHFKTTSDALLIEVTGTQEKHKFGQGQRPISYHFTLMYFEKDIATSIAWHKASTTTIGFIRLSELEQYSDIEKNLCLEAFELERQSKKTS

SEQ ID NO: 7562 - DNA, 50 bp, Vibrio splendidus
  source 1..50: mol_type = genomic DNA
ggacatgataatgtacacttcagcgaagagaactttacattaacatagtt

SEQ ID NO: 7563 - DNA, 40 bp, Vibrio splendidus
  source 1..40: mol_type = genomic DNA
cgatttggatcacttcagcgaagacaactttaccaaagac

SEQ ID NO: 7564 - DNA, 40 bp, Vibrio splendidus
  source 1..40: mol_type = genomic DNA
cgatttggatcacttcagcccagacaactttaccaaagac

SEQ ID NO: 7565 - DNA, 50 bp, Vibrio splendidus
  source 1..50: mol_type = genomic DNA
ggacctgatcttggacttttcagcccacagaactgtgaaaaaatacattt

SEQ ID NO: 7566 - protein, 482 aa, Streptococcus anginosus
MITTNKVAIYVRVSTTNQVEEGYSIDEQKDKLSSYCKIKDWSVYNIYTDGGFTGSNTHRPALEQLIKDAKKQLFDTVLVYKLDRLSRSQKDTLYLIEDIFLENKIDFVSLLENFDTSTPFGKAMIGILSVFAQLEREQIKERLMLGKIGRAKSGKSMMWARTSYGYDYHKKTGTMTINEFEAIVIRYIFNSYLEGMSITKLRDRINEKYPKEPAWHYRIIRGILANPVYCGYNQYKGRIYPGNHEPIITEEIYNKTQEELKIRQIAAAEFSNNPRPFRAKYMLSGIAQCGYCGAPLQITLGTKRKDGSRNIRYQCKNRFPRTTKGVTIYNDNKKCDSRFYEKADVEENVLHQLSKLQNDTNYLDELFSDNEETNIDRDNYQKQIDELTKKLSRLNDLYIDDRITLEELQKRSAEFTLMRAMLEAELENDPVLKQKKRKESMRETLDTEDILSMDYEQQKVIVRALITKVRVTSEDIVIKWKI

SEQ ID NO: 7567 - DNA, 50 bp, Streptococcus anginosus
  source 1..50: mol_type = genomic DNA
ctaacaattttactatctttcatttcaatcaatgtatctaaaactctttg

SEQ ID NO: 7568 - DNA, 40 bp, Streptococcus anginosus
  source 1..40: mol_type = genomic DNA
aagaagcacgactaacatttctactaaagtaaaagcttta

SEQ ID NO: 7569 - DNA, 40 bp, Streptococcus anginosus
  source 1..40: mol_type = genomic DNA
aagaagcacgactaacattcatactaaagtaaaagcttta

SEQ ID NO: 7570 - DNA, 50 bp, Streptococcus anginosus
  source 1..50: mol_type = genomic DNA
atggtaattcatgtgtctttcattcaaataaatgtacgaaaacttctttg

SEQ ID NO: 7571 - protein, 479 aa, Streptococcus thermophilus
MTKIALYLRLSVDEANTDESNSITHQRYLLNHFLNQEPKFKNWERLEFVDDGFSGTSLNRPAFIRMMADVKAGTIRNIIVKDLSRFMRDYLELGNYLENIFPFLGVRFIALNDHYDSLVSEHNGLDIDVPFRNLLNDFYAKDVSEKVKSAMNSMKRSGKNMSWLPPFGYIKDPNDRFKIIIDEEVAPIVRRIFRLCIEGMGTQKIAMLLNSEQTITPAERKMQVSQARYTKSIIITAEQKRNVWTRSGILQILKNEAYKGTYLFNTRTTVNGKQIRRPESEWERLDNNHEAIVSSEDFDKAQRSLASRISGPKNQTCNQPEEVLLRGLVICEHCGHRLLRYSHYNNYDYFYCRYCRSQGQTMKSCRIDRIEEAIEKELKSRLPKNSPKLSKTNLIREAERLKTQKVSHFQDYKEGLMTRETYMEKRQNLDNSIMEIEEQLKVVGRENIAFDKKMTREVVDTHIERIVVNGQGSFTVVYR

SEQ ID NO: 7572 - DNA, 50 bp, Streptococcus thermophilus
  source 1..50: mol_type = genomic DNA
agtgtcatttacttgacataagagggggatggtgtcataataatgacagg

SEQ ID NO: 7573 - DNA, 40 bp, Streptococcus thermophilus
  source 1..40: mol_type = genomic DNA
tatgtgggaattaccaggtggtggaagagagggcatagaa

SEQ ID NO: 7574 - DNA, 40 bp, Streptococcus thermophilus
  source 1..40: mol_type = genomic DNA
tatgtgggaattaccaggtcttggaagagagggcatagaa

SEQ ID NO: 7575 - DNA, 50 bp, Streptococcus thermophilus
  source 1..50: mol_type = genomic DNA
agtgccattggtgggatgtaaatgctggatggtgtttacattatgtcagg

SEQ ID NO: 7576 - protein, 617 aa, Enterobacter ludwigii
MLIQTKIRRSTMKKVFVYHRVSSDQQFGGSGIARQAELLEAYLKRTNILAEMDDPEPVIITESGGVSAFKGHNMLITSGLGAWMQEVRASKWDGSHLVYENGDRFSRQNPFLVIGYINDLINHNITIHDATMNIIISREKSAMLPMVLMNAQRAYDESKYKSDRIRKGWAKKREQAFNKGTIVTNKRPQWIEVEKDKYVLNERAAVVKEIFALYQTGMGCPTIAKQLQRKEGEQYKFNRPWTGELVHKILTNRRVTGKIFISEIIRNHADIENPVTQKKYDMDVYPVVINEEEFELVQELLKSRRPNAGRVTVKKDGQEEVLIKSNLFSGIARCTECGGPMYHNVVRAKRTPKKGDPKIEEYRYIRCLNERDGLCQNKAMPYETVERFVVEHMLGMDLSTVIKEREFNPEIEVLRIQIDQVKDQITNYENGIERRKSAGKPISFEMREELDDAKSELERLLARQASLATVQVDVPVLQDVNVTELYDVNNVDIRTRYENELNKIVSNIRLKRNGTSYTIDINYKQNELKRHVLFVENKKKEQSLISEVIIEDIDGAKFYYTPSFMIRLKEGEIRFQQTNEDLSIVDYSLLLNYVDAVDRNDAVGVWMRNQFNFLTSN

SEQ ID NO: 7577 - DNA, 50 bp, Enterobacter ludwigii
  source 1..50: mol_type = genomic DNA
atgttgtaataagcgatacacattcaaatgtgttatgcttatacaaacaa

SEQ ID NO: 7578 - DNA, 40 bp, Enterobacter ludwigii; identical to SEQ ID NO: 4913
  source 1..40: mol_type = genomic DNA

SEQ ID NO: 7579 - DNA, 40 bp, Enterobacter ludwigii
  source 1..40: mol_type = genomic DNA
tttttgcctgataatcataaaaataagtgccattacaaca

SEQ ID NO: 7580 - DNA, 50 bp, Enterobacter ludwigii
  source 1..50: mol_type = genomic DNA
atgttgtaaacctcaatacacaataaaatttattttttcgaaagaaaaaa

SEQ ID NO: 7581 - protein, 551 aa, Clostridium beijerinckii
MKVAIYSRKSKYTGKGDSIGNQIQMCKDYIENLYKNKKIEYSIYEDEGFSGKNTNRPEFQKLLNDIKKEKFNVLICYRLDRISRNVADFSSTLDELQVYGVDFVSIREQFDTTSPMGRAMIYIASVFAQLERETIAERVRDNMIELAKNGQWLGGSPPLGYSRKRETCYDENGNEKAISFLVQELDEVKLVQLLYDTYLKLGSIHQTERYLMNNGICAPSGKLFAASTMHKILKNPLYAKSSDEILKYLEADGINVFGSPDGIHGILEYNRTSVIIRDGKKTNPFKDKSEWIAAVSKRCEGFIDPDTWLKTQKQLKTNSALSPNLGKTNNALLTSKLKCKCCGSSMGVALGRRLNETGLCKVYYRCNLKRRSSGHLCNSKNLIGDKVDECVLDSLVEMAKNKKAFLDRILKSKKENKKLKEDKFKKSTLEKQIANKTKQLNGLLDKLSVADDLLDIFMNKIRSLKSEISQLEENLKSIGENIENNSSELYDIEFINAVLDKCVNIKNESIESKRRIINFLIEEIIYDSETELLEIYPIGSGGNKKNAIIPS

SEQ ID NO: 7582 - DNA, 50 bp, Clostridium beijerinckii
  source 1..50: mol_type = genomic DNA
tcttttgttgcacttttattcacgaaccagttgcaacctgtataaaagtg

SEQ ID NO: 7583 - DNA, 40 bp, Clostridium beijerinckii
  source 1..40: mol_type = genomic DNA
attgtagtagttttaccagaaccagttggaccgcttatta

SEQ ID NO: 7584 - DNA, 40 bp, Clostridium beijerinckii
  source 1..40: mol_type = genomic DNA
attgtagtagttttaccagccccagttggaccgcttatta

SEQ ID NO: 7585 - DNA, 50 bp, Clostridium beijerinckii
  source 1..50: mol_type = genomic DNA
ttttttgttgttttttttttcataccccagtggcaattggaacaccagtg

SEQ ID NO: 7586 - protein, 571 aa, Leclercia adecarboxylata
MIHLAIPYRRFSSDKQTGNTSLTRQQDLVTKWLSKNPEYKTLPQYDYVDEAVSGYHGDNIKFGQLGEFISEVEKGTFNRYKAPTLLIENFDRFGRLKPRKALGYITDILEAGVSICLLDRGEVITPDKVDDDFFLMQLVMTASRAHGESKRKSDNVTKAWQIKAEGIADGATLTRNVPFWINPDDRQLVIPERAKLVERIFKMRLESMSCYAIGKTLNQEGIPVYTHRTVTPGKDYKKRRVAPCWHSANVSGLLSNKAVLGILPAQQVNKHNKHRQDTLRADTPGYYPAVISATLFAAVQSLKDEKHGKKRVLSNINSIQIFKKMLRCVCGAYMDVTGCRSTYAGVFKCASARAGSTLCTKPSINRQKVEEALLTRLLPSLTRLDVNHELSNQIETLKAEIEGLDVLIRKGWEDYENSEHPFYLSDGQASRISQNEKKRDEKKSELTALSVTEQSSVYEDISHLDLSDYTQRCEARVIIKRMISSITIDTDKGLLDVHLVNGNTITGFCIDSTSNKKAVFTEATDEEKQAELTAIIGERLPLVIPAGDPVGVAYEPMLDWPDVDTGDYPNE

SEQ ID NO: 7587 - DNA, 50 bp, Leclercia adecarboxylata
  source 1..50: mol_type = genomic DNA
aaatgtgtaatagaaattaaaatgaaaactataaagtctatcgtacaact

SEQ ID NO: 7588 - DNA, 40 bp, Leclercia adecarboxylata; identical to SEQ ID NO: 1588
  source 1..40: mol_type = genomic DNA

SEQ ID NO: 7589 - DNA, 40 bp, Leclercia adecarboxylata
  source 1..40: mol_type = genomic DNA
tacggactctttataaatgccgctcttaaagacagtaccc

SEQ ID NO: 7590 - DNA, 50 bp, Leclercia adecarboxylata
  source 1..50: mol_type = genomic DNA
aaatgtgtacttagaattaaattgccaacaagaaagttacatggaaaaaa

SEQ ID NO: 7591 - protein, 582 aa, Clostridioides difficile
MPRVRKVKKSNSKNHMVWRIAVYIRLSKDDGNDESLSVTNQKKIIREYLENFFEEEYILVDIYIDDGISGTTDDARTEFIRMIDDVKAGLVNCIICKTLARTFRNYADQGYYLEELFPLYNTRFICLGSPSFDTYKNPESITDGMDVPITGLMNDRYSARTSNDVRRTFNMKRRNGEFIGAFAPYGYKKDPTNKNCLIIDEVPAQVVRDIYRWYVEDGMSKIGIVRHLNELGVPTPMDYKHSQGLNLKTPNQAKNDGMWGISTIARILSNRMYIGDMVQGKQRVISYKVHKAIATPESEWFIVENTHEPIIDKVTFEMAQSLSQRDTRTAPTKRNVYLFSGFLRCADCDKSMTKKTNKKNMANGETKEYTYYVCSTYALKNKDKCSRHSISLEDLTEAVLNAIQVQISLVSNMAEVITEINKQEAVCNQSLRLTKQLQTKEHELEKITNVIDNLYMDWKCGEITRAEYVRMKSKFEAKADSMKNAIVNLKAEIELSSKGVGNNDPYLQMFLKHKNITELNRGILAELIDTIYIHENNEITIKFNFADQHKRLLEFISNNQNTSKKEGRVYTLPSLSKSTLAV

SEQ ID NO: 7592 - DNA, 50 bp, Clostridioides difficile
  source 1..50: mol_type = genomic DNA
atttttgtctatatatctatgcaccgttcggtacatgcttatatagacaa

SEQ ID NO: 7593 - DNA, 40 bp, Clostridioides difficile
  source 1..40: mol_type = genomic DNA
gttgtcgtcttacccgcaccgtttcttcctagcaatccgt

SEQ ID NO: 7594 - DNA, 40 bp, Clostridioides difficile
  source 1..40: mol_type = genomic DNA
gttgtcgtcttacccgcacaatttcttcctagcaatccgt

SEQ ID NO: 7595 - DNA, 50 bp, Clostridioides difficile
  source 1..50: mol_type = genomic DNA
atttttgtcatgaaatctttgcccaaacccctacttttaactattgacaa

SEQ ID NO: 7596 - protein, 582 aa, Clostridioides difficile
MPRVRKVKKSNSKNHMVWRIAVYIRLSKDDGNDESLSVTNQKKIIREYLENFFEEEYILVDIYIDDGISGTTDDARTEFIRMIDDVKAGLVNCIICKTLARTFRNYADQGYYLEELFPLYNTRFICLGSPSFDTYKNPESITDGMDVPITGLMNDRYSARTSNDVRRTFNMKRRNGEFIGAFAPYGYKKDPTNKNCLIIDEVPAQVVRDIYRWYVEDGMSKIGIVRHLNELGVPTPMDYKHSQGLNLKTPNQAKNDGMWGISTIARILSNRMYIGDMVQGKQRVISYKVHKAIATPESEWFIVENTHEPIIDKVTFEMAQSLSQRDTRTAPTKRNVYLFSGFLRCADCDKSMTKKTNKKNMANGETKEYTYYVCSTYALKNKDKCSRHSISLEDLTETVLNAIQVQISLVSNMAEVITEINKQEAVCNQSLRLTKQLQTKEHELEKITNVIDNLYMDWKCGEITRAEYVRMKAKFEAKADSMKNAIVNLKAEIELSSKGVGNNDPYLQMFLKHKNITELNRGILAELIDTIYIHENNEITIKFNFADQHKRLLEFISNNQNTSKKEGRVYTLPSLSKSTLAV

SEQ ID NO: 7597 - DNA, 50 bp, Clostridioides difficile; identical to SEQ ID NO: 7592
  source 1..50: mol_type = genomic DNA

SEQ ID NO: 7598 - DNA, 40 bp, Clostridioides difficile; identical to SEQ ID NO: 7593
  source 1..40: mol_type = genomic DNA

SEQ ID NO: 7599 - DNA, 40 bp, Clostridioides difficile; identical to SEQ ID NO: 7594
  source 1..40: mol_type = genomic DNA

SEQ ID NO: 7600 - DNA, 50 bp, Clostridioides difficile; identical to SEQ ID NO: 7595
  source 1..50: mol_type = genomic DNA

SEQ ID NO: 7601 - protein, 561 aa, Klebsiella oxytoca
MVKAYIYTRVSSLQQSDGFGIERQVHTLMDFLEDAELPKELGYQLDPHDYEVLEQDAGLSGFKGHNFTKGSIGKFKNRVASGEITSGCLLIESVDRFSRKQGYDAIDEFTFLIKRNIDIIEVETGQIFSYKLDHKLTQLSTSIERAYQESKRKSRMAVKSWANIKRKAVEEGIAISRNVPYWLEVKNNEYLTRTEHVNKIKRVFDMYINGVGVTSIVRELNKEGGKHDGGVYSTNFINMMLRDRRLLGWQRGKKKANETQEGREKRAIKIYPVIIGTDIFDLVQRKIDANKVTKSVRTSSKQKSLFNGLVRCEICGEALVGHFSERGNYLRCIGKRSKVGSCDSRLIKYSTFEESMLVNLKGIDFKEIYTNKNVSDDHVNNLRNELAVVNAEYDEIEGLLNTSGSTIEIVALSKALREKNKDKDKLQSELTTLTNNNVIEDVEIDVSKLTNQNNVELREKYNIYLRKVIKEIRVKRVDDILYVMVQYFTDVISHLFIIDGKDGTLLSRSHISNDLVFESDMMTIDMLKGEWELKKNNMSQWDELALDIWQSVVESAVKSIK

SEQ ID NO: 7602 - DNA, 50 bp, Klebsiella oxytoca
  source 1..50: mol_type = genomic DNA
gcttgtattagtgttttgatttgggtatatatagtactattaatacaaac

SEQ ID NO: 7603 - DNA, 40 bp, Klebsiella oxytoca
  source 1..40: mol_type = genomic DNA
ggtttgcacgatggcgtgggtatacggctctgttcagggc

SEQ ID NO: 7604 - DNA, 40 bp, Klebsiella oxytoca
  source 1..40: mol_type = genomic DNA
ggtttgcacgatggcgtgggaatacggctctgttcagggc

SEQ ID NO: 7605 - DNA, 50 bp, Klebsiella oxytoca
  source 1..50: mol_type = genomic DNA
gcttttacaaaatgtttaattttggaatatagagtcctataaatactaac

SEQ ID NO: 7606 - protein, 561 aa, Klebsiella michiganensis
MVKAYIYTRVSSLQQSDGFGIERQVHTLMDFLEDAELPKELGYQLDPHDYEVLEQDAGLSGFKGHNFTKGSIGKFKNRVASGEITSGCLLIESVDRFSRKQGYDAIDEFTFLIKRNIDIIEVETGQIFSYKLDHKLTQLSTSIERAYQESKRKSRMAVKSWANVKRKAVEEGIAISRNVPYWLEVKNNEYLTRTEHVNKIKRVFDMYMNGVGVTSIVRELNKEGGKHDGGVYSTNFINMMLRDKRLLGWQRGKKKANETQEEREGRAIKIYPVIIETDIFDLVQRKIDANKLSKSVRTSSKQKSLFNGLVRCEICGEALVGHFSERGNYLRCIGKRSKVGSCDSRLIKYSTFEEAMIVNLKGIDFKEIYTNKNVSDGHVNNLRNELAVVNAEYDEIEGLLNTSGSTIEIVALSKALREKNKEKDKLQSELTTLTNNNVIEDIEIDISELTEQDNVELREKYNIYLRKVIKEIRVKRVDDILYVMVQYFTDAISHLFIIDGNDGTLLSRSHISNDLVFESDMMTIDMVKGEWELKKNNMSQWDELALDIWQSVVESAVKSIK

SEQ ID NO: 7607 - DNA, 50 bp, Klebsiella michiganensis; identical to SEQ ID NO: 7602
  source 1..50: mol_type = genomic DNA

SEQ ID NO: 7608 - DNA, 40 bp, Klebsiella michiganensis
  source 1..40: mol_type = genomic DNA
ggtttgcacgatggcgtgggtatacggctccgttcagggc

SEQ ID NO: 7609 - DNA, 40 bp, Klebsiella michiganensis
  source 1..40: mol_type = genomic DNA
ggtttgcacgatggcgtgggaatacggctccgttcagggc

SEQ ID NO: 7610 - DNA, 50 bp, Klebsiella michiganensis; identical to SEQ ID NO: 7605
  source 1..50: mol_type = genomic DNA

SEQ ID NO: 7611 - protein, 561 aa, Raoultella ornithinolytica; identical to SEQ ID NO: 7601

SEQ ID NO: 7612 - DNA, 50 bp, Raoultella ornithinolytica; identical to SEQ ID NO: 7602
  source 1..50: mol_type = genomic DNA

SEQ ID NO: 7613 - DNA, 40 bp, Raoultella ornithinolytica; identical to SEQ ID NO: 7403
  source 1..40: mol_type = genomic DNA

SEQ ID NO: 7614 - DNA, 40 bp, Raoultella ornithinolytica
  source 1..40: mol_type = genomic DNA
aatctgcacaatggcatgggaatatggctcggttcagggc

SEQ ID NO: 7615 - DNA, 50 bp, Raoultella ornithinolytica; identical to SEQ ID NO: 7605
  source 1..50: mol_type = genomic DNA

SEQ ID NO: 7616 - protein, 604 aa, Escherichia coli
MKKCFIYHRVSSDQQLSGGRSGIVRQAENLNLYVKRIRLLETMDDPEAVILCDQGVSAFKGLNISEGELGRWMEQVQAGMWDGSHLVLESIDRFSRQNPFTLVGYLSRLVEHDITLHDVSLNLLINRSNSAMLPIVTMSAQRAYEESKIKSDRIRDGWRRKREQAFNNGTIVTNKRPQWIDIRDDQYVLNDKVHIVKEVFRLAQSGIGTPTIAKILNAKGDDWLFESGRQWRGESVHKLLKNKRVTGSIFISEIIRDYNSTSNPVDQKRYEMDVYPIVISKEEFNLVQQLLRSRRANTGRISTNKDTDELKKSNIFNSICRCGKCGEAMYHNVVKSHRNSKKNGKFTEEYRYIRCLGERDNLCDNKALRYEVVEQFVLEYLKGMDFSRILKPNNHKSEIDVLRLNIDEEKKHIREYRQGIEKLKSMGKKVPFDVLVELEESQKRLSDLEEKESKYTDLTVDTEYLKSVDPSVLFDQGNIEVRSRIEKELSMLLESIVLHRLDKHYVITLEYTQVNILKHVLFIEAGKIPVLMSTLSIEKYNDEHIYTMPSFSIRCGEGVPEIHGEAISLVDYSLLLNYIDGVDGSEYVSEWMRTNQNFIFSKET

SEQ ID NO: 7617 - DNA, 50 bp, Escherichia coli
  source 1..50: mol_type = genomic DNA
tgtttgtttactatagcggctattcaagtgtatgctaagttatacaaaca

SEQ ID NO: 7618 - DNA, 40 bp, Escherichia coli
  source 1..40: mol_type = genomic DNA
tttttgcatgataatcatacaaataggtgccgttacagca

SEQ ID NO: 7619 - DNA, 40 bp, Escherichia coli
  source 1..40: mol_type = genomic DNA
tttttgcatgataatcataagaataggtgccgttacagca

SEQ ID NO: 7620 - DNA, 50 bp, Escherichia coli; identical to SEQ ID NO: 1290
  source 1..50: mol_type = genomic DNA

SEQ ID NO: 7621 - protein, 604 aa, Escherichia coli
MKKCFIYHRVSSDQQLSGGRSGIVRQAENLNLYVKRIRLLETMDDPEAVILCDQGVSAFKGLNISEGELGRWMEQVQAGMWDGSHFVLESIDRFSRQNPFTLVGYLSRLVEHDITLHDVSLNLLINRSNSAMLPIVTMSAQRAYEESKIKSDRIRDGWRRKREQAFNNGTIVTNKRPQWIDIRDDQYVLNDKVHIVKEVFRLAQSGIGTPTIAKILNAKGDDWLFESGRQWRGESVHKLLKNKRVTGSIFISEIIRDYNSTSNPVDQKRYEMDVYPIVISKEEFNLVQQLLRSRRANTGRISTNKDTDELKKSNIFNSICRCGKCGEAMYHNVVKSHRNSKKNGKFTEEYRYIRCLGERDNLCDNKALRYEVVEQFVLEYLKGMDFSRILKPNNHKSEIDVLRLNIDEEKKHIREYRQGIEKLKSMGKKVPFDVLVELEESQKRLSDLEEKESKYTDLTVDTEYLKSVDPSVLFDQGNIEVRSRIEKELSMLLESIVLHRLDKHYVITLEYTQVNILKHVLFIEAGKIPVLMSTLSIEKYNDEHIYTMPSFSIRCGEGVPEIHGEAISLVDYSLLLNYIDGVDGSEYVSEWMRTNQNFIFSKET

SEQ ID NO: 7622 - DNA, 50 bp, Escherichia coli; identical to SEQ ID NO: 7617
  source 1..50: mol_type = genomic DNA

SEQ ID NO: 7623 - DNA, 40 bp, Escherichia coli; identical to SEQ ID NO: 1288
  source 1..40: mol_type = genomic DNA

SEQ ID NO: 7624 - DNA, 40 bp, Escherichia coli; identical to SEQ ID NO: 1289
  source 1..40: mol_type = genomic DNA

SEQ ID NO: 7625 - DNA, 50 bp, Escherichia coli; identical to SEQ ID NO: 1290
  source 1..50: mol_type = genomic DNA

SEQ ID NO: 7626 - protein, 604 aa, Escherichia coli; identical to SEQ ID NO: 7616

SEQ ID NO: 7627 - DNA, 50 bp, Escherichia coli; identical to SEQ ID NO: 7617
  source 1..50: mol_type = genomic DNA

SEQ ID NO: 7628 - DNA, 40 bp, Escherichia coli; identical to SEQ ID NO: 1288
  source 1..40: mol_type = genomic DNA

SEQ ID NO: 7629 - DNA, 40 bp, Escherichia coli; identical to SEQ ID NO: 1289
  source 1..40: mol_type = genomic DNA

SEQ ID NO: 7630 - DNA, 50 bp, Escherichia coli; identical to SEQ ID NO: 1290
  source 1..50: mol_type = genomic DNA

SEQ ID NO: 7631 - protein, 493 aa, Nocardia terpenica
MAGQRLLGRVRLSRFTDESTSVERQKDVIEAYARTNEDIIVGWAIDVDVSRSVDPFDTPELGQWFKEEKLHDWDKVVCWKLDRLATGSIYLNKLIAWCGENNKTIASVTESFDLSNWVGRMIANVIAGVAEGELEAIKERTRGSYNKLLETGRWPGGTAPYGHVPEKTNQGWVLVADPPAVKVIDRMATQAIDGNSIDWIRDELNHDKITSPADRWRELKGLEPKGGEWNSKAIWNTLTNKSLLGHATKEGETVRDAEGMPVLYGDPILTRERWNELQDALDKRRQGPQRTRSTSPGLGVVFCFDCSGQLMHKQMKRDYGKTMYRYYHCINKDCSNMTMMLAEQIESMLEESFITDLGDEQEVKRIFIRASDHSQDLAEALEAADELATMFSTVKSVSMKNRLREQMAALDSRIATLEAMPIRPAGFEYQPTGRTYGEAWADAHTPEDKRQLLLKYGIKCRVAQRSRGTGTNQAGVWDWDMDTPEDLTARMAS

SEQ ID NO: 7632 - DNA, 50 bp, Nocardia terpenica
  source 1..50: mol_type = genomic DNA
catatacaaaccgtgaaacttgacgtctcaccgttcatgcattgtatact

SEQ ID NO: 7633 - DNA, 40 bp, Nocardia terpenica
  source 1..40: mol_type = genomic DNA
ggtgtacgaggacgcggatgtgctggcgttcatggacatt

SEQ ID NO: 7634 - DNA, 40 bp, Nocardia terpenica
  source 1..40: mol_type = genomic DNA
ggtgtacgaggacgcggatttgctggcgttcatggacatt

SEQ ID NO: 7635 - DNA, 50 bp, Nocardia terpenica
  source 1..50: mol_type = genomic DNA
aatattcagagagagaaacttgatttctaaccattctttttttgaataca

SEQ ID NO: 7636 - protein, 483 aa, Hungatella hathewayi
MTTQSTVEIGAAYIRVSTNDQTELSPDAQLRVILESAKADGYVIPKEFVYIEKKGVSGRRADNRQEFQRMVATAKTQPCPFKRLYLWKFSRFARNQDESVFYKSVLRKKCGVEIKSVSEPIADGMFGRLIESIIEWFDEYYSFNLSGEVMRGMTEKALREGYQCSPSLGYAAVGEGKPFIIVEKEYVIVDFIHQSFHKGKDMTAIAREANDMGFRTKRGNRFDRRGIYRILVNEFYNGIVVWNGIKFQGAHETRPSITDIFESNQQRIKEEYRPKSRRETSSCQHWLSGILKCSVCGASLSYNRSNDQKKRPDFFQCWKYGKGVHRESCSVSVKKAEEAVLTSLRQVMADQSVQYEYIRKPDQKVISEESRLSEALEKVAMKERRVKDAYESGIDSLEEYKANKLRLQDERTHILDELEQLKETPDEPEGPDMQEILKRITTVYDLLMDPDIDNVTKGNAVRRIIKKIVFDRQMNEFHFYYYA

SEQ ID NO: 7637 - DNA, 50 bp, Hungatella hathewayi
  source 1..50: mol_type = genomic DNA
ataggtttatgcattttgggccaccggattgtaaaaaccaagaatagaaa

SEQ ID NO: 7638 - DNA, 40 bp, Hungatella hathewayi
  source 1..40: mol_type = genomic DNA
atttcgccgtctggtcccccatactgactcataataaacg

SEQ ID NO: 7639 - DNA, 40 bp, Hungatella hathewayi
  source 1..40: mol_type = genomic DNA
atttcgccgtctggtccccagtactgactcataataaacg

SEQ ID NO: 7640 - DNA, 50 bp, Hungatella hathewayi
  source 1..50: mol_type = genomic DNA
catggtttagtcacttggggccagaggatgggaaaaatttggaatagaac

SEQ ID NO: 7641 - protein, 506 aa, Bacillus thuringiensis
MYKPFSQTDYKPSDKPKALYIRKSKKSQGKTEIETIESHLKRLTDFCKDQGWNNYVIYNDYVAKSTDINRIEYNKMLNGCLDGKHDLIVVVEESRLYRTVNEQTNVYEELKGTDIAILSIREGYIFPNDRNQFLTNIIRGAMNQQELENFAYRMNVKVLASAKEGKYVNKLPFGYFKDKDKLTPHPIESKTFRFIVDKVLEGYVIAEIIGQLNQLGYTTKSNKKWKDVGTITRMLANRVYLGESHYYSKMFDEDVIVRDTHPALLTIEEFQKISNMIRSRSRNPQGIRYTKINTVLDRLVVCGICGNRLPIHKSWTNKEGVTSYQVGKCQKVMGEYNEKKCPNKSISLKELLPHFYIAIESYKDSLREEIESVEIDTTSDMKIKVMEHIKDMSKRIAEIQTEIQNAKSYLIKGVLSEADYVGLVPPLEKDLKDLNVALEDNERLLASLTDYDRSAVIQNAVDSLINIENESIENQNRVYRLLFEHLELVNTVNEFEIRLKEKDVSN

SEQ ID NO: 7642 - DNA, 50 bp, Bacillus thuringiensis
  source 1..50: mol_type = genomic DNA
actttatattaagaggttttatctcctgataaagtatgttattataatgt

SEQ ID NO: 7643 - DNA, 40 bp, Bacillus thuringiensis
  source 1..40: mol_type = genomic DNA
accttgaataacgaagtcgccagataaggcgatgccgtgt

SEQ ID NO: 7644 - DNA, 40 bp, Bacillus thuringiensis
  source 1..40: mol_type = genomic DNA
accttgaataacgaagtcgaaagataaggcgatgccgtgt

SEQ ID NO: 7645 - DNA, 50 bp, Bacillus thuringiensis
  source 1..50: mol_type = genomic DNA
actttatatgatcaagttgtctgtaatgaaagagaaattatttataatgg

SEQ ID NO: 7646 - protein, 506 aa, Bacillus wiedmannii
MYKPFSQTDYKPSDKPKALYIRKSKKSQGKTEIETIESHLKRLTDFCKDQGWNNYVIYNDYVAKSTDINRIEYNKMLNACLDGKHDLIVVVEESRLYRTVNEQTNVYEELKGTDIAILSIREGYIFPNDRNQFLTNIIRGAMNQQELENFAYRMNVKVLASAKEGKYVNKLPFGYFKDKDKLTPHPIESKTFRFIVDKVLEGYVIAEIIGQLNQLGYTTKSNKKWKDVGTITRMLANRVYLGESHYYSKMFDEDVIVRDTHPALLTIEEFQKISNMIRSRSRNPQGIRYTKINTVLDRLVVCGICGNRLPIHKSWTNKEGVTSYQVGKCQKVMGEYNEKKCPNKSISLKELLPHFYIAIESYKDSLREEIESVEIDTTSNMKIKVMEHIKDMSKRIAEIQTEIQNAKSYLIKGVLSEADYVGLVPPLEKDLKDLNVALEDNERLLASLTDYDRSAVIQNAVDSLINIENESIENQNRVYRLLFEHLELVNTVNEFEIRLKEKDVSN

SEQ ID NO: 7647 - DNA, 50 bp, Bacillus wiedmannii; identical to SEQ ID NO: 7642
  source 1..50: mol_type = genomic DNA

SEQ ID NO: 7648 - DNA, 40 bp, Bacillus wiedmannii; identical to SEQ ID NO: 5548
  source 1..40: mol_type = genomic DNA

SEQ ID NO: 7649 - DNA, 40 bp, Bacillus wiedmannii
  source 1..40: mol_type = genomic DNA
accttgaataacgaagtcaaaagataaggcgatgccgtgt

SEQ ID NO: 7650 - DNA, 50 bp, Bacillus wiedmannii; identical to SEQ ID NO: 7645
  source 1..50: mol_type = genomic DNA

SEQ ID NO: 7651 - protein, 479 aa, Streptococcus pyogenes
MNKVAIYVRVSTKGQADEGYSIDEQIALLTSYCSIHKWKIYDTYVDAGVSGATIERPELSRLSRDAKKKKFNTMIVYDLKRLGRSQRNNIAFIEDVLEKNGIGFISLTENFDTSSPLGKAMVGILSAFGQLDRDTIRERMMMGKIGRAKAGKPMMTSTIAFGYTYDRVTSSLNINPAEAIIVKTIYNEYISGRSLTKLRDYLNENGLLRNGKPWSYQGVSRILRNPVYKGMNRFRGEVYQGTHEPIISAELFDRTQKELKKRQIEAYKRNNNRRPFRAKYMLSGIIRCGVCGSPMEITLGFKRNDGTRNMRYQCINRFPRQTKGITVYNDAQKCDTGLYEKSDIEIHVLSQVRLLQLNKAKLESMFERTDVINVEDIQNQIETLNNKMRRLNDLYLNDMIDLDGLRSQTQNFLKQKELLENELENNPALNQEQDKEQFKELLGTKDITQLDYDKQKLIIKNLIDKVFVKPGNIKIKWRI

SEQ ID NO: 7652 - DNA, 50 bp, Streptococcus pyogenes
  source 1..50: mol_type = genomic DNA
taaacaaatttagatacacttgtttcaattagtgtatctaaatttctctg

SEQ ID NO: 7653 - DNA, 40 bp, Streptococcus pyogenes
  source 1..40: mol_type = genomic DNA
ctctaaagcgtcagccatttcctccgaggtaaaggctgca

SEQ ID NO: 7654 - DNA, 40 bp, Streptococcus pyogenes
  source 1..40: mol_type = genomic DNA
ctctaaagcgtcagccattggctccgaggtaaaggctgca

SEQ ID NO: 7655 - DNA, 50 bp, Streptococcus pyogenes
  source 1..50: mol_type = genomic DNA
taaacaaatagtttaaaccctgttggaagtagtttatttgaatttctatt

SEQ ID NO: 7656 - protein, 481 aa, Streptococcus pneumoniae
MITTNKVAIYVRVSTTSQVEEGYSIDEQKAKLSSYCDIKDWSVYKIYTDGGFSGSNTDRPALEGLIKDAKKRKFDTVLVYKLDRLSRSQKDTLYLIEDIFIKNNIAFLSLQENFDTSTPFGKAMIGLLSVFAQLEREQIKERMQLGKIGRAKAGKSMMWAKTSYGYDYHRETGTITINPAQALAVKFIFESYLRGRSITKLRDDLNEKYPKHVPWSYRAVRTILDNPVYCGFNQYKGEIYPGNHESIISKEEYDKTQSELKIRQRTAAENVNPRPFQAKYILSGIAQCGYCGAPLKIMLGVKRKDGSRLKKYECHQRHPRTLRGVTTYNDNKKCDSGFYYKDKLEAYVLTEISKLQDNAGYLDKIFSGDNAETIDRESYKKQIEELSKKLSRLNDLYIDDRITLEELQSKSAEFISMRGTLETELENDPALRKNKRKADMRKLLNAEKVFSMDYENQKVLVRRLINKVKVTAEDIVINWKI

SEQ ID NO: 7657 - DNA, 50 bp, Streptococcus pneumoniae
  source 1..50: mol_type = genomic DNA
ttggaaaatataaataattttagtaaccaacatttcaatcaaggatagta

SEQ ID NO: 7658 - DNA, 40 bp, Streptococcus pneumoniae
  source 1..40: mol_type = genomic DNA
cgctgataatcagcaagaccaccaacatctccaccaatgt

SEQ ID NO: 7659 - DNA, 40 bp, Streptococcus pneumoniae
  source 1..40: mol_type = genomic DNA
cgctgataatcagcaagacttccaacatctccaccaatgt

SEQ ID NO: 7660 - DNA, 50 bp, Streptococcus pneumoniae
  source 1..50: mol_type = genomic DNA
ttgcaaaatggagataattttaatttccatcatttcataacactgtttta

SEQ ID NO: 7661 - protein, 587 aa, Bacteroides ovatus
MRGAIYSRVSTEIQDYGKQTDELKDYAARNNIEVKYIFEEKVSGFKDDRTEFKKLEKLTKNDIDIILVWELSRLSRRSIFIQQTVKNFANKGICIFTKKEGLYTLNDDGTENKNAMFTIGVISMIAEQEIETLKERTISSKRRYILKEGHSYTPIAPYGYNYNSITKQLTINEDEAKVVRRMYQLSIDGVSTNRISKILTSEGIKTKKGNPNWSLATVRDILHNPVYKGVPKYTMTIRNKKVVELVSAPPIVSEEVFEQSEKELTERRNRSKSEMVNKPLLRALIFCTDCGRRYICNSGRNIYACQTRFDNIRANYVADCHSAGISATNIEPIIWNLVERLFKSTIASSKAQERIEPYQEQLSKLSESKNNFEMQRDKINKDAAKLFDTLLLIRDTNPTVFTSKMEDFNKMSTEANNYQKEIDIIESKKQAIQRRIKAIEEIKDIDITDESEKYDILHKVIEAIKIYSVKTNQKVFTVLFASGLEYNVLYNVNKPKFRIEYAFASDETITFNKKDKLLINKLHSSVRDILPDFSITAGNNDMFDNDVCGDYSFQEVWDLLEKYNKTEVLREWKPDYTKRTINRRSKK

SEQ ID NO: 7662 - DNA, 50 bp, Bacteroides ovatus
  source 1..50: mol_type = genomic DNA
agtattatgtgtaagtgaaaataggacaataaacatttgcacataatact

SEQ ID NO: 7663 - DNA, 40 bp, Bacteroides ovatus
  source 1..40: mol_type = genomic DNA
ttcacattggagaggagtagataaaatgcacgcgaacaat

SEQ ID NO: 7664 - DNA, 40 bp, Bacteroides ovatus
  source 1..40: mol_type = genomic DNA
ttcacattggagaggagtatttaaaatgcacgcgaacaat

SEQ ID NO: 7665 - DNA, 50 bp, Bacteroides ovatus
  source 1..50: mol_type = genomic DNA
tctattatgagattgtgaaaatagttaaatacaccccttttaatattact

SEQ ID NO: 7666 - protein, 587 aa, Bacteroides thetaiotaomicron
MRGAIYSRVSTEIQDYGKQTDELKDYAARNNIEVKYIFEEKVSGFKDDRTEFKKLEKLTKNDIDIILVWELSRLSRRSIFIQQTVKNFANKGICIFTKKEGLYTLNDDGTENKNAMFTIGVISMIAEQEIETLKERTISSKRRYILKEGHSYTPIAPYGYNYNLTTKQLTINEDEAEVVRRMYQLSIDGVSTNRISKILTSEGIKTKKGNPNWSLATVRDILHNPVYKGAPKYTMTIRNKKVVELVSAPQIVSEEVFEQSERELTERRNRSKSEMVNKPLLRALIFCTDCGRRYICSSGKSIYACQTRFDNIRANYIADCHSAGISATNIEPIIWNLVERLFKSTIASSKAQERIEPYQEQLSKLSESKNNFEMQRDKINKDAAKLFDTLLLIRDTNPTVFTSKMEDFNKMSTEANDYQKEIDIIESKKQAIQRRIKAIEEIKDIDITDESEKYDILHKVIEAIKIYSIKTNQKVFTVLFASGLEYNVLYNVNKPKFRIEYAFASDETITFNKKDKLLINKLYSSVRDILPDFSITAGNNDMFDNDVCGDYSFQEVWDLLEKYNKTEVLREWKPDYTKRTINRRSKK

SEQ ID NO: 7667 - DNA, 50 bp, Bacteroides thetaiotaomicron; identical to SEQ ID NO: 7662
  source 1..50: mol_type = genomic DNA

SEQ ID NO: 7668 - DNA, 40 bp, Bacteroides thetaiotaomicron
  source 1..40: mol_type = genomic DNA
agtccactggcgtggaacggataccaaatatgccaataat

SEQ ID NO: 7669 - DNA, 40 bp, Bacteroides thetaiotaomicron
  source 1..40: mol_type = genomic DNA
agtccactggcgtggaacgtttaccaaatatgccaataat

SEQ ID NO: 7670 - DNA, 50 bp, Bacteroides thetaiotaomicron; identical to SEQ ID NO: 7665
  source 1..50: mol_type = genomic DNA

SEQ ID NO: 7671 - protein, 587 aa, Bacteroides thetaiotaomicron
MRGAIYSRVSTEIQDYGKQTDELKDYAARNNIEVKYIFEEKVSGFKDDRTEFKKLEKLTKNDIDIILVWELSRLSRRSIFIQQTVKNFANKGICIFTKKEGLYTLNDDGTENKNAMFTIGVISMIAEQEIETLKERTISSKRRYILKEGHSYTPIAPYGYNYNSTTKQLTVNEDEAEVVRRMYQLSIDGVSTNRISKILTSEGVKTKKGNPNWSLATVRDILHNPVYKGVPKYTMTIRNKKVVELVSAPPIVSEEVFEQSEKELTERRNRSKSEMVNKPLLRALIFCTDCGRRYICNSGRNIYACQTRFDNIRANYVADCHSAGISATNIEPIIWNLVERLFKSTIASSKAQERIEPYQEQLSKLSESKNNFEMQRDKINKDAAKLFDTLLLIRDTNPTVFTSKMEDFNKMSTEANDYQKEIDIIESKKQAIQRRIKAIEEIKDIDITDESEKYDILHKVIEAIKIYSVKTNQKVFTVLFASGLEYNVLYNVNKPKFRIEYAFASDETITFNKKDKLLINKLHSSVRDILPDFSITAGNNDMFDNDVCGDYSFQEVWDLLEKYNKTEVLREWKPDYTKRTINRRSKK

SEQ ID NO: 7672 - DNA, 50 bp, Bacteroides thetaiotaomicron; identical to SEQ ID NO: 7662
  source 1..50: mol_type = genomic DNA

SEQ ID NO: 7673 - DNA, 40 bp, Bacteroides thetaiotaomicron
  source 1..40: mol_type = genomic DNA
ttctcattggagagggtatgataaaaaatacgcgaacagt

SEQ ID NO: 7674 - DNA, 40 bp, Bacteroides thetaiotaomicron
  source 1..40: mol_type = genomic DNA
ttctcattggagagggtattttaaaaaatacgcgaacagt

SEQ ID NO: 7675 - DNA, 50 bp, Bacteroides thetaiotaomicron; identical to SEQ ID NO: 7665
  source 1..50: mol_type = genomic DNA

SEQ ID NO: 7676 - protein, 577 aa, Pseudomonas helleri
MLVFYSKDLSMTVHIYSYKRISSRTQKEGTGIDRQEALIDEYLAHHKLELTREFIDLGISGFRGKNARTGALREFLDLITSGAIKANDVLLVENFDRLTRMNGIDATKLVVDILSAKIIIVTLSDNQTYDYRQEDHSNILFKINFVLSRANEESRIKRNRSLGAWQKKHSEAKSLNKVMTKKLPYWISYNRETESLNLNPSRANEVKKIFKLLELYGCARTAIEINKTETDKKWTLIAIRHLSRAKSVFGCLEIYKTKTANGEGADYEELENYYPAVISKEQFYNIQTKLNVRAETHEKKGREAKGFRNVFKGVIFCEHCNTALHQHFTKRKDKEYMYLLCAKSLVGACPAGRKIFIPYNYILEPFLLYYKNYDLERIIRKTGDIQSIVESRNAYDTEIKDKQKTMDKMIESIESNGGDIPKIILSRIRSIETEIDELSNKRDLADIEVTRMNIYVEAEKAISRDDIDELLSSEEGRIRFNVLLKESQVEIRVLKRFDDSKPFEGQDFKDEHKMSEVIINNKTKGFGINYYFDRKHAILAGGYYYFYTKKYIGTWNSELTLPLGSRADFSSRDDDTQ

SEQ ID NO: 7677 - DNA, 50 bp, Pseudomonas helleri
  source 1..50: mol_type = genomic DNA
tgtttgtgaaatcgctcgtaaatcgcgctttatgagctatataatagatg

SEQ ID NO: 7678 - DNA, 40 bp, Pseudomonas helleri
  source 1..40: mol_type = genomic DNA
ggtcgggctgccggaaaccgcggtcaaagaaagcaaagac

SEQ ID NO: 7679 - DNA, 40 bp, Pseudomonas helleri
  source 1..40: mol_type = genomic DNA
ggtcgggctgccggaaaccatggtcaaagaaagcaaagac

SEQ ID NO: 7680 - DNA, 50 bp, Pseudomonas helleri
  source 1..50: mol_type = genomic DNA
tgtttgtgataaaacgcatacaaaatgctttataattagatgaatagatg

SEQ ID NO: 7681 - protein, 481 aa, Streptococcus pneumoniae
MITTNKVAIYVRVSTTNQVEEGYSIDEQKDKLSSYCDIKDWNVYKVYTDGGFSGSNTDRPALESLIKDAKKRKFDTVLVYKLDRLSRSQKDTLHLIEDVFIKNGIEFLSLQENFDTSTPFGKAMIGLLSVFAQLEREQIKERMQLGKLGRAKSGKSMMWAKTSYGYDYHKETGTVTINPAQALTIKFIFESYLRGRSITKLRDDLNEKYPKHVPWSYRAVRTILDNPVYCGFNQYKGEIYPGNHEPIISKEEYDKTQSELKIRQRTAAENVNPRPFQAKYILSGIAQCGYCGAPLKIMLGVKRKDGSRLKKYECHQRHPRTLRGVTTYNDNKKCDSGFYYKDKLEAYVLKEISKLQDDADYLDKIFSGDNAETIDRESYKKQIEELSKKLSRLNDLYIDDRITLEELQSKSAEFISMRGTLETELENDPALRKNKRKADMRKLLNAEKVFSMDYENQKVLVRRLINKVKVIAEDIVINWKI

SEQ ID NO: 7682 - DNA, 50 bp, Streptococcus pneumoniae
  source 1..50: mol_type = genomic DNA
taattttagtaacctacatttccaccaaggatagtaaaactctcactctt

SEQ ID NO: 7683 - DNA, 40 bp, Streptococcus pneumoniae
  source 1..40: mol_type = genomic DNA
aagaccaccaacatttcaatcaatgtaaaagctttaacct

SEQ ID NO: 7684 - DNA, 40 bp, Streptococcus pneumoniae
  source 1..40: mol_type = genomic DNA
aagaccaccaacatttcaaccaatgtaaaagctttaacct

SEQ ID NO: 7685 - DNA, 50 bp, Streptococcus pneumoniae
  source 1..50: mol_type = genomic DNA
tgattgtatcattttacatttccacccagtatattagagttctaattctt

SEQ ID NO: 7686 - protein, 506 aa, Shigella flexneri
MRTVITYLRFSSATQGAEGADSTRRQNELFKQWLRKNSDAQVVASFNDEGLSGYKGKHLSGQFGDMLSRIESGEFPEGTILLVEAIDRIGRLEHLETEALMNRIIAHGIEIHTLQDGLIYTRDALSDDLGISIIQRVKSYIAHQESKQKSFRVSQKWEQRAKLALAGEQRLTRNVPGWIDPETFKLNERAETVRLIFKLLLDGESLHNIARHLQANNISSFSRRKDANGFSVHSVRTILRSETTIGTLPASQRNDRPAIPNYYEAAIDAATFNKAQEILDKNRKGRTPASDNPLTINIFKGLFRCQCGASVHPTGTKNKYAGVYRCNNHLDGRCDVPPLKRKPFDRWMIDNFLGMIDVGNDGESERKIAALQHEVEIVTARIKKATALLLEMDDIDELKIQLKELNQKRTELQTTIDTMKRKASLTDKELPQLKDIDLTTKAGRVECQLILSKHLKGLTLGKGSVTITLQNDTEITIPTDPLPLNDGSPIFEIADKELLDIDAYQL

SEQ ID NO: 7687 - DNA, 50 bp, Shigella flexneri
  source 1..50: mol_type = genomic DNA
aaaccgaatagacttcattcaaggggcattgtattgtagctattcggcac

SEQ ID NO: 7688 - DNA, 40 bp, Shigella flexneri
  source 1..40: mol_type = genomic DNA
gcggcgaggtaaatcaagggttattgaagtcataatcatt

SEQ ID NO: 7689 - DNA, 40 bp, Shigella flexneri
  source 1..40: mol_type = genomic DNA
gcggcgaggtaaatcaaggtgtattgaagtcataatcatt

SEQ ID NO: 7690 - DNA, 50 bp, Shigella flexneri
  source 1..50: mol_type = genomic DNA
aagcagaaagagtgtcattcaaggtgcattgtactacatataatggtcac

SEQ ID NO: 7691 - protein, 475 aa, Streptococcus pneumoniae; identical to SEQ ID NO: 1516

SEQ ID NO: 7692 - DNA, 50 bp, Streptococcus pneumoniae; identical to SEQ ID NO: 3132
  source 1..50: mol_type = genomic DNA

SEQ ID NO: 7693 - DNA, 40 bp, Streptococcus pneumoniae; identical to SEQ ID NO: 1483
  source 1..40: mol_type = genomic DNA

SEQ ID NO: 7694 - DNA, 40 bp, Streptococcus pneumoniae
  source 1..40: mol_type = genomic DNA
ttaaacgcccaatcatgattactttattatacatattttc

SEQ ID NO: 7695 - DNA, 50 bp, Streptococcus pneumoniae
  source 1..50: mol_type = genomic DNA
tattttattaatattcattattaatagtaacagttataattagtaatttt

SEQ ID NO: 7696 - protein, 475 aa, Streptococcus pneumoniae; identical to SEQ ID NO: 1501

SEQ ID NO: 7697 - DNA, 50 bp, Streptococcus pneumoniae; identical to SEQ ID NO: 3132
  source 1..50: mol_type = genomic DNA

SEQ ID NO: 7698 - DNA, 40 bp, Streptococcus pneumoniae; identical to SEQ ID NO: 1483
  source 1..40: mol_type = genomic DNA

SEQ ID NO: 7699 - DNA, 40 bp, Streptococcus pneumoniae; identical to SEQ ID NO: 7694
  source 1..40: mol_type = genomic DNA

SEQ ID NO: 7700 - DNA, 50 bp, Streptococcus pneumoniae; identical to SEQ ID NO: 7695
  source 1..50: mol_type = genomic DNA

SEQ ID NO: 7701 - protein, 475 aa, Streptococcus pneumoniae; identical to SEQ ID NO: 1481

SEQ ID NO: 7702 - DNA, 50 bp, Streptococcus pneumoniae; identical to SEQ ID NO: 3132
  source 1..50: mol_type = genomic DNA

SEQ ID NO: 7703 - DNA, 40 bp, Streptococcus pneumoniae; identical to SEQ ID NO: 1483
  source 1..40: mol_type = genomic DNA

SEQ ID NO: 7704 - DNA, 40 bp, Streptococcus pneumoniae; identical to SEQ ID NO: 7694
  source 1..40: mol_type = genomic DNA

SEQ ID NO: 7705 - DNA, 50 bp, Streptococcus pneumoniae; identical to SEQ ID NO: 7695
  source 1..50: mol_type = genomic DNA

SEQ ID NO: 7706 - protein, 475 aa, Streptococcus pneumoniae; identical to SEQ ID NO: 1481

SEQ ID NO: 7707 - DNA, 50 bp, Streptococcus pneumoniae; identical to SEQ ID NO: 3132
  source 1..50: mol_type = genomic DNA

SEQ ID NO: 7708 - DNA, 40 bp, Streptococcus pneumoniae; identical to SEQ ID NO: 1498
  source 1..40: mol_type = genomic DNA

SEQ ID NO: 7709 - DNA, 40 bp, Streptococcus pneumoniae
  source 1..40: mol_type = genomic DNA
ttaaacgcccaatcaagattactttattatacatattttc

SEQ ID NO: 7710 - DNA, 50 bp, Streptococcus pneumoniae; identical to SEQ ID NO: 7695
  source 1..50: mol_type = genomic DNA

SEQ ID NO: 7711 - protein, 475 aa, Streptococcus pneumoniae; identical to SEQ ID NO: 1516

SEQ ID NO: 7712 - DNA, 50 bp, Streptococcus pneumoniae; identical to SEQ ID NO: 3132
  source 1..50: mol_type = genomic DNA

SEQ ID NO: 7713 - DNA, 40 bp, Streptococcus pneumoniae; identical to SEQ ID NO: 1498
  source 1..40: mol_type = genomic DNA

SEQ ID NO: 7714 - DNA, 40 bp, Streptococcus pneumoniae; identical to SEQ ID NO: 7709
  source 1..40: mol_type = genomic DNA

SEQ ID NO: 7715 - DNA, 50 bp, Streptococcus pneumoniae; identical to SEQ ID NO: 7695
  source 1..50: mol_type = genomic DNA

SEQ ID NO: 7716 - protein, 475 aa, Streptococcus pneumoniae; identical to SEQ ID NO: 1521

SEQ ID NO: 7717 - DNA, 50 bp, Streptococcus pneumoniae; identical to SEQ ID NO: 3132
  source 1..50: mol_type = genomic DNA

SEQ ID NO: 7718 - DNA, 40 bp, Streptococcus pneumoniae; identical to SEQ ID NO: 1498
  source 1..40: mol_type = genomic DNA

SEQ ID NO: 7719 - DNA, 40 bp, Streptococcus pneumoniae; identical to SEQ ID NO: 7709
  source 1..40: mol_type = genomic DNA

SEQ ID NO: 7720 - DNA, 50 bp, Streptococcus pneumoniae; identical to SEQ ID NO: 7695
  source 1..50: mol_type = genomic DNA

SEQ ID NO: 7721 - protein, 509 aa, Paeniclostridium sordellii
MKTCIYLRKSRLDEEAEKQGEFETLSRHRSTLLKVAKEQNLNIVEIKEELVSGESIAYRPKMLELLEEVKNGLYDSVLVMDIDRLGRGNMQDQGLILETFKKSNTKIITPRKTYDLNNEWDEEYSEFEAFMARKELKLITRRMQRGRVKSVEEGKFIASKPPYGYKFVFDESGNKSMVIDEDKAKVVRMIFDLYVNKHYGGVKIATHLNSLGLKTTTGRTWYDKGVRDILKNKTYAGYVVWNKVERRKNSSKTRPIDERIEAKGIHEPIIDESIFLEAQSLFKSNFIPSTKQHTTITNPLAGLIVCSKCGHKMIAQQSTYKNKEIVKFVKCLNCGKNRGIKLDILEKDIINELADWVDAYNVSIKDLDSNENKNPNLESYDSIIKSLESEYQTLMKQKENLHNLLEQGIYDVDTYLDRSKILTDKINLNRSNLSQAKKDLENEKESVFSIADIIPQIKKVLELYYQSNDMQERNELLKEVIDFINYSREPKKRTSRFNIKIYPRLIKNK

SEQ ID NO: 7722 - DNA, 50 bp, Paeniclostridium sordellii
  source 1..50: mol_type = genomic DNA
aactgttattatcaaactgataaacaataatcagttatattatagcagtt

SEQ ID NO: 7723 - DNA, 40 bp, Paeniclostridium sordellii
  source 1..40: mol_type = genomic DNA
aaatgttagaactgatattcaatttaacgttatgagtggt

SEQ ID NO: 7724 - DNA, 40 bp, Paeniclostridium sordellii
  source 1..40: mol_type = genomic DNA
aaatgttagaactgatattttatttaacgttatgagtggt

SEQ ID NO: 7725 - DNA, 50 bp, Paeniclostridium sordellii
  source 1..50: mol_type = genomic DNA
aacttttaaaatttagatgataaattttaatcagctgtagaaaagcactt

SEQ ID NO: 7726 - protein, 452 aa, Listeria monocytogenes
MKAAIYIRVSTQEQIENYSIQAQTEKLTALCRSKDWDVYDIFIDGGYSGSNMNRPALNEMLSKLHEIDAVVVYRLDRLSRSQRDTITLIEEYFLKNNVEFVSLSETLDTSSPFGRAMIGILSVFAQLERETIRDRMVMGKIKRIEAGLPLTTAKGRTFGYDVIDTKLYINEEEAKQLQMIYDIFEEEKSITTLQKRLKKLGFKVKSYSSYNNWLTNDLYCGYVSYADKVHTKGVHEPIISEEQFYRVQEIFSRMGKNPNMNRDSASLLNNLVVCGKCGLGFVHRRKDTVSRGKKYHYRYYSCKTYKHTHELEKCGNKIWRADKLEELIIDRVNNYSFASRNVDKEDELDSLNEKLKTEHTKKKRLFDLYISGSYEVSELDGMMADIDARINYYEAQIEANEELKKNKKIQENLADLATVDFDSLEFREKQLYLKSLINKIYIDGEQVTIEWL

SEQ ID NO: 7727 - DNA, 50 bp, Listeria monocytogenes
  source 1..50: mol_type = genomic DNA
tttagttcctcgttttctctcgttggaagaagaagaaacgagataccaaa

SEQ ID NO: 7728 - DNA, 40 bp, Listeria monocytogenes; identical to SEQ ID NO: 1298
  source 1..40: mol_type = genomic DNA

SEQ ID NO: 7729 - DNA, 40 bp, Listeria monocytogenes; identical to SEQ ID NO: 1299
  source 1..40: mol_type = genomic DNA

SEQ ID NO: 7730 - DNA, 50 bp, Listeria monocytogenes; identical to SEQ ID NO: 1300
  source 1..50: mol_type = genomic DNA

SEQ ID NO: 7731 - protein, 452 aa, Listeria monocytogenes
MKAAIYIRVSTQEQVENYSIQAQTEKLTALCRSKDWDVYDIFIDGGYSGSNMNRPALNEMLSKLHEIDAVVVYRLDRLSRSQRDTITLIEEYFLKNNVEFVSLSETLDTSSPFGRAMIGILSVFAQLERETIRDRMVMGKIKRIEAGLPLTTAKGRTFGYDVIDTKLYINEEEAKQLQLIYDIFEEEQSITFLQKRLKKLGFKVRTYNRYNNWLTNDLYCGYVSYKDKVHVKGIHEPIISEEQFYRVQEIFTRMGKNPNMNRDSASLLNNLVVCSKCGLGFVHRRKDTMSRGKKYHYRYYSCKTYKHTHELEKCGNKIWRADKLEELIIDRVNNYSFASRNIDKEDELDSLNEKLKIEHTKKKRLFDLYISGSYEVSELDAMMSDIDAQINYYEAQIEANEELKKNKKIQENLADLATVDFDSLEFREKQLYLKSLINKIYIDGEQVTIEWL

SEQ ID NO: 7732 - DNA, 50 bp, Listeria monocytogenes
  source 1..50: mol_type = genomic DNA
tttagtacctcgttttctctcgttggaagaagaagaaacgagatacaaaa

SEQ ID NO: 7733 - DNA, 40 bp, Listeria monocytogenes
  source 1..40: mol_type = genomic DNA
tttcggttcaagctatgagggacgcaaagagggaactaaa

SEQ ID NO: 7734 - DNA, 40 bp, Listeria monocytogenes
  source 1..40: mol_type = genomic DNA
tttcggttcaagctatgaggaacgcaaagagggaactaaa

SEQ ID NO: 7735 - DNA, 50 bp, Listeria monocytogenes; identical to SEQ ID NO: 1300
  source 1..50: mol_type = genomic DNA

SEQ ID NO: 7736 - protein, 452 aa, Listeria monocytogenes
MKAAIYIRVSTQEQIENYSIQAQTEKLTALCRSKDWDVYDIFIDGGYSGSNMNRPALNEMLSKLHEIDAVVVYRLDRLSRSQRDTITLIEEYFLKNNVEFVSLSETLDTSSPFGRAMIGILSVFAQLERETIRDRMVMGKIKRIEAGLPLTTAKGRTFGYDVIDTKLYINEEEAKQLQMIYDIFEKEKSITTLQKRLKKLGFKVKSYSSYNNWLTNDLYCGYVSYADKVHTKGVHEPIISEEQFYRVQEIFSRMGKNPNMNRDSASLLNNLVVCSKCGLGFVHRRKDTVSRGKKYHYRYYSCKTYKHTHELEKCGNKIWRADKLEELIIDRVNNYSFASRNVDKEDELDSLNEKLKTEHTKKKRLFDLYISGSYEVSELDGMMADIDARINYYEAQIEANEELKKNKKIQENLADLATVDFDSLEFREKQLYLKSLINKIYIDGEQVTIEWL

SEQ ID NO: 7737 - DNA, 50 bp, Listeria monocytogenes; identical to SEQ ID NO: 7727
  source 1..50: mol_type = genomic DNA

SEQ ID NO: 7738 - DNA, 40 bp, Listeria monocytogenes; identical to SEQ ID NO: 1298
  source 1..40: mol_type = genomic DNA

SEQ ID NO: 7739 - DNA, 40 bp, Listeria monocytogenes; identical to SEQ ID NO: 1299
  source 1..40: mol_type = genomic DNA

SEQ ID NO: 7740 - DNA, 50 bp, Listeria monocytogenes; identical to SEQ ID NO: 1300
  source 1..50: mol_type = genomic DNA

SEQ ID NO: 7741 - protein, 452 aa, Listeria monocytogenes
MKAAIYIRVSTQEQIENYSIQAQTEKLTALCRSKDWDVYDIFIDGGYSGSNMNRPALNEMLSKLHEIDAVVVYRLDRLSRSQRDTITLIEEYFLKNNVEFVSLSETLDTSSPFGRAMIGILSVFAQLERETIRDRMVMGKIKRIEAGLPLTTAKGRTFGYDVIDTKLYINEEEAKQLQMIYDIFEEEKSITTLQKRLKKLGFKVKSYSSYNNWLTNDLYCGYVSYADKVHTKGVHEPIISEEQFYRVQEIFSRMGKNPNMNRDSASLLNNLVVCGKCGLGFVHRRKDTVSRGKKYHYRYYSCKTYKHTHELEKCGNKIWRADKLEELIIDRVNNYSFASRNVDKEDELDSLNEKLKTEHTKKKRLFDLYISGSYEVSELDGMMADIDAQINYYEAQIEANEELKKNKKIQENLADLATVDFDSLEFREKQLYLKSLINKIYIDGEQVTIEWL

SEQ ID NO: 7742 - DNA, 50 bp, Listeria monocytogenes; identical to SEQ ID NO: 7727
  source 1..50: mol_type = genomic DNA

SEQ ID NO: 7743 - DNA, 40 bp, Listeria monocytogenes; identical to SEQ ID NO: 1298
  source 1..40: mol_type = genomic DNA

SEQ ID NO: 7744 - DNA, 40 bp, Listeria monocytogenes; identical to SEQ ID NO: 1299
  source 1..40: mol_type = genomic DNA

SEQ ID NO: 7745 - DNA, 50 bp, Listeria monocytogenes; identical to SEQ ID NO: 1300
  source 1..50: mol_type = genomic DNA

SEQ ID NO: 7746 - protein, 452 aa, Listeria monocytogenes
MKAAIYIRVSTQEQIENYSIQAQTEKLTALCRSKDWDVYDIFIDGGYSGSNMNRPALNEMLSKLHEIDAVVVYRLDRLSRSQRDTITLIEEYFLKNNVEFVSLSETLDTSSPFGRAMIGILSVFAQLERETIRDRMVMGKIKRIEAGLPLTTAKGRTFGYDVIDTKLYINEEEAKQLQMIYDIFEEEKSITSLQKRLKKLGFKVKSYSSYNNWLTNDLYCGYVSYADKVHTKGVHEPIISEEQFYRVQEIFSRMGKNPNMNRDSASLLNNLVVCGKCGLGFVHRRKDTVSRGKKYHYRYYSCKTYKHTHELEKCGNKIWRADKLEELIIDRVNNYSFASRNVDKEDELDSLNEKLKTEHVKKKRLFDLYISGSYEVSELDAMMADIDAQINYYEAQIEANEELKKNKKIQENLADLATVDFDSLEFREKQLYLKSLINKIYIDGEQVTIEWL

SEQ ID NO: 7747 - DNA, 50 bp, Listeria monocytogenes; identical to SEQ ID NO: 7727
  source 1..50: mol_type = genomic DNA

SEQ ID NO: 7748 - DNA, 40 bp, Listeria monocytogenes; identical to SEQ ID NO: 1298
  source 1..40: mol_type = genomic DNA

SEQ ID NO: 7749 - DNA, 40 bp, Listeria monocytogenes; identical to SEQ ID NO: 1299
  source 1..40: mol_type = genomic DNA

SEQ ID NO: 7750 - DNA, 50 bp, Listeria monocytogenes; identical to SEQ ID NO: 1300
  source 1..50: mol_type = genomic DNA

SEQ ID NO: 7751 - protein, 452 aa, Listeria monocytogenes
MKAAIYIRVSTQEQIENYSIQAQTEKLTALCRSKDWDVYDIFIDGGYSGSNMNRPALNEMLSKLHEIDAVVVYRLDRLSRSQRDTITLIEEYFLKNNVEFVSLSETLDTSSPFGRAMIGILSVFAQLERETIRDRMVMGKIKRIEAGLPLTTAKGRTFGYDVIDTKLYINEEEAKQLQMIYDIFEEEKSITSLQKRLKKLGFKVKSYSSYNNWLTNDLYCGYVSYADKVHTKGVHEPIISEEQFYRVQEIFSRMGKNPNMNRDSASLLNNLVVCSKCGLGFVHRRKDTVSRGKKYHYRYYSCKTYKHTHELEKCGNKIWRADKLEELIIDRVNNYSFASRNVDKEDELDNLNEKLKTEHTKKKRLFDLYISGSYEVSELDAMMADIDAQINYYEAQIEANEELKKNKKIQENLADLATVDFDSLEFREKQLYLKSLINKIYIDGEQVTIEWL

SEQ ID NO: 7752 - DNA, 50 bp, Listeria monocytogenes; identical to SEQ ID NO: 7727
  source 1..50: mol_type = genomic DNA

SEQ ID NO: 7753 - DNA, 40 bp, Listeria monocytogenes; identical to SEQ ID NO: 1298
  source 1..40: mol_type = genomic DNA

SEQ ID NO: 7754 - DNA, 40 bp, Listeria monocytogenes; identical to SEQ ID NO: 1299
  source 1..40: mol_type = genomic DNA

SEQ ID NO: 7755 - DNA, 50 bp, Listeria monocytogenes; identical to SEQ ID NO: 1300
  source 1..50: mol_type = genomic DNA

SEQ ID NO: 7756 - protein, 452 aa, Listeria monocytogenes
MKAAIYIRVSTQEQIENYSIQAQTEKLTALCRSKDWDVYDIFIDGGYSGSNMNRPALNEMLSKLHEIDAVVVYRLDRLSRSQRDTITLIEEYFLKNNVEFVSLSETLDTSSPFGRAMIGILSVFAQLERETIRDRMVMGKIKRIEAGLPLTTAKGRTFGYDVIDTKLYINEEEAKQLQMIYDIFEEEKSITTLQKRLKKLGFKVKSYSSYNNWLTNDLYCGYVSYADKVHTKGVHEPIISEEQFYRVQEIFSRMGKNPNMNRDSASLLNNLVVCGKCGLGYVHRRKDTVSRGKKYHYRYYSCKTYKHTHELEKCGNKIWRADKLEELIIDRVNNYSFASRNVDKEDELDSLNEKLKTEHTKKKRLFDLYISGSYEVSELDAMMSDIDAQINYYEAQIEANEELKKNKKIQENLADLATVDFDSLEFREKQLYLKSLINKIYIDGEQVTIEWL

SEQ ID NO: 7757 - DNA, 50 bp, Listeria monocytogenes; identical to SEQ ID NO: 7732
  source 1..50: mol_type = genomic DNA

SEQ ID NO: 7758 - DNA, 40 bp, Listeria monocytogenes; identical to SEQ ID NO: 1298
  source 1..40: mol_type = genomic DNA

SEQ ID NO: 7759 - DNA, 40 bp, Listeria monocytogenes; identical to SEQ ID NO: 1299
  source 1..40: mol_type = genomic DNA

SEQ ID NO: 7760 - DNA, 50 bp, Listeria monocytogenes; identical to SEQ ID NO: 1300
  source 1..50: mol_type = genomic DNA

SEQ ID NO: 7761 - protein, 452 aa, Listeria monocytogenes
MKAAIYIRVSTQEQVENYSIQAQTEKLTALCRSKDWDVYDIFIDGGYSGSNMNRPALNEMLSKLHEIDAVVVYRLDRLSRSQRDTITLIEEYFLKNNVEFVSLSETLDTSSPFGRAMIGILSVFAQLERETIRDRMVMGKIKRIEAGLPLTTAKGRTFGYDVIDTKLYINEEEAKQLQLIYDIFEEEQSITFLQKRLKKLGFKVRTYNRYNNWLTNDLYCGYVSYKDKVHVKGIHEPIISEEQFYRVQEIFTRMGKNPNMNRDSASLLNNLVVCSKCGLGFVHRRKDTMSRGKKYHYRYYSCKTYKHTHELEKCGNKIWRADKLEELIINRVNNYSFASRNVDKEDELDSLNEKLKIEHAKKKRLFDLYINGSYEVSELDSMMNDIDAQINYYESQIEANEELKKNKKIQENLADLATVDFDSLEFREKQLYLKSLINKIYIDGEQVTIEWL

SEQ ID NO: 7762 - DNA, 50 bp, Listeria monocytogenes; identical to SEQ ID NO: 7732
  source 1..50: mol_type = genomic DNA

SEQ ID NO: 7763 - DNA, 40 bp, Listeria monocytogenes; identical to SEQ ID NO: 7733
  source 1..40: mol_type = genomic DNA

SEQ ID NO: 7764 - DNA, 40 bp, Listeria monocytogenes; identical to SEQ ID NO: 7734
  source 1..40: mol_type = genomic DNA

SEQ ID NO: 7765 - DNA, 50 bp, Listeria monocytogenes; identical to SEQ ID NO: 1300
  source 1..50: mol_type = genomic DNA

SEQ ID NO: 7766 - protein, 452 aa, Listeria monocytogenes
MKAAIYIRVSTQEQVENYSIQAQTEKLTALCRSKDWDVYDIFIDGGYSGSNMNRPALNEMLSKLHEIDAVVVYRLDRLSRSQRDTITLIEEYFLKNNVEFVSLSETLDTSSPFGRAMIGILSVFAQLERETIRDRMVMGKIKRIEAGLPLTTAKGRTFGYDVIDTKLYINEEEAKQLRLIYDIFEEEQSITFLQKRLKKLGFKVRTYNRYNNWLTNDLYCGYVSYKDKVHVKGIHEPIISEEQFYRVQEIFTRMGKNPNMNRDSASLLNNLVVCSKCGLGFVHRRKDTVSRGKKYHYRYYSCKTYKHTHELEKCGNKIWRADKLEELIIDRVNNYSFASRNVDKEDELDYLNEKLKTEHVKKKRLFDLYISGSYEVSELDAMMADIDAQINYYEAQIEANEELKKNKKIQENLADLATVDFDSLEFREKQLYLKSLINKIYIDGEQVTIEWL

SEQ ID NO: 7767 - DNA, 50 bp, Listeria monocytogenes; identical to SEQ ID NO: 7727
  source 1..50: mol_type = genomic DNA

SEQ ID NO: 7768 - DNA, 40 bp, Listeria monocytogenes; identical to SEQ ID NO: 7733
  source 1..40: mol_type = genomic DNA

SEQ ID NO: 7769 - DNA, 40 bp, Listeria monocytogenes; identical to SEQ ID NO: 7734
  source 1..40: mol_type = genomic DNA

SEQ ID NO: 7770 - DNA, 50 bp, Listeria monocytogenes; identical to SEQ ID NO: 1300
  source 1..50: mol_type = genomic DNA

SEQ ID NO: 7771 - protein, 452 aa, Listeria monocytogenes; identical to SEQ ID NO: 7756

SEQ ID NO: 7772 - DNA, 50 bp, Listeria monocytogenes; identical to SEQ ID NO: 7732
  source 1..50: mol_type = genomic DNA

SEQ ID NO: 7773 - DNA, 40 bp, Listeria monocytogenes; identical to SEQ ID NO: 7733
  source 1..40: mol_type = genomic DNA

SEQ ID NO: 7774 - DNA, 40 bp, Listeria monocytogenes; identical to SEQ ID NO: 7734
  source 1..40: mol_type = genomic DNA

SEQ ID NO: 7775 - DNA, 50 bp, Listeria monocytogenes; identical to SEQ ID NO: 1300
  source 1..50: mol_type = genomic DNA

SEQ ID NO: 7776 - protein, 452 aa, Listeria monocytogenes
MKAAIYIRVSTQEQIENYSIQAQTEKLTALCRSKDWDVYDIFIDGGYSGSNMNRPALNEMLSKLHEIDAVVVYRLDRLSRSQRDTITLIEEYFLKNNVEFVSLSETLDTSSPFGRAMIGILSVFAQLERETIRDRMVMGKIKRIEAGLPLTTAKGRTFGYDVIDTKLYINEEEAKQLQMIYDIFEEEKSITSLQKRLKKLGFKVKSYSSYNNWLTNDLYCGYVSYADKVHTKGVHEPIISEEQFYRVQEIFSRMGKNPNMNRDSASLLNNLVVCGKCGLGFVHRRKDTVSRGKKYHYRYYSCKTYKHTHELEKCGNKIWRADKLEKLIIDRVNNYSFASRNVDKEDELDNLNEKLKTEHTKKKRLFDLYISGSYEVSELDAMMADIDAQINYYEAQIEANEELKKNKKIQENLADLATVDFDSLEFREKQLYLKSLINKIYIDGEQVTIEWL

SEQ ID NO: 7777 - DNA, 50 bp, Listeria monocytogenes
  source 1..50: mol_type = genomic DNA
tttagttcctcattttctctcgttggaagaagaagaaacgagataccaaa

SEQ ID NO: 7778 - DNA, 40 bp, Listeria monocytogenes; identical to SEQ ID NO: 1298
  source 1..40: mol_type = genomic DNA

SEQ ID NO: 7779 - DNA, 40 bp, Listeria monocytogenes; identical to SEQ ID NO: 1299
  source 1..40: mol_type = genomic DNA

SEQ ID NO: 7780 - DNA, 50 bp, Listeria monocytogenes; identical to SEQ ID NO: 1300
  source 1..50: mol_type = genomic DNA

SEQ ID NO: 7781 - protein, 452 aa, Listeria monocytogenes
MKAAIYIRVSTQEQIENYSIQAQTEKLTALCRSKDWDVYDIFIDGGYSGSNMNRPALNEMLSKLHEIDAVVVYRLDRLSRSQRDTITLIEEYFLKNNVEFVSLSETLDTSSPFGRAMIGILSVFAQLERETIRDRMVMGKIKRIEAGLPLTTAKGRTFGYDVIDTKLYINEEEAKQLQMIYDIFEEEKSITTLQKRLKKLGFKVKSYSSYNNWLTNDLYCGYVSYADKVHTKGVHEPIISEEQFYRVQEIFSRMGKNPNMNRDSASLLNNLVVCGKCGLGYVHRRKDTVSRWKKYHYRYYSCKTYKHTHELEKCGNKIWRADKLEELIIDRVNNYSFASRNVDKEDELDSLNEKLKTEHTKKKRLFDLYISGSYEVSELDAMMSDIDAQINYYEAQIEANEELKKNKKIQENLADLATVDFDSLEFREKQLYLKSLINKIYIDGEQVTIEWL

SEQ ID NO: 7782 - DNA, 50 bp, Listeria monocytogenes; identical to SEQ ID NO: 7732
  source 1..50: mol_type = genomic DNA

SEQ ID NO: 7783 - DNA, 40 bp, Listeria monocytogenes; identical to SEQ ID NO: 7733
  source 1..40: mol_type = genomic DNA

SEQ ID NO: 7784 - DNA, 40 bp, Listeria monocytogenes; identical to SEQ ID NO: 7734
  source 1..40: mol_type = genomic DNA

SEQ ID NO: 7785 - DNA, 50 bp, Listeria monocytogenes; identical to SEQ ID NO: 1300
  source 1..50: mol_type = genomic DNA

SEQ ID NO: 7786 - protein, 454 aa, Listeria monocytogenes
MRMKAAIYIRVSTQEQVENYSIQAQTEKLTALCRSKDWDVYDIFIDGGYSGSNMNRPALNEMLSKLHEIDAVVVYRLDRLSRSQKDTITLIEEYFLKNNVEFVSLSETLDTSSPFGRAMIGILSVFAQLERETIRDRMVMGQIKRVESGLPLTTAKGRTFGYDVVDTKLYINEEEAKHLQLIYDIFEEEKSITFLQKRLKELGFIVKSYSSYNKWLMNDLYIGYVSYSDKVHVKGIHEPIISEDQFYRVQEIFSRMGKNPNMNKESSSLLNNLIVCEKCGLGYVHRAKDTVSRGKKYHYRYYSCKTYKHTHELEKCGNKIWRADKLEEIIISRVKNYSFATRNLDKEDELDSINAKLKVEHLKKKRLFDLYINGSYEVAELDKMMADIDAQINYYNSQIEANEELKRNKKVQESLAELATVDFDSLEFREKQLYLKSLINKIYIDGEQVTIEWL

SEQ ID NO: 7787 - DNA, 50 bp, Listeria monocytogenes; identical to SEQ ID NO: 7777
  source 1..50: mol_type = genomic DNA

SEQ ID NO: 7788 - DNA, 40 bp, Listeria monocytogenes; identical to SEQ ID NO: 1298
  source 1..40: mol_type = genomic DNA

SEQ ID NO: 7789 - DNA, 40 bp, Listeria monocytogenes; identical to SEQ ID NO: 1299
  source 1..40: mol_type = genomic DNA

SEQ ID NO: 7790 - DNA, 50 bp, Listeria monocytogenes; identical to SEQ ID NO: 1300
  source 1..50: mol_type = genomic DNA

SEQ ID NO: 7791 - protein, 452 aa, Listeria monocytogenes
MKAAIYIRVSTQEQIENYSIQAQTEKLTALCRSKDWDVYDIFIDGGYSGSNMNRPALNEMLSKLHEIDAVVVYRLDRLSRSQRDTITLIEEYFLKNNVEFVSLSETLDTSSPFGRAMIGILSVFAQLERETIRDRMVMGKIKRIEAGLPLTTAKGRTFGYDVIDTKLYINEEEAKQLQMIYDIFEEEKSITTLQKRLKKLGFKVKSYSSYNNWLTNDLYCGYVSYADKVHTKGVHEPIISEEQFYRVQEIFSRMGKNPNMNRDSASLLNNLVVCSKCGLGFVHRRKDTVSRGKKYHYRYYSCKTYKHTHELEKCGNKIWRADKLEELIIDRVNNYSFASRNVDKEDELDNLNEKLKTEHTKKKRLFDLYISGSYEVSELDGMMADIDARINYYEAQIEANEELKKNKKIQENLADLATVDFDSLEFREKQLYLKSLINKIYIDGEQVTIEWL

SEQ ID NO: 7792 - DNA, 50 bp, Listeria monocytogenes; identical to SEQ ID NO: 7727
  source 1..50: mol_type = genomic DNA

SEQ ID NO: 7793 - DNA, 40 bp, Listeria monocytogenes; identical to SEQ ID NO: 1298
  source 1..40: mol_type = genomic DNA

SEQ ID NO: 7794 - DNA, 40 bp, Listeria monocytogenes; identical to SEQ ID NO: 1299
  source 1..40: mol_type = genomic DNA

SEQ ID NO: 7795 - DNA, 50 bp, Listeria monocytogenes; identical to SEQ ID NO: 1300
  source 1..50: mol_type = genomic DNA

SEQ ID NO: 7796 - protein, 452 aa, Listeria monocytogenes
MKAAIYIRVSTQEQIENYSIQAQTEKLTALCRSKDWDVYDIFIDGGYSGSNMNRPALNEMLSKLHEIDAVVVYRLDRLSRAQRDTITLIEEYFLKNNVEFVSLSETLDTSSPFGRAMIGILSVFAQLERETIRDRMVMGKIKRIEAGLPLTTAKGRTFGYDVIDTKLYINEEEAKQLQMIYDIFEEEKSITSLQKRLKKLGFKVKSYSSYNNWLTNDLYCGYVSYADKVHTKGVHEPIISEEQFYRVQEIFSRMGKNPNMNRDSASLLNNLVVCGKCGLGFVHRRKDTVSRGKKYHYRYYSCKTYKHTHELEKCGNKIWRADKLEKLIIDRVNNYSFASRNVDKEDELDNLNEKLKTEHTKKKRLFDLYISGSYEVSELDAMMADIDAQINYYEAQIEANEELKKNKKIQENLADLATVDFDSLEFREKQLYLKSLINKIYIDGEQVTIEWL

SEQ ID NO: 7797 - DNA, 50 bp, Listeria monocytogenes; identical to SEQ ID NO: 7777
  source 1..50: mol_type = genomic DNA

SEQ ID NO: 7798 - DNA, 40 bp, Listeria monocytogenes; identical to SEQ ID NO: 1298
  source 1..40: mol_type = genomic DNA

SEQ ID NO: 7799 - DNA, 40 bp, Listeria monocytogenes; identical to SEQ ID NO: 1299
  source 1..40: mol_type = genomic DNA

SEQ ID NO: 7800 - DNA, 50 bp, Listeria monocytogenes; identical to SEQ ID NO: 1300
  source 1..50: mol_type = genomic DNA

SEQ ID NO: 7801 - protein, 452 aa, Listeria monocytogenes
MKAAIYIRVSTQEQIENYSIQAQTEKLTALCRSKDWDVYDIFIDGGYSGSNMNRPALNEMLSKLHEIDAVVVYRLDRLSRSQRDTITLIEEYFLKNNVEFVSLSETLDTSSPFGRAMIGILSVFAQLERETIRDRMVMGKIKRIEAGLPLTTAKGRTFGYDVIDTKLYINEEEAKQLQMIYDIFEEEKSITTLQKRLKKLGFKVKSYSSYNNWLTNDLYCGYVSYADKVHTKGVHEPIISEEQFYRVQEIFSRMGKNPNMNRDSASLLNNLVVCGKCGLGFVHRRKDTVSRGKKYHYRYYSCKTYKHTHELEKCGNKIWRADKLEELIIDRVNNYSFASRNVDKEDELDSLNEKLKTEHVKKKRLFDLYISGSYEVSELDAMMADIDAQINYYEAQIEANEELKKSKKIQENLADLATVDFDSLEFREKQLYLKSLINKIYIDGEQVTIEWL

SEQ ID NO: 7802 - DNA, 50 bp, Listeria monocytogenes; identical to SEQ ID NO: 7727
  source 1..50: mol_type = genomic DNA

SEQ ID NO: 7803 - DNA, 40 bp, Listeria monocytogenes; identical to SEQ ID NO: 1298
  source 1..40: mol_type = genomic DNA

SEQ ID NO: 7804 - DNA, 40 bp, Listeria monocytogenes; identical to SEQ ID NO: 1299
  source 1..40: mol_type = genomic DNA

SEQ ID NO: 7805 - DNA, 50 bp, Listeria monocytogenes; identical to SEQ ID NO: 1300
  source 1..50: mol_type = genomic DNA

SEQ ID NO: 7806 - protein, 452 aa, Listeria monocytogenes
MKAAIYIRVSTQEQIENYSIQAQTEKLTALCRSKDWDVYDIFIDGGYSGSNMNRPALNEMLSKLHEIDAVVVYRLDRLSRSQRDTITLIEEYFLKNNVEFVSLSETLDTSSPFGRAMIGILSVFAQLERETIRDRMVMGKIKRIEAGLPLTTAKGRTFGYDVIDTKLYINEEEAKQLQMIYDIFEEEKSITSLQKRLKKLGFKVKSYSSYNNWLTNDLYCGYVSYADKVHTKGVHEPIISEEQFYRVQEIFSRMGKNPNMNRDSASLLNNLVVCGKCGLGFVHRRKDTVSRGKKYHYRYYSCKTYKHTHELEKCGNKIWRADKLEELIIDRVNNYSFASRNVDKEDKLDSLNEKLKTEHVKKKRLFDLYISGSYEVSELDAMMADIDAQINYYEAQIEANEELKKNKKIQENLADLATVDFDSLEFREKQLYLKSLINKIYIDGEQVTIEWL

SEQ ID NO: 7807 - DNA, 50 bp, Listeria monocytogenes; identical to SEQ ID NO: 7727
  source 1..50: mol_type = genomic DNA

SEQ ID NO: 7808 - DNA, 40 bp, Listeria monocytogenes; identical to SEQ ID NO: 1298
  source 1..40: mol_type = genomic DNA

SEQ ID NO: 7809 - DNA, 40 bp, Listeria monocytogenes; identical to SEQ ID NO: 1299
  source 1..40: mol_type = genomic DNA

SEQ ID NO: 7810 - DNA, 50 bp, Listeria monocytogenes; identical to SEQ ID NO: 1300
  source 1..50: mol_type = genomic DNA

SEQ ID NO: 7811 - protein, 452 aa, Listeria monocytogenes; identical to SEQ ID NO: 7766

SEQ ID NO: 7812 - DNA, 50 bp, Listeria monocytogenes; identical to SEQ ID NO: 7727
  source 1..50: mol_type = genomic DNA

SEQ ID NO: 7813 - DNA, 40 bp, Listeria monocytogenes; identical to SEQ ID NO: 1298
  source 1..40: mol_type = genomic DNA

SEQ ID NO: 7814 - DNA, 40 bp, Listeria monocytogenes; identical to SEQ ID NO: 1299
  source 1..40: mol_type = genomic DNA

SEQ ID NO: 7815 - DNA, 50 bp, Listeria monocytogenes; identical to SEQ ID NO: 1300
  source 1..50: mol_type = genomic DNA

SEQ ID NO: 7816 - protein, 452 aa, Listeria monocytogenes; identical to SEQ ID NO: 5116

SEQ ID NO: 7817 - DNA, 50 bp, Listeria monocytogenes; identical to SEQ ID NO: 7727
  source 1..50: mol_type = genomic DNA

SEQ ID NO: 7818 - DNA, 40 bp, Listeria monocytogenes; identical to SEQ ID NO: 1298
  source 1..40: mol_type = genomic DNA

SEQ ID NO: 7819 - DNA, 40 bp, Listeria monocytogenes; identical to SEQ ID NO: 1299
  source 1..40: mol_type = genomic DNA

SEQ ID NO: 7820 - DNA, 50 bp, Listeria monocytogenes; identical to SEQ ID NO: 1300
  source 1..50: mol_type = genomic DNA

SEQ ID NO: 7821 - protein, 452 aa, Listeria monocytogenes
MKAAIYIRVSTQEQVENYSIQAQTEKLTALCRSKDWDVYDTFIDGGYSGSNMNRPALNEMLSKLHEIDAVVVYRLDRLSRSQKDTITLIEEYFLKNNVEFVSLSETLDTSSPFGRAMIGILSVFAQLERETIRDRMVMGKIKRIEAGLPLTTAKGRTFGYDVIDTKLYINEEEAKQLQMIYDIFEEEKSITTLQKRLKKLGFKVKSYSSYNNWLTNDLYCGYVSYADKVHTKGVHEPIISEEQFYRVQEIFSRMGKNPNMNRDSASLLNNLVVCGKCGLGYVHRRKDTVSRGKKYHYRYYSCKTYKHTHELEKCGNKIWRADKLEELIIDRVNNYSFASRNVDKEDELDSLNEKLKTEHTKKKRLFDLYISGSYEVSELDAMMSDIDAQINYYEAQIEANEELKKNKKIQENLADLATVDFDSLEFREKQLYLKSLINKIYIDGEQVTIEWL

SEQ ID NO: 7822 - DNA, 50 bp, Listeria monocytogenes; identical to SEQ ID NO: 7732
  source 1..50: mol_type = genomic DNA

SEQ ID NO: 7823 - DNA, 40 bp, Listeria monocytogenes; identical to SEQ ID NO: 7733
  source 1..40: mol_type = genomic DNA

SEQ ID NO: 7824 - DNA, 40 bp, Listeria monocytogenes; identical to SEQ ID NO: 7734
  source 1..40: mol_type = genomic DNA

SEQ ID NO: 7825 - DNA, 50 bp, Listeria monocytogenes; identical to SEQ ID NO: 1300
  source 1..50: mol_type = genomic DNA

SEQ ID NO: 7826 - protein, 452 aa, Listeria monocytogenes; identical to SEQ ID NO: 5116

SEQ ID NO: 7827 - DNA, 50 bp, Listeria monocytogenes; identical to SEQ ID NO: 7727
  source 1..50: mol_type = genomic DNA

SEQ ID NO: 7828 - DNA, 40 bp, Listeria monocytogenes
  source 1..40: mol_type = genomic DNA
tttcggatcaagctatgaaggacgcaaagagggaactaaa

SEQ ID NO: 7829 - DNA, 40 bp, Listeria monocytogenes
  source 1..40: mol_type = genomic DNA
tttcggatcaagctatgaagaacgcaaagagggaactaaa

SEQ ID NO: 7830 - DNA, 50 bp, Listeria monocytogenes; identical to SEQ ID NO: 1300
  source 1..50: mol_type = genomic DNA

SEQ ID NO: 7831 - protein, 452 aa, Listeria monocytogenes; identical to SEQ ID NO: 7751

SEQ ID NO: 7832 - DNA, 50 bp, Listeria monocytogenes; identical to SEQ ID NO: 7727
  source 1..50: mol_type = genomic DNA

SEQ ID NO: 7833 - DNA, 40 bp, Listeria monocytogenes; identical to SEQ ID NO: 7828
  source 1..40: mol_type = genomic DNA

SEQ ID NO: 7834 - DNA, 40 bp, Listeria monocytogenes; identical to SEQ ID NO: 7829
  source 1..40: mol_type = genomic DNA

SEQ ID NO: 7835 - DNA, 50 bp, Listeria monocytogenes; identical to SEQ ID NO: 1300
  source 1..50: mol_type = genomic DNA

SEQ ID NO: 7836 - protein, 452 aa, Listeria monocytogenes
MKAAIYIRVSTQEQIENYSIQAQTEKLTALCRSKDWDVYDIFIDGGYSGSNMNRPALNEMLSKLHEIDAVVVYRLDRLSRSQRDTITLIEEYFLKNNVEFVSLSETLDTSSPFGRAMIGILSVFAQLERETIRDRMVMGKIKRIEAGLPLTTAKGRTFGYDVIDTKLYINEEEAKQLQMIYDIFEEEKSITSLQKRLKKLGFKVKSYSSYNNWLTNDLYCGYVSYADKVHTKGVHEPIISEEQFYRVQEIFSRMGKNPNMNRDSASLLNNLVVCSKCGLGFVHRRKDTVSRGKKYHYRYYSCKTYKHTHELEKCGNKIWRADKLEELIIDRVNNYSFASRNVDKEDELDNLNEKLKTEHTKKKRLFDLYISGSYEVSELDGMMADIDARINYYEAQIEANEELKKNKKIQENLADLATVDFDSLEFREKQLYLKSLINKIYIDGEQVTIEWL

SEQ ID NO: 7837 - DNA, 50 bp, Listeria monocytogenes; identical to SEQ ID NO: 7727
  source 1..50: mol_type = genomic DNA

SEQ ID NO: 7838 - DNA, 40 bp, Listeria monocytogenes; identical to SEQ ID NO: 7828
  source 1..40: mol_type = genomic DNA

SEQ ID NO: 7839 - DNA, 40 bp, Listeria monocytogenes; identical to SEQ ID NO: 7829
  source 1..40: mol_type = genomic DNA

SEQ ID NO: 7840 - DNA, 50 bp, Listeria monocytogenes; identical to SEQ ID NO: 1300
  source 1..50: mol_type = genomic DNA

SEQ ID NO: 7841 - protein, 452 aa, Listeria ivanovii; identical to SEQ ID NO: 7761

SEQ ID NO: 7842 - DNA, 50 bp, Listeria ivanovii; identical to SEQ ID NO: 7727
  source 1..50: mol_type = genomic DNA

SEQ ID NO: 7843 - DNA, 40 bp, Listeria ivanovii
  source 1..40: mol_type = genomic DNA
tttcggttcgagctatgatggacgtaaggagggcactaag

SEQ ID NO: 7844 - DNA, 40 bp, Listeria ivanovii
  source 1..40: mol_type = genomic DNA
tttcggttcgagctatgatgaacgtaaggagggcactaag

SEQ ID NO: 7845 - DNA, 50 bp, Listeria ivanovii; identical to SEQ ID NO: 1300
  source 1..50: mol_type = genomic DNA

SEQ ID NO: 7846 - protein, 452 aa, Listeria monocytogenes
MKAAIYIRVSTQEQIENYSIQAQTEKLTALCRSKDWDVYDIFIDGGYSGSNMNRPALNEMLSKLHEIDAVVVYRLDRLSRSQRDTITLIEEYFLKNNVEFVSLSETLDTSSPFGRAMIGILSVFAQLERETIRDRMVMGKIKRIEAGLPLTTAKGRTFGYNVIDTKLYINEEEAKQLQLIYDIFEEEKSITTLQKRLKKLGFKVKSYSSYNNWLTNDLYCGYVSYADKVHTKGVHEPIISEEQFYRVQEIFSRMGKNPNMNRDSASLLNNLVVCGKCGLRFVHRRKDTVSRGKKYHYRYYSCKTYKHTHELEKCGNKIWRADKLEELIIDRVNNYSFASRNVDKEDELDSLNEKLKTEHVKKKRLFDLYISGSYEVSELDAMMADIDAQINYYEAQIEANEELKKNKKIQENLADLATVDFDSLEFREKQLYLKSLINKIYIDGEQVTIEWL

SEQ ID NO: 7847 - DNA, 50 bp, Listeria monocytogenes; identical to SEQ ID NO: 7727
  source 1..50: mol_type = genomic DNA

SEQ ID NO: 7848 - DNA, 40 bp, Listeria monocytogenes; identical to SEQ ID NO: 1298
  source 1..40: mol_type = genomic DNA

SEQ ID NO: 7849 - DNA, 40 bp, Listeria monocytogenes; identical to SEQ ID NO: 1299
  source 1..40: mol_type = genomic DNA

SEQ ID NO: 7850 - DNA, 50 bp, Listeria monocytogenes; identical to SEQ ID NO: 1300
  source 1..50: mol_type = genomic DNA

SEQ ID NO: 7851 - protein, 452 aa, Listeria monocytogenes
MKAAIYIRVSTQEQIENYSIQAQTEKLTALCRSKDWDVYDIFIDGGYSGSNMKRPALNEMLSKLHEIDAVVVYRLDRLSRSQRDTITLIEEYFLKNNVEFVSLSETLDTSSPFGRAMIGILSVFAQLERETIRDRMVMGKIKRIESGLPLTTAKGRTFGYDVVDTKLYINEEEAKQLQMIYDIFEEEKSITFLQKRLKKLGFKVKSYSSYNNWLTNDLYCGYVSYKDKVHTKGIHEPIISEEQFYRVQEIFSRMGKNPNMNKESASLLNNLVVCSKCGLSFVHRRKDTVSRGKKYHYRYYSCKTYKHTHELEKCGNKIWRADKLEELIIDRVNNYSFASRNVDKEDELDNLNEKLKTEHTKKKRLFDLYISGSYEVSELDAMMADIDAQINYYEAQIEANEELKKNKKIQENLADLATVDFDSLEFREKQLYLKSLINKIYIDGEQVTIEWL

SEQ ID NO: 7852 - DNA, 50 bp, Listeria monocytogenes; identical to SEQ ID NO: 7777
  source 1..50: mol_type = genomic DNA

SEQ ID NO: 7853 - DNA, 40 bp, Listeria monocytogenes; identical to SEQ ID NO: 1298
  source 1..40: mol_type = genomic DNA

SEQ ID NO: 7854 - DNA, 40 bp, Listeria monocytogenes; identical to SEQ ID NO: 1299
  source 1..40: mol_type = genomic DNA

SEQ ID NO: 7855 - DNA, 50 bp, Listeria monocytogenes; identical to SEQ ID NO: 1300
  source 1..50: mol_type = genomic DNA

SEQ ID NO: 7856 - protein, 452 aa, Listeria monocytogenes
MKAAIYIRVSTQEQVENYSIQAQTEKLTALCRSKDWDVYDTFIDGGYSGSNMNRPALNEMLSKLHEIDAVVVYRLDRLSRSQKDTITLIEEYFLKNNVEFVSLSETLDTSSPFGRAMIGILSVFAQLERETIRDRMVMGKIKRIEAGLPLTTAKGRTFGYDVIDTKLYINEEEAKQLRLIYDIFEEEQSITFLQKRLKKLGFKVRTYNRYNNWLTNDLYCGYVSYKDKVHVKGIHEPIISEEQFYRVQEIFSRMGKNPNMNRDSASLLNNLVVCGKCGLGFVHRRKDTVSRGKKYHYRYYSCKTYKHTHELEKCGNKIWRADKLEKLIIDRVNNYSFASRNVDKEDELDNLNEKLKTEHTKKKRLFDLYISGSYEVSELDAMMADIDAQINYYEAQIEANEELKKNKKIQENLADLATVDFDSLEFREKQLYLKSLINKIYIDGEQVTIEWL

SEQ ID NO: 7857 - DNA, 50 bp, Listeria monocytogenes; identical to SEQ ID NO: 7777
  source 1..50: mol_type = genomic DNA

SEQ ID NO: 7858 - DNA, 40 bp, Listeria monocytogenes; identical to SEQ ID NO: 1298
  source 1..40: mol_type = genomic DNA

SEQ ID NO: 7859 - DNA, 40 bp, Listeria monocytogenes; identical to SEQ ID NO: 1299
  source 1..40: mol_type = genomic DNA

SEQ ID NO: 7860 - DNA, 50 bp, Listeria monocytogenes; identical to SEQ ID NO: 1300
  source 1..50: mol_type = genomic DNA

SEQ ID NO: 7861 - protein, 452 aa, Listeria monocytogenes
MKAAIYIRVSTQEQIENYSIQAQTEKLTALCRSKDWDVYDIFIDGGYSGSNMNRPALNEMLSKLHEIDAVVVYRLDRLSRSQRDTITLIEEYFLKNNVEFVSLSETLDTSSPFGRAMIGILSVFAQLERETIRDRMVMGKIKRIEAGLPLTTAKGRTFGYDVIDTKLYINEEEAKQLQMIYDIFEEEKSITSLQKRLKKLGFKVKSYSSYNNWLTNDLYCGYVSYADKVHTKGVHEPIISEEQFYRVQEIFSRMGKNPNMNRDSASLLNNLVVCGKCGFGFVHRRKDTVSRGKKYHYRYYSCKTYKHTHELEKCGNKIWRADKLEELIIDRVNNYSFASRNVDKEDELDSLNEKLKTEHAKKKRLFDLYISGSYEVSELDGMMADIDAQINYYEAQIEANEELKKNKKIQENLADLATVDFDSLEFREKQLYLKSLINKIYIDGEQVTIEWL

SEQ ID NO: 7862 - DNA, 50 bp, Listeria monocytogenes; identical to SEQ ID NO: 7727
  source 1..50: mol_type = genomic DNA

SEQ ID NO: 7863 - DNA, 40 bp, Listeria monocytogenes; identical to SEQ ID NO: 1298
  source 1..40: mol_type = genomic DNA

SEQ ID NO: 7864 - DNA, 40 bp, Listeria monocytogenes; identical to SEQ ID NO: 1299
  source 1..40: mol_type = genomic DNA

SEQ ID NO: 7865 - DNA, 50 bp, Listeria monocytogenes; identical to SEQ ID NO: 1300
  source 1..50: mol_type = genomic DNA

SEQ ID NO: 7866 - protein, 452 aa, Listeria monocytogenes
MKAAIYIRVSTQEQIENYSIQAQTEKLTALCRSKDWDVYDIFIDGGYSGSNMNRPALNEMLSKLHEIDAVVVYRLDRLSRSQRDTITLIEEYFLKNNVEFVSLSETLDTSSPFGRAMIGILSVFAQLERETIRDRMVMGKIKRIEAGLPLTTAKGRTFGYDVIDTKLYINEEEAKQLQMIYDIFEEEKSITTLQKRLKKLGFKVKSYSSYNNWLTNDLYCGYISYADKVHTKGVHEPIISEEQFYRVQEIFSRMGKNPNMNRDSASLLNNLVVCGKCGLGYVHRRKDTVSRGKKYHYRYYSCKTYKHTHELEKCGNKIWRADKLEELIIDRVNNYSFASRNVDKEDELDSLNEKLKTEHTKKKRLFDLYISGSYEVSELDAMMSDIDAQINYYEAQIEANEELKKNKKIQENLADLATVDFDSLEFREKQLYLKSLINKIYIDGEQVTIEWL

SEQ ID NO: 7867 - DNA, 50 bp, Listeria monocytogenes; identical to SEQ ID NO: 7732
  source 1..50: mol_type = genomic DNA

SEQ ID NO: 7868 - DNA, 40 bp, Listeria monocytogenes; identical to SEQ ID NO: 7733
  source 1..40: mol_type = genomic DNA

SEQ ID NO: 7869 - DNA, 40 bp, Listeria monocytogenes; identical to SEQ ID NO: 7734
  source 1..40: mol_type = genomic DNA

SEQ ID NO: 7870 - DNA, 50 bp, Listeria monocytogenes; identical to SEQ ID NO: 1300
  source 1..50: mol_type = genomic DNA

SEQ ID NO: 7871 - protein, 452 aa, Listeria innocua
MKAAIYIRVSTQEQIENYSIQAQTEKLTALCRSKDWDVYDIFIDGGYSGSNMNRPALNEMLSKLHEIDAVVVYRLDRLSRSQRDTITLIEEYFLKNNVEFVSLSETLDTSSPFGRAMIGILSVFAQLERETIRDRMVMGKIKRIEAGLPLTTAKGRTFGYDVIDTKLYINEEEAKQLRLIYDIFEEEQSITFLQKRLKKLGFKVRTYNRYNNWLTNDLYCGYVSYKDKVHVKGIHEPIISEEQFYRVQEIFTRMGKNPNMNRDSASLLNNLVVCGKCGLGFVHRRKDTVSRGKKYHYRYYSCKTYKHTHELEKCGNKIWRADKLEELIIDRVNNYSFASRNVDKEDELDYLNEKLKTEHVKKKRLFDLYISGSYKVSELDAMMADIDAQINYYEAQIEANEELKKNKKIQENLADLATVDFDSLEFREKQLYLKSLINKIYIDGEQVTIEWL

SEQ ID NO: 7872 - DNA, 50 bp, Listeria innocua
  source 1..50: mol_type = genomic DNA
tttagtacctcgatttctctcgttggaagaagaagaaacgagaaactaaa

SEQ ID NO: 7873 - DNA, 40 bp, Listeria innocua
  source 1..40: mol_type = genomic DNA
tttcggatcgagttatgatggacgtaaagagggaacaaag

SEQ ID NO: 7874 - DNA, 40 bp, Listeria innocua
  source 1..40: mol_type = genomic DNA
tttcggatcgagttatgattaacgtaaagagggaacaaag

SEQ ID NO: 7875 - DNA, 50 bp, Listeria innocua
  source 1..50: mol_type = genomic DNA
tctaagacctgtgcttcttccttttaaagaagaagaagcatgcaactaat

SEQ ID NO: 7876 - protein, 470 aa, Eubacteriaceae bacterium; identical to SEQ ID NO: 3156

SEQ ID NO: 7877 - DNA, 50 bp, Eubacteriaceae bacterium
  source 1..50: mol_type = genomic DNA
aaatttccactatattacattatcccaatagagtacgataaaggaaatga

SEQ ID NO: 7878 - DNA, 40 bp, Eubacteriaceae bacterium
  source 1..40: mol_type = genomic DNA
attttcaacatatgcagtgcccatcatcatgggtgaaatc

SEQ ID NO: 7879 - DNA, 40 bp, Eubacteriaceae bacterium
  source 1..40: mol_type = genomic DNA
attttcaacatatgcagtgatcatcatcatgggtgaaatc

SEQ ID NO: 7880 - DNA, 50 bp, Eubacteriaceae bacterium
  source 1..50: mol_type = genomic DNA
aaattaaaaaatttttacattaacataataaacaacacaaaagcaaatga

SEQ ID NO: 7881 - protein, 557 aa, Yersinia pseudotuberculosis
MIKKSIAYCRVSSAKQSEQGYGMSRQQKLLLAYVENYQDPKKLGYELSTKNFQWMLQPGQSAFKGFNLEVGELHDFIKEAMTGKHQGVCLIIENIDRFSRATPSKSAFNFLALVNNGIHIHEVETGEIYTEDLNLDQLSSSVTRSNRESARKAFLSNANWNNRYEEALAGSSVLTKRVPKWMIVENDQYVLNTAASTIITYIFDQFIKGMGSTSIARELNKAERFIGGVLWYPQNLNKLLSDPRVCGWLTPKNNTTRCRSRLYPQIISDEQYQRVQNIKESKNQLVKHKPSEKMNNLFNGISTCKKCGSSMSVVKQSYKGELKYFRLFCAKRKELKTCDATSIRYDFIEVAIFEFIQNFDWNSVMDSQDTFKEDSLKQELITKNEYVTELRIIIDSSSAPDLSIIRTLDKANKELLNLQSKISSIIEKPINIDLSKFDINNTEDRTKYNLTLRKVVTKIEIQRYNSYVMIQFHYYSGIKKHTLLMESLTGKVRSNITKTESNNIHLYESNFTWVQHNTETDEVIISDDYFSEAMAFLILFMEQDNTSPRVIEKLRRL

SEQ ID NO: 7882 - DNA, 50 bp, Yersinia pseudotuberculosis
  source 1..50: mol_type = genomic DNA
ttacttattttaggagatattatgtcgatgagttgataaaatagaagtaa

SEQ ID NO: 7883 - DNA, 40 bp, Yersinia pseudotuberculosis
  source 1..40: mol_type = genomic DNA
ttattggtgagcgattatgtcgatgagtgaagagtatcaa

SEQ ID NO: 7884 - DNA, 40 bp, Yersinia pseudotuberculosis
  source 1..40: mol_type = genomic DNA
ttattggtgagcgattatggtgatgagtgaagagtatcaa

SEQ ID NO: 7885 - DNA, 50 bp, Yersinia pseudotuberculosis
  source 1..50: mol_type = genomic DNA
caaaacattactacagatgttatggtgatgagttgacaatttagaaatta

SEQ ID NO: 7886 - protein, 489 aa, Streptococcus gordonii
MKTINKVAIYVRVSTTNQAEEGYSIDEQIAKLKSYCDIKDWSLYKVYKDAGFSGSNIERPGLQNLISDAKNKQFDTVLVYKLDRLSRSQKDTLYLIEEIFIKRDISFFSLQENFDTSTAFGKAMIGLLAVFAQLEREQIKERMQLGKLGRAKAGKAMMWAKVAYGYTYNKETGSLDINPAEAEIVKIVYEEYLNGRSISKLKDYLNENNLNTKARPWYYRAIRQILGNPVYAGYNQFSGQVFKGDHQPIVSKEDFDRTQEELKKRQLKAYEMSNNPRPFRAKYMLSGIARCGYCGTPLKMGMTARRKSDGGRTYRYGCTNRVANRFKNPTLYNNGEKCDSGLYYKEDIEKYVLDELAKLQHDPEAINTIIEPLITVIDEQEINSRINALDTKLGRLNDLYLNNLTTLEDLKEKTAEILKEKAILEKKLTDNPQNRLEEEKERIKRIQAKADIRSMSYEEQTKIVKSLIKKVDVTAEAIVIRWNIANFSD

SEQ ID NO: 7887 - DNA, 50 bp, Streptococcus gordonii
  source 1..50: mol_type = genomic DNA
tagcgaattttagtgactaacatttcaatgctggtttctaaaattgttga

SEQ ID NO: 7888 - DNA, 40 bp, Streptococcus gordonii
  source 1..40: mol_type = genomic DNA
cagaaggacgactagcatttctaccagagtaaaagctttc

SEQ ID NO: 7889 - DNA, 40 bp, Streptococcus gordonii
  source 1..40: mol_type = genomic DNA
cagaaggacgactagcattagtaccagagtaaaagctttc

SEQ ID NO: 7890 - DNA, 50 bp, Streptococcus gordonii
  source 1..50: mol_type = genomic DNA
aattgaatttttagaagtaagattagaatgctggttaccagagttgttgg

SEQ ID NO: 7891 - protein, 553 aa, Blautia producta
MARIRKEKTQGNSKKKWFFGKYERLSKEDLLKGDSRSIQSQDMTLDNYLDNLIFNGEDITIVDTYKDDGTSGMYDSRSEFQRAIMDIESERINALIVCDLSRMFRNDADQKHYLEYYFRERKIRIISCSLPQLDTYKEPDRVFSMDVKFQAMSNANMPLENSLKIKDKLATRRKCGLYVGSFAPYGYKKDTENKNQLLIDDNVSDVVQDIYNWFVYDSMSIRRIVERLNELGIVNPTEYKKQQGYKFKNTSGSNCGLWCEGTVRKILTREYYIGNMDQHHSKTIFTQDRKKIVALEEDEINEIVENTHEAIIDKHTYELAKRLLERDRRTAPTQKHSYLFSGYLVCGDCGKAMVAKKAKNNSYYYCSTYVKRSKTACTKHTFREDQLQEAVLKVIQLQIALAVNMREQVNKINQTEKVNHSSKRIEDLLKATQMSLQKQQNVQDNLYTDWKNGDITREQHNRLRSKTEDKIENLKQTINQLWQEKKVLESNLKDSNNFLETFCKYQNVKTLDSKILIELVNKIYIYENNMIEVKFNFRDEYKLTLEFIENNKL

SEQ ID NO: 7892 - DNA, 50 bp, Blautia producta
  source 1..50: mol_type = genomic DNA
agttttcctaaaatgaatgcaccagttggtacatatattttaggaaaact

SEQ ID NO: 7893 - DNA, 40 bp, Blautia producta
  source 1..40: mol_type = genomic DNA
agcttctcccgtggctcctgttggaccggtcgctcctatt

SEQ ID NO: 7894 - DNA, 40 bp, Blautia producta
  source 1..40: mol_type = genomic DNA
agcttctcccgtggctcctgatggaccggtcgctcctatt

SEQ ID NO: 7895 - DNA, 50 bp, Blautia producta
  source 1..50: mol_type = genomic DNA
aggtctccaaaggggtaagcaccagatgatacatatggtatagaaaaaca

SEQ ID NO: 7896 - protein, 535 aa, Acetivibrio clariflavus
MNAVIYARYSSDNQREESIDAQVRAIKEFAAREGINIIRIYADEAKSATTDQRPQFLDMMKDAETGMFQAVIVHKLDRFSRDRFDSAYYKRHLKKCGVRLISVLENLDDSPESIILESVLEGMAEYYSKNLSREVMKGMKETAYQCKHTGGIPPLGFDVGPDKSYVINEWEAEAVRMIFEMFADGKGYSAIIDALNAKGYKTKAGKPFGKNSIHDLLLNEKYIGVFVFNKVYNKINGKRNGHKMKPDDEIIRIPGGCPAIVSQDLWERVKKRLEANKRASGAYSAKAVYILSGRIFCGKCGAAMTGKRARMGRNKTVYSYYECSARKSKRTCDMKPINKDFVEQKVIDALYDNLFCDEVIEAATDMIYNHAVSRNTEIPEMIKKYEKQLQTVEFEISNIVNAIAKGMFHESMKAKMDELEASKAQLMIRIEEAKLQQQSHSLTREQIYAFLARYRNIKEMTPEQQKTAIQVFVERVTVYEDKIDMDILTVPGKGPGPGKNKKTASDNTDSSIESNMPENGHSGLSGDSCTLLVEA

SEQ ID NO: 7897 - DNA, 50 bp, Acetivibrio clariflavus
  source 1..50: mol_type = genomic DNA
tgatagttgcaccttgttggtggaggcgaacagacacctgtcaaggtgca

SEQ ID NO: 7898 - DNA, 40 bp, Acetivibrio clariflavus
  source 1..40: mol_type = genomic DNA
taactatgtatgtggtggaggcgaggggagtcgaacccct

SEQ ID NO: 7899 - DNA, 40 bp, Acetivibrio clariflavus
  source 1..40: mol_type = genomic DNA
taactatgtatgtggtggaagcgaggggagtcgaacccct

SEQ ID NO: 7900 - DNA, 50 bp, Acetivibrio clariflavus
  source 1..50: mol_type = genomic DNA
tgatgtctgacggctgtcggtggaagcgaagacacagagcaccagctgca

SEQ ID NO: 7901 - protein, 568 aa, Enterobacter hormaechei
MPSIRRFERFKAMCVAIGYMRYSSKLQGAGSTIHRQKSLINKWVEDQKTHHGKVYEVKFYTDKGLSGWTGENLLAGALGRLIEEVEAGGYPEGTPIILESIDRLSRQGHEEATAILRRLTSTGCVVHSILDRQVIQRSDLKTFIGAMQIIAVAERGREESDIKSERVSSSKERNYELAKLGKKLVTRNLPGWIYLDQKGKMQIDPAKQKLVKEIFEMRLAGHTYQGIAETMTNRGEPVLNERKGAQRWLPNSIRTLLHSRSVIGVLPASKVNDKYKEIEEYFPSAITKDLFYAVNDLNVPTVRSREKKQYPETVFLFKGLVKCRYCKGNVFLNGAKPGYWGRIRCIGHHDKVCDAPSLPRYDFEQSLITRMFPLLKSMDVSTEENPVAVLQAKIDHLTNILEGYYDDLEEIPRADKPRRKSINERISKRANEKEEYERQLVVVRRKMEVRTENTLSDLNYDDYSDRLKMQLVISRNIERIVLDSLFDRVHIKLVNGNALMNFPLYGDVDGSRLVITAKENTGITDVERILGLDDAMPTVYNLAPSSGEFMDDRDFPEIEPDYPNINEG

SEQ ID NO: 7902 - DNA, 50 bp, Enterobacter hormaechei
  source 1..50: mol_type = genomic DNA
aaaatactatgattcatctaaaataagtcttagaatcattatagtattta

SEQ ID NO: 7903 - DNA, 40 bp, Enterobacter hormaechei; identical to SEQ ID NO: 6183
  source 1..40: mol_type = genomic DNA

SEQ ID NO: 7904 - DNA, 40 bp, Enterobacter hormaechei
  source 1..40: mol_type = genomic DNA
acccggtgttttctaaaagaggttttcgtcatggtatttt

SEQ ID NO: 7905 - DNA, 50 bp, Enterobacter hormaechei
  source 1..50: mol_type = genomic DNA
aaaacacttattttcagctagaaaaggtcttggaataaagttggtcttta

SEQ ID NO: 7906 - protein, 655 aa, Bacteroides eggerthii
MGKAILFIRVSTEQQHLESQEDTLKRAAVADGYREEDFIIIGKKESAIKLDEDNRQGLQELKKQLSEGDIDCIYIFELSRLSRKPMVLYSIRDQLLDARVQLKCLNPAFTLLNSERTGFDNTASLIFSLFGAMAEQEMIEKKERFRRGKRRLAEEGRYNGGNIPFGYRIDKEHKNKIVINDEEARLVKEIFNLYESGISQPQLAKEYYRRGERRLTISLINNILNNERYTGRKRCYRGSSYERAYPILVTPEQFQHCREIARKNNTTADKTQNIYYANRLIVCKDCGCYWSASGSKVSYHCYDAFNTMRKYDHYKTPQCRNRKSISINIMDSLLWHVAKDAELDYIMNAASEDRQKYEERINVLEQKISFVKVRLEDLDKKRDRIVESYIEGDLTKEKRDDKFRILDEKRKEILLEQTSFRNEREHLKFLLEDIKLEYDIDDVLKITGHIERTISLEEKIAGISDDGERSRIIHRHIQEITVENRETEYEFGIGKRKTPTRFITIKFYSGEKQYYHYLPSTGRGGIVLLSTSDGLPMEKIRLEYLDRFCDGGKRRRYQEAKEKKQQERKAKYPDNEYILGYSGLARFLKVGVSTAYRWTETLDVLKPAVVDIYNKQIVVDKKKCIKLLAVAAEHNVWAKKIFNNVNDLYHEDEDY

SEQ ID NO: 7907 - DNA, 50 bp, Bacteroides eggerthii
  source 1..50: mol_type = genomic DNA
gattatataatcaccagttgtatagataaataaccgaagattttgtagtt

SEQ ID NO: 7908 - DNA, 40 bp, Bacteroides eggerthii
  source 1..40: mol_type = genomic DNA
acccttactcgaccgtatcgacctgcaaatcgaagtcatt

SEQ ID NO: 7909 - DNA, 40 bp, Bacteroides eggerthii
  source 1..40: mol_type = genomic DNA
acccttactcgaccgtatcaacctgcaaatcgaagtcatt

SEQ ID NO: 7910 - DNA, 50 bp, Bacteroides eggerthii
  source 1..50: mol_type = genomic DNA
agttgtataataaacagttgtttgaataaataaccagtaaatgagtagtt

SEQ ID NO: 7911 - protein, 475 aa, Streptococcus pneumoniae; identical to SEQ ID NO: 1511

SEQ ID NO: 7912 - DNA, 50 bp, Streptococcus pneumoniae
  source 1..50: mol_type = genomic DNA
ctgtattttagtcaaagtaattaagataagttagagttagtaacagtatt

SEQ ID NO: 7913 - DNA, 40 bp, Streptococcus pneumoniae
  source 1..40: mol_type = genomic DNA
acgttaaacgcccaatcaagataactttattatacatatt

SEQ ID NO: 7914 - DNA, 40 bp, Streptococcus pneumoniae
  source 1..40: mol_type = genomic DNA
acgttaaacgcccaatcaatataactttattatacatatt

SEQ ID NO: 7915 - DNA, 50 bp, Streptococcus pneumoniae
  source 1..50: mol_type = genomic DNA
ttttgtttttataagagtaattaatatagcttagaaagtcaaacactatt

SEQ ID NO: 7916 - protein, 475 aa, Streptococcus pneumoniae; identical to SEQ ID NO: 1481

SEQ ID NO: 7917 - DNA, 50 bp, Streptococcus pneumoniae; identical to SEQ ID NO: 7912
  source 1..50: mol_type = genomic DNA

SEQ ID NO: 7918 - DNA, 40 bp, Streptococcus pneumoniae
  source 1..40: mol_type = genomic DNA
acgttaaacgtccaatcaagataactttattatacatatt

SEQ ID NO: 7919 - DNA, 40 bp, Streptococcus pneumoniae
  source 1..40: mol_type = genomic DNA
acgttaaacgtccaatcaatataactttattatacatatt

SEQ ID NO: 7920 - DNA, 50 bp, Streptococcus pneumoniae; identical to SEQ ID NO: 7915
  source 1..50: mol_type = genomic DNA

SEQ ID NO: 7921 - protein, 475 aa, Streptococcus pneumoniae; identical to SEQ ID NO: 1481

SEQ ID NO: 7922 - DNA, 50 bp, Streptococcus pneumoniae; identical to SEQ ID NO: 7912
  source 1..50: mol_type = genomic DNA

SEQ ID NO: 7923 - DNA, 40 bp, Streptococcus pneumoniae
  source 1..40: mol_type = genomic DNA
acgttaaacgcccaatcatgataactttattatacatatt

SEQ ID NO: 7924 - DNA, 40 bp, Streptococcus pneumoniae
  source 1..40: mol_type = genomic DNA
acgttaaacgcccaatcattataactttattatacatatt

SEQ ID NO: 7925 - DNA, 50 bp, Streptococcus pneumoniae; identical to SEQ ID NO: 7915
  source 1..50: mol_type = genomic DNA

SEQ ID NO: 7926 - protein, 475 aa, Streptococcus pneumoniae; identical to SEQ ID NO: 1491

SEQ ID NO: 7927 - DNA, 50 bp, Streptococcus pneumoniae; identical to SEQ ID NO: 7912
  source 1..50: mol_type = genomic DNA

SEQ ID NO: 7928 - DNA, 40 bp, Streptococcus pneumoniae; identical to SEQ ID NO: 7923
  source 1..40: mol_type = genomic DNA

SEQ ID NO: 7929 - DNA, 40 bp, Streptococcus pneumoniae; identical to SEQ ID NO: 7924
  source 1..40: mol_type = genomic DNA

SEQ ID NO: 7930 - DNA, 50 bp, Streptococcus pneumoniae; identical to SEQ ID NO: 7915
  source 1..50: mol_type = genomic DNA

SEQ ID NO: 7931 - protein, 475 aa, Streptococcus pneumoniae; identical to SEQ ID NO: 1521

SEQ ID NO: 7932 - DNA, 50 bp, Streptococcus pneumoniae; identical to SEQ ID NO: 7912
  source 1..50: mol_type = genomic DNA

SEQ ID NO: 7933 - DNA, 40 bp, Streptococcus pneumoniae
  source 1..40: mol_type = genomic DNA
acgttaaacgtccaatcatgataactttattatacatatt

SEQ ID NO: 7934 - DNA, 40 bp, Streptococcus pneumoniae
  source 1..40: mol_type = genomic DNA
acgttaaacgtccaatcattataactttattatacatatt

SEQ ID NO: 7935 - DNA, 50 bp, Streptococcus pneumoniae; identical to SEQ ID NO: 7915
  source 1..50: mol_type = genomic DNA

SEQ ID NO: 7936 - protein, 475 aa, Streptococcus pneumoniae; identical to SEQ ID NO: 1521

SEQ ID NO: 7937 - DNA, 50 bp, Streptococcus pneumoniae; identical to SEQ ID NO: 7912
  source 1..50: mol_type = genomic DNA

SEQ ID NO: 7938 - DNA, 40 bp, Streptococcus pneumoniae; identical to SEQ ID NO: 7918
  source 1..40: mol_type = genomic DNA

SEQ ID NO: 7939 - DNA, 40 bp, Streptococcus pneumoniae; identical to SEQ ID NO: 7919
  source 1..40: mol_type = genomic DNA

SEQ ID NO: 7940 - DNA, 50 bp, Streptococcus pneumoniae; identical to SEQ ID NO: 7915
  source 1..50: mol_type = genomic DNA

SEQ ID NO: 7941 - protein, 475 aa, Streptococcus pneumoniae; identical to SEQ ID NO: 1486

SEQ ID NO: 7942 - DNA, 50 bp, Streptococcus pneumoniae; identical to SEQ ID NO: 7912
  source 1..50: mol_type = genomic DNA

SEQ ID NO: 7943 - DNA, 40 bp, Streptococcus pneumoniae; identical to SEQ ID NO: 7913
  source 1..40: mol_type = genomic DNA

SEQ ID NO: 7944 - DNA, 40 bp, Streptococcus pneumoniae; identical to SEQ ID NO: 7914
  source 1..40: mol_type = genomic DNA

SEQ ID NO: 7945 - DNA, 50 bp, Streptococcus pneumoniae; identical to SEQ ID NO: 7915
  source 1..50: mol_type = genomic DNA

SEQ ID NO: 7946 - protein, 475 aa, Streptococcus pneumoniae; identical to SEQ ID NO: 1486

SEQ ID NO: 7947 - DNA, 50 bp, Streptococcus pneumoniae; identical to SEQ ID NO: 7912
  source 1..50: mol_type = genomic DNA

SEQ ID NO: 7948 - DNA, 40 bp, Streptococcus pneumoniae; identical to SEQ ID NO: 7918
  source 1..40: mol_type = genomic DNA

SEQ ID NO: 7949 - DNA, 40 bp, Streptococcus pneumoniae; identical to SEQ ID NO: 7919
  source 1..40: mol_type = genomic DNA

SEQ ID NO: 7950 - DNA, 50 bp, Streptococcus pneumoniae; identical to SEQ ID NO: 7915
  source 1..50: mol_type = genomic DNA

SEQ ID NO: 7951 - protein, 475 aa, Streptococcus pneumoniae; identical to SEQ ID NO: 1501

SEQ ID NO: 7952 - DNA, 50 bp, Streptococcus pneumoniae; identical to SEQ ID NO: 7912
  source 1..50: mol_type = genomic DNA

SEQ ID NO: 7953 - DNA, 40 bp, Streptococcus pneumoniae; identical to SEQ ID NO: 7918
  source 1..40: mol_type = genomic DNA

SEQ ID NO: 7954 - DNA, 40 bp, Streptococcus pneumoniae; identical to SEQ ID NO: 7919
  source 1..40: mol_type = genomic DNA

SEQ ID NO: 7955 - DNA, 50 bp, Streptococcus pneumoniae; identical to SEQ ID NO: 7915
  source 1..50: mol_type = genomic DNA

SEQ ID NO: 7956 - protein, 475 aa, Streptococcus pneumoniae
MKTTNKVAIYVRVSTTSQVEEGYSIDEQKDKLEAYCKIKDWKIYDVYVDGGFSGANTQRPELERLISDVKRKKVDIVLVYKLDRLSRSQKDTLFLIEDVFAKNDVAFISLQENFDTSTPFGKASIGMLSVFAQLEREQIKERMMLGKEGRAKNGKSMSWTTIPFGYDYSKETGVLSVNPTQALIVNRIFTEYLNGKPVVKIIRDLNAEGHVGRKRPWGETITKYLLKNETYLGKVKYKDKVYEGQHEPIITQELFDLVQLEVERRQISAYEKYNNPRPFRAKYMLSGLMKCGYCGASLGLRYTRKDKNGISHHKYQCRNRHSKDLEKRCESGWYSKEELERVVIKELERIKFDPKYKNETLAKKEETIKVEEIKKQLERINNQVSKLTELYLDEIITRKELDEKNDKIKTERQFLEEQLENQKSNVLSIRKRKLTRLLKDFDVEKLSYEDASKIVKNIIKEIIVTKDGMSITLDL

SEQ ID NO: 7957 - DNA, 50 bp, Streptococcus pneumoniae; identical to SEQ ID NO: 7912
  source 1..50: mol_type = genomic DNA

SEQ ID NO: 7958 - DNA, 40 bp, Streptococcus pneumoniae; identical to SEQ ID NO: 7923
  source 1..40: mol_type = genomic DNA

SEQ ID NO: 7959 - DNA, 40 bp, Streptococcus pneumoniae; identical to SEQ ID NO: 7924
  source 1..40: mol_type = genomic DNA

SEQ ID NO: 7960 - DNA, 50 bp, Streptococcus pneumoniae; identical to SEQ ID NO: 7915
  source 1..50: mol_type = genomic DNA

SEQ ID NO: 7961 - protein, 475 aa, Streptococcus pneumoniae; identical to SEQ ID NO: 1486

SEQ ID NO: 7962 - DNA, 50 bp, Streptococcus pneumoniae; identical to SEQ ID NO: 7912
  source 1..50: mol_type = genomic DNA

SEQ ID NO: 7963 - DNA, 40 bp, Streptococcus pneumoniae; identical to SEQ ID NO: 7933
  source 1..40: mol_type = genomic DNA

SEQ ID NO: 7964 - DNA, 40 bp, Streptococcus pneumoniae; identical to SEQ ID NO: 7934
  source 1..40: mol_type = genomic DNA

SEQ ID NO: 7965 - DNA, 50 bp, Streptococcus pneumoniae; identical to SEQ ID NO: 7915
  source 1..50: mol_type = genomic DNA

SEQ ID NO: 7966 - protein, 475 aa, Streptococcus pneumoniae; identical to SEQ ID NO: 1516

SEQ ID NO: 7967 - DNA, 50 bp, Streptococcus pneumoniae; identical to SEQ ID NO: 7912
  source 1..50: mol_type = genomic DNA

SEQ ID NO: 7968 - DNA, 40 bp, Streptococcus pneumoniae; identical to SEQ ID NO: 7918
  source 1..40: mol_type = genomic DNA

SEQ ID NO: 7969 - DNA, 40 bp, Streptococcus pneumoniae; identical to SEQ ID NO: 7919
  source 1..40: mol_type = genomic DNA

SEQ ID NO: 7970 - DNA, 50 bp, Streptococcus pneumoniae; identical to SEQ ID NO: 7915
  source 1..50: mol_type = genomic DNA

SEQ ID NO: 7971 - protein, 475 aa, Streptococcus pneumoniae; identical to SEQ ID NO: 1551

SEQ ID NO: 7972 - DNA, 50 bp, Streptococcus pneumoniae; identical to SEQ ID NO: 7912
  source 1..50: mol_type = genomic DNA

SEQ ID NO: 7973 - DNA, 40 bp, Streptococcus pneumoniae; identical to SEQ ID NO: 7913
  source 1..40: mol_type = genomic DNA

SEQ ID NO: 7974 - DNA, 40 bp, Streptococcus pneumoniae; identical to SEQ ID NO: 7914
  source 1..40: mol_type = genomic DNA

SEQ ID NO: 7975 - DNA, 50 bp, Streptococcus pneumoniae; identical to SEQ ID NO: 7915
  source 1..50: mol_type = genomic DNA

SEQ ID NO: 7976 - protein, 475 aa, Streptococcus pneumoniae; identical to SEQ ID NO: 1511

SEQ ID NO: 7977 - DNA, 50 bp, Streptococcus pneumoniae; identical to SEQ ID NO: 7912
  source 1..50: mol_type = genomic DNA

SEQ ID NO: 7978 - DNA, 40 bp, Streptococcus pneumoniae; identical to SEQ ID NO: 7918
  source 1..40: mol_type = genomic DNA

SEQ ID NO: 7979 - DNA, 40 bp, Streptococcus pneumoniae; identical to SEQ ID NO: 7919
  source 1..40: mol_type = genomic DNA

SEQ ID NO: 7980 - DNA, 50 bp, Streptococcus pneumoniae; identical to SEQ ID NO: 7915
  source 1..50: mol_type = genomic DNA

SEQ ID NO: 7981 - protein, 475 aa, Streptococcus pneumoniae; identical to SEQ ID NO: 1521

SEQ ID NO: 7982 - DNA, 50 bp, Streptococcus pneumoniae; identical to SEQ ID NO: 7912
  source 1..50: mol_type = genomic DNA

SEQ ID NO: 7983 - DNA, 40 bp, Streptococcus pneumoniae; identical to SEQ ID NO: 7923
  source 1..40: mol_type = genomic DNA

SEQ ID NO: 7984 - DNA, 40 bp, Streptococcus pneumoniae; identical to SEQ ID NO: 7924
  source 1..40: mol_type = genomic DNA

SEQ ID NO: 7985 - DNA, 50 bp, Streptococcus pneumoniae; identical to SEQ ID NO: 7915
  source 1..50: mol_type = genomic DNA

SEQ ID NO: 7986 - protein, 475 aa, Streptococcus pneumoniae; identical to SEQ ID NO: 1476

SEQ ID NO: 7987 - DNA, 50 bp, Streptococcus pneumoniae; identical to SEQ ID NO: 7912
  source 1..50: mol_type = genomic DNA

SEQ ID NO: 7988 - DNA, 40 bp, Streptococcus pneumoniae; identical to SEQ ID NO: 7913
  source 1..40: mol_type = genomic DNA

SEQ ID NO: 7989 - DNA, 40 bp, Streptococcus pneumoniae; identical to SEQ ID NO: 7914
  source 1..40: mol_type = genomic DNA

SEQ ID NO: 7990 - DNA, 50 bp, Streptococcus pneumoniae; identical to SEQ ID NO: 7915
  source 1..50: mol_type = genomic DNA

SEQ ID NO: 7991 - protein, 475 aa, Streptococcus pneumoniae; identical to SEQ ID NO: 1521

SEQ ID NO: 7992 - DNA, 50 bp, Streptococcus pneumoniae; identical to SEQ ID NO: 7912
  source 1..50: mol_type = genomic DNA

SEQ ID NO: 7993 - DNA, 40 bp, Streptococcus pneumoniae; identical to SEQ ID NO: 7913
  source 1..40: mol_type = genomic DNA

SEQ ID NO: 7994 - DNA, 40 bp, Streptococcus pneumoniae; identical to SEQ ID NO: 7914
  source 1..40: mol_type = genomic DNA

SEQ ID NO: 7995 - DNA, 50 bp, Streptococcus pneumoniae; identical to SEQ ID NO: 7915
  source 1..50: mol_type = genomic DNA

SEQ ID NO: 7996 - protein, 475 aa, Streptococcus pneumoniae
MITTNKVAIYVRVSTTNQVEEGYSIDEQKDKLEAYCKIKDWKIYDVYVDGGFSGANTQRPELERLISDVKRKKVDIVLVYKLDRLSRSQKDTLFLIEDVFAKNDVAFISLQENFDTSTPFGKASIGMLSVFAQLEREQIKERMMLGKEGRAKNGKSMSWTTIAFGYDYSKETGVLSVNPTQALIVNRIFTEYLNGKPVVKIIRDLNAEGHVGRKRPWGETITKYLLKNETYLGKVKYKDKVYEGQHEPIITQELFDLVQLEVERRQISAYEKYNNPRPFRAKYMLSGLMKCGYCGASLGLRYTRKDKNGISHHKYQCRNRHSKDLEKRCESGWYSKEELERGVIKELERIKFDPKYKNETLAKKEETIKVEEIKKQLERINNQVSKLTELYLDEIITRKELDEKNDKIKTERQFLEEQLENQKSNVLSIRKRKLTRLLKDFDVEKLSYEDASKIVKNIIKEIIVTKDGMSITLDF

SEQ ID NO: 7997 - DNA, 50 bp, Streptococcus pneumoniae; identical to SEQ ID NO: 7912
  source 1..50: mol_type = genomic DNA

SEQ ID NO: 7998 - DNA, 40 bp, Streptococcus pneumoniae; identical to SEQ ID NO: 7918
  source 1..40: mol_type = genomic DNA

SEQ ID NO: 7999 - DNA, 40 bp, Streptococcus pneumoniae; identical to SEQ ID NO: 7919
  source 1..40: mol_type = genomic DNA

SEQ ID NO: 8000 - DNA, 50 bp, Streptococcus pneumoniae; identical to SEQ ID NO: 7915
  source 1..50: mol_type = genomic DNA

SEQ ID NO: 8001 - protein, 471 aa, Vallitalea guaymasensis
MSANLEKRVACYVRVSTENQLENYSIDEQTDRLKAFCKAKDLSIVKFYTDGGYSGGNMNRPGLQQMLKDIKDKHIDMIIVYKLDRLSRSQKDTLTLIEDEFLSNDVDFVSMSENFDTSTPFGKAMIGILSVFAQLEKDQITERFTMGRIGRAKNGYYHGGPTAPTGYDYIDGELVVNEYEALQVKEVFKRFLDGQSINAIRKYMSEHYTNKYGNWSSHTLVLNILKNKVYIGKVKFKGKAYAGKHKPIISTDIFNDVQKILTSTKREDSKTIFQKNPFKANNLLTSLIYCKNCGARFCGNHGNYVCYSRGKTDKRKIIDPNCKNKKWNIQALDKIIKDEILEAALNKEYFNKIISNKEIVPVDNTKKMKKRIDEIDKQIVRMMDLYQVGDIPIEQISHRIVKLKKEKDTISDQLVDKKQTKLSIAEAKGILSRAAIILENGDLSQQRMVVSNLIDYIEIDDECIQIHWSFV

SEQ ID NO: 8002 - DNA, 50 bp, Vallitalea guaymasensis
  source 1..50: mol_type = genomic DNA
tattacagttttagtttatccatgtgtatggttatactaaaactgcaaaa

SEQ ID NO: 8003 - DNA, 40 bp, Vallitalea guaymasensis
  source 1..40: mol_type = genomic DNA
taagcaggcattgaccatgtgcatgggattcggatgtaat

SEQ ID NO: 8004 - DNA, 40 bp, Vallitalea guaymasensis
  source 1..40: mol_type = genomic DNA
taagcaggcattgaccatggtcatgggattcggatgtaat

SEQ ID NO: 8005 - DNA, 50 bp, Vallitalea guaymasensis
  source 1..50: mol_type = genomic DNA
tgtcacagttttcatttatccttggtcatggatatagatctacggggaaa

SEQ ID NO: 8006 - protein, 617 aa, Vibrio cyclitrophicus
MFKPSAYPQVYSYRRFSNIEQEKGSSIARQKMHAENIAKEYSLEINQDLVMTDRGLSAFHAEHKRKGALGVFLKLVEEEKIQRGSVLIVESLDRLSREQPFKAQATMNEIIESDITIITAKDNKVYNKEVIAQAPLETLIYSILELIRAHNESLIKQGYSVDFIRQQIKEYYDGNPSDVAGSLVFWLSRKPTQHKKTKGGFELNDKVDVVRYILELYNKGNGVRKISRKLLKKNIPAPLGGDVWGVSTISSILCNPALCGRKVFNLSYLLKGNTKTDPYSLDNYYPAVISEEDFEQMQAKKKRKASAGHGDRGKFVHFLSDYGKRSVCSECDRSVTSQTQTQVNRHRRRLHCAQQKDKEICSPSIIQDYIEDAFLVSVARHIDHNLINQDEDSSAQILVEERLAEIDIALINMMDIRYSVTDPKMRLKLTTDYKRLEGEKEALSKKSGELKKYQVSEDEITEFIARVEAARVFENTEDRRFIKSILELCIRKITVYMQAKPLAEYGYENLYENALVNVIDVEFYSERKLSIFVSSDKDNSTLLFTKIDDEFADDARGSYTSKQLRLWNDHGFEALLEDLGIEQSEHVANSAWLTLDLTQAFAAALVDKIVQDDCSLE

SEQ ID NO: 8007 - DNA, 50 bp, Vibrio cyclitrophicus
  source 1..50: mol_type = genomic DNA
ttagtgtttagtgttcgcttgccgtctctctggtgaacactcatactatt

SEQ ID NO: 8008 - DNA, 40 bp, Vibrio cyclitrophicus
  source 1..40: mol_type = genomic DNA
aaaatagccgaatgcgccgtctgtccagtggatgtcttgc

SEQ ID NO: 8009 - DNA, 40 bp, Vibrio cyclitrophicus
  source 1..40: mol_type = genomic DNA
aaaatagccgaatgcgccgactgtccagtggatgtcttgc

SEQ ID NO: 8010 - DNA, 50 bp, Vibrio cyclitrophicus
  source 1..50: mol_type = genomic DNA
ttagtgttttgttttcacttcccaactttcaggtaagtctagatcctatt

SEQ ID NO: 8011 - protein, 521 aa, Vallitalea guaymasensis
MIRRAVAYCRVSSDHEDQLNSLENQKQMWEEYINKHEGLEFCGLYVDEGISGTSTKKREAFNRMVNDASTGKFDLILTKEVSRFARNTVDTLQFTRKLKEYGVDVYFKIDNINTGDNDGELRLSLMATLAQEESRKISERVKSGHKQAMKNGIVFGANRIFGYDLIDKQLFINKTEADIVRKIFNWYLLEDESLHGIVRRLAAIGITKGKLGGKINHSSIRRILENEKYAGDLKQQKYYTVNYLTHKKKKNKGDKGYIINIDNHPAVIDRDIWNKVQMKLNDNMRKYKEQGIGYSKSLFSGKIICGSCGGKYRKRTMKNKDGTYRVIYKCNVNYSKGKKGCENGSYIRQDVLINIFIDLLTRISEVKDKKIFIKNMMIALEEGLVNNSIKRLENIEKQITKIQDKKDKLLDLYMDGILGKEGYIKKNTELQEAESRFNAELQIAENRKYHLSSKKQRLDNLYNIVCKELDYSELQSNDDIKELVNIFIDKIVIKENIINFYLVDGNYEIDIKKYPKRVNTG

SEQ ID NO: 8012 - DNA, 50 bp, Vallitalea guaymasensis
  source 1..50: mol_type = genomic DNA
aatatcctaaaagggtgaacacaggagaacgtacacccattggggatatt

SEQ ID NO: 8013 - DNA, 40 bp, Vallitalea guaymasensis
  source 1..40: mol_type = genomic DNA
aaatccaggagcagtagatgagattatccatctaggagat

SEQ ID NO: 8014 - DNA, 40 bp, Vallitalea guaymasensis
  source 1..40: mol_type = genomic DNA
aaatccaggagcagtagatacgattatccatctaggagat

SEQ ID NO: 8015 - DNA, 50 bp, Vallitalea guaymasensis
  source 1..50: mol_type = genomic DNA
aatatcctgttagtgagaacacacacgagtgcagcctttttggggatatt

SEQ ID NO: 8016 - protein, 524 aa, Vibrio parahaemolyticus
MKTAYSYIRFSSKAQELGDSLRRQLDDTRRYCAEHNFKLSETSYQDLGISAFKDRDRASLEDMLAAIKSGSIQRGSVIILESVDRLSRAGIDKTQEIVKSILRHDVEIVSLHDGLHLTKGSLNDLIAVIRLAASADLAHQESVKKAERVKSAKKRQKDDARQGKAIKKRLVWWLSRESDTYKLNENAQHVREMIKLRQQGAGYHKIAMKLNESGIQTRYGKTWSDTAVREMLSHDALYGGYQVGTVRNGKFIKEELIHNYYPPLISYSEFKELQSEYVNRTGGHKKHNHLSGLVRCGHCGSAMQKKVSKRTTKKRTIEYKQWICVASVSGGCEFKNGIRDLDEHIFKVAKNLVIENSATISEAENTAIARVDELQSRLIMQKDKLANADGVAFDLILEATERTKAELDSASSHLAQLQANSRDITGEDVDRLAEYSNDAVKFNLHLKKLIQRIVVSKKGSNLWHVKLFQRNQHTVNLTVFRETQRSAFKYFLGGSEDRANLIEDAKNSFAEMHEWEKDYGDEVT

SEQ ID NO: 8017 - DNA, 50 bp, Vibrio parahaemolyticus
  source 1..50: mol_type = genomic DNA
gttttctactttataaagttaactgtgataaactttttgaaatagacaac

SEQ ID NO: 8018 - DNA, 40 bp, Vibrio parahaemolyticus
  source 1..40: mol_type = genomic DNA
cgccggggccaaattgaccgtaatgcgcttggctggaaac

SEQ ID NO: 8019 - DNA, 40 bp, Vibrio parahaemolyticus
  source 1..40: mol_type = genomic DNA
cgccggggccaaattgaccataatgcgcttggctggaaac

SEQ ID NO: 8020 - DNA, 50 bp, Vibrio parahaemolyticus
  source 1..50: mol_type = genomic DNA
gttttcttctataaaaacctacctatgataaagtttaacttataaaccag

SEQ ID NO: 8021 - protein, 480 aa, Streptococcus mutans
MIATNKVAIYIRVSTTNQAEEGYSIEEQQEKLKAYCAIKDWSIYDVYIDGGFTGSNTDRPELKRLVKEAKNKKFDTVLVYKLDRLSRSQKDTLYLIEEVFTKNNIAFLSLLENFDTSSAFGKAMIGILSVFAQLEREQIKERMQLGKVGRAKSGKSMMWAKPSYGYIYHQETGEMTVDEYESIVIKFIFSSYLAGRSITKLRDDLNKKYPKKIAWNYKMVRHILDNPVYCGNIRFKSEIYSGNHEAIISKEDFEKVQEELAIRQRTAAENSNPRPFQAKYMLSGIAQCGYCKAPLKIIMGAIRKDGTRFIHYECYQRHPRTTKGVTVYNDNKKCNSGYYDKKELEQYVLKEVSKLQEDKEYLESLFNVPDKSIERDKIQEQVNILENKISRLNDLYVDDRISLDELKIKSDNFLKMKAVLETELENDPAIKQQKKKENMKKTLKTKDILSMNYEQQKAVIRALIIKVQVTAESIVIKWKI

SEQ ID NO: 8022 - DNA, 50 bp, Streptococcus mutans
  source 1..50: mol_type = genomic DNA
taaagaattttactatctttcatttcaatcaaggatactaaaaatatcta

SEQ ID NO: 8023 - DNA, 40 bp, Streptococcus mutans
  source 1..40: mol_type = genomic DNA
gagaagaactactaacatttctataagcgtaaaagcccgt

SEQ ID NO: 8024 - DNA, 40 bp, Streptococcus mutans
  source 1..40: mol_type = genomic DNA
gagaagaactactaacatttatataagcgtaaaagcccgt

SEQ ID NO: 8025 - DNA, 50 bp, Streptococcus mutans
  source 1..50: mol_type = genomic DNA
taaagaaaaaagatatctatgatttaaatcaataatcaaattaatattta

SEQ ID NO: 8026 - protein, 480 aa, Streptococcus mutans
MIATNKVAIYIRVSTTNQAEEGYSIEEQQEKLKAYCAIKDWSIYDVYIDGGFTGSNTDRPELKRLVKEAKNKKFDTVLVYKLDRLSRSQKDTLYLIEEVFTKNNIAFLSLLENFDTSSAFGKAMIGILSVFAQLEREQIKERMQLGKVGRAKSGKSMMWAKPSYGYIYHKETGEMTVDEYESIAIKFIFSSYLAGRSITKLRDDLNKKYPKEIAWNYKMVRHILDNPVYCGNIRFKDEIYSGNHEAIISKKDFEKVQEELAIRQRTAAENSNPRPFQAKYMLSGIAQCGYCKAPLKIIMGAIRKDGTRFIRYECYQRHPRKIKGVTVYNDNKKCNSGYYDKKELEQYVLKEVSKLQEDKEYLESLFNVPDKSIERDKIQGQVNILEKKISRLNDLYVDDRISLDELKIKSDNFLKMKAVLETELENDPTIKQQKKKENMKKILKTKDILSMNYKQQKAVIRALITKVQVTAESIIIKWKI

SEQ ID NO: 8027 - DNA, 50 bp, Streptococcus mutans; identical to SEQ ID NO: 8022
  source 1..50: mol_type = genomic DNA

SEQ ID NO: 8028 - DNA, 40 bp, Streptococcus mutans; identical to SEQ ID NO: 8023
  source 1..40: mol_type = genomic DNA

SEQ ID NO: 8029 - DNA, 40 bp, Streptococcus mutans; identical to SEQ ID NO: 8024
  source 1..40: mol_type = genomic DNA

SEQ ID NO: 8030 - DNA, 50 bp, Streptococcus mutans; identical to SEQ ID NO: 8025
  source 1..50: mol_type = genomic DNA

SEQ ID NO: 8031 - protein, 480 aa, Streptococcus mutans
MIATNKVAIYIRVSTTNQAEEGYSIEEQQEKLKAYCAIKDWSIYDVYIDGGFTGSNTDRPELKRLVREAKNKKFDTVLVYKLDRLSRSQKDTLYLIEEVFTKNNIAFLSLLENFDTSSAFGKAMIGILSVFAQLEREQIKERMQLGKVGRAKSGKSMMWAKPSYGYIYHQETGEMTVDEYESIAIKFIFSSYLAGRSITKLRDDLNKKYPKKIAWNYRMVRHILDNPVYCGNIRFKGEIYSGNHKAIISKEDFEKVQEELAIRQRTAAENSNPRPFQAKYMLSGIVQCGYCKAPLKIIMGAIRKDGTRFIRYECYQRHPRTTKGVTVYNDNKKCNSGYYDKKELEQYVLKEVSKLQEDKEYLESLFNVPDKSIEHDKIQGQVNILENKISRLNDLYVDDRISLDELKIKSDNFLKMKAVLKTELENDPVTKQQKKKENMEKILKTKDILSMNYEQQKAVIRALITKVQVTTESIIIKWKI

SEQ ID NO: 8032 - DNA, 50 bp, Streptococcus mutans
  source 1..50: mol_type = genomic DNA
taaagaattttattatctttcatttcaatcaaggatactaaaaatatcta

SEQ ID NO: 8033 - DNA, 40 bp, Streptococcus mutans
  source 1..40: mol_type = genomic DNA
gagaagaactactaacatttctataagcgtaaaagctcgt

SEQ ID NO: 8034 - DNA, 40 bp, Streptococcus mutans
  source 1..40: mol_type = genomic DNA
gagaagaactactaacatttatataagcgtaaaagctcgt

SEQ ID NO: 8035 - DNA, 50 bp, Streptococcus mutans; identical to SEQ ID NO: 8025
  source 1..50: mol_type = genomic DNA

SEQ ID NO: 8036 - protein, 480 aa, Streptococcus mutans
MIATNKVAIYIRVSTTNQAEEGYSIEEQQEKLKAYCAIKDWSIYDVYIDGGFTGSNTDRPELKRLVKEAKNKKFDTVLVYKLDRLSRSQKDTLYLIEEVFTKNNIAFLSLLENFDTSSAFGKAMIGILSVFAQLEREQIKERMQLGKVGRAKSGKSMMWAKPSYGYIYHQETGEMTVDEYESIAIKFIFSSYLAGRSITKLRDDLNKKYPKKIAWNYKMIRHILDNPVYCGNIRFKDEIYSGNHEAIISKEDFEKVQEELAIRQRTAAENSNPRPFQAKYMLSGIAQCGYCKAPLKIIMGAIRKDGTRFIRYECYQRHPRKIKGVTVYNDNKKCNSGYYDKKELEQYVLKEVSKLQEDKEYLESLFNVPDKSIERDKLQGQVNILEKKISRLNDLYVDDRISLNELKIKSDNFLKMKAVLETELENDPAIKQQKKKENMKKILKTKDILSMNYEQQKAVIRALITKVKVTAESIIIKWKI

SEQ ID NO: 8037 - DNA, 50 bp, Streptococcus mutans; identical to SEQ ID NO: 8022
  source 1..50: mol_type = genomic DNA

SEQ ID NO: 8038 - DNA, 40 bp, Streptococcus mutans; identical to SEQ ID NO: 8023
  source 1..40: mol_type = genomic DNA

SEQ ID NO: 8039 - DNA, 40 bp, Streptococcus mutans; identical to SEQ ID NO: 8024
  source 1..40: mol_type = genomic DNA

SEQ ID NO: 8040 - DNA, 50 bp, Streptococcus mutans; identical to SEQ ID NO: 8025
  source 1..50: mol_type = genomic DNA

SEQ ID NO: 8041 - protein, 480 aa, Streptococcus mutans
MIATNKVAIYIRVSTTNQAEEGYSIEEQQEKLKAYCAIKDWSIYDVYIDGGFTGSNTDRPELKRLVKEAKNKKFDTVLVYKLDRLSRSQKDTLYLIEEVFTKNNIAFLSLLENFDTSSAFGKAMIGILSVFAQLEREQIKERMQLGKVGRAKSGKSMMWAKPSYGYIYHQETGEMTVDEYESIAIKFIFSSYLAGRSITKLRDDLNKKYPKKIAWNYKMVRHILDNPVYCGNIRFKDEIYSGNHEAIISKKIFEKVQEELAIRQRTAAENSNPRPFQAKYMLSGIAQCGYCKAPLKIIMGAIRKDGTRFIRYECYQRHPRKIKGVTVYNDNKKCNSGYYDKKELEQYVLKEVSKLQEDKEYFESLFNVPDKSIERDKIQGQVNILENKISRLNDLYVDDRISLDELKIKSDNFLKMKAVLETELENDPAIKQQKKKENMKKILKTKDILSMNYEQQKAVIRALITKVQVTAESIIIKWKI

SEQ ID NO: 8042 - DNA, 50 bp, Streptococcus mutans; identical to SEQ ID NO: 8022
  source 1..50: mol_type = genomic DNA

SEQ ID NO: 8043 - DNA, 40 bp, Streptococcus mutans; identical to SEQ ID NO: 8023
  source 1..40: mol_type = genomic DNA

SEQ ID NO: 8044 - DNA, 40 bp, Streptococcus mutans; identical to SEQ ID NO: 8024
  source 1..40: mol_type = genomic DNA

SEQ ID NO: 8045 - DNA, 50 bp, Streptococcus mutans; identical to SEQ ID NO: 8025
  source 1..50: mol_type = genomic DNA

SEQ ID NO: 8046 - protein, 480 aa, Streptococcus mutans
MIATNKVAIYIRVSTTNQAEEGYSIEEQQEKLKAYCAIKDWSIYDVYIDGGFTGSNTDRPELKRLVKEAKNKKFDTVLVYKLDRLSRSQKDTLYLIEEVFTKNNIAFLSLLENFDTSSAFGKAMIGILSVFAQLEREQIKERMQLGKVGRAKSGKSMMWAKPSYGYIYHKETGKMTVDEYESIAIKFIFSSYLAGRSITKLRDDLNKKYPKEIAWNYKMVRHILDNPVYCGDIRFKDEIYSGNHEAIISKEDFEKVQEELAIRQRTAAENSNPRPFQAKYMLSGIAQCGYCKAPLKIIMGAIRKDGTRFIRYECYQRHPRKIKGVTVYNDNKKCNSGYYDKKELEQYVLKEVSKLQEDKEYLESLFNVPDKSIERDKIQGQVNILENKISRLNDLYIDDRISLDELKIKSDNFLKMKAILETELKNDPATKQQKKKENMEKILKTKDILSMNYEQQKAVIRALITKVQVTAERIIIKWKI

SEQ ID NO: 8047 - DNA, 50 bp, Streptococcus mutans; identical to SEQ ID NO: 8022
  source 1..50: mol_type = genomic DNA

SEQ ID NO: 8048 - DNA, 40 bp, Streptococcus mutans; identical to SEQ ID NO: 8023
  source 1..40: mol_type = genomic DNA

SEQ ID NO: 8049 - DNA, 40 bp, Streptococcus mutans; identical to SEQ ID NO: 8024
  source 1..40: mol_type = genomic DNA

SEQ ID NO: 8050 - DNA, 50 bp, Streptococcus mutans; identical to SEQ ID NO: 8025
  source 1..50: mol_type = genomic DNA

SEQ ID NO: 8051 - protein, 480 aa, Streptococcus mutans
MIATNKIAIYIRVSTTNQAEEGYSIEEQQEKLKAYCAIKDWSIYDVYIDGGFTGSNTDRPELKRLVKEAKNKKFDTVLVYKLDRLSRSQKDTLYLIEEVFTKNNIAFLSLLENFDTSSAFGKAMIGILSVFAQLEREQIKERMQLGKVGRAKSGKSMMWAKPSYGYIYHQETGEMTVDEYESIAIKFIFSSYLAGRSITKLRDDLNKKYPKKIAWNYKMVRHILDNPVYCGNIRFKDEIYSGNHEAIISKEDFEKVQEELVIRQRTAAENSNPRPFQAKYMLSGIAQCGYCKAPLKIIMGAIRKDGTRFIRYECYQRHPRTTKGVTVYNDNKKCNSGYYDKKELEQHVLKEVSKLQEDKEYLESLFNVPDKSIERDKIQGQVNILENKISRLNDLYVDDRISLDELKIKSDNFLKMKAVLETELENDPAIKQQKKKENMKKILKTKDILSMNYEQQKAVIRALITKVQVTAESIIIKWKI

SEQ ID NO: 8052 - DNA, 50 bp, Streptococcus mutans
  source 1..50: mol_type = genomic DNA
tataaagaattttactatctttaatttctataagcgtaaaagctttaatt

SEQ ID NO: 8053 - DNA, 40 bp, Streptococcus mutans; identical to SEQ ID NO: 1308
  source 1..40: mol_type = genomic DNA

SEQ ID NO: 8054 - DNA, 40 bp, Streptococcus mutans; identical to SEQ ID NO: 1309
  source 1..40: mol_type = genomic DNA

SEQ ID NO: 8055 - DNA, 50 bp, Streptococcus mutans; identical to SEQ ID NO: 1310
  source 1..50: mol_type = genomic DNA

SEQ ID NO: 8056 - protein, 495 aa, Citrobacter freundii
MKQNGQAYSYIRFSSKKQEQGDSVRRQTELAEQYAHANSLILSDKNFQDLGISAFKEGNRPSLGDMLEAIEKGQIEQGSTIIIESLDRLSRRGIDVTQQIIKSILQHNIFIASLVDGLLLNQESVNDLVSVIRIALAADLAYKESEKKSQRLRETKRQQRQRALNGEVINKILPFWLERKEDKFYFSDRVDSVIRIIQLRREGFGTNKIAKALNDEGHRPLRSTGWNHTTVGKTINSVALYGAYQTSETTKDRKVILLDIIENYYPAVISKEEFMLLQSDQKQNKPGYKSEHNAFAGILKHECGGSLVRKFHVASGKTYQYHVCANARDGKCNITKNFKNIEIALYRIMRKLKLEKSTNLDGALLIERDTIKLKIQELNNMLLTESKIPTSVIQTINNLEDKLHELEEKIKKQNSTIISERAFDLNLLQEIKDPQELNMMLKRVIEQITVYNIGKKWRIKVLYRNKHVQSFLWDGEKISFITDTKEILDLVNSWV

SEQ ID NO: 8057 - DNA, 50 bp, Citrobacter freundii
  source 1..50: mol_type = genomic DNA
aatttccccctttgaaactatattgtgatattgttgcaaagaagcaaaat

SEQ ID NO: 8058 - DNA, 40 bp, Citrobacter freundii
  source 1..40: mol_type = genomic DNA
cttactgccgaactgcatggtgacgttgctggaaactaac

SEQ ID NO: 8059 - DNA, 40 bp, Citrobacter freundii
  source 1..40: mol_type = genomic DNA
cttactgccgaactgcatgatgacgttgctggaaactaac

SEQ ID NO: 8060 - DNA, 50 bp, Citrobacter freundii
  source 1..50: mol_type = genomic DNA
aatttatctcttaaaaagtattttatgatatttttgatatgaattaaaat

SEQ ID NO: 8061 - protein, 495 aa, Citrobacter freundii
MKQNGQAYSYIRFSSKKQEQGDSVRRQTELAEQYAHANSLILSDKNFQDLGISAFKEGNRPSLGDMLEAIEKGQIEQGSTIIIESLDRLSRRGIDVTQQIIKSILQHNIFIASLVDGLLLNQESVNDLVSVIRIALAADLAYKESEKKSQRLRETKRQQRQRALNGEVINKILPFWLERKEDKFYFSDRVDSVIRIIQLRREGFGTNKIAKALNDEGHRPLRSTGWNHTTVGKTINSVALYGAYQTSETTKDRKVILLDIIENYYPAVISKEEFMLLQSDQKQNKPGYKSEHNAFAGILKHECGGSLVRKFHVASGKTYQYHVCANARDGKCNITKNFKNIEIALYRIMRKLKLEKSTNLDGALLIERDTIKLKIQELNNMLLTESKIPTSVIQTINNLEDKLHELEEKIKKQNSMIISERAFDLNLLQEIKDPQELNMMLKRVIEQITVYNIGKKWRIKVLYRNKHVQSFLWDGEKISFITDTKEILDLVNSWV

SEQ ID NO: 8062 - DNA, 50 bp, Citrobacter freundii; identical to SEQ ID NO: 8057
  source 1..50: mol_type = genomic DNA

SEQ ID NO: 8063 - DNA, 40 bp, Citrobacter freundii; identical to SEQ ID NO: 8058
  source 1..40: mol_type = genomic DNA

SEQ ID NO: 8064 - DNA, 40 bp, Citrobacter freundii; identical to SEQ ID NO: 8059
  source 1..40: mol_type = genomic DNA

SEQ ID NO: 8065 - DNA, 50 bp, Citrobacter freundii; identical to SEQ ID NO: 8060
  source 1..50: mol_type = genomic DNA

SEQ ID NO: 8066 - protein, 495 aa, Escherichia coli; identical to SEQ ID NO: 8061

SEQ ID NO: 8067 - DNA, 50 bp, Escherichia coli; identical to SEQ ID NO: 8057
  source 1..50: mol_type = genomic DNA

SEQ ID NO: 8068 - DNA, 40 bp, Escherichia coli; identical to SEQ ID NO: 4473
  source 1..40: mol_type = genomic DNA

SEQ ID NO: 8069 - DNA, 40 bp, Escherichia coli
  source 1..40: mol_type = genomic DNA
cttactgccgaactgcatgatgacgttactggaaactaac

SEQ ID NO: 8070 - DNA, 50 bp, Escherichia coli; identical to SEQ ID NO: 8060
  source 1..50: mol_type = genomic DNA

SEQ ID NO: 8071 - protein, 575 aa, Bacteroides uniformis
MRGVIYSRVSTIDQDYSKQTNELKDFAKKNNIDIVHIFEEKESGFNNDRPEFKKVQQLTKDEVDILLVWELSRLSRRSIYIQQQVRNFADKGICIYTKKENLYTLNEDGTENKSAMLLIGFTSIIAEQEVATLKERTISSKRNRIIKEGYSYTYNAPYGYIYDKETKKLSINPIEAEVVKRIFELSANGYSAYRIPVLLNADGIPTKTGKKWTLPTIATILTNTVYKGEAHYKLKGEKPKEGKRYSRTTEYAVVETPAIVTSELFDLSRKMMKERLSRSKSSGVKYNPLLRGLIVCPYCNVKYIFNRRDNLYSCHERYEKATNKTTQCFSKSISINKIDEIIWNLVKILFSKELAAGKTDEQIEPINRELENYKLQVVNLEHKQNELTQKANIIANAAIDIKIQFPNLPDLYLNKLKEVESINKEAGRYLNEIKHLEKLMESCRNKIQAINTLSDESIVVESIVDETEKYDLVHKVIDNIVVYGEGHYTLVVVTFQTGQVAYIGYYSFKRYKYYTIFYPSQSVWFDTEKRLGYIMTMKDSKSLKLSLETVTKEYSITDFINMFDVPENRHYYENQ

SEQ ID NO: 8072 - DNA, 50 bp, Bacteroides uniformis
  source 1..50: mol_type = genomic DNA
acccatacctataaatgttaaatagtaaataaacatttgcaggtacgtgt

SEQ ID NO: 8073 - DNA, 40 bp, Bacteroides uniformis
  source 1..40: mol_type = genomic DNA
ggcttctttttggagcgtggtcaggtcgtacagcaaggga

SEQ ID NO: 8074 - DNA, 40 bp, Bacteroides uniformis
  source 1..40: mol_type = genomic DNA
ggcttctttttggagcgtggccaggtcgtacagcaaggga

SEQ ID NO: 8075 - DNA, 50 bp, Bacteroides uniformis
  source 1..50: mol_type = genomic DNA
atccataccttggaacaatatatagcaactaaaaataagaatgtacgtgt

SEQ ID NO: 8076 - protein, 566 aa, Vibrio parahaemolyticus
MSKIIYPYIRFSSDKQAAGSSFQRQMERITDYANENGYIVNNSLKLQDLGLSAFTAKHIEKGALGAFLDGVKAGKIEQDGSAYLCIEQLDRLSRENVDDAYQVFRKILKSNVNIITLMDNKIYTKESLTDLMSIMYSLMLMAQANQESAKKSDRVLRAFDKKLDKLNEGKTVQYVGMFPGWIDNKGTKEETNFVINKKSEIVQRVFSLYINGTSMGDIARILNEERVPQVAKKRQKNYTNSWSSAKINHLLKNRCVLGELLIRKTGDIFENYYPAIISVDDWDIVQSMMKTKKIAKSSGRRSINIFTGKMFCACCGQKYYFETDDKNTKTGKKLYYMLKCSGRRSLSCKSKSIKYDDFLDSSPNLFGMITKSKKDNSKEIDKIKLKIKEINETTKKSRDKLITLENLNDSNELDFTVYLKESSKVQKQVRENDARVASFKLKISRLSSDNKLDYFDKTDPNSVVKAKKFISDNFAAFVISSDSRFCIALYNDGQVLQFKIKNSKIEKKESQVKNIDNFESFNEFYKLKEQVLETYKNGTMDGRFIEILSATNFWGVETSEKDYSLD

SEQ ID NO: 8077 - DNA, 50 bp, Vibrio parahaemolyticus
  source 1..50: mol_type = genomic DNA
ttcctgtaaactttacatagtatagtaaagctatgtatgattaacaggaa

SEQ ID NO: 8078 - DNA, 40 bp, Vibrio parahaemolyticus
  source 1..40: mol_type = genomic DNA
cgccggagccaaattgaccgtaatgcgcttggctggaaac

SEQ ID NO: 8079 - DNA, 40 bp, Vibrio parahaemolyticus
  source 1..40: mol_type = genomic DNA
cgccggagccaaattgaccataatgcgcttggctggaaac

SEQ ID NO: 8080 - DNA, 50 bp, Vibrio parahaemolyticus
  source 1..50: mol_type = genomic DNA
ttccagaatccctgacatagtagaataatgctgtgagaataaaacaggaa

SEQ ID NO: 8081 - protein, 566 aa, Vibrio rotiferianus; identical to SEQ ID NO: 8076

SEQ ID NO: 8082 - DNA, 50 bp, Vibrio rotiferianus; identical to SEQ ID NO: 8077
  source 1..50: mol_type = genomic DNA

SEQ ID NO: 8083 - DNA, 40 bp, Vibrio rotiferianus
  source 1..40: mol_type = genomic DNA
cgcaggagccaaattgaccgtgattcgtttcgccggaaac

SEQ ID NO: 8084 - DNA, 40 bp, Vibrio rotiferianus
  source 1..40: mol_type = genomic DNA
cgcaggagccaaattgaccatgattcgtttcgccggaaac

SEQ ID NO: 8085 - DNA, 50 bp, Vibrio rotiferianus; identical to SEQ ID NO: 8080
  source 1..50: mol_type = genomic DNA

SEQ ID NO: 8086 - protein, 463 aa, Blautia obeum
MNTYFHPQPELYGLRVVKYIRCSHEGQVLHGDTLEAQDALLNEFIEANHMVLVDTFVDEALTARKKFTKRKEFVRLLNGVRAHAFDMILFTKLDRWFRNIGDYHKIQEILDANGVQWKAITESYDTTTTNGRLHINIRLSVAQDECDRDSDRIKDVFAYKLKNKSYISGRLPRGLKLDADKHIIHDPEWKQWALDMFDHFESSGSIYSTFLFLTNKYGPLLRYDGVSRALKNPLYKGMYRDDPEFCDPLIDPERFDHLLELAKKNVRQRKTRRYYIFTGLLVCSSCQHSLVPYTIPHTLADGTHKDYVSYRCGYHSSSRLCDRSRTYREEYIEQYLLDHVRPALSHYIAEYDVISSSASKKDPAAEAAKIRRKLEKLYDLFLDDLIEKDLYRQKYDELQAQLKECLAAPSAPVRDFSAVQELLSKNWEDMYCTFSKTEKNVFWKSFVESITVYEDGSMDINFL

SEQ ID NO: 8087 - DNA, 50 bp, Blautia obeum
  source 1..50: mol_type = genomic DNA
atttatactaactatacctaaccgtttggttacaaatagttagtataaat

SEQ ID NO: 8088 - DNA, 40 bp, Blautia obeum
  source 1..40: mol_type = genomic DNA
cttttgtgccggatacacattcggcaaggataataataag

SEQ ID NO: 8089 - DNA, 40 bp, Blautia obeum
  source 1..40: mol_type = genomic DNA
cttttgtgccggatacacatacggcaaggataataataag

SEQ ID NO: 8090 - DNA, 50 bp, Blautia obeum
  source 1..50: mol_type = genomic DNA
atatatactcatattacatagcagtatgtttacaaaaggcttataaaaat

SEQ ID NO: 8091 - protein, 601 aa, Shewanella frigidimarina
MVVCAHHVFKSYENIMQEEVLSGLVYLYQRFSSIGQDGNSSLFRQGEAQRDWLKNHPHCIETEIDNSPFIDAGVSAFSGKHLESGSLGRLVAAIESKAIPPGSIILVEHFSRLSRMNISETGRLLDRIWDHDVTIVTARDKAVYSPAMRDDMSTRLRLIIEIDKAHSDSKWRSEKVKSSWTRRAFNAEDNDIPPKMRMPFWLDKNGKLNEYESLVKKIFELYLDGFGQVRIERELKKLFPGAKPLKNVNPTKFIRIILNRKCIGEVYGKRLYEPVIDDATFFSAQEIHSKRLYKSVKADRRWPLRGLITCGHCGSGMSIQQSSNSLPLLRCSNKQRSGGSNCDSAATFPYIIADYFFYHTVEPLLLVMLSNRKKQEKNNLRANEIVADINKKNKASKDLDVLYLEIVNEGKNGNFITRKQLELEEEVKSLTSELEQIRHDVAINRSFRISKEALELTRDSDSYNLTLLKLGVKMVLKNRIISFSPDVDDSKTVSIEYIKFDRNSQNYSSSGYNIVNDVIAGYRCRIYDTQDFPQGKSLVVISDGVTADSLFRSKPLSKKEHSFQDVMFDMIDQFTDTDNLDDELNPVEALSKNLLEKMKKE

SEQ ID NO: 8092 - DNA, 50 bp, Shewanella frigidimarina
  source 1..50: mol_type = genomic DNA
tatatgcacatctattcactatatgagctttatggtagtatgtgcacatc

SEQ ID NO: 8093 - DNA, 40 bp, Shewanella frigidimarina
  source 1..40: mol_type = genomic DNA
gattgatcattgcaactgtgaacttaaagctgcacaaact

SEQ ID NO: 8094 - DNA, 40 bp, Shewanella frigidimarina
  source 1..40: mol_type = genomic DNA
gattgatcattgcaactgtatacttaaagctgcacaaact

SEQ ID NO: 8095 - DNA, 50 bp, Shewanella frigidimarina
  source 1..50: mol_type = genomic DNA
tatatgcactgggatgcaatatatatgtcttatggtaggttgtgggcaaa

SEQ ID NO: 8096 - protein, 545 aa, Enterocloster bolteae
MTKQYRVGIYCRLSVDDASNSAKAKHYIPSEESVSIENQYEILSKFAMLNGWIEVKTYRDDGYSGGNFQRPGFLELLEDARHGVINLILVKDLSRLGRDFVEVGRYTDVVFPSLGCRFVSVLDCLDSEGDNTDMLHFRSLMNDYHLKDLSSKIKSVLHAKKKSGQYVAAYAPYGYRKSEEDKHRLVLDEEAAAVVREIYQMRCSGMAYGKIAAALNERGVLPPSWHWAVHYGKGSSNRSKLWAYATIRCLLNDDIYLGTLTQNCTGSRSYKDKTTIRKPESEWISHENAHEAIIQPELWEAVQEINRAAKQRADGRTPPQPALFTGKLVCADCGHPMVVNRQSQHRKNGTVKRYVSYFCSRFGTTGHSTCSWHRVSEITLKNIVLNEIRAHGKAVATDEAAVLDRLKRQIQSENAAQQEDCRQEISRLRRRLEELELMTAKLYEDKVSGTISEASFALLINKSEQERVQKAERLDTLLAGEKKARQDIANIQQWAGTVRQYLDLQDLSRDIVEELIDHIEIGERTVIDGQKHQDIKIYYRFAGLV

SEQ ID NO: 8097 - DNA, 50 bp, Enterocloster bolteae
  source 1..50: mol_type = genomic DNA
ccctctcgcagatagcttatgttcttgaagataggttgttcaagaggggg

SEQ ID NO: 8098 - DNA, 40 bp, Enterocloster bolteae
  source 1..40: mol_type = genomic DNA
attgatggaaaaacatccattggtcatgataatcatagga

SEQ ID NO: 8099 - DNA, 40 bp, Enterocloster bolteae
  source 1..40: mol_type = genomic DNA
attgatggaaaaacatccaaaggtcatgataatcatagga

SEQ ID NO: 8100 - DNA, 50 bp, Enterocloster bolteae
  source 1..50: mol_type = genomic DNA
ccttcgcttcacttgcttttgttcaagaagaatggtcagaaaagaggtgg

SEQ ID NO: 8101 - protein, 507 aa, Escherichia coli
MKRVISYIRFSSEKQAKGDSLRRQSKMVTDWLKAHPEYYLDQDLSFRDLGVSGFTGKHLKGGLGDFLTAIEKGLVKAGDTLLIESLDRLSRQAVDRASELLRNILRSGVDVVTLSDGEHYTSESLKDPLALIKSILIMQRAHEESLRKSERIQAAWNRKKELISEGIKVSRRCPAWLRLNDDRKSFSVIPDKVETVKRCFQLRLEGKSIWEIVRTLNAEGHRSMNQYKPGKFGQTSVQDLLKNRSVIGYFTPKGCEEIAGYYPSVIDETTFYKVQQLSYARHGRKPASAKPLSVNLFKGVIRCSECGHALIITGFSDTRNGIYRCPLRNENRCSAKGLSRKQTDGTLLTLLSRLDRFDSDTTNTVDTLKLHREHISSNIEKLVQLSLEIEDLSAITIKLKQLKGELSQVDADIEKETQRLKSIDVGCLSDCDLTTKAGRIEAQLIIKSAVKEVVLNTAKRRCKVTFHNGKAITLPITENPSEDVTEAIQSLSEVTERGLIDVDEVII

SEQ ID NO: 8102 - DNA, 50 bp, Escherichia coli
  source 1..50: mol_type = genomic DNA
agtgtatttagaccttgatgatttttttattagacacgtttaaatacact

SEQ ID NO: 8103 - DNA, 40 bp, Escherichia coli
  source 1..40: mol_type = genomic DNA
gcggcgttaatcgggtgattttagacagccgcccgattca

SEQ ID NO: 8104 - DNA, 40 bp, Escherichia coli
  source 1..40: mol_type = genomic DNA
gcggcgttaatcgggtgatactagacagccgcccgattca

SEQ ID NO: 8105 - DNA, 50 bp, Escherichia coli
  source 1..50: mol_type = genomic DNA
agtgtatttatctatatatcatgtacctattagaaaactgaatataaact

SEQ ID NO: 8106 - protein, 674 aa, Vibrio parahaemolyticus
MRTTPKIYNYARVSTTKQTKGVGLETQQQRSVLENLSQEHNLPIHDENFVDQGLSAYHGKHKDGAFGVVLSRIESGEIASGSILVVFSLDRLSRETVNVAMEQFLSIINRGVRVYTHIDCKMFDSESQNQTADLIGSLITMQRANEESETKSKRIIAAQKIALKRWKDTGKPQGALGRSPFWIDQPTNTLNINAEGVKKAVEMKLAGYGDLKIKQYLDANFEYKQTRTKGTVKQSNTWDYTAISQLWTNRSLIGEKNFHIEGVSHVFENYYPPIIDEATFRKLKMCKSEKRGRNTSSGKIPLLKGIARCGICGGAMVFVDKGGSRVNYVCNLAMKGEHDREVYNVNMLDLLTLEICKDAYLTESDKANNTFVENEKIKIEAELVEEREVLDELVARFKSKRSNAILDLIGDSENKIDELEARLDALNSADVILSADELASLPDIFTDDVRKDYLHPERLAIRNNLYRFISSITLNRMFEPCSDAKTKFANCVDITWHFKNGQKRRLAMLPYEYTKTESGGKGLYLPFVYMYCSKNLIKVEDGDQLLSDILTKLHKLDLTKCLYPSKGQYQWSQRTLECGKTYWVPLDEGVFLEPEALQFDFGGIHTEKSTSQNYISLMYSHLWAEGEYTNDYPLLKFRDLARGFNFVESYAFYDTLRDNLFDQELYLARDFLMS

SEQ ID NO: 8107 - DNA, 50 bp, Vibrio parahaemolyticus
  source 1..50: mol_type = genomic DNA
cgaagaaatttgattgtttttagtttgccaataaaaaacagtttccttcg

SEQ ID NO: 8108 - DNA, 40 bp, Vibrio parahaemolyticus
  source 1..40: mol_type = genomic DNA
gaggaatatttgctgtggtttgataaaaagggctggccga

SEQ ID NO: 8109 - DNA, 40 bp, Vibrio parahaemolyticus
  source 1..40: mol_type = genomic DNA
gaggaatatttgctgtggtctgataaaaagggctggccga

SEQ ID NO: 8110 - DNA, 50 bp, Vibrio parahaemolyticus
  source 1..50: mol_type = genomic DNA
ggaagcaataacacaggttttagtctgcaaatataagcagttttcttttg

SEQ ID NO: 8111 - protein, 516 aa, Aeromonas veronii
MPIAILYSRFSSGIQAEGHSQERQQTQAEDFCARHTPPLELSSLTFKDLGISGWKSNAKRDGLEQLIEAVELGRIPKGSFILVEAADRLSRQGFMHVMLLVRRLVATGCKFVTIDNGQIYDHKNIENLSGALPLIISADLALQESERKSFRVKQAKSAVRKNRVLQGKMPFWIDLVDGKAVLNSSAQLMRRIIDMRLEGKSPLIIAKTLNEEGIRTIRDKQWYAETIRTLFEQSAIYGSKTYFEMKDGSYKPAEEVANLFPAIATKDEFLRLSPKKPPRGKYPSGPFSGLLKCSKCGAHIRSNGKRGEIQYRSCANAKIGKCEETGYIRDTDQILSEQLKKLAFIKSPQVASVDYEKEINELEAMLENLERDRQASKGKAFVYKMILEDMDETNTKLEALKQKRDSEAASNIDVNLEYICSIEDEQHRNSLYKTVIDRIEITRFGTTRVMYDIRFKNNHRTVFLSDYERKSKTHIAKLKSDTEELDKFISGAVDGLEPWEICTGDKPEGYLSEYWE

SEQ ID NO: 8112 - DNA, 50 bp, Aeromonas veronii
  source 1..50: mol_type = genomic DNA
tgtggttaaaaagaaatgttcacagtcatgttgtttccttttgacataca

SEQ ID NO: 8113 - DNA, 40 bp, Aeromonas veronii
  source 1..40: mol_type = genomic DNA
ttgcagaatggcgttgatggtcatgttgttggtcccatag

SEQ ID NO: 8114 - DNA, 40 bp, Aeromonas veronii
  source 1..40: mol_type = genomic DNA
ttgcagaatggcgttgatgtacatgttgttggtcccatag

SEQ ID NO: 8115 - DNA, 50 bp, Aeromonas veronii
  source 1..50: mol_type = genomic DNA
aatggttaactttatatgttaacttacaggttgttttggggtgagataaa

SEQ ID NO: 8116 - protein, 613 aa, Citrobacter portucalensis
MKKCFIYHRVSSEYQLAGSGIQRQADNLQAYVEHTNLLDDMEDPEATIISDQGVSAFKGLNMSEGELGRWMEQVRAGMWDGSALVLESIDRFSRQNPFTVVAYLSELVNHNITIHDVSLNMLINRTNSAMLPIVTMSAQRAYEESKIKSDRIRDGWRRKRENAFNNGTIVTNKCPQWIDVQDNKYVLNDKVAIVREIFRLYQTGIGTPTIAKVLNAKGDEWLFESGRLWRGESVHKILRNKRVTGTIFISEIIRDYNSTSNPVDQKTYEMDVYPIAIPKEEFDLVQQLMKTRRPNNGRITTSKNTEELKKSNIFNSVCRCARCGEAMYHNVVLANRDSKKNGKFTEEYRYVRCIGERDGFCDNKALRYEVIEQFVIEYIKGMDFTQILKPNNINPEIELVRQRIEEEKAHIQEYELGIERLKNQDKKIPFDVLTELQESRDKLKELEEHQSTFTEVQVDTDYLKTVDPSVLFDQTNIEVRSRIERELSKVIDTIQLYRTGKHYVITLKYRNVDVMKHVLFVEAKKVPVFISGVAIERMGDTIVYSTPSFNIDMVDGDLPRLTNVGGEPLNIIDYSLLLNYVDNIDPNDAVGVWMRHNHDFLFIKSDLNLWNHP

SEQ ID NO: 8117 - DNA, 50 bp, Citrobacter portucalensis
  source 1..50: mol_type = genomic DNA
tgtttgtttactatagctgtaattcaagtgtatactttgttatacaaaca

SEQ ID NO: 8118 - DNA, 40 bp, Citrobacter portucalensis
  source 1..40: mol_type = genomic DNA
tttttgcctgataatcatacaagtaggtaccgttacagca

SEQ ID NO: 8119 - DNA, 40 bp, Citrobacter portucalensis
  source 1..40: mol_type = genomic DNA
tttttgcctgataatcatataagtaggtaccgttacagca

SEQ ID NO: 8120 - DNA, 50 bp, Citrobacter portucalensis
  source 1..50: mol_type = genomic DNA
tgtttctttttcctatgtggaatttaaatgtatcctgacctattcaaaga

SEQ ID NO: 8121 - protein, 504 aa, Klebsiella pneumoniae
MTLAFSYVRFSTKHQASGTSLERQVNASKLFCSQNGLTLSNQSYHDLGISGFKNVRRPELEQMLEAIQTGDIPSGSYILIEAIDRLSRKGISHTQDILKKILQYDVKVAFVGEDAKTLQGHILNKDSLNDLSSVILVALAADLAHKESLRKSKLVKASKAIAREKAADGEILPGKSVFYLDYDRKNKKYVFNKRVDLARKIIQMRLEGKGPRKIARLLNEENIPGPTGKQWYQMSVKRLLKSPVLYGAYQTHQIIEEKYIPVSLIENYYPALIDYQTFSQIQFDDKRVSKGRPSRHKFSGVLYCECGAVLCRKVNTYETKQGPKEYQYFNCFGAFEGRCKNNKAIKDLHIPLEKAIDKLQIKTRSVKNIKNEQIIAKREKIDQLNKMLLELEMPPVSVLKTISTLEKELQELLEQPDVQPPKSADVKTLVAIKDAEQYNLYLKRLVKRITIFQLNGPKNIRIKIEKTDGHYQSFIVNNGKIMFNADTKALQEHLRKLKEGTSDE

SEQ ID NO: 8122 - DNA, 50 bp, Klebsiella pneumoniae
  source 1..50: mol_type = genomic DNA
gaatcagtgaaagaactttcagctgagtaatagtatcattttacaaaaga

SEQ ID NO: 8123 - DNA, 40 bp, Klebsiella pneumoniae
  source 1..40: mol_type = genomic DNA
cctcgcagaaatgtgccgcgggtaatagttctttcatata

SEQ ID NO: 8124 - DNA, 40 bp, Klebsiella pneumoniae
  source 1..40: mol_type = genomic DNA
cctcgcagaaatgtgccgcgagtaatagttctttcatata

SEQ ID NO: 8125 - DNA, 50 bp, Klebsiella pneumoniae
  source 1..50: mol_type = genomic DNA
gaaccagtgatctaactttaagctgaatgcaaatataaaaatacaaagga

SEQ ID NO: 8126 - protein, 562 aa, Shewanella amazonensis
MSTTKAYSYLRFSTTRQVRGDSARRQLELARDYAKRKGLELQELALADMGVSAFKGANRDAALGVFLHLVQDGKIPKGAYLLVESHDRLSRQNVEDALMQFMEIIRAGIVVVTLTDEVEYRQGQLDMSKLMLSLVYMSRANEESEMKSRRAKAVWEQSRKAAAESKTLIRNAYLPQWLKWEGDRVAIIPERAAIVQRMFALAMQGYGYTRIAAILNSEGHTGFRKNKPWRPSGVGSLLRNRRVIGEYQNCTKVDGQRQPIGEPIPEYYPAIVSISDFQEVQQQIATRNKHSGSARRGRFDNLFSGILRCQCGASMVYNDKGKKGAPRYYLVCPMREANNCDMPMLRYDAFEPQALVAISHLKPVMDARSAKSTQLWQLQNDIAKLTDQVNAQKARKRRALTLALESDDPMYNESLSNIHNDLCLMESQLDELTVLQKQLLTANRSIQLLKATEMLTMESRQLFNTQLHQSLNTMQLVLYRDFVAVAYYSKELDERPLLEQAFTVGLASSEVMEADGEMVCRTIKSPPYIDTSWFSELEMKPSESYEAIDDPEGFCVQELYDS

SEQ ID NO: 8127 - DNA, 50 bp, Shewanella amazonensis
  source 1..50: mol_type = genomic DNA
aacggtagatctgataaaaagtgctcgcacttttggggagaaataccgta

SEQ ID NO: 8128 - DNA, 40 bp, Shewanella amazonensis
  source 1..40: mol_type = genomic DNA
tcgtgctttttttaccgtgtcgcagttcttaatcccatag

SEQ ID NO: 8129 - DNA, 40 bp, Shewanella amazonensis
  source 1..40: mol_type = genomic DNA
tcgtgctttttttaccgtgaagcagttcttaatcccatag

SEQ ID NO: 8130 - DNA, 50 bp, Shewanella amazonensis
  source 1..50: mol_type = genomic DNA
aaaggtaaacaaattaaaaggtggaagtagttttggtctctattacctta

SEQ ID NO: 8131 - protein, 562 aa, Shewanella amazonensis; identical to SEQ ID NO: 8126

SEQ ID NO: 8132 - DNA, 50 bp, Shewanella amazonensis; identical to SEQ ID NO: 8127
  source 1..50: mol_type = genomic DNA

SEQ ID NO: 8133 - DNA, 40 bp, Shewanella amazonensis
  source 1..40: mol_type = genomic DNA
tcgtgctttttttaccgtgtcgcagtttttaatcccatag

SEQ ID NO: 8134 - DNA, 40 bp, Shewanella amazonensis
  source 1..40: mol_type = genomic DNA
tcgtgctttttttaccgtgaagcagtttttaatcccatag

SEQ ID NO: 8135 - DNA, 50 bp, Shewanella amazonensis; identical to SEQ ID NO: 8130
  source 1..50: mol_type = genomic DNA

SEQ ID NO: 8136 - protein, 562 aa, Shewanella algae
MSTIKAYSYLRFSTTRQVRGDSARRQLELARDYAKRKGLELQELALADMGVSAFKGANRDAALGVFLRLVQDGKIPKGAYLLVESHDRLSRQNVEDALMQFMEIIRAGIVVVTLTDEIEYRQGQLDMSKLMLSLVYMSRANEESEMKSRRAKAVWEQSRKAAVESKTLIRNAYLPQWLKWEGDRVAIIPERAAIVQRMFALAMQGYGYTRIAAILNSEGHTGFRKNNPWRPSGVGSLLRNRRVIGEYQNFTKVDGQRQPIGEPIPEYYPAIVSISDFQEVQLQIATRNKHSGSARRGRFDNLFSGILRCQCGASMVYNDKGKKGAPRYYLVCPMREANNCDMPMLRYDAFEPQALVAISHLKPVMDARSAKSTQLWQLQNDIAKLTDQVNAQKARKRRALTLALESDDPMYNESLSNIHNDLCLMESQLDELTVLQKQLLTANRSIQLLKATEMLTMESRQLFNTQLHQSLNTMQLVLHRDFIAVAYYSKELDERPLLEQAFTVGLASSEVMEADGEMVCRTIKSPPYIDTSWFSELEMKPSESYEAIDDPEGFCVQELYDS

SEQ ID NO: 8137 - DNA, 50 bp, Shewanella algae; identical to SEQ ID NO: 8127
  source 1..50: mol_type = genomic DNA

SEQ ID NO: 8138 - DNA, 40 bp, Shewanella algae; identical to SEQ ID NO: 8133
  source 1..40: mol_type = genomic DNA

SEQ ID NO: 8139 - DNA, 40 bp, Shewanella algae; identical to SEQ ID NO: 8134
  source 1..40: mol_type = genomic DNA

SEQ ID NO: 8140 - DNA, 50 bp, Shewanella algae; identical to SEQ ID NO: 8130
  source 1..50: mol_type = genomic DNA

SEQ ID NO: 8141 - protein, 519 aa, Klebsiella michiganensis
MPKAISYIRFSNKIQSVGDSTKRQSKYINDWLKRNPDYYLDESLRFQDLGISGFSGANAKSGAFGEFLAAVESGYIESGSVLLVESLDRVSRQDIDTAGEQLRKILRSGVEVVTLVDNEWYTKESLKDSLSMIKAMLVMERAHEESAMKSTRLRSVWAAKRERAANGEIMSKRCAAWLKVSEDRSHFEFIPENVKAVQRVFQLRLEGLSHVKIAKQMNDEGFYTLNQHKSVKGGWSQSSVTELLSNRSVIGFKVPSKSMAVKGVSEIPDYYPAIISEQQFHAVQQLKQGAGRKPSSDLPLLTNLFKGVLRCSDCGFIIIVSGVTAKRSGNYRCSMKYEGRCNAKGFSRLQTDRALVQGLLYNTNRLSLNRDNGSAIGALQSELEQLQKRRERLIKLAMLADDTESMAKDLKALNSQIKDAEKAVSEVHQREQSSQLETLSHLDLTVKKDRIEAQIIIKRIVKEIRINTAGKKCDVFLHNGLKLYNFPLDRVVDGEIFLEVLPLLEADEFDFDTYRLINP

SEQ ID NO: 8142 - DNA, 50 bp, Klebsiella michiganensis
  source 1..50: mol_type = genomic DNA
gtgtatcaatagaaaggtctcttcagaattaaacctttcttatgatacac

SEQ ID NO: 8143 - DNA, 40 bp, Klebsiella michiganensis
  source 1..40: mol_type = genomic DNA
atgaaccggacggctatccaggatcacgcggttgacgttt

SEQ ID NO: 8144 - DNA, 40 bp, Klebsiella michiganensis
  source 1..40: mol_type = genomic DNA
atgaaccggacggctatcccagatcacgcggttgacgttt

SEQ ID NO: 8145 - DNA, 50 bp, Klebsiella michiganensis; identical to SEQ ID NO: 1340
  source 1..50: mol_type = genomic DNA

SEQ ID NO: 8146 - protein, 518 aa, Klebsiella pneumoniae
MPKAISYIRFSTKIQSVGDSTKRQSKYINDWLKRNPDYYLDESLRFQDLGISGFSGANAKSGAFSEFLAAVESGYIEAGSVLLVESLDRVSRQDIDTAGEQLRKILRSGVEVVTLVDNEWYTKESLKDSLSMIKAMLVMERAHEESAMKSTRLRSVWAAKRERAAKGEIMSKRCAAWLKVSEDRSHFEFIPENVKAVQRVFQLRLEGLSHVKIAKQMNDEGFSTLNQFKSVTGGWSQSSVTELLSNRSVIGFKVPSKSMAVKGVSEIPNYYPSIITDEQFYAVQQLKQGSGRKPSSDLPLLTNLFKGVLRCSECGFIVVVAGVSAKRSGIYKCSMKSEGRCNSVGFSRLQTDRALVQGLLYNTNRLTLNSYKASAIGSLQSELEQLQKQRERLIKLAMLADDTESMAKDLKALNSQIKDAEKAVSEVHQREQSSQLETISHLDLTVKKDRVEAQIIIKRIVKEIRLNTAQKKCDVFLHNGLKLLNFPLDRVVDGEIFLEVLPLLEADEFDFDTYRIIE

SEQ ID NO: 8147 - DNA, 50 bp, Klebsiella pneumoniae
  source 1..50: mol_type = genomic DNA
gtgtatcaatagaaaggtctcttcagaattacacctttcttatgatacac

SEQ ID NO: 8148 - DNA, 40 bp, Klebsiella pneumoniae
  source 1..40: mol_type = genomic DNA
atggaccgggcggctgtcgaggatcacgcggttgacgtta

SEQ ID NO: 8149 - DNA, 40 bp, Klebsiella pneumoniae
  source 1..40: mol_type = genomic DNA
atggaccgggcggctgtcgcagatcacgcggttgacgtta

SEQ ID NO: 8150 - DNA, 50 bp, Klebsiella pneumoniae; identical to SEQ ID NO: 1340
  source 1..50: mol_type = genomic DNA

SEQ ID NO: 8151 - protein, 518 aa, Klebsiella pneumoniae
MPKAISYIRFSTKIQSVGDSTKRQSKYINDWLKRNPDYYLDESLRFQDLGISGFSGANARSGAFGEFLAAVESGYIEAGSVLLVESLDRVSRQDIDTAGEQLRKILRSGVEVVTLVDNEWYTKESLKDSLSMIKAMLVMERAHEESAMKSTRLRSVWAAKRERAAKGEIMSKRCAAWLKVSEDRSHFEFIPENVKAVQRVFQLRLEGKSHAKIAKQMNEEGFYTLNQFKSVKGGWSQSSITELLSNRAVIGVKVPSKSMVVKGVSEILDYYPAIISEQQFHAVQQLKQVAGRRPSSDLPLLTNLFKGVLRCSECGFIIIVSGVTAKRSGNYRCSMRYEGRCNAKGFSRLQTDRALVQGLLYNTNRLSLNRDNGSAIGSLQSELEHLQKQRERLIKLAMLADDTESMAKDLKALNSQIKDAEKTVSEVHQREQSSQLETISHLDLTVKKDRIEAQIIIKRIVKEIRLNTAQKKCDVFLHNGLKLLNFPLDRLVDGEIFLEVLPVLEADEFDFDTYRMIE

SEQ ID NO: 8152 - DNA, 50 bp, Klebsiella pneumoniae
  source 1..50: mol_type = genomic DNA
gtgtatcaatagaaaggtctcttcagaattatacctttcttatgatacac

SEQ ID NO: 8153 - DNA, 40 bp, Klebsiella pneumoniae; identical to SEQ ID NO: 8148
  source 1..40: mol_type = genomic DNA

SEQ ID NO: 8154 - DNA, 40 bp, Klebsiella pneumoniae; identical to SEQ ID NO: 8149
  source 1..40: mol_type = genomic DNA

SEQ ID NO: 8155 - DNA, 50 bp, Klebsiella pneumoniae; identical to SEQ ID NO: 1340
  source 1..50: mol_type = genomic DNA

SEQ ID NO: 8156 - protein, 521 aa, Klebsiella pneumoniae
MPKAISYIRFSTKIQSVGDSTKRQSKYINDWLKRNPDYYLDESLRFQDLGISGFSGANAKSGAFGEFLAAVESGYIEAGSVLLVESLDRVSRQDIDTAGEQLRKILRSGVEVVTLVDNEWYTKESLKDSLSMIKAMLVMERAHEESAMKSTRLRSVWAAKRERAAKGEIMSKRCAAWLKVSEDRSHFEFIPENVKAVQRVFQLRLEGKSHAKIAKQMNEEGFYTLNQFKSVKGGWSQSSITELLSNRAVIGVKVPSKSMVVKGVSEIPDYYPAIISEQQYHAVQQLKQGSGRKPSSDLPLLTNLFKGVLRCSECGFIIIVSGVTAKRSGNYRCSMRYEGRCNAKGFSRLQTDKALVQGLLYNTNRLSLNRDKGSAIGAIQSELEQLQKQRERLIKLAMLADDTESMAKDLKALNSQIKDAEKAVSEVHQREQSSQLETISHLDLTVKKDRIEAQIIIKRIVKEIRLNTAGKKCDVFLHNGLNLLNFPLDRVVDGEIFLEVLPVLEADEFDFDTYRVIEQAP

SEQ ID NO: 8157 - DNA, 50 bp, Klebsiella pneumoniae; identical to SEQ ID NO: 8147
  source 1..50: mol_type = genomic DNA

SEQ ID NO: 8158 - DNA, 40 bp, Klebsiella pneumoniae; identical to SEQ ID NO: 8148
  source 1..40: mol_type = genomic DNA

SEQ ID NO: 8159 - DNA, 40 bp, Klebsiella pneumoniae; identical to SEQ ID NO: 8149
  source 1..40: mol_type = genomic DNA

SEQ ID NO: 8160 - DNA, 50 bp, Klebsiella pneumoniae; identical to SEQ ID NO: 1340
  source 1..50: mol_type = genomic DNA

SEQ ID NO: 8161 - protein, 521 aa, Klebsiella pneumoniae
MPKAISYIRFSTKIQSVGDSTKRQGKYINDWLKRNPDYYLDESLRFQDLGISGFSGANAKSGAFGEFLAAVESGYIEAGSVLLVESLDRVSRQDIDTAGEQLRKILRSGVEVVTLVDNEWYTKESLKDSLSMIKAMLVMERAHEESAMKSTRLRSVWAAKRERAANGEIMSKRCAAWLKVSEDRSHFEFIPENVKAVQRVFQLRLEGKSHAKIAKQMNEEGFYTLNQFNPVKGGWSQSSITELLSNQAVIGVKVPSKSMVVKGVSEIPDYYPAIISEQQFHAVQQLKQGAGRKPSSDLPLLTNLFKGVLRCSECGFIIIVSGVTAKRSGNYRCSMKYEGRCNAKGFSRLQTDKALVQGLLYNTNRLSLNRDNGSAIGALQTELEQLQKQRERLIKLAMLADDTESMAKDLKALNRQIKDAEKAVSEVHQREQSSQLEIISHLDLTVKKDRIEAQIIIKRIVKEIRLNTAGKKCDVFLHNGLKLYNFPLDRVVDGEIFLEVLPVLEADEFDFDTYRVIEQAP

SEQ ID NO: 8162 - DNA, 50 bp, Klebsiella pneumoniae; identical to SEQ ID NO: 8147
  source 1..50: mol_type = genomic DNA

SEQ ID NO: 8163 - DNA, 40 bp, Klebsiella pneumoniae; identical to SEQ ID NO: 8148
  source 1..40: mol_type = genomic DNA

SEQ ID NO: 8164 - DNA, 40 bp, Klebsiella pneumoniae; identical to SEQ ID NO: 8149
  source 1..40: mol_type = genomic DNA

SEQ ID NO: 8165 - DNA, 50 bp, Klebsiella pneumoniae; identical to SEQ ID NO: 1340
  source 1..50: mol_type = genomic DNA

SEQ ID NO: 8166 - protein, 494 aa, Clostridium perfringens; identical to SEQ ID NO: 7441

SEQ ID NO: 8167 - DNA, 50 bp, Clostridium perfringens
  source 1..50: mol_type = genomic DNA
aaacctaaaaggttatatttggcaactgcaatatataactaaataggtta

SEQ ID NO: 8168 - DNA, 40 bp, Clostridium perfringens; identical to SEQ ID NO: 6113
  source 1..40: mol_type = genomic DNA

SEQ ID NO: 8169 - DNA, 40 bp, Clostridium perfringens
  source 1..40: mol_type = genomic DNA
tgaacctgctaataaagaaagtgcaacctgtataggtctt

SEQ ID NO: 8170 - DNA, 50 bp, Clostridium perfringens
  source 1..50: mol_type = genomic DNA
aaacctaaactacaatttttggcaagggaaataaattccaaagtaggaat

SEQ ID NO: 8171 - protein, 565 aa, Blautia obeum; identical to SEQ ID NO: 5601

SEQ ID NO: 8172 - DNA, 50 bp, Blautia obeum
  source 1..50: mol_type = genomic DNA
tattttctcataaaagacataaaacacttaatgtcttctatgtgaaaaga

SEQ ID NO: 8173 - DNA, 40 bp, Blautia obeum
  source 1..40: mol_type = genomic DNA
aaagtcacaaggaataaaacagttgatggcgggcggtggc

SEQ ID NO: 8174 - DNA, 40 bp, Blautia obeum
  source 1..40: mol_type = genomic DNA
aaagtcacaaggaataaaattgttgatggcgggcggtggc

SEQ ID NO: 8175 - DNA, 50 bp, Blautia obeum
  source 1..50: mol_type = genomic DNA
caccctctccaagaagacataaaattcttaatgtatatacactgaacaaa

SEQ ID NO: 8176 - protein, 565 aa, Blautia obeum
MNNRYMSNNTDRNATWRVGVYCRLSKDDELTGESASISNQRDILVNYCQSQGWQVVDVFQDDGYTGLNTDRPDLQRLLKACEKGLVNLVITKDQSRLGRNHVQTGFLMEEFFPKHGVRYIALYDNVDTFDGDNEIAPFKNVLNEMYSRDISKKVHASYHLQATKGKFTGVVPPLGYQKDPEEKGHLLIDDETAPIVRKIFQWAVDGHGINFISRELERQQIPCPSWWHRKRGLRTYYTKWEKKDPENGKYVWDESYLKSLLMNPVYCGDMASQKRYYRFKIGNQGDKAPEDWITVRDTHEAIIPQDVFALVQAKMKGRKRQTEQGEYSMFAGLLRCAECGGALTLKKTHTKDQHEVYTCSTYIHKGKSHCTQHRVDADDLYDAVLTRIQECAKAVTGDGTELEDRVKELCEEDTQGHRDSLEKLVSKQKDRLETLDRLIAKLYDDLINDKITESVFDKMLEKTQKEQADIKKELSQNESVLNTEEKLDAQSQQWIDDISEYADIKELDANLLNRLISKIIISEPQEKDGKENYRRTPETVTMEIHFNLKPIPELGTIERGSGSHK

SEQ ID NO: 8177 - DNA, 50 bp, Blautia obeum; identical to SEQ ID NO: 8172
  source 1..50: mol_type = genomic DNA

SEQ ID NO: 8178 - DNA, 40 bp, Blautia obeum; identical to SEQ ID NO: 8173
  source 1..40: mol_type = genomic DNA

SEQ ID NO: 8179 - DNA, 40 bp, Blautia obeum; identical to SEQ ID NO: 8174
  source 1..40: mol_type = genomic DNA

SEQ ID NO: 8180 - DNA, 50 bp, Blautia obeum; identical to SEQ ID NO: 8175
  source 1..50: mol_type = genomic DNA

SEQ ID NO: 8181 - protein, 565 aa, Anaerobutyricum hallii; identical to SEQ ID NO: 5601

SEQ ID NO: 8182 - DNA, 50 bp, Anaerobutyricum hallii; identical to SEQ ID NO: 8172
  source 1..50: mol_type = genomic DNA

SEQ ID NO: 8183 - DNA, 40 bp, Anaerobutyricum hallii
  source 1..40: mol_type = genomic DNA
taagagccagggcatcaaacagctgatggctggtgccgga

SEQ ID NO: 8184 - DNA, 40 bp, Anaerobutyricum hallii
  source 1..40: mol_type = genomic DNA
taagagccagggcatcaaattgctgatggctggtgccgga

SEQ ID NO: 8185 - DNA, 50 bp, Anaerobutyricum hallii; identical to SEQ ID NO: 8175
  source 1..50: mol_type = genomic DNA

SEQ ID NO: 8186 - protein, 517 aa, Halopseudomonas bauzanensis
MKAAIYARYSSDKQSETSLDDQISVCQSRALREGWQVLATHSDTAVSGSTKVAARPGGKALLADMMAGRFDVLLLESLDRLSRDQVEQESIVRRLEHRNIRIICVADGYDSQHQGRKVMRGVRGLINELYLDDLRHKTQRGLHGQVDRGYIAGGKSYGYDIERDDQGSKFVINELQAHWVHWIFEQVAKGRAYRHIVYDLNDKGVPSPRGSSWAVSAIYGSPVKGSGIINNPLYVGRYVWNRSQWIKDPDTGKRQRIERPRHEWREADLPELRIIDDVLWQRVRSRIDFGRNAAGRKAEQRPISALLSGVLRCPHCAGPLTSFGSTRYGCSRSHDRGKTVCPGFAIGRIRTEKRMLAAVREELLSDDAAAAFEILVSERLKSVRAAGQAQALKARHVEIQEEIGRLVEAIARMGMSAPIEQRIRQSERELATISAEIARAEAADAPMMDVRKTFKALLMDLGTALQSSPMEARAAVGEILGTVNIELKGREVWAQIATGPALQIAVGANGCNDGCGG

SEQ ID NO: 8187 - DNA, 50 bp, Halopseudomonas bauzanensis
  source 1..50: mol_type = genomic DNA
aatggctgtaacgatggttgcgggggcgcgctttgtgcgttggagatccg

SEQ ID NO: 8188 - DNA, 40 bp, Halopseudomonas bauzanensis
  source 1..40: mol_type = genomic DNA
tttctatgttggttgcgggggcaggatttgaacctacgac

SEQ ID NO: 8189 - DNA, 40 bp, Halopseudomonas bauzanensis
  source 1..40: mol_type = genomic DNA
tttctatgttggttgcgggaccaggatttgaacctacgac

SEQ ID NO: 8190 - DNA, 50 bp, Halopseudomonas bauzanensis
  source 1..50: mol_type = genomic DNA
aatggctgtgcctttggtttgtggaccgcactttgttatggttagagcag

SEQ ID NO: 8191 - protein, 565 aa, Vibrio cyclitrophicus
MIDSSVGGAMTNKYYLYHRVSKKEQASSGEGIFRQQELTNNWIENENKRLILDGKEPYAEGGVYEDSGRSGFTDDNFKKGELGRLFKDVSRGRIRSGDIIVIELIDRFSRGKRKNVVKRFQNLLEHGIKVAFTKWNLVFEEDMDGVQGASAWMMFEIGLYLAHLESVQKSDRIRATNKLMKDKGYVTTAKTPIWLNRTLDRKGYEVVQENAEVIQRIYQLRMKGLGPQKILNSIGGVELKRYTYNTEEKLVVSSTNSPLCESTIKSYLANKAVIGVANGELKFEPIIDEKIFNAVQQKVVRNIGGGGKRKVFKNILSGIGFCKRCGYSMSYQDSTSTYGKVRSYLYCNGKRKRKQCDAKNIKYPLLESKVYEILSKLDYKDEESVDILSLEQQLKEIKDEVSSIRQNMIKFPNDQEFEKLYTERFSNQEDLELKLVEAKTSRSGDLSFLNVDYSRPEGKQQLNEIFKDYGIKVLVEDDIIEITVGAWNDFMIKGSLSSTVNPSAALNGKKYGSKGIDYDAKTSMERYMLDAPKEDVGSGVSSELGKQVLNLYPEIKDHILKGNKQ

SEQ ID NO: 8192 - DNA, 50 bp, Vibrio cyclitrophicus
  source 1..50: mol_type = genomic DNA
gagctgtctaatagttattttcctaaagaataatgtatgatagacagctc

SEQ ID NO: 8193 - DNA, 40 bp, Vibrio cyclitrophicus
  source 1..40: mol_type = genomic DNA
tggcaatccacagttggcaaaagagacgaatggtcctcgc

SEQ ID NO: 8194 - DNA, 40 bp, Vibrio cyclitrophicus
  source 1..40: mol_type = genomic DNA
tggcaatccacagttggcattagagacgaatggtcctcgc

SEQ ID NO: 8195 - DNA, 50 bp, Vibrio cyclitrophicus
  source 1..50: mol_type = genomic DNA
gagctttcttttccttattttcctttaaaataatcatttcaagattcttc

SEQ ID NO: 8196 - protein, 502 aa, Yersinia mollaretii; identical to SEQ ID NO: 5806

SEQ ID NO: 8197 - DNA, 50 bp, Yersinia mollaretii
  source 1..50: mol_type = genomic DNA
tatttttatatatgaaactacattgtgatattgttacttaatagcaaagg

SEQ ID NO: 8198 - DNA, 40 bp, Yersinia mollaretii; identical to SEQ ID NO: 5808
  source 1..40: mol_type = genomic DNA

SEQ ID NO: 8199 - DNA, 40 bp, Yersinia mollaretii
  source 1..40: mol_type = genomic DNA
cttgctgccgaattgcatgtggatattgttagtacttagc

SEQ ID NO: 8200 - DNA, 50 bp, Yersinia mollaretii
  source 1..50: mol_type = genomic DNA
tacttttatgcaaaaatcttcatttgaatatttacatgcagtaggaaagg

SEQ ID NO: 8201 - protein, 570 aa, Salmonella enterica
MAHLAIPYRRFSSDSQTGNTSLTRQQDLVSKWLSHNPQYVTIPQFEYVDEALSGFHGDNITVGQLGKFLNEVEKGTFRKYESPVLLIENFDRFGRLKPRKALGYITDILDAGISICLLDRDEIIKPEKADDDFFLMQLVMTASRAHGESKRKSDNVSKAWKIKADKIQEGETLTRNVPWWINPEDRSLVIPERAKLVERIFRMRFEGMSCYAIGKALNAENIPVYSHRKPKQDKEYKKRRVASCWHSANVSALLSNKAVIGVLAAQQVNKHNQHRQDSLRGDTEGYYPEIVSPTLFYSIQSLKDEQRGRKRVLTNINSIQIFKKMIRCTCGNYVDVTGCRERYAGVFKCATVRAGSAQCNQPSINRQKVEDALLMRLIPSLHRLDTNHELTSQIMTLESEIGELTTRITKGWTDYENPEHPFYQSVELATRITSAMTEKNKKLTELDQLKIKEKSSQYETVSHLDLSDYTQRCEARVIIKRMVKSITLDASNGLLDVYLVNGSVLHGFKVDGESNQAENFRFVSDTTELESVAGVSGGVTSYAGDPVQRTPVDYDALNFPPADEPDYPNE

SEQ ID NO: 8202 - DNA, 50 bp, Salmonella enterica
  source 1..50: mol_type = genomic DNA
atatgtttaatagagattaagatgaagcttttaatttctattgtacatcc

SEQ ID NO: 8203 - DNA, 40 bp, Salmonella enterica
  source 1..40: mol_type = genomic DNA
tacggactctttataaatgaagcttttgaagacagtaccc

SEQ ID NO: 8204 - DNA, 40 bp, Salmonella enterica
  source 1..40: mol_type = genomic DNA
tacggactctttataaatggtgcttttgaagacagtaccc

SEQ ID NO: 8205 - DNA, 50 bp, Salmonella enterica
  source 1..50: mol_type = genomic DNA
atacatttaaaaatgattaaggtggtgcttttaatgctgtgtataattca

SEQ ID NO: 8206 - protein, 452 aa, Listeria innocua
MKAAIYIRVSTQEQIENYSIQAQTEKLTALCRSKDWDVYDIFIDGGYSGSNMNRPALNEMLSKLHEIDAVVVYRLDRLSRSQRDTITLIEEYFLKNNVEFVSLSETLDTSSPFGRAMIGILSVFAQLERETIRDRMVMGKIKRIEAGLPLTTAKGRTFGYDVIDTKLYINEEEAKQLRLIYDIFEEEQSITFLQKRLKKLGFKVRTYNRYNNWLTNDLYCGYVSYKDKVHVKGIHEPIISEEQFYRVQEIFARMGKNPNMNRDSASLLNNLVVCGKCGLGFVHRRKDTVSRGKKYHYRYYSCKTYKHTHELEKCGNKIWRADKLEELIIDRVNNYSFASRNVDKEDELDYLNEKLKIEHAKKKRLFDLYINGSYEVSELDAMMADIDAQINYYEAQIEANEELKKNKKIQENLADLATVDFDSLEFREKQLYLKSLINKIYIDDEQVTIEWL

SEQ ID NO: 8207 - DNA, 50 bp, Listeria innocua
  source 1..50: mol_type = genomic DNA
tttagtttctcatttcctctcactggagggagaggaaatggtatacaaaa

SEQ ID NO: 8208 - DNA, 40 bp, Listeria innocua; identical to SEQ ID NO: 7873
  source 1..40: mol_type = genomic DNA

SEQ ID NO: 8209 - DNA, 40 bp, Listeria innocua
  source 1..40: mol_type = genomic DNA
tttcggatcgagttatgatatacgtaaagagggaacaaag

SEQ ID NO: 8210 - DNA, 50 bp, Listeria innocua
  source 1..50: mol_type = genomic DNA
tttagtttccctcatactctgactatagaggcagctactcttttacaaaa

SEQ ID NO: 8211 - protein, 545 aa, Vibrio parahaemolyticus
MNKYHLYQRVSKQIQAEEGQGIQRQEQACEHWISDYNKRLLSEGKSAYSKGLIYEDRGKSAYTAANFKRGELGALINDIENGKIEKGDLIVIELIDRFSRANVDFVRSQFQRIIDAGVKIAITKWNLVFEENMESVSSVTGRILLEIGMYLAYQESSQKSSRIKASRKLLEDSGRKSIAKPPFWLARNLDLKSYTIIEENAEIIRKIFDLKLNFNYGPQKIIKSLGDLDIYRYSFDENGNLIKTTKNSPLSESSINAYIRNTNVIGKLDGKDYYPRIIDDRTFYAVQKRTRENTGGVGEIFRNVFVGVGKCGCLIRKENENGCGSLAKCGYIMAFSSRKVKNPTKGMYLKCNRKRKSTKCDSENINYYLAQNKIYNVLKSLKFDIDQSVDISHLEEKINTIDKSMSKIREYMTQYSDDEEWENQYKIKRMEREKIENEIKASKSRITGKLSNLDIDFSKEKDRVLFNQFLKDNRITVYFTKERMEIIIGSLNNFSIKCGYDDSNRDIDHIIESYSKNGLVGIEEKSGKSEGKGLLRFNLPTVPGS

SEQ ID NO: 8212 - DNA, 50 bp, Vibrio parahaemolyticus
  source 1..50: mol_type = genomic DNA
atgtcgtcaatcatttagttgactaaagacaactacatgttatactacat

SEQ ID NO: 8213 - DNA, 40 bp, Vibrio parahaemolyticus
  source 1..40: mol_type = genomic DNA
aggcaagccacagttagcaaatgaaacaaacgggccacgt

SEQ ID NO: 8214 - DNA, 40 bp, Vibrio parahaemolyticus
  source 1..40: mol_type = genomic DNA
aggcaagccacagttagcatttgaaacaaacgggccacgt

SEQ ID NO: 8215 - DNA, 50 bp, Vibrio parahaemolyticus; identical to SEQ ID NO: 1345
  source 1..50: mol_type = genomic DNA

SEQ ID NO: 8216 - protein, 518 aa, Vibrio parahaemolyticus
MNKYHLYQRVSKQIQAEEGQGIQRQEQACEHWISDYNKRLLSEGKSAYSKGLIYEDRGKSAYTAANFKRGELGALINDIENGKIEKGDLIVIELIDRFSRANVDFVRSQFQRIIDAGVKIAITKWNLVFEENMESVSSVTGRILLEIGMYLAYQESSQKSSRIKASRKLLEDSGRKSIAKPPFWLARNLDLKSYTIIEENAEIIRKIFDLKLNFNYGPQKIIKSLGDLDIYRYSFDENGNLIKTTKNSPLSESSINAYIRNTNVIGKLDGKDYYPRIIDDRTFYAVQKRTRENTGGVGEIFRNVFVGVGKCGCLIRKENENDCGSLAKCGYIMAFSSRKVKNPTKGMYLKCNRKRKSTKCDSENINYYLAQNKIYNVLKSLKFDIDQSVDISHLEERINTIDKSMSKIREYMTQYSDDEEWENQYKIKRMEREKIENEIKASKSRITGKLSNLDIDFSKEKDRVLFNQFLKDNRITVYFTKERMEIIIGSLNNFSIKCGYDDSNRDIDHIIESYSKMV

SEQ ID NO: 8217 - DNA, 50 bp, Vibrio parahaemolyticus
  source 1..50: mol_type = genomic DNA
atgtcgtcaatcatacagttgactaaagacaactacatgttatactacat

SEQ ID NO: 8218 - DNA, 40 bp, Vibrio parahaemolyticus; identical to SEQ ID NO: 5003
  source 1..40: mol_type = genomic DNA

SEQ ID NO: 8219 - DNA, 40 bp, Vibrio parahaemolyticus; identical to SEQ ID NO: 5004
  source 1..40: mol_type = genomic DNA

SEQ ID NO: 8220 - DNA, 50 bp, Vibrio parahaemolyticus; identical to SEQ ID NO: 1345
  source 1..50: mol_type = genomic DNA

SEQ ID NO: 8221 - protein, 545 aa, Vibrio alginolyticus
MNKYHLYQRVSKQIQAEEGQGIQRQEQACEHWISDYNKRLLSEGKSAYSKGLIYEDRGKSAYTAANFKRGELGALINDIENGKIEKGDLIVIELIDRFSRANVDFVRSQFQRIIDAGVKIAITKWNLVFEENMESVSSVTGRILLEIGMYLAYQESSQKSSRIKASRKLLEDSGRKSIAKPPFWLARNSDLKSYTIIEENAEIIRKIFDLKLNFNYGPQKIIKSLGDLDIYRYSFDENGNLIKTTKNSPLSESSINAYIRNTNVIGKLDGKDYYPRIIDDRTFYAVQKRTRENTGGVGEIFRNVFVGVGKCGCLIRKENENGCGSLAKCGYIMAFSSRKVKNPTKGMYLKCNRKRKSTKCDSVNINYYLAQNKIYNVLKSLKFDIDQSVDISHLEEKINTIDKSMSKIREYMTQYSDDEEWENQYKIKRMEREKIENEIKASKSRITGKLSNLDIDFSKEKDRVLFNQFLKDNRITVYFTKERMEIIIGSLNNFSIKCGYDDSNRDIDHIIESYSKNGLVGIEEKSGKSEGKGLLRFNLPTVPGS

SEQ ID NO: 8222 - DNA, 50 bp, Vibrio alginolyticus
  source 1..50: mol_type = genomic DNA
atgtcgtctatcatgtagttgactaaagacaactacatgttatactacat

SEQ ID NO: 8223 - DNA, 40 bp, Vibrio alginolyticus
  source 1..40: mol_type = genomic DNA
gggtaagccacagtttgcaaatgacacaaatggaccgcgt

SEQ ID NO: 8224 - DNA, 40 bp, Vibrio alginolyticus
  source 1..40: mol_type = genomic DNA
gggtaagccacagtttgcatttgacacaaatggaccgcgt

SEQ ID NO: 8225 - DNA, 50 bp, Vibrio alginolyticus; identical to SEQ ID NO: 1345
  source 1..50: mol_type = genomic DNA

SEQ ID NO: 8226 - protein, 413 aa, Vibrio alginolyticus
MESVSSVTGRILLEIGMYLAYQESSQKSARIKASRKLLEDSGRKSIAKPPFWLARNLDLKSYTIIEENAEIIRKIFDLKLNFNYGPQKIIKSLGDLDIYRYSFDENGNLIKTTKNSPLSESSINAYIRNTNVIGKLDGKDYYPRIIDDRTFYAVQKRTRENTGGVGEIFRNVFVGVGKCGCLIRKENENGCGSLAKCGYIMAFSSRKVKNPTKGMYLKCNRKRKSTKCDSENINYYLAQNKIYNVLKSLKFDIDQSVDISHLEEKINAIDKSMSKIREYMTQYSDDEEWENQYNIKRMEREKIENEIKASKSRITGKVSNLDIDFSEEKDRVLFNQFLKDNRITVYFTKERMEIIIGSLNNFSIKCGYDDSSRDIDHIIESYSKNGLVGIEEKAGKSEGKGLLRFNLPTVSGS

SEQ ID NO: 8227 - DNA, 50 bp, Vibrio alginolyticus; identical to SEQ ID NO: 8217
  source 1..50: mol_type = genomic DNA

SEQ ID NO: 8228 - DNA, 40 bp, Vibrio alginolyticus; identical to SEQ ID NO: 8223
  source 1..40: mol_type = genomic DNA

SEQ ID NO: 8229 - DNA, 40 bp, Vibrio alginolyticus; identical to SEQ ID NO: 8224
  source 1..40: mol_type = genomic DNA

SEQ ID NO: 8230 - DNA, 50 bp, Vibrio alginolyticus; identical to SEQ ID NO: 1345
  source 1..50: mol_type = genomic DNA

SEQ ID NO: 8231 - protein, 545 aa, Vibrio anguillarum
MNKYHLYQRVSKQIQAEEGQGIQRQEQACEHWISDYNKRLLSEGKSAYSKGLIYEDRGKSAYTAANFKRGELGALINDIENGKIEKGDLIVIELIDRFSRANVDFVRGEFQRILDAGVKIAITKWNLVFEENMESVSSVTGRILLEIGMYLAYQESSQKSARIKASRKLLEDSGRKSIAKPPFWLARNLDLKSYTIIEENAEIIRKIFDLKLNLNYGPQKIIKSLGDLDIYRYSIDENGNLIKTTKNSPLNESSINAYFRNTNVIGKLKGKDYYPRIIDDRTFYAVQKRTRENTGGVGEIFRNIFVGVGKCGCLIRQENENGCGGLAKCGYIMAFSSRKVKNPTKGMYLKCNRKRKSTRCEAENINYYLAQNKIYNVLKSLKFDIEQSVDISHLEEKINAIDKSMSKIREYMTQYSDDEEWENQYNIKRIEREKIENEIKASKSRVTGKLSNLDIDFSEEKDRVLFNQFLKDNRITVYFTKEKMEIIIGSLNNFSIKCGYDDNEREIDQLVESISQQGFVGLEVRSRKSEGKELLRFNLPTVLDS

SEQ ID NO: 8232 - DNA, 50 bp, Vibrio anguillarum
  source 1..50: mol_type = genomic DNA
atgtcgtcaatcatacagttgactaatgacaactgcatgttatactacat

SEQ ID NO: 8233 - DNA, 40 bp, Vibrio anguillarum
  source 1..40: mol_type = genomic DNA
tggcaagccacagttagcaaatgaaacgaaggggccccgc

SEQ ID NO: 8234 - DNA, 40 bp, Vibrio anguillarum
  source 1..40: mol_type = genomic DNA
tggcaagccacagttagcatttgaaacgaaggggccccgc

SEQ ID NO: 8235 - DNA, 50 bp, Vibrio anguillarum; identical to SEQ ID NO: 1345
  source 1..50: mol_type = genomic DNA

SEQ ID NO: 8236 - protein, 545 aa, Vibrio natriegens
MNKYHLYQRVSKQIQAEEGQGIQRQEQACEHWISDYNKRLLSEGKSAYSKGLIYEDRGKSAYTAANFKRGELGALINDIENGKIEKGDLIVIELIDRFSRANVDFVRSQFQRVLDAGVKIAITKWNLVFEENMESVSSVTGRILLEIGMYLAYQESSQKSSRIKASRKLLEDSGRKSIAKPPFWLARNLDLKSYTIIEENAEIIRKIFDLKLNFNYGPQKIIKSLGDLDIYRYSFDENGNLIKTTKNSPLNESSINAYIRNTNVIGKLNGKDYYPRIIDDRTFYAVQKRTRENTGGVGEIFRNVFVGVGKCGCLIRKENENGCGSLAKCGYIMAFSSRKVKNPTKGMYLKCNRKRKSTKCNSENINYYLAQNKIYNVLKSLKFDIDQSVDISHLEEKINAIDKSMSKIREYMTQYSDDEEWENQYNIKRMEREKIENEIKASKSRITGKLSNLDIDFSEEKDRVLFNQFLKDNRITVYFTKERMEIIIGSLNNFSIKCGYDDSSRDIDHIIESYSKNGFVGIEEKSSKSESKGLLRFNLPTASRS

SEQ ID NO: 8237 - DNA, 50 bp, Vibrio natriegens
  source 1..50: mol_type = genomic DNA
atgtcgtcaatcatctagttgactaaagacaactgtatgttatactacat

SEQ ID NO: 8238 - DNA, 40 bp, Vibrio natriegens
  source 1..40: mol_type = genomic DNA
tggcaggccacagtttgcaaaagacacgaatggaccgcgc

SEQ ID NO: 8239 - DNA, 40 bp, Vibrio natriegens
  source 1..40: mol_type = genomic DNA
tggcaggccacagtttgcattagacacgaatggaccgcgc

SEQ ID NO: 8240 - DNA, 50 bp, Vibrio natriegens; identical to SEQ ID NO: 1345
  source 1..50: mol_type = genomic DNA

SEQ ID NO: 8241 - protein, 477 aa, Streptococcus equi
MFTTRKVAIYVRVSTTNQAEEGYSIQGQLDSLTKYCEAMGWIIYQEYTDAGFSGGKIDRPAMSKLITDAKHKRFDTILVYKLDRLSRSVRDTLYLVKDVFNQNNIHFVSLQENIDTSSAMGNLFLTLLSAIAEFEREQITERMTMGKIGRAKSGKTMAWTYTPFGYDYNKEKGELILDPAKAPIVKMIYTDYIKGMSIQKIVDKLNKMDYNGKDCTWFPHGVKHLLDNPVYYGMTRYNNKLFPGNHQPIITKELFDKTQRERQRRRLGIEENHYTIPFQAKYMLSKFLRCRQCGSRMGLELGRPRKKDGKRSKKYYCLNSRPKRTASCDTPLYDAETLEDYVLHEIAKIQKDPSIASRQKHIEDHELKYKRERIEANINKTVNQLSKLNNLYLNDLITLEDLKTQTNTLIAKKRLLENELDKTYDNDDELDRQETIADFLALPDVWTMDYEGQKYAVELLVQRVKVDRDNIDIHWTF

SEQ ID NO: 8242 - DNA, 50 bp, Streptococcus equi
  source 1..50: mol_type = genomic DNA
ttacaaagttttcaacccttgatttgaattagcggtcaaataatttgtaa

SEQ ID NO: 8243 - DNA, 40 bp, Streptococcus equi
  source 1..40: mol_type = genomic DNA
cccaacgcgacctgaaatttgaataagactgctgcttgtg

SEQ ID NO: 8244 - DNA, 40 bp, Streptococcus equi
  source 1..40: mol_type = genomic DNA
cccaacgcgacctgaaattacaataagactgctgcttgtg

SEQ ID NO: 8245 - DNA, 50 bp, Streptococcus equi
  source 1..50: mol_type = genomic DNA
ttacaaagttgtatacccatgattacaatgtaatctcagaaaatttttaa

SEQ ID NO: 8246 - protein, 477 aa, Streptococcus equi
MITTRKVAIYVRVSTTNQAEEGYSIQGQLESLTKYCEAMGWIIYQEYTDAGFSGGKIDRPAMSKLITDAKHKRFDTILVYKLDRLSRSVRDTLYLVKDVFSQNDVHFVSLQENIDTSSAMGNLFLTLLSAIAEFEREQITERMTMGKIGRAKSGKTMAWTYTPFGYDYNKEKGELILDPAKAPIVKMIYTDYIKGMSIQKIVDKLNKMDYNGKDCTWFPHGVKHLLDNPVYYGMTRYNNKLFPGNHQPIITKELFDKTQRERQRRRLGIEENHYTIPFQAKYMLSKFLRCRQCGSRMGLELGRPRKKDGKRSKKYYCLNSRPKRTANCDTPLYDAETLEDYVLHEIAKIQKDPSIASRQKHIEDHELKYKRERIEANINKTVNQLSKLNNLYLNDLITLEDLKTQTNTLIAKKRLLENELDKTCDNDDELDRQETIADFLALPDVWTMDYEGQKYAVELLVQRVKVDRDNIDIHWTF

SEQ ID NO: 8247 - DNA, 50 bp, Streptococcus equi
  source 1..50: mol_type = genomic DNA
ttacaaagtttttaacccttgatttgaattagcggtcaaataatttgtaa

SEQ ID NO: 8248 - DNA, 40 bp, Streptococcus equi
  source 1..40: mol_type = genomic DNA
cccgacgcgacctgaaatctgaatcagactgctgcttgtg

SEQ ID NO: 8249 - DNA, 40 bp, Streptococcus equi
  source 1..40: mol_type = genomic DNA
cccgacgcgacctgaaatcacaatcagactgctgcttgtg

SEQ ID NO: 8250 - DNA, 50 bp, Streptococcus equi; identical to SEQ ID NO: 8245
  source 1..50: mol_type = genomic DNA

SEQ ID NO: 8251 - protein, 477 aa, Streptococcus equi; identical to SEQ ID NO: 8246

SEQ ID NO: 8252 - DNA, 50 bp, Streptococcus equi; identical to SEQ ID NO: 8247
  source 1..50: mol_type = genomic DNA

SEQ ID NO: 8253 - DNA, 40 bp, Streptococcus equi; identical to SEQ ID NO: 8243
  source 1..40: mol_type = genomic DNA

SEQ ID NO: 8254 - DNA, 40 bp, Streptococcus equi; identical to SEQ ID NO: 8244
  source 1..40: mol_type = genomic DNA

SEQ ID NO: 8255 - DNA, 50 bp, Streptococcus equi; identical to SEQ ID NO: 8245
  source 1..50: mol_type = genomic DNA

SEQ ID NO: 8256 - protein, 477 aa, Streptococcus equi
MITTRKVAIYVRVSTTNQAEEGYSIQGQIDSLIKYCEAMGWIIYEEYTDAGFSGGKIDRPAMSKLITDAKHKRFDTILVYKLDRLSRSVRDTLYLVKDVFNQNNIHFVSLQENIDTSSAMGNLFLTLLSAIAEFEREQITERMTMGKIGRAKSGKTMAWTYTPFGYDYNKEKGELILDPAKAPIVKMIYTDYLKGMSIQKIVDKLNKMDYNGKDCTWFPHGVKHLLDNPVYYGMTRYNNKLFPGNHQPIITKELFDKTQRERQRRRLGIEENHYTIPFQAKYMLSKFLRCRQCGSRMGLELGRPRKKEGKRSKKYYCLNSRPKRTASCDTPLYDAETLEDYVLHEIAKIQKDPSIASRQKHIEDHELKYKRERIEANINKTVNQLSKLNNLYLNDLITLEDLKTQTNTLIAKKRLLENELDKTCDNDDELDRQETIADFLALPDVWTMDYEGQKYAVELLVQRVKVDRDNIDIHWTF

SEQ ID NO: 8257 - DNA, 50 bp, Streptococcus equi; identical to SEQ ID NO: 8242
  source 1..50: mol_type = genomic DNA

SEQ ID NO: 8258 - DNA, 40 bp, Streptococcus equi; identical to SEQ ID NO: 8243
  source 1..40: mol_type = genomic DNA

SEQ ID NO: 8259 - DNA, 40 bp, Streptococcus equi; identical to SEQ ID NO: 8244
  source 1..40: mol_type = genomic DNA

SEQ ID NO: 8260 - DNA, 50 bp, Streptococcus equi; identical to SEQ ID NO: 8245
  source 1..50: mol_type = genomic DNA

SEQ ID NO: 8261 - protein, 478 aa, Lactobacillus reuteri
MKVALYVRVSTLEQAEEGYSINEQKDKLKKYCEIKDWTIVKEYVDPGRSGSNINRPSMQQLIKDADTGLYDAVLVYKLDRLSRSQKDTLYLIEDVFQKNNIHFISLSENFDTSTAFGKAMIGILSVFAQLEREQIKERMSMGRIGRAKSGKIMEFNNPAFGYEIDGDNYKVDPLRAEIVKRIYKMYLSGTSINKIKEILNSEGHIGNKKNWSDTRIRYILSNPTYLGKIRYDGKTYDGKFSPIIDEETFNKTQNELKERQTATYKRFNMKLRPFQSKYMLSGLLRCGYCGATLFVNSYVYNGKRKLRYNCPSTYKSKQKTRTYKIMDPNCPFKLVYAKDLEPAVINEIKNLALNPQSIQKPVKKKPDIDVEAIQKELAKVRKQQQRLIDLYVISDDVNIDNISKKSADLKLQEETLKKQLAPLEEPDNDDKIVAFNEILAQIKDIDSLDYDKQKFIVKKLIKKIDVWNNNKIKIHWNI

SEQ ID NO: 8262 - DNA, 50 bp, Lactobacillus reuteri
  source 1..50: mol_type = genomic DNA
ttcgtatattaggtatttccaattgaaactggttatacctaatatacgaa

SEQ ID NO: 8263 - DNA, 40 bp, Lactobacillus reuteri
  source 1..40: mol_type = genomic DNA
aaaaattccgcagacaattgaaactgggatcgggggccaa

SEQ ID NO: 8264 - DNA, 40 bp, Lactobacillus reuteri
  source 1..40: mol_type = genomic DNA
aaaaattccgcagacaattcaaactgggatcgggggccaa

SEQ ID NO: 8265 - DNA, 50 bp, Lactobacillus reuteri
  source 1..50: mol_type = genomic DNA
ttcttttagcatttattagccattcaaactgtttattctctatatatgaa

SEQ ID NO: 8266 - protein, 478 aa, Limosilactobacillus reuteri
MKVALYTRVSTLEQAEEGYSISEQKDKLTKYCEIKDWTITKIYSDPGFSGSNINRPSMQQLIKDADTGLYDAVLVYKLDRLSRSQKDTLYLIEDVFQKNNIHFISLSENFDTSTPFGKAMIGILSVFAQLEREQIKERMSMGRVGRAKSGKIMEFNNPAFGYEIDGDNYKVDPLRAEIVKRIYKMYLSGTSINKIKETLNSEGHIGNKKNWSDTRIRYILSNPTYLGKIRYDGKTYDGKFSPIIDEETFNKTQNELKERQTATYKRFNMKLRPFQSKYMLSGLLRCGYCGATLFVNSYVYNGKRKLRYNCPSTYKSKQKTRTYKIMDPNCPFKLVYAKDLEPAVINEIKNLALNPQSIQKPVKKKPDIDMEAIQKELAKVRKQQQRLIDLYVISDDVNIDNISKKSADLKLQEETLKKQLAPFEEPDNDDKIVAFNEILAQIKDVDSLDYDKQKFIVKKLIKKIDVWNDNKIKIHWNI

SEQ ID NO: 8267 - DNA, 50 bp, Limosilactobacillus reuteri
  source 1..50: mol_type = genomic DNA
ttcgtatattaggtatttccaattgaaactggttatatctaatatacgaa

SEQ ID NO: 8268 - DNA, 40 bp, Limosilactobacillus reuteri
  source 1..40: mol_type = genomic DNA
aaaaattccgcagacaattgaaaccgggatcgggggccaa

SEQ ID NO: 8269 - DNA, 40 bp, Limosilactobacillus reuteri
  source 1..40: mol_type = genomic DNA
aaaaattccgcagacaattcaaaccgggatcgggggccaa

SEQ ID NO: 8270 - DNA, 50 bp, Limosilactobacillus reuteri; identical to SEQ ID NO: 8265
  source 1..50: mol_type = genomic DNA

SEQ ID NO: 8271 - protein, 478 aa, Limosilactobacillus reuteri
MKVALYVRVSTLEQAEEGYSINEQKDKLKKYCEIKDWTITKIYSDPGFSGSNINRPSMQQLIKDADTGLYDAVLVYKLDRLSRSQKDTLYLIEDVFQKNNIHFISLSENFDTSTAFGKAMIGILSVFAQLEREQIKERMSMGRVGRAKSGKIMEFNNPAFGYEIDGDNYKVDPLRAEIVKRIYKMYLSGTSINKIKETLNSEGHIGNKKNWSDTRIRYILSNPTYLGKIRYDGKTYDGKFSPIIDEETFNKTQNELKERQTATYKRFNMKLRPFQSKYMLSGLLRCGYCGATLFVNSYVYNGKRKLRYNCPSTYKSKQKTRTYKIMDPNCPFKLVYAKDLEPAVINEIKNLALNPQSIQKPVKKKPDIDVEAIQKELAKVRKQQQRLIDLYVISDDVNIDNISKKSADLKLQEETLKKQLAPIEEPDNDDKIVAFNEILAQIKDIDSLDYDKQKFIVKKLIKKIDVWNDNKIKIHWNI

SEQ ID NO: 8272 - DNA, 50 bp, Limosilactobacillus reuteri; identical to SEQ ID NO: 8262
  source 1..50: mol_type = genomic DNA

SEQ ID NO: 8273 - DNA, 40 bp, Limosilactobacillus reuteri
  source 1..40: mol_type = genomic DNA
aaagattccccaaactattgaaaccgggatcgggggccaa

SEQ ID NO: 8274 - DNA, 40 bp, Limosilactobacillus reuteri
  source 1..40: mol_type = genomic DNA
aaagattccccaaactattcaaaccgggatcgggggccaa

SEQ ID NO: 8275 - DNA, 50 bp, Limosilactobacillus reuteri; identical to SEQ ID NO: 8265
  source 1..50: mol_type = genomic DNA

SEQ ID NO: 8276 - protein, 530 aa, Vibrio parahaemolyticus
MRQAYSYVRLSSKKQILGYGQERQWEAIQSAALAHNWELSDKTFSDLGVSGWKGVNIDTGALSQFLRCVEDGYIEQGSVLIVENVDRLSRAGVNRAVTLLMQLLDNGISIYTLTDSKLYEPESPNPLMDLMGWALSAQRAFEESERKSQMILNAKAKAREEARLTGKIITRRCPSWLRVNDDKTAFELLPERVETVQKIFDLYTSGYGTPRIGRLLTEEGRKPLNGRAWYARSLSRIIQYRAVLGEYQPTLNGKPEGEPVKEYYPAIISEDQFNEAQAIMKAGGAGKGRRGEDMRNYFAGLLRCSCGEGMHITSSRVKGKRYYQLRCLQYRISCTNATWNFNKASTYILFGLRRLPILEVMGTDNNKDIKELNNSIRDLTAQLDSSKQQLENTTNAIAELGLSDQLKNKFRELTVLVEDTERQLAEAKSSLDKSHGETAIKKQDTEMLTGRFLELIENTKEVDDRIKLNQVLRRYLSKIVLDADKEKDNRFIEIYRKDGELLVTAKLDHKLNGGTFESSEASEAVELKRA

SEQ ID NO: 8277 - DNA, 50 bp, Vibrio parahaemolyticus
  source 1..50: mol_type = genomic DNA
ttatgtctttaagaaaacttaattaaggtattgtataggttatgacataa

SEQ ID NO: 8278 - DNA, 40 bp, Vibrio parahaemolyticus; identical to SEQ ID NO: 4863
  source 1..40: mol_type = genomic DNA

SEQ ID NO: 8279 - DNA, 40 bp, Vibrio parahaemolyticus
  source 1..40: mol_type = genomic DNA
atttggttggcatgtggtctgggttctctacagaacatag

SEQ ID NO: 8280 - DNA, 50 bp, Vibrio parahaemolyticus
  source 1..50: mol_type = genomic DNA
ttaagtctttgatccatcttgatttggttattgtatatggtgagacatga

SEQ ID NO: 8281 - protein, 547 aa, Vibrio parahaemolyticus; identical to SEQ ID NO: 4886

SEQ ID NO: 8282 - DNA, 50 bp, Vibrio parahaemolyticus
  source 1..50: mol_type = genomic DNA
ttatgtctttaagaaaacttaattaaggtattgtatcggttatgacataa

SEQ ID NO: 8283 - DNA, 40 bp, Vibrio parahaemolyticus; identical to SEQ ID NO: 4428
  source 1..40: mol_type = genomic DNA

SEQ ID NO: 8284 - DNA, 40 bp, Vibrio parahaemolyticus
  source 1..40: mol_type = genomic DNA
atttggctggcatgtggtctgggttctctacagaacatag

SEQ ID NO: 8285 - DNA, 50 bp, Vibrio parahaemolyticus; identical to SEQ ID NO: 8280
  source 1..50: mol_type = genomic DNA

SEQ ID NO: 8286 - protein, 472 aa, Gemella morbillorum
MKRVAIYTRVSTQEQVENGNSLEFQTEKLRAFCSLHDFKIVHEYVDKGVSGAKFHRPALDMLKKDINKFDIVLVYKLDRLSRSIKDTMLLVEDFFKPNNVDLISLSENFNTSEAMGMATVGMLSTFAQLERETIKERMIAGKIQSVKNGNYINHAPFGYVKKDRKLVKDEQTRECVEFIFEKLLEGHSTTQVSKLIEAHGYDKLRSAFWHFTTICTMARNPVYVGHTCLMGIKVENTHEPYITEAQQELIISKLDERSTHVSRVSRLNTYPALFRGLLNCPTCHRKLGTSRSPRKDGSYRIYYFCNYCGANCKTYKYVGETEIENKLLEYFNDFDFEVSVKEDEKITKKPKDLSKKIEAEENKKYKLQKAWLDDLLTDEELSKLQSEIDERIKLLEEEQRKYDEAIKVKSVKSKLKDFIVNFKTVYSKLNQNEKLELLNSFIDDITVDIGTEKRGTKQHRYTIDIQDVNYKK

SEQ ID NO: 8287 - DNA, 50 bp, Gemella morbillorum
  source 1..50: mol_type = genomic DNA
aaatggaactccttaggaagcatttcaatgcttatgtaggagtattattt

SEQ ID NO: 8288 - DNA, 40 bp, Gemella morbillorum
  source 1..40: mol_type = genomic DNA
aaataatacagccatcatttcaattaaactaaatgctgaa

SEQ ID NO: 8289 - DNA, 40 bp, Gemella morbillorum; identical to SEQ ID NO: 8288
  source 1..40: mol_type = genomic DNA

SEQ ID NO: 8290 - DNA, 50 bp, Gemella morbillorum
  source 1..50: mol_type = genomic DNA
aaatgagactttgcaggatgcatttcaatgttaatataaaggtacaattt

SEQ ID NO: 8291 - protein, 461 aa, Listeria booriae
MTVGIYIRVSTEEQAKEGFSISAQREKLQAYCIAQGWNEFKFYVDEGLSAKNMERPLLKSLLKHIETGLIDTVLVYKLDRLTRSVVDLHNMLNFFDKYDCSFKSATEVYDTSSAMGRFFITIISSVAQFERENTSERVSFGMEERARQGKYIPSPPFGYKKGEDGVLVIYEEEAALVLELVARLQKGYSVRQCCTYLDNLGVKTRRSNSVWKNTTLRRILGNHALYGATSWSGKVFKNTHTGILTEAEFLELQSILKARTGHVSSRKRALTHVFAGKIVCPNCGYRMTCVRTKYKERYNNDYRCSNCKIHYTHTSVSERKLLKAFDEYIDSYRLTSYDIKKESKKENNQMKIERQIVNLSKKREKYQKGWALDLIDDHEFSKLMKETQLELNQLESKLETDKYSSEKTFNQTAINNIVKNIKMNWSELTIEERKDFVNMFLKDIHYVKVAGIAKITKIDFH

SEQ ID NO: 8292 - DNA, 50 bp, Listeria booriae
  source 1..50: mol_type = genomic DNA
ctctgtatttatgataactatagactactatacttatcaaatatacagaa

SEQ ID NO: 8293 - DNA, 40 bp, Listeria booriae; identical to SEQ ID NO: 4853
  source 1..40: mol_type = genomic DNA

SEQ ID NO: 8294 - DNA, 40 bp, Listeria booriae
  source 1..40: mol_type = genomic DNA
ttccaagttggagtagccgtggctgtatttataacccatc

SEQ ID NO: 8295 - DNA, 50 bp, Listeria booriae
  source 1..50: mol_type = genomic DNA
ctctgtattttaaggaaatttacatgactattcttaccaatcatacaaca

SEQ ID NO: 8296 - protein, 499 aa, Brevibacillus brevis
MIGIYARVSTEEQAKSGFSLDDQLRECRKKAATSEAAEYVDDVSGEFLDRPALSRLRRDAKEGLITKIVCLDPDRLSRKLMNQLLITDEFDKRGIELVFVNGEYAKTPEGQLFYSMRGAIAEFEKAKINERMSRGRREKARQGRVLRDFQIYGYSYDSKKEQIVINEAEAAVVRLVFDLFTQPNELVQGMNGIAVYLTNKGVPTKRGASVWHRQVVRQMLMNEAYVGRFYQNKWNTEGMLGNQFREPDEKVRMKMRPKDEWISLPCPSIIDEVKFEHAQRLLKESRRRWAGRSFNEYLLSGLVRCGSCGNTMSGRKVKNWSQHIFEYTDVKNTAGAKNKGCGRRVRCEQLDNQVWETVRSWLNNPDEIAIAVEEKVETPFEQVELERLQKELEKTKAGRKRLLKLFASVEEDISEEDIRQGLKELKEKEDKLNQRSNELHEQAKLQIANEYNRNLIQEAADYYLSKAQDELSFGDKKELIRHVVREVRVYEESVEIYTF

SEQ ID NO: 8297 - DNA, 50 bp, Brevibacillus brevis
  source 1..50: mol_type = genomic DNA
tgcacttcttttgacatttagattgagatagtaatgtcaaaagggtagct

SEQ ID NO: 8298 - DNA, 40 bp, Brevibacillus brevis
  source 1..40: mol_type = genomic DNA
tgcgcgttgtattgagaatgaaatcctcatgcatctgaga

SEQ ID NO: 8299 - DNA, 40 bp, Brevibacillus brevis
  source 1..40: mol_type = genomic DNA
tgcgcgttgtattgagaattaaatcctcatgcatctgaga

SEQ ID NO: 8300 - DNA, 50 bp, Brevibacillus brevis
  source 1..50: mol_type = genomic DNA
tacacttccatctccatttatatatacattgtaatgctcatggggttgct

SEQ ID NO: 8301 - protein, 502 aa, Clostridium tertium
MGIAIYVRQSLEKKDSLSLEGQVDICKKQLTEGEQFEIYEDSGFSGKNINRPAMEKLLNDIESGIISKVICYKLDRISRSILDFNKLLVLFQKNKVEFVSCTENLDTTSPMGRAMVNIVATFAQLERETIQERVKDNYYKRGTTGAFLGGTIPYGFNRTYTQINGKKAPMLERDDEQAEVVELMFELYANSSMSLGDVAKHINKLGISSANGKRWNSNTISRMLKSPLYVKANADVYNYYKIKGVSITNEIDDFEGFNGCFLYGKREANERRYTNVKDHYLSIALHEGFVESRLFLKCQAKLDSNQQLCNSGKGKHTWLTGVLKCGKCGYSMSAVKNSTGKKYLVCKGKSNQANCEGHKNAIILQDIEDIVEPKIVKKLKELSEIKINTEVKQNRKVNEIKIQISKIDEDINKIMEKLLEANNIVMSYINKKIQELDEQKKILYAKMQKENNSDDNLKSIKEVIEKAIDFESLSFENKKDVVKLLIDKVEIADTKVKITWRI

SEQ ID NO: 8302 - DNA, 50 bp, Clostridium tertium
  source 1..50: mol_type = genomic DNA
ttgtttactttaatatcggactgtgatatatttaatacaatagtaaacta

SEQ ID NO: 8303 - DNA, 40 bp, Clostridium tertium
  source 1..40: mol_type = genomic DNA
atgtattcaatgggatgtagactcagttgactggaagcaa

SEQ ID NO: 8304 - DNA, 40 bp, Clostridium tertium
  source 1..40: mol_type = genomic DNA
atgtattcaatgggatgtagcctcagttgactggaagcaa

SEQ ID NO: 8305 - DNA, 50 bp, Clostridium tertium
  source 1..50: mol_type = genomic DNA
ttgctgtatgtactatagaactgtgcttaatttaattagaaagtaaacta

SEQ ID NO: 8306 - protein, 502 aa, Yersinia kristensenii
MPQQNNGIAYSYVRFSSKRQEQGDSVRRQTEMAEKYALEKGLTLSSKNFQDLGISAFKEGKRPSLVDMLDTIENGQITAGSTIIIEALDRLSRRGIDATLETVKDILRKDVQVVSLSDGLLLTKNSLNDLQSIIRIAVAADLAHKESERKSSRLRETKGQQRQAALAGKAINKILPFWLQRASERYEFSDKAHIAREIIRLKQEGKGSNMIAKTLNKQGVAGIRSSQWNHASITKMLKHPALYGAYQTGETTKERELIKLDLIENYYPALISKEDWLLIQSDQSKSTRGRRTTDNPYSGLLRCGCGGALVKRQTTVKNKLYVYHGCLNAKDGRCEQNISIKGLDQALKTILGRLEFKKRPTPDQSIHHERKQLEDRISNLNNKLLTLDDIPISVIKTIGTLEERLKTVTDLILQNEREQRGIDAVQGETLSSITDGLELNLLLKRVLKSITVSASGNGWAVKVLHLSGHKQNFLMVDGKIKFLSDTIALQKLLASFKKTTEE

SEQ ID NO: 8307 - DNA, 50 bp, Yersinia kristensenii
  source 1..50: mol_type = genomic DNA
attttttacatatgaaactacattgtgatattgttacttaatagcaaagg

SEQ ID NO: 8308 - DNA, 40 bp, Yersinia kristensenii; identical to SEQ ID NO: 5808
  source 1..40: mol_type = genomic DNA

SEQ ID NO: 8309 - DNA, 40 bp, Yersinia kristensenii; identical to SEQ ID NO: 8199
  source 1..40: mol_type = genomic DNA

SEQ ID NO: 8310 - DNA, 50 bp, Yersinia kristensenii
  source 1..50: mol_type = genomic DNA
attttttaaattttaaattccatttgcttattgctgggatatagcaaagt

SEQ ID NO: 8311 - protein, 471 aa, Listeria welshimeri
MTVGIYIRVSTEEQVKEGFSISAQKEKLKAYCTAQGWKDFKFYVDEGKSAKDMNRPLLQEMITHIKKGHIDTVLVYKLDRLTRSVVDLHNLLSVFDEHNCAFKSATEVYDTSSAMGRFFITIISSVAQFERENTSERVSFGMAEKVRQGEYIPLAPFGYIKGADGKLIVNKIEKEIFLQVVEMVSTGYSLRQTCEYLTNIGLKTRRSNDVWKVSTLIWMLKNPAVYGAIKWNNEIYENTHEPLIDKATFNKVAKILSIRSKSTTSRRGHVHHIFKNRLICPACGKRLSGLRTKYVNKDKETFYNNNYRCATCKEHRRPSINISEQKIEKAFIDYISNYTLHKASISSKKLDNNWRKQEIIQKEIISLQRKREKYQKAWAADLIKDDEFSKLMIDTKMEIDAAEDRQKEFDVSLFLSPEDIAKRNNILRELKINWTSLSPAEKIDFISMFIEGIEYVKDDANKAVITKIRFL

SEQ ID NO: 8312 - DNA, 50 bp, Listeria welshimeri
  source 1..50: mol_type = genomic DNA
tataggctttttgtcaaatatagtgatgtatacttgataaataccctata

SEQ ID NO: 8313 - DNA, 40 bp, Listeria welshimeri
  source 1..40: mol_type = genomic DNA
ttctatattactataacccgatgtgtatttatatcccatt

SEQ ID NO: 8314 - DNA, 40 bp, Listeria welshimeri
  source 1..40: mol_type = genomic DNA
ttctatattactataacccagtgtgtatttatatcccatt

SEQ ID NO: 8315 - DNA, 50 bp, Listeria welshimeri
  source 1..50: mol_type = genomic DNA
tatacggtatatagtatatatagtagtgtatacatattatataccatata

SEQ ID NO: 8316 - protein, 471 aa, Listeria welshimeri
MTVGIYIRVSTEEQVKEGFSISAQKEKLKAYCTAQGWKDFKFYVDEGKSAKDMNRPLLQEMITHIKKGLIDTVLVYKLDRLTRSVVDLHNLLSVFDEHNCAFKSATEVYDTSSAMGRFFITIISSVAQFERENTSERVSFGMAEKVRQGEYIPLAPFGYVKGADGKLIVNKIEKEIFLQVVEMVSTGYSLRQTCEYLTNIGLKTRRSNDVWKVSTLIWMLKNPAVYGAIKWNNEIYENTHEPLIDKATFNKVAKILSIRSKSTTSRRGHVHHIFKNRLICPACGKRLSGLRTKYVNKDKETFYNNNYRCATCKEHRRPSINISEQKIEKAFIDYISNYTLHKASISSKKLDNNWRKQEIIQKEIISLQRKREKYQKAWAADLIKDDEFSKLMIDTKMEIDAAEDRQKEFDVSLFLSPEDIAKRNNILRELKINWTSLSPAEKTDFISMFIEGIEYVKDDANKAVITKIRFL

SEQ ID NO: 8317 - DNA, 50 bp, Listeria welshimeri
  source 1..50: mol_type = genomic DNA
tataggctttttgtcaaatatagtgatgtatacttgacgaataccctata

SEQ ID NO: 8318 - DNA, 40 bp, Listeria welshimeri; identical to SEQ ID NO: 6093
  source 1..40: mol_type = genomic DNA

SEQ ID NO: 8319 - DNA, 40 bp, Listeria welshimeri
  source 1..40: mol_type = genomic DNA
ttctatattactataacccagtgtatatttatatcccatt

SEQ ID NO: 8320 - DNA, 50 bp, Listeria welshimeri; identical to SEQ ID NO: 8315
  source 1..50: mol_type = genomic DNA

SEQ ID NO: 8321 - protein, 471 aa, Listeria welshimeri; identical to SEQ ID NO: 8316

SEQ ID NO: 8322 - DNA, 50 bp, Listeria welshimeri; identical to SEQ ID NO: 8317
  source 1..50: mol_type = genomic DNA

SEQ ID NO: 8323 - DNA, 40 bp, Listeria welshimeri; identical to SEQ ID NO: 8313
  source 1..40: mol_type = genomic DNA

SEQ ID NO: 8324 - DNA, 40 bp, Listeria welshimeri; identical to SEQ ID NO: 8314
  source 1..40: mol_type = genomic DNA

SEQ ID NO: 8325 - DNA, 50 bp, Listeria welshimeri; identical to SEQ ID NO: 8315
  source 1..50: mol_type = genomic DNA

SEQ ID NO: 8326 - protein, 471 aa, Listeria welshimeri
MTVGIYIRVSTEEQVKEGFSISAQKEKLKAYCTAQGWKDFKFYVDEGKSAKDMNRPLLQEMITHIKKGLIDTVLVYKLDRLTRSVVDLHNLLSVFDEHNCAFKSATEVYDTSSAMGRFFITIISSVAQFERENTSERVSFGMAEKVRQGEYIPLAPFGYVKGADGKLIVNKIEKEIFLQVVEMVSTGYSLRQTCEYLTNIGLKTRRSNDVWKVSTLIWMLKNPAVYGAIKWNNEIYENTHEPLIDKATFNKVAKILSIRSKSTTSRRGHVHHIFKNRLICPACGKRLSGLRTKYVNRDKETFYNNNYRCATCKEHRRPSINISEQKIEKAFIDYISNYTLHKASISSKKLDNNWRKQEIIQKEIISLQRKREKYQKAWAADLIKDDEFSKLMIDTKMEIDAAEDRQKEFDVSLFLSPEDIAKRNNILRELKINWTSLSPAEKIDFISMFIEGIEYVKDDANKAVITKIRFL

SEQ ID NO: 8327 - DNA, 50 bp, Listeria welshimeri; identical to SEQ ID NO: 8317
  source 1..50: mol_type = genomic DNA

SEQ ID NO: 8328 - DNA, 40 bp, Listeria welshimeri; identical to SEQ ID NO: 6093
  source 1..40: mol_type = genomic DNA

SEQ ID NO: 8329 - DNA, 40 bp, Listeria welshimeri; identical to SEQ ID NO: 8319
  source 1..40: mol_type = genomic DNA

SEQ ID NO: 8330 - DNA, 50 bp, Listeria welshimeri; identical to SEQ ID NO: 8315
  source 1..50: mol_type = genomic DNA

SEQ ID NO: 8331 - protein, 471 aa, Listeria welshimeri; identical to SEQ ID NO: 6091

SEQ ID NO: 8332 - DNA, 50 bp, Listeria welshimeri; identical to SEQ ID NO: 8317
  source 1..50: mol_type = genomic DNA

SEQ ID NO: 8333 - DNA, 40 bp, Listeria welshimeri; identical to SEQ ID NO: 6093
  source 1..40: mol_type = genomic DNA

SEQ ID NO: 8334 - DNA, 40 bp, Listeria welshimeri; identical to SEQ ID NO: 8319
  source 1..40: mol_type = genomic DNA

SEQ ID NO: 8335 - DNA, 50 bp, Listeria welshimeri; identical to SEQ ID NO: 8315
  source 1..50: mol_type = genomic DNA

SEQ ID NO: 8336 - protein, 644 aa, Escherichia coli
MLRPICYERVSSIQQIEGGGGLDDQRSALEGYLDRNAGLFKNDRLFIQDRGVSAFKNSNISSESQLGIFLQDVQNRKYGEGDALIVMSLDRISRRSSWAEDTIRFIVNSGIEVHDISASTVLRKDDPHSKLIMELIQMRSHNESLMKSVRAKAAWDRKIIEAVQNGTVISNKMPMWLKNVDNRYQVIQEKADLIIRCFEWYRDGFSTGEIVKRIADPKWQMVTVSRLVRDRRLLGEHKRYNDEVIHNVYPKVIDDDLFLTANRMMDRVMLERNKPAEDLLLESDVVQEIFQLYESGLGSGAIVKRLPKGWSTVNVLRVLRDKNVVTQKIIDNLTFERVNQKLSMNGVANRIRKDITIAQDDYITNLFPKILKCGYCGGNVAIHYNHVRTKYVICRNREERKICDAKSIQYIRIEKNILKCVKNVDFQKLMIESTGSETSVLDGLHEELSSLRREENSYSDKINERKLAGKRVGIHLNDGLTEVQDRIEEIEKEIINAQTVREIPKFDFDMDEVLDPMNIELRAKVRKQLRLVLKAVKYWMFDKRIFIQLEYFNDVLSHMLVIDNKRGGGDVIYEMSIEERKGERIYTVHENGHAVFIASVTIGTDIWSLALSRTRTIDSIGNYLSLLAREGFEIFVNEDQIDWF

SEQ ID NO: 8337 - DNA, 50 bp, Escherichia coli
  source 1..50: mol_type = genomic DNA
atgttcccattgattgtggtgtgcgtcctttcgtatactatgggaacatt

SEQ ID NO: 8338 - DNA, 40 bp, Escherichia coli
  source 1..40: mol_type = genomic DNA
aatatattcatggtatgccgtcctttcgttttttagcaca

SEQ ID NO: 8339 - DNA, 40 bp, Escherichia coli
  source 1..40: mol_type = genomic DNA
aatatattcatggtatgccttcctttcgttttttagcaca

SEQ ID NO: 8340 - DNA, 50 bp, Escherichia coli
  source 1..50: mol_type = genomic DNA
atattcacattttttcttgtgtgcttccttttgtatgttttggccacact

SEQ ID NO: 8341 - protein, 647 aa, Klebsiella oxytoca
MLRPISYERVSTFQQVEMGKGLVDQRSSLTAFLDKNADKFTNERIFITDEGVSAFKNANISPESNLGKFLQDVRDRKYGKGDALIVTSLDRLSRRSSWSENTIQFIVAAGIVIYDISTDVVLRDDDSFSKILMEIILQRSHNESVMKSVRAKVAWQNKVMRAAANGEVVSNRMPFWLENIDNKYSVKEDQAALIVKCFELYKSGFSTGEIVKRIDDPKWQMVRVSRLIRDRRLLGEHKRYNDEVISNVYPKIIDDELFLTANRMMDTVMTDKKKPAEDLLLEPSVVKQIFSLSESGLGSGAIVKRLPKGWSTVNVLRVLRDKKVVEMKIIDNLTFERVNAKLTANGVANRIRKDVTIAQDDYITNLFPRILKCGCCGGNIAIHYNHVRTKYVICRTREEKKRCDAKSIQYTRIEKNILSVVMNVDFGKVLSEDSTKKDKVLEALKVELSALRKEENTYQLKIDERKKSGKKTSLPLMEGLTDVQDRIEETFEQISRSSTINELPTFDYDINCLLDPMNVELRAKVRKELKHVISKVTYQVIDKYILVRLHYYTDVLSHVLIIDNKRGGGDIISQIAIYTKDSTTIYTTPSFALTTSNNEIPRIHFMGNVPLNQIDYELLLISADYGECSDSVTSWMRHNHNFLFANN

SEQ ID NO: 8342 - DNA, 50 bp, Klebsiella oxytoca
  source 1..50: mol_type = genomic DNA
atgttcccattgattgatgtatgcgtccttttgtataatctgggaacatt

SEQ ID NO: 8343 - DNA, 40 bp, Klebsiella oxytoca
  source 1..40: mol_type = genomic DNA
aatatattcatggcatgccgtcctttcgtttttagcacag

SEQ ID NO: 8344 - DNA, 40 bp, Klebsiella oxytoca
  source 1..40: mol_type = genomic DNA
aatatattcatggcatgccttcctttcgtttttagcacag

SEQ ID NO: 8345 - DNA, 50 bp, Klebsiella oxytoca; identical to SEQ ID NO: 8340
  source 1..50: mol_type = genomic DNA

SEQ ID NO: 8346 - protein, 644 aa, Escherichia coli
MLRPICYERVSSIQQIEGGGGLDDQRSALEGYLDKNAGLFENDRLFIQDRGVSAFKNSNISSESQLGIFLQDVQNRKYGEGDALIVMSLDRISRRSSWAEDTIRFIVNSGIEVHDISASTVLRKDDPHSKLIMELIQMRSHNESLMKSVRAKAAWDRKIIEAVQNGTVISNKMPMWLKNVDNRYQVIQEKADLIIRCFEWYRDGFSTGDIVKRIADPKWQMVTVSRLVRDRRLLGEHKRYNDEVIHNVYPKVIDDDLFLTANRMMDRVMLEKNKPAEDLLLESDVVQEIFQLYESGLGSGAIVKRLPKGWSTVNVLRVLRDKNVVTQKIIDNLTFERVNQKLSMNGVANRIRKDITIAQDDYITNLFPKILKCGYCGGNVAIHYNHVRTKYVICRNREERKICDAKSIQYIRIEKNILKCVKNVDFQKLMIESTGSETSVLDGLHEELSSLRREENSYSDKINERKLAGKRVGIHLNDGLTEVQDRIEEIEKEIINAQTVREIPKFDFDMDEVLDPMNIELRAKVRKQLRLVLKAVKYWMFDKRIFIQLEYFNDVLSHMLVIDNKRGGGDVIYEMSIEERKGERIYTVHENGHAVFIASVTIGTDIWSLALSRTRTIDSIGNYLSLLAREGFEIFVNEDQIDWF

SEQ ID NO: 8347 - DNA, 50 bp, Escherichia coli; identical to SEQ ID NO: 8337
  source 1..50: mol_type = genomic DNA

SEQ ID NO: 8348 - DNA, 40 bp, Escherichia coli; identical to SEQ ID NO: 8338
  source 1..40: mol_type = genomic DNA

SEQ ID NO: 8349 - DNA, 40 bp, Escherichia coli; identical to SEQ ID NO: 8339
  source 1..40: mol_type = genomic DNA

SEQ ID NO: 8350 - DNA, 50 bp, Escherichia coli; identical to SEQ ID NO: 8340
  source 1..50: mol_type = genomic DNA

SEQ ID NO: 8351 - protein, 495 aa, Enterobacter hormaechei
MKQNGKAYSYIRFSSKKQEQGDSVRRQTELAEQYAHMHGLILSDKNFQDLGISAFKEGNRPSLGDMLEAIEKGQIEPGSTIIIESLDRLSRRGIDVTQQIIKSILQHNVFIASLVDGLLLNRESVNDLVSVIRIALAADLAHKESEKKSQRLRETKSQQRQRALSGEVINKILPFWLKRKEGKFVFSDKVDTVRRIIELRREGFGTNKIAKMLNDEGHKPLRSAGWNHTTVGKTINSVALYGAYQTSETTKDRKVILLDIIEDYYPAVISKEEFMLLQSDHKQNKPGYKSEHNAFAGILKHECGGSLVRKFHIASGKTYQYHVCANARDGKCNTTKNFKNIEKALYRIMKKLKLEKNTNFDRALPLEQETIKKRIQELNDMLLTAAKIPKSVMETINNLEDKLQEVEEKIKQQDRMIISERAFDLKLLQDIKEPQELNMMLKRIIENIIVYNIGKKWRIKVQYKNKHVQSFLWDGENITFITDTKEILDLVNSWG

SEQ ID NO: 8352 - DNA, 50 bp, Enterobacter hormaechei
  source 1..50: mol_type = genomic DNA
aatttccccctttgaaactatatggtaatattgttgcaaagaagcaaaat

SEQ ID NO: 8353 - DNA, 40 bp, Enterobacter hormaechei; identical to SEQ ID NO: 4963
  source 1..40: mol_type = genomic DNA

SEQ ID NO: 8354 - DNA, 40 bp, Enterobacter hormaechei; identical to SEQ ID NO: 5994
  source 1..40: mol_type = genomic DNA

SEQ ID NO: 8355 - DNA, 50 bp, Enterobacter hormaechei
  source 1..50: mol_type = genomic DNA
aattggcacagggaaaattataagtaaatattcctggagaaaagcaaagt

SEQ ID NO: 8356 - protein, 495 aa, Enterobacter sp HK169
MKQNGKAYSYIRFSSKKQEQGDSVRRQTELAEQYAHVHGLILSDKNFQDLGISAFKEGNRPSLGDMLEAIEKGQIEPGSTIIIESLDRLSRRGIDVTQQIIKSILQHNVFIASLVDGLLLNRESVNDLVSVIRIALAADLAHKESEKKSQRLRETKSQQRQRALSGEVINKILPFWLKRKEGKFVFSDKVDTVRRIIQLRREGFGTNKIAKVLNDEGHKPLRSAGWNHTTVGKTINSVALYGAYQTSETTKDRKIILLDIIEDYYPAVISKEEFMLLQSDHKQNKPGYKSEHNAFAGILKHECGGSLVRKFHIASGKTYQYHVCANARDGKCNTTKNFKNIEIALYRIMKKLKLEKNTNFDGALPLEQETIKKRIQELNDMLLTAAKIPKSVMETINNLEDKLQEVEEKIKQQNSMIISERAFDLKLLQDIKEPQELNMMLKRIIENIIVYNIGKKWRIKVQYKNKHVQSFLWDGENITFITDTKEILDLVNSWG

SEQ ID NO: 8357 - DNA, 50 bp, Enterobacter sp HK169; identical to SEQ ID NO: 8352
  source 1..50: mol_type = genomic DNA

SEQ ID NO: 8358 - DNA, 40 bp, Enterobacter sp HK169; identical to SEQ ID NO: 4963
  source 1..40: mol_type = genomic DNA

SEQ ID NO: 8359 - DNA, 40 bp, Enterobacter sp HK169; identical to SEQ ID NO: 5994
  source 1..40: mol_type = genomic DNA

SEQ ID NO: 8360 - DNA, 50 bp, Enterobacter sp HK169; identical to SEQ ID NO: 8355
  source 1..50: mol_type = genomic DNA

SEQ ID NO: 8361 - protein, 495 aa, Cronobacter sakazakii
MKQNGKAYSYIRFSSKKQEQGDSVRRQTELAEQYAHMHGLILSDKNFQDLGISAFKEGNRPSLGDMLEAIEKGQIEPGSTIIIESLDRLSRRGIDVTQQIIKSILQHNVFIASLVDGLLLNRESVNDLVSVIRIALAADLAHKESEKKSQRLRETKSQQRQRALSGEVINKILPFWLKRKEGKFVFSDKVDTVRRIIELRREGFGTNKIAKMLNDEGHKPLRSAGWNHTTVGKTINSVALYGAYQTSETTKDRKVILLDIIEDYYPAVISKEEFTLLQSDHKQNKPGYKSEHNAFAGILKHECGGSLVRKFHIASGKTYQYHVCANARDGKCNTTKNFKNIEKALYRIMKKLKLEKNTNFDRALPLEQETIKKRIQELNDMLLTAAKIPKSVMETINNLEDKLQEVEEKIKQQDRMIISERAFDLKLLQDIKEPQELNMMLKRIIENIIVYNIGKKWRIKVQYKNKHVQSFLWDGENITFITDTKEILDLVNSWG

SEQ ID NO: 8362 - DNA, 50 bp, Cronobacter sakazakii; identical to SEQ ID NO: 8352
  source 1..50: mol_type = genomic DNA

SEQ ID NO: 8363 - DNA, 40 bp, Cronobacter sakazakii
  source 1..40: mol_type = genomic DNA
cttactgccgaactgcatggtgacgttgctggtaactaac

SEQ ID NO: 8364 - DNA, 40 bp, Cronobacter sakazakii
  source 1..40: mol_type = genomic DNA
cttactgccgaactgcatgtagacgttgctggtaactaac

SEQ ID NO: 8365 - DNA, 50 bp, Cronobacter sakazakii; identical to SEQ ID NO: 8355
  source 1..50: mol_type = genomic DNA

SEQ ID NO: 8366 - protein, 495 aa, Klebsiella grimontii; identical to SEQ ID NO: 8356

SEQ ID NO: 8367 - DNA, 50 bp, Klebsiella grimontii; identical to SEQ ID NO: 8352
  source 1..50: mol_type = genomic DNA

SEQ ID NO: 8368 - DNA, 40 bp, Klebsiella grimontii; identical to SEQ ID NO: 4508
  source 1..40: mol_type = genomic DNA

SEQ ID NO: 8369 - DNA, 40 bp, Klebsiella grimontii
  source 1..40: mol_type = genomic DNA
cttactgccgaactgcatgtagacgttgctggatactagc

SEQ ID NO: 8370 - DNA, 50 bp, Klebsiella grimontii; identical to SEQ ID NO: 8355
  source 1..50: mol_type = genomic DNA

SEQ ID NO: 8371 - protein, 495 aa, Enterobacter asburiae
MKQNGKAYSYIRFSSKKQEQGDSVRRQTELAEQYAHVHGLILSDKNFQDLGISAFKEGNRPSLGDMLEAIEKGQIEPGSTIIIESLDRLSRRGIDVTQQIIKSILQHNVFIASLVDGLLLNRESVNDLVSVIRIALAADLAHKESEKKSQRLRETKSQQRQRALSGEVINKILPFWLKRKEDKFVFSDKVDTVKRIIQLRREGFGTNKIAKVLNDEGHKPLRSAGWNHTTVRKTINSVALYGAYQTSETTKDRKVILLDIIDDYYPAVISKEEFMLLQSDQKQNKPGYKSEHNAFAGILKHECGGSLVRKFHVASGKTYQYHVCANARDGKCNITKNFKNIEIALFRIMKKLKLEKNTSFDGALLLEQETIKKKIQELNDMLLTASKIPTSVIQTINNLEDKLQEVEEKIKQQNSMIISERAFELKPLQDIKDPQELNMMLKRIIESIIVYNIGIKWRIKVQYRNEHVQSFLWDGENITFITDTKEILDLVNSWS

SEQ ID NO: 8372 - DNA, 50 bp, Enterobacter asburiae; identical to SEQ ID NO: 8352
  source 1..50: mol_type = genomic DNA

SEQ ID NO: 8373 - DNA, 40 bp, Enterobacter asburiae; identical to SEQ ID NO: 4963
  source 1..40: mol_type = genomic DNA

SEQ ID NO: 8374 - DNA, 40 bp, Enterobacter asburiae; identical to SEQ ID NO: 5994
  source 1..40: mol_type = genomic DNA

SEQ ID NO: 8375 - DNA, 50 bp, Enterobacter asburiae; identical to SEQ ID NO: 8355
  source 1..50: mol_type = genomic DNA

SEQ ID NO: 8376 - protein, 495 aa, Enterobacter asburiae
MKQNGKAYSYIRFSSKKQEQGDSVRRQTELAEQYAHMHGLILSDKNFQDLGISAFKEGNRPSLGDMLEAIEKGQIEPGSTIIIESLDRLSRRGIDVTQQIIKSILQHNVFIASLVDGLLLNRESVNDLVSVIRIALAADLAHKESEKKSQRLRETKSQQRQRALSGEVINKILPFWLKRKEGKFVFSDKVDTVRRIIQLRREGFGTNKIAKMLNDEGHKPLRSAGWNHTTVGKTINSVALYGAYQTSETTKDRKVILLDIIEDYYPAVISKEEFMLLQSDHKQNKPGYKSEHNAFAGILKHECGGSLVRKFHIASGKTYQYHVCANARDGKCNTTKNFKNIEIALYRIMKKLKLEKNTNFDRALPLEQETIKKRIQELNDMLLTAAKIPKSVMETINNLEDKLQDIEEKIKQQNSMIISERAFDLKLLQDIKEPQELNMMLKRIIENIIVYNIGKKWRIKVQYKNKHVQSFLWDGGNITFITDTKEILDLVNSWG

SEQ ID NO: 8377 - DNA, 50 bp, Enterobacter asburiae
  source 1..50: mol_type = genomic DNA
aattcccccctttgaaactatatggtaatattgttgcaaagaagcaaaat

SEQ ID NO: 8378 - DNA, 40 bp, Enterobacter asburiae; identical to SEQ ID NO: 4963
  source 1..40: mol_type = genomic DNA

SEQ ID NO: 8379 - DNA, 40 bp, Enterobacter asburiae; identical to SEQ ID NO: 5994
  source 1..40: mol_type = genomic DNA

SEQ ID NO: 8380 - DNA, 50 bp, Enterobacter asburiae; identical to SEQ ID NO: 8355
  source 1..50: mol_type = genomic DNA

SEQ ID NO: 8381 - protein, 495 aa, Enterobacter cloacae
MKQNGKAYSYIRFSSKKQEQGDSVRRQTELAEQYAHVHGLILSDKNFQDLGISAFKEGNRPSLGDMLEAIEKGQIEPGSTIIIESLDRLSRRGIDVTQQIIKSILQHNVFIASLVDGLLLNRESVNDLVSVIRIALAADLAHKESEKKSQRLRETKSQQRQRALSGEVINKILPFWLKRKEGKFVFSDKVDTVRRIIQLRREGFGTNKIAKVLNDEGHKPLRSAGWNHTTVGKTINSVALYGAYQTSETTKDRKIILLDIIEDYYPAVISKEEFMLLQSDHKQNKPGYKSEHNAFAGILKHECGGSLVRKFHIASGKTYQYHVCANARDGKCNTTKNFKNIEIALYRIMKKLKLEKNTNFDGALPLEQETIKKRIQELNDMLLTASKIPKSVMETINNLEDKLQEVEEKIKQQNSMIISERAFDLKLLQDIKEPQELNMMLKRIIENIIVYNIGKKWRIKVQYKNKHVQSFLWDGENITFITDTKEILDLVNSWG

SEQ ID NO: 8382 - DNA, 50 bp, Enterobacter cloacae; identical to SEQ ID NO: 8352
  source 1..50: mol_type = genomic DNA

SEQ ID NO: 8383 - DNA, 40 bp, Enterobacter cloacae; identical to SEQ ID NO: 4963
  source 1..40: mol_type = genomic DNA

SEQ ID NO: 8384 - DNA, 40 bp, Enterobacter cloacae; identical to SEQ ID NO: 5994
  source 1..40: mol_type = genomic DNA

SEQ ID NO: 8385 - DNA, 50 bp, Enterobacter cloacae; identical to SEQ ID NO: 8355
  source 1..50: mol_type = genomic DNA

SEQ ID NO: 8386 - protein, 567 aa, Clostridium botulinum
MKITLLYYIKKFNIYCNRYLSQQINISVDIIGFYQFKNVTNSVTDVLKRGDNLDRICIYLRKSRADEELEKTIGVGETLSKHRKALLKFAKEKKLNIMEIKEEIVSADSIFFRPKMIELLKEVENNQYTGVLVMDIQRLGRGDTEDQGIIARIFKESHTKIITPMKTYDLDDDLDEDYFEFESFMGRKEYKMIKKRMQGGRVRSVEDGNYIATNPPFGYDIHWINKSRTLKFNSKESEIVKLIFKLYTEGNGAGTISNYLNSLGYKTKFGNNFSNSSIIFILKNPVYIGKITWKKKDIRKSKDPHKVKDTRTRDKSEWIIADGKHEPIIDEKIWNKAQEILNNKYHIPYKIANGPANPLAGVVICSKCNSKMVMRKYGKKLPHLICNNKECNNKSARFDYIEKAVLEGLDEYLKNYKVNVKANNKTSDIEPYEQQSNALNKELILLNEQKLKLFDFLEREIYTEEIFLERSKNLDERINTTTLAINKIKKILDNEKKKNNKNDIVKFEKILEGYKKTNDIQKKNELMKSLVFKIEYKKEQHQRNDGLLYIYFLSFCVRCISYLTQFI

SEQ ID NO: 8387 - DNA, 50 bp, Clostridium botulinum
  source 1..50: mol_type = genomic DNA
ggtgtatatcatacctaacgcaattcattacatcacatatgttatacacc

SEQ ID NO: 8388 - DNA, 40 bp, Clostridium botulinum
  source 1..40: mol_type = genomic DNA
tatatccataagagaaatttcatttccttctttgtctacc

SEQ ID NO: 8389 - DNA, 40 bp, Clostridium botulinum
  source 1..40: mol_type = genomic DNA
tatatccataagagaaattggatttccttctttgtctacc

SEQ ID NO: 8390 - DNA, 50 bp, Clostridium botulinum
  source 1..50: mol_type = genomic DNA
gatttatagtaatcctaacacaatggtatacatctcccttcttatacaca

SEQ ID NO: 8391 - protein, 664 aa, Vibrio parahaemolyticus
MFSFDKSKFKGICVPYARFSTKGQSKIGKKSLERQIEEARRYAKSNNLYINEDLIFADKGISGFAQQGNIAKAFKKGQMQVMLALLEEVPYQEREFIYVTFHNFDRFSRMSPKQARTYFDLILQKGFNVVTTIDNQLYTRHDKDLGKMLISTIKMTTAWEESQVKSVYIKDALARKKKVVEYLYTHPSQKGKYKHIGVVQPNMPRWIDHEKIELTYTDESGSKRTDSFKKFTLNKEKAKIVNYIFDLKIQGLGYARICRRLNEEGIPTFDQGKHRIAKKWHVFAVQNLICNEMVLGHITLHTHNEEEYMCEIDKVFKKRKIKQTATEKLYNYYPAAVSEAKYLEAHKNTIQQDKPKKLGRIGERTNIFAQILLCECGGTLQYRRTKKNKKKSESVSVNEYLQCNNAFVNHKCNSQTINYTMLETAFFRYVNNIDFKKICSTTNSKHALKIIDLDTDIKELTDEIESLKLREAGLAKTYMSLASAGLDGSTALIDREKTKKEIAEKVLELENLELKKKGLEIEADKDNREFVDINDYMLNKDNYSSDEKIIIRKKINDFLHSKIEWMEVVSTERQKFVIIAFHDTVIRTFAFDDRCANDLMFNEIDVDLSGLNRVQASNLMFTLIKAIRNSLKGVEAVITKADLISYLQHIKQDYLNNIGEQASV

SEQ ID NO: 8392 - DNA, 50 bp, Vibrio parahaemolyticus
  source 1..50: mol_type = genomic DNA
ggttgtgtaatactatgtaaatcattagataaacgctttaatacacaact

SEQ ID NO: 8393 - DNA, 40 bp, Vibrio parahaemolyticus
  source 1..40: mol_type = genomic DNA
cgtattcagttttatgtctttcatagtaaacatacccaaa

SEQ ID NO: 8394 - DNA, 40 bp, Vibrio parahaemolyticus
  source 1..40: mol_type = genomic DNA
cgtattcagttttatgtctaacatagtaaacatacccaaa

SEQ ID NO: 8395 - DNA, 50 bp, Vibrio parahaemolyticus
  source 1..50: mol_type = genomic DNA
ggtcgtctactaatatgttactgaaaaaataaacaggtctttacacaact

SEQ ID NO: 8396 - protein, 537 aa, Clostridium cadaveris
MKQQIYNTALYLRLSRDDELQGESSSITTQRSMLRLYAKEHHLNVTDEYIDDGWSGTNFERPSFQRMIEDIEAGKINCVVTKDLSRLGRNYIMTGQYTELYFPSHNVRYIAIDDGVDSEKGESEIAPFKNIINEWVARDTSRKVKSVFKTKFAEGAHYGAYAPLGYKKHPDIKGKLLIDDETKWIIEKIFSLAYQGYGSAKITKQLRAEKVPTPAWLNFTRYGTFAHIFEGKPESKRYEWTIAHVKAILKSEVYIGNSVHNMQSTISFKSKKKVRKPESEWFRVENTHEPIIDKEVFYRVQEQIKSRRRQTKQKETPIFAGLVKCADCGWSMRFATNKANRTPYSYYACSYYGQFGKGNCSMHYIRYDVLYQAVLERLQYWAKAVQQDEEKVLNKIQKVGNAERIREKKKKANTLKKAENRQNEIDRLFAKMYEDRACEKITERNFVMLSSKYQKEQIELEQQITSLREELSKMEQDMIGAEKWIELIKEYSIPKELTAPLLNAMIEKILVHEATTNEDNERIQEIEIYYRFVGKVD

SEQ ID NO: 8397 - DNA, 50 bp, Clostridium cadaveris
  source 1..50: mol_type = genomic DNA
tcatatctttaactaagggaaacaggagtttcccaaacaaaaggatatta

SEQ ID NO: 8398 - DNA, 40 bp, Clostridium cadaveris
  source 1..40: mol_type = genomic DNA
agtgtcaaagtgggaaacaggtgaaggttttccagatata

SEQ ID NO: 8399 - DNA, 40 bp, Clostridium cadaveris
  source 1..40: mol_type = genomic DNA
agtgtcaaagtgggaaacacttgaaggttttccagatata

SEQ ID NO: 8400 - DNA, 50 bp, Clostridium cadaveris
  source 1..50: mol_type = genomic DNA
tcatctctgacataaagccaatcactagtcccccaacctaaatgatatta

SEQ ID NO: 8401 - protein, 516 aa, Pseudomonas monteilii
MPTAFSYARFSSGKQQRGSSLERQEQMVADWLILHPDYNRSELRFRDLAKSGWKGEHIKDGGGFAELLAAVEAGEIQRGDAVLVEAIDRTGRLPVMTMFSKIIDPILTAGVEIITLDDGVVYSEKSLNEGGQIHLLVAKIQAARQYSDNLSRRLTASYDSRRRLAKEGTTPKRNTPVWLTSKGEVIQEIADQIKLAFELYTSGLGKAVIAKRMRESGVPALAKTSGPGVEGWLRNEAVIGRWNGSEVYEPIVDLSRYQLAQIEGERRKTAPPAKTATHFYVGLVKCGSCGGNFIMRTIKGVQVSMRCRKRQELKGCGNKKVIPKVVIDAVYRYTSAPAARKVVAHEHRGVNEKAIIAAEAKVLELSKGIEAMVMAFSGTMAIPEVAGRIQAMHADREAAERELAMLKVTVERSPTNWRVQGRVDDLGRTDPQRLAAMLRSVGYTITIHSDGRLCTSESETVYRYAGVDRREDMYRLAVVGGKELLISKVPEEEFDEWWEPGDGGEVVESTYTEEYE

SEQ ID NO: 8402 - DNA, 50 bp, Pseudomonas monteilii
  source 1..50: mol_type = genomic DNA
attgtgtacatgtgaaaatgttgcttgtaggtatttcagatgtttacaat

SEQ ID NO: 8403 - DNA, 40 bp, Pseudomonas monteilii
  source 1..40: mol_type = genomic DNA
tttgtgcatgaggcgcttcttgtaggtactgacggtcttg

SEQ ID NO: 8404 - DNA, 40 bp, Pseudomonas monteilii
  source 1..40: mol_type = genomic DNA
tttgtgcatgaggcgcttcaagtaggtactgacggtcttg

SEQ ID NO: 8405 - DNA, 50 bp, Pseudomonas monteilii
  source 1..50: mol_type = genomic DNA
attttgtacactttaaattggtgaaagaaggtctttatttactttacaaa

SEQ ID NO: 8406 - protein, 562 aa, Thermoclostridium stercorarium
MEPKAYSYIRFSSPEQEKGDSLRRQIQLSEEYCKQHGLILDDTLKLTDKGLSAYKGHHRTKGALGEFLRLVEEGKIPPGSVLLVENLDRLYREQILDALNQFTSIIKAGIKIVTLQDGMEYDQESINQNWAQLIISITYMARAHDESEIKSKRISAVWENKRSKAGNGGKKLTAKAPAWLKLSQDRTKFILIPEAAKAIELIFRKKLAGKGAERIARELNDDPNIWKPPRTGPKKTGGWRGSYINKILRSRAVIGEFQPYKLVDGKRQPIGDPIPDYFPPVIDKELFYQVQAQLQANAEKKGNAGGRTGKVSNLFTHVIKCGLCGYPMHFINKGKPPKGGKYLVCDASRRLKTCTAKPIRYEEFEQLFFDNFEELDISQLIPGEDETQARINELEKLLTVNRQRLLEIDSKVENFSDTIGRTKDSRIREQLEKKLSQAFDDKERLESENKKFEREITELRQQNAGLEKDIEQAKEIYQLLNSARGETERIELRLRLRQQIQKSIEWIKIYPLQEPYQEIQETEEPGIVKIMKSKYIDKVRIKFRGSRNLRVLYLKNHAELSE

SEQ ID NO: 8407 - DNA, 50 bp, Thermoclostridium stercorarium
  source 1..50: mol_type = genomic DNA
tagcataaaaccgtttataacattataatgttatatatggttttatcctt

SEQ ID NO: 8408 - DNA, 40 bp, Thermoclostridium stercorarium
  source 1..40: mol_type = genomic DNA
ttcgggtgtttggtccgtcatgctgttaacgccgcctgaa

SEQ ID NO: 8409 - DNA, 40 bp, Thermoclostridium stercorarium
  source 1..40: mol_type = genomic DNA
ttcgggtgtttggtccgtcttgctgttaacgccgcctgaa

SEQ ID NO: 8410 - DNA, 50 bp, Thermoclostridium stercorarium
  source 1..50: mol_type = genomic DNA
taggatcaattaaaatatcacatgttaatgatagatttttatttttcctt

SEQ ID NO: 8411 - protein, 521 aa, Paenibacillus odorifer
MDTYCIYLRKSRADFDAEARGEGETLKKHRTTLFALAKKMKIQVTDVYSEIVSGERVADRPQMQRLLNDVGDGRWTGVLVMEVERLARGDTMDQGLVAQAFKYSSTKIITPVKVYDPSNEFDEEYFEFGLFMSRREYKTINRRQQAGRLASAIEGNYIGNIPPYGYQRTILPDKSHSLVPDVDQAPVVKMVYDMFTKQNMSMGSIRAKLNKLGIPSARNTFWSVSTISKMLQNSVYVGEIVWKRRPQKKSQKDGVLISTRPLMPEDQWIKAKGKHEPLVTLEIWEKAQEILNNRKPVPAPTGIITNPLAGLVRCEICGHLMVRRTYSADKPAQIVCTTPSCPNISSNFTLVEQRLLTGLRTWINQYHAEWELNKPEKDMPVDELIQAKKSIITGLEKKLSELSQQSGKLHDLLERGIYTEDVFLERSQNITERVVETKSALNVAISELETEANRKKATVEVIPKVENVLDLYVKTEEAALKNELLKSVLEVAVYNKTVRGHWRKPEVMSHFEIKLFPKLPK

SEQ ID NO: 8412 - DNA, 50 bp, Paenibacillus odorifer
  source 1..50: mol_type = genomic DNA
ggttgataacttgtgaatgcggatacttctgcatgtataggttatcaatc

SEQ ID NO: 8413 - DNA, 40 bp, Paenibacillus odorifer
  source 1..40: mol_type = genomic DNA
aaaaggaatcactaccgaaaccttcggtctcataacaacc

SEQ ID NO: 8414 - DNA, 40 bp, Paenibacillus odorifer
  source 1..40: mol_type = genomic DNA
aaaaggaatcactaccgaagtcttcggtctcataacaacc

SEQ ID NO: 8415 - DNA, 50 bp, Paenibacillus odorifer
  source 1..50: mol_type = genomic DNA
ggctgataaatggtgaatgaggatgttgatgcgtgttgtaatcatcatgc

SEQ ID NO: 8416 - protein, 502 aa, Clostridium neonatale
MRKVAFLSRVSTLDQHSSIDNQEEVFKNWLKRNSGCILYKIYTDEGISGAKGYKRKQWLNMLEDGKKKKFDILISKSYSRFGRNQRETLDAIAMLRNNGIRIIFLEDNLDSEQDSNKFGLFAWLAEQEAQKTSERIKIVWENYNSEGKVHVTLAPYGYDYNKEIKNFVVNDIEADIVRKIFSLYIKGNGYNKIAKLLTENNIPTKRNGKWAGTTVGNMLKNDFYLGVLTQGKTKTIDVTMDTKKKIPKEEWIKHINNHEAIISKECFESVQYNIKKRSKRIKEFYNETSIKQSNSSLFSNLLICGECNSRLSIKRKKKLNNYKPFYNCINYELRGIKVCGHRSNFIWEDILINYIKEKLDSIVKNNYKELKNKIKQKNTCNIKYEKELKCIENKIKDQINISTRLLCEYTKGNVGEMNYKLQNEKIEKILKHLVNRKEELNSFANSGRKIKQEEKLLIGGINDLLETKTEDWNNAMIKSIIDNIVVYIDGTIEIYFKYLNDK

SEQ ID NO: 8417 - DNA, 50 bp, Clostridium neonatale
  source 1..50: mol_type = genomic DNA
tgtccctaaacagtaaattaagatacttcataatttattatttaggatgt

SEQ ID NO: 8418 - DNA, 40 bp, Clostridium neonatale
  source 1..40: mol_type = genomic DNA
ggatcctaacaatcaagatacttcaatattaacaggatct

SEQ ID NO: 8419 - DNA, 40 bp, Clostridium neonatale
  source 1..40: mol_type = genomic DNA
ggatcctaacaatcaagatttttcaatattaacaggatct

SEQ ID NO: 8420 - DNA, 50 bp, Clostridium neonatale
  source 1..50: mol_type = genomic DNA
tgtccatatttctcaaattattttttttcataacttatctgttagcaggt

SEQ ID NO: 8421 - protein, 535 aa, Bacillus pumilus
MELKHIVNSYNVTKIIGYLRRSRQDVEREKRTGEDTLTEQKELMNKILTGIEIPYETRTEIGSGESIEGRPVFKSCLADLRSGKFQAIAVKEITRLSRGSYSDAGEIVNLLNEKRIIIITPYKIYDPRNPVDARQIRFELFMAREEFEMTRERMNGAKFTYAAQGKWISGLAPFGYKLNKRTSRLEPADESKAVVQLIFDIFLNGLDGKDLSYTAIATHLTKLQFTTPRGGKRWSKDSVKKILQNEAYMGRVRYKARETTKDGKRIFRPESEHIVVDDAHEPIISKEDFEAVQTKIANKVPLLPVVTSFEPNELAGLCVCSVCGKSLQKYESEYNRQNKDGTSSYFHVKLLICRINKCTSVRYQYVEDAILDYLEQLIALENDKLKDVIEKSMEAAENNNSEKTSEQMVVQANQKQKELENKLTFIFEKFESGIYTDEIFLQRKAAIEKEISDIKKLKQELSMTFEVKDKDVNEFRVNIADVVKFYKESKSRGMKNEKLRTVFDYIVLEMTEKRRGPIPAKFEIYPYLRIASASH

SEQ ID NO: 8422 - DNA, 50 bp, Bacillus pumilus
  source 1..50: mol_type = genomic DNA
cattaagtatcatgataaactgacaaagcggtatatcatgatactaagta

SEQ ID NO: 8423 - DNA, 40 bp, Bacillus pumilus
  source 1..40: mol_type = genomic DNA
tgtcaacatctccactgacaaagcagtttctccgacaaat

SEQ ID NO: 8424 - DNA, 40 bp, Bacillus pumilus
  source 1..40: mol_type = genomic DNA
tgtcaacatctccactgacacagcagtttctccgacaaat

SEQ ID NO: 8425 - DNA, 50 bp, Bacillus pumilus
  source 1..50: mol_type = genomic DNA
gatcaagtaagttaataaactgcaacaccggtacctgtgcatactaagtg

SEQ ID NO: 8426 - protein, 510 aa, Chryseobacterium indologenes
MKIADLYIRVSTDEQADKGYSQRDQHERLEKYCQQNEITIGQVIFEDHSAKNFNRPEWNNYIQNIKKRSLRSNLILFTKWDRFSRNAGDAYQMIKLLLSNNISPQAIEQPLDMSIPENKMMLAIYLAAPEVENDRRALNTFYGMRRAQKEGRLMGTASYGYINKCSEDGRKYIALKEPEASNMRWAFNEIAKGKYSINQIRLKMNTMAGTKISRTSFYRAIKNPLYCGKIYIKPYKDEDACTVDGKHESLISESLFNKVQMVLSGITTTERPKGKINAAKEFPLRGFLKCPRCGGHISGSGSKGKKSIYYYYHCNSTCGYRYRSNIINCAFEKELQKYEYHEGVNTLLKEIIFTNFKYIQEDIDAQKKEISSQIQSLNNRLNNAREKYLEDRLDYDDYQLIKNECKKKIDDLEISLQNHKLSNKNSDIKLKLDRVIKIVPNLYKLYVQGNDETKNTILCSILAEKLEFHENSFRTPKLNSALSHILLISNKLKDKKKGKSTFENAFSRKV

SEQ ID NO: 8427 - DNA, 50 bp, Chryseobacterium indologenes
  source 1..50: mol_type = genomic DNA
ttgaaaatgctttttcccgaaaggtgactcaaaggtacattttccaaaaa

SEQ ID NO: 8428 - DNA, 40 bp, Chryseobacterium indologenes
  source 1..40: mol_type = genomic DNA
aaatagttgtctccttaagtgaccgcagaaggattcgaac

SEQ ID NO: 8429 - DNA, 40 bp, Chryseobacterium indologenes
  source 1..40: mol_type = genomic DNA
aaatagttgtctccttaagacaccgcagaaggattcgaac

SEQ ID NO: 8430 - DNA, 50 bp, Chryseobacterium indologenes
  source 1..50: mol_type = genomic DNA
ttgaaaaactgaagtcccgggaagaccctcaaaagtttgtattccaaaat

SEQ ID NO: 8431 - protein, 480 aa, Streptococcus pyogenes
MKTINKVAIYVRVSTTNQAEEGYSIDEQKDKLKSYCQIKDWNVYKVYTDGGFSGSNTERPALEKLIKDAKNKKFDTVLVYKLDRLSRSQKDTLYLIEEIFIKNGIEFLSLQENFDTSTPFGKAMIGLLAVFAQLEREQIKERMQLGKLGRAKSGKSMMWARTSYGYDYHRETGTVTINELEAVAIRDIFESYLAGMSITKLRDKLNDKYPKTPNWHYRIVRGILANPVYCGYNQYKGHVFLGNHEPIITEEAFNKTQEELKIRQQTALEKFNPRPFRAKYMLSGIAQCGYCGAPLSITLGTIRKDGTRNIRYQCKNRFPRATKGVTIYNENKKCDSGFYEKSDIEQYVIEQICKLQHDKKYVEELFADHGPSVDRIACQKQIDLLTNKISRLNDLYIDDRITLEELQTKSSEFSSQRSILEKELENDPALKRKKREKEMKKILRTDDISNLDYEHQKNLVRSLINKVQVTVDKIIIKWRI

SEQ ID NO: 8432 - DNA, 50 bp, Streptococcus pyogenes
  source 1..50: mol_type = genomic DNA
ataagagttttactatccttcatttcaattagtgtatctaaatttctctg

SEQ ID NO: 8433 - DNA, 40 bp, Streptococcus pyogenes
  source 1..40: mol_type = genomic DNA
tgatagtaatcctaacatctctatcaaagcattacatcgt

SEQ ID NO: 8434 - DNA, 40 bp, Streptococcus pyogenes
  source 1..40: mol_type = genomic DNA
tgatagtaatcctaacatcattatcaaagcattacatcgt

SEQ ID NO: 8435 - DNA, 50 bp, Streptococcus pyogenes
  source 1..50: mol_type = genomic DNA
ataaaagttaaattatgcttctttataattagcttagatgtttttatatg

SEQ ID NO: 8436 - protein, 634 aa, Vibrio parahaemolyticus
MKLEHFSHTEPQIYSYSRFSNIRQEKGRSLARQKKFIDEVSAKFNLKINKDLVMTDRGLSAFHGHHKTKGALGVFLAAVEKQLIKPGSVLIVESLDRLSREQPYIAQATLASLVNADIVVVTAADEKIYSKETMAKDPLGTMILSVLEMVRAHKESLRKTEASIDFLHGQIATHEEGGVSDLAGPLPFWISRKQRPHPKIKTGFELNEHEEIIRLIVDMHFKQGMGLRPISVELLNRGIKPPSQLKHSPANSRKPKNDVWGVSTLSHIVSNQALCGRYVVNLNYQKDGKKHVEDYVLRSYYPAIMSEEEFDTFQAIKKRRYGSNKGDKSKRNGLVYLLTDYGNKSVCAKCGRSIGSQPQKQKHGIRRRLHCSKHKETANCCKSIIQDYIEDAFLISVARHIDYNLINTQVKPADIIRNSDRLEEIDLEMANVIDMRRTVKDEKIKLKLKFDYETLENEKEELIKQKLEFKQFKIAPDDIKKFIRTVNDARNYNNNEARTFVKSILMQCIRKIEVHMEKKKLECYGYPNLFENAIVNVVDVEFYTDKKLSIFVSAETNALLFSKISDEFADESLGSFTEEQLKAWNDVGFDNFQNLGERGTLVNENENSTENLWFASDLAEAFMNEMINQSEDES

SEQ ID NO: 8437 - DNA, 50 bp, Vibrio parahaemolyticus
  source 1..50: mol_type = genomic DNA
tttgtgatgagtgttcgattaccatctgcatactgaacactgatactttt

SEQ ID NO: 8438 - DNA, 40 bp, Vibrio parahaemolyticus; identical to SEQ ID NO: 7098
  source 1..40: mol_type = genomic DNA

SEQ ID NO: 8439 - DNA, 40 bp, Vibrio parahaemolyticus
  source 1..40: mol_type = genomic DNA
gaaataaccaaaagagccggaagtccaatggatgtcttgc

SEQ ID NO: 8440 - DNA, 50 bp, Vibrio parahaemolyticus
  source 1..50: mol_type = genomic DNA
gttgtgatgtactttcgattataagatgaatcttgatttcagagagtttt

SEQ ID NO: 8441 - protein, 634 aa, Vibrio natriegens; identical to SEQ ID NO: 8436

SEQ ID NO: 8442 - DNA, 50 bp, Vibrio natriegens; identical to SEQ ID NO: 8437
  source 1..50: mol_type = genomic DNA

SEQ ID NO: 8443 - DNA, 40 bp, Vibrio natriegens
  source 1..40: mol_type = genomic DNA
gaagtacccgaatgcgccatcggtccagtggatatcctgc

SEQ ID NO: 8444 - DNA, 40 bp, Vibrio natriegens
  source 1..40: mol_type = genomic DNA
gaagtacccgaatgcgccagaggtccagtggatatcctgc

SEQ ID NO: 8445 - DNA, 50 bp, Vibrio natriegens; identical to SEQ ID NO: 8440
  source 1..50: mol_type = genomic DNA

SEQ ID NO: 8446 - protein, 470 aa, Enterococcus faecalis
MKGESELDKKAAIYIRVSTQEQATEGYSIQAQTDRLTKYVEAKDFILYKKYIDAGYSASKLERPAMQELIQDVKSKKVDVVIVYKLDRLSRSQKDTMYLIEDIFRPNDVELISMQESFDTSTAFGSATVGMLSVFAQLERKSISERMITGRVERAKKGFYHTGGQDRPPAGYQFNSDNQLIINEYEAAAIKDLFRLYNDGLGKSSISEYLKKNYPGKNKWLPSSIDRMLKNSLYIGKVKFSGVEYDGIHEPIIDEVTFYKTQKEIARRKQSNTKRYNYVALLGGLCECGICGAKMANRRAVGRKGKVYRYYRCYSKKGSPKHMMKTDGCSSKAQQQFIIDEAVINNLKNIDVEAELKRRSAPQTNTSLISSQIESIDKQINKLIDLFQVDSMPLDVISEKIDKLNKEKQSMEKLLERKNRLDKTELQHRFDILKSFDWDNSSIESKRAVIEMLVQKVIIHDNSIEIILVE

SEQ ID NO: 8447 - DNA, 50 bp, Enterococcus faecalis
  source 1..50: mol_type = genomic DNA
gatgtacaacattgctctttattttcaaatacagattaatgttgtataaa

SEQ ID NO: 8448 - DNA, 40 bp, Enterococcus faecalis; identical to SEQ ID NO: 1388
  source 1..40: mol_type = genomic DNA

SEQ ID NO: 8449 - DNA, 40 bp, Enterococcus faecalis; identical to SEQ ID NO: 1389
  source 1..40: mol_type = genomic DNA

SEQ ID NO: 8450 - DNA, 50 bp, Enterococcus faecalis; identical to SEQ ID NO: 1385
  source 1..50: mol_type = genomic DNA

SEQ ID NO: 8451 - protein, 470 aa, Enterococcus faecalis
MKGESELDKKAAIYIRVSTQEQATEGYSIQAQTDRLTKYVEAKDFILYKKYIDAGYSASKLERPAMQELIQDVQSKKVDVVIVYKLDRLSRSQKDTMYLIEDIFRPNDVELISMQESFDTSTAFGSATVGMLSVFAQLERKSISERMITGRVERAKKGFYHTGGQDRPPAGYQFNSDNHLIINEYEAAAIKDLFRLYNDGLGKSSISEYLKKNYPGKNKWLPSSIDRMLKNSLYIGKVKFSGVEYDGIHEPIIDEVTFYKTQKEIARRKQSNTKRYNYVALLGGLCECGICGAKMANRRAVGRKGKVYRYYRCYSKKGSPKHMMKTDGCSSKAQQQFIIDEAVINNLKNIDVEAELKRRSAPQTNTSLISSQIESIDKQINKLIDLFQVDSMPLDVISEKIDKLNKEKQSMEKLLERKNRLDKTELQHRFDVLKSFDWDNSSIESKRVVIEMLVQKVIIHDNSIEIILVE

SEQ ID NO: 8452 - DNA, 50 bp, Enterococcus faecalis; identical to SEQ ID NO: 8447
  source 1..50: mol_type = genomic DNA

SEQ ID NO: 8453 - DNA, 40 bp, Enterococcus faecalis; identical to SEQ ID NO: 1388
  source 1..40: mol_type = genomic DNA

SEQ ID NO: 8454 - DNA, 40 bp, Enterococcus faecalis; identical to SEQ ID NO: 1389
  source 1..40: mol_type = genomic DNA

SEQ ID NO: 8455 - DNA, 50 bp, Enterococcus faecalis; identical to SEQ ID NO: 1385
  source 1..50: mol_type = genomic DNA

SEQ ID NO: 8456 - protein, 470 aa, Enterococcus faecalis; identical to SEQ ID NO: 5646

SEQ ID NO: 8457 - DNA, 50 bp, Enterococcus faecalis; identical to SEQ ID NO: 8447
  source 1..50: mol_type = genomic DNA

SEQ ID NO: 8458 - DNA, 40 bp, Enterococcus faecalis; identical to SEQ ID NO: 1388
  source 1..40: mol_type = genomic DNA

SEQ ID NO: 8459 - DNA, 40 bp, Enterococcus faecalis; identical to SEQ ID NO: 1389
  source 1..40: mol_type = genomic DNA

SEQ ID NO: 8460 - DNA, 50 bp, Enterococcus faecalis; identical to SEQ ID NO: 1385
  source 1..50: mol_type = genomic DNA

SEQ ID NO: 8461 - protein, 470 aa, Enterococcus faecalis
MKGESELDKKAAIYIRVSTQEQATEGYSIQAQTDRLTKYVEAKDFILYKKYIDAGYSASKLERPAMQELIQDVQSKKVDVVIVYKLDRLSRSQKDTMYLIEDIFRPNDVELISMQESFDTSTAFGSATVGMLSVFAQLERKSISERMITGRVERAKKGFYHTGGQDRPPAGYQFNSDNQLVINEYEAAAIKDLFRLYNDGLGKSSISEYLKKNYPGKNKWLPSSIDRMLKNSLYIGKVKFSGAEYDGIHEPIIDEVTFYKTQKEIARRKQTNTKRYNYVALLGGLCECGICGAKMANRRAVGRKGKVYRYYRCYSKKGSPKHMMKTDGCSSKAQQQFIIDEAVINNLKNIDVEAELKRRSAPQTNTSLISSQIESIDKQINKLIDLFQVDSMPLDVISEKIDKLNKEKQSMEKLLERKNRLDKTELQHRFDILKSFDWDNSSIESKRAVIEMLVQKVIIHDNSIEIILVE

SEQ ID NO: 8462 - DNA, 50 bp, Enterococcus faecalis; identical to SEQ ID NO: 8447
  source 1..50: mol_type = genomic DNA

SEQ ID NO: 8463 - DNA, 40 bp, Enterococcus faecalis; identical to SEQ ID NO: 1388
  source 1..40: mol_type = genomic DNA

SEQ ID NO: 8464 - DNA, 40 bp, Enterococcus faecalis; identical to SEQ ID NO: 1389
  source 1..40: mol_type = genomic DNA

SEQ ID NO: 8465 - DNA, 50 bp, Enterococcus faecalis; identical to SEQ ID NO: 1385
  source 1..50: mol_type = genomic DNA

SEQ ID NO: 8466 - protein, 470 aa, Enterococcus faecalis; identical to SEQ ID NO: 5656

SEQ ID NO: 8467 - DNA, 50 bp, Enterococcus faecalis
  source 1..50: mol_type = genomic DNA
gatgtacaacattgctctttattttcaaatacagattaatattgtataaa

SEQ ID NO: 8468 - DNA, 40 bp, Enterococcus faecalis; identical to SEQ ID NO: 1383
  source 1..40: mol_type = genomic DNA

SEQ ID NO: 8469 - DNA, 40 bp, Enterococcus faecalis; identical to SEQ ID NO: 1384
  source 1..40: mol_type = genomic DNA

SEQ ID NO: 8470 - DNA, 50 bp, Enterococcus faecalis; identical to SEQ ID NO: 1385
  source 1..50: mol_type = genomic DNA

SEQ ID NO: 8471 - protein, 470 aa, Enterococcus faecalis
MKGESELDKKAAIYIRVSTQEQATEGYSIQAQTDRLIKYVEAKDFILYNKYIDAGYSASKLERPAMQELIQDVQSKKVDVVIVYKLDRLSRSQKDTMYLIEDIFRPNDVELISMQESFDTSTAFGSATVGMLSVFAQLERKSISERMITGRVERAKKGFYHTGGQDRPPAGYQFNSDNQLIINEYEAAAIKDLFRLYNDGLGKSSISEYLKKNYPGKNKWLPSSIDRMLKNSLYIGKVKFSGAEYDGIHEPIIDEVTFYKTQKEIARRKQTNTKRYNYVALLGGLCECGICGAKMANRRAVGRKGKVYRYYRCYSKKGSPKHMMKTDGCSSKAQQQFIIDEAVINNLKNIDVEAELKRRSAPQTNTSLISSQIESIDKQINKLIDLFQVDSMPLDVISEKIDKLNKEKQSMEKLLERKNRLDKTELQHRFDVLKSFDWDNSSIESKRVVIEMLVQKVIIHDNSIEIILVE

SEQ ID NO: 8472 - DNA, 50 bp, Enterococcus faecalis; identical to SEQ ID NO: 8447
  source 1..50: mol_type = genomic DNA

SEQ ID NO: 8473 - DNA, 40 bp, Enterococcus faecalis; identical to SEQ ID NO: 1388
  source 1..40: mol_type = genomic DNA

SEQ ID NO: 8474 - DNA, 40 bp, Enterococcus faecalis; identical to SEQ ID NO: 1389
  source 1..40: mol_type = genomic DNA

SEQ ID NO: 8475 - DNA, 50 bp, Enterococcus faecalis; identical to SEQ ID NO: 1385
  source 1..50: mol_type = genomic DNA

SEQ ID NO: 8476 - protein, 470 aa, Enterococcus faecalis
MKGESELDKKAAIYIRVSTQEQATEGYSIQAQTDRLTKYVEAKDFILYKKYIDAGYSASKLERPAMQELIQDVQSKKVDVVIVYKLDRLSRSQKDTMYLIEDIFRPNDVELISMQESFDTSTAFGSATVGMLSVFAQLERKSISERMITGRVERAKKGFYHTGGQDRPPAGYQFNSDNQLVINEYEAAAIKDLFRLYNDGLGKSSISEYLKKNYPGKNKWLPSSIHRMLKNSLYIGKVKFSGAEYDGIHEPIIDEVTFYKTQKEIARRKQTNTKRYNYVALLGGLCECGICGAKMANRRSVGRKGKVYRYYRCYSKKGSPIHMMKIDGCPSKAQQQFIIDEAVINNLKNIDVEAELKKRSAPQTNTSLISSQIESIDKQINKLIDLFQVDSMPLDVISEKIDKLNKEKQSMEKLLERKNKLDKTELQHRFAILKSFDWDNSSIESKRAVIEMLVQKVIIHDNSIEIILVE

SEQ ID NO: 8477 - DNA, 50 bp, Enterococcus faecalis; identical to SEQ ID NO: 8447
  source 1..50: mol_type = genomic DNA

SEQ ID NO: 8478 - DNA, 40 bp, Enterococcus faecalis; identical to SEQ ID NO: 1388
  source 1..40: mol_type = genomic DNA

SEQ ID NO: 8479 - DNA, 40 bp, Enterococcus faecalis; identical to SEQ ID NO: 1389
  source 1..40: mol_type = genomic DNA

SEQ ID NO: 8480 - DNA, 50 bp, Enterococcus faecalis; identical to SEQ ID NO: 1385
  source 1..50: mol_type = genomic DNA

SEQ ID NO: 8481 - protein, 484 aa, Bacillus thuringiensis
MKYAVYVRVSTDRDEQVSSVENQIDVCRYWLDQHGYDWDENSIYFDDGITGTVLLERHAMQLILEKAKKRELQMVLFKSIHRLARDLKDALEIKEILIANGIRLVTIEEGYDSHYEGKNDMKFEMFAMFASQYPKTLSVSISAALSAKVRRGEHTGGRLPFGYSDCEKKYVINEEEAEIVREIYDMYSKGIGYIGIAKILNERGIPSKTGGKWQMSSVQRIIKNPIYKGDYILNQYTTVKISGRKKQIKNPEEKWTIFKKHHPAIVSEEQWELVNKPRSAKKRRPALWNEFRGIMFCAHCGSAMQVVYSAKKKKDGTKEEWRYLKCSRYKRYGSDECVRHAPIQYHEFREFILENLKEKEKQLETEFNLNEESSNAEKKNKLQREIQRIEEKRKKLIDLYMEELIEKEEFLSRRNELEKTIKEKEVQFVSMEDKSEVKRTQDEFRKAFALLDESKNLYEEFKRIIDRIEIFENGDIKIVYRIEM

SEQ ID NO: 8482 - DNA, 50 bp, Bacillus thuringiensis
  source 1..50: mol_type = genomic DNA
tactatctacaattatgcataacaaatgaaatgtataattgtaactagtg

SEQ ID NO: 8483 - DNA, 40 bp, Bacillus thuringiensis
  source 1..40: mol_type = genomic DNA
agttcgcaaccacatctcaaacgcaatgcaaaagctaggg

SEQ ID NO: 8484 - DNA, 40 bp, Bacillus thuringiensis
  source 1..40: mol_type = genomic DNA
agttcgcaaccacatctcaagcgcaatgcaaaagctaggg

SEQ ID NO: 8485 - DNA, 50 bp, Bacillus thuringiensis
  source 1..50: mol_type = genomic DNA
tacaagctacctgcatgcattacaagtgagatgtatgcaggaagttggtg

SEQ ID NO: 8486 - protein, 546 aa, Sellimonas intestinalis
MNQQPEKITALYCRLSQDDALDGESNSITNQKALLSKYAADHGFRNIRFFVDDGFSGTSFQRPGFQEMMRYVEDYSVSAVIVKDLSRLGREYSYMGRLQDFIFPAYDVRFIAINDDVDSAKGENDFAVFKNVFNDYYAKDTSKKIRAVVKMRGEVGEHLASNPPYGYIKDPQDKKKWIVDEEAAKVVQRIFNLCIAGKGPMQIAKILTADKVLTVTAYHARQKGWAMPDNLYQWCAKSVAGILERREYTGCTVNFKTYTKSLKFKKRMENPVENQKVFEDTQPAIIEKVQWERVQELRKNKRRPTKTGRTSIFSGLLYCADCGAKLYFCACNTYKDDSQNHFVCSNYKSNTGSCKIHYIREQVLYRIVLETIQRTLVYVRMFRKDFKLEMLAQDEESRKAELAEKQKALSGAKKRMEDLDRIIQHIYEDNVLGRLSDSRYLKLSRQYEKEQAEIEQLAAVLEREIETQAGQVSDVNKFLKLVDKYLDIPELDAAILNELVSKIVVHSPVRENGRKHVQIDLYFTYVGQIRIPLKIGRESLNESEPA

SEQ ID NO: 8487 - DNA, 50 bp, Sellimonas intestinalis
  source 1..50: mol_type = genomic DNA
ttacttccttatgggacactgtctaaaggcagaggagcataaagaagtat

SEQ ID NO: 8488 - DNA, 40 bp, Sellimonas intestinalis
  source 1..40: mol_type = genomic DNA
taagaaaaacgccctgccaaagcagagcgccttcatcctt

SEQ ID NO: 8489 - DNA, 40 bp, Sellimonas intestinalis
  source 1..40: mol_type = genomic DNA
taagaaaaacgccctgccagcgcagagcgccttcatcctt

SEQ ID NO: 8490 - DNA, 50 bp, Sellimonas intestinalis
  source 1..50: mol_type = genomic DNA
ttactttcagtttttaaactgtctgcagtgacaggaaatcaaagaattat

SEQ ID NO: 8491 - protein, 566 aa, Hydrogeniiclostidium mannosilyticum
MERYNKGNRLLGCLNRKEKQMNQQPEKITALYCRLSQDDALDGESNSITNQKALLSKYAAEHGFRNIQFFVDDGYSGTSFQRPGFQEMMKYVENYSVSTLIVKDLSRLGREYSYMGRLQDFIFPAYDVRFIAINDDVDSAKGENDFAVFKNVFNDYYAKDTSKKIRAVAKMRGEAGEHIASNPPYGYVKDPQDKKKWIVDEEAAKVVRRIFSLCIAGKGPMQIAKILTADKVLTVTTYHARQKGWAMPENLYHWNTNAVLRILERREYTGCTVNFKTYTKSLKFKKRMENPVENQKVFEDTQPAIIEKGQWERVQELRKNKRRLTKTGRTSMFSGLLYCADCGAKLYFCTCNTYKDDSQNHFVCSNYKSNTGSCKIHYIREQVLYRIVLETIQRTLIYVRMFRKDFKLEMLAQDEESRKAELTEKQKALSGAKKRMEDLDKIIQHIYEDNVLGKLSGSRYLKLSRQYEKEQAEIEQLAVVLEREIEAQAGQVSDVNEFLKLVDKYLDIPELDAAILNELVSKIVVHSPVRENRRKHVQIDLYFTYVGQIRIPLKIGRESLNESEPA

SEQ ID NO: 8492 - DNA, 50 bp, Hydrogeniiclostidium mannosilyticum; identical to SEQ ID NO: 8487
  source 1..50: mol_type = genomic DNA

SEQ ID NO: 8493 - DNA, 40 bp, Hydrogeniiclostidium mannosilyticum
  source 1..40: mol_type = genomic DNA
gaatgaaaagcccgggtcaaagtatgcgggcttttttatt

SEQ ID NO: 8494 - DNA, 40 bp, Hydrogeniiclostidium mannosilyticum
  source 1..40: mol_type = genomic DNA
gaatgaaaagcccgggtcagcgtatgcgggcttttttatt

SEQ ID NO: 8495 - DNA, 50 bp, Hydrogeniiclostidium mannosilyticum; identical to SEQ ID NO: 8490
  source 1..50: mol_type = genomic DNA

SEQ ID NO: 8496 - protein, 506 aa, Bacillus mobilis
MYKPFSQADYKPSDKPKALYIRKSKKSQGKTEIETIESHLKRLTDFCKDQGWNNYVIYNDYVAKSTDINRIEYNKMLNACLDGKHDLIVVVEESRLYRTVNEQTNVYEELKGTDIAILSIREGYIFPNDRNQFLTNIIRGAMNQQELENFAYRMNVKVLASAKEGKYVNKLPFGYFKDKDKLTPHPIESKTFRFIVDKVLEGYVIAEIIGQLNQLGYTTKSNKRWKDVGTITRMLANRVYLGESHYYSKMFDEDVIVRDTHPALLTIEEFQKISNMIRSRSRNPQGIRYTKINTVLDRLVLCGICGNRLPIHKSWTNKEGVTSYQVGKCQKVMGEYNEKKCPNKSISLKELLPHFYIAMESYKDSLREEIESVEIDTTSDMKIKVMEQIKDISKRIAEIQTEIQNAKSYLIKGVLSEADYVGLVPPLEKDLKDLNVALEDNERLLASLTDYDRSAVIQNAVDSLINIENESIENQNRVYRLLFEHLELVNTVNEFEIRLKEKDVSN

SEQ ID NO: 8497 - DNA, 50 bp, Bacillus mobilis
  source 1..50: mol_type = genomic DNA
actttatattaagaggttttatctccggataaagtatgttattatgatgt

SEQ ID NO: 8498 - DNA, 40 bp, Bacillus mobilis
  source 1..40: mol_type = genomic DNA
accttgaataacgaagtcaccagataaggcgatgccgtgc

SEQ ID NO: 8499 - DNA, 40 bp, Bacillus mobilis
  source 1..40: mol_type = genomic DNA
accttgaataacgaagtcaatagataaggcgatgccgtgc

SEQ ID NO: 8500 - DNA, 50 bp, Bacillus mobilis
  source 1..50: mol_type = genomic DNA
agtttatatcctttcagtttctctatgaataaagtatgaatatatgatct

SEQ ID NO: 8501 - protein, 544 aa, Peptococcaceae bacterium
MKYYNSVWKVAMYIRISNNDGNNESESVANQREIIKKHIDSFDDGDYIIVDEYIDDGISGTTDEKRTAFQRMLKDIQAGLINCVIVKDLARSFRNYSDQGYYLDEWFPRHNVRFISLYHQSLDTLKDNYNIRNIMIPIQGIINENYCAELSVKIRMAKETQRKRGEYTGNWGPYGYIVDSENRHRLAVDPEAAEIVKTIFSMFLDGKSRSDITRYLNDAKVLCPSEYRKKVLQYNYHTYFAEKSRMPLWSSTTVTRILKNQIYCGDMVQGRQLSKSYKLSKVENIPEAEWVIVKNTHDAIIARETFEQAQAILEKAYSPKKKIKHDGLYSGIIFCGDCGKAMYRSNARQKSCQYYCCNTYRAQSRNACTQHYITEDQLNEVVLKAIQQYVYLICEYERVMVVTDNSFVDKKSCKTEKESIVSKSEEKQRYTSLKRKAYMDWKDGKITRDEYHELKKEYEAIIEGFNDEILEVEDVQKKSELQNDNTLSVIKMFKKYRNITMLTREILLELIQRIEIYEGKINIQFKAKDDLLYLDEQILAVNNI

SEQ ID NO: 8502 - DNA, 50 bp, Peptococcaceae bacterium
  source 1..50: mol_type = genomic DNA
attcttcttattaaatatgtggcagaggagccatatcagttaagaaaaca

SEQ ID NO: 8503 - DNA, 40 bp, Peptococcaceae bacterium
  source 1..40: mol_type = genomic DNA
ggtagggctgatggggccggaggcctctgtttatgtggcc

SEQ ID NO: 8504 - DNA, 40 bp, Peptococcaceae bacterium
  source 1..40: mol_type = genomic DNA
ggtagggctgatggggccgtaggcctctgtttatgtggcc

SEQ ID NO: 8505 - DNA, 50 bp, Peptococcaceae bacterium
  source 1..50: mol_type = genomic DNA
attctcattgcatgatatgtggtatagcagcaatacattttgagaaaaaa

SEQ ID NO: 8506 - protein, 546 aa, Brevibacillus laterosporus
MSLKREYLIELGIEHIINYLRRSRQDEERERRTGEDVLKEQKEIMDRILEPLGIPFTQKAEVGSGDKISTRPVFQNVIEELRAKKYQAIAVKEISRMGRGSYTDMGLIYDLIVDNRIFIITPYKTYDPRNSSDLRQIRFELFMSREEFETTRERLFGGRVNNAMAGRWVAGAAPFGFNYNKTTKKLEINEEQAAVVRMIFNYYVNGVPQENGTRRDVSFRALATYFSKKTPIKTPQGKREWTFMQLKQLITNERYIGTMKFRVHQTINGKRVVRPEEEHIIVPNAIPAIIDMETWELAQKKVKDSSHKPRTKMDFSPCELAGLCICNQCGKRMVRQYSTQNYKTKAGTINTYHKEFLWCTTSGCTFVKYRAIEEDLLETLRHFHDMEDDLLKEEISTKLTEDKETNNADLIEDLTGYFEQRTKELKNRLSFIYDKYENGIYTDEMFLERKAEIDREMEKLKDIKENQSTENNEQKFDPQIVKKNIGSILEAYKTNTNKTQRNKILRSVFDHAYITIIEKGRGRKPAKHVIYPVLKHNILQDDFLVP

SEQ ID NO: 8507 - DNA, 50 bp, Brevibacillus laterosporus
  source 1..50: mol_type = genomic DNA
tagtaccatgagataataaccgattcatcaattataacctcatataccta

SEQ ID NO: 8508 - DNA, 40 bp, Brevibacillus laterosporus
  source 1..40: mol_type = genomic DNA
tgtgtgagcaattatcagctcatctgctgaaatcagagca

SEQ ID NO: 8509 - DNA, 40 bp, Brevibacillus laterosporus; identical to SEQ ID NO: 8508
  source 1..40: mol_type = genomic DNA

SEQ ID NO: 8510 - DNA, 50 bp, Brevibacillus laterosporus
  source 1..50: mol_type = genomic DNA
ttgtacaatatcaaaatatcatattcattaattttactgcaatatatcta

SEQ ID NO: 8511 - protein, 557 aa, Pseudomonas syringae
MPKVFSYVRFSSAKQSAGDSKARQIKYAKAFADEYGYELADPNDYLFFDAGRSAYKGKHLDDTGELARFLAFVEDGTIPTGSVLVIESLDRLSRERVRDALPRFLDLLAKGINVYTSIDKRLYTREYNEIDLIISIINMSRAHEESATKGSRVSSAWRNKHRQARESGKPIGKLRPLWLDVTPDGYVLNAERADVVRRMFHLTAEGYGSRVIAAKLNQEGIPAFSAGRKNLSGLWAFSTIRHILESRTVLGEYQPHIFIDGVRTPDGEPIAGFFPAAVTEDEYYLATAARASRRQYQVTKTTQNFNVMAGVLFCQRCDASMHLQASRGRKHFKCANKAKGMCDSGIVTTSRAELVFREVLAKIDSLSLVRTSSGSLTKQLQVVEGQIEELRAKQAEAEASHEEFPSRITARQLQQLESDLERLDSERTVLSQELATDNVLSKEDFFEKLDLISYGGRSAANNLVKRLGVRINVAKWGRLNEAYAVTVNTAPTFVIIHDKDDIAVRALDRASLDKLALHGDIDEETRVRLAAVGDLVKGVATQLSDQLIAQLRSRPSK

SEQ ID NO: 8512 - DNA, 50 bp, Pseudomonas syringae
  source 1..50: mol_type = genomic DNA
aacagtgttttgttgcacgacattaagaaatgctgccacaattacctaca

SEQ ID NO: 8513 - DNA, 40 bp, Pseudomonas syringae
  source 1..40: mol_type = genomic DNA
tggcagcgaacagaaattcaagaaatgctgctcgccttac

SEQ ID NO: 8514 - DNA, 40 bp, Pseudomonas syringae
  source 1..40: mol_type = genomic DNA
tggcagcgaacagaaattcgggaaatgctgctcgccttac

SEQ ID NO: 8515 - DNA, 50 bp, Pseudomonas syringae
  source 1..50: mol_type = genomic DNA
aacaaggtcctagggccacacattgggaaatgctgctctacttgactaca

SEQ ID NO: 8516 - protein, 524 aa, Bacillus subtilis; identical to SEQ ID NO: 656

SEQ ID NO: 8517 - DNA, 50 bp, Bacillus subtilis
  source 1..50: mol_type = genomic DNA
atacttattttaaaaaacgacatacctactgtgttttttaaaataagtat

SEQ ID NO: 8518 - DNA, 40 bp, Bacillus subtilis; identical to SEQ ID NO: 648
  source 1..40: mol_type = genomic DNA

SEQ ID NO: 8519 - DNA, 40 bp, Bacillus subtilis
  source 1..40: mol_type = genomic DNA
tacctcaggctatgcggttattacctttgtcgttgacgca

SEQ ID NO: 8520 - DNA, 50 bp, Bacillus subtilis
  source 1..50: mol_type = genomic DNA
atacttatataattaaatgatataattactgagagtaattgcataattat

SEQ ID NO: 8521 - protein, 524 aa, Bacillus subtilis
MIKNLENIHHVAIYLRISQEKKGENVETLENHRQILIEFCEEHGFTYEEFGEVISGGKSEITQRVALKRLLDNIEKYDAIACFELTRISRNGLISQTVKQYCIDYDKPILTPYQSYDLANSETDRLLFDVGSMISSHEHSTIGKRSKANKMQMSKAGLHVSGNVPFGYKRNNETKKLEIDEEAASTIRYIFQLHSEGYGSFKIRDILNNEGYKSATGKAFNLPSIKRIIRNPAYKGTLIFNNRKKIKRNGKFEYDNVETITVDNAHPAIIPPDVWDKANQDRESRALKSISIREKPAIKSGVTLLKDLIFCGVCGRKMIIRKDTKSSTGYTLKKCEYLLPNGEKCPNCGKKLDAVIARVLTGLTKYADDLSQMEEQLRKNNASDLNEKNQLKLNQIVKAIMEVEQKQKNLIELAMEGLFSHEEIREKKQELVKRMDELKAKREEVINSINSLSVEEEIELIQEKRKLILSLREDMDQEYGNELLKRFIKKIHFTRVIPEDILKRSTRNSERQNYPFNIKFEFFD

SEQ ID NO: 8522 - DNA, 50 bp, Bacillus subtilis; identical to SEQ ID NO: 8517
  source 1..50: mol_type = genomic DNA

SEQ ID NO: 8523 - DNA, 40 bp, Bacillus subtilis; identical to SEQ ID NO: 648
  source 1..40: mol_type = genomic DNA

SEQ ID NO: 8524 - DNA, 40 bp, Bacillus subtilis; identical to SEQ ID NO: 8519
  source 1..40: mol_type = genomic DNA

SEQ ID NO: 8525 - DNA, 50 bp, Bacillus subtilis; identical to SEQ ID NO: 8520
  source 1..50: mol_type = genomic DNA

SEQ ID NO: 8526 - protein, 524 aa, Bacillus subtilis
MIKNLENIHHVAIYLRISQEKKGENVETLENHRQILIEFCEEHGFTYEEFGEVISGGKSEITQRVALKRLLDNIEKYDAIACFELTRISRNGLISQTVKQYCIDYDKPILTPYQSYDLANSETDRLLFDVGSMISSHEHSTIGKRSKANKMQMSKAGLHVSGNVPFGYKRNNETKKLEIDEEAASTIRYIFQLHSEGYGSFKIRDILNNEGYKSATGKAFNLPSIKRIIRNPAYKGTLIFNNRKKIKRNGKFEYDNVETITVDNAHPAIIPPDVWDKANQDRESRALKSINIREKPAIKSGVTLLKDLIFCGVCGRKMIIRKDTKSSTGYTLKKCEYLLPNGEKCPNCGKKLDAVIARVLTGLTKYADDLSQMEEQLRKNNASDLNEKNQLKLNQIVKAIMEVEQKQKNLIELAMEGVFSHEEIREKKQELVKRMDELKAKREEVINSINSLSVEEEIELIQEKRKLILSLREDMDQEYGNELLKRFIKKIHFTRVIPEDILKRSTRNSERQNYPFNIKFEFFD

SEQ ID NO: 8527 - DNA, 50 bp, Bacillus subtilis; identical to SEQ ID NO: 8517
  source 1..50: mol_type = genomic DNA

SEQ ID NO: 8528 - DNA, 40 bp, Bacillus subtilis; identical to SEQ ID NO: 648
  source 1..40: mol_type = genomic DNA

SEQ ID NO: 8529 - DNA, 40 bp, Bacillus subtilis; identical to SEQ ID NO: 8519
  source 1..40: mol_type = genomic DNA

SEQ ID NO: 8530 - DNA, 50 bp, Bacillus subtilis; identical to SEQ ID NO: 8520
  source 1..50: mol_type = genomic DNA

SEQ ID NO: 8531 - protein, 569 aa, Yersinia aleksiciae
MRVSSEQQLSGDGLDRQESMLTRYFDDNASCYDFDPNYELIVDRGVSAFKGHHQRESAGLGGFFKKVRNGEVEKGSVLCVESLDRFSRENPFKCVEYISILDSYQIELHDVDKKLKIGRKYPNSLSFAVMIAERSYEESRLKSVRIQKGWDKRRKMAKEEGQYMIKNCPKWIDVVNDRYVLNENHIVIREIFDLYLSGIGSYTIAVMLNRDNKTIDGMKWNSTKICHVLRNRRCKGEYTSNRVIRNFDDDTVTSTFEILNIYPRIVSDDEFHEVSTRLEKFNYTGRIRHDLKRTVFNSLLKCELCGSALGVSSTSGYTYIKCDNARANGGCTGVLMAYMPFEKAILSHIKDIDISRVINIDSTISNIDILKAEVVELESYIQSFTAGIENLKQQGRLPTFDMLDGKAQAEDRLQDVKKTLAAERDTANVSNLEFSSDIHKLENIIERSRLEVELRKVIKRIAVKANKTYITADISYYNDDNIKHILLIHKKKAIIEAMGEISQQGRWRIYSFLESGVQVFRVESNGDVWTLAAARNKSINEIQKYMTMMVGREPIDFDYYINEDMIEWI

SEQ ID NO: 8532 - DNA, 50 bp, Yersinia aleksiciae
  source 1..50: mol_type = genomic DNA
aatttgtgtaatgttcatggtattttgataccatatactttatacaaact

SEQ ID NO: 8533 - DNA, 40 bp, Yersinia aleksiciae
  source 1..40: mol_type = genomic DNA
ttttatggtgtcgcaatttttaatgccataaaggcgcaat

SEQ ID NO: 8534 - DNA, 40 bp, Yersinia aleksiciae; identical to SEQ ID NO: 8533
  source 1..40: mol_type = genomic DNA

SEQ ID NO: 8535 - DNA, 50 bp, Yersinia aleksiciae
  source 1..50: mol_type = genomic DNA
acatagtgttctcttcatggtattttgatggcatatggcgtataaacaca

SEQ ID NO: 8536 - protein, 576 aa, Yersinia intermedia; identical to SEQ ID NO: 3941

SEQ ID NO: 8537 - DNA, 50 bp, Yersinia intermedia; identical to SEQ ID NO: 3942
  source 1..50: mol_type = genomic DNA

SEQ ID NO: 8538 - DNA, 40 bp, Yersinia intermedia; identical to SEQ ID NO: 5303
  source 1..40: mol_type = genomic DNA

SEQ ID NO: 8539 - DNA, 40 bp, Yersinia intermedia; identical to SEQ ID NO: 5303
  source 1..40: mol_type = genomic DNA

SEQ ID NO: 8540 - DNA, 50 bp, Yersinia intermedia; identical to SEQ ID NO: 8535
  source 1..50: mol_type = genomic DNA

SEQ ID NO: 8541 - protein, 576 aa, Yersinia kristensenii
MKKCYLYVRVSSEQQLSGDGLDRQESMLTRYFDDNASCYDFDPNYELIVDRGVSAFKGHHQRESAGLGGFFKKVRNGEVEKGSVLCVESLDRFSRENPFKCVEYISILDSYQIELHDVDKKLKIGRKYPNSLSFAVMIAERSYEESRLKSVRIQKGWDKRRKMAKEEGQYMIKNCPKWIDVVNDRYVLNENHIVIREIFDLYLSGIGSYTIAVMLNRDNKTIDGMKWNSTKICHVLRNRRCKGEYTSNRVIRNFDDDTVTSTFEILNIYPRIVSDDEFHEVSTRLEKFNYTGRIRHDLKRTVFNSLLKCELCGSALGVSSTSGYTYIKCDNARANGGCTGVLMAYMPFEKAILSHIKDIDISRVINIDSIISNIDILKTEIVELESYIQSFTAGIENLKQQGRLPTFDMLDGKAQAEERLQDVKKTLAVERDTANVSNLEFSSDIHKLENIIERSRLEVELRKVIKRIAVKANKTYITADISYYNDDNIKHILLIHKKKATIEAMGEISQQDRWRTYSFVESGVQVFRVESNGDVWTLSATRNKSINEIQKYMTMMVGREPIDFDYDINEDMIEWI

SEQ ID NO: 8542 - DNA, 50 bp, Yersinia kristensenii; identical to SEQ ID NO: 3942
  source 1..50: mol_type = genomic DNA

SEQ ID NO: 8543 - DNA, 40 bp, Yersinia kristensenii; identical to SEQ ID NO: 843
  source 1..40: mol_type = genomic DNA

SEQ ID NO: 8544 - DNA, 40 bp, Yersinia kristensenii; identical to SEQ ID NO: 843
  source 1..40: mol_type = genomic DNA

SEQ ID NO: 8545 - DNA, 50 bp, Yersinia kristensenii; identical to SEQ ID NO: 8535
  source 1..50: mol_type = genomic DNA

SEQ ID NO: 8546 - protein, 506 aa, Bacillus mycoides
MYKPFSQADYKPSDKPKALYIRKSKKSQGKSEIETIESHLKRLTDFCKDQGWNNYVIYNDYVAKSTDINRIEYNKMLNACLDGKHDLIVVVEESRLYRTVNEQTNVYEELKGTDIAILSIREGYIFPNDRNQFLTNIIRGAMNQQELENFAYRMNVKVLASAKEGKYVNKLPFGYFKDKDKLTPHPIESKTFRFIVDKVLEGYVIAEIIGQLNQLGYTTKSNKKWKDVGTITRMLANRVYLGESHYYSKMFDEDVIKRDTHQPLLTIEEFQKVNTMIRSRSRNPQGVRYTKVNTVLDRLVVCGICGSRLPIHKSWTNKEGITSYQIGKCQKVIGEYNEKKCPNKSISLKELLPHFYNAIESYKDALREEIDSVEIDITNDKKIKVMEQIKDTSKRISEIQEEIQNAKSYLIKGVLTEADYVGLVPPLEKDIKELNVVLEDNERILASLTDYDRTAVIQYTAELLNNIDNESIENQNRVFRVIFEELGLINTVDAFAINLKEKDVSY

SEQ ID NO: 8547 - DNA, 50 bp, Bacillus mycoides
  source 1..50: mol_type = genomic DNA
actttatattaagaggttttatctcctgataaagtgtgttattataatgt

SEQ ID NO: 8548 - DNA, 40 bp, Bacillus mycoides
  source 1..40: mol_type = genomic DNA
accttgaattacgaagtcaccagataaggcgatgccgtgt

SEQ ID NO: 8549 - DNA, 40 bp, Bacillus mycoides
  source 1..40: mol_type = genomic DNA
accttgaattacgaagtcatcagataaggcgatgccgtgt

SEQ ID NO: 8550 - DNA, 50 bp, Bacillus mycoides
  source 1..50: mol_type = genomic DNA
aacatatattggtctgttttattttcttataatgtcttttcttataatgt

SEQ ID NO: 8551 - protein, 576 aa, Aeromonas hydrophila
MAYIKTHIYTRISKTSQQEGCGLDEQLARIEAYIQDKPQQFQGEPQYWQDIGLSAFKNKNIVDGQLGEFIKLVVEGKIGKGHAIVIYSLDRLSRRSGWDDSSIQKIVNAGVDIHDVSANIVLRSDDSFSQILMLLIVSRGNNESQIKSERSTAGWAARLRDTLENGKVFTKKLPFWLSADKNSNYVVIPDQVEIINNIFKEYTNGLSCPMIARKLNEEGVKTSTGSLWRSTTISKLIKDERLMGSFRRAADKSLIPNVFPVVVDEELFTIANRIIQANAAGIKGRPRENNKTREINNIITGFVRCGKCNSKVTTSKNSRGVRYVVCLNRRNHEVCGQKSIRLSELERVVTAYAKQLDMSKIFSYEEVDTSLETKLQSELQGLEVDEKNCIAKIEQRKKEKKTYLALADALTDIQDRIEEVRKELQEVSVNEPLVAIENYNINDLLDPTKKELRMSLRKYLVQVLDKVIFRSIDDNILIEVVYNKDVFRHVLITDSKVSTVLHEISIVKEDGLIKYSTKGFSIIEDEEAGTCTFKGLDSVSVEDYFLLATYMDGVEGKRWIIDCMNDPLNVEAVLEN

SEQ ID NO: 8552 - DNA, 50 bp, Aeromonas hydrophila
  source 1..50: mol_type = genomic DNA
ttgtttgaaacatgtgtcattaccgtggtaatgtaatgcatatcaaacac

SEQ ID NO: 8553 - DNA, 40 bp, Aeromonas hydrophila
  source 1..40: mol_type = genomic DNA
gtggcgcaacgccaataccgtggtgatcggccgggcccag

SEQ ID NO: 8554 - DNA, 40 bp, Aeromonas hydrophila
  source 1..40: mol_type = genomic DNA
gtggcgcaacgccaataccttggtgatcggccgggcccag

SEQ ID NO: 8555 - DNA, 50 bp, Aeromonas hydrophila
  source 1..50: mol_type = genomic DNA
ttgttttaaataagtgtcatgtccttgctaatgttacaattaaaaaacaa

SEQ ID NO: 8556 - protein, 494 aa, Anaerotignum lactatifermentans
MIAIYARQSVEKKDSISIESQIEYAKHEVFSDDFKIYQDSGFSGKNTNRPAFMEMMHDIEAGRIEKVVVYRLDRISRSIVDFADFIDVLENNGISFVSATEKFDTSTPMGRAMLYIIIVFAQLERETIAERVRDNYYARVKKGAWGGGPAAYGFDLVRTTLDGKKATIYQPNADLETVARIFEVYSRPNTSLSDVQKELIRTGSLSSGGVNFDNVKLSSILKNPAYVRADIAVYNYYKARGAILANEPEDFDGVHGCILVGKRDASERKYKDVSNHLLAIGHHKGIVDSTMFLYCQEKLSKNRQIKNTGKGKHSWLTGLVKCGHCGYAFSVRFGQTKEGPTPYFVCSGKYLHKCCDVKQTHRVRDVEAHVQARLIQEVESYHLTREKRENAVIKQNQQKIADIDSKIENLISTLENVSSISAEYINRRIETLHREKQLLIHQYSEALAEFNTAEVIPFTADDWENMSFEDRRDIAHNMIDRVVLTEDGIDIRFK

SEQ ID NO: 8557 - DNA, 50 bp, Anaerotignum lactatifermentans
  source 1..50: mol_type = genomic DNA
tcttttctttttgtttcctatgtatccacacatgaaacaaaaatacttat

SEQ ID NO: 8558 - DNA, 40 bp, Anaerotignum lactatifermentans
  source 1..40: mol_type = genomic DNA
ttctttccagtctagactatccacatcccactggatagaa

SEQ ID NO: 8559 - DNA, 40 bp, Anaerotignum lactatifermentans
  source 1..40: mol_type = genomic DNA
ttctttccagtctagactatgcacatcccactggatagaa

SEQ ID NO: 8560 - DNA, 50 bp, Anaerotignum lactatifermentans
  source 1..50: mol_type = genomic DNA
tcatttctctttctctcctatgcatgcacacatggaggtacacatcttat

SEQ ID NO: 8561 - protein, 491 aa, Brevibacillus centrosporus
MAIKKVAIYCRKSREADDKTTASIDGQANSLIELCEKRGYVYDLYSETGSSQEWDRPEFQKLLSKIKHYEYDAIVCTEQSRLTRNTKHYEEVKEIMIKTGCVLVTPTSITDYSNEDQMFSGDIIALIEKREWQTTRKRLMRGSRESAKKGNWMGKKVPFGYRYNRDTKNLEIVPEEAQIIVRMFNEYVSGKSTTTIAYDFTNEGITNMQWSSSSVARMIANVVYAGHSSYGRTKQYKQDGKRVTERTSTEDQILIMNAHEPVIPQDLFDMAQRIRNERNSRPAALKVGKHTFSGLVRCGVCGNIHSFQNANGKKRITSCRTRTYKEDGTYTTCTNGGAYVDDFRTLFHEYFAQYVDQLEQYVHLMSDDEIQNFDEEIKRKEKQIEKLNKDIKRVQQGFVMEIFTPDEARKQIASFKEQIASLEEQIEEMTTENNMSEHDKVSARLENMRRFLIHGDNIPENEANDILREFIDTIIYTKDGNEINLKIIMKQ

SEQ ID NO: 8562 - DNA, 50 bp, Brevibacillus centrosporus
  source 1..50: mol_type = genomic DNA
tattgcatttagaaaatggtctataaacaaacggatgcttaattgcaaca

SEQ ID NO: 8563 - DNA, 40 bp, Brevibacillus centrosporus
  source 1..40: mol_type = genomic DNA
gatcgcgaccatggtgtataaattgaccaaggacgcaaca

SEQ ID NO: 8564 - DNA, 40 bp, Brevibacillus centrosporus; identical to SEQ ID NO: 8563
  source 1..40: mol_type = genomic DNA

SEQ ID NO: 8565 - DNA, 50 bp, Brevibacillus centrosporus
  source 1..50: mol_type = genomic DNA
aatagtcttcaataaatggtctataaacaaatggatattcacatgcaaaa

SEQ ID NO: 8566 - protein, 499 aa, Salmonella enterica
MKQNGKAYSYIRFSSKKQEQGDSVRRQIALAEHYAHANNLILSDKNFQDLGISAFKEGNRPSLGDMLEAIEQGQIEQGSTIIIESLDRLSRRGIDVTQQIIKSILQKNVFIASLVDGLLLNRDSVNDLVSVIRIALAADLAYKESEKKSKRLRETKGQQRQRALKGEVINKILPFWLERKQNKYIFSNRLATVKRIIELRQKGLGTNKIAKILNEEGHKPLRSKGWNHTTIGKTINSVALYGAYQTSETTQDRKVILLDIVENYYPAVISKEEFMLLQSDHKQNKPGYKSEHNAFAGLLKHECGGALVRKFHVASGKTYQYHVCANARDGKCNVTKNFKNIEVALYQIMKELKLEKKTSFDKTLLEERNSVKTKIQELNNMLLELPKVPLSVLQTINNLEEKLQELEEKIKHQDNIIASEKTFNINTLRETKDPQQLNMMLKRVIENIIVFNIGKRWRIKILYRNKHSQSFIWDGSNITFVSDTKKLLELVKHTPEESK

SEQ ID NO: 8567 - DNA, 50 bp, Salmonella enterica
  source 1..50: mol_type = genomic DNA
tcttgttcactttgaaactatattgtgatattgttgcaaagaagcaaaat

SEQ ID NO: 8568 - DNA, 40 bp, Salmonella enterica; identical to SEQ ID NO: 6353
  source 1..40: mol_type = genomic DNA

SEQ ID NO: 8569 - DNA, 40 bp, Salmonella enterica
  source 1..40: mol_type = genomic DNA
cttactgccgaactgcatgtcaacgttgctggaaactaac

SEQ ID NO: 8570 - DNA, 50 bp, Salmonella enterica; identical to SEQ ID NO: 1420
  source 1..50: mol_type = genomic DNA

SEQ ID NO: 8571 - protein, 499 aa, Escherichia coli; identical to SEQ ID NO: 8566

SEQ ID NO: 8572 - DNA, 50 bp, Escherichia coli; identical to SEQ ID NO: 8567
  source 1..50: mol_type = genomic DNA

SEQ ID NO: 8573 - DNA, 40 bp, Escherichia coli; identical to SEQ ID NO: 4473
  source 1..40: mol_type = genomic DNA

SEQ ID NO: 8574 - DNA, 40 bp, Escherichia coli
  source 1..40: mol_type = genomic DNA
cttactgccgaactgcatgtcgacgttactggaaactaac

SEQ ID NO: 8575 - DNA, 50 bp, Escherichia coli; identical to SEQ ID NO: 1420
  source 1..50: mol_type = genomic DNA

SEQ ID NO: 8576 - protein, 460 aa, Escherichia coli
MILSDKNFQDLGISAFKEGNRPSLGDMLEAIEQGQIEQGSTIIIESLDRLSRRGIDVTQQIIKSILQKNVFIASLVDGLLLNRDSVNDLVSVIRIALAADLAYKESEKKSKRLRETKGQQRQRALKGEVINKILPFWLERKQNKYIFSNRLATVKRIIELRQKGLGTNKIAKILNEEGHKPLRSKGWNHTTIGKTINSVALYGAYQTSETTQDRKVILLDIVENYYPAVISKEEFMLLQSDHKQNKPGYKSEHNAFAGLLKHECGGALVRKFHVASGKTYQYHVCANARDGKCNVTKNFKNIEVALYQIMKELKLEKKTSFDKTLLEERNSVKTKIQELNNMLLELPKVPLSVLQTINNLEEKLQELEEKIKHQDNIIASEKTFNINTLRETKDPQQLNMMLKRVIENIIVFNIGKRWRIKILYRNKHSQSFIWDGSNITFVSDTKKLLELVKHTPEESK

SEQ ID NO: 8577 - DNA, 50 bp, Escherichia coli; identical to SEQ ID NO: 8567
  source 1..50: mol_type = genomic DNA

SEQ ID NO: 8578 - DNA, 40 bp, Escherichia coli; identical to SEQ ID NO: 4473
  source 1..40: mol_type = genomic DNA

SEQ ID NO: 8579 - DNA, 40 bp, Escherichia coli; identical to SEQ ID NO: 8574
  source 1..40: mol_type = genomic DNA

SEQ ID NO: 8580 - DNA, 50 bp, Escherichia coli; identical to SEQ ID NO: 1420
  source 1..50: mol_type = genomic DNA

SEQ ID NO: 8581 - protein, 499 aa, Escherichia coli
MKQNGKAYSYIRFSSKKQEQGDSVRRQIALAEHYAHANNLILSDKNFQDLGISAFKEGNRPSLGDMLEAIEQGQIEQGSTIIIESLDRLSRRGIDVTQQIIKSILQKNVFIASLVDGLLLNRDSVNDLVSVIRIALAADLAYKESEKKSKRLRETKGQQRQRALKGEVINKILPFWLERKQNKYIFSNRLATVKRIIELRQKGLGTNKIAKILNEEGHKPLRSKGWNHTTIGKTINSVALYGAYQTSETTQDRKVILLDIVENYYPAVISKEEFMLLQSDHKQNKPGYKSEHNAFAGLLKHECGGALVRKFHVASGKTYQYHVCANARDGKCNVTKNFKNIEVALYQIMKELKLEKKTSFDKTLLEERNSVKTKIQELNNMLLELPKVPLSVLQTINNLEEKLQELEEKIKHQDNIIASEKTFNINTLREIKDPQQLNMMLKRVIENIIVFNIGKRWRIKILYRNKHSQSFIWDGSNITFVSDTKKLLELVKHTPEESK

SEQ ID NO: 8582 - DNA, 50 bp, Escherichia coli; identical to SEQ ID NO: 8567
  source 1..50: mol_type = genomic DNA

SEQ ID NO: 8583 - DNA, 40 bp, Escherichia coli; identical to SEQ ID NO: 4473
  source 1..40: mol_type = genomic DNA

SEQ ID NO: 8584 - DNA, 40 bp, Escherichia coli; identical to SEQ ID NO: 8574
  source 1..40: mol_type = genomic DNA

SEQ ID NO: 8585 - DNA, 50 bp, Escherichia coli; identical to SEQ ID NO: 1420
  source 1..50: mol_type = genomic DNA

SEQ ID NO: 8586 - protein, 499 aa, Escherichia coli
MKQNGKAYSYIRFSSKKQEQGDSVRRQIALAEHYAHANNLILSDKNFQDLGISAFKEGNRPSLGDMLEAIEQGQIEQGSTIIIESLDRLSRRGIDVTQQIIKSILQKNVFIASLVDGLLLNRDSVNDLVSVIRIALAADLAYKESEKKSKRLRETKGQQRQRALKGEVINKILPFWLERKQNKYIFSNRLATVKRIIELRQKGLGTNKIAKILNEEGHKPLRSKGWNHTTIGKTINSVALYGAYQTSETTQDRKVILLDIVENYYPAVISKEEFMLLQSDHKQNKPGYKSEHNAFAGLLKHECGGALVRKFHVASGKTYQYHVCANARDGKCNVTKNFKNIEVALYQIMKELKLEKKTSFDKTLLEERNSVKTKIQELNNMLLELPKVPLSVLQTINNLEEKLQELEEKIKHQDNIIASEKTFNINTLREIKDPQQLNMMLKRVIENIIIFNIGKRWRIKILYRNKHSQSFIWDGSNITFVSDTKKLLELVKHTPEESK

SEQ ID NO: 8587 - DNA, 50 bp, Escherichia coli; identical to SEQ ID NO: 8567
  source 1..50: mol_type = genomic DNA

SEQ ID NO: 8588 - DNA, 40 bp, Escherichia coli; identical to SEQ ID NO: 4473
  source 1..40: mol_type = genomic DNA

SEQ ID NO: 8589 - DNA, 40 bp, Escherichia coli; identical to SEQ ID NO: 8574
  source 1..40: mol_type = genomic DNA

SEQ ID NO: 8590 - DNA, 50 bp, Escherichia coli; identical to SEQ ID NO: 1420
  source 1..50: mol_type = genomic DNA

SEQ ID NO: 8591 - protein, 499 aa, Escherichia coli
MKQNGKAYSYIRFSSKKQEQGDSVRRQIALAEHYAHANNLILSDKNFQDLGISAFKEGNRPSLGDMLEAIEQGQIEQGSTIIIESLDRLSRRGIDVTQQIIKSILQKNVFIASLVDGLLLNRDSVNDLVSVIRIALAADLAYKESEKKSKRLRETKGQQRQRALKGEVINKILPFWLERKQNKYIFSNRLATVKRIIELRQKGLGTNKIAKILNEEGHKPLRSKGWNHTTIGKTINSVALYGAYQTSETTQDRKVILLDIVENYYPAVISKEEFMLLQSDHKQNKPGYKSEHNAFAGLLKHECGGALVRKFHVASGKTYQYHVCANARDGKCNVTKNFKNIEVALYQIMKELKLEKKTSFDKTLLEERNSVKTKIQELNNMLLELPKVPLSVLQTINNLEEKLQELEEKIKHQDNIIASEKTFNINTLRETKDPQQLNMMLKRVIENIIVFNIEKRWRIKILYRNKHSQSFIWDGSNITFVSDTKKLLELVKHTPEESK

SEQ ID NO: 8592 - DNA, 50 bp, Escherichia coli; identical to SEQ ID NO: 8567
  source 1..50: mol_type = genomic DNA

SEQ ID NO: 8593 - DNA, 40 bp, Escherichia coli; identical to SEQ ID NO: 4473
  source 1..40: mol_type = genomic DNA

SEQ ID NO: 8594 - DNA, 40 bp, Escherichia coli; identical to SEQ ID NO: 8574
  source 1..40: mol_type = genomic DNA

SEQ ID NO: 8595 - DNA, 50 bp, Escherichia coli; identical to SEQ ID NO: 1420
  source 1..50: mol_type = genomic DNA

SEQ ID NO: 8596 - protein, 499 aa, Escherichia coli
MKQNGKAYSYIRFSSKKQEQGDSVRRQIALAEHYAHANNLILSDKNFQDLGISAFKEGNRPSLGDMLEAIEQGQIEQGSTIIIESLDRLSRRGIDVTQQIIKSILQKNVFIASLVDGLLLNRDSVNDLVSVIRIALAADLAYKESEKKSKRLRETKGQQRQRALKGEVINKILPFWLERKQNKYIFSNRLATVKRIIELRQKGLGTNKIAKILNEEGHKPLRSKGWNHTTIGKTINSVALYGAYQTSETTQDRKVILLDIVENYYPAVISKEEFMLLQSDHKQNKPGYKSEHNAFAGLLKHECGGALVRKFHVASGKTYQYHVCANARDGKCNVTKNFKNIEVALYQIMKELKLEKKTSFDKTLLEERNSAKTKIQELNNMLLELPKVPLSVLQTINNLEEKLQELEEKIKHQDNIIASEKTFNINTLRETKDPQQLNMMLKRVIENIIVFNIEKRWRIKILYRNKHSQSFIWDGSNITFVSDTKKLLELVKHTPEESK

SEQ ID NO: 8597 - DNA, 50 bp, Escherichia coli; identical to SEQ ID NO: 8567
  source 1..50: mol_type = genomic DNA

SEQ ID NO: 8598 - DNA, 40 bp, Escherichia coli; identical to SEQ ID NO: 4473
  source 1..40: mol_type = genomic DNA

SEQ ID NO: 8599 - DNA, 40 bp, Escherichia coli; identical to SEQ ID NO: 8574
  source 1..40: mol_type = genomic DNA

SEQ ID NO: 8600 - DNA, 50 bp, Escherichia coli; identical to SEQ ID NO: 1420
  source 1..50: mol_type = genomic DNA

SEQ ID NO: 8601 - protein, 499 aa, Escherichia coli
MKQNGKAYSYIRFSSKKQEQGDSVRRQIALAEHYAHANNLILSDKNFQDLGISAFKEGNRPSLGDMLEAIEQGQIEQGSTIIIESLDRLSRRGIDVTQQIIKSILQKNVFIASLVDGLLLNRDSVNDLVSVIRIALAADLAYKESEKKSKRLRETKGQQRQRALKGEVINKILPFWLERKQNKYIFSNRLATVKRIIELRQKGLGTNKIAKILNEEGHKPLRSKGWNHTTIGKTINSVALYGAYQTSETTQDRKVILLDIVENYYPAVISKEEFMLLQSDHKQNKPGYKSEHNAFAGLLKHECGGALVRKFHVASGKTYQYHVCANARDGKCNVTKNFKNIEVALYQIMKELKLEKKTSFDKTLLEERNSVKTKIQELNNMLLELPKVPLSVLQTINNLEEKLQELEEKIKHQDNIIASEKTFNINALRETKDPQQLNMMLKRVIENIIVFNIGKRWRIKILYRNKHSQSFIWDGSNITFVSDTKKLLELVKHTPEESK

SEQ ID NO: 8602 - DNA, 50 bp, Escherichia coli; identical to SEQ ID NO: 8567
  source 1..50: mol_type = genomic DNA

SEQ ID NO: 8603 - DNA, 40 bp, Escherichia coli; identical to SEQ ID NO: 4473
  source 1..40: mol_type = genomic DNA

SEQ ID NO: 8604 - DNA, 40 bp, Escherichia coli; identical to SEQ ID NO: 8574
  source 1..40: mol_type = genomic DNA

SEQ ID NO: 8605 - DNA, 50 bp, Escherichia coli; identical to SEQ ID NO: 1420
  source 1..50: mol_type = genomic DNA

SEQ ID NO: 8606 - protein, 460 aa, Escherichia coli
MILSDKNFQDLGISAFKEGNRPSLGDMLEAIEQGQIEQGSTIIIESLDRLSRRGIDVTQQIIKSILQKNVFIASLVDGLLLNRDSVNDLVSVIRIALAADLAYKESEKKSKRLRETKGQQRQRALKGEVINKILPFWLERKQNKYIFSNRLATVKRIIELRQKGLGTNKIAKILNEEGHKPLRSKGWNHTTIGKTINSVALYGAYQTSETTQDRKVILLDIVENYYPAVISKEEFMLLQSDHKQNKPGYKSEHNAFAGLLKHECGGALVRKFHVASGKTYQYHVCANARDGKCNVTKNFKNIEVALYQIMKELKLEKKTSFDKTLLEERNSVKTKIQELNNMLLELPKVPLSVLQTINNLEEKLQELEEKIKHQDNIIASEKTFNINTLRETKDPQQLNMMLKRVIENIIVFNIGKRWRIKISYRNKHSQSFIWDGSNITFVSDTKKLLELVKHTPEESK

SEQ ID NO: 8607 - DNA, 50 bp, Escherichia coli; identical to SEQ ID NO: 8567
  source 1..50: mol_type = genomic DNA

SEQ ID NO: 8608 - DNA, 40 bp, Escherichia coli; identical to SEQ ID NO: 4473
  source 1..40: mol_type = genomic DNA

SEQ ID NO: 8609 - DNA, 40 bp, Escherichia coli; identical to SEQ ID NO: 8574
  source 1..40: mol_type = genomic DNA

SEQ ID NO: 8610 - DNA, 50 bp, Escherichia coli; identical to SEQ ID NO: 1420
  source 1..50: mol_type = genomic DNA

SEQ ID NO: 8611 - protein, 499 aa, Escherichia coli
MKQNGKAYSYIRFSSKKQEQGDSVRRQIALAEHYAHANNLILSDKNFQDLGISAFKEGNRPSLGDMLEAIEQGQIEQGSTIIIESLDRLSRRGIDVTQQIIKSILQKNVFIASLVDGLLLNRDSVNDLVSVIRIALAADLAYKESEKKSKRLRETKGQQRQRALKGEVINKILPFWLERKQNKYIFSNRLATVKRIIELRQKGLGTNKIAKILNEEGHKPLRSKGWNHTTIGKTINSVALYGAYQTSETTQDRKVILLDIVENYYPAVISKEEFMLLQSDHKQNKPGYKSEHNAFAGLLKHECGGALVRKFHVASGKTYQYHVCANARDGKCNVTKNFKNIEVALYQIMKELKLEKKTSFDKTLLEERNSVKTKIQELNNMLLELPKVPLSVLQTINNLEEKSQELEEKIKHQDNIIASEKTFNINTLRETKDPQQLNMMLKRVIENIIVFNIGKRWRIKILYRNKHSQSFIWDGSNITFVSDTKKLLELVKHTPEESK

SEQ ID NO: 8612 - DNA, 50 bp, Escherichia coli; identical to SEQ ID NO: 8567
  source 1..50: mol_type = genomic DNA

SEQ ID NO: 8613 - DNA, 40 bp, Escherichia coli; identical to SEQ ID NO: 4473
  source 1..40: mol_type = genomic DNA

SEQ ID NO: 8614 - DNA, 40 bp, Escherichia coli; identical to SEQ ID NO: 8574
  source 1..40: mol_type = genomic DNA

SEQ ID NO: 8615 - DNA, 50 bp, Escherichia coli; identical to SEQ ID NO: 1420
  source 1..50: mol_type = genomic DNA

SEQ ID NO: 8616 - protein, 460 aa, Escherichia coli
MILSDKNFQDLGISAFKEGNRPSLGDMLEAIEQGQIEQGSTIIIESLDRLSRRGIDVTQQIIKSILQKNVFIASLVDGLLLNRDSVNDLVSVIRIALAADLAYKESEKKSNRLRETKGQQRQRALKGEVINKILPFWLERKQNKYIFSNRLATVKRIIELRQKGLGTNKIAKILNEEGHKPLRSKGWNHTTIGKTINSVALYGAYQTSETTQDRKVILLDIVENYYPAVISKEEFMLLQSDHKQNKPGYKSEHNAFAGLLKHECGGALVRKFHVASGKTYQYHVCANARDGKCNVTKNFKNIEVALYQIMKELKLEKKTSFDKTLLEERNSVKTKIQELNNMLLELPKVPLSVLQTINNLEEKLQELEEKIKHQDNIIASEKTFNINTLRETKDPQQLNMMLKRVIENIIVFNIGKRWRIKISYRNKHSQSFIWDGSNITFVSDTKKLLELVKHTPEESK

SEQ ID NO: 8617 - DNA, 50 bp, Escherichia coli; identical to SEQ ID NO: 8567
  source 1..50: mol_type = genomic DNA

SEQ ID NO: 8618 - DNA, 40 bp, Escherichia coli; identical to SEQ ID NO: 4473
  source 1..40: mol_type = genomic DNA

SEQ ID NO: 8619 - DNA, 40 bp, Escherichia coli; identical to SEQ ID NO: 8574
  source 1..40: mol_type = genomic DNA

SEQ ID NO: 8620 - DNA, 50 bp, Escherichia coli; identical to SEQ ID NO: 1420
  source 1..50: mol_type = genomic DNA

SEQ ID NO: 8621 - protein, 460 aa, Escherichia coli
MILSDKNFQDLGISAFKEGNRPSLGDMLEAIEQGQIEQGSTIIIESLDRLSRRGIDVTQQIIKSILQKNVFIASLVDGLLLNRDSVNDLVSVIRIALAADLAYKESEKKSKRLRETKGQQRQRALKGEVINKILPFWLERKQNKYIFSNRLATVKRIIELRQKGLGTNKIAKILNEEGHKPLRSKGWNHTTIGKTINSVALYGAYQTSETTQDRKVILLDIVENYYPAVISKEEFMLLQSDHKQNKPGYKSEHNAFAGLLKHECGGALVRKFHVASGKTYQYHVCANARDGKCNVTKNFKNIEVALYQIMKELKLEKKNSFDKTLLEERNSVKTKIQELNNMLLELPKVPLSVLQTINNLEEKLQELEEKIKHQDNIIASEKTFNINTLRETKDPQQLNMMLKRVIENIIVFNIGKRWRIKISYRNKHSQSFIWDGSNITFVSDTKKLLELVKHTPEESK

SEQ ID NO: 8622 - DNA, 50 bp, Escherichia coli; identical to SEQ ID NO: 8567
  source 1..50: mol_type = genomic DNA

SEQ ID NO: 8623 - DNA, 40 bp, Escherichia coli; identical to SEQ ID NO: 4473
  source 1..40: mol_type = genomic DNA

SEQ ID NO: 8624 - DNA, 40 bp, Escherichia coli; identical to SEQ ID NO: 8574
  source 1..40: mol_type = genomic DNA

SEQ ID NO: 8625 - DNA, 50 bp, Escherichia coli; identical to SEQ ID NO: 1420
  source 1..50: mol_type = genomic DNA

SEQ ID NO: 8626 - protein, 460 aa, Escherichia coli
MILSDKNFQDLGISAFKEGNRPSLGDMLEAIEQGQIEQGSTIIIESLDRLSRRGIDVTQQIIKSILQKNVFIASLVDGLLLNRDSVNDLVSVIRIALAADLAYKESEKKSKRLRETKGQQRQRALKGEVINKILPFWLERKQNKYIFSNRLATVKRIIELRQKGLGTNKIAKILNEEGHKPLRSKGWNHTTIGKTINSVALYGAYQTSETTQDRKVILLDIVENYYPAVISKEEFMLLQSDHKQNKPGYKSEHNAFAGLLKHECGGALVRKFHVASGKTYQYHVCANARDGKCNVTKNFKNIEVALYQIMKELKLEKKTSFDKTLLEERNSVKTKIQELNNMLLELPKVPLSVLQTINNLEEKLQELEEKIKHQDNIIASKKTFNINTLRETKDPQQLNMMLKRVIENIIVFNIVKRWRIKILYRNKHSQSFIWDGSNITFVSDTKKLLELVKHTPEESK

SEQ ID NO: 8627 - DNA, 50 bp, Escherichia coli; identical to SEQ ID NO: 8567
  source 1..50: mol_type = genomic DNA

SEQ ID NO: 8628 - DNA, 40 bp, Escherichia coli; identical to SEQ ID NO: 4473
  source 1..40: mol_type = genomic DNA

SEQ ID NO: 8629 - DNA, 40 bp, Escherichia coli; identical to SEQ ID NO: 8574
  source 1..40: mol_type = genomic DNA

SEQ ID NO: 8630 - DNA, 50 bp, Escherichia coli; identical to SEQ ID NO: 1420
  source 1..50: mol_type = genomic DNA

SEQ ID NO: 8631 - protein, 499 aa, Escherichia coli
MKQNGKAYSYIRFSSKKQEQGDSVRRQIALAEHYAHANNLILSDKNFQDLGISAFKEGNRPSLGDMLEAIEQGQIEQGSTIIIESLDRLSRRGIDVTQQIIKSILQKNVFIASLVDGLLLNRDSVNDLVSVIRIALAADLAYKESEKKSKRLRETKGQQRQRALKGEVINKILPFWLERKQNKYIFSNRLATVKRIIELRQKGLGTNKIAKILNEEGHKPLRSKGWNHTTIGKTINSVALYGAYQTSETTQDRKVILLDIVENYYPAVISKEEFMLLQSDHKQNKPGYKSEHNAFAGLLKHECGGALVRKFHVASGKTYQYHVCANARDGKCNVTKNFKNIEVALYQIMKELKLEKKTSFDKTLLEERNSVKTKIQELNNMLLELPKVPLSVLQTINNLEEKLQELEEKIKHQDNIIASEKTFNINTLREIKNPQQLNMMLKRVIENIIVFNIGKRWRIKILYRNKHSQSFIWDGSNITFVSDTKKLLELVKHTPEESK

SEQ ID NO: 8632 - DNA, 50 bp, Escherichia coli; identical to SEQ ID NO: 8567
  source 1..50: mol_type = genomic DNA

SEQ ID NO: 8633 - DNA, 40 bp, Escherichia coli; identical to SEQ ID NO: 4473
  source 1..40: mol_type = genomic DNA

SEQ ID NO: 8634 - DNA, 40 bp, Escherichia coli; identical to SEQ ID NO: 8574
  source 1..40: mol_type = genomic DNA

SEQ ID NO: 8635 - DNA, 50 bp, Escherichia coli; identical to SEQ ID NO: 1420
  source 1..50: mol_type = genomic DNA

SEQ ID NO: 8636 - protein, 499 aa, Escherichia coli
MKQNGKAYSYIRFSSKKQEQGDSVRRQIALAEHYAHANNLILSDKNFQDLGISAFKEGNRPSLGDMLEAIEQGQIEQGSTIIIESLDRLSRRGIDVTQQIIKSILQKNVFIASLVDGLLLNRDSVNDLVSVIRIALAADLAYKESEKKSKRLRETKGQQRQRALKGEVINKILPFWLERKQNKYIFSNRLATVKRIIELRQKGLGTNKIAKILNEEGHKPLRSKGWNHTTIGKTINSVALYGAYQTSETTQDRKVILLDIVENYYPAVISKEEFMLLQSDHKQNKPGYKSEHNAFAGLLKHECGGALVRKFHVASGKTYQYHVCANARDGKCNVTKNFKNIEVALYQIMKELKLEKKTSFDKTLLEEHNSVKTKIQELNNMLLELPKVPLSVLQTINNLEEKLQELEEKIKHQDNIIASEKTFNINTLRETKDPQQLNMMLKRVIENIIVFNIGKRWRIKILYRNKHSQSFIWDGSNITFVSDTKKLLELVKHTPEESK

SEQ ID NO: 8637 - DNA, 50 bp, Escherichia coli; identical to SEQ ID NO: 8567
  source 1..50: mol_type = genomic DNA

SEQ ID NO: 8638 - DNA, 40 bp, Escherichia coli; identical to SEQ ID NO: 4473
  source 1..40: mol_type = genomic DNA

SEQ ID NO: 8639 - DNA, 40 bp, Escherichia coli; identical to SEQ ID NO: 8574
  source 1..40: mol_type = genomic DNA

SEQ ID NO: 8640 - DNA, 50 bp, Escherichia coli; identical to SEQ ID NO: 1420
  source 1..50: mol_type = genomic DNA

SEQ ID NO: 8641 - protein, 499 aa, Escherichia coli
MKQNGKAYSYIRFSSKKQEQGDSVRRQIALAEHYAHANNLILSDKNFQDLGISAFKEGNRPSLGDMLEAIEQGQIEQGSTIIIESLDRLSRRGIDVTQQIIKSILQKNVFIASLVDGLLLNRDSVNDLVSVIRIALAADLAYKESEKKSKRLRETKGQQRQRALKGEVINKILPFWLERKQNKYIFSNRLATVKRIIELRQKGLGTNKIAKILNEEGHKPLRSKGWNHTTIGKTINSVALYGAYQTSETTQDRKVILLDIVENYYPAVISKEEFMLLQSDHKQNKPGYKSEHNAFAGLLKHECGGALVRKFHVASGKTYQYHVCANARDGKCNVTKNFKNIEVALYQIMKELKLEKKTSFDKTLLEERNSVKTKIQELNNMLLELPKVPLSVLQTINNLEEKLQELEEKIKHQDNIIASEKTFNINTLREIKDPQQLNMMLKRVIENIIVFNIGKRWRIKILYRNKHSQSFIWDGSNITLVSDTKKLLELVKHTPEESK

SEQ ID NO: 8642 - DNA, 50 bp, Escherichia coli; identical to SEQ ID NO: 8567
  source 1..50: mol_type = genomic DNA

SEQ ID NO: 8643 - DNA, 40 bp, Escherichia coli; identical to SEQ ID NO: 4473
  source 1..40: mol_type = genomic DNA

SEQ ID NO: 8644 - DNA, 40 bp, Escherichia coli; identical to SEQ ID NO: 8574
  source 1..40: mol_type = genomic DNA

SEQ ID NO: 8645 - DNA, 50 bp, Escherichia coli; identical to SEQ ID NO: 1420
  source 1..50: mol_type = genomic DNA

SEQ ID NO: 8646 - protein, 499 aa, Escherichia coli
MKQNGKAYSYIRFSSKKQEQGDSVRRQIALAEHYAHANNLILSDKNFQDLGISAFKEGNRPSLGDMLEAIEQGQIEQGSTIIIESLDRLSRRGIDVTQQIIKSILQKNVFIASLVDGLLLNRDSVNDLVSVIRIALAADLAYKESEKKSKRLRETKGQQRQRALKGEVINKILPFWLERKQNKYIFSNRLATVKRIIELRQKGLGTNKIAKILNEEGHKPLRSKGWNHTTIGKTINSVALYGAYQTSETTQDRKVILLDIVENYYPAVISKEEFMLLQSDHKQNKPGYKSEHNAFAGLLKHECGGALVRKFHVASGKTYQYHVCANARDGKCNVTKNFKNIEVALYQIMKELKLEKKTSFDKTLLEERNSVKTKIQELNNMLLELPKVPLSVLQTINNLEEKLQELEEKIKHQDNIIASEKTFNINTLRETKDPQQLNMMLKRVIENIIIFNIGKRWRIKILYRNKHSQSFIWDGSNITFVSDTKKLLELVKHTPEESK

SEQ ID NO: 8647 - DNA, 50 bp, Escherichia coli; identical to SEQ ID NO: 8567
  source 1..50: mol_type = genomic DNA

SEQ ID NO: 8648 - DNA, 40 bp, Escherichia coli; identical to SEQ ID NO: 4473
  source 1..40: mol_type = genomic DNA

SEQ ID NO: 8649 - DNA, 40 bp, Escherichia coli; identical to SEQ ID NO: 8574
  source 1..40: mol_type = genomic DNA

SEQ ID NO: 8650 - DNA, 50 bp, Escherichia coli; identical to SEQ ID NO: 1420
  source 1..50: mol_type = genomic DNA

SEQ ID NO: 8651 - protein, 499 aa, Escherichia coli
MKQNGKAYSYIRFSSKKQEQGDSVRRQIALAEHYAHANNLILSDKNFQDLGISAFKEGNRPSLGDMLEAIEQGQIEQGSTIIIESLDRLSRRGIDVTQQIIKSILQKNVFIASLVDGLLLNRDSVNDLVSVIRIALAADLAYKESEKKSKRLRETKGQQRQRALKGEVINKILPFWLERKQNKYIFSNRLATVKRIIELRQKGLGTNKIAKILNEEGHKPLRSKGWNHTTIGKTINSVALYGAYQTSETTQDRKVILLDIVENYYPAVISKEEFMLLQSDHKQNKPGYKSEHNAFAGLLKHECGGALVRKFHVASGKTYQYHVCANARDGKCNVTKNFKNIEVALYQIMKELKLEKKTSFDKTLLEERNSVKTKIQELNNMLLELPKVPLSVLQTINNLEEKLQELEEKIKHQDNIIASEKTFNINTLRETKDPQQLNMMLKRVIENIIVFNIGKRWRIKILYRNKHSQSFIWDGSNITFVSDTKKLLELVKHMPEESK

SEQ ID NO: 8652 - DNA, 50 bp, Escherichia coli; identical to SEQ ID NO: 8567
  source 1..50: mol_type = genomic DNA

SEQ ID NO: 8653 - DNA, 40 bp, Escherichia coli; identical to SEQ ID NO: 4473
  source 1..40: mol_type = genomic DNA

SEQ ID NO: 8654 - DNA, 40 bp, Escherichia coli; identical to SEQ ID NO: 8574
  source 1..40: mol_type = genomic DNA

SEQ ID NO: 8655 - DNA, 50 bp, Escherichia coli; identical to SEQ ID NO: 1420
  source 1..50: mol_type = genomic DNA

SEQ ID NO: 8656 - protein, 435 aa, Escherichia coli
MKQNGKAYSYIRFSSKKQEQGDSVRRQIALAEHYAHANNLILSDKNFQDLGISAFKEGNRPSLGDMLEAIEQGQIEQGSTIIIESLDRLSRRGIDVTQQIIKSILQKNVFIASLVDGLLLNRDSVNDLVSVIRIALAADLAYKESEKKSKRLRETKGQQRQRALKGEVINKILPFWLERKQNKYIFSNRLATVKRIIELRQKGLGTNKIAKILNEEGHKPLRSKGWNHTTIGKTINSVALYGAYQTSETTQDRKVILLDIVENYYPAVISKEEFMLLQSDHKQNKPGYKSEHNAFAGLLKHECGGALVRKFHVASGKTYQYHVCANARDGKCNVTKNFKNIEVALYQIMKELKLEKKTSFDKTLLEERNSVKTKIQELNNMLLELPKVPLSVLQTINNLEEKLQELEEKIKHQDNIIASEKTFNINTLRETKDPQ

SEQ ID NO: 8657 - DNA, 50 bp, Escherichia coli; identical to SEQ ID NO: 8567
  source 1..50: mol_type = genomic DNA

SEQ ID NO: 8658 - DNA, 40 bp, Escherichia coli; identical to SEQ ID NO: 4473
  source 1..40: mol_type = genomic DNA

SEQ ID NO: 8659 - DNA, 40 bp, Escherichia coli; identical to SEQ ID NO: 8574
  source 1..40: mol_type = genomic DNA

SEQ ID NO: 8660 - DNA, 50 bp, Escherichia coli; identical to SEQ ID NO: 1420
  source 1..50: mol_type = genomic DNA

SEQ ID NO: 8661 - protein, 423 aa, Escherichia coli
MKQNGKAYSYIRFSSKKQEQGDSVRRQIALAEHYAHANNLILSDKNFQDLGISAFKEGNRPSLGDMLEAIEQGQIEQGSTIIIESLDRLSRRGIDVTQQIIKSILQKNVFIASLVDGLLLNRDSVNDLVSVIRIALAADLAYKESEKKSKRLRETKGQQRQRALKGEVINKILPFWLERKQNKYIFSNRLATVKRIIELRQKGLGTNKIAKILNEEGHKPLRSKGWNHTTIGKTINSVALYGAYQTSETTQDRKVILLDIVENYYPAVISKEEFMLLQSDHKQNKPGYKSEHNAFAGLLKHECGGALVRKFHVASGKTYQYHVCANARDGKCNVTKNFKNIEVALYQIMKELKLEKKTSFDKTLLEERNSVKTKIQELNNMLLELPKVPLSVLQTINNLEEKLQELEEKIKHQDNIIASEKNI

SEQ ID NO: 8662 - DNA, 50 bp, Escherichia coli; identical to SEQ ID NO: 8567
  source 1..50: mol_type = genomic DNA

SEQ ID NO: 8663 - DNA, 40 bp, Escherichia coli; identical to SEQ ID NO: 4473
  source 1..40: mol_type = genomic DNA

SEQ ID NO: 8664 - DNA, 40 bp, Escherichia coli; identical to SEQ ID NO: 8574
  source 1..40: mol_type = genomic DNA

SEQ ID NO: 8665 - DNA, 50 bp, Escherichia coli; identical to SEQ ID NO: 1420
  source 1..50: mol_type = genomic DNA

SEQ ID NO: 8666 - protein, 499 aa, Escherichia coli
MKQNGKAYSYIRFSSKKQEQGDSVRRQIALAEHYAHANNLILSDKNFQDLGISAFKEGNRPSLGDMLEAIEQGQIEQGSTIIIESLDRLSRRGIDVTQQIIKSILQKNVFIASLVDGLLLNRDSVNDLVSVIRIALAADLAYKESEKKSKRLRETKGQQRQRALKGEVINKILPFWLERKQNKYIFSNRLATVKRIIELRQKGLGTNKIAKILNEEGHKPLRSKGWNHTTIGKTINSVALYGAYQTSETTQDRKVILLDIVENYYPAVISKEEFMLLQSDHKQNKPGYKSEHNAFAGLLKHECGGALVRKFHVASGKTYQYHVCANARDGKCNVTKNFKNIEVALYQIMKELKLEKKTSFDKTLLEERNSVKTKIQELNNMLLELPKVPLSVLQTINNLEEKLQELEEKIKHQDNIIASEKTFNINTLREIKDPQQLNMMLKRVIENIIVFNIGKRWRINILYRNKHSQSFIWDGSNITFVSDTKKLLELVKHTPEESK

SEQ ID NO: 8667 - DNA, 50 bp, Escherichia coli; identical to SEQ ID NO: 8567
  source 1..50: mol_type = genomic DNA

SEQ ID NO: 8668 - DNA, 40 bp, Escherichia coli; identical to SEQ ID NO: 4473
  source 1..40: mol_type = genomic DNA

SEQ ID NO: 8669 - DNA, 40 bp, Escherichia coli; identical to SEQ ID NO: 8574
  source 1..40: mol_type = genomic DNA

SEQ ID NO: 8670 - DNA, 50 bp, Escherichia coli; identical to SEQ ID NO: 1420
  source 1..50: mol_type = genomic DNA

SEQ ID NO: 8671 - protein, 499 aa, Escherichia coli
MKQNGKAYSYIRFSSKKQEQGDSVRRQIALAEHYAHANNLILSDKNFQDLGISAFKEGNRPSLGDMLEAIEQGQIEQGSTIIIESLDRLSRRGIDVTQQIIKSILQKNVFIASLVDGLLLNRDSVNDLVSVIRIALAADLAYKESEKKSKRLRETKGQQRQRALKGEVINKILPFWLERKQNKFIFSNRLATVKRIIELRQKGLGTNKIAKILNEEGHKPLRSKGWNHTTIGKTINSVALYGAYQTSETTQDRKVILLDIVENYYPAVISKEEFMLLQSDHKQNKPGYKSEHNAFAGLLKHECGGALVRKFHVASGKTYQYHVCANARDGKCNVTKNFKNIEVALYQIMKELKLEKKTSFDKTLLEERNSVKTKIQELNNMLLELPKVPLSVLQTINNLEEKLQELEEKIKHQDNIIASEKTFNINTLRETKDPQQLNMMLKRVIENIIVFNIGKRWRIKILYRNKHSQSFIWDGSNITFVSDTKKLLELVKHTPEESK

SEQ ID NO: 8672 - DNA, 50 bp, Escherichia coli; identical to SEQ ID NO: 8567
  source 1..50: mol_type = genomic DNA

SEQ ID NO: 8673 - DNA, 40 bp, Escherichia coli; identical to SEQ ID NO: 4473
  source 1..40: mol_type = genomic DNA

SEQ ID NO: 8674 - DNA, 40 bp, Escherichia coli; identical to SEQ ID NO: 8574
  source 1..40: mol_type = genomic DNA

SEQ ID NO: 8675 - DNA, 50 bp, Escherichia coli; identical to SEQ ID NO: 1420
  source 1..50: mol_type = genomic DNA

SEQ ID NO: 8676 - protein, 501 aa, Escherichia coli
MKQNGKAYSYIRFSSKKQEQGDSVRRQIALAEHYAHANNLILSDKNFQDLGISAFKEGNRPSLGDMLEAIEQGQIEQGSTIIIESLDRLSRRGIDVTQQIIKSILQKNVFIASLVDGLLLNRDSVNDLVSVIRIALAADLAYKESEKKSKRLRETKGQQRQRALKGEVINKILPFWLERKQNKYIFSNRLATVKRIIELRQKGLGTNKIAKILNEEGHKPLRSKGWNHTTIGKTINSVALYGAYQTSETTQDRKVILLDIVENYYPAVISKEEFMLLQSDHKQNKPGYKSEHNAFAGLLKHECGGALVRKFHVASGKTYQYHVCANARDGKCNVTKNFKNIEVALYQIMKELKLEKKTSFDKTLLEERNSVKTKIQELNNMLLELPKVPLSVLQTINNLEEKLQELEEKIKHQDNIIASEKTFNINTLRETKDPQQLNMMLKRVIENIIVFNIGKRWRIKISYRNKHSQSFIWDGSNITFVSDTKKLLELVKHTPEEYKKY

SEQ ID NO: 8677 - DNA, 50 bp, Escherichia coli; identical to SEQ ID NO: 8567
  source 1..50: mol_type = genomic DNA

SEQ ID NO: 8678 - DNA, 40 bp, Escherichia coli; identical to SEQ ID NO: 4473
  source 1..40: mol_type = genomic DNA

SEQ ID NO: 8679 - DNA, 40 bp, Escherichia coli; identical to SEQ ID NO: 8574
  source 1..40: mol_type = genomic DNA

SEQ ID NO: 8680 - DNA, 50 bp, Escherichia coli; identical to SEQ ID NO: 1420
  source 1..50: mol_type = genomic DNA

SEQ ID NO: 8681 - protein, 499 aa, Escherichia coli
MKQNGKAYSYIRFSSKKQEQGDSVRRQIALAEHYAHANNLILSDKNFQDLGISAFKEGNRPSLGDMLEAIEQGQIEQGSTIIIESLDRLSRRGIDVTQQIIKSILQKNVFIASLVDGLLLNRDSVNDLVSVIRIALAADLAYKESEKKSKRLRETKGQQRQRALKGEVINKILPFWLERKQNKYIFSNRLATVKRIIELRQKGLGTNKIAKILNEEGHKPLRSKGWNHTTIGKTINSVALYGAYQTSETTQDRKVILLDIVENYYPAVISKEEFMLLQSDHKQNKPGYKSEHNAFAGLLKHECGGAFVRKFHVASGKTYQYHVCANARDGKCNVTKNFKNIEVALYQIMKELKLEKKTSFDKTLLEERNSVKTKIQELNNMLLELPKVPLSVLQTINNLEEKLQELEEKIKHQDNIIASEKTFNINTLREIKDPQQLNMMLKRVIENIIVFNIGKRWRIKILYRNKHSQSFIWDGSNITFVSDTKKLLELVKHTPEESK

SEQ ID NO: 8682 - DNA, 50 bp, Escherichia coli; identical to SEQ ID NO: 8567
  source 1..50: mol_type = genomic DNA

SEQ ID NO: 8683 - DNA, 40 bp, Escherichia coli; identical to SEQ ID NO: 4473
  source 1..40: mol_type = genomic DNA

SEQ ID NO: 8684 - DNA, 40 bp, Escherichia coli; identical to SEQ ID NO: 8574
  source 1..40: mol_type = genomic DNA

SEQ ID NO: 8685 - DNA, 50 bp, Escherichia coli; identical to SEQ ID NO: 1420
  source 1..50: mol_type = genomic DNA

SEQ ID NO: 8686 - protein, 499 aa, Escherichia coli
MKQNGKAYSYIRFSSKKQEQGDSVRRQIALAEHYAHANNLILSDKNFQDLGISAFKEGNRPSLGDMLEAIEQGQIEQGSTIIIESLDRLSRRGIDVTQQIIKSILQKNVFIASLVDGLLLNRDSVNDLVSVIRIALAADLAYKESEKKSKRLRETKGQQRQRALKGEVINKILPFWLERKQNKYIFSNRLATVKRIIELRQKGLGTNKIAKILNEEGHKPLRSKGWNHTTIGKTINSVALYGAYQTSETTQDRKVILLDIVENYYPAVISKEEFMLLQSDHKQNKPGYKSEHNAFAGLLKHECGGALVRKFHVASGKTYQYHVCANARDGKCNVTKNFKNIEVALYQIMKELKLEKKTSFDKTLLEERNSVKTKIQELNNMLLELPKVPLSVLQTINNLEEKLQELEEKIKHQDNIIASEKTFNINTLRETKDPQQLNMMLKRVIENIIVFNIEKRWRIKILYRNKHSQSFIWDGSNITFDSDTKKLLELVKHTTEESK

SEQ ID NO: 8687 - DNA, 50 bp, Escherichia coli; identical to SEQ ID NO: 8567
  source 1..50: mol_type = genomic DNA

SEQ ID NO: 8688 - DNA, 40 bp, Escherichia coli; identical to SEQ ID NO: 4473
  source 1..40: mol_type = genomic DNA

SEQ ID NO: 8689 - DNA, 40 bp, Escherichia coli; identical to SEQ ID NO: 8574
  source 1..40: mol_type = genomic DNA

SEQ ID NO: 8690 - DNA, 50 bp, Escherichia coli; identical to SEQ ID NO: 1420
  source 1..50: mol_type = genomic DNA

SEQ ID NO: 8691 - protein, 499 aa, Escherichia coli
MKQNGKAYSYIRFSSKKQEQGDSVRRQIALAEHYAHANNLILSDKNFQDLGISAFKEGNRPSLGDMLEAIEQGQIEQGSTIIIESLDRLSRRGIDVTQQIIKSILQKNVFIASLVDGLLLNRDSVNDLVSVIRIALAADLAYKESEKKSKRLRETKGQQRQRALKGEVINKILPFWLERKQNKYIFSNRLATVKRIIELRQKGLGTNKIAKILNEEGHKPLRSKGWNHTTIGKTINSVALYGAYQTSETTQDRKVILLDIVENYYPAVISKEEFMLLQSDHKQNKPGYKSEHNAFAGLLKHECGGALVRKFHVASGKTYQYHVCANARDGKCNVTKNFKNIEVALYQIMKELKLEKKTSFDKTLLEERNSVTTKIQELNNMLLELPKVPLSVLQTINNLEEKLQELEEKIKHQDNIIASEKTFNINTLRETKDPQQLNMMLKRVIENIIVFNIGKRWRIKILYRNKHSQSFIWDGSNITFVSDTKKLLELVKHTPEESK

SEQ ID NO: 8692 - DNA, 50 bp, Escherichia coli; identical to SEQ ID NO: 8567
  source 1..50: mol_type = genomic DNA

SEQ ID NO: 8693 - DNA, 40 bp, Escherichia coli; identical to SEQ ID NO: 4473
  source 1..40: mol_type = genomic DNA

SEQ ID NO: 8694 - DNA, 40 bp, Escherichia coli; identical to SEQ ID NO: 8574
  source 1..40: mol_type = genomic DNA

SEQ ID NO: 8695 - DNA, 50 bp, Escherichia coli; identical to SEQ ID NO: 1420
  source 1..50: mol_type = genomic DNA

SEQ ID NO: 8696 - protein, 460 aa, Escherichia coli
MILSDKNFQDLGISAFKEGNRPSLGDMLEAIEQGQIEQGSTIIIESLDRLSRRGIDVTQQIIKSILQKNVFIASLVDGLLLNRDSVNDLVSVIRIALAADLAYKESEKKSNRLRETKGQQRQRALKGEVINKILPFWLERKQNKYIFSNRLATVKRIIELRQKGLGTNKIAKILNEEGHKPLRSKGWNHTTIGKTINSVALYGAYQTSETTQDRKVILLDIVENYYPAVISKEEFMLLQSDHKQNKPGYKSEHNAFAGLLKHECGGALVRKFHVASGKTYQYHVCANARDGKCNVTKNFKNIEVALYQIMKELKLEKKTSFDKTLLEERNSVKTKIQELNNMLLELPKVPLSVLQTINNLEEKLQELEEKIKHQDNIIASEKTFNINTLRETKDPQQLNMMLKRVIENIIVFNIGKRWRIKISYRNKHSQRFIWDGSNITFVSDTKKLLELVKHTPEESK

SEQ ID NO: 8697 - DNA, 50 bp, Escherichia coli; identical to SEQ ID NO: 8567
  source 1..50: mol_type = genomic DNA

SEQ ID NO: 8698 - DNA, 40 bp, Escherichia coli; identical to SEQ ID NO: 4473
  source 1..40: mol_type = genomic DNA

SEQ ID NO: 8699 - DNA, 40 bp, Escherichia coli; identical to SEQ ID NO: 8574
  source 1..40: mol_type = genomic DNA

SEQ ID NO: 8700 - DNA, 50 bp, Escherichia coli; identical to SEQ ID NO: 1420
  source 1..50: mol_type = genomic DNA

SEQ ID NO: 8701 - protein, 491 aa, Bacillus mycoides
MGLAAIYLRLSRNEEQLNIDEILLNHRNALTKIAKQQKLTYDIYQEISSGVNTERPELNLLLSRLDDYDALLVMDIDRISRDNAHAEEIKKMLIIHDIKILTPQGAIDLSQESNEMLFSFQAMMANFEYKQIRKRLGRGRLAAAEQGKWTMSNRVPLGYKKNEEKRLEVVEDEAKIIRFIFQKTLERVSANEIAKQLDILGWRSRQGKVLTSTHISNMRRNVVYYGVVKAGRKVNGRVVDEVFVEDAHEPIVSKQMFLEVQKILEENTTGNFFNKLKATRKLQNLIYCNCCKRKRYIQCDGNGIDYIKSCIYKVDNNKCRDRGYKYEPIEQFVLQKVKEKKPAFEQELQMLKSLDTTEVEKKLSIQKESLEKQINRFNKRQRNLKEMRMDGEISKAEFYEMRDENEEQIKQVKQQMELIDIKLENLSNTDEEQARLKDAIKKLDKLEELKAESCNTFLKKFIKKIWFSSNTEANHDTTKPREDATIEIEWL

SEQ ID NO: 8702 - DNA, 50 bp, Bacillus mycoides
  source 1..50: mol_type = genomic DNA
gccaataaaaatagaaagattacaaatgttaattttctatttttactcgg

SEQ ID NO: 8703 - DNA, 40 bp, Bacillus mycoides
  source 1..40: mol_type = genomic DNA
aaccgttggaaaaattacaaatatgaagattttagatgga

SEQ ID NO: 8704 - DNA, 40 bp, Bacillus mycoides
  source 1..40: mol_type = genomic DNA
aaccgttggaaaaattacatttatgaagattttagatgga

SEQ ID NO: 8705 - DNA, 50 bp, Bacillus mycoides
  source 1..50: mol_type = genomic DNA
tccaataaaagtctacagattgcatttgataattatgttaatttagcctg

SEQ ID NO: 8706 - protein, 491 aa, Bacillus cereus
MGLAAIYLRLSRNEEQLNIDEILLNHRNALTKLAKQQKLTYDIYQEISSGVNTERPELNLLLSRLDDYDALLVMDIDRISRDNAHAEEIKKMLIIHDIKILTPQGAIDLSQESNEMLFSFQAMMANFEYKQIRKRLGRGRLAAAEQGKWTMSNRVPLGYKKNEEKRLEVVEDEAKIIRFIFQKTLERVSANEIAKQLDILGWRSRQGKVLTSTHISNMRRNVVYYGVVKAGRKVNGRVVDEVFVEDAHEPIVSKQMFLEVQKILEENTTGNFFNKLKATRKLQNLIYCNCCKRKRYIQCDGNGIDYIKSCIYKVDNNKCRDRGYKYEPIEQFVLQKIKEKKPAFEQELQMLKSLDTTEVEKKLLIQRESLEKQINRFNKRQRNLKEMRMDGEISKAEFYEMRDENEEQIKQVKQQMELIDIKLENLSNTDEEQARLQDAIKKLDNLEELKAESCNTFLKKFIKKIWFSSNTEANHDTTRPREDATIEIEWL

SEQ ID NO: 8707 - DNA, 50 bp, Bacillus cereus; identical to SEQ ID NO: 8702
  source 1..50: mol_type = genomic DNA

SEQ ID NO: 8708 - DNA, 40 bp, Bacillus cereus; identical to SEQ ID NO: 4253
  source 1..40: mol_type = genomic DNA

SEQ ID NO: 8709 - DNA, 40 bp, Bacillus cereus
  source 1..40: mol_type = genomic DNA
aaccgttgggaaaatcacatttatgaaggttttagatgga

SEQ ID NO: 8710 - DNA, 50 bp, Bacillus cereus; identical to SEQ ID NO: 8705
  source 1..50: mol_type = genomic DNA

SEQ ID NO: 8711 - protein, 491 aa, Bacillus thuringiensis
MGLAAIYLRLSRNEEQLNIDEILLNHRNALTKLANQQKLTYDIYQEISSGVNTERPELNLLLSRLDDYDALLVMDIDRISRDNAHAEEIKKMLIIHDIKILTPQGAIDLSQESNEMLFSFQAMMANFEYKQIRKRLGRGRLAAAEQGKWTMSNRVPLGYKKNEEKRLEVVEDEAKIIRFIFQKTLERVSANEIAKQLDILGWRSRQGKVLTSTHISNMRRNVVYYGVVKAGRKVNGRVVDEVFVEDAHEPIVSKQMFLEVQKILEENTTGNFFNKLKATRKLQNLIYCNCCKRKRYIQCDGNGIDYIKSCIYKVDNNKCRDRGYKYEPIEQFVLQKIKEKKPAFEQELQMLKSLDTTEVEKKLLIQRDSLDKQINRFNKRQRNLKEMRMDGEITKAEFYEMRDENEEQIKQVKQQMELIDIKLENLSNTDEEQARLRDAIKKLDKLEELKAESCNTFLKKFIKKIWFSSNTEANHNTTRPREDATIKIEWL

SEQ ID NO: 8712 - DNA, 50 bp, Bacillus thuringiensis; identical to SEQ ID NO: 8702
  source 1..50: mol_type = genomic DNA

SEQ ID NO: 8713 - DNA, 40 bp, Bacillus thuringiensis; identical to SEQ ID NO: 4253
  source 1..40: mol_type = genomic DNA

SEQ ID NO: 8714 - DNA, 40 bp, Bacillus thuringiensis; identical to SEQ ID NO: 8709
  source 1..40: mol_type = genomic DNA

SEQ ID NO: 8715 - DNA, 50 bp, Bacillus thuringiensis; identical to SEQ ID NO: 8705
  source 1..50: mol_type = genomic DNA

SEQ ID NO: 8716 - protein, 491 aa, Bacillus thuringiensis
MGLAAIYLRLSRNEEQLNIDEILLNHRNALTKLAKQQKLTYDIYQEISSGVNTERPQLNLLLSRLDDYDALLVMDIDRISRDNAHAEEIKKMLIIHDIKILTPQGAIDLSQESNEMLFSFQAMMANFEYKQIRKRLGRGRLAAAEQGKWTMSNRVPLGYKKNDEKRLEVVEEEAKIIRFIFQKTLERVSANEIAKQLDILGWRSRQGKVLTSAHISNMRKNVVYYGVVKAGRKVNGRVVDEVFVEDAHEPIVSKQMFLEVQKILEENTTGNFFNKLKATRKLQNLIYCNCCKRKRYIQCDGNGVDYIKSCIYKVDNNKCRDRGYKYEPIEQFVLQKVKEKKPAFEQELQMLKSLDTTELEKRLLVQRESLEKQISRFNKRQRNLKEMRMDGEISKAEFYEMRDENEEQIKQVKQQMELIDIKLENLSNTDEEQARLQDAIKTLDKLEELKAESCNTFLKKFIKKIWFSSNTEANHDTTKPREDATIKIEWL

SEQ ID NO: 8717 - DNA, 50 bp, Bacillus thuringiensis; identical to SEQ ID NO: 8702
  source 1..50: mol_type = genomic DNA

SEQ ID NO: 8718 - DNA, 40 bp, Bacillus thuringiensis
  source 1..40: mol_type = genomic DNA
aaccgttggtaaaatcacaaatatgaaggtcttggatgga

SEQ ID NO: 8719 - DNA, 40 bp, Bacillus thuringiensis
  source 1..40: mol_type = genomic DNA
aaccgttggtaaaatcacatttatgaaggtcttggatgga

SEQ ID NO: 8720 - DNA, 50 bp, Bacillus thuringiensis; identical to SEQ ID NO: 8705
  source 1..50: mol_type = genomic DNA

SEQ ID NO: 8721 - protein, 491 aa, Bacillus cereus
MGLAAIYLRLSRNEEQLNIDEILLNHRNALTKLANQQKLTYDIYQEISSGVNTERPELNLLLSRLDDYDALLVMDIDRISRDNAHAEEIKKMLIIHDIKILTPQGAIDLSQESNEMLFSFQAMMANFEYKQIRKRLGRGRLAAAEQGKWTMSNRVPLGYKKNEEKRLEVVEEEAKIIRFIFQKTLERVSANEIAKQLDILGWRSRQGKVLTSAHISNMRRNVVYYGVVKAGRKVNGRVVDEVFVEDAHEPIVSKQMFLEAQKILEENTTGNFFNKLKATRKLQNLIYCNCCKRKRYIQCDGNGVDYIKSCIYKVDNNKCRDRGYKYEPIEQFVLQKVKEKKPDFEQELQMLKSLDTTEVEKKLSIQRESLEKQINRFNKRQRNLKEMRMDGEISKAEFYEMRDENEEQIKQVKQQMELIDIKLENLSNTDEEQARLQDAIKTLDKLEELKAESCNTFLKKFIKKIWFSSNTEANHDTTRPKEDATIEIEWL

SEQ ID NO: 8722 - DNA, 50 bp, Bacillus cereus; identical to SEQ ID NO: 8702
  source 1..50: mol_type = genomic DNA

SEQ ID NO: 8723 - DNA, 40 bp, Bacillus cereus
  source 1..40: mol_type = genomic DNA
aaccgttggtaaaatcacaaatatgaagattttagatgga

SEQ ID NO: 8724 - DNA, 40 bp, Bacillus cereus
  source 1..40: mol_type = genomic DNA
aaccgttggtaaaatcacatttatgaagattttagatgga

SEQ ID NO: 8725 - DNA, 50 bp, Bacillus cereus; identical to SEQ ID NO: 8705
  source 1..50: mol_type = genomic DNA

SEQ ID NO: 8726 - protein, 491 aa, Bacillus cereus
MGLAAIYLRLSRNEEQLNIDEILLNHRNALTKLAKQQKLTYDIYQEISSGVNTERPELNLLLSRLDDYDALLVMDIDRISRDNAHAEEIKKMLIIHDIKILTPQGAIDLSQESNEMLFSFQAMMANFEYKQIRKRLGRGRLAAAEQGKWTMSNRVPLGYKKNEEKRLEVVEEEAKIIRFIFQKTLERVSANEIAKQLDILGWRSRQGKVLTSTHISNMRRNVVYYGVVKAGRKVNGRVVDEVFVEDAHEPIVSKQMFLEVQKILEENTTGNFFNKLKATRKLQNLIYCNCCKRKRYIQCDGNGIDYIKSCIYKVDNNKCRDRGYKYEPIEQFVLQKVKEKKPAFEKELQMLKALDTTEVEKKLSIQRESLEKQINRFNKRQRNLKEMRMDGEISKAEFYEMRDENEEKIKQVKQQMELIDIKLENLSNTDEEQARLQDAIKKLDKLEELKAESCNTFLKKFIKKIWFSSNTEANHDTTRPKEDATIEIEWL

SEQ ID NO: 8727 - DNA, 50 bp, Bacillus cereus; identical to SEQ ID NO: 8702
  source 1..50: mol_type = genomic DNA

SEQ ID NO: 8728 - DNA, 40 bp, Bacillus cereus; identical to SEQ ID NO: 4253
  source 1..40: mol_type = genomic DNA

SEQ ID NO: 8729 - DNA, 40 bp, Bacillus cereus; identical to SEQ ID NO: 8709
  source 1..40: mol_type = genomic DNA

SEQ ID NO: 8730 - DNA, 50 bp, Bacillus cereus; identical to SEQ ID NO: 8705
  source 1..50: mol_type = genomic DNA

SEQ ID NO: 8731 - protein, 491 aa, Bacillus cereus
MGLAAIYLRLSRNEEQLNIDEILLNHRNALTKLAKQQKLTYDIYQEISSGVNTERPELNLLLSRLDDYDALLVMDIDRISRDNAHAEEIKKMLIIHDIKILTPQGAIDLSQESNEMLFSFQAMMANFEYKQIRKRLGRGRLAAAEQGKWTMSNRVPLGYKKNEEKRLEVVEDEAKIIRFIFQKTLERVSANEIAKQLDILGWRSRQGKVLTSTHISNMRRNVVYYGVVKAGRKVNGRVVDEVFVEDAHEPIVSKQMFLEVQKILEENTTGNFFNKLKATRKLQNLIYCNFCKRKRYIQCDGNGIDYIKSCIYKVDNNKCRDRGYKYEPIEQFVLQKIKEKKPAFEQELQMLKSLDTTEVEKKLLIQRESLEKQINRFNKRQRNLKEMRMDGEISKAEFYEMRDENEEQIKQVKQQMELIDIKLENLSNTDEEQARLKDAIKKLDKLEELKAESCNTFLKKFIKKIWFSSNTEANHDTTKPREDATIEIEWL

SEQ ID NO: 8732 - DNA, 50 bp, Bacillus cereus; identical to SEQ ID NO: 8702
  source 1..50: mol_type = genomic DNA

SEQ ID NO: 8733 - DNA, 40 bp, Bacillus cereus; identical to SEQ ID NO: 4253
  source 1..40: mol_type = genomic DNA

SEQ ID NO: 8734 - DNA, 40 bp, Bacillus cereus; identical to SEQ ID NO: 8709
  source 1..40: mol_type = genomic DNA

SEQ ID NO: 8735 - DNA, 50 bp, Bacillus cereus; identical to SEQ ID NO: 8705
  source 1..50: mol_type = genomic DNA

SEQ ID NO: 8736 - protein, 491 aa, Bacillus cereus
MGLAAIYLRLSRNEEQLNINEILLNHRNALTKLAKQQKLTYDIYQEISSGVNTERPELNLLLSRLDDYDALLVMDIDRISRDNAHAEEIKKMLIIHDIKILTPQGAIDLSQESNEMLFSFQAMMANFEYKQIRKRLGSGRLAAAEQGKWTMSNRVPLGYKKNEEKRLEVMEEEAKIIRFIFQKTLERVSANEIAKQLDILGWRSRQGKVLTSTHISNMRRNVVYYGVVKACRKINGRVVDEVFVEDAHEPIVSKQMFLEVQKILEENTTGNFFNKLKATRKLQNLIYCNCCKRKRYIQCDGNGIDYIKSCIYKVDNNKCRDRGYKYEPIEQFVLQKIKEKKLAFEQELQMLKSLDTTEVEKKLLIQRESLEKQINRFNKRQRNLKEMRMDGEISKAEFYEMRDENEEQIKQVKQQMELIDIKLENLSNTDEEQARLQDAIKKLDKLEELKAESCNTFLKKFIKKIWFSSNTEANHDTTKPREDATIEIEWL

SEQ ID NO: 8737 - DNA, 50 bp, Bacillus cereus; identical to SEQ ID NO: 8702
  source 1..50: mol_type = genomic DNA

SEQ ID NO: 8738 - DNA, 40 bp, Bacillus cereus; identical to SEQ ID NO: 4253
  source 1..40: mol_type = genomic DNA

SEQ ID NO: 8739 - DNA, 40 bp, Bacillus cereus; identical to SEQ ID NO: 8709
  source 1..40: mol_type = genomic DNA

SEQ ID NO: 8740 - DNA, 50 bp, Bacillus cereus; identical to SEQ ID NO: 8705
  source 1..50: mol_type = genomic DNA

SEQ ID NO: 8741 - protein, 491 aa, Bacillus mycoides
MGLAAIYLRLSRNEEQLNIDEILLNHRNALTKIAKQQKLTYDIYQEISSGVNTERPELNLLLSRLDDYDALLVMDIDRISRDNAHAEEIKKMLIIHDIKILTPQGAIDLSQESNEMLFSFQAMMANFEYKQIRKRLGRGRLAAAEQGKWTMSNRVPLGYKKNEEKRLEVVEEEAKIIRFIFQKTLERVSANEIAKQLDILGWRSRQGKVLTSTHISNMRRNVVYYGVVKAGRKVNGRVVDEVFVEDAHEPIVSKQIFLEVQKILEENTTGNFFNKLKATRKLQNLIYCNCCKRKRYIQCDGNGIDYIKSCIYKVDNNKCRDRGYKYEPIEQFVLQKIKEKKPAFEQELQMLKSLDTTEVEKKLSIQRESLEKQINRFNKRQRNLKEMRMDGEISKAEFYEMRDENEEQIKQVKQQMELIDIKLENLSNTDEEQARLQDAIKTLDKLEELKAESCNTFLKKFIKKIWFSSNTEANHDTTKPREDATIEIEWL

SEQ ID NO: 8742 - DNA, 50 bp, Bacillus mycoides; identical to SEQ ID NO: 8702
  source 1..50: mol_type = genomic DNA

SEQ ID NO: 8743 - DNA, 40 bp, Bacillus mycoides
  source 1..40: mol_type = genomic DNA
aaccgttgggaaagttacaaatatgaaagttttagatgga

SEQ ID NO: 8744 - DNA, 40 bp, Bacillus mycoides
  source 1..40: mol_type = genomic DNA
aaccgttgggaaagttacatttatgaaagttttagatgga

SEQ ID NO: 8745 - DNA, 50 bp, Bacillus mycoides; identical to SEQ ID NO: 8705
  source 1..50: mol_type = genomic DNA

SEQ ID NO: 8746 - protein, 491 aa, Bacillus mycoides
MGLAAIYLRLSRNEEQLNIDEILLNHRNALTKLAEQQKLTYDIYQEISSGVNTERQELNLLLSRLDDYDALLVMDIDRISRDNAHAEEIKKMLIIHDIKILTPQGAIDLSQESNEMLFSFQAMMANFEYKQIRKRLGRGRLAAAEQGKWTMSNRVPLGYRKNEEKRLEVVEDEAKIIRFIFQKTLERVSANEIAKQLDILGWRSRQGKVLTSTHISNMRRNVVYYGVVKAGRKVNGRVVDEVFVEDAHEPIVSKQMFLEVQKILEENTTGNFFNKLKATRKLQNLIYCNCCKRKRYIQCDGNGIDYIKSCIYKVDNNKCRDRGYKYEPIEQFVLQKIKEKKPAFEQELQMLKSLDTTEVEKKLLIQRDSLDKQINRFNKRQRNLKEMRMDGEITKAEFYEMRDENEEQIKQVKQQMELIDIKLENLSNTDEEQVRLQGAIKKLDKLEELKAESCNTFLKKFIKKIWFSSNTEANHDTTKPREAATIEIEWL

SEQ ID NO: 8747 - DNA, 50 bp, Bacillus mycoides; identical to SEQ ID NO: 8702
  source 1..50: mol_type = genomic DNA

SEQ ID NO: 8748 - DNA, 40 bp, Bacillus mycoides; identical to SEQ ID NO: 8743
  source 1..40: mol_type = genomic DNA

SEQ ID NO: 8749 - DNA, 40 bp, Bacillus mycoides; identical to SEQ ID NO: 8744
  source 1..40: mol_type = genomic DNA

SEQ ID NO: 8750 - DNA, 50 bp, Bacillus mycoides; identical to SEQ ID NO: 8705
  source 1..50: mol_type = genomic DNA

SEQ ID NO: 8751 - protein, 491 aa, Bacillus mycoides
MGLAAIYLRLSRNEEQLNIDEILLNHRNALTKLAEQQKLTYDIYQEISSGVNTERQELNLLLSRLDDYDALLVMDIDRISRDNAHAEEIKKMLIIHDIKILTPQGAIDLSQESNEMLFSFQAMMANFEYKQIRKRLGRGRLAAAEQGKWTMSNRVPLGYKKNEEKRLEVVEDEAKIIRFIFQKTLERVSANEIAKQLDILGWRSRQGKVLTSTHISNMRRNVVYYGVVKAGRKVNGRVVDEVFVEDAHEPIVSKQMFLEVQKILEENTTGNFFNKLKATRKLQNLIYCNCCKRKRYIQCDGNGIDYIKSCIYKVDNNKCRDRGYKYEPIEQFVLQKIKEKKPAFEQELQMLKSLDTTEVEKKLLIQRDSLDKQINRFNKRQRNLKEMRMDGEITKAEFYEMRDENEEQIKQVKQQMELIDIKLENLSNTDEEQVRLQGAIKKLDKLEELKAESCNTFLKKFIKKIWFSSNTEANHDTTKPREAATIEIEWL

SEQ ID NO: 8752 - DNA, 50 bp, Bacillus mycoides; identical to SEQ ID NO: 8702
  source 1..50: mol_type = genomic DNA

SEQ ID NO: 8753 - DNA, 40 bp, Bacillus mycoides; identical to SEQ ID NO: 8743
  source 1..40: mol_type = genomic DNA

SEQ ID NO: 8754 - DNA, 40 bp, Bacillus mycoides; identical to SEQ ID NO: 8744
  source 1..40: mol_type = genomic DNA

SEQ ID NO: 8755 - DNA, 50 bp, Bacillus mycoides; identical to SEQ ID NO: 8705
  source 1..50: mol_type = genomic DNA

SEQ ID NO: 8756 - protein, 491 aa, Bacillus toyonensis
MGLAAIYLRLSRNEEQLNIDEILLNHRNALTKLANQQKLTYDIYQEISSGVNTERPELNLLLSRLDDYDALLVMDIDRISRDNAHAEEIKKMLIIHDIKILTPQGAIDLSQESNEMLFSFQAMMANFEYKQIRKRLGRGRLAAAEQGKWTMSNRVPLGYKKNEEKRLEVVEDEAKIIRFIFQKTLERVSANEIAKQLDILGWRSRQGKVLTSTHISNMRRNVVYYGVVKAGRKVNGRVVDEVFVEDAHEPIVSKQMFLEVQKILEENTTGNFFNKLKATRKLQNLIYCNCCKRKRYIQCDGNGIDYIKSCIYKVDNNKCRDRGYKYEPIEQFVLQKVKEKKPAFEQELQMLKSLDTTEVEKKLSIQRESLEKQINRFNKRQRNLKEMRMDGEISKAEFYEMRDENEEQIKQVKQQMELIDIKLENLSNTDEEQARLQDAIKTLDKLEELKAESCNTFLKKFIKKIWFSSNTEANHDTTRPKEDATIEIEWL

SEQ ID NO: 8757 - DNA, 50 bp, Bacillus toyonensis; identical to SEQ ID NO: 8702
  source 1..50: mol_type = genomic DNA

SEQ ID NO: 8758 - DNA, 40 bp, Bacillus toyonensis
  source 1..40: mol_type = genomic DNA
aaccgttggtaaaatcacaaatatgaaagttttagatggg

SEQ ID NO: 8759 - DNA, 40 bp, Bacillus toyonensis
  source 1..40: mol_type = genomic DNA
aaccgttggtaaaatcacatttatgaaagttttagatggg

SEQ ID NO: 8760 - DNA, 50 bp, Bacillus toyonensis; identical to SEQ ID NO: 8705
  source 1..50: mol_type = genomic DNA

SEQ ID NO: 8761 - protein, 491 aa, Bacillus albus
MGLAAIYLRLSRNEEQLNIDEILLNHRNALTKLAKQQKLTYDIYQEISSGVNTERPQLNLLLSRLDDYDALLVMDIDRISRDNAHAEEIKKMLIIHDIKILTPQGAIDLSQESNEMLFSFQAMMANFEYKQIRKRLGRGRLAAAEQGKWTMSNRVPLGYKKNDEKRLEVVEEEAKIIRFIFQKTLERVSANEIAKQLDILGWRSRQGKVLTSAHISNMRKNVVYYGVVKAGRKVNGRVVDEVFVEDAHEPIVSKQMFLEVQKILEENTTGNFFNKLKATRKLQNLIYCNCCKRKRYIQCDGNGVDYIKSCIYKVDNNKCRDRGYKYEPIEQFVLQKVKEKKPAFEQELQMLKSLDTTELEKRLLVQRESLEKQISRFNKRQRNLKEMRMDEEITKAEFYEMRDENEEQIKQVKQQMELIDIKLENLSNTDEEQARLQDAIKKLDKLEELKAESCNTFLKKFIKKIWFSSNTEANHDTTKPREDATIEIEWL

SEQ ID NO: 8762 - DNA, 50 bp, Bacillus albus; identical to SEQ ID NO: 8702
  source 1..50: mol_type = genomic DNA

SEQ ID NO: 8763 - DNA, 40 bp, Bacillus albus; identical to SEQ ID NO: 4258
  source 1..40: mol_type = genomic DNA

SEQ ID NO: 8764 - DNA, 40 bp, Bacillus albus
  source 1..40: mol_type = genomic DNA
aaccgttggtaaaatcacatttatgaaggttttagatgga

SEQ ID NO: 8765 - DNA, 50 bp, Bacillus albus; identical to SEQ ID NO: 8705
  source 1..50: mol_type = genomic DNA

SEQ ID NO: 8766 - protein, 491 aa, Bacillus wiedmannii
MGLAAIYLRLSRNEEQLNIDEILLNHRNALTKLAKQQKLTYDIYQEISSGVNTERPELNLLLSRLDDYDALLVMDIDRISRDNAHAEEIKKMLIIHDIKILTPQGAIDLSQESNEMLFSFQAMMANFEYKQIRKRLGRGRLAAAEQGKWTMSNRVPLGYKKNEEKRLEVVEDEAKIIRFIFQKTLERVSANEIAKQLDILGWRSRQGKVLTSTHISNMRRNVVYYGVVKAGRKVNGRVVDEVFVEDAHEPIVSKQMFLEVQKILEENTTGNFFNKLKATRKLQNLIYCNCCKRKRYIQCDGNGIDYIKSCIYKVDNNKCRDRGYKYEPIEQFVLQKVKEKKPAFEQELQMLKSLDTTEVEKKLLIQRESLEKQINRFNKRQRNLKEMRMDGEISKAEFYEMRDENEEQIKQVKQQMELIDIKLENLSNTDEEQSRLQDALKTLDKLEELKAESCNTFLKKFIKKIWFSSNTEANHDTTRPKEDATIEIEWL

SEQ ID NO: 8767 - DNA, 50 bp, Bacillus wiedmannii; identical to SEQ ID NO: 8702
  source 1..50: mol_type = genomic DNA

SEQ ID NO: 8768 - DNA, 40 bp, Bacillus wiedmannii; identical to SEQ ID NO: 4258
  source 1..40: mol_type = genomic DNA

SEQ ID NO: 8769 - DNA, 40 bp, Bacillus wiedmannii; identical to SEQ ID NO: 8764
  source 1..40: mol_type = genomic DNA

SEQ ID NO: 8770 - DNA, 50 bp, Bacillus wiedmannii; identical to SEQ ID NO: 8705
  source 1..50: mol_type = genomic DNA

SEQ ID NO: 8771 - protein, 491 aa, Bacillus wiedmannii
MGLAAIYLRLSRNEEQLNIDEILLNHRNALTKLAKQQKLTYDIYQEISSGVNTERPELNLLLSRLDDYDALLVMDIDRISRDNAHAEEIKKMLIIHDIKILTPQGAIDLSQESNEMLFSFQAMMANFEYKQIRKRLGRGRLAAAEQGKWTMSNRVPLGYRKNEEKRLEVVEEEAKIIRFIFQKTLERVSANEIAKQLDILGWRSRQGKVLTSAHISNMRRNVVYYGVVKAGRKVNGRVVDEVFVEDAHEPIVSKQMFLEVQKILEENTTGNFFNKLKATRKLQNLIYCNCCKRKRYIQCDGNGIDYIKSCIYKVDNNKCRDRGYKYEPIEQFVLQKVKEKKPDFEQELQMLKSLDTTEVEKKLSIQRESLEKQINRFNKRQRNLKEMRMDGEISKAEFYEMRDENEEQIKQVKQQMELIDIKLENLSNTDEEQARLQDAIKTLDKLEELKAESCNTFLKKFIKKIWFSSNTEANHDTTRPKEDATIEIEWL

SEQ ID NO: 8772 - DNA, 50 bp, Bacillus wiedmannii; identical to SEQ ID NO: 8702
  source 1..50: mol_type = genomic DNA

SEQ ID NO: 8773 - DNA, 40 bp, Bacillus wiedmannii; identical to SEQ ID NO: 4258
  source 1..40: mol_type = genomic DNA

SEQ ID NO: 8774 - DNA, 40 bp, Bacillus wiedmannii; identical to SEQ ID NO: 8764
  source 1..40: mol_type = genomic DNA

SEQ ID NO: 8775 - DNA, 50 bp, Bacillus wiedmannii; identical to SEQ ID NO: 8705
  source 1..50: mol_type = genomic DNA

SEQ ID NO: 8776 - protein, 491 aa, Bacillus wiedmannii
MGLAAIYLRLSRNEEQLNIDEILLNHRNALTKLAKQQKLTYDIYQEISSGVNTERPELNLLLSRLDDYDALLVMDIDRISRDNAHAEEIKKMLIIHDIKILTPQGAIDLSQESNEMLFSFQAMMANFEYKQIRKRLGRGRLAAAEQGKWTMSNRVPLGYRKNEEKRLEVVEEEAKIIRFIFQKTLERVSANEIAKQLDILGWRSRQGKVLTSAHISNMRRNVVYYGVVKAGRKVNGRVVDEVFVEDAHEPIVSKQMFLEVQKILEENTTGNFFNKLKATRKLQNLIYCNCCKRKRYIQCDGNGIDYIKSCIYKVDNNKCRDRGYKYEPIEQFVLQKVKEKKPDFEQELQMLKSLDTTEVEKKLSIQRESLEKQINRFNKRQRNLKEMRMDGEISKAEFYEMRDENEEQIKQVKQQMELIDIKLENLSNTDEEQARLQDAIKTLDKLEELKAESCNTFLKKFIKKIWFSSNTEANHDTTKPREDATIEIEWL

SEQ ID NO: 8777 - DNA, 50 bp, Bacillus wiedmannii; identical to SEQ ID NO: 8702
  source 1..50: mol_type = genomic DNA

SEQ ID NO: 8778 - DNA, 40 bp, Bacillus wiedmannii; identical to SEQ ID NO: 4258
  source 1..40: mol_type = genomic DNA

SEQ ID NO: 8779 - DNA, 40 bp, Bacillus wiedmannii; identical to SEQ ID NO: 8764
  source 1..40: mol_type = genomic DNA

SEQ ID NO: 8780 - DNA, 50 bp, Bacillus wiedmannii; identical to SEQ ID NO: 8705
  source 1..50: mol_type = genomic DNA

SEQ ID NO: 8781 - protein, 491 aa, Bacillus wiedmannii
MGLAAIYLRLSRNEEQLNIDEILLNHRNALTKLAKQQKLTYDIYQEISSGVNTERPELNLLLSRLDDYDALLVMDIDRISRDNAHAEEIKKMLIIHDIKILTPQGAIDLSQESNEMLFSFQAMMANFEYKQIRKRLGRGRLAAAEQGKWTMSNRVPLGYKKNEEKRLEVVEEEAKIIRFIFQKTLERVSANEIAKQLDILGWRSRQGKVLTSTHISNMRRNVVYYGVVKAGRKVNGRVVDEVFVEDAHEPIVSKQMFLEVQKILEENTTGNFFNKLKATRKLQNLIYCNCCKRKRYIQCDGNGIDYIKSCIYKVDNNKCRDRGYKYEPIEQFVLQKIKEKKPAFEQELQMLKSLDTTEVEKKLFIQRESLEKQINRFNKRQRNLKEMRMDGEISKAEFYEMRDENEEQIKQVKQQMELIDIKLENLSNTDEEQARLQDAIKKLDKLEELKAESCNTFLKKFIKKIWFSSNTEANHDTTKPREDATIEIEWL

SEQ ID NO: 8782 - DNA, 50 bp, Bacillus wiedmannii; identical to SEQ ID NO: 8702
  source 1..50: mol_type = genomic DNA

SEQ ID NO: 8783 - DNA, 40 bp, Bacillus wiedmannii; identical to SEQ ID NO: 4258
  source 1..40: mol_type = genomic DNA

SEQ ID NO: 8784 - DNA, 40 bp, Bacillus wiedmannii; identical to SEQ ID NO: 8764
  source 1..40: mol_type = genomic DNA

SEQ ID NO: 8785 - DNA, 50 bp, Bacillus wiedmannii; identical to SEQ ID NO: 8705
  source 1..50: mol_type = genomic DNA

SEQ ID NO: 8786 - protein, 491 aa, Bacillus wiedmannii
MGLAAIYLRLSRNEEQLNIDEILLNHRNALTKLAKQQKLTWDIYQEISSGVNTERPELNLLLSRLDDYDALLVMDIDRISRDNAHAEEIKKMLIIHDIKILTPQGAIDLSQESNEMLFSFQAMMANFEYKQIRKRLGRGRLAAAEQGKWTMSNRVPLGYKKNEEKRLEVVEEEAKIIRFIFQKTLERVSANEIAKQLDILGWRSRQGKVLTSTHISNMRRNVVYYGVVKAGRKVNGRVVDEVFVEDAHEPIVSKQMFLEVQKILEENTTGNFFNKLKATRKLQNLIYCNCCKRKRYIQCDGNGVDYIKSCIYKVDNNKCRDRGYKYEPIEQFVLQKVKEKKPDFEQELQMLKSLDTTEIEKKLSIQRESLEKQINRFNKRQRNLKEMRMDGEISKAEFYEMRDENEEQIKQVKQQMELIDIKLENLSNTDEEQARLQDAIKTLDKLEELKAESCNTFLKKFIKKIWFSSNTEANHDTTRPKEDATIEIEWL

SEQ ID NO: 8787 - DNA, 50 bp, Bacillus wiedmannii; identical to SEQ ID NO: 8702
  source 1..50: mol_type = genomic DNA

SEQ ID NO: 8788 - DNA, 40 bp, Bacillus wiedmannii; identical to SEQ ID NO: 4258
  source 1..40: mol_type = genomic DNA

SEQ ID NO: 8789 - DNA, 40 bp, Bacillus wiedmannii; identical to SEQ ID NO: 8764
  source 1..40: mol_type = genomic DNA

SEQ ID NO: 8790 - DNA, 50 bp, Bacillus wiedmannii; identical to SEQ ID NO: 8705
  source 1..50: mol_type = genomic DNA

SEQ ID NO: 8791 - protein, 491 aa, Bacillus wiedmannii
MGLAAIYLRLSRNEEQLNIDEILLNHRNALTKLAKQQKLTYDIYQEISSGVNTERPELNLLLSRLDDYDALLVMDIDRISRDNAHAEEIKKMLIIHDIKILTPQGAIDLSQESNEMLFSFQAMMANFEYKQIRKRLGRGRLAAAEQGKWTMSNRVPLGYKKNEEKRLEVVEDEAKIIRFIFQKTLERVSANEIAKQLDILGWRSRQGKVLTSTHISNMRRNVVYYGVVKAGRKVNGRVVDEVFVEDAHEPIVSKQMFLEVQKILEENTTGNFFNKLKATRKLQNLIYCNCCKRKRYIQCDGNGIDYIKSCIYKVDNNKCRDRGYKYEPIEQFVLQKIKEKKPAFEQELQMLKSLDTTEVEKKLSIQRESLEKQINRFNKRQRNLKEMRMDGEISKAEFYEMRDENEEQIKQVKQQIELIDIKLENLSNTDEEQARLQDAIKKLDKLEELKAESCNTFLKKFLKKIWFSSNTEANHDTTKPREDATIEIEWL

SEQ ID NO: 8792 - DNA, 50 bp, Bacillus wiedmannii; identical to SEQ ID NO: 8702
  source 1..50: mol_type = genomic DNA

SEQ ID NO: 8793 - DNA, 40 bp, Bacillus wiedmannii; identical to SEQ ID NO: 4258
  source 1..40: mol_type = genomic DNA

SEQ ID NO: 8794 - DNA, 40 bp, Bacillus wiedmannii; identical to SEQ ID NO: 8764
  source 1..40: mol_type = genomic DNA

SEQ ID NO: 8795 - DNA, 50 bp, Bacillus wiedmannii; identical to SEQ ID NO: 8705
  source 1..50: mol_type = genomic DNA

SEQ ID NO: 8796 - protein, 491 aa, Bacillus wiedmannii
MGLAAIYLRLSRNEEQLNIDEILLNHRNALTKLAKQQKLTYDIYQEISSGVNTERPQLNLLLSRLDDYDALLVMDIDRISRDNAHAEEIKKMLIIHDIKILTPQGAIDLSQESNEMLFSFQAMMANFEYKQIRKRLGRGRLAAAEQGKWTMSNRVPLGYKKNEEKRLEVVEDEAKIIRYIFQKTLERVSANEIAKQLDILGWRSRQGKVLTSAHISNMRRNVVYYGVVKAGRKVNGRVVDEVFVEDAHEPIVSKQMFLEVQKILEENTTGNFFNKLKATRKLQNLIYCNCCKRKRYIQCDGNGIDYIKSCIYKVDNNKCRDRGYKYEPIEQFVLQKVKEKKPDFEKELQMLKSLDMKEVEKKLSIQRESLEKQINRFNKRQRNLKEMRMDGEISKAEFYEMRNENEEQIKQVKQQMELIDIKLENLSNTDEEQARLQDAIKKLDKLEELKAESCNTFLKKFIKKIWFSSNTEANHDTTKAREEATIEIEWL

SEQ ID NO: 8797 - DNA, 50 bp, Bacillus wiedmannii; identical to SEQ ID NO: 8702
  source 1..50: mol_type = genomic DNA

SEQ ID NO: 8798 - DNA, 40 bp, Bacillus wiedmannii; identical to SEQ ID NO: 4258
  source 1..40: mol_type = genomic DNA

SEQ ID NO: 8799 - DNA, 40 bp, Bacillus wiedmannii; identical to SEQ ID NO: 8764
  source 1..40: mol_type = genomic DNA

SEQ ID NO: 8800 - DNA, 50 bp, Bacillus wiedmannii; identical to SEQ ID NO: 8705
  source 1..50: mol_type = genomic DNA

SEQ ID NO: 8801 - protein, 491 aa, Bacillus proteolyticus
MGLAAIYLRLSRNEEQLNIDEILLNHRNALTKLAKQQKLTYDIYQEISSGVNTERPQLNLLLSRLDDYDVLLVMDIDRISRDNAHAEEIKKMLIIHDIKILTPQGAIDLSQESNEMLFSFQAMMANFEYKQIRKRLGRGRLAAAEQGKWTMSNRVPLGYKKNEEKRLEVVEEEAKIIRFIFQKTLERVSANEIAKQLDILGWRSRQGKVLTSAHISNMRRNVVYYGVVKAGRKVNGRVVDEVFVEDAHEPIVSKQMFLEVQKILEENTTGNFFNKLKATRKLQNLIYCNCCKRKRYIQCDGNGIDYIKSCIYKVDNNKCRDRGYKYEPIEQFVLQKVKEKKPDFEQELQMLKSLDTTEVEKKLSIQRESLEKQINRFNKRQRNLKEMRMDGEISKAEFYEMRDENEEQIKQVKQQMELIDIKLENLSNTDEEQARLQDAIKKLDKLEELKAESCNTFLKKFIKKIWFSSNTEANHDTTKPREDATIEIEWL

SEQ ID NO: 8802 - DNA, 50 bp, Bacillus proteolyticus; identical to SEQ ID NO: 8702
  source 1..50: mol_type = genomic DNA

SEQ ID NO: 8803 - DNA, 40 bp, Bacillus proteolyticus
  source 1..40: mol_type = genomic DNA
aaccgttggaaaagttacaaatatgaaggttttagatgga

SEQ ID NO: 8804 - DNA, 40 bp, Bacillus proteolyticus
  source 1..40: mol_type = genomic DNA
aaccgttggaaaagttacatttatgaaggttttagatgga

SEQ ID NO: 8805 - DNA, 50 bp, Bacillus proteolyticus; identical to SEQ ID NO: 8705
  source 1..50: mol_type = genomic DNA

SEQ ID NO: 8806 - protein, 491 aa, Bacillus pseudomycoides
MGLAAIYLRLSRNEEQLNIDEILLNHRNALTKLSKQHKLTYDIYQEISSGVNTERPQLNLLLSRLDDYDALLVMDIDRISRDNAHAEEIKKMLIVHDIKILTPQGAIDLSQESNEMLFSFQAMMANFEYKQIRKRLGRGRLAAAEQGKWTMSNRVPLGYKKNEEKRLEVVEDEAKIIRFIFQKTLERVSANEIAKQLDILGWRSRQGKVLTSAHISNMRKNVVYYGVVKACRKVNGRVVDDVFVENAHEPIVSKQMFLEVQKILEENANGNFFNKLKATRKLQNLIYCNCCKRKRYIQCDGNGVDYIKSCIYKVDNNKCRDRGYKYEPIEQFVLQKVKEKKPAFEQELQMLKSLDTTEVEKKLSMQRESLEKQINRFNKRQRNLKEMRMDGEITKAEFYEMRDENEEQIKQVKQQMELIDIKLENLSNTDEEQARLQDAIKKLDKLEELKAESCNTFLKKFIKKIWFSSNTEANHDTTRPREDATVEIEWL

SEQ ID NO: 8807 - DNA, 50 bp, Bacillus pseudomycoides; identical to SEQ ID NO: 8702
  source 1..50: mol_type = genomic DNA

SEQ ID NO: 8808 - DNA, 40 bp, Bacillus pseudomycoides; identical to SEQ ID NO: 773
  source 1..40: mol_type = genomic DNA

SEQ ID NO: 8809 - DNA, 40 bp, Bacillus pseudomycoides
  source 1..40: mol_type = genomic DNA
aactgttggcaaaattacatttatgaaaatattagatggc

SEQ ID NO: 8810 - DNA, 50 bp, Bacillus pseudomycoides; identical to SEQ ID NO: 8705
  source 1..50: mol_type = genomic DNA

SEQ ID NO: 8811 - protein, 463 aa, Tsukamurella pulmonis
MSSTNAIIYARISKDRAGAGLGVERQAEDCRALAERLGWTVLRVESDNDISAYSGKKRPGYQRTLAALESGEASAVIAWHSDRLHRRNTELEPFLDIVERTGAQVATVQSGPVDLASPSGRMTARILGAVAQQEVEHTTARIKAQKAQTAAAGGYRGGMRPFGYERDGMTIREREAAIIRQAIADVTAGKTISAVRRELNAAEIRTSSGREWSLPGVRNVLSRWRNAGKVEREGEPVADAQWPAIVTVDELLAVRAVLANPARRVSPGNQRRWQGAGVYIDAFTGDPMVCTKSSGTNPTPVYRPAARTAGCASVVAVDLDEYVSAAVCARLGQPDARELLAAPEVDTRALSGQREALDARLREAASLFSSGAITGAQLTEITADLRAQLDTIDAQLDAATADPELAELLRADDIRAAWDGPNGLHVDTRARLIKSLARVTVHKMTMKGVRRTFKPECVDIEWL

SEQ ID NO: 8812 - DNA, 50 bp, Tsukamurella pulmonis
  source 1..50: mol_type = genomic DNA
atgagtcacaaaccgcaggtggcaccagcaaatagttggtcatgactcat

SEQ ID NO: 8813 - DNA, 40 bp, Tsukamurella pulmonis
  source 1..40: mol_type = genomic DNA
gtggacctggatgcgggcaccgtcgagcttgtactcgacg

SEQ ID NO: 8814 - DNA, 40 bp, Tsukamurella pulmonis
  source 1..40: mol_type = genomic DNA
gtggacctggatgcgggcatagtcgagcttgtactcgacg

SEQ ID NO: 8815 - DNA, 50 bp, Tsukamurella pulmonis
  source 1..50: mol_type = genomic DNA
gtgggtctcagacttcaggtggcataataaaataagaaggaatgactcat

SEQ ID NO: 8816 - protein, 513 aa, Clostridium botulinum
MKRIAIYSRKSRETDTGESIKNQIDMCKTYFNRADEECSFEVFQDEGFSGGNTNRPSFQRMLELAKHKQFDIIAVYKVDRIARNIVDFVNIYDELENHDVKLVSITEGFDPSTPIGKMMMMLLASFAEMERMNIAERVKDNMKGLAKIGRWSGGTPPTGYRNKTIINDNGKKESYLELIPQKKQLLISIFEKAADGYTTYQIGEMFNMPPKTISNILCNPTYVKSDELSANYLKSVGYSVFGELNGNGYLSYNRRPRKKGKKLFNAKGMFVAVSEHEAIIDSKTWIKANNNLKDRATEARPRISPQSFLAHLVKCKCGSGMYIHKGHFKKNGTRNTYFVCSKKKSKDKCTSKWLRIDVVEAEVLDLLKKISLNPKILDAYLKKKNNSVNYVESIKNIKKQINKNTETINALTDKLILLEGASIDIVSKKINSMANENTRLNTQLLEIEREKMFLEVDGENLKLLISNISKFLAKFDKIDISEKQNFIKTIIKEVVWDSTSNDGEDEITIKFLE

SEQ ID NO: 8817 - DNA, 50 bp, Clostridium botulinum
  source 1..50: mol_type = genomic DNA
agacataatttcagatgtaccgcatgtgcaatacatctgaaattgatgct

SEQ ID NO: 8818 - DNA, 40 bp, Clostridium botulinum; identical to SEQ ID NO: 1438
  source 1..40: mol_type = genomic DNA

SEQ ID NO: 8819 - DNA, 40 bp, Clostridium botulinum; identical to SEQ ID NO: 1439
  source 1..40: mol_type = genomic DNA

SEQ ID NO: 8820 - DNA, 50 bp, Clostridium botulinum; identical to SEQ ID NO: 1440
  source 1..50: mol_type = genomic DNA

SEQ ID NO: 8821 - protein, 537 aa, Eubacterium rectale
MIYQKASNLFNAAVYIRLSREDGDKEESDSVGNQRKLLTEYVNKHDDFILYDVYIDDGFTGTNFDRPDFHRMIADIENNKVNCVVVKDLSRFGRDYIDTGRYLERIFPELNVRFISVTDNIDSMKQSYDMLLPIKNIFNEQYARDISNKIQATVKSKQKAGEFIGAFTSYGYNKSPANKNKLVIDEYASEVVKRVFSMYAQGIGKQSIAKILNAEGILCPSEYKKLNGENYKNCTRLEKTSYWTYSTINVMLQNELYIGNMVQGKKHQRMRSKQRLVDKENWIRVENTHEPIIDHQLWDKVQKLLTKKHRDIDLETNKNIFAGFIKCGDCGRAMMKNLWQRADGSKSYSFYCGTYKRSGKNYCTPHTLPFQVLNDIVLGDLKQIISNVENLQELVKLQSFTAPKIRKSTDIELTKLKTELERVKRLQKAIYEDYKDELISKEEFLSYREDYQQKETLYSKQIETLEEKKNENVTESIFETPWLRRLLELKDIEELDRDIIVEMIDQITVYENRKIKISYNFGNELEHLFSSVYCKDL

SEQ ID NO: 8822 - DNA, 50 bp, Eubacterium rectale
  source 1..50: mol_type = genomic DNA
aatttgcgtaaactacaaccaacacatggaggttgtagataacgcaagtg

SEQ ID NO: 8823 - DNA, 40 bp, Eubacterium rectale
  source 1..40: mol_type = genomic DNA
tattgtaatagacccggggcatggtggaagtgatcccggt

SEQ ID NO: 8824 - DNA, 40 bp, Eubacterium rectale
  source 1..40: mol_type = genomic DNA
tattgtaatagacccggggtttggtggaagtgatcccggt

SEQ ID NO: 8825 - DNA, 50 bp, Eubacterium rectale
  source 1..50: mol_type = genomic DNA
aatttgcttccccaacaaccaacatttagagatctggtgtgatgcaaatg

SEQ ID NO: 8826 - protein, 500 aa, Virgibacillus pantothenticus
MNEGFDIKYVALYLRKSRGEGEQDLENHRYMLVNMCKENNWRYLEYKEIASSETIEYRPEFKKLLKDVQEGLFDAVLVVDYQRLGRGEIEDQGLIKRVFKDSRTYIVTPEKIYNLVDDTDDLLVDVSGLLARQEFKSIKRNLQRGKKIGAKLGRWTNGTPPFPYRYEASIKNIVVDEEKNKIYQEMKNMILNEHPCYEVCWYLNNRGVKSPRGGIWHENTVRRIMLDETHLGKKITNKTEGSAHKNKKTKPLRQLPREEWDIVENSHEAVKTQEEHEQILTIFSKRKIVPHRSRSGTYILSGIVYCSKCGKSMQFTNKETKNGNVAYIRKCQKSDPYGNRCENRGIIANAIYDAINIEVQAYESQLLKHEEYENQEEIKRIQDVISFKQSQINKLNNALARIKELYEIGDYTREEYQDRKKVREREITSTQNEIEELKAKQNVQERVNNKERIIKIKEFKQIWSAEVENKVKNQALKKIISRINYERDENGNAKIDIVFN

SEQ ID NO: 8827 - DNA, 50 bp, Virgibacillus pantothenticus
  source 1..50: mol_type = genomic DNA
attatacattaatcaacatgtcattggtgtcatgtacactaatgtatact

SEQ ID NO: 8828 - DNA, 40 bp, Virgibacillus pantothenticus
  source 1..40: mol_type = genomic DNA
tggttatagtacatgtcattggtgtcatgttatggcaaaa

SEQ ID NO: 8829 - DNA, 40 bp, Virgibacillus pantothenticus
  source 1..40: mol_type = genomic DNA
tggttatagtacatgtcatgagtgtcatgttatggcaaaa

SEQ ID NO: 8830 - DNA, 50 bp, Virgibacillus pantothenticus
  source 1..50: mol_type = genomic DNA
tttatacagtttgaaacatgcaaagagtgacatgtatgcttatgcatacc

SEQ ID NO: 8831 - protein, 514 aa, Chryseobacterium culicis
MQIADLYIRVSTDEQADKGYSQRDQEERLRKHCNSQNIQIDRVIFEDHSAKTFDRPEWKKYMFSFRRGKPAKEVRLLLFTKWDRFSRNTSEAYQMISKLTKLNISPQAIEQPLDLRVPENKLLLAIYLSTPEVENDRRALNVIYGMRRAIKEGRMMGTAPYGYINKCTEDGRKYVAVKEPEASNIIWAFKEVAKGHLPSAKVRELMNKREGRKLTRNSFLEALRNVVYCGNIVLKAHGDEEERIIKGKHEPLISEELFMKVQHILRRKSNKDIFLPGGRVINEDRYPLRGLLLCPKCGKNLTASSAKGRSKHYYYYHCILACGFRHNSEIVNELFEAELSKFEFIPAFANLLKTIMMKNFSSVTDGLDDERKILTEQVIRIEQKIAKARDLYLEDKLDEEDFRAVKTKNKDELDRLLFKLNSIKQTKKDNNVELKLDAALKAVTKISERYKKADSVDKRAIIGLIYPEKLTFDGENFQTAKINTFVHTIFLIKKELGNKKNRQRSEKSSNVGFV

SEQ ID NO: 8832 - DNA, 50 bp, Chryseobacterium culicis
  source 1..50: mol_type = genomic DNA
tgaaaaatcttcaaatgtcggttttgtgaacatcacaggactatattcaa

SEQ ID NO: 8833 - DNA, 40 bp, Chryseobacterium culicis
  source 1..40: mol_type = genomic DNA
ggcgccttttggcttttttggtgacctcgacaggattcaa

SEQ ID NO: 8834 - DNA, 40 bp, Chryseobacterium culicis
  source 1..40: mol_type = genomic DNA
ggcgccttttggcttttttgatgacctcgacaggattcaa

SEQ ID NO: 8835 - DNA, 50 bp, Chryseobacterium culicis
  source 1..50: mol_type = genomic DNA
tgaaaaatgttcatatgttgatttgatgatcaagacttcactatatacat

SEQ ID NO: 8836 - protein, 650 aa, Elizabethkingia occulta
MLGIYARISKEKEEGKDRSINDQVLSGKELAVNLGLNYEIYIDEGLSGTLDVEERPGLMQLIEDILNKKITHVFAYDQSRLERNKDVWSKLYSIFQDKKIKLSFKDVPEFDFESDENYLFSHITSLMNNFYTKVASRKIKGVLTRNIQEGKAHAIPPYGYTKDNDGYLIIDENEENIVKQIYKSSLNGIGVDSIAYALNEASVPTRYNKINTGTYTVRNKYTGEEKKLEKSKTKWRGGTIRNIIINPIYKGTRIWKGQSYNVPSIISAEHWEEVNSNLSKNANNSGKKVIHRYLLKGLLSCGKCGRNMVGRSRINKKDHYYQCSSKRYKGESCGNKSINIDKIEGIIWARFFKGNDLLNLLQKDLIKDDNKIELLNKDLQRLRKKIETEKKEKTNLINAVAKGLFIDEEIMSRKNQIDSKIKETEILINDIESQIYNAHNSDKLVSNYISEFEHYTTDLSFLQKKEIINKYIKSISVLSHNPNNISIYTLIIKFKINLKDESYIYEKQSNLLMSYSDWTIIDSKFFNPKSTKFISTEDISIIRRTYIDPTTNTVSTPPYNITDDGMIYFHMNSIIPYYTFPKNTIVWTKESICEFYEKYPHLFCKESGVSIMSKDETQEYYKEMVSDYQKFKDKPLIEWLEFIENRSKSS

SEQ ID NO: 8837 - DNA, 50 bp, Elizabethkingia occulta
  source 1..50: mol_type = genomic DNA
acccccacattcaaaataactactgatgttattgtatagaatgtaaccat

SEQ ID NO: 8838 - DNA, 40 bp, Elizabethkingia occulta
  source 1..40: mol_type = genomic DNA
tcctcatcacacaatttcagatgtcgctcttgtaggcggt

SEQ ID NO: 8839 - DNA, 40 bp, Elizabethkingia occulta
  source 1..40: mol_type = genomic DNA
tcctcatcacacaatttcaattgtcgctcttgtaggcggt

SEQ ID NO: 8840 - DNA, 50 bp, Elizabethkingia occulta
  source 1..50: mol_type = genomic DNA
acccccaaactaacattagctactattgttgttttatttctttaagccat

SEQ ID NO: 8841 - protein, 650 aa, Elizabethkingia anophelis
MLGIYARISKEKEEGKDRSINDQVLSGKELAVNLGLNYEIYIDEGLSGTLDVEERPGLMQLIEDILNKKITHVFAYDQSRLERNKDVWSKLYSIFQDKKIKLSFKDVPEFDFESDENYLFSHITSLMNNFYTKVASRKIKGVLTRNIQEGKAHAIPPYGYTKDNDGYLIIDENEENIVKQIYKSSLKGIGVDSIAYALNEASVPTRYNKINTGTYTVRNKYTGEEKKLEKSKTKWRGGTIRNIIINPIYKGTRIWKGQSYNVPSIISAEHWEEVNSNLSKNANNSGKKVIHRYLLKGLLSCGKCGRNMVGRSRINKKDHYYQCSSKRYKGESCGNKSINIDKIEGIIWARFFKGNDLLNLLQKDLIKDDNKIELLNKDLQRLRKKIETEKKEKTNLINAVAKGLFIDEEIMSRKNQIDSKIKETEILINDIESQIYNAHNSDKLVSNYISEFEHYTTDLSFLQKKEIINKYIKSISVLSHNPNNISIYTLIIKFKINLKDESYIYEKQSNLLMSYSDWTIIDSKFFNPKSTKFISTEDISIIRRTYIDPTTNTVSTPPYNITDDGMIYFHMNSIIPYYTFPKNTIVWTKESICEFYEKYPHLFCKESGVSIMSKDETQEYYKEMVSDYQKFKDKPLIEWLEFIENRSKSS

SEQ ID NO: 8842 - DNA, 50 bp, Elizabethkingia anophelis; identical to SEQ ID NO: 8837
  source 1..50: mol_type = genomic DNA

SEQ ID NO: 8843 - DNA, 40 bp, Elizabethkingia anophelis
  source 1..40: mol_type = genomic DNA
tcctcaccacacaatatccgatgtcgccctggtgggcgga

SEQ ID NO: 8844 - DNA, 40 bp, Elizabethkingia anophelis
  source 1..40: mol_type = genomic DNA
tcctcaccacacaatatccattgtcgccctggtgggcgga

SEQ ID NO: 8845 - DNA, 50 bp, Elizabethkingia anophelis; identical to SEQ ID NO: 8840
  source 1..50: mol_type = genomic DNA

SEQ ID NO: 8846 - protein, 524 aa, Clostridium novyi
MKKVWNVAIYARVSTDKKEQSESIPAQIQGLKKWIMEKNKSGKEDIYNLKEVYEDYGFSGSNFNRKSFIKMKEDIDCGKINMVLTRDLSRFARNYIVAGYYLEDYFKEKGVRFVSVLDNVDTINEVDDIVPFKNILNEMYIKDCSKRTRDGLRQRMIRGSSIASKPPYGYKFETTYEGEIKSIKLVPKEDETTDIVREIFSLYIQGYGMGKIATYLNNKGIEPPSANVKNATKGKSKKWSGNTIRYILTNPKYAGIMVQGRWKKVSYKIKKVKITSKDQWIIGKEFKGIISKKTFKKVQEIINERRKKFRHKDGNVHLFSGVLKCNECKGSMSYRTKFKGYKCTNSQRGGGKCTAHSIKEEYLKTAILNDLRRHVLEINDMEEVYELLREKIKGDNNYEKKLECLNKQLDKLDGKIQKIYNDKLNGAINYRNFTMLVTIIEQKQENIINKKNKLINKIESNDFKVQEQEIYNYYKNFIDEILSFKDLDRFILENLVDRIVVSEDKERKCKVIDICYKFKSNDLH

SEQ ID NO: 8847 - DNA, 50 bp, Clostridium novyi
  source 1..50: mol_type = genomic DNA
aagacctataaccacaagtaagagacctcttaataaacaacataggtcat

SEQ ID NO: 8848 - DNA, 40 bp, Clostridium novyi
  source 1..40: mol_type = genomic DNA
tgaacctgctaataaagagaccgctacatgtatagggctt

SEQ ID NO: 8849 - DNA, 40 bp, Clostridium novyi
  source 1..40: mol_type = genomic DNA
tgaacctgctaataaagagaacgctacatgtatagggctt

SEQ ID NO: 8850 - DNA, 50 bp, Clostridium novyi
  source 1..50: mol_type = genomic DNA
aaaccccatctctacaaataagagaaatctgaataagattggtgggtcat

SEQ ID NO: 8851 - protein, 585 aa, Photobacterium carnosum
MTIPVPMIYPYRRVSTSKQVSGYGLELQNEDEICRELSKKYTLPIAETQDDKGLSAFHANHIKKGALGHFISSVNNGDIAEGSILVVYSLDRLSRQKIEEAISIVTNLINNGVMIYECTSRMLFGDHNSDNNSRAMQLQNAIFTLTRSHGESQIKSDRSRDMAIKKAAAFNRGESVSFGGYGQSPIWLTKNKFNEKAEAIKAAISCFQQGMGISRTVQHLNEHFMDLAPTRKNKIHKGWNIDAINNLRSSPSIYGLKVLNIDGHKHELQNYYPPLMTKQEFDKLQLTIATNTNHKAKTNYLSLLSNLNQITKCGDCGMSMIACKKRGRIKYICSGSMKHKSNCKKLNYDGELLERLTLLICADVFHSDEDFDDTELINLTNQVQNLEQRLLTLKDKYTSTGSDSILDIIVSTESALQKATEYQQKESARKLYITESKSSTINLYTEYENKQSFNIFNMEKRQELRKIIAESFESIEVSRKFYLDFNFSKSRKLNTLFVKWTFKDGTTRVIDFRPFEVIKRIHSGNYINLSVQTAFEHPKNPNADTTIIYEMKPEKILSEVRKHDLLSYAYPTRGHWEIFSKYRII

SEQ ID NO: 8852 - DNA, 50 bp, Photobacterium carnosum
  source 1..50: mol_type = genomic DNA
caaggttatcttgactattttaggaaaccaaatcattatagttacccttc

SEQ ID NO: 8853 - DNA, 40 bp, Photobacterium carnosum
  source 1..40: mol_type = genomic DNA
caggaaaaccttttttttgaaaccacagtaaatattcatc

SEQ ID NO: 8854 - DNA, 40 bp, Photobacterium carnosum
  source 1..40: mol_type = genomic DNA
caggaaaaccttttttttgacaccacagtaaatattcatc

SEQ ID NO: 8855 - DNA, 50 bp, Photobacterium carnosum
  source 1..50: mol_type = genomic DNA
aaaagttattttatctatttttgtacacctaatcatttttctttgctttc

SEQ ID NO: 8856 - protein, 585 aa, Photobacterium phosphoreum; identical to SEQ ID NO: 8851

SEQ ID NO: 8857 - DNA, 50 bp, Photobacterium phosphoreum; identical to SEQ ID NO: 8852
  source 1..50: mol_type = genomic DNA

SEQ ID NO: 8858 - DNA, 40 bp, Photobacterium phosphoreum
  source 1..40: mol_type = genomic DNA
ctggaaaaccttgcttttgaaaccacagaagatattcatc

SEQ ID NO: 8859 - DNA, 40 bp, Photobacterium phosphoreum
  source 1..40: mol_type = genomic DNA
ctggaaaaccttgcttttgacaccacagaagatattcatc

SEQ ID NO: 8860 - DNA, 50 bp, Photobacterium phosphoreum; identical to SEQ ID NO: 8855
  source 1..50: mol_type = genomic DNA

SEQ ID NO: 8861 - protein, 511 aa, Pantoea vagans
MNNEIIENQGIRRAAQYLRMSTLNQEFSLDNQAHFIKQYAQKHNYEIVHTYDDAGKSGVTASGRHDFNRLIDDVLFKEINIEAVLVYDVSRFGRFEDPLEGIYYKYLVEKQGVKVIFCADDIPDNFIESPFFLLMLMYSAGSYSKNLSQKVLAGHINLVNRGYYQGGVPGYGLIRNLVDNNNQFKMPLHMGEQKSLTTDRVVLSPGKKEEIKLIKKIFDMFIFKGMNEYLIAVHLNREGSRYSDGSHWNRSRIHAILTNIRYTGKYVYNRTSSKLQSKRVKNPESQWVSNESFFKPIISLEKFKLAQEIINSRSRQMSDDEILSYLKNKLEENGKISGFIIDQDNTGPSSSVVANRFGGLINAYKLIGYTPEIDYSFLTINESLREKHKELLEEIEGKLTTRNLSILENKTVSINKAFTFSVVLSRCRKRGNEKYQWIVRLDRSLNTDLNIVVRMNTLNSEPVDYFILPSLEKFEKDLKFKEDNKMLFELYRFDNLDVFLNMLNPSLMEAS

SEQ ID NO: 8862 - DNA, 50 bp, Pantoea vagans
  source 1..50: mol_type = genomic DNA
gtggaaattattcgatattttgaatctgaatgttgattagtgatgtaaaa

SEQ ID NO: 8863 - DNA, 40 bp, Pantoea vagans
  source 1..40: mol_type = genomic DNA
tattactcgatattctgaatctgctcgcgcatctgttcaa

SEQ ID NO: 8864 - DNA, 40 bp, Pantoea vagans
  source 1..40: mol_type = genomic DNA
tattactcgatattctgaaaatgctcgcgcatctgttcaa

SEQ ID NO: 8865 - DNA, 50 bp, Pantoea vagans
  source 1..50: mol_type = genomic DNA
gtggaatttgaagcagatttttaaaatgaattttaaatgaaaaagtcaaa

SEQ ID NO: 8866 - protein, 460 aa, Bacillus thuringiensis
MKCAIYRRVSTDEQAEKGFSLENQLLRLQAFAESQGWEVVHDYMDDGYSGKNMNRPQIKRMLHDLKSNKFDIVLVYRLDRFTRSVKDLNDLLEVFKEHEVDFKSATESIDTATATGRMILNMMVSTAQWERETISERVKDVVRKKKELGLISTGYPPYGYAMNDGVISQVPHEVEIVKFVFEKAKVYGFQKISKLLNEQGLVTRNGTKWLISTASRIAHNPFYSGEMRYKRDGETSTVPINVEGYEPVITKEEHKEVLKAIKKRNRNQTRAKSNEVYPFSGIVLCPECGHPMKGTRVSSRGYYYKYYRCDRASDHFCNGKLIRYEKLDKAFAEYIHDAFQIDRIEIKEETNTKDIQREIKRCKSKIERLKDLYVDGDISKKKYKNDVGELNEKIYDLEQKLLSAENKISHDHIRENLKRLSEFWGLIDDNTKMESIRGVFDTITVEIQGNDVVITDHTLL

SEQ ID NO: 8867 - DNA, 50 bp, Bacillus thuringiensis
  source 1..50: mol_type = genomic DNA
gttttgcctaaaggagcatttacacttgaaagtgctatgttaggcaaaaa

SEQ ID NO: 8868 - DNA, 40 bp, Bacillus thuringiensis
  source 1..40: mol_type = genomic DNA
ctcagatttactatctaagcttgaagtcgcctcatcgagc

SEQ ID NO: 8869 - DNA, 40 bp, Bacillus thuringiensis
  source 1..40: mol_type = genomic DNA
ctcagatttactatctaagtttgaagtcgcctcatcgagc

SEQ ID NO: 8870 - DNA, 50 bp, Bacillus thuringiensis
  source 1..50: mol_type = genomic DNA
gtttggcctaagtaagcatttacctttgcaagtcctgtgttttacaacaa

SEQ ID NO: 8871 - protein, 460 aa, Bacillus cereus
MKCAIYRRVSTDEQAEKGFSLENQLLRLQAFAESQGWEVVHDYMDDGYSGKNMNRPQIKRMLHDLKSNKFDVVLVYRLDRFTRSVKDLNDLLEVFKENEVDFKSATESIDTSTATGRMILNMMVSTAQWERETISERVKDVVRKKKDLGLISTGYPPYGYAMNDGVISQVPHEVEIVKFVFEKAKVYGFQKISKLLNEQGLVTRNGTKWLISTASRIAHNPFYSGEMRYKRDGETSTVPINVEGYEPVITKEEHKEVLKAIKKRNRNQTRAKSNEVYPFSGIVLCPECGHPMKGTRVSSRGYYYKYYRCDRASDHFCNGKLIRYEKLDKAFAEYIHDAFQIDRIEIKEETNTKDIQREIKRCKSKIERLKDLYVDGDISKKKYKNDVGELNEKIYDLEQKLLSAENKISHDHIRENLKRLSEFWGLIDDNTKMESIRGVFDTITVEIQGNDVVITDHTLL

SEQ ID NO: 8872 - DNA, 50 bp, Bacillus cereus; identical to SEQ ID NO: 8867
  source 1..50: mol_type = genomic DNA

SEQ ID NO: 8873 - DNA, 40 bp, Bacillus cereus
  source 1..40: mol_type = genomic DNA
ctcagatttactatctaagcttgaagtcgcctcatctagc

SEQ ID NO: 8874 - DNA, 40 bp, Bacillus cereus
  source 1..40: mol_type = genomic DNA
ctcagatttactatctaagtttgaagtcgcctcatctagc

SEQ ID NO: 8875 - DNA, 50 bp, Bacillus cereus; identical to SEQ ID NO: 8870
  source 1..50: mol_type = genomic DNA

SEQ ID NO: 8876 - protein, 460 aa, Bacillus cereus
MKCAIYRRVSTDEQAEKGFSLENQLLRLQAFAESQGWEVIADYMDDGYSGKNMNRPQIKRMLHDLKLNKFDIVLVYRLDRFTRSVKDLNDLLEVFKENEVDFKSATESIDTSTATGRMILNMMVSTAQWERETISERVKDVVRKKKDLGLISTGYPPYGYTMNDGVISQVPHEVEIVKFIFEKAKIYGFQKISKLLNEQGLVTRNGTKWLISTASRIAHNPFYSGEMRYKRDGETSTVPINVEGYEPVITKEEHKEVLKAIKKRNRNQTRAKSNEVYPFSGIVLCPECGHPMKGTRVSSRGYYYKYYRCDRASDHFCNGKLIRCEKLDKAFAEYIHDAFQIDRIEIKEETNTKDIQREIKRCKSKIERLKDLYVDGDISKKKYKNDVGELNEKIYDLEQKLLSAENKISHDHIRENLKRLSEFWGLIDDNTKMESIRGVFDTITVEIQGNDVVITDHTLL

SEQ ID NO: 8877 - DNA, 50 bp, Bacillus cereus; identical to SEQ ID NO: 8867
  source 1..50: mol_type = genomic DNA

SEQ ID NO: 8878 - DNA, 40 bp, Bacillus cereus; identical to SEQ ID NO: 8873
  source 1..40: mol_type = genomic DNA

SEQ ID NO: 8879 - DNA, 40 bp, Bacillus cereus; identical to SEQ ID NO: 8874
  source 1..40: mol_type = genomic DNA

SEQ ID NO: 8880 - DNA, 50 bp, Bacillus cereus; identical to SEQ ID NO: 8870
  source 1..50: mol_type = genomic DNA

SEQ ID NO: 8881 - protein, 460 aa, Bacillus cereus
MKCAIYRRVSTDEQAEKGFSLENQLLRLQAFAESQGWEVVHDYMDDGYSGKNMNRPQIKRMLHDLKSNKFDIVLVYRLDRFTRSVKDLNDLLEVFKEHEVDFKSATESIDTATATGRMILNMMVSTAQWERETISERVKDVVRKKKDLGLISTGYPPYGYAMNDGVISQVPHEVEIVKFVFEKAKVYGFQKISKLLNEQGLVTRNGTKWLISTASRIAHNPFYSGEMRYKRDGETSTVPINVEGYEPVITKEEHKEVLKAIKKRNRNQTRAKSNEVYPFSGIVLCPECGHPMKGTRVSSRGYYYKYYRCDRASDHFCNGKLIRYEKLDKAFAEYIHDAFQIDRIEIKEETNTKDIQREIKRCKSKIERLKDLYVDGDISKKKYKNDVGELNEKIYDLEQKLLSAENKISHDHIRENLKRLSEFWGLIDDNTKMESIRGVFDTITVELQGNDVVITDHTLL

SEQ ID NO: 8882 - DNA, 50 bp, Bacillus cereus; identical to SEQ ID NO: 8867
  source 1..50: mol_type = genomic DNA

SEQ ID NO: 8883 - DNA, 40 bp, Bacillus cereus
  source 1..40: mol_type = genomic DNA
ctcagatttactatctaagcttgaagtcgcctcatctaac

SEQ ID NO: 8884 - DNA, 40 bp, Bacillus cereus
  source 1..40: mol_type = genomic DNA
ctcagatttactatctaagtttgaagtcgcctcatctaac

SEQ ID NO: 8885 - DNA, 50 bp, Bacillus cereus; identical to SEQ ID NO: 8870
  source 1..50: mol_type = genomic DNA

SEQ ID NO: 8886 - protein, 460 aa, Bacillus cereus
MKCAIYRRVSTDEQAEKGFSLENQLLRLQAFAESQGWEVVHDYMDDGYSGKNMNRPQIKRMLHDLKLNKFDIVLVYRLDRFTRSVKDLNDLLEVFKENEVDFKSATESIDTSTATGRMILNMMVSTAQWERETISERVKDVVRKKKDLGLISTGYPPYGYAMNDGVISQVPHEVEIVKFIFEKAKVYGFQKISKLLNEQGLVTRNGTKWLISTASRIAHNPFYSGEMRYKRDGETSTVPINVEGYEPVITKEEHKEVLKAIKKRNRNQTRAKSNEVYPFSGIVLCPECGHPMKGTRVSSRGYYYKYYRCDRASDHFCNGKLIRCEKLDKAFAEYIHDAFQIDRIEIKEETNTKDIQREIKRCKSKIERLKDLYVDGDISKKKYKNDVGELNEKIYDLEQKLLSAENKISHDHIRENLKRLSEFWGLIDDNTKMESIRGVFDTITVDIQGNDVVITDHTLL

SEQ ID NO: 8887 - DNA, 50 bp, Bacillus cereus; identical to SEQ ID NO: 8867
  source 1..50: mol_type = genomic DNA

SEQ ID NO: 8888 - DNA, 40 bp, Bacillus cereus; identical to SEQ ID NO: 8873
  source 1..40: mol_type = genomic DNA

SEQ ID NO: 8889 - DNA, 40 bp, Bacillus cereus; identical to SEQ ID NO: 8874
  source 1..40: mol_type = genomic DNA

SEQ ID NO: 8890 - DNA, 50 bp, Bacillus cereus; identical to SEQ ID NO: 8870
  source 1..50: mol_type = genomic DNA

SEQ ID NO: 8891 - protein, 460 aa, Bacillus cereus
MKCAIYRRVSTDEQAEKGFSLENQLLRLQAFAESQGWEVVHDYMDDGYSGKNMNRPQIKRMLHDLKLNKFDIVLVYRLDRFTRSVKDLNDLLEVFKEHDVDFKSATESIDTATATGRMILNMMVSTAQWERETISERVKDVVRKKKDLGLISTGYPPYGYAMNDGVISQVPHEVEIVKFIFEKAKVYGFQKISKLLNEQGLVTRNGTKWLISTASRIAHNPFYSGEMRYKRDGETSTVPINVEGYEPVITKEEHRDVLKAIKKRNRNQTRSKSNEVYPFSGIVLCPECGHPMKGTRVSSRGYYYKYYRCDRAQDHFCDGKLIRSEKVDKAFVEYLRVTFKVDRIEIKEETNTKDIEREIKRCKSKIERLKDLYVDGDISKKKYKNDVDELNEKIYDLEQKLLSAENKISHDHIRENLKRISELWEHIDDQTKTESIRGVMDTMTIEIQSKDVVITSHTLL

SEQ ID NO: 8892 - DNA, 50 bp, Bacillus cereus; identical to SEQ ID NO: 8867
  source 1..50: mol_type = genomic DNA

SEQ ID NO: 8893 - DNA, 40 bp, Bacillus cereus; identical to SEQ ID NO: 8883
  source 1..40: mol_type = genomic DNA

SEQ ID NO: 8894 - DNA, 40 bp, Bacillus cereus; identical to SEQ ID NO: 8884
  source 1..40: mol_type = genomic DNA

SEQ ID NO: 8895 - DNA, 50 bp, Bacillus cereus; identical to SEQ ID NO: 8870
  source 1..50: mol_type = genomic DNA

SEQ ID NO: 8896 - protein, 460 aa, Bacillus cereus
MKCAIYRRVSTDEQAEKGFSLENQLLRLQAFAESQGWEVIADYMDDGYSGKNMNRPQIKRMLHDLKLNKFDIVLVYRLDRFTRSVKDLNDLLEVFKENEVDFKSATESIDTSTATGRMILNMMVSTAQWERETISERVKDVVRKKKDLGLISTGYPPYGYAMNDGVISQVPHEVEIVKFIFEKAKVYGFQKISKLLNEQGLVTRNGTKWLISTASRIAHNPFYSGEMRYKRDGETSTVPINVEGYEPVITKEEHKEVLKAIKKRNRNQTRAKSNEVYPFSGIVLCPECGHPMKGTRVSSRGYYYKYYRCDRASDHFCNGKLIRYEKLDKAFAEYIHDAFQIDRIEIKEETNTKDIQREIKRCKSKIERLKDLYVDGDISKKKYKNDVGELNEKIYDLEQKLLSAENKISHDHIRENLKRLSEFWGLIDDNTKMESIRGVFDTITVEIQGNDVVITDHTLL

SEQ ID NO: 8897 - DNA, 50 bp, Bacillus cereus; identical to SEQ ID NO: 8867
  source 1..50: mol_type = genomic DNA

SEQ ID NO: 8898 - DNA, 40 bp, Bacillus cereus
  source 1..40: mol_type = genomic DNA
ctcagatttactatctaagcttgaagttgcctcatcgagc

SEQ ID NO: 8899 - DNA, 40 bp, Bacillus cereus
  source 1..40: mol_type = genomic DNA
ctcagatttactatctaagtttgaagttgcctcatcgagc

SEQ ID NO: 8900 - DNA, 50 bp, Bacillus cereus; identical to SEQ ID NO: 8870
  source 1..50: mol_type = genomic DNA

SEQ ID NO: 8901 - protein, 483 aa, Leuconostoc gelidum
MNKKVAIYVRVSTLEQAESGYSIGEQIDKLKKFADIKEWQVYDVYEDGGFSGSNTTRPALERMINDAKRKLFDTVLVYKLDRLSRSQKDTLFLIEDVFKVNNIDFVSLNENFDTSTAFGTAMIGILSVFAQLEREQIRERMKLGLVGRAKSGKAMGWHMTPFGYTYDKKSGNFIIDEVAASVVKMIFDDYLSGISITKLRDKLNAEGHIGKDRNWSYRTLRQTLDNPTYTGLVKYDGKTFPGNHEPILDNETFQSVQYELDIRQKQAYLKNNNSRPFQSKYLLSGIAKCGYCGAPLVSILGNKRKDGTRLLKYQCANRIIRKANPVTTYNDNKQCDSGFYMMQNIEAYVINSISELQTNKKKIQEIIKLDNGQPVIDTLYLESELAKISSRLKKLSDLYMNDLMTLDDLKNRTEELKQTRKNIEAKIFSEENKHGHAKSDIFRSRIDGNNITELDYDQQSMLAKSLIRKVSVTNETIEISWDF

SEQ ID NO: 8902 - DNA, 50 bp, Leuconostoc gelidum
  source 1..50: mol_type = genomic DNA
aaacataccgactatataccgtttcaattaggtataataaatatattttt

SEQ ID NO: 8903 - DNA, 40 bp, Leuconostoc gelidum
  source 1..40: mol_type = genomic DNA
aaaagcacaattgctgcttcaatcagagtaaatgcttgtc

SEQ ID NO: 8904 - DNA, 40 bp, Leuconostoc gelidum
  source 1..40: mol_type = genomic DNA
aaaagcacaattgctgcttgtatcagagtaaatgcttgtc

SEQ ID NO: 8905 - DNA, 50 bp, Leuconostoc gelidum
  source 1..50: mol_type = genomic DNA
aaacatatcacatatatagtgtgtgtattaaatattatatatatatattt

SEQ ID NO: 8906 - protein, 506 aa, Sphingopyxis terrae
MERTEQKAVIYCRVSGRKQKLEGHGLESQETRCREYAAHRGYQVVAAFHDDFTGASSSRPAMRAMLDMLKRSRKERYVVIIDDISRLARGLRAHMDLRAAIEAAGGILESPNLEFADDADSEMQEYILATIAQHHRRKNAEQVKNRMRARNLNGYYTFQSCVGYRYEKVEGHGKMLVRDEPIASILQEALEGFASGRFPQQINVRDFLASHPEWKRSKAAQLAPQSICNMLNRVVYAGYIDYPAWGISLVKGKHEPIISYETYQAIQRRLQRGPVVTERRDMNADFPLRGFVTCAGCGKPYQASWSKGRTKHHPYYLCATKACPDYGKSIRRDVMQQDFANLLSEMRPTAKLFGLAHDLFRKLWDDRIGSAQQQKRAIETELAKIEKGITQLVDRIVDAESDAVVEAYERRIRKFEEERTALRERLANCGASQKPFRDTFRTAMEFLLNPCKLWDSNDPAHKRLVLKLTFVERLAYARNHGFRTALTSLPFTVISGLNDLKEMVVD

SEQ ID NO: 8907 - DNA, 50 bp, Sphingopyxis terrae
  source 1..50: mol_type = genomic DNA
tctgaacgacctaaaagagatggtggtggaccttgatggagaaagccaga

SEQ ID NO: 8908 - DNA, 40 bp, Sphingopyxis terrae
  source 1..40: mol_type = genomic DNA
tgccctcggaccggagggtggtggacagggctggattcga

SEQ ID NO: 8909 - DNA, 40 bp, Sphingopyxis terrae
  source 1..40: mol_type = genomic DNA
tgccctcggaccggagggtcctggacagggctggattcga

SEQ ID NO: 8910 - DNA, 50 bp, Sphingopyxis terrae
  source 1..50: mol_type = genomic DNA
cctgacccacctccaagagatgctcctgtcccctgagagtcaaagccaca

SEQ ID NO: 8911 - protein, 515 aa, Bacillus tropicus
MKTAIYLRKSRADLEAEARGEGETLAKHRSTLLKIAKEMNLNVLSVREEIVSGESLVKRPEMLALLEEIEDNKYDVVLCMDMDRLGRGGMKEQGIILETFKRSNTKIMTPRKTYDLNDEWDEEYSEFEAFMARKELKIITRRMQRGRVASVEAGNYLGTHAPFGYDIHRLNKRERTLTINPEEASVVRMIFDWYANEDMGASAIRSKLNDLGYKSKLGNDWNPYSILDILKNNVYIGKVTWQKRKEVKRPDAVKRSCARQDKSDWIIADGKHEPIIPESLFEQVQEKLNSRYHVPYNTNGIRNPLAGIIKCSKCGYSMVQRYPKNRKETMDCKHRGCENKSSYTELIEKRLLDALKEWYINYKADFEKHKQGEKFKETQVIQMNEVALRKLEKELVDVQKQKNNLHDLLERGVYTVDIFLERSNVVSDRINEITSTMENLKKEIKTEIKKEKMKKDTIPQVEHVLDLYFKTDDPKKKNSLLKSVLEKAVYKKEKWQRLDDFELVLYPKLPQDGDI

SEQ ID NO: 8912 - DNA, 50 bp, Bacillus tropicus
  source 1..50: mol_type = genomic DNA
cgtcaccttgttggtgtaattagattaacaccaacagggtggtgacaaaa

SEQ ID NO: 8913 - DNA, 40 bp, Bacillus tropicus
  source 1..40: mol_type = genomic DNA
ggccattaggcgcatgaggtttactccattaagccctaaa

SEQ ID NO: 8914 - DNA, 40 bp, Bacillus tropicus
  source 1..40: mol_type = genomic DNA
ggccattaggcgcatgaggcatactccattaagccctaaa

SEQ ID NO: 8915 - DNA, 50 bp, Bacillus tropicus
  source 1..50: mol_type = genomic DNA
caacaccttaaccaagtaattaaacaaataccaccaataaggggacaaac

SEQ ID NO: 8916 - protein, 488 aa, Bacillus toyonensis
MNYAIYVRVSTDKDEQVSSIQNQIDICRYWVEKNGFEWDEAAVYKDEAVSGTEWFKRQAIQLILAKARNRELDTVIFKSIHRLARDLRDALEIKSILLGHGVRLVTIEEGYDSYYEGNNDMKFEMYAMFAAQYPKTMSVSISAALNAKVRRGEYNGGRVPYGYRVVDQKYVIDDEESENVKALFDLYNQGLGYLKVALYMNDKGFRFIDGKLWRDYHIRHIINNPFYIGDYIAQKYTKVKVDGRRKQTVNPKEKWVVYKNHHPAIIERDLWDKIHSFEKKEKNRMKRRVSVDNELRGLVYCAHCGQPMKAETVKKTQSEGVIKYVYMRCSKYRRTGGRECVKHVPLYYSQVRELLVEKLKEKEQDLEEQISGEHKNKNKQKINKVNKEIKEWESKKEKLLDLYLDGQNISKDVFTQRDKKIDKIIREKNMELLKLSSLEEQIKEDDAAKEAFILLENSENLYECFNKLIKQIDITQNGGLDIYYRFEE

SEQ ID NO: 8917 - DNA, 50 bp, Bacillus toyonensis
  source 1..50: mol_type = genomic DNA
agtttgtcacatatgttaattgcactactgattaacttatataacaaact

SEQ ID NO: 8918 - DNA, 40 bp, Bacillus toyonensis
  source 1..40: mol_type = genomic DNA
agtttctttaatgtttgcacttgaacttggcggacaaaaa

SEQ ID NO: 8919 - DNA, 40 bp, Bacillus toyonensis
  source 1..40: mol_type = genomic DNA
agtttctttaatgtttgcagctgaacttggcggacaaaaa

SEQ ID NO: 8920 - DNA, 50 bp, Bacillus toyonensis
  source 1..50: mol_type = genomic DNA
agtttttcaaagcttttcattacagcactgattaagactagaaataatct

SEQ ID NO: 8921 - protein, 479 aa, Mycobacterium simiae
MAKPRTPGQRVGVRSAAIYARISADVEGTGLGVARQLEDCRKLAADRGWQVGDEYVDNDVSAYSGKPRREYARMLDDLKSGARDAVIVYNLDRLHRRPVELEDFVTLCEVAGVRDVATVTADIDLGNDDGLFMARIFAAFAAKESGRKSARIRRKMLQNAEQGLPHGPARPFGYEPDKITLRPDEAKVVREMVDRYLAGASIRSLTIWLNDTGIAPPASTSWQTTTVRHILASGRIAGLREHHGEVIGPAAWPAIITPAERDRILARMTARSVTKTRAPRTYLLSGMLRCGRCGNRLFSQARHNNPTNRVRRYVCLKGPDHGGCGRLTVVAQPVEELLTDAVLTRLDSPQLADALNGKARVDADVAALAAQLEADQARLDELAALYAEGAVTAREWIAARDPITNRITQTRRDIAKATDTSSIVDLVGTGNALRGQWDGLDIDRQQAIIKSVLDHAVIAPGTPGSRGLDINRVQPVWRV

SEQ ID NO: 8922 - DNA, 50 bp, Mycobacterium simiae
  source 1..50: mol_type = genomic DNA
caggtagatcaacgacttgtaaccaagctcaaatgtcgctaaactaccct

SEQ ID NO: 8923 - DNA, 40 bp, Mycobacterium simiae
  source 1..40: mol_type = genomic DNA
agggccgacgcatccgtcgaacctcaagtgtctgtgccga

SEQ ID NO: 8924 - DNA, 40 bp, Mycobacterium simiae
  source 1..40: mol_type = genomic DNA
agggccgacgcatccgtcgatcctcaagtgtctgtgccga

SEQ ID NO: 8925 - DNA, 50 bp, Mycobacterium simiae; identical to SEQ ID NO: 1455
  source 1..50: mol_type = genomic DNA

SEQ ID NO: 8926 - protein, 479 aa, Mycobacterium avium; identical to SEQ ID NO: 8921

SEQ ID NO: 8927 - DNA, 50 bp, Mycobacterium avium; identical to SEQ ID NO: 8922
  source 1..50: mol_type = genomic DNA

SEQ ID NO: 8928 - DNA, 40 bp, Mycobacterium avium
  source 1..40: mol_type = genomic DNA
cggaccgaccgagttggccaacctggtgctggtctgcccc

SEQ ID NO: 8929 - DNA, 40 bp, Mycobacterium avium
  source 1..40: mol_type = genomic DNA
cggaccgaccgagttggccatcctggtgctggtctgcccc

SEQ ID NO: 8930 - DNA, 50 bp, Mycobacterium avium; identical to SEQ ID NO: 1455
  source 1..50: mol_type = genomic DNA

SEQ ID NO: 8931 - protein, 479 aa, Mycobacterium kansasii; identical to SEQ ID NO: 8921

SEQ ID NO: 8932 - DNA, 50 bp, Mycobacterium kansasii; identical to SEQ ID NO: 8922
  source 1..50: mol_type = genomic DNA

SEQ ID NO: 8933 - DNA, 40 bp, Mycobacterium kansasii
  source 1..40: mol_type = genomic DNA
gggcagcaccgatatgggcaatgtgacgcaggtgctaccg

SEQ ID NO: 8934 - DNA, 40 bp, Mycobacterium kansasii
  source 1..40: mol_type = genomic DNA
gggcagcaccgatatgggcattgtgacgcaggtgctaccg

SEQ ID NO: 8935 - DNA, 50 bp, Mycobacterium kansasii; identical to SEQ ID NO: 1455
  source 1..50: mol_type = genomic DNA

SEQ ID NO: 8936 - protein, 479 aa, Mycobacterium kansasii; identical to SEQ ID NO: 8921

SEQ ID NO: 8937 - DNA, 50 bp, Mycobacterium kansasii; identical to SEQ ID NO: 8922
  source 1..50: mol_type = genomic DNA

SEQ ID NO: 8938 - DNA, 40 bp, Mycobacterium kansasii
  source 1..40: mol_type = genomic DNA
cggacacaccggcgctggtaatgacgttgtcctgccgcac

SEQ ID NO: 8939 - DNA, 40 bp, Mycobacterium kansasii
  source 1..40: mol_type = genomic DNA
cggacacaccggcgctggtattgacgttgtcctgccgcac

SEQ ID NO: 8940 - DNA, 50 bp, Mycobacterium kansasii; identical to SEQ ID NO: 1455
  source 1..50: mol_type = genomic DNA

SEQ ID NO: 8941 - protein, 479 aa, Mycobacterium kansasii; identical to SEQ ID NO: 8921

SEQ ID NO: 8942 - DNA, 50 bp, Mycobacterium kansasii; identical to SEQ ID NO: 8922
  source 1..50: mol_type = genomic DNA

SEQ ID NO: 8943 - DNA, 40 bp, Mycobacterium kansasii
  source 1..40: mol_type = genomic DNA
cggacacacccgcgctggtaatgacgttgtcctgacgcac

SEQ ID NO: 8944 - DNA, 40 bp, Mycobacterium kansasii
  source 1..40: mol_type = genomic DNA
cggacacacccgcgctggtattgacgttgtcctgacgcac

SEQ ID NO: 8945 - DNA, 50 bp, Mycobacterium kansasii; identical to SEQ ID NO: 1455
  source 1..50: mol_type = genomic DNA

SEQ ID NO: 8946 - protein, 479 aa, Mycobacteroides abscessus; identical to SEQ ID NO: 8921

SEQ ID NO: 8947 - DNA, 50 bp, Mycobacteroides abscessus; identical to SEQ ID NO: 8922
  source 1..50: mol_type = genomic DNA

SEQ ID NO: 8948 - DNA, 40 bp, Mycobacteroides abscessus
  source 1..40: mol_type = genomic DNA
ccggcgcagggtggtaagcaacctcagtaccacctgtatg

SEQ ID NO: 8949 - DNA, 40 bp, Mycobacteroides abscessus
  source 1..40: mol_type = genomic DNA
ccggcgcagggtggtaagcatcctcagtaccacctgtatg

SEQ ID NO: 8950 - DNA, 50 bp, Mycobacteroides abscessus; identical to SEQ ID NO: 1455
  source 1..50: mol_type = genomic DNA

SEQ ID NO: 8951 - protein, 479 aa, Mycobacteroides abscessus; identical to SEQ ID NO: 8921

SEQ ID NO: 8952 - DNA, 50 bp, Mycobacteroides abscessus; identical to SEQ ID NO: 8922
  source 1..50: mol_type = genomic DNA

SEQ ID NO: 8953 - DNA, 40 bp, Mycobacteroides abscessus
  source 1..40: mol_type = genomic DNA
gaaccagacaggcgcgagcaaggtcgacctcgtcggtcac

SEQ ID NO: 8954 - DNA, 40 bp, Mycobacteroides abscessus
  source 1..40: mol_type = genomic DNA
gaaccagacaggcgcgagcatggtcgacctcgtcggtcac

SEQ ID NO: 8955 - DNA, 50 bp, Mycobacteroides abscessus; identical to SEQ ID NO: 1455
  source 1..50: mol_type = genomic DNA

SEQ ID NO: 8956 - protein, 479 aa, Mycobacteroides abscessus; identical to SEQ ID NO: 8921

SEQ ID NO: 8957 - DNA, 50 bp, Mycobacteroides abscessus; identical to SEQ ID NO: 8922
  source 1..50: mol_type = genomic DNA

SEQ ID NO: 8958 - DNA, 40 bp, Mycobacteroides abscessus
  source 1..40: mol_type = genomic DNA
tgggcatacgagtgccgataatctgaaagcgctgtgccgt

SEQ ID NO: 8959 - DNA, 40 bp, Mycobacteroides abscessus
  source 1..40: mol_type = genomic DNA
tgggcatacgagtgccgatattctgaaagcgctgtgccgt

SEQ ID NO: 8960 - DNA, 50 bp, Mycobacteroides abscessus; identical to SEQ ID NO: 1455
  source 1..50: mol_type = genomic DNA

SEQ ID NO: 8961 - protein, 479 aa, Mycobacteroides immunogenum; identical to SEQ ID NO: 8921

SEQ ID NO: 8962 - DNA, 50 bp, Mycobacteroides immunogenum; identical to SEQ ID NO: 8922
  source 1..50: mol_type = genomic DNA

SEQ ID NO: 8963 - DNA, 40 bp, Mycobacteroides immunogenum
  source 1..40: mol_type = genomic DNA
cagagcacgctgacgcgccaacctgtgatcggttgcgcct

SEQ ID NO: 8964 - DNA, 40 bp, Mycobacteroides immunogenum
  source 1..40: mol_type = genomic DNA
cagagcacgctgacgcgccatcctgtgatcggttgcgcct

SEQ ID NO: 8965 - DNA, 50 bp, Mycobacteroides immunogenum; identical to SEQ ID NO: 1455
  source 1..50: mol_type = genomic DNA

SEQ ID NO: 8966 - protein, 643 aa, Vibrio alginolyticus
MLYAYCRVSSGKQLEGLSMSLQGDEALLSRIAKEYHTTVSDRIYIDEGVSSYKGKNLESGQLGEIVRDIEKGRIKKGDIIVMRALDRLSRQELTDSENLYNRIVGAGVNIYTTIDNHLYKPNCVHSAILKTLALNTAHEESAKKAYLTNRYALHRIEEFQRGEKPENGTAWDIGVGKHPFWIQLDNKVVQPHRLYFQAAKDIVKLIIDGKGNREIMRYLEENHPRYDKDGERIEWSYSLVASFHRKEALTGLRSVKLEDIEYKLEDYYPRVCTDLEFHQMSLRKEEKYVSNGNRARPTLLGGIRRLYCSCGRAMGGITPKDSPAFYRCLHILTPCISYISLRVVDRIVLDAIQTHVFESEKFDDTLLNELLSKADLMRIKYSKQESMLMSDPDLFTPEFKQQLRKSKLEIEQVEQEIMAERKKHAVIEDVDLKSYAEWQAAISEFQEQRDDEEIIKLRDKVQKLVRRIDIDGQLITITMVDGKKIYRHIVKDNTHDTVYCKVHVVDSETLEMVTLTNPALADVYCLESELERFKSACNINQTFITRIAIREKTDHLGIVQQAVSDYLDEHDVLRWRRSDVMKLGVTTTQWQMFKEPEHMSGTGVVIEELKYKDKNYAKKSAVVAYKRYNEQAILNLLNARSLI

SEQ ID NO: 8967 - DNA, 50 bp, Vibrio alginolyticus
  source 1..50: mol_type = genomic DNA
tatctcactagttttgacttttgcgtcacttaaagtaaaatagtgtgata

SEQ ID NO: 8968 - DNA, 40 bp, Vibrio alginolyticus
  source 1..40: mol_type = genomic DNA
actcaacactttctttcgcatcaccaaatagcattgatgt

SEQ ID NO: 8969 - DNA, 40 bp, Vibrio alginolyticus
  source 1..40: mol_type = genomic DNA
actcaacactttctttcgcctcaccaaatagcattgatgt

SEQ ID NO: 8970 - DNA, 50 bp, Vibrio alginolyticus
  source 1..50: mol_type = genomic DNA
gatctcactgcattgtaattttccctcactcaaagtcatagactgtcata

SEQ ID NO: 8971 - protein, 503 aa, Priestia megaterium
MYGIVQRRQDEMIGDNFIMNVGIYLRKSRGEDEVQDLAKHREYLIQIAKKNDWKVKLYEEIASSQHYLERPALQQMLKDIENREVDTILVYAPDRLSRKDVHFLTILDHLLQYGINKIYIKDTEYDLTSPHVRTQLSIMAVLAQAEYMLIAQRMSEGKMRSAEKGRWNGGRVKFGYTTNEENQLIINQEDYPLAREIVDKLLQGFSYHNIARDFAERGIRTKRGKIWTTASLGDWFKSPTLRGHTSYKIKGKEIFTPNTHEAIVSEAEYQAIKKLQENRENNFKKKKNNVSHWLSGVLTCSVCGWSKKVQIDTKKGNKFYIRKCNSTVEDSEGNLVPCPSIGCKSDIVENMLKDVIGDIREQLKERMSLLLETDVTILKAKKEQEAKQLEKELDKLEQRNEYLLEDLQDRIITREEFQKGKKRNEEKKEKITANLREAQLQLQEIDVSASYNQYQYIETLLNRWDTLEHEDKNRLIKIVFKKIEYIRLKRGQVPDITVIPNLS

SEQ ID NO: 8972 - DNA, 50 bp, Priestia megaterium
  source 1..50: mol_type = genomic DNA
agctgtattctttaaggtattgttcattcaaaacattaaagaatacagaa

SEQ ID NO: 8973 - DNA, 40 bp, Priestia megaterium
  source 1..40: mol_type = genomic DNA
agctgcaatagcttttgtacaatcgattacacttcctccc

SEQ ID NO: 8974 - DNA, 40 bp, Priestia megaterium
  source 1..40: mol_type = genomic DNA
agctgcaatagcttttgtatcatcgattacacttcctccc

SEQ ID NO: 8975 - DNA, 50 bp, Priestia megaterium
  source 1..50: mol_type = genomic DNA
acttttatttaataagttattgcttcttctaaacattagtgaatacgaaa

SEQ ID NO: 8976 - protein, 517 aa, Parageobacillus thermoglucosidasius
MDRVAMYLRKSRADLEAEARGEGETLAKHKKMLLKVAKEKNLNIVKIFEEVVSGDSILHRPQMLQLLQEVGAGKYDAVLCVDIDRLGRGDKQEQGLIEKTFKESNTKIITLRKTYDLNDEFDEEYMEFETFMARKEYKIIKRRLQRSRVQSVEEGNYIGTYPPFGYIIKDLGKNGRTLEPHPEQAPIVKMIFEWYTHDNPAIRMGTAAIANKLNELGYRTATGKLWYGSAVLNIIKNAVYAGRIQWRKREQKPSTVPGKRRDTRTRNKDEWIDVPGKHEPIISEELYQKAQDILKSRYHVPYQLVNGITNPLAGIVKCGKCGASMVYRPYTNQKPHLKCYNNPRCDNKASNFELVEKRLIDSLRLWLEAYKANWESYRPEEDETNTIELKQTAIKRLERELIETQKQKWNLHDLLERGIYDEKTFIERSNYLADKIDELERALTKAQEELALEKERELAKVEIIPQVEHVLELYDKTDDPKLKNSLLKSVLEKAVYRKEKHQWRDEFTLIIYPKLPK

SEQ ID NO: 8977 - DNA, 50 bp, Parageobacillus thermoglucosidasius
  source 1..50: mol_type = genomic DNA
aacagataacatgtgaaaggaaacgaaatcacactaacatgttatctgtt

SEQ ID NO: 8978 - DNA, 40 bp, Parageobacillus thermoglucosidasius
  source 1..40: mol_type = genomic DNA
gcaagataaggaagggaatgaaatcagcctcatcgacgtc

SEQ ID NO: 8979 - DNA, 40 bp, Parageobacillus thermoglucosidasius
  source 1..40: mol_type = genomic DNA
gcaagataaggaagggaataaaatcagcctcatcgacgtc

SEQ ID NO: 8980 - DNA, 50 bp, Parageobacillus thermoglucosidasius
  source 1..50: mol_type = genomic DNA
catacataaacattgaaattaaacaaaatgtcactatcattttatctttt

SEQ ID NO: 8981 - protein, 540 aa, Roseburia hominis; identical to SEQ ID NO: 3656

SEQ ID NO: 8982 - DNA, 50 bp, Roseburia hominis
  source 1..50: mol_type = genomic DNA
caacaatatctttaattaagggaaacaggagtttcccatagttaaagata

SEQ ID NO: 8983 - DNA, 40 bp, Roseburia hominis
  source 1..40: mol_type = genomic DNA
gacactctcgaaatatgagacgggggaatccctgccggat

SEQ ID NO: 8984 - DNA, 40 bp, Roseburia hominis
  source 1..40: mol_type = genomic DNA
gacactctcgaaatatgagcagggggaatccctgccggat

SEQ ID NO: 8985 - DNA, 50 bp, Roseburia hominis
  source 1..50: mol_type = genomic DNA
aaacaatagaaaagataaatggaacaaagagttgctgtttttaaaagata

SEQ ID NO: 8986 - protein, 561 aa, Clostridium gasigenes
MDLINVCAYCRVSTDKEEQKQSFEAQQRFFKNKLSKENKYNLIDIYTDEGLSGTKFRKRESFNRMLHDAGLDKVESSSNIAEVRNKYISTDYILSERKPKFKYIFVKDSSRFARNTEVNRILNRLRDKGVYVYFEDLNKSTENDTDKMLIEFIFSMAQQESIDKSNKVRFGNKRSAEAGVVRFGREVYGYTINNKENTLRENKEEADIIRKMFNMRLEGKGSRVMSKELADEGMVTRKGTKFEPGSIRYILKNPVYMGKLVRNKSKVSSIGDSSSRITNPMEEWIIEDSDKVDKIISEEIFYEVQKIILKSAKNSRGKYNGRKEYAGKIVCGSCYKNYNRSWGVNDIKYYVCSNRKKHSKCMNPNLTEKFVDAEIDKYLVKGEYKTMVRGYCKLLIYIMSDKAQKIIDDVPAEKINEIQAEIDKYKNKISILLDILLEDGSESSKEMFNNKKSEFDSKIKELEKELVELNSTKKVKEEKLDKLGEIQESIEKYYSTIPEEISKKDFIQKNLIHIKVNKDKTLTILNRGMEFVFNTFNTLGLSEKEIDEYLNMTLHNETYDT

SEQ ID NO: 8987 - DNA, 50 bp, Clostridium gasigenes
  source 1..50: mol_type = genomic DNA
cattgcataatgaaacatacgatacatattgtttattacaatatgcaaca

SEQ ID NO: 8988 - DNA, 40 bp, Clostridium gasigenes
  source 1..40: mol_type = genomic DNA
aagagccgccctaacagggcataaggtatatgccacgatt

SEQ ID NO: 8989 - DNA, 40 bp, Clostridium gasigenes
  source 1..40: mol_type = genomic DNA
aagagccgccctaacagggtataaggtatatgccacgatt

SEQ ID NO: 8990 - DNA, 50 bp, Clostridium gasigenes
  source 1..50: mol_type = genomic DNA
tattgtatatgtatatatactatatatattgtatatgtatatatactata

SEQ ID NO: 8991 - protein, 577 aa, Citrobacter sp FDAARGOS 156
MPKLYSYIRWSSDRQDKGTTKDRQLSAARTYAEEKGLEMVEIIEPGVSAFRGKNRSGKLGDFIDAVKSNAIPSDSWLYCENLDRLSRDQVDEALSLFLEMIRLGLTIVTGMDKKVYNKASIRQNPTDLMLSILLFIRGNEESETKSKRTIGNVVALVERHNQGLPVNIKSVGRHPFWIDDSGSQYEAVKKHPIYWNIAREAIDMFLDGHGVYSVKRALDEKYPNGLKGKEWDYQVLQKMRNNRALIGERTMKVGGQIYKLKNYYPLLCKDETEYLVLAEKKEQNNFKSKKESKDKIKLLSGLSLLRCSKCGGTMHSFINKKTPRYICTNGTHKQKNCSGWSIIASLVEHCTMIALLMGYLNNSWKNGSDTTLIDEEINAKQSIIADLDSKISNLAAAISVAPNVVELATKIQVLNTEREQLLINVVNLKERSVSLKSKGSFEIEMTEFLILIQYAVFTDLEDEDRNKIRKIISSIIEYVIVDKTDSCITIRIKCYGIDEVLVFGGVNRKPHWEFDIELVNDDQDSNVAVVTDEIREKTNQYLADLRKSYHNLYDSSVSMLSQVGYPEINGSLFWPNR

SEQ ID NO: 8992 - DNA, 50 bp, Citrobacter sp FDAARGOS 156
  source 1..50: mol_type = genomic DNA
acaatatatttattgatttttcgggcaccctaatgatataaatccaatct

SEQ ID NO: 8993 - DNA, 40 bp, Citrobacter sp FDAARGOS 156
  source 1..40: mol_type = genomic DNA
aatcgacaaggtttttcgggcagccgagggagacaaagcc

SEQ ID NO: 8994 - DNA, 40 bp, Citrobacter sp FDAARGOS 156
  source 1..40: mol_type = genomic DNA
aatcgacaaggtttttcgggaagccgagggagacaaagcc

SEQ ID NO: 8995 - DNA, 50 bp, Citrobacter sp FDAARGOS 156
  source 1..50: mol_type = genomic DNA
ataatatgtgaatatttttttctggatccctaatgaccatgttccactct

SEQ ID NO: 8996 - protein, 577 aa, Citrobacter braakii
MPKLYSYIRWSSDRQDKGTTKDRQLSAARTYAEEKGLEMVEIIEPGVSAFRGKNRSGKLGDFIDAVKSNAIPSDSWLYCENLDRLSRDQVDEALSLFLEMIRLGLTIVTGMDKKVYNKASIRQNPTDLMLSILLFIRGNEESETKSKRTIGNVFALVERHNQGLPVNIKSVGRHPFWIDDSGSQYEAVKKHPIYWNIAREAIDMFLDGHGVYSVKRALDEKYPNGLKGKEWDYQVLQKMRNNRALIGERTMKVGGQIYKLKNYYPLLCKDETEYLVLAEKKEQNNFKSKKESKDKIKLLSGLSLLRCSKCGGTMHSFINKKTPRYICTNGTHKQKSCSGWSIIASLVEHCTMIALLMGYLNNSWKNGSDTTLIDEEINAKQSIIADLDSKISNLAAAISVAPNVVELATKIQVLNTEREQLLINVVNLKERSVSLKSKGSFEIEMTEFLILIQYAVFTDLEDEDRNKIRKIISSIIEYVIVDKTDSCITIRIKCYGIDEVLVFGGVNRKPHWEFDIELVNDDQDSNAVVVTDEIREKTNQYLVDLRKSYHNLYDSSVSMLSQVGYPEINGSLFWPNR

SEQ ID NO: 8997 - DNA, 50 bp, Citrobacter braakii; identical to SEQ ID NO: 8992
  source 1..50: mol_type = genomic DNA

SEQ ID NO: 8998 - DNA, 40 bp, Citrobacter braakii
  source 1..40: mol_type = genomic DNA
aatcgacgaggtttttcgggcagccgagggagacaaagcc

SEQ ID NO: 8999 - DNA, 40 bp, Citrobacter braakii
  source 1..40: mol_type = genomic DNA
aatcgacgaggtttttcgggaagccgagggagacaaagcc

SEQ ID NO: 9000 - DNA, 50 bp, Citrobacter braakii; identical to SEQ ID NO: 8995
  source 1..50: mol_type = genomic DNA

SEQ ID NO: 9001 - protein, 416 aa, Citrobacter braakii
MPKLYSYIRWSSDRQDKGTTKDRQSARTYAEEKGLEMVEIIEPGVSAFRGKNRSGKLGDFIDAVKSNAIPSDSWLYCENLDRLSRDQVDEALSLFLEMIRLGLTIVTGMDKKVYNKASIRQNPTDLMLSILLFIRGNEESETKSKRTIGNVVALVERHNQGLPVNIKSVGRHPFWIDDSGSQYEAVKKHPIYWNIAREAIDMFLDGHGVYSVKRALDEKYPNGLKGKEWDYQVLQKMRNNRALIGERTMKVGGQIYKLKNYYPLLCKDEAEYLVLAEKKEQNNFKSKKESKDKIKLLSGLSLLRCSKCGGTMHSFINKKTPRYICTNGTHKQKSCSGWSIIASLVEHCTMIALLMGYLNNSWKNGSDTTLIDEEINAKQSIIADLDSKISNLAAAISVAPNVVELGNKDSSVKYRT

SEQ ID NO: 9002 - DNA, 50 bp, Citrobacter braakii; identical to SEQ ID NO: 8992
  source 1..50: mol_type = genomic DNA

SEQ ID NO: 9003 - DNA, 40 bp, Citrobacter braakii; identical to SEQ ID NO: 8998
  source 1..40: mol_type = genomic DNA

SEQ ID NO: 9004 - DNA, 40 bp, Citrobacter braakii; identical to SEQ ID NO: 8999
  source 1..40: mol_type = genomic DNA

SEQ ID NO: 9005 - DNA, 50 bp, Citrobacter braakii; identical to SEQ ID NO: 8995
  source 1..50: mol_type = genomic DNA

SEQ ID NO: 9006 - protein, 577 aa, Escherichia coli
MPKLYSYIRWSSDRQDKGTTKDRQLSAARTYAEEKGLEMVEIIEPGVSAFRGKNRSGKLGDFIDAVKSNAIPSDSWLYCENLDRLSRDQVDEALSLFLEMIRLGLTIVTGMDKKVYNKASIRQNPTDLMLSILLFIRGNEESETKSKRTIGNVVALVERHNQGLPVNIKSVGRHPFWIDDSGSQYEAVKKHPIYWNIAREAIDMFLDGHGVYSVKRALDEKYPNGLKGKEWDYQVLQKMRNNRALIGERTMKVGGQIYKLKNYYPLLCKDETEYLVLAEKKEQNNFKSKKESKDKIKLLSGLSLLRCSKCGGTMHSFINKKTPRYICTNGTHKQKSCSGWSIIASLVEHCTMIALLMGYLNNSWKNGSDTTLIDEEINAKQSIIADLDSKISNLAAAISVAPNVVELATKIQVLNTEREQLLINVVNLKERSVSLKSKGSFEIEMTEFLILIQYAVFTDLEDEDRNKIRKIISSIIEYVIVDKTDSCITIRIKCYGIDEVLVFGGVNRKPHWEFDIELVNDDQDSNAVVVTDEIREKTNQYLVDLRKSYHNLYDSSVSMLSQVGYPEINGSLFWPNR

SEQ ID NO: 9007 - DNA, 50 bp, Escherichia coli; identical to SEQ ID NO: 8992
  source 1..50: mol_type = genomic DNA

SEQ ID NO: 9008 - DNA, 40 bp, Escherichia coli
  source 1..40: mol_type = genomic DNA
aatcaacaaggtttttcggacagccaagggaaacaaagcc

SEQ ID NO: 9009 - DNA, 40 bp, Escherichia coli
  source 1..40: mol_type = genomic DNA
aatcaacaaggtttttcgggaagccaagggaaacaaagcc

SEQ ID NO: 9010 - DNA, 50 bp, Escherichia coli; identical to SEQ ID NO: 8995
  source 1..50: mol_type = genomic DNA

SEQ ID NO: 9011 - protein, 577 aa, Escherichia coli; identical to SEQ ID NO: 9006

SEQ ID NO: 9012 - DNA, 50 bp, Escherichia coli
  source 1..50: mol_type = genomic DNA
caatatatttattgatttttcgggcaccctaatgatataaatccaatctt

SEQ ID NO: 9013 - DNA, 40 bp, Escherichia coli
  source 1..40: mol_type = genomic DNA
atcaacaaggtttttcggacagccaagggaaacaaagccg

SEQ ID NO: 9014 - DNA, 40 bp, Escherichia coli
  source 1..40: mol_type = genomic DNA
atcaacaaggtttttcggaatgccaagggaaacaaagccg

SEQ ID NO: 9015 - DNA, 50 bp, Escherichia coli
  source 1..50: mol_type = genomic DNA
taatatgtgaatatttttttctggatccctaatgaccatgttccactctc

SEQ ID NO: 9016 - protein, 604 aa, Escherichia fergusonii
MKKVFVYHRVSSDQQLDWSGIARQAELLEGYLERTGICAEMDDPAPVVLSDQGVSAFKGLNISEGELGAWMEQVRNGMWDSSILVVESIDRFSRQNPFDVMGYINALMAHNVAIHDVMANIVISRSNSKDLPFVMMNAQRAYDESKYKSDRIRKGWAKKREQAFNKGTIVTNKRPQWIEVEKDKYVLNEKAAVVKEIFALYQTSMGCPTIAKQLQRKEGEHYKFNRPWTGELVHKILTNRRVTGKIFISEIIRNHDDIENPVTQKKYDMDVYPVVINEEEFELVQELLKSRRPNAGRVTVKKDGQEEVLIKSNLFSGIARCTECGGPMYHNVVRAKRTPKKGDPKIEEYRYIRCLNERDGLCENKAMTYETVERFVVEHLLGMDLSTVMKEQEFNPEIEVLRIQIDQVKEQITNYENGIERRKSAGKIITFDMREDLDDAKSELERLLARQASLATVQVDVAVLQDVNVTELYNVNNVDIRTRYENELNKIVSTIRLKRNGISYTIDISYKQNELKRHVLFVENKKKEQTLISEVIIEDVDGGKFYYTPSFMIRLEDGEIRFQHTNEDLSIVDYSLLLNYVDAVDRNDTVGVWMRNQFNFLTSN

SEQ ID NO: 9017 - DNA, 50 bp, Escherichia fergusonii
  source 1..50: mol_type = genomic DNA
atattgtaattagcaatacacactcaagtgtgttatgcttatacaaacaa

SEQ ID NO: 9018 - DNA, 40 bp, Escherichia fergusonii
  source 1..40: mol_type = genomic DNA
tttttgcttgataatcatacaaataggttccgttacagca

SEQ ID NO: 9019 - DNA, 40 bp, Escherichia fergusonii
  source 1..40: mol_type = genomic DNA
tttttgcttgataatcatattaataggttccgttacagca

SEQ ID NO: 9020 - DNA, 50 bp, Escherichia fergusonii
  source 1..50: mol_type = genomic DNA
atattttaatagaaaatacacacttttttgtgttattcaattctattcat

SEQ ID NO: 9021 - protein, 604 aa, Escherichia fergusonii
MKKVFVYHRVSSDQQLDGSGIARQAELLEGYLERTGICAEMDDPAPVVLSDQGVSAFKGLNISEGELGAWMEQVRNGMWDSSILVVESIDRFSRQNPFDVMGYINALMAHNVAIHDVMANIVISRSNSKDLPFVMMNAQRAYDESKYKSDRIRKGWAKKREQAFNKGTIVTNKRPQWIEVEKDKYVLNEKAAVVKEIFALYQTSMGCPTIAKQLQRKEGEHYKFNRPWTGELVHKILTNRRVTGKIFISEIIRNHDDIENPVTQKKYDMDVYPVVINEEEFELVQELLKSRRPNAGRVTVKKDGQEEVLIKSNLFSGIARCTECGGPMYHNVVRAKRTPKKGDPKIEEYRYIRCLNERDGLCENKAMTYETVERFVVEHLLGMDLSTVMKEQEFNPEIEVLRIQIDQVKEQITNYENGIERRKSAGKIITFDMREDLDDAKSELERLLARQASLATVQVDVAVLQDVNVTELYNVNNVDIRTRYENELNKIVSTIRLKRNGISYTIDISYKQNELKRHVLFVENKKKEQTLISEVIIEDVDGGKFYYTPSFMIRLEDGEIRFQHTNEDLSIVDYSLLLNYVDAVDRNDTVGVWMRNQFNFLTSN

SEQ ID NO: 9022 - DNA, 50 bp, Escherichia fergusonii; identical to SEQ ID NO: 9017
  source 1..50: mol_type = genomic DNA

SEQ ID NO: 9023 - DNA, 40 bp, Escherichia fergusonii; identical to SEQ ID NO: 9018
  source 1..40: mol_type = genomic DNA

SEQ ID NO: 9024 - DNA, 40 bp, Escherichia fergusonii; identical to SEQ ID NO: 9019
  source 1..40: mol_type = genomic DNA

SEQ ID NO: 9025 - DNA, 50 bp, Escherichia fergusonii; identical to SEQ ID NO: 9020
  source 1..50: mol_type = genomic DNA

SEQ ID NO: 9026 - protein, 503 aa, Paraclostridium bifermentans
MKTAIYLRKSRADEEAENKGEFETLSRHRSTLLKIAKEQNLNIVEIKEELVSGESIQYRPKMLELLDEVKSGLYDAVLVMDIDRLGRGNMQDQGLILETFKKSKTKIITPRKIYDLTNEFDEEYSEFEAFMARKELKLITRRMQRGRIKSVEDGKFIASKPPYGYKFVFDENGKKSMVIDEEKANVVKLIFKLYTSGNGACKVANHLNSLGLKTTTGRSWYEKGVRDIIKNKTYAGYVVWNKVERTKTSSKLRSEDEIIESKGIHEPIISESLWNKAQRTLKGNAILPTPVFKEITNPLAGLVICRCCGHKMLARSSTSKSYEKFIRCTNCGMNRGSKLYIVEDEVISQLREWVKAYKTNFKNIPSIENSNSNLDTYNKLLKNLNSEYETLVKQKENLHNLLEQGIYDVDTYLDRSKSLADKIETNKLNIESVKKDISKEEKVNISIDDIIPSVEDVLDLYYKTDLMSERNDLLRSVIDYIDYYKEPGSKRSKLDIVINPKLD

SEQ ID NO: 9027 - DNA, 50 bp, Paraclostridium bifermentans
  source 1..50: mol_type = genomic DNA
aactgttatcatggaactgataaccaataatcagttctatgataacagtt

SEQ ID NO: 9028 - DNA, 40 bp, Paraclostridium bifermentans; identical to SEQ ID NO: 7208
  source 1..40: mol_type = genomic DNA

SEQ ID NO: 9029 - DNA, 40 bp, Paraclostridium bifermentans
  source 1..40: mol_type = genomic DNA
aaatgtccgtacagatgttatattcaacgttttatcaggt

SEQ ID NO: 9030 - DNA, 50 bp, Paraclostridium bifermentans
  source 1..50: mol_type = genomic DNA
acctgttattagataacagataacataatatctgttattagataacatag

SEQ ID NO: 9031 - protein, 501 aa, Clostridioides difficile
MNVAIYLRKSRADEEAEHRGEFETLSRHKTTLLKLAREQNLNVIEIKEELVSGESIEYRPKMIELLDEIKNNNYDAVLVMDIDRLGRGNMQDQGLILDTFKKSKTKIITPRKTYNLNDEFDEEYSEFEAFMARKELKLISRRMQRGKIKSIEEGKFIAQAPPYGYDIKYLNNKERVLVINEDKATVVKIIFDMYLNGDGACKISNYLNELGYKTTTGRTWYEKGIRDIIKNKVYCGYIVWNKVERKRNSSRTRGIEEQIEVKGKHEPIISEDIWNKAQNIRKKRINSPTPNNKITNPLAGIVKCGYCNHTLIAKSNTTSSGYEKYMVCTNCKNKATKLYILENKILEVLNKWLVNYRLSLKDEKDNSKPENTLEHTLINLNKELDTLEKQKERLHDFLEQGIYDSNTFGERLKILLSRIENVREAINKTNIDIEMQKERNTVKTQIVPQLEKILSEYTEEKEPYLKNVLLKSVINYAVYKKEPNQKSGDFSLVLYPNIPRN

SEQ ID NO: 9032 - DNA, 50 bp, Clostridioides difficile
  source 1..50: mol_type = genomic DNA
aaatgttataaatagactgattaccaaaaatcagtttgtttataacataa

SEQ ID NO: 9033 - DNA, 40 bp, Clostridioides difficile
  source 1..40: mol_type = genomic DNA
taatgtaagaactgatgtacaatttggtgtaatggctgga

SEQ ID NO: 9034 - DNA, 40 bp, Clostridioides difficile
  source 1..40: mol_type = genomic DNA
taatgtaagaactgatgtaatatttggtgtaatggctgga

SEQ ID NO: 9035 - DNA, 50 bp, Clostridioides difficile; identical to SEQ ID NO: 9030
  source 1..50: mol_type = genomic DNA

SEQ ID NO: 9036 - protein, 491 aa, Klebsiella pneumoniae
MKQNGKAYSYIRFSSKKQEQGDSVRRQTELAEQYAHANNLILSDKNFQDLGISAFKEGNRPSLGDMLEAIEKGQIEQGSTIIIESLDRLSRRGIDVTQQIIKSILQNNVFIASLVDGLLLNRESVNDLVSVIRIALAADLAHKESEKKSQRLRETKGQQRQRALNGEVIHKVLPFWLQRKGDKYVFSEKLDTVKRIIELRQKGLGTNKIAKTLNDEGHEPLRSTGWNHTTIGKTINSVALYGAYQTSETTKDRKIILLDIVEDFYPAVISKEEFMLLQSDQKQNKPGYKSVHNAFAGILKHECGGALVRKFHAVSGKTYQYHVCANARDGKCNVTKNFKNIEIALYRIMKELKLEKKTSIDETLLLERNSVKAKIQDLNDMLLNLSKVPISVIQTINNLEEKLQRLEESIKQQNNMIISEQAVDFNLLQEIKDPQELNMMLKRVIEKIIVFNIGKRWRVKVMYRNKHSQSFIWDGEKISFISDTNKLLDLF

SEQ ID NO: 9037 - DNA, 50 bp, Klebsiella pneumoniae
  source 1..50: mol_type = genomic DNA
tattattcactttgaaactatattgtgatattgttgcaaagaagcaaaat

SEQ ID NO: 9038 - DNA, 40 bp, Klebsiella pneumoniae; identical to SEQ ID NO: 1423
  source 1..40: mol_type = genomic DNA

SEQ ID NO: 9039 - DNA, 40 bp, Klebsiella pneumoniae
  source 1..40: mol_type = genomic DNA
cttgctgccaaactgcatgttaacgttgctggatactagc

SEQ ID NO: 9040 - DNA, 50 bp, Klebsiella pneumoniae
  source 1..50: mol_type = genomic DNA
tagttatgaagccataactttattttgatatttttcttaataagcaaaat

SEQ ID NO: 9041 - protein, 491 aa, Klebsiella pneumoniae; identical to SEQ ID NO: 9036

SEQ ID NO: 9042 - DNA, 50 bp, Klebsiella pneumoniae; identical to SEQ ID NO: 9037
  source 1..50: mol_type = genomic DNA

SEQ ID NO: 9043 - DNA, 40 bp, Klebsiella pneumoniae; identical to SEQ ID NO: 1418
  source 1..40: mol_type = genomic DNA

SEQ ID NO: 9044 - DNA, 40 bp, Klebsiella pneumoniae
  source 1..40: mol_type = genomic DNA
cttactgccaaactgcatgttaacgttgctggatactagc

SEQ ID NO: 9045 - DNA, 50 bp, Klebsiella pneumoniae; identical to SEQ ID NO: 9040
  source 1..50: mol_type = genomic DNA

SEQ ID NO: 9046 - protein, 491 aa, Klebsiella pneumoniae
MKQNGKAYSYIRFSSKKQEQGDSVRRQTELAEQYAHANNLILSDKNFQDLGISAFKEGNRPSLGDMLEAIEKGQIEQGSTIIIESLDRLSRRGIDVTQQIIKSILQNNVFIASLVDGLLLNRESVNDLVSVIRIALAADLAHKESEKKSQRLRETKGQQRQRALNGEVIHKVLPFWLQRKGDKYVFSEKLDTVKRIIELRQKGLGTNKIAKTLNDEGHKPLRSTGWNHTTIGKTINSVALYGAYQTSETTKDRKIILLDIVEDFYPAVISKEEFMLLQSDQKQNKPGYKSVHNAFAGILKHECGGALVRKFHAVSGKTYQYHVCANARDGKCNVTKNFKNIEIALYRIMKELKLEKKTSIDETLLLERNSVKAKIQDLNDMLLNLSKVPISVIQTINNLEEKLQRLEESIKQQNNMIISEQAVDFNLLQEIKDPQELNMMLKRVIEKIIVFNIGKRWRVKVMYRNKHSQSFIWDGEKISFISDTNKLLDLF

SEQ ID NO: 9047 - DNA, 50 bp, Klebsiella pneumoniae; identical to SEQ ID NO: 9037
  source 1..50: mol_type = genomic DNA

SEQ ID NO: 9048 - DNA, 40 bp, Klebsiella pneumoniae; identical to SEQ ID NO: 1418
  source 1..40: mol_type = genomic DNA

SEQ ID NO: 9049 - DNA, 40 bp, Klebsiella pneumoniae; identical to SEQ ID NO: 9044
  source 1..40: mol_type = genomic DNA

SEQ ID NO: 9050 - DNA, 50 bp, Klebsiella pneumoniae; identical to SEQ ID NO: 9040
  source 1..50: mol_type = genomic DNA

SEQ ID NO: 9051 - protein, 498 aa, Klebsiella pneumoniae
MKQNGQAYSYIRFSSKKQEQGDSVRRQTELAEQYAHANNLILSDKNFQDLGISAFKEGNRPSLGDMLEAIEKGQIEQGSTIIIESLDRLSRRGIDVTQQIIKSILQNNVFIASLVDGLLLNRESTNDLVSVIRIALAADLAYKESEKKSQRLRETKGQQRQRALNGEVINKILPFWLERKQNKFVFSDKLDTVKRIIELRRKGLGTNKIAKTLNNEGYKPLRSAGWNHTTIGKTINSVALYGAYQTSETTKDRKIILLDIVEDYYPAVISKEEFMLLQSDQKQNKPGYKSEHNAFAGILKHECGGALVRKFHAVSGKTYQYHVCANARDGKCNVTKNFKNIEIALYRIMKELKLEKKTNIDETLILERNSVKAKILDLNDMLLNLSKIPVSVIQTINNLEEKLQRLEEKIKEQNSMIISEQAFDLNLLQEIKDPQELNMMLKRVIEQIIVFNIGKRWRVKVMYRNKHSQNFIWDGEKISFISDTKKLLELFKSQKEQT

SEQ ID NO: 9052 - DNA, 50 bp, Klebsiella pneumoniae; identical to SEQ ID NO: 9037
  source 1..50: mol_type = genomic DNA

SEQ ID NO: 9053 - DNA, 40 bp, Klebsiella pneumoniae; identical to SEQ ID NO: 1418
  source 1..40: mol_type = genomic DNA

SEQ ID NO: 9054 - DNA, 40 bp, Klebsiella pneumoniae; identical to SEQ ID NO: 9044
  source 1..40: mol_type = genomic DNA

SEQ ID NO: 9055 - DNA, 50 bp, Klebsiella pneumoniae; identical to SEQ ID NO: 9040
  source 1..50: mol_type = genomic DNA

SEQ ID NO: 9056 - protein, 491 aa, Klebsiella pneumoniae
MKKNGKAYSYIRFSSKKQEQGDSVRRQTELAEQYAHANNLILSDKNFQDLGISAFKEGNRPSLGDMLEAIEKGQIEQGSTIIIESLDRLSRRGIDVTQQIIKSILQNNVFIASLVDGLLLNRESVNDLVSVIRIALAADLAHKESEKKSQRLRETKGQQRQRALNGEVIHKVLPFWLQRKGDKYVFSEKLDTVKRIIELRQKGLGTNKIAKTLNDEGHEPLRSTGWNHTTIGKTINSVALYGAYQTSETTKDRKIILLDIVEDFYPAVISKEEFMLLQSDQKQNKPGYKSVHNAFAGILKHECGGALVRKFHAVSGKTYQYHVCANARDGKCNVTKNFKNIEIALYRIMKELKLEKKTSIDETLLLERNSVKAKIQDLNDMLLNLSKVPISVIQTINNLEEKLQRLEESIKQQNNMIISEQAVDFNLLQEIKDPQELNMMLKRVIEKIIVFNIGKRWRVKVMYRNKHSQSFIWDGEKISFISDTNKLLDLF

SEQ ID NO: 9057 - DNA, 50 bp, Klebsiella pneumoniae; identical to SEQ ID NO: 9037
  source 1..50: mol_type = genomic DNA

SEQ ID NO: 9058 - DNA, 40 bp, Klebsiella pneumoniae; identical to SEQ ID NO: 1418
  source 1..40: mol_type = genomic DNA

SEQ ID NO: 9059 - DNA, 40 bp, Klebsiella pneumoniae; identical to SEQ ID NO: 9044
  source 1..40: mol_type = genomic DNA

SEQ ID NO: 9060 - DNA, 50 bp, Klebsiella pneumoniae; identical to SEQ ID NO: 9040
  source 1..50: mol_type = genomic DNA

SEQ ID NO: 9061 - protein, 498 aa, Klebsiella pneumoniae; identical to SEQ ID NO: 9051

SEQ ID NO: 9062 - DNA, 50 bp, Klebsiella pneumoniae; identical to SEQ ID NO: 9037
  source 1..50: mol_type = genomic DNA

SEQ ID NO: 9063 - DNA, 40 bp, Klebsiella pneumoniae; identical to SEQ ID NO: 1423
  source 1..40: mol_type = genomic DNA

SEQ ID NO: 9064 - DNA, 40 bp, Klebsiella pneumoniae; identical to SEQ ID NO: 9039
  source 1..40: mol_type = genomic DNA

SEQ ID NO: 9065 - DNA, 50 bp, Klebsiella pneumoniae; identical to SEQ ID NO: 9040
  source 1..50: mol_type = genomic DNA

SEQ ID NO: 9066 - protein, 628 aa, Bacteroides helcogenes
MKAAFLIRCSTKNQDLNRQTRDLTRLAKSMGYEYDLENLVYGEKITGKDDVTKKNRDSIDRLLRAAKEQRFDVVLVSEVSRMSRDPASGRIYVRLLINMNIPVYFKDIDLWTINPETGKKVRDAELVIGAAFDAAWKYLKSMKTQIASARRNELDNNRISIGQPYFGYKRYEGTDKSKKNQIVVNEEEAEVVQAVYNEYLKEGATLKSTALAITDKYGEKLNRKFSLGTIEHILTYESYATGIKKVNLKDPDTDEVEVFDVSTPIIIDKELYEAATNKRKKNRVKDEPYPNQQVYLLSKLIKCPDCGYTLTPRRKAGEFGQTYRLVNGKPAVSWLCMSGINNITDCTNRTSIANEKLEPIIWELVKKELIGYANMNDEKREEQIRECEEKIEYQNYSIQNFTKEIDKLKKRLSTAYQFSINAAEMAGDDEDMRTMAMEEFNRTAKGVRQEMKNFEKSIEQAKGELEKLRDLKTFYSQPTLPKDYLEQIEGNFTEKRNLVKQLITKIVPYRITTFKKKERESGVKTCNKMITVKNGAVLLEVYTIGGVYNVFYNANSKFQVKTAYYVHGEYATFQNGIRKYPAYDEGEYFVISNANMVMETDDIDEVVTVNEFVDIAIANNWVIEYQYQ

SEQ ID NO: 9067 - DNA, 50 bp, Bacteroides helcogenes
  source 1..50: mol_type = genomic DNA
tggttaaagtgtttattctgttgttcaacataaagaaatcacttgcacag

SEQ ID NO: 9068 - DNA, 40 bp, Bacteroides helcogenes
  source 1..40: mol_type = genomic DNA
gcggctgtactctggcagttcatcaagatataaaatgccg

SEQ ID NO: 9069 - DNA, 40 bp, Bacteroides helcogenes
  source 1..40: mol_type = genomic DNA
gcggctgtactctggcagtacatcaagatataaaatgccg

SEQ ID NO: 9070 - DNA, 50 bp, Bacteroides helcogenes
  source 1..50: mol_type = genomic DNA
ttgttaaaccatttattctcttctacaaaatagagataatagtttcacag

SEQ ID NO: 9071 - protein, 550 aa, Yersinia aleksiciae
MRTKMAYCYCRVSSGHQTTEKGGYGMSRQQGMLMDYVDEYSDSDGLGYGLSSESVVFLNAEGVSGFSGANLAKGSVLLAFIEDVKAEKIKNAVLCIENIDRFSRTNPQTAALSFLQLIEAGCNIHEAENGIVHHKNSDLNLISSGLIRSHRESLRKQKLSLKNWDKRFDNVVKKEAVLTARCPSWLYVEDNKYLEVIEHTKSIRLIFDLYIKGFGQAYIRDELNSRQWLYNGKTWGSWNVHRVLNDVRVTGKHRTQSDLRKDFDGLVIYPAIISEMDFNSVQQKLKSPGRSKKINRRANNLFSGLLMCGHCKKAHILLQVDKDKRFGRCSYAIAGNNRCHARGFKYEIIENALIEHLRHFEMQSLDEGEHNLELQKLQDEFIYYKNYGAEVQSIVDSVDIPNERDYRILKNIESKVREIEGRIDEIKVADNIADEFGKIVETITSDLKDVNNISMRQEFNCRLRKIIKSISVFRNSEIILLSIDYYACKDYQWININPKTGELQGNLYVEGDKIVIHTKTGDVSYNTIDREYSFIETSINEDEVLEILQK

SEQ ID NO: 9072 - DNA, 50 bp, Yersinia aleksiciae
  source 1..50: mol_type = genomic DNA
tactatatattgacatacctaatgaccatgagttatgctaaattatagtt

SEQ ID NO: 9073 - DNA, 40 bp, Yersinia aleksiciae
  source 1..40: mol_type = genomic DNA
tgcgattattgcgatcaccaccattagctcaattaatgta

SEQ ID NO: 9074 - DNA, 40 bp, Yersinia aleksiciae
  source 1..40: mol_type = genomic DNA
tgcgattattgcgatcacctgcattagctcaattaatgta

SEQ ID NO: 9075 - DNA, 50 bp, Yersinia aleksiciae
  source 1..50: mol_type = genomic DNA
aaatatataaatatatacataatgtgcatattttatatataaatatattt

SEQ ID NO: 9076 - protein, 550 aa, Yersinia kristensenii; identical to SEQ ID NO: 9071

SEQ ID NO: 9077 - DNA, 50 bp, Yersinia kristensenii; identical to SEQ ID NO: 9072
  source 1..50: mol_type = genomic DNA

SEQ ID NO: 9078 - DNA, 40 bp, Yersinia kristensenii
  source 1..40: mol_type = genomic DNA
cgcaatgatggcaatcgcaaccatcaattcaattaatgta

SEQ ID NO: 9079 - DNA, 40 bp, Yersinia kristensenii
  source 1..40: mol_type = genomic DNA
cgcaatgatggcaatcgcatgcatcaattcaattaatgta

SEQ ID NO: 9080 - DNA, 50 bp, Yersinia kristensenii; identical to SEQ ID NO: 9075
  source 1..50: mol_type = genomic DNA

SEQ ID NO: 9081 - protein, 475 aa, Bacillus subtilis
MELVEANSLKNVGIYVRVSTEEQAKEGYSIAAQKEKLKAYCISQGWANYKFYIDEGKSAKDIHRPSLELMLRHIEQGIINTVLVYRLDRLTRSVRDLYSLLDYFDKYNAVFRSATEVYDTGSATGRLFITLVAAMAQWERENLGERVKMGQVEKARQGQYSAPAPFGFTKEGGYLVKNPQEGEILLDMIDKIKKGYSLRELADYLDESDAVPKRGYKWHIASILVMLKNPVLYGAFRWGDEIIEDAFEGYISKEEFEQLQKILHDRQNFKKRETYSIFIFQTKIICPNCGNRLTSERSKYFRKRDNKHVESNHYRCQACLLNKRPTIGGSEKKFEKALIEYMQNFNFKREPKIPEEKQQDFDKLHQKILSIEKQRKKYQKAWSMDLMTDQEFEQLMAETKEALQKATAELEKEQDFHAPKKSFDIERAKEMVRMFKENWSVLTSEEKRQIVQEVIKQIEFKKKGLKIKILDIQFY

SEQ ID NO: 9082 - DNA, 50 bp, Bacillus subtilis
  source 1..50: mol_type = genomic DNA
attagtgtttatgtaaattacacacatataaatttgacataaatacagaa

SEQ ID NO: 9083 - DNA, 40 bp, Bacillus subtilis; identical to SEQ ID NO: 6058
  source 1..40: mol_type = genomic DNA

SEQ ID NO: 9084 - DNA, 40 bp, Bacillus subtilis
  source 1..40: mol_type = genomic DNA
ttttgtatttaagtataaactgacaaaatgctcctgggtt

SEQ ID NO: 9085 - DNA, 50 bp, Bacillus subtilis
  source 1..50: mol_type = genomic DNA
attattggtctttcaaattacacacttaaaacctgattcctaaaacagaa

SEQ ID NO: 9086 - protein, 481 aa, Streptococcus pneumoniae
MKTTNKVAIYVRVSTTSQVEEGYSIDEQKAKLSSYCDIKDWNVYKIYTDGGFSGANTDRPALEGLIKDAKKRKFDTVLVYKLDRLSRSQKDTLYLIEDIFIKNNIAFLSLQENFDTSTPFGKAMIGLLSVFAQLEREQIKERMQLGKIGRAKAGKSMMWAKTSYGYDYHRETGTITINPAQALAIKFIFESYLRGRSITKLRDDLNENYPKHVPWSYRAVRAILDNPVYCGFNQFKGEVYPGNHEPIITEEVYNKTKAELKIRQRTAAENVNPRPFQAKYILSGIGQCGYCGAPLKIILGVKRKDGSRFKKYECHQRHPRTLRGITTYNDNKKCDSGFYYKDDLETYVLTEISKLQDDAGYLDKIFSEDSAETIDRESYKRQIEELSKKLSRLNDLYIDDRITLEELQNKSAEFINMRATLETELENDPALRKGKRKADMRELLNAEKVFSMDYESQKVLVRGLINKVRVTAEDIVIKWKI

SEQ ID NO: 9087 - DNA, 50 bp, Streptococcus pneumoniae
  source 1..50: mol_type = genomic DNA
taaataattttagtaacctacatttcaatcaaggatagtaaaattattga

SEQ ID NO: 9088 - DNA, 40 bp, Streptococcus pneumoniae; identical to SEQ ID NO: 1573
  source 1..40: mol_type = genomic DNA

SEQ ID NO: 9089 - DNA, 40 bp, Streptococcus pneumoniae; identical to SEQ ID NO: 1574
  source 1..40: mol_type = genomic DNA

SEQ ID NO: 9090 - DNA, 50 bp, Streptococcus pneumoniae; identical to SEQ ID NO: 1575
  source 1..50: mol_type = genomic DNA

SEQ ID NO: 9091 - protein, 481 aa, Streptococcus mitis
MITTNKVAIYVRVSTTSQAEEGYSIEEQKDKLSSYCDIKDWSVYKIYTDGGFSGSNTDRPALEGLIKDAKKRKFDTVLVYKLDRLSRSQKDTLYLIEDIFIKNNIAFLSLQENFDTSTPFGKAMIGLLSVFAQLEREQIKERMQLGKIGRAKAGKSMMWAKTSYGYDYHRETGTITINPAQALAVKFIFESYLRGRSITKLRDDLNEKYPKHVPWSYRAVRTILDNPVYCGFNQYKGEIYPGNHEPIISKEEYDKTQSELKIRQRTAAENVNPRPFQAKYILSGIAQCGYCGAPLKIMLGVKRKDGSRFKKYECHQRHPRTLRGITTYNNNKKCDSGFYYKDDLEAYVLTEISKLQDDASYLDKIFSEDSAETIDRESYKRQIEELSKKLSRLNDLYIDDRITLEELQSKSAEFISMRATLETELENDPALRKNKRKADMRKLLNAEKVFSMGYENQKVLVRGLINKVKVTAEDIIINWKI

SEQ ID NO: 9092 - DNA, 50 bp, Streptococcus mitis
  source 1..50: mol_type = genomic DNA
taaataattttagtaaccaacatttcaataaaggatagtaaaattattga

SEQ ID NO: 9093 - DNA, 40 bp, Streptococcus mitis; identical to SEQ ID NO: 5778
  source 1..40: mol_type = genomic DNA

SEQ ID NO: 9094 - DNA, 40 bp, Streptococcus mitis
  source 1..40: mol_type = genomic DNA
gagcaagaccaccaacatcaacacaagtgtgaaagcttta

SEQ ID NO: 9095 - DNA, 50 bp, Streptococcus mitis; identical to SEQ ID NO: 1575
  source 1..50: mol_type = genomic DNA

SEQ ID NO: 9096 - protein, 481 aa, Streptococcus oralis
MKTTNKVAIYVRVSTTSQVEEGYSIDEQKAKLSSYCDIKDWNVYKIYTDGGFSGANTDRPALEGLIKDAKKRKFDTVLVYKLDRLSRSQKDTLYLIEDIFIKNNIAFLSLQENFDTSTPFGKAMIGLLSVFAQLEREQIKERMQLGKIGRAKAGKSMMWARTSYGYDYHRETGTITINPAQALAIKFIFESYLRGRSITKLRDDLNEKYPKHVPWSYRSVRAILDNPVYCGFNQFKGEVYPGNHEPIITEEVYNKTKEELKIRQRTAAENVNPRPFQAKYILSGIAQCGYCGAPLKILMGVVRKDGTRFIRYECHQRHPRKTKGVTVYNNNEKCDSGFYEKDDIENYVLTEISKLQDDADYLDKIFSDDNAETLDRESYKKQIEELSKKLSRLNDLYIDDRITLEELQDKSAEFISMRAALETELENDPALGKDKRKADMRELLNAEKVFSMDYEGQKVLVRGLINKVQVTAEDIVIKWKI

SEQ ID NO: 9097 - DNA, 50 bp, Streptococcus oralis; identical to SEQ ID NO: 9087
  source 1..50: mol_type = genomic DNA

SEQ ID NO: 9098 - DNA, 40 bp, Streptococcus oralis
  source 1..40: mol_type = genomic DNA
gagcaagaccactaacatttctaccaaagtgaaagcttta

SEQ ID NO: 9099 - DNA, 40 bp, Streptococcus oralis
  source 1..40: mol_type = genomic DNA
gagcaagaccactaacattaataccaaagtgaaagcttta

SEQ ID NO: 9100 - DNA, 50 bp, Streptococcus oralis; identical to SEQ ID NO: 1575
  source 1..50: mol_type = genomic DNA

SEQ ID NO: 9101 - protein, 458 aa, Staphylococcus simulans
MKVAIYTRVSTLEQANEGYSIGEQERKLKQFCDINDWKVVDVYVDAGISGGSLKRPSLQKLLNDIDKFDMVLVYKLDRLTRSVRDLLDLLEIFDQNNVAFRSATEVYDTTNAMGRLFVTLVGAMAEWERATITERTLYGKEGALESGKFLGHVPFYYDLVDNKLIPNENRKYVDYIIKRLKENISATQIGKELSNMKDTPVKFNKTMVIQILHSPTAHGHTKYGKFFKENTHEPVITQEDYNTAIKILSTRRHTYKQNHTSIFRGKIECPNNCGRFLHLNVNKIKRADGSYYLRQYYKCDKCSREKKPSTIIRYDMMQEAFMKYLNNLSFDTIEPPENNDDEEEFEIDIAKVMRQREKYQKAWAMDLMTDDEFKARMKETDKLLEEASEKEVENNELEFEQVVKIQKLLQKSWKNLSEDKKEDLVAATIDKIQIELIRGNKTVNSPNEVKIKDVSFLL

SEQ ID NO: 9102 - DNA, 50 bp, Staphylococcus simulans
  source 1..50: mol_type = genomic DNA
gtgtgtggtgttagcattttgattgtgatttaacatacaagaccacacac

SEQ ID NO: 9103 - DNA, 40 bp, Staphylococcus simulans
  source 1..40: mol_type = genomic DNA
accaggagggaaagcacctgtgatgtttctaccaatacag

SEQ ID NO: 9104 - DNA, 40 bp, Staphylococcus simulans
  source 1..40: mol_type = genomic DNA
accaggagggaaagcacctctgatgtttctaccaatacag

SEQ ID NO: 9105 - DNA, 50 bp, Staphylococcus simulans
  source 1..50: mol_type = genomic DNA
gtccctgctaatagcatttcgattctgcttacacattcacaaccacacac

SEQ ID NO: 9106 - protein, 472 aa, Bacillus safensis
MEDSSNKSVGIYVRVSTDEQAKEGFSISAQKEKLKAYCVSQGWANFKFYVDEGKSAKDTHRPSLELLLRHIEQGIIDTVLVYRLDRLTRSVRDLYTLLDYFDKYNAVFRSATEVYDTGSATGRLFITLVAAMAQWERENLGERVKMGQNEKARQGQFSAPAPFGFIKEGKSLVKNHEQGEILLEIIDKVKKGYSTRQIANYLDDSGLLPIRGYRWHPGTILTLLKNPILYGSFRWGDEIIEDTHEGYISKDEFDRIQEILKERSIVKKRDSYSVFIFQSKIVCAGCGNRLASERSKYFRKKDKQYVETNNYRCQTCAQNRKPSIMGSEKKFQKALVKYMQNVTPKLEPKIPEEKKHDYEKVHQKILNLEKQRKKYQKAWSLDLMTDEEFEQLMYETKEALKSAQNELAAAHSSDSQNSQIDIERAKEIVKMFNENWSVLTNEEKRSIVQELIKHINFTKEDGEIIITHIEFY

SEQ ID NO: 9107 - DNA, 50 bp, Bacillus safensis
  source 1..50: mol_type = genomic DNA
attagtatttatgtcaggtttaagcatgtaaacataacataaacacaaaa

SEQ ID NO: 9108 - DNA, 40 bp, Bacillus safensis
  source 1..40: mol_type = genomic DNA
tttagtattgagataaagacaaacgaaattttcctgttgt

SEQ ID NO: 9109 - DNA, 40 bp, Bacillus safensis
  source 1..40: mol_type = genomic DNA
tttagtattgagataaagaaaaacgaaattttcctgttgt

SEQ ID NO: 9110 - DNA, 50 bp, Bacillus safensis
  source 1..50: mol_type = genomic DNA
aataatatgtactccaggtttaagaatgtaaccaaatcttaaaaatgaaa

SEQ ID NO: 9111 - protein, 558 aa, Clostridioides difficile
MLQQSNSTITSIYPIGNQTEELTALYCRLSQDDKQEGDSNSIINQKKILKRYAIEHGYQPYVFFVDDGFSGTNFNRPDFQRMIAEVEAGKIKRVIVKDMSRLGRDYLQVGMYTEIMFPNMDVHFIAVNDGVDSRVGDNEFTPFRNIINEWYAKDTSKKIRAVKRSKGMAGEHIGSHAPYGYMKNPDNKKEWLIDEEAAEVVREIFRLCVNGYGPTRIANILTERKILCPTYYALEHGEKPRTVLPPDKYLWSATVVSHILERMDYLGHTVNFKTHVKSYKNRKKIDNSPEQWKIFENTHEAIIDKETFEIVQKIRSGKRRPTKMGDMPMFSGLLYCADCGSKMTFHRQMAQSAEKHNFVCSNYRHNSKSCTMHYIRNVVVEQIVLENLKEVIRYVSDYEDEFVQMVMDTDMRQRNKELLQKKKRLTEIHSRIQELDKIFQRIYEDNISGKLSDERFMKLSKGYEEEQHTLQEEQTSLEKELQKEEKQSVDVKQFLSAVRKYTNLTELTPEIVHEFIDKIIVHAPDKSSGKRLQEIEIIYNHIGVFDHSKVTLWKGKAV

SEQ ID NO: 9112 - DNA, 50 bp, Clostridioides difficile
  source 1..50: mol_type = genomic DNA
aaacatccttaccaaacccttacattagcaaggctttgataaggatggta

SEQ ID NO: 9113 - DNA, 40 bp, Clostridioides difficile
  source 1..40: mol_type = genomic DNA
aaaatccaaatagccttactttattggctatttggattta

SEQ ID NO: 9114 - DNA, 40 bp, Clostridioides difficile
  source 1..40: mol_type = genomic DNA
aaaatccaaatagccttacgctattggctatttggattta

SEQ ID NO: 9115 - DNA, 50 bp, Clostridioides difficile
  source 1..50: mol_type = genomic DNA
aagcagtcttggttaccccttccagcagcaaggctaccaggaggaaggtg

SEQ ID NO: 9116 - protein, 674 aa, Photobacterium damselae
METTPKIYNYARVSTTKQLQGVGLETQQQKSILENLSLEYGLPIHDENFVDHGVSAYHGKHKEGALGIVLSRIESGEIPTGSILVVFSLDRLSRETVNVAMEQLLRIINQGVRVYTHIDGKLFDAKSQHLTADLIVSLITMQRANEESETKSKRTIAASKIALKRWKETCQPQGALGRTPFWIDQRTNTFNINAEGVKKAIEMRITGYGDLKIKQYLDANFEYKPTRRKGKIKQSDSWDYIAISQLWGKRSLIGEKTFTIEGVPHVMENYYPPLIDDSTFLKLQICKNKKQGRDTGSGKIALLKGITRCGICGGAMVFMDKGGDRVSYVCNLALKGEHDRELYNANMLDFLTLEICKDTYLTVSDNTDNISEEHEKLQLEIELSAEQENRDKLFEISLRTPKDSFFKLLENSENKIDKLKAKLDALENDNIVLNADELASLQEVFDDDIRTNYLHPERYVIRNNLYRFISSITLSRRFEPCCDAKTKFANCVDITWHFKNGQKRRLAMLPYEYTKAKSGSKGLYLPFMYIYGSKNFIDVKDGEQLLSDILKKLHELDLTKSLYPSKGQYKWNQRSLECGNTYGVPLDEASFLDPETRLFEFGGMNTEKTTSLNYISMMYNHQWKGEKLAYDYPLSKFNNLARRFNLVESEKFLEFLQDNRFDQELYSSLDFLMS

SEQ ID NO: 9117 - DNA, 50 bp, Photobacterium damselae
  source 1..50: mol_type = genomic DNA
caaagaaagttgattttttttggcttgccaataaaaaacagtttccctca

SEQ ID NO: 9118 - DNA, 40 bp, Photobacterium damselae
  source 1..40: mol_type = genomic DNA
gaagagtatttattgtggtttcagaaacaaggctttcctg

SEQ ID NO: 9119 - DNA, 40 bp, Photobacterium damselae
  source 1..40: mol_type = genomic DNA
gaagagtatttattgtggttgcagaaacaaggctttcctg

SEQ ID NO: 9120 - DNA, 50 bp, Photobacterium damselae
  source 1..50: mol_type = genomic DNA
caaaggaacggatttttttgtggctggtgaagacaatgtccttcccctca

SEQ ID NO: 9121 - protein, 526 aa, Vibrio cyclitrophicus
MKNCYLYRRYSTSKQSKGSSLERQQSLADRWCDANDGQLVDVITDEGYSAFKGDHISQGAFAGVLTAISSGVIPAGSYLLVENIDRLSRQAIGDALTTWMNILGADINIVTLMDGKVFTKESRNDLGSMLTYLVTQERAWSESHAKSVRTTNAIKAANKRLLNGEIARVTRPASWVTFTPQGYVLNGKADGVRRLFELYLSGLGQASTAKQLNDEGVSTLSGRSALWSSASVRKVLLNENVTGVKTIDGQTVIVYPVVISREDWLKAREQLASKNVGASITVGKVSNPLTGLCYCGVCGDTMHYSPSTSRAGKRYEYLNCASHRRADKCGNVLFKLDHLFEIAKNLAAILCELPVQEDETHRLSAELEGAQLELADASERLAVASTMAVKYPSEAAFAALGTLELEISEVTKRVEKAELALAGAKGVQSAPLVQLSTVRKLQMSEEASRREAAQIFSSSFVSWSFDVNGNSELRTKRHGVIHLDGAGRVLEVRANGLALEGLINRFRAIPFVIDGKQGHITFDRTG

SEQ ID NO: 9122 - DNA, 50 bp, Vibrio cyclitrophicus
  source 1..50: mol_type = genomic DNA
tttttgtgtagtaataactaaagctcgcattagttatcgtatgatgtaaa

SEQ ID NO: 9123 - DNA, 40 bp, Vibrio cyclitrophicus
  source 1..40: mol_type = genomic DNA
tttctgtgcatcccaaatatcaccttgtgaaccaaggaac

SEQ ID NO: 9124 - DNA, 40 bp, Vibrio cyclitrophicus
  source 1..40: mol_type = genomic DNA
tttctgtgcatcccaaatataaccttgtgaaccaaggaac

SEQ ID NO: 9125 - DNA, 50 bp, Vibrio cyclitrophicus
  source 1..50: mol_type = genomic DNA
tttttatcaagtgctacataaagctagcattatttttaaactgctgtaaa

SEQ ID NO: 9126 - protein, 513 aa, Chryseobacterium indologenes
MKIMKVADLYIRVSTDEQADKGYSQRDQEDRLKRYCSSNNISIGQIIYEDHSAKSFNRPGWIRLLTTLKKKSCKTNLILFTKWDRFSRNAGDAYQMISILSKLGIEIQAVEQPLDLSIPENKMMLAIYLAAPEVENDRRALNVFYGMRRARKEGRVMGKAPFGYANKSFENGQKYIALQEPEASAMKWAFNEIAKGILACNQIREELNKSTSKKISRTSFHIAIRNPVYYGKVFLGKHKDEDACLVEGQHEPLISEELFHRVQDVLDGKKRKERPNTKILSDENFPLRGFLTCPKCGNNITGSASKGRKNRYYYYHCNATCGFRHRAEIVNRIFEDGLKQLEMKEPAKRILKKMFLDNYEKYIKTPKNERKSILNEIDKLNARLSVARNKLLSEIIDDEEYLEIRKECREKIEKLEAQFKEEPEAKVNIPKLIEQALEILTNIWKLYSEGGIAVKRAIIGSIFPEKLEFDGKEYRTTRMNSIAHYIFQIKSGLPQNENRRNDKTNHFSCYVDP

SEQ ID NO: 9127 - DNA, 50 bp, Chryseobacterium indologenes
  source 1..50: mol_type = genomic DNA
atcatttctcctgttatgtagacccagagcaacaaatatcgaatcatttt

SEQ ID NO: 9128 - DNA, 40 bp, Chryseobacterium indologenes
  source 1..40: mol_type = genomic DNA
aaagaatggtttgtagacccacagggattcgaaccccaac

SEQ ID NO: 9129 - DNA, 40 bp, Chryseobacterium indologenes
  source 1..40: mol_type = genomic DNA
aaagaatggtttgtagacctacagggattcgaaccccaac

SEQ ID NO: 9130 - DNA, 50 bp, Chryseobacterium indologenes
  source 1..50: mol_type = genomic DNA
aaaatgtcttgaagtatgtaaacctaaagcaataaattttcaaatatttt

SEQ ID NO: 9131 - protein, 558 aa, Selenomonas sp F0473
MGRQSQTAVENGEKITALYCRLSRDDDMQGDSNSIRNQKAILEKYAVDNGFRNREFFVDDGYSGTNFDRPDWQRLIAKAERGQVGTVIVKDMSRLGRNYLRVGYYTEMFFPDAGIRFIAVNNGVDSANQQDSDFTPFINIINEWYAKDTSKKIKAVFKAKGESGRHMANRAPYGYMKDPQNKERWIPDEIAAPLVKAMFRKCMQGFGPGWIARELREQKVLNPILHAKVRDGKISRQEAEAMPNAFVWSSTYVADILRRPDYLGHTVNFKTYKKSYRTRGVYLNDPSEWVIFENTQEPIIDQETFDIVQRIREGRRKKTFLGIPDMLSGILYCADCKEKMGAVRQGNRRRELDHYVCDNYRRKKAQKLCDGRSHTIRINKIEGILLHAIRRVTDFARAHEDEFIALIVKKSRKAADKALRDAKREMEQAGKRMRKLDLLIQRLYEDNVDGKVSDERFTKLTATYENEQSVLTARMKELQAVVAKESKTAANVNGFLSIVRKYTDIPELTSEIVREFIEKVYIFHPEVVDGKRTQKIVIVWNCIGEFNARTLDAENEQA

SEQ ID NO: 9132 - DNA, 50 bp, Selenomonas sp F0473
  source 1..50: mol_type = genomic DNA
cggtatccataagggaagttatctaaagatgagttttcttagggatacat

SEQ ID NO: 9133 - DNA, 40 bp, Selenomonas sp F0473
  source 1..40: mol_type = genomic DNA
ttgttttttccaatgataaaacgtataatttgtaaaacga

SEQ ID NO: 9134 - DNA, 50 bp, Selenomonas sp F0473
  source 1..50: mol_type = genomic DNA
cggtatccataagggaagttatctttagatgagttttcttagggatacat

SEQ ID NO: 9135 - DNA, 40 bp, Selenomonas sp F0473
  source 1..40: mol_type = genomic DNA
tggttatttccaataataatttgtatattttacataacgc

SEQ ID NO: 9136 - protein, 465 aa, Aeromicrobium erythreum
METPRRAAIYARISSDPSGRALGVQRQLEDCRAQAQQRGITVAEEYVDNDVSAYSGKARPGYEQMLADIRDGLRDAVIVYNLDRLTRQPIELEQFHQTCNGAGLRAVITVTAELDMSNDDGLFAARLMAAFAAKESARKSERVKRKLRQNAEMGLPGGGGLRPFGFEKDRMTVRPAEAAVIVEMVERFLAGESARSLAADLDARGVPTSSGSPWRSTTIRNLLLRARIAGLREHNGDILGPAAWPGIISPEQFEQIRSEFKRRASSGRRAPRRYLLSGMLRCGKCEGKLFSSARETRRRYVCLSGPDHQGCGGIMIDAPRVEEWLTAAVLFRLDTPDMEAVLSGQRAQDERYGELSIERDRLQARMTELSEMFAAGEVSRLEWKAARDPLEAALTSTDTQLARLSHGSTLAQIVGQGAALREGWDALNLERQHKIVGAVLDYAVIKPAQRRGHFDYDRIVPVWAL

SEQ ID NO: 9137 - DNA, 50 bp, Aeromicrobium erythreum
  source 1..50: mol_type = genomic DNA
atgcacgattcagaacttgtgaggttggcgacgagtcgttagtctgccct

SEQ ID NO: 9138 - DNA, 40 bp, Aeromicrobium erythreum
  source 1..40: mol_type = genomic DNA
gggacagagtccgatgaggttggcgaggtcagtggtgccg

SEQ ID NO: 9139 - DNA, 50 bp, Aeromicrobium erythreum
  source 1..50: mol_type = genomic DNA
atgcacgattcagaacttgtgagggaggcgacgagtcgttagtctgccct

SEQ ID NO: 9140 - DNA, 40 bp, Aeromicrobium erythreum
  source 1..40: mol_type = genomic DNA
gggattgggtgcgaggagggaggcgaggtcaagggtgggg

SEQ ID NO: 9141 - protein, 612 aa, Rhodococcus erythropolis
MESASPALRVLGRLRLSRLTDESTSIERQRETIQRWAETQGHTVVGWAEDADVSGAVDPFDTPQLGQWLNHRVEEYDVVAAWKLDRLGRNAIQLSKLFGWCIDHDKTLVSCSESIDLSNWSGRMLASVIAGLAEGELEAIRERARGSRVKLRESARFAGGKPPFGYRKKKRPGGGWMLEKDAQAADLVKNIVADVLDGKPVARVIRELNSNGYRTPRDYYETVKAGKSSLKLAEGEKRSSEWRSTALRNLLTNPALRGYVHHKGQVARGDDGMPLQLADEPLVEPDQWEALQAIFDGHRERRSHYRRPDASPLVGLVFCYWCHSPLWHNRNVSRGHEYFYYRCPNIQQHERASMIPADQAEKAVAESFLEQAGVLPVTERVWVSGDSNEQALRDATTALDAVFAELETARSEITRDRARKRIAALDERISNLEMKPKREARWEYTQVGGTYREEWESLGESDRWQLILKSGMTFAFGLTDKGRGPNSVFVSNVYIPEPLKQTLVSGVTQRRTLADADPDRDVNPGAHTRALPERWATMRKHGILGIEAFLEKTVVVLKSDERVEIPNWLGEIGISAITNDEDVRIVWTTDGRGFYQQPSGEWIDVPLGDTEE

SEQ ID NO: 9142 - DNA, 50 bp, Rhodococcus erythropolis
  source 1..50: mol_type = genomic DNA
gttctgtggaggctgttgttcaattcatggaacatcaacctgtacacaac

SEQ ID NO: 9143 - DNA, 40 bp, Rhodococcus erythropolis
  source 1..40: mol_type = genomic DNA
gttgggtgggatgcggggctcgtggaacatcactcggaac

SEQ ID NO: 9144 - DNA, 50 bp, Rhodococcus erythropolis
  source 1..50: mol_type = genomic DNA
gttctgtggaggctgttgttcaatagatggaacatcaacctgtacacaac

SEQ ID NO: 9145 - DNA, 40 bp, Rhodococcus erythropolis
  source 1..40: mol_type = genomic DNA
gttgggtgggaagcgtggcaggaagggcagcccttggaac

SEQ ID NO: 9146 - protein, 477 aa, Rhodococcus qingshengii
MHEWDIIVAWKLDRLGRNAIQLNKLFGWCCEHGKTLVSCSESIDLGTWAGRMLAGVIAGLAEGELEAIRERTLASRAKLRERARWAGGKPPFGYTAVKRTDGQGWALEIDPLASALVRRIVDSVLDDQPFTATARNLNEEGVLTPGDYYRTVRAGTPSLHKDDGIIEPRSKWAPTTIRQLLRSKALRGHVHHNGETVRGDDGQPLQMAEPLVTTDEWELIQAYLDRRAESRKGIKRSESSPLSGVAVCLVCGNPLHHTRHKTKGHYYRYYRCAEKHTTQIPAAYLEELVEVHFLGQVGDMEVRERVWVPGDSRDADLRNAQSALDELTKALGGMRSAQAVQRIHEQLLAVDTRIIALETTPVREARWEYRATGGTYLDAWGAADTDGRRELLLRSGITVAVHLETGGVRRSKFNDGTVSADIRIPSGFYESLGLKRPESITGMFETLTEADLAGVEIGAGKAVFVSKTGERTEVPLE

SEQ ID NO: 9147 - DNA, 50 bp, Rhodococcus qingshengii
  source 1..50: mol_type = genomic DNA
gttgcgctaaagctgcaatcccactcgtggaacatcagcttgaacacaac

SEQ ID NO: 9148 - DNA, 40 bp, Rhodococcus qingshengii; identical to SEQ ID NO: 9143
  source 1..40: mol_type = genomic DNA

SEQ ID NO: 9149 - DNA, 50 bp, Rhodococcus qingshengii
  source 1..50: mol_type = genomic DNA
gttgcgctaaagctgcaatcccacaggtggaacatcagcttgaacacaac

SEQ ID NO: 9150 - DNA, 40 bp, Rhodococcus qingshengii; identical to SEQ ID NO: 9145
  source 1..40: mol_type = genomic DNA

SEQ ID NO: 9151 - protein, 618 aa, Rhodococcus hoagii
MESASPGLRVLGRLRLSRLTDESTSIERQRETIQRWAESQGHTVVGWAEDADVSGAVDPFDTPQLGQWLNHRVEEYDVIAAWKLDRLGRNAIQLNKLFGWCLDHNKTLVSCSESIDLGSWAGRMLASVIAGLAEGELEAIRERAKGSRVKLRESARFAGGKPPFGYRKKPRPGGGWMLEIDDSDNGDESPAGLVQRIVADVLDGKPVSRVVSKLNDDGYRTPRDYYETIKSGKPSLKLAVGEKRASEWRSTALRNLLTNPALRGYVHHKGQVARGDDGMPLQLADEPLVDADEWEALQAIFDGHRERRSHYRRPDASPLVGLVFCYWCHAPLWHNRNVSRGHEYFYYRCPSIQQHERASMIPAGQAEKAVAESFLDEAGDLPVMERVWVPGDSAEQELKEATTALDDVFAELEAAKSEITRARARKRIAALDERISILEAKPKQEARWEYKQLGGTYRDAWESLGEAERWQLILKSGMTFAFGLTDKGRGPNSVWVSSVYTPEPLRQTLVSGVTQRRTLADADPHRDVNPADHTKHLPERWATMREAGIQGIETREDKTVVVLKTGERVEIPNWLDEIGISEITNDDDVRIVWTQDGRGWHQHSDGEWIEVPLGEPEE

SEQ ID NO: 9152 - DNA, 50 bp, Rhodococcus hoagii
  source 1..50: mol_type = genomic DNA
gttttgtggaggttgctgtccgactcgtggaacatcaacctgtacacaac

SEQ ID NO: 9153 - DNA, 40 bp, Rhodococcus hoagii; identical to SEQ ID NO: 9143
  source 1..40: mol_type = genomic DNA

SEQ ID NO: 9154 - DNA, 50 bp, Rhodococcus hoagii
  source 1..50: mol_type = genomic DNA
gttttgtggaggttgctgtccgacaggtggaacatcaacctgtacacaac

SEQ ID NO: 9155 - DNA, 40 bp, Rhodococcus hoagii; identical to SEQ ID NO: 9145
  source 1..40: mol_type = genomic DNA

SEQ ID NO: 9156 - protein, 539 aa, Rhodococcus hoagii
MPGMAPPLQHRRVLGRLRLSRATDESTSIARQRETIQQWADSMGHTIVGWAEDVDVSGSIDPFETPQLGPWLNDRLGEWDILAAWKLDRLGRNAIQLNKLFGWCGEHEKTLVSCSESIDLGNWAGRMLASVIAGLAEGELEAIRERTLGSRRKLREQARWPGGKPAFGYTAVRQDGDKGWTLEIDPVAREVIRRIVDDLIDGKPTTRIARELNDEGYLTPAQYHESVRRGVPMVQFPKGEIPDEAKDTTGSRKPRWAAASLKLMLRNKSLLGYVHHNGETVRDDEGLPIQLAKPLVSLDEWELIQSILDQKQESRRGIRRAVASPLSGIAICYDCRQPLHHSRHTARGREYRYYKCENRHTTQIPAEMLEETAEEYFLDQLGDVEIQERVWVSGDSREADLRRELSTLDELGKAFDRVSSAAAKQRIQGQIDAVDARIVKLESMPATEGRWEYRVVGGTYRAAWESSDVDERRELLRRSGIRIAAKIDTGGERRTQLNGGTHYFHIWVPEEITKFIHTPEEPPAYLHLPGESREADRGR

SEQ ID NO: 9157 - DNA, 50 bp, Rhodococcus hoagii
  source 1..50: mol_type = genomic DNA
aattggcggcaggtcatgtcctcgtcgtggaacataaccttgaacacaac

SEQ ID NO: 9158 - DNA, 40 bp, Rhodococcus hoagii; identical to SEQ ID NO: 9143
  source 1..40: mol_type = genomic DNA

SEQ ID NO: 9159 - DNA, 50 bp, Rhodococcus hoagii
  source 1..50: mol_type = genomic DNA
aattggcggcaggtcatgtcctcgaggtggaacataaccttgaacacaac

SEQ ID NO: 9160 - DNA, 40 bp, Rhodococcus hoagii; identical to SEQ ID NO: 9145
  source 1..40: mol_type = genomic DNA

SEQ ID NO: 9161 - protein, 540 aa, Clostridioides difficile
MKQPYNTTIYNTALYMRLSRDDELQGESGSIQTQRMMLRQYAAEHGLNVIDEYIDDGWSGTNFDRPDFQRMIDDIEDGKINCVVTKDLSRLGRNYILTGQYTEIYFPSKGVRYIAVNDNVDTINGENELAPFLNILNEMHARQTSKKVKAAMRTRFANGAHYGAYAPLGYVKDPDKKGHLLIDPETRWIIEKIFDLAVHGRGAASITRILVEEKVPTPGWLNFQRYGTFANIYAGAPEEKAYAWTIAQVKSILKEETYIGHSVHNKQTNISFKNKKKVRKPKEEWYRVENTHEAIISEDVFRQVQEQICNRRRRQKNGTTQIFSGLVKCADCGWSLAYGMNSQNKNPYAHYHCSKYGQGLHQCSMHYIRYDVLYAYVLSRLQYWSVLAQQDGDKLLKRLLNASDKERNTARKRQTAELKKAEKRKAEVDTLFAKMYEDWSAGRITEYNFNMLSEKYQGEQRELDAKIERLHEAMEVAAQTAVDAEKWIGLMKQYVNPTELTAELLNTLIEKILVHEAVKSEDGSREQEVEIFYRFIGKIE

SEQ ID NO: 9162 - DNA, 50 bp, Clostridioides difficile
  source 1..50: mol_type = genomic DNA
caatatctttaactaagggaaactgggggttcacttagataaagatacca

SEQ ID NO: 9163 - DNA, 40 bp, Clostridioides difficile; identical to SEQ ID NO: 5343
  source 1..40: mol_type = genomic DNA

SEQ ID NO: 9164 - DNA, 50 bp, Clostridioides difficile
  source 1..50: mol_type = genomic DNA
caatatctttaactaagggaaactccgggttcacttagataaagatacca

SEQ ID NO: 9165 - DNA, 40 bp, Clostridioides difficile
  source 1..40: mol_type = genomic DNA
aatagcaaaatgagaaagtccagtagagattcatgaacaa

SEQ ID NO: 9166 - protein, 537 aa, Clostridioides difficile; identical to SEQ ID NO: 6616

SEQ ID NO: 9167 - DNA, 50 bp, Clostridioides difficile
  source 1..50: mol_type = genomic DNA
tcatatctttaactaagggaaactggagttttccaaacaaaaggatatta

SEQ ID NO: 9168 - DNA, 40 bp, Clostridioides difficile; identical to SEQ ID NO: 5343
  source 1..40: mol_type = genomic DNA

SEQ ID NO: 9169 - DNA, 50 bp, Clostridioides difficile
  source 1..50: mol_type = genomic DNA
tcatatctttaactaagggaaactccagttttccaaacaaaaggatatta

SEQ ID NO: 9170 - DNA, 40 bp, Clostridioides difficile; identical to SEQ ID NO: 9165
  source 1..40: mol_type = genomic DNA

SEQ ID NO: 9171 - protein, 537 aa, Clostridioides difficile
MKQQIYNTALYLRLSRDDELQGESSSITTQRSMLRLYAKEHHLNVIDEYIDDGWSGTNFDRPSFQRMIEDIEAGKINCVVTKDLSRLGRNYIMTGQYTELYFPSHNVRYIAIDDGVDSEKGESEIAPFKNIINEWVARDTSRKVKSAFKTKFAEGAHYGAYAPLGYKKHPDIKGKLLVDEETKWIVEKIFSLAYQGYGSAKITKILREEKVPTSSWLNFTRYGTFAHIFEGKPESKRYEWTIAHVKAILKSEVYIGNSVHNMQSTVSFKSKKKVRKPESEWFRVENTHEPIIDKEVFYRVQEQIKSRRRQTKEKATPIFAGLVKCADCGWSMRFATNKANKTPYSYYSCSFYGQFGKGYCSMHYIRYDVLYQAVLERLQYWAKAVQQDEEKVLHKIQKVGNAERIREKKKKANALKKAENRQNEIDRLFAKMYEDRACEKITERNFIMLSGKYQKEQIELEQQITNLREELSKMEQDMIGAEKWIELIKEYSVPKELTAPLLNAMIEKILIHEATTNEENERIQEIEIYYRFIGKVD

SEQ ID NO: 9172 - DNA, 50 bp, Clostridioides difficile; identical to SEQ ID NO: 1657
  source 1..50: mol_type = genomic DNA

SEQ ID NO: 9173 - DNA, 40 bp, Clostridioides difficile; identical to SEQ ID NO: 5343
  source 1..40: mol_type = genomic DNA

SEQ ID NO: 9174 - DNA, 50 bp, Clostridioides difficile
  source 1..50: mol_type = genomic DNA
tcatatctttaactaagggaaagcccagtttcccaaacaaaaggatatta

SEQ ID NO: 9175 - DNA, 40 bp, Clostridioides difficile; identical to SEQ ID NO: 9165
  source 1..40: mol_type = genomic DNA

SEQ ID NO: 9176 - protein, 537 aa, Clostridioides difficile
MKQQIYNTALYLRLSRDDELQGESSSITTQRSMLRLYAKEHHLNVIDEYIDDGWSGTNFERPSFQRMIEDIEAGKINCVVTKDLSRLGRNYIMTGQYTELYFPSHNVRYIAIDDGVDSEKGESEIAPFKNIINEWVARDTSRKVKSAFKTKFAEGAYYGAYAPLGYKKHPDIKGKLLVDEETKWIVEKIFSLAYQGYGSAKITKVLREEKVPTASWLNFTRYGTFAHIFEGKPDSKRYEWTIAHVKAILKSEVYIGNSVHNRQSTVSFKSKKKVRKPESEWFRVENTHEPIIDKEVFYRVQEQIKSRRRQTKEKATPIFAGLVKCADCGWSMRFGTNTANKTPYSYYACSFYGQFGKGYCSMHYIRYDVLYQAVLERLQYWAKAVQQDEEKVLNKIQKAGNAERIREKKKKASALKKAENRQNEIDRLFAKMYEDRACEKITERNFIMLSGKYQKEQIELEQQITNLREELSKMEQDMIGAEKWIELIKEYSVPKELTAPLLNAMIEKILIHEATTNEDNERIQEIEIYYRFIGKVD

SEQ ID NO: 9177 - DNA, 50 bp, Clostridioides difficile; identical to SEQ ID NO: 1657
  source 1..50: mol_type = genomic DNA

SEQ ID NO: 9178 - DNA, 40 bp, Clostridioides difficile; identical to SEQ ID NO: 5343
  source 1..40: mol_type = genomic DNA

SEQ ID NO: 9179 - DNA, 50 bp, Clostridioides difficile; identical to SEQ ID NO: 9174
  source 1..50: mol_type = genomic DNA

SEQ ID NO: 9180 - DNA, 40 bp, Clostridioides difficile; identical to SEQ ID NO: 9165
  source 1..40: mol_type = genomic DNA

SEQ ID NO: 9181 - protein, 540 aa, Clostridioides difficile; identical to SEQ ID NO: 1671

SEQ ID NO: 9182 - DNA, 50 bp, Clostridioides difficile; identical to SEQ ID NO: 1672
  source 1..50: mol_type = genomic DNA

SEQ ID NO: 9183 - DNA, 40 bp, Clostridioides difficile; identical to SEQ ID NO: 5343
  source 1..40: mol_type = genomic DNA

SEQ ID NO: 9184 - DNA, 50 bp, Clostridioides difficile
  source 1..50: mol_type = genomic DNA
caatatctttaactaagggaaacgccggtatcacttagataaagatacca

SEQ ID NO: 9185 - DNA, 40 bp, Clostridioides difficile; identical to SEQ ID NO: 9165
  source 1..40: mol_type = genomic DNA

SEQ ID NO: 9186 - protein, 470 aa, Clostridioides difficile
MIDDIEDGKINCVVTKDLSRLGRNYILTGQYTEIYFPSKGVRYIAVNDNVDTINGENELAPFLNILNEMHARQTSKKVKAAMRTRFANGAHYGAYAPLGYVKDPDKKGHLLIDPETRWIIEKIFDLAVHGRGAASITRILVEEKVPTPGWLNFQRYGTFANIYAGAPEEKAYAWTIAQVKSILKEETYIGHSVHNKQTNISFKNKKKVRKPKEEWYRVENTHEAIISEDVFRQVQEQICNRRRRQKNGTTQIFSGLVKCADCGWSLAYGMNSQNKNPYAHYHCSKYGQGLHQCSMHYIRYDVLYAYVLSRLQYWSVLAQQDGDKLLKRLLNASDKERNTARKRQTAELKKAEKRKAEVDTLFAKMYEDWSAGRITEYNFNMLSEKYQGEQRELDAKIERLHEAMEVAAQTAVDAEKWIGLMKQYVNPTELTAELLNTLIEKILVHEAVKSEDGSREQEVEIFYRFIGKIE

SEQ ID NO: 9187 - DNA, 50 bp, Clostridioides difficile; identical to SEQ ID NO: 1672
  source 1..50: mol_type = genomic DNA

SEQ ID NO: 9188 - DNA, 40 bp, Clostridioides difficile; identical to SEQ ID NO: 5343
  source 1..40: mol_type = genomic DNA

SEQ ID NO: 9189 - DNA, 50 bp, Clostridioides difficile; identical to SEQ ID NO: 9184
  source 1..50: mol_type = genomic DNA

SEQ ID NO: 9190 - DNA, 40 bp, Clostridioides difficile; identical to SEQ ID NO: 9165
  source 1..40: mol_type = genomic DNA

SEQ ID NO: 9191 - protein, 537 aa, Clostridioides difficile; identical to SEQ ID NO: 2031

SEQ ID NO: 9192 - DNA, 50 bp, Clostridioides difficile; identical to SEQ ID NO: 2032
  source 1..50: mol_type = genomic DNA

SEQ ID NO: 9193 - DNA, 40 bp, Clostridioides difficile; identical to SEQ ID NO: 5343
  source 1..40: mol_type = genomic DNA

SEQ ID NO: 9194 - DNA, 50 bp, Clostridioides difficile
  source 1..50: mol_type = genomic DNA
tcatatctttaactaagggaaaccccagtttcccaaacaaaaggatatta

SEQ ID NO: 9195 - DNA, 40 bp, Clostridioides difficile; identical to SEQ ID NO: 9165
  source 1..40: mol_type = genomic DNA

SEQ ID NO: 9196 - protein, 537 aa, Clostridioides difficile
MKQQIYNTALYLRLSRDDELQGESSSITTQRSMLRLYAKEHHLNVIDEYIDDGWSGTNFDRPSFQRMIEDIEVGKINCVVTKDLSRLGRNYIMTGQYTELYFPSHNVRYIAIDDGVDSEKGESEIAPFKNIINEWVARDTSRKVKSAFKTKFAEGAYYGAYAPLGYKKHPDIKGKLLVDEETKWIVEKIFSLAYQGYGSAKITKILREEKVPTASWLNFTRYGTFAHIFEGEPESKRYEWTIAHVKAILKSEVYIGNSVHNRQSTVSFKSKKKVRKPESEWFRVENTHEPIIDKEVFYRVQEQIKSRRRQTKEKATPIFAGLVKCADCGWSMRFATNKANKTPYSYYSCSFYGQFGKGYCSMHYIRYDVLYQAVLERLQYWAKAVQQDEEKVLNKIQKVGNAERIREKKKKANALRKAENRQNEIDRLFAKMYEDRACEKITERNFIMLSGKYQKEQIELEQQITNLREELSKMEQDMIGAEKWIELIKEYSVPKELTAPLLNAMIEKILIHEATTNEENERIQEIEIYYRFIGKVD

SEQ ID NO: 9197 - DNA, 50 bp, Clostridioides difficile; identical to SEQ ID NO: 1657
  source 1..50: mol_type = genomic DNA

SEQ ID NO: 9198 - DNA, 40 bp, Clostridioides difficile; identical to SEQ ID NO: 5343
  source 1..40: mol_type = genomic DNA

SEQ ID NO: 9199 - DNA, 50 bp, Clostridioides difficile; identical to SEQ ID NO: 9174
  source 1..50: mol_type = genomic DNA

SEQ ID NO: 9200 - DNA, 40 bp, Clostridioides difficile; identical to SEQ ID NO: 9165
  source 1..40: mol_type = genomic DNA

SEQ ID NO: 9201 - protein, 537 aa, Clostridioides difficile
MKQQIYNTALYLRLSRDDELQGESSSITTQRSMLRLYAKEHHLNVIDEYIDDGWSGTNFERPSFQRMIEDIEAGKINCVVTKDLSRLGRNYIMTGQYTELYFPSHNVRYIAIDDGVDSEKGESEIAPFKNIINEWVARDTSRKVKSAFKTKFAEGAHYGAYAPLGYKKHPDIKGKLLIDDETKWIVEKIFSLAYQGYGSAKITKILREEKVPTASRLNFTRYGTFAHIFEGKPESKRYEWTIAHVKAILKSEVYIGNSVHNMKSTVSFKSKKKVRKPESEWFRVENTHEPIIDKEVFYRVQEQIKSRRRQTKEKTTQIFAGLVKCADCGWSMRFATNKANKTPYSYYVYSFYGQFSKGYCSMHYIRYDVLYQAVLERLQYWAKAVQQDEEKVLNKIQKAGNAERIREKKKKASALKKAENRQNEIDRLFAKMYEDRACEKITERNFVMLSGKYQKEQVELEEQITNLREELNQMEQDMIGAEKWIELIKEYSVLKELTAPLLNAMIEKIFIHDATTNEDNERIQEIEIYYRFIGKVE

SEQ ID NO: 9202 - DNA, 50 bp, Clostridioides difficile
  source 1..50: mol_type = genomic DNA
caatatttttaactaagggaaaccggagtttcccaaacaaaaggatatta

SEQ ID NO: 9203 - DNA, 40 bp, Clostridioides difficile; identical to SEQ ID NO: 5343
  source 1..40: mol_type = genomic DNA

SEQ ID NO: 9204 - DNA, 50 bp, Clostridioides difficile
  source 1..50: mol_type = genomic DNA
caatatttttaactaagggaaaccccagtttcccaaacaaaaggatatta

SEQ ID NO: 9205 - DNA, 40 bp, Clostridioides difficile; identical to SEQ ID NO: 9165
  source 1..40: mol_type = genomic DNA

SEQ ID NO: 9206 - protein, 471 aa, Clostridioides difficile
MIEDIEVGKINCVVTKDLSRLGRNYIMTGQYTELYFPSHNVRYIAIDDGVDSEKGESEIAPFKNIINEWVARDTSRKVKSAFKTKFAEGAYYGAYAPLGYKKHPDIKGKLLVDEETKWIVEKIFSLAYQGYGSAKITKILREEKVPTASWLNFTRYGTFAHIFEGEPESKRYEWTIAHVKAILKSEVYIGNSVHNRQSTVSFKSKKKVRKPESEWFRVENTHEPIIDKEVFYRVQEQIKSRRRQTKEKATPIFAGLVKCADCGWSMRFATNKANKTPYSYYSCSFYGQFGKGYCSMHYIRYDVLYQAVLERLQYWAKAVQQDEEKVLNKIQKVGNAERIREKKKKANALRKAENRQNEIDRLFAKMYEDRACEKITERNFIMLSGKYQKEQIELEQQITNLREELSKMEQDMIGAEKWIELIKEYSVPKELTAPLLNAMIEKILIHEATTNEENERIQEIEIYYRFIGKVD

SEQ ID NO: 9207 - DNA, 50 bp, Clostridioides difficile; identical to SEQ ID NO: 1657
  source 1..50: mol_type = genomic DNA

SEQ ID NO: 9208 - DNA, 40 bp, Clostridioides difficile; identical to SEQ ID NO: 5343
  source 1..40: mol_type = genomic DNA

SEQ ID NO: 9209 - DNA, 50 bp, Clostridioides difficile; identical to SEQ ID NO: 9174
  source 1..50: mol_type = genomic DNA

SEQ ID NO: 9210 - DNA, 40 bp, Clostridioides difficile; identical to SEQ ID NO: 9165
  source 1..40: mol_type = genomic DNA

SEQ ID NO: 9211 - protein, 471 aa, Clostridioides difficile
MIEDIEAGKINCVVTKDLSRLGRNYIMTGQYTELYFPSHNVRYIAIDDGVDSEKGESEIAPFKNIINEWVARDTSRKVKSAFKTKFAEGAHYGAYAPLGYKKHPDIKGKLLVDEETKWIVEKIFSLAYQGYGSAKITKILREEKVPTSSWLNFTRYGTFAHIFEGKPESKRYEWTIAHVKAILKSEVYIGNSVHNMQSTVSFKSKKKVRKPESEWFRVENTHEPIIDKEVFYRVQEQIKSRRRQTKEKATPIFAGLVKCADCGWSMRFATNKANKTPYSYYSCSFYGQFGKGYCSMHYIRYDVLYQAVLERLQYWAKAVQQDEEKVLHKIQKVGNAERIREKKKKANALKKAENRQNEIDRLFAKMYEDRACEKITERNFIMLSGKYQKEQIELEQQITNLREELSKMEQDMIGAEKWIELIKEYSVPKELTAPLLNAMIEKILIHEATTNEENERIQEIEIYYRFIGKVD

SEQ ID NO: 9212 - DNA, 50 bp, Clostridioides difficile; identical to SEQ ID NO: 1657
  source 1..50: mol_type = genomic DNA

SEQ ID NO: 9213 - DNA, 40 bp, Clostridioides difficile; identical to SEQ ID NO: 5343
  source 1..40: mol_type = genomic DNA

SEQ ID NO: 9214 - DNA, 50 bp, Clostridioides difficile; identical to SEQ ID NO: 9174
  source 1..50: mol_type = genomic DNA

SEQ ID NO: 9215 - DNA, 40 bp, Clostridioides difficile; identical to SEQ ID NO: 9165
  source 1..40: mol_type = genomic DNA

SEQ ID NO: 9216 - protein, 529 aa, Kytococcus sedentarius
MSIATPTRTTTSPSAAVQRLRVVLYVRISDDPEGTEKGVERQEADCRDYAESLGFEVVEVFREDDTLAFKQRTITLPTGEKVRRVVRPRFRAMLSFLTQGRAEAMIAYDLDRAVRDPRDLEDLIDAKVLYGFRVLSTTGSLRLDNDSDIAMARVLVEMANKSSADTARRVARASKQQAIDGKWHGGRAPYGYRMGDSTLYVVPEQAALVREAADRLLAGESVYAIIQRWHRRGESSALGKRWTESALVRIMRNPALKGARTYLPMLPDGSRSTVPETVTDGNWTPILDVTTWQRVNDVLAARTAKSQGGPGAIKRVYPFTGLIRCAECGTAMYRQGDFYTCGNKQFNTCHRSVKMTEVTALVEDAVLSVFSRLALTPETLPARDGSETERAHDELSVLIDSDRTVLNRLDDDHYDGLIDRATWARQRSRLTERISTRQREYQQHLARKPVLDVDIDLGTVASEWAERTAQWKYDAASIVLEAVLIHGHPKGVSPIVSRRRDEPDETYQARLREHRQSLLARRVEFVWCA

SEQ ID NO: 9217 - DNA, 50 bp, Kytococcus sedentarius
  source 1..50: mol_type = genomic DNA
ctactacttttgcgcccccacagcgtgccgtgggctagcaaacgtacctg

SEQ ID NO: 9218 - DNA, 40 bp, Kytococcus sedentarius
  source 1..40: mol_type = genomic DNA
cagggtggggggcacgcgcgtgccgcctgccatggggtgc

SEQ ID NO: 9219 - DNA, 50 bp, Kytococcus sedentarius
  source 1..50: mol_type = genomic DNA
ctactacttttgcgcccccacagcaagccgtgggctagcaaacgtacctg

SEQ ID NO: 9220 - DNA, 40 bp, Kytococcus sedentarius
  source 1..40: mol_type = genomic DNA
cggggtcgggggcacgtgcaagccgcctccctgggtggga

SEQ ID NO: 9221 - protein, 539 aa, Azospirillum brasilense
MRAAIYARFSSDNQHERSIDDQVRLCRDFVERHGGTVVTVYADYAMSGAHLRNRPQALRLLDDAKAGQFDTVVAEGLDRLSRDQEDTAAIHKRLGFAGIRLATVQEGDISELHVGLKGTMNALFLRDLAQKVRRGQTGRAMAGSVPAGLSYGYDVVREFDARGELVRGKRRINPEQADAIRRIYREFAAGISPRAIADGLNRDGIPSPAGGHWNASTINGNPARKNGILYNEAYIGFVIYNRLHMVKDPETGKRLPRLNPPSDWVVTEVPELRIVEDDLWERAQAIKAGFAHLRVDKTRRPKHLFSGLLRCGCCGGAYTVKSKDQLACSTYRESGPSVCSNNRTIRLPDLQERVLDGIRTQLLSPKLLALYVKTYGEERRRLRSEASAKREDVAARVAKLGRQIDNIVDAIAEGTAGPALRGKLADLERQKAEADAELEAIIEAESDSVVELHPQAAERYRDQLDALDKALAGGDEARQNAANTLRALLARIEVHPGERRGETHLMVHGRIEELLSLTRTKPGEGNNTVARTAMMVAAE

SEQ ID NO: 9222 - DNA, 50 bp, Azospirillum brasilense
  source 1..50: mol_type = genomic DNA
taggactgcaatgatggtagcagcggagagctaccgtcagtacagtccca

SEQ ID NO: 9223 - DNA, 40 bp, Azospirillum brasilense
  source 1..40: mol_type = genomic DNA
ccttcatgatggtagcagcggagggatttgaacccccgac

SEQ ID NO: 9224 - DNA, 50 bp, Azospirillum brasilense
  source 1..50: mol_type = genomic DNA
taggactgcaatgatggtagcagcgcagagctaccgtcagtacagtccca

SEQ ID NO: 9225 - DNA, 40 bp, Azospirillum brasilense
  source 1..40: mol_type = genomic DNA
ccttcgtgcaggcagctgcgcagggattcaaaccccagcc

SEQ ID NO: 9226 - protein, 548 aa, Mycolicibacterium peregrinum
MSLRFAFYGRVSTEDAQDPEASRSWQKRRAMDLITPHGGFIAADYFDVGQSRSLPWKRRPEASRLLADVACRDRSFDAVVIGEPARAFYGPQFALTFPVLTHYGVGLWVPEVGGAVDPGSEAHDLVMTLFGGMSKGERARIQMRVRTAMSALAHDTARYLGGRPPYGYRLVDAGPHPNPAKANLGQRLHRLEPDPATSSVVERIYRMYADGAGLRYIAQRLTDDGVPSPSQYDPARNRHRDPRGWSHSAIRAILDNPAYRGIRVWGKQEKYEVLVNPDDVAAGYETRMRWRDEADWIAPERRTHEALIRDELAQAVRLRMQARRGPGLVCSRESTVPYALRGLLFCAACGRRMQGAARAGKRTTRILYRCELGKSRSVPADLSDHPRTVYLREDEVTARLDEWIATLADPADLARGQDADPVAGAGYAALRRQLSEANAKVAALVTAVESGVAVEDLTVALRRRTAERDELKVRLEQAERPRVMTAAQISELVEELGGLSAVLGEATGAERAQVYASLGLRLDYDPHLQRVTATADLSRVAGRVRGGT

SEQ ID NO: 9227 - DNA, 50 bp, Mycolicibacterium peregrinum
  source 1..50: mol_type = genomic DNA
cgtgtcgccggacgtgtccgaggggggacttggccacttacgacacgggt

SEQ ID NO: 9228 - DNA, 40 bp, Mycolicibacterium peregrinum
  source 1..40: mol_type = genomic DNA
ctcacgctgtgtccgaggggggacttgaacccccacgccc

SEQ ID NO: 9229 - DNA, 50 bp, Mycolicibacterium peregrinum
  source 1..50: mol_type = genomic DNA
cgtgtcgccggacgtgtccgagggtggacttggccacttacgacacgggt

SEQ ID NO: 9230 - DNA, 40 bp, Mycolicibacterium peregrinum
  source 1..40: mol_type = genomic DNA
ctcactatgtttcccaggctggtcttgaactcccaggctc

SEQ ID NO: 9231 - protein, 562 aa, Pseudomonas simiae
MPKVFSYVRFSSAKQSAGDSFERQIKAAKAFATSKGLELADPKDYLFFDAGRSAYKGRHIDDTSELARFLGYVEDGTVPVGSYLVIESLDRLSREKVRDALPRFLDLLAKGINVFTSLDQRTYTKDFDVTDLLVSIISMSRAHEESATKGSRVSSAWAKKHKEARDTGKPLGKLRPLWLDLTPDGYVLNPAHAQVVQRIFDLSAKGYGSRVIAATLNQDGIPTFSADRKNSSGLWGFSTIRHILESRTTLGEYQPHIFIGGERTPDGEPIKGYFPPVITEEQFYLAAAARASRRLHKVTKVTKNFNVLAGIFFCQKCGGTMHLQGFKDRKYFKCANKQKGMCDSGLIGAERSESVFREVLAKIDSLSLVRSSSGSLTKKLHVIDGRVEELRVKQANAESSHEEFPSRITAKLLQQIETDLETLNAEREALAQSLATDQVVSKSDFFESLDLTSYEGRAAANNLVKRLGVRISVMKLERMNECYAVSVEGTVSFLVYNREAALTIRSVDTDILDKQVMHGEITQDQRVRLEQIREMGNVQGTTSLVRALFNWEHVVASRADNG

SEQ ID NO: 9232 - DNA, 50 bp, Pseudomonas simiae
  source 1..50: mol_type = genomic DNA
actagtcaattgttgtacaacttcaagaagtgctgccacaattacctaca

SEQ ID NO: 9233 - DNA, 40 bp, Pseudomonas simiae
  source 1..40: mol_type = genomic DNA
cggcagtgggcagaaattcaagaagtgctgctccagctac

SEQ ID NO: 9234 - DNA, 50 bp, Pseudomonas simiae
  source 1..50: mol_type = genomic DNA
actagtcaattgttgtacaacttctggaagtgctgccacaattacctaca

SEQ ID NO: 9235 - DNA, 40 bp, Pseudomonas simiae
  source 1..40: mol_type = genomic DNA
ctgcagtgagctgagattgtggcactgctgctccagctcg

SEQ ID NO: 9236 - protein, 496 aa, Fusobacterium mortiferum
MKKAVAYCRFSSDNQRTESIDAQVRAIEEYCKKEGYTLIKIYKDEAISGTSIDDREEFLKMIEDSKNKEFNYVIVHKFDRFARNRYDHAINEKKLNENGVKLISVLEQLNDSPEAVILKSVLTGMNEYYSLNLAREVRKGQKENALKCIHNGGIPPLGYDLTEDKTYTINEEEAKAVRLIFKMYLEGRGYAYIADELNSLGFKNKLGKPFKKISIRDTLYNEKYIGNFIFGKKDKKGNLTGKEIKIENGIPAIISKEDFEKVQIMLQKKVRSSSGRSTALTTYLLTGLCECGECGGSYSGGYRSVNRNKTVSYGYQCRNRKDKVNDCKNTPIRREVLEDLVITTLKENIFSTSQIEVITDKVYDYVQDTFKRSNKELIKIDKSLEKLKAKAEKLLDLTLDGTISDYEYRNKKGEIDMEILNLKEERFKYTDAPKFMDKQKIKNHLIELGKNLDSKDENLLKILIQTFVKKIVVHRDSIALELRIFPGLTPAKVGGD

SEQ ID NO: 9237 - DNA, 50 bp, Fusobacterium mortiferum
  source 1..50: mol_type = genomic DNA
acaccggctaaggttggtggagatgaaagccaacataaattagctatatc

SEQ ID NO: 9238 - DNA, 40 bp, Fusobacterium mortiferum
  source 1..40: mol_type = genomic DNA
aaaacattctggtggagatgacgggaatcgaacccgtgtc

SEQ ID NO: 9239 - DNA, 50 bp, Fusobacterium mortiferum
  source 1..50: mol_type = genomic DNA
acaccggctaaggttggtggagatgcaagccaacataaattagctatatc

SEQ ID NO: 9240 - DNA, 40 bp, Fusobacterium mortiferum
  source 1..40: mol_type = genomic DNA
aaaacaaccacgtgcagtggccgggaattgaacccgggtc

SEQ ID NO: 9241 - protein, 496 aa, Fusobacterium mortiferum
MKKAVAYCRFSSDNQRTESIDAQVRAIEEYCRKEGYTLIKIYKDEAISGTSIDDREEFLKMIEDSKNKEFNYVIVHKFDRFARNRYDHAINEKKLNENGVKLISVLEQLNDSPEAVILKSVLTGMNEYYSLNLAREVRKGQKENALKCVHNGGIPPLGYDLTEDKTYTINEEEAKAVRLIFKMYLEGRGYAYIADELNSLGFKNKLGKPFKKISIRDTLYNEKYIGNFIFGKKDKKGKLTGKEIKIENGIPAIISKEDFEKVQIMLQKKVRSSSGRSTALTTYLLTGLCECGECGGSYSGGYRSVNRNKTVSYGYQCRNRKDKVNDCKNTPIRREVLEDLVITTLKENIFSTSQIEVITDKVYDYVQDTFKRSNKELIKIDKSLEKLKAKAEKLLDLTLDGTISDYEYRNKKGEIDMEILNLKEERFKYTDAPKFMDKQKIKNHLIELGKNLDSKDENLLKILIQTFVKKIVVHRDSIALELRIFPGLTPAKVGGD

SEQ ID NO: 9242 - DNA, 50 bp, Fusobacterium mortiferum
  source 1..50: mol_type = genomic DNA
acacctgctaaggttggtggagatgaaagccaacataaattagctatatc

SEQ ID NO: 9243 - DNA, 40 bp, Fusobacterium mortiferum; identical to SEQ ID NO: 9238
  source 1..40: mol_type = genomic DNA

SEQ ID NO: 9244 - DNA, 50 bp, Fusobacterium mortiferum
  source 1..50: mol_type = genomic DNA
acacctgctaaggttggtggagatgcaagccaacataaattagctatatc

SEQ ID NO: 9245 - DNA, 40 bp, Fusobacterium mortiferum; identical to SEQ ID NO: 9240
  source 1..40: mol_type = genomic DNA

SEQ ID NO: 9246 - protein, 509 aa, Streptomyces dengpaensis
MTQRLILDSYARESRRGDKRRLSVTGQHASNEQRINDLGGVLGKHLDDQGKSAWNPDVTRGDWEELIARLTSRQCDGVVIFDLERFVRQVKDAVRIVDLAKVGFRIFDSDMEFDLTTTSGRDAFYKQAVAAETYSSRLSEKVSRGNRQRALNGEGKRGRYRAFGFEDDSTTVREVERPYIREVARMILRDGKTWPDAVKYLTKNGLFSTAIRHTAECAEAKESMTPYQLRSYSCECAGQPWSNTTLQQALKSPRMAGYARLGSELLGRLPGEPILDPADWQELCALISSRRGRPPAQIFLCTGKVPVRCWNCGTVLTQRQSSHGKRYPDTGEVKRYYLCDKTADGCGRTIADRYVLDGHVRDLVVRELSSTESADELKRQRERRQDMRAPHEKEIARLVRIRDHWDRQLNDGAEDMTIERHSFLTGDLNKKIKERNAKLEEIGEALSAIPEAESREAVLTKWEAAGPEDQRAMFRQAFGERVIYIQPGSSLDDDCLDRMLPAPRQSQPG

SEQ ID NO: 9247 - DNA, 50 bp, Streptomyces dengpaensis
  source 1..50: mol_type = genomic DNA
gggggcataaaagaagtcatgtaccaggacttgatttagtttcttccccg

SEQ ID NO: 9248 - DNA, 40 bp, Streptomyces dengpaensis
  source 1..40: mol_type = genomic DNA
cgggcagggcagcatgtaccaccacttcaagggcaagccc

SEQ ID NO: 9249 - DNA, 50 bp, Streptomyces dengpaensis; identical to SEQ ID NO: 9247
  source 1..50: mol_type = genomic DNA

SEQ ID NO: 9250 - DNA, 40 bp, Streptomyces dengpaensis
  source 1..40: mol_type = genomic DNA
aggtcagggcaccatgtgccaccacttgaaggtgaagggc

SEQ ID NO: 9251 - protein, 638 aa, Klebsiella grimontii
MKPKLYSYVRFSSVKQREGNSLERQQDTALRIASRYDLELDTTAFHDLGMSAFKGKNAHEGKLSEFIKQIGVKVPVGSWLVVENLDRISRDDAWSALDIFKSILSKGIVVVTGMDEKVYKYADVKNNPTDLIISLLMFTRAHDESLTKKNRVESQARSLIRHNLTREPGTPARAIESVGQNVWWVDTKSGYVTPHPTYFAAAQKIIELKQSGETLLGIQRYLNEHYPAPKKRVYKDQTGQALTSKTEQWGKHLIRTFLNPTVHGQKVFTLDKRDESGIVIYDPDSEKPLKETFTIPDYYPVLMSEIDYLTLSKLDRHRAVTRSSSKYPEGNPEPEIPLLSGIGILFCGKCGSFMFKSGSNKNKYRYICGSKIVQGKPCGKKGFTSYQLEHTILQLIADHVWNNHQEDKTAWYESEIAKASESIDKLLKLATLTDSLEELAEQINSNKHKKVTLEREFHQYKINRSEIQTTGWEQFQHFDVHDTKNPNRKQIRLKVKQAIKRIDCYDIDGRHGHFEVTFADETKQRIVIKFNRNRSPGVSYVEAQTVNDHDLLKMQGLVLHSFIDELISPDKFAQHIKEKHEVSLLNPTYITELENSASRDKDNGMTIIVDGSTSKTYATVNGTKYEINSLEDLEKFSH

SEQ ID NO: 9252 - DNA, 50 bp, Klebsiella grimontii
  source 1..50: mol_type = genomic DNA
actatgaataattgacaattaggcttgcctaatatacaattactcattgt

SEQ ID NO: 9253 - DNA, 40 bp, Klebsiella grimontii
  source 1..40: mol_type = genomic DNA
gcagcgggtgtttgccggcttgccctgcggcatgcccggg

SEQ ID NO: 9254 - DNA, 50 bp, Klebsiella grimontii
  source 1..50: mol_type = genomic DNA
actatgaataattgacaattaggctggcctaatatacaattactcattgt

SEQ ID NO: 9255 - DNA, 40 bp, Klebsiella grimontii
  source 1..40: mol_type = genomic DNA
gcagcccgcgtgtgcctgctgtgcctgctgcatccccggg

SEQ ID NO: 9256 - protein, 638 aa, Klebsiella grimontii
MKPKLYSYVRFSSVKQREGNSLERQQDTALKIAARYNLELDTTAFHDLGMSAFKGRNAHEGKLSEFIKQIGVKVPVGSWLVVENLDRISRDDAWTALDIFKSILSKGIVVVTGMDEKVYKYADVKNNPTDLIISLLMFTRAHDESLTKKNRVEAQARSLIRYNLTRKAGTPAKAIESVGQNVWWVDTKSGYVTPHPMYFSAAQKIIELKQNGETLLGIQRYLNEHYTAPKKRVYKDKTGQALTPKTKQWGKHLIRTFLNPTVHGQKIFTLDKRDESGAIIYDSESDEPLKETFIIPDYYPALMSEVDYLTLSKLDRHRAVTRSSSTYPGGNPEPEIPLLSGIGILFCGKCGSFMFKSGSSENKYRYICGSKIVQGKPCGKKGFTSYQLEHTVLQLIADHVWNNHQEDKTAWYESEIEKASEAIKKLLKLATLTDNIEELADQINANKQKKITLEKEFQQYKISRSEIQTTGWDQFRHFDVHDTKNPERKRIRLKVKQAIKRIDCYDIDGRHSHFEVTFADETKQRIVIKFNRNRSPGISYVEAQTVNDHDLLKMQGLVLHSFIDELISPEKFAQHIKDKHEVSILNPTFITELEDGVTRDEDSGIAIRVDGITSKSYATVNGIKYEINSLEDLEKLSQ

SEQ ID NO: 9257 - DNA, 50 bp, Klebsiella grimontii
  source 1..50: mol_type = genomic DNA
actgcgaataattgactattaggcttgcctaacatataattattcactat

SEQ ID NO: 9258 - DNA, 40 bp, Klebsiella grimontii; identical to SEQ ID NO: 9253
  source 1..40: mol_type = genomic DNA

SEQ ID NO: 9259 - DNA, 50 bp, Klebsiella grimontii
  source 1..50: mol_type = genomic DNA
actgcgaataattgactattaggctggcctaacatataattattcactat

SEQ ID NO: 9260 - DNA, 40 bp, Klebsiella grimontii; identical to SEQ ID NO: 9255
  source 1..40: mol_type = genomic DNA

SEQ ID NO: 9261 - protein, 552 aa, Streptomyces albidoflavus
MTSAEAPATFHGPPAVQGGEPWLGYIRVSTWREEKISPELQKAAVLAWAARTGRQITDWITDLDATGRNFKRKIMGAIQRVEEGEARGIAVWKFSRFGRTDLGIATNLARLEHAGGQLASATEDVDVRTAVGRFNRRILFDLAVFESDRAGEMWKDAHQWRRAHGLPATGGKRLGYVWYPRRIPDLTRLGEWVTQNERYEIDEGARADIEQLFERKLGLGAGVPEGYGALAGWLNRLGYRTGVGTLWKADSLRRYMLSGFAAGLLRIHHPDCHCAYTDNGGTCTRWLLIDGAHEAIITPETWERYLAQVEERRNMSPRARNPTYPLTGLVRCGSCRGDAGATSAKRASGRIYGYAYTCGRQAHSGGTVCENGVWVQRYLVEDAVMDWVRREAAASVDAAPPTPVEMNPDRDRQRAAGERARLQAEHTRIENALVNLAADRALNPSSYPGQVFEQAQGKLLAQLQAAKAGAEEAAAVESAPRREDFTPMAGKLLDLWDVLDAPEKNALLRQLIRRVVCTRGAKGKKGVEGSGDTRVTVHAVWEPDPWADKAIA

SEQ ID NO: 9262 - DNA, 50 bp, Streptomyces albidoflavus
  source 1..50: mol_type = genomic DNA
ccacttgttttacacgtgtcgtccctggatagaacgcgtaaaacaagtgc

SEQ ID NO: 9263 - DNA, 40 bp, Streptomyces albidoflavus
  source 1..40: mol_type = genomic DNA
ccacaggggtgtgctttttcttgacgaggcgccggagttc

SEQ ID NO: 9264 - DNA, 50 bp, Streptomyces albidoflavus; identical to SEQ ID NO: 9262
  source 1..50: mol_type = genomic DNA

SEQ ID NO: 9265 - DNA, 40 bp, Streptomyces albidoflavus
  source 1..40: mol_type = genomic DNA
ccacagggcgctgctttttctccacgtggagctggagtgc

SEQ ID NO: 9266 - protein, 509 aa, Clostridium sulfidigenes
MKIAIYSRKSKETDTGESIKNQINMCKDYFTRQFDDCIFETFEDEGFSGGNINRPSFQRMMQLAKHKQFDVVTCYKIDRISRNTLDFLTVFEELKSYGVKLVSVTEGFDPSTPAGKMMMSMISSMAEMERMNIAQRVKDNMLELGKMGRWSGGTPPTGYRSVSVVNESGKKETYLELIPEYIDKLNLIFNMIAEGYTPGQVSKKIGLPNRTISNILTNPVHLAATEESKSYLESIGYKVYGELNGKGFMPYNRRPRVNGKALWNSKDMFVSTSKHEVAVEPTIWIKANQVFKSRGAEARPRISPNSFLSHMVKCKCGSGMFVFPGNPNKYGEVKYYFRCSDKKYKKTNCDIKWLPVELVEEYFLKTLQGISLDKSILYSYLTSNEDINYDNLIKDVKKDINKRNKDIESLTEKLIFIEGPAIEIVTNKINNISNEISVLNEELLALERKKIFQDQDKINIDTLYELIVITISEFDTLSVEKQQVKIKSFLKEIIYHGGDDIEIVFLGGV

SEQ ID NO: 9267 - DNA, 50 bp, Clostridium sulfidigenes
  source 1..50: mol_type = genomic DNA
aggtggagtttaaactgtactgcacatgcactacagtttaaatttcaccc

SEQ ID NO: 9268 - DNA, 40 bp, Clostridium sulfidigenes
  source 1..40: mol_type = genomic DNA
tgcagaaattgcagctgcacaaccagaccagcctccccct

SEQ ID NO: 9269 - DNA, 50 bp, Clostridium sulfidigenes
  source 1..50: mol_type = genomic DNA
aggtggagtttaaactgtactgcacctgcactacagtttaaatttcaccc

SEQ ID NO: 9270 - DNA, 40 bp, Clostridium sulfidigenes
  source 1..40: mol_type = genomic DNA
tgctgaaatcgccactgcaccgccaggcctgccatcccct

SEQ ID NO: 9271 - protein, 447 aa, Enterocloster bolteae
MGTYIDRALSAKTDNRPEFQHMIKDSAKGLFDIALVWKLDRFARNRYDSARYKNMLKKNGVKVISARENISEGSEGIILEAMLEGYAEYYSAELSEKVIRGLTDNALKCKYNGGTVPMGYYIDEQQYYQIDPKTAPVVLEMFTRYSEGSTMQELVNLLNDRGMRSIRGGKITLNIMNHLLKNRRYMGEYSYRDVIKEDGIPAIVPKELFERVQEQLAKNKKAPARHKAEDDYLLSTKLYCGKCNSFMVGESGTSHTLKVHHYYRCVNTKKKKLCTKKAVKKDWIEDLVINYTMKAIMNDEVMERLIDTLMELQKKESTNLPLLKKQLAETEKGINNMLNAIQAGIFTPSTKQRLDELEETKSQLEVSILQEEMQKPMLTREQIAFFIYRFRKFDTTKREQRQRLIDSFVNAVYLYEDKVVMTFNYKDGSKTVTLAEVEGLDLSCFGA

SEQ ID NO: 9272 - DNA, 50 bp, Enterocloster bolteae
  source 1..50: mol_type = genomic DNA
gggtttggatttatcctgcttcggcgcattgactggatagtccgaaaacc

SEQ ID NO: 9273 - DNA, 40 bp, Enterocloster bolteae
  source 1..40: mol_type = genomic DNA
gggttcaagtcccatctcccgcattttagaaaaaggaatc

SEQ ID NO: 9274 - DNA, 50 bp, Enterocloster bolteae
  source 1..50: mol_type = genomic DNA
gggtttggatttatcctgcttcgggccattgactggatagtccgaaaacc

SEQ ID NO: 9275 - DNA, 40 bp, Enterocloster bolteae
  source 1..40: mol_type = genomic DNA
gggttcaaatcccatttctgccattttagctgagggactt

SEQ ID NO: 9276 - protein, 504 aa, Mesorhizobium sp
MLQPRDLKGRNAISYARWSSGKQASGDSLARQTKNAEDFCISFGLTLDRQLRDDGVSAFKGRNLEQGLGRFINGVKSGTIHHDTVLLLEAMDRFSRQNPMDARDSFEGILKLGVTVVTLIDNRVHTWDGYRNDIMQSISSLLMMKAANDYALRLSHNVKGAWERKATKAKAAVASGGRIKVAKLPFWIDRDSNELNERADDARLIFELAKEGHGQQAIAQILNTRGIPSSAGNTWSQVVVGDVLRSPATYGCLVLKGEEVPGYFPALISETEWLATRQRTKARLHGRQVGRTSNLFSRMVHCGHCGSPMVLTSSKKGGVSWGYFICTGKTFKRTGCTAPNWRYDQFERELLDRVGFLAVPVPQDQSAPDLSRELEETIGALEAKQSNVLAGIAEAETADVRKVLLAKADELSRQIEVKRKEIVAIRENDARYRESAAAVMDFTADQEEIRRLAKEDRKGAQGLISSLVQRIDLESASKTLRRAMVTMRSGYTHAIVFDGTREPG

SEQ ID NO: 9277 - DNA, 50 bp, Mesorhizobium sp
  source 1..50: mol_type = genomic DNA
attccgtaaaataaaagccaagtctggactagactttaactctacagact

SEQ ID NO: 9278 - DNA, 40 bp, Mesorhizobium sp
  source 1..40: mol_type = genomic DNA
gatctgcaggagccagacctggcacaagctctgattgctt

SEQ ID NO: 9279 - DNA, 50 bp, Mesorhizobium sp
  source 1..50: mol_type = genomic DNA
attccgtaaaataaaagccaagtcgagactagactttaactctacagact

SEQ ID NO: 9280 - DNA, 40 bp, Mesorhizobium sp
  source 1..40: mol_type = genomic DNA
ggtccacaggtgccagacagagcacaagctctgaagccct

SEQ ID NO: 9281 - protein, 578 aa, Streptococcus suis
MNKRTLTIEDIKTQNWENLPDQITALYCRLSAEDANEGESNSISNQKQILTQVAMRENLPNPFFFVDDGFSGSNAQRPDFQKMMNLVETGKIQAVVVKDLSRLSRDYLLTGQLTEITFPSKNIRFISLNENLDSNKRNSQDAYLAPLVSLFNNWYSLQCSEKIKLSKHTKAKTGEKIGWIAPYGYLKNPENPKEWLIDDYASRIVKRIFKEYLSGKPISSIANDLRKDKVLTPANYKKKLGISNYRVLESDPYHWKNQMICQMLEKEEYTGATVNLKTAKISYKQRGHRMKPREDWLIFPNTHEAIISKEDFKTVRKMMNHKRVTRRYDWKNKPGHENLFAGLVFCENGHKLSFCPQQKDNTNLDHYKCYHYRRAGDTYSGSHYLRKETLEELVLGDLQQLISSIRFNEEELLAKLKSRFDIRESKKQDSLRKQLNKAKKRSLELDTIIQRLYEKQLLSEISDERFRKLVDSYESEQAELSQQIQEFQEVLVSQTESAENIDKFMRTIRQHTKLENLTTQLVNELIDKIVIHQPTGRSKNRQVTIELHYRFSENYKTSELKSARKIITNRLLGEVWIL

SEQ ID NO: 9282 - DNA, 50 bp, Streptococcus suis
  source 1..50: mol_type = genomic DNA
agactgctcggtgaggtgtggatattatagcacagtccagacagcagtcc

SEQ ID NO: 9283 - DNA, 40 bp, Streptococcus suis
  source 1..40: mol_type = genomic DNA
taatcttttcatgtctctattatatcaacaaacaatgaat

SEQ ID NO: 9284 - DNA, 50 bp, Streptococcus suis
  source 1..50: mol_type = genomic DNA
agactgctcggtgaggtgtggatagtatagcacagtccagacagcagtcc

SEQ ID NO: 9285 - DNA, 40 bp, Streptococcus suis
  source 1..40: mol_type = genomic DNA
taatattttcatttttctagtataatataataaaatgaat

SEQ ID NO: 9286 - protein, 433 aa, Streptococcus suis
MNKRTLTIEDIKTQNWENLPDQITALYCRLSAEDANEGESNSISNQKQILTQVAMRENLPNPFFFVDDGFSGSNAQRPDFQKMMNLVETGKIQAVVVKDLSRLSRDYLLTGQLTEITFPSKNIRFISLNENLDSNKRNSQDAYLAPLVSLFNNWYSLQCSEKIKLSKHTKAKTGEKIGWIAPYGYLKNPENPKEWLIDDYASRIVKRIFKEYLSGKPISSIANDLRKDKVLTPANYKKKLGISNYRVLESDPYHWKSQMICQMLEKEEYTGATVNLKTTKISYKQRGHRMKPREDWLIFPNTHEAIISKEDFKTVRKMMNHKRVTRRYDWKNKPGHENLFAGLVFCENGHKLSFCPQQKDNTNLDHYKCYHYRRAGDTCSGSHYLRKETLEELVLGDLQQLISSIQFNEEELLTKLKSRFDIRESKKQDSLRK

SEQ ID NO: 9287 - DNA, 50 bp, Streptococcus suis; identical to SEQ ID NO: 9282
  source 1..50: mol_type = genomic DNA

SEQ ID NO: 9288 - DNA, 40 bp, Streptococcus suis; identical to SEQ ID NO: 9283
  source 1..40: mol_type = genomic DNA

SEQ ID NO: 9289 - DNA, 50 bp, Streptococcus suis; identical to SEQ ID NO: 9284
  source 1..50: mol_type = genomic DNA

SEQ ID NO: 9290 - DNA, 40 bp, Streptococcus suis; identical to SEQ ID NO: 9285
  source 1..40: mol_type = genomic DNA

SEQ ID NO: 9291 - protein, 555 aa, Streptococcus suis
MNKGTLTFEEIKTQNLENLPDRITALYCRLSAEDANEGESNSISNQKQILTQVAMRENLLNPFFFVDDGFSGSNAQRPDFQRMMSLVEAGKIQAVVVKDLSRLSRDYLLTGQLTEITFPSKNIRFISLNENLDSNKRNSQDAYLAPLVSLFNNWYSLQCSEKIKLSKHTKAKTGEKIGWIAPYGYLKNPENPKEWLIDDYASQIVKRVFEEYLSGKPIASIASGLRKDKILTPANYKKKLGISNYRVLESDPFHWKSQMICQMLEKEEYTGATINLKTTKISYKKRGHRMKPREDWLIFPNTHEAIISKEDFKTVRKMMNHKRVIRRYDWKNKPGHENLFAGLVFCENGHKLSFCPQQKDNTNLDHYKCYHYRRAGDTCSGSHYLRKETLEELVLGDLQQLISSIQFNEEELLTKLKSRFDIRESKKQDSLRKQLNKAKKRSLGLDTIIQRLYEKQLLSEISDERFRKLVDSYESEQAELSQQIQELQRVLASQTESTENINKFMRTIRQYTKLETLTIQLVNELIDKIIVHQPIGRGKNRQVTIELHYRFIGEL

SEQ ID NO: 9292 - DNA, 50 bp, Streptococcus suis
  source 1..50: mol_type = genomic DNA
ggactgctcgttgaggggtggacattatagcacagtccagacagcagtcc

SEQ ID NO: 9293 - DNA, 40 bp, Streptococcus suis; identical to SEQ ID NO: 9283
  source 1..40: mol_type = genomic DNA

SEQ ID NO: 9294 - DNA, 50 bp, Streptococcus suis
  source 1..50: mol_type = genomic DNA
ggactgctcgttgaggggtggacagtatagcacagtccagacagcagtcc

SEQ ID NO: 9295 - DNA, 40 bp, Streptococcus suis; identical to SEQ ID NO: 9285
  source 1..40: mol_type = genomic DNA

SEQ ID NO: 9296 - protein, 555 aa, Streptococcus suis
MNKGTLTFEEIKTQNLENLPDRITALYCRLSAEDANEGESNSISNQKQILTQVAMRENLLNPFFFVDDGFSGSNAQRPDFQRMMSLVEAGKIQAVVVKDLSRLSRDYLLTGQLTEITFPSKNIRFISLNENLDSNKRNSQDAYLAPLVSLFNNWYSLQSSEKIKLSKHTKAKTGEKIGWIAPYGYLKNPENPKEWLIDDYASQIVKRVFEEYLSGKPIASIASGLRKDKILTPANYKKKLGISNYRVLESDPFHWKSQMICQMLEKEEYTGATINLKTTKISYKQRGHRMKPREDWLIFPNTHEAIISKEDFKTVRKMMNHKRVIRRYDWKNKPGHENLFAGLVFCENGHKLSFCPQQKDNTNLDHYKCYHYRRAGDTCSGSHYLRKETLEELVLGDLQQLISSIQFNEEELLTKLKSRFDIRESKKQDSLRKQLNKAKKRSLGLDTIIQRLYEKQLLSEISDERFRKLVDSYESEQAELSQQIQELQRVLASQTESTENINKFMRTIRQYTKLETLTIQLVNELIDKIIVHQPIGRGKNRQVTIELHYRFIGEL

SEQ ID NO: 9297 - DNA, 50 bp, Streptococcus suis; identical to SEQ ID NO: 9292
  source 1..50: mol_type = genomic DNA

SEQ ID NO: 9298 - DNA, 40 bp, Streptococcus suis; identical to SEQ ID NO: 9283
  source 1..40: mol_type = genomic DNA

SEQ ID NO: 9299 - DNA, 50 bp, Streptococcus suis; identical to SEQ ID NO: 9294
  source 1..50: mol_type = genomic DNA

SEQ ID NO: 9300 - DNA, 40 bp, Streptococcus suis; identical to SEQ ID NO: 9285
  source 1..40: mol_type = genomic DNA

SEQ ID NO: 9301 - protein, 451 aa, Streptococcus suis
MNENLDSNKRNSQDAYLAPLVSLFNNWYSLQCSEKIKLSKHTKAKTGEKIGWIAPYGYLKNPKNPKEWLIDDYASRIVKRIFKEYLSGKPISSIANDLRKDKVLTPANYKKKLGISNYRVLESDPYHWKSQMIYQMLAKEEYTGATINLKTAKISYKQRGHRMKPREDWLIFPNTHEAIISKEDLKTVRKMMNHKRVTRRYDWKNKPGHENLFAGLVFCENGHKLSFCPQQKDNTNLDHYKCYHYRRAGDTYSGSHYLRKETLEELVLGDLQQLISSIRFNEEELLAKLKSRFDIRESKKQDSLRKQLNKAKKRSLELDTIIQRLYEKQLLSEISDERFRKLVDSYESEQAELSQQIQEFQEVLVSQTESAENIDKFMRTIRQHTKLENLTTQLVNELIDKIVIHQPTGRSKNRQVTIELHYRFSENYKTSELKSARKIITNRLLGEVWIL

SEQ ID NO: 9302 - DNA, 50 bp, Streptococcus suis; identical to SEQ ID NO: 9282
  source 1..50: mol_type = genomic DNA

SEQ ID NO: 9303 - DNA, 40 bp, Streptococcus suis; identical to SEQ ID NO: 9283
  source 1..40: mol_type = genomic DNA

SEQ ID NO: 9304 - DNA, 50 bp, Streptococcus suis; identical to SEQ ID NO: 9284
  source 1..50: mol_type = genomic DNA

SEQ ID NO: 9305 - DNA, 40 bp, Streptococcus suis; identical to SEQ ID NO: 9285
  source 1..40: mol_type = genomic DNA

SEQ ID NO: 9306 - protein, 555 aa, Streptococcus suis
MNKSTLTIKEIKTQTLEELPDKITVLYCRLSAEDANEGESNSISSQKQILAQVAEREGLVNPYFFVDDGFSGSNAQRPDFQKALNLVEAGRVANFVVKDLSRLSRDYLLSGQLTEITFPSKNIRFISLNENLDSFKRNSQDAYLTPLVSLFNNWYSLQCSEKIKLSKHTKAKTGEKIGWFAPYGYLKNPENPKEWLVDEYASQIVRRVFKEYLSGKPIASIANGLREDRILTPANYKKKLGVSNYRVLESDPYHWKSQMICQMLEKEEYTGATINLKTAKISYKQRNCRLRPREDWLIFPDTHEAIISKEDFALARKMLGHKRVVQRNTWKDKPGHENIFAGLVFCENGHKLSFCPQQKDHINLDHYKCYHHRRAGDSCSGLHYLRKNVLEELVLTELQQLISSTHLDEEKLLEELKSRFDIREDKRQDSLRKQLNRSKRRSKELDTIIQKLYEKQLLDEISEDRFRKLADGYESEQAELEQQIRELQEVLVGQTESAENIDKFMRTIRQYTNIETLSTQLVNELIDKIVVHQPTGRGKSRQVPIELHYRFIGEI

SEQ ID NO: 9307 - DNA, 50 bp, Streptococcus suis
  source 1..50: mol_type = genomic DNA
ggactgctgagggaggtgtggatattataccacaccccacccagcagtcc

SEQ ID NO: 9308 - DNA, 40 bp, Streptococcus suis; identical to SEQ ID NO: 9283
  source 1..40: mol_type = genomic DNA

SEQ ID NO: 9309 - DNA, 50 bp, Streptococcus suis
  source 1..50: mol_type = genomic DNA
ggactgctgagggaggtgtggatagtataccacaccccacccagcagtcc

SEQ ID NO: 9310 - DNA, 40 bp, Streptococcus suis; identical to SEQ ID NO: 9285
  source 1..40: mol_type = genomic DNA

SEQ ID NO: 9311 - protein, 555 aa, Streptococcus suis
MNKSTLKIKEIKTQTLEELPDKITVLYCRLSAEDANEGESNSISSQKQILAQVAEREGLVNPYFFVDDGFSGSNAQRPDFQKALNLVEAGRVANFVVKDLSRLSRDYLLSGQLTEITFPSKNIRFISLNENLDSFKRNSQDAYLTPLVSLFNNWYSLQCSEKIKLSKHTKAKTGEKIGWFAPYGYLKNPENPKEWLVDEYASQIVRRVFKEYLSGKPIASIANGLREDRILTPANYKKKLGVSNYRVLESDPYHWKSQMICQMLEKEEYTGATINLKTAKISYKQRNCRLRPREDWLIFPDTHEAIISKEDFALARKMLGHKRVVQRNTWKDKPGHENIFAGLVFCENGHKLSFCPQQKDHINLDHYKCYHHRRAGDSCSGLHYLRKNVLEELVLTELQQLISSTHLDEEKLLEELKSRFDIREDKRQDSLRKQLNRSKKRSKELDTIIQKLYEKQLLDEISEDRFRKLADGYESEQAELDQQIRELQEVLVGQTESAENIDKFMRTIRQYTNIETLSTQLVNELIDKIVVHQPTGRGKSRQVPIELHYRFIGEI

SEQ ID NO: 9312 - DNA, 50 bp, Streptococcus suis; identical to SEQ ID NO: 9307
  source 1..50: mol_type = genomic DNA

SEQ ID NO: 9313 - DNA, 40 bp, Streptococcus suis; identical to SEQ ID NO: 9283
  source 1..40: mol_type = genomic DNA

SEQ ID NO: 9314 - DNA, 50 bp, Streptococcus suis; identical to SEQ ID NO: 9309
  source 1..50: mol_type = genomic DNA

SEQ ID NO: 9315 - DNA, 40 bp, Streptococcus suis; identical to SEQ ID NO: 9285
  source 1..40: mol_type = genomic DNA

SEQ ID NO: 9316 - protein, 563 aa, Pseudomonas veronii
MSKTIFPYVRFSSPEQMKGDSQRRQTEKIRHYAASNGYQLNETLDLRDLGLSAYHAEHMEADAGLGRFLLAIESGLIPLDGTSYLCIEQLDRLSRQSIDQANELFKKILRANVNIITMMDSKVYTKDSLNNFMEIVYSLFLMEQAHQESAKKASRIKSVFNGRLAKLERGEKIQYAGQIPGWLKKTKVSGVFEIDEAKANVVREIFTRKSNDESLKKIADDLNSRGVIRLRNKSDGSKLWTTGALSNLLKAESTYGVLIVKQTTKIKSLSGNRNEVTELGRFDNYYPAVISRELFMSAREKLREINTIKDYGRSTSKNLFSGLVYCGYCGERMYFDEDDKMLKTGRKYYRHLKCIGYLHKLCDKGKLKYDKFESVFPWSYAYDAEKGSAHTQAKISALSSERLTIEGELALNRDRLESLTAAFEASEDYDADFFLKTSSSISRKISAKQQELDSIITQISFFAGSVAEPLEFDLTNTSDRDKAKAQLKKILAAIIVYPAESMGFLLFKNGNVQSIDAIARAKTDMKAFSYFAVYAKELRKKLESGSGDAKLKKIFDALRHWSD

SEQ ID NO: 9317 - DNA, 50 bp, Pseudomonas veronii
  source 1..50: mol_type = genomic DNA
ttttcctaaaagtatccagcttagggtgatgagtgctaccctttggagaa

SEQ ID NO: 9318 - DNA, 40 bp, Pseudomonas veronii
  source 1..40: mol_type = genomic DNA
cggcgggcgcgaggttgagggtgatgcggcgggacgggta

SEQ ID NO: 9319 - DNA, 50 bp, Pseudomonas veronii
  source 1..50: mol_type = genomic DNA
ttttcctaaaagtatccagcttagcttgatgagtgctaccctttggagaa

SEQ ID NO: 9320 - DNA, 40 bp, Pseudomonas veronii
  source 1..40: mol_type = genomic DNA
ctgggggctcgagggtgggcttggtgcggctgggcgggga

SEQ ID NO: 9321 - protein, 584 aa, Streptococcus pasteurianus
MKKNNVEIIKADSLVRRRGDNFERESKRVAAYCRVSSDSEDQKNSYESQVRHYKDYISQRSDWELAGIYADEGISGTQVGKRQDFQRLINDCVNGEIDYIVTKAIARFARNTLDTLKYVRMLKDMQIGVYFEEENIDTLTMDGELLLTILSSVAQQEVENTSAHVKKGLKMKMQRGELIGFQGCLGYDYDVETKQLSINKKEAKIVRYIFERYLEGIGGKVIARELDELGYKSPRGLDHWNDTTVLGIIKNEKYKGDILMGKTFTVDPISKRRLSNFGEEDKYYIKDNHEPIISKEDFEKAQEIRLRRAGNKKTAANVNGKRERYSKMYAFSSMLECGFCGSILSRRSWHCRSDYRKVVWHCVTSIKKGKKFCKHSKGLEELAIEGAFMEAYRKLYHSNENLMTDLLETIESELNDNSLNKELKRITNKLRTLLKKEENLVNLRLEGKISDTIYNEKYNEISSEKEFLAEEKVNIETTLKSEIDVKKRLTEFKHLLSSQKMLTEFDRAVFESIVEKIIVGGVNSDGEIDPAMLTIIFKTGETQNKDGKQFKSKRKNAKLETDKLCPQNSDEDKKLYSQGTDYTR

SEQ ID NO: 9322 - DNA, 50 bp, Streptococcus pasteurianus
  source 1..50: mol_type = genomic DNA
ttctcaaggaacagactacacgcgcgtggagtgcgtagtgttgctacaac

SEQ ID NO: 9323 - DNA, 40 bp, Streptococcus pasteurianus
  source 1..40: mol_type = genomic DNA
tgttcccgaatacgcatcacgttgaggcagtatcactgct

SEQ ID NO: 9324 - DNA, 50 bp, Streptococcus pasteurianus
  source 1..50: mol_type = genomic DNA
ttctcaaggaacagactacacgcgggtggagtgcgtagtgttgctacaac

SEQ ID NO: 9325 - DNA, 40 bp, Streptococcus pasteurianus
  source 1..40: mol_type = genomic DNA
tattcccagctactcagcaggctgaggcaggataactgct

SEQ ID NO: 9326 - protein, 560 aa, Enterocloster citroniae; identical to SEQ ID NO: 1631

SEQ ID NO: 9327 - DNA, 50 bp, Enterocloster citroniae; identical to SEQ ID NO: 1632
  source 1..50: mol_type = genomic DNA

SEQ ID NO: 9328 - DNA, 40 bp, Enterocloster citroniae
  source 1..40: mol_type = genomic DNA
ggcaggagcgaccggccctactggacctactggagccacc

SEQ ID NO: 9329 - DNA, 50 bp, Enterocloster citroniae
  source 1..50: mol_type = genomic DNA
tgttgtgcataaatacacggctctgttgccccgtcaatatatgcacaaca

SEQ ID NO: 9330 - DNA, 40 bp, Enterocloster citroniae
  source 1..40: mol_type = genomic DNA
gaaaggagccaccggacctgtgggacctcctggggccagt

SEQ ID NO: 9331 - protein, 635 aa, Salmonella enterica
MRLYRYRGVVIMIKTFIYSRVSSQEQLSGGGLDRQETDVREYVTRNGLDQYEIVAMVDRGISGYDGSNMRDGELGKWYKDAITGMYWGSHLVLEAIDRFSRRDPMLAMEDFTVLVNKGGIKVHIVKFNTFINGDNLPMLSMMMNLAHSESKQKSDRISKGWQRRRRMALDNGTAITARTPYWIDVRDNEYRLNNSSIAVVEAFAMYKQGLSCGLIAKKLNELKHYFPYMWTKTAVQHIVDGLNTSGIIDAPRAIKTIKAFYKSGFSVEDIAKKMNAEFQFMKEWNAPAVHKLLQNKSVTGLVEIQKRKLIQEFDSDGKPLELRTKIEGEKYFESIYPQIISIDDFELIQKLLESNRKVDTKTGKGQTTGGTVTQNEDGELVKQFILSSLCRCYKCGGAMFNNIVRSKRKNGKVDTYSYLRCLNERDAHCDVKALNYPVIERAIIEHVKGLNFDTMFKGTNNSELELLKTREVELLRDIATYEDAIAARKAAGKNTSPVLVTSLVDAQDDLEALQKKIRAISGVTVNAEELTSLNESVFDVAEYELRNMVELELQKIIKRITFNCTEKNIYFITIQYNTGTVLQHGLKVDKKKGVIETYELHEGNKGYVSNGEVITPALIEAAESKNIGIFEGKVM

SEQ ID NO: 9332 - DNA, 50 bp, Salmonella enterica
  source 1..50: mol_type = genomic DNA
tttttgtataaagtgcaacccatacaaatgagttgatcaaaatacaaaaa

SEQ ID NO: 9333 - DNA, 40 bp, Salmonella enterica
  source 1..40: mol_type = genomic DNA
ttttcgtttgataatcatacaaataggtgccgttgcagca

SEQ ID NO: 9334 - DNA, 50 bp, Salmonella enterica
  source 1..50: mol_type = genomic DNA
tttttgtataaagtgcaacccataataatgagttgatcaaaatacaaaaa

SEQ ID NO: 9335 - DNA, 40 bp, Salmonella enterica
  source 1..40: mol_type = genomic DNA
ttttccttttataatcataataatgtgtggcggtgcattt

SEQ ID NO: 9336 - protein, 501 aa, Bacillus thuringiensis
MKPNIKEVAIYLRKSRDESDGKEDVLAKHESLLLEYVKNHNLKYEIYKEIGSSEYIDSRPKMVRLLNDVSQKLYDAVLVVDLDRLSRGDLEEMGRIGRIFKDSKTIVLTPTKTYDFNDEEQALINNFEMVFANHEFRMIKKRMLRGKLQGTKAGKWTNGRPPFPYVYNRLTKELDVDSDKVKVYEFMKKMFLEDMKATYEIAWKLNELGFKTNRNSYWYENTVRRLLINEVHLGKVVYGKTSGSGSKKKLNANGVQIKDRSEWIIAEGSHQQLKTEEEHQRILAILESRRYTPKGTRTNVQVLSKLIYCGKCNRVMSFTGKASGKKYVKTCLTTDHFGNRCHNRCLNVEVIYAQLFLDLEQYEQQLLNHKPKEKQGDSSTLQLALHNKLEELERLEKGVNRIKDLFIDEVIDKSEMKKRLEKQKQLMQTKKEEIRSIEQSLAVIENVITDDDRLHAIKEFKKAWNTEGIRKKELNTLAKQLIDRIEYVREGNNVQINIKFL

SEQ ID NO: 9337 - DNA, 50 bp, Bacillus thuringiensis
  source 1..50: mol_type = genomic DNA
aggtttcactagattacctttcaaaaatgtaaggtaacatggtgaaactt

SEQ ID NO: 9338 - DNA, 40 bp, Bacillus thuringiensis
  source 1..40: mol_type = genomic DNA
atttttttaaacctttcaaaactgtaaggtttttgtcatt

SEQ ID NO: 9339 - DNA, 50 bp, Bacillus thuringiensis
  source 1..50: mol_type = genomic DNA
aggtttcactagattacctttcaaccatgtaaggtaacatggtgaaactt

SEQ ID NO: 9340 - DNA, 40 bp, Bacillus thuringiensis
  source 1..40: mol_type = genomic DNA
attttattaaaactttcaaccttttaagatttctgcaact

SEQ ID NO: 9341 - protein, 547 aa, Escherichia coli
MKLLVTYIRWSTKEQDSGDSLRRQTNLIDAFYSKHKEEYYLLPAHRYVDKGKSGFHQQHKAQGSDFRRMFENVMSGAIPEGSLIVVENFDRFSRADIDTAIDDVRQILRKGVSILTLGDGELYDKSALTDPVKLIKHIIIAERAHQESLVKQKRIAQVWNHKTQLARELKKPMGKQAPGWLELSEDGSHYIVDEDKASLVNIIYDKRLSGMSMFAICKWLNEQGYPTINQRKVRISKTKKPDGNWSALSVKHILTSRSVLGYLPAKISSEDRKTVLREEIEGFYPQIVTDSKFYAVQQLLEETGKGKTSSGDHWLYVNILKGLIRCKCGLVMTPTGIRKPVYQGTYRCNGNKESRCSYGTVSRKLLDTQLCSRLFSKLSQLHDEATDTAKLDELQRRLNTVDSELEKLTETLIQLPNITQIQEALRIKQEEKDELIVQLSREKARVKSVSSLDLSGLDMESVEGRTEAQIIIKRLVKEIVVSGNEKLVDIYLHNGNMIRGFPLDGKDDHTLTLEEATDEMQSLDDMLIFGEPVTRIYPAGDMEEVDA

SEQ ID NO: 9342 - DNA, 50 bp, Escherichia coli
  source 1..50: mol_type = genomic DNA
aatgtacgtgtttagctatgtaaaagtactagtattcttgccttaacact

SEQ ID NO: 9343 - DNA, 40 bp, Escherichia coli
  source 1..40: mol_type = genomic DNA
tccgtacatggaataataaagcaccagaactttagccatt

SEQ ID NO: 9344 - DNA, 50 bp, Escherichia coli
  source 1..50: mol_type = genomic DNA
aatgtacgtgtttagctatgtaaaattactagtattcttgccttaacact

SEQ ID NO: 9345 - DNA, 40 bp, Escherichia coli
  source 1..40: mol_type = genomic DNA
tacttgcattgaataataaattcccagaaatgtagccagt

SEQ ID NO: 9346 - protein, 547 aa, Escherichia coli
MKLLVTYIRWSTKEQDSGDSLRRQTNLIDAFYSKHKNDYYLLPAHRYVDKGKSGFHQQHKAQGSDFRRMFENVMSGAIPEGSLIVVENFDRFSRADIDTAIDDVRQILRKGVSILTLGDGELYDKSALTDPVKLIKHIIIAERAHQESLVKQKRIAQVWNHKTQLARELKKPMGKQAPGWLELSEDGSHYIVDEDKASLVNIIYDKRLSGMSMFAICKWLNEQGYPTINQRKVRISKTKKPDGNWSALSVKHILTSRSVLGYLPAKISTEDRKTVLREEIEGFYPQIVTDSKFYAVQQLLEETGKGKTSSGEHWLYVNILKGLIRCKCGLVMTPTGIRKPVYQGTYRCNGNKESRCSYGTVSRKLLDTQLCSRLFSKLSQLHDEATDTAKLDELQRRLNTVDSELEKLTETLIQLPNITQIQEALRVKQEEKDELIVQLSREKARVKSVSSLDLSGLDMESVEGRTEAQIIIKRLVKEIVVSGNEKLVDIYLHNGNMIRGFPLDGKDDHTLTLEEATDEMQSLDDMLIFGEPVTRIYPAGDMEEVDA

SEQ ID NO: 9347 - DNA, 50 bp, Escherichia coli; identical to SEQ ID NO: 9342
  source 1..50: mol_type = genomic DNA

SEQ ID NO: 9348 - DNA, 40 bp, Escherichia coli; identical to SEQ ID NO: 9343
  source 1..40: mol_type = genomic DNA

SEQ ID NO: 9349 - DNA, 50 bp, Escherichia coli; identical to SEQ ID NO: 9344
  source 1..50: mol_type = genomic DNA

SEQ ID NO: 9350 - DNA, 40 bp, Escherichia coli; identical to SEQ ID NO: 9345
  source 1..40: mol_type = genomic DNA

SEQ ID NO: 9351 - protein, 571 aa, Atlantibacter hermannii
MIKTLIWYKRVSTDRQIDGHGLQRQQDFFNKYLDNLPDRNSYRVEEISDEGLSAFHGVNVSDKGRLGSILQRIQSGDISAGSILVCESQSRLTRLHAVDATLLIHTLNKAGIKVWSLADNREITTDSDTGLIMAVLDGIRNRAYSQDISDKVSKKKKMIRHAVRVDRTATYGNICPHWLKVTDNGFEPIPEHVATIQRIFRERYELRSMASIAAGLNQDEIPLITSRNWKKKAAPTGWSQSTVKNLLSNERVIGTLPASTSTSGDKVTGYYGSPVVPLEHWLAAQESLSHRGKKAVRNEANPFAVRLFKSLIVCKHCGHRMDVNGARQAHSERGSPYQGSLICRGSRDNSCMCGENGTRTPALPMKLVEHSLINNLFRSLKQRDITTGAQEQIAHLRLKITEAENDLAETAALVVTQRNAIARQALQNELDKLADSITQWRSDLGFLERKQQATTFFTLEGLNLMTVDGRSEAQRVIAKSIATISIDTVTALADITLRNGNIIQSFDLRATDDFTSTMANATDFEHHEEIAMIIGENLPVVYLGKRPLFTNDEPDFSGWPDVEDDYPNTDD

SEQ ID NO: 9352 - DNA, 50 bp, Atlantibacter hermannii
  source 1..50: mol_type = genomic DNA
aatgtatcaaatggcgcatcaatctggatggataacccctaaaatacatt

SEQ ID NO: 9353 - DNA, 40 bp, Atlantibacter hermannii
  source 1..40: mol_type = genomic DNA
cacgccagccagcagcatctggatcatcaacgcctatcaa

SEQ ID NO: 9354 - DNA, 50 bp, Atlantibacter hermannii
  source 1..50: mol_type = genomic DNA
aatgtatcaaatggcgcatcaatcaagatggataacccctaaaatacatt

SEQ ID NO: 9355 - DNA, 40 bp, Atlantibacter hermannii
  source 1..40: mol_type = genomic DNA
cacccctgccaccaccatcaagaacattaacgtttaacaa

SEQ ID NO: 9356 - protein, 487 aa, Cellulosimicrobium sp TH-20
MSSEPPRATLYLRLSVAGDDASTSISRQERDLRALAEQRGWTIAHVFVDDGRSGRSERANALAALATLADGSADVLAVWKFDRWSRQGLGAVAALLDVLDERPAALFVALQDGLSSNSPAWRIVASVLAEVAKMESDNTRLRVRSAIDTVRRSGRFSGGVVPFGYRSVDNPNGPGKVLEVDEREAAAVREVAERILAGSTWNAEARRLNETGVLPHRAQAWTRQTLRGVLLGDAVVGRQTHRGEVLRGPDGLPLQPWEPALPLATWRDLRALPASESASGSGTRRRAARLLSGLLYCASCDSPLYVSRVKRDAKVYESYRCVARSVGRKCDGVVVSAPQAEEHVSAVFLRALGSWPIYRDESSVDPEAVERLQMTEEALDRVAARIRDVEDEDEEARLLAERRMLRRGVSELRAAVEAPVVRRTPTGETFAEAWERAETFTRRQYLQSAIDHVLVTKGSPGRKALDPGRLSIQWAYPTDDRLLAESD

SEQ ID NO: 9357 - DNA, 50 bp, Cellulosimicrobium sp TH-20
  source 1..50: mol_type = genomic DNA
tggtgagtctaggagtggcacggcaacccgcgcaagtcgtagactcagca

SEQ ID NO: 9358 - DNA, 40 bp, Cellulosimicrobium sp TH-20
  source 1..40: mol_type = genomic DNA
cacgtgcaacagctaccgcaacccggacctcctcgccgac

SEQ ID NO: 9359 - DNA, 50 bp, Cellulosimicrobium sp TH-20
  source 1..50: mol_type = genomic DNA
tggtgagtctaggagtggcacggccgcccgcgcaagtcgtagactcagca

SEQ ID NO: 9360 - DNA, 40 bp, Cellulosimicrobium sp TH-20
  source 1..40: mol_type = genomic DNA
cacccgcaacacctgccgccgcccggggctcctagcgggc

SEQ ID NO: 9361 - protein, 493 aa, Bacillus oceanisediminis
MVTNNIIKNVAVYLRISRDKGENVDTLQNHRERLVRLCEDRGYTYTIYEEIVSGQARMEAREALNSLLDELEKYDAVVVTAIDRLSRDLEYSIHIFKRLEKVGIPVITPERIYTEQDFTLYAIESTLAHGEYKQIRKRMLQGKRDKALRGEIVASRPPYGYDSVMVDKKRTFVPNKDANTVKKIFNLAINGYGGKSISDITGKPYKSVQNIIRNEAYTGTMIYKDIRVDDAFTAIVDKETFKKANNAMKARFAGDREQRTRTKGKVRTILKDLVYCDNCDRKISFQLKRREVYEDAMVTKKCECGMPGVKEETLLAEFYAQFYWVELHFRKEWQKALETPLEDKKGIIEGQLTELTKKQEKLNRRLKNAREMRLDGELSKAEFEETKAESEKELIALSSKITELSDELSTLDTAKLSQGYQEKLKLIGIIKQELNLPEGKGQLNYTKIEECTNKEEANRLLKLLIDKIYYFRGIEANAFGEEEEVIKLTIAPR

SEQ ID NO: 9362 - DNA, 50 bp, Bacillus oceanisediminis
  source 1..50: mol_type = genomic DNA
ttggtatatgtaaatgcacttaatccattaaaagcatctatagacaccac

SEQ ID NO: 9363 - DNA, 40 bp, Bacillus oceanisediminis
  source 1..40: mol_type = genomic DNA
caggtgatggccaaaaaaaccacgaaataaccatcattaa

SEQ ID NO: 9364 - DNA, 50 bp, Bacillus oceanisediminis
  source 1..50: mol_type = genomic DNA
ttggtatatgtaaatgcacttaataaattaaaagcatctatagacaccac

SEQ ID NO: 9365 - DNA, 40 bp, Bacillus oceanisediminis
  source 1..40: mol_type = genomic DNA
tgggtgatgggaaaaaaaaaaaagaaaaaaccctcatttc

SEQ ID NO: 9366 - protein, 576 aa, Holdemanella biformis
MTTKNKNKGQIANPDELITAPYCRLSVEDMKDHDKKKDEIDESNSITNQKQILLDYAKKHSYKNTVFFVDDGISGTRFDREAFQRMQRMAENGEISRIIVKDLSRFGREQVEAGRLTQIVYPSLGITFISIQENVNSTTGEGMEMLPFYNIFNEWYAAQTSKKIRAVWQSKADNGKRVSSSVPFGYVKDPENREKWLIDEPAAEIVRKIFALALGGRGPSQIARQLEKENILIPSAYYESVGRKHSQKIPLNPCAWDQKTIVHILENRQYTGCAINFKSTTVSYKVHKVIYNPIEEQQVIPNMQEPIIPEEDWLRVQELRKNKRRPTATGRQSLFLGLVFCPDCGAKLYFCSAKSLNTNQEFYCCSNYRSGRGTCKVHYIRNVVLEKIVMEAISDFADFVRCHEPVFLYMMAMKNKAIRKAEFKKMQETVEYGKRRLEELERLMDKLYEDNTFGRLSDDIYERRVSKYEKEQKKLAITVSEAQAVLDKAEQKSLDLRLLLRTFREMTDIKELTPTLVNSLIERIEVHNNDKSSGHCYVKVDIYFTAVGMFKIPTEDEIIIMMEEIRKNPHEYRFAA

SEQ ID NO: 9367 - DNA, 50 bp, Holdemanella biformis
  source 1..50: mol_type = genomic DNA
atacttccttatgggacttgcccaaaggctaacgcccgataaagaagtaa

SEQ ID NO: 9368 - DNA, 40 bp, Holdemanella biformis
  source 1..40: mol_type = genomic DNA
taaaaaaaagaccgatacaaatgtatcagtccttagtttt

SEQ ID NO: 9369 - DNA, 50 bp, Holdemanella biformis
  source 1..50: mol_type = genomic DNA
atacttccttatgggacttgcccagcggctaacgcccgataaagaagtaa

SEQ ID NO: 9370 - DNA, 40 bp, Holdemanella biformis
  source 1..40: mol_type = genomic DNA
taaaaaaaagaaagatacagcatgctcagtgctgtgtttt

SEQ ID NO: 9371 - protein, 525 aa, Paeniclostridium sordellii
MVAAIYSRKSKFTGKGESIENQIQLCMDYAKNLGINEFLVYEDEGFSGKSTDRPKFKEMLKDAKNKKFDYLICYRLDRISRNVSDFSTLIEDLNKLNISFVSIKEQFDTSTPMGRAMMYISSVFAQLERETIAERIRDNMYELAKTGRWLGGMPPYGFNSTQINYYDDGMNQKKMYKLQIDKDTMEIVKIIFNKYLELRSLSKLYKYMYENGIKGTRGGNLDPSALSLILKNPAYVKANKNVINYLKSIDMEVIGDVDDTHGILTYAKNTDNPIAAVAKHEGVIDADKWIEVQNLLNANKSKAPRAGTGSKALLSGLLKCSKCGSNMRITYKNSKKRTIYYYICGTKKSLGVSACDCRNIRSDKAESKVIEELKNKSVESIISNYKNAQLENTKDSKDIKAQINSIKNQIKEKETYIDNLVMQLAKVTDSSASTFIIRKLEDLNNELSELKLKLNSLDTLSLENKKLDIDINMLIDNIDKFNKEIDTSDINKKRLLLSTIVDSMYWNSDEETIKVNLIGINSNRS

SEQ ID NO: 9372 - DNA, 50 bp, Paeniclostridium sordellii
  source 1..50: mol_type = genomic DNA
ttaggaacttttttccatatagcagaagctatatatattaaagttcaact

SEQ ID NO: 9373 - DNA, 40 bp, Paeniclostridium sordellii; identical to SEQ ID NO: 5893
  source 1..40: mol_type = genomic DNA

SEQ ID NO: 9374 - DNA, 50 bp, Paeniclostridium sordellii
  source 1..50: mol_type = genomic DNA
ttaggaacttttttccatatagcataagctatatatattaaagttcaact

SEQ ID NO: 9375 - DNA, 40 bp, Paeniclostridium sordellii
  source 1..40: mol_type = genomic DNA
agagacagatggtatatcctaaggtttatccatgtcaggt

SEQ ID NO: 9376 - protein, 577 aa, Dehalococcoides mccartyi
MKEKALTTERFDSLIDMASKEAKYEEGFGVKGCDLTNSCWWAAYTRQSWEEQANNNRLPEYLLTCAREAKKLGVVVPLEYILYDTVTGEHLERPNMIRLRKLLTQRSTSGVIFPALDRLSREPLHQQIFELEATHYEIQIHYADVPNGNDPNSQFTRTILAHAAKLIKLANRRNNRGGNIGRVVSGNVPAGKASYGYIYRAEYQALEHGRRRLIRAWWEINALEADGTYRMGSEAWVVKQIFRWIGLEGRSTFWVAEELNRMRIKPRYAEKWSPALVGFICKNRAYTGKHAYNKACYVTNPNRPLTDITAEIKRTLRKAKPEDDWAHFEVPLLVSEELWQRANDNIHERGKGRGKAGKTIPALFRARVFCPQCGHIMRLHRDSTCSWLTYYVCRTQGCRMRFIRVSHLDNIGWENVVNLVQKRSFIDAQAENMSKYDGGIQKRIRLELFQKREAERKIAKIQDDLLSDEPVITRQEAVAKIGELRKVVEKVDTEIARLQGIVQTAKQAEEKIEALKKALEDLRDTNLNTATFQQKAEWIARLGIKVYPAKDLTNYHIKCGIKITEPQKVSCYKTSIA

SEQ ID NO: 9377 - DNA, 50 bp, Dehalococcoides mccartyi
  source 1..50: mol_type = genomic DNA
tcatgttacaaaaccagcatcgcgtcgcctatactggcttttagacacgt

SEQ ID NO: 9378 - DNA, 40 bp, Dehalococcoides mccartyi
  source 1..40: mol_type = genomic DNA
ttataaaaccagcatggcatcaccaaaactgtaaaaacgg

SEQ ID NO: 9379 - DNA, 50 bp, Dehalococcoides mccartyi
  source 1..50: mol_type = genomic DNA
tcatgttacaaaaccagcatcgcgtagcctatactggcttttagacacgt

SEQ ID NO: 9380 - DNA, 40 bp, Dehalococcoides mccartyi
  source 1..40: mol_type = genomic DNA
ttacaaaaccaaattgggataaccagtactgtaaacactg

SEQ ID NO: 9381 - protein, 503 aa, Coprobacillus cateniformis
MNNRIDAIYARQSVDKKDSISIESQIEFCKYELKGGNCKEYTDKGYSGKNTDRPKFQELVRDIKRGLIAKVVVYKLDRISRSILDFANMMELFQQYNVEFVSSTEKFDTSTPMGRAMLNICIVFAQLERETIQKRVTDAYYSRSQRGFKMGGKAPYGFHTEPIKMDGINTKKLVVNPDEAANIRLMFEMYAQPTTSYGDITRYFAERGILFHGKELIRPTLAQMLRNPVYVQADLDVYEFFKSQGAVLVNDAADFTGMNGCYLYQGRDVKPSKKNDLKDQMLVLAPHEGIVPSDIWLTCRKKLMNNMKIQSARKATHTWLAGKIKCGNCGYALMSIFNPSGKQYLRCTKRLDNKSCPGCGKIITSELEAVVYQQMVKKLAGYKTLTGRKKAAKANPKIAALQVELAHVDSEIEKLVDSLTGANNVLLSYVNVKIAELDGRKQELVKQIAELTVEAISPEQVSQISGYLDTWENVSFDDKRRVVDLMITTIAATSDSLNITWKI

SEQ ID NO: 9382 - DNA, 50 bp, Coprobacillus cateniformis; identical to SEQ ID NO: 12
  source 1..50: mol_type = genomic DNA

SEQ ID NO: 9383 - DNA, 40 bp, Coprobacillus cateniformis
  source 1..40: mol_type = genomic DNA
ttgtggtttatatacacctttagaaacttttaaatagtga

SEQ ID NO: 9384 - DNA, 50 bp, Coprobacillus cateniformis; identical to SEQ ID NO: 344
  source 1..50: mol_type = genomic DNA

SEQ ID NO: 9385 - DNA, 40 bp, Coprobacillus cateniformis
  source 1..40: mol_type = genomic DNA
ttgaggtttatatacaacttaaagcaattttaacaactga

SEQ ID NO: 9386 - protein, 535 aa, Streptomyces microflavus
MTATGLRIVGAVRISRYTDASTSPEVQEETVTATGARVGGEFVGWARDLDISALKTTPWEREELRHWLDRPDEWDVMIWQRMDRAVRSMADMADLGRYAKKHGKRLIFASGPGGDKLELDFSSPMSELIMLILAFAAQLEGQTIMERNQGAAAHLQSMGRWAGGMIPYGYAPGRYVFPDGNEGWWLFEHTSKEPTHSTANIRRAMAARAIAGRNYSEILRWLEEMDAITPENHRALLATPPRKIDPDSKWGLTSVRDMLLSPVMRGHIVKKDGTTVRDAEGAPVLQGEPLIDDNTWHSLQEALKVLSTGPKGPRRKDGHPLLGILVCGVCDQNMYVNWYSERRGGRGAKGRPTGVKKEVFRCSGKAHAKGTPSLSIQCKEVLEYVEEQFLAHMGPFKRTQVIRVGGVDHRAEIADLTADVDELSVRLGQLRGPAADAVMTQLQARSDRLEALRAEPVRPPREDVVTLDNTWADDWAAADDAHARRRMLEEAGVRVTVHPPARWRPPAAERLTFEVGTHVDPEQDALDDIAYQESL

SEQ ID NO: 9387 - DNA, 50 bp, Streptomyces microflavus
  source 1..50: mol_type = genomic DNA
acctgacacttgctgcgacttgcccacgccgggtgaagtgactatcgtgt

SEQ ID NO: 9388 - DNA, 40 bp, Streptomyces microflavus
  source 1..40: mol_type = genomic DNA
cccggggatccagctcgcccacgccggccgcaaggcctcc

SEQ ID NO: 9389 - DNA, 50 bp, Streptomyces microflavus
  source 1..50: mol_type = genomic DNA
acctgacacttgctgcgacttgcccccgccgggtgaagtgactatcgtgt

SEQ ID NO: 9390 - DNA, 40 bp, Streptomyces microflavus
  source 1..40: mol_type = genomic DNA
cgcggtgctcctgctcgccccggccggccgcgcggccgcg

SEQ ID NO: 9391 - protein, 554 aa, Streptococcus salivarius
MNKSTLTIEEWTSLNFENLTNITVLYCRLSAEDAKEGESNSISNQKQILTQVSQREGLTNPVFFVDDGFSGSNAQRPAFQQAMNLVQAGRVSNFVVKDLSRLSRDYLLSGQLTEITFPSKNIRFISLNENLDSSKRSSQDAYLAPLVSLFNNWYSLQCSEKIKLSKHTKAKTGEKIGWVAPYGYLKNPENPKEWLVDDYASQIVKRVFKEYLSGKPIASIANGLRRDKILTPANYKKKLGVSNYRVLESDPYHWKSQMICQMLEKEEYTGATINLKTAKVSYKQRNCRLRPREDWLIFPDTHEAIISKEDFALARKMLGHKRVVRRNNWKDKPGHENIFAGLVFCENGHKLTFCPQQKVDVNLDHYKCSYYERVGKTCSGSHYLRKEILEELILDDFNQIISTLELSEESLLEKLKAKFNIQESKKQNSLRKTLLKAEKRAEELDTIIQRLYEKQLLGDIRDERFRKLADGYEDEQAQLTQQIQESREVLDSEIESAGNIEKFLRTIRNYTKLEKLTPQILNELIDKIVVHQPTGRGKSRQVRIELHYRFIGEI

SEQ ID NO: 9392 - DNA, 50 bp, Streptococcus salivarius
  source 1..50: mol_type = genomic DNA
ggactgctggggaaggtgtggatattataccatactccagccagcagtcc

SEQ ID NO: 9393 - DNA, 40 bp, Streptococcus salivarius
  source 1..40: mol_type = genomic DNA
caatatactcatgttactattataccaaaaaaatgctatt

SEQ ID NO: 9394 - DNA, 50 bp, Streptococcus salivarius; identical to SEQ ID NO: 9392
  source 1..50: mol_type = genomic DNA

SEQ ID NO: 9395 - DNA, 40 bp, Streptococcus salivarius
  source 1..40: mol_type = genomic DNA
tattatgctcatgttacttttatactaaaaaaaaaaaatt

SEQ ID NO: 9396 - protein, 481 aa, Streptococcus pneumoniae
MITTNKVAIYVRVSTTNQVEEGYSIDEQKDKLSSYCDIKDWNVYKVYTDGGFSGSNTDRPALESLIKDAKKRKFDTVLVYKLDRLSRSQKDTLHLIEDVFIKNGIEFLSLQENFDTSTPFGKAMIGLLSVFAQLEREQIKERMQLGKLGRAKAGKSMMWAKTSYGYDYHKETGTVTINPAQALTIKFIFESYLRGRSITKLRDDLNEKYPKHVPWSYRAVRTILDNPVYCGFNQYKGEIYPGNHEPIISKEEYDKTQSELKIRQRTAAENVNPRPFQAKYILSGIAQCGYCGAPLKIMLGVKRKDGSRLKKYECHQRHPRTLRGVTTYNDNKKCDSGFYYKDKLEAYVLKEISKLQDDADYLDKIFSGDNAETIDRESYKKQIEELSKKLSRLNDLYIDDRITLEELQSKSAEFISMRATLETELENDPALRKNKRKADMRKLLNAEKVFSMDYEGQKVLVRRLINKVKVTAEDIVINWKI

SEQ ID NO: 9397 - DNA, 50 bp, Streptococcus pneumoniae
  source 1..50: mol_type = genomic DNA
taaataattttagtaacctacatctcaatcaaggatagtaaaactctcac

SEQ ID NO: 9398 - DNA, 40 bp, Streptococcus pneumoniae; identical to SEQ ID NO: 1573
  source 1..40: mol_type = genomic DNA

SEQ ID NO: 9399 - DNA, 50 bp, Streptococcus pneumoniae
  source 1..50: mol_type = genomic DNA
taaataattttagtaacctacatcaaaatcaaggatagtaaaactctcac

SEQ ID NO: 9400 - DNA, 40 bp, Streptococcus pneumoniae
  source 1..40: mol_type = genomic DNA
aaacaacaacaccaacaacaacaacaaagtaatagcttaa

SEQ ID NO: 9401 - protein, 481 aa, Streptococcus pneumoniae
MITTNKVAIYVRVSTTNQVEEGYSIDEQKDKLSSYCDIKDWNVYKVYTDGGFSGSNTDRPALESLIKDAKKRKFDTVLVYKLDRLSRSQKDTLHLIEDVFIKNGIEFLSLQENFDTSTPFGKAMIGLLSVFAQLEREQIKERMQLGKLGRAKSGKSMMWAKTSYGYDYHKETGTVTINPAQALTIKFIFESYLRGRSITKLRDDLNEKYPKHVPWSYRAVRTILDNPVYCGFNQYKGEIYPGNHEPIISKEEYDKTQSELKIRQRTAAENVNPRPFQAKYILSGIAQCGYCGAPLKIMLGVKRKDGSRLKKYECHQRHPRTLRGVTTYNDNKKCDSGFYYKDKLEAYVLKEISKLQDDADYLDKIFSGDNAETIDRESYKKQIEELSKKLSRLNDLYIDDRITLEELQSKSAEFISMRATLETELENDPALRKNKRKADMRKLLNAEKVFSMDYEGQKVLVRRLINKVKVTAEDIVINWKI

SEQ ID NO: 9402 - DNA, 50 bp, Streptococcus pneumoniae; identical to SEQ ID NO: 9397
  source 1..50: mol_type = genomic DNA

SEQ ID NO: 9403 - DNA, 40 bp, Streptococcus pneumoniae; identical to SEQ ID NO: 1573
  source 1..40: mol_type = genomic DNA

SEQ ID NO: 9404 - DNA, 50 bp, Streptococcus pneumoniae; identical to SEQ ID NO: 9399
  source 1..50: mol_type = genomic DNA

SEQ ID NO: 9405 - DNA, 40 bp, Streptococcus pneumoniae; identical to SEQ ID NO: 9400
  source 1..40: mol_type = genomic DNA

SEQ ID NO: 9406 - protein, 481 aa, Streptococcus pneumoniae
MITTNKVAIYVRVSTTNQVEEGYSIDEQKDKLSSYCDIKDWNVYKVYTDGGFSGSNTDRPALESLIKDAKKRKFDTVLVYKLDRLSRSQKDTLHLIEDVFIKNGIEFLSLQENFDTSTPFGKAMIGLLSVFAQLEREQIKERMQLGKIGRAKAGKSMMWAKTSYGYDYHRDTGTITINPAQALAIKFIFESYLRGRSITKLRDDLNEKYPKHVPWSYRAVRTILDNPVYCGFNQYKGEIYPGNHEPIISKEEYDKTQSELKIRQRTAAENVNPRPFQAKYILSGIAQCGYCGAPLKIMLGVKRKDGSRLKKYECHQRHPRTLRGVTTYNDNKKCDSGFYYKDKLEAYVLKEISKLQDDADYLDKIFSGDNAETIDRESYKKQIEELSKKLSRLNDLYIDDRITLEELQSKSAEFISMRGTLETELENDPALRKNKRKADMRKLLNAEKVFSMDYESQKVLVRRLINKVKVTAEDIVINWKI

SEQ ID NO: 9407 - DNA, 50 bp, Streptococcus pneumoniae; identical to SEQ ID NO: 2172
  source 1..50: mol_type = genomic DNA

SEQ ID NO: 9408 - DNA, 40 bp, Streptococcus pneumoniae; identical to SEQ ID NO: 1573
  source 1..40: mol_type = genomic DNA

SEQ ID NO: 9409 - DNA, 50 bp, Streptococcus pneumoniae
  source 1..50: mol_type = genomic DNA
taaataattttagtaacctacattaaaatcaaggatagtaaaactctcac

SEQ ID NO: 9410 - DNA, 40 bp, Streptococcus pneumoniae; identical to SEQ ID NO: 9400
  source 1..40: mol_type = genomic DNA

SEQ ID NO: 9411 - protein, 481 aa, Streptococcus pneumoniae; identical to SEQ ID NO: 5846

SEQ ID NO: 9412 - DNA, 50 bp, Streptococcus pneumoniae; identical to SEQ ID NO: 2172
  source 1..50: mol_type = genomic DNA

SEQ ID NO: 9413 - DNA, 40 bp, Streptococcus pneumoniae; identical to SEQ ID NO: 1573
  source 1..40: mol_type = genomic DNA

SEQ ID NO: 9414 - DNA, 50 bp, Streptococcus pneumoniae; identical to SEQ ID NO: 9409
  source 1..50: mol_type = genomic DNA

SEQ ID NO: 9415 - DNA, 40 bp, Streptococcus pneumoniae; identical to SEQ ID NO: 9400
  source 1..40: mol_type = genomic DNA

SEQ ID NO: 9416 - protein, 481 aa, Streptococcus pneumoniae; identical to SEQ ID NO: 2231

SEQ ID NO: 9417 - DNA, 50 bp, Streptococcus pneumoniae; identical to SEQ ID NO: 2172
  source 1..50: mol_type = genomic DNA

SEQ ID NO: 9418 - DNA, 40 bp, Streptococcus pneumoniae; identical to SEQ ID NO: 1573
  source 1..40: mol_type = genomic DNA

SEQ ID NO: 9419 - DNA, 50 bp, Streptococcus pneumoniae; identical to SEQ ID NO: 9409
  source 1..50: mol_type = genomic DNA

SEQ ID NO: 9420 - DNA, 40 bp, Streptococcus pneumoniae; identical to SEQ ID NO: 9400
  source 1..40: mol_type = genomic DNA

SEQ ID NO: 9421 - protein, 481 aa, Streptococcus pneumoniae
MKTMNKVAIYVRVSTTNQVEEGYSIDEQKDKLSSYCDIKDWNVYKVYTDGGFSGSNTDRPALESLIKDAKKRKFDTVLVYKLDRLSRSQKDTLHLIEDVFIKNGIEFLSLQENFDTSTPFGKAMIGLLSVFAQLEREQIKERMQLGKIGRAKAGKSMMWAKTSYGYDYHRDTGTITINPAQALAIKFIFESYLRGRSITKLRDDLNEKYPKHVPWSYRAVRTILDNPVYCGFNQYKGEIYPGNHEPIISKEEYDKTQSELKIRQRTAAENVNPRPFQAKYILSGIAQCGYCGAPLKIMLGVKRKDGSRLKKYECHQRHPRTLRGVTTYNDNKKCDSGFYYKDKLEAYVLKEISKLQDDADYLDKIFSGDNAETIDRESYKKQIEELSKKLSRLNDLYIDDRITLEELQSKSAEFISMRGTLETELENDPALRKNKRKADMRKLLNAEKVFSMDYESQKVLVRRLMNKVKVTAEDIVINWKI

SEQ ID NO: 9422 - DNA, 50 bp, Streptococcus pneumoniae; identical to SEQ ID NO: 2172
  source 1..50: mol_type = genomic DNA

SEQ ID NO: 9423 - DNA, 40 bp, Streptococcus pneumoniae; identical to SEQ ID NO: 1573
  source 1..40: mol_type = genomic DNA

SEQ ID NO: 9424 - DNA, 50 bp, Streptococcus pneumoniae; identical to SEQ ID NO: 9409
  source 1..50: mol_type = genomic DNA

SEQ ID NO: 9425 - DNA, 40 bp, Streptococcus pneumoniae; identical to SEQ ID NO: 9400
  source 1..40: mol_type = genomic DNA

SEQ ID NO: 9426 - protein, 481 aa, Streptococcus pneumoniae; identical to SEQ ID NO: 5071

SEQ ID NO: 9427 - DNA, 50 bp, Streptococcus pneumoniae; identical to SEQ ID NO: 2172
  source 1..50: mol_type = genomic DNA

SEQ ID NO: 9428 - DNA, 40 bp, Streptococcus pneumoniae; identical to SEQ ID NO: 1573
  source 1..40: mol_type = genomic DNA

SEQ ID NO: 9429 - DNA, 50 bp, Streptococcus pneumoniae; identical to SEQ ID NO: 9409
  source 1..50: mol_type = genomic DNA

SEQ ID NO: 9430 - DNA, 40 bp, Streptococcus pneumoniae; identical to SEQ ID NO: 9400
  source 1..40: mol_type = genomic DNA

SEQ ID NO: 9431 - protein, 481 aa, Streptococcus pneumoniae; identical to SEQ ID NO: 2171

SEQ ID NO: 9432 - DNA, 50 bp, Streptococcus pneumoniae; identical to SEQ ID NO: 2172
  source 1..50: mol_type = genomic DNA

SEQ ID NO: 9433 - DNA, 40 bp, Streptococcus pneumoniae; identical to SEQ ID NO: 1573
  source 1..40: mol_type = genomic DNA

SEQ ID NO: 9434 - DNA, 50 bp, Streptococcus pneumoniae; identical to SEQ ID NO: 9409
  source 1..50: mol_type = genomic DNA

SEQ ID NO: 9435 - DNA, 40 bp, Streptococcus pneumoniae; identical to SEQ ID NO: 9400
  source 1..40: mol_type = genomic DNA

SEQ ID NO: 9436 - protein, 481 aa, Streptococcus pneumoniae
MITTNKVAIYVRVSTTNQVEEGYSIDEQKDKLSSYCDIKDWNVYKVYTDGGFSGSNTDRPALESLIKDAKKRKFDTILVYKLDRLSRSQKDTLHLIEDVFIKNGIEFLSLQENFDTSTPFGKAMIGLLSVFAQLEREQIKERMQLGKLGRAKSGKSMMWAKTSYGYDYHKETGTVTINPAQALTIKFIFESYLRGRSITKLRDDLNEKYPKHVPWSYRAVRTILDNPVYCGFNQYKGEIYPGNHEPIISKEEYDKTQSELKIRQRTAAENVNPRPFQAKYILSGIAQCGYCGAPLKIMLGVKRKDGSRLKKYECHQRHPRTLRGVTTYNDNKKCDSGFYYKDKLEAYVLKEISKLQDDADYLDKIFSGDNAETIDRESYKKQIEELSKKLSRLNDLYIDDRITLEELQSKSAEFISMRGTLETELENDPALRKNKRKADMRKLLNAEKVFSMDYENQKVLVRRLINKVKVTAEDIVINWKI

SEQ ID NO: 9437 - DNA, 50 bp, Streptococcus pneumoniae; identical to SEQ ID NO: 2172
  source 1..50: mol_type = genomic DNA

SEQ ID NO: 9438 - DNA, 40 bp, Streptococcus pneumoniae; identical to SEQ ID NO: 1573
  source 1..40: mol_type = genomic DNA

SEQ ID NO: 9439 - DNA, 50 bp, Streptococcus pneumoniae; identical to SEQ ID NO: 9409
  source 1..50: mol_type = genomic DNA

SEQ ID NO: 9440 - DNA, 40 bp, Streptococcus pneumoniae; identical to SEQ ID NO: 9400
  source 1..40: mol_type = genomic DNA

SEQ ID NO: 9441 - protein, 481 aa, Streptococcus pneumoniae
MITTNKVAIYVRVSTTNQAEEGYSIDEQKDKLSSYCDIKDWSVYKVYTDGGFSGSNTNRPALENLIKDAKKRKFDTVLVYKLDRLSRSQKDTLYLIEDIFIKNNIAFLSLQENFDTSTPFGKAMIGLLSVFAQLEREQIKERMQLGKLGRAKAGKSMMWAKTSYGYDYHRDTGTVTINHAQALAVKYMFESYLSGRSITKLRDDLNEKFPKEIPWNYRAVRMILGNPVYCGYNQFMGEIYKGNHEAIISKEDFDKTQEELKIRQRNALENNNPRPFQAKYILSGISQCGYCGAPLKLLMGMVRKDGTRFIRYECHQRHPRKIKGVTVYNNNEKCDSGFYYKDALENYVLTEISKLQDDTSYLDKIFSGDNAENIDRESYKKQIEELSKKLSRLNDLYIDDRITLEELQSKSAEFISMRATLETELENDPSLKRDKRKSDMRKLLNAEKVFSMDYESQKVLVRGLINKVRVTAEDIVIKWKV

SEQ ID NO: 9442 - DNA, 50 bp, Streptococcus pneumoniae
  source 1..50: mol_type = genomic DNA
taaagaattttagtaaccttcatttcaatcaaggatagtaaaactctcgc

SEQ ID NO: 9443 - DNA, 40 bp, Streptococcus pneumoniae; identical to SEQ ID NO: 1573
  source 1..40: mol_type = genomic DNA

SEQ ID NO: 9444 - DNA, 50 bp, Streptococcus pneumoniae
  source 1..50: mol_type = genomic DNA
taaagaattttagtaaccttcattaaaatcaaggatagtaaaactctcgc

SEQ ID NO: 9445 - DNA, 40 bp, Streptococcus pneumoniae; identical to SEQ ID NO: 9400
  source 1..40: mol_type = genomic DNA

SEQ ID NO: 9446 - protein, 481 aa, Streptococcus pneumoniae; identical to SEQ ID NO: 7656

SEQ ID NO: 9447 - DNA, 50 bp, Streptococcus pneumoniae; identical to SEQ ID NO: 2172
  source 1..50: mol_type = genomic DNA

SEQ ID NO: 9448 - DNA, 40 bp, Streptococcus pneumoniae; identical to SEQ ID NO: 1573
  source 1..40: mol_type = genomic DNA

SEQ ID NO: 9449 - DNA, 50 bp, Streptococcus pneumoniae; identical to SEQ ID NO: 9409
  source 1..50: mol_type = genomic DNA

SEQ ID NO: 9450 - DNA, 40 bp, Streptococcus pneumoniae; identical to SEQ ID NO: 9400
  source 1..40: mol_type = genomic DNA

SEQ ID NO: 9451 - protein, 481 aa, Streptococcus pneumoniae
MKTMNKVAIYVRVSTTNQVEEGYSIDEQKDKLSSYCDIKDWNVYKVYTDGGFSGSNTDRPALESLIKDAKKRKFDTVLVYKLDRLSRSQKDTLHLIEDVFIKNGIEFLSLQENFDTSTPFGKAMIGLLSVFAQLEREQIKERMQLGKLGRAKSGKSMMWAKTSYGYDYHKETGTVTINPAQALTIKFIFESYLRGRSITKLRDDLNEKYPKHVPWSYRAVRTILDNPVYCGFNQYKGEIYPGNHEPIISKEEYDKTQSELKIRQRTAAENVNPRPFQAKYILSGIAQCGYCGAPLKIMLGVKRKDGSRLKKYECHQRHPRTLRGVTTYNDNKKCDSGFYYKDKLEASVLKEISKLQDDADYLDKIFSGDNAETIDRESYKKQIEELSKKLSRLNDLYIDDRITLEELQSKSAEFISMRGTLETELENDPALRKNKRKADMRKLLNAEKVFSMDYENQKVLVRRLINKVKVTAEDIVINWKI

SEQ ID NO: 9452 - DNA, 50 bp, Streptococcus pneumoniae; identical to SEQ ID NO: 2172
  source 1..50: mol_type = genomic DNA

SEQ ID NO: 9453 - DNA, 40 bp, Streptococcus pneumoniae; identical to SEQ ID NO: 1573
  source 1..40: mol_type = genomic DNA

SEQ ID NO: 9454 - DNA, 50 bp, Streptococcus pneumoniae; identical to SEQ ID NO: 9409
  source 1..50: mol_type = genomic DNA

SEQ ID NO: 9455 - DNA, 40 bp, Streptococcus pneumoniae; identical to SEQ ID NO: 9400
  source 1..40: mol_type = genomic DNA

SEQ ID NO: 9456 - protein, 481 aa, Streptococcus pneumoniae; identical to SEQ ID NO: 2201

SEQ ID NO: 9457 - DNA, 50 bp, Streptococcus pneumoniae; identical to SEQ ID NO: 2172
  source 1..50: mol_type = genomic DNA

SEQ ID NO: 9458 - DNA, 40 bp, Streptococcus pneumoniae; identical to SEQ ID NO: 1573
  source 1..40: mol_type = genomic DNA

SEQ ID NO: 9459 - DNA, 50 bp, Streptococcus pneumoniae; identical to SEQ ID NO: 9409
  source 1..50: mol_type = genomic DNA

SEQ ID NO: 9460 - DNA, 40 bp, Streptococcus pneumoniae; identical to SEQ ID NO: 9400
  source 1..40: mol_type = genomic DNA

SEQ ID NO: 9461 - protein, 481 aa, Streptococcus pneumoniae
MIATNKVAIYVRVSTTNQVEEGYSIDEQKDKLSSYCDIKDWNVYKVYTDGGFSGSNTDRPALESLIKDAKKRKFDTVLVYKLDRLSRSQKDTLHLIEDVFIKNGIEFLSLQENFDTSTPFGKAMIGLLSVFAQLEREQIKERMQLGKLGRAKSGKSMMWAKTSYGYDYHKETGTVTINPAQALTIKFIFESYLRGRSITKLRDDLNEKYPKHVPWSYRAVRTILDNPVYCGFNQYKGEIYPGNHEPIISKEEYDKTQSELKIRQRTAAENVNPRPFQAKYILSGIAQCGYCGAPLKIMLGVKRKDGSRLKKYECHQRHPRTLRGVTTYNDNKKCDSGFYYKDKLEASVLKEISKLQDDADYLDKIFSGDNAETIDRESYKKQIEELSKKLSRLNDLYIDDRITLEELQSKSAEFISMRATLETELENDSALRKNKRKADMRKLLNAEKVFSMDYEKQKVLVRGLINKVQVTAEDIVIKWKI

SEQ ID NO: 9462 - DNA, 50 bp, Streptococcus pneumoniae; identical to SEQ ID NO: 2187
  source 1..50: mol_type = genomic DNA

SEQ ID NO: 9463 - DNA, 40 bp, Streptococcus pneumoniae; identical to SEQ ID NO: 1573
  source 1..40: mol_type = genomic DNA

SEQ ID NO: 9464 - DNA, 50 bp, Streptococcus pneumoniae
  source 1..50: mol_type = genomic DNA
taaataattttagtaacttacattaaaatcaaggatagtaaaactctcac

SEQ ID NO: 9465 - DNA, 40 bp, Streptococcus pneumoniae; identical to SEQ ID NO: 9400
  source 1..40: mol_type = genomic DNA

SEQ ID NO: 9466 - protein, 481 aa, Streptococcus pneumoniae; identical to SEQ ID NO: 5036

SEQ ID NO: 9467 - DNA, 50 bp, Streptococcus pneumoniae; identical to SEQ ID NO: 2172
  source 1..50: mol_type = genomic DNA

SEQ ID NO: 9468 - DNA, 40 bp, Streptococcus pneumoniae; identical to SEQ ID NO: 1573
  source 1..40: mol_type = genomic DNA

SEQ ID NO: 9469 - DNA, 50 bp, Streptococcus pneumoniae; identical to SEQ ID NO: 9409
  source 1..50: mol_type = genomic DNA

SEQ ID NO: 9470 - DNA, 40 bp, Streptococcus pneumoniae; identical to SEQ ID NO: 9400
  source 1..40: mol_type = genomic DNA

SEQ ID NO: 9471 - protein, 481 aa, Streptococcus pneumoniae; identical to SEQ ID NO: 2226

SEQ ID NO: 9472 - DNA, 50 bp, Streptococcus pneumoniae; identical to SEQ ID NO: 2172
  source 1..50: mol_type = genomic DNA

SEQ ID NO: 9473 - DNA, 40 bp, Streptococcus pneumoniae; identical to SEQ ID NO: 1573
  source 1..40: mol_type = genomic DNA

SEQ ID NO: 9474 - DNA, 50 bp, Streptococcus pneumoniae; identical to SEQ ID NO: 9409
  source 1..50: mol_type = genomic DNA

SEQ ID NO: 9475 - DNA, 40 bp, Streptococcus pneumoniae; identical to SEQ ID NO: 9400
  source 1..40: mol_type = genomic DNA

SEQ ID NO: 9476 - protein, 481 aa, Streptococcus pneumoniae
MKTMNKVAIYVRVSTTNQVEEGYSIDEQKDKLSSYCDIKDWNVYKVYTDGGFSGSNTDRPALESLIKDAKKRKFDTVLVYKLDRLSRSQKDTLHLIEDVFIKNGIEFLSLQENFDTSTPFGKAMIGLLSVFAQLEREQIKERMQLGKLGRAKSGKSMMWAKTSYGYDYHKETGTVTINPAQALTIKFIFESYLRGRSITKLRDDLNEKYPKHVPWSYRAVRTILDNPVYCGFNQYKGEIYPGNHEPIISKEEYDKTQSELKIRQRTAAENVNPRPFQAKYILSGIAQCGYCGAPLKIMLGVKRKDGSRLKKYECHQRHPRTLRGVTTYNDNKKCDSGFYYKDKLEASVLKEISKLQDDADYLDKIFSGDNAETIDRESYKKQIEELSKKLSRLNDLYIDDRITLEELQSKSAEFISMRGTLETELENDPALRKNKRKADMRKLLNAEKIFSMDYEGQKVLVRGLINKVQVTAEDIVINWKI

SEQ ID NO: 9477 - DNA, 50 bp, Streptococcus pneumoniae; identical to SEQ ID NO: 2172
  source 1..50: mol_type = genomic DNA

SEQ ID NO: 9478 - DNA, 40 bp, Streptococcus pneumoniae; identical to SEQ ID NO: 1573
  source 1..40: mol_type = genomic DNA

SEQ ID NO: 9479 - DNA, 50 bp, Streptococcus pneumoniae; identical to SEQ ID NO: 9409
  source 1..50: mol_type = genomic DNA

SEQ ID NO: 9480 - DNA, 40 bp, Streptococcus pneumoniae; identical to SEQ ID NO: 9400
  source 1..40: mol_type = genomic DNA

SEQ ID NO: 9481 - protein, 481 aa, Streptococcus pneumoniae; identical to SEQ ID NO: 2261

SEQ ID NO: 9482 - DNA, 50 bp, Streptococcus pneumoniae; identical to SEQ ID NO: 9397
  source 1..50: mol_type = genomic DNA

SEQ ID NO: 9483 - DNA, 40 bp, Streptococcus pneumoniae; identical to SEQ ID NO: 1573
  source 1..40: mol_type = genomic DNA

SEQ ID NO: 9484 - DNA, 50 bp, Streptococcus pneumoniae; identical to SEQ ID NO: 9399
  source 1..50: mol_type = genomic DNA

SEQ ID NO: 9485 - DNA, 40 bp, Streptococcus pneumoniae; identical to SEQ ID NO: 9400
  source 1..40: mol_type = genomic DNA

SEQ ID NO: 9486 - protein, 481 aa, Streptococcus pneumoniae; identical to SEQ ID NO: 5021

SEQ ID NO: 9487 - DNA, 50 bp, Streptococcus pneumoniae; identical to SEQ ID NO: 2172
  source 1..50: mol_type = genomic DNA

SEQ ID NO: 9488 - DNA, 40 bp, Streptococcus pneumoniae; identical to SEQ ID NO: 1573
  source 1..40: mol_type = genomic DNA

SEQ ID NO: 9489 - DNA, 50 bp, Streptococcus pneumoniae; identical to SEQ ID NO: 9409
  source 1..50: mol_type = genomic DNA

SEQ ID NO: 9490 - DNA, 40 bp, Streptococcus pneumoniae; identical to SEQ ID NO: 9400
  source 1..40: mol_type = genomic DNA

SEQ ID NO: 9491 - protein, 481 aa, Streptococcus pneumoniae
MKTMNKVAIYVRVSTTNQVEEGYSIDEQKDKLSSYCDIKDWNVYKVYTDGGFSGSNTDRPALESLIKDAKKRKFDTVLVYKLDRLSRSQKDTLHLIEDVFIKNGIEFLSLQENFDTSTPFGKAMIGLLSVFAQLEREQIKERMQLGKIGRAKAGKSMMWAKTSYGYDYHRETGTITINPAQALAIKFIFESYLRGRSITKLRDDLNEKYPKHVPWSYRAVRTILDNPVYCGFNQYKGEIYPGNHEPIISKEEYDKTQSELKIRQRTAAENVNPRPFQAKYILSGIAQCGYCGAPLKIMLGVKRKDGSRLKKYECHQRHPRTLRGVTTYNDNKKCDSGFYYKDKLEAYVLTEISKLQDNAGYLDKIFSGDNAETIDRESYKKQIEELSKKLSRLNDLYIDDRITLEELQSKSAEFISMRGTLETELENDPALRKNKRKADMRKLLNAEKIFSMDYEGQKVLVRGLINKVQVTAEDIVINWKI

SEQ ID NO: 9492 - DNA, 50 bp, Streptococcus pneumoniae; identical to SEQ ID NO: 2172
  source 1..50: mol_type = genomic DNA

SEQ ID NO: 9493 - DNA, 40 bp, Streptococcus pneumoniae; identical to SEQ ID NO: 1573
  source 1..40: mol_type = genomic DNA

SEQ ID NO: 9494 - DNA, 50 bp, Streptococcus pneumoniae; identical to SEQ ID NO: 9409
  source 1..50: mol_type = genomic DNA

SEQ ID NO: 9495 - DNA, 40 bp, Streptococcus pneumoniae; identical to SEQ ID NO: 9400
  source 1..40: mol_type = genomic DNA

SEQ ID NO: 9496 - protein, 481 aa, Streptococcus pneumoniae
MITTNKVAIYVRVSTTNQVEEGYSIDEQKDKLSSYCDIKDWNVYKVYTDGGFSGSNTDRPALESLIKDAKKRKFDTVLVYKLDRLSRSQKDTLHLIEDVFIKNGIEFLSLQENFDTSTPFGKAMIGLLSVFAQLEREQIKERMQLGKLGRAKSGKSMMWAKTSYGYDYHKETGTVTINPAQALTIKFIFESYLRGRSITKLRDDLNEKYPKHVPWSYRAVRTILDNPVYCGFNQYKGEIYPGNHEPIISKEEYDKTQSELKIRQRTAAENVNPRPFQAKYILSGIAQCGYCGAPLKIMLGVKRKDGSRLKKYECHQRHPRTLRGVTTYNDNKKCDSGFYYKDKLEAYVLKEISKLQDDADYLDNIFLGDNAETIDRESYKKQIEELSKKLSRLNDLYIDDRITLEELQSKSAEFISMRGTLETELENDPALRKNKRKADMRKLLNAEKVFSMDYENQKVLVRRLINKVKVTAEDIVINWKI

SEQ ID NO: 9497 - DNA, 50 bp, Streptococcus pneumoniae; identical to SEQ ID NO: 2172
  source 1..50: mol_type = genomic DNA

SEQ ID NO: 9498 - DNA, 40 bp, Streptococcus pneumoniae; identical to SEQ ID NO: 1573
  source 1..40: mol_type = genomic DNA

SEQ ID NO: 9499 - DNA, 50 bp, Streptococcus pneumoniae; identical to SEQ ID NO: 9409
  source 1..50: mol_type = genomic DNA

SEQ ID NO: 9500 - DNA, 40 bp, Streptococcus pneumoniae; identical to SEQ ID NO: 9400
  source 1..40: mol_type = genomic DNA

SEQ ID NO: 9501 - protein, 481 aa, Streptococcus pneumoniae
MKTMNKVAIYVRVSTTNQVEEGYSIDEQKDKLSSYCDIKDWNVYKVYTDGGFSGSNTDRPALESLIKDAKKRKFDTVLVYKLDRLSRSQKDTLHLIEDVFIKNGIEFLSLQENFDTSTPFGKAMIGLLSVFAQLEREQIKERMQLGKLGRAKSGKSMMWAKTSYGYDYHKETGTVTINPAQALTIKFIFESYLRGRSITKLRDDLNEKYPKHVPWSYRAVRTILDNPVYCGFNQYKGEIYPGNHEPIISKEEYDKTQSELKIRQRTAAENVNPRPFQAKYILSGIAQCGYCDAPLKIMLGVKRKDGSRLKKYECHQRHPRTLRGVTTYNDNKKCDSGFYYKDKLEASVLKEISKLQDDADYLDKIFSGDNAETIDRESYKKQIEELSKKLSRLNDLYIDDRITLEELQSKSAEFISMRGTLETELENDPALRKNKRKADMRKLLNAEKVFSMDYESQKVLVRRLINKVKVTAEDIVINWKI

SEQ ID NO: 9502 - DNA, 50 bp, Streptococcus pneumoniae; identical to SEQ ID NO: 2172
  source 1..50: mol_type = genomic DNA

SEQ ID NO: 9503 - DNA, 40 bp, Streptococcus pneumoniae; identical to SEQ ID NO: 1573
  source 1..40: mol_type = genomic DNA

SEQ ID NO: 9504 - DNA, 50 bp, Streptococcus pneumoniae; identical to SEQ ID NO: 9409
  source 1..50: mol_type = genomic DNA

SEQ ID NO: 9505 - DNA, 40 bp, Streptococcus pneumoniae; identical to SEQ ID NO: 9400
  source 1..40: mol_type = genomic DNA

SEQ ID NO: 9506 - protein, 481 aa, Streptococcus pneumoniae
MITTNKVAIYVRVSTTNQVEEGYSIDEQKDKLSSYCDIKDWNVYKVYTDGGFSGSNTDRPALESLIKDAKKRKFDTVLVYKLDRLSRSQKDTLHLIEDVFIKNGIEFLSLQENFDTSTPFGKAMIGLLSVFAQLEREQIKERMQLGKLGRAKSGKSMMWAKTSYGYDYHKETGTVTINPAQALTIKFIFESYLRGRSITKLRDDLNEKYPKHVPWSYRAVRTILDNPVYCGFNQYKGEIYPGNHEPIISKEEYDKTQSELKIRQRTAAENVNPRPFQAKYILSGIAQCGYCGAPLKIMLGVKRKDGSRLKKYECHQRHPRTLRGVTTYNDNKKCDSGFYYKDKLEASVLKEISKLQDDADYLDKIFSGDNAETIDRESYKKQIEELSKKLSRLNDLYIDDRITLEELQSKSAEFISMRATLETELENDPALRKNKRKADMRKLLNAEKVFSMDYESQKVLVRRLINKVKVTAEDIVINWKI

SEQ ID NO: 9507 - DNA, 50 bp, Streptococcus pneumoniae; identical to SEQ ID NO: 2172
  source 1..50: mol_type = genomic DNA

SEQ ID NO: 9508 - DNA, 40 bp, Streptococcus pneumoniae; identical to SEQ ID NO: 1573
  source 1..40: mol_type = genomic DNA

SEQ ID NO: 9509 - DNA, 50 bp, Streptococcus pneumoniae; identical to SEQ ID NO: 9409
  source 1..50: mol_type = genomic DNA

SEQ ID NO: 9510 - DNA, 40 bp, Streptococcus pneumoniae; identical to SEQ ID NO: 9400
  source 1..40: mol_type = genomic DNA

SEQ ID NO: 9511 - protein, 481 aa, Streptococcus pneumoniae
MITTNKVAIYVRVSTTNQAEEGYSIEEQKAKLSSYCDIKDWSVYKIYTDGGFSGSNTDRPALESLIKDAKKRKFDTVLVYKLDRLSRSQKDTLHLIEDVFIKNGIEFLSLQENFDTSTPFGKAMIGLLSVFAQLEREQIKERMQLGKLGRAKSGKSMMWAKTSYGYDYHKETGTVTINPAQALTIKFIFESYLRGRSITKLRDDLNEKYPKHVPWSYRAVRTILDNPVYCGFNQYKGEIYPGNHEPIISKEEYDKTQSELKIRQRTAAENVNPRPFQAKYILSGIAQCGYCGAPLKIMLGVKRKDGSRLKKYECHQRHPRTLRGVTTYNDNKKCDSGFYYKDKLEASVLKEISKLQDDADYLDKIFSGDNAETIDRESYKKQIEELSKKLSRLNDLYIDDRITLEELQSKSAEFISMRATLETELENDPALRKNKRKADMRKLLNAEKVFSMDYESQKVLVRRLINKVKVTAEDIVINWKI

SEQ ID NO: 9512 - DNA, 50 bp, Streptococcus pneumoniae; identical to SEQ ID NO: 2172
  source 1..50: mol_type = genomic DNA

SEQ ID NO: 9513 - DNA, 40 bp, Streptococcus pneumoniae; identical to SEQ ID NO: 1573
  source 1..40: mol_type = genomic DNA

SEQ ID NO: 9514 - DNA, 50 bp, Streptococcus pneumoniae; identical to SEQ ID NO: 9409
  source 1..50: mol_type = genomic DNA

SEQ ID NO: 9515 - DNA, 40 bp, Streptococcus pneumoniae; identical to SEQ ID NO: 9400
  source 1..40: mol_type = genomic DNA

SEQ ID NO: 9516 - protein, 481 aa, Streptococcus pneumoniae
MKTMNKVAIYVRVSTTNQVEEGYSIDEQKDKLSSYCDIKDWNVYKVYTDGGFSGSNTDRPALESLIKDAKKRKFDTVLVYKLDRLSRSQKDTLHLIEDVFIKNGIEFLSLQENFDTSTPFGKAMIGLLSVFAQLEREQIKERMQLGKLGRAKSGKSMMWAKTSYGYDYHKETGTVTINPAQALTIKFIFESYLRGRSITKLRDDLNEKYPKHVPWSYRAVRTILDNPVYCGFNQYKGEIYPGNHEPIISKEEYDKTQSELKIRQRTAAENVNPRPFQAKYILSGIAQCGYCDAPLKIMLGVKRKDGSRLKKYECHQRHPRTLRGVTTYNDNKKCDSGFYYKDKLEASVLKEISKLQDDADYLDKIFSGDNAETIDRESYKKQIEELSKKLSRLNDLYIDDRITLEELQSKSAEFISMRGTLETELENDPALRKNKRKADMRKLLNAEKVFSMDYESQKVLVRRLINKIKVTAEDIVINWKI

SEQ ID NO: 9517 - DNA, 50 bp, Streptococcus pneumoniae; identical to SEQ ID NO: 2172
  source 1..50: mol_type = genomic DNA

SEQ ID NO: 9518 - DNA, 40 bp, Streptococcus pneumoniae; identical to SEQ ID NO: 1573
  source 1..40: mol_type = genomic DNA

SEQ ID NO: 9519 - DNA, 50 bp, Streptococcus pneumoniae; identical to SEQ ID NO: 9409
  source 1..50: mol_type = genomic DNA

SEQ ID NO: 9520 - DNA, 40 bp, Streptococcus pneumoniae; identical to SEQ ID NO: 9400
  source 1..40: mol_type = genomic DNA

SEQ ID NO: 9521 - protein, 481 aa, Streptococcus pneumoniae
MITTNKVAIYVRVSTTNQVEEGYSIDEQKDKLSSYCDIKDWNVYKVYTDGGFSGSNTDRPALESLIKDAKKRKFDTVLVYKLDRLSRSQKDTLHLIEDVFIKNGIEFLSLQENFDTSTPFGKAMIGLLSVFAQLEREQIKERMQLGKLGRAKSGKSMMWAKTSYGYDYHKETGTVTINPAQALTIKFIFESYLRGRSITKLRDDLNEKYPKHVPWSYRAVRTILDNPVYCGFNQYKGEIYPGNHEPIISKEEYDKTQSELKIRQRTAAENVNPRPFQAKYILSGIAQCGYCGAPLKIMLGVKRKDGSRLKKYECHQRHPRTLRGVTTYNDNKKCDSGFYYKDKLEASVLKEISKLQDDADYLDKIFSGDNAETIDRESYKKQIEELSKKLSRLNDLYIDDRITLEELQSKSAEFISMRGTLETELENDPALRKNKRKADMRKLLNAEKVFSMDYESQKVLVRRLINKVKVTDEDIVINWKI

SEQ ID NO: 9522 - DNA, 50 bp, Streptococcus pneumoniae; identical to SEQ ID NO: 2172
  source 1..50: mol_type = genomic DNA

SEQ ID NO: 9523 - DNA, 40 bp, Streptococcus pneumoniae; identical to SEQ ID NO: 1573
  source 1..40: mol_type = genomic DNA

SEQ ID NO: 9524 - DNA, 50 bp, Streptococcus pneumoniae; identical to SEQ ID NO: 9409
  source 1..50: mol_type = genomic DNA

SEQ ID NO: 9525 - DNA, 40 bp, Streptococcus pneumoniae; identical to SEQ ID NO: 9400
  source 1..40: mol_type = genomic DNA

SEQ ID NO: 9526 - protein, 481 aa, Streptococcus pneumoniae; identical to SEQ ID NO: 2216

SEQ ID NO: 9527 - DNA, 50 bp, Streptococcus pneumoniae; identical to SEQ ID NO: 2172
  source 1..50: mol_type = genomic DNA

SEQ ID NO: 9528 - DNA, 40 bp, Streptococcus pneumoniae; identical to SEQ ID NO: 1573
  source 1..40: mol_type = genomic DNA

SEQ ID NO: 9529 - DNA, 50 bp, Streptococcus pneumoniae; identical to SEQ ID NO: 9409
  source 1..50: mol_type = genomic DNA

SEQ ID NO: 9530 - DNA, 40 bp, Streptococcus pneumoniae; identical to SEQ ID NO: 9400
  source 1..40: mol_type = genomic DNA

SEQ ID NO: 9531 - protein, 481 aa, Streptococcus pneumoniae; identical to SEQ ID NO: 2261

SEQ ID NO: 9532 - DNA, 50 bp, Streptococcus pneumoniae; identical to SEQ ID NO: 2172
  source 1..50: mol_type = genomic DNA

SEQ ID NO: 9533 - DNA, 40 bp, Streptococcus pneumoniae; identical to SEQ ID NO: 1573
  source 1..40: mol_type = genomic DNA

SEQ ID NO: 9534 - DNA, 50 bp, Streptococcus pneumoniae; identical to SEQ ID NO: 9409
  source 1..50: mol_type = genomic DNA

SEQ ID NO: 9535 - DNA, 40 bp, Streptococcus pneumoniae; identical to SEQ ID NO: 9400
  source 1..40: mol_type = genomic DNA

SEQ ID NO: 9536 - protein, 481 aa, Streptococcus pneumoniae
MKTMNKVAIYVRVSTTSQVEEGYSIDEQKDKLSSYCDIKDWNVYKVYTDGGFSGSNTDRPALESLIKDAKKRKFDTVLVYKLDRLSRSQKDTLHLIEDVFIKNGIEFLSLQENFDTSTPFGKAMIGLLSVFAQLEREQIKERMQLGKLGRAKSGKSMMWAKTSYGYDYHKETGTVTINPAQALTIKFIFESYLRGRSITKLRDDLNEKYPKHVPWSYRAVRTILDNPVYCGFNQYKGEIYPGNHEPIISKEEYDKTQSELKIRQRTAAENVNPRPFQAKYILSGIAQCGYCGAPLKIMLGVKRKDGSRLKKYECHQRHPRTLRGVTTYNDNKKCDSGFYYKDKLEAYVLTEISKLQDNAGYLDKIFSGDNAETIDRESYKKQIEELSKKLSRLNDLYIDDRITLEELQSKSAEFISMRGTLETELENDPALRKNKRKADMRKLLNAEKIFSMDYEGQKVLVRGLINKVQVTAEDIVINWKI

SEQ ID NO: 9537 - DNA, 50 bp, Streptococcus pneumoniae; identical to SEQ ID NO: 2172
  source 1..50: mol_type = genomic DNA

SEQ ID NO: 9538 - DNA, 40 bp, Streptococcus pneumoniae; identical to SEQ ID NO: 1573
  source 1..40: mol_type = genomic DNA

SEQ ID NO: 9539 - DNA, 50 bp, Streptococcus pneumoniae; identical to SEQ ID NO: 9409
  source 1..50: mol_type = genomic DNA

SEQ ID NO: 9540 - DNA, 40 bp, Streptococcus pneumoniae; identical to SEQ ID NO: 9400
  source 1..40: mol_type = genomic DNA

SEQ ID NO: 9541 - protein, 481 aa, Streptococcus pneumoniae
MITTNKVAIYVRVSTTNQVEEGYSIDEQKDKLSSYCDIKDWNVYKVYTDGGFSGSNTDRPALESLIKDAKKRKFDTVLVYKLDRLSRSQKDTLHLIEDVFIKNGIEFLSLQENFDTSTPFGKAMIGLLSVFAQLEREQIKERMQLGKIGRAKAGKSMMWAKTSYGYDYHRDTGTITINPAQALAIKFIFESYLRGRSITKLRDDLNEKYPKHVPWSYRAVRTILDNPVYCGFNQYKGEIYPGNHEPIISKEEYDKTQSELKIRQRTAAENVNPRPFQAKYILSGIAQCGYCGAPLKIMLGVKRKDGSRLKKYECHQRHPRTLRGVTTYNDNKKCDSGFYYKDKLEASVLKEISKLQDDADYLDKIFSGDNAETIDRESYKKQIEELSKKLSRLNDLYIDDRITLEELQSKSAEFISMRGTLETELENDPALRKNKRKADMRKLLNAEKVFSMDYENQKVLVRRLINKVKVTAEDIVINWKI

SEQ ID NO: 9542 - DNA, 50 bp, Streptococcus pneumoniae; identical to SEQ ID NO: 2172
  source 1..50: mol_type = genomic DNA

SEQ ID NO: 9543 - DNA, 40 bp, Streptococcus pneumoniae; identical to SEQ ID NO: 1573
  source 1..40: mol_type = genomic DNA

SEQ ID NO: 9544 - DNA, 50 bp, Streptococcus pneumoniae; identical to SEQ ID NO: 9409
  source 1..50: mol_type = genomic DNA

SEQ ID NO: 9545 - DNA, 40 bp, Streptococcus pneumoniae; identical to SEQ ID NO: 9400
  source 1..40: mol_type = genomic DNA

SEQ ID NO: 9546 - protein, 481 aa, Streptococcus pneumoniae
MKTMNKVAIYVRVSTTNQVEEGYSIDEQKDKLSSYCDIKDWNVYKVYTDGGFSGSNTDRPALESLIKDAKKRKFDTVLVYKLDRLSRSQKDTLHLIEDVFIKNGIEFLSLQENFDTSTPFGKAMIGLLSVFAQLEREQIKERMQLGKIGRAKAGKSMMWAKTSYGYDYHRETGTITINPAQALAIKFIFESYLRGRSITKLRDDLNEKYPKHVPWSYRAVRTILDNPVYCGFNQYKGEIYPGNHESIISKEEYDKTQSELKIRQRTAAENVNPRPFQAKYILSGIAQCGYCGAPLKIMLGVKRKDGSRLKKYECHQRHPRTLRGVTTYNDNKKCDSGFYYKDKLEAYVLTEISKLQDNAGYLDKIFSGDNAETIDRESYKKQIEELSKKLSRLNDLYIDDRITLEELQSKSAEFISMRGTLETELENDPALRKNKRKADMRKLLNAEKIFSMDYEGQKVLVRGLINKVQVTAEDIVINWKI

SEQ ID NO: 9547 - DNA, 50 bp, Streptococcus pneumoniae; identical to SEQ ID NO: 2172
  source 1..50: mol_type = genomic DNA

SEQ ID NO: 9548 - DNA, 40 bp, Streptococcus pneumoniae; identical to SEQ ID NO: 1573
  source 1..40: mol_type = genomic DNA

SEQ ID NO: 9549 - DNA, 50 bp, Streptococcus pneumoniae; identical to SEQ ID NO: 9409
  source 1..50: mol_type = genomic DNA

SEQ ID NO: 9550 - DNA, 40 bp, Streptococcus pneumoniae; identical to SEQ ID NO: 9400
  source 1..40: mol_type = genomic DNA

SEQ ID NO: 9551 - protein, 481 aa, Streptococcus pneumoniae
MITTNKVAIYVRVSTTNQVEEGYSIDEQKDKLSSYCDIKDWNVYKVYTDGGFSGSNTDRPALESLIKDAKKRKFDTVLVYKLDRLSRSQKDTLHLIEDVFIKNGIEFLSLQENFDTSTPFGKAMIGLLSVFAQLEREQIKERMQLGKLGRAKSGKSMMWAKTSYGYDYHKETGTVTINPAQALTIKFIFESYLRGRSITKLRDDLNEKYPKHVPWSYRAVRTILDNPVYCGFNQYKGEIYPGNHEPIISKEEYDKTQSELKIRQRTAAENVNPRPFQAKYILSGIAQCGYCGAPLKIMLGVKRKDGSRLKKYECHQRHPRTLRGVTTYNDNKKCDSGFYYKDMLEASVLKEISKLQDDADYLDKIFSGDNAETIDRESYKKQIEELSKKLSRLNDLYIDDRITLEELQSKSAEFISMRGTLETELENDPALRKNKRKADMRKLLNAEKVFSMDYENQKVLVRRLINKVKVTAEDIVINWKI

SEQ ID NO: 9552 - DNA, 50 bp, Streptococcus pneumoniae; identical to SEQ ID NO: 2172
  source 1..50: mol_type = genomic DNA

SEQ ID NO: 9553 - DNA, 40 bp, Streptococcus pneumoniae; identical to SEQ ID NO: 1573
  source 1..40: mol_type = genomic DNA

SEQ ID NO: 9554 - DNA, 50 bp, Streptococcus pneumoniae; identical to SEQ ID NO: 9409
  source 1..50: mol_type = genomic DNA

SEQ ID NO: 9555 - DNA, 40 bp, Streptococcus pneumoniae; identical to SEQ ID NO: 9400
  source 1..40: mol_type = genomic DNA

SEQ ID NO: 9556 - protein, 481 aa, Streptococcus pneumoniae; identical to SEQ ID NO: 2186

SEQ ID NO: 9557 - DNA, 50 bp, Streptococcus pneumoniae; identical to SEQ ID NO: 2187
  source 1..50: mol_type = genomic DNA

SEQ ID NO: 9558 - DNA, 40 bp, Streptococcus pneumoniae; identical to SEQ ID NO: 1573
  source 1..40: mol_type = genomic DNA

SEQ ID NO: 9559 - DNA, 50 bp, Streptococcus pneumoniae; identical to SEQ ID NO: 9464
  source 1..50: mol_type = genomic DNA

SEQ ID NO: 9560 - DNA, 40 bp, Streptococcus pneumoniae; identical to SEQ ID NO: 9400
  source 1..40: mol_type = genomic DNA

SEQ ID NO: 9561 - protein, 481 aa, Streptococcus pneumoniae; identical to SEQ ID NO: 7681

SEQ ID NO: 9562 - DNA, 50 bp, Streptococcus pneumoniae; identical to SEQ ID NO: 2172
  source 1..50: mol_type = genomic DNA

SEQ ID NO: 9563 - DNA, 40 bp, Streptococcus pneumoniae; identical to SEQ ID NO: 1573
  source 1..40: mol_type = genomic DNA

SEQ ID NO: 9564 - DNA, 50 bp, Streptococcus pneumoniae; identical to SEQ ID NO: 9409
  source 1..50: mol_type = genomic DNA

SEQ ID NO: 9565 - DNA, 40 bp, Streptococcus pneumoniae; identical to SEQ ID NO: 9400
  source 1..40: mol_type = genomic DNA

SEQ ID NO: 9566 - protein, 481 aa, Streptococcus pneumoniae
MKTTNKVAIYVRVSTTSQVEEGYSIEEQKDKLESYCKIKDWSVYKVYTDGGFSGSNTNRPAIEQLIKDAQKKKFDTVLVYKLDRLSRSQKDTLHLIEDVFIKNGIEFLSLQENFDTSTPFGKAMIGLLSVFAQLEREQIKERMQLGKIGRAKAGKSMMWAKTSYGYDYHRETGTITINPAQALTIKFIFESYLRGRSITKLRDDLNEKYPKHVPWSYRAVRTILDNPVYCGFNQYKGEIYPGNHESIISKEEYDKTQSELKIRQRTAAENVNPRPFQAKYILSGIAQCGYCGAPLKIMLGVKRKDGSRLKKYECHQRHPRTLRGVTTYNDNKKCDSGFYYKDKLEAYVLTEISKLQDNAGYLDKIFSGDNAETIDRESYKKQIEELSKKLSRLNDLYIDDRITLEELQSKSAEFISMRGTLETELENDPALRKNKRKADMRKLLNAEKIFSMDYEGQKVLVRGLINKVQVTAEDIVINWKI

SEQ ID NO: 9567 - DNA, 50 bp, Streptococcus pneumoniae; identical to SEQ ID NO: 2172
  source 1..50: mol_type = genomic DNA

SEQ ID NO: 9568 - DNA, 40 bp, Streptococcus pneumoniae; identical to SEQ ID NO: 1573
  source 1..40: mol_type = genomic DNA

SEQ ID NO: 9569 - DNA, 50 bp, Streptococcus pneumoniae; identical to SEQ ID NO: 9409
  source 1..50: mol_type = genomic DNA

SEQ ID NO: 9570 - DNA, 40 bp, Streptococcus pneumoniae; identical to SEQ ID NO: 9400
  source 1..40: mol_type = genomic DNA

SEQ ID NO: 9571 - protein, 481 aa, Streptococcus pneumoniae
MITTNKVAIYVRVSTTNQVEEGYSIDEQKDKLSSYCDIKDWNVYKVYTDGGFSGSNTDRPALESLIKDAKKRKFDTVLVYKLDRLSRSQKDTLHLIEDVFIKNGIEFLSLQENFDTSTPFGKAMIGLLSVFAQLEREQIKERMQLGKIGRAKAGKSMMWAKTSYGYDYHRETGTITINPAQALAIKFIFESYLRGRSITKLRDDLNEKYPKHVPWSYRAVRTILDNPVYCGFNQYKGEIYPGNHEPIISKEEYDKTQSELKIRQRTAAENVNPRPFQAKYILSGIAQCGYCGAPLKIMLGVKRKDGSRLKKYECHQRHPRTLRGVTTYNDNKKCDSGFYYKDKLEASVLKEISKLQDDADYLDKIFSGDNAETIDRESYKKQIEELSKKLSRLNDLYIDDRITLEELQSKSAEFISMRGTLETELENDPALRKNKRKADMRKLLNAEKVFSMDYENQKVLVRRLINKVKVTAEDIVINWKI

SEQ ID NO: 9572 - DNA, 50 bp, Streptococcus pneumoniae; identical to SEQ ID NO: 2172
  source 1..50: mol_type = genomic DNA

SEQ ID NO: 9573 - DNA, 40 bp, Streptococcus pneumoniae; identical to SEQ ID NO: 1573
  source 1..40: mol_type = genomic DNA

SEQ ID NO: 9574 - DNA, 50 bp, Streptococcus pneumoniae; identical to SEQ ID NO: 9409
  source 1..50: mol_type = genomic DNA

SEQ ID NO: 9575 - DNA, 40 bp, Streptococcus pneumoniae; identical to SEQ ID NO: 9400
  source 1..40: mol_type = genomic DNA

SEQ ID NO: 9576 - protein, 480 aa, Streptococcus pneumoniae
MKTTNKVAIYVRVSTTSQVEEGYSIEEQKDKLEAYCKIKDWSVYKVYTDGGFSGSNTNRPAIEQLIKDAQKKKFDTVLVYKLDRLSRSQKDTLYLIEEVFIKNGIEFLSLQENFDTSTPFGKAMIGLLAVFAQLEREQIKERMQLGKLGRAKAGKSMMWAKTSYGYDYHKETGTMTINPAQSLAIKFIFESYLSGRSITKLRDDLNEKYPKPIPWNYRAVRVILDNPVYCGYNQFMGEIYKGNHEPIISKETYDKTQEELKIRQRTALENLNPRPFQAKYMLSGIGQCGYCLAPLKIIMGVKRKDGTRFVKYECHQRHPRKTIGATTYNGNKKCDSGFYYKDDLEAYVLQEISKLQVDKESFEGLFKAQKNEIDRKAYKRQINELTGKISRLNDLYIDNRITLEQLQGKSAEFLEMRSRLENELENDPALKRNEKKEEMRKILEKDDIYKMDYEMQASVVRSLISKVQVTAECIKILWRI

SEQ ID NO: 9577 - DNA, 50 bp, Streptococcus pneumoniae
  source 1..50: mol_type = genomic DNA
taaagaattttagtatccctcatttcaatcaagggtactaaaattattga

SEQ ID NO: 9578 - DNA, 40 bp, Streptococcus pneumoniae; identical to SEQ ID NO: 1573
  source 1..40: mol_type = genomic DNA

SEQ ID NO: 9579 - DNA, 50 bp, Streptococcus pneumoniae
  source 1..50: mol_type = genomic DNA
taaagaattttagtatccctcattaaaatcaagggtactaaaattattga

SEQ ID NO: 9580 - DNA, 40 bp, Streptococcus pneumoniae; identical to SEQ ID NO: 9400
  source 1..40: mol_type = genomic DNA

SEQ ID NO: 9581 - protein, 481 aa, Streptococcus pneumoniae
MITTNKVAIYVRVSTTNQVEEGYSIDEQKAKLSSYCDIKDWSVYKIYTDGGFSGSNTDRPALESLIKDAKKRKFDTVLVYKLDRLSRSQKDTLHLIEDVFIKNGIEFLSLQENFDTSTPFGKAMIGLLSVFAQLEREQIKERMQLGKIGRAKAGKSMMWAKTSYGYDYHRETGTITINPAQALAIKFIFESYLRGRSITKLRDDLNEKYPKHVPWSYRAVRTILDNPVYCGFNQYNGEIYPGNHEPIISKEEYDKTQSELKIRQRTAAENVNPRPFQAKYILSGIAQCGYCGAPLKIMLGVKRKDGSRLKKYECHQRHPRTLRGVTTYNDNKKCDSGFYYKDKLEASVLKEISKLQDDADYLDKIFSGDNAETIDRESYKKQIEELSKKLSRLNDLYIDDRITLEELQSKSAEFISMRGTLETELENDPALRKNKRKADMRKLLNAEKVFSMDYESQKVLVRRLINKVKVTAEDIVINWKI

SEQ ID NO: 9582 - DNA, 50 bp, Streptococcus pneumoniae; identical to SEQ ID NO: 2172
  source 1..50: mol_type = genomic DNA

SEQ ID NO: 9583 - DNA, 40 bp, Streptococcus pneumoniae; identical to SEQ ID NO: 1573
  source 1..40: mol_type = genomic DNA

SEQ ID NO: 9584 - DNA, 50 bp, Streptococcus pneumoniae; identical to SEQ ID NO: 9409
  source 1..50: mol_type = genomic DNA

SEQ ID NO: 9585 - DNA, 40 bp, Streptococcus pneumoniae; identical to SEQ ID NO: 9400
  source 1..40: mol_type = genomic DNA

SEQ ID NO: 9586 - protein, 481 aa, Streptococcus pneumoniae
MITTNKVAIYVRVSTTNQVEEGYSIDEQKDKLSSYCDIKDWNVYKVYTDGGFSGSNTDRPALESLIKDAKKRKFDTVLVYKLDRLSRSQKDTLHLIEDVFIKNGIEFLSLQENFDTSTPFGKAMIGLLSVFAQLEREQIKERMQLGKLGRAKSGKSMMWAKTSYGYDYHKETGTVTINPAQALTIKFIFENYLRGRSITKLRDDLNEKYPKHVPWSYRAVRTILDNPVYCGFNQYKGEIYPGNHEPIISKEEYDKTQSELKIRQRTAAENVNPRPFQAKYILSGIAQCGYCGAPLKIMLGVKRKDGSRLKKYECHQRHPRTLRGVTTYNDNKKCDSGFYYKDKLEAYVLTEISKLQDNAGYLDKIFSGDNAETIDRESYKKQIEELSKKLSRLNDLYIDDRITLEELQSKSAEFISMRGTLETELENDPALRKNKRKADMRKLLNAEKIFSMDYEGQKVLVRGLINKVQVTAEDIVINWKI

SEQ ID NO: 9587 - DNA, 50 bp, Streptococcus pneumoniae; identical to SEQ ID NO: 2172
  source 1..50: mol_type = genomic DNA

SEQ ID NO: 9588 - DNA, 40 bp, Streptococcus pneumoniae; identical to SEQ ID NO: 1573
  source 1..40: mol_type = genomic DNA

SEQ ID NO: 9589 - DNA, 50 bp, Streptococcus pneumoniae; identical to SEQ ID NO: 9409
  source 1..50: mol_type = genomic DNA

SEQ ID NO: 9590 - DNA, 40 bp, Streptococcus pneumoniae; identical to SEQ ID NO: 9400
  source 1..40: mol_type = genomic DNA

SEQ ID NO: 9591 - protein, 481 aa, Streptococcus pneumoniae; identical to SEQ ID NO: 5446

SEQ ID NO: 9592 - DNA, 50 bp, Streptococcus pneumoniae; identical to SEQ ID NO: 2172
  source 1..50: mol_type = genomic DNA

SEQ ID NO: 9593 - DNA, 40 bp, Streptococcus pneumoniae; identical to SEQ ID NO: 1573
  source 1..40: mol_type = genomic DNA

SEQ ID NO: 9594 - DNA, 50 bp, Streptococcus pneumoniae; identical to SEQ ID NO: 9409
  source 1..50: mol_type = genomic DNA

SEQ ID NO: 9595 - DNA, 40 bp, Streptococcus pneumoniae; identical to SEQ ID NO: 9400
  source 1..40: mol_type = genomic DNA

SEQ ID NO: 9596 - protein, 481 aa, Streptococcus pneumoniae
MITTNKVAIYVRVSTTNQVEERYSIDEQKDKLSSYCDIKDWNVYKVYTDGGFSGSNTDRPALESLIKDAKKRKFDTVLVYKLDRLSRSQKDTLHLIEDVFIKNGIEFLSLQENFDTSTPFGKAMIGLLSVFAQLEREQIKERMQLGKLGRAKSGKSMMWAKTSYGYDYHKETGTVTINPAQALTIKFIFESYLRGRSITKLRDDLNEKYPKHVPWSYRAVRTILDNPVYCGFNQYKGEIYPGNHEPIISKEEYDKTQSELKIRQRTAAENVNPRPFQAKYILSGIAQCGYCGAPLKIMLGVKRKDGSRLKKYECHQRHPRTLRGVTTYNDNKKCDSGFYYKDKLEASVLKEISKLQDDADYLDKIFSGDNAETIDRESYKKQIEELSKKLSRLNDLYIDDRITLEELQSKSAEFISMRGTLETELENDPALRKNKRKADMRKLLNAEKVFSMDYENQKVLVRRLINKVKVTAEDIVINWKI

SEQ ID NO: 9597 - DNA, 50 bp, Streptococcus pneumoniae; identical to SEQ ID NO: 2172
  source 1..50: mol_type = genomic DNA

SEQ ID NO: 9598 - DNA, 40 bp, Streptococcus pneumoniae; identical to SEQ ID NO: 1573
  source 1..40: mol_type = genomic DNA

SEQ ID NO: 9599 - DNA, 50 bp, Streptococcus pneumoniae; identical to SEQ ID NO: 9409
  source 1..50: mol_type = genomic DNA

SEQ ID NO: 9600 - DNA, 40 bp, Streptococcus pneumoniae; identical to SEQ ID NO: 9400
  source 1..40: mol_type = genomic DNA

SEQ ID NO: 9601 - protein, 481 aa, Streptococcus pneumoniae
MKTMNKVAIYVRVSTTNQVEEGYSIDEQKDKLSSYCDIKDWNVYKVYTDGGFSGSNTDRPALESLIKDAKKRKFDTVLVYKLDRLSRSQKDTLHLIEDVFIKNGIEFLSLQENFDTSTPFGKAMIGLLSVFAQLEREQIKERMQLGKIGRAKAGKSMMWAKTSYGYDYHRETGTITINPAQALAIKFIFESYLRGRSITKLRDDLNEKYPKHVPWSYRAVRTILDNPVYCGFNQYKGEIYPGNHEPIISKEEYDKTQSELKIRQRTAAENVNPRPFQAKYILSGIAQCGYCGAPLKIMLGVKRKDGSRLKKYECHQRHPRTLRGVTTYNDNKKCDSGFYYKDKLEAYVLKEISKLQDDADYLDKIFSGDNAETIDRESYKKQIEELSKKLSRLNDLYIDDRITLEELQSKSAEFISMRGTLETELENDPALRKNKRKADMRKLLNAEKVFSMDYESQKVLVRRLINKVKVTAEDIVINWKI

SEQ ID NO: 9602 - DNA, 50 bp, Streptococcus pneumoniae; identical to SEQ ID NO: 2172
  source 1..50: mol_type = genomic DNA

SEQ ID NO: 9603 - DNA, 40 bp, Streptococcus pneumoniae; identical to SEQ ID NO: 1573
  source 1..40: mol_type = genomic DNA

SEQ ID NO: 9604 - DNA, 50 bp, Streptococcus pneumoniae; identical to SEQ ID NO: 9409
  source 1..50: mol_type = genomic DNA

SEQ ID NO: 9605 - DNA, 40 bp, Streptococcus pneumoniae; identical to SEQ ID NO: 9400
  source 1..40: mol_type = genomic DNA

SEQ ID NO: 9606 - protein, 481 aa, Streptococcus pneumoniae
MITTNKVAIYVRVSTTNQVEEGYSIDEQKDKLSSYCDIKDWNVYKVYTDGGFSGSNTDRPALESLIKDAKKRKFDTVLVYKLDRLSRSQKDTLHLIEDVFIKNGIEFLSLQENFDTSTPFGKAMIGLLSVFAQLEREQIKERMQLGKLGRAKSGKSMMWAKTSYGYDYHKETGTVTINPAQALTIKFIFENYLRGRSITKLRDDLNEKYPKHVPWSYRAVRTILDNPVYCGFNQYKGEIYPGNHEPIISKEEYDKTQSELKIRQRTAAENVNPRPFQAKYILSGIAQCGYCGAPLKIMLGVKRKDGSRLKKYECHQRHPRTLRGVTTYNDNKKCDSGFYYKDKLEASVLKEISKLQDDADYLDKIFSGDNAETIDRESYKKQIEELSKKLSRLNDLYIDDRITLEELQSKSAEFISMRGTLETELENDPALRKNKRKADMRKLLNAEKVFSMDYENQKVLVRRLINKVKVTAEDIVINWKI

SEQ ID NO: 9607 - DNA, 50 bp, Streptococcus pneumoniae; identical to SEQ ID NO: 2172
  source 1..50: mol_type = genomic DNA

SEQ ID NO: 9608 - DNA, 40 bp, Streptococcus pneumoniae; identical to SEQ ID NO: 1573
  source 1..40: mol_type = genomic DNA

SEQ ID NO: 9609 - DNA, 50 bp, Streptococcus pneumoniae; identical to SEQ ID NO: 9409
  source 1..50: mol_type = genomic DNA

SEQ ID NO: 9610 - DNA, 40 bp, Streptococcus pneumoniae; identical to SEQ ID NO: 9400
  source 1..40: mol_type = genomic DNA

SEQ ID NO: 9611 - protein, 481 aa, Streptococcus pneumoniae
MITTNKVAIYVRVSTTNQVEEGYSIDEQKDKLSSYCDIKDWNVYKVYTDGGFSGSNTDRPALESLIKDAKKRKFDTVLVYKLDRLSRSQKDTLHLIEDVFIKNGIEFLSLQENFDTSTPFGKAMIGLLSVFAQLEREQIKERMQLGKIGRAKAGKSMMWAKTSYGYDYHRETGTITINPAQALAIKFIFESYLRGRSITKLRDDLNEKYPKHVPWSYRAVRTILDNPVYCGFNQYKGEIYPGNHEPIISKEEYDKTQSELKIRQRTAAENVNPRPFQAKYILSGIAQCGYCGAPLKIMLGVKRKDGSRLKKYECHQRHPRTLRGVTTYNDNKKCDSGFYYKDKLEASVLKEISKLQDDDDYLDKIFSGDNAETIDRESYKKQIEELSKKLSRLNDLYIDDRITLEELQSKSAEFISMRATLETELENDPALRKNKRKADMRKLLNAEKVFSMDYEGQKVLVRGLINKVKVTAEDIVINWKI

SEQ ID NO: 9612 - DNA, 50 bp, Streptococcus pneumoniae; identical to SEQ ID NO: 2172
  source 1..50: mol_type = genomic DNA

SEQ ID NO: 9613 - DNA, 40 bp, Streptococcus pneumoniae; identical to SEQ ID NO: 1573
  source 1..40: mol_type = genomic DNA

SEQ ID NO: 9614 - DNA, 50 bp, Streptococcus pneumoniae; identical to SEQ ID NO: 9409
  source 1..50: mol_type = genomic DNA

SEQ ID NO: 9615 - DNA, 40 bp, Streptococcus pneumoniae; identical to SEQ ID NO: 9400
  source 1..40: mol_type = genomic DNA

SEQ ID NO: 9616 - protein, 481 aa, Streptococcus pneumoniae
MITTNKVAIYVRVSTTNQVEEGYSIDEQKDKLSSYCDIKDWNVYKVYTDGGFSGSNTDRPALESLIKDAKKRKFDTVLVYKLDRLSRSQKDTLHLIEDVFIKNGIEFLSLQENFDTSTPFGKAMIGLLSVFAQLEREQIKERMQLGKIGRAKAGKSMMWAKTSYGYDYHRETGTITINPAQALAIKFIFESYLRGRSITKLRDDLNEKYPKHVPWSYRAVRTILDNPVYCGFNQYKGEIYPGNHEPIISKEEYDKTQSELKIRQRTAAENVNPRPFQAKYILSGIAQCGYCGAPLKIMLGVKRKDGSRLKKYECHQRHPRTLRGVTTYNDNKKCDSGFYYKDKLEASVLKEISKLQDDADYLDKIFSGDNAETIDRESYKKQIEELSKKLSRLNDLYIDDRITLEELQSKSAEFISMRGTLETELENDPALRKNKRKADMRKLLNAEKVFSMDYESQKVLVRRLINKVKVTAEDIVINWKI

SEQ ID NO: 9617 - DNA, 50 bp, Streptococcus pneumoniae; identical to SEQ ID NO: 2172
  source 1..50: mol_type = genomic DNA

SEQ ID NO: 9618 - DNA, 40 bp, Streptococcus pneumoniae; identical to SEQ ID NO: 1573
  source 1..40: mol_type = genomic DNA

SEQ ID NO: 9619 - DNA, 50 bp, Streptococcus pneumoniae; identical to SEQ ID NO: 9409
  source 1..50: mol_type = genomic DNA

SEQ ID NO: 9620 - DNA, 40 bp, Streptococcus pneumoniae; identical to SEQ ID NO: 9400
  source 1..40: mol_type = genomic DNA

SEQ ID NO: 9621 - protein, 481 aa, Streptococcus pneumoniae
MITTNKVAIYVRVSTTNQVEEGYSIDEQKDKLSSYCDIKDWNVYKVYTDGGFSGSNTDRPALESLIKDAKKRKFDTVLVYKLDRLSRSQKDTLHLIEDVFIKNGIEFLSLQENFDTSTPFGKAMIGLLSVFAQLEREQIKERMQLGKLGRAKAGKSMMWAKTSYGYDYHRETGTITINPAQALAIKFIFESYLRGRSITKLRDDLNEKYPKHVPWSYRAVRTILDNPVYCGFNQYKGEIYPGNHEPIISKEEYDKTQSELKIRQRTAAENVNPRPFQAKYILSGIAQCGYCGAPLKIMLGVKRKDGSRLKKYECHQRHPRTLRGVTTYNDNKKCDSGFYYKDKLEASVLKEISKLQDDADYLDKIFSGDNAETIDRESYKKQIEELSKKLSRLNDLYIDDRITLEELQSKSAEFISMRGTLETELENDPALRKNKRKADMRKLLNAEKVFSMDYENQKVLVRRLINKVKVTAEDIVINWKI

SEQ ID NO: 9622 - DNA, 50 bp, Streptococcus pneumoniae; identical to SEQ ID NO: 2172
  source 1..50: mol_type = genomic DNA

SEQ ID NO: 9623 - DNA, 40 bp, Streptococcus pneumoniae; identical to SEQ ID NO: 1573
  source 1..40: mol_type = genomic DNA

SEQ ID NO: 9624 - DNA, 50 bp, Streptococcus pneumoniae; identical to SEQ ID NO: 9409
  source 1..50: mol_type = genomic DNA

SEQ ID NO: 9625 - DNA, 40 bp, Streptococcus pneumoniae; identical to SEQ ID NO: 9400
  source 1..40: mol_type = genomic DNA

SEQ ID NO: 9626 - protein, 481 aa, Streptococcus pneumoniae
MKTMNKVAIYVRVSTTNQVEEGYSIDEQKDKLSSYCDIKDWNVYKVYTDGGFSGSNTDRPALESLIKDAKKRKFDTVLVYKLDRLSRSQKDTLHLIEDVFIKNGIEFLSLQENFDTSTPFGKAMIGLLSVFAQLEREQIKERMQLGKIGRAKAGKSMMWAKTSYGYDYHRETGTITINPAQALAIKFIFESYLRGRSITKLRDDLNEKYPKHVPWSYRAVRTILDNPVYCGFNQYKGEIYPGNHEPIISKEEYDKTQSELKIRQRTAAENVNPRPFQAKYILSGIAQCGYCGAPLKIMLGVKRKDGSRLKKYECHQRHPRTLRGVTTYNDNKKCDSGFYYKDKLEAYVLKEISKLQDDADYLDKIFSGDNAETIDRESYKKQIEELSKKLSRLNDLYIDDRITLEELQSKSAEFISMRGTLETELENDPALRKNKRKADMRKLLNAEKVFSMDYENQKVLVRRLINKVKVIAEDIVINWKI

SEQ ID NO: 9627 - DNA, 50 bp, Streptococcus pneumoniae; identical to SEQ ID NO: 2172
  source 1..50: mol_type = genomic DNA

SEQ ID NO: 9628 - DNA, 40 bp, Streptococcus pneumoniae; identical to SEQ ID NO: 1573
  source 1..40: mol_type = genomic DNA

SEQ ID NO: 9629 - DNA, 50 bp, Streptococcus pneumoniae; identical to SEQ ID NO: 9409
  source 1..50: mol_type = genomic DNA

SEQ ID NO: 9630 - DNA, 40 bp, Streptococcus pneumoniae; identical to SEQ ID NO: 9400
  source 1..40: mol_type = genomic DNA

SEQ ID NO: 9631 - protein, 481 aa, Streptococcus pneumoniae
MITTNKVAIYVRVSTTNQVEEGYSIDEQKDKLSSYCDIKDWNVYKVYTDGGFSGSNTDRPALESLIKDAKKRKFDTVLVYKLDRLSRSQKDTLHLIEDVFIKNGIEFLSLQENFDTSTPFGKAMIGLLSVFAQLEREQIKERMQLGKLGRAKSGKSMMWAKTSYGYDYHKETGTVTINPAQALTIKFIFESYLRGRSITKLRDDLNEKYPKHVPWSYRAVRTILDNPVYCGFNQYKGEIYPGNHKPIISKEEYDKTQSELKIRQRTAAENVNPRPFQAKYILSGIAQCGYCGAPLKIMLGVKRKDGSRLKKYECHQRHPRTLRGVTTYNDNKKCDSGFYYKDKLEASVLKEISKLQDDADYLDKIFSGDNAETIDRESYKKQIEELSKKLSRLNDLYIDDRITLEELQSKSAEFISMRGTLETELENDPALRKNKRKADMRKLLNAEKVFSMDYENQKVLVRRLINKVKVTAEDIVINWKI

SEQ ID NO: 9632 - DNA, 50 bp, Streptococcus pneumoniae; identical to SEQ ID NO: 2172
  source 1..50: mol_type = genomic DNA

SEQ ID NO: 9633 - DNA, 40 bp, Streptococcus pneumoniae; identical to SEQ ID NO: 1573
  source 1..40: mol_type = genomic DNA

SEQ ID NO: 9634 - DNA, 50 bp, Streptococcus pneumoniae; identical to SEQ ID NO: 9409
  source 1..50: mol_type = genomic DNA

SEQ ID NO: 9635 - DNA, 40 bp, Streptococcus pneumoniae; identical to SEQ ID NO: 9400
  source 1..40: mol_type = genomic DNA

SEQ ID NO: 9636 - protein, 529 aa, Blautia wexlerae
MPYCLYLRKSRADIDAEANGEMETLARHEKILLDLAKRMHLDVTEIYREVVSGETISSRPVVQHLLTEVENEMWDGVLVVEIERLARGDTIDQGIVSRAFKFSNTKIITPLKTYDPNNEYDEEYFEFGLFMSRREYKTIRRRLTQGRMSSAKEGKHTGSKAPYGYDRIHVESGKGYTLSPNEKETPIVKMIFDWFVNGQLQEDGSYRKLGAHAIAHRLTNLSIDSPTGNPTWNPRSVYWILHNPVYTGKIRWGYKKDKKIIVDGAVKRTRIIPPEEEQILVEGLHPAIISDEIFNQAQELFLRRGNPSVVIEKELKNPLAGVVVCGICGRPLRYRSNANRRDFGVECRTYGCPCKGSYIYIVEKRIIDALRDWVNEYKLSWDDMPREMHSLLIVKEQAYNAAIKELNTLTKQLDKTHDLLEQGIYDTETFLIRSKSLSEKIAESEKNIAKLSADINNEKLRENNRKNLIPKVENLIDIYWQLPNASAKNDMLKEVLEKVEYTKLHTVGRSKTKKLDDFDLVLYPKLPRT

SEQ ID NO: 9637 - DNA, 50 bp, Blautia wexlerae
  source 1..50: mol_type = genomic DNA
ggtcgcacgcatgggtaatcctatgtatagggttagatacgtgtgcgacg

SEQ ID NO: 9638 - DNA, 40 bp, Blautia wexlerae
  source 1..40: mol_type = genomic DNA
ggcagcacagcagttcatagtgtaaggcgcatgagccacc

SEQ ID NO: 9639 - DNA, 50 bp, Blautia wexlerae
  source 1..50: mol_type = genomic DNA
ggtcgcacgcatgggtaatcctatggatagggttagatacgtgtgcgacg

SEQ ID NO: 9640 - DNA, 40 bp, Blautia wexlerae
  source 1..40: mol_type = genomic DNA
ggcagcacagcagaaggtggggtagggggcatgagcgagc

SEQ ID NO: 9641 - protein, 523 aa, Pseudomonas psychrotolerans
MPTAIPYLRFSSGRQAKGSSYERQSDMIADWLRRNPDYKLSTISFEDLGVSGYHGHHLKEESGFAKLRVAIAGGAFGKGDCVIIEAIDRAGRLEPLQMLSLLGEILNAGVEIETLDDGVRYTRESVSNNHLFLLVAKVQQAHLYSQNLSRRLSAAWDSKRKAATSGKSIRRRLPLWFDQETGMLREDIAPLVKQAFEDYAAGFGNRRIYKRLAPLHPEIAAMTPEGMGEWFSNRTAIGYWNDTPDVHPAVIDLDLWYRVQMLRESRKRTTIAAPSKHLLAGLVKCGSCGKNFTIKVNKGKSTSMVCKTKSRLGDKGCDNGKAFPTAVLDKIRIDTSLSLVQEAFTNQNLSSNRKKLIEIEGQLQDVAKGLTALGEAIAAAGDVTPFLDSLSSYKRKREELENEKTLLSRETKDKNILLSGVIDLEQDLLEDDQLKLNALLQSVGYKITVYSDGLMIVEGQEYPFLYKGYNRGKDGYVYMDMGEEKFIKRADQEQIDAFKALRKQAPEPDNILLKLIKRRNGRS

SEQ ID NO: 9642 - DNA, 50 bp, Pseudomonas psychrotolerans
  source 1..50: mol_type = genomic DNA
tgtagaccttttgacagactgatctcgtagaagattacaataggtctacc

SEQ ID NO: 9643 - DNA, 40 bp, Pseudomonas psychrotolerans
  source 1..40: mol_type = genomic DNA
gaaggtgcgcaggaagatctcgtagtagtaggggtcgctc

SEQ ID NO: 9644 - DNA, 50 bp, Pseudomonas psychrotolerans
  source 1..50: mol_type = genomic DNA
tgtagaccttttgacagactgatctggtagaagattacaataggtctacc

SEQ ID NO: 9645 - DNA, 40 bp, Pseudomonas psychrotolerans
  source 1..40: mol_type = genomic DNA
gcaggtgctcaggaagatctggatggggcaggcttcgctc

SEQ ID NO: 9646 - protein, 493 aa, Anaerotruncus rubiinfantis
MKAVIYARYSSDSQREESIEGQLRECAAFAEKNGITVLRHYIDRAYSAKTDNRPEFQSMIKDSGKRLFDIVIVWKLDRFARNRYDSARYKATLKKNGVKVVSATEIISEGAEGIILESVLEGYAEYYSADLSEKVVRGMTDNALKCKFNGGSLPIGYVIDDEQHFQIDPLTAPFVLEAFKRYDGGATMKEVRDALNAKGVTNQRGGELTFNSIQHMLNNRRYIGEFRYRDVIVPDGIPAIVPQDLFDRVQEKLAKNKKAPARHKAEDDYLLTTKLFCGCCGAYLCGESGTSRTGKVHHYYKCVSVKKKRTDCHKKPVRKEWIEDLVVGETMKMVMDDKAIEAIVSMLMDLQDRDNVNVPLYEQQLHEADTAISNLLNAIQQGILTRSTKERLEELENRRDELENRLSCEKLAKPKVSAEFMTFWLHRFRKLDVRQQSHRKMLIDAFINAIFLYDDKMVITFNYKEGTKTITFAELQEAISNKNGSDLDCLAAP

SEQ ID NO: 9647 - DNA, 50 bp, Anaerotruncus rubiinfantis
  source 1..50: mol_type = genomic DNA
ggttcggatttggattgccttgctgcaccaaacaaatataatccgaacca

SEQ ID NO: 9648 - DNA, 40 bp, Anaerotruncus rubiinfantis
  source 1..40: mol_type = genomic DNA
ggttcaagtcccatctcccgcaccaaatcccgaaagttcc

SEQ ID NO: 9649 - DNA, 50 bp, Anaerotruncus rubiinfantis; identical to SEQ ID NO: 9647
  source 1..50: mol_type = genomic DNA

SEQ ID NO: 9650 - DNA, 40 bp, Anaerotruncus rubiinfantis
  source 1..40: mol_type = genomic DNA
ggtccaaggcccatctccagccctgaaacccaagagttcc

SEQ ID NO: 9651 - protein, 503 aa, Eisenbergiella massiliensis
MNNRIDAIYARQSVDKKDSISIESQIEFCKYELKGGNCKEYTDKGYSGKNTDRPKFQELVRDIKRGLIAKVVVYKLDRISRSILDFANMMELFQQYNVEFVSSTEKFDTSTPMGRAMLNICIVFAQLERETIQKRVTDAYYSRSQRGFKMGGKAPYGFHTEPIKMDGINTKKLVVNPDEAANIRLMFEMYAQPTTSYGDITRYFAEQGILFNGKELIRPTLAQMLRNPVYVRADLDVYEFFKSQGTIIVNDAADFTGMNGCYLYQGRDVKPSKKNDLKDQMLVLAPHEGIVPSDIWLTCRKKLMNNMKIQSARKATHTWLAGKIKCGNCGYALMSINNPVGKQYLRCTKRLDNKSCAGCGKIITSELEAVVYQQMVKKLEKHKTLTGRKKAAKANPKIAALQVELLHVDSEIEKLVDSLTGANNVLLSYVNVKIAELDGRKQELLARIAELTVEAISPEQVSQISGYLDTWEDVSFDDKRRVVDLMITTIAATSDSLNITWKI

SEQ ID NO: 9652 - DNA, 50 bp, Eisenbergiella massiliensis; identical to SEQ ID NO: 12
  source 1..50: mol_type = genomic DNA

SEQ ID NO: 9653 - DNA, 40 bp, Eisenbergiella massiliensis
  source 1..40: mol_type = genomic DNA
tttttattttgcatccaagttatggactgataaataaatt

SEQ ID NO: 9654 - DNA, 50 bp, Eisenbergiella massiliensis; identical to SEQ ID NO: 284
  source 1..50: mol_type = genomic DNA

SEQ ID NO: 9655 - DNA, 40 bp, Eisenbergiella massiliensis
  source 1..40: mol_type = genomic DNA
ttttttttttgcacccacgctgttgactgctaaatgtaat

SEQ ID NO: 9656 - protein, 402 aa, Acetivibrio clariflavus
MGKIALYTRVSSARQAADDAYSLDVQKERCIFLLKSKGYNDADIDFYCDAGISGTTILERDQLKELLDKLEKGQYDGICCYDLSRISRSISHTLQIFKLLKENNLRLYTCDGAFNGDINGQNAKIMVSIYSMLNELFIDQLRERVIDGMSKSVEAGNYFGGPPPYGYKYEYYSVKQENNFQENQNSKTKKRDIKKRLIVNEEEKPIVELIFTLFVREKYSIKNVAQHLNLHGYKTRAGKQFATATVQKILENPVYCSRLFWAKRRQKKKTEEGVRVWEKKTIFDVNFYDLPLGNHQAIIPEDVFLEALERLRSRRKVRVNENTADAMRGITKQQFDDANKKMFINILRCPGCGGRMTSSLQHLNWPMEKEVKQKYIINAIVLMRVGTTAMAIIQYKKSERLI

SEQ ID NO: 9657 - DNA, 50 bp, Acetivibrio clariflavus
  source 1..50: mol_type = genomic DNA
gtcatgcattcggtaaacaacggtgagccgtgatttaccgaatacatgac

SEQ ID NO: 9658 - DNA, 40 bp, Acetivibrio clariflavus
  source 1..40: mol_type = genomic DNA
ttttaaaatattgaacaacgaaacgtatcataagtgagag

SEQ ID NO: 9659 - DNA, 50 bp, Acetivibrio clariflavus
  source 1..50: mol_type = genomic DNA
gtcatgcattcggtaaacaacggttagccgtgatttaccgaatacatgac

SEQ ID NO: 9660 - DNA, 40 bp, Acetivibrio clariflavus
  source 1..40: mol_type = genomic DNA
ttttaatctatagatctactaaacttgtaataattgagag

SEQ ID NO: 9661 - protein, 505 aa, Clostridium botulinum
MDRICIYLRKSRADEELEKTIGEGETLSKHRKALLKFAKEKKLNIVEIKEEIVSADSIFFRPKMIELLKEVETKRYIGVLVMDIQRLGRGDTEDQGIITRIFKESHTKIITPQKTYDLDDDLDEDYFEFESFMGRKEYKMIKKRMQGGRVRSVEDGNYIATNPPFGYDVHWINKSRTLKANSKESEIVKLIFKLYIKGNGAGTIAKHLNDLGYKTKFGNNFSNSSVIFILKNPVYIGKITWKKKDIKKSKDPNKVKDTRTRDKSEWIIADGKHKAIIDSNIWNKAQEILSNKYHIPYKLANPPANPLAGLVICSKCNGKMVMRKYGKKLPHLICTNTKCNNKSARFDYIEKAILEGLEEYLKNYKVNVKGNGKKANLKPYEQQLNALSKELIVLNEQKLKLFDFLEREVYTEEIFLERSKNLDERINTSTLAINKIKKILDDEKKKNNKNDIVKFEKILEGYKETKDIQKKNELMKSLIFKIEYKKEQHQRNDDFDIRLFPKLLR

SEQ ID NO: 9662 - DNA, 50 bp, Clostridium botulinum
  source 1..50: mol_type = genomic DNA
ggtgtatatcatgcctagcgcaattcattacatcatacatgttgtacacc

SEQ ID NO: 9663 - DNA, 40 bp, Clostridium botulinum
  source 1..40: mol_type = genomic DNA
tatatccataagagaaatttcatttccttctttatctact

SEQ ID NO: 9664 - DNA, 50 bp, Clostridium botulinum
  source 1..50: mol_type = genomic DNA
ggtgtatatcatgcctagcgcaatcaattacatcatacatgttgtacacc

SEQ ID NO: 9665 - DNA, 40 bp, Clostridium botulinum
  source 1..40: mol_type = genomic DNA
tgtattcttatgagaaattcaatttatttatttatttatt

SEQ ID NO: 9666 - protein, 598 aa, Vibrio campbellii
MDEKPRIAHIYSRVSKGTQVKGDGLRRQIEIASKFIEDVNISNSRDGLPVYTLADSPIYDRGLSAYFGLNTDENAGLGAFLKAAENGQVEKGTLLIVEAIDRISRLPVDDARALFARFKKYGIDVAICRFNLIIYHDKSSDLGQDLLITTAIHLAHLESEQKSKRIRARFTHKRLLEKEGGERRTSMSPSWIELSKDKTHFVLIPERARIVRKMVDLKLQGWGAHRITVYLNEQGYPCWNRSNTWYTKIVEKYLKMIQLVGDFQPVEHVHGEKGVRKEPVGDVIKGYYPALITEEEWIRLKASFKRSGGRQTGAFSNLFSCMLYCPTCGSCMSYFKPNRGRIKVRCRKQIDKQGCDQRALNYEEIEPRLIKALAGLDYAKINNNSFASLQKELNTLEAQVAELEASADDIKTQMLEESDPRIISVYVNKLKAIYTEQDKAKARFEKLSTQTSDYDVNTLEQLQLERNEDRERYNGFVRSFVKYVIASDSKLGKPLRIVFKSEAVGEVPVFFNDDKNNKAISDIFTAQKDVNEAAPIRLINMSRVHGNLGKLAAIDTVPVPDDLGDALERIKYLFAVRQAVLQNPEKWQAIADDARLFE

SEQ ID NO: 9667 - DNA, 50 bp, Vibrio campbellii
  source 1..50: mol_type = genomic DNA
tgcgatactaatagaaacccaaccaatgaagagtgggtgatagcatcgca

SEQ ID NO: 9668 - DNA, 40 bp, Vibrio campbellii
  source 1..40: mol_type = genomic DNA
agcgctagttattcctaccaatgaagagtgggttatcgct

SEQ ID NO: 9669 - DNA, 50 bp, Vibrio campbellii
  source 1..50: mol_type = genomic DNA
tgcgatactaatagaaacccaacctctgaagagtgggtgatagcatcgca

SEQ ID NO: 9670 - DNA, 40 bp, Vibrio campbellii
  source 1..40: mol_type = genomic DNA
aatgccagtttctcctgcctctgaagagtgagttttctct

SEQ ID NO: 9671 - protein, 539 aa, Nocardia cerradoensis
MQPDESVPAVDGAVLAKLDMEMRGVPENLPSPAELIASGAKCVLAYARISDLSGKRGTSKNAKGVTNQHTTNHSTARRENLVIVRYYTDNDLSASKDAYRPDFELMLTHLHKGVTPEGYPIHGVVAVDEDRIYKLPAQWQHFIEAFRAAPDRVFADDYGTQDLYSENSEIIGLLGVAIAMGENRKRRSRTRRWHEGQARRGIAHTGGRVFGYEPVEGKPGEIQVVPEEAALIRKAVTACIAGQSWGTITKLFQESGIPTAKGGPWRDQTVKQIVSNPRNAGLRILGEGNDVYRDEHGEMKLGQWEAIITPAEWEKVAERYRPRNRIGKNKLAKGVVSRVYLGSGLYRCGNLLEDGRRCNSVMAGRKNDKGRAAYRYGCRPVTNGGCGGVSVAGEWIDERISELVLLALDQRPAVVAEVHWDKESELEAAVRRRDDFEGRWNRGEIGDERFYRMLPGLDDTVNKLRRERAAFQRANTVPVETAVERRERWYKPVEDGGYDLQQKRSILFAELSAVVVYPVGRGTQKRSLDSFKPVWNAAE

SEQ ID NO: 9672 - DNA, 50 bp, Nocardia cerradoensis
  source 1..50: mol_type = genomic DNA
tacggcacttaacaaatcatttggtgtcaactgatttgtgaagtaccgta

SEQ ID NO: 9673 - DNA, 40 bp, Nocardia cerradoensis
  source 1..40: mol_type = genomic DNA
ttacgcctcgtgtcactggtgtcatgtgatggcgcacgaa

SEQ ID NO: 9674 - DNA, 50 bp, Nocardia cerradoensis
  source 1..50: mol_type = genomic DNA
tacggcacttaacaaatcatttggggtcaactgatttgtgaagtaccgta

SEQ ID NO: 9675 - DNA, 40 bp, Nocardia cerradoensis
  source 1..40: mol_type = genomic DNA
ttatgacttgtgtgactggggccaggtgatgttgcaggaa

SEQ ID NO: 9676 - protein, 503 aa, Clostridium symbiosum
MNNRIDAIYARQSVDKKDSISIESQIEFCKYELKGGNCKEYTDKGYSGKNTDRPKFQELVRDIKRGLIAKVVVYKLDRISRSILDFANMMELFQQYNVEFVSSTEKFDTSTPMGRAMLNICIVFAQLERETIQKRVTDAYYSRSQRGFKMGGKAPYGFHTEPIKMDGINTKKLVVNPDESANIRLMFEMYAQPTTSYGDITRYFAEQGILFHGKELIRPTLAQMLRNPVYVQADLDVYEFFKSQGTVIVNDAADFTGMNSCYLYQGRDVKPSKKNDLKDQMLVLAPHEGIVPSNIWLTCRKKLMNNMKIQSARKATHTWLAGKIKCGNCGYALMSINNPVGKQYLRCTKRLDNKSCAGCGKIITSELETVVYQQMVKKLASYKTLTGRKKAAKANPKIAALQVELAHVDGEIEKLVDSLTGANNVLLSYVNVKIAELDGRKQELVKQIAELTVEAISPEQVSQISGYLDTWENVSFDDKRRVVDLMITTIAATSDSLNITWKI

SEQ ID NO: 9677 - DNA, 50 bp, Clostridium symbiosum; identical to SEQ ID NO: 12
  source 1..50: mol_type = genomic DNA

SEQ ID NO: 9678 - DNA, 40 bp, Clostridium symbiosum
  source 1..40: mol_type = genomic DNA
tttttattataactgataatttccgaataataaacttctt

SEQ ID NO: 9679 - DNA, 50 bp, Clostridium symbiosum; identical to SEQ ID NO: 12
  source 1..50: mol_type = genomic DNA

SEQ ID NO: 9680 - DNA, 40 bp, Clostridium symbiosum
  source 1..40: mol_type = genomic DNA
gttttattataattgtttatttccctagaataaatttcta

SEQ ID NO: 9681 - protein, 587 aa, Anaerococcus vaginalis
MNTRVKLIKASNTGARNRNALDLELKRVAVYCRVSTDSKDQLESYKSQVDYYTNLIKNNMNWTLAGIYADEATTGTTATKRADFMRLISDCQNGDIDMIITKSISRFARNTLDTLKYVRLLKENNVGVVFEEENIDTLTMDGELLLTILSSVAQQEVENTSAHVKKGLKMKMEKGELIGFQGCLGYDYDPITKSISINEEEATIVRYIFKRYLEGNGGSVIGRELEEQGYLTPRGKAKWSDTTVLGIIKNEKYIGDILMGKTFTVDPITKRRLANFGESDKYHIENHHEPIISREDFEKAQEIRLRRAQNRNTIANKDRKREKLSRQYAFSSMLECGFCGEILSRRTWHTSSIYKKINWQCVRSTKKGKKYCPHSKGIQEAAIEKAFVESYRQLCHADSTVIDDFLKIVEEEINDNTLVKDLKKLENQLNRIISQERKLVDLHLEDSIDEEVYAKKYKKLTKQKEELLDEKKTLELTIKDENSIKERLKQFKKVLENREIIEEFNRTVFESIVDKVVVGRIDKDGTVHPYDLTLYFKTGIEDSQNSNNFKDKRKNAKDNDSDKLCSHKNDEDKKLCSQAKDNECGDC

SEQ ID NO: 9682 - DNA, 50 bp, Anaerococcus vaginalis
  source 1..50: mol_type = genomic DNA
tcccaagcaaaagacaatgaatgtggagactatagcgttgatacaaaaga

SEQ ID NO: 9683 - DNA, 40 bp, Anaerococcus vaginalis
  source 1..40: mol_type = genomic DNA
tccctaggtcaaggcatgtggagactgtagtattgatgtc

SEQ ID NO: 9684 - DNA, 50 bp, Anaerococcus vaginalis
  source 1..50: mol_type = genomic DNA
tcccaagcaaaagacaatgaatgttcagactatagcgttgatacaaaaga

SEQ ID NO: 9685 - DNA, 40 bp, Anaerococcus vaginalis
  source 1..40: mol_type = genomic DNA
tacctgggactaggcatgttcaaactgtagccttcatgtt

SEQ ID NO: 9686 - protein, 484 aa, Bacillus paranthracis
MYVRVSTDKDEQVASIQNQIDICRYWIEKNGFEWDEDAVYKDEAVSGTEWFKRQAIQLILAKARKRELDTVIFKSIHRLARDLRDALEIKSILLGHGVRLVTIEEGYDSYYEGNNDMKFEMYAMFAAQYPKTMSVSISAAMNAKVRRGEYNGGRVPYGYRVVDQKYVIDDEESENVKELFDLYNQGLGYLKVALYMNDKGLRFIDGKLWRDYHIRHIINNPFYVGDYIAQKYTKVKVDGRRKQTVNPKEKWVVYKNHHPAIIERDLWDKIHSFEKKEKNRTKRRVSVDNELRGLVYCAHCGQPMKAEAVKKTQRDGVIKYVYMRCSKYRRTGGRECVKHVPLYYNQVRKLIVEKLKEKEQDLDEQISGGHKNKNKQKISKVNKEIKEWERKKEKLLDLYLDGQNISKEVFTQRDKKIDKIIREKNMELLKLNSLEEQIKEDNATKKAFDLLKNSENLYECFNTLIKRIDITQNGGLDIYYRFEE

SEQ ID NO: 9687 - DNA, 50 bp, Bacillus paranthracis
  source 1..50: mol_type = genomic DNA
agtttgtcatacttgttaatcggattaccaattaactcatataacaaact

SEQ ID NO: 9688 - DNA, 40 bp, Bacillus paranthracis
  source 1..40: mol_type = genomic DNA
agtttctttaatgtttgctttagaacttggtggacaaaag

SEQ ID NO: 9689 - DNA, 50 bp, Bacillus paranthracis
  source 1..50: mol_type = genomic DNA
agtttgtcatacttgttaatcggatcaccaattaactcatataacaaact

SEQ ID NO: 9690 - DNA, 40 bp, Bacillus paranthracis
  source 1..40: mol_type = genomic DNA
agcttatttcatctctaattctgaacttggtggacacaag

SEQ ID NO: 9691 - protein, 477 aa, Clostridioides difficile
MIAEVEAGRIKRVIVKDMSRLGRDYLQVGMYTEIMFPNMDVHFIAVNDGVDSHVGENEFTPFRNIINEWYAKDTSKKIRAVKRSKGMAGEHIGSHAPYGYMKNPDNKKEWLIDEEAAEVVREIFRLCVNGYGPTRIANILTERKILCPTYYALEHGEKPRTVLPPDKYLWSATVVSHILERMDYLGHTVNFKTHVKSYKNRKKIDNSPEQWRIFENTHEAIIDKETFEIVQKIRSGKRRPTKMGDMPMFSGLLYCADCGSKMTFHRQMAQSAEKHNFVCSNYRHNSKSCTMHYIRNVVVEQIVLENLKEVIRYVSDYEDEFVQMVMDTDMRQRNKELSQKKKRLTEIHSRIQELDKIFQRIYEDNISGKLSDERFMKLSKGYEEEQHTLQEEQTSLEKELQKEEKQSVDVKQFLSVVRKYTNLTELTPEIVHEFIDKIIVHAPDKSSGKRLQEIEIIYNHIGVFDHSKVTLWKGKAV

SEQ ID NO: 9692 - DNA, 50 bp, Clostridioides difficile; identical to SEQ ID NO: 3207
  source 1..50: mol_type = genomic DNA

SEQ ID NO: 9693 - DNA, 40 bp, Clostridioides difficile
  source 1..40: mol_type = genomic DNA
aatccttacaacctcttatttcaaaaggatagcctttgtt

SEQ ID NO: 9694 - DNA, 50 bp, Clostridioides difficile
  source 1..50: mol_type = genomic DNA
aaacatccttaccaaaccctcacataagcaaggctttgataaggatggta

SEQ ID NO: 9695 - DNA, 40 bp, Clostridioides difficile
  source 1..40: mol_type = genomic DNA
tatccttacaaccacttaataaaagaggtcagccttggat

SEQ ID NO: 9696 - protein, 612 aa, Streptococcus agalactiae; identical to SEQ ID NO: 471

SEQ ID NO: 9697 - DNA, 50 bp, Streptococcus agalactiae
  source 1..50: mol_type = genomic DNA
agaaagtccttgacaagttgttacaggagtaatagaattaaggagaacac

SEQ ID NO: 9698 - DNA, 40 bp, Streptococcus agalactiae
  source 1..40: mol_type = genomic DNA
agaaatataaactggcagcaggaaaaactgccaagtcaat

SEQ ID NO: 9699 - DNA, 50 bp, Streptococcus agalactiae
  source 1..50: mol_type = genomic DNA
agaaagtccttgacaagttgttactagagtaatagaattaaggagaacac

SEQ ID NO: 9700 - DNA, 40 bp, Streptococcus agalactiae
  source 1..40: mol_type = genomic DNA
agaaaaataaactgacagctagaaaaatactccactgaat

SEQ ID NO: 9701 - protein, 612 aa, Streptococcus agalactiae
MRNFEKITALYERLSRDDELQGESNSIINQKKILEEYASKNNLSNIIHFTDDGISGTQFDRPGFMAMMNGVNQGNIGCIIVKDMSRLGRDYLKVGQCMEILRQKGVRLIAINDNVDSFYREDDFTPFRNIMNEWYARDTSRKIQSTFRSKGESGKHTASTPPYGYIKDEKDKNKWIVDEKAAEIVRRIFNLTMQGNGPYRIAKILESEKVDIPAYHQQKLGYGLYQSKNFEHPYRWCSSTIASILKKQEYLGHTVNFKTRKHFKDKKSKYVSEDNWIIFENTHEPIIDQETFDNVQRIRGNVKRYPDGWGEYHPLTGLMHCADCGSKMYVHRTSNYKNIPYYTCSAYTKTPCGTLCPSAHRIKAEAVLNLIRETLKDIKKYLNEDNEAFIRSIQNEMEEKEKIEIEKKRTRLIDSKGRLQELERLMCRIYEDMILNKIPNSRYEILNNQYETEQITLSKEIKDLEQQVSRYEKETDRAKKFISLISRYENFDELTTTMINEFVEKIVVHERDRKGSQTSKQKIEIYFNFIGNYELPQAELSDEEKQKLEEEERKIKKRKDKLHQNYLKRKASGKQKEYEDKYKARREQKKQEKIKVLKRVGIPVSEYIKTNI

SEQ ID NO: 9702 - DNA, 50 bp, Streptococcus agalactiae; identical to SEQ ID NO: 9697
  source 1..50: mol_type = genomic DNA

SEQ ID NO: 9703 - DNA, 40 bp, Streptococcus agalactiae; identical to SEQ ID NO: 9698
  source 1..40: mol_type = genomic DNA

SEQ ID NO: 9704 - DNA, 50 bp, Streptococcus agalactiae; identical to SEQ ID NO: 9699
  source 1..50: mol_type = genomic DNA

SEQ ID NO: 9705 - DNA, 40 bp, Streptococcus agalactiae; identical to SEQ ID NO: 9700
  source 1..40: mol_type = genomic DNA

SEQ ID NO: 9706 - protein, 538 aa, Pseudomonas brenneri
MKRQATKQAISYVRFSSERQRGGSSVERQEAMIAEWLAANPDYSNTDLKFSDLAKSGFHGEHVKEGGGFGKLLLAVEAGVIKAGDVVLVEAIDRTGRLQALDMLTQVIAPILQAGVSIITLDDNTTYTKESVGGAQIFLLVAKIQAAHGYSQALSERVAASYKLRREQAKKSGVTPKRMTPVWLNSDGSVRDDVAPWIKTAFELYVSGVGKAAVAKRMRESGVERLAKASGPGVGGWLRNKSVIGKWETQPDTPEHQIIDDVYPSIIEPSLFYKAQLHAEKMKTQRPKKTAKHFLVGLVRCGECGKSYVMQNKDGAPHTMRCITRAQKLGCDNSHSVPKPVLDKIYSDTSVKAALEAIAQQQMGVNDKEIVTREAELQELSRRVTSLLQTVDAVGFMPELATKLKEAQKAREGAENALVILRSTVVAPPAQGWNEMGKLWTLEADDSQRLAAMLRTVGYSITVNANGQITSSHSNAMYRYDGVDRRKNRYKLIAGERLILVSKGDEAGYPYHEPFQSDEPADLVWDEADYADLHQQYQ

SEQ ID NO: 9707 - DNA, 50 bp, Pseudomonas brenneri
  source 1..50: mol_type = genomic DNA
ttgtgtcatatatgaaaaggttgcgagcagctatttcgtatgtgacactt

SEQ ID NO: 9708 - DNA, 40 bp, Pseudomonas brenneri
  source 1..40: mol_type = genomic DNA
tcgagtgattaaaggttgggaccagggcttgatgggcatg

SEQ ID NO: 9709 - DNA, 50 bp, Pseudomonas brenneri; identical to SEQ ID NO: 9707
  source 1..50: mol_type = genomic DNA

SEQ ID NO: 9710 - DNA, 40 bp, Pseudomonas brenneri
  source 1..40: mol_type = genomic DNA
tcaaatgattgaaggaagggaccaggacctgatgggtatt

SEQ ID NO: 9711 - protein, 570 aa, Clostridium beijerinckii
MEEKRVVIYARQSKFKENSESCINQILQCKTKIDHLNADPRDSTRYTVIQELIDDGFSGKSLDRPNMQKFIKMVERNEVDIIFAYKLDRVSRNMKDVFWLLDKLQKHKVDIISFKEKEIDTTGATGKAFFAINMVFAQLERDLASERSKDNNVELAKRGQFMGSYVKYGHTAIKEEIGQIEEGRSKTKTLLTWNKEEAEVVKNTFAMYLEGNNSFSRIAKMLNDDGIPKKQEWKQPKKNNKWIESNIANMIKDINYCENTIEAYNYFKKQGFEFLVDIEKFSGGKSLQKYDGKITILNVKPIVSASTYINAQKMRDSKRTTRNHVLPYQSDILLGSGILVCHECGKHLGNAVTTKKVKNGTKEYRYYHCYNKECGQCGKMSHIKMDELDKNVLNRLKEFFPNKELIKNILEADYNKKNRLSEEEERMKQIIKKIEGLDRLINNMNTAIANLAEQENDEDVQSLIATYQSQQIQAVKKKKELRAELETLNLEVVEEKEHLYEISELLDRVDNLGEVLDKSTEENRKRLVHFLVKNIVVRSDQDFDMNMYFYEDLPKPEQLQKCLDNDCTPQ

SEQ ID NO: 9712 - DNA, 50 bp, Clostridium beijerinckii
  source 1..50: mol_type = genomic DNA
tgtcttgataatgattgtacaccacagggagtacgatggaagcggataca

SEQ ID NO: 9713 - DNA, 40 bp, Clostridium beijerinckii
  source 1..40: mol_type = genomic DNA
aattttagaagatacaccacaaggtgttagatggaaaaag

SEQ ID NO: 9714 - DNA, 50 bp, Clostridium beijerinckii
  source 1..50: mol_type = genomic DNA
tgtcttgataatgattgtacaccatagggagtacgatggaagcggataca

SEQ ID NO: 9715 - DNA, 40 bp, Clostridium beijerinckii
  source 1..40: mol_type = genomic DNA
aaatgtagtagacacaccataaagtatttgataaaaaaag

SEQ ID NO: 9716 - protein, 556 aa, Bradyrhizobium elkanii
MGKQKTAVIYARFSSDLQRDRSIDDQVTLCEQIARREGYRVIEVFSDRAKSGASMFERDGLLALMTAAKKRAFDGVISESLSRLSRDPEDTAAIFKRLRFNDITIFDQNGAVTDIHASIGGIVNSMFLKNLADNVRRHHSGRAREGKFPGALTYGYRCIPGKPGEREIDEEQAAIVRRIFAEYADGKPARQIAADLTRGGIPSPGGGKHWNHQTFVGGMMGRRGMLGNRLYVGEIVWNSNRTIRNPETGKRTQRKANPDDQIVTSVPHLRIIDQGLWDRVHALCDQRASRFGHDRRVGVRRGQYKDHLLSGMLCCGACGGNMRVYQVTAKGGGRVACAAAIQKGTCAHRKSYYLSGLEAAVLDGMKANLANPKALIEYARAYHARWAERQREISADRAAAEKQLNKLTVQIDRYVTAIGESDEPVKPMMERLNKLEAERAALAARLDATAAESNVIALHPAAIDKLASNVEVMHAALSDATRLGADPAKAARYRSAFRSLFDRFLVHPTPRRHAYEVTPIARLSVILGVDLFPKNRNLKEMLAEQGVTMPLVANET

SEQ ID NO: 9717 - DNA, 50 bp, Bradyrhizobium elkanii
  source 1..50: mol_type = genomic DNA
tatgccgcttgtggcaaatgagacaaatcgcgattgccaaaaatatcaca

SEQ ID NO: 9718 - DNA, 40 bp, Bradyrhizobium elkanii
  source 1..40: mol_type = genomic DNA
atatggcaaaatctgtgacaattcccacctgatatcaata

SEQ ID NO: 9719 - DNA, 50 bp, Bradyrhizobium elkanii; identical to SEQ ID NO: 9717
  source 1..50: mol_type = genomic DNA

SEQ ID NO: 9720 - DNA, 40 bp, Bradyrhizobium elkanii
  source 1..40: mol_type = genomic DNA
atatctaaaaatcaataataattcccatctaatatcaata

SEQ ID NO: 9721 - protein, 515 aa, Bacillus wiedmannii
MKTAIYLRKSRADLEAEARGEGETLAKHRTTLLKIAKEMNLNVLSVREEIVSGESLVKRPEMLALLEEIEDNKYDVVLCMDMDRLGRGGMKEQGIILETFKRSNTKIMTPRKTYDLNDEWDEEYSEFEAFMARKELKIITRRMQRGRIASVEAGNYLGTHAPFGYDIHRLNKRERTLIINSDEASVVRMIFDWYTNEDMGANAIRSKLNDLGYKSKLGNEWNPYSILDILKNNIYIGKVTWQKRKEIKRPDAVKRSCARQDKSDWIIADGKHEPIIPESLFEQVQEKLNSRYHVPYNTNGIKNPLAGIIKCSKCGYSMVQRYPKNRKETMDCKHRGCENKSSYTELIEKRLLEALKEWYINYKADFEKHKQDDKLKETQVIQMNEAALRKLEKELVDVQKQKSNLHDLLERGVYTVDMFLERSNVVSNRITEINSTMENLKKEIKTEIKKEKVKKDTIPQVEHVLDLYFKTDDPKKKNSLLKSVLEKAVYKKEKWQRLDDFELVLYPKLPQDGDI

SEQ ID NO: 9722 - DNA, 50 bp, Bacillus wiedmannii
  source 1..50: mol_type = genomic DNA
tgtcgtcaccttgttggtgtaattaggttgacgccaacagggtgacgctc

SEQ ID NO: 9723 - DNA, 40 bp, Bacillus wiedmannii
  source 1..40: mol_type = genomic DNA
tgttgccattaggcgcatgagatttactccattcaaccct

SEQ ID NO: 9724 - DNA, 50 bp, Bacillus wiedmannii
  source 1..50: mol_type = genomic DNA
tgtcgtcaccttgttggtgtaattatgttgacgccaacagggtgacgctc

SEQ ID NO: 9725 - DNA, 40 bp, Bacillus wiedmannii; identical to SEQ ID NO: 1615
  source 1..40: mol_type = genomic DNA

SEQ ID NO: 9726 - protein, 515 aa, Bacillus wiedmannii
MKTAIYLRKSRADLEAEARGEGETLAKHRSTLLKIAKEMNLNVLAVREEIVSGESLVKRPEMLALLEEIEDNKYDVVLCMDMDRLGRGGMKEQGIILETFKRSNTKIMTPRKTYDLNDEWDEEYSEFEAFMARKELKIITRRMQRGRIASVEAGNYLGTHAPFGYNIHRLNKRERTLTINSEEASVIRMIFDWYANEDMGASAIRNKLNELGYKSKLGNEWNPYSILDILKNNVYIGKVTWQKRKEVKQPDAVKRSCARQDKSDWIIADGKHEPIISESLFEQVQEKLNSRYHVPYNTNGIKNPLAGIIKCSKCGYSMVQRYPKNRKETMDCKHRGCENKSSYTELIEKRLLEALKEWYINYKADFEKHKQDDKLKETQVIQMNEAALRKLEKELMDVQKQKNNLHDLLERGVYTVDMFLERSNVVSDRITEITSTMENLKKEIKTEIKKEKVKKDTIPQVEHVLDLYFKTDDPKKKNSLLKSVLEKAVYKKEKWQRLDDFELVLYPKLPQDGDI

SEQ ID NO: 9727 - DNA, 50 bp, Bacillus wiedmannii
  source 1..50: mol_type = genomic DNA
tgtcgtcaccttgttggtgtaattaggttgacgccaacatggtgacgaca

SEQ ID NO: 9728 - DNA, 40 bp, Bacillus wiedmannii; identical to SEQ ID NO: 9723
  source 1..40: mol_type = genomic DNA

SEQ ID NO: 9729 - DNA, 50 bp, Bacillus wiedmannii
  source 1..50: mol_type = genomic DNA
tgtcgtcaccttgttggtgtaattatgttgacgccaacatggtgacgaca

SEQ ID NO: 9730 - DNA, 40 bp, Bacillus wiedmannii; identical to SEQ ID NO: 1615
  source 1..40: mol_type = genomic DNA

SEQ ID NO: 9731 - protein, 515 aa, Bacillus wiedmannii
MKTAIYLRKSRADLEAEARGEGETLAKHRTTLLKIAKEMNLNVLTVREEIVSGESLVKRPEMLALLEEIEDNKYDVVLCMDMDRLGRGGMKEQGIILETFKRSNTKIMTPRKTYDLNDEWDEEYSEFEAFMARKELKIITRRMQRGRVASVEAGNYLGTHAPFGYDIHRLNKRERTLTINSEEASVVRMIFDWYANEDMGANAIRSKLNDLGYKSKLGNEWNPYSILDILKNNIYIGKVTWQKRKEVKRPDAVKRSCARQDKSDWIIADGKHEPIIPESLFEQVQDKLNSRYHVPYNTNGIKNPLAGIIKCSKCGYSMVQRYPKNRKETMDCKHRGCENKSSYTELIEKRLLEALKEWYINYKADFEKHKQDDKLKETQVIQMNEAALRKLEKELMDVQKQKNNLHDLLERGVYTVDMFLERSNVVSDRITEITSTMENLKKEIKTEIKKEKVKKDTIPQVEHVLDLYFKTDDPKKKNSLLKSVLEKAVYKKEKWQRLDDFELVLYPKLPQDGDI

SEQ ID NO: 9732 - DNA, 50 bp, Bacillus wiedmannii; identical to SEQ ID NO: 9727
  source 1..50: mol_type = genomic DNA

SEQ ID NO: 9733 - DNA, 40 bp, Bacillus wiedmannii; identical to SEQ ID NO: 9723
  source 1..40: mol_type = genomic DNA

SEQ ID NO: 9734 - DNA, 50 bp, Bacillus wiedmannii; identical to SEQ ID NO: 9729
  source 1..50: mol_type = genomic DNA

SEQ ID NO: 9735 - DNA, 40 bp, Bacillus wiedmannii; identical to SEQ ID NO: 1615
  source 1..40: mol_type = genomic DNA

SEQ ID NO: 9736 - protein, 515 aa, Bacillus wiedmannii
MKTAIYLRKSRADLEAEARGEGETLAKHRTTLLKIAKEMNLNVLTVREEIVSGESLVKRPEMLALLEEIEDNKYDVVLCMDMDRLGRGGMKEQGIILETFKRSNTKIMTPRKTYDLNDEWDEEYSEFEAFMARKELKIITRRMQRGRVASVEAGNYLGTHAPFGYDIHRLNKRERTLTINSEEASVVRMIFDWYANEDMGANAIRSKLNDLGYKSKLGNEWNPYSILDILKNNIYIGKVTWQKRKEVKRPDAVKRSCARQDKSDWIIADGKHEPIIPESLFEQVQEKLNSRYHVPYNTNGIKNPLAGIIKCSKCGYSMVQRYPKNRKETMDCKHRGCENKSSYTELIEKRLLEALKEWYINYKADFEKHKQDDKLKETQVIQMNEAALRKLEKELVDVQKQKSNLHDLLERGIYTVDMFLERSNVVSDRITEITSTMENLKKEIKTEIKKEKVKKDTIPQVEHVLDLYFKTDDPKKKNSLLKSVLEKAVYKKEKWQRLDDFELVLYPKLPQDGDI

SEQ ID NO: 9737 - DNA, 50 bp, Bacillus wiedmannii
  source 1..50: mol_type = genomic DNA
tgtcgtcaccttgttggtttaattaggttgacgccaacagggtgacgctc

SEQ ID NO: 9738 - DNA, 40 bp, Bacillus wiedmannii; identical to SEQ ID NO: 9723
  source 1..40: mol_type = genomic DNA

SEQ ID NO: 9739 - DNA, 50 bp, Bacillus wiedmannii
  source 1..50: mol_type = genomic DNA
tgtcgtcaccttgttggtttaattatgttgacgccaacagggtgacgctc

SEQ ID NO: 9740 - DNA, 40 bp, Bacillus wiedmannii; identical to SEQ ID NO: 1615
  source 1..40: mol_type = genomic DNA

SEQ ID NO: 9741 - protein, 515 aa, Bacillus wiedmannii
MKTAIYLRKSRADLEAEARGEGETLAKHRTTLLKIAKEMNLNVLAVREEIVSGESLVKRPEMLALLEEIEDNKYDVVLCMDMDRLGRGGMKEQGIILETFKRSNTKIMTPRKTYDLNDEWDEEYSEFEAFMARKELKIITRRMQRGRVASVEAGNYLGTHAPFGYDIHRLNKRERTLTINSEEASVVRMIFDWYANEDMGANAIRSKLNDLGYKSKLGNEWNPYSILDILKNNVYIGKVTWQKRKEVKRPDSVKRSCARQDKSEWIIADGKHEPIIPESLFEQVQEKLNSRYHIPYNTNGIKNPLAGIIKCSKCGYSMVQRYPKNRKETMDCKHRGCENKSSYTELIEKRLLEALKEWYINYKADFEKHKQDDKLKETQVIQMNETALRKLEKELVDVQKQKSNLHDLLERGVYTVDMFLERSNVVSDRITEITSTMENLKKEIKTEIKKEKVKKDTIPQVEHVLDLYFKTDDPKKKNSLLKSVLEKAVYKKEKWQRLDDFELVLYPKLPQDGDI

SEQ ID NO: 9742 - DNA, 50 bp, Bacillus wiedmannii
  source 1..50: mol_type = genomic DNA
tgtcgtcaccttgttggtgtaattaggttgacgccaacagggtggtgacg

SEQ ID NO: 9743 - DNA, 40 bp, Bacillus wiedmannii; identical to SEQ ID NO: 9723
  source 1..40: mol_type = genomic DNA

SEQ ID NO: 9744 - DNA, 50 bp, Bacillus wiedmannii
  source 1..50: mol_type = genomic DNA
tgtcgtcaccttgttggtgtaattatgttgacgccaacagggtggtgacg

SEQ ID NO: 9745 - DNA, 40 bp, Bacillus wiedmannii; identical to SEQ ID NO: 1615
  source 1..40: mol_type = genomic DNA

SEQ ID NO: 9746 - protein, 505 aa, Streptococcus pneumoniae
MNKLAMYLRLSIEDYQKESESESIHNQREYIKGYIKEHNDLTGYEVSEYVDDGFSGTNPNRPAYQRLLDDLKKNHIQAIIVKDMSRFSRDYIEMGNYLENIFPFMGIRFISINDAYDSLKEGNNGIEMDTQFKSLLYDFYSKELSLKIRGISQELKSQGKNTNALAPFGYVKDPNDKYRILVDEKTAFIVKEAFELILQGYSCRKIARIFNEKGYITRSERKEELGIISYMRNLKTGTEIKKRMWQGATIAQMTGMELYTGDYVYNQMKETHIGGRKSERLPQEEWKRIENTHEAIISKEVFEKVQEMKRLNTGKRSMDNGNKKKYFGIFEGKLLCKECGRKLRYREDHQKTKTGISVYKKYYCEFCKLNQSSNIVKEKKLEELLLDEVKNIPIKLNKENTKFLVPEKENLLYELESINSSLQKEYEKYKKKELSKEIYLQGKQKLLLKKQKLENELEQGNNSIDANEMSNSPADGKITKEYVEAMVEEIVVSRHGSIEIELKER

SEQ ID NO: 9747 - DNA, 50 bp, Streptococcus pneumoniae
  source 1..50: mol_type = genomic DNA
tatatcatatacttgacattagagggggataatgctataatgatgacagt

SEQ ID NO: 9748 - DNA, 40 bp, Streptococcus pneumoniae
  source 1..40: mol_type = genomic DNA
gacaggtggttctggtggtggtaaaaccagtgtttcaaga

SEQ ID NO: 9749 - DNA, 50 bp, Streptococcus pneumoniae
  source 1..50: mol_type = genomic DNA
tatatcatatacttgacattagagctggataatgctataatgatgacagt

SEQ ID NO: 9750 - DNA, 40 bp, Streptococcus pneumoniae
  source 1..40: mol_type = genomic DNA
gagaggtctttctggtgttctgtaaatcagtgtttccaaa

SEQ ID NO: 9751 - protein, 532 aa, Ruminococcus gnavus
MPAKQYCLYLRKSRADMEAEARGEGETLARHEKLLLDLAKKGRYNVTKIYREIVSGETIAARPVVQQLLQEVEDGLWEGVLVVEVERLARGDTIDQGVMSQAFKYSGTKIITPMKIYNPADEFDEEYFEFGLFMSRREYKTINRRLVRGRLASAREGKWVSGVAPYGYERVRIKNDKGWTLRPVEEEADIVRFIFRLYTSGEEGENGAVKQFGTYSLALRLDKMGIAPPGSASCWNDRTIQAMLQNPVYIGKVRWNVNKSKKRIINNTVEVEYYKSPAEDVILVDGLHPAIVDEEIFYKAQELIGRSGPPPVPKNDVVKNPLAGVLVCGKCGHSIAMRPNQRCGMLLCPNRACNNVGSKYDIVEERLLQALSQWLSDYRLEWSDKPPAEEQALIDLKHKSLRRADTELETLRRQLDRTHDLLEQGVYDTETFLSRSRSLTERIAAAEADIESLSAEVLEDEKRAASRLNIIPKVEKLLEVYPALPSAQAKNELLKEVLEKVEYTKLQRSGRNGPFDNFELVLFPKLPREFGD

SEQ ID NO: 9752 - DNA, 50 bp, Ruminococcus gnavus
  source 1..50: mol_type = genomic DNA
tgttgataaccttagaagtgttatttgtaacacttctaaggttatcactt

SEQ ID NO: 9753 - DNA, 40 bp, Ruminococcus gnavus
  source 1..40: mol_type = genomic DNA
aatttacaaaactactactttatgtcattattttactgtt

SEQ ID NO: 9754 - DNA, 50 bp, Ruminococcus gnavus; identical to SEQ ID NO: 9752
  source 1..50: mol_type = genomic DNA

SEQ ID NO: 9755 - DNA, 40 bp, Ruminococcus gnavus
  source 1..40: mol_type = genomic DNA
aaataacaaaacaactattttatgtcaataaaattctgtt

SEQ ID NO: 9756 - protein, 556 aa, Dorea formicigenerans
MAMMNEMEYRTIGKALAGGYRAAVYCRLSKDDDLQGESASIANQRDMLEKYCEKQGWEVVAVYQDDGFTGLNMERPDLQRMLRAIERRQINLVITKDLSRLGRNYLQTGHLIEDFFPRNGVRYIAMNDGIDTLRDNNDIAPFKNILNEMYSKDISKKVHSSYLLKAQKGQFTGCLAPFGYRKDPEDKNHLLIDEETAPIVRLIFGYALNGHGPNYIRRRLEEEKIPCPTWWNRERGLRNTRTKWEKKDPENGRYMWDFSVIKDLLMNPVYTGAIASQKKDYRFKIGTIGEKKPEDWIVVEGQHEPLIDRMSFDIVQNKLKSRQRPGQTNEISLFAGLIKCGECGKSLTIRYTNAKHPQQIYSCKTYNAFGKNHCTQHRIDYDTLYSHVLRKIRECARAALMDGEAVADRLTNTCEAEQREQREAMERSLTRDEERIEVLDKMVMRLYEDMIAGRISEQNFNTMLEKTQTEQAELKAKVSEGRKRLSDEVQLANDAKQWVEAIQEYANITELDAATLNRLIKEIVVHERIDEDKTRHISIEIHFNLKPIPEVEQVTA

SEQ ID NO: 9757 - DNA, 50 bp, Dorea formicigenerans
  source 1..50: mol_type = genomic DNA
ttttacacctaattggggataaaacagttcatggctaattaaagggagca

SEQ ID NO: 9758 - DNA, 40 bp, Dorea formicigenerans
  source 1..40: mol_type = genomic DNA
aaagtcccaggggatcaagcagctgatggcaggaggcggt

SEQ ID NO: 9759 - DNA, 50 bp, Dorea formicigenerans
  source 1..50: mol_type = genomic DNA
ttttacacctaattggggataaaagagttcatggctaattaaagggagca

SEQ ID NO: 9760 - DNA, 40 bp, Dorea formicigenerans
  source 1..40: mol_type = genomic DNA
aaaattccaggggatataggagcttatgtcaggaaccgga

SEQ ID NO: 9761 - protein, 566 aa, Clostridium septicum
MKKIGIYSRKSKFTGKGDSIENQIEMCKEYTLKNLGNDVEFIIYEDEGFSGGTINRPEFKRLIKDIKDKKIDVLVCYRLDRISRNVSDFSSTLEILQSNNCSFISIREQFDTTSPMGRAMIYIASVFAQLERETIAERIKDNMIELAKNGRWTGGKVPLGFESKKIKFKDADGNTREKPQLVINPEEMEFVKFLYNKYLELGSLHKLEVFITENQIKSKNNIMYEKSSLKLILQNPVYVKANNDVINYLKENDWTVYGEADEIHSLLTYNKTEQVKKDGKYTKANKSKNDRFASVSSIEGFLEPELWLNVQKQFDKNRNKFPRLGKTHNALLVGKLKCGECKENMLIQHGKTSKVTGEKLFYYVCSLKRKSHKKLCNNKNAKAAEVESLVLLSLRRLGLEKKSFLDSLKNKYNTQNTNNIKIERISLEKTLLSKKNQIDTLVDKLSLADGIEEILLNKIKELKKECEDLNIKLNDLDVKVENLKVEKLNLELIEEALNMCINIQDLSREEQKKLIDILIDKIYWYGDGGIEIKFVGTDDSSKSQNFSLSEYELQHVDKLQFCSQSM

SEQ ID NO: 9762 - DNA, 50 bp, Clostridium septicum
  source 1..50: mol_type = genomic DNA
agttgcagttttgttcacagagcatgtgcagtataaacaaaacaacaaca

SEQ ID NO: 9763 - DNA, 40 bp, Clostridium septicum
  source 1..40: mol_type = genomic DNA
agttgtcataagctttgcatgacctgtatctagaagaatt

SEQ ID NO: 9764 - DNA, 50 bp, Clostridium septicum
  source 1..50: mol_type = genomic DNA
agttgcagttttgttcacagagcaactgcagtataaacaaaacaacaaca

SEQ ID NO: 9765 - DNA, 40 bp, Clostridium septicum
  source 1..40: mol_type = genomic DNA
agctgttctaagctttaaaacacaagtatctggaagtatt

SEQ ID NO: 9766 - protein, 638 aa, Enterobacter kobei; identical to SEQ ID NO: 9256

SEQ ID NO: 9767 - DNA, 50 bp, Enterobacter kobei; identical to SEQ ID NO: 9257
  source 1..50: mol_type = genomic DNA

SEQ ID NO: 9768 - DNA, 40 bp, Enterobacter kobei
  source 1..40: mol_type = genomic DNA
acagcgggtattggcgggcttgccctccggcattccgggt

SEQ ID NO: 9769 - DNA, 50 bp, Enterobacter kobei
  source 1..50: mol_type = genomic DNA
actgcgaataattgactattaggcaagcctaacatataattattcactat

SEQ ID NO: 9770 - DNA, 40 bp, Enterobacter kobei
  source 1..40: mol_type = genomic DNA
agagcgcaaattggctgtcaagccctacggcatttctggt

SEQ ID NO: 9771 - protein, 638 aa, Enterobacter kobei
MKPKLYSYVRFSSVKQREGNSLERQQDTALKIAARYNLELDTTAFHDLGMSAFKGKNAHEGKLSEFIKQIGAKVPVGSWLVVENLDRISRDDAWSALDIFKNILSRGIVVVTGMDEKVYKYADVKNNPTDLIISLLMFTRAHDESLTKKNRVEAQARSLIRHNLTRESGTPAKAIESVGQNVWWVDTKSGYVTPHPLYFTAAQKIIELKQNGETLLGIQRYLNEHYPAPKKRVYKDQTGQALTPKTEQWGKHLIRTFLNPTVHGQKTFTLDKRDESGVIIYDSESDEPLKETFIIPDYYPALMSEVDYLTLSKLDRHRAITRNSSKYPAGNPEPEIPLLSGIGILFCGKCGSFMFKSGSSENKYRYICGSKIVQGKPCGKKGFTSYQLEHTVLQLIADHVWNNHQEDKTAWYESEIEKASEAVKKLLKLATLTDDLEELADQINANKQKKITLEREYQQYKISRSEIQTTGWDQFRNFDVHDTKNPDRKRIRLKIKQAIKRIDCYDIDGRYGHFEVTFADETKQRIVIKFNRNRSPGVSYVEAQTVNDHDLLKMQGLVLHSFIDELISPEKFAQHIKDKHEVSILNPTFITKLEDGVNQNEGNGLAIKVASTTSKSYATVNGIKYEINSLEDLEKLLQ

SEQ ID NO: 9772 - DNA, 50 bp, Enterobacter kobei
  source 1..50: mol_type = genomic DNA
actgtgaataattgactattgggcttgcctaacatataattattcactgt

SEQ ID NO: 9773 - DNA, 40 bp, Enterobacter kobei; identical to SEQ ID NO: 9768
  source 1..40: mol_type = genomic DNA

SEQ ID NO: 9774 - DNA, 50 bp, Enterobacter kobei
  source 1..50: mol_type = genomic DNA
actgtgaataattgactattgggcaagcctaacatataattattcactgt

SEQ ID NO: 9775 - DNA, 40 bp, Enterobacter kobei; identical to SEQ ID NO: 9770
  source 1..40: mol_type = genomic DNA

SEQ ID NO: 9776 - protein, 638 aa, Enterobacter cloacae complex sp
MKPKLYSYVRFSSAKQREGNSLERQQDTALRIASRYDLELDTTAFHDLGMSAFKGKNAHEGKLSEFIKQIGIKVPVGSWLVVENLDRISRDDAWSALDIFKSILSKGIVIVTGMDEKVYKYADVKNNPTDLIISLLMFTRAHDESLTKKNRVESQARSLIRHNLTRKSGTPAKSIESVGQNVWWVDTKSGYVTPHPMYFSAAQKIIELKQSGETLLGIQRYLNEHYPAPKKRIYKDQTGQALTPKTEQWGKHLIRTFLNPTVHGQKVFTLDKRDESGAIMCDPDTDAPLKETLTIPDYYPALMSEIDYLTLSKLDRHRAVTRSSSKYPEGNPEPEIPLLSGIGILFCGKCGSFMFKSGSSKNKYRYICGSKIVQGKPCGKKGFTSYQLEHTVLQLISDHVWNNHQEDKTAWYESEIEKASEAVNTLYKLATLTDGLEELADQIKANKQKKVTLEREFQQYKISRSEIQTTGWEQFRHFDVHDTKNPNRKRIRLKVKQAIKRIDCYDIDERHDHFEVTFADETKQRIVIKFNRNRSPGVSYVEAQTVNAHDLLKMQGLVLHSFIDELIEPEKFAQHIKDKQEVSILNPTFITELEDGVGKAEGDGMAIMVDGNKNKSYATVNGIKYEINSLEDLEKLSR

SEQ ID NO: 9777 - DNA, 50 bp, Enterobacter cloacae complex sp
  source 1..50: mol_type = genomic DNA
actgagaataattgactgttaggcttgcctagcatacaattattcactgt

SEQ ID NO: 9778 - DNA, 40 bp, Enterobacter cloacae complex sp; identical to SEQ ID NO: 9768
  source 1..40: mol_type = genomic DNA

SEQ ID NO: 9779 - DNA, 50 bp, Enterobacter cloacae complex sp
  source 1..50: mol_type = genomic DNA
actgagaataattgactgttaggcaagcctagcatacaattattcactgt

SEQ ID NO: 9780 - DNA, 40 bp, Enterobacter cloacae complex sp; identical to SEQ ID NO: 9770
  source 1..40: mol_type = genomic DNA

SEQ ID NO: 9781 - protein, 517 aa, Bacillus cereus
MKTAIYLRKSRADMEAEQRGEGETLAKHRTALLKVAKEKSLNIIAVHEEIVSGESLVHRPEMLKLLQDVEDKKYDAVLCMDMDRLGRGGMKEQGIILETFKRSNTKIVTPRKIYDLNDEWDEEYSEFEAFMARKELKIITRRMQRGRIASVESGNYLGTTPPYGYLIKELKDGRTLEPHPDQSKIVKLIFEWYTHDDPEIRIGASMIANKINALGHKTATGKTWGNWTVLGIIKNPVYSGKVTWKKKEIKKSITPGKVKDTRTRDESEWIIVDGKHDAIISEELFEKAQSILKGRYHVPYQLTNGVRSALAGIIKCAKCGASMVYRPYTTQKPALKCYNQTRCHNKSSNYELVERRILEGIAEWLEVYKANFEMNSPQEETSEMNQINVYRQMLKNLEKELAETEKQKENLFDFLERKIYTEDVFLSRSKTLAVKTEKLQQDIDTIKESIDNELQREQAQDNIIPQVERVLDLYDKTDDPKKKNSLLKSVLEKAVYNKEKHQYKDDFSLTLYPKLPK

SEQ ID NO: 9782 - DNA, 50 bp, Bacillus cereus
  source 1..50: mol_type = genomic DNA
acaggataaagtctagtcggcatctcattccccactagactttatcctgt

SEQ ID NO: 9783 - DNA, 40 bp, Bacillus cereus
  source 1..40: mol_type = genomic DNA
tatatcaataagcgatatttcattcccctctttatcttgc

SEQ ID NO: 9784 - DNA, 50 bp, Bacillus cereus
  source 1..50: mol_type = genomic DNA
acaggataaagtctagtcggcatcttattccccactagactttatcctgt

SEQ ID NO: 9785 - DNA, 40 bp, Bacillus cereus
  source 1..40: mol_type = genomic DNA
tatgtaaaaaaggaatattttattctcctcattttattgc

SEQ ID NO: 9786 - protein, 503 aa, Blautia obeum; identical to SEQ ID NO: 341

SEQ ID NO: 9787 - DNA, 50 bp, Blautia obeum; identical to SEQ ID NO: 12
  source 1..50: mol_type = genomic DNA

SEQ ID NO: 9788 - DNA, 40 bp, Blautia obeum
  source 1..40: mol_type = genomic DNA
ttgtgctttctatctttcattagtgctatacaaatattta

SEQ ID NO: 9789 - DNA, 50 bp, Blautia obeum; identical to SEQ ID NO: 284
  source 1..50: mol_type = genomic DNA

SEQ ID NO: 9790 - DNA, 40 bp, Blautia obeum
  source 1..40: mol_type = genomic DNA
ttttcctatctatatatctctagtgctaaaaaaatactta

SEQ ID NO: 9791 - protein, 548 aa, Streptococcus pneumoniae
MSKEKIKVYLYTRVSTSIQIEGYSLEAQKSRMKAFAIYNDYEIVGEYEDAGKSGKSIEGRIQFNRMMEDIKSGKDGVSFVLVFKLSRFARNAADVLSTLQIMQDYGVNLICVEDGIDSSKDAGKLMISVLSAVAEIERENIRIQTMEGRIQKAREGKWNGGFAPYGYKLEDGKLFINEEEAVAIRTIFDQYVNTTIGANGISKYLENHGIRKIPRQNGKNPLFDAGLIRKILKNPVYNGKIAFGRRTLEKVHGTRNEYKQVEQDEYLISEGIHEAIVSDEVWQAAQVKLKSQAKKYEHVNKGKDTRTHLLSGIVKCPICGVGMFGNKCIKKKKDGTKYKDFYYYGYKHRQMIRGHKCTFSKQIREELLDDAVAEVIVKIVSNPKFASMMQEKINMKVDTSEIEKEIDNYQKELRKSHSTKFKLIEEIDNLDVEDKHYKRRKQDLDDRLYRMYDKIDELESSLIDAKAKKQTIEAEKLTGDNIYKVLIYFDKLYKVMNDVERRQLISALISEIQVYEEKQSNGQWLKSITFKLPIIEENLNIDLDNDEQ

SEQ ID NO: 9792 - DNA, 50 bp, Streptococcus pneumoniae
  source 1..50: mol_type = genomic DNA
catagatttggacaatgatgaacaagtcgagacggtagcacttttgtcca

SEQ ID NO: 9793 - DNA, 40 bp, Streptococcus pneumoniae
  source 1..40: mol_type = genomic DNA
tatttcctcaaacgcatcacgttgaatgtgtaagtttatt

SEQ ID NO: 9794 - DNA, 50 bp, Streptococcus pneumoniae
  source 1..50: mol_type = genomic DNA
catagatttggacaatgatgaacaattcgagacggtagcacttttgtcca

SEQ ID NO: 9795 - DNA, 40 bp, Streptococcus pneumoniae
  source 1..40: mol_type = genomic DNA
tatgtgctaaaatgcattaattttaatgtgtttctttatt

SEQ ID NO: 9796 - protein, 505 aa, Streptococcus pneumoniae
MSKEKIKVYLYTRVSTSIQIEGYSLEAQKSRMKAFAIYNDYEIVGEYEDAGKSGKSGKSIEGRIQFNRMMEDIKSGKDGVSFVLVFKLSRFARNAADVLSTLQIMQDYGVNLICVEDGIDSSKDAGKLMISVLSAVAEIERENIRIQTMEGRIQKAREGKWNGGFAPYGYKLEDGKLFINEEEAVAIRTIFDQYVNTTIGANGISKYLENHGIRKIPRQNGKNPLFDAGLIRKILKNPVYNGKIAFGRRTLEKVHGTRNEYKQVEQDEYLISEGIHEAIVSDEVWQAAQVKLKSQAKKYEHVNKGKDTRTHLLSGIVKCPICGVGMFGNKCIKKKKDGTKYKDFYYYGCNHRQMIRGHKCTFSKQIRKELRKSHSTKFKLIEEIDNLDVEDKHYKRRKQDLDDRLYRMYDKIDELESSLIDAKAKKQTIEAEKLTGDNIYKVLIYFDKLYKVMNDVERRQLISALISEIQVYEEKQSNGQWLKSITFKLPIIEENLNIGLDNDEQ

SEQ ID NO: 9797 - DNA, 50 bp, Streptococcus pneumoniae
  source 1..50: mol_type = genomic DNA
cataggtttggacaatgatgaacaagtcgagacggtagcacttttgtcca

SEQ ID NO: 9798 - DNA, 40 bp, Streptococcus pneumoniae; identical to SEQ ID NO: 9793
  source 1..40: mol_type = genomic DNA

SEQ ID NO: 9799 - DNA, 50 bp, Streptococcus pneumoniae
  source 1..50: mol_type = genomic DNA
cataggtttggacaatgatgaacaattcgagacggtagcacttttgtcca

SEQ ID NO: 9800 - DNA, 40 bp, Streptococcus pneumoniae; identical to SEQ ID NO: 9795
  source 1..40: mol_type = genomic DNA

SEQ ID NO: 9801 - protein, 583 aa, Enterococcus faecalis
MNTKVKLIKASNTGARNRNALDIDLKRVAAYCRVSTDSKDQLESYKSQVDYYTNLIKNNKNWTLAGIYADEATTGTTATKRANFMRLISDCQNGDIDMIITKSISRFARNTLDTLKYVRLLKENNVGVVFEEENIDTLTMDGELLLTILSSVAQQEVENTSAHVKKGLKMKMEKGELIGFQGCLGYDYDPITKSISINEEEAKIVRYIFKRYLEGNGGSVIGRELEEQGYLTPRGKTKWSDTTVLGVIKNEKYIGDILMGKTFTVDPITKRRLANFGESDKYHIENHHEPIISKEDFEKAQEIRLRRAQNRNTIANKDRKREKLSRQYAFSSMLECGFCGEILSRRTWHTSSIYKKINWQCVRSTKKGKKYCPHSKGIQEAAIEKAFVESYRQLCHADSTVIDDFLKIVEEEINDNTLVKDLKKIENQLNRIISQERKLVDLHLEDSIDEEVYAKKYKKLTKQKEELLDEKKTLELTIKDENSIKERLKQFKNILENREIIEEFNRTVFESIVEKVVVGRIDKDGTVHPYDLTFYFKTGVKDSQDSNNFKDKRKNAKDNDINKLCSHKNDEDNKLCSQAKDNA

SEQ ID NO: 9802 - DNA, 50 bp, Enterococcus faecalis
  source 1..50: mol_type = genomic DNA
tatgttcccaagcaaaagacaacgcatgtcgaagctatagcgttgataca

SEQ ID NO: 9803 - DNA, 40 bp, Enterococcus faecalis
  source 1..40: mol_type = genomic DNA
taatttcccacaaacgacccacattgaatctgtcacgtta

SEQ ID NO: 9804 - DNA, 50 bp, Enterococcus faecalis
  source 1..50: mol_type = genomic DNA
tatgttcccaagcaaaagacaacgactgtcgaagctatagcgttgataca

SEQ ID NO: 9805 - DNA, 40 bp, Enterococcus faecalis
  source 1..40: mol_type = genomic DNA
taaatgccaagaaaagaccaccaagtaatctgtcacttta

SEQ ID NO: 9806 - protein, 587 aa, Enterococcus faecalis
MKKEVKVIKGDTTLKRTASGCVERSIKRVAAYCRVSTDTEDQINSYNSQVEHYTEFIQKNNEWTLAGIYADEAITGTQVDRRIDFQRLINDCMNGDIDMIITKSISRFARNTLDTLKYVRKLKEFNVAVFFEEENINTLTMDGELLLTILSSVAQQEVENISANVKKGLRMKMERGEMVGFQGCLGYDYDPETKSISINEKEAEIVRYIFRRYIEGVGGMVISRELEEQGYLSPRGNKRWTETTVLGIIKNEKYKGDLMMGKTYTVDPISKRRLDNFGEQDKFYIENHHEPIISEEDFEKAQGIRLRRSKNRNTVANNGGKREKYSRKYAFSSMLECGFCGHNLSRRNWHSSSEYTKVIWQCVNATKNGKKYCPHSKGIEEEAIEKAFMESYRQVCHNNVEITNEFLKTVEEELKDNSLSKDLKKISNQLDKILKKEKDLVELRLNESISMDIYQDKYNEIAISKEKLLAEKRTLEVTLTDEKALKKRLEGFKKLLESNKYLEEFDRAVFESIVDKIIIGGTNDEGEIDPAMITIIYKTGKKDSQDGRLFKSRRKNAKEVNEETENKLYPQSSDEVNNLCSYPMDNT

SEQ ID NO: 9807 - DNA, 50 bp, Enterococcus faecalis
  source 1..50: mol_type = genomic DNA
tgtgttcctatcctatggacaacacatgtggagtgcatagcgttgataca

SEQ ID NO: 9808 - DNA, 40 bp, Enterococcus faecalis; identical to SEQ ID NO: 9803
  source 1..40: mol_type = genomic DNA

SEQ ID NO: 9809 - DNA, 50 bp, Enterococcus faecalis
  source 1..50: mol_type = genomic DNA
tgtgttcctatcctatggacaacaactgtggagtgcatagcgttgataca

SEQ ID NO: 9810 - DNA, 40 bp, Enterococcus faecalis; identical to SEQ ID NO: 9805
  source 1..40: mol_type = genomic DNA

SEQ ID NO: 9811 - protein, 607 aa, Enterococcus faecalis
MFCKCGIIELHRKIQKGGGAVKKDVKVIKGDTTLKRTASGCVERSIKRVAAYCRVSTDTEDQINSYNSQVEHYTDFIKQNNEWTLAGIYADEAITGTQVDRRIDFKRLINDCMNGDIDMVITKSISRFARNTLDTLKYVRKLKEYNVAVFFEEENINTLTMDGELLLTILSSVAQQEVENISANVKKGLRMKMERGEMVGFQGCLGYDYDPETKSISINEKEAEIVRYIFRRYLEGVGGMVISRELEEQGYLSPRGYKKWTETTVLGIIKNEKYKGDLLMGKTFTVDPISKRRLDNFGEQDKFYIENHHEPIISEEDFEKAQGIRLRRAKNRNTVANNGGKREKYSRKYAFSSMLECGFCGHMLSRRNWHSSSEYKKVIWQCVNATKNGKKYCPHSKGIEEEAVEKAFMESYRQVCHNNVEITNEFLKTVEEELKDNSLAKDLKKISNQLDKILKKEKDLVELRLNESISMDIYQEKYNEISISKEKLLEEKRALEITLTDEKALKKRLEGFKKLLESNKYLEEFDRTVFESIVDKIIIGGTNDDGEIDPAMITIIYKTGKKDSQDGRLFKSRRKNAKAAEENDSNKLYPQSGNEVNKLCSYPIDNT

SEQ ID NO: 9812 - DNA, 50 bp, Enterococcus faecalis
  source 1..50: mol_type = genomic DNA
tgtgttcctatccaatagacaacacatgtggagtgcatagcgttgataca

SEQ ID NO: 9813 - DNA, 40 bp, Enterococcus faecalis; identical to SEQ ID NO: 9803
  source 1..40: mol_type = genomic DNA

SEQ ID NO: 9814 - DNA, 50 bp, Enterococcus faecalis
  source 1..50: mol_type = genomic DNA
tgtgttcctatccaatagacaacaactgtggagtgcatagcgttgataca

SEQ ID NO: 9815 - DNA, 40 bp, Enterococcus faecalis; identical to SEQ ID NO: 9805
  source 1..40: mol_type = genomic DNA

SEQ ID NO: 9816 - protein, 583 aa, Enterococcus faecalis
MNTKVKLIKASNTGARNRNALHLDLKRVAAYCRVSTDSKDQLESYKSQVDYYTNLIKNNKNWTLAGIYADEATTGTTATKRADFMRLISDCQNGDIDMIITKSISRFARNTLDTLKYVRLLKENNVGVVFEEENIDTLTMDGELLLTILSSVAQQEVENTSAHVKKGLKMKMEKGELIGFQGCLGYDYDPTTKSISINEEEAKIVRYIFKRYLEGNGGSVIGRELEEQGYLTPRGKTKWSDTTVLGIIKNEKYIGDILMGKTFTVDPITKRRLANFGESDKYHIENHHEPIISKEDFEKAQEIRLRRAQNRNTIANKDRKREKLSRQYAFSSMLECGFCGEILSRRTWHTSSIYKKINWQCVKSTKKGKKYCPHSKGIQEAAIEKAFVESYRQLCHADSTVIDDFLKIVEEEINDNTLVKDLKKIENQLNRIISQERKLVNLHLEDSIDEELYAKKYKKLTKQKEELLDEKKTLELTIKDEDSIKERLKQFKKVLENKEIIEEFNRTVFESIVDKVVVGRIDKDGTVHPYDLTFYFKTGVKDSQDSNNFKDKRKNAKDNDINKLCSYKNDEDKKLCSQSKDNA

SEQ ID NO: 9817 - DNA, 50 bp, Enterococcus faecalis
  source 1..50: mol_type = genomic DNA
tatgttcccaatcaaaagacaacgcatgtggagactatagcgttgataca

SEQ ID NO: 9818 - DNA, 40 bp, Enterococcus faecalis; identical to SEQ ID NO: 9803
  source 1..40: mol_type = genomic DNA

SEQ ID NO: 9819 - DNA, 50 bp, Enterococcus faecalis
  source 1..50: mol_type = genomic DNA
tatgttcccaatcaaaagacaacgactgtggagactatagcgttgataca

SEQ ID NO: 9820 - DNA, 40 bp, Enterococcus faecalis; identical to SEQ ID NO: 9805
  source 1..40: mol_type = genomic DNA

SEQ ID NO: 9821 - protein, 587 aa, Enterococcus faecalis
MKKEVKVIKGDTTLKRTASGCVERSIKRVAAYCRVSTDTEDQINSYNSQVEHYTEFIQKNNEWTLAGIYADEAITGTQVDRRIDFQRLINDCMNGDIDMIITKSISRFARNTLDTLKYVRKLKEFNVAVFFEEENINTLTMDGELLLTILSSVAQQEVENISANVKKGLRMKMERGEMVGFQGCLGYDYDPETKSISINEKEAEIVRYIFRRYIEGVGGMVISRELEEQGYLSPRGNKKWTETTVLGIIKNEKYKGDLMMGKTYTVDPISKRRLDNYGEQDKFYIENHHEPIISEEDFEKAQGIRLRRSKNRNTVANNGGKREKYSRKYAFSSMLECGFCGHNLSRRNWHSSSEYTKVIWQCVNATKNGKKYCPHSKGIEEEAIEKAFMESYRQVCHNNVEITNEFLKTVEEELKDNSLAKDLKKITNQLDKVLKKEKDLVELRLNESISMDIYQDKYNEIAISKEKLLAEKRTLEVTLTDEKALKKRLEGFKKLLESNKYLEEFDRAVFESIVDKIIIGGTNDEGEIDPAMITIIYKTGKKDSQDGRLFKSRRKNAKEVDEGTDNKLYPQSSDEVNNLCSYPMDNT

SEQ ID NO: 9822 - DNA, 50 bp, Enterococcus faecalis; identical to SEQ ID NO: 9807
  source 1..50: mol_type = genomic DNA

SEQ ID NO: 9823 - DNA, 40 bp, Enterococcus faecalis; identical to SEQ ID NO: 9803
  source 1..40: mol_type = genomic DNA

SEQ ID NO: 9824 - DNA, 50 bp, Enterococcus faecalis; identical to SEQ ID NO: 9809
  source 1..50: mol_type = genomic DNA

SEQ ID NO: 9825 - DNA, 40 bp, Enterococcus faecalis; identical to SEQ ID NO: 9805
  source 1..40: mol_type = genomic DNA

SEQ ID NO: 9826 - protein, 608 aa, Enterococcus faecalis
MSWKCGIIKLHRKIQKKEAGAVKRDVKVIKGDTTLKRTASGCVERSIKRVAAYCRVSTDTEDQINSYNSQVEHYTDFIKQNNEWTLAGIYADEAITGTQVDRRIDFQRLINDCMNGDIDMVITKSISRFARNTLDTLKYVRKLKEFNVAVFFEEENINTLTMDGELLLTILSSVAQQEVENISANVKKGLRMKMERGEMVGFQGCLGYDYDPETKSISINEKEAEIVRYIFRRYIEGVGGMVISRELEEQGYLSPRGNKRWTETTVLGIIKNEKYKGDLMMGKTYTVDPISKRRLDNYGEQDKFYIENHHEPIISEEDFEKAQGIRLRRSKNRNTVANNGGKREKYSRKYAFSSMLECGFCGHNLSRRNWHSSSEYTKVIWQCVNATKNGKKYCPHSKGIEEEAIEKAFMESYRQVCHNNVEITNEFLKTVEEELKDNSLAKDLKKITNQLDKILKKEKDLVELRLNDSISMDIYQDKYNEIAISKEKLLAEKRTLEVTLTDEKALKKRLEGFKKLLESNKYLEEFDRAVFESIVDKIIIGGTNDEGEIDPAMITIIYKTGKKDSQDGRLFKSRRKNAKEVNEETDNKLYPHSSDEVNNLYSYPIDNT

SEQ ID NO: 9827 - DNA, 50 bp, Enterococcus faecalis
  source 1..50: mol_type = genomic DNA
tgtattcctatcctattgacaacacatgtggagtgcatagcgttgataca

SEQ ID NO: 9828 - DNA, 40 bp, Enterococcus faecalis; identical to SEQ ID NO: 9803
  source 1..40: mol_type = genomic DNA

SEQ ID NO: 9829 - DNA, 50 bp, Enterococcus faecalis
  source 1..50: mol_type = genomic DNA
tgtattcctatcctattgacaacaactgtggagtgcatagcgttgataca

SEQ ID NO: 9830 - DNA, 40 bp, Enterococcus faecalis; identical to SEQ ID NO: 9805
  source 1..40: mol_type = genomic DNA

SEQ ID NO: 9831 - protein, 583 aa, Enterococcus faecalis
MKKNNVEIIKADSLVRRRGDNFERESKRVAAYCRVSSDSEDQKNSYESQVRHYKDYISQRSDWELAGIYADEGISGTQVGKRQDFQRLINDCVNGEIDYIVTKAIARFARNTLDTLKYVRMLKDMQIGVYFEEENIDTLTMDGELLLTILSSVAQQEVENTSAHVKKGLKMKMQRGELIGFQGCLGYDYDVETKQLSINKKEAKIVRYIFERYLEGIGGKVIARELDELGYKSPRGLDHWNDTTVLGIIKNEKYKGDILMGKTFTVDPISKRRLSNFGEEDKYYIKDNHEPIISKEDFEKAQEIRLRRAGNKKTAANVNGKRERYSKMYAFSSMLECGFCGSILSRRSWHCRSDYRKVVWHCVTSIKKGKKFCKHSKGLEELAIEGAFMEAYRKLYHSNENLMTDLLETIESELNDNSLNKELKRITNKLRTLLKKEENLVNLRLEGKISDTIYNEKYNEISSEKEFLAEEKVNIETTLKSEIDVKKRLTEFKHLLSSQKMLTEFDRAVFESIVEKIIVGGVNSDGEIDPAMLTIIFKTGETQNKDGKQFKSKRKNAKLETDKLCPQNSDEDKKLYSQGPDNT

SEQ ID NO: 9832 - DNA, 50 bp, Enterococcus faecalis
  source 1..50: mol_type = genomic DNA
tgtattctcaaggaccagacaacacacgtggagtgcgtagtgttgctaca

SEQ ID NO: 9833 - DNA, 40 bp, Enterococcus faecalis; identical to SEQ ID NO: 9803
  source 1..40: mol_type = genomic DNA

SEQ ID NO: 9834 - DNA, 50 bp, Enterococcus faecalis
  source 1..50: mol_type = genomic DNA
tgtattctcaaggaccagacaacaaccgtggagtgcgtagtgttgctaca

SEQ ID NO: 9835 - DNA, 40 bp, Enterococcus faecalis; identical to SEQ ID NO: 9805
  source 1..40: mol_type = genomic DNA

SEQ ID NO: 9836 - protein, 518 aa, Eisenbergiella tayi
MTDGNFGISGYQGKAPVWRRGEPPIKIRKEVQRMKAVIYARYSSDNQREESIEGQLRECKEYAEKNGITILSTYIDRALSAKTDNRPEFQHMIKDSAKGLFDIVLVWKLDRFARNRYDSAHYKATLRKNGVKVVSATEAIAEDSTGILLESLLEGYAEFYSAELSEKVIRGRTENALKCKFNGGGLPIGYIVDSEQYLQIDPLTAPIVVEAFQRYDKGATIKQLVDFLNSKGIQSYRKKPLRIDCVKRLLKNRRYIGEYKYRDIVTPNGVPAIVPQDLFDRVGERLEKNKKAPARAKAKEEMYLLTTKLFCGNCGAYMCGESGTSHTGVTHHYYKCVTAKYKKACHKKTVKKDWIENLVIEHIVRLLFDDNLMNDITDSIMVLQKRENITLPLLKQQLADTTRGIENIINAIQQGIFTQSTKQRLDELEERKSQLEIEILQEEMQKPLLTREQVLFWLHRFRTLDITDPDHRQRLVDSFVNSIYLYDDKIVLMFNYKEGSKTISFADIESSSLSAGGA

SEQ ID NO: 9837 - DNA, 50 bp, Eisenbergiella tayi
  source 1..50: mol_type = genomic DNA
agttcgagtttaagtgcgggtggtgcactaaacgcacataacccgaaccc

SEQ ID NO: 9838 - DNA, 40 bp, Eisenbergiella tayi
  source 1..40: mol_type = genomic DNA
agttcaagtctcttttcctgcacttcataaaacacttcag

SEQ ID NO: 9839 - DNA, 50 bp, Eisenbergiella tayi
  source 1..50: mol_type = genomic DNA
agttcgagtttaagtgcgggtggtctactaaacgcacataacccgaaccc

SEQ ID NO: 9840 - DNA, 40 bp, Eisenbergiella tayi
  source 1..40: mol_type = genomic DNA
agctcaagtctctcttcctcttcttaaaaagccactagag

SEQ ID NO: 9841 - protein, 581 aa, Escherichia coli; identical to SEQ ID NO: 1621

SEQ ID NO: 9842 - DNA, 50 bp, Escherichia coli; identical to SEQ ID NO: 1622
  source 1..50: mol_type = genomic DNA

SEQ ID NO: 9843 - DNA, 40 bp, Escherichia coli; identical to SEQ ID NO: 9008
  source 1..40: mol_type = genomic DNA

SEQ ID NO: 9844 - DNA, 50 bp, Escherichia coli; identical to SEQ ID NO: 1624
  source 1..50: mol_type = genomic DNA

SEQ ID NO: 9845 - DNA, 40 bp, Escherichia coli; identical to SEQ ID NO: 1625
  source 1..40: mol_type = genomic DNA

SEQ ID NO: 9846 - protein, 461 aa, Mycolicibacterium fortuitum
MYLRQSRDRDGNELAVSRQREDCLTLCHGRGWTEVVEYCDNNVSATNRRKVRSQYQQMLADISAGMIQAVVVWDLDRLYRQPRELEDFIDLADAHHLALATVTGDTDLSTDNGRLFARIKGAVAKAEGERKAARWKRSNEQGAAAGKWTASYRPFGYTWDGEPLEPEATAVREAYRDVLAGKTLRRIALDWNAAGFTTPTRYKNGQVTHAGKPWTNIQVRRLLLNPRYAALRVLRGMVVGRGVWTPLVDEDTWRGLCAMLRDPARARCTTFEVAHMGAGVYLCGRCGSPLITAYDKHGARLYRCKVSPHLSRRADKLDDYVTAYVLERCARDDAAVLTAEPEGVNSEDLHTAREALVARKDELSALFTDGVLDATAVRRDAAKLTARIAEIDRQLADAVRTSPAAALLDATGEQLWRRWEQMTPALRGQAVDELATVTVLPSPRGLRRFDPDYVEITWKQG

SEQ ID NO: 9847 - DNA, 50 bp, Mycolicibacterium fortuitum
  source 1..50: mol_type = genomic DNA
aaacgtgagacctagacagtcgcgaacgcgacagacagggtggcacggtt

SEQ ID NO: 9848 - DNA, 40 bp, Mycolicibacterium fortuitum
  source 1..40: mol_type = genomic DNA
gaaggcgacgacggaggcgaaagcgacggcccatacggcc

SEQ ID NO: 9849 - DNA, 50 bp, Mycolicibacterium fortuitum; identical to SEQ ID NO: 9847
  source 1..50: mol_type = genomic DNA

SEQ ID NO: 9850 - DNA, 40 bp, Mycolicibacterium fortuitum
  source 1..40: mol_type = genomic DNA
gaaggcgaaggcgcaggcgaaggcgaaggcgcaggcggcg

SEQ ID NO: 9851 - protein, 461 aa, Mycolicibacterium fortuitum
MYLRQSRDRDGNELAVTRQREDCLKLCQDRGWSDITEYCDNNVSATSRTRARPQFQRMLADITSGLVQAVVVWDLDRLYRQPRELEDFIDLADDHRLALATVTGDTDLSTDNGRLFARIKGAVAKAEGERKAERWKRSNEQGAAAGKWVVSYRPFGYTWDGEPLEPEATAVREAYRDMLEGKSLRRIAIDWNAAGFTTPKRSKNGQVTDAGKSWTNTQVRRLLLNPRYAALRVLRGQVVGRGEWTPLVDEDTWRGLGATLRDPARARCTTFEIAHMGAGVYVCGRCGSPLITAYDKHGARLYRCKVQPHLSRRAEKLDDYVTASVLERCARNDAAVLTADPEVVNSDDLHTAREALIARKDELSALFTDGVLDAAAVRRDAAKLTAKIAEIDRRLADAVRVSPAAALLGATGEQLWKRWEQMTPALRGQVVDELVTVTVLPSPRGLRRFDPTYVEMTWKHD

SEQ ID NO: 9852 - DNA, 50 bp, Mycolicibacterium fortuitum
  source 1..50: mol_type = genomic DNA
aaccgtgagacctagacagtcgcgaaagcgactgacaaggtggcacggtt

SEQ ID NO: 9853 - DNA, 40 bp, Mycolicibacterium fortuitum; identical to SEQ ID NO: 9848
  source 1..40: mol_type = genomic DNA

SEQ ID NO: 9854 - DNA, 50 bp, Mycolicibacterium fortuitum; identical to SEQ ID NO: 9852
  source 1..50: mol_type = genomic DNA

SEQ ID NO: 9855 - DNA, 40 bp, Mycolicibacterium fortuitum; identical to SEQ ID NO: 9850
  source 1..40: mol_type = genomic DNA

SEQ ID NO: 9856 - protein, 559 aa, Lachnospiraceae bacterium MD335
MSIDKYETLNQERKIQHTKRKVAAYCRVSTDNEDQANSFESQQRYFRQYIERNPDWELYEVFADEGISGTNTKKRKEFNRMIACAKNGDFDLIVTKEISRFARNTLDSIFYTRDLKKHGVGVIFLNDNINTLDGDAELRLAIMSSIAQEESRKTSERVKWGQKRQMEQGVVFGRSMLGYDVKDGKMYINEDGAKVVRLIFHKFVNEGKGTHVIARELREEGIKPMRVKEWQNTVILRVIRNEKYCGDLVQKKTYTPDFLSHEKKVNLGQEEFVIIKDHHEPIISRELFDKANRILDEKSLSQEGKAKHSNRYPFSGKIKCGCCGSSYVARYKTRKNGSRYKAWRCLEAARHGSPHVDKAGNQVGCSGLSIRNEDATHIMYLVTSSLKYNKEKITNNLLAIIQSIIAMDTAGTDSEKLKSQIKAIEQKRTNLIDLYTSGDITRDEFSAAKAKCENEIAELQSVIGSIDKQREMIEKQQELVDEITEAMNELINGVEYEDDFYKEILDKMVVNDKDHIDVYLNLLPLKWSYTVAKSVNCPQGRPLKKAQAPEMEHFRGFST

SEQ ID NO: 9857 - DNA, 50 bp, Lachnospiraceae bacterium MD335
  source 1..50: mol_type = genomic DNA
tggaacatttcaggggcttctctacccagagaagcagcggtaatgttcca

SEQ ID NO: 9858 - DNA, 40 bp, Lachnospiraceae bacterium MD335
  source 1..40: mol_type = genomic DNA
gtgagcaagctcttcagtaccgatatctgtcaaaagacct

SEQ ID NO: 9859 - DNA, 50 bp, Lachnospiraceae bacterium MD335
  source 1..50: mol_type = genomic DNA
tggaacatttcaggggcttctctattcagagaagcagcggtaatgttcca

SEQ ID NO: 9860 - DNA, 40 bp, Lachnospiraceae bacterium MD335
  source 1..40: mol_type = genomic DNA
gtgaacaatgattttagtattggtatctgtcaaaggtcct

SEQ ID NO: 9861 - protein, 598 aa, Enterocloster clostridioformis
MNGNEKYIAIYSRKSKFTGKGDSIGNQIELCKEYIQTHYTEIPQEHILVYEDEGFSGGNFNRPDFKKMMEAARQRKFKAIIVYRLDRISRNISDFSSLIEELSRLDIAFISIREQFDTGTPMGRAMMYIASVFSQLERETIAERIRDNMHELAKTGRWLGGTTPTGYASESVQKVTIDGKAKKACKLKLIPEEAEIVRLIYSLYIEHDSLTSVEAELIKRGIKTKNNKLFTRFSIKSILQNPVYMIADVNAYDYFVKENADLNSAKDEFDGVHGMMVYNRTRQEKGKAVTYLPPDEWIAAVGLHPGIIPGKTWISVQDSLNRNKSKAYRKPRNNEALLTGLLYCTCGSRMYPKISKRKTADGKPIYTYVCKLKERSKRTLCNSKNANGNTLDMAVIEQIKLLEDDKGSFIDQLEQSRKFYTGNREAYNNQLASMQEEKAELERKIDGLVDSIAELGDSVAKNRVAKRIEQLNQKSVDLDSRIHELEGLTSQHALSNIEFDVMRQLLSVFKTSIDEMSIEQKRAAIRTLVHKVVWDGVNAHIILFGVQDDEIEYPPLSYQANEADSTEDDLEELERFGDVDYEDEIADGSKTHWGEDSK

SEQ ID NO: 9862 - DNA, 50 bp, Enterocloster clostridioformis
  source 1..50: mol_type = genomic DNA
aaactcattggggagaggatagcaaatgctatcctctcgccaatgggatt

SEQ ID NO: 9863 - DNA, 40 bp, Enterocloster clostridioformis
  source 1..40: mol_type = genomic DNA
tgtacccatttcttcttctaaagctgtaataatcactctt

SEQ ID NO: 9864 - DNA, 50 bp, Enterocloster clostridioformis
  source 1..50: mol_type = genomic DNA
aaactcattggggagaggatagcatgtgctatcctctcgccaatgggatt

SEQ ID NO: 9865 - DNA, 40 bp, Enterocloster clostridioformis
  source 1..40: mol_type = genomic DNA
tgttcccttttcttcttcttgaacttttataattctgctt

SEQ ID NO: 9866 - protein, 542 aa, Intestinimonas butyriciproducens
MAERVYCLYRVSTNKQVDHDENNQADIPMQRKACHDFAAKMGWVIVGEEQETGVSGYKVSADDRDKLQLIKKYAEQGKFDILLVFMFDRLGRKSDETPFVVEWFTKKGVRVWSVQEGEQRFESHTDRLTNYIRFWQADGESQKTSMRTKTALGQMVEEGRFRGGNAPYGYRLEKSGILNKRKHEVYMLVIDEDEARVVRMMFDLCISSGYGRWRLANFLNDHGIKNRKGQNWHDASVGGILHNPLYKGILRSGETYAGPFEALQIIAPDQFDLAQKLMLERTNERKERRTVPLNTTGQSLLSGNIFCGHCGGRLVLTTNGTTTRLADGTPVHKKRIRYVCYNKTRRRQECTGQTGYTMHILDGIVTEVLHQVFDKMQGASNDMIVGSAVQKQMAMIRSELQRARAENTKANKEYESLKAEVLKAIQGKSALPQDVLTEMLEDTRQKVLSTSERITTLTAELNDGNSKIEEMKAEFNRIVSWSKIFDESPMEVKKMICGYIIKKVSVFRDYRIKIEFNINVEQFLNGIDSIDECATYELPMAQ

SEQ ID NO: 9867 - DNA, 50 bp, Intestinimonas butyriciproducens
  source 1..50: mol_type = genomic DNA
agggtgcatacccggtggttcgggagcgcaagcaaccgggtgtgctcccc

SEQ ID NO: 9868 - DNA, 40 bp, Intestinimonas butyriciproducens
  source 1..40: mol_type = genomic DNA
ggggtatagctcagctgggagagcgcttgaatggcattca

SEQ ID NO: 9869 - DNA, 50 bp, Intestinimonas butyriciproducens; identical to SEQ ID NO: 9867
  source 1..50: mol_type = genomic DNA

SEQ ID NO: 9870 - DNA, 40 bp, Intestinimonas butyriciproducens
  source 1..40: mol_type = genomic DNA
ggggtatagctcaggtggtagagcatttgactgcagatca

SEQ ID NO: 9871 - protein, 561 aa, Flavonifractor plautii
MNKTSMIPYSVPRKSSDSISEITPDYGVDNLLVGNRVWCLYRVSTNQQVDHDEKNEADIPMQRKACHRFAKKMGWTIIHEEQEEGVSGHKVRAENRDKLQIIKEAAKQKKFDILLVFMFDRIGRIADETPFVVEWFVKNGIRVWSTKEGEQRFDSHTDKLTNYIRFWQADGESEKTSIRTSTRMGQIVEDGFYTGGSCPYGYKLVRQGRVNKRGHELYDLVINEDEAPLVRMIFEKYVEEGRGAQSIANLLNSLNVKNRSGHNWHPSSIRGMIKNITYIGILRSGESRSQVLPHLRIIDEQTFGAAQEITRQRSKHHEDTRHVPMNIKGQSLLAGNVFCGHCGARLSLTTNGKGRPRSDGTDAVRVRYVCQTKTRKHEPCGGQTGYTLHILDSMIEDIVHKIFRRVKCLSRSEILGAGYAAKMSEQKAIARRAQREYQKAENDLKGLRSEVVKAVNGESAFPLDLLSSLVKETEQKCVQLQETYQKAQAEVDKSDILMDELRATYNQFIGWSNIYDTANIQTKKMIVCQLIERVDVFRGYELKIKFSISVEQFILGLDISA

SEQ ID NO: 9872 - DNA, 50 bp, Flavonifractor plautii
  source 1..50: mol_type = genomic DNA
aggtacgcaggtgcgcgatccaggagccgtaactgcgcaagcgcgtaccc

SEQ ID NO: 9873 - DNA, 40 bp, Flavonifractor plautii; identical to SEQ ID NO: 9868
  source 1..40: mol_type = genomic DNA

SEQ ID NO: 9874 - DNA, 50 bp, Flavonifractor plautii; identical to SEQ ID NO: 9872
  source 1..50: mol_type = genomic DNA

SEQ ID NO: 9875 - DNA, 40 bp, Flavonifractor plautii; identical to SEQ ID NO: 9870
  source 1..40: mol_type = genomic DNA

SEQ ID NO: 9876 - protein, 532 aa, Intestinimonas butyriciproducens
MENRVYCLYRVSTDKQVDYDDKSQADIPMQRKACHRFAEERGWTIIHEEQEDGVSGHKVRAENRDKLQIIKEHAKQGKFDILLVFMFDRIGRIADETPFVVEWFVKNGVRVWSTQEGEQRFDSHTDKLTNYIRFWQADGESEKTSIRTKTALGQLVEGGGFKGGLAPYGYDLVKSGRFNKRKHELYDLVVNETEAAVVRIIFDKYVHEGFGAQRIATYLNNQGYRARTGKMWHHATIRGIICNLTYTGVLRSGKSRSPVLPHLQIIPPELFEAAQHIRTNRANETERTVPRNIAGQSLLSGNVYCGHCGARLTLTTSGKAYPCKEDPHRVIKRVRYICYGKTRKQTDCDGQTGYTAHILDGIIDKLVRQIFERMKAIPKSEIVNVRYREKMEERKSLLQSVRAEYSKAAAELDMLKAEVIKALRGESAFPKDLLGTMVTEAEAKCTELQGQFEAAQAACDEGEQVLRSLTAQYDDIISWADMYDTASLEAKKMIVNCLIRRVEVYRDYKLHIDFNIDFEQFSLGLDMITIAA

SEQ ID NO: 9877 - DNA, 50 bp, Intestinimonas butyriciproducens
  source 1..50: mol_type = genomic DNA
gggtaggtacacgcttgtactgggctcccggtcgaagaggttacataccc

SEQ ID NO: 9878 - DNA, 40 bp, Intestinimonas butyriciproducens
  source 1..40: mol_type = genomic DNA
tgaatgccattcaagcgctctcccagctgagctatacccc

SEQ ID NO: 9879 - DNA, 50 bp, Intestinimonas butyriciproducens; identical to SEQ ID NO: 9877
  source 1..50: mol_type = genomic DNA

SEQ ID NO: 9880 - DNA, 40 bp, Intestinimonas butyriciproducens
  source 1..40: mol_type = genomic DNA
tgatctgcagtcaaatgctctaccacctgagctatacccc

SEQ ID NO: 9881 - protein, 564 aa, Oscillibacter valericigenes
MTETSIIPSYDFDKLTGWRLNLPDYIEPGTRVLCLYRVSTGKQLYHTDDNEPDIPMQRVRCREFCERMGWTLVCELQEEGVSGHKVRAARRDKVQLIKEYTKQGKFDILLVFMFDRIGRISDETPFVVEWLIANNIRVWSALEGEQRIETHTDRLTNYIRYWQADGESQKISARTSNSMGVLTQEGCFTGGLCAYGYRYVKLGRTNRRKQEVFDLAICEEEAFVVRIIFRLAADEGYGAQRIANHLNAKGIKNRSGKNWHPASIQGMLKNILYTGILRSGESRSEVQEQLRIIDDKTFATVQEMLAARSRRQETIRSKPLNTRGRSLLAGNIFCGHCGARLCITTSGKGRRRQDGTDVVRMRYTCQTKSRTHGECDGQTGYTVEKLDAMIDSIIQGIFSRVRSLNRKDVVKACVSNDLNTKKAFLRKAQKDYEKAEKDLQRLKSEIVNALTGTSAFSPELLNSVIQEQSQRCEELRHALAEAEKDYTESDSQIEVRSQQYDDLLEWSAAYETASISAKKVIVARMIERVDVYRGYQLKLKLNISVEQFLVSLENIKAPGQTFTA

SEQ ID NO: 9882 - DNA, 50 bp, Oscillibacter valericigenes
  source 1..50: mol_type = genomic DNA
ggggcatagaaatcatgctttgggagcctgcaaaattaaaagtatacccc

SEQ ID NO: 9883 - DNA, 40 bp, Oscillibacter valericigenes
  source 1..40: mol_type = genomic DNA
ggggtatagctcagctgggagagcgcatgactggcagtca

SEQ ID NO: 9884 - DNA, 50 bp, Oscillibacter valericigenes; identical to SEQ ID NO: 9882
  source 1..50: mol_type = genomic DNA

SEQ ID NO: 9885 - DNA, 40 bp, Oscillibacter valericigenes; identical to SEQ ID NO: 9870
  source 1..40: mol_type = genomic DNA

SEQ ID NO: 9886 - protein, 564 aa, Flavonifractor plautii
MIETSIIPSYDFDKLTGWRLNLPAYIEPGTRVLCLYRVSTGKQLYHTDDNEPDIPMQRVRCREFCERMGWTLVCELQEEGISGHKVRAERRDKVQLIKGYAKQGKFDILLVFMFDRIGRISDETPFVVEWLIANNIRVWSALEGEQRIETHTDRLTNYIRYWQADGESQKISARTSNSMGVLTQEGCFTGGLCAYGYQYVKLGRTNRRKQEVFDLAICEEEAFVVRLIFRLAADEGYGAQRIANHLNAKGIKNRSGKNWHPASIQGMLKNILYTGILRSGESRSEVQEHLRIIDDKTFVTVQEMLAARSRKQEAIRSKPLNTRGKSLLAGNIFCGHCGARLCITTSGKGRRRQDGTDVVRMRYTCQTKSRTHGECDGQTGYTVEKLDAMIDSIIRGIFSRVRSLNRKDVVNACVDNDLNAKKVFLRKVQKDYEKAEKDLQRLKSEIVNALTGASAFSPELLNNVIEEQSQRCEELRAALNKAEKEYAESDSQLEVRSQQYDDLLEWSAAYETASVSAKKVIVARMIERVDVYRGYQLKLKLNISVEQFLVSLENIKTPEQSFTA

SEQ ID NO: 9887 - DNA, 50 bp, Flavonifractor plautii
  source 1..50: mol_type = genomic DNA
ggggcatagaaatcatgctttgggagcctaaccaattagaagtatgcccc

SEQ ID NO: 9888 - DNA, 40 bp, Flavonifractor plautii; identical to SEQ ID NO: 9868
  source 1..40: mol_type = genomic DNA

SEQ ID NO: 9889 - DNA, 50 bp, Flavonifractor plautii; identical to SEQ ID NO: 9887
  source 1..50: mol_type = genomic DNA

SEQ ID NO: 9890 - DNA, 40 bp, Flavonifractor plautii; identical to SEQ ID NO: 9870
  source 1..40: mol_type = genomic DNA

SEQ ID NO: 9891 - protein, 554 aa, Delftia sp HK171
MGKTSKGLVYSYLRFSDPKQSTGSSTDRQLAYAEKWASEHGLQLDSSLTLRDEGLSAYHQQHIKSGALGVFLRAVEDGRVPHGSVLIVEGLDRLSRAEPIQAQAQLAQIVNAGITVVTASDGKAYSRTRLKENPMDLVYSLLVMIRAHEESDTKSKRVKASIRRLCEGWQNGTYRGRVRQGHDPEWIKETETGWEIDPERAAAGRRAVELYTQGHGGKGIVQRLDAKGLRLYSTTQANVTTQVYRIIKMPQLAGIKPVSLDGEEYQLKGYYPAVLSADEWTELQRVAAQSGRRRVKGDLPHIITGLGITVCGYCGRPMSGQHLATKKRLPDGRIRDGYRRLLCASAAAYGGGCAVFGSTSVAPVERAIMSYCSDIVNLQALYGADRSQAPRAQVVAARQEVDQISAQLDKLTDAMLASANEGTPAVFARRALKLESELYAAQSKLQTAELDLAGAARTDITGAEAAWRALAVGVEAQEITPRLQARQLVADTFERIVVYSRGVNPDPDASARDYKIDLVLIARGGVAKLLSVDRQGILIAAEQSSSSGSGASPI

SEQ ID NO: 9892 - DNA, 50 bp, Delftia sp HK171
  source 1..50: mol_type = genomic DNA
gtatggatgcagtatcttacgggcgcccgagggagaccatacctatacgg

SEQ ID NO: 9893 - DNA, 40 bp, Delftia sp HK171
  source 1..40: mol_type = genomic DNA
tccgtgagtgcctttgggcacccaagagacacgaagccca

SEQ ID NO: 9894 - DNA, 50 bp, Delftia sp HK171
  source 1..50: mol_type = genomic DNA
gtatggatgcagtatcttacgggcctccgagggagaccatacctatacgg

SEQ ID NO: 9895 - DNA, 40 bp, Delftia sp HK171
  source 1..40: mol_type = genomic DNA
gctgtgagagacttggggcctccaagagacaaggagagca

SEQ ID NO: 9896 - protein, 476 aa, Virgibacillus pantothenticus
MKVAAYLRVSTDEQVESGHSLLEQRERLKAYAKVMGWDKPTFYIDDGYSAGSLKRPQLQKLIKDIESRKVNILMTTKLDRLSRNLLDLLQVIKFMETHDCNYVSATESFDTSTAAGRMVLHLLGVFAEFERGRTSERVKDNMTSLARNTNMALSGPCFGFDIIDKQYVLNKKEAKYGLKMVEMTEAGHGTRSIAQWLNSMNVKTKRGKQWDSTAVRRLLRTETICGTRIMNKRKKANGKTVMRPKEEWIIKENNHEGFISPERFKNLQNILDSRKINKQHENETYLLTGILKCGYCGGTMKGSSARVSRGDKKYEYYRYICSSYVKGSGCKHHAAHREDIENAVITQIESVTNSSDKELQLKVVASNENEDVVELKRALESLDKQMMRQIEAYGKGLIEEEDLERSNKYVKEQRQLLRNQLDSLEQINTPQALKEKAKTLLPDIKSLDRKKAKTTIAQLIDSLVLTDGELDIVWRI

SEQ ID NO: 9897 - DNA, 50 bp, Virgibacillus pantothenticus
  source 1..50: mol_type = genomic DNA
tttgtggtctttaagacaatcggatctccttttgcatttaaagacataac

SEQ ID NO: 9898 - DNA, 40 bp, Virgibacillus pantothenticus
  source 1..40: mol_type = genomic DNA
atataaatcagcaatcggatctccttttgcctgaatataa

SEQ ID NO: 9899 - DNA, 50 bp, Virgibacillus pantothenticus
  source 1..50: mol_type = genomic DNA
tttgtggtctttaagacaatcggaagtccttttgcatttaaagacataac

SEQ ID NO: 9900 - DNA, 40 bp, Virgibacillus pantothenticus
  source 1..40: mol_type = genomic DNA
atttaaatcaccaaacagaagtccttttacctgatgacag

SEQ ID NO: 9901 - protein, 646 aa, Escherichia coli
MLRPICYERVSSVKQVELGYGLDDQRSSIEDFLEKNTDKFTSERVFITDDGVSAFKNANISPESNLGKFLQDVRDKKFGKGDALIVLSLDRLSRRSSWTENTIQFIVASGIVIYDISTDLVLREDDNFSKILMEIILQRSHNESLMKSVRAKVAWQNKVMRAAANGEVVSNRMPFWLENVDNKYSVIEEQAALVVQCFEWYKSGFSTGEIVKRIGDPKWQMVKVSRLIRDRRLLGEHKRYNDEVISNVYPKIVDDELFIMANRMMDTVMVDKKKPAEDLLLEPEVVKQIFTLSEMGLGSGAIVKRLPEGWSTVNVLRVLRDKRVVEEKIIDNLTFDRVNEKLTKNGVANRIRKDVTIAQDDYITNLFPRILKCGCCGGNIAIHYNHVRTKYVICRTREEKKRCDAKSIQYIRIEKNILSTIMNVDFHNLINEESSNSSNVVDSLKVELLALRTEENTYQIKISERKSAGKKTSLPLMEGLTDVQDRIEETLDLISKSTNVQQLPVLNYDIDDLLDPLNVELRARVRKEIKQVVSKITYRVIDKYIVVNLQYFTDVLSHVLVIDNKRGGGNLISQIAIYVKDHITIYETPSFSLTAENEGMPQINFNNSEPLSQIDYSLLLNYVDGIESANTVAEWMRHNMKFLFTK

SEQ ID NO: 9902 - DNA, 50 bp, Escherichia coli
  source 1..50: mol_type = genomic DNA
aatgttcccattgatagatgtatgcgtcctgttgtaatctgtgggaacat

SEQ ID NO: 9903 - DNA, 40 bp, Escherichia coli
  source 1..40: mol_type = genomic DNA
gaatatattcatggtatgccgtcctttcgttttttagcac

SEQ ID NO: 9904 - DNA, 50 bp, Escherichia coli
  source 1..50: mol_type = genomic DNA
aatgttcccattgatagatgtatgagtcctgttgtaatctgtgggaacat

SEQ ID NO: 9905 - DNA, 40 bp, Escherichia coli
  source 1..40: mol_type = genomic DNA
taatctgttcctggtatacagtgctctaggtttttagcac

SEQ ID NO: 9906 - protein, 540 aa, Eisenbergiella massiliensis
MKQPYNTTIYNTALYLRLSRDDELQGESGSIQTQRMMLRQKDAEDGLTVVHENIDDGWSGTNFGGPSVQRMIDDIEDGKINCVVTKDLSRLGRNYILTGQYTEIYFPSKGVRYIAINDNVDTINGESELAPFLNILNEMHARQTSKKVKAAMHTRFANGAHYGAYAPLGYVKDPDKKGHLLIDPETRWIVEKIFDLAVHGRGAASITRILVEEKVPTPGWLNYERYGTFANIYAGAPAEKAYAWTIAQVKSILKEETYIGHSIHNKQSNISFKNKKKVRKPQEEWYRVENTHEAIISEEVFQKVQELIASRRRKRRNGTTQIFAGLIKCADCGWSLAYGENKQNKNPYGYYHCSKNGQGLRQCSMHYIRYDVLYAYVLARLQYWSMLAQKDEDKLLKRLLNASDRERNSAKKKQAAELKKAEKRKAEVDGLFAKMYEDWSAGRITEYNFNMLSEKYQNEQKELETKIRQLHKTMEAAVQTAADAEKWIALMKQYVNPVELTAELLNTLIEKITVHEAVKGEDGSREQEVEIYYRFIGKID

SEQ ID NO: 9907 - DNA, 50 bp, Eisenbergiella massiliensis; identical to SEQ ID NO: 2472
  source 1..50: mol_type = genomic DNA

SEQ ID NO: 9908 - DNA, 40 bp, Eisenbergiella massiliensis
  source 1..40: mol_type = genomic DNA
ggtgaataagtgggaaaaaggagtaacttatcctgatatt

SEQ ID NO: 9909 - DNA, 50 bp, Eisenbergiella massiliensis
  source 1..50: mol_type = genomic DNA
caatatctttaattaagggagacgtaagtttcccatagttaaagatacca

SEQ ID NO: 9910 - DNA, 40 bp, Eisenbergiella massiliensis
  source 1..40: mol_type = genomic DNA
actgaaaatttgagaaaattaagtaacttatgctgttatt

SEQ ID NO: 9911 - protein, 530 aa, Blautia obeum
MMYQMGVYCRLSKDDGENKVSESIENQMKLIREYVTKSEDLEIADIYIDDGYSGLYFANRPEFQRMMEDISKGKIQGVITKDISRLGREHIETSNYIERVFPSLGVRYIAILDGVDSVHHSNEELAQFKTLFNDMYSRDISKKIRGALTAQKKRGQFMSGFAPYGYVKDPADKHHFLVDEEAAKVVRRIFYMSLEGYSRDGIAKKLNQEGILTPSEYKRKVQGLKYANALEKAGAKGWAYPTINVILRNRVYTGAMVQHKSEKISYKVEKYQYIPEEQQYIVEGMHEAIISKDTFEQVQELMKKRTRTPGFNSEVRKVNPYAGIIVCGDCGYNFQRVTCRDGYECGTYHKKGNTVCYSHFIKKEVLDSIVKNEIQRQAELALKESDKDEILKVADRKKEVQRRCAEADQQIERLQKELAAVQKYKKKTYENYVDGVLDKEEYLSYKAEYEKQDKDIRAKIQLAEQEKDSFGEAEESYENWIEKFIKYGTLSEVTREIVTELIEKIVVNGDKSIDIVFKYQSPYPVEKQAV

SEQ ID NO: 9912 - DNA, 50 bp, Blautia obeum; identical to SEQ ID NO: 1637
  source 1..50: mol_type = genomic DNA

SEQ ID NO: 9913 - DNA, 40 bp, Blautia obeum
  source 1..40: mol_type = genomic DNA
tggaaataactatggttcccatcagggagactcattgttg

SEQ ID NO: 9914 - DNA, 50 bp, Blautia obeum; identical to SEQ ID NO: 1639
  source 1..50: mol_type = genomic DNA

SEQ ID NO: 9915 - DNA, 40 bp, Blautia obeum; identical to SEQ ID NO: 1640
  source 1..40: mol_type = genomic DNA

SEQ ID NO: 9916 - protein, 530 aa, Blautia obeum
MMYQMGVYCRLSKDDGENKVSESIENQMKLIREYVTKSEDLEIADIYIDDGYSGLYFANRPEFQRMMEDIYKGKIQGVITKDISRLGREHIETSNYIERVFPSLGVRYIAILDGVDSVHHSNEELAQFKTLFNDMYSRDISKKIRGALTAQKKRGQFMSGFAPYGYVKDPADKHHFLVDEEAAKVVRRIFYMSLEGYSRDGIAKKLNQEGILTPSEYKRKVQGLKYANALEKAGAKGWAYPTINVILRNRVYTGAMVQHKSEKISYKVEKYQYIPEEQQYIVEGMHEAIISKDTFEQVQKLMKKRTRTPGFNSEVRKVNPYAGIIVCGDCGYNFQRVTCRDGYECGTYHKKGNTVCYSHFIKKEVLDSIVKNEIQRQAELALKESDKDEILKAADRKKEVQRRCAEANQKIERLQKELVAVQKYKKKTYENYVDGVLDKEEYLSYKAEYEKQDKEIRAKIQLAEQEKDSFGEAEESYENWIEKFIKYGTLSEVTREIVTELIEKIVVNGDKSIDIVFKYQSPYSKEKNAV

SEQ ID NO: 9917 - DNA, 50 bp, Blautia obeum
  source 1..50: mol_type = genomic DNA
actttcccctagttataatgaacacatgaaccttataattaagggaaaac

SEQ ID NO: 9918 - DNA, 40 bp, Blautia obeum; identical to SEQ ID NO: 9913
  source 1..40: mol_type = genomic DNA

SEQ ID NO: 9919 - DNA, 50 bp, Blautia obeum
  source 1..50: mol_type = genomic DNA
actttcccctagttataatgaacatttgaaccttataattaagggaaaac

SEQ ID NO: 9920 - DNA, 40 bp, Blautia obeum; identical to SEQ ID NO: 1640
  source 1..40: mol_type = genomic DNA

SEQ ID NO: 9921 - protein, 530 aa, Blautia obeum
MMYQMGVYCRLSKDDGENKVSESIENQMKLIREYVTKSEDLEIADIYIDDGYSGLYFANRPEFQRMMEDIYKGKIQGVITKDISRLGREHIETSNYIERVFPSLGVRYIAILDGVDSVHHSNEELAQFKTLFNDMYSRDISKKIRGALTAQKKRGQFMSGFAPYGYVKDPADKHHFLVDEEAAKVVRRIFYMSLEGYSRDGIAKKLNQEGILTPSEYKRKVQELKYANALEKAGAKGWAYPTINVILRNRVYTGAMVQHKSEKISYKVEKYQYIPEEQQYIVEGMHEAIISKDTFEQVQKLMKKRTRTPGFNSEVRKVNPYAGIIVCGDCGYNFQRVTCRDGYECGTYHKKGNTVCYSHFIKKEVLDSIVKNEIQRQAELALKESDKDEILKAADRKKEVQRRCAEANQKIERLQKELVAVQKYKKKTYENYVDGVLDKEEYLSYKAEYEKQDKEIRAKIQLAEQEKDSFGEAEESYENWIEKFIKYGTLSEVTREIVTELIEKIVVNGDKSIDIVFKYQSPYSKEKNAV

SEQ ID NO: 9922 - DNA, 50 bp, Blautia obeum; identical to SEQ ID NO: 9917
  source 1..50: mol_type = genomic DNA

SEQ ID NO: 9923 - DNA, 40 bp, Blautia obeum; identical to SEQ ID NO: 9913
  source 1..40: mol_type = genomic DNA

SEQ ID NO: 9924 - DNA, 50 bp, Blautia obeum; identical to SEQ ID NO: 9919
  source 1..50: mol_type = genomic DNA

SEQ ID NO: 9925 - DNA, 40 bp, Blautia obeum; identical to SEQ ID NO: 1640
  source 1..40: mol_type = genomic DNA

SEQ ID NO: 9926 - protein, 530 aa, Blautia obeum
MMYQMGVYCRLSKDDGENKVSESIENQMKLIREYVTKSEDLEIADIYIDDGYSGLYFANRPEFQRMMEDIYKGKIQGVITKDISRLGREHIETSNYIERVFPSLGVRYIAILDGVDSVHHSNEELAQFKTLFNDMYSRDISKKIRGALTAQKKRGQFMSGFAPYGYVKDPADKHHFLVDEEAAKVVRRIFYMSLEGYSRDGIAKKLNQEGILTPSEYKRKVQGLKYANALEKAGAKGWAYPTINVILRNRVYTGAMVQHKSEKISYKVEKYQYIPEEQQYIVEGMHEAIISKDTFEQVQELMKKRTRTPGFNSEVRKVNPYAGIIVCGDCGYNFQRVTCRDGYECGTYHKKGNTVCYSHFIKKEVLDSIVKNEIQRQAELALKESDKDEILKVADRKKEVQRRCAEADQQIERLQKELVAVQKYKKKTYENYVDGVLDKEEYLSYKAEYEKQDKDIRAKIQLAEQEKDSFGEAEESYENWIEKFIKYGTLSEVTREIVTELIEKIVVNGDKSIDIVFKYQSPYPVEKQAV

SEQ ID NO: 9927 - DNA, 50 bp, Blautia obeum; identical to SEQ ID NO: 1637
  source 1..50: mol_type = genomic DNA

SEQ ID NO: 9928 - DNA, 40 bp, Blautia obeum; identical to SEQ ID NO: 9913
  source 1..40: mol_type = genomic DNA

SEQ ID NO: 9929 - DNA, 50 bp, Blautia obeum; identical to SEQ ID NO: 1639
  source 1..50: mol_type = genomic DNA

SEQ ID NO: 9930 - DNA, 40 bp, Blautia obeum; identical to SEQ ID NO: 1640
  source 1..40: mol_type = genomic DNA

SEQ ID NO: 9931 - protein, 530 aa, Blautia obeum; identical to SEQ ID NO: 1636

SEQ ID NO: 9932 - DNA, 50 bp, Blautia obeum; identical to SEQ ID NO: 1637
  source 1..50: mol_type = genomic DNA

SEQ ID NO: 9933 - DNA, 40 bp, Blautia obeum; identical to SEQ ID NO: 9913
  source 1..40: mol_type = genomic DNA

SEQ ID NO: 9934 - DNA, 50 bp, Blautia obeum; identical to SEQ ID NO: 1639
  source 1..50: mol_type = genomic DNA

SEQ ID NO: 9935 - DNA, 40 bp, Blautia obeum; identical to SEQ ID NO: 1640
  source 1..40: mol_type = genomic DNA

SEQ ID NO: 9936 - protein, 554 aa, Blautia wexlerae
MESIISIRLKARENVKVISCFFYLFCYNKVVTERLKYNRKALNMNIAAYCRVSTDKADQLNSLEAQKQFFSEYTQRTGDNLVRLYADEGISGTKIKNRKEFLRMMADAEHGLFDMVVVKDISRFARNTVDLLQNVRKLKALGIETQFLTANMTSMGNSEFVLTIFGALAQEESANTSKRVKFGKKMNAEKGRVPNIVYGYDKTIGDYFNLAINEGEAAVIRQIYKWYIEEGYGAAKIANMLNAKGIRTKRNCQWSQNATCRILTNELYTGKIINGKQEVADFLTGQRTEKDETEWMVTERPELRIIEPEMYEKAQEILECRSKTFKLTKERQSNKYLFSTLIKCKECGWSFRRTVRTYKNTYIRWVCSGHNGRGADSCPNAQTVDEEELIEVLSEYFSELLKAKKNVIRHVTGEFQRVYKAKDENLNYEKELNAQLHKLQKMRQKYIDMYTDDLITREELNEKIGGTKQEIERLENELKMVAYHLTKGEQLETILNRTFKEIEDISDVHQMTNAQLKRIIQKIEVDKDGNVDIYLRIFGDLGLDETVLISDNQT

SEQ ID NO: 9937 - DNA, 50 bp, Blautia wexlerae
  source 1..50: mol_type = genomic DNA
ccgttctaattagtgacaaccaaacatatggaagtaacaatatagaacgg

SEQ ID NO: 9938 - DNA, 40 bp, Blautia wexlerae
  source 1..40: mol_type = genomic DNA
gattagtaagagtactgtacataaggactgcactgaccgt

SEQ ID NO: 9939 - DNA, 50 bp, Blautia wexlerae
  source 1..50: mol_type = genomic DNA
ccgttctaattagtgacaaccaaacttatggaagtaacaatatagaacgg

SEQ ID NO: 9940 - DNA, 40 bp, Blautia wexlerae
  source 1..40: mol_type = genomic DNA
gaacaataagagtagtggacttcagtactgcactgacagc

SEQ ID NO: 9941 - protein, 551 aa, Blautia luti
MHIRNILKKGYSLFCYLQLYFRWYNKVVTERLKYNRKVLDMNIAAYCRVSTDKADQLNSLEAQKQFFSEYTQRTGDNLVRLYADEGISGTKIKNRKEFLRMMADAEHGLFDMVVVKDISRFARNTVDLLQNVRKLKALGIETQFLTANMTSMGNSEFVLTIFGALAQEESANTSKRVKFGKKMNAEKGRVPNIVYGYDKTIGDYFNLAINEEEAAVIRQIYKWYIEEGYGAAKIANMLNAKGIRTKRNCQWSQNATCRILTNELYTGKIINGKQEVTDFLTGQRTEKDETEWMVTERPELRIIEPEMYEKAQEILECRSKTFKLTKERQSNKYLFSTLIKCKECGWSFRRTVRTYKNTYIRWVCSGHNGRGADSCPNAQTVDEEELIEVLSEYFSELLKAKKNVIRHVTGEFQRVYKAKDENLNYEKELNAQLHKLQKMRQKYMDMYTDDLITREELNEKIGGTKQEIERLENELKMVAYHLTKGEQLETILNRTFKEIEDISDVHQMTNAQLKRIIQKIEVDKDGNVDIYLRIFGDLGLDETVLISDNQT

SEQ ID NO: 9942 - DNA, 50 bp, Blautia luti; identical to SEQ ID NO: 9937
  source 1..50: mol_type = genomic DNA

SEQ ID NO: 9943 - DNA, 40 bp, Blautia luti
  source 1..40: mol_type = genomic DNA
gatcagtaagagtacggcacataaggactgtactgaccgc

SEQ ID NO: 9944 - DNA, 50 bp, Blautia luti; identical to SEQ ID NO: 9939
  source 1..50: mol_type = genomic DNA

SEQ ID NO: 9945 - DNA, 40 bp, Blautia luti; identical to SEQ ID NO: 9940
  source 1..40: mol_type = genomic DNA

SEQ ID NO: 9946 - protein, 534 aa, Clostridium baratii
MKTAAIYARRSKIVETGDSIENQINLCTNYLKNVGVTDIRVYSDEGFSGKNTDRPEFIRLMNDAKENKFQILICYKLDRLSRNIGDFSNLINDLEKYNISFISVVEQFDTNSAMGKAMMYICSVFSQLERETISKRVCDNMYELASNGYWLGGSCPLGFTNNRKTFTDNGGKIRSYSELTPVKKEIKLVELIFNKYIELGSFSQVEKYMLQNNIKTRNGKDWSKTTLKNILTNPVYVKADNKIVDYFKAIGITTYGNVDGIHGILIYKKRKGKNGKLRDPSEWIYAISSHEGIIASDMWLNVQKMAESNKARAPSLGCSHNALLSGMIRCAKCGSHMRIAYGCPTKNSPVRKHYYMCTLKHNSGKVRCSCKNVDGPELDRLIINKLKEFSIDKNYLIKRLKDYKNSIKNSSENFLYENIQEKLHINEQQINNLVNNISLTNEPELVQILLTKLTNLKNESIELNKSLTDLNSELIKQNNLLDTCDNIVNKLKDFSLLVDTLDVPAKRKLLSSIIDKVFVNGDTGAVKIKFKYFK

SEQ ID NO: 9947 - DNA, 50 bp, Clostridium baratii
  source 1..50: mol_type = genomic DNA
catcgcaatcttgtaatgcgagcatctgctcgcttaaccaaagtgcgatg

SEQ ID NO: 9948 - DNA, 40 bp, Clostridium baratii
  source 1..40: mol_type = genomic DNA
aatttctcttagtattacatctgctctaaatacaaacatg

SEQ ID NO: 9949 - DNA, 50 bp, Clostridium baratii
  source 1..50: mol_type = genomic DNA
catcgcaatcttgtaatgcgagcatttgctcgcttaaccaaagtgcgatg

SEQ ID NO: 9950 - DNA, 40 bp, Clostridium baratii
  source 1..40: mol_type = genomic DNA
catttctttcattgttacttttactataaatataaacatg

SEQ ID NO: 9951 - protein, 502 aa, Roseburia inulinivorans
MEFIREDCIYARQSVDRKDSISIESQIDFCKYELKGGSCRVFKDKGYSGKNTDRPEFQKLLGEIRKGKVRRVIVYKLDRISRSILDFATMMELFQEYDVEFVSSTEKFDTSTPMGRAMLNICIVFAQLERETIQKRVTDAYYSRCLKGFHMSGQAPYGYQLEPTVVEGIRTKKMVADPVAADHVRLMFEMYAEPETSFGDITRYFEEHDIKIYGKSMFRTFLSQLLRNPVYAQADLELYEFFKSQGAAIVNDASDFAGTNGCYLYQGRDVKEDKDRCLKDQILVIAPHEALISSDTWLKCRKKLMANTTFQQGRKPKNTWLAGKIKCGHCGYALKATHVPNSTGYFRCTKRTENKGCPGCGKIRKEEFEQFIFSAMQEKFKDFQILHGREEKVNPKLTTYQVELAQVEAEIEKLLDTLTGANATLLAYANKKIEELDTRRQTISKAIAELSVETISPQQIKKLSYYLDNWDSIDFDDKRKAADGLISTIKATSDRVQIEWKI

SEQ ID NO: 9952 - DNA, 50 bp, Roseburia inulinivorans; identical to SEQ ID NO: 2062
  source 1..50: mol_type = genomic DNA

SEQ ID NO: 9953 - DNA, 40 bp, Roseburia inulinivorans
  source 1..40: mol_type = genomic DNA
catgttccataatagttgattgccaatacgaatatataat

SEQ ID NO: 9954 - DNA, 50 bp, Roseburia inulinivorans; identical to SEQ ID NO: 2062
  source 1..50: mol_type = genomic DNA

SEQ ID NO: 9955 - DNA, 40 bp, Roseburia inulinivorans
  source 1..40: mol_type = genomic DNA
tattttccataattattgtttgccattacaaatatgtaaa

SEQ ID NO: 9956 - protein, 502 aa, Faecalibacterium prausnitzii
MEFIREDCIYARQSVDRKDSISIESQIDFCKYELKGGSCRVFKDKGYSGKNTDRPEFQKLLGEIRKGKVRRVIVYKLDRISRSILDFATMMELFQEYDVEFVSSTEKFDTSTPMGRAMLNICIVFAQLERETIQKRVTDAYYSRCLKGFHMSGQAPYGYQLEPTVVEGIRTKKMVADPVAADHVRLMFEMYAEPETSFGDITRYFEEHDIKIYGKSMFRTFLSQLLRNPVYAQADLELYEFFKSQGAAIVNDASDFAGTNGCYLYQGRDVKEDKDRCLKDQILVIAPHEALISSDTWLKCRKKLMANTTFQQGRKPKNTWLAGKIKCGHCGYALKATHVPNSTGYFRCTKRTENKGCPGCGKIRKEEFEQFIFSAMQEKFKDFQILHGREEKVNPKLTAYQVELAQVESEIEKLLDTLTGANATLLAYANKKIEELDNRRQTISKAIAELSVETISPQQIKKLSYYLDNWDSIDFDDKRKAADGLISTIKATSDRVQIEWKI

SEQ ID NO: 9957 - DNA, 50 bp, Faecalibacterium prausnitzii
  source 1..50: mol_type = genomic DNA
tttgtaccccttgtacactgatgtttgcaacggtgtacaaagggaacata

SEQ ID NO: 9958 - DNA, 40 bp, Faecalibacterium prausnitzii
  source 1..40: mol_type = genomic DNA
tgtgttcattatcaaatagttccttttgattttggttttg

SEQ ID NO: 9959 - DNA, 50 bp, Faecalibacterium prausnitzii
  source 1..50: mol_type = genomic DNA
tttgtaccccttgtacactgatgttagcaacggtgtacaaagggaacata

SEQ ID NO: 9960 - DNA, 40 bp, Faecalibacterium prausnitzii
  source 1..40: mol_type = genomic DNA
tgatttctttttcaaatagtactttttttttttttttttg

SEQ ID NO: 9961 - protein, 481 aa, Streptococcus agalactiae; identical to SEQ ID NO: 2986

SEQ ID NO: 9962 - DNA, 50 bp, Streptococcus agalactiae; identical to SEQ ID NO: 392
  source 1..50: mol_type = genomic DNA

SEQ ID NO: 9963 - DNA, 40 bp, Streptococcus agalactiae
  source 1..40: mol_type = genomic DNA
gtaaccaatgctaccaaacattctaaaagtgtaaatgctt

SEQ ID NO: 9964 - DNA, 50 bp, Streptococcus agalactiae; identical to SEQ ID NO: 394
  source 1..50: mol_type = genomic DNA

SEQ ID NO: 9965 - DNA, 40 bp, Streptococcus agalactiae
  source 1..40: mol_type = genomic DNA
atacccactgttacaaaatcttctaaaaatgtaaattcta

SEQ ID NO: 9966 - protein, 481 aa, Streptococcus agalactiae; identical to SEQ ID NO: 391

SEQ ID NO: 9967 - DNA, 50 bp, Streptococcus agalactiae; identical to SEQ ID NO: 392
  source 1..50: mol_type = genomic DNA

SEQ ID NO: 9968 - DNA, 40 bp, Streptococcus agalactiae; identical to SEQ ID NO: 9963
  source 1..40: mol_type = genomic DNA

SEQ ID NO: 9969 - DNA, 50 bp, Streptococcus agalactiae; identical to SEQ ID NO: 394
  source 1..50: mol_type = genomic DNA

SEQ ID NO: 9970 - DNA, 40 bp, Streptococcus agalactiae; identical to SEQ ID NO: 9965
  source 1..40: mol_type = genomic DNA

SEQ ID NO: 9971 - protein, 481 aa, Streptococcus agalactiae; identical to SEQ ID NO: 391

SEQ ID NO: 9972 - DNA, 50 bp, Streptococcus agalactiae
  source 1..50: mol_type = genomic DNA
tataaagaaatttactatccttgatttcaatgaaccgctctacaacttga

SEQ ID NO: 9973 - DNA, 40 bp, Streptococcus agalactiae; identical to SEQ ID NO: 9963
  source 1..40: mol_type = genomic DNA

SEQ ID NO: 9974 - DNA, 50 bp, Streptococcus agalactiae
  source 1..50: mol_type = genomic DNA
tataaagaaatttactatccttgacttcaatgaaccgctctacaacttga

SEQ ID NO: 9975 - DNA, 40 bp, Streptococcus agalactiae; identical to SEQ ID NO: 9965
  source 1..40: mol_type = genomic DNA

SEQ ID NO: 9976 - protein, 502 aa, Clostridium tetani
MNKICIYLRKSRADEELEKTLGEGETLSKHRKALLKFAKEKKLNIVEIKEEIVSGESLFFRPKMLELLKEVENKQYTGVLVMDMQRLGRGNMQDQGIILETFKKSNTKIITPMKTYDLSDDFDEEYTEFEAFMSRKELKMINRRMQGGRVRSVEDGNYIATNPPLGYDIHWIKKSRTLKINPHECEIIKLIFKLYTEGNGAGSIAEHLNNLGYKTKFNNNFSRSSVLFILKNPIYIGKVTWKKKEIKKSKNPNKVKDTRTRDKSEWIVVDGKHEPMISMKMWNKAQEILNNKYHIPYQLVNGPANPLAGIVICSKCKFKMVMRKLKGVDRLLCRNNKCDNISNRYDSTEKAIIQALERYLKEYRINISNQNKTSDIKPYERQVNILEKELAALNEQKLKLFDFLERGIYDENTFLERSKNIEERITKTSSGIEKINDIINKEKKVVKEEDVIKFQKLLDGYKNTDDIKLKNELMKKLVNKVEYTKNKRGDTFGIDIFPKLKP

SEQ ID NO: 9977 - DNA, 50 bp, Clostridium tetani
  source 1..50: mol_type = genomic DNA
gactgataacttgtccagggtatttcattacctcttacatgttatatatt

SEQ ID NO: 9978 - DNA, 40 bp, Clostridium tetani
  source 1..40: mol_type = genomic DNA
aacatccattaaagagatttcattgccttctttatctatt

SEQ ID NO: 9979 - DNA, 50 bp, Clostridium tetani
  source 1..50: mol_type = genomic DNA
gactgataacttgtccagggtatttgattacctcttacatgttatatatt

SEQ ID NO: 9980 - DNA, 40 bp, Clostridium tetani
  source 1..40: mol_type = genomic DNA
aacatacattaaaaagttttgaattccttctatttcagtt

SEQ ID NO: 9981 - protein, 565 aa, Pectinatus frisingensis
MPKAKKAAIYRRVSTLHQADKDSLPMQRNDMINYAKYVLNINNYEVFTDAGYSGKNTDRPAFQDMMQRVKNGEFSHILVWKIDRISRNLLDFSSMYATCKSLGVIFISKNEQFDTSTAMGEAMLKIILVFAELERNMTSERVSATMISRANDGHWNGGRVPFGYFFDKISKTFAIKNDEAAVIHNIYDTYEREHSVVNTTQIINESGSRSRRGYKWTPTTTNIILRNPFYVGVLRYNRQSESQSTFKLKDKSEWIIIPDHHPAIIEKEQFELCATWLKKNQRIHGVAGHSQRKNIHIFAGLIHCGYCGSLMIATLGRKFTSGYRPSMYICSEKRISKKCKNKYVNDTTVGGFVFNYVSNLLHLQESFSPIYTENDIEQLLLKGDSFAHVSEINRLALSTLRNTLLENKCGHIEYEHPSIKNHSVSSLQETTSLQVDLDKQKRALERLEELYLFSDDSMPQKDYLQKCQRFRNSIDELSKKLNESKKDSIFVTSLSDEKFIEKATALLFNKSMQNGCIDFQKLVMDTGNRILKDFINSIVSDIIVKDGLILQIDFHNGTTHKFSYK

SEQ ID NO: 9982 - DNA, 50 bp, Pectinatus frisingensis
  source 1..50: mol_type = genomic DNA
tgttgttataagcacaacattgcatcactaaagtataggttagtataaca

SEQ ID NO: 9983 - DNA, 40 bp, Pectinatus frisingensis
  source 1..40: mol_type = genomic DNA
tcatagaatcaacattgcatcaccaaagctaaaaaaacga

SEQ ID NO: 9984 - DNA, 50 bp, Pectinatus frisingensis
  source 1..50: mol_type = genomic DNA
tgttgttataagcacaacattgcaaaactaaagtataggttagtataaca

SEQ ID NO: 9985 - DNA, 40 bp, Pectinatus frisingensis
  source 1..40: mol_type = genomic DNA
tcatagaaccaacatagcaaaacaaaatctgcagaaacat

SEQ ID NO: 9986 - protein, 484 aa, Bacillus cereus
MKILKYAVYVRVSTDRDEQVSSVQNQVDICRYWLEKNGYEWDSNAVYFDDGISGTAWLERHAMQLILEKARRNELDTVVFKSIHRLARDLRDALEIKEILIGHGIRLVTIEENYDSLYEGGNDIKFEMFAMFAAQLPKTLSVSVSAAMQAKARRGEYIGKPGLGYHVIDKKLVINEEEAEVVREIFDLSHKGYGFKKIANILNDKGTYTKFGQLWSHATVGKILKNQKYKGDLVLNSYKTVKVDGKKKRVYTPKERLTIIEDHYPAIVSKELWNAVNSDRTSKKKTKQDTRNEFRGMMFCKHCGGPITAKYTSRFAKGSKKEWVYMKCSNYVRFNRCVNFDPVKYDDIREVIIYRLKQQEKELEIHFNPKMHQKRKDKSTEIKKQIKLLKVKKEKLIDLYIEGLIDKEMFSKRDFNFENEIKEQELALLKLTDQNKRNKEEQQIKKAFSMLDEEKDMHEVFKTLIKKITLSKDKYIEIEYTFSL

SEQ ID NO: 9987 - DNA, 50 bp, Bacillus cereus
  source 1..50: mol_type = genomic DNA
agttagttattagttactgtaagatttgttacggtaactaataaccaaca

SEQ ID NO: 9988 - DNA, 40 bp, Bacillus cereus
  source 1..40: mol_type = genomic DNA
aattggtgtaactgttgtatttgttacagtgctaccaaca

SEQ ID NO: 9989 - DNA, 50 bp, Bacillus cereus
  source 1..50: mol_type = genomic DNA
agttagttattagttactgtaagaaatgttacggtaactaataaccaaca

SEQ ID NO: 9990 - DNA, 40 bp, Bacillus cereus
  source 1..40: mol_type = genomic DNA
taatgttgtaaatgttgtaaatgttacagtgttagcagtg

SEQ ID NO: 9991 - protein, 497 aa, Fusobacterium necrophorum
MSKVAIYIRLSVEDMIKTDESESIINQRAYLNDYLDKNEEFKNFTREEYVDDGYSGTNENRPAFQRMLEDVKKNNIQTIIVKDLSRFMRDYITLGDYLENIFPFLGVRFIAINDGYDSNKEKGNGTDLDIQFKGLLYDFYTKDISEKVKSSMTTLKKQGKFLAWSPPLGYMKDPNDRHKIIVDEETAWIVKKIFKLALDGISSRNIAKILNEEKIPTPSKRKSEITNLDFEYSIIRTAKKPRPTWTNGNVIDVLANENYTGTYTFNMQDKSVLNPSSFKFKPKEEWERVENNHEAIISREDFEKVQKIKEKNLFMKGKNTDYEWRKKSPLQGFAKCPTCNHILGCIQSKRKRQDGSIRVHTYFTCRICKCNNVKHKNSRAGSLEEQVFEAIKEKYGLEDPIKDEKVKVKPMEKSIEDLEAKKMHNFEKYKLGKMNRQKFIDSKNLIDEEIQAIKEKIQKAKEEKEVIDNTKLTRELMEKYIDSVICEGNEVLNIIWK

SEQ ID NO: 9992 - DNA, 50 bp, Fusobacterium necrophorum; identical to SEQ ID NO: 2317
  source 1..50: mol_type = genomic DNA

SEQ ID NO: 9993 - DNA, 40 bp, Fusobacterium necrophorum
  source 1..40: mol_type = genomic DNA
tgttcttgacttctttgctggtagtggtactacaggtcat

SEQ ID NO: 9994 - DNA, 50 bp, Fusobacterium necrophorum
  source 1..50: mol_type = genomic DNA
tttgtcataagcttgacatgagagctgtttcgtgtcataatagtgataga

SEQ ID NO: 9995 - DNA, 40 bp, Fusobacterium necrophorum
  source 1..40: mol_type = genomic DNA
tgttcttcattttcttgctcttagtgctcatacagatctt

SEQ ID NO: 9996 - protein, 497 aa, Fusobacterium necrophorum
MSKIALYIRLSVEDMIKTDESESIINQRAYLNDYLDKNEGFKNFTREEYVDDGYSGTNENRPAFQRMLEDVKKNNIQTIIVKDLSRFMRDYITLGDYLENIFPFLGVRFIAINDGYDSNKEKGNGTDLDIQFKGLLYDFYTKDISEKVKSSMTTLKKQGKFLAWSPPLGYMKDPNDRHKIIVDEETAWIVKKIFKLALDGISSRNIAKILNEEKIPTPSKRKSELTNLDFEYSIIRTAKKPRPTWTNGNVIDVLANENYTGTYTFNMQDKSVLNPSSFKFKPKEEWGRVENNHEAIISKEDFEKVQKIKEKNLFMKGKNTDYEWRKKSPLQGFAKCPTCNHILGCVQSKRKRKDGSIRVHTYFTCRICKCNNVKHKNSRAGSLEEKVFEAIKEKYGLEDSNKDEKVKVKPMEKSIEDLEAKKMQNFEKYKLGKMNRQKFIDSKNLIDEEIQAIKEKIQKAKEEKEVIDNTKLTRELMEKYIDSVICEGNEVLNIIWK

SEQ ID NO: 9997 - DNA, 50 bp, Fusobacterium necrophorum; identical to SEQ ID NO: 2317
  source 1..50: mol_type = genomic DNA

SEQ ID NO: 9998 - DNA, 40 bp, Fusobacterium necrophorum; identical to SEQ ID NO: 9993
  source 1..40: mol_type = genomic DNA

SEQ ID NO: 9999 - DNA, 50 bp, Fusobacterium necrophorum; identical to SEQ ID NO: 9994
  source 1..50: mol_type = genomic DNA

SEQ ID NO: 10000 - DNA, 40 bp, Fusobacterium necrophorum; identical to SEQ ID NO: 9995
  source 1..40: mol_type = genomic DNA

SEQ ID NO: 10001 - protein, 613 aa, Vibrio parahaemolyticus
MRTTPKIYNYARVSTTKQLQGVGLETQQQRSVLESLSQEHNLPIHDENFVDQGLSAYHGKHKEGALGLVLSHIESGEIPSGSILVVFSLDRLSRETVNVAMEQLLSIINRGVRVYTHIDCKMFDAKSQNLTADLIVSLITMQRANEESETKSKRIISAQKEALKKWHIDKKPRGALGRVPCWIDQPTNKLNQNATGIKVAIDLYLQGWSSIKIKKHLDENYPYKRTRITRVKTSSTWDLGVIDQLWNKRALIGEKHLSIEDKTHVLKDYYPKVVDLNTYLRLKALREPKKGRATTTGSIHLLKGLAKCGVCGGAMVFIDKGTSRQNYVCNLATKGEHQREVVSTRMLEFLTLEVCKDFYLVNKVGATSNTNIKAEIQERILEEKAELSDLIERYKKKARGSLAELIEDQEDKIELLEKELDTFNINIFDEVLERLTEDLYTEKVRNNMSDPQRADLHEILCRILKSVKVYRRTETTKFTKTKKVNCIEIEWEFKSGQARKLVMNPFEYIHTENRKSLYIPYEYKHDIPFEEYRRSKNLIPKALKKLHDWNWLRGLYPTRGRYDWNEIDLELGYVHTITSPNFDAILDGTYMKKGTMYIQSDKNSLEDKDDIFC

SEQ ID NO: 10002 - DNA, 50 bp, Vibrio parahaemolyticus
  source 1..50: mol_type = genomic DNA
tgaagaatgttattttcttttactttgccaataaaaaacaatttccttcg

SEQ ID NO: 10003 - DNA, 40 bp, Vibrio parahaemolyticus
  source 1..40: mol_type = genomic DNA
gaggaatatttgctgtggtttgataaaaagggctggccaa

SEQ ID NO: 10004 - DNA, 50 bp, Vibrio parahaemolyticus
  source 1..50: mol_type = genomic DNA
tgaagaatgttattttcttttactcagccaataaaaaacaatttccttcg

SEQ ID NO: 10005 - DNA, 40 bp, Vibrio parahaemolyticus
  source 1..40: mol_type = genomic DNA
gaggaggattttcggtggtcatgaaaacagggctggacaa

SEQ ID NO: 10006 - protein, 587 aa, Streptococcus pneumoniae
MKKDVKVIKGDTTLKRTASGCVQRSIKRVAAYCRVSTDTEDQINSYNSQVEHYTEFIQKNKEWTLAGIYADEAITGTQVDRRIDFQRLINDCMNGDIDMIITKSISRFARNTLDTLKYVRKLKEFNVAVFFEEENINTLTMDGELLLTILSSVAQQEVENISANVKKGLRMKMERGEMVGFQGCLGYDYDPETKSISINEKEAEIVRYIFRRYIEGVGGMVISRELEEQGYLSPRGNKRWTETTVLGIIKNEKYKGDLMMGKTYTVDPISKRRLDNFGEQDKFYIENHHEPIISEEDFEKAQGIRLRRSKNRNTVANNGGKREKYSRKYAFSSMLECGFCGHNLSRRNWHSSSEYTKVIWQCVNATKNGKKYCPHSKGIEEEAIEKAFMESYRQVCHNNVEITNEFLKTVEEELKDNSLAKDLKKITNQLDKILKKEKDLVELRLNESISMDIYQDKYNEIAISKEKLLAEKRTLEVTLTDEKALKKRLEGFKKLLESNKYLEEFDRAVFESIVDKIIIGGTNDEGEIDPAMITIIYKTGKKDSQDGRLFKSRRKNAKEVNEETDNKLYPHSSDEVNNLYSYPIDNT

SEQ ID NO: 10007 - DNA, 50 bp, Streptococcus pneumoniae; identical to SEQ ID NO: 1792
  source 1..50: mol_type = genomic DNA

SEQ ID NO: 10008 - DNA, 40 bp, Streptococcus pneumoniae
  source 1..40: mol_type = genomic DNA
ctatttcctcaaacgcatcacgtggagacggtagcacttt

SEQ ID NO: 10009 - DNA, 50 bp, Streptococcus pneumoniae; identical to SEQ ID NO: 1792
  source 1..50: mol_type = genomic DNA

SEQ ID NO: 10010 - DNA, 40 bp, Streptococcus pneumoniae
  source 1..40: mol_type = genomic DNA
ctctttcctcaaagaaatcatgtgcagacactcacacttt

SEQ ID NO: 10011 - protein, 532 aa, Streptomyces mobaraensis
MSVEHVCTICGKSEPNAVDLYTRKSKRLREDDHRREQSTDAQCEQGHRWAHRNGYAVRKVWRDIQSAFKDVKRSDFDRALRALANGEVPALWAYAIDRFSRKGADDLLKVIGKARVIFDMDGLDSNETRDRRWIINRAEEARESSENLSKRVRDTKEAQRDAGLWVAGRAPFGYVVSRDRVLTPDEEPYICHVATRTEWTRAALLREMFRRIAEDGDSTREVCRWLDGMGVPSPGGSSWGYAYVHRMTRNPAFSGWQVIQIRPGHPEAYRNSKGQKVRLKGKALVTSEMQRKAQETLTGGNLIPLAHRARDTRRKHLLTDLMRCEGCGRSMSMGGASYKCQAATGGTGCKAIASVKVEAIENFVFNAWLARLTNAAEDDPIVIAVSERWTARVRPEETAEEQTARAALRTAEAGLKRLLDDRQAGVYDGAAARYFGPLLRDANKAVEAAREEVNHYSHGGTVTLPFESVEHETLTATWDAADLPKKRDLLRLAIERITVRKAPRQGARFNGHERLVIEWAQPAQQEDFAEAA

SEQ ID NO: 10012 - DNA, 50 bp, Streptomyces mobaraensis
  source 1..50: mol_type = genomic DNA
agatgtgtaagagtcctcctcgccgaggaggagtaaccccttgcggacct

SEQ ID NO: 10013 - DNA, 40 bp, Streptomyces mobaraensis
  source 1..40: mol_type = genomic DNA
ggtccgcgtcctcctcgccgaggaccagtccatggtccgc

SEQ ID NO: 10014 - DNA, 50 bp, Streptomyces mobaraensis
  source 1..50: mol_type = genomic DNA
agatgtgtaagagtcctcctcgccggggaggagtaaccccttgcggacct

SEQ ID NO: 10015 - DNA, 40 bp, Streptomyces mobaraensis
  source 1..40: mol_type = genomic DNA
ggtccgcctcctgcccgccgggggccaatccctggcgcga

SEQ ID NO: 10016 - protein, 587 aa, Streptococcus pyogenes
MKKEVKVIKGDTTLKRTASGCVERSIKRVAAYCRVSTDTEDQINSYNSQVEHYTEFIQKNNEWTLAGIYADEAITGTQVDRRIDFQRLINDCMNGDIDMIITKSISRFARNTLDTLKYVRKLKEFNVAVFFEEENINTLTMDGELLLTILSSVAQQEVENISANVKKGLRMKMERGEMVGFQGCLGYDYDPETKSISINEKEAEIVRYIFRRYIEGVGGMVISRELEEQGYLSPRGNKRWTETTVLGIIKNEKYKGDLMMGKTYTVDPISKRRLDNFGEQDKFYIENHHEPIISEEDFEKAQGIRLRRSKNRNTVANNGGKREKYSRKYAFSSMLECGFCGHNLSRRNWHSSSEYTKVIWQCVNATKNGKKYCPHSKGIEEEAIEKAFMESYRQVCHNNVEITNEFLKTVEEELKDNSLAKDLKKITNQLDKILKKEKDLVELRLNESISMDIYQDKYNEIAISKEKLLAEKRTLEVTLTDEKALKKRLEGFKKLLESNKYLEEFDRAVFESIVDKIIIGGTNDEGEIDPAMITIIYKTGKKDSQDGRLFKSRRKNAKEVNEKADSKLYPQSSDEVNNLCSYPMDNT

SEQ ID NO: 10017 - DNA, 50 bp, Streptococcus pyogenes
  source 1..50: mol_type = genomic DNA
tgtgttcctatcctatggacaacacatgtggagacggtagcacttttgtc

SEQ ID NO: 10018 - DNA, 40 bp, Streptococcus pyogenes
  source 1..40: mol_type = genomic DNA
tttgtttccgcaaacgcatcacgtcgagtgcgtagggttg

SEQ ID NO: 10019 - DNA, 50 bp, Streptococcus pyogenes
  source 1..50: mol_type = genomic DNA
tgtgttcctatcctatggacaacaattgtggagacggtagcacttttgtc

SEQ ID NO: 10020 - DNA, 40 bp, Streptococcus pyogenes
  source 1..40: mol_type = genomic DNA
tttgtttccccaagcggctatcgaagatggcgtaggggtg

SEQ ID NO: 10021 - protein, 518 aa, Acidithiobacillus ferrivorans
MSKAYSYIRFSSEKQSSGDSLRRQTEMARAYAAKHGLELADVSFRDLGLSGFDRSNIERGALAEFLTAVKSGKVEPGSLLLIEQFDRLSRAEISVALRLLLDLVASDIGVVTLVDEKLWDKNTVNDMPNLMLSLILMFRAHEESLAKSQRLRAVWTEKKRTAGTKILTAECPRWLTLKADRSSFSVIEDRAEAIRQVFALSAAGIGANAIVRRANIEKWPVPGKGDSWHMSLINRLTRNRAVLGEYQPYSHLKQGGKRSRNPSGNPISDYYPAIIDPALFSTVQAVRERRPRFPGRRDVEYRNFLHGLVRCICGRTLFRKGGDKNYPDYARYYCSGRARGATDCPSIDSKELESTVLYAATALAGAYFSPSTKMAELKEQADSLTLAMSAGQRRIERLVEAIESTDTPPSALVSKLTLVEQEVREAEQRHAGILAQLAEMSKAGDPDERLGAAFALASGGAEERSELREILARLLAAVEADGRQHRVRIRFHGGDVWVNVPLNEKARLPGVVHTVAPP

SEQ ID NO: 10022 - DNA, 50 bp, Acidithiobacillus ferrivorans
  source 1..50: mol_type = genomic DNA
ctcttctattacatctcgacgttggcaatagttggtgtataatggcagaa

SEQ ID NO: 10023 - DNA, 40 bp, Acidithiobacillus ferrivorans
  source 1..40: mol_type = genomic DNA
ttcggcgaggccgacgacggcgaaggtgggcaggccgggg

SEQ ID NO: 10024 - DNA, 50 bp, Acidithiobacillus ferrivorans
  source 1..50: mol_type = genomic DNA
ctcttctattacatctcgacgttgagaatagttggtgtataatggcagaa

SEQ ID NO: 10025 - DNA, 40 bp, Acidithiobacillus ferrivorans
  source 1..40: mol_type = genomic DNA
cacctcggggccgacggcgagggaggcgggcaggccgcgg

SEQ ID NO: 10026 - protein, 551 aa, Leclercia adecarboxylata
MEEIRKGMWDGSRLVVESTDRFSRLNPFKVLSYINELVSHKITMIDASNNMWINLANSQLLPVVTMSAQRAYEESVIKSRRIADGWRRRRDTAFSENGIVTNKTPQWIDVVDNKYVLNNKAEVVKEIFRLCKSGIGTPTIAKILREKDEEWQFDRPWRAESVHKILRNRRVTGVIFISEIIRDFESTDNIVEQKNYEKEVYPIVISNEDFELVGKLLASRKPGAGKSVGRVSGGTVLKNVEGVDIVIEQSPMTKSNIFNSVCRCGRCGEPMYHNVVERERFAKRKGEMVKSEYRYIRCIGERDNLCTNKSFRYDAVEHFVIEHIKNLDFSKVIQTSELNPELELLRLNIQEEMEHIAEYESGIERLKAANKKVLFDIVMELNDSQDKLLQLKVKLASYDKVQVDVSILKNIDTDVVYDVHNIEVRSLIEQEINKLIDRIDLYMADNFNIITLCYKNDEVLKHVLITENGKKPKLITRIAVVKSGDSTVYETASFKLIATDEQLTIEVPQMIVLNDYVLLLNYIDGMKDGHSTNVAMWMREHMNEVLTNTLM

SEQ ID NO: 10027 - DNA, 50 bp, Leclercia adecarboxylata
  source 1..50: mol_type = genomic DNA
tgtttgtttactatcaccactattcaaatgtaaaataagttgtacaaaca

SEQ ID NO: 10028 - DNA, 40 bp, Leclercia adecarboxylata; identical to SEQ ID NO: 5168
  source 1..40: mol_type = genomic DNA

SEQ ID NO: 10029 - DNA, 50 bp, Leclercia adecarboxylata
  source 1..50: mol_type = genomic DNA
tgtttgtttactatcaccactatttgaatgtaaaataagttgtacaaaca

SEQ ID NO: 10030 - DNA, 40 bp, Leclercia adecarboxylata
  source 1..40: mol_type = genomic DNA
ttttaacttgataatcagatgtatagggacctttaaaagg

SEQ ID NO: 10031 - protein, 545 aa, Caulobacter vibrioides
MAKRKTPPPPTAPSAALYLRVSTGRQAESDLSIPDQGRQLRAYCQAKGWPVAEEFVEPGNSATDDRRPAFQQMIDTATAKPPPFNVILVHSFSRFFRDQFLFEFYARKLAKNGVRIVSITQEVGDDPMGIMVRQMMNLFDEYQSRENAKHTLRAMKENARQGFWNGSHPPLGYRVITAEQRGERIKKKLEIDPIGAETVRQIFRLALHGVENSGPMGLKSIATYLNDKGITTRGGGRWGVGTVHHTLTRTTYIGEHVFNSRNWASQEPKDDTEHVVMAVPPLIERDTFEAVQRAMSLRNPRAMAPRFVNSSILLGGICFCGLCGKAMTLRTGKGGAYRYYTCCTNARQGPVGCEGMAVRMDLLDASVIDHLENRLLNPERLATMMDNIIDRRSEWIERRHRHVADLRKRATEADQRLQRLYLSIEQGIIDPGDPSLKQRVTTLKAQRDKADGDAQRAAKAIDGITPALTPDLLRRFSEATREMFRDEAGAYRRDLIRAVAQKVELLSPHEARICGSRVELLRTLASNNGVQSAALALPGFAPGWR

SEQ ID NO: 10032 - DNA, 50 bp, Caulobacter vibrioides
  source 1..50: mol_type = genomic DNA
ctgccgggttttgcaccagggtggcgccccttgtcggatgaagccgatca

SEQ ID NO: 10033 - DNA, 40 bp, Caulobacter vibrioides
  source 1..40: mol_type = genomic DNA
cgctctggcatagttttggcgcgccctgcaggattcgaac

SEQ ID NO: 10034 - DNA, 50 bp, Caulobacter vibrioides
  source 1..50: mol_type = genomic DNA
ctgccgggttttgcaccagggtggttccccttgtcggatgaagccgatca

SEQ ID NO: 10035 - DNA, 40 bp, Caulobacter vibrioides
  source 1..40: mol_type = genomic DNA
agcttttgcaaagtttggtttagcccttcaggatttgaac

SEQ ID NO: 10036 - protein, 519 aa, Klebsiella aerogenes
MEDILRLMNKGGIQIHLVRMNLIVNNNPIILSVYSQLANEESQQKSERIAKGWKRRRDIALATGTVITERTPYWIDIENNQYKANKHTVTVLKAFNHYKSGLSCGLIAKKLNEDGEYFPYMWTKLSVQKVVDGLGAAGVIDVESAIDTIMGLHKNGMSCEDIAKDMNANHNYLKEWNTSSVHKLLQNRSVTGLVEIQKNKMIDDIDSYGRPIKREKEDHERIYEMVYEQIITIDDFEIIQKLLSSNRKVKDSVGNSHTTSNGDGEYVKNSIFSTICRCGKCGGAMYNNIVNARRSNGKIDTYNYLRCINENSGICDTKSMNYSVLEKGIIQHIKGLNFDTLVKSDNNSELELLRLQEVELLRDVAFYDEKIKTAKAAGKKVNPTYREGIAEAEEALDEVQAKIAALRDIHINVEELVSVNESIFDTSEYELRNAIEGELQKLIERLEFHHIEKNKYSVDIHYRGGNTTFHRLGISKKEGVYFVLEVGKDGSAYTSHGDVIMEEDKKPMNINTFKSTGIL

SEQ ID NO: 10037 - DNA, 50 bp, Klebsiella aerogenes
  source 1..50: mol_type = genomic DNA
atgttgtaaatcatgcgacacatacaaaggagttgaccattttccaaaat

SEQ ID NO: 10038 - DNA, 40 bp, Klebsiella aerogenes
  source 1..40: mol_type = genomic DNA
tttttgcatgataatcatacaaataggtaccattacaaca

SEQ ID NO: 10039 - DNA, 50 bp, Klebsiella aerogenes
  source 1..50: mol_type = genomic DNA
atgttgtaaatcatgcgacacataataaggagttgaccattttccaaaat

SEQ ID NO: 10040 - DNA, 40 bp, Klebsiella aerogenes; identical to SEQ ID NO: 1665
  source 1..40: mol_type = genomic DNA

SEQ ID NO: 10041 - protein, 510 aa, Bacillus licheniformis
MRAAIYIRVSTKLQEEKYSLRAQTTELRRYVEQQRWRLVDEFQDIESGGKLHKKGLNALLDIVEEGKIDVVVCIDQDRLSRLDTISWEYLKSTLRENKVKIAEPGTIVDLGDEDQEFVSDIKNLIAKREKKALVKRMMRGKRQRMREGKGWGQAPYEYYYDKKEEQYKLKKEWAWVIPFIDRLYLEEQLGMRSITDELNKISKTPSGIMWNEHLVHTRLTTKAYHGVQEKTFANGEVIAAENIFPKLRTKETWEKIQIERNKRGNQYKVTSRKRNDLHLLRRTYFVCGECGRKISLAAHGTKEAPRYYLKHGRKLRLADGSVCDVSINTVRVEGNIIQAIKDIVTSKELAKQYVNLENEKEEITQLEQNIKNNEQIIQKHTTKNEKLIDLYLDNHLTKEQLNKKQHEIKNITENLQTQLKRDKAKLETLKSDSWSYDFLSELFESINFFDSDFSPLERAMLMGNIFPEGIVYRDHIILKANVGGLNFDVKVLVNEDPFPWHYSKSNSKQK

SEQ ID NO: 10042 - DNA, 50 bp, Bacillus licheniformis
  source 1..50: mol_type = genomic DNA
aaggggttattacccctatttatttcaataaatatgggtaataaccctta

SEQ ID NO: 10043 - DNA, 40 bp, Bacillus licheniformis
  source 1..40: mol_type = genomic DNA
gagcatgacgactaacatttctatcagtgtaaatcccttt

SEQ ID NO: 10044 - DNA, 50 bp, Bacillus licheniformis
  source 1..50: mol_type = genomic DNA
aaggggttattacccctatttattttaataaatatgggtaataaccctta

SEQ ID NO: 10045 - DNA, 40 bp, Bacillus licheniformis
  source 1..40: mol_type = genomic DNA
gataatatcgactaacatttttgtcactgtaaaacccagt

SEQ ID NO: 10046 - protein, 540 aa, Coprococcus comes
MKQPYNTTIYNTALYLRLSRDDELQGESGSIQTQRMMLRQYAAEHGLTVVDEYIDDGWSGTNFERPSFQRMIDDIEDGKINCVVTKDLSRLGRNYILTGQYTEIYFPSKGVRYIAINDNVDTINGESELAPFLNILNEMHARQTSKKVKAAMHTRFANGAHYGAYAPLGYVKDPDKKGHLLIDPETRWIVEKIFDLAVHGRGAASITRILVEEKVPTPGWLNYERYGTFANIYAGAPAEKAYAWTIAQVKSILKEETYIGHSVHNKQSNISFKNKKKVRKPQEEWYRVENTHEAIISEEVFQKVQELIASRRRRQKNGTTQIFSGLVKCADCGWSLAYGVNSQNKNPYAHYHCSKYGQGLRQCSMHYIRYDVLYAYVLARLQYWSMQVQKDEDKLLKRLLNASDRERNSAKKKQAAELKKAAKRKAEVDGLFAKMYEDWSAGRITEYNFNMLSKKYQNEQKELETKIRQLHETMEAAVQTAADAEKWIALMKQYVNPVELTAELLNTLIEKITVHEAVKGEDGSREQEVEIYYRFIGKID

SEQ ID NO: 10047 - DNA, 50 bp, Coprococcus comes; identical to SEQ ID NO: 3657
  source 1..50: mol_type = genomic DNA

SEQ ID NO: 10048 - DNA, 40 bp, Coprococcus comes
  source 1..40: mol_type = genomic DNA
tgtttcaaattgggaaaacggaaaaagttatcctgatttg

SEQ ID NO: 10049 - DNA, 50 bp, Coprococcus comes
  source 1..50: mol_type = genomic DNA
caatatctttaattaagggaaacggcagtttcccatagttaaagatacca

SEQ ID NO: 10050 - DNA, 40 bp, Coprococcus comes
  source 1..40: mol_type = genomic DNA
cttttccattttggaaaaggcaaaaatttatcctgacctg

SEQ ID NO: 10051 - protein, 569 aa, Clostridioides difficile
MPRRRKSQESRLTNNRTIWKVAVYIRLSREDGNDESLSVINQKKILKEYLEEMFEDEYVLVDFYVDDGLTGTDDERESFQRMIKDVKQGKVNCIICKTLARAFRNYSDQGYFLEEFLPLHRTRFICLGSPKFDTYLNPEVITDGLDVPITGLMNDRYAARASADIRRTFNTKRRNGEFIGAFAPYGYKKSPDNKNKLIIDEEAAQVIRDIFRWRVEEGINKLGIVRRLNELGTLTPTKYKHSKGLMLKNPKLDKQDGMWSMNTISTILKNRMYIGDMVQGRQRVISYKVHKTICTPENEWFIVENTHEAIIDKDTYLKAQELDQRDIRMSPKGRNVYLFSGFLRCADCKRSMTKKTNKNKLNDGTVKEYNYYICSTYALKNKSKCSRHSIKLEILEEAVLKAIQIQIAMVENMSEVISEINKQAIIVNQSSRLKKQLNEKQKELEKIICVTDNLYMDWKSEEISRNEYARMKSRFEIKAEEIRRIISNIEAEIQSSSKGVGDNDPYLKTFLKYKNIKELNRGILIELIDAIYIHENNEITIQFKFADQYKRLKEFIKDNHFSKKLKYNN

SEQ ID NO: 10052 - DNA, 50 bp, Clostridioides difficile
  source 1..50: mol_type = genomic DNA
acttgtctatacgtcaatggttcaaatgaaccatagatggatagataata

SEQ ID NO: 10053 - DNA, 40 bp, Clostridioides difficile
  source 1..40: mol_type = genomic DNA
ctttggattccttggacctaatggttcaggaaaatccaca

SEQ ID NO: 10054 - DNA, 50 bp, Clostridioides difficile
  source 1..50: mol_type = genomic DNA
acttgtctatacgtcaatggttcatctgaaccatagatggatagataata

SEQ ID NO: 10055 - DNA, 40 bp, Clostridioides difficile
  source 1..40: mol_type = genomic DNA
ctcttgctttcttggaccttctcttccaagaaaatacaca

SEQ ID NO: 10056 - protein, 505 aa, Clostridium sporogenes
MDRICIYLRKSRADEELEKTIGEGETLSKHRKALLKFAKEKKLNIVEIKEEIVSADSIFFRPKMVELLKEVESKQYTGVLVMDIQRLGRGDTEDQGIITRIFKESHTKIITPQKTYDLDDDLDEDYFEFESFMGRKEYKMIKKRMQGGRVRSVEDGNYIATNAPYGYDIHWINKSRTLKANSKESEIVKLIFKLYIEGNGAGTIAKHLNDLGYKTKFGNNFSNSSIIFILKNPIYIGKITWKKKDIRKSKDPNKVKDTKTRDKSEWIISDGKHDAIIQESTFEKAQEILNNKYHIPYKLANPPANPLAGLVICSKCNGKMVMRKYGKKLPHLICTNTKCNNKSARFDYIEKSLLEGLEEYLKNYKVNVKSNSKESNLKPYEQQLDALNKELIVLNEQKLKLFDFLEREIYTEEVFLERSKNLDERINTTTLAINKIKKILDNEKKKNNKNDIVKFEKILEGYKKTKDIQKKNELIKSLIFKIEYKKEQHQRNDDFDIRLFPKLLR

SEQ ID NO: 10057 - DNA, 50 bp, Clostridium sporogenes
  source 1..50: mol_type = genomic DNA
ggtgtatatcatgcctaacgcaattcattacattatacatgatatacacc

SEQ ID NO: 10058 - DNA, 40 bp, Clostridium sporogenes; identical to SEQ ID NO: 6918
  source 1..40: mol_type = genomic DNA

SEQ ID NO: 10059 - DNA, 50 bp, Clostridium sporogenes
  source 1..50: mol_type = genomic DNA
ggtgtatatcatgcctaacgcaatttattacattatacatgatatacacc

SEQ ID NO: 10060 - DNA, 40 bp, Clostridium sporogenes
  source 1..40: mol_type = genomic DNA
tatatctatgggagaaattttattttatttttattatact

SEQ ID NO: 10061 - protein, 504 aa, Clostridium botulinum
MRICMYLRKSRADEELEKTLGEGETLSKHRKALLKFAKEKNLNIVEIKEEIVSGESLFFRPKMLELLKEIENKQYSGVLVMDMQRLGRGNMQDQGIILETFKKSNTKIITPMKTYDLSNDFDEEYSEFEAFMSRKELKMINRRMQGGRVRSVEDGNYIATNAPYGYDIHWINKARTLKPNQKESEIVKLIFKLYIEGNGAGTIAKHLNSLGYKTKFGNSFNNSSIIFILKNPVYIGKITWKKKDIRKSKDPNKVKDTRTRDKSEWIIVDGKHDPIIDQITWKQAQEILNNRYHVPYKLVNGPANPLAGLIICTTCKSKMVMRKLRGTDRILCKNNKCNNISNRFDAVEKSVVESLENYLKAYKVNLPELNKTSNLKLYEQQISTLKKELKILNEQKLKLFDFLERGIYDEDTFLKRSKNLDERIEITNESLSNLNQIIAKENKAIKKEDIIKFEKVLDSYKSTADIRLKNELMKTLIFKIEYTKNKKGNDFKIKVFPKLKPLNI

SEQ ID NO: 10062 - DNA, 50 bp, Clostridium botulinum
  source 1..50: mol_type = genomic DNA
aacatataacatgtttaagggtattcattacccacttcatgttgtatgtt

SEQ ID NO: 10063 - DNA, 40 bp, Clostridium botulinum; identical to SEQ ID NO: 6918
  source 1..40: mol_type = genomic DNA

SEQ ID NO: 10064 - DNA, 50 bp, Clostridium botulinum
  source 1..50: mol_type = genomic DNA
aacatataacatgtttaagggtatttattacccacttcatgttgtatgtt

SEQ ID NO: 10065 - DNA, 40 bp, Clostridium botulinum; identical to SEQ ID NO: 10060
  source 1..40: mol_type = genomic DNA

SEQ ID NO: 10066 - protein, 557 aa, Clostridium botulinum
MKITLLYYIKKFNIYCNRYLSQQINISVGIIGFYQFKNVTNSVTDVLKRGDNLDRICIYLRKSRADEELEKTIGVGETLSKHRKALLKFAKEKKLNIMEIKEEIVSADSIFFRPKMIELLKEVENNQYTGVLVMDIQRLGRGDTEDQGIIARIFKESHTKIITPMKTYDLDDDLDEDYFEFESFMGRKEYKMIKKRMQGGRVRSVEDGNYIATNPPFGYDIHWINKSRTLKFNSKESEIVKLIFKLYTEGNGAGTIANYLNSLGYKTKFGNNFSNSSIIFILKNPVYIGKITWKKKDIRKSKDPHKVKDTRTRDKSEWIIADGKHEPIIDEKIWNKAQEILNNKYHIPYKIANGPANPLAGVVICSKCNSKMVMRKYGKKLPHLICNNKECNNKSARFDYIEKAVLEGLDEYLKNYKVNVKANNKTSDIKPYEQQLNALSKELIVLNEQKLKLFDFLEREVYTEEIFLERSKNLDERINTSTLAINKIKNILDDEKKKNNKNDIVKFEKILEGYKKTKDIQKKNELMKSLIFKIEYEKEQHQRNDDFDIRLFPKLLR

SEQ ID NO: 10067 - DNA, 50 bp, Clostridium botulinum
  source 1..50: mol_type = genomic DNA
ggtgtatatcatgcctaacgcaattcattacatcatacatgttgtacacc

SEQ ID NO: 10068 - DNA, 40 bp, Clostridium botulinum; identical to SEQ ID NO: 6918
  source 1..40: mol_type = genomic DNA

SEQ ID NO: 10069 - DNA, 50 bp, Clostridium botulinum
  source 1..50: mol_type = genomic DNA
ggtgtatatcatgcctaacgcaatttattacatcatacatgttgtacacc

SEQ ID NO: 10070 - DNA, 40 bp, Clostridium botulinum; identical to SEQ ID NO: 10060
  source 1..40: mol_type = genomic DNA

SEQ ID NO: 10071 - protein, 504 aa, Clostridium botulinum
MRICMYLRKSRADEELEKTLGEGETLSKHRKALLKFAKEKNLNIVEIKEEIVSGESLFFRPKMLELLKEIENKQYSGVLVMDMQRLGRGNMQDQGIILETFKKSNTKIITPMKTYDLSNDFDEEYSEFEAFMSRKELKMINRRMQGGRVRSVEDGNYIATNAPYGYDIHWINKARTLKPNQKESEIVKLIFKLYIEGNGAGTIAKHLNSLGYKTKFENSFNNSSIIFILKNPVYIGKITWKKKDIRKSKDPNKIKDTRTRDKSEWIVVDGKHDPIIDQITWKQAQEILNNRYHIPYKLVNGPANPLAGLIICATCKSKMVMRKLRGTDRILCKNNKCNNISNRFDAVEKSVVESLENYLKAYKVNLPELNEISNLKLYEQQISTLKKELKILNEQRLKLFDFLERGIYDEDTFLKRSKNLDERIEITNESLSNLNQIIAKENKAIKKEDIIKFEKVLDSYKSTADIRLKNELMKTLIFKIEYTKNKKGNDFKIKVFPKLKPLNI

SEQ ID NO: 10072 - DNA, 50 bp, Clostridium botulinum; identical to SEQ ID NO: 10062
  source 1..50: mol_type = genomic DNA

SEQ ID NO: 10073 - DNA, 40 bp, Clostridium botulinum; identical to SEQ ID NO: 6918
  source 1..40: mol_type = genomic DNA

SEQ ID NO: 10074 - DNA, 50 bp, Clostridium botulinum; identical to SEQ ID NO: 10064
  source 1..50: mol_type = genomic DNA

SEQ ID NO: 10075 - DNA, 40 bp, Clostridium botulinum; identical to SEQ ID NO: 10060
  source 1..40: mol_type = genomic DNA

SEQ ID NO: 10076 - protein, 504 aa, Clostridium botulinum
MRICMYLRKSRADEELEKTLGEGETLSKHRKALLKFAKEKNLNIVEIKEEIVSGESLFFRPKMLELLKEIENKQYSGVLVMDMQRLGRGNMQDQGIILETFKKSNTKIITPMKTYDLSNDFDEEYSEFEAFMSRKELKMINRRMQGGRVRSVEDGNYIATNAPYGYDIHWINKARTLKPNQKESEIVKLIFKLYIEGNGAGTIAKHLNSLGYKTKFENSFNNSSIIFILKNPVYIGKITWKKKDIRKSKDPNKVKDTRTRDKSEWIIVDGKHDPIIDQITWKQAQEILNNRYHVPYKLVNGPANPLAGLIICTTCKSKMVMRKLRGTDRILCKNNKCNNISNRFDAVEKSVVESLENYLKAYKVNLPELNKTSNLKLYEQQISTLKKELKILNEQKLKLFDFLERGIYDEDTFLKRSKNLDERIEITNESLSNLNQIIAKENKAIKKEDIIKFEKVLDSYKSTADIRLKNELMKTLIFKIEYTKNKKGNDFKIKVFPKLKPLNI

SEQ ID NO: 10077 - DNA, 50 bp, Clostridium botulinum; identical to SEQ ID NO: 10062
  source 1..50: mol_type = genomic DNA

SEQ ID NO: 10078 - DNA, 40 bp, Clostridium botulinum; identical to SEQ ID NO: 6918
  source 1..40: mol_type = genomic DNA

SEQ ID NO: 10079 - DNA, 50 bp, Clostridium botulinum; identical to SEQ ID NO: 10064
  source 1..50: mol_type = genomic DNA

SEQ ID NO: 10080 - DNA, 40 bp, Clostridium botulinum; identical to SEQ ID NO: 10060
  source 1..40: mol_type = genomic DNA

SEQ ID NO: 10081 - protein, 477 aa, Bacillus tropicus
MRCAIYARVSTEEQAVEGYSISAQKKKLTAYCEAQDWDVVGYYVDEGISAKNTNRPELIRMIDHIKKGLIDCVLVYRLDRLTRSVLDLYNLLDVFEKYDCKFKSATEVYDTTTAIGRLFITIIAALAQWERENIGERVRVGQQEKVRQGKYTSGRKPYGYNADHKEGVLTVIEEEAKVVRSIFNDYLKGHSAQRICKKLNTIGTPGRNYWNEKAILYILENPLYVGTLRWRKETEHYFEIPNSVPPIIDKELFDNVQKLRESRRESHPRSAYGNYIFSGIIKCPRCGRSLVGNYVTSKKKGGTVTKYKQYFCRGRKLNVCNMGSMSERKLEKVIIPYILSLHIHATDEDVLTGQSNTEDEIIQIKNELKVIEKRRKKWQYAWANEHLKDEEFTELMQEESAREKVLTEELYKLKPAENKKLKNDELKEILNDMKLNWNNLNDEEKKILMQIILKRIVVERSDEWQAYELKIVEMEFN

SEQ ID NO: 10082 - DNA, 50 bp, Bacillus tropicus
  source 1..50: mol_type = genomic DNA
tttatgtgttataagaggttttgcccagcaaacctcatataacacataaa

SEQ ID NO: 10083 - DNA, 40 bp, Bacillus tropicus
  source 1..40: mol_type = genomic DNA
tttcgttccttcttttctgcctaaaaaactagaaccatgc

SEQ ID NO: 10084 - DNA, 50 bp, Bacillus tropicus
  source 1..50: mol_type = genomic DNA
tttatgtgttataagaggttttgctcagcaaacctcatataacacataaa

SEQ ID NO: 10085 - DNA, 40 bp, Bacillus tropicus
  source 1..40: mol_type = genomic DNA
ttttgttcattgttttatctccaaaaacctagaaaaatgc

SEQ ID NO: 10086 - protein, 477 aa, Bacillus paranthracis
MRCAIYARVSTDEQAVEGYSISAQKKKLTAYCEAQDWDVVGYYVDEGISAKNTNRPELTRMIDHIKKGLIDCVLVYRLDRLTRSVLDLYTLLDVFEKYECKFKSATEVYDTTTAIGRLFITIIAALAQWERENIGERVRVGQQEKVRQGKYTSGRKPYGYNADHKEGILTIVEEEAKVVRSIFNDYLKGHSAMRIGKKLNSIGTPGRDYWNEKAVMYILENPLYVGTLRWRKETEHYFEIPNSVPAIIEKELFDNVQKLRESRRESHPRSAYGSYIFSGIIKCPRCGRPLVGNYVTSKKKDGTVTKYKHYFCRGRKLGVCNMGSMSERKLEKTIIPHILSLHVHATDEDVSIGQNNTEDEIIQIKNELKIIEKRRKKWQYAWANEHLKDEEFTELMQEENAREKVLTEELYKLKPAENKKLKNEELKEILNDMKLNWNNLNDEEKKILMQIILKKLVVERSDEWQAYELKIVEMEFN

SEQ ID NO: 10087 - DNA, 50 bp, Bacillus paranthracis
  source 1..50: mol_type = genomic DNA
tttatgtattacaagaggttttgcccagcaaacctccaataacacataaa

SEQ ID NO: 10088 - DNA, 40 bp, Bacillus paranthracis; identical to SEQ ID NO: 10083
  source 1..40: mol_type = genomic DNA

SEQ ID NO: 10089 - DNA, 50 bp, Bacillus paranthracis
  source 1..50: mol_type = genomic DNA
tttatgtattacaagaggttttgctcagcaaacctccaataacacataaa

SEQ ID NO: 10090 - DNA, 40 bp, Bacillus paranthracis; identical to SEQ ID NO: 10085
  source 1..40: mol_type = genomic DNA

SEQ ID NO: 10091 - protein, 558 aa, Blautia obeum
MLQQSNSTITSIYPMGNQTEELTALYCRLSQDDKQEGDSNSIINQKKILKRYAIEHGYQPYVFFVDDGFSGTNFNRPDFQRMIAEVEAGRIKRVIVKDMSRLGRDYLQVGMYTEIMFPNMDVHFIAVNDGVDSHVGDNEFTPFRNIINEWYAKDTSKKIRAVKRSKGMAGEHIGSHAPYGYMKNPDNKKEWLIDEEAAEVVREIFRLCVNGYGPTRIANILTERKILCPTYYALEHGEKPRTVLPPDKYLWSATVVSHILERMDYLGHTVNFKTHVKSYKNRKKIDNSPEQWRIFENTHEAIIDKETFEIVQKIRSGKRRPTKMGDMPMFSGLLYCADCGSKMTFHRQMAQSAEKHNFVCSNYRHNSKSCTMHYIRNVVVEQIVLENLKEVIRYVSDYEDEFVQMVMDTDMRQRNKELSQKKKRLTEIHSRIQELDKIFQRIYEDNISGKLSDERFMKLSKGYEEEQHTLQEEQTFLEKELQKEEKQSVDVKQFLSVVRKYTNLTELTPEIVHEFIDKIIVHAPDKSSGKRLQEIEIIYNHIGVFDHSKVILWKGKAV

SEQ ID NO: 10092 - DNA, 50 bp, Blautia obeum; identical to SEQ ID NO: 3207
  source 1..50: mol_type = genomic DNA

SEQ ID NO: 10093 - DNA, 40 bp, Blautia obeum
  source 1..40: mol_type = genomic DNA
tgtatcagaaactcctatattatcaagcattatgtcacta

SEQ ID NO: 10094 - DNA, 50 bp, Blautia obeum
  source 1..50: mol_type = genomic DNA
aaacatccttaccaaaccctcacagtagcaaggctttgataaggatggta

SEQ ID NO: 10095 - DNA, 40 bp, Blautia obeum
  source 1..40: mol_type = genomic DNA
tgtattaaaaatttccatagtatcaagacatatttcacta

SEQ ID NO: 10096 - protein, 520 aa, Roseburia intestinalis
MPTSKNTARKYAAGGSSDNSCGVEPLRAVIYARYSSSGQREESIEGQLRDCYEFAKKHGIIVIGEYIDKAMTGRVDRRPDFQRMMKDSEKGRFNCVLLWKMDRFARNRYDSAMYKYKLKKNGIRIFYAKETIPDGPEGIILESVMEGYAEYYSENLAQNVKRGNYDSALELKTLGKTCLGLKTGPDGRYMIDQAEAAIVRRIFEEYAEGERAKDIYERLNSEGYRTSRGGKFNKNSLRRILSNKKYIGVYEYEDIYVENGIPAIITDRDLFERVQKMLKINHDAPARGKAQNFLLTTKLFCGLCGSPMIGDGGTSHTGKAYAYYSCTKRKRGRSCKKESVPKDWIEDLVVGELVKIVHNDELIEQIADRVMEYQKREKDQSGLHALEIRQKENEKAISNMLAAIEAGIITPSTKTRLMELEADRADIEKGIAHELLAEPEFERDQIIYFLERFRSGDINDEAYRIMLVDTFLNSVYLYDDDHLVLVMNYSGENCKVDLKLVEGAVSGDGCKGSAFAPSSA

SEQ ID NO: 10097 - DNA, 50 bp, Roseburia intestinalis
  source 1..50: mol_type = genomic DNA
ggttcagcttttgcgccgtcaagcgcactcaatggcgcgaagccgaaccc

SEQ ID NO: 10098 - DNA, 40 bp, Roseburia intestinalis
  source 1..40: mol_type = genomic DNA
ggttcaagtcccattgccggcattgaaaaaagattcagtt

SEQ ID NO: 10099 - DNA, 50 bp, Roseburia intestinalis
  source 1..50: mol_type = genomic DNA
ggttcagcttttgcgccgtcaagctaactcaatggcgcgaagccgaaccc

SEQ ID NO: 10100 - DNA, 40 bp, Roseburia intestinalis
  source 1..40: mol_type = genomic DNA
agttcctgtcccattgaaataattgaaaagaggctcagtt

SEQ ID NO: 10101 - protein, 537 aa, Streptococcus suis; identical to SEQ ID NO: 641

SEQ ID NO: 10102 - DNA, 50 bp, Streptococcus suis; identical to SEQ ID NO: 402
  source 1..50: mol_type = genomic DNA

SEQ ID NO: 10103 - DNA, 40 bp, Streptococcus suis
  source 1..40: mol_type = genomic DNA
tgtttccaagtgggaaaatggtgaagccacaccagatatt

SEQ ID NO: 10104 - DNA, 50 bp, Streptococcus suis
  source 1..50: mol_type = genomic DNA
taatatttttaactaagggaaaccgctgtttcccaaacaaaaagatatta

SEQ ID NO: 10105 - DNA, 40 bp, Streptococcus suis; identical to SEQ ID NO: 1675
  source 1..40: mol_type = genomic DNA

SEQ ID NO: 10106 - protein, 540 aa, Streptococcus suis
MKQPYNTTIYNTALYMRLSRDDELQGESGSIQTQRMMLRQYAAEHGLNVIDEYIDDGWSGTNFDRPDFQRMIDDIEAGKINCVVTKDLSRLGRNYILTGQYTEIYFPSKGVRYIAVNDNVDTINGENELAPFLNILNEMHARQTSKKVKAAMRTRFANGAHYGAYAPLGYVKDPDKKGHLLIDPETRWIIEKIFDLAVHGRGAASITRILVEEKVPTPGWLNFQRYGTFANIYAGAPEEKAYAWTIAQVKSILKEETYIGHSVHNKQTNISFKNKKKVRKPKEEWYRVENTHEAIISEDVFRQVQEQICNRRRRQKNGTTQIFSGLVKCADCGWSLAYGMNSQNKNPYAHYHCSKYGQGLHQCSMHYIRYDVLYAYVLSRLQYWSVLAQQDGDKLLKRLLNASDKERNTARKRQTAELKKAEKRKAEVDTLFAKMYEDWSAGRITEYNFNMLSEKYQGEQRELDVKIERLHEAMETAAQTAVDAEKWIGLMKQYVNPTELTAELLNTLIEKILVHEAVKSEDGSREQEVEIFYRFIGKIE

SEQ ID NO: 10107 - DNA, 50 bp, Streptococcus suis; identical to SEQ ID NO: 297
  source 1..50: mol_type = genomic DNA

SEQ ID NO: 10108 - DNA, 40 bp, Streptococcus suis
  source 1..40: mol_type = genomic DNA
tgtttccaagtgggaaaatggcgaagcaacgccagatatt

SEQ ID NO: 10109 - DNA, 50 bp, Streptococcus suis
  source 1..50: mol_type = genomic DNA
caatatctttaactaagggaaacggcagtttcccaaagttaaagatacca

SEQ ID NO: 10110 - DNA, 40 bp, Streptococcus suis; identical to SEQ ID NO: 1675
  source 1..40: mol_type = genomic DNA

SEQ ID NO: 10111 - protein, 540 aa, Streptococcus suis; identical to SEQ ID NO: 296

SEQ ID NO: 10112 - DNA, 50 bp, Streptococcus suis; identical to SEQ ID NO: 297
  source 1..50: mol_type = genomic DNA

SEQ ID NO: 10113 - DNA, 40 bp, Streptococcus suis; identical to SEQ ID NO: 10108
  source 1..40: mol_type = genomic DNA

SEQ ID NO: 10114 - DNA, 50 bp, Streptococcus suis; identical to SEQ ID NO: 10109
  source 1..50: mol_type = genomic DNA

SEQ ID NO: 10115 - DNA, 40 bp, Streptococcus suis; identical to SEQ ID NO: 1675
  source 1..40: mol_type = genomic DNA

SEQ ID NO: 10116 - protein, 557 aa, Paenibacillus woosongensis
MINFPELNKVEDVAVYPRVSSDDQQERETIQSQIEFAIKYCDLHGLNIVDWYKDDGVTGTIPLADRPEGQRLLEDAKAGKFKTVLIYNMKRLGRKARITLDAIYQLEEYGVTIKSMTEPFDTSTPMGRFVITLLAGQAEFDRDTLVETLWHGANRHARLGKWLGGIVPYGYRVDAEGFLEVNEDPLPGNEDLSEAGVVRLVYHLIADQKMTTIQVADYLNALNIPPSYVVNKRKVKDRGKRKVNTAGIWYPGRVGSIIKNSTYKGIHDYGKRSKKDREIIRREVPAIVSETVWDVAQETLRENQLEGVRNATRKYLLRGIIKCGCCGRTYVGTSYSTGSKSSDGSRPMKAFYVCTGKSAYKGPSHEKCRSKNIPGEWIEEMVWAECVNFILNPGDAIKELQEGMNVKRSLRNEYFHEIDLVVKSLEDKENERQSILSLYRQKMITAADVEKQLQEIMEESMNLEKRIKQLNALLNADELVTVQFRNAEKLLLDFRSKIDKDPSYETKRQIVKTLVNKITVYTIQPPDGSPQKRKAEVKVQYSFESPKGTDDTLVRAD

SEQ ID NO: 10117 - DNA, 50 bp, Paenibacillus woosongensis
  source 1..50: mol_type = genomic DNA
ccccaaaggtactgacgacacgcttgtccgtgcggataataaccttggca

SEQ ID NO: 10118 - DNA, 40 bp, Paenibacillus woosongensis
  source 1..40: mol_type = genomic DNA
ggcggtatctctaaatccttgtccgtgcggattttttgga

SEQ ID NO: 10119 - DNA, 50 bp, Paenibacillus woosongensis
  source 1..50: mol_type = genomic DNA
ccccaaaggtactgacgacacgctcttccgtgcggataataaccttggca

SEQ ID NO: 10120 - DNA, 40 bp, Paenibacillus woosongensis
  source 1..40: mol_type = genomic DNA
agtggtacttctatattctcttccctgaggatttcttgga

SEQ ID NO: 10121 - protein, 539 aa, Clostridium sporogenes
MKAAIYSRKSMFTGKGDSVENQVQMCKDYGNRLNIDEYIIYEDEGYSGGNINRPKFQELLQDVKEKKFDVLICYRLDRISRNVADFSSTLELLQDNNISFVSIKEQFDTSTPMGKAMVYIASVFAQLERETIAERVRDNMLELAKSGRWLGGQTPLGFESEKISYFDAEMKERTMYKLSPESKELELVKLIYNKYLETGSIHLALKYLLSNNIKGKNGGEFASMSINDILRNPVYAKSNEMVLNYLKDKGMNVCGTANGNGILIYNKRNSKYKRKDINEWIAAVSKHKGIIPANAWIEVQKTLDKNSSKSTPRQGTSKKSILSGVLKCDRCGAPMRVTYGRKRKDGTSIYYYTCTMKAHSGKTRCDNPNVRGDYLEKSIIKKLQNLNSDVVIKELEEYKKQLVATTENSIIKNISKEIEEKKKEMDSLLKQLSKVESPVASEFIISKVDSLGTEIKDLEISLTKTTDKKKENSNIELNIEIVLQALNEFNDFFNSVESLKNDELTIQRKRYLLERAVDEITIDGETKKIGIDLWGSKKK

SEQ ID NO: 10122 - DNA, 50 bp, Clostridium sporogenes
  source 1..50: mol_type = genomic DNA
catcgcaattatataaagcatgtacatgcatgattgatataattgcgaca

SEQ ID NO: 10123 - DNA, 40 bp, Clostridium sporogenes
  source 1..40: mol_type = genomic DNA
agattttcctggtcataaacatgcatggctttatgatgta

SEQ ID NO: 10124 - DNA, 50 bp, Clostridium sporogenes
  source 1..50: mol_type = genomic DNA
catcgcaattatataaagcatgtatctgcatgattgatataattgcgaca

SEQ ID NO: 10125 - DNA, 40 bp, Clostridium sporogenes
  source 1..40: mol_type = genomic DNA
agattatttttctcataaatctacatgaatttatgttgta

SEQ ID NO: 10126 - protein, 519 aa, Clostridium cochlearium
MIAVYCRVSTEDQHERGTIENQIEFAKKYCDLHELPIFKIYKEDGISGTIPLEDRPCGKELLQDAENKKIDTLLLYKLDRLGRSARITLNSIHLLEQLNVQIKSMTEPFDTSSPSGRFMITMLAGVADLERSTILERMWLGTNRAAREGKWLGGIVPYGYYVDNKKYLQINNNKLPNLDLSEADVIKLIFSLSVDKGYSSIQISDYLNSLGIPTSYMKDNRRFAKGKRKVSVAGTWGPSTVLRILRNKTYMGIHEYGKRSKKKNREIITRKIPSIVSEDTWYKAQETIEDNKIEANRNRKRQYLLRGLIKCSICGRTYVGANHGKNKYYYICNGKITYRDSCKSKNLNGKYIEELVWNDIVEFINNPKDSINVLKENLNSKNNDKLLEHKKCLEQNLKTKDTEKQSILDLFRKNLIDYSDVEIQLNKINEEYNNIILAIDYIEKDIKSCNDINNIDTINELLNNMKKKINGQLNFEDKRNIVKMLVDKITVETKKDNAGTKKAILHINYVFKVSSHTDK

SEQ ID NO: 10127 - DNA, 50 bp, Clostridium cochlearium
  source 1..50: mol_type = genomic DNA
ttaaagtaagttcgcacacggacaagggttcatattccaactttaacttt

SEQ ID NO: 10128 - DNA, 40 bp, Clostridium cochlearium
  source 1..40: mol_type = genomic DNA
tatctttagaacagggacaaggatttaatgaagcaattaa

SEQ ID NO: 10129 - DNA, 50 bp, Clostridium cochlearium
  source 1..50: mol_type = genomic DNA
ttaaagtaagttcgcacacggacataggttcatattccaactttaacttt

SEQ ID NO: 10130 - DNA, 40 bp, Clostridium cochlearium
  source 1..40: mol_type = genomic DNA
tatattttgaaaaggaacataaaattcatgaagcaaaaaa

SEQ ID NO: 10131 - protein, 494 aa, Fusobacterium necrophorum
MNRRAVGYCRFSSDSQREESIDAQLRAIRDFCKQNNYDLIKVYKDEGISGTSTKDRESFLQLIEDSKKNMFDYVIVHKFDRFARNRYDHAIYEKILNDNKVKLLSVLERLNDSPESIILKSVLTGMNEYYSLNLSREIKKGLNENALKAMHTCGIPPLGYDLDENRRYIINEKEAEAVRLIFSLAADGIGFASIARTLNERSYKNKRGREFKKTSIRDTLLNQKYIGTYFHSLKNRDGTFRRDPILIENAHPAIIEKSLFYKVQTRFKNHLKGPRDRKNTTYYLTGFCRCGECGGSFSGGYRSAHIDGSVHYGYECRKRRAKENNCKNKPIFKEVLEPVILELIKSEIFAEENMEILVKDISEVIKKYKISQEQEEEYYVKEIEKLNKMVLKLLDKNLEGFLSDEIFRKKNKELNERILIMKEKLYSLETLDQLKEDNLRKYLLKLKNDSTHSLNRKIVESFLHEVIIYQDHIEVTLRRFPKQILDMSKDGGSR

SEQ ID NO: 10132 - DNA, 50 bp, Fusobacterium necrophorum
  source 1..50: mol_type = genomic DNA
gatatgagtaaagatggcggaagtagagactttcattttttactaaaatt

SEQ ID NO: 10133 - DNA, 40 bp, Fusobacterium necrophorum
  source 1..40: mol_type = genomic DNA
aaaaaaatatggcggaagtagagggaatcgaacccacaag

SEQ ID NO: 10134 - DNA, 50 bp, Fusobacterium necrophorum
  source 1..50: mol_type = genomic DNA
gatatgagtaaagatggcggaagtgaagactttcattttttactaaaatt

SEQ ID NO: 10135 - DNA, 40 bp, Fusobacterium necrophorum
  source 1..40: mol_type = genomic DNA
gaagaaatatggcggatgggaagggaagggaaggcaaaag

SEQ ID NO: 10136 - protein, 494 aa, Fusobacterium necrophorum
MNRRAVGYCRFSSDSQREESIDAQLRAIRDFCKQNNYDLIKVYKDEGISGTSTKDRESFLQLIEDSKKNMFDYVIVHKFDRFARNRYDHAIYEKILNDNKVKLLSVLERLNDSPESVILKSVLTGMNEYYSLNLSREIKKGLNENALKAMHTCGIPPLGYDLDENRRYIINEKEAEAVRLIFSLAADGVGFASIARTLNERSYKNKRGREFKKTSIRDTLLNQKYIGTYFHSLKNRDGTFRRDPILIENAHPAIIEKSLFYKVQTRFKNHLKGPRNRKNTTYYLTGFCRCGECGGSYSGGYRSAHIDGSIHYGYECRKRRAKENNCKNKPVLKEVLEPVILELIKSEIFTEENMEILVKDISEVIKKYKMSQEQEEEYYVKEIEKLNKMLLKLLDKNLEGFLSDEIFRKKNKELNERILIMKEKLYSFETLDQVKEDNLRKYLLKLKNDSTHSLNRKIVESFLYEVIIYKNHIEVTLRRFPKQILDMSKDGGSR

SEQ ID NO: 10137 - DNA, 50 bp, Fusobacterium necrophorum; identical to SEQ ID NO: 10132
  source 1..50: mol_type = genomic DNA

SEQ ID NO: 10138 - DNA, 40 bp, Fusobacterium necrophorum; identical to SEQ ID NO: 10133
  source 1..40: mol_type = genomic DNA

SEQ ID NO: 10139 - DNA, 50 bp, Fusobacterium necrophorum; identical to SEQ ID NO: 10134
  source 1..50: mol_type = genomic DNA

SEQ ID NO: 10140 - DNA, 40 bp, Fusobacterium necrophorum; identical to SEQ ID NO: 10135
  source 1..40: mol_type = genomic DNA

SEQ ID NO: 10141 - protein, 582 aa, Citrobacter freundii
MTKRLYSYIRWSTDKQTGNTSMDRQTEKARKFAALHKLEYSEILDAGVSAFRGKNTTQGALAGFIKAVEAGVIPSDSWLYVENLDRLTRQDVMTALNLFTGLLQLGLTIVTGMDGKIYSEESVKNNVTDLMLSLFLFSRANEESLTKQKRAHETALKLIDRHRSGLPVNIKSAGSAPWWIDASMGTYEAVKPHPVHFKAAKEAVRLLLSGWGCFRVTEYLNQNSEVYPPPKGNRGKGMKRAGSGWVVANLKAMRKNRALYGEKEITIDGVTHRLSNYFPPVCSQSDYARLQEIAECNRMPQGEEKKIITLLSGMGILRCGHCGGSMSYFSKEGRIRYVCETGKNRSSTCRVWSVSGQLVERCLLAPVVRGYMDLMMGKHEHGEDLKRLLESKQGELQGIEDQIANITKAITLGGNIPALVASLQTLEHTKDGLLVELDRIAQREAVQSTQAQQIESMVDVFELLTPAILTDVTDPNRLRLREVVRSVITSVTLSKQPNKALTLSYELPDKTRYVYGGVLSDGVKSYQLTVENNIQIQGIEGTPQGDEAIERVREAEITIDQKVGEILGSFPPLNPAHFFGKR

SEQ ID NO: 10142 - DNA, 50 bp, Citrobacter freundii
  source 1..50: mol_type = genomic DNA
gttgtcttctaaataaatttcgggttccccaacttcaaatacattccaat

SEQ ID NO: 10143 - DNA, 40 bp, Citrobacter freundii
  source 1..40: mol_type = genomic DNA
atcaacgggatacttgggatttcccggatggctaatgatg

SEQ ID NO: 10144 - DNA, 50 bp, Citrobacter freundii
  source 1..50: mol_type = genomic DNA
gttgtcttctaaataaatttcgggtaccccaacttcaaatacattccaat

SEQ ID NO: 10145 - DNA, 40 bp, Citrobacter freundii
  source 1..40: mol_type = genomic DNA
atgaagggttttctttccatatccctgatggctaatgatg

SEQ ID NO: 10146 - protein, 557 aa, Eisenbergiella tayi
MMANMTEMLSYHNVLSLDALTALYCRLSVDDANDGDSNSIQNQKEMLERYCKENGFTNYRFYVDDGYSGTTFDRPDFQRMVADVRAGLVKRVIIKDMSRFGRDYLQVGMYTEMIFPEYEVHFVAVNDGVDSQKGENDLTPFRNLFNEWYARDCSKKQRAVKRMKGMSGQRISSNPPYGYIKGEGGQLVPDPEAAWVVKLMFDLAAQGLGPVRIANILTKKKIPTPGTLAFRRTGKKRNYHPEAPYNWSDSTIANILEYKEYLGHTVNFKTYSKSYKFKKRLPTPEDQQMIFENTHPALVEQEVWEQVQRLREGRPRPTKQGEMALFSGLLFCADCGSPLRAHRGQNISKNQECYCCGKYRDRTNSCTMHYIRAVVLENLVLENLKQTVTFALENEQEFVRRLMNRSAKEQQKQIQSMKKELAAKERRIGELDNIIKRLYEDNISGKLSDERFKKLSSDYEKEQRDTCSEIADIQKQVNEAESKVIKIDSFLKMARKYTSFEELSRGMLHDLIEKIVIHEGDKSSGHRQQKIDIYYTFIGEVGATQLVAQLELKGKAA

SEQ ID NO: 10147 - DNA, 50 bp, Eisenbergiella tayi
  source 1..50: mol_type = genomic DNA
aagtttccttaaccggctcccgctttagctggtgccgattaaggaaacta

SEQ ID NO: 10148 - DNA, 40 bp, Eisenbergiella tayi
  source 1..40: mol_type = genomic DNA
aaaaaccacaggatctgctttcgcgtggggtggcgcagaa

SEQ ID NO: 10149 - DNA, 50 bp, Eisenbergiella tayi
  source 1..50: mol_type = genomic DNA
aagtttccttaaccggctcccgcttgagctggtgccgattaaggaaacta

SEQ ID NO: 10150 - DNA, 40 bp, Eisenbergiella tayi
  source 1..40: mol_type = genomic DNA
gacaaccataagatctgattgcctgtggggttgggcagaa

SEQ ID NO: 10151 - protein, 457 aa, Bacillus cereus
MRCAIYRRVSTDEQAEKGFSLENQKLRLESFATSQGWEVVEDYVDDGFSGKDTNRPALQRMFSNVDKFDVILVYKLDRFTRSVKDLNEMLETIKENEIAFKSATESIDTTTATGRMILNMMGTTAQWERETISERIKDVFGKLRENGIFSTGHPPYGYRCSGNKSIEIDEEQAEIVRYIYELSKTMGLFKISVELNRKGIKTRRNNKFGQSAVKRILHNPFYCGYMEVNNKWVPIKNEGYIPIISEEEFKTTQKILTKRNKAQTRSRSVSYYPFSGIVLCPECQRAMRGDRAKYGDYYYRYYRCVYGRENINCTNRKRIRVEQVDKAFAEYISGSFENTTIKLDSKDIKSDIEYELKQLDSKIERLSDIYIEGDITKSKYNEKMNSLLNEKEKLKKDLTSCKENVDAEFVRDQINKLESIWHLIDDKTKSESIRSIFDTIKIKQDKNKVTIMDHTLL

SEQ ID NO: 10152 - DNA, 50 bp, Bacillus cereus
  source 1..50: mol_type = genomic DNA
ttttgggttaatgttccatttcctctagtaaaagtattattaacccaaaa

SEQ ID NO: 10153 - DNA, 40 bp, Bacillus cereus
  source 1..40: mol_type = genomic DNA
taagcatatccctcatactctatttttgttttccccgaaa

SEQ ID NO: 10154 - DNA, 50 bp, Bacillus cereus
  source 1..50: mol_type = genomic DNA
ttttgggttaatgttccatttccttgagtaaaagtattattaacccaaaa

SEQ ID NO: 10155 - DNA, 40 bp, Bacillus cereus
  source 1..40: mol_type = genomic DNA
aaagactatgcctcaaacttgattcttgttttctgtgaaa

SEQ ID NO: 10156 - protein, 583 aa, Eubacterium callanderi
MTQTQIHATISPCTPILSADPTVKEDAMLDQQKITILYCRLSNEDALDGESNSIQNQKEFLTRYAAEHGYTNLKILVDDGYTGTNFDRPGVQEGFALVKQGLVGCWLVKDLSRFGRDYLTVGQYTDIIFPSYDVRFIAVNDGVDSERGDGDGFAAIRNLFNEWYPRDTSKKVRVVFRQKGTSGKHLGKPPYGYRTDPADKDHWIIDEDAAPVVKRIFDLAIDGKGPEQIARILEQDKVLTTKALYAKQSENHPDPKKRKKMPERPYHWIGQSVVGILERMEYTGCTCNFKTYSKSYKLKKRIPNAIEDMCIFPDTQEAIVSQAQWDRVQELRKNKRRPTKAQRQGLFSGLLFCPDCGNKLHFATCKSFDGRQDHYVCSSYKSGRGTCSAHYIREDVLRELVLERIRAVNAYIRQDVEGFQEEWLQCRRSDQERSIREDRKRVEQAKKRLTDLDVLLSRLYEDFVLGDLSKERYKKMTADYEAEQERLKLEIEVTEEWLETQETMSADVDAFVALTQKYVDVPELTPTIVNEYIKKIEVFAPDKSSGKRVQKVKIYFNFVDDVEIPVISEPVVAKSTPGRRKTA

SEQ ID NO: 10157 - DNA, 50 bp, Eubacterium callanderi
  source 1..50: mol_type = genomic DNA
atagtaccttatcactattaagccttggcttaacagtgataaggaactaa

SEQ ID NO: 10158 - DNA, 40 bp, Eubacterium callanderi
  source 1..40: mol_type = genomic DNA
aaaaaagccctgaaaagtattgtcttttcagggcttttgc

SEQ ID NO: 10159 - DNA, 50 bp, Eubacterium callanderi
  source 1..50: mol_type = genomic DNA
atagtaccttatcactattaagccgtggcttaacagtgataaggaactaa

SEQ ID NO: 10160 - DNA, 40 bp, Eubacterium callanderi
  source 1..40: mol_type = genomic DNA
aagtaagtcttgaatagtagtgatttttaaaggcttttgc

SEQ ID NO: 10161 - protein, 547 aa, Clostridioides difficile
MNREGKKCVLYPRVSTEMQVDGYSLEGQKNSLKRFADREEMEIVGIYEDAGKSGKSIEGRPAFKKMLSDIKYGLEIDYILVYKLSRFGRNAADILNSLEFVQSYGINLICIEEGIDSSQTSGKLLISVLSAVAEIERENIIEQTMNGRREKARQGGWNGGFAPYGYYLKDNKLLIQETEAEAIRIIYDKFGNSDIGLGGIAKYLNLQGIKKIPRQNGKLETWSSHFIRLILDNPVYCGKIAYGRRTREKVKGTKNEYKQVHTDDYILEDGQHEAIISEELWQKVHAKRLATGVKQPSKIGKDRAHLLTGLLKCPICGSSMYTNKHAWTNKDGTYKEVYYYICGRNKQERGHHCDYKASLRKTEIEPLVIEAVKELVSDKYFAQEIEKRIGAQTDTSMIDKELANYERKLKEVDLNKARLEREIDNLPIDARYRERKLHDMILRLDGLYDTIVELEERIEDAKLRRNSIEMEAITLDNIYKIMLNFGKLYDIISDEEKKSIITYLIKEVQIYPHGESEMPLKSIEFNFPIYRDGKEVRKILWESGNTV

SEQ ID NO: 10162 - DNA, 50 bp, Clostridioides difficile
  source 1..50: mol_type = genomic DNA
ttgtgggaatctggtaataccgttgagacggtagtactgctttcccacaa

SEQ ID NO: 10163 - DNA, 40 bp, Clostridioides difficile
  source 1..40: mol_type = genomic DNA
ttgtcatactataacagatgaaacttttgcagttaattat

SEQ ID NO: 10164 - DNA, 50 bp, Clostridioides difficile
  source 1..50: mol_type = genomic DNA
ttgtgggaatctggtaataccgttgtgacggtagtactgctttcccacaa

SEQ ID NO: 10165 - DNA, 40 bp, Clostridioides difficile
  source 1..40: mol_type = genomic DNA
ttgtaataatataatagttgtagcttttacatttaggtat

SEQ ID NO: 10166 - protein, 558 aa, Clostridioides difficile; identical to SEQ ID NO: 3206

SEQ ID NO: 10167 - DNA, 50 bp, Clostridioides difficile; identical to SEQ ID NO: 3207
  source 1..50: mol_type = genomic DNA

SEQ ID NO: 10168 - DNA, 40 bp, Clostridioides difficile
  source 1..40: mol_type = genomic DNA
aaaatccaaatagccttactttattagctatttggattta

SEQ ID NO: 10169 - DNA, 50 bp, Clostridioides difficile
  source 1..50: mol_type = genomic DNA
aaacatccttaccaaaccctcacaatagcaaggctttgataaggatggta

SEQ ID NO: 10170 - DNA, 40 bp, Clostridioides difficile
  source 1..40: mol_type = genomic DNA
aaaatccaattaaccttttattttcagatatttgagttta

SEQ ID NO: 10171 - protein, 480 aa, Anaerotruncus colihominis
MIAEIEAGNVATVIVKDMSRLGRDYLKVGYYTEIFFVERDVRYIAINDGVDSAKGDNDFTPFRNLFNDFYAKDTSKKVRAIKKAQGMAGEHLTKPPYGYKVDPNDRKKWIVDEEAAAVVKRIFDLCVAGKGPSQIAKVLKADKVLIAKAYYSKKKGKALPDNPYNWKDSTIVAVLERMDYCGHTVNFKSYSKSHKLKKRIPTTKEQQAIFRNTHEAIVEEAVFERVQELRANKRRPTKAERQGMFSGLVFCADCGSKLHFATCKSFDGSQDHYRCARYKSNTGDCTAHFIREEVLRKIVLNRIFAVTAMFYEDITAFMELIQKQRFDEAEKDMKRKRREVGQARKRIAELDRIFKRIYEDDINGTISHERFLKLSAEYEAEQKELTEKVKAEQQEVDTYEQNKSDFDSFAAIIRKYVGITELTTTIVNEFIKKIVVHAPEKIDGKRFQKVAIVFNFVGEIHLPTDPQTEHKEANKQEKTA

SEQ ID NO: 10172 - DNA, 50 bp, Anaerotruncus colihominis
  source 1..50: mol_type = genomic DNA
atacttccttgtaaccggaaaaccttagttttacgctgataaggaagtat

SEQ ID NO: 10173 - DNA, 40 bp, Anaerotruncus colihominis
  source 1..40: mol_type = genomic DNA
aaaaatacgcaggaagcatttcggatttctaagtttttta

SEQ ID NO: 10174 - DNA, 50 bp, Anaerotruncus colihominis
  source 1..50: mol_type = genomic DNA
atacttccttgtaaccggaaaaccacagttttacgctgataaggaagtat

SEQ ID NO: 10175 - DNA, 40 bp, Anaerotruncus colihominis
  source 1..40: mol_type = genomic DNA
aataatactcaggaagcttactgtgtttccaaattttttg

SEQ ID NO: 10176 - protein, 550 aa, Anaerotruncus colihominis
MTANTYKPEQITALYARLSQEDALDGDSNSIVNQKAVLTKYASDNGFTNPVFFIDDGVSGVTFDRPNFNRMIAEIEAGNVATVIVKDMSRLGRDYLKVGYYTEIFFVERDVRYIAINDGVDSAKGDNDFTPFRNLFNDFYAKDTSKKVRAIKKAQGMAGEHLTKPPYGYKVDPNDRKKWIVDEEAAAVVKRIFDLCVAGKGPSQIAKVLKADKVLIAKAYYSKKKGKALPDNPYNWKDSTIVAVLERMDYCGHTVNFKSYSKSHKLKKRIPTTKEQQAIFRNTHEAIVEEAVFERVQELRANKRRPTKAERQGMFSGLVFCADCGSKLHFATCKSFDGSQDHYRCARYKSNTGDCTAHFIREEVLRKIVLNRIFAVTAMFYEDITAFMELIQKQRFDEAEKDMKRKRREVGQARKRIAELDRIFKRIYEDDINGTISHERFLKLSAEYEAEQKELTEKVKAEQQEVDTYEQNKSDFDSFAAIIRKYVGITELTTTIVNEFIKKIVVHAPEKIDGKRFQKVAIVFNFVGEIHLPTDPQTEHKEANKQEKTA

SEQ ID NO: 10177 - DNA, 50 bp, Anaerotruncus colihominis; identical to SEQ ID NO: 10172
  source 1..50: mol_type = genomic DNA

SEQ ID NO: 10178 - DNA, 40 bp, Anaerotruncus colihominis; identical to SEQ ID NO: 10173
  source 1..40: mol_type = genomic DNA

SEQ ID NO: 10179 - DNA, 50 bp, Anaerotruncus colihominis; identical to SEQ ID NO: 10174
  source 1..50: mol_type = genomic DNA

SEQ ID NO: 10180 - DNA, 40 bp, Anaerotruncus colihominis; identical to SEQ ID NO: 10175
  source 1..40: mol_type = genomic DNA

SEQ ID NO: 10181 - protein, 537 aa, Amedibacterium intestinale; identical to SEQ ID NO: 641

SEQ ID NO: 10182 - DNA, 50 bp, Amedibacterium intestinale; identical to SEQ ID NO: 402
  source 1..50: mol_type = genomic DNA

SEQ ID NO: 10183 - DNA, 40 bp, Amedibacterium intestinale
  source 1..40: mol_type = genomic DNA
tgtcaacaaatgggaaaagggaacttcatttccagatatc

SEQ ID NO: 10184 - DNA, 50 bp, Amedibacterium intestinale; identical to SEQ ID NO: 3539
  source 1..50: mol_type = genomic DNA

SEQ ID NO: 10185 - DNA, 40 bp, Amedibacterium intestinale
  source 1..40: mol_type = genomic DNA
agtgaacaaatggataaagtaaacctcatatctatatatg

SEQ ID NO: 10186 - protein, 484 aa, Anaerostipes hadrus
MKKEKVIPIDSLDLVDLYIRVSTTEQALEGYSVAEQEHRLRQYCAAMGHRIHKVHIDAGFSGASLDRPGIKETIKDVQKHLVRRVIVWKLDRLSRSQKDTLIMLEDVFLENGCDFISMMESFDTSTSFGRAIVGILAAFAQLERENIKERTMMGRQARLAKGHYNGSRPPLGYSFIPGSNDLQVDPYQAAIVREIFKLFLSGISINAIARKMEEKYPTVRTWNNTMIRRTLKNPVYIGKVNDNGILRDGIHEPLISEIDFQMANAILVHNSKIKKQSCRSRSLLTGLLYCGDCGARMHPRRIARGYPLRRYVCYSVSRTSKSMIKSDHCTNRLHPYTQEELEQIIIDEIKKLAADEDYISEVIRNSSAEAPADDTELFQERIEELNRQTDKLLNLYQIGAIELDQIQERLAALKQERESLTAALKESQTKTDINMDHLKIMSYASAFQVALESGDPEYTNSIIRLLIDKIVVLNEDIEIHWTFC

SEQ ID NO: 10187 - DNA, 50 bp, Anaerostipes hadrus
  source 1..50: mol_type = genomic DNA
tcacacctatatgaatcaataatcttgacgaatgttctaatttggtgtgt

SEQ ID NO: 10188 - DNA, 40 bp, Anaerostipes hadrus
  source 1..40: mol_type = genomic DNA
tacattgaaatttataattttctgaattgcttttggatgg

SEQ ID NO: 10189 - DNA, 50 bp, Anaerostipes hadrus
  source 1..50: mol_type = genomic DNA
tcacacctatatgaatcaataatcccgacgaatgttctaatttggtgtgt

SEQ ID NO: 10190 - DNA, 40 bp, Anaerostipes hadrus
  source 1..40: mol_type = genomic DNA
taaataaaaatttatatttccctcacttgattttggatca

SEQ ID NO: 10191 - protein, 450 aa, Erysipelatoclostridium ramosum
MTLNNTDNIDTRRIAIYIRVSTKKQYEEGCSLEVQENQCRKFVYKMGYTEDDIDIYSDGGKSGTNTNRADLLDLLAGISQGMYKMVVMMKFDRLTRDLMDFNSIIKICNNKNCSLIPLDNPKTDLKNPMEKANANVSMIFSQLQPELTSQRVKDVIRDKLENGLYPFGGKPPLGYIRETSEKLVISNNIEEVRIVKRIFHEISLGKSALQLAAELTIEQALGRSWVDKTLIRMCKNRIYIGEIEWNGKIYTNILTDLIIDRDTFYRANYFINRSARIKKHDYAYHNLCICNDCSTHLEQKTTNKKGKIYFYYYCPKCNKRINEKIIDRQLTNVTNDLYNKEILNIEKSSEEKEIEKEIRRLSKIVSNYYEITVTEGTKEQLLEYNDFKKRTDKKISYYKKQLNNIQEFQRKKVSNITSISKELKCQLFQKYVKDIKINLVEKKVLKITRI

SEQ ID NO: 10192 - DNA, 50 bp, Erysipelatoclostridium ramosum
  source 1..50: mol_type = genomic DNA
cgattatatcgaccaatatggctccataatgtatttagtcgaactttttg

SEQ ID NO: 10193 - DNA, 40 bp, Erysipelatoclostridium ramosum
  source 1..40: mol_type = genomic DNA
cgattcccatcacccgctccataatggagttaacacactt

SEQ ID NO: 10194 - DNA, 50 bp, Erysipelatoclostridium ramosum
  source 1..50: mol_type = genomic DNA
cgattatatcgaccaatatggctctataatgtatttagtcgaactttttg

SEQ ID NO: 10195 - DNA, 40 bp, Erysipelatoclostridium ramosum
  source 1..40: mol_type = genomic DNA
gaaatccctctacctgctctataatggagataacacacta

SEQ ID NO: 10196 - protein, 558 aa, Enterococcus faecalis
MSLREEKSIMNLDTLQRTLTTQNHNLSRRNKGKQEITVLYVRLSQDDGTQGDSDSITNQKAMLEKFAREKKLYNTRFFVDDGYTGTNFNRPGFQEALELVNNGEVKNFVVKDLSRFGRNYAEVALYTEILFPKLDIRFIAVNDGVDSETQDSNEIDFAPFRNVFNEFYAKDTSKKIRAVKRAKGLAGERISANAPFGYKKDPNDKNHLLVDEPAAKVVKKIFNYCIDGFGPLQIAKKLEKERVPTTTEYKNKSENPTCVWHSKAIVWILERPDYLGHTVNFKTTTKSYRDKRKIWNDPKDWAVFKNTHEPIIDQETFDLVQKMRQKRRRQTKADRVGLFSGLVYCADCKNRHYFCTGKSVSPNQERYVCSGFQSRFIDCNNAHYIREMKLAEIVLNDVNDKINFLKQHEKQFTKSLAKRAKTDQQKELKKAEKRVIEAKKRVSELDNIIKRLYEDNVLGKLSDERFTILSKDYEFEQSELKQEIDELEIRLSKQKEDVKNVQKFLEIVRKYTTLESLTPSIVNELIDRIEIHKPDKSTGKRIQQIDIYYRFVGKLDEI

SEQ ID NO: 10197 - DNA, 50 bp, Enterococcus faecalis
  source 1..50: mol_type = genomic DNA
ttagtaggttatggacacctagctaaagctagggttccataaaacactat

SEQ ID NO: 10198 - DNA, 40 bp, Enterococcus faecalis
  source 1..40: mol_type = genomic DNA
aataaacgaagctcttctaaattagcgtcttcttttttta

SEQ ID NO: 10199 - DNA, 50 bp, Enterococcus faecalis
  source 1..50: mol_type = genomic DNA
ttagtaggttatggacacctagctttagctagggttccataaaacactat

SEQ ID NO: 10200 - DNA, 40 bp, Enterococcus faecalis
  source 1..40: mol_type = genomic DNA
aataaataaagctcttctattctaggcttatatttgttta

SEQ ID NO: 10201 - protein, 537 aa, Faecalibacillus intestinalis
MKQQIYNTALYLRLSRDDELQGESSSITTQRSMLRLYAKEHHLNVIDEYIDDGWSGTNFDRPSFQRMIEDIEAGKINCVVTKDLSRLGRNYIMTGQYTELYFPSHNVRYIAIDDGVDSEKGESEIAPFKNIINEWVARDTSRKVKSAFKTKFAEGAHYGAYAPLGYKKHPDIKGKLLVDDETKWIIEKIFSLAYQGYGSAKITKQLRAEKVPTASWLNFTRYGTFAHIFEGKPESKRYEWTIAHVKAILKSEVYIGNSVHNMQSTVSFKSKKKVRKPESEWFRVENTHEPIIDKEVFYRVQEQIKSRRRQTKEKATPIFAGLVKCADCGWSMRFGTNKTNKTPYSYYACSYYGQFGKGNCSMHYIRYDVLYQAVLERLQYWAKAVQQDEEKVLNKIQKAGNAERIREKKKKASTLKKAENRQNEIDRLFAKMYEDRACEKITERNFVMLSSKYQKEQIELEQQITSLREELSKMEQDMIGAEKWIELIKEYSVPKELTAPLLNAMIEKILIHEATTNEDNERIQEIEIYYRFIGRVE

SEQ ID NO: 10202 - DNA, 50 bp, Faecalibacillus intestinalis; identical to SEQ ID NO: 402
  source 1..50: mol_type = genomic DNA

SEQ ID NO: 10203 - DNA, 40 bp, Faecalibacillus intestinalis
  source 1..40: mol_type = genomic DNA
aattagtaaatgggaaacaggaagaggttatcctgatatt

SEQ ID NO: 10204 - DNA, 50 bp, Faecalibacillus intestinalis
  source 1..50: mol_type = genomic DNA
taatatttttaactaagggaaaccgatgtttcccaaacaaaaagatatta

SEQ ID NO: 10205 - DNA, 40 bp, Faecalibacillus intestinalis
  source 1..40: mol_type = genomic DNA
aatcagtcaatgagaaagagaaagaggttgtaatgataga

SEQ ID NO: 10206 - protein, 492 aa, Microbacterium foliorum
MKKAVLYIRVSRSKDESVSLARQEAELRELCQRENWAVAAVVEDDGITGTRERENAEAALAMVASGEADVLVSWELSRWSRMGLSAVAKLVAVLDERPSALLVFHKEGLRSSQPAFGIMAAVIAEVARMEAQGTRDRILSMRAYVLGQTAPEDQRWLGGKCPVGYKAVPRPDGKGKRLVVDEEAARHLREVARRLIAGHTLTEVTQYLTDNLPTPQSKGPWRISTVRKLMQSPTLLGRTTQKVEVGKRVDGSPIIEYHVVTDAQGLPIQRWDPVLDAGTFAAVQERFYKKGPNQPRKAASWLSGFMICALCGSVMYANSRKNRAVDTFRCSNRAIPGQACPGVSISRKVLEDYMESVILGMIGSLKEYTVTERIEGPDLGSLDDVGLAIADVQRALAADGADYGVLLPQLDALKAERRRLVDSPARVVRKRVPTGRTLAEAWVEGTIPQRQYIISDMLDCVKVSRPRVAGKAGRIEDRIEEVWIDPVAEPDD

SEQ ID NO: 10207 - DNA, 50 bp, Microbacterium foliorum
  source 1..50: mol_type = genomic DNA
ggtcgcttttaggcactccttgactcatcgaggaatgcctaaaggcgaca

SEQ ID NO: 10208 - DNA, 40 bp, Microbacterium foliorum
  source 1..40: mol_type = genomic DNA
gccgggagcctcggccgcctcgtcgaggaagagcagcccg

SEQ ID NO: 10209 - DNA, 50 bp, Microbacterium foliorum
  source 1..50: mol_type = genomic DNA
ggtcgcttttaggcactccttgacacatcgaggaatgcctaaaggcgaca

SEQ ID NO: 10210 - DNA, 40 bp, Microbacterium foliorum
  source 1..40: mol_type = genomic DNA
gccgtgcgcctccgccgccacggcgaggaaaaagagtccc

SEQ ID NO: 10211 - protein, 520 aa, Anaerotruncus massiliensis
MPYLMYLRKSRADVEAEAHGAGDTLARHQDELLRAAKRLNLPVSKIYREIVSGDSIAARPVMQQLLDEVERGMWEGVLVVEVERLARGDTIDQGIVAQAFKLSHTKIVTPAKIYDPNNEFDEEYFEFGLFMSRREYKTINRRLQRGRVASVMEGKYTGNIPPYGYTRVKLQNEKGWTLEPDPDEAETVRLIFELYTLGATDSDGTTTRLGSKKIANRLNDLHIPTRKGGLWTYNSVVAILENPVYCGQLRWNRRPGVKSISGGDVKISRPKKRDYIVTQGRHEPIISRETWDAAQENIAHNPPIRFDAHKQMRNPLAGLLVCGVCGHMMVRRPYANRQASMICQYPGCPNVSADLPLILAKVRTSLQEWLEEYRLSIEGVHDKKPAGIEAAEKSVRRLEKELATLDHQLSKAHDLLEQEIYSVEIFLSRTQSISSRRQELQNQLDELQHEADTYRQAEAGRKKIIPKVENLLNVFDSTMDPAQLNQLLKEVIDKIVYTKARGGRHGDPSDFKVDLFMRLP

SEQ ID NO: 10212 - DNA, 50 bp, Anaerotruncus massiliensis
  source 1..50: mol_type = genomic DNA
catatatataatccttgcgccaaagaattggctcgtagtttatatcaatg

SEQ ID NO: 10213 - DNA, 40 bp, Anaerotruncus massiliensis
  source 1..40: mol_type = genomic DNA
caccgacatcggcaccgaagagctcgcccacatcgagatg

SEQ ID NO: 10214 - DNA, 50 bp, Anaerotruncus massiliensis; identical to SEQ ID NO: 10212
  source 1..50: mol_type = genomic DNA

SEQ ID NO: 10215 - DNA, 40 bp, Anaerotruncus massiliensis
  source 1..40: mol_type = genomic DNA
ctcggccaccgtcaccaaggagctcgcccacatccagaag

SEQ ID NO: 10216 - protein, 612 aa, Finegoldia magna
MIEYHNKITALYSRLSVGDEDRDGGESNSIVNQKAFLERYAREKKLINIRHYIDDDESGRFFDRSAYTQMISDVEQGKIGIVIMKDMTRWGRDYLQVGNAMEIFRRNNVRFIAINNGIDSIDQNTLEFAPFINIMSEWYARDISKKVKTGIKTKGADGKPVATEAPYGYIKDPENKDYWIVDKEAAEVVKLIFRLFMEGKNRNQIAVYLKEKEILTPTFYMKQQGRGTAKNKPLNKENRYNWNKATLTRILKRQEYCGDVVNFKTEKHYRDKRNHYVDKSKWQITENVHEPIIDRTTFENVERMLKNAPVKRPNGDGEIHALSGLMYCKDCGTKMHIRTIHKNGRVQHVTYCSEYAKGKAKHPKCNSPHRIDVDEVMENIAEVLRKIAQYSLENKAEFEKLVKESLYKEQTEEVKKNQKRMPQITDRMEQIERVMNKLYEDNALGNLDTERYEQLSRKYAEEYYTLKAEKEEIKERLSECENANQRAKKFIRLAESYSNFEELTPTIINEFISKIAVHERDVKRAKYVVQRIEVYFNYIGKFENELTKQIEPTEQEMIQMREEIEEARREKSRAYHRAYSKAYRAKNLEKCREYEKLKAREYRAKKKLQATT

SEQ ID NO: 10217 - DNA, 50 bp, Finegoldia magna
  source 1..50: mol_type = genomic DNA
aaagatatttgacaaaacgcttcctgggttgcataatattaactgaacag

SEQ ID NO: 10218 - DNA, 40 bp, Finegoldia magna
  source 1..40: mol_type = genomic DNA
agaatatggatcggcaagatggggaaatgaaaaagacatt

SEQ ID NO: 10219 - DNA, 50 bp, Finegoldia magna
  source 1..50: mol_type = genomic DNA
aaagatatttgacaaaacgcttccgaggttgcataatattaactgaacag

SEQ ID NO: 10220 - DNA, 40 bp, Finegoldia magna; identical to SEQ ID NO: 1730
  source 1..40: mol_type = genomic DNA

SEQ ID NO: 10221 - protein, 612 aa, Anaerococcus vaginalis; identical to SEQ ID NO: 3476

SEQ ID NO: 10222 - DNA, 50 bp, Anaerococcus vaginalis; identical to SEQ ID NO: 3477
  source 1..50: mol_type = genomic DNA

SEQ ID NO: 10223 - DNA, 40 bp, Anaerococcus vaginalis; identical to SEQ ID NO: 10218
  source 1..40: mol_type = genomic DNA

SEQ ID NO: 10224 - DNA, 50 bp, Anaerococcus vaginalis; identical to SEQ ID NO: 3669
  source 1..50: mol_type = genomic DNA

SEQ ID NO: 10225 - DNA, 40 bp, Anaerococcus vaginalis; identical to SEQ ID NO: 1730
  source 1..40: mol_type = genomic DNA

SEQ ID NO: 10226 - protein, 498 aa, Clostridium perfringens
MKRIAIYSRKSVYVENSESIETQINMCKAYFTRQFKNCEFEIFEDEGFSGKNTDRPAFKRLMKLCSIKSFDAVAVYKIDRLARNIVDFMSIYNELERLEIKLISITEGFDPTTPIGKMMMVMLAGFADMERMNIAQRVKDNMISLAKKGCWTGGAINRGYTAERKADGKKYLKLENEEFIKFTFENFLNGYSMHTLSKMQKEVYGSYGLKGAISIRNMLRSPVYVKSSKDVSDYLKKKGFEVVGKEDNKHGYLTYGLVSKEPFAIVSKHEAVIDPIVWLKVNTKLDNIKSTALTKESKCYWLTGVLKCPYCKANYVLANTKGKTYYTCSTRLKRGANKPNTCQNRTYVNAVEIENLIEDLIKKLYSKKYFDSFFCKSEKVYEDNTLELEKKLKKNEKSIMNLVEKLALIDNSNSATKFITNKIEELSKEISDIKIKIEENKFNKLEIELNKSTPDIIYNNISNFSKCNTLEEKRLRLKLIFKSVYYDPKTKAIEVEFI

SEQ ID NO: 10227 - DNA, 50 bp, Clostridium perfringens
  source 1..50: mol_type = genomic DNA
attatcagatttgtaaagttagcatctcctctcgttctaaaactgatata

SEQ ID NO: 10228 - DNA, 40 bp, Clostridium perfringens
  source 1..40: mol_type = genomic DNA
aacagacatatattttgattctccatctaatatatcaact

SEQ ID NO: 10229 - DNA, 50 bp, Clostridium perfringens; identical to SEQ ID NO: 10227
  source 1..50: mol_type = genomic DNA

SEQ ID NO: 10230 - DNA, 40 bp, Clostridium perfringens
  source 1..40: mol_type = genomic DNA
tacagatatatatatttaatcatcttctaatatatcacct

SEQ ID NO: 10231 - protein, 485 aa, Streptococcus pyogenes; identical to SEQ ID NO: 256

SEQ ID NO: 10232 - DNA, 50 bp, Streptococcus pyogenes; identical to SEQ ID NO: 247
  source 1..50: mol_type = genomic DNA

SEQ ID NO: 10233 - DNA, 40 bp, Streptococcus pyogenes
  source 1..40: mol_type = genomic DNA
cttagattttccttgcaaccaatttttaaatcaagctcca

SEQ ID NO: 10234 - DNA, 50 bp, Streptococcus pyogenes; identical to SEQ ID NO: 247
  source 1..50: mol_type = genomic DNA

SEQ ID NO: 10235 - DNA, 40 bp, Streptococcus pyogenes; identical to SEQ ID NO: 250
  source 1..40: mol_type = genomic DNA

SEQ ID NO: 10236 - protein, 485 aa, Streptococcus pyogenes; identical to SEQ ID NO: 251

SEQ ID NO: 10237 - DNA, 50 bp, Streptococcus pyogenes
  source 1..50: mol_type = genomic DNA
ttagcgtttttagtgtcttgcattcaaatgtaagacactaaaattcttca

SEQ ID NO: 10238 - DNA, 40 bp, Streptococcus pyogenes; identical to SEQ ID NO: 10233
  source 1..40: mol_type = genomic DNA

SEQ ID NO: 10239 - DNA, 50 bp, Streptococcus pyogenes; identical to SEQ ID NO: 10237
  source 1..50: mol_type = genomic DNA

SEQ ID NO: 10240 - DNA, 40 bp, Streptococcus pyogenes; identical to SEQ ID NO: 250
  source 1..40: mol_type = genomic DNA

SEQ ID NO: 10241 - protein, 485 aa, Streptococcus pyogenes; identical to SEQ ID NO: 256

SEQ ID NO: 10242 - DNA, 50 bp, Streptococcus pyogenes; identical to SEQ ID NO: 10237
  source 1..50: mol_type = genomic DNA

SEQ ID NO: 10243 - DNA, 40 bp, Streptococcus pyogenes; identical to SEQ ID NO: 10233
  source 1..40: mol_type = genomic DNA

SEQ ID NO: 10244 - DNA, 50 bp, Streptococcus pyogenes; identical to SEQ ID NO: 10237
  source 1..50: mol_type = genomic DNA

SEQ ID NO: 10245 - DNA, 40 bp, Streptococcus pyogenes; identical to SEQ ID NO: 250
  source 1..40: mol_type = genomic DNA

SEQ ID NO: 10246 - protein, 485 aa, Streptococcus pyogenes
MAEKRKVAVYCRVSSMHQAIEGYSIEQQRDSLTKYCEAMEWNIYDIYIDAGFSGGKLERPAMDKLIREAEAGKFDTVAVYKLDRLSRSVQDTLHLIRDVFKEHDIDFVCLQENIDTKSAMGNLFLTLLSAIAEFEREQITERMAMGRHGRAKSGKSMMWARPAYGYRYDRESQTVSVVQSEAMIVKRIYKEYLEGKSVSQIKNDLNSEGHITKEKPWVYKRITYILQSRVYTGVNEYKGEIYDGKHEAIIDTETFELTQMEFAKRQQQTKDKKNNPRPFQAKYMLSGLARCGYCKAPLKLRLGAVRKDGTRAMVYDCHNRWNRKVTYLTIYNDNKQCTESGRYQKADLEAYVLDKIKELQLNPDTIREKMDLNEKPTANTEEIKKQIAKINQRIDKLNDLYLNDLITVEKLKERANKLKKERELLEAELSKNSDHLFKAKKKQLNDLLMNKDIDSMTYEEQRNLVKMLIYKVDVTKEDINIIFDF

SEQ ID NO: 10247 - DNA, 50 bp, Streptococcus pyogenes; identical to SEQ ID NO: 10237
  source 1..50: mol_type = genomic DNA

SEQ ID NO: 10248 - DNA, 40 bp, Streptococcus pyogenes; identical to SEQ ID NO: 10233
  source 1..40: mol_type = genomic DNA

SEQ ID NO: 10249 - DNA, 50 bp, Streptococcus pyogenes; identical to SEQ ID NO: 10237
  source 1..50: mol_type = genomic DNA

SEQ ID NO: 10250 - DNA, 40 bp, Streptococcus pyogenes; identical to SEQ ID NO: 250
  source 1..40: mol_type = genomic DNA

SEQ ID NO: 10251 - protein, 485 aa, Streptococcus pyogenes
MAEKRKVAVYCRVSSMHQAIEGYSIEQQRDSLTKYCEAMEWNIYDIYIDAGFSGGKLERPAMDKLIREAEAGKFDTVAVYKLDRLSRSVQDTLHLIRDVFKEHDIDFVCLQENIDTKSAMGNLFLTLLSAIAEFEREQITERMAMGRHGRAKSGKSMMWARPAYGYRYDRESQTVSVVQSEAMIVKRIYKEYLEGKSVSQIKNDLNSEGHITKEKPWVYKRITYILQSRVYTGVNEYKGEIYDGKHEAIIDTETFELTQMEFAKRQQQTKDKKNNPRPFQAKYMLSGLARCGYCKAPLKLRLGAVRKDGTRAMVYDCHNRWNRKVTYLTIYNDNKQCTESGRYQKADLEAYVLDKIKELQLNPDTIREKMDLNEKPTANTEEIKKQIAKTNQQIDKLNDLYLNDLITVEKLKERANKLKKERELLEAELSKNSDHLFKAKKKQLNDLLMNKDIDSMTYEEQRNLVKMLIYKVDVTKEDINIIFDF

SEQ ID NO: 10252 - DNA, 50 bp, Streptococcus pyogenes; identical to SEQ ID NO: 247
  source 1..50: mol_type = genomic DNA

SEQ ID NO: 10253 - DNA, 40 bp, Streptococcus pyogenes; identical to SEQ ID NO: 10233
  source 1..40: mol_type = genomic DNA

SEQ ID NO: 10254 - DNA, 50 bp, Streptococcus pyogenes; identical to SEQ ID NO: 247
  source 1..50: mol_type = genomic DNA

SEQ ID NO: 10255 - DNA, 40 bp, Streptococcus pyogenes; identical to SEQ ID NO: 250
  source 1..40: mol_type = genomic DNA

SEQ ID NO: 10256 - protein, 485 aa, Streptococcus pyogenes
MAEKRKVAVYCRVSSMHQAIEGYSIEQQRDSLTKYCEAMEWNIYDIYIDAGFSGGKLERPAMDKLIREAEAGKFDTVAVYKLDRLSRSVQDTLHLIRDVFKEHDIDFVCLQENIDTKSAMGNLFLTLLSAIAEFEREQITERMAMGRHGRAKSGKSMMWARPAYGYRYDRESQTVSVVQSEAMIVKRIYKEYLEGKSVSQIKNDLNSEGHITKEKPWVYKRITYILQSRVYTGVNEYKGEIYDGKHEAIIDTETFELTQMEFAKRQQQTKDKKNNPRPFQAKYMLSGLARCGYCKAPLKLRLGAVRKDGTRAMVYDCHNRWNRKITYLTIYNDNKQCTESGRYQKADLEAYVLDKIKELQLNPDTIREKMDLNEKPTANTEEIKKQIAKTNQQIDKLNDLYLNDLITVEKLKERANKLKKERELLEAELSKNSDHLFKAKKKQLNDLLMNKDIDSMTYEEQRNLVKMLIYKVDVTKEDINIIFDF

SEQ ID NO: 10257 - DNA, 50 bp, Streptococcus pyogenes
  source 1..50: mol_type = genomic DNA
ttagcgtttttagtgtcttacattcaaatgcaagatactaaaattcttcc

SEQ ID NO: 10258 - DNA, 40 bp, Streptococcus pyogenes; identical to SEQ ID NO: 10233
  source 1..40: mol_type = genomic DNA

SEQ ID NO: 10259 - DNA, 50 bp, Streptococcus pyogenes; identical to SEQ ID NO: 10257
  source 1..50: mol_type = genomic DNA

SEQ ID NO: 10260 - DNA, 40 bp, Streptococcus pyogenes; identical to SEQ ID NO: 250
  source 1..40: mol_type = genomic DNA

SEQ ID NO: 10261 - protein, 485 aa, Streptococcus pyogenes; identical to SEQ ID NO: 246

SEQ ID NO: 10262 - DNA, 50 bp, Streptococcus pyogenes; identical to SEQ ID NO: 247
  source 1..50: mol_type = genomic DNA

SEQ ID NO: 10263 - DNA, 40 bp, Streptococcus pyogenes; identical to SEQ ID NO: 10233
  source 1..40: mol_type = genomic DNA

SEQ ID NO: 10264 - DNA, 50 bp, Streptococcus pyogenes; identical to SEQ ID NO: 247
  source 1..50: mol_type = genomic DNA

SEQ ID NO: 10265 - DNA, 40 bp, Streptococcus pyogenes; identical to SEQ ID NO: 250
  source 1..40: mol_type = genomic DNA

SEQ ID NO: 10266 - protein, 628 aa, Blautia obeum
MRKNEKITALYERLSRDDFGKDDDQQRESNSISNQKAMLEEFAARQGFTNIVHFTDDGISGTCFDRPGFLAMMKEVEAGNVEYLCIKDMSRMGRDYLKVGQIMEILRQRGVRLIAINDGVDSARGDDDFTPFRNIMNEYYARDTSRKIRSTFQSKGKSGKHLTGTVIYGYLWNEARDQWLVDPEAAEVVKRIFAMTIEGYGPYQIASKLKEEKILIPSAYLAQHGEGVNKNKTFKDVYGWGSSTICNLLEKREYLGHTINFKTRKHFKDKKSHYVPEDEWTIFENTHEAIIDQQTFDLVQKIRGNVRRYPDGWGEAAPLTGLLYCADCGGKMYVHRTNNGKRISQYTCSQYSKVPVGKLCTTQHRINEDVVLSLVSEMLKAIAEYAKHDRAEFVRVVQEAQSSQQTAEVKKQRTRLATAKQRVSELEVLLCKIYEDNILGKLSDSRYATLDAQYEKEQSELTAEISVLEKAVKSYEKHEKDADRFIALIDKYENFDKLTIAMLNEFIEKILVHERDRKGSIQTTQEVEIYFNFVGRFVPPAFGEVELTPEELEEIRKREERKDRLHQNYLKRKASGAQKRYEDKIKGRKKAEIEAKKAAIRAEDIAKGVFVPVSSLPQREPMKGVQTA

SEQ ID NO: 10267 - DNA, 50 bp, Blautia obeum; identical to SEQ ID NO: 57
  source 1..50: mol_type = genomic DNA

SEQ ID NO: 10268 - DNA, 40 bp, Blautia obeum; identical to SEQ ID NO: 4998
  source 1..40: mol_type = genomic DNA

SEQ ID NO: 10269 - DNA, 50 bp, Blautia obeum; identical to SEQ ID NO: 59
  source 1..50: mol_type = genomic DNA

SEQ ID NO: 10270 - DNA, 40 bp, Blautia obeum
  source 1..40: mol_type = genomic DNA
aaaagacagtttggctgcttctcacaaagctaaatatatt

SEQ ID NO: 10271 - protein, 495 aa, Symmachiella dynata
MNVVIWTRVSSREQKEGYSIDAQLRVTREKAQRLGWNVVREFELDESAKRGAERKIFNEMLRWLAKNAKREKIKAILCHKLDRACRNMRDAVRLQELEDACGVQLSFVENEFGPGAAGTFSFNVMAAVAQYYSDNLREEVIKGLDEKVRQGWPTGLAPYGYLNVDDREEPVVPHPEKAKSLIRIFDLYSSGSHTFKSLADRLASEGHVFRDSQSRFNRTALSHILNNRFYIGELHRNGHVFEGRYQRVIHRATFDACQEILCGRKRRTGTYHLPLAGGLFRCEYCGQSITGERIRRKLKGGGIREHIYYRCCNNNRGPDHPKVRWKAQDLEEAIAADLEKMRMPTLEVAEWFRKELGAAVHDLTGYRRQQAASFAKRKTELANMQDRLLNAYLAGTIDDDAYKAKSNELKAEAASADESLDKLGDVDPARGELAVTLFDWTQKAAEIWRGSNNTVRRDILDAVCLNRVVSDVNLVLEKRKPFDELAERPDLENSR

SEQ ID NO: 10272 - DNA, 50 bp, Symmachiella dynata
  source 1..50: mol_type = genomic DNA
aaggccggatttagagaatagtcggggtgactggcgttcgtttgaaccgt

SEQ ID NO: 10273 - DNA, 40 bp, Symmachiella dynata
  source 1..40: mol_type = genomic DNA
ctgttttgaattcaagtcgggacgacaggattcgaacctg

SEQ ID NO: 10274 - DNA, 50 bp, Symmachiella dynata
  source 1..50: mol_type = genomic DNA
aaggccggatttagagaatagtcgaggtgactggcgttcgtttgaaccgt

SEQ ID NO: 10275 - DNA, 40 bp, Symmachiella dynata
  source 1..40: mol_type = genomic DNA
cctttttaaatgcaagttgagacgagaggtttccaagctg

SEQ ID NO: 10276 - protein, 523 aa, Peribacillus butanolivorans
MSRPTELNIYLYLRKSRKDIEEEKKAQGSGETYDTLQRHRQTLFAVAKKERHNIVAIYEEVVSGESVTERPRIQEMLRSVEAGSVDAVLVMDLDRLGRGDMLDQGLLDRAFRYSATKILTPTESYDPSSETWELVFGIKSLVAREELKAITRRMQRGRVASASEGKSISKIPPYGYLRDENLRLYPDVDTAWVVKKMFEMMRDGHGRQAIAQELDRLGIKPPNKRRETWSPSSITAIIKNEVYIGTIIWGQVKYVKQNGKYQKKKVPRENWTIKENAHEPIVSPELFEAANLAHSGRWRPSTVTTKKLRNPMAGVLKCAVCGYSMLYQPRPKRPNDVVRCVQPGCKGVQKGSSINIVESYLLDGLAKIAEQLEAQAEAEVPSNVDDISYKRLLIEKKTQEVSELDTQKSRLHDFLERGVYDIDTFMERQKNLTDRIDGVETEIRNLQREIQKDDLRNRSVDEYLPKLRDVINAYHRADIERKNALLKSVLESVTYLRKKEWTKQDEFVLQFNPIVWPDEVGPS

SEQ ID NO: 10277 - DNA, 50 bp, Peribacillus butanolivorans
  source 1..50: mol_type = genomic DNA
cgtgtatagcgtttatagttgtattgattgaaccgttaaccctatacccg

SEQ ID NO: 10278 - DNA, 40 bp, Peribacillus butanolivorans
  source 1..40: mol_type = genomic DNA
tgtcgaatggcgattgtattgattgacttccccatagcca

SEQ ID NO: 10279 - DNA, 50 bp, Peribacillus butanolivorans
  source 1..50: mol_type = genomic DNA
cgtgtatagcgtttatagttgtatgcattgaaccgttaaccctatacccg

SEQ ID NO: 10280 - DNA, 40 bp, Peribacillus butanolivorans
  source 1..40: mol_type = genomic DNA
agtcaaatggccattctatgcattaccttctccaaggcca

SEQ ID NO: 10281 - protein, 604 aa, Parabacteroides distasonis
MIKIIGYARVSTTKQDLSRQKLKIKEFCENNNYELIEIIEDFGISGVVADRKGYIELQSKTYKDADMIVISELSRLSRQEDVTETVYNIQQIINKGLSVILLDSPSKIYEANKLLDITEILILTIKAWAAAQERLDIKKKNQDGKQALFQAYPYAVVDQKIPYGYKAVPNPNGKRPKYILEEVPEEVENIKRLFALVNSGKTLGAVARYFNERNITFRGYYSTVAILSNYIHSDIYRGIRRRTQRLGREEPYTIEVRIKPIISEEDFMKAQELIKNNYKNTPTGKVNHNPLKGIIRCRCGRAMTVKDKKPAAGISKLTYRCSCVDRKSHPDFCKYNIDEVSYDLTNEILYSLFKSMHTAEYINFFRNQTDNRVTELQEEIAGIEKRLSALYLDKENLSNESQDNANKFLLTTNPTLLNIIQEKQNQLDEKIKSIDKEIIRYKKSQSKKMADIERIKDNNGKEKLQNLSIEEQGELYHKYLERVNYIPVTTMQGYYIVQFLNGIKFYIAITKVRSIAMASLLLDNWTIDEKGIITANYDTLKSSDMKNFSIEMIRKTKTMTLQEYLKSDLAKERALHLDLSYRERYLEQLHKAGLDGRHRPFKKE

SEQ ID NO: 10282 - DNA, 50 bp, Parabacteroides distasonis
  source 1..50: mol_type = genomic DNA
ttgggtttttccgttttattatactcacttaactaaacagacttgcccaa

SEQ ID NO: 10283 - DNA, 40 bp, Parabacteroides distasonis
  source 1..40: mol_type = genomic DNA
cggtacttggaaacaatactcaaaaaaagcgagaaaccaa

SEQ ID NO: 10284 - DNA, 50 bp, Parabacteroides distasonis
  source 1..50: mol_type = genomic DNA
ttgggtttttccgttttattataccaacttaactaaacagacttgcccaa

SEQ ID NO: 10285 - DNA, 40 bp, Parabacteroides distasonis
  source 1..40: mol_type = genomic DNA
cgtttcttagatacaacaccaaaaaagaacaagcaaccaa

SEQ ID NO: 10286 - protein, 604 aa, Parabacteroides distasonis
MIKIIGYARVSTTKQDLSRQKLKIKEFCENNNYELIEIIEDFGISGVVADRKGYIELQSKTYKDADMIVISELSRLSRQEDVTETVYNIQQIINKGLSVILLDSPSKIYEANKLLDITEILILTIKAWAAAQERLDIKKKNQDGKQALFQAYPYAVVDQKIPYGYKAVPNPNGKRPKYILEEVPEEVENIKRLFALVNSGKTLGAVARYFNERNITFRGYYSTVAILSNYIHSDIYRGIRRRTQRLGREEPYTIKVRIKPIISEEDFMKAQELIKNNYKNTPTGKVNHNPLKGIIRCRCGRAMTVKDKKPAAGISKLTYRCSCVDRKSHPDFCKYNIDEVSYDLTNEILYSLFKSMHTAEYINFFRNQTDNRVTELQEEIAGIEKRLSALYLDKENLSNESQDNANKFLLTTNPTLLNIIQEKQNQLDEKIKSIDKEIIRYKKSQSKKMADIERIKDNNGKEKLQNLSIEEQGELYHKYLERVNYIPVTTMQGYYIVQFLNGIKFYIAITKVRSIAMASLLLDNWTIDKKGIITANYDTLKSSDMKNFSIEMIRKTKTMTLQEYLKSDLAKERALHLDLSYRERYLEELHKAGLDGRLRPFKKE

SEQ ID NO: 10287 - DNA, 50 bp, Parabacteroides distasonis
  source 1..50: mol_type = genomic DNA
ttgggtttttccgttttattatactcacttaactaaataaacttgcccaa

SEQ ID NO: 10288 - DNA, 40 bp, Parabacteroides distasonis; identical to SEQ ID NO: 10283
  source 1..40: mol_type = genomic DNA

SEQ ID NO: 10289 - DNA, 50 bp, Parabacteroides distasonis
  source 1..50: mol_type = genomic DNA
ttgggtttttccgttttattataccaacttaactaaataaacttgcccaa

SEQ ID NO: 10290 - DNA, 40 bp, Parabacteroides distasonis; identical to SEQ ID NO: 10285
  source 1..40: mol_type = genomic DNA

SEQ ID NO: 10291 - protein, 604 aa, Parabacteroides distasonis; identical to SEQ ID NO: 3306

SEQ ID NO: 10292 - DNA, 50 bp, Parabacteroides distasonis; identical to SEQ ID NO: 3312
  source 1..50: mol_type = genomic DNA

SEQ ID NO: 10293 - DNA, 40 bp, Parabacteroides distasonis; identical to SEQ ID NO: 10283
  source 1..40: mol_type = genomic DNA

SEQ ID NO: 10294 - DNA, 50 bp, Parabacteroides distasonis
  source 1..50: mol_type = genomic DNA
ttgggtttttccgttttattataccaacttaactaaatagacttgcccaa

SEQ ID NO: 10295 - DNA, 40 bp, Parabacteroides distasonis; identical to SEQ ID NO: 10285
  source 1..40: mol_type = genomic DNA

SEQ ID NO: 10296 - protein, 604 aa, Parabacteroides distasonis
MIKIIGYARVSTTKQDLSRQKLKIKEFCENNNYELIEIIEDFGISGVVADRKGYIELQSKTYKDADMIVISELSRLSRQEDVTETVYNIQQIINKGLSVILLDSPSKIYEANKLLDITEILILTIKAWAAAQERLDIKKKNQDGKQALFQAYPYAVVDQKIPYGYKAVPNPNGKRPKYILEEVPEEVENIKRLFALVNSGKTLGAVARYFNERNITFRGYYSTVAILSNYIHSDIYRGIRRRTQRLGREEPYTIEVRIKPIISEEDFMKAQELIKNNYKNTPTGKVNHNPLKGIIRCRCGRAMTVKDKKPAAGISKLTYRCSCVDRKSHPDFCKYNIDEVSYDLTNEILYSLFKSMHTAEYINFFRNQTDNRVTELQEEIAGIEKRLSALYLDKENLSNESQDNANKFLLTTNPTLLNIIQEKQNQLDEKIKSIDKEIIRYKKSQSKKMADIERIKDNNGKEKLQNLSIEEQGELYHKYLERVNYIPVTTMQGYYIVQFLNGIKFYIAITKVRSIAMASLLLDNWTIDEKGIITANYDTLKSSDMKNFSIEMIRKTKTMTLQEYLKSDLAKERALHLDLSYRERYLEQLHKAGLDGRLRPFKKE

SEQ ID NO: 10297 - DNA, 50 bp, Parabacteroides distasonis; identical to SEQ ID NO: 3312
  source 1..50: mol_type = genomic DNA

SEQ ID NO: 10298 - DNA, 40 bp, Parabacteroides distasonis; identical to SEQ ID NO: 10283
  source 1..40: mol_type = genomic DNA

SEQ ID NO: 10299 - DNA, 50 bp, Parabacteroides distasonis; identical to SEQ ID NO: 10294
  source 1..50: mol_type = genomic DNA

SEQ ID NO: 10300 - DNA, 40 bp, Parabacteroides distasonis; identical to SEQ ID NO: 10285
  source 1..40: mol_type = genomic DNA

SEQ ID NO: 10301 - protein, 604 aa, Parabacteroides distasonis; identical to SEQ ID NO: 3301

SEQ ID NO: 10302 - DNA, 50 bp, Parabacteroides distasonis; identical to SEQ ID NO: 3302
  source 1..50: mol_type = genomic DNA

SEQ ID NO: 10303 - DNA, 40 bp, Parabacteroides distasonis; identical to SEQ ID NO: 10283
  source 1..40: mol_type = genomic DNA

SEQ ID NO: 10304 - DNA, 50 bp, Parabacteroides distasonis
  source 1..50: mol_type = genomic DNA
ttgggtttttctattttattataccaacttaactaaatagacttgcccaa

SEQ ID NO: 10305 - DNA, 40 bp, Parabacteroides distasonis; identical to SEQ ID NO: 10285
  source 1..40: mol_type = genomic DNA

SEQ ID NO: 10306 - protein, 545 aa, Vibrio penaeicida
MNKENRRKAITYQRFSSVRQMGNSSLARQLDSTKEWLSRNPDVEVIDNYVDQAMSGWSGKHLKDGSLGQLMNAIEDGIVKSGTLILVEHFSRLTRQNLRDAEKLMHRIWDAGITVVTVRDGTEYSPSAANDMSLRIRLIVEMEQAFKESEWRSAKVKASYVSREKAAREGKVPKIRKPFWLNDDGTLNHLHQSVKDMFEWYRNGWGQQRIVVALREKYADEAIQQINPSTVMRWIKSDIVLGYWRKNRIYEAAVDETLYYEVQAIHKNRLYKNVNPDRQWPLSGLMKCGVCGRGMSIQKSGKSAPVIRCSSKQRDKSCNRKTTFPYYLAHIYMMDVVLPFAQRKYTNLNSNKSLQKELLKVEDSLAKENSAMSDLKETIKILKEQNKKTNFLLMEMQDVFERIEELETKQQDIRSSLEELSSGGISLEAKEIAYDKDNFNIEMHKLNFRIVIGEWDISLEGLTDDAVTLKYNGYNRGTFCYEYKYSDQEEMQSVKSSRAKTSTLMLSNLAIKENENWARFFDEEKRKEDNAKAFENIAKKNNWIY

SEQ ID NO: 10307 - DNA, 50 bp, Vibrio penaeicida
  source 1..50: mol_type = genomic DNA
aatatgcacacctcagcctttgatgagcagaagacataggtgtgcatatt

SEQ ID NO: 10308 - DNA, 40 bp, Vibrio penaeicida
  source 1..40: mol_type = genomic DNA
aatgtgctcaacctaaaccgagatgagcgcatgtatctga

SEQ ID NO: 10309 - DNA, 50 bp, Vibrio penaeicida
  source 1..50: mol_type = genomic DNA
aatatgcacacctcagcctttgatctgcagaagacataggtgtgcatatt

SEQ ID NO: 10310 - DNA, 40 bp, Vibrio penaeicida
  source 1..40: mol_type = genomic DNA
gatctgctctacctattccctgatgatctgatgtatcaga

SEQ ID NO: 10311 - protein, 546 aa, Garciella nitratireducens
MKVAIYSRKSKFTGKGDSIENQIQLCKNYAFTHYDLKDEDILVYEDEGFSGGNTDRPQFQLMMKDAKKKKFDLLICYRLDRISRSVMDFSNTFESLEDNDIGFVSIKEQFDTSTPMGKAMLYISSVFAQLERETTAERIRDNMMQLARTGRWLGGQTPTGYESQQVTHLDHNGKERKMFKLSPIPKELETVKIIYDKYMELKSLTQVEQYLIVNNIKTKNNLDFRRYSIRFILSNPVYAIADEKLYEFMMSNDYEVCAPKSDFTGNFGVMAYNKTKQNKKSSVEARDVSEWIVAVGQHEGIIDSDTWIKVQKMLNRNKSKSFRKVKSTTSLLSGLLYCADCGSYMRPKMGRIDKNGQQIFYYMCEMKEKSKRTRCSMKNVKGNDLDKLVIEEIKRMAHDNSELKGNLQSDKLQIETKQNTIHNEIINLETNIKNNEQSINNLVSSLSKSQESAASKYIIQQINQLDKETAEMKERLLKLKENEENNNMKDNSLNVMGDMLAAFNDNIDEVDIEAKRMFLKSIIDKITWDGEIIKIYMFGMNTEKKL

SEQ ID NO: 10312 - DNA, 50 bp, Garciella nitratireducens
  source 1..50: mol_type = genomic DNA
tgtttccgcaatgtaggaatagcattttcaataccttcacaacggaaaca

SEQ ID NO: 10313 - DNA, 40 bp, Garciella nitratireducens
  source 1..40: mol_type = genomic DNA
tatactcattaagatttcattttcaatacaacgtgctgca

SEQ ID NO: 10314 - DNA, 50 bp, Garciella nitratireducens
  source 1..50: mol_type = genomic DNA
tgtttccgcaatgtaggaatagcagtttcaataccttcacaacggaaaca

SEQ ID NO: 10315 - DNA, 40 bp, Garciella nitratireducens
  source 1..40: mol_type = genomic DNA
tttcctcattaatccttccgttgtaatacaacctgctgca

SEQ ID NO: 10316 - protein, 571 aa, Cronobacter muytjensii
MPSIRRLVRFKAMCVAIGYMRYSSKLQGAGSTIHRQKSLINKWVEDQKTHHGKVYEVKFYTDKGLSGWTGENLLAGALGRLIEEVEAGGYPEGTQIVLESIDRLSRQGHEEATAILRRLTSTGCVVHSILDRQVIHRSDLKTFIGAMQIIAVAERGREESDIKSERVSSSKERNYELAKLGKKLVTRNLPGWIYLDHNGKMQIDPAKQKLVQEIFEMRLAGHTYQSIAETMTNKGVPVLNERKGAQRWLPNSIRTLLHSRSVIGVLPASKVNDKYKEIEDYFPSAITKDLFYAVNDLNVPTVRSRGKKDKPQYPETVFLFKGLVKCRYCKGNVFLNGAKPGYWGRIRCIGHHDKVCDAPSLPRYDFEQSLITRMFPLLKSMDVSTEENPVAVLQSKIDHLTNILEGYYDDLEEIPREDKPRRKSINERISKRANEKEEYERQLVVVRRKMEARTENTLSDLKYDDYGDRLKMQLIISRNIERIVLDSFFDKVHIKLVNGNALMNFPIYGDVDGSKLLITAKEKAGITDVERILGLDDAMSTVYNLAPSSGELMDDREFPEVEPDYPNVNEG

SEQ ID NO: 10317 - DNA, 50 bp, Cronobacter muytjensii
  source 1..50: mol_type = genomic DNA
aaaatactatctttctactaaaagaagtcttagaatcattatagtatttg

SEQ ID NO: 10318 - DNA, 40 bp, Cronobacter muytjensii
  source 1..40: mol_type = genomic DNA
agccggtgatttctaaaagaagttttctgcatactatttt

SEQ ID NO: 10319 - DNA, 50 bp, Cronobacter muytjensii
  source 1..50: mol_type = genomic DNA
aaaatactatctttctactaaaagacgtcttagaatcattatagtatttg

SEQ ID NO: 10320 - DNA, 40 bp, Cronobacter muytjensii
  source 1..40: mol_type = genomic DNA
ttttggtgatttttaaaagacgttttcttaattttatttt

SEQ ID NO: 10321 - protein, 579 aa, Leclercia adecarboxylata
MSIALAYLRFSSLQMQGKGSSISRQKDMVTKWTEEQKLLMGKNYDEVSYYIDRGKSAYDGTNLREGNLGKLIEEVQRGMFPEGTPIVCESLDRLTRQGVQHIQQILTQLTRTGCVVHTLSDRQVISKDTLESLGGIVTIVAVADRAREESETKAKRVRDSKLRNYKAAREGKKLMTKHLPGWIYLNESTGKLCVDPEKQKVVTRIYKLRLEGHTFQSIANIMNDSGVPVLNASKGARHWLPNSIRTLLMNKSVIGYSSPSKVNPLIEEIPGYFPPCISETLFNDVQDTHVPAKRGKKTRPEYAEAVNLFKGLTVCKYCKGNVFPNGAKPGYWGRLRCMGHHNKTCEAPPIGRYAFEHSLVTRMFPLLRFFDTTKQEDPSAAIRSKIGHLQTGIDNLYNMVRDMGYTPEIGKRIKASENEKEGLERQLIAIKKNIESSTEENMSQLNFDNYNDRLTMQRILSRTIERVVVDSFNERAHVKLLNGNVLYGFPLYGDSDASLTLQKALSGTDDELFAELGMEKPLHTIYMVTSAKSQQPYDYNAVYYNKDLKQPYTVNQGESPHHPDDSKYWPDVEPDYPNE

SEQ ID NO: 10322 - DNA, 50 bp, Leclercia adecarboxylata
  source 1..50: mol_type = genomic DNA
aaaatactatgtttgacctaaaagaagttttagagttactatcgtatttc

SEQ ID NO: 10323 - DNA, 40 bp, Leclercia adecarboxylata
  source 1..40: mol_type = genomic DNA
acccggtgatttctaaaagaagttttctgcatggtatttt

SEQ ID NO: 10324 - DNA, 50 bp, Leclercia adecarboxylata
  source 1..50: mol_type = genomic DNA
aaaatactatgtttgacctaaaagacgttttagagttactatcgtatttc

SEQ ID NO: 10325 - DNA, 40 bp, Leclercia adecarboxylata; identical to SEQ ID NO: 10320
  source 1..40: mol_type = genomic DNA

SEQ ID NO: 10326 - protein, 576 aa, Massiliimalia timonensis
MLIKNAGADKIGVSNPVLADCPPMKGAETMLRQSDKITALYCRLSRDDELQGDSNSIVNQKAILSKYAKENHFSNTAFFVDDGYSGTNFNRPSWSALLERIENGEVATLIVKDMSRLGRDYLKVGFYTEVLFVEKGVRFIAINNGIDSANQQDSDFTPFLNIINEWYAKDTSKKIRAVMKSKGEAGEHLCTNPPYGYRKAPDNPKQWIVDEEAAMVVKRIFALCLDGYGPSQIARILKEDKVITPTIHFQQIGRATRNAPPDNLYDWDNKTVAGILERPEYQGHTVNFKTYKQSYKSKKTCYNPEEKWLVFENTHEAIIDADTWARVQELRKNKRRPTRTGKTNMFSGIVRCADCGEKLYYCTSKNFEARQDHFVCSTSRLKGKEICSAHFIRAVVLEQGVLAHMRWTIACVANHEEQFRKAMGAKQKAEAKKELAAKRRQLTQAERRIEELDRLFKRIYEDNANGKLSDSRFQMLSDDYEQEQEELRKKLLLLNEEISEQEEQTENIDRFISKVQKYLDLDELTPSVLNDMVKAVYVHAPDKSKGHREQQIDISYDLVGILPASLLNDLQNGETA

SEQ ID NO: 10327 - DNA, 50 bp, Massiliimalia timonensis
  source 1..50: mol_type = genomic DNA
atactgtcttatgagtgccgccctaatggtagctactcataaaacagtat

SEQ ID NO: 10328 - DNA, 40 bp, Massiliimalia timonensis
  source 1..40: mol_type = genomic DNA
actaaaaagggctgaacaaaaagttcagcccttttttatg

SEQ ID NO: 10329 - DNA, 50 bp, Massiliimalia timonensis
  source 1..50: mol_type = genomic DNA
atactgtcttatgagtgccgcccttctggtagctactcataaaacagtat

SEQ ID NO: 10330 - DNA, 40 bp, Massiliimalia timonensis
  source 1..40: mol_type = genomic DNA
actaaaaagtgctggaaaatcagttaacctattttctata

SEQ ID NO: 10331 - protein, 484 aa, Streptococcus ruminantium
MITTNKVAIYVRVSTTSQAEEGYSIEEQKDKLSSYCHIKDWSIYNIYTDGGFSGSNTKRPALEKLIKDAKNKKFDTVLVYKLDRLSRSQKDTLYLIEDIFLENNIDFVSLLENFDTSTPFGKAMVGILSVFAQLEREQIKERMQLGKLGRAKSGKSMMWAKTSYGYDYHKETGTVTVNPWQSIIIADIFDWYLSGKSITKIRDALNDMYGEDNGGKVWNYRAIRVILSNPVYCGYNQYKGEIYKGNHEAIISEEVFNKTQEELKIRQRKAAEYSNPRPFQAKYMLSGITQCGYCQAPLKIIMGVVRKDGTRFIRYECHQRHPRKTKGVTVYNNNEKCHSGAYEKEKIEQYVLEEISKMQNNVKYLDEIFESPDTEAIDRDSYQKQIDELTKKIGRLNDLYIDDRITLEELQKKSAEFTTIRAFLEAELENDPSLKQQERKEDMRKILSAGDIFSMDYEGQKVMVRGLVNKVQVTAENIKIQFKV

SEQ ID NO: 10332 - DNA, 50 bp, Streptococcus ruminantium
  source 1..50: mol_type = genomic DNA
tatagcgaattttagtatccttcatctcaatcaaggttactaaaattatt

SEQ ID NO: 10333 - DNA, 40 bp, Streptococcus ruminantium
  source 1..40: mol_type = genomic DNA
attaaaagaacaactaacatttctactagtgtaaaggctt

SEQ ID NO: 10334 - DNA, 50 bp, Streptococcus ruminantium
  source 1..50: mol_type = genomic DNA
tatagcgaattttagtatccttcatttcaatcaaggttactaaaattatt

SEQ ID NO: 10335 - DNA, 40 bp, Streptococcus ruminantium
  source 1..40: mol_type = genomic DNA
attaaaagtataaatgacatttctactggtttacatgcta

SEQ ID NO: 10336 - protein, 625 aa, Intestinibacillus massiliensis
MRKNEKITALYERLSRDDFGKDDDQQRESNSISNQKAMLEEFAARQGFTNIVHFTDDGISGTCFDRPGFLAMMKEVEAGNVEYLCIKDMSRMGRDYLKVGQIMEILRQRGVRLIAINDGVDSARGDDDFTPFRNIMNEYYARDTSRKIRSTFQSKGKSGKHLTGTVIYGYLWNEARDQWLVDPEAAEVVKRIFAMTIDGYGPYQIASKLKEEKVLIPSAYLARHGEGVNKNKTFKDVYGWGSSTICNILEKREYLGHTINFKTRKHFKDKKSHYVPEDEWTIFENTHEAIIDQQTFDLVQKIRGNVRRYPDGWGEAAPLTGLLYCADCGGKMYVHRTNNGKRISQYTCSQYSKVPVGKLCTTQHRINEDVVLSLVSEMLKAIAEYAKHDRAEFVRVVQEAQSSQQTAEVKKQRTRLATAKQRVSELEVLLCKIYEDNILGKLSDSRYATLDAQYEKEQTELTAEISVLEKAIKSYEKHEKDADRFIALIDKYENFDKLTIAMLNEFIEKILVHERDRKGSIQTTQEVEIYFNFVGRFVPPAFGEVELTPEELEEIRKREERKDRLHQNYLKRKANGKQKEYEERTKAKKKAEIEARKQAIRTEDIARGVFIPVSSLPQLGPRKGA

SEQ ID NO: 10337 - DNA, 50 bp, Intestinibacillus massiliensis; identical to SEQ ID NO: 262
  source 1..50: mol_type = genomic DNA

SEQ ID NO: 10338 - DNA, 40 bp, Intestinibacillus massiliensis
  source 1..40: mol_type = genomic DNA
gaaaatataaattggcggcgggcaaaacagcaaaatcaat

SEQ ID NO: 10339 - DNA, 50 bp, Intestinibacillus massiliensis; identical to SEQ ID NO: 264
  source 1..50: mol_type = genomic DNA

SEQ ID NO: 10340 - DNA, 40 bp, Intestinibacillus massiliensis
  source 1..40: mol_type = genomic DNA
gaaaataaaaattcacagcaaacaaaatagcaaaaagaaa

SEQ ID NO: 10341 - protein, 537 aa, Sellimonas intestinalis
MKQQIYNTALYLRLSRDDELQGESSSITTQRSMLRLYAKEHHLNVIDEYIDDGWSGTNFDRPSFQRMIEDIEAGKINCVVTKDLSRLGRNYIMTGQYTELYFPSHNVRYIAIDDGVDSEKGESEIAPFKNIINEWVARDTSRKVKSAFKTKFAEGAHYGAYAPLGYKKHPDIKGKLLIDDETKWIIEKIFSLAYQGYGSAKITKQLRAEKVPTASWLNFTRYGTFAHIFEGKPESKRYEWTIAHVKAILKSEVYIGNSVHNMQSTVSFKSKKKVRKPESEWFRVENTHEPIIDKEVFYRVQEQIKSRRRQTKEKATPIFAGLVKCADCGWSMRLGTNKANKTPYSYYACSYYGQFGKGNCSMHYIRYDVLYQAVLERLQYWAKAVQQDEEKVLNKIQKVGNAERIREKKKKASTLKKAENRQNEIDRLFAKMYEDRACEKITERNFVMLSSKYQKEQIELEQQITSLREELSKMEQDMIGAEKWIELIKEYSVPKELTAPLLNAMIEKILIHEATTNEDNERIQEIEIYYRFIGKVE

SEQ ID NO: 10342 - DNA, 50 bp, Sellimonas intestinalis
  source 1..50: mol_type = genomic DNA
taatatttttaactaagggaaaccggtgtttcccaaactaaaggatattg

SEQ ID NO: 10343 - DNA, 40 bp, Sellimonas intestinalis
  source 1..40: mol_type = genomic DNA
catttctaattgggagaatgggaaaagctatccggattta

SEQ ID NO: 10344 - DNA, 50 bp, Sellimonas intestinalis
  source 1..50: mol_type = genomic DNA
taatatttttaactaagggaaaccattgtttcccaaactaaaggatattg

SEQ ID NO: 10345 - DNA, 40 bp, Sellimonas intestinalis
  source 1..40: mol_type = genomic DNA
tatttctaattgctagaatatgaacagaagtacgtattta

SEQ ID NO: 10346 - protein, 521 aa, Moritella viscosa
MLTATIYKRQSTLRQHAKGDSNTRQTNSSDEYCTRNNLQVTEVLSDAGISGFTGENFATGELGFFIERVQAGEYQQGHTLVLEHLDRFSRADVDVAINRLTSITTAGVDIAITGLGKEERLLKKGMPLTDMLVVLLEFAQANDESAKKSERLKSVWVTKKQQAQQGIIITKRYPHWLDTKDGNFIIKEANAALVKEMFSLYISGESFMSIARILTDKDQDGSLIKFYPRSTTFKSTSVGAILKNHSVYGRLDTMDVNDYYPVIVSKEDFDLVQSIRYKKTNNQHTNNKYTIKSAAKKGVIKHLFSGLYICNTCNSSLQYNEGERAKLKTNPNWESLYRLRCMSAQLKSNGRCSGSYTLKARVIEQMLWEQMDNLMLYDAADEINTQQSIKKLGNEMASYDETFNTYNFMITSKYPVPTELAVDYKTASERVDLINQEIRTLEQQLKNTNNKSLLTYKELNSNDKRKQARRLVEHTIKSITVNWNKKPDAEFLVTLNNNQRYIIVNVDGKYKTVAKGLLLGF

SEQ ID NO: 10347 - DNA, 50 bp, Moritella viscosa
  source 1..50: mol_type = genomic DNA
gtgtgttgtcaggagatgtatgttataacataataactccgacaacacac

SEQ ID NO: 10348 - DNA, 40 bp, Moritella viscosa
  source 1..40: mol_type = genomic DNA
ctggttcctaaagtatctgatgacataattgttcatccat

SEQ ID NO: 10349 - DNA, 50 bp, Moritella viscosa
  source 1..50: mol_type = genomic DNA
gtgtgttgtcaggagatgtatgtttcaacataataactccgacaacacac

SEQ ID NO: 10350 - DNA, 40 bp, Moritella viscosa
  source 1..40: mol_type = genomic DNA
ctggttcttaaaatatctgtcaactctagtgttaatgcat

SEQ ID NO: 10351 - protein, 521 aa, Moritella viscosa; identical to SEQ ID NO: 10346

SEQ ID NO: 10352 - DNA, 50 bp, Moritella viscosa; identical to SEQ ID NO: 10347
  source 1..50: mol_type = genomic DNA

SEQ ID NO: 10353 - DNA, 40 bp, Moritella viscosa
  source 1..40: mol_type = genomic DNA
atggatgaacaattatgtcatcagatactttaggaaccag

SEQ ID NO: 10354 - DNA, 50 bp, Moritella viscosa
  source 1..50: mol_type = genomic DNA
gtgtgttgtcaggagatgtatgttgaaacataataactccgacaacacac

SEQ ID NO: 10355 - DNA, 40 bp, Moritella viscosa
  source 1..40: mol_type = genomic DNA
atgcattaacactagagttgacagatattttaagaaccag

SEQ ID NO: 10356 - protein, 550 aa, Gardnerella vaginalis
MNKLNRQPSYTLDNVGKITALYCRLSKDDELQGDSNSIINQKSMLKKYAEDNHFNNLMFFVDDGYSGTNFQRPDWLKLTALIDEGKIGTIIVKDMSRLGRDYLQVGMYTEMVFPNADIRFIAINNGVDSNNQSDNDMTPFINIFNEFYAKDTSRKIKAVFKAKGQSGKPLCINPPYGYLKDPEDKNHWIVDEEAASVVREIFRLCVNGYGPSQIANELIKRNIPTPSEHFFSLGIKIPSAKSEIKGVWNQKTISNMLEKQEYLGHTVNFKTRKKSYKCKKTLLNPKEDWLIFKNTHEAIIDQETFDIVQRIRNGRRVRTNLGEMPVLSGMLFCADCGNKLYQVRGKGWSHDKEYFVCATYRKQKGKCSSHQIRNIQIEAILLHELRMITSFAKQHEEEFVGLVMKKSEKELTQKLKSSNRELEQAKARISKLDTIVQHLYEDNLDGKISDERFKSMSESYDKEQAELKSKIESLEAFISKAQEECLNVDSFLKLVRQYTDIQELNAEIIRTFVDKIYVEKSEKVAGTRTKKQTIWIQWNYIGAVDIPLHK

SEQ ID NO: 10357 - DNA, 50 bp, Gardnerella vaginalis; identical to SEQ ID NO: 1607
  source 1..50: mol_type = genomic DNA

SEQ ID NO: 10358 - DNA, 40 bp, Gardnerella vaginalis
  source 1..40: mol_type = genomic DNA
taaaaaaaaacgcggagcaaaagcttcgcgttttgtttgt

SEQ ID NO: 10359 - DNA, 50 bp, Gardnerella vaginalis; identical to SEQ ID NO: 2059
  source 1..50: mol_type = genomic DNA

SEQ ID NO: 10360 - DNA, 40 bp, Gardnerella vaginalis
  source 1..40: mol_type = genomic DNA
taaaaataagggccatgcattagctcctggttttgtttgt

SEQ ID NO: 10361 - protein, 545 aa, Pseudomonas sp FDAARGOS 380
MPAAIPYIRFSTGKQRHGNSEERQHQMVMSWLGQNPNHTLSDLKYSDLGKSGYKGDHIKDGGGFAMLLEAVEAGAIKPGDVVLVEAIDRTGRLSPLKMLNTIISPIIEAGVSIVTLDDNVTYDSGSIAGGHLFLLVAKIQAAHGYSKQLSERVTASYGIRRQQAIEGKSIKRWAPIWLTVDGVLKEAIAPYIKQAFEWYVSGIGKTTIANRLRGSGVPELATCSGPTVEAWLRNKAAIGTWEYHKGKEDAEDIPNVYEPVVTPELFMQAQRRKKEVATKPRERTSKHFLVGLVKCGVCGSSYIIHHKDGKPNNLRCGTYHRLKKAGCTNDETIPYQVAVYIYSETATHWVDKALQKVQLTVNDKRKLVLENERDTLTASIKTLTEKAVALDIPELWNKLEEESNRRKFVDEELSVLERTPDAGGGFAAVLAQDQMMIHDPIQLSALLRQVEYSIVVYPNKLFKVAGELYPWLYLGPKRKPKSNVTLGYRILYLGQEAIISPVLPMTLDWGKPTDNPVEQMRYYLRRAYKLVSAPQSYEYNDDVPE

SEQ ID NO: 10362 - DNA, 50 bp, Pseudomonas sp FDAARGOS 380
  source 1..50: mol_type = genomic DNA
cagtgtattttatgaaaatgttgggaccagcttttcatcaaatgacactg

SEQ ID NO: 10363 - DNA, 40 bp, Pseudomonas sp FDAARGOS 380
  source 1..40: mol_type = genomic DNA
ccgcgtgatcaagggttgggaccagggtttgatgggcatg

SEQ ID NO: 10364 - DNA, 50 bp, Pseudomonas sp FDAARGOS 380
  source 1..50: mol_type = genomic DNA
cagtgtattttatgaaaatgttggcaccagcttttcatcaaatgacactg

SEQ ID NO: 10365 - DNA, 40 bp, Pseudomonas sp FDAARGOS 380; identical to SEQ ID NO: 1745
  source 1..40: mol_type = genomic DNA

SEQ ID NO: 10366 - protein, 438 aa, Pseudomonas lactis
MPAAIPYIRFSTGKQRHGNSEERQHQMVMSWLGQNPNHTLSDLKYSDLGKSGYKGDHIKDGGGFAMLLEAVEAGAIKPGDVVLVEAIDRTGRLSPLKMLNTIISPIIEAGVSIVTLDDNVTYDSGSIAGGHLFLLVAKIQAAHGYSKQLSERVTASYGIRRQQAIEGKSIKRWAPIWLTVDGVLKEAIAPYIKQAFEWYVSGIGKTTIANRLRGSGVPELATCSGPTVEAWLRNKAAIGTWEYHKGKEDAEDIPNVYEPVVTPELFMQAQRRKKEVATKPRERTSKHFLVGLVKCGVCGSSYIIHHKDGKPNNLRCGTYHRLKKAGCTNDETIPYQVAVYIYSETATHWVDKALQKVQLTVNDKRKLVLENERDTLTASIKTLTEKAVALDIPELWNKLEEESNRRKFVDEELSVLERTPDAGGGFAAVLAQDQMVSS

SEQ ID NO: 10367 - DNA, 50 bp, Pseudomonas lactis; identical to SEQ ID NO: 10362
  source 1..50: mol_type = genomic DNA

SEQ ID NO: 10368 - DNA, 40 bp, Pseudomonas lactis; identical to SEQ ID NO: 10363
  source 1..40: mol_type = genomic DNA

SEQ ID NO: 10369 - DNA, 50 bp, Pseudomonas lactis; identical to SEQ ID NO: 10364
  source 1..50: mol_type = genomic DNA

SEQ ID NO: 10370 - DNA, 40 bp, Pseudomonas lactis; identical to SEQ ID NO: 1745
  source 1..40: mol_type = genomic DNA

SEQ ID NO: 10371 - protein, 532 aa, Pseudomonas syringae group genomosp 7
MKQAISYVRFSSDRQKHGSSVERQEGMIAAWLKAHPDYEMSDLKFSDLGKSGYHGEHIKEAGGFGKLLKALEDGFIRVGDVVLVEAIDRTGRLEPMDMLTLVINPILKAGVSIITLDDNTTYSKESVNTAQIFLLVAKIQAAHGYSAALSTRVADSYKKRRKDAAKHGIVPRRITPVWLNPDGTVREEVAPWIKTAFELYVSGVGKSTIAKRMRESGVERLAKASGPGVEAWLRNKAVIGKWETLEGTPDHQIIDDIYPAIIEPSLFYKAQVHAEKMKTQRPIKTASHFLVGLVRCGECGKNYIVQNLHGKPHSMRCRTRQSQNDCKNSHCVPKPVLDAIYRYTSVTAAIEAVQQQQMGVNDKEIVTRETELLTITKRVDGLVQALTQTGPIPEVIEALKQSRIEREAAESALVILRSTVVPSAGTHWQDMGKVWKLEADDAQRLAAMLRMVGYHITVQNTGEITSSHSDVLYRYIGVDRALDKYKLLVNGKLTLIPKGYVDDYPYHEPFQEVEGEVTWNAEDYTNLQAQYE

SEQ ID NO: 10372 - DNA, 50 bp, Pseudomonas syringae group genomosp 7
  source 1..50: mol_type = genomic DNA
cagtgttacttacgaaaagcttgctcccagcaatttcttatgtaacactc

SEQ ID NO: 10373 - DNA, 40 bp, Pseudomonas syringae group genomosp 7
  source 1..40: mol_type = genomic DNA
catgcccatcaggccctgatcccagcccttgatgacgcgc

SEQ ID NO: 10374 - DNA, 50 bp, Pseudomonas syringae group genomosp 7
  source 1..50: mol_type = genomic DNA
cagtgttacttacgaaaagcttgctgccagcaatttcttatgtaacactc

SEQ ID NO: 10375 - DNA, 40 bp, Pseudomonas syringae group genomosp 7; identical to SEQ ID NO: 1740
  source 1..40: mol_type = genomic DNA

SEQ ID NO: 10376 - protein, 541 aa, Pseudomonas simiae
MKQAISYVRFSSERQKGGSSVERQQAMIAQWLSDHPDYTNTDLKFSDLGKSGFHGEHVKEGGGFGKLLLAVEAGAIKAGDVVLVEAIDRTGRLPALEMLTRVIAPILQAGVSIITLDDKTTYTNDSVGGQHLFMLVAKIQAAHGYSKALSERVAASYKLRREQAKKSGITPKRMTPVWLNPDGTVRNDVAPWIKTAFELYVSGVGKATIAKRMRESGVERLAKASGPGVEGWLRNKAVIGKWETQPDTPEHQIIDDVYPVIIEPSLFYKAQVHAERMRTERPTKTAKHFLVGLVRCGGCGKSYVMQNRDGAPHTMRCISRAQKLGCDNSHIVPKLVLDKIYSYTAITAALEAIAQQQMGVNDKEIVTREAELQELSRKVASLLQTVEAVGFMPELATKLKEAQNAREAAENALVILRSTIVAPAGHHWNEMGKLWTLERDDKQRLAAMLRTVGYSITVNADGRVTSSHSGVVYRYMGVDRRANQYKLMAGEELILVMKRSKEDDYPYEEPFLSDDMEGTSQWDEADYADLHQQHQKATASA

SEQ ID NO: 10377 - DNA, 50 bp, Pseudomonas simiae
  source 1..50: mol_type = genomic DNA
cagcgtcatttatgaaaaggttgcgagcaggtttttcatatgtgacactg

SEQ ID NO: 10378 - DNA, 40 bp, Pseudomonas simiae
  source 1..40: mol_type = genomic DNA
gcgcgtgatcaagggctgggacctgggcttgatgggcatg

SEQ ID NO: 10379 - DNA, 50 bp, Pseudomonas simiae
  source 1..50: mol_type = genomic DNA
cagcgtcatttatgaaaaggttgccagcaggtttttcatatgtgacactg

SEQ ID NO: 10380 - DNA, 40 bp, Pseudomonas simiae; identical to SEQ ID NO: 1745
  source 1..40: mol_type = genomic DNA

SEQ ID NO: 10381 - protein, 581 aa, Pseudomonas fluorescens
MRSAIPYIRFSSARQTTGSSAERQQQMVTQWLTEHPEYTLSDLTYKDFGKSGYHGEHVKDGGGFAKLLAAVEAGDIKAGDVVLVEAIDRTGRLHPLDMLNKVITPILAAGVSIITLDDKVTYTHESAASGHLFLLVAKIQAAYGYSKQLSERTKASYAIRLEQAKEGNKVKRNTPVWLHSDGRLNDDVAPYIKQAFELYVSGVGKTAIANRLRASGVPELVKCSGPTVEAWLRNQAAIGNWEYGKDDTDKPSQIILGVYPPVISNELFLQAQHRKSAVATKPRERTSKNFLVGIVKCGVCGANLIIHNKDGKPNNMRCLTHHRLKDAGCTNKETIPYQVVHFVYLQTAPAWIDKAMKVIQLTDNEKRKLTLTTERNEVTASIQRLAKKIAKVDSVELEAEFDLVNERRAAIDIELNILGRTDDDGAESKSKSNYVGYESNLEHDRLAFRDPIQLSALLKQAGYSIVVQPGRKLYLPNDNHPWVYAGVVRKGNMTLGYRIRNSEEEFTISQAIPEVPDVRLYGNIPNGDLVHVAERSYKYAKPPTLLNSSDKHSRKGVFVLRFESADIAMEYMKSGIETDSK

SEQ ID NO: 10382 - DNA, 50 bp, Pseudomonas fluorescens
  source 1..50: mol_type = genomic DNA
tggtgtaacatataaaatacctgtgaacagctatgtgctaagtgacactg

SEQ ID NO: 10383 - DNA, 40 bp, Pseudomonas fluorescens
  source 1..40: mol_type = genomic DNA
gcgtgtgatcaagggctgggaccagggcttgatgggcatg

SEQ ID NO: 10384 - DNA, 50 bp, Pseudomonas fluorescens
  source 1..50: mol_type = genomic DNA
tggtgtaacatataaaatacctgtcaacagctatgtgctaagtgacactg

SEQ ID NO: 10385 - DNA, 40 bp, Pseudomonas fluorescens; identical to SEQ ID NO: 1745
  source 1..40: mol_type = genomic DNA

SEQ ID NO: 10386 - protein, 545 aa, Pseudomonas mosselii
MPAAIPYIRFSTGKQKHGNSEERQHQMVMSWLGQNPNHTLSDLKYSDLGKSGYKGDHIKDGGGFAMLLEAVEAGAIKPGDVVLVEAIDRTGRLSPLKMLNTIISPIIEAGVSIVTLDDNVTYDSGSIDGGHLFLLVAKIQAAHGYSKQLSERVTASYGIRRQQAIEGKAIKRWTPIWLTVDGVLKEAIAPYIKQAFEWYVSGIGKTTIANRLRGSGVPELATCSGPTVEAWLRNKAAIGTWEYHKGREDAEDIPNVYEPVVTPELFMQAQRRKKEVATKPRERTSKHFLVGLVKCGVCGSSYIIHHKDGKPNNLRCGTYHRLKKAGCTNDETIPYQVAVYIYSETATHWVDKALQQVQLTVNDKRKLVLENERDTLTASITTLTEKAVALDIPELWNKLEEESSRRKFVDEELSVLERTPDAGGGFAAVLAQDQMMIHDPIQLSALLRQVEYSIVVYPNKLFKVAGELYPWLYLGPKRKPKSNVTLGYRILYLAQETIISPVLPVTLDWGKPTDNPVEQMRYYLRRAYKLVSAPQPYEYNDDVPE

SEQ ID NO: 10387 - DNA, 50 bp, Pseudomonas mosselii
  source 1..50: mol_type = genomic DNA
cggtgtgctttatgaaagtgttgggaccagcttttcatcaaatgacactg

SEQ ID NO: 10388 - DNA, 40 bp, Pseudomonas mosselii
  source 1..40: mol_type = genomic DNA
ccgggtgatcaagggctgggatcagggcttgatgggcatg

SEQ ID NO: 10389 - DNA, 50 bp, Pseudomonas mosselii
  source 1..50: mol_type = genomic DNA
cggtgtgctttatgaaagtgttggcaccagcttttcatcaaatgacactg

SEQ ID NO: 10390 - DNA, 40 bp, Pseudomonas mosselii; identical to SEQ ID NO: 1745
  source 1..40: mol_type = genomic DNA

SEQ ID NO: 10391 - protein, 550 aa, Clostridium cadaveris
MSKEKIKVYLYTRVSTSIQIDGYSLEAQKSRMKAFALYNDYEIVGEYEDAGKSGKSIEGRVQFTRMMEDIKSGKDGVSFVLVFKLSRFARNAADVLSTLQIMQDFGVNLICVEDGIDSSKDAGKLMISVLSAVAEIERENIRVQTMEGRIQKAKEGKWNGGFAPYGYQLIDGKLIINEEEAIAIRTIFDQYVNTSIGANGLSKYLENHGIRKIPRQNGKNPLFDAGLIRKILKNPVYNGKIAFGRRTLEKVHGTRNEYRQVEQDDYLVAEGIHEAIIPDELWQAAQVKLKAQAKKYEHVNKGKNMRTHLLSGIVKCPICGAGMFGNKSIKYKKDGTKYKDFYYYGCKHRLMNRGHKCTYNKQIREELLDDAVAEVIIKLVSNPKFASMIQEKINMKVDTSAIENEIDNYQNELRKSHSTKYKLIEEIDNLDVEDKHYKRRKNDLDDRLYRMYDKIEELESQLIEAKAKKETIEVEKLTGDNIYKVLIYFDKLYKVMNDVERRQLIEALISEIQIYEEKQPNGQWLKSITFKLPIIDEDLNISLENDEQVE

SEQ ID NO: 10392 - DNA, 50 bp, Clostridium cadaveris
  source 1..50: mol_type = genomic DNA
agtttggaaaatgatgagcaagttgagacggtagcgttattgtccaaact

SEQ ID NO: 10393 - DNA, 40 bp, Clostridium cadaveris
  source 1..40: mol_type = genomic DNA
aatataaaaaactatgatggagtcatgactggagagatgg

SEQ ID NO: 10394 - DNA, 50 bp, Clostridium cadaveris
  source 1..50: mol_type = genomic DNA
agtttggaaaatgatgagcaagttatgacggtagcgttattgtccaaact

SEQ ID NO: 10395 - DNA, 40 bp, Clostridium cadaveris
  source 1..40: mol_type = genomic DNA
aaaataaaatactatgaaaatatcaggggaggagagatgg

SEQ ID NO: 10396 - protein, 550 aa, Clostridium cadaveris
MSKEKIKVYLYTRVSTSIQIDGYSLEAQKSRMKAFALYNDYEIVGEYEDAGKSGKSIEGRVQFTRMMEDIKSGKDGVSFVLVFKLSRFARNAADVLSTLQIMQDFGVNLICVEDGIDSSKDAGKLMISVLSAVAEIERENIRVQTMEGRIQKAKEGKWNGGFAPYGYQLIDGKLIINEEEAIAIRTIFDQYVNTSIGANGLSKYLENHGIRKIPRQNGKNPLFDAGLIRKILKNPVYNGKIAFGRRTLEKVHGTRNEYRQVEQDDYLVAEGIHEAIIPDELWQAAQVKLKAQAKKYEHVNKGKNMRTHLLSGIVKCPICGAGMFGNKSIKYKKDGTKYKDFYYYGCKYRLMNRGHKCTYNKQIREELLDDAVAEVIIKLVSNPKFASMIQEKINMKVDTSAIENEIDNYQNELRKSHSTKYKLIEEIDNLDVEDKHYKRRKNDLDDRLYRMYDKIEELESQLIEAKAKKETIEVEKLTGDNIYKVLIYFDKLYKVMNDVERRQLIEALISEIQIYEEKQPNGQWLKSITFKLPIIDEDLNISLENDEQVE

SEQ ID NO: 10397 - DNA, 50 bp, Clostridium cadaveris; identical to SEQ ID NO: 10392
  source 1..50: mol_type = genomic DNA

SEQ ID NO: 10398 - DNA, 40 bp, Clostridium cadaveris; identical to SEQ ID NO: 10393
  source 1..40: mol_type = genomic DNA

SEQ ID NO: 10399 - DNA, 50 bp, Clostridium cadaveris; identical to SEQ ID NO: 10394
  source 1..50: mol_type = genomic DNA

SEQ ID NO: 10400 - DNA, 40 bp, Clostridium cadaveris; identical to SEQ ID NO: 10395
  source 1..40: mol_type = genomic DNA

SEQ ID NO: 10401 - protein, 483 aa, Actinosynnema pretiosum
MTTPHLRAGLYGRQSAGNAASVADQHRSNAAACVQHNWSETARYSDLVSASRFGKKTRDDWAKLGADVASGKLDIVVMWDLSRGDRTVASWAAFVDQCRERGVLIHATAHGRTYDPRVPRDWRTLMDDGVEAGFDSEQKSLVVRRGMAGAALAGKPHGSAGYGYTRQYDPYDRKVYVDVPDDRAPIVREIVERCAREEPLKHIVKDLNARGVPSPRGGLWTSRVVKQFATHPRYIGLRSHLGELHQGNWDPIVSEEVFRRAVAVLTAPSRKAAAPGSNRYLLSYIGVAAPCGGFLNAQPDGEHRPARYRCNSDGCVSVRVDYLDELITRMTLERLALPDARGLFMPADAEASAAQVEVARLQARLVEARESFVGPEGISAAALASLERAVQPQLDAAQQRVAELTACAAGLELLGNGQFTVEVGTPRWRSLPLAGQRSVVKTLFEKIEVGPSVRRLSRWADREDHLLAVLERVAIERRSKVDS

SEQ ID NO: 10402 - DNA, 50 bp, Actinosynnema pretiosum
  source 1..50: mol_type = genomic DNA
tgaaacctcagtagccccgaatgcctggactgctgcttactggggttaca

SEQ ID NO: 10403 - DNA, 40 bp, Actinosynnema pretiosum
  source 1..40: mol_type = genomic DNA
ctggtaccccggcgagatcctggacctgccgcagtgcacc

SEQ ID NO: 10404 - DNA, 50 bp, Actinosynnema pretiosum
  source 1..50: mol_type = genomic DNA
tgaaacctcagtagccccgaatgcatggactgctgcttactggggttaca

SEQ ID NO: 10405 - DNA, 40 bp, Actinosynnema pretiosum
  source 1..40: mol_type = genomic DNA
ctggtacacgggcgagggcatggacgtgatggagttcacc

SEQ ID NO: 10406 - protein, 486 aa, Ruminococcus flavefaciens
MKEYCMYLRKSRADVEAEARGEGETLARHQNMLIELAKRQKLSVVKIYKEIVSGDSIAARPQMQALLADVTQGKYAGVLVVEIERLARGDTIDQGIVAQAFRESSTKIVTPVKTYDPDNEFDEEYFEFSLFMSRREYKTIKRRMQVGRLASVKEGNYISASAPYGYRKINPEPKVHTLEVVPEEAEIIRLIYRLYLDGHGAKFIANELNRMGVSPQKSAFWEPPSIKKILSNPLYCGFVGWKSKSNGDTLYKGIHEPIISEETFNNAQQKKRTAPAVQLRPNAKLKNYYHSILYCKNCGHQLKRRLIASSGQEHMLCVHSECRGKIVSSAIEAVDEAVIAALRYRIKQFENLKCKGTSEFGSQPNIKAALAAELEKARRQLLRLYDLLEQEVYDKETFIERSEIVNDRIKMLEAAVMEAEREQKPALLPDKAVKRLQYVIDNFESSDAEEKNRLLHTAVRKIYYCKTERMCRNKPFSDLSLSADFL

SEQ ID NO: 10407 - DNA, 50 bp, Ruminococcus flavefaciens
  source 1..50: mol_type = genomic DNA
tatgtacaacaaagatattgtaataaatcatcgtatccatgttgtacata

SEQ ID NO: 10408 - DNA, 40 bp, Ruminococcus flavefaciens
  source 1..40: mol_type = genomic DNA
tatgtggcagtatgagaaaaaattacagtaccctgttaag

SEQ ID NO: 10409 - DNA, 50 bp, Ruminococcus flavefaciens
  source 1..50: mol_type = genomic DNA
tatgtacaacaaagatattgtaatggatcatcgtatccatgttgtacata

SEQ ID NO: 10410 - DNA, 40 bp, Ruminococcus flavefaciens
  source 1..40: mol_type = genomic DNA
taaatggcaggatgagaatggaagacagagccctgttcag

SEQ ID NO: 10411 - protein, 483 aa, Corynebacterium glutamicum
MLVSMRVLGRVRLSRTTDESTSVERQQQIITQWAEGNNHTIVGWAIDVDVSGSINPFDTPSLGPWLKMPKAREWDILCAWKLDRVARNSIGLHKVFAWIQENDKQLVCIADNIDLSTWVGRLIASVIAGVAEGELEAITERNKAANRTLRANGRWQGGAPPYGYRIKDTGHGKVLEKNPDEWGILKQIIYRALAGESINSIKNWLVQSGLPTAAKSRYGKDSTWTASVVRGILTSKHLLGYQTLQRKPVLDAEGKPILVGPPLISLETYSKLQEELSSRTLATRNVSSGNPLKGAIKCGVCGGSMALRSREKVTGKFSGSYVCLNDNCTNKTIHAAKLLATVSELLEEELGQFEIMEKHTEYAGDTTLQLKEAEESYKEVAEFLPNAPSKEARQVILEQLQVIGKRINALKQTPMKDTTTWKPLGKTYGEAWKEADNIGKQKLLQKAGIIIKATSINSNTGPKPGIFHTELIIPPDLRQRLGK

SEQ ID NO: 10412 - DNA, 50 bp, Corynebacterium glutamicum
  source 1..50: mol_type = genomic DNA
attacaccctgttaattccactcgcactcgtgggatacacggtatgctag

SEQ ID NO: 10413 - DNA, 40 bp, Corynebacterium glutamicum
  source 1..40: mol_type = genomic DNA
tttcgattgtttttgcctccacgagtgggccatgtgctat

SEQ ID NO: 10414 - DNA, 50 bp, Corynebacterium glutamicum
  source 1..50: mol_type = genomic DNA
attacaccctgttaattccactcgttctcgtgggatacacggtatgctag

SEQ ID NO: 10415 - DNA, 40 bp, Corynebacterium glutamicum
  source 1..40: mol_type = genomic DNA
tgtccacttattttgcctctttgaatgggccatgtgttct

SEQ ID NO: 10416 - protein, 568 aa, Bacteroides thetaiotaomicron
MKKKVVGYARVSTEKQDLERQKILIREYCADSGYELIKIISEKVSGAKKDRQSINELLDIDGSVADMVVVSELSRISRQKELMAVLNTINEILENGLDVLFLDDTTKIYSAYAELDMVDIITLTVKAHSAAEERDKITTRMKTGKLTKVSTNPYMYTGGVVPYGFKVIDNPKYEGQKNNIPAKRLMVLDESKSKDIHLIYQLVLNGTTLRDAAKEANRLGLITQQNKPFCETSISKMIKNPIYNGRRRFKNLDLEIEKIIPDEDWNRAQICVSKNQLFKGKATKNFNPLKGIIFCPCGYALMLHKMVKKNGSSYFVLACCKKNDKEYRSKCRNSGTTADSLLPTVWKCVKSTLLLSEYLTKTKSEVNRINSIIDSLEDKIIVLVEEISTHKKEMTRLAKAITLVTVTGLIEQYQNEYIINEAKVNELEGKIQTVKNEITAYKDEINRVNTIKKDSELVNLTEQEKADIYKKVLSRVVYYSEDYFRGFIVISYKNGLENIVAINKTVFGYISPLPSSFGFNVDKRTITVQVSKKQPSLKSFSSGDIETREYNFKEMESNFDLKQWNITK

SEQ ID NO: 10417 - DNA, 50 bp, Bacteroides thetaiotaomicron
  source 1..50: mol_type = genomic DNA
ccatgcacatttgacaacttcgctgaaacaatatttgcaaatgtgctatg

SEQ ID NO: 10418 - DNA, 40 bp, Bacteroides thetaiotaomicron
  source 1..40: mol_type = genomic DNA
tcatcaccatgctctcgccgatgctgaggcttgtgcacaa

SEQ ID NO: 10419 - DNA, 50 bp, Bacteroides thetaiotaomicron
  source 1..50: mol_type = genomic DNA
ccatgcacatttgacaacttcgctcaaacaatatttgcaaatgtgctatg

SEQ ID NO: 10420 - DNA, 40 bp, Bacteroides thetaiotaomicron
  source 1..40: mol_type = genomic DNA
tcatcacatttctctctctcatgctgaggcttgagaatag

SEQ ID NO: 10421 - protein, 612 aa, Streptococcus anginosus
MIEYHNKITALYSRLSVGDEDRDGGESNSIVNQKAFLERYAREKKLINIRHYIDDDESGRFFDRSAYTQMISDVEQGKIGIVIMKDMTRWGRDYLQVGNAMEIFRRNNVRFIAINNGIDSIDQNTLEFAPFINIMSEWYARDISKKVKTGIKTKGADGKPVATEAPYGYIKDPENKDYWIADKEAAEVVKLIFRLFMEGKNRNQIAVYLKEKEILTPTFYMKQQDRGTAKSKPLNEENRYNWNKATITRILKRQEYCGDVVNFKTEKHYRDKRNHYVDKSKWQITENVHEPIIDRTTFENVERMLKNAPVKRPNGDGEIHALSGLMYCKDCGTKMHIRTIHKNKKVQHVTYCSEYAKGKAKHPKCNSPHRIDVDEVMENIAEVLRKIAQYSLENKAEFEKLVKESLYKEQTEEVKKNQKRMPQITDRMEQIERVMNKLYEDNALGNMDTERYEQLSRKYAEEYYTLKAEKEEIKERLSECENANQRAKKFIRLAESYSNFEELTPTIINEFISKIVVHERDVKRAKYVVQRIEVYFNYIGKFKNELTKQIEPTEQEMLQMREEIEEAKKEKARAYRRAYYKEYRAKNLEKCREYEKLKAREYRAKKKLQRAT

SEQ ID NO: 10422 - DNA, 50 bp, Streptococcus anginosus
  source 1..50: mol_type = genomic DNA
aaaggtatttgacaaaacgcttcctgggttgcataatattaactgaacag

SEQ ID NO: 10423 - DNA, 40 bp, Streptococcus anginosus
  source 1..40: mol_type = genomic DNA
agagtatggatcagcaagatggggaactaaaaaagatata

SEQ ID NO: 10424 - DNA, 50 bp, Streptococcus anginosus
  source 1..50: mol_type = genomic DNA
aaaggtatttgacaaaacgcttccaaggttgcataatattaactgaacag

SEQ ID NO: 10425 - DNA, 40 bp, Streptococcus anginosus
  source 1..40: mol_type = genomic DNA
agagaagggaaaagcaaaaaagggaaagaaaaaagctatc

SEQ ID NO: 10426 - protein, 472 aa, Streptococcus uberis
METNKVAIYARVSTLNQAEEGYSINEQIDSLTKYCDAMSWEVVRQYVDAGYSGGKLERPDMMKLISDAKNKKFDTVLVFKLDRLSRSVRDTLYLVKDVFTENKIGFVSLKENIDTSTAMGNLFLTMLSAIAEFEREQIKERMQFGLAGRAKSGKPTSWKTPPYGYNYDKNLQEMVVNEYEANNVREMFDMIISGHSLMQITHYARDHYPGNTWTHVKVKRILENEAYIGLVKLRNERYKGNHKRIISDEIFIKAQNAIEERTNASDNTRPFQGKYMLSHIVKCGYCGAPLKIDTSKPRKDGTRRQTYTCVNKFKARATNGATIYNNGKICKSGRYDAKTIEKFVIEEIRKIQIDKDFLKSKKQKSNINNDIAKKEISKIENKIEKLNDLYINDLIALDDLKKKTSDLKKEISKINKSINEEIIDSVKQNALNELESNIDISKSSYEVQKRIVKLIVDRVEVTNDNINIILKF

SEQ ID NO: 10427 - DNA, 50 bp, Streptococcus uberis
  source 1..50: mol_type = genomic DNA
tatgaacaccaactagtatagtagtgcatgaatcctgtatttttttgata

SEQ ID NO: 10428 - DNA, 40 bp, Streptococcus uberis
  source 1..40: mol_type = genomic DNA
tttccaactagtatagtagtgcaacccatttgatattctc

SEQ ID NO: 10429 - DNA, 50 bp, Streptococcus uberis
  source 1..50: mol_type = genomic DNA
tatgaacaccaactagtatagtagtccatgaatcctgtatttttttgata

SEQ ID NO: 10430 - DNA, 40 bp, Streptococcus uberis
  source 1..40: mol_type = genomic DNA
tttgcaacttttatagtagtccagccctttcgttactttc

SEQ ID NO: 10431 - protein, 472 aa, Streptococcus uberis
METNKVAIYARVSTLNQAEEGYSINEQIDSLTKYCDAMSWEVVHQYVDAGYSGGKLERPDMMKLISDAKNKKFDTVLVFKLDRLSRSVRDTLYLVKDVFTENKIGFVSLKENIDTSTAMGNLFLTMLSAIAEFEREQIKERMQFGLAGRAKSGKPTSWKTPPYGYNYDKNLQEMVVNEYEANNVREMFDMIISGHSLMQITHYARDHYPGNTWTHVKVKRILENEAYIGLVKLRNERYKGNHKRIISDEIFIKAQNAIEERTNASDNTRPFQGKYMLSHIAKCGYCGAPLKIDTSKPRKDGTRRQTYTCVNKFKARATNGATIYNNGKICKSGRYDAKTIEKFVIEEIRKIQIDKDFLKSKKQKSNINNDIAKKEISKIENKIEKLNDLYINDLIALDDLKKKTSDLKKEISKINKSINEEIIDSVKQNALNELESNIDISKSSYEVQKRIVKLIVDRVEVTNDNINIILKF

SEQ ID NO: 10432 - DNA, 50 bp, Streptococcus uberis; identical to SEQ ID NO: 10427
  source 1..50: mol_type = genomic DNA

SEQ ID NO: 10433 - DNA, 40 bp, Streptococcus uberis; identical to SEQ ID NO: 10428
  source 1..40: mol_type = genomic DNA

SEQ ID NO: 10434 - DNA, 50 bp, Streptococcus uberis; identical to SEQ ID NO: 10429
  source 1..50: mol_type = genomic DNA

SEQ ID NO: 10435 - DNA, 40 bp, Streptococcus uberis; identical to SEQ ID NO: 10430
  source 1..40: mol_type = genomic DNA

SEQ ID NO: 10436 - protein, 472 aa, Streptococcus uberis
MKTNKVAIYARVSTLNQAEEGYSINEQIDSLTKYCDVMSWEVVHQYVDAGYSGGKLERPDITKLISDAKNKKFDTVLVFKLDRLSRSVRDTLYLVKDVFTENKIGFVSLKENIDTSTAMGNLFLTMLSAIAEFEREQIKERMQFGLAGRAKSGKPTSWKTPPYGYTYDKNLQEMVVNEYEANNVREMFDMIISGHSLMQITHYARDHYPGNTWTHVKVKRILENEAYIGLVKLRNERYKGNHERIISDEIFIKAQNAIEERTNASDNTRPFQGKYMLSHIAKCGYCGAPLKIDTSKPRKDGTRRQTYTCVNKFKARATNGATIYNNGKICKSGRYDAKTIEKFVIEEIRKIQIDKDFLKSKKQKSNINNDIAKKEISKIENKIEKLNDLYINDLIALDDLKKKTSDLKKEISKINKSINEEIIDSVKQNALNELQSNIDISKSSYEVQKRIVKLIVDRVEVTNDNINIILKF

SEQ ID NO: 10437 - DNA, 50 bp, Streptococcus uberis
  source 1..50: mol_type = genomic DNA
tatgaacatcaactagtatagtagtgcatgaatcctgtatttttttgata

SEQ ID NO: 10438 - DNA, 40 bp, Streptococcus uberis; identical to SEQ ID NO: 10428
  source 1..40: mol_type = genomic DNA

SEQ ID NO: 10439 - DNA, 50 bp, Streptococcus uberis
  source 1..50: mol_type = genomic DNA
tatgaacatcaactagtatagtagtccatgaatcctgtatttttttgata

SEQ ID NO: 10440 - DNA, 40 bp, Streptococcus uberis; identical to SEQ ID NO: 10430
  source 1..40: mol_type = genomic DNA

SEQ ID NO: 10441 - protein, 472 aa, Streptococcus uberis
METNKVAIYARVSTLNQAEEGYSINEQIDSLTKYCDAMSWEVVHQYVDAGYSGGKLERPDITKLISDAKNKKFDTVLVFKLDRLSRSVRDTLYLVKDVFTENKIGFVSLKENIDTSTAMGNLFLTMLSAIAEFEREQIKERMQFGLAGRAKSGKPTSWKTPPYGYTYDKNLQEMVVNEYEANNVREMFDMIISGHSLMQITHYARDHYPGNTWTHVKVKRILENEAYIGLVKLRNERYKGNHKRIISDEIFIKAQNAIEERTNASDNTRPFQGKYMLSHIAKCGYCGAPLKIDTSKPRKDGTRRQTYTCVNKFKARATNGATIYNNGKICKSGRYDAKTIEKFVIEEIRKIQIDKDFLKSKKQKSNINNDIAKKEISKIENKIEKLNDLYINDLIALDDLKKKTSDLKKEISKINKSINEEIIDSVKQNALNELESNIDISKSSYEVQKRIVKLIVDRVEVTNDNINIILKF

SEQ ID NO: 10442 - DNA, 50 bp, Streptococcus uberis; identical to SEQ ID NO: 10437
  source 1..50: mol_type = genomic DNA

SEQ ID NO: 10443 - DNA, 40 bp, Streptococcus uberis; identical to SEQ ID NO: 10428
  source 1..40: mol_type = genomic DNA

SEQ ID NO: 10444 - DNA, 50 bp, Streptococcus uberis; identical to SEQ ID NO: 10439
  source 1..50: mol_type = genomic DNA

SEQ ID NO: 10445 - DNA, 40 bp, Streptococcus uberis; identical to SEQ ID NO: 10430
  source 1..40: mol_type = genomic DNA

SEQ ID NO: 10446 - protein, 472 aa, Streptococcus uberis
METNKVAIYARVSTLNQAEEGYSINEQIDSLTKYCDAMSWEVVHQYVDAGYSGGKLERPDITKLISDAKNKKFDTVLVFKLDRLSRSVRDTLYLVKDVFTENKIGFVSLKENIDTSTAMGNLFLTMLSAIAEFEREQIKERMQFGLAGRAKSGKPTSWKTPPYGYTYDKNLQEMVVNEYEANNVREMFDMIISGHSLMQITHYARDHYPGNTWTHVKVKRILENEAYIGLVKLRNERYKGNHERIISDEIFIKAQNAIEERTNASDNTRPFQGKYMLSHIAKCGYCGAPLKIDTSKPRKDGTRRQTYTCVNKFKARSTNGATIYNNGKICKSGRYDAKTIEKFVIEEIRKIQIDEDFFKSKKQKSNINNDIAKKEISKIENKIEKLNDLYINDLIALDDLKKKTSDLKKEISKINKSINEEIIDSVKQNALNELESNIDISKSSYEVQKRIVKLIVDRVEVTNDNINIILKF

SEQ ID NO: 10447 - DNA, 50 bp, Streptococcus uberis; identical to SEQ ID NO: 10437
  source 1..50: mol_type = genomic DNA

SEQ ID NO: 10448 - DNA, 40 bp, Streptococcus uberis; identical to SEQ ID NO: 10428
  source 1..40: mol_type = genomic DNA

SEQ ID NO: 10449 - DNA, 50 bp, Streptococcus uberis; identical to SEQ ID NO: 10439
  source 1..50: mol_type = genomic DNA

SEQ ID NO: 10450 - DNA, 40 bp, Streptococcus uberis; identical to SEQ ID NO: 10430
  source 1..40: mol_type = genomic DNA

SEQ ID NO: 10451 - protein, 471 aa, Alkalihalobacillus halodurans
MNRQSTFSTIRKSTLAFEEAKITALYCRLSRDDELAGDSNSIVNQKAILKKYAEDNGFRNIEFYVDDGVSGTTFDRPDFNRMIADVESGRIGTIIIKDMSRFGRDYLKVGYYTEIMFPEADVRFIAINNGIDSANQADSDFTPFLNIINEWYAKDTSKKIRAVFKSKGQSGKPLCTNPPYGYIKDPEDKLHWIIDEKAAEVVRDIFRLCMAGFGPTQIAKQLEKRCIDTPTVHLRKMGINTPARPPENPYAWSARTVADILAKMEYLGHTVNFKTSKKSYKSKVKILNNPEDWMVFKNTHEAIIDEGTWETVQKIRDGKRRPSRLGEMGMLSGMMFCADCGAKLYQVRGKGWSRDKEYFVCATYRKKKGMCSSHQIRNVVVEQLLLEDLRRVTSFAKDHEQEFIRIVMNNSEKELAKELRQSQKEYEQAQARIADIDKIIRKLYEDNVMGKIPEERFYKMSTEYEAEQKTL

SEQ ID NO: 10452 - DNA, 50 bp, Alkalihalobacillus halodurans; identical to SEQ ID NO: 3022
  source 1..50: mol_type = genomic DNA

SEQ ID NO: 10453 - DNA, 40 bp, Alkalihalobacillus halodurans
  source 1..40: mol_type = genomic DNA
aagtgaagaaaaggagctgaacgtggctccttttttgctc

SEQ ID NO: 10454 - DNA, 50 bp, Alkalihalobacillus halodurans
  source 1..50: mol_type = genomic DNA
ataaatccctatctgaccgctccttgagaagcgttcacttagggattgaa

SEQ ID NO: 10455 - DNA, 40 bp, Alkalihalobacillus halodurans
  source 1..40: mol_type = genomic DNA
cagagaagaaaagcagctttgcctgggtcctgttgttctc

SEQ ID NO: 10456 - protein, 570 aa, Clostridium phoceensis
MRTDKLTLGFAYLRLSNEEAQGGESSSITNQRMIVQNYCKQNNITLVREFADDGWSGGNFDRPAFQEMMRQLEQGKANTVITKDLSRLGRDMREASYYAEQFFPEHGIRYIAIGDNFDTERENIMAPFLFAMNEVYLRDGSRKVKDVLRSKRESGQYCACPPYGYRKDSQDKHRLAPDEQTAPVVRRVFEQAAKGDSSRKIALDLNADGVIPPLKYRVLYRDEFSPEGAARASDVWNYTTVKRILKNPVYLGHTLLGKSRKASVKSKKKVPVPRDDWAVTEGTHPPLVTKQLYERAQANLGRGSRDYRAYDQVRRSIFSGVTVCAKCGYSLCSCGTVYKGEREKYWYLSCTHQRQDIAEPCTGVRVRYADLLEVVRRDLNSLLSMTDDRMERMVRNALKRFGSEEVLKAKKLRREQAEARLLTIDKMVGKLYLDNAEGHLDDDRLRRMVADLEKESAGLKAILAELSAVTPAHEVEENYRRFFALAREYTQIEELDRDILLTFVERIEVGPKEYPDGTVKATHRSQPYRQSIRIFYRFIGEMQDNATRELPVDVSISKQSENRENKPNLA

SEQ ID NO: 10457 - DNA, 50 bp, Clostridium phoceensis
  source 1..50: mol_type = genomic DNA
tgagatggagagggaacatcaagggacctgcgtgtacctacaccatctta

SEQ ID NO: 10458 - DNA, 40 bp, Clostridium phoceensis
  source 1..40: mol_type = genomic DNA
caagatggaagcggccaacgaggtgggtgtcaacctgaag

SEQ ID NO: 10459 - DNA, 50 bp, Clostridium phoceensis
  source 1..50: mol_type = genomic DNA
tgagatggagagggaacatcaaggctcctgcgtgtacctacaccatctta

SEQ ID NO: 10460 - DNA, 40 bp, Clostridium phoceensis
  source 1..40: mol_type = genomic DNA
caagatggaagctggcagcctagtgggtgtgccactcaag

SEQ ID NO: 10461 - protein, 565 aa, Oscillibacter sp
MRNHIQLADAYYRLSDEERKYGESASITNQRTIVREYCEKHGIILVEEFVDDGFSGGNFERPGFQAMLEHLKTGKANMVITKDLSRLGRDMTESSHYAERYFPEHGIRYLAPGSNFDSEEDNLMAPFQFAMNDVYLRDTSRKVKQTLNTKRNNGKYVACPPYGYRKAERTTDQLVPDENTAPVVKMIFDLAASGQSCRSIALRLNELCIMPPLKYRVECRDNFTERGAQRMSDLWNYTTVKRILCNRVYLGHTLLGKSRKVSVKSKKKILVPEDEWVFTKDTHQALVSQEQFDLAAHFMGENTKANGANPAFRHSIFGGIAYCACCGAAMCSGGSVYNGEREKYWYLVCNNLTSRAQHRCAHGARIRYDDLMEVVRRDLNKLLSFDDDGIRAITESAIEQANASLGGADPATQIENIDKQTLRLKKMIERSYRDNIAGMLSDDIHGEMVKKFGVEIEELAARRKKLVEGETTAKEIRSAYGLFFDLAKKYTCVEKLDRDMLHAFIERIEIGEKILPEGRKVAGPRTPYRQSIRIFYRFIGEVSGDNLREMQANRDREEAAYAAGM

SEQ ID NO: 10462 - DNA, 50 bp, Oscillibacter sp
  source 1..50: mol_type = genomic DNA
ctttaaggtggatacacatcctcctcttgtggtgtgtattcacctcaaag

SEQ ID NO: 10463 - DNA, 40 bp, Oscillibacter sp
  source 1..40: mol_type = genomic DNA
cttcaggttcacgccaacctcgttggcagcttccatcttg

SEQ ID NO: 10464 - DNA, 50 bp, Oscillibacter sp
  source 1..50: mol_type = genomic DNA
ctttaaggtggatacacatcctccagttgtggtgtgtattcacctcaaag

SEQ ID NO: 10465 - DNA, 40 bp, Oscillibacter sp
  source 1..40: mol_type = genomic DNA
cttgagtggcacacccactaggctgccagcttccatcttg

SEQ ID NO: 10466 - protein, 560 aa, Frankia casuarinae
MPRSTARRTTAKRTKQAVAAQPEIVRVGIYLRRSTDDENQPYTIEAQEERLRSYVDSQPNWIVALRFADDASGATTERKDLQRALAAARNGLIDVLLVYRVDRLSRSLRDTVDLLEELEQAGVVFRSATEPFDTATPIGRMLLQILAMFAQFERDMIIDRVIAGMERKAAKGLWKGGRRPFGYQVDKIAKKLIIDVAEATIVRLIFDLYVRDRLGTRAIASVLNNRGLRTTVGGPWSGHKILRMLDNRAYLGELTFREITVEGTHEPIIDEETFDAAQKILTERSEETSRRASNPSDYYLTGRMRCPQCGTALIGTRATGRNHTYRYYTCHTRNRYNRHECDAPRLDADAVDYAVLTALAGFYRDHQQLIADAVLKAQRSHRDARSEHTAELSTIETELTLTDQAIDRYLGAFERGTLDDETLATRLEALRTKQKQLRQRQAELTEEIDHEPVMPARSSLRAVTRHIETIIETGDDLGRKALIEALVAEVKITGPDRLTPIFKVLGPDAPRDVTNVDTGDISQPKLTQPATSPAPHRGAAAVLPATTPPKGAVRAMPTLV

SEQ ID NO: 10467 - DNA, 50 bp, Frankia casuarinae
  source 1..50: mol_type = genomic DNA
ggttcgcgcaatgcctacattggtggacctaacgcaccacaataagaacc

SEQ ID NO: 10468 - DNA, 40 bp, Frankia casuarinae
  source 1..40: mol_type = genomic DNA
cgagtatgaatcctttggtggaggtgaggggactcgaacc

SEQ ID NO: 10469 - DNA, 50 bp, Frankia casuarinae; identical to SEQ ID NO: 10467
  source 1..50: mol_type = genomic DNA

SEQ ID NO: 10470 - DNA, 40 bp, Frankia casuarinae
  source 1..40: mol_type = genomic DNA
ccagtatgaattctttcgtggaggtgaagggaactgaggc

SEQ ID NO: 10471 - protein, 560 aa, Roseburia hominis
MARAKNRGYQQSFSPSYTIRRWRLGIYIRLSKEDLKKGKDDSNSVKNQRDLLNDFYRRNIDEFESITEYVDDGHTGTDANREDFQRLLADVVSGKINCVIVKDLSRFARNYSDAGSLIDNLFVQMGVRFISLAENVDSYKNPDSVSNIIVPITNVMNDNYCYQTSKKIRQVFDYKRRNGQYIGAFAPYGYVKHPKDKHRLIVDPDAAENVKLIFTMLIQGSSKRAIALYLNEHGVPSPSAYKVQKGLPVSTRGYDDPMWGVRMIHSILTNPTYTGDLAQGRSRVKSYKVHQIEAVPREEWVEVAGTHEAIIDYETFDKVQALLQRDTRTSPKGREVHLFSGFLKCADCGRAITRCVGKNNNVYYSCSTYKNRSRTACTMHSIKHERLEAAVLFAVQHQVHLAVSYSEIVTQINSAPIKKSQSYRLDDLIAAKERELTKITRYKQSLYQDWKDGEITQQEYRDMKADYERQTSDISAVLTRLNAERAELANGVDNEHPALVAFMKYQNIEALNREILVELVDYIKVYENGNISVKFKFADELRKIAEYIEINTTEDTAVAG

SEQ ID NO: 10472 - DNA, 50 bp, Roseburia hominis; identical to SEQ ID NO: 4052
  source 1..50: mol_type = genomic DNA

SEQ ID NO: 10473 - DNA, 40 bp, Roseburia hominis
  source 1..40: mol_type = genomic DNA
cttttgctgtataataggatatgaaaattgttatacggaa

SEQ ID NO: 10474 - DNA, 50 bp, Roseburia hominis
  source 1..50: mol_type = genomic DNA
tgttttcctaataggcgctaatcatttgattgtttcctattaggaacgct

SEQ ID NO: 10475 - DNA, 40 bp, Roseburia hominis
  source 1..40: mol_type = genomic DNA
tttttcctgaattatattatttgaaaattgttttattgaa

SEQ ID NO: 10476 - protein, 551 aa, Stenotrophomonas maltophilia
MATKARVYSYLRFSDPKQAAGSSAARQLEYAKRWAAEHGMALDAALSMQDEGLSAYHQRHVTKGALGVFLAAIDEGRIPAGSVLIVEGLDRLSRAEPIQAQAQLAQIINAGITVVTASDGREYNRAGLKAQPMDLVYSLLVMIRAHEESDTKSKRVRAAIHRQCKGWKDGTWRGVIRNGKDPSWTRLDPETKAFQLVPERAEAVKLAIRMFRDGHGAVRIMRTLAEEGLQLTNGGNPAGQLYRILRNRALIGEKVLEIDGEEYRLAGYYPSLLSAEQFADLQQATEQRAKQKGTGEIPGLITGLRISYCGYCGSAMVAQNLMNRGRREDGGPQHGHRRLICVGNSQGMGCAVAGSCSVVPIEHAIMSYCADQMNLARLFEGGDRSEALAGKLAIARARVADTTAKVERITDAMLADDAGDAPAAFMRRARELEASLVEQQAEVDALEHELAAIASSPTPAVAKAWADVQEGVKALDYNARTKARQLVADTFERISIYHRGTEPEQTRSWKGTIDLVLVAKRGSARILHVDRQTGEWRGGEEVRDLPDDPIQ

SEQ ID NO: 10477 - DNA, 50 bp, Stenotrophomonas maltophilia
  source 1..50: mol_type = genomic DNA
agtttacttcagagggccttcgggcaccccaatgaaataaaccctatact

SEQ ID NO: 10478 - DNA, 40 bp, Stenotrophomonas maltophilia
  source 1..40: mol_type = genomic DNA
atcaacaagggccttcgggcagccaaggctgacgaagccg

SEQ ID NO: 10479 - DNA, 50 bp, Stenotrophomonas maltophilia
  source 1..50: mol_type = genomic DNA
agtttacttcagagggccttcgggatccccaatgaaataaaccctatact

SEQ ID NO: 10480 - DNA, 40 bp, Stenotrophomonas maltophilia
  source 1..40: mol_type = genomic DNA
ttcaacaagctccttggtgatgccaaggcagcctaagcct

SEQ ID NO: 10481 - protein, 626 aa, Flavonifractor plautii
MRNEKITPLYERLSRDDELQGESNSISNQKQMLEDFARRNGLPNPTHFTDDGISGTRFDRPGFLAMMEEVEAGRVEAIVIKDMSRLGRDYLKVGQVMEVLRQRGVRLIAINDGVDSLKGDDDFTPFRNIMNEFYARDTSRKIRSVFKAKGMSGKHLTGTVIYGYLWDEKREHWLVDEEAAEVVRRIFSLTLEGYGPYQIACKLSADRIEIPVVHLARFNEGVNRSKPVKDPYGWGSSTIVNILKKREYLGHTINFKTRKHFKDKKSHYVSEDEWTIFENTHEAIIDQQTFDLVQKIRSNVRRYPNGWGEAAPLTGLLYCADCGGKMYVHRTNNGKRISQYTCSNYTKVPCGTLCLTQHRINESAVLTLVSDTLRAIAEYSRNDRTEFIHTVQETQVAQQSADISKKRRHLATAQKRAGELEKLICKIYEDNALGKLPDTRYKALDAQYAKEQDALEIEIAELEKAVTGYEQSQKSAEKFIALIDKYENFDTLTNTMLNEFVEKILVHERSRKGSQDTTQEIEIYFNFLGRYIPPSLQPVPLTPEEQGELRKREERKDRLHQNYLKRKASGAQKRYEDKIKAKKKAEMDAKKALIRAEDMKKGVFSTIGQLPKEEPRKGSIAASAAV

SEQ ID NO: 10482 - DNA, 50 bp, Flavonifractor plautii; identical to SEQ ID NO: 2337
  source 1..50: mol_type = genomic DNA

SEQ ID NO: 10483 - DNA, 40 bp, Flavonifractor plautii
  source 1..40: mol_type = genomic DNA
gattttcaagcaggccgccggaaaaacagccaagagcatt

SEQ ID NO: 10484 - DNA, 50 bp, Flavonifractor plautii
  source 1..50: mol_type = genomic DNA
aaaagtccttgacaatttgtctctactgatatatgctctaagtgacttct

SEQ ID NO: 10485 - DNA, 40 bp, Flavonifractor plautii
  source 1..40: mol_type = genomic DNA
gatttttataaaggctgcaacaaaatcagccaagagaatg

SEQ ID NO: 10486 - protein, 461 aa, Staphylococcus aureus
MKVAIYTRVSTLEQKEKGHSIEEQERKLRAYSDINDWKIHKVYTDAGYSGAKKDRPALQEMLNEIDNFDLVLVYKLDRLTRSVKDLLEILELFENKNVLFRSATEVYDTTSAMGRLFVTLVGAMAEWERTTIQERTAMGRRASARKGLAKTVPPFYYDRVNDKFVPNEYKKVLRFAVEEAKKGTSLREITIKLNNSKYKAPLGKNWHRSVIGNALTSPVARGHLVFGDIFVENTHEAIISEEEYEEIKLRISEKTNSTIVKHNAIFRSKLLCPNCNQKLTLNTVKHTPKNKEVWYSKLYFCSNCKNTKNKNACNIDEGEVLKQFYNYLKQFDLTSYKIENQPKEIEDVGIDIEKLRKERARCQTLFIEGMMDKDEAFPIISRIDKEIHEYEKRKDNDKGKTFNYEKIKNFKYSLLNGWELMEDELKTEFIKMAIKNIHFEYVKGIKGKRQNSLKITGIEFY

SEQ ID NO: 10487 - DNA, 50 bp, Staphylococcus aureus
  source 1..50: mol_type = genomic DNA
aattggaagttcggaataactatgcagatacctgatacacacttccaata

SEQ ID NO: 10488 - DNA, 40 bp, Staphylococcus aureus
  source 1..40: mol_type = genomic DNA
aattggcggatgaggtatccagttacctcgttcgccaatt

SEQ ID NO: 10489 - DNA, 50 bp, Staphylococcus aureus
  source 1..50: mol_type = genomic DNA
aattggaagttcggaataactatgttgatacctgatacacacttccaata

SEQ ID NO: 10490 - DNA, 40 bp, Staphylococcus aureus
  source 1..40: mol_type = genomic DNA
atttggcagatggggtattttgttatcctgatggccaatt

SEQ ID NO: 10491 - protein, 461 aa, Staphylococcus aureus; identical to SEQ ID NO: 10486

SEQ ID NO: 10492 - DNA, 50 bp, Staphylococcus aureus
  source 1..50: mol_type = genomic DNA
aattggaacttcggaataactattcagatacctgatacacacttccaata

SEQ ID NO: 10493 - DNA, 40 bp, Staphylococcus aureus; identical to SEQ ID NO: 10488
  source 1..40: mol_type = genomic DNA

SEQ ID NO: 10494 - DNA, 50 bp, Staphylococcus aureus
  source 1..50: mol_type = genomic DNA
aattggaacttcggaataactattttgatacctgatacacacttccaata

SEQ ID NO: 10495 - DNA, 40 bp, Staphylococcus aureus; identical to SEQ ID NO: 10490
  source 1..40: mol_type = genomic DNA

SEQ ID NO: 10496 - protein, 461 aa, Staphylococcus aureus; identical to SEQ ID NO: 10486

SEQ ID NO: 10497 - DNA, 50 bp, Staphylococcus aureus
  source 1..50: mol_type = genomic DNA
aattggaagttcggaataactatgcagatacctgatacacacttccaaca

SEQ ID NO: 10498 - DNA, 40 bp, Staphylococcus aureus; identical to SEQ ID NO: 10488
  source 1..40: mol_type = genomic DNA

SEQ ID NO: 10499 - DNA, 50 bp, Staphylococcus aureus
  source 1..50: mol_type = genomic DNA
aattggaagttcggaataactatgttgatacctgatacacacttccaaca

SEQ ID NO: 10500 - DNA, 40 bp, Staphylococcus aureus; identical to SEQ ID NO: 10490
  source 1..40: mol_type = genomic DNA

SEQ ID NO: 10501 - protein, 461 aa, Staphylococcus aureus
MKVAIYTRVSTLEQKEKGHSIEEQERKLRAYSDINDWKIHKVYTDAGYSGAKKDRPALQEMLNEIDNFDLVLVYKLDRLTRSVKDLLEILELFENKNVLFRSATEVYDTTSAMGRLFVTLVGAMAEWERTTIQERTAMGRRASARKGLAKTVPPFYYDRVNDKFVPNEYKKVLRFAVEEAKKGTSLREITIKLNNSKYKAPLGKNWHRSVIGNALTSPVARGHLVFGDIFVENTHEAIISEEEYEEIKLRISEKTNSTIIKHNAIFRSKLLCPNCNQKLTLNTVKHTPKNKEVWYSKLYFCSNCKNTKNKNACNIDEGEVLKQFYNYLKQFDLTSYKIENQPKEIEDVGIDIEKLRKERARCQTLFIEGMMDKDEAFPIISRIDKEIHEYEKRKDNDKGKTFNYEKIKNFKYSLLNGWELMEDELKTEFIKMAIKNIHFEYVKGIKGKRQNSLKITGIEFY

SEQ ID NO: 10502 - DNA, 50 bp, Staphylococcus aureus
  source 1..50: mol_type = genomic DNA
aattggaagttcggaataactatgctgatacctgatacacacttccaaca

SEQ ID NO: 10503 - DNA, 40 bp, Staphylococcus aureus
  source 1..40: mol_type = genomic DNA
aattggcggatgaggtatcctgttacctcgttcgccaatt

SEQ ID NO: 10504 - DNA, 50 bp, Staphylococcus aureus; identical to SEQ ID NO: 10499
  source 1..50: mol_type = genomic DNA

SEQ ID NO: 10505 - DNA, 40 bp, Staphylococcus aureus; identical to SEQ ID NO: 10490
  source 1..40: mol_type = genomic DNA

SEQ ID NO: 10506 - protein, 461 aa, Staphylococcus aureus; identical to SEQ ID NO: 10486

SEQ ID NO: 10507 - DNA, 50 bp, Staphylococcus aureus; identical to SEQ ID NO: 10502
  source 1..50: mol_type = genomic DNA

SEQ ID NO: 10508 - DNA, 40 bp, Staphylococcus aureus; identical to SEQ ID NO: 10503
  source 1..40: mol_type = genomic DNA

SEQ ID NO: 10509 - DNA, 50 bp, Staphylococcus aureus; identical to SEQ ID NO: 10499
  source 1..50: mol_type = genomic DNA

SEQ ID NO: 10510 - DNA, 40 bp, Staphylococcus aureus; identical to SEQ ID NO: 10490
  source 1..40: mol_type = genomic DNA

SEQ ID NO: 10511 - protein, 461 aa, Staphylococcus aureus
MKVAIYTRVSTLEQKEKGHSIEEQERKLRAYSDINDWKIHKVYTDAGYSGAKKDRPALQEMLNEIDNFDLVLVYKLDRLTRSVKDLLEILELFENKNVLFRSATEVYDTTSAMGRLFVTLVGAMAEWERTTIQERTAMGRRASARKGLAKTVPPFYYDRVNDKFVPNEYKKVLRFAVEEAKKGTSLREITIKLNNSKYKAPLGKNWHRSVIGNALTSPVARGHLVFGDIFVENTHEAIISEEEYEEIKLRISEKTNSTIVKHNAIFRSKLLCPNCNQKLTLNTVKHTPKNKEVWYSKLYFCSNCKNTKNKNACNIDEGEVLKQFYNYLKQFDLTSYKIENQPKEIEDVGIDIEKLRKERARCQTLFIEGMMDKDEVFPIISRIDKEIHEYEKRKDNDKGKTFNYEKIKNFKYSLLNGWELMEDELKTEFIKMAIKNIHFEYVKGIKGKRQNSLKITGIEFY

SEQ ID NO: 10512 - DNA, 50 bp, Staphylococcus aureus; identical to SEQ ID NO: 10497
  source 1..50: mol_type = genomic DNA

SEQ ID NO: 10513 - DNA, 40 bp, Staphylococcus aureus; identical to SEQ ID NO: 10488
  source 1..40: mol_type = genomic DNA

SEQ ID NO: 10514 - DNA, 50 bp, Staphylococcus aureus; identical to SEQ ID NO: 10499
  source 1..50: mol_type = genomic DNA

SEQ ID NO: 10515 - DNA, 40 bp, Staphylococcus aureus; identical to SEQ ID NO: 10490
  source 1..40: mol_type = genomic DNA

SEQ ID NO: 10516 - protein, 461 aa, Staphylococcus aureus
MKVAIYTRVSTLEQKEKGHSIEEQERKLRAYSDINDWKIHKVYTDAGYSGAKKDRPALQEMLNEIDNFDLVLVYKLDRLTRSVKDLLEILELFENKNVLFRSATEVYDTTSAMGRLFVTLVGAMAEWERTTIQERTAMGRRASARKGLAKTVPPFYYDRVNDKFVPNEYKKVLRFAVEEAKKGTSLREITIKLNNSKYKAPLGKNWHRSVIGNALTSPVARGHLVFGDIFVENTHEAIISEEEYEEIKLRISEKTNSTIVKHNAIFRSKLLCPNCNQKLTLNTVKHTPKNKEVWYSKLYFCSNCKNTKNKNACNIDEGEVLKQFYNYLKQFDLTSYKIENQPKEIEDVGIDIEKLRKERARCQTLFIEGMMDKDEAFPIISRIDKEIHEYEKRKDNDKGKTFNYEKIKNFKYSLLNGWELMEDELKTEFIKMTIKNIHFEYVKGIKGKRQNSLKITGIEFY

SEQ ID NO: 10517 - DNA, 50 bp, Staphylococcus aureus; identical to SEQ ID NO: 10497
  source 1..50: mol_type = genomic DNA

SEQ ID NO: 10518 - DNA, 40 bp, Staphylococcus aureus; identical to SEQ ID NO: 10488
  source 1..40: mol_type = genomic DNA

SEQ ID NO: 10519 - DNA, 50 bp, Staphylococcus aureus; identical to SEQ ID NO: 10499
  source 1..50: mol_type = genomic DNA

SEQ ID NO: 10520 - DNA, 40 bp, Staphylococcus aureus; identical to SEQ ID NO: 10490
  source 1..40: mol_type = genomic DNA

SEQ ID NO: 10521 - protein, 461 aa, Staphylococcus aureus; identical to SEQ ID NO: 10486

SEQ ID NO: 10522 - DNA, 50 bp, Staphylococcus aureus
  source 1..50: mol_type = genomic DNA
aattggaagttcggaataactatgcagttacctgatacacacttccaaca

SEQ ID NO: 10523 - DNA, 40 bp, Staphylococcus aureus; identical to SEQ ID NO: 10488
  source 1..40: mol_type = genomic DNA

SEQ ID NO: 10524 - DNA, 50 bp, Staphylococcus aureus
  source 1..50: mol_type = genomic DNA
aattggaagttcggaataactatgttgttacctgatacacacttccaaca

SEQ ID NO: 10525 - DNA, 40 bp, Staphylococcus aureus; identical to SEQ ID NO: 10490
  source 1..40: mol_type = genomic DNA

SEQ ID NO: 10526 - protein, 461 aa, Staphylococcus aureus
MKVAIYTRVSTLEQKEKGHSIEEQERKLRAYSDINDWKIHKVYTDAGYSGAKKDRPALQEMLNEIDNFDLILVYKLDRLTRSVKDLLEILELFENKNVLFRSATEVYDTTSAMGRLFVTLVGAMAEWERTTIQERTAMGRRASARKGLAKTVPPFYYDRVNDKFVPNEYKKVLRFAVEEAKKGTSLREITIKLNNSKYKAPLGKNWHRSVIGNALTSPVARGHLVFGDIFVENTHEAIISEEEYEEIKLRISEKTNSTIVKHNAIFRSKLLCPNCNQKLTLNTVKHTPKNKEVWYSKLYFCSNCKNTKNKNACNIDEGEVLKQFYNYLKQFDLTSYKIENQPKEIEDVGIDIEKLRKERARCQTLFIEGMMDKDEAFPIISRIDKEIHEYEKRKDNDKGKTFNYEKIKNFKYSLLNGWELMEDELKTEFIKMAIKNIHFEYVKGIKGKRQNSLKITGIEFY

SEQ ID NO: 10527 - DNA, 50 bp, Staphylococcus aureus; identical to SEQ ID NO: 10497
  source 1..50: mol_type = genomic DNA

SEQ ID NO: 10528 - DNA, 40 bp, Staphylococcus aureus; identical to SEQ ID NO: 10488
  source 1..40: mol_type = genomic DNA

SEQ ID NO: 10529 - DNA, 50 bp, Staphylococcus aureus; identical to SEQ ID NO: 10499
  source 1..50: mol_type = genomic DNA

SEQ ID NO: 10530 - DNA, 40 bp, Staphylococcus aureus; identical to SEQ ID NO: 10490
  source 1..40: mol_type = genomic DNA

SEQ ID NO: 10531 - protein, 400 aa, Staphylococcus aureus
MNEIDNFDLVLVYKLDRLTRSVKDLLEILELFENKNVLFRSATEVYDTTSAMGRLFVTLVGAMAEWERTTIQERTAMGRRASARKGLAKTVPPFYYDRVNDKFVPNEYKKVLRFAVEEAKKGTSLREITIKLNNSKYKAPLGKNWHRSVIGNALTSPVARGHLVFGDIFVENTHEAIISEEEYEEIKLRISEKTNSTIVKHNAIFRSKLLCPNCNQKLTLNTVKHTPKNKEVWYSKLYFCSNCKNTKNKNACNIDEGEVLKQFYNYLKQFDLTSYKIENQPKEIEDVGIDIEKLRKERARCQTLFIEGMMDKDEAFPIISRIDKEIHEYEKRKDNDKGKTFNYEKIKNFKYSLLNGWELMEDELKTEFIKMAIKNIHFEYVKGIKGKRQNSLKITGIEFY

SEQ ID NO: 10532 - DNA, 50 bp, Staphylococcus aureus; identical to SEQ ID NO: 10497
  source 1..50: mol_type = genomic DNA

SEQ ID NO: 10533 - DNA, 40 bp, Staphylococcus aureus; identical to SEQ ID NO: 10488
  source 1..40: mol_type = genomic DNA

SEQ ID NO: 10534 - DNA, 50 bp, Staphylococcus aureus; identical to SEQ ID NO: 10499
  source 1..50: mol_type = genomic DNA

SEQ ID NO: 10535 - DNA, 40 bp, Staphylococcus aureus; identical to SEQ ID NO: 10490
  source 1..40: mol_type = genomic DNA

SEQ ID NO: 10536 - protein, 461 aa, Staphylococcus aureus
MKVAIYTRVSTLEQKEKGHSIEEQERKLRAYSDINDWKIHKVYTDAGYSGAKKDRPALQEMLNEIDNFDLVLVYKLDRLTRSVKDLLEILELFENKNVLFRSATEVYDTTSAMGRLFVTLVGAMAEWERTTIQERTAMGRRASARKGLAKTVPPFYYDRVNDKFVPNEYKKVLRFAVEEAKKGTSLREITIKLNNSKYKAPLGKNWHRSVIGNALTSPVARGHLVFGDIFVENTHEAIISEEEYEEIKLRISEKTNSTIVKHNAIFRSKLLCPNCNQKLTLNTVKHTPKNKEVWYSKLYFCSNCKNTKNKNACNIDEGEVLKHFYNYLKQFDLTSYKIENQPKEIEDVGIDIEKLRKERARCQTLFIEGMMDKDEAFPIISRIDKEIHEYEKRKDNDKGKTFNYEKIKNFKYSLLNGWELMEDELKTEFIKMAIKNIHFEYVKGIKGKRQNSLKITGIEFY

SEQ ID NO: 10537 - DNA, 50 bp, Staphylococcus aureus; identical to SEQ ID NO: 10497
  source 1..50: mol_type = genomic DNA

SEQ ID NO: 10538 - DNA, 40 bp, Staphylococcus aureus; identical to SEQ ID NO: 10488
  source 1..40: mol_type = genomic DNA

SEQ ID NO: 10539 - DNA, 50 bp, Staphylococcus aureus; identical to SEQ ID NO: 10499
  source 1..50: mol_type = genomic DNA

SEQ ID NO: 10540 - DNA, 40 bp, Staphylococcus aureus; identical to SEQ ID NO: 10490
  source 1..40: mol_type = genomic DNA

SEQ ID NO: 10541 - protein, 461 aa, Staphylococcus aureus
MKVAIYTRVSTLEQKEKGHSIEEQERKLRAYSDINDWKIHKVYTDAGYSGAKKDRPALQEMLNEIDNFDLVLVYKLDRLTRSVKDLLEILELFENKNVLFRSATEVYDTTSAMGRLFVTLVGAMAEWERTTIQERTAMGRRASARKGLAKTVPPFYYDRVNDKFVPNEYKKVLRFAVEEAKKGTSLREITMKLNNSKYKAPLGKNWHRSVIRNALISPVARGHLVFGDIFVKNTHEAIISEEEYKEIKQRISEKTNSTIVKHNAIFRSKLLCPNCNQKLTLNTVKHTPKNKEVWYSKLYFCVNCKNTKNKNACNIDEGEVLKQFYNYLKQFDLTSYKIENQPKEIEDVGIDIEKLRKERARCQTLFIEGMMDKDEAFPIISRIDKEIHEYEKRKDNDKGKTFNYEKIKNFKYSLLNGWELMEDELKTEFIKMAIKNIHFEYVKGIKGKRQNSLKITGIEFY

SEQ ID NO: 10542 - DNA, 50 bp, Staphylococcus aureus; identical to SEQ ID NO: 10497
  source 1..50: mol_type = genomic DNA

SEQ ID NO: 10543 - DNA, 40 bp, Staphylococcus aureus; identical to SEQ ID NO: 10488
  source 1..40: mol_type = genomic DNA

SEQ ID NO: 10544 - DNA, 50 bp, Staphylococcus aureus; identical to SEQ ID NO: 10499
  source 1..50: mol_type = genomic DNA

SEQ ID NO: 10545 - DNA, 40 bp, Staphylococcus aureus; identical to SEQ ID NO: 10490
  source 1..40: mol_type = genomic DNA

SEQ ID NO: 10546 - protein, 524 aa, Aeromonas veronii
MTNKCFPYVRFSSTRQEDGSTRERQNALIDAFVAKHGLTVDRALEDAGTSAFRGLNASADGVLGGFLKQVREGEIEKGSYLLIENFDRLSRDKIVRSNQIFTDILNAGIKIVILDRDKIFDINNLDIGDWITALIEFERANKESERKSDFSSKAWRYNREKMRSGEIVTKKVPNWLSVEDGVFIVDLDKVSRITHLFNLSLKYGLLEATKRYNQEYADKLAPHQVQYILGNRKLIGEHQPKKLYWEDGGKRRLKDEGNPIPNYYPAVIEQELFYKVQEIIKGRKPFTGNYNKQQYNIFRGLIYCRWCGGTIRYMNKGERDYFICTKSMGHNCVVPGQQSIRGRKLFSLFFQFTDKLNIQSLINESKDYTAIKTNILKVENDKKRIQNRLDDFKSSLKKMILEQQSVPNSFYEVVNDLENDLASLEEKSKTLNEEYKQATQSYNALLEVEHIDIESIIYDRSEAAIEKRVAYNSTLKHIFKGIAIDWLGGMLVLEFKDGTERYLKEGQRVPVDIPTDFDEVLDIE

SEQ ID NO: 10547 - DNA, 50 bp, Aeromonas veronii
  source 1..50: mol_type = genomic DNA
atggaacctatcgcagaacacatccagatgtgttaggttaaaggttccac

SEQ ID NO: 10548 - DNA, 40 bp, Aeromonas veronii
  source 1..40: mol_type = genomic DNA
cctggcatagcagtagatgcagccgtgctcgcacccctga

SEQ ID NO: 10549 - DNA, 50 bp, Aeromonas veronii
  source 1..50: mol_type = genomic DNA
atggaacctatcgcagaacacatcaagatgtgttaggttaaaggttccac

SEQ ID NO: 10550 - DNA, 40 bp, Aeromonas veronii
  source 1..40: mol_type = genomic DNA
cttgcaatagaagaggatgaagccgtgctcgctgccctgc

SEQ ID NO: 10551 - protein, 489 aa, Oscillibacter sp
MKAVIYARYSSDSQREESIEGQLRECTEYAERNGITILRSYIDRALSARTADRPEFQNMIKDSEQKLFDVVLIWKLDRFSRDRYDSAHYKRILKKNGVKVVSVKENISDGPEGIILESMLEGYAEYYSAELSEKIHRGQKENALKGRNNGGGIPLGYLLDKKEQKLVLDPVTAPLVREIFQRYADGEIVRTIVEDFNRRGLKTKSGKPFSPNSFNRILKNRKYIGEYRYQDVIIPSGVPAILSDDVFYQVQARLEKNKRAPATAKADVDYLLTTKLFCGLCERMMIGESGTSHTGDKHYYYKCAGAKRKLGCKKKSVKKDFIERAAVILTVNRVLRDEEISRIADSILALQNSEDTTIPALKKQLADTERGIENMLNAIQKGVLTSSTKERLEALEKQRDNLKIAVLQAELQKPKYTKEQIVSWIGQFKYGDVNSREYQKRIIDTFVNSLYLFDDRLVITYNFKGGTEIITLKDVEAVYGSDLKAMSPP

SEQ ID NO: 10552 - DNA, 50 bp, Oscillibacter sp
  source 1..50: mol_type = genomic DNA
ttcggatttgaaagcgatgtctccaccaatgcaagataatccgaacctta

SEQ ID NO: 10553 - DNA, 40 bp, Oscillibacter sp
  source 1..40: mol_type = genomic DNA
ttcgactcccctcagctccaccaaaacgaaagaccagaag

SEQ ID NO: 10554 - DNA, 50 bp, Oscillibacter sp
  source 1..50: mol_type = genomic DNA
ttcggatttgaaagcgatgtctcccccaatgcaagataatccgaacctta

SEQ ID NO: 10555 - DNA, 40 bp, Oscillibacter sp
  source 1..40: mol_type = genomic DNA
ttggtcttccctcagctgaccctatgggaaagaccagaag

SEQ ID NO: 10556 - protein, 585 aa, Clostridioides difficile
MNTKVKLIKASNIGARNRNALHLDLKRVAAYCRVSTDSKDQLESYKSQVDYYTNLIKNNKNWTLAGIYADEATTGTTATKRADFMRLISDCQNGDIDMIITKSISRFARNTLDTLKYVRLLKENNVGVVFEEENIDTLTMDGELLLTILSSVAQQEVENTSAHVKKGLKMKMEKGELIGFQGCLGYDYDPITKSISINEEEAKIVRYIFKRYLEGNGGSVIGRELEEQGYLTPRGKTKWSDTTVLGIIKNEKYIGDILMGKTFTVDPITKRRLANFGESDKYHIENHHEPIISKEDFEKAQEIRLRRAQNRNTIANKDRKREKLSRQYAFSSMLECGFCGEILSRRTWHTSSIYKKINWQCVKSTKKGKKYCPHSKGIQEAAIEKAFVESYRQLCHADSTVIDDFLKIVEEEINDNTLVKDLKKLENQLNRIISQERKLVDLHLEDSIDEEVYAKKYKKLTKQKEELLDEKKTLELTIKDEDSIKERLKQFKKVLENKEIIEEFNRTVFESIVDKVVVGRIDKDGTVHPYDLTFYFKTGVKDSQDSNNFKDKRKNAKDNDINKLCSYKNDEDKKLCSQSKDNACG

SEQ ID NO: 10557 - DNA, 50 bp, Clostridioides difficile
  source 1..50: mol_type = genomic DNA
atgttcccaatcaaaagacaacgcatgtggagactatagcgttgatacaa

SEQ ID NO: 10558 - DNA, 40 bp, Clostridioides difficile
  source 1..40: mol_type = genomic DNA
atgttccctcattctactcatgtggaaactgtagctaaga

SEQ ID NO: 10559 - DNA, 50 bp, Clostridioides difficile
  source 1..50: mol_type = genomic DNA
atgttcccaatcaaaagacaacgcttgtggagactatagcgttgatacaa

SEQ ID NO: 10560 - DNA, 40 bp, Clostridioides difficile; identical to SEQ ID NO: 1790
  source 1..40: mol_type = genomic DNA

SEQ ID NO: 10561 - protein, 588 aa, Clostridioides difficile
MKKDVKVIKGDTTLKRTASGCVERSIKRVAAYCRVSTDTEDQINSYNSQVEHYTEFIQKNNEWTLAGIYADEAITGTQVDRRIDFQRLINDCMNGDIDMIITKSISRFARNTLDTLKYVRKLKEFNVAVFFEEENINTLTMDGELLLTILSSVAQQEVENISANVKKGLRMKMERGEMVGFQGCLGYDYDPETKSISVNEKEAEIVRYIFRRYIEGVGGMVISRELEEQGYLSPRGNKRWTETTVLGIIKNEKYKGDLMMGKTYTVDPISKRRLDNFGEQDKFYIENHHEPIISEEDFEKAQGIRLRRSKNRNTVANNGGKREKYSRKYAFSSMLECGFCGYNLSRRNWHSSSEYTKVIWQCVNATKNGKKYCPHSKGIEEAAIEKAFMESYRQVCHNNVEITNEFLKTVEEELKDNSLAKDLKKITNQLDKILKKEKDLVELRLNESISMDIYQEKYNEIAVSKEKLLAEKRTLEVTLTDEKALKKRLEGFKKLLESNKYLEEFDRAVFESIVDKIIIGGINDEGEIDPAMITIIYKTGKKDSQDGRLFKSRRKNAKKVNEETDNKLYPQSSDEVNNLRSYPMDNTC

SEQ ID NO: 10562 - DNA, 50 bp, Clostridioides difficile
  source 1..50: mol_type = genomic DNA
gcgttcctatcctatggacaacacatgtcgagaccatagcgttgatacaa

SEQ ID NO: 10563 - DNA, 40 bp, Clostridioides difficile; identical to SEQ ID NO: 10558
  source 1..40: mol_type = genomic DNA

SEQ ID NO: 10564 - DNA, 50 bp, Clostridioides difficile
  source 1..50: mol_type = genomic DNA
gcgttcctatcctatggacaacacttgtcgagaccatagcgttgatacaa

SEQ ID NO: 10565 - DNA, 40 bp, Clostridioides difficile; identical to SEQ ID NO: 1790
  source 1..40: mol_type = genomic DNA

SEQ ID NO: 10566 - protein, 555 aa, Streptococcus equi
MNKSTLTIEDIKTQNLDSLPDRITALYCRLSAEDANEGESNSISNQKQILSQVAIRENLPNPFFFVDDGFSGSNAQRPDFQKMMSLVETGKIQAVVVKDLSRLSRDYLLTGQLTEITFPSKNIRFISLNENLDSNKRNSQDAYLAPLVSLFNNWYSLQCSEKIKLSKHTKAKTGEKIGWVAPYGYIKNPENPKEWLVDDYASQIVKRVFKEYLSGKPIASIAGGLRKDKILTPANYKKKLGISNYRVLETDPYHWKSQMICQMLEKEEYTGATINLKTAKISYKQRGHRMRPREDWLIFPDTHEAIISQEDFEMARKMLGHKRVTPKNRWKNTAGHENLFAGLVFCENGHKLSFCPQQKNHLNLDHYKCYHYHRAGDTCSGSHYLRKEVLEELVLRDLQQLISSVQLDEEKLLEKLKSRFDIRENQKQESLRRQLSHSQKRTQELDTIIQKLYEKQLLDDISDERFRKLADSYESEQAELNQKIQELQEVLINQTESEESIDKFMRTIRQYTNLEALSTQLVNELIDKIVVHQPTGRGKNRQVTVELHYRFIGEL

SEQ ID NO: 10567 - DNA, 50 bp, Streptococcus equi
  source 1..50: mol_type = genomic DNA
ggactgctcagtgaggtgtaaatattatatcacagacctgtaagcagtcc

SEQ ID NO: 10568 - DNA, 40 bp, Streptococcus equi; identical to SEQ ID NO: 4818
  source 1..40: mol_type = genomic DNA

SEQ ID NO: 10569 - DNA, 50 bp, Streptococcus equi
  source 1..50: mol_type = genomic DNA
ggactgctcagtgaggtgtaaatataatatcacagacctgtaagcagtcc

SEQ ID NO: 10570 - DNA, 40 bp, Streptococcus equi
  source 1..40: mol_type = genomic DNA
aagtttttatttagctttataatacaaatattctaacaaa

SEQ ID NO: 10571 - protein, 613 aa, Streptomyces albidoflavus; identical to SEQ ID NO: 3851

SEQ ID NO: 10572 - DNA, 50 bp, Streptomyces albidoflavus; identical to SEQ ID NO: 3852
  source 1..50: mol_type = genomic DNA

SEQ ID NO: 10573 - DNA, 40 bp, Streptomyces albidoflavus
  source 1..40: mol_type = genomic DNA
cgggtgccagggcgtccccttcggctccccggccgcgtac

SEQ ID NO: 10574 - DNA, 50 bp, Streptomyces albidoflavus
  source 1..50: mol_type = genomic DNA
gtagtgccccaactggggtaacctaagagttctctcagttgggggcgtag

SEQ ID NO: 10575 - DNA, 40 bp, Streptomyces albidoflavus
  source 1..40: mol_type = genomic DNA
cggccgccagggcctccccaacggctccccggccagcgcg

SEQ ID NO: 10576 - protein, 500 aa, Streptomyces cyaneofuscatus
MKTSARDRVRRVGIYVRISDDREGGGLGVKRQEDDCRLLAASLGWKVVEVYVDNDVTAADRRKKRKDYLRMLADIESGHIDAIVSWHPDRVYRQPAELEDLIIIVEEHKTEIATVKAGDLDLSTPTGRLVARMLGAIAKYEVEHKQERILRKIQELVEAGKIHNSGHRPFGYTRLFDGEGSRRKILGEILNEKEAAHIKKWARRVQEGEKLGTLVAEANEAGIKTSTGGAWSYQAMRFLLMSGRISGRKEHKGEIYGQAVWPKIIEPEDSDSIRALLAERSEEFKAEFGERDTPALKYPLSGLVKCTCKVRHVVGEPCSCKEEGKKHHRMSTGQRGDKDMPIYTCKKDGGGCGGRTIQIPDLEPLMEKLLFKRLEEVEAAAGEDPDDPRPALEAKLARWEKRKKELGDELLDGDRPAREIREAIDTLNGRMAWARQEIAQYAVKANLHEISAAELREAWKDYSVARKQSTYRGLIREILIHPATRPFNVWSPDRVEVFWK

SEQ ID NO: 10577 - DNA, 50 bp, Streptomyces cyaneofuscatus
  source 1..50: mol_type = genomic DNA
gggtagggtcgaagaaatttctggtgccacaccttccttggagcacatca

SEQ ID NO: 10578 - DNA, 40 bp, Streptomyces cyaneofuscatus
  source 1..40: mol_type = genomic DNA
ctggaagcccgagccgtggtgggccaccttgaggacgtcc

SEQ ID NO: 10579 - DNA, 50 bp, Streptomyces cyaneofuscatus
  source 1..50: mol_type = genomic DNA
gggtagggtcgaagaaatttctggcgccacaccttccttggagcacatca

SEQ ID NO: 10580 - DNA, 40 bp, Streptomyces cyaneofuscatus
  source 1..40: mol_type = genomic DNA
ctgcaggcccgaggagtggcgggccagcttgaagatgcgc

SEQ ID NO: 10581 - protein, 488 aa, Clostridium perfringens
MKRIAIYIRKSVKGDENSISLEAQTEIIKHYFKDKNEFVVYKDDGFSGGNTNRPAFQELMADAMEGKFDTVACYKLDRIARNTLDFLTTFNTLKEYGIDLICVEDKYDPSTPAGRLMMTLLASLAEMERENIKQRVSDSMLNLARSGRWTGGNTPFGYKVVTIDGGKYLELEDKENIKYIFNEFINGKSIFKLAREFNFGKKKISRILRNITYLKSSKNANIYLKQVLSYEVVGEPNGYGYLPYGQNKVIGGKIVRNNDKIATVSKHKAVIDLDTFIRTQERLKTFEGKRAPRISNKSFLAQMVKCGCCGANMLIVLGYKRKDGTRKLYFACPNKCGNSFKDIIEVENDVLNSLKNVNFFNEINKNKSIVNKDNSKIKKSMIKELEEKKKILDGLMDKLALVDSTLANVIIEKMNSVNVDINDLQNKIDLLEKEEIASSYNKEDFKLKEENRKHFIEEFENMSMEEKQNAIRGIINNIVWDGENIIIS

SEQ ID NO: 10582 - DNA, 50 bp, Clostridium perfringens
  source 1..50: mol_type = genomic DNA
atagtaaccataactatttaaatactctcggtactgctagtggtttcaaa

SEQ ID NO: 10583 - DNA, 40 bp, Clostridium perfringens
  source 1..40: mol_type = genomic DNA
gattatttagttatagcatctcttggtactgctttagccc

SEQ ID NO: 10584 - DNA, 50 bp, Clostridium perfringens
  source 1..50: mol_type = genomic DNA
atagtaaccataactatttaaatagcctcggtactgctagtggtttcaaa

SEQ ID NO: 10585 - DNA, 40 bp, Clostridium perfringens
  source 1..40: mol_type = genomic DNA
taatatttatttacagcatgccttactactgctttacttc

SEQ ID NO: 10586 - protein, 522 aa, Rhizobium leguminosarum
MKRAVIYARYSTDLQNDKSVEDQFRLCQDFAGRLGAKVIKQFSDKAKSGASMFGRPGLADLMTAAERGEFDILITESTDRVSRDIADLAHVHKVLKFRNIEMQCVNGGLMDTVQIGMYGIVGQMQREEGARKVKRGMTGVVRSGRNPGGRAYGYRPISGKKGELEIVEEEATVIRRIFDMYAAGISARTIAKSLNEDGVPAPRGKQWNASTINGNSNRGNGILRNPIYAGQIVWNRVHMVKDPSTGKRVSRINEDSAVETIDAPHLRIVDDKLFQLVRDSKKERTGTAARTAPKNKRLLSGLLRCECGGSLSIIGADRSGPRVQCTVNKESGSCSNDARYYVEKIERDVIDRLRVMFADTSIIDAYVEEYKAESKRIAAERRNSRGNTERALADVQERIGRLLDQVARGTIEEEDVLSMLPPMKAERERLKGELAAQEPPSNVIEIKPKAVTRFREDVESLAEILKERGAEPTVEMARAFRDVISGIIVSRRKPGEAYHYEIKGWLEGITGPALSSVLLVAE

SEQ ID NO: 10587 - DNA, 50 bp, Rhizobium leguminosarum
  source 1..50: mol_type = genomic DNA
gtcgtctgttttgttggtagcggaggtccgttctggtcacaacagccgac

SEQ ID NO: 10588 - DNA, 40 bp, Rhizobium leguminosarum
  source 1..40: mol_type = genomic DNA
tgaaggagatggtagcggaggagggatttgaacccccgac

SEQ ID NO: 10589 - DNA, 50 bp, Rhizobium leguminosarum
  source 1..50: mol_type = genomic DNA
gtcgtctgttttgttggtagcggagatccgttctggtcacaacagccgac

SEQ ID NO: 10590 - DNA, 40 bp, Rhizobium leguminosarum
  source 1..40: mol_type = genomic DNA
tgaactaggtggtagcagagaagggttttgaaccatttac

SEQ ID NO: 10591 - protein, 584 aa, Paeniclostridium sordellii
MKEVEIIKKNDNLENRRRGKYIDCKRVAAYCRVSTDSEDQLNSYKSQVSYYTDLINNNIEWCMVDIYADEAITGTQVNKREDFQRMINDCMNNEIDMIITKSISRFARNTLDTLKYVRMLKEKNIAVYFEDEKINTLTMDGELLLVVLSSVAQQEVENISANVKKGLKMKMRRGELVGFQGCLGYDYHKEDKTLTINEKEAEIVRYIFNRYIEGAGCSIIGQELENLGYKTKYGSTIWSNSTVLGIIKNEKYIGDVLLGKTFTVDPISKRRLDNLGEEEKYYVKNNHEPIISREIFDKAHEILNRRSKNRGKYEEGVTKREKYSRKYAFSCMMECGFCGGTLTRRNWHSGSEYSKIIWQCVVATKKGKKYCPESKGIPERVIENAFVESYRLLCDEKKSVLEELLNRINDTVGSSEVNNKIKKIERELSVIEKKINNLVDMRLDDIIEKETYEIKYQELIDNQEKLLNERNKLNVVAKNENSMKQRLKEFKKTLEENEVLDKFDRGVFESVVEKVIIGEKNKDGENDPTKITFIYKTGFKNTLSSNEFKIPRKNARGRHKRKELCLHGNNEVENLCSYSSSNTC

SEQ ID NO: 10592 - DNA, 50 bp, Paeniclostridium sordellii
  source 1..50: mol_type = genomic DNA
ttcatatagtagttcaaacacatgtggagactgtagcgttactacgtcga

SEQ ID NO: 10593 - DNA, 40 bp, Paeniclostridium sordellii
  source 1..40: mol_type = genomic DNA
ttcccaaatactcctcatgttgaaactgtagtaaaattaa

SEQ ID NO: 10594 - DNA, 50 bp, Paeniclostridium sordellii
  source 1..50: mol_type = genomic DNA
ttcatatagtagttcaaacacatgaagagactgtagcgttactacgtcga

SEQ ID NO: 10595 - DNA, 40 bp, Paeniclostridium sordellii
  source 1..40: mol_type = genomic DNA
tccctaaatacatcttatgaagcagctttagtaaaatcaa

SEQ ID NO: 10596 - protein, 540 aa, Coprococcus eutactus
MKQPYNTTIYNTALYLRLSRDDELQGESGSIQTQRMMLRQYAAEHGLTVVDEYIDDGWSGTNFERPSFQRMIDDIEDGKINCVVTKDLSRLGRNYILTGQYTEIYFPSKGVRYIAINDNVDTINGESELAPFLNILNEMHARQTSKKVKAAMHTRFANGAHYGAYAPLGYVKDPDKKGHLLIDPETRWIVEKIFDLAVHGRGAASITRILVEEKVPTPGWLNYERYGTFANIYAGAPAEKAYAWTIAQVKSILKEETYIGHSVHNKQSNISFKNKKKVRKPQEEWYRVENTHEAIISEEVFQKVQELIASRRRRQKNGTTQIFSGLVKCADCGWSLAYGVNSQNKNPYAHYHCSKYGQGLRQCSMHYIRYDVLYAYVLARLQYWSMLAQKDEDKLLKRLLNASDRERNSAKKKQAAELKKAEKRKAEVDGLFAKMYEDWSAGRITEYNFNMLSEKYQNEQKELETKIRQLHEMMEAAVQTAADAEKWIALMKQYVNPVELTAELLNTLIEKITVHEAVKGEDGSREQEVEIYYRFIGKID

SEQ ID NO: 10597 - DNA, 50 bp, Coprococcus eutactus; identical to SEQ ID NO: 3657
  source 1..50: mol_type = genomic DNA

SEQ ID NO: 10598 - DNA, 40 bp, Coprococcus eutactus
  source 1..40: mol_type = genomic DNA
gatatccaactgggaaactggaaagaccatgccagatatt

SEQ ID NO: 10599 - DNA, 50 bp, Coprococcus eutactus; identical to SEQ ID NO: 3657
  source 1..50: mol_type = genomic DNA

SEQ ID NO: 10600 - DNA, 40 bp, Coprococcus eutactus
  source 1..40: mol_type = genomic DNA
gaaaaccaaataggaaaatggaaagaccaggccaaattta

SEQ ID NO: 10601 - protein, 552 aa, Caproicibacter fermentans
MKKLYKVGIYCRLSVDDASNSAKAKSYIPADESASIENQREILSKFVMLNGWTEVKTYADDGYSGGNFQRPGFLEMLEDAKKGIINLILVKDLSRLGRDFVEVGRYTDVVFPSLGCRFVSVLDCLDTEGDNTDMLHFRSLMNDYHLKDLSNKIKSVRYAKMKSGQFLSAYAPYGYRKSEDDKHKLVIDEYSAAVVRRAFSMRRDGAAYGKIAAAFNLDGILSPRGYWHSLYGTGECRYSQFWTCATVKNLLNSEVYLGNLLMNYTGSRSYKDGTMIYKPESEWIRCEATHEAIVAPEEWEAVRKINEAAKRRVENNRKPTRSLFSGKLVCADCKGPLGASTETQHRKNGTVKHYVSYCCERYIQSGRSVCSWHRIYEMTLAQIVMAEIKADAEAASLDEAGAVEKLKRRMAQYDDQRTANTRQEIGKLRRRLQELESITAKLYEDKVSGAVSESTFSVLITKNEQERLIKAERLDALLSEVKKSDQDAADIQNWAATIRKYLNLQELDRETIDELIDHIEIGERTVVDGKRRQDVKVFYRFVGQINRELDMQ

SEQ ID NO: 10602 - DNA, 50 bp, Caproicibacter fermentans
  source 1..50: mol_type = genomic DNA
gacgttccccaataatgtatgctcttgaacatgcgttattcgggaaggtg

SEQ ID NO: 10603 - DNA, 40 bp, Caproicibacter fermentans
  source 1..40: mol_type = genomic DNA
atcccggacgaaaaattcgttcatgatgttgcggaagggg

SEQ ID NO: 10604 - DNA, 50 bp, Caproicibacter fermentans
  source 1..50: mol_type = genomic DNA
gacgttccccaataatgtatgctcaagaacatgcgttattcgggaaggtg

SEQ ID NO: 10605 - DNA, 40 bp, Caproicibacter fermentans
  source 1..40: mol_type = genomic DNA
atccctgaagaaaaactttaaaatcatgttgggggagggg

SEQ ID NO: 10606 - protein, 547 aa, Salmonella enterica
MKLLVTYIRWSTKEQDSGDSLRRQTNLIDAFYSKHKNDYYLLPAHRYVDKGKSGFHQQHKNQGSDFRRMFENVMSGAIPEGSLIVVENFDRFSRADIDTAIDDVRQILRKGVSILTLGDGELYDKSALTDPVKLIKHIIIAERAHQESLVKQKRIAQVWNHKTQLARELKKPMGKQAPGWLELSEDGSHYIVDEDKASLVNIIYDKRLSGMSMFAICKWLNEQGYPTINQRKVRISKTKKPDGNWSALSVKHILTSRSVLGYLPAKISTEDRKTVLREEIEGFYPQIVTDSKFYAVQQLLEETGKGKTSSGEHWLYVNILKGLIRCKCGLVMTPTGIRKPVYQGTYRCNGNKESRCSYGTVSRKLLDTQLCSRLFSKLSQLHDEATDTAKLDELQRRLNTVDGELEKLTETLIQLPNITQIQEALRVKQEEKDELIVQLSREKARVKSVSSLDLSGLDMESVEGRTEAQIIIKRLVKEIVVSGNEKLVDIYLHNGNMIRGFPLDGKDDHTLTLEEATDEMQPLDDMLIFGEPVTRIYPAGDMEEVDA

SEQ ID NO: 10607 - DNA, 50 bp, Salmonella enterica; identical to SEQ ID NO: 3242
  source 1..50: mol_type = genomic DNA

SEQ ID NO: 10608 - DNA, 40 bp, Salmonella enterica
  source 1..40: mol_type = genomic DNA
gtacatggaataatagagcaccagaatctttgccatttgt

SEQ ID NO: 10609 - DNA, 50 bp, Salmonella enterica
  source 1..50: mol_type = genomic DNA
gtacgtgtttagctatgtaaaagctctagtattcttgccttaacactcat

SEQ ID NO: 10610 - DNA, 40 bp, Salmonella enterica
  source 1..40: mol_type = genomic DNA
gtatatggtatagtagatctccagaaactgtaccctttga

SEQ ID NO: 10611 - protein, 547 aa, Salmonella enterica
MKLLVTYIRWSTKEQDSGDSLRRQTNLIDAFYSKHKNDYYLLPAHRYVDKGKSGFHQQHKAQGSDFRRMFENVMSGAIPEGSLIVVENFDRFSRADIDTAIDDVRQILRKGVSILTLGDGELYDKSALTDPVKLIKHIIIAERAHQESLVKQKRIAQVWNHKTQLARELKKPMGKQAPGWLELSEDGSHYIVDEDKASLVNIIYDKRLSGMSMFAICKWLNEQGYPTINQRKVRISKTKKPDGNWSALSVKHILTSRSVLGYLPAKISTEDRKTVLREEIEGFYPQIVTDSKFYAVQQLLEETGKGKTSSGEHWLYVNILKGLIRCKCGLVMTPTGIRKPVYQGTYRCNGNKESRCSYGTVSRKLLDTQLCSRLFSKLSQLHDEATDTAKLDELQRRLNTVDGELEKLTETLIQLPNITQIQEALRVKQEEKDELIVQLSREKARVKSVSSLDLSGLDMESVEGRTEAQIIIKRLVKEIVVSGNEKLVDIYLHNGNMIRGFPLDGKDDHTLTLEEATDEMQSLDDMLIFGEPVTRIYPAGDMEEVDA

SEQ ID NO: 10612 - DNA, 50 bp, Salmonella enterica; identical to SEQ ID NO: 3242
  source 1..50: mol_type = genomic DNA

SEQ ID NO: 10613 - DNA, 40 bp, Salmonella enterica; identical to SEQ ID NO: 10608
  source 1..40: mol_type = genomic DNA

SEQ ID NO: 10614 - DNA, 50 bp, Salmonella enterica; identical to SEQ ID NO: 10609
  source 1..50: mol_type = genomic DNA

SEQ ID NO: 10615 - DNA, 40 bp, Salmonella enterica; identical to SEQ ID NO: 10610
  source 1..40: mol_type = genomic DNA

SEQ ID NO: 10616 - protein, 547 aa, Salmonella enterica
MKLLVTYIRWSTKEQDSGDSLRRQTNLIDAFYSKHKNDYYLLPAHRYVDKGKSGFHQQHKNQGSDFRRMFENVMSGAIPEGSLIVVENFDRFSRADIDTAIDDVRQILRKGVSILTLGDGELYDKSALTDPVKLIKHIIIAERAHQESLVKQKRIAQVWNHKTQLARELKKPMGKQAPGWLELSEDGSHYIVDEDKASLVNIIYDKRLSGMSMFAICKWLNEQGYPTINQRKVRISKTKKPDGNWSALSVKHILTSRSVLGYLPAKISTEDRKTVLREEIEGFYPQIVTDSKFYAVQQLLEETGKGKTSSGEHWLYVNILKGLIRCKCGLVMTPTGIRKPVYQGTYRCNGNKESRCSYGTVSRKLLDTQLCSRLFSKLSQLHDEATDTAKLDELQRRLNAVDGELEKLTETLIQLPNITQIQEALRVKQEEKDELIVQLSREKARVKSVSSLDLSGLDMESVEGRTEAQIIIKRLVKEIVVSGNEKLVDIYLHNGNMIRGFPLDGKDDHTLTLEEATDEMQPLDDMLIFGEPVTRIYPAGDMEEVDA

SEQ ID NO: 10617 - DNA, 50 bp, Salmonella enterica; identical to SEQ ID NO: 3242
  source 1..50: mol_type = genomic DNA

SEQ ID NO: 10618 - DNA, 40 bp, Salmonella enterica; identical to SEQ ID NO: 10608
  source 1..40: mol_type = genomic DNA

SEQ ID NO: 10619 - DNA, 50 bp, Salmonella enterica; identical to SEQ ID NO: 10609
  source 1..50: mol_type = genomic DNA

SEQ ID NO: 10620 - DNA, 40 bp, Salmonella enterica; identical to SEQ ID NO: 10610
  source 1..40: mol_type = genomic DNA

SEQ ID NO: 10621 - protein, 547 aa, Salmonella enterica
MKLLVTYIRWSTKEQDSGDSLRRQTNLIDAFYAKHKEEYYLLPAHRYVDKGKSGFHQQHKNQGSDFRRMFENVMSGTIPEGSLIVVENFDRFSRADIDTAIDDVRQILRKGVSILTLGDGELYDKSALTDPVKLIKHIIIAERAHQESLVKQKRIAQVWNHKTQLARELKKPMGKQAPGWLELSEDGSHYIVDEDKASLVNLIFDKRLSGMSMFSICKWLNEQGHPTINQRKVRISKTKKPDGNWSALSVKHILTSRSVLGYLPAKISTEDRKTVLREEIEGFYPQIVTDSKFYAVQQLLEETGKGKTSSGEHWLYVNILKGLIRCKCGLVMTPTGIRKPVYQGTYRCNGNKESRCNYGTVSRKLLDTQLCSRLFSKLSQLHDEATDTAKLDELQRRLNTVDSELEKLTETLIQLPNITQIQEALRVKQEEKDELIVQLSREKARVKSVSSLDLSGLDMESVEGRTEAQIIIKRLVKEIVVSGNEKLVDIYLHNGNMIRGFPLDGKDDHTLTLEEATDEMQSLDDMLIFGEPVTRIYPAGDMEEVDA

SEQ ID NO: 10622 - DNA, 50 bp, Salmonella enterica
  source 1..50: mol_type = genomic DNA
atgcgtgtttagctatgtaaaagcactagtattcttgccttaacgctcat

SEQ ID NO: 10623 - DNA, 40 bp, Salmonella enterica; identical to SEQ ID NO: 10608
  source 1..40: mol_type = genomic DNA

SEQ ID NO: 10624 - DNA, 50 bp, Salmonella enterica
  source 1..50: mol_type = genomic DNA
atgcgtgtttagctatgtaaaagctctagtattcttgccttaacgctcat

SEQ ID NO: 10625 - DNA, 40 bp, Salmonella enterica; identical to SEQ ID NO: 10610
  source 1..40: mol_type = genomic DNA

SEQ ID NO: 10626 - protein, 547 aa, Salmonella enterica
MKLLVTYIRWSTKEQDSGDSLRRQTNLIDAFYSKHKEEYYLLPAHRYVDKGKSGFHQQHKNQGSDFRRMFENVMSGAIPEGSLIVVENFDRFSRADIDTAIDDVRQILRKGVSILTLGDGELYDKSALTDPVKLIKHIIIAERAHQESLVKQKRIAQVWNHKTQLARELKKPMGKQAPGWLELSEDGSHYIVDEDKASLVNIIYDKRLSGMSMFAICKWLNEQGYPTINQRKVRISKTKKPDGNWSALSVKHILTSRSVLGYLPAKISSEDRKTVLREEIEGFYPQIVTDSKFYAVQQLLEETGKGKTSSGEHWLYVNILKGLIRCKCGLVMTPTGIRKPVYQGTYRCNGNKESRCSYGTVSRKLLDTQLCSRLFSKLSQLHDEATDTAKLDELQRRLNTVDSELEKLTETLIQLPNITQIQEALRVKQEEKDELIVQLSREKARVKSVSSLDLSGLDMESVEGRTEAQIIIKRLVKEIVVSGNEKLVDIYLHNGNMIRGFPLDGKDDHTLTLEEATDEMQSLDDMLIFGEPVTRIYPAGDMEEVDA

SEQ ID NO: 10627 - DNA, 50 bp, Salmonella enterica; identical to SEQ ID NO: 3242
  source 1..50: mol_type = genomic DNA

SEQ ID NO: 10628 - DNA, 40 bp, Salmonella enterica; identical to SEQ ID NO: 10608
  source 1..40: mol_type = genomic DNA

SEQ ID NO: 10629 - DNA, 50 bp, Salmonella enterica; identical to SEQ ID NO: 10609
  source 1..50: mol_type = genomic DNA

SEQ ID NO: 10630 - DNA, 40 bp, Salmonella enterica; identical to SEQ ID NO: 10610
  source 1..40: mol_type = genomic DNA

SEQ ID NO: 10631 - protein, 547 aa, Salmonella enterica
MKLLVTYIRWSTKEQDSGDSLRRQTNLIDAFYSKHKNDYYLLPAHRYVDKGKSGFHQQHKNQGSDFRRMFENVMSGVIPEGSLIVVENFDRFSRADIDTAIDDVRQILRKGVSILTLGDGELYDKSALTDPVKLIKHIIIAERAHQESLVKQKRIAQVWNHKTQLARELKKPMGKQAPGWLELSDDGSHYIVDEDKASLVNIIYDKRLSGMSMFAICKWLNEQGYPTINQRKVRISKTKKPDGNWSALSVKHILTSRSVLGFLPAKLSSEDRKTVLREEIEGFYPQIVTDSKFYAVQQLLEETGKGKTSSGDHWLYVNILKGIIRCRCGLVMTPTGIRKPVYQGTYRCNGNKESRCSYGTVSRKLLDTQLCSRLFSKLSQLHDEATDTAKLDELQRRLNTVDSELEKLTETLIQLPNITQIQEALRVKQGEKDELIVQLSREKARVKSVSSLDLSGLDMESVEGRTEAQIIIKRLVKEIVVSGNEKLVDIYLHNGNMIRGFPLDGKDDHTLTLEEATDEMQSLDDMLIFGEPVTRIYPAGDMEEVDA

SEQ ID NO: 10632 - DNA, 50 bp, Salmonella enterica; identical to SEQ ID NO: 3242
  source 1..50: mol_type = genomic DNA

SEQ ID NO: 10633 - DNA, 40 bp, Salmonella enterica; identical to SEQ ID NO: 10608
  source 1..40: mol_type = genomic DNA

SEQ ID NO: 10634 - DNA, 50 bp, Salmonella enterica; identical to SEQ ID NO: 10609
  source 1..50: mol_type = genomic DNA

SEQ ID NO: 10635 - DNA, 40 bp, Salmonella enterica; identical to SEQ ID NO: 10610
  source 1..40: mol_type = genomic DNA

SEQ ID NO: 10636 - protein, 547 aa, Salmonella enterica
MKLLVTYIRWSTKEQDSGDSLRRQTNLIDAFYAKHKDDYYLLPAHRYVDKGKSGFHQQHKAQGSDFRRMFENVMSGVIPEGSLIVVENFDRFSRADIDTAIDDVRQILRKGVSILTLGDGELYDKSALTDPVKLIKHIIIAERAHQESLVKQKRIAQVWNHKTQLARELKKPMGKQAPGWLELSDDGSHYIVDEDKASLVNIIYDKRLSGMSMFAICKWLNEQGYPTINQRKVRISKTKKPDGNWSALSVKHILTSRSVLGYLPAKISSEDRKTVLREEIEGFYPQIVTDSKFYAVQQLLEETGKGKTSSGEHWLYVNILKGLIRCKCGLVMTPTGIRKPVYQGTYRCNGNKESRCNYGTVSRKLLDTQLCSRLFSKLSQLHDEATDTAKLDELQRRLNTVDSELEKLTETLIQLPNITQIQEALRVKQEEKDELIVQLSREKARVKSVSSLDLSGLDMESVEGRTEAQIIIKRLVKEIVVSGNEKLVDIYLHNGNMIRGFPLDGKDDHTLTLEEATDEMQSLDDMLIFGEPVTRIYPAGDMEEVDA

SEQ ID NO: 10637 - DNA, 50 bp, Salmonella enterica; identical to SEQ ID NO: 3242
  source 1..50: mol_type = genomic DNA

SEQ ID NO: 10638 - DNA, 40 bp, Salmonella enterica; identical to SEQ ID NO: 10608
  source 1..40: mol_type = genomic DNA

SEQ ID NO: 10639 - DNA, 50 bp, Salmonella enterica; identical to SEQ ID NO: 10609
  source 1..50: mol_type = genomic DNA

SEQ ID NO: 10640 - DNA, 40 bp, Salmonella enterica; identical to SEQ ID NO: 10610
  source 1..40: mol_type = genomic DNA

SEQ ID NO: 10641 - protein, 547 aa, Salmonella enterica
MKLLVTYIRWSTREQDSGDSLRRQTNLIDAFYAKHKDDYYLLPAHRYVDKGKSGFHQQHKAQGSDFRRMFENVMSGAIPEGSLIVVENFDRFSRADIDTAIDDVRQILRKGVSILTLGDGELYDKSALTDPVKLIKHIIIAERAHQESLVKQKRIAQVWNHKTQLARELKKPMGKQAPGWLELSEDGSHYIVDEDKASLVNIIYDKRLSGMSMFAICKWLNEQGYPTINQRKVRISKTKKPDGNWSALSVKHILTSRSVLGYLPAKISTEDRKTVLREEIESFYPQIVTDSKFYAVQQLLEETGKGKTSSGEHWLYVNILKGLIRCKCGLVMTPTGIRKPVYQGTYRCNGNKESRCSYGTVSRKLLDTQLCSRLFSKLSQLHDEATDTAKLDELQRRLNTVDSELEKLTETLIQLPNITQIQEALRVKQEEKDELIVQLSREKARVKSVSSLDLSGLDMESVEGRTEAQIIIKRLVKEIVVSGNEKLVDIYLHNGNMIRGFPLDGKDDHTLTLEEATDEMQSLDDMLIFGEPVTRIYPAGDMEEVDA

SEQ ID NO: 10642 - DNA, 50 bp, Salmonella enterica; identical to SEQ ID NO: 3242
  source 1..50: mol_type = genomic DNA

SEQ ID NO: 10643 - DNA, 40 bp, Salmonella enterica; identical to SEQ ID NO: 10608
  source 1..40: mol_type = genomic DNA

SEQ ID NO: 10644 - DNA, 50 bp, Salmonella enterica; identical to SEQ ID NO: 10609
  source 1..50: mol_type = genomic DNA

SEQ ID NO: 10645 - DNA, 40 bp, Salmonella enterica; identical to SEQ ID NO: 10610
  source 1..40: mol_type = genomic DNA

SEQ ID NO: 10646 - protein, 547 aa, Salmonella enterica
MKLLVTYIRWSTKEQDSGDSLRRQTNLIDAFYAKHKDDYYLLPAHRYVDKGKSGFHQQHKNQGSDFRRMFENVMSGAIPEGSLIVVENFDRFSRADIDTAIDDVRQILRKGVSILTLGDGELYDKSALTDPVKLIKHIIIAERAHQESLVKQKRIAQVWNHKTQLARELKKPMGKQAPGWLELSEDGSHYIVDEDKASLVNIIYDKRLSGMSMFAICKWLNEQGYPTINQRKVRISKTKKPDGNWSALSVKHILTSRSVLGYLPAKISSEDRKTVLREEIEGFYPQIVTDSKFYAVQQLLEETGKGKTSSGDHWLYVNILKGLIRCKCGLVMTPTGIRKPVYQGTYRCNGNKESRCSYGTVSRKLLDTQLCSRLFSKLSQLHDEATDTAKLDELQRRLNTVDGELEKLTETLIQLPNITQIQEALRVKQEEKDELIVQLSREKARVKSVSSLDLSGLDMESVEGRTEAQIIIKRLVKEIVVSGNEKLVDIYLHNGNMIRGFPLDGKDDHTLTLEEATDEMQSLDDMLIFGEPVTRIYPAGDMEEVDA

SEQ ID NO: 10647 - DNA, 50 bp, Salmonella enterica; identical to SEQ ID NO: 3242
  source 1..50: mol_type = genomic DNA

SEQ ID NO: 10648 - DNA, 40 bp, Salmonella enterica; identical to SEQ ID NO: 10608
  source 1..40: mol_type = genomic DNA

SEQ ID NO: 10649 - DNA, 50 bp, Salmonella enterica; identical to SEQ ID NO: 10609
  source 1..50: mol_type = genomic DNA

SEQ ID NO: 10650 - DNA, 40 bp, Salmonella enterica; identical to SEQ ID NO: 10610
  source 1..40: mol_type = genomic DNA

SEQ ID NO: 10651 - protein, 547 aa, Salmonella enterica
MKLLVTYIRWSTKEQDSGDSLRRQTNLIDAFYSKHKNDYYLLPAHRYVDKGKSGFHQQHKNQGSDFRRMFENVMSGAIPEGSLIVVENFDRFSRADIDTAIDDVRQILRKGVSILTLGDGELYDKSALTDPVKLIKHIIIAERAHQESLVKQKRIAQVWNHKTQLARELKKPMGKQAPGWLELSEDGSYYIVDEDKASLVNIIYDKRLSGMSMFAICKWLNEQGYPTINQRKVRISKTKKPDGNWSALSVKHILTSRSVLGYLPAKISSEDRKTVLREEIEGFYPQIVTDSKFYAVQQLLEETGKGKTSSGEHWLYVNILKGIIRCKCGLVMTPTGIRKPVYQGTYRCNGNKESRCNYGTVSRKLLDTQLCSRLFSKLSQLHDEATDTAKLDELQRRLNTVDSELEKLTETLIQLPNITQIQEALRIKQEEKDELIVQLSREKARVKSVSSLDLSGLDMESVEGRTEAQIIIKRMVKEIVVSGNEKLVDIYLHNGNMIRGFPLDGKDDHTLTLEEATDEMQSLDDMLIFGEPVTRIYPAGDMEEVDA

SEQ ID NO: 10652 - DNA, 50 bp, Salmonella enterica; identical to SEQ ID NO: 3242
  source 1..50: mol_type = genomic DNA

SEQ ID NO: 10653 - DNA, 40 bp, Salmonella enterica; identical to SEQ ID NO: 10608
  source 1..40: mol_type = genomic DNA

SEQ ID NO: 10654 - DNA, 50 bp, Salmonella enterica; identical to SEQ ID NO: 10609
  source 1..50: mol_type = genomic DNA

SEQ ID NO: 10655 - DNA, 40 bp, Salmonella enterica; identical to SEQ ID NO: 10610
  source 1..40: mol_type = genomic DNA

SEQ ID NO: 10656 - protein, 547 aa, Salmonella enterica
MKLLVTYIRWSTREQDSGDSLRRQTNLIDAFYSKHKEEYYLLPAHRYIDKGKSGFHQQHKAQGSDFRRMFENVMSGAIPEGSLIVVENFDRFSRADIDTAIDDVRQILRKGVSILTLGDGELYDKSALTDPVKLIKHIIIAERAHQESLVKQKRIAQVWNHKTQLARELKKPMGKQAPGWLELSEDGSHYIVDEDKASLVNIIYDKRLSGMSMFAICKWLNEQGYPTINQRKVRISKTKKPDGNWSALSVKHILTSRSVLGYLPAKISTEDRKTVLREEIEGFYPQIVTDSKFYAVQQLLEETGKGKTSSGEHWLYVNILKGLIRCKCGLVMTPTGIRKPVYQGTYRCNGNKESRCSYGTVSRKLLDTQLCSRLFSKLSQLHDEATDTAKLDELQRRLNTVDSELEKLTETLIQLPNITQIQEALRIKQEEKDELIVQLSREKARVKSVSSLDLSGLDMESVEGRTEAQIIIKRLVKEIVVSGNEKLVDIYLHNGNMIRGFPLDGKDDHTLTLEEATDEMQSLDDMLIFGEPVTRIYPAGDMEEVDA

SEQ ID NO: 10657 - DNA, 50 bp, Salmonella enterica; identical to SEQ ID NO: 3242
  source 1..50: mol_type = genomic DNA

SEQ ID NO: 10658 - DNA, 40 bp, Salmonella enterica; identical to SEQ ID NO: 10608
  source 1..40: mol_type = genomic DNA

SEQ ID NO: 10659 - DNA, 50 bp, Salmonella enterica; identical to SEQ ID NO: 10609
  source 1..50: mol_type = genomic DNA

SEQ ID NO: 10660 - DNA, 40 bp, Salmonella enterica; identical to SEQ ID NO: 10610
  source 1..40: mol_type = genomic DNA

SEQ ID NO: 10661 - protein, 547 aa, Salmonella enterica
MKLLVPYIRWSTKEQDSGDSLRRQTNLIDAFYAKHKDDYYLLPAHRYVDKGKSGFHQQHKAQGSDFRRMFENVMSGVIPEGSLIVVENFDRFSRADIDTAIDDVRQILRKGVSILTLGDGELYDKSALTDPVKLIKHIIIAERAHQESLVKQKRIAQVWNHKTQLARELKKPMGKQAPGWLELSEDGSHYIVDEDKASLVNIIYDKRLSGMSMFAICKWLNEQGYPTINQRKVRISKTKKPDGNWSALSVKHILTSRSVLGYLPAKISTEDRKTVLREEIESFYPQIVTDSKFYAVQQLLEETGKGKTSSGEHWLYVNILKGLIRCKCGLVMTPTGIRKPVYQGTYRCNGNKESRCNYGTVSRKLLDTQLCSRLFSKLSQLHDEATDTAKLDELQRRLNTVDSELEKLTETLIQLPNITQIQEALRVKQEEKDELIVQLSREKARVKSVSSLDLSGLDMESVEGRTEAQIIIKRLVKEIVVSGNEKLVDIYLHNGNMIRGFPLDGKDDHTLTLEEATDEMQSLDDMLIFGEPVTRIYPAGDMEEVDA

SEQ ID NO: 10662 - DNA, 50 bp, Salmonella enterica
  source 1..50: mol_type = genomic DNA
gtacgtgtttagctatgtaaacgcactagtattcttgccttaacactcat

SEQ ID NO: 10663 - DNA, 40 bp, Salmonella enterica; identical to SEQ ID NO: 10608
  source 1..40: mol_type = genomic DNA

SEQ ID NO: 10664 - DNA, 50 bp, Salmonella enterica
  source 1..50: mol_type = genomic DNA
gtacgtgtttagctatgtaaacgctctagtattcttgccttaacactcat

SEQ ID NO: 10665 - DNA, 40 bp, Salmonella enterica; identical to SEQ ID NO: 10610
  source 1..40: mol_type = genomic DNA

SEQ ID NO: 10666 - protein, 547 aa, Salmonella enterica
MKLLVTYIRWSTKEQDSGDSLRRQTNLIDAFYSKHKNDYYLLPAHRYVDKGKSGFHQQHKNQGSDFRRMFENVMSGAIPEGSLIVVENFDRFSRADIDTAIDDVRQILRKGVSILTLGDGELYDKSALTDPVKLIKHIIIAERAHQESLVKQKRIAQVWNHKTQLARELKKPMGKQAPGWLELSDDGSHYIVDEDKASLVNIIYDKRLSGMSMFAICKWLNEQGYPTINQRKVRISKTKKPDGNWSALSVKHILTSRSVLGYLPAKISTEDRKTVLREEIEGFYPQIVTDSKFYAVQQLLEETGKGKTSSGEHWLYVNILKGLIRCKCGLVMTPTGIRKPVYQGTYRCNGNKESRCSYGTVSRKLLDTQLCSRLFSKLSQLHDEATDTAKLDELQRRLNTVDSELEKLTETLIQLPNITQIQEALRVKQEEKDELIVQLSREKARVKSVSSLDLSGLDMESVEGRTEAQIIIKRLVKEIVVSGNEKLVDIYLHNGNMIRGFPLDGKDDHTLTLEEATDEMQPLDDMLIFGEPVTRIYPAGDMEEVDA

SEQ ID NO: 10667 - DNA, 50 bp, Salmonella enterica
  source 1..50: mol_type = genomic DNA
gtgcgtgtttagctatgtaaaagcactagtattcttgccttaacactcat

SEQ ID NO: 10668 - DNA, 40 bp, Salmonella enterica; identical to SEQ ID NO: 10608
  source 1..40: mol_type = genomic DNA

SEQ ID NO: 10669 - DNA, 50 bp, Salmonella enterica
  source 1..50: mol_type = genomic DNA
gtgcgtgtttagctatgtaaaagctctagtattcttgccttaacactcat

SEQ ID NO: 10670 - DNA, 40 bp, Salmonella enterica; identical to SEQ ID NO: 10610
  source 1..40: mol_type = genomic DNA

SEQ ID NO: 10671 - protein, 547 aa, Salmonella enterica; identical to SEQ ID NO: 10611

SEQ ID NO: 10672 - DNA, 50 bp, Salmonella enterica; identical to SEQ ID NO: 3502
  source 1..50: mol_type = genomic DNA

SEQ ID NO: 10673 - DNA, 40 bp, Salmonella enterica; identical to SEQ ID NO: 10608
  source 1..40: mol_type = genomic DNA

SEQ ID NO: 10674 - DNA, 50 bp, Salmonella enterica
  source 1..50: mol_type = genomic DNA
atacgtgtttagctatgtaaaagctctagtattcttgccttaacactcat

SEQ ID NO: 10675 - DNA, 40 bp, Salmonella enterica; identical to SEQ ID NO: 10610
  source 1..40: mol_type = genomic DNA

SEQ ID NO: 10676 - protein, 547 aa, Salmonella enterica
MKLLVTYIRWSTKEQDSGDSLRRQTNLIDAFYSKHKNDYYLLPAHRYVDKGKSGFHQQHKNQGSDFRRMFENVMSGAIPEGSLIVVENFDRFSRADIDTAIDDVRQILRKGVSILTLGDGELYDKSALTDPVKLIKHIIIAERAHQESLVKQKRIAQVWNHKTQLARELKKPMGKQAPGWLELSEDGSHYIVDEDKASLVNIIYDKRLSGMSMFAICKWLNEQGYPTINQRKVRISKTKKPDGNWSALSVKHILTSRSVLGYLPAKISTEDRKTVLREEIEGFYPQIVTDSKFYAVQQLLEETGKGKTSSGDHWLYVNILKGLIRCKCGLVMTPTGIRKPVYQGTYRCNGNKESRCSYGTVSRKLLDTQLCSRLFSKLSQLHDEATDTAKLDELQRRLNTVDSELEKLTETLIQLPNITQIQEALRVKQEEKDELIVQLSREKARVKSVSSLDLSGLDMESVEGRTEAQIIIKRLVKEIVVSGNEKLVDIYLHNGNMIRGFPLDGKDDHTLTLEEATDEMQSLDDMLIFGEPVTRIYPAGDMEEVDA

SEQ ID NO: 10677 - DNA, 50 bp, Salmonella enterica; identical to SEQ ID NO: 3242
  source 1..50: mol_type = genomic DNA

SEQ ID NO: 10678 - DNA, 40 bp, Salmonella enterica; identical to SEQ ID NO: 10608
  source 1..40: mol_type = genomic DNA

SEQ ID NO: 10679 - DNA, 50 bp, Salmonella enterica; identical to SEQ ID NO: 10609
  source 1..50: mol_type = genomic DNA

SEQ ID NO: 10680 - DNA, 40 bp, Salmonella enterica; identical to SEQ ID NO: 10610
  source 1..40: mol_type = genomic DNA

SEQ ID NO: 10681 - protein, 547 aa, Salmonella enterica
MKLLVTYIRWSTKEQDSGDSLRRQTNLIDAFYAKHKDDYYLLPAHRYVDKGKSGFHQQHKNQGSDFRRMFENVMSGAIPEGSLIVVENFDRFSRADIDTAIDDVRQILRKGVSILTLGDGELYDKSALTDPVKLIKHIIIAERAHQESLVKQKRIAQVWNHKTQLARELKKPMGKQAPGWLELSEDGSHYIVDEDKASLVNIIYDKRLSGMSMFAICKWLNEQGYPTINQRKVRISKTKKPDGNWSALSVKHILTSRSVLGYLPAKISTEDRKTVLREEIEGFYPQIVTDSKFYAVQQLLEETGKGKTSSGDHWLYVNILKGLIRCKCGLVMTPTGIRKPVYQGTYRCNGNKESRCSYGTVSRKLLDTQLCSRLFSKLSQLHDEATDTAKLDELQRRLNTVDSELEKLTETLIQLPNITQIQEALRVKQEEKDELIVQLSREKARVKSVSSLDLSGLDMESVEGRTEAQIIIKRLVKEIVVSGNEKLVDIYLHNGNMIRGFPLDGKDDHTLTLEEATDEMQSLDDMLIFGEPVTRIYPAGDMEEVDA

SEQ ID NO: 10682 - DNA, 50 bp, Salmonella enterica; identical to SEQ ID NO: 3242
  source 1..50: mol_type = genomic DNA

SEQ ID NO: 10683 - DNA, 40 bp, Salmonella enterica; identical to SEQ ID NO: 10608
  source 1..40: mol_type = genomic DNA

SEQ ID NO: 10684 - DNA, 50 bp, Salmonella enterica; identical to SEQ ID NO: 10609
  source 1..50: mol_type = genomic DNA

SEQ ID NO: 10685 - DNA, 40 bp, Salmonella enterica; identical to SEQ ID NO: 10610
  source 1..40: mol_type = genomic DNA

SEQ ID NO: 10686 - protein, 547 aa, Salmonella enterica
MKLLATYIRWSTKEQDSGDSLRRQTNLIDAFYAKHKDDYYLLPAHRYVDKGKSGFHQQHKAQGSDFRRMFENVMSGVIPEGSLIVVENFDRFSRADIDTAIDDVRQILRKGVSILTLGDGELYDKSALTDPVKLIKHIIIAERAHQESLVKQKRIAQVWNHKTQLARELKKPMGKQAPGWLELSEDGSHYIVDEDKASLVNIIYDKRLSGMSMFAICKWLNEQGYPTINQRKVRISKTKKPDGNWSALSVKHILTSRSVLGYLPAKISTEDRKTVLREEIESFYPQIVTDSKFYAVQQLLEETGKGKTSSGEHWLYVNILKGLIRCKCGLVMTPTGIRKPVYQGTYRCNGNKESRCSYGTVSRKLLDTQLCSRLFSKLSQLHDEATDTAKLDELQRRLNTVDGELEKLTETLIQLPNITQIQEALRVKQEEKDELIVQLSREKARVKSVSSLDLSGLDMESVEGRTEAQIIIKRLVKEIVVSGNEKLVDIYLHNGNMIRGFPLDGKDDHTLTLEEATDEMQPLDDMLIFGEPVTRIYPAGDMEEVDA

SEQ ID NO: 10687 - DNA, 50 bp, Salmonella enterica; identical to SEQ ID NO: 3242
  source 1..50: mol_type = genomic DNA

SEQ ID NO: 10688 - DNA, 40 bp, Salmonella enterica; identical to SEQ ID NO: 10608
  source 1..40: mol_type = genomic DNA

SEQ ID NO: 10689 - DNA, 50 bp, Salmonella enterica; identical to SEQ ID NO: 10609
  source 1..50: mol_type = genomic DNA

SEQ ID NO: 10690 - DNA, 40 bp, Salmonella enterica; identical to SEQ ID NO: 10610
  source 1..40: mol_type = genomic DNA

SEQ ID NO: 10691 - protein, 547 aa, Salmonella enterica
MKLLVTYIRWSTKEQDSGDSLRRQTNLIDAFYSKHKNDYYLLPAHRYVDKGKSGFHQQHKNQGSDFRRMFENVMSGAIPEGSLIVVENFDRFSRADIDTAIDDVRQILRKGVSILTLGDGELYDKSALTDPVKLIKHIIIAERAHQESLVKQKRIAQVWNHKTQLARELKKPMGKQAPGWLELSEDGSHYIVDEDKASLVNIIYDKRLSGMSMFAICKWLNEQGYPTINQRKVRISKTKKPDGNWSALSVKHILTSRSVLGYLPAKISTEDRKTVLREEIEGFYPQIVTDSKFYAVQQLLEETGKGKTSSGDHWLYVNILKGLIRCKCGLVMTPTGIRKPVYQGTYRCNGNKESRCNYGTVSRKLLDTQLCSRLFSKLSQLHDEATDTAKLDELQRRLNTVDSELEKLTETLIQLPNITQIQEALRVKQEEKDELIVQLSREKARVKSVSSLDLSGLDMESVEGRTEAQIIIKRLVKEIVVSGNEKLVDIYLHNGNMIRGFPLDGKDDHTLTLEEATDEMQSLDDMLIFGEPVTRIYPAGDMEEVDA

SEQ ID NO: 10692 - DNA, 50 bp, Salmonella enterica; identical to SEQ ID NO: 3242
  source 1..50: mol_type = genomic DNA

SEQ ID NO: 10693 - DNA, 40 bp, Salmonella enterica; identical to SEQ ID NO: 10608
  source 1..40: mol_type = genomic DNA

SEQ ID NO: 10694 - DNA, 50 bp, Salmonella enterica; identical to SEQ ID NO: 10609
  source 1..50: mol_type = genomic DNA

SEQ ID NO: 10695 - DNA, 40 bp, Salmonella enterica; identical to SEQ ID NO: 10610
  source 1..40: mol_type = genomic DNA

SEQ ID NO: 10696 - protein, 547 aa, Salmonella enterica
MKLLVPYIRWSTKEQDSGDSLRRQTNLIDAFYSKHKEEYYLLPAHRYVDKGKSGFHQQHKAQGSDFRRMFENVMSGTIPEGSLIVVENFDRFSRADIDTAIDDVRQILRKGVSILTLGDGELYDKSALTDPVKLIKHIIIAERAHQESLVKQKRIAQVWNHKTQLARELKKPMGKQAPGWLELSEDGSHYIVDEDKASLVNIIYDKRLSGMSMFAICKWLNEQGYPTINQRKVRISKTKKPDGNWSALSVKHILTSRSVLGYLPAKISTEDRKTVLREEIESFYPQIVTDSKFYAVQQLLEETGKGKTSSGEHWLYVNILKGLIRCKCGLVMTPTGIRKPVYQGTYRCNGNKESRCSYGTVSRKLLDTQLCSRLFSKLSQLHDEATDTAKLDELQRRLNTVDGELEKLTETLIQLPNITQIQEALRVKQEEKDELIVQLSREKARVKSVSSLDLSGLDMESVEGRTEAQIIIKRLVKEIVVSGNEKLVDIYLHNGNMIRGFPLDGKDDHTLTLEEATDEMQSLDDMLIFGEPVTRIYPAGDMEEVDA

SEQ ID NO: 10697 - DNA, 50 bp, Salmonella enterica; identical to SEQ ID NO: 3242
  source 1..50: mol_type = genomic DNA

SEQ ID NO: 10698 - DNA, 40 bp, Salmonella enterica; identical to SEQ ID NO: 10608
  source 1..40: mol_type = genomic DNA

SEQ ID NO: 10699 - DNA, 50 bp, Salmonella enterica; identical to SEQ ID NO: 10609
  source 1..50: mol_type = genomic DNA

SEQ ID NO: 10700 - DNA, 40 bp, Salmonella enterica; identical to SEQ ID NO: 10610
  source 1..40: mol_type = genomic DNA

SEQ ID NO: 10701 - protein, 547 aa, Salmonella enterica
MKLLVTYIRWSTKEQDSGDSLRRQTNLIDAFYSKHKEEYYLLPAHRYVDKGKSGFHQQHKAQGSDFRRMFENVMSGAIPEGSLIVVENFDRFSRADIDTAIDDVRQILRKGVSILTLGDGELYDKSALTDPVKLIKHIIIAERAHQESLVKQKRIAQVWNHKTQLARELKKPMGKQAPGWLELSEDGSHYIVDEDKASLVNIIYDKRLSGMSMFAICKWLNEQGYPTINQRKVRISKTKKPDGNWSALSVKHILTSRSVLGYLPAKISTEDRKTVLREEIESFYPQIVTDSKFYAVQQLLEETGKGKTSSGEHWLYVNILKGLIRCKCGLVMTPTGIRKPVYQGTYRCNGNKESRCSYGTVSRKLLDTQLCSRLFSKLSQLHDEATDTAKLDELQRRLNTVDGELEKLTETLIQLPNITQIQEALRVKQEEKDELIVQLSREKARVKSVSSLDLSGLDMESVEGRTEAQIIIKRLVKEIVVSGNEKLVDIYLHNGNMIRGFPLDGKDDHTLTLEEATDEMQSLDDMLIFGEPVTRIYPAGDMEEVDA

SEQ ID NO: 10702 - DNA, 50 bp, Salmonella enterica; identical to SEQ ID NO: 3242
  source 1..50: mol_type = genomic DNA

SEQ ID NO: 10703 - DNA, 40 bp, Salmonella enterica; identical to SEQ ID NO: 10608
  source 1..40: mol_type = genomic DNA

SEQ ID NO: 10704 - DNA, 50 bp, Salmonella enterica; identical to SEQ ID NO: 10609
  source 1..50: mol_type = genomic DNA

SEQ ID NO: 10705 - DNA, 40 bp, Salmonella enterica; identical to SEQ ID NO: 10610
  source 1..40: mol_type = genomic DNA

SEQ ID NO: 10706 - protein, 547 aa, Salmonella enterica
MKLLVTYIRWSTKEQDSGDSLRRQTNLIDAFYSKHKNDYYLLPAHRYVDKGKSGFHQQHKNQGSDFRRMFENVMSGVIPEGSLIVVENFDRFSRADIDTAIDDVRQILRKGVSILTLGDGELYDKSALTDPVKLIKHIIIAERAHQESLVKQKRIAQVWNHKTQLARELKKPMGKQAPGWLELSEDGSHYIVDEDKASLVNIIYDKRLSGMSMFAICKWLNEQGYPTINQRKVRISKTKKPDGNWSALSVKHILTSRSVLGYLPAKISTEDRKTVLREEIEGFYPQIVTDSKFYAVQQLLEETGKGKTSSGEHWLYVNILKGLIRCKCGLVMTPTGIRKPVYQGTYRCNGNKESRCSYGTVSRKLLDTQLCSRLFSKLSQLHDEATDTAKLDELQRRLNTVDSELEKLTETLIQLPNITQIQEALRVKQEEKDELIVQLSREKARVKSVSSLDLSGLDMESVEGRTEAQIIIKRLVKEIVVSGNEKLVDIYLHNGNMIRGFPLDGKDDHTLTLEEATDEMQSLDDMLIFGEPVTRIYPAGDMEEVDA

SEQ ID NO: 10707 - DNA, 50 bp, Salmonella enterica; identical to SEQ ID NO: 3242
  source 1..50: mol_type = genomic DNA

SEQ ID NO: 10708 - DNA, 40 bp, Salmonella enterica; identical to SEQ ID NO: 10608
  source 1..40: mol_type = genomic DNA

SEQ ID NO: 10709 - DNA, 50 bp, Salmonella enterica; identical to SEQ ID NO: 10609
  source 1..50: mol_type = genomic DNA

SEQ ID NO: 10710 - DNA, 40 bp, Salmonella enterica; identical to SEQ ID NO: 10610
  source 1..40: mol_type = genomic DNA

SEQ ID NO: 10711 - protein, 525 aa, Henriciella mobilis
MSSQRTVTKSAIIYCRISSLKQASDGDGLNSQEHRCRQYAAQKGYDVEAVFPDSITGGGDYLKRPGMVALLTYLDAQKDKNYVVIFDDLKRLARDTAAHIALRQELSSRGATVESLNFKFEESPEGKFIETIIAAQGQLEREQNSRQVVQKMKARLEKGFWVFHAPIGMKYVPAKGGGKVLVRDEPLASICAEALEGFASNRFASQTEVLRWLEAQPEFPKDKPNGSIRPQSVVRFLGKEVYAGLVSSKKWGVTLREGQHEGLISVATYERIQHKLKEGVYAPTRIDTREDFALRGALKCACCGYNLTGGWCKGKYKKYPYYFCVNRDCEQCSKTISRDKLEGEFANLLGQLEPARALVQVATAMLTDCWNQRLARAEERADGFRREAETCETQIGELVDRIIEATNPRVIQAYEDKIAEAEKRKLVLLEKAARTARPQMPLESLIELSLKYVSAPKTLWDSGVLELRRLVLRLTFSSHLRYSKKGGIELPETTAPFKLFNQINNVKGGKMTETPDFTSAEGMVP

SEQ ID NO: 10712 - DNA, 50 bp, Henriciella mobilis
  source 1..50: mol_type = genomic DNA
acttcacttcagcagaaggaatggtgccgctggacggagtggacttaaac

SEQ ID NO: 10713 - DNA, 40 bp, Henriciella mobilis
  source 1..40: mol_type = genomic DNA
gcaggtaaggggaagatggtgccgcgggggaggattgaac

SEQ ID NO: 10714 - DNA, 50 bp, Henriciella mobilis
  source 1..50: mol_type = genomic DNA
acttcacttcagcagaaggaatggttccgctggacggagtggacttaaac

SEQ ID NO: 10715 - DNA, 40 bp, Henriciella mobilis
  source 1..40: mol_type = genomic DNA
gcaggtaaggggaagaaagttcagctcgggggcattgcaa

SEQ ID NO: 10716 - protein, 583 aa, Streptococcus pyogenes
MNTKVKLIKASNTGARNRNALDLDLKRVAAYCRVSTDSKDQLESYKSQVDYYTNLIKNNKNWTLAGIYADEATTGTTATKRADFMRLISDCQNGDIDMIITKSISRFARNTLDTLKYVRLLKENNVGVVFEEENIDTLTMDGELLLTILSSVAQQEVENTSAHVKKGLKMKMEKGELIGFQGCLGYDYDPITKSISINEEEAKIVRYIFKRYLEGNGGSVIGRELEEQGYLTPRGKTKWSDTTVLGIIKNEKYIGDILMGKTFTVDPITKRRLANFGESDKYHIENHHEPIISKEDFEKAQEIRLRRAQNRNTIANKDRKREKLSRQYAFSSMLECGFCGEILSRRTWHTSSIYKKINWQCVRSTKKGKKYCPHSKGIQEAAIEKAFVESYRQLCHADSTVIDDFLKIVEEEINDNTLVKVLKKIESQLNRIISQERKLVDLHLEDSIDEEVYAKKYKKLTKQKEELLDEKKTLELTIKDENSIKERLKQFKKVLENREIIEEFNRTVFESIVDKVVVGRIDKDGTVHPYDLTFYFKTGVKDSQDSNNFKDKRKNAKDNDSEKLCSYKNDEDKKLCSQSKDNA

SEQ ID NO: 10717 - DNA, 50 bp, Streptococcus pyogenes; identical to SEQ ID NO: 9817
  source 1..50: mol_type = genomic DNA

SEQ ID NO: 10718 - DNA, 40 bp, Streptococcus pyogenes
  source 1..40: mol_type = genomic DNA
tttgtttccgcaaacgcatcacgtcgagtgcgtagtgttg

SEQ ID NO: 10719 - DNA, 50 bp, Streptococcus pyogenes
  source 1..50: mol_type = genomic DNA
tatgttcccaatcaaaagacaacgattgtggagactatagcgttgataca

SEQ ID NO: 10720 - DNA, 40 bp, Streptococcus pyogenes
  source 1..40: mol_type = genomic DNA
tttgtttcctccaaatcatatcatcgagtgcttttttttg

SEQ ID NO: 10721 - protein, 587 aa, Streptococcus pyogenes
MKKEVKVIKGDTTLKRTASGCVERSIKRVAAYCRVSTDTEDQINSYNSQVEHYTEFIQKNNEWTLAGIYADEAITGTQVDRRIDFQRLINDCMNGDIDMIITKSISRFARNTLDTLKYVRKLKEFNVAVFFEEENINTLTMDGELLLTILSSVAQQEVENISANVKKGLRMKMERGEMVGFQGCLGYDYDPETKSISINEKEAEIVRYIFRRYIEGVGGMVISRELEEQGYLSPRGNKRWTETTVLGIIKNEKYKGDLMMGKTYTVDPISKRRLDNFGEQDKFYIENHHEPIISEEDFEKAQGIRLRRSKNRNTVANNGGKREKYSRKYAFSSMLECGFCGHNLSRRNWHSSSEYTKVIWQCVNATKNGKKYCPHSKGIEEEAIEKAFMESYRQVCHNNVEITNEFLKTVEEELKDNSLAKDLKKITNQLDKILKKEKDLVELRLNESISMDIYQDKYNEIAISKEKLLAEKRTLEVTLTDEKALKKRLEGFKKLLESNKYFEEFDRAVFESIVDKIIIGGTNDEGEIDPAMITIIYKTGKKDSQDGRLFKSRRKNAKEVNEKADSKLYPQSSDEVNNLCSYPMDNT

SEQ ID NO: 10722 - DNA, 50 bp, Streptococcus pyogenes; identical to SEQ ID NO: 9807
  source 1..50: mol_type = genomic DNA

SEQ ID NO: 10723 - DNA, 40 bp, Streptococcus pyogenes; identical to SEQ ID NO: 10718
  source 1..40: mol_type = genomic DNA

SEQ ID NO: 10724 - DNA, 50 bp, Streptococcus pyogenes
  source 1..50: mol_type = genomic DNA
tgtgttcctatcctatggacaacaattgtggagtgcatagcgttgataca

SEQ ID NO: 10725 - DNA, 40 bp, Streptococcus pyogenes; identical to SEQ ID NO: 10720
  source 1..40: mol_type = genomic DNA

SEQ ID NO: 10726 - protein, 587 aa, Streptococcus pyogenes; identical to SEQ ID NO: 10016

SEQ ID NO: 10727 - DNA, 50 bp, Streptococcus pyogenes; identical to SEQ ID NO: 9807
  source 1..50: mol_type = genomic DNA

SEQ ID NO: 10728 - DNA, 40 bp, Streptococcus pyogenes; identical to SEQ ID NO: 10718
  source 1..40: mol_type = genomic DNA

SEQ ID NO: 10729 - DNA, 50 bp, Streptococcus pyogenes; identical to SEQ ID NO: 10724
  source 1..50: mol_type = genomic DNA

SEQ ID NO: 10730 - DNA, 40 bp, Streptococcus pyogenes; identical to SEQ ID NO: 10720
  source 1..40: mol_type = genomic DNA

SEQ ID NO: 10731 - protein, 607 aa, Streptococcus pyogenes
MFCKCGIIELHRKIQKGGGAVKKDVKVIKGDTTLKRTASGCVQRSIKRVAAYCRVSTDTEDQINSYNSQVEHYTEFIQKNKEWTLAGIYADEAITGTQVDRRIDFQRLINDCMNGDIDMIITKSISRFARNTLDTLKYVRKLKEFNVAVFFEEENINTLTMDGELLLTILSSVAQQEVENISANVKKGLRMKMERGEMVGFQGCLGYDYDPETKSISINEKEAEIVRYIFRRYIEGVGGMVISRELEEQGYLSPRGNKRWTETTVLGIIKNEKYKGDLMMGKTYTVDPISKRRLDNFGEQDKFYIENHHEPIISEEDFEKAQGIRLRRSKNRNTVANNGGKREKYSRKYAFSSMLECGFCGHNLSRRNWHSSSEYTKVIWQCVNATKNGKKYCPHSKGIEEEAIEKAFMESYRQVCHNNVEITNEFLKTVEEELKDNSLAKDLKKITNQLDKILKKEKDLVELRLNESISMDIYQDKYNEIAISKEKLLAEKRTLEVTLTDEKALKKRLEGFKKLLESNKYLEEFDRAVFESIVDKIIIGGTNDEGEIDPAMITIIYKTGKKDSQDGRLFKSRRKNAKEVNEETDNKLYPHSSDEVNNLYSYPIDNT

SEQ ID NO: 10732 - DNA, 50 bp, Streptococcus pyogenes; identical to SEQ ID NO: 9827
  source 1..50: mol_type = genomic DNA

SEQ ID NO: 10733 - DNA, 40 bp, Streptococcus pyogenes; identical to SEQ ID NO: 10718
  source 1..40: mol_type = genomic DNA

SEQ ID NO: 10734 - DNA, 50 bp, Streptococcus pyogenes
  source 1..50: mol_type = genomic DNA
tgtattcctatcctattgacaacaattgtggagtgcatagcgttgataca

SEQ ID NO: 10735 - DNA, 40 bp, Streptococcus pyogenes; identical to SEQ ID NO: 10720
  source 1..40: mol_type = genomic DNA

SEQ ID NO: 10736 - protein, 583 aa, Streptococcus pyogenes
MNTKVKLIKASNTGARNRNALDLELKRVAAYCRVSTDSKDQLESYKSQVDYYTNLIKNNKNWTLAGIYADEATTGTTATKRADFMRLISDCQNGDIDMIITKSISRFARNTLDTLKYVRLLKENNVGVVFEEENIDTFTMDGELLLTILSSVAQQEVENTSAHVKKGLKMKMEKGELIGFQGCLGYDYDPTTKTISINEEEAKIVRYIFKRYLEGNGGSVIGRELEEQGYLTPRGKTKWSDTTVLGIIKNEKYIGDILMGKTFTVDPITKRRLANFGESDKYHIENHHEPIISKEDFEKAQEIRLRRAQNRNTIANKDRKREKLSRQYAFSSMLECGFCGEILSRRTWHTSSIYKKINWQCVKSTKKGKKYCPHSKGIQEAAIEKAFVESYRQLCHADSTVIDDFLKIVEEEINDNTLVKDLKKLENQLSRIISQERKLVDLHLEDSIDEEVYAKKYKKLTKQKEELLDEKKTLELTIKDENSIKERLKQFKKILENREIIDEFSRTVFESIVDKVVVGRIDKDGTVHPYDLTFYFKTGVKGSQNSNNFKDKRKNAKDNDINKLCSYKNDEDKKLCSQSKDNA

SEQ ID NO: 10737 - DNA, 50 bp, Streptococcus pyogenes; identical to SEQ ID NO: 9817
  source 1..50: mol_type = genomic DNA

SEQ ID NO: 10738 - DNA, 40 bp, Streptococcus pyogenes; identical to SEQ ID NO: 10718
  source 1..40: mol_type = genomic DNA

SEQ ID NO: 10739 - DNA, 50 bp, Streptococcus pyogenes; identical to SEQ ID NO: 10719
  source 1..50: mol_type = genomic DNA

SEQ ID NO: 10740 - DNA, 40 bp, Streptococcus pyogenes; identical to SEQ ID NO: 10720
  source 1..40: mol_type = genomic DNA

SEQ ID NO: 10741 - protein, 587 aa, Streptococcus pyogenes; identical to SEQ ID NO: 9821

SEQ ID NO: 10742 - DNA, 50 bp, Streptococcus pyogenes
  source 1..50: mol_type = genomic DNA
tgtgttcctatcctatggacaacacatgtagagtgcatagcgttgataca

SEQ ID NO: 10743 - DNA, 40 bp, Streptococcus pyogenes; identical to SEQ ID NO: 10718
  source 1..40: mol_type = genomic DNA

SEQ ID NO: 10744 - DNA, 50 bp, Streptococcus pyogenes
  source 1..50: mol_type = genomic DNA
tgtgttcctatcctatggacaacaattgtagagtgcatagcgttgataca

SEQ ID NO: 10745 - DNA, 40 bp, Streptococcus pyogenes; identical to SEQ ID NO: 10720
  source 1..40: mol_type = genomic DNA

SEQ ID NO: 10746 - protein, 608 aa, Streptococcus pyogenes
MFCKCGIMKLHRKIQKKEADAVKKDVKVIKGDTTLKRTASGCVERSIKRVAAYCRVSTDTEDQINSYNSQVEHYTEFIQKNNEWTLAGIYADEAITGTQVDRRIDFQRLINDCINGDIDMIITKSISRFARNTLDTLKYVRKLKEFNVAVFFEEENINTLTMDGELLLTILSSVAQQEVENISANVKKGLRMKMERGEMVGFQGCLGYDYDPETKSISINEKEAEIVRYIFRRYIEGVGGMVISRELEEQGYLSPRGNKRWTETTVLGIIKNEKYKGDLMMGKTYTVDPISKRRLDNYGEQDKFYIENHHEPIISEEVFEKAQGIRLRRSKNRNTVANNGGKREKYSRKYAFSSMLECGFCGHNLSRRNWHSSSEYTKVIWQCVNATKNGKKYCPHSKGIEEEAIEKAFMESYRQVCHNNVEITNEFLKTVEEELKDNSLAKDLKKITNQLDKVLKKEKDLVELRLNESISMDIYQDKYNEIAISKEKLLAEKRTLEVTLTDEKALKKRLEGFKKILESNKYLEKFDRAVFESIVDKIIIGGTNDEGEIDPTMITIIYKTGKKDSQDGRLFKSRRKNAKEVNEETDNKLYPQSSDEVNNLCSYPMDNT

SEQ ID NO: 10747 - DNA, 50 bp, Streptococcus pyogenes; identical to SEQ ID NO: 9807
  source 1..50: mol_type = genomic DNA

SEQ ID NO: 10748 - DNA, 40 bp, Streptococcus pyogenes; identical to SEQ ID NO: 10718
  source 1..40: mol_type = genomic DNA

SEQ ID NO: 10749 - DNA, 50 bp, Streptococcus pyogenes; identical to SEQ ID NO: 10724
  source 1..50: mol_type = genomic DNA

SEQ ID NO: 10750 - DNA, 40 bp, Streptococcus pyogenes; identical to SEQ ID NO: 10720
  source 1..40: mol_type = genomic DNA

SEQ ID NO: 10751 - protein, 583 aa, Streptococcus pyogenes
MNTKVKLIKASNIGARNRNALHLDLKRVAAYCRVSTDSKDQLESYKSQVDYYTNLIKNNKNWTLAGIYADEATTGTTATKRADFMRLISDCQNGDIDMIITKSISRFARNTLDTLKYVRLLKENNVGVVFEEENIDTLTMDGELLLTILSSVAQQEVENTSAHVKKGLKMKMEKGELIGFQGCLGYDYDPITKSISINEEEAKIVRYIFKRYLEGNGGSVIGRELEEQGYLTPRGKTKWSDTTVLGIIKNEKYIGDILMGKTFTVDPITKRRLANFGESDKYHIENHHEPIISKEDFEKAQEIRLRRAQNRNTIANKDRKREKLSRQYAFSSMLECGFCGEILSRRTWHTSSIYKKINWQCVKSTKKGKKYCPHSKGIQEAAIEKAFVESYRQLCHADSTVIDDFLKIVEEEINDNTLVKDLKKLENQLNRIISQERKLVDLHLEDSIDEEVYAKKYKKLTKQKEELLDEKKTLELTIKDEDSIKERLKQFKKVLENKEIIEEFNRTVFESIVDKVVVGRIDKDGTVHPYDLTFYFKTGVKDSQDSNNFKDKRKNAKDNDINKLCSYKNDEDKKLCSQSKDNA

SEQ ID NO: 10752 - DNA, 50 bp, Streptococcus pyogenes; identical to SEQ ID NO: 9817
  source 1..50: mol_type = genomic DNA

SEQ ID NO: 10753 - DNA, 40 bp, Streptococcus pyogenes; identical to SEQ ID NO: 10718
  source 1..40: mol_type = genomic DNA

SEQ ID NO: 10754 - DNA, 50 bp, Streptococcus pyogenes; identical to SEQ ID NO: 10719
  source 1..50: mol_type = genomic DNA

SEQ ID NO: 10755 - DNA, 40 bp, Streptococcus pyogenes; identical to SEQ ID NO: 10720
  source 1..40: mol_type = genomic DNA

SEQ ID NO: 10756 - protein, 587 aa, Streptococcus pyogenes
MKKDVKVIKGDTTLKRTASGCVERSIKRVAAYCRVSTDTEDQINSYNSQVEHYTEFIQKNNEWTLAGIYADEAITGTQVDRRIDFQRLINDCINGDIDMIITKSISRFARNTLDTLKYVRKLKEFNVAVFFEEENINTLTMDGELLLTILSSVAQQEVENISANVKKGLRMKMERGEMVGFQGCLGYDYDPETKSISINEKEAEIVRYIFRRYIEGVGGMVISRELEEQGYLSPRGNKRWTETTVLGIIKNEKYKGDLMMGKTYTVDPISKRRLDNYGEQDKFYIENHHEPIISEEVFEKAQGIRLRRSKNRNTVANNGGKREKYSRKYAFSSMLECGFCGHNLSRRNWHSSSEYTKVIWQCVNATKNGKKYCPHSKGIEEEAIEKAFMESYRQVCHNNVEITNEFLKTVEEELKDNSLAKDLKKITNQLDKVLKKEKDLVELRLNESISMDIYQDKYNEIAISKEKLLAEKRTLEVTLTDEKALKKRLEGFKKILESNKYLEKFDRAVFESIVDKIIIGGTNDEGEIDPTMITIIYKTGKKDSQDGRLFKSRRKNAKEVNEETDNKLYPQSSDEVNNLCSYPMDNT

SEQ ID NO: 10757 - DNA, 50 bp, Streptococcus pyogenes; identical to SEQ ID NO: 9807
  source 1..50: mol_type = genomic DNA

SEQ ID NO: 10758 - DNA, 40 bp, Streptococcus pyogenes; identical to SEQ ID NO: 10718
  source 1..40: mol_type = genomic DNA

SEQ ID NO: 10759 - DNA, 50 bp, Streptococcus pyogenes; identical to SEQ ID NO: 10724
  source 1..50: mol_type = genomic DNA

SEQ ID NO: 10760 - DNA, 40 bp, Streptococcus pyogenes; identical to SEQ ID NO: 10720
  source 1..40: mol_type = genomic DNA

SEQ ID NO: 10761 - protein, 583 aa, Streptococcus pyogenes
MNTKVKLIKASNTGARNRNALHLDLKRVAAYCRVSTDSKDQLESYKSQVDYYTNLIKNNKNWTLAGIYADEATTGTTATKRADFMRLISDCQNGDIDMIITKSISRFARNTLDTLKYVRLLKENNVGVVFEEENIDTLTMDGELLLTILSSVAQQEVENTSAHVKKGLKMKMEKGELIGFQGCLGYDYDPITKSISINEEESKIVRYIFKRYLEGNGGSVIGRELEEQGYLTPRGKTKWSDTTVLGIIKNEKYIGDILMGKTFTVDPITKRRLANFGESDKYHIENHHEPIISREDFEKAQEIRLRRAQNRNTIANKDRKREKLSRQYAFSSMLECGFCGEILSRRTWHTSSIYKKINWQCVRSTKKGKKYCPHSKGIQEAAIEKAFVESYRQLCHADSTVIDDFLKIVEEEINDNTLVKDLKKIENQLNRIISQERKLVDLHLEDNIDEEVYAKKYKKLTKQKEELLDEKKTLELTIKDEDSIKERLKQFKKVLENKEIIEEFNGTVFESIVDKVVVGRIDKDGTVHPYDLTFYFKTGVKDSQDSNNFKDKRKNAKDNDINKLCSYKNDEDKKLCSQSKDNA

SEQ ID NO: 10762 - DNA, 50 bp, Streptococcus pyogenes; identical to SEQ ID NO: 9817
  source 1..50: mol_type = genomic DNA

SEQ ID NO: 10763 - DNA, 40 bp, Streptococcus pyogenes; identical to SEQ ID NO: 10718
  source 1..40: mol_type = genomic DNA

SEQ ID NO: 10764 - DNA, 50 bp, Streptococcus pyogenes; identical to SEQ ID NO: 10719
  source 1..50: mol_type = genomic DNA

SEQ ID NO: 10765 - DNA, 40 bp, Streptococcus pyogenes; identical to SEQ ID NO: 10720
  source 1..40: mol_type = genomic DNA

SEQ ID NO: 10766 - protein, 607 aa, Streptococcus pyogenes
MFCKCGIIELHRKIQKGGGAVKKDVKVIKGDTTLKRTASGCVQRSIKRVAAYCRVSTDTEDQINSYNSQVEHYTEFIQKNKEWTLAGIYADEAITGTQVDRRIDFQRLINDCMNGDIDMIITKSISRFARNTLDTLKYVRKLKEFNVAVFFEEENINTLTMAGELLLTILSSVAQQEVENISANVKKGLRMKMERGEMVGFQGCLGYDYDPETKSISINEKEAEIVRYIFRRYIEGVGGMVISRELEEQGYLSPRGNKRWTETTVLGIIKNEKYKGDLMMGKTYTVDPISKRRLDNFGEQDKFYIENHHEPIISEEDFEKAQGIRLRRSKNRNTVANNGGKREKYSRKYAFSSMLECGFCGHNLSRRNWHSSSEYTKVIWQCVNATKNGKKYCPHSKGIEEEAIEKAFMESYRQVCHNNVEITNEFLKTVEEELKDNSLAKDLKKITNQLDKILKKEKDLVELRLNESISMDIYQDKYNEIAISKEKLLAEKRTLEVTLTDEKALKKRLEGFKKLLESNKYLEEFDRAVFESIVDKIIIGGTNDEGEIDPAMITIIYKTGKKDSQDGRLFKSRRKNAKEVNEETDNKLYPHSSDEVNNLYSYPIDNT

SEQ ID NO: 10767 - DNA, 50 bp, Streptococcus pyogenes; identical to SEQ ID NO: 9827
  source 1..50: mol_type = genomic DNA

SEQ ID NO: 10768 - DNA, 40 bp, Streptococcus pyogenes; identical to SEQ ID NO: 10718
  source 1..40: mol_type = genomic DNA

SEQ ID NO: 10769 - DNA, 50 bp, Streptococcus pyogenes; identical to SEQ ID NO: 10734
  source 1..50: mol_type = genomic DNA

SEQ ID NO: 10770 - DNA, 40 bp, Streptococcus pyogenes; identical to SEQ ID NO: 10720
  source 1..40: mol_type = genomic DNA

SEQ ID NO: 10771 - protein, 583 aa, Streptococcus pyogenes
MNTKVKLIKASNIGARNRNALHLDLKRVAAYCRVSTDSKDQLESYKSQVDYYTNLIKNNKNWTLAGIYADEATTGTTATKRADFMRLISDCQNGDIDMIITKSISRFARNTLDTLKYVRLLKENNVGVVFEEENIDTLTMDGELLLTILSSVAQQEVENTSAHVKKGLKMKMEKGELIGFQGCLGYDYDPITKSISINEEESKIVRYIFKRYLEGNGGSVIGRELEEQGYLTPRGKTKWSDTTVLGIIKNEKYIGDILMGKTFTVDPITKRRLANFGESDKYHIENHHEPIISREDFEKAQEIRLRRAQNRNTIANKDRKREKLSRQYAFSSMLECGFCGEILSRRTWHTSSIYKKINWQCVRSTKKGKKYCPHSKGIQEAAIEKAFVESYRQLCHADSTVIDDFLKIVEEEINDNTLVKDLKKIENQLNRIISQERKLVDLHLEDNIDEEVYAKKYKKLTKQKEELLDEKKTLELTIKDEDSIKERLKQFKKVLENKEIIEEFNGTVFESIVDKVVVGRIDKDGTVHPYDLTFYFKTGVKDSQDSNNFKDKRKNAKDNDINKLCSYKNDEDKKLCSQSKDNA

SEQ ID NO: 10772 - DNA, 50 bp, Streptococcus pyogenes; identical to SEQ ID NO: 9817
  source 1..50: mol_type = genomic DNA

SEQ ID NO: 10773 - DNA, 40 bp, Streptococcus pyogenes; identical to SEQ ID NO: 10718
  source 1..40: mol_type = genomic DNA

SEQ ID NO: 10774 - DNA, 50 bp, Streptococcus pyogenes; identical to SEQ ID NO: 10719
  source 1..50: mol_type = genomic DNA

SEQ ID NO: 10775 - DNA, 40 bp, Streptococcus pyogenes; identical to SEQ ID NO: 10720
  source 1..40: mol_type = genomic DNA

SEQ ID NO: 10776 - protein, 583 aa, Streptococcus pyogenes
MNTKVKLIKASNTGARNRNALDLDLKRVAAYCRVSTDSKDQLESYKSQVDYYTNLIKNNKNWTLAGIYADEATTGTTATKRADFMRLISDCQNGDIDMIITKSISRFARNTLDTLKYVRLLKENNVGVVFEEENIDTLTMDGELLLTILSSVAQQEVENTSAHVKKGLKMKMEKGELIGFQGCLGYDYDPITKSISINEEEAKIVRYIFKRYLEGNGGSVIGRELEEQGYLTPRGKTKWSDTTVLGIIKNEKYIGDILMGKTFTVDPITKRRLANFGESDKYHIENHHEPIISREDFEKAQEIRLRRAQNRNTIANKDRKREKLSRQYAFSSMLECGFCGEILSRRTWHTSSIYKKINWQCVRSTKKGKKYCPHSKGIQEAAIEKAFVESYRQLCHADSTVIDDFLKIVEEEINDNTLVKDLKKIENQLNRIISQERKLVDLHLEDSIDEEVYAKKYKKLTKQKEELLDEKKTLELTIKDEDSIKERLKQFKKVLENKEIIEEFNRTVFESIVDKVVVGRIDKDGTVHPYDLTFYFKTGVKDSQDSNNFKDKRKNAKDNDSEKLCSYKNDEDKKLCSQSKDNA

SEQ ID NO: 10777 - DNA, 50 bp, Streptococcus pyogenes; identical to SEQ ID NO: 9817
  source 1..50: mol_type = genomic DNA

SEQ ID NO: 10778 - DNA, 40 bp, Streptococcus pyogenes; identical to SEQ ID NO: 10718
  source 1..40: mol_type = genomic DNA

SEQ ID NO: 10779 - DNA, 50 bp, Streptococcus pyogenes; identical to SEQ ID NO: 10719
  source 1..50: mol_type = genomic DNA

SEQ ID NO: 10780 - DNA, 40 bp, Streptococcus pyogenes; identical to SEQ ID NO: 10720
  source 1..40: mol_type = genomic DNA

SEQ ID NO: 10781 - protein, 587 aa, Streptococcus pyogenes
MKKEVKVIKGDTTLKRTASGCVERSIKRVAAYCRVSTDTEDQINSYNSQVEHYTEFIQKNNEWTLAGIYADEAITGTQVDRRIDFQRLINDCMNGDIDMIITKSISRFARNTLDTLKYVRKLKEFNVAVFFEEENINTLTMDGELLLTILSSVAQQEVENISANVKKGLRMKMERGEMVGFQGCLGYDYDPETKSISINEKEAEIVRYIFRRYIEGVGGMVISRELEEQGYLSPRGNKRWTETTVLGIIKNEKYKGDLMMGKTYTVDPISKRRLDNYGEQDKFYIENHHEPIISEEDFEKAQGIRLRRSKNRNTVANNGGKREKYSRKYAFSSMLECGFCGHNLSRRNWHSSSEYTKVIWQCVNATKNGKKYCPHSKGIEEEAIEKAFMESYRQVCHNNVEITNEFLKTVEEELKDNSLSKDLKKISNQLDKILKKEKDLVELRLNESISMDIYQDKYNEIAISKEKLLAEKRTLEVTLTDEKALKKRLEGFKKLLESNKYLEEFDRAVFESIVDKIIIGGTNDEGEIDPAMITIIYKTGKKDSQDGRLFKSRRKNAKEVNEETENKLYPQSSDEVNNLCFYPMDNT

SEQ ID NO: 10782 - DNA, 50 bp, Streptococcus pyogenes
  source 1..50: mol_type = genomic DNA
tgtgtttctatcctatggacaacacatgtagagtgcatagcgttgataca

SEQ ID NO: 10783 - DNA, 40 bp, Streptococcus pyogenes; identical to SEQ ID NO: 10718
  source 1..40: mol_type = genomic DNA

SEQ ID NO: 10784 - DNA, 50 bp, Streptococcus pyogenes
  source 1..50: mol_type = genomic DNA
tgtgtttctatcctatggacaacaattgtagagtgcatagcgttgataca

SEQ ID NO: 10785 - DNA, 40 bp, Streptococcus pyogenes; identical to SEQ ID NO: 10720
  source 1..40: mol_type = genomic DNA

SEQ ID NO: 10786 - protein, 607 aa, Streptococcus pyogenes
MFCKCGIIELHRKIQKGGGAVKKDVKVIKGDTTLKRTASGCVQRSIKRVAAYCRVSTDTEDQINSYNSQVEHYTEFIQKNKEWTLAGIYADEAITGTQVDRRIDFQRLINDCMNGDIDMIITKSISRFARNTLDTLKYVRKLKEFNVAVFFEEENINTLTMDGELLLTILSSVAQQEVENISANVKKGLRMKMERGEMVGFQGCLGYDYDPETKSISINEKEAEIVRYIFRRYIEGVGGMVISRELEEQGYLSPRGNKRWTETTVLGIIKNEKYKGDLMMGKTYTVDPISKRRLDNFGEQDKFYIENHHEPIISEEDFEKAQGIRLRRSKNRNTVANNGGKREKYSRKYAFSSMLECGFCGHNLSRRNWHSSSEYTKVIWQCVNATKNGKKYCPHSKGIEEEAIEKAFMESYRQVCHNNIEITNEFLKTVEEELKDNSLAKDLKKITNQLDKILKKEKDLVELRLNESISMDIYQDKYNEIAISKEKLLAEKRTLEVTLTDEKALKKRLEGFKKLLESNKYLEEFDRAVFESIVDKIIIGGTNDEGEIDPAMITIIYKTGKKDSQDGRLFKSRRKNAKEVNEETDNKLYPHSSDEVNNLYSYPIDNT

SEQ ID NO: 10787 - DNA, 50 bp, Streptococcus pyogenes; identical to SEQ ID NO: 9827
  source 1..50: mol_type = genomic DNA

SEQ ID NO: 10788 - DNA, 40 bp, Streptococcus pyogenes; identical to SEQ ID NO: 10718
  source 1..40: mol_type = genomic DNA

SEQ ID NO: 10789 - DNA, 50 bp, Streptococcus pyogenes; identical to SEQ ID NO: 10734
  source 1..50: mol_type = genomic DNA

SEQ ID NO: 10790 - DNA, 40 bp, Streptococcus pyogenes; identical to SEQ ID NO: 10720
  source 1..40: mol_type = genomic DNA

SEQ ID NO: 10791 - protein, 587 aa, Streptococcus pyogenes
MKKDVKVIKGDTTLKRTASGCVERSIKRVAAYCRVSTDTEDQINSYNSQVEHYTEFIQKNNEWTLAGIYADEAITGTQVDRRIDFQRLINDCMNGDIDMIITKSISRFARNTLDTLKYVRKLKEFNVAVFFEEENINTLTMDGELLLTILSSVAQQEVENISANVKKGLRMKMERGEMVGFQGCLGYDYDPETKSISINKKEAEIVRYIFRRYIEGVGGMVISRELEEQGYLSPRGNKRWTETTVLGIIKNEKYKGDLMMGKTYTVDPISKRRLDNFGEQDKFYIENHHEPIISEEDFEKAQGIRLRRSKNRNTVANNGGKREKYSRKYAFSSMLECGFCGHNLSRRNWHSSSEYTKVIWQCVNATKNGKKYCPHSKGIEEEAIEKAFMESYRQVCHNNVEITNEFLKTVEEELKDNSLAKDLKKITNQLDKVLKKEKDLVELRLNESISMDVYQDKYNEIAISKEKLLAEKRTLEVTLTDEKALKKRLEGFKKLLESNKYLEEFDRAVFESIVDKIIIGGTNDEGEIDPAMITIIYKTGKKDSQDGRLFKSRRKNAKEVDEKTDNKLYPQSSDEVNNLCSYPMDNT

SEQ ID NO: 10792 - DNA, 50 bp, Streptococcus pyogenes; identical to SEQ ID NO: 9807
  source 1..50: mol_type = genomic DNA

SEQ ID NO: 10793 - DNA, 40 bp, Streptococcus pyogenes; identical to SEQ ID NO: 10718
  source 1..40: mol_type = genomic DNA

SEQ ID NO: 10794 - DNA, 50 bp, Streptococcus pyogenes; identical to SEQ ID NO: 10724
  source 1..50: mol_type = genomic DNA

SEQ ID NO: 10795 - DNA, 40 bp, Streptococcus pyogenes; identical to SEQ ID NO: 10720
  source 1..40: mol_type = genomic DNA

SEQ ID NO: 10796 - protein, 587 aa, Streptococcus pyogenes; identical to SEQ ID NO: 10721

SEQ ID NO: 10797 - DNA, 50 bp, Streptococcus pyogenes; identical to SEQ ID NO: 9807
  source 1..50: mol_type = genomic DNA

SEQ ID NO: 10798 - DNA, 40 bp, Streptococcus pyogenes
  source 1..40: mol_type = genomic DNA
tttgtttccgcaaatgcatcacgtcgagtgcgtagtgttg

SEQ ID NO: 10799 - DNA, 50 bp, Streptococcus pyogenes; identical to SEQ ID NO: 10724
  source 1..50: mol_type = genomic DNA

SEQ ID NO: 10800 - DNA, 40 bp, Streptococcus pyogenes; identical to SEQ ID NO: 10720
  source 1..40: mol_type = genomic DNA

SEQ ID NO: 10801 - protein, 587 aa, Streptococcus pyogenes
MKKEVKVIKGDTTLKRTASGCVERSIKRVAAYCRVSTDTEDQINSYNSQVEHYTEFIQKNNEWTLAGIYADEAITGTQVDRRIDFQRLINDCMNGDIDMIITKSISRFARNTLDTLKYIRKLKEFNVAVFFEEENINTLTMDGELLLTILSSVAQQEVENISANVKKGLRMKMERGEMVGFQGCLGYDYDPETKSISINEKEAEIVRYIFRRYIEGVGGMVISRELEEQGYLSPRGNKRWTETTVLGIIKNEKYKGDLMMGKTYTVDPISKRRLDNFGEQDKFYIENHHEPIISEEDFEKAQGIRLRRSKNRNTVANNGGKREKYSRKYAFSSMLECGFCGHNLSRRNWHSSSEYTKVIWQCVNATKNGKKYCPHSKGIEEEAIEKAFMESYRQVCHNNVEITNEFLKTVEEELKDNSLAKDLKKITNQLDKILKKEKDLVELRLNESISMDIYQDKYNEIAISKEKLLAEKRTLEVTLTDEKALKKRLEGFKKLLESNKYFEEFDRAVFESIVDKIIIGGTNDEGEIDPAMITIIYKTGKKDSQDGRLFKSRRKNAKEVNEKADSKLYPQSSDEVNNLCSYPMDNT

SEQ ID NO: 10802 - DNA, 50 bp, Streptococcus pyogenes; identical to SEQ ID NO: 9807
  source 1..50: mol_type = genomic DNA

SEQ ID NO: 10803 - DNA, 40 bp, Streptococcus pyogenes; identical to SEQ ID NO: 10718
  source 1..40: mol_type = genomic DNA

SEQ ID NO: 10804 - DNA, 50 bp, Streptococcus pyogenes; identical to SEQ ID NO: 10724
  source 1..50: mol_type = genomic DNA

SEQ ID NO: 10805 - DNA, 40 bp, Streptococcus pyogenes; identical to SEQ ID NO: 10720
  source 1..40: mol_type = genomic DNA

SEQ ID NO: 10806 - protein, 530 aa, Acidovorax cattleyae
MQEPSVRVYSYRRFSSGRQAKGHSLERQMAAAKRWCLEHSYELDDDLVLSDLGVSAFTGDNVNRGALSGFLNFVQRGLVPEGSILLVESLDRLSREALPEAVNLLTSIVRAGVRVVSLMDNMEWNNTTINDFVSFMVSVSLFSRAHEESATKSKRVSAKFQSKRQAGLAVVTAGHGPGWAHPAADKSGWLVVEDEAESVRKTFDAAASGLGGVAIARMANEQGWVLPWRKRANTSHRWEHTGVSRLLRDRRVLGEWQPKRMVGGRLVVDGEPVQNYFPQIIPATLWTKVQLALEGRPGPKRLRGLSTDVFANLLYCDCGERMERKAPSSRGYARYYCLGRKAGVSKCAPLAERVLTGPVLEMLVQGKQAHFNPERAVEKAREKLAHAQAQAADLLQRAERILVALEQGGSIELLAQRLAKLEREREVALQDAEAAKLAMAAVPSKGAEFGQGMVAQATKIIEDKSKSAERHKLALSIARIVDRIEWSGTNYLMMYLKDGVTFAVKPDASYFAKAEDSRRRRKRETEQLRA

SEQ ID NO: 10807 - DNA, 50 bp, Acidovorax cattleyae
  source 1..50: mol_type = genomic DNA
ttgtaggttttttgtgcgattgactagtcactcgcacatattacccgcat

SEQ ID NO: 10808 - DNA, 40 bp, Acidovorax cattleyae
  source 1..40: mol_type = genomic DNA
ggccggcgtggcgaggtggtagtccagccgccaccccacg

SEQ ID NO: 10809 - DNA, 50 bp, Acidovorax cattleyae
  source 1..50: mol_type = genomic DNA
ttgtaggttttttgtgcgattgaccggtcactcgcacatattacccgcat

SEQ ID NO: 10810 - DNA, 40 bp, Acidovorax cattleyae
  source 1..40: mol_type = genomic DNA
ggccggcggggcgcgttggcggttctcctgccacccccgg

SEQ ID NO: 10811 - protein, 562 aa, Eubacterium limosum
MARTKNRGQQTLSPSHMTRRWRLGEYIRLSKEDLKRGRDDSNSVVNQRNLLNEYYQNHQDEFESTSEYVDDGHTGTDTDREDFQRLLADVMSGKINCVIVKDLSRLSRNYSDAGSLIENLFVQLNIRFISLAESVDSFKNPDSVSSIIVPITNVMNDNYCYQTSKKIRQVFDYKRRNGQYIGAMAPYGYVKHPKDKHQLMVDPEAAETVKLIFEMCLQGKAKHAITLHLNEHGVPSPLAYRRLKGYPVSTSSDNDNPMWSVGIVGHILTNPIYTGDLVQGRRRVKSYKVHQIEEVPEEEWVVVPDTHDAIIDKADFEKVQGLLKRDTRTAPQKKELHLFSGFLKCADCGKAVNRCLSGKHVYYACSTYKNRSKTACTMHGIKHNRLEAAVLFAIQQQVHLAVSYSAIIARINSAPVKKSESARLNDLISVKERELAKIARYKQAIYQDWKDGTLTRQEYMDMKADYEHKADELSAILNRLTSEREELASGVNNEHPALVAFMQYQNIDALSRDILIELVDHIKVYENGNIKVRFKFADELRRITEYIKINTDSPGQAAGKSA

SEQ ID NO: 10812 - DNA, 50 bp, Eubacterium limosum
  source 1..50: mol_type = genomic DNA
cgttttcctaataaatctcaatcatatgattgtgatttaataggaaagct

SEQ ID NO: 10813 - DNA, 40 bp, Eubacterium limosum
  source 1..40: mol_type = genomic DNA
tttttggaaagcaagtacttatgagcatttcagatctttt

SEQ ID NO: 10814 - DNA, 50 bp, Eubacterium limosum
  source 1..50: mol_type = genomic DNA
cgttttcctaataaatctcaatcatttgattgtgatttaataggaaagct

SEQ ID NO: 10815 - DNA, 40 bp, Eubacterium limosum
  source 1..40: mol_type = genomic DNA
tctttgtgaagcaagaacttttgaagaattcagatggttt

SEQ ID NO: 10816 - protein, 574 aa, Oscillibacter sp
MVAISQSVWHFMKEVNMLQPNQKITALYCRLSRDDNLEGDSNSIQNQKLILQKYADENGFQNTRFYVDDGYSGANFNRPAFEQMMDDMSNGDIAVIITKDLSRLGRNQLHTGLYIEEIFPSNDVRYIAVNDNVDTKYENSNELMPFKNLFNEWHVRDCSRKVRNVVNAKAQRGIRVGTRVPYGYRKGATKDSPLLVDEEAAAVVKRIFAMCAGGMGPAQIAKQLKKECIYSPSMYAYTKFGTSHSGLNAERPYNWTGDMVADMLQNMVYLGHTVNLRYSTKSYKDKKRCERPKSEWLIFENTHEELVDQETWDIVQEVRSHKRRRTNMDEQNMFSGLVYCADCGKPMVLHRAHTMKPEQNHFTCRTYKKDGAEVCSAHYIREVALKEIVLETIRRATEFARSDPERFAAYIQQKQSTEVAKEIRGLERELSTMRKRDGELDVVFKRMYEDSALGRVSNEQFRLLSEAYSKEKAQLAEAIPATEERLEKLRSSMANAKNFIAKARKFTDMTELTPELLRTFVAKIIVYEKEVKYSKHAPQKIHICFRDFNLNETDDMLLCGETTEKADSTIALPA

SEQ ID NO: 10817 - DNA, 50 bp, Oscillibacter sp
  source 1..50: mol_type = genomic DNA
aggtacccctatcaggagtagcggaagggcgactcctcataaggacatct

SEQ ID NO: 10818 - DNA, 40 bp, Oscillibacter sp
  source 1..40: mol_type = genomic DNA
gattaaaaaatgcaccccaaaggggtgcattttttaatct

SEQ ID NO: 10819 - DNA, 50 bp, Oscillibacter sp
  source 1..50: mol_type = genomic DNA
aggtacccctatcaggagtagcggttgggcgactcctcataaggacatct

SEQ ID NO: 10820 - DNA, 40 bp, Oscillibacter sp
  source 1..40: mol_type = genomic DNA
gattagaacatgaacatcattggggtccattgttcagtct

SEQ ID NO: 10821 - protein, 531 aa, Erythrobacter sp
MRTLIYARYSTSLQNSRSIEQQIGVCRDRAGAEGWPVIDVFTDYAIGGGAGTSESQRPGLAAMLARVEQGDIDQVLIDTTSRLARNQGDAHHLRERLNFHGARLFTLGDGEIDSFKGAIKGLLDEQQRVELRHNIKRGQAGTVRQGRSPAGLAYGYRLANRIDEGGRAVRGLREVDEDQAAIVRRIFTEYAAGRSPVAIARQLNVEGIPGPRGSSWRASTIRPDRTRGNGMLSNRLYIGELVHNRTSKIIEPVTRTTRIRPNPESAWIIENVPQLRIIDDALWGAVQIELERNRVEAKPVKARRPRHILSGLGQCGTCGGAWNISTATFWSCGARRDGGTCTNNRTISTESYERHALAALQEQLLDPEWVSAYVREYHEEAARAAKQARQRKGTLERQLLAVSAKVDRLVQAVAEGGEEFAEIRTALRTARIERDRLAAELAEIAAVRVIALHPAIAEEYRRQVADLRTALAEPAAREAAIPVLRELIDRIILTPNPAGRGVTVEVKARLAAVVELATGEQPHAGKARQTG

SEQ ID NO: 10822 - DNA, 50 bp, Erythrobacter sp
  source 1..50: mol_type = genomic DNA
acttactctaaaggcgtgttcccttcacccgctccacctttggagtaagt

SEQ ID NO: 10823 - DNA, 40 bp, Erythrobacter sp
  source 1..40: mol_type = genomic DNA
gacgagggttcgattcccttcacccgctccaattccccgt

SEQ ID NO: 10824 - DNA, 50 bp, Erythrobacter sp
  source 1..50: mol_type = genomic DNA
acttactctaaaggcgtgttccctacacccgctccacctttggagtaagt

SEQ ID NO: 10825 - DNA, 40 bp, Erythrobacter sp
  source 1..40: mol_type = genomic DNA
gttgtggctttggttccctacacccactccacctccccgt

SEQ ID NO: 10826 - protein, 621 aa, Leclercia adecarboxylata
MKKCFVYYRFSSEQQRDGASIVRQKEVLQEYIKRHNVCDGMDDPEVVEISDEALSAFKGLNMSEGQLGKWMDQVRVGMWDGSRIVVESTDRFSRLNPFKVLSYINELVSHKITMIDVTNNMWINLANSQLLPIVTMSAQRAYEESVIKSKRIADGWRRRRDTAFSENRIVTNKTPQWIDVVDNKYVLNNKAEIVKEIFRLCKSGIGTPTIAKILREKGEEWQFDRPWRAESVHKILRNRRVTGVIFISEIIRDFENTDNIVEQKKYEKEVYPVVISNEEFELVGKLLASRKPGSGKSVGRVSGGSVLKNIEGVDIVIEQSPMTKSNIFNSVCRCGRCGEPMYHNVVERERFAKRKGEMVKSEYRYIRCIGERDNLCTNKAFRYDAVEHFVIEHIKNLDFSKVIQASEVNPELELLRLNIQEEIEHIAEYERGIERLKAANKKVPFDIVMELNDSQEKLHKLKIKLASYDKVQVDVSVLKNIDTSIVYDVHNIEVRSLIEQEINNLIERIDLYREDNFNIITLWYKDNEVLKHVLITENGKKPKLISRIAVVKNGDATTYETASFKLIATDEQLTVEVPQEIVLNDYVLLLNYIDGLKDEHSTNVAVWMREHMNGVLTNTLM

SEQ ID NO: 10827 - DNA, 50 bp, Leclercia adecarboxylata
  source 1..50: mol_type = genomic DNA
tgtttgtttactatcaccactattcaaatgtacactaatttgtacaaaca

SEQ ID NO: 10828 - DNA, 40 bp, Leclercia adecarboxylata; identical to SEQ ID NO: 7433
  source 1..40: mol_type = genomic DNA

SEQ ID NO: 10829 - DNA, 50 bp, Leclercia adecarboxylata
  source 1..50: mol_type = genomic DNA
tgtttgtttactatcaccactatttcaatgtacactaatttgtacaaaca

SEQ ID NO: 10830 - DNA, 40 bp, Leclercia adecarboxylata
  source 1..40: mol_type = genomic DNA
tattaccttgacactaaaatcaatcagtgacattacaaga

SEQ ID NO: 10831 - protein, 549 aa, Vibrio breoganii
MLAYSYKRFSSKHQTQGHSIERQTKLAEDYCAKHQLELSTLSFEDLGVSAWTQANTKEDAGLGQFLSALESNKIKTPCYLLVESLDRLSRAKIKVAMNQLWRITDHDVTVITLLDQKSYTKDMDFTDFLMAGLIMERSHEESLTKSKRLKAAWAKKRSKQDMHSKAPFWLDRIKGDPDRPDGYYLNRHQATVQRVFEMASEGLGHYTITGILNKEQIPSPTGRDWNGSSVSKLLRYRQVIGEYQPCTVSNKIATPIGEPIKDYYPSAISEELFNKVQLGINQRLKKYKTHRGGSTTTHRNVLRDVGKCSCGKYLSLVKKRSRYYLQCIGSRSSLCPIRAIQIDAFEKFLRQYFISPRFHNQWVSADQANIDIDSKINRLQLEQEETNKALQGLLSVIEMNPNQLILQKVSELSESLTERSGMIAELEESKGSGNKQQSLKETLKLIDLAFSPEDDSENIKARVKLKQLLNATFDYFVMTRVDSDNGKVLYYLIELGFKGVVLKYQSIGAPTALQNASKKEIWFAISDKPRVELTEEQKEAVIEELKINH

SEQ ID NO: 10832 - DNA, 50 bp, Vibrio breoganii
  source 1..50: mol_type = genomic DNA
tgtggttctagtatgtaagatgtgttaatctccgagatactagagcccca

SEQ ID NO: 10833 - DNA, 40 bp, Vibrio breoganii
  source 1..40: mol_type = genomic DNA
atgtattgccgaggaagtcttattaacgttctgaccaccc

SEQ ID NO: 10834 - DNA, 50 bp, Vibrio breoganii
  source 1..50: mol_type = genomic DNA
tgtggttctagtatgtaagatgtgacaatctccgagatactagagcccca

SEQ ID NO: 10835 - DNA, 40 bp, Vibrio breoganii
  source 1..40: mol_type = genomic DNA
ctgccttgcagaggaaatcacattaactttgtgacaactc

SEQ ID NO: 10836 - protein, 628 aa, Campylobacter coli; identical to SEQ ID NO: 3751

SEQ ID NO: 10837 - DNA, 50 bp, Campylobacter coli; identical to SEQ ID NO: 262
  source 1..50: mol_type = genomic DNA

SEQ ID NO: 10838 - DNA, 40 bp, Campylobacter coli
  source 1..40: mol_type = genomic DNA
ataaagatggatttgcatagggtatttggatgaaatgctt

SEQ ID NO: 10839 - DNA, 50 bp, Campylobacter coli; identical to SEQ ID NO: 2349
  source 1..50: mol_type = genomic DNA

SEQ ID NO: 10840 - DNA, 40 bp, Campylobacter coli
  source 1..40: mol_type = genomic DNA
aaaaaaacacatttgcaaactttatttggatgaagttctt

SEQ ID NO: 10841 - protein, 628 aa, Campylobacter coli; identical to SEQ ID NO: 56

SEQ ID NO: 10842 - DNA, 50 bp, Campylobacter coli; identical to SEQ ID NO: 262
  source 1..50: mol_type = genomic DNA

SEQ ID NO: 10843 - DNA, 40 bp, Campylobacter coli; identical to SEQ ID NO: 10838
  source 1..40: mol_type = genomic DNA

SEQ ID NO: 10844 - DNA, 50 bp, Campylobacter coli; identical to SEQ ID NO: 2349
  source 1..50: mol_type = genomic DNA

SEQ ID NO: 10845 - DNA, 40 bp, Campylobacter coli; identical to SEQ ID NO: 10840
  source 1..40: mol_type = genomic DNA

SEQ ID NO: 10846 - protein, 628 aa, Campylobacter coli; identical to SEQ ID NO: 3766

SEQ ID NO: 10847 - DNA, 50 bp, Campylobacter coli; identical to SEQ ID NO: 262
  source 1..50: mol_type = genomic DNA

SEQ ID NO: 10848 - DNA, 40 bp, Campylobacter coli; identical to SEQ ID NO: 10838
  source 1..40: mol_type = genomic DNA

SEQ ID NO: 10849 - DNA, 50 bp, Campylobacter coli; identical to SEQ ID NO: 2349
  source 1..50: mol_type = genomic DNA

SEQ ID NO: 10850 - DNA, 40 bp, Campylobacter coli; identical to SEQ ID NO: 10840
  source 1..40: mol_type = genomic DNA

SEQ ID NO: 10851 - protein, 628 aa, Campylobacter coli; identical to SEQ ID NO: 3771

SEQ ID NO: 10852 - DNA, 50 bp, Campylobacter coli; identical to SEQ ID NO: 262
  source 1..50: mol_type = genomic DNA

SEQ ID NO: 10853 - DNA, 40 bp, Campylobacter coli; identical to SEQ ID NO: 10838
  source 1..40: mol_type = genomic DNA

SEQ ID NO: 10854 - DNA, 50 bp, Campylobacter coli; identical to SEQ ID NO: 2349
  source 1..50: mol_type = genomic DNA

SEQ ID NO: 10855 - DNA, 40 bp, Campylobacter coli; identical to SEQ ID NO: 10840
  source 1..40: mol_type = genomic DNA

SEQ ID NO: 10856 - protein, 628 aa, Campylobacter coli
MRKNEKITALYERLSRDDFGKDDDQQRESNSISNQKAMLEEFAARQGFTNIVHFTDDGISGTCFDRPGFLAMMKEVEAGNVEYLCIKDMSRMGRDYLKVGQIMEILRQRGVRLIAINDGVDSARGDDDFTPFRNIMNEYYARDTSRKIRSTFQSKGKSGKHLTGTVIYGYLWNEARDQWLVDPEAAEVVKRIFSMTIDGYGPYQIASKLKSEKVLIPSAYLAQHGEGVNKNKTFKDVYGWGSSTICNILEKREYLGHTINFNTRKHFKDKKSHYVPEDEWTIFENTHEPIIDQQTFDLVQKIRGNVRRYPDGWGEAAPLTGLLYCADCGGKMYVHRTNNGKRISQYTCSQYTKVPCGTLCKTQHRINEDVVLSLVSEMLKAIAEYAKHDRAEFVRVVQEAQSSQQTTEVRKQRTRLATAKQRVSELEVLLCKIYEDNILGKLSDSRYATLDAQYEKEQSELTAEISVLEKAVKSYEKHEKDADRFIALIDKYENFDKLTIAMLNEFIEKILVHERDRKGSIQTTQEVEIYFNFVGRFVPPAFGEVELTPEELEEIRKREERKDRLHQNYLKRKASGAQKRYEDKIKKRKKAEIEAKKAAIRAEDIAKGVFVPVSSLPQREPMKGVQTA

SEQ ID NO: 10857 - DNA, 50 bp, Campylobacter coli; identical to SEQ ID NO: 262
  source 1..50: mol_type = genomic DNA

SEQ ID NO: 10858 - DNA, 40 bp, Campylobacter coli; identical to SEQ ID NO: 10838
  source 1..40: mol_type = genomic DNA

SEQ ID NO: 10859 - DNA, 50 bp, Campylobacter coli; identical to SEQ ID NO: 2349
  source 1..50: mol_type = genomic DNA

SEQ ID NO: 10860 - DNA, 40 bp, Campylobacter coli; identical to SEQ ID NO: 10840
  source 1..40: mol_type = genomic DNA

SEQ ID NO: 10861 - protein, 628 aa, Campylobacter coli
MRKNEKITALYERLSRDDFGKDDDQQRESNSISNQKAMLEEFAARQGFTNIVHFTDDGISGTCFDRPGFLAMMKEVEAGNVEYLCIKDMSRMGRDYLKVGQIMEILRQRGVRLIAINDGVDSARGDDDFTPFRNIMNEYYARDTSRKIRSTFQSKGKSGKHLTGTVIYGYLWNEARDQWLVDPEAAEVVKRIFSMTIDGYGPYQIASKLKSEKVLIPSAYLAQHGEGVNKNKTFKDVYGWGSSTICNILEKREYLGHTINFKTRKHFKDKKSHYVPEDEWTIFENTHEPIIDQQTFDLVQKIRGNVRRYPDGWGEAAPLTGLLYCADCGGKMYVHRTNNGKRISQYTCSQYTKVPCGTLCKTQHRINEDVVLSLVSEMLKAIAEYAKHDRAKFVRVVQEAQSSQQTTEVRKQRTRLATAKQRVSELEVLLCKIYEDNILGKLSDSRYATLDAQYEKEQSELTAEISVLEEAVKSYEKHEKDADRFIALIDKYENFDKLTIAMLNEFIEKILVHERDRKGSIQTTQEVEIYFNFVGRFVPPAFGEVELTPEELEEIRKREERKDRLHQNYLKRKASGAQKRYEDKIKKRKKAEIEAKKAAIRAEDIAKGVFVPVSSLPQREPMKGVQTA

SEQ ID NO: 10862 - DNA, 50 bp, Campylobacter coli; identical to SEQ ID NO: 262
  source 1..50: mol_type = genomic DNA

SEQ ID NO: 10863 - DNA, 40 bp, Campylobacter coli; identical to SEQ ID NO: 10838
  source 1..40: mol_type = genomic DNA

SEQ ID NO: 10864 - DNA, 50 bp, Campylobacter coli; identical to SEQ ID NO: 2349
  source 1..50: mol_type = genomic DNA

SEQ ID NO: 10865 - DNA, 40 bp, Campylobacter coli; identical to SEQ ID NO: 10840
  source 1..40: mol_type = genomic DNA

SEQ ID NO: 10866 - protein, 628 aa, Campylobacter coli; identical to SEQ ID NO: 3771

SEQ ID NO: 10867 - DNA, 50 bp, Campylobacter coli
  source 1..50: mol_type = genomic DNA
aaaaagttcttgacttttcgtctctggtgttgtatgctctaaaagacttc

SEQ ID NO: 10868 - DNA, 40 bp, Campylobacter coli; identical to SEQ ID NO: 10838
  source 1..40: mol_type = genomic DNA

SEQ ID NO: 10869 - DNA, 50 bp, Campylobacter coli
  source 1..50: mol_type = genomic DNA
aaaaagttcttgacttttcgtctcctgtgttgtatgctctaaaagacttc

SEQ ID NO: 10870 - DNA, 40 bp, Campylobacter coli; identical to SEQ ID NO: 10840
  source 1..40: mol_type = genomic DNA

SEQ ID NO: 10871 - protein, 628 aa, Campylobacter coli
MRKNEKITALYERLSRDDFGKDDDQQRESNSISNQKAMLEEFAARQGFTNIVHFTDDGISGTCFDRPGFLAMMKEVEAGNVEYLCIKDMSRMGRDYLKVGQIMEILRQRGVRLIAINDGVDSARGDDDFTPFRNIMNEYYARDTSRKIRSTFQSKGKSGKHLTGTVIYGYLWNEARDQWLVDPEAAEVVKRIFSMTIDGYGPYQIASKLKSEKVLIPSAYLAQHGEGVNKNKTFKDVYGWGSSTICNILEKREYLGHTINFKTRKHFKDKKSHYVPEDEWTIFENTHEPIIDQQTFDLVQKIRGNVRRYPDGWGEAAPLTGLLYCADCGGKMYVHRTNNGKRISQYTCSQYTKVPCGTLCKTQHRINEDVVLSLVSEMLKAIAEYAKHDRAEFVRVVQEAQSSQQTTEVRKQRTRLATAKQRVSELEVLLCKIYEDNILGKLSDSRYATLDAQYEKEQSELTAEISVLEEAVKSYEKHEKDADRFIALIDKYENFDKLTIAMLNEFIEKILVHERDRKGSIQTTHEVEIYFNFVGRFVPPAFGEVELTPEELEEIRKREERKDRLHQNYLKRKASGAQKRYEDKIKKRKKAEIEAKKAAIRAEDIAKGVFVPVSSLPQREPMKGVQTA

SEQ ID NO: 10872 - DNA, 50 bp, Campylobacter coli; identical to SEQ ID NO: 262
  source 1..50: mol_type = genomic DNA

SEQ ID NO: 10873 - DNA, 40 bp, Campylobacter coli; identical to SEQ ID NO: 10838
  source 1..40: mol_type = genomic DNA

SEQ ID NO: 10874 - DNA, 50 bp, Campylobacter coli; identical to SEQ ID NO: 2349
  source 1..50: mol_type = genomic DNA

SEQ ID NO: 10875 - DNA, 40 bp, Campylobacter coli; identical to SEQ ID NO: 10840
  source 1..40: mol_type = genomic DNA

SEQ ID NO: 10876 - protein, 556 aa, Blautia obeum
MAMMNEMEYRTIGKALAGGYRAAVYCRLSKDDDLQGESASIANQRDMLEKYCEKQGWEVVAVYQDDGFTGLNMERPDLQRMLRAIERRQINLVITKDLSRLGRNYLQTGHLIEDFFPRNGVRYIAMNDGIDTLRDNNDIAPFKNILNEMYSKDISKKVHSSYLLKAQKGQFTGCLAPFGYRKDPEDKNHLLIDEETAPIVRLIFGYALNGHGPNYIRRRLEEEKIPCPTWWNRERGLRNTRTKWEKKDPENGRYMWDFSVIKDLLMNPVYTGAIASQKKDYRFKIGTIGEKKPEDWIVVEGQHEPLVDRMSFDIVQNKLKSRQRPGQTNEISLFAGLIKCGECGKSLTVRYTNAKHPQQIYSCKTYNAFGKNHCTQHRIDYDTLYSHVLRKIRECARAALMDGEAVADRLTNTCEAEQREQREAMERSLTRDEERIEVLDKMVMRLYEDMIAGRISEQNFNTMLEKTQTEQTELKTKVSEGRKRLSDEVQLANDAKQWVEAIQEYANITELDAATLNRLIKEIVVHERIDEDKTRHISIEIHFNLKPIPEVEQVTA

SEQ ID NO: 10877 - DNA, 50 bp, Blautia obeum
  source 1..50: mol_type = genomic DNA
ttttacacctaattggggataaaacagttcatggctaattaaaggtaaca

SEQ ID NO: 10878 - DNA, 40 bp, Blautia obeum; identical to SEQ ID NO: 8183
  source 1..40: mol_type = genomic DNA

SEQ ID NO: 10879 - DNA, 50 bp, Blautia obeum; identical to SEQ ID NO: 10877
  source 1..50: mol_type = genomic DNA

SEQ ID NO: 10880 - DNA, 40 bp, Blautia obeum
  source 1..40: mol_type = genomic DNA
taagaacaaggacataaaacagctaatggcaggtctctga

SEQ ID NO: 10881 - protein, 535 aa, Enterococcus faecium
MQIKQCIAEYIRLSSEDNNVDGKLKAESISVTSQRKLISEFIAKQQEFMDVPVIEYVDDGYSGTNFNRPGFQRMMEDARAGRISVIVIKDFSRFGRDHLEVGNYLEKVLPLLGVRIISVNDGFDSDNCSGVTGGMSIALKNMLNAMYSKDLSKKVRSAMATHAMNGEYMPSRPKYGYIKDPEDKHHLIVDPEAAEIVRLVFTMAADGVKKPHIARYLNEHNVMTCREYMKKKGIKITCAIEKEKKLWSQTTISDMLKNEVYLGKTVWSKKRVAVTGSTKLAKNDREDWIIVEGTHEPIVSEELFAKANEMAFSKEKRPYKPKKKSHAILMCPSCGRRLDLTGSGKSYRCPQAHMTGLPECSNSKMDKVELEETVLACARNMVRFISDNLEKKKKVWLETSIQEEKLSTLASEKKRLSSRKMKLYSDYRMGSLTKDQYISELEITTKRIAEIDQCIPEIENEIEEARKKIEEAGAKQAELNDIAALQSFDKNVLYKIIDKVYVYGGGRIEIIWKMDDIFFVGDKSKVIDVNEKKDE

SEQ ID NO: 10882 - DNA, 50 bp, Enterococcus faecium
  source 1..50: mol_type = genomic DNA
tttagtcttatattgacaaaagcagatgctgatggtaaaataagtctaaa

SEQ ID NO: 10883 - DNA, 40 bp, Enterococcus faecium
  source 1..40: mol_type = genomic DNA
cactggaatgcgatttgctgaacttctaggattaacatgg

SEQ ID NO: 10884 - DNA, 50 bp, Enterococcus faecium
  source 1..50: mol_type = genomic DNA
tttagtcttatattgacaaaagcacctgctgatggtaaaataagtctaaa

SEQ ID NO: 10885 - DNA, 40 bp, Enterococcus faecium
  source 1..40: mol_type = genomic DNA
cactaaaatgctatttgctccatttctcggattattttga

SEQ ID NO: 10886 - protein, 524 aa, Enterococcus faecium
MPVTECIAVYIRLSSEDNDVDGSIKAESNSVSAQRMLINEFIKKQDEFTNCPVVEYVDDGYSGTNFNRPGFQRMMEDAKAGRIKSIVIKDFSRFGRDYLEVGNYLEKILPVLGIRIISINDGFDSINSSGFTGGMSVALKNMLNAMYSRDLSRKVRSAMKTHAKNGEYMPAFPKYGYIKDPEDKHHLVIDPEAAETVKLIFTMAADGKTKGQIAKYLNETHVLTCREYMCRKGIKMHRENEKEKKLWSVTTISDMLKNEVYLGKIIWNKKRVARTGSNKLVSNDKEEWIVVENAHEPIISDELFRKANEKAFTNQKRVLTKRGVACPIFFCPTCGRRLGFTSRETGYRCMQAHISGLSGCAESKMDRKEAEETVLDAARNMAQLISENLEKKKSEWHKTILKEENIATLVSEKKRLSSRKMKLYSDYRSEVLDKEGYMEELEKTTSRISEITLQIAELENEIAVAKKKCDEATEKEMEVNEIAALQDFDKIQLSKIIEKVFIYEPGRMEINWKMDDIFYKEEKA

SEQ ID NO: 10887 - DNA, 50 bp, Enterococcus faecium
  source 1..50: mol_type = genomic DNA
tttagacttatattgacaaaagcagatgatgatgataaaataagactaaa

SEQ ID NO: 10888 - DNA, 40 bp, Enterococcus faecium; identical to SEQ ID NO: 10883
  source 1..40: mol_type = genomic DNA

SEQ ID NO: 10889 - DNA, 50 bp, Enterococcus faecium
  source 1..50: mol_type = genomic DNA
tttagacttatattgacaaaagcacctgatgatgataaaataagactaaa

SEQ ID NO: 10890 - DNA, 40 bp, Enterococcus faecium; identical to SEQ ID NO: 10885
  source 1..40: mol_type = genomic DNA

SEQ ID NO: 10891 - protein, 542 aa, Flavobacterium johnsoniae
MKLGIYCRISRIKDGNDLSIKDQQQKGIEKAKELKLPYDIYIDEGLSGASEKIEDRPEFERFIGDVTNGMLTHVFAYDQSRFERNPQIRFVINDLFKKHKIIYITQLDGIVDLHDPQQEFFGDLLSVINKYHVTTTKLKVKSALKVRVKEGKSRGLRPYGYTADSSGLLIIKEDEAEIVKRIYALTIEGHGARAISTIFNDEKIPTRMNLVEKGTMKMTNKYTGITIYKDKKQILWSPNTIVGIIKNTLYKGERNYSGEVYDAMPLFTKEYWEKANDSLSKKKSYISNSPVHQFLLKGLMRCGKCGRNYYGIRKLNKHDNHYVCSSTRLTGGKCGNRRVNIDKIETILWDNLFASGLIVERLSKDFFDNNTQTKNEILKREIKEISNQNTTLSTEKEKAINLVIKGLIQESDIQKILFNLDKSISDNTIKINELSNKISLNENSVSVMAYIKKEFNAFLNISSFEAKRKIVNDIIENILVNFDEEKGEFLFKIDYKININQDVLNVNMKDKLTFDATTPHERMMKGVVNNIINGPHTSKSNL

SEQ ID NO: 10892 - DNA, 50 bp, Flavobacterium johnsoniae
  source 1..50: mol_type = genomic DNA
gtccccacacatctaaatctaaccttagtcaaattattttgtatgggggt

SEQ ID NO: 10893 - DNA, 40 bp, Flavobacterium johnsoniae
  source 1..40: mol_type = genomic DNA
tgctccaacaaatgcagcatttgataaattaccagcagga

SEQ ID NO: 10894 - DNA, 50 bp, Flavobacterium johnsoniae
  source 1..50: mol_type = genomic DNA
gtccccacacatctaaatctaacctaagtcaaattattttgtatgggggt

SEQ ID NO: 10895 - DNA, 40 bp, Flavobacterium johnsoniae
  source 1..40: mol_type = genomic DNA
tatatcaacaaatgcagaatatgataaattatcggccaga

SEQ ID NO: 10896 - protein, 587 aa, Faecalibacterium prausnitzii
MAKTADTIAIYSRKSRYTGKGESIGNQIDLCREYIRTHYGDAAAEHTVVFEDEGFSGGNLNRPDFKKMMTAAKDRKFKAIVVYRLDRISRNISDFSSLIEELGRLGIDFVSIRESFDTSSPMGRAMMYIASVFSQLERETIAERIRDNMHELAKTGRWLGGTTPTGYASESVKSITVDGKTKKACKLKLLPDEAEIIYKIFDLYEQYDSLTMTETELLRQGIKTKTGRSFTRFSIKSILQNPVYLIADKDAYQYFVDNEAELFAPESDFDGVRGVLAYNRSDQEKGRATVYNPISEWIVSVGEHPGIISSNRWIRVQESLERNKSKSYHKSRGNEALLTGLLWCSCGSRMYPKVTGRKTADGQVVFPYMCKLKERSRRELCNVRNANGNLLDAAICEQVKHLADHSSDFMKQLEKAKSAHAGNRSEFETKLSTLRKEQAETQRKINALIDSLADFSDSTAAVHLKKRIEELNAQDATLSSRIRELESLTDSGVLGGIEFDVMRQLLTVFHDNIDDMTVTQKRAAIRTVVRKVVWDGKVAHVVLFGSPEDEIDWTTFPVDPEEDDNDPEGGGDGSDSQSGVRSGEDSI

SEQ ID NO: 10897 - DNA, 50 bp, Faecalibacterium prausnitzii
  source 1..50: mol_type = genomic DNA
gcgttcgctcgggtgaggatagcatttgctatcctctccccagcgcactt

SEQ ID NO: 10898 - DNA, 40 bp, Faecalibacterium prausnitzii
  source 1..40: mol_type = genomic DNA
aaaatgcatccgcagctcattctcaatgcatctgctggca

SEQ ID NO: 10899 - DNA, 50 bp, Faecalibacterium prausnitzii
  source 1..50: mol_type = genomic DNA
gcgttcgctcgggtgaggatagcacatgctatcctctccccagcgcactt

SEQ ID NO: 10900 - DNA, 40 bp, Faecalibacterium prausnitzii
  source 1..40: mol_type = genomic DNA
aaaatgcatcaccaacacacaaccaattgatgtgctggca

SEQ ID NO: 10901 - protein, 668 aa, Mogibacterium pumilum
MKKEYNTNIVGRLDRQEEKMSIQANRKTALYCRLSRDDELQGESNSITNQKKILSQFAKQNGFFQCEFFIDDGYSGTNFDRPEFQNMITRVANGEIGTVIVKDLSRFGRNHLHVGIYTTEFFPKYNVRFIAINDNVDTFTTDMETDISIPIKNIINEIYAVDTSRKIKAVYRAKGLEGKHTGSHAIYGYKKDPDNKDKWIIDEEAAKVVKRIYSLVVSGLGPYQIADLLYKEKVYSPSYYMAMNGYGNRINKEFDTPYRWWGTSISCIVRREEYLGHTVNFKTIKPSFKDKRRYTNKKENRAIFENTHEAIVDKETWDIANSLLNTTRRQSREGTVNPLTGKLFCGDCGEKLYNSRGINYKDTGHYKKDVRYDNYICSTYQKHRNECSAHYIRTEVVRELILEALKDISKYIENNEEEFKNIVISARLEEREKSQKENIKKLKADKNRLAVIDRLFVKLYEDNASGRINDETFNKIAVQYTEEQKTLNTEIVELEEVTEKLQSVSDNTEQFIKIIKSFTDFSILTTSMINQLIDKIVIYQKQKLKRYKFTQRIDIYFNFIGKFEIGKDDEIKEDTYIEKTEDKKYIHKDSRFLPITEYLKGQDREIELDFSKVEELIGRKLCKSARKYPSYWYASEDRPMGNSIYNAGYDIVKVDVKKETIRLINYDK

SEQ ID NO: 10902 - DNA, 50 bp, Mogibacterium pumilum; identical to SEQ ID NO: 1827
  source 1..50: mol_type = genomic DNA

SEQ ID NO: 10903 - DNA, 40 bp, Mogibacterium pumilum
  source 1..40: mol_type = genomic DNA
gcaaaagaacaatatgcacgatacagatacctttgaattt

SEQ ID NO: 10904 - DNA, 50 bp, Mogibacterium pumilum
  source 1..50: mol_type = genomic DNA
aaactttgttgacaaatatcaacctatgttgtattctataagagaagtta

SEQ ID NO: 10905 - DNA, 40 bp, Mogibacterium pumilum
  source 1..40: mol_type = genomic DNA
tcaaaggtctaatatgaagtaaacagatacttttgaattt

SEQ ID NO: 10906 - protein, 604 aa, Erysipelotrichaceae bacterium I46
MMKKQKQNNEDNRSVAIYARKSRITNKGDSIGVQFKQCAEYAKRELQLYDDYNFMEYEDKGLSGYYSDRPDFQRMLHDIEMGKIRAIVCYKLDRIGRKTSDLLRLLDFLEKHKVDLLICSNNINTASGVSKIFIQIFAVVAEFERDTLTERITDNMMELAKDGRWLGGNTPTGFTVKRVKTGSGKNKSAYSYLESIPEEKAMIQKLYAVFSETRSIKKTADWMNELGYRTKIGSKFNTSTTRLLLKNPIYCVADEIAYNYFYENGGGVCAELSEFDGQHGLSAYNKTDQEKFEDADSTFISPKFVQLMSAKPVSEWIISVGRHEGFIPSQQWIDTQNMLDSIAEKYNRPHRKTNALLAGLVYCPHCGKRLRVVSESNRWTNGKPRFKYVCPGYRLSECTFRAVDGVLLDEFVVKQLSNLSDEDSEYFVKLLNQKASDIFKSSQNEQELTELRKKKAQLETAISNQVKNLREADDNLKRFIQDDVKGLTDELSETEKLLQKLEDSRQSQMYAVRDIEEIKERLLSFEKYAKDAQPDVLVTLIQSFVERIYIVDENDERCCHIFIKGCTKEDYDEFFRATGYISGTRETGTITSKLSLCDSDECCQ

SEQ ID NO: 10907 - DNA, 50 bp, Erysipelotrichaceae bacterium I46
  source 1..50: mol_type = genomic DNA
tgtgtgattcagatgagtgttgccaatacgacactattctcaatcacaca

SEQ ID NO: 10908 - DNA, 40 bp, Erysipelotrichaceae bacterium I46
  source 1..40: mol_type = genomic DNA
cctgggaaatctgattgataatgctatagaggctcaaaaa

SEQ ID NO: 10909 - DNA, 50 bp, Erysipelotrichaceae bacterium I46
  source 1..50: mol_type = genomic DNA
tgtgtgattcagatgagtgttgccgatacgacactattctcaatcacaca

SEQ ID NO: 10910 - DNA, 40 bp, Erysipelotrichaceae bacterium I46
  source 1..40: mol_type = genomic DNA
ccaggaaaatctgagataagaggctaaagaggctcacaaa

SEQ ID NO: 10911 - protein, 604 aa, Clostridium innocuum
MMKKQKQNNEDNRSVAIYARKSRITNKGDSIGVQFKQCAEYAKRELQLYDDYNFMEYEDKGLSGYYSDRPDFQRMLHDVEMGKIRAIVCYKLDRIGRKTSDLLRLLDFLEKHKVDLLICSNNINTASGVSKIFIQIFAVVAEFERDTLTERITDNMMELAKDGRWLGGNTPTGFTVKRVKTGSGKNKSAYSYLESIPEEKAMIQKLYAVFSETRSIKKTADWMNELGYRTKIGSKFNTSTTRLLLKNPVYCVADEIAYNYFYENGGGVCAELSEFDGQHGLSAYNKTDQEKFEDADSTFISPKFVQLMSAKPVSEWIISVGRHEGFIPSQQWIDTQNMLDSIAEKYNRPHRKTNALLAGLVYCPHCGKRLRVVSESNRWTNGKPRFKYVCPGYRLSECTFRAVDGVLLDEFVVKQLSNLSDEDSEYFVKLLNQKASDIFKSSQNEQELTELRKKKAQLETAISNQVKNLREADDNLKRFIQDDVKGLTDELSETEKLLQKLEDSRQSQMYAVRDIEEIKERLLSFEKYAKDAQPDVLVTLIQSFVERIYIVDENDERCCHIFIKGCTKEDYDEFFRATGYISGTRETGTITSKLSLCDSDECCQ

SEQ ID NO: 10912 - DNA, 50 bp, Clostridium innocuum
  source 1..50: mol_type = genomic DNA
tgtgtgattcagatgagtgttgccaaaccgacactattctcaatcacaca

SEQ ID NO: 10913 - DNA, 40 bp, Clostridium innocuum; identical to SEQ ID NO: 10908
  source 1..40: mol_type = genomic DNA

SEQ ID NO: 10914 - DNA, 50 bp, Clostridium innocuum
  source 1..50: mol_type = genomic DNA
tgtgtgattcagatgagtgttgccgaaccgacactattctcaatcacaca

SEQ ID NO: 10915 - DNA, 40 bp, Clostridium innocuum; identical to SEQ ID NO: 10910
  source 1..40: mol_type = genomic DNA

SEQ ID NO: 10916 - protein, 604 aa, Clostridium innocuum
MMKKQKQNNEDNRSVAIYARKSRITNKGDSIGVQFKQCAEYAKRELQLYDDYNFMEYEDKGLSGYYSDRPDFQRMLHDIEMGKIRAIVCYKLDRIGRKTSDLLRLLDFLEKHKVDLLICSNNINTASGVSKIFIQIFAVVAEFERDTLTERITDNMMELAKDGRWLGGNTPTGFTVKRVKTGSGKNKSAYSYLESIPEEKAMIQKLYAVFSETRSIKKTADWMNELGYRTKIGSKFNTSTTRLLLKNPVYCVADEIAYNYFYENGGGVCAELSEFDGQHGLSAYNKTDQEKFEDADSTFISPKFVQLMSAKPVSEWIISVGRHEGFIPSQQWIDTQNMLDSIAEKYNRPHRKTNALLAGLVYCPHCGKRLRVVSESNRWTNGKPRFKYVCPGYRLSECTFRAVDGVLLDEFVVKQLSNLSDEDSEYFVKLLNQKASDIFKSSQNEQELTELRKKKAQLETAISNQVKNLREADDNLKRFIQDDVKGLTDELSETEKLLQKLEDSRQSQMYAVRDIEEIKERLLSFEKYAKDAQPDVLVTLIQSFVERIYIVDENDERCCHIFIKGCTKEDYDEFFRATGYISGTRETGTITSKLSLCDSDECCQ

SEQ ID NO: 10917 - DNA, 50 bp, Clostridium innocuum; identical to SEQ ID NO: 10907
  source 1..50: mol_type = genomic DNA

SEQ ID NO: 10918 - DNA, 40 bp, Clostridium innocuum; identical to SEQ ID NO: 10908
  source 1..40: mol_type = genomic DNA

SEQ ID NO: 10919 - DNA, 50 bp, Clostridium innocuum; identical to SEQ ID NO: 10909
  source 1..50: mol_type = genomic DNA

SEQ ID NO: 10920 - DNA, 40 bp, Clostridium innocuum; identical to SEQ ID NO: 10910
  source 1..40: mol_type = genomic DNA

SEQ ID NO: 10921 - protein, 604 aa, Clostridium innocuum
MMKKQKQNNEDNRSVAIYARKSRITNKGDSIGVQFKQCAEYAKRELQLYDDYNFMEYEDKGLSGYYSDRPDFQRMLHDIEMGKIRAIVCYKLDRIGRKTSDLLRLLDFLEKHKVDLLICSNNINTASGVSKIFIQIFAVVAEFERDTLTERITDNMMELAKDGRWLGGNTPTGFTVKRVKNGSGKNKSAYSYLESIPEEKAMIQKLYAVFSETRSIKKTADWMNELGYRTKIGSKFNTSTTRLLLKNPVYCVADEIAYNYFYENGGGVCAELSEFDGQHGLSAYNKTDQEKFEDADSTFISPKFVQLMSAKPVSEWIISVGRHEGFIPSQQWIDTQNMLDSIAEKYNRPHRKTNALLAGLVYCPHCGKRLRVVSESNRWTNGKPRFKYVCPGYRLSECTFRAVDGVLLDEFVVKQLSNLSDEDSEYFVKLLNQKASDIFKSSQNEQELTELRKKKAQLETAISNQVKNLREADDNLKRFIQDDVKGLTDELSETEKLLQKLEDSRQSQMYAVRDIEEIKERLLSFEKYAKDAQPDVLVTLIQSFVERIYIVDENDERCCHIFIKGCTKEDYDEFFRATGYISGTRETGTITSKLSLCDSDECCQ

SEQ ID NO: 10922 - DNA, 50 bp, Clostridium innocuum; identical to SEQ ID NO: 10907
  source 1..50: mol_type = genomic DNA

SEQ ID NO: 10923 - DNA, 40 bp, Clostridium innocuum; identical to SEQ ID NO: 10908
  source 1..40: mol_type = genomic DNA

SEQ ID NO: 10924 - DNA, 50 bp, Clostridium innocuum; identical to SEQ ID NO: 10909
  source 1..50: mol_type = genomic DNA

SEQ ID NO: 10925 - DNA, 40 bp, Clostridium innocuum; identical to SEQ ID NO: 10910
  source 1..40: mol_type = genomic DNA

SEQ ID NO: 10926 - protein, 501 aa, Ruminococcus bromii
MIIREDAIYGRQSVDRKDSISIESQIEFCKYELRGGNFRKYTDKGYSGKNTDRPKFQEMMADIRRGLIKRVVVYKLDRISRSILDFATMMETFQEYNVEFVSSTEKFDTSTPMGRAMLNICIVFAQLERETIQKRVTDAYYSRCQHGFHMSGAAPYGFQLEPTTIEGIRTKMMKPDPETADIAKLMFEMYSQPGTSFGDIARYFSDEGILIYGKEMKRGFISQLLRNPIYAQADLDMYEFFKSQGTVVVNEATDFAGTNGCYLYQGRDVQERKNKHLKDQILVLAPSEGLVSSDTWLRCRKKLMANKTFQGGRKAKNTWLAGKVKCGRCGYALMSVGNPTGVQYLRCSKRADSKSCDGCGTLRTREFERFLYGEMVKKLSEFQTLTAKRETVNPKLTALNMELTRVEDEIEKLLNTLTGANAVLLSYANSKIEELDTHRQALTKEIAALSAETMSPEQIERLSVYLNQWKEIDFEDRRQVADGLISQIRATDEHVSIEWKI

SEQ ID NO: 10927 - DNA, 50 bp, Ruminococcus bromii
  source 1..50: mol_type = genomic DNA
ctgtgtgcccttgtcaagcgatgtaaacatcgcttgacaagggcacacag

SEQ ID NO: 10928 - DNA, 40 bp, Ruminococcus bromii
  source 1..40: mol_type = genomic DNA
ttcctttattcatcattgtaatgttaagcactacatatga

SEQ ID NO: 10929 - DNA, 50 bp, Ruminococcus bromii
  source 1..50: mol_type = genomic DNA
ctgtgtgcccttgtcaagcgatgttcacatcgcttgacaagggcacacag

SEQ ID NO: 10930 - DNA, 40 bp, Ruminococcus bromii
  source 1..40: mol_type = genomic DNA
tacttttattcataattattcagtaaagaactacaaatgt

SEQ ID NO: 10931 - protein, 510 aa, Pantoea ananatis
MIDKTYKTHKVRVAQYLRMSTNHQEFSLDNQAQFIKKYADGHNMEILHTYDDAGKSGVSTTGRHDFNKLVNDVLTKEINIDAVLVYDVSRFGRFKDPQEGIYYKYLLKMNNVDVIYCAENLPENSETETFILSSLMYAAGAYSKNLSIKVFAGHVNLVKRGYYQGGTPGYGLKRKLLDNNNKPKMLLAHGERKSLQTDRIVLVPGTKKEIELIKKIFNMFIFDGLNEYLIASRLNQEGYRFSDKTEWTRGRIHSVLINSRYTGRYIYNRTSQKLKTKRIKNPEEDWVEYNSFFKPIISEEKFRLAKEIIDNRSIKMSDEKILDCLRKILSKHGKISGFIIDEENSSPSSSVIANRFGGLLNAYKLIDYTPERDYQYLEINSYLRKKHSDIVNKIQNEIISSEVKTLENKLISVNKALSFSIVLSRCKKTGLNKHRWVVRLDRSLNPEISIIARMNSLNTEPVDYYILPSIEFLEHELKIKDNNTLLFEMYRFDDIKPFFDMLSTDDKDVL

SEQ ID NO: 10932 - DNA, 50 bp, Pantoea ananatis
  source 1..50: mol_type = genomic DNA
agataaggacttttctactcatacgccaatgatgcagcagtacctataat

SEQ ID NO: 10933 - DNA, 40 bp, Pantoea ananatis
  source 1..40: mol_type = genomic DNA
tggacttgagtacgcacacgccaatgatgcagcaatattt

SEQ ID NO: 10934 - DNA, 50 bp, Pantoea ananatis
  source 1..50: mol_type = genomic DNA
agataaggacttttctactcatacgtcaatgatgcagcagtacctataat

SEQ ID NO: 10935 - DNA, 40 bp, Pantoea ananatis
  source 1..40: mol_type = genomic DNA
tcgtcttgagcaagcaaaggtgaatgatgcagctataatt

SEQ ID NO: 10936 - protein, 599 aa, Klebsiella quasipneumoniae; identical to SEQ ID NO: 2026

SEQ ID NO: 10937 - DNA, 50 bp, Klebsiella quasipneumoniae; identical to SEQ ID NO: 2027
  source 1..50: mol_type = genomic DNA

SEQ ID NO: 10938 - DNA, 40 bp, Klebsiella quasipneumoniae
  source 1..40: mol_type = genomic DNA
ctcccgcccctgctccagccaggtgtaccaggtaacgccg

SEQ ID NO: 10939 - DNA, 50 bp, Klebsiella quasipneumoniae
  source 1..50: mol_type = genomic DNA
ttgggttcctatttcttttacatctgggtgtagttaatataggtgcatct

SEQ ID NO: 10940 - DNA, 40 bp, Klebsiella quasipneumoniae
  source 1..40: mol_type = genomic DNA
ctgccgcccctgctccagctggctgcaccagttcagccac

SEQ ID NO: 10941 - protein, 599 aa, Klebsiella pneumoniae; identical to SEQ ID NO: 2021

SEQ ID NO: 10942 - DNA, 50 bp, Klebsiella pneumoniae; identical to SEQ ID NO: 2022
  source 1..50: mol_type = genomic DNA

SEQ ID NO: 10943 - DNA, 40 bp, Klebsiella pneumoniae; identical to SEQ ID NO: 10938
  source 1..40: mol_type = genomic DNA

SEQ ID NO: 10944 - DNA, 50 bp, Klebsiella pneumoniae
  source 1..50: mol_type = genomic DNA
ttgggttcctatttattttacagctgggtgtagttaatataagtgcacct

SEQ ID NO: 10945 - DNA, 40 bp, Klebsiella pneumoniae; identical to SEQ ID NO: 10940
  source 1..40: mol_type = genomic DNA

SEQ ID NO: 10946 - protein, 599 aa, Klebsiella pneumoniae
MKKKLYSYIRWSSAQQTAGTSLERQTAAAREYAKAHDLEFVEILDAGVSAFRGKNATDGALAEFIAAVENGAIPSDSWLYVENLDRLSRATVRNALKLLLHITDLGVTVVTGMDGKIYSAETMDKDFTDLMISLLLFSRANEESKTKSDRVKEASMKALARVQAGLPATIKGGGADPFWIQRGDRETSPTQHPTHWLAIKKIVELSLQGVGCNRIRQILNDDPTLYPPPRQKDTPRRRALLDAGLAPTGWNIHRIEDARRQPSLYGLKTITLSGHTYSLEGYYPAVCSEEEFHLIQNISASNRIKSGDIRNTITLLSGLNLCKCGSCGGWVTTFRKNGKLTYRCDAGHRKIHHCPTRWSLNARIIESATVRALIAGVAHNIIEDSQDLESVAGEIDNRRAEVADIDRKRERLAARIAEEDDDLLMQQLRQYNARKRDLLTEIGALTQREALRSEGQNVAERLAEAQRLLTADMVNDIFTSDRLAVRELIRKSMRQVTIWKRQDKSLKVECEFISGWRYTFEGVMKEGKKSFIEYRTSPDGINMMEIYDKLNAITAKAFKHVLDVDDNVMPPTLSHVQAYHDMSVRLGHSPLTGSQFFWR

SEQ ID NO: 10947 - DNA, 50 bp, Klebsiella pneumoniae; identical to SEQ ID NO: 2022
  source 1..50: mol_type = genomic DNA

SEQ ID NO: 10948 - DNA, 40 bp, Klebsiella pneumoniae; identical to SEQ ID NO: 10938
  source 1..40: mol_type = genomic DNA

SEQ ID NO: 10949 - DNA, 50 bp, Klebsiella pneumoniae; identical to SEQ ID NO: 10944
  source 1..50: mol_type = genomic DNA

SEQ ID NO: 10950 - DNA, 40 bp, Klebsiella pneumoniae; identical to SEQ ID NO: 10940
  source 1..40: mol_type = genomic DNA

SEQ ID NO: 10951 - protein, 599 aa, Klebsiella pneumoniae
MKKKLYSYIRWSSAQQTAGTSLERQTAAARDYAKAHDLEFVEILDAGVSAFRGKNATDGALAEFIAAVENGAIPSDSWLYVENLDRLSRATVRNALKLLLHITDLGVTVVTGMDGKIYSAETMDKDFTDLMISLLLFSRANEESKTKSDRVKEASMKALARIQAGLPATIKGGGADPFWIQRGGRETSPTQHPAHWLAIKKIVELSLQGIGCNRIRQVLNADPTLYPPPRQKDTPQRRALIDAGLAPIGWNIHRIEDARRQPSLYGLKTIRLSGHTYNLEGYYPAVCSEEEFHLIQNISASNRIKSGDIRNTITLLSGLNLCKCGSCGGWVTTFRKNGKLTYRCDAGHRKIHHCPTTWSLNALIIESATVRALIAGVAHNIIEDSQDLESVAGEIDNRRAEVLEIDRKRERLAIRIAEEDDDLLMQQLRQYNARKRDLLTEIGALTQREALRSEGQNVAERLAEAQRLLTADMVNDIFTSDRLAVRELIRKSMRQVTIWKRQDKSLKVECEFISGWRYTFEGVMNGGQKSFIEYRTSPNGINMVEIYDKLNAITAKAFKHVLGVDDNVMLPTLSHIQVYHDMAVRLGHSPLTGSQFFWR

SEQ ID NO: 10952 - DNA, 50 bp, Klebsiella pneumoniae
  source 1..50: mol_type = genomic DNA
ttgggttcctatttcctttacagccaggtgtagttaatataggtgcactt

SEQ ID NO: 10953 - DNA, 40 bp, Klebsiella pneumoniae; identical to SEQ ID NO: 10938
  source 1..40: mol_type = genomic DNA

SEQ ID NO: 10954 - DNA, 50 bp, Klebsiella pneumoniae
  source 1..50: mol_type = genomic DNA
ttgggttcctatttcctttacagctgggtgtagttaatataggtgcactt

SEQ ID NO: 10955 - DNA, 40 bp, Klebsiella pneumoniae; identical to SEQ ID NO: 10940
  source 1..40: mol_type = genomic DNA

SEQ ID NO: 10956 - protein, 599 aa, Klebsiella quasipneumoniae
MKKKLYSYIRWSSAQQTAGTSLERQTAAAREYAKAHDLEFVEILDAGVSAFRGKNATDGALAEFIAAVENGAIPPDSWLYVENLDRLSRATVRNALKLLLHITDLGVTVVTGMDGKIYSAETMDKDFTDLMISLLLFSRANEESKTKSDRVKEASMKALARVQAGLPATIKGGGADPFWIQRGGRETSPTQHPTHWLAIKKIVELSLQGIGCNRIRQVLNDDPTLYPPPRQKDTPRRRALLDAGLAPTGWNIHRIEDARRQPSLYGLKTITLSGHTYSLEGYYPAVCSEEEFHLIQNISASNRIKSGDIRNTITLLSGLNLCKCGSCGGWVTTFRKNGKLTYRCDAGHRKIHHCPTKWSLNARIIESATVRALIAGVAHNIIEDSQDLESVAGEIDNRRAEVSEIDRKRERLAVRIAEEDDDLLMQQLRQYNARKRDLLAEIGTLTQREALRSEGQNVAERLAEAQRLLTAEMVADIFTSDRLAVRELIRKSMRQVTIWKRQDKSLKVECEFISGWRYTFEGVMNGGQKSFIEYRTSPDGINMMEIYDKLNAITAKAFKHALGVDDNVMLPTLSHVQVYHDMAVRLGHSPLTGSQFFWR

SEQ ID NO: 10957 - DNA, 50 bp, Klebsiella quasipneumoniae; identical to SEQ ID NO: 2027
  source 1..50: mol_type = genomic DNA

SEQ ID NO: 10958 - DNA, 40 bp, Klebsiella quasipneumoniae; identical to SEQ ID NO: 10938
  source 1..40: mol_type = genomic DNA

SEQ ID NO: 10959 - DNA, 50 bp, Klebsiella quasipneumoniae; identical to SEQ ID NO: 10939
  source 1..50: mol_type = genomic DNA

SEQ ID NO: 10960 - DNA, 40 bp, Klebsiella quasipneumoniae; identical to SEQ ID NO: 10940
  source 1..40: mol_type = genomic DNA

SEQ ID NO: 10961 - protein, 599 aa, Klebsiella quasipneumoniae
MKKKLYSYIRWSSAQQTAGTSLERQTAAAREYAKAHDLEFVEILDAGVSAFRGKNATDGALAEFIAAVENGAIPPDSWLYVENLDRLSRATVRNALKLLLHITDLGVTVVTGMDGKIYSAETMDKDFTDLMISLLLFSRANEESKTKSDRVKEASMKALARVQAGLPATIKGGGADPFWIQRGGRETSPTQHPTHWLAIKKIVELSLQGIGCNRIRQVLNDDPTLYPPPRQKDTPRRRALLDAGLAPTGWNIHRIEDARRQPSLYGLKTITLSGHTYSLEGYYPAVCSEEEFHLIQNISASNRIKSGDIRNTITLLSGLNLCKCGSCGGWVTTFRKNGKLTYRCDAGHRKIHHCPTTWSLNARIIESATVRALIAGVAHNIIEDSQDPESVAGEIDNRRAEVSEIDRKRERLVVRIAEEDDDLLMQQLRQYNARKRDLLAEIGTLTQREALRSEGQNVAERLAEAQRLLTAEMVADIFNSDRLAVRELIRKSMRQVTIWKRQDKSLKVECEFISGWRYTFEGVMNGGQKSFIEYRTSPDGINMMEIYDKLNAITAKAFKHALGVDDNVMLPTLSHVQVYHDMAVRLGHSPLTGSQFFWR

SEQ ID NO: 10962 - DNA, 50 bp, Klebsiella quasipneumoniae; identical to SEQ ID NO: 2027
  source 1..50: mol_type = genomic DNA

SEQ ID NO: 10963 - DNA, 40 bp, Klebsiella quasipneumoniae; identical to SEQ ID NO: 10938
  source 1..40: mol_type = genomic DNA

SEQ ID NO: 10964 - DNA, 50 bp, Klebsiella quasipneumoniae; identical to SEQ ID NO: 10939
  source 1..50: mol_type = genomic DNA

SEQ ID NO: 10965 - DNA, 40 bp, Klebsiella quasipneumoniae; identical to SEQ ID NO: 10940
  source 1..40: mol_type = genomic DNA

SEQ ID NO: 10966 - protein, 599 aa, Klebsiella pneumoniae; identical to SEQ ID NO: 2021

SEQ ID NO: 10967 - DNA, 50 bp, Klebsiella pneumoniae; identical to SEQ ID NO: 2022
  source 1..50: mol_type = genomic DNA

SEQ ID NO: 10968 - DNA, 40 bp, Klebsiella pneumoniae
  source 1..40: mol_type = genomic DNA
ctcccgcccctgctccagcgaggtgtaccaggtaacgccg

SEQ ID NO: 10969 - DNA, 50 bp, Klebsiella pneumoniae; identical to SEQ ID NO: 10944
  source 1..50: mol_type = genomic DNA

SEQ ID NO: 10970 - DNA, 40 bp, Klebsiella pneumoniae; identical to SEQ ID NO: 10940
  source 1..40: mol_type = genomic DNA

SEQ ID NO: 10971 - protein, 599 aa, Klebsiella pneumoniae
MKKKLYSYIRWSSAQQTAGTSLERQTAAAREYAKAHDLEFVEILDAGVSAFRGKNATDGALAEFIAAVENGAIPSDSWLYVENLDRLSRATVRNALKLLLHITDLGVTVVTGMDGKIYSAETMDKDFTDLMISLLLFSRANEESKTKSDRVKEASMKALARVQAGLPATIKGGGADPFWIQRGDRETSPTQHPTHWLAIKKIVELSLQGVGCNRIRQVLNDDPTLYPPPRQKDTPRRRALLDAGLAPTGWNIHRIEDARRQPSLYGLKTITLSGHTYSLEGYYPAVCSEEEFHLIQNISASNRIKSGDIRNTITLLSGLNLCKCGSCGGWVTTFRKNGKLTYRCDAGHRKIHHCPTTWSLNARIIESATVRALIAGVAHNIIEDSQDLESVAGEIDNRRAEVADIDRKRERLAARIAEEDDDLLMQQLRQYNARKRDLLTEIGALTQREALRSEGQNVAERLAEAQRLLTADMVNDIFTSDRLAVRELIRKSMRQVTIWKRQDKSLKVECEFISGWRYTFEGVMNGGQKSFIEYRTSPDGINMIEIYDKLNAITAKAFKHVLDVDDNVMLPTLSHVQAYHDMAVRLGHSPLTGSQFFWR

SEQ ID NO: 10972 - DNA, 50 bp, Klebsiella pneumoniae
  source 1..50: mol_type = genomic DNA
ttgggttcctatttattttacatccaggtgtagttaatataggtgcgcct

SEQ ID NO: 10973 - DNA, 40 bp, Klebsiella pneumoniae; identical to SEQ ID NO: 10938
  source 1..40: mol_type = genomic DNA

SEQ ID NO: 10974 - DNA, 50 bp, Klebsiella pneumoniae
  source 1..50: mol_type = genomic DNA
ttgggttcctatttattttacatctgggtgtagttaatataggtgcgcct

SEQ ID NO: 10975 - DNA, 40 bp, Klebsiella pneumoniae; identical to SEQ ID NO: 10940
  source 1..40: mol_type = genomic DNA

SEQ ID NO: 10976 - protein, 676 aa, Bacteroides helcogenes
MDKKVLIYCRVSTQQQTTDRQKEELLKFVEDNHWNVEEEDIFIDVISGFKKGEFRPEYAKMLERVEYGDIDIILFSEFSRLARNATELLEQIKLFIDKGINLYFDKQKLWVRDSNKDVGSLILLHVLAVMSSYEIELFVERSLSGKITKVQAGHGGGDERAYGYMHNENKQIVINPIESKIVARIFEMYVGGYSSIQISEILNAEKVPAPYIRKLNEYKKNREAKGLEVKEYKFDTDNLKWRISTINRLMHNELYKGNRRITFYKPDPTNPLPLSERQDREIVYEYSEHVESLRIVSDELFQQAQDKLSKAHYNKNNAVRHENLLKHLMVCGECGANFSVGKSNETSKNYISGGRTYKCYGRVNRKDKPRTCTNGAELRQWKLDGLVLQLSIQMFAEINIQQSNILKIENLGKEIEELVQIKSSKNTELVEAENLYKKTLKRLIAIEDDEVAKNLISDAKHKYDETKNVLNKTMDKLSREITTKRITIDNLRRLNANPLLINKMDEIRKNRDLVKTMVDEYIDKITIFRLHELWLLVVVSYKGGEEMWGTIKCARYKKEEMFYDELHCHYGVEFQGWLLNNTEHCFSYDKSTRIITYHGGSKIYVEFKSGEYDYDTFNQMIQETGWMGCFPFYAYEDSDKDLSVPFNEKFRKSLQENRVDWKARNDKVLERLLSES

SEQ ID NO: 10977 - DNA, 50 bp, Bacteroides helcogenes
  source 1..50: mol_type = genomic DNA
aaggatgtgttcatttcggcagtatgcataggtgcgattgacacatcctg

SEQ ID NO: 10978 - DNA, 40 bp, Bacteroides helcogenes
  source 1..40: mol_type = genomic DNA
gatgatgtgctccgttgtatgcataggagggtactcctgc

SEQ ID NO: 10979 - DNA, 50 bp, Bacteroides helcogenes
  source 1..50: mol_type = genomic DNA
aaggatgtgttcatttcggcagtaggcataggtgcgattgacacatcctg

SEQ ID NO: 10980 - DNA, 40 bp, Bacteroides helcogenes
  source 1..40: mol_type = genomic DNA
cattatatgccaccttgtaggcattggaggggacttctgc

SEQ ID NO: 10981 - protein, 676 aa, Bacteroides uniformis
MDKKVLIYCRVSTQQQTTDRQKEELLKFAAENHWNVEEEDIFIDVISGFKKGEFRPEYVKMLERVEYGDIDIILFSEFSRLARNATELLEQIKLFIDKGINLYFDKQKLWVRDSNKDVGSIILLHVLAVMSSYEIELFVERSLSGKITKVQAGHGGGDERAYGYMHNENKQIVINPIESKIVTRIFEMYVGGYSSIQISEILNAEKVPAPYVRKLNEYKKNREAKGLEVKEYKFDTDNLKWRISTINRLMHNELYKGNRRITFYKPDPTNPLPLSERQDREIVYEYSEHVESLRIVSDELFQQAQDKLSKAHYNKNNAVRHENLLKHLMVCGECGANFSVGKSNETSKNYISGGRTYKCYGRVNRKDKPRTCTNGAELRQWKLDGLVLQLSIQMFAEINIQQTNILKIENLGKEIEELVQIKSSKNTELVEAENLYKKTLKRLIAIEDDEVAKNLISDAKHKYDETKNVLNKTMDKLSREITTKRITIDNLKRLNANPLLINKMDEIRKNRDLIKTMVDEYIDKITIFRLHELWLLVVVSYKGGEEMWGTIKCARYKKEEMFYSELHCHYGVEFQGWLLNNTEHCFSYDKSTRIITYHGGSKIYVEFKSGEYDYDTFNQMIQETGWMGCFPFYAYEDSDKNLSVPFNEEFRKSLQENRIDWKAHNDKVLERLLSKS

SEQ ID NO: 10982 - DNA, 50 bp, Bacteroides uniformis
  source 1..50: mol_type = genomic DNA
aaggatgtgttcatttcgactgtatgcataggtgcgattgacacatcctg

SEQ ID NO: 10983 - DNA, 40 bp, Bacteroides uniformis; identical to SEQ ID NO: 10978
  source 1..40: mol_type = genomic DNA

SEQ ID NO: 10984 - DNA, 50 bp, Bacteroides uniformis
  source 1..50: mol_type = genomic DNA
aaggatgtgttcatttcgactgtaggcataggtgcgattgacacatcctg

SEQ ID NO: 10985 - DNA, 40 bp, Bacteroides uniformis; identical to SEQ ID NO: 10980
  source 1..40: mol_type = genomic DNA

SEQ ID NO: 10986 - protein, 676 aa, Bacteroides uniformis
MDKKVLIYCRVSTQQQTTDRQKEELLKFAAENHWNVEEEDIFIDVISGFKKGEFRPEYVKMLERVEYGDIDIILFSEFSRLARNATELLEQIKLFIDKGINLYFDKQKLWVRDSNKDVGSIILLHVLAVMSSYEIELFVERSLSGKITKVQAGHGGGDERAYGYMHNENKQIVINPIESKIVTRIFEMYVGGYSSIQISEILNAEKVPAPYVRKLNEYKKNREAKGLEVKEYKFDTDNLKWRISTINRLMHNELYKGNRRITFYKPDPTNPLPLSERQDREIVYEYSEHVESLRIVSDELFQQAQDKLSKAHYNKNNAVRHENLLKHLMVCGECGANFSVGKSNETSKNYISGGRTYKCYGRVNRKDKPRTCTNGAELRQWKLDGLVLQLSIQMFAEINIQQTNILKIENLGKEIEELVQIKSSKNTELVEAENLYKKTLKRLIAIEDDEVAKNLISDAKHKYDETKNVLNKTMDKLSREITTKRITIDNLKRLNANPLLINKMDEIRKNRDLVKTMVDEYIDKITIFRLHELWLLVVVSYKGGEEMWGTIKCARYKKEEMFYDELHCHYGVEFQGWLLNNTEHCFSYDKSTRIITYHGGSKIYVEFKSGEYDYDTFNQMIQATGWMGCFPFYAYEDSGKDLSVPSNEDFGKSLQENRTDWKVHNDKVLERLLSKS

SEQ ID NO: 10987 - DNA, 50 bp, Bacteroides uniformis
  source 1..50: mol_type = genomic DNA
aagggtgtgttcatttcgactgtatgcataggtgcgattgacacatcctg

SEQ ID NO: 10988 - DNA, 40 bp, Bacteroides uniformis; identical to SEQ ID NO: 10978
  source 1..40: mol_type = genomic DNA

SEQ ID NO: 10989 - DNA, 50 bp, Bacteroides uniformis
  source 1..50: mol_type = genomic DNA
aagggtgtgttcatttcgactgtaggcataggtgcgattgacacatcctg

SEQ ID NO: 10990 - DNA, 40 bp, Bacteroides uniformis; identical to SEQ ID NO: 10980
  source 1..40: mol_type = genomic DNA

SEQ ID NO: 10991 - protein, 615 aa, Enterobacter cloacae
MLIQTKIRRFNMKKVFVYHRVSSDQQLDGSGIARQAELLEGYLERTGICAEMDDPAPVVLSDQGVSAFKGLNISEGELGAWMEQVRNGMWDSSILVVESIDRFSRQNPFDVMGYINALMAHNVAIHDVMANIVISRSNSKDLPFVMMNAQRAYDESKYKSDRIRKGWAKKREQAFNKGTIVTNKRPQWIEVENDKYVLNHKAAVVKEIFALYQTGMGCPTIAKQLQTKEGEQYKFNRPWTGELVHKILTNRRVTGKIFISEIIRNHDDIENPVTQKKYDMDVYPVVINEEEFELVQELLKSRRPNAGRVTVKKDGQEEVLIKSNLFSGIARCTECGGPMYHNVVRAKRTPKKGDPKIEEYRYIRCLNERDGLCENKAMTYETVERFVVEHLLSMDLNTVIKEQEFNPEIEVIRIQIDQVKDQITNYENGIERRKSAGKAVSFEMREELDDAKLELEQLLARQASLATVQVDLPVLQDVNVTELYNVNNVDIRTRYENELNKIVSNIRLKRNGNFYTIDIIYKQNELKRHVLFIENKKKEQKLISEVIIENVDGAKFYYTPSFVISVKDGEIRFQQTKEDLTIIDYSLLLNYVDAVDRCDAVGVWMRNNMSFLFTK

SEQ ID NO: 10992 - DNA, 50 bp, Enterobacter cloacae
  source 1..50: mol_type = genomic DNA
atgttgtaataagcgtcacacactcaaatgtgttatgcttatacaaacaa

SEQ ID NO: 10993 - DNA, 40 bp, Enterobacter cloacae
  source 1..40: mol_type = genomic DNA
tttttgcttgataatcatacaaataagtgccattacaaca

SEQ ID NO: 10994 - DNA, 50 bp, Enterobacter cloacae
  source 1..50: mol_type = genomic DNA
atgttgtaataagcgtcacacactgcaatgtgttatgcttatacaaacaa

SEQ ID NO: 10995 - DNA, 40 bp, Enterobacter cloacae
  source 1..40: mol_type = genomic DNA
tgtttgcttcatgataaaagcaataagctccattagagca

SEQ ID NO: 10996 - protein, 604 aa, Enterobacter cloacae
MKKVFVYHRVSSDQQLDGSGIARQAELLEGYLERTGICAEMDDPAPVVLSDQGVSAFKGLNISEGELGAWMEQVRNGMWDSSILVVESIDRFSRQNPFDVMGYINALMAHNVAIHDVMANIVISRSNSKDLPFVMMNAQRAYDESKYKSDRIRKGWAKKREQAFNKGTIVTNKRPQWIEVENDKYVLNHKAAVVKEIFALYQTGMGCPTIAKQLQTKEGEQYKFNRPWTGELVHKILTNRRVTGKIFISEIIRNHDDIENPVTQKKYDMDVYPVVINEEEFELVQELLKSRRPNAGRVTVKKDGQEEVLIKSNLFSGIARCTECGGPMYHNVVRAKRTPKKGDPKIEEYRYIRCLNERDGLCENKAMTYETVERFVVEHLLSMDLNTVIKEQEFNPEIEVIRIQIDQVKDQITNYENGIERRKSAGKAVSFEMREELDDAKLELEQLLARQASLATVQVDLPVLQDVNVTELYNVNNVDIRTRYENELNKIVSNIRLKRNGNFYTIDIIYKQNELKRHVLFIENKKKEQKLISEVIIENVDGAKFYYTPSFVISVKDGEIRFQQTKEDLTIIDYSLLLNYVDAVDRCDAVGVWMRNNMSFLFTK

SEQ ID NO: 10997 - DNA, 50 bp, Enterobacter cloacae; identical to SEQ ID NO: 10992
  source 1..50: mol_type = genomic DNA

SEQ ID NO: 10998 - DNA, 40 bp, Enterobacter cloacae; identical to SEQ ID NO: 10993
  source 1..40: mol_type = genomic DNA

SEQ ID NO: 10999 - DNA, 50 bp, Enterobacter cloacae; identical to SEQ ID NO: 10994
  source 1..50: mol_type = genomic DNA

SEQ ID NO: 11000 - DNA, 40 bp, Enterobacter cloacae; identical to SEQ ID NO: 10995
  source 1..40: mol_type = genomic DNA

SEQ ID NO: 11001 - protein, 615 aa, Enterobacter cloacae
MLIQTKIRRSPMKKVFVYHRVSSDQQLDGSGIARQAELLEGYLERTGICAEMDDPAPVVLSDQGVSAFKGLNISEGELGAWMEQVRNGMWDSSILVVESIDRFSRQNPFDVMGYINALMAHNVAIHDVMANIVISRSNSKDLPFVMMNAQRAYDESKYKSDRIRKGWAKKREQAFNKGTIITNKRPQWIEVDNDKYVLNEKAAVVKEIFALYQTGMGCPTIAKQLQRKEGEQYKFNRPWTGELVHKILTNRRVTGKIFISEIIRNHDDIENPVTQKKYDMDVYPVVINEEEFELVQELLKSRRSNAGRITVKKDGQEEVLIKSNLFSGIARCTECGGPMYHNVVRAKRTPKKGDPKIEEYRYIRCLNERDGLCENKAMTYETVERFVVEHLLGMDLSTVMKEQEFNPEIEVLRIQIDQVKDQIANYENGIERRKSTGKPISFEMREELDDAKSELERLLARQASLATVQVDVPVLQDVNVTELYDVNNVDIRTRYENELNKIVSNIRLKRNGTYYTIDINYKQNELKRHVLFVENKKKEQTLISEVIIEDVDGGKFYYTPSFMIRLKDGEIRFQQTNEDLSIVDYSLLLNYVDAIDRNDAVGVWMRNQFNFLTSN

SEQ ID NO: 11002 - DNA, 50 bp, Enterobacter cloacae
  source 1..50: mol_type = genomic DNA
atgttgtaataagcgatacacactcaagtgtgttatgcttatacaaacaa

SEQ ID NO: 11003 - DNA, 40 bp, Enterobacter cloacae; identical to SEQ ID NO: 10993
  source 1..40: mol_type = genomic DNA

SEQ ID NO: 11004 - DNA, 50 bp, Enterobacter cloacae
  source 1..50: mol_type = genomic DNA
atgttgtaataagcgatacacactgcagtgtgttatgcttatacaaacaa

SEQ ID NO: 11005 - DNA, 40 bp, Enterobacter cloacae; identical to SEQ ID NO: 10995
  source 1..40: mol_type = genomic DNA

SEQ ID NO: 11006 - protein, 615 aa, Enterobacter cloacae
MLIQTKIRRSPMKKVFVYHRVSSDQQLDGSGIARQAELLEGYLERTGICAEMDDPDPVVLSDQGVSAFKGLNISEGELGAWMEQVRNGMWDSSILVVESIDRFSRQNPFDVMGYINALMAHNVAIHDVMANIVISRSNSKDLPFVMMNAQRAYDESKYKSDRIRKGWAKKREQAFNKGTIVTNKRPQWIEVENDKYVVNEKAAVVKEIFALYQTGMGCPTIAKQLQRKEGEQYKFNRPWTGELVHKILTNRRVTGKIFISEIIRNHDDIENPVTQKKYDMDVYPVVINEEEFELVQELLKSRRPNAGRITVKKDGQEEVLIKSNLFSGIARCTECGGPMYHNVVRAKRTPKKGDPKIEEYRYIRCLNERDGLCENKAMTYETVERFVVEHLLGMDLSTVMKEQEFNPEIEVLRIQIDQVKDQITNYENGIERRKSAGKLISFDMREELDDAKSELERLLARQASLATVQVDVPVLQDVNVTELYDVNNVDIRTRYESELNKIVSNIRLKRNGTSYTIDINYKQNELKRHVLFVENKKKEQTLISEVIIEDVDGAKFYYTPSFMIMLKDSDIRFQQTNEDLSIIDYSLLLNYIDAVDRNDAVGVWMRDQFKFLTSN

SEQ ID NO: 11007 - DNA, 50 bp, Enterobacter cloacae; identical to SEQ ID NO: 11002
  source 1..50: mol_type = genomic DNA

SEQ ID NO: 11008 - DNA, 40 bp, Enterobacter cloacae; identical to SEQ ID NO: 10993
  source 1..40: mol_type = genomic DNA

SEQ ID NO: 11009 - DNA, 50 bp, Enterobacter cloacae; identical to SEQ ID NO: 11004
  source 1..50: mol_type = genomic DNA

SEQ ID NO: 11010 - DNA, 40 bp, Enterobacter cloacae; identical to SEQ ID NO: 10995
  source 1..40: mol_type = genomic DNA

SEQ ID NO: 11011 - protein, 491 aa, Bacillus pseudomycoides
MGLAAIYLRLSRNEEQLNIDEILLNHRNALTKIAKQQKLTYDIYQEISSGVNTERPELNLLLSRLDDYDALLVMDIDRISRDNAHAEEIKKMLIIHDIKILTPQGAIDLSQESNEMLFSFQAMMANFEYKQIRKRLGRGRLAAAEQGKWTMSNRVPLGYKKNEEKRLEVVEDEAKIIRFIFQKTLERVSANEIAKQLDILGWRSRQGKVLTSTHISNMRRNVVYYGVVKAGRKVNGRVVDEVFVEDAHEPIVSNQMFLEVQKILEENTTGNFFNKLKATRKLQNLIYCNCCKRKRYIQCDGNGIDYIKSCIYKVDNNKCRDRGYKYEPIEQFVLQKVKEKKSAFEQELQMLKSLDTTEVEKKLLIQRESLEKQINRFNKRQRNLKEMRMDGEISKAEFYEMRDENEEQIKQVKQQMELIDIKLENLSNTDEEQDRLQYAIKTLDKLEELKAESCNTFLKKFIKKIWFSSNTEANHDTTRPKEDATIEIEWL

SEQ ID NO: 11012 - DNA, 50 bp, Bacillus pseudomycoides
  source 1..50: mol_type = genomic DNA
gccgataaaaatagaaagattacaaatgttaattttctatttttactcgg

SEQ ID NO: 11013 - DNA, 40 bp, Bacillus pseudomycoides; identical to SEQ ID NO: 773
  source 1..40: mol_type = genomic DNA

SEQ ID NO: 11014 - DNA, 50 bp, Bacillus pseudomycoides
  source 1..50: mol_type = genomic DNA
gccgataaaaatagaaagattacaattgttaattttctatttttactcgg

SEQ ID NO: 11015 - DNA, 40 bp, Bacillus pseudomycoides
  source 1..40: mol_type = genomic DNA
aactttctgcaaaattgcaataattaaaacagtagctggc

SEQ ID NO: 11016 - protein, 621 aa, Enterococcus faecium; identical to SEQ ID NO: 2511

SEQ ID NO: 11017 - DNA, 50 bp, Enterococcus faecium; identical to SEQ ID NO: 2512
  source 1..50: mol_type = genomic DNA

SEQ ID NO: 11018 - DNA, 40 bp, Enterococcus faecium
  source 1..40: mol_type = genomic DNA
aaccctttttgtttcaactggtttaacggtaatgtatttg

SEQ ID NO: 11019 - DNA, 50 bp, Enterococcus faecium
  source 1..50: mol_type = genomic DNA
aaaagtccttgacaattcgtttctcttgttgtatgctctaaaagacttct

SEQ ID NO: 11020 - DNA, 40 bp, Enterococcus faecium
  source 1..40: mol_type = genomic DNA
cacacttattgtttctactctttaaacgtgaagttatttg

SEQ ID NO: 11021 - protein, 539 aa, Faecalibacterium prausnitzii
MLRQATQNLITALYPRLSHEDELQGESNSISNQKRILETYAKQNGFTNLRWYTDDGYSGANFQRPGFQAMLADIEAGKVGTVIVKDMSRLGRNYLQVGFYTEMLFPQKGVRFIAVNDNVDSANGGMDNDFTPLRNLFNEWLVRDTSKKIKAVKRAKGMSGKPVTSKPVYGYLMDEDENYIVDEETAPVVQQIYQLCLAGNGPTKIARMLTEQQIPTPGTLEYRRTGSTRRYHPGYECKWATNTVVHILENREYTGCLVNFKTEKPSYKTKHSVENPIEKQAIFENHHEPIIDTETWERVQELRKQRKRPNRYDEVGLFSGMLFCADCGHVMYQQRYQNKNRKQDCYICGSYKKRTRDCTAHFIRTDLLTAGVLSNLRQVTEYAARHESRFVKLLIQQNEIGGKRKTAAATKQLEQAQERIAEVSRIIKRLYEDNVNGKISDERFMELSADYEQEQRELKDRTAALQAELDKSQAATVNAEKFMGIVRKHLAFEELTPTLLREMIEKIVVHECSYDENGTRRQDIEIYYSFVGKIDLPEA

SEQ ID NO: 11022 - DNA, 50 bp, Faecalibacterium prausnitzii
  source 1..50: mol_type = genomic DNA
ttacttctttatcgcacatcagcaaatgctcatgtacggtaaggaagcaa

SEQ ID NO: 11023 - DNA, 40 bp, Faecalibacterium prausnitzii
  source 1..40: mol_type = genomic DNA
acaggataaccccggcagcaagagccagggcgtcaagcag

SEQ ID NO: 11024 - DNA, 50 bp, Faecalibacterium prausnitzii
  source 1..50: mol_type = genomic DNA
ttacttctttatcgcacatcagcaattgctcatgtacggtaaggaagcaa

SEQ ID NO: 11025 - DNA, 40 bp, Faecalibacterium prausnitzii
  source 1..40: mol_type = genomic DNA
cccggctgacccagccagcatgagccagggaaccaagcag

SEQ ID NO: 11026 - protein, 480 aa, Schleiferia thermophila
MKYFIYARKSTDSEERQVLSIEAQLAELKEFAAKEKLEIVASLCEAKTAKEPGRTVFGEMLDRIEKGEAQGILAWHPDRLARNSIDGGRIIYLLDTGKLKDLKFPTFWFDNTPQGKFMLNIAFGQSKYYIDNLSENIKRGHRAKLRKGIWPSFAPLGYLNNHKTKGIDIDPEKAPLIRKAFELYATGEYTLKAIAKILKDAGLRSYKGKVLSVSCVQRMLKNTFYYGVFRFNGEMYDGSHEPIISKKLFDTIQQVMNNRGKKKRKRKHNFAFSGLMRCGNCGCMITAEIQKGYIYYRCTKKKQRCNEKYLREEKLVEQLKAIIQKVSLPDEWAEKMLEEIEKEKEQAKQETKSLVQNLLKQKVAIERKMDRLLDLYIEGKGIEPEEYQAKKQKLLNEKLKIQQKIKDFEQTGNNWLEPMKKMILASSQAKILSSQNDNSQIRAFLKNIGSNFILKGKKFQFEGKIGWRALLNSPQNTNWR

SEQ ID NO: 11027 - DNA, 50 bp, Schleiferia thermophila
  source 1..50: mol_type = genomic DNA
tttaaattccccccagaataccaattggcggtgtctgttcgaaaaaattc

SEQ ID NO: 11028 - DNA, 40 bp, Schleiferia thermophila
  source 1..40: mol_type = genomic DNA
cgcgaaaaacaggtagagtctggcggtgagggggggattc

SEQ ID NO: 11029 - DNA, 50 bp, Schleiferia thermophila
  source 1..50: mol_type = genomic DNA
tttaaattccccccagaataccaagtggcggtgtctgttcgaaaaaattc

SEQ ID NO: 11030 - DNA, 40 bp, Schleiferia thermophila
  source 1..40: mol_type = genomic DNA
ctcgaaaaacagagtgagtgtggaggggaggggggtgctc

SEQ ID NO: 11031 - protein, 493 aa, Enterocloster bolteae
MDNRIDAIYGRQSIDKKDSISIESQFEFCRYELKGGEGREYKDKGYSGKNIERPDFQRLLQDIKLGLIKRVIVYKLDRISRSIVDFAKLMELFKQYNVEFVSCTEKFDTSTPMGRAMLNICIVFAQLERESIQMRVQDAFYSRCTKGYYMRGRTPYGFDTEPIVMDGIKTKKLVENAEMDFAELMYQMYAEPSSSYGDITRYFVKNSIDVYGKALQRAFISKLLRNPVYVQADMDIYEYFKAQGVKIESPPEMFTGDNSCYLYQGREGEEQILVIAPHQGRIPSSLWLTVQRKLSQNTSFQNGRKCHNTWLAGKIKCGRCGYALVGLRAQNGVTYLRCKQRADNGSCEGAGTLTAQSMESFVYGEMVEKMRKYHTLKGGKEPGYNPKLTAARVALAKTESEIEKLLDTLSGANPLLLQYANNRIEELDAERQKQLKLVADLTANSVSDTQIDCITNYLNDWESVSFDDKRKVVDILISHIDATSESVTIHWKI

SEQ ID NO: 11032 - DNA, 50 bp, Enterocloster bolteae
  source 1..50: mol_type = genomic DNA
cattatgcctttgtaaaaaatagtttaggtttttatacaagggcataatc

SEQ ID NO: 11033 - DNA, 40 bp, Enterocloster bolteae
  source 1..40: mol_type = genomic DNA
tggcgtgattacgaatagattgacataattcgtataacat

SEQ ID NO: 11034 - DNA, 50 bp, Enterocloster bolteae
  source 1..50: mol_type = genomic DNA
cattatgcctttgtaaaaaatagttaaggtttttatacaagggcataatc

SEQ ID NO: 11035 - DNA, 40 bp, Enterocloster bolteae
  source 1..40: mol_type = genomic DNA
tgcagtgtttaggaataaatagatatgatacatataacat

SEQ ID NO: 11036 - protein, 530 aa, Candidatus Desulforudis audaxviator
MSGVAIIYIRVSTEEQSRKGYSLPDQLEKCTQKAEEMGACDAVLCTDYAETAAYLDRPGLQRALELVATGRYAYFIALDVDRLARDLGDQLYVTEEIEKRARVEFVTHRRGDPGNPEDTLFYHIKGAFSQYERAKTRQRTIAGARQKAKSGRIVRPGCYPGHPGPYGYRYNKDPQNPEFSIVEEEAAVVRKIYRWVLDEGLGLQAIAARLNQEKVPPPRGVKWYTSMVGRILTKELYYGEFHNFKWRTVTVEGRTPSGRRRTRYLTRPVEERIPVKVPPIVSREEWKRVQEIRRQNGLRVRKGRKHQYLLVGHIRCGECGRSYNSEPHGTGLRYRCIGTRKQMSSTPCTNRSWPVHSNSRTPGLDDVIWDEISKRLKDASLIEKELAGKRRFPDAAVRDKLEKELQELELHLSELRRHRESLFEMRLENVLSEKEFRFRLLKVNDKVNIIQQKLDEARRKLSVMGPVKMPDFHALQKAYIAKVENADFDLKREIIGKLNISAKVYRRRVEIFWPFSCTQKVDNLTHNRDC

SEQ ID NO: 11037 - DNA, 50 bp, Candidatus Desulforudis audaxviator
  source 1..50: mol_type = genomic DNA
aagtggacaatctcacccacaatcgagattgtgggtacgaatgtccaact

SEQ ID NO: 11038 - DNA, 40 bp, Candidatus Desulforudis audaxviator
  source 1..40: mol_type = genomic DNA
cgggggcctgccgggttgggagattgtcgggctcccggga

SEQ ID NO: 11039 - DNA, 50 bp, Candidatus Desulforudis audaxviator
  source 1..50: mol_type = genomic DNA
aagtggacaatctcacccacaatcgcgattgtgggtacgaatgtccaact

SEQ ID NO: 11040 - DNA, 40 bp, Candidatus Desulforudis audaxviator
  source 1..40: mol_type = genomic DNA
cggggactggcaggggtgggcgcttgtcggggtccggggg

SEQ ID NO: 11041 - protein, 536 aa, Mesobacillus jeotgali
MKKVYCLYRVSTEKQGTENEIPMQKSECHKFVRQQGWMITKEFTEKVSGFQVPLQERKELFEILAAAEQRQFDILLVYSTDRLGRQVEFLPFYGQLEENNVQVWSTKEQRVSGTEHIDTLKQFIGLWMAEGESRKTSMRVKDTFTQLHEAGEYATGNAPYGYKKVDTGIKRNPNKPNTIKKIIIDENESEILKMIFNFAGNKGWGTPRIAKYLNENGFPNRKRKIWRTSSIYRILRNPVVIGRKPYQRSEKINMKNKKRKEYSYKEWKLQPFNPELVLIPEELFTKVQELTTNRGYEKKTDIPLNSNVLLSGIIYCGDCENKLRTDFSYSKRKGSDGNQEKVKAYRYRCYSPGHINHDGRKNYSAKQIDYAVSEMVKFAIKNVNIGSIQDAIKNYKSKEVVLNNQKLIEMENEKVSLERGLRNAENELEKFFMGQSKFNENRIVNMIESFETNLKKVNKEILIVQDEINDIQHKQIDIEALLTKLNQWSQIYEDSDFDTKKVIVGDLIEKVIVQNETIRIIYRTSFEGIFANRIQN

SEQ ID NO: 11042 - DNA, 50 bp, Mesobacillus jeotgali
  source 1..50: mol_type = genomic DNA
gtatgtgtttcatcttctttagctacacctaatgagtattaaacacacat

SEQ ID NO: 11043 - DNA, 40 bp, Mesobacillus jeotgali
  source 1..40: mol_type = genomic DNA
atccggttcttccttggagacacctaatgaaaaacctttc

SEQ ID NO: 11044 - DNA, 50 bp, Mesobacillus jeotgali
  source 1..50: mol_type = genomic DNA
gtatgtgtttcatcttctttagctgtacctaatgagtattaaacacacat

SEQ ID NO: 11045 - DNA, 40 bp, Mesobacillus jeotgali
  source 1..40: mol_type = genomic DNA
ctagggtttctcatttgaggtactgaatgaaaaacctttc

SEQ ID NO: 11046 - protein, 503 aa, Clostridioides difficile; identical to SEQ ID NO: 2911

SEQ ID NO: 11047 - DNA, 50 bp, Clostridioides difficile; identical to SEQ ID NO: 12
  source 1..50: mol_type = genomic DNA

SEQ ID NO: 11048 - DNA, 40 bp, Clostridioides difficile
  source 1..40: mol_type = genomic DNA
tgagtatttataatttcacttgctttattataaagctctt

SEQ ID NO: 11049 - DNA, 50 bp, Clostridioides difficile; identical to SEQ ID NO: 284
  source 1..50: mol_type = genomic DNA

SEQ ID NO: 11050 - DNA, 40 bp, Clostridioides difficile
  source 1..40: mol_type = genomic DNA
tgaggttttaaaattagatctgcttttatataaagatctt

SEQ ID NO: 11051 - protein, 509 aa, Escherichia coli
MRRAISYIRFSSERQLKGDSVRRQSKLVTDWLDKNPEFYLDSSLSFKDLGKSAFSGKHLKGGLGDFLTAIEKGLVKAGDTLLIESLDRLSRQDIDIASELLRRILRAGVDVVTLSDGEHYTRESLKDPLSLIKSILIMQRAHEESLRKSERVQAAWNRKKELISEGIKVSRRCPAWLRLNDDRRTFTIIPDKVEVVKRAFDLRLQGLSFWAITRTLNDEGHLSLNQYTPKQKGWSDTAVKKLLRNRAVIGCFTPAGREEVQGYYPAIISESLFYRVQQLNTGQYGRASVSSNPLSVNLFRGIIKCSECGATIVLGGYALKRFGMYRCPNRSANRCSAKAISRKQTDATILYMLALCDRFETENTDTIDSLKLQREDLQRKISKMAELAIELDDMTIITEKLRDMKNALSKLNHDIEEETQRIKAITTGSLKDIDRTTKEGMIETQLLIKGVLKEIVIDAAKRRCKVTFHNGRAITLPITENPSEDVTEAIQSLSEVTERGLIDVDEVII

SEQ ID NO: 11052 - DNA, 50 bp, Escherichia coli; identical to SEQ ID NO: 1887
  source 1..50: mol_type = genomic DNA

SEQ ID NO: 11053 - DNA, 40 bp, Escherichia coli
  source 1..40: mol_type = genomic DNA
gtggtccggtattgtcttcagcattacatttttattttct

SEQ ID NO: 11054 - DNA, 50 bp, Escherichia coli; identical to SEQ ID NO: 1889
  source 1..50: mol_type = genomic DNA

SEQ ID NO: 11055 - DNA, 40 bp, Escherichia coli; identical to SEQ ID NO: 1880
  source 1..40: mol_type = genomic DNA

SEQ ID NO: 11056 - protein, 525 aa, Longicatena caecimuris
MTYGMILSEATVCAVAFFVERGIFMARKSRKHQHAEMVKTSIAKAVGYVRLSVANQEESSSIQNQKFIIECWGDQHQIPISNYYIDNGFSGKRFDRPAFQKMSKDILAGKINCVIVKDLSRLGRDYITTGYYIEVIFPANGVRFVSVNDQFDTIDGITNQERPYSSRIRVPITNAFNEQVSIGIKKKVEANLDMKAQHGTFIGPRAPFGYQKSESNRDQLIPDPKAAIIVRKIFELAANGTGVTAIVRYLNEKDIPTPIQYARSNGLAGNYDDGRGDWNSRSVKYILTNRTYTGMLVQGKEKRAVAATHEPLVDTDTFDAIQRSFQAKAFNLTTNSQSTENVLKGKVICGCCGGKMQRKRGTNHADWYFFTCITKNRLGAGKCTGMYVREEDVFSAVYYQLKLYINYHFITKDQYKQEIQHLDSTIEAASIKYGEATDFSMKLYEKYVMGEGSKEAIAAARPAKEQAEVELNRAIANKVAYEEQYRVFCKLLKASRKEVPLNEIVDCIEQIVVDVDGRIMVKWTK

SEQ ID NO: 11057 - DNA, 50 bp, Longicatena caecimuris
  source 1..50: mol_type = genomic DNA
ctaataacttgaatctgcgtgtcggcaccatagaaaaacaaagcctttaa

SEQ ID NO: 11058 - DNA, 40 bp, Longicatena caecimuris
  source 1..40: mol_type = genomic DNA
agttcaattctgcgtgtcggcaccaggtaacaatgcaaac

SEQ ID NO: 11059 - DNA, 50 bp, Longicatena caecimuris
  source 1..50: mol_type = genomic DNA
ctaataacttgaatctgcgtgtcgaaaccatagaaaaacaaagcctttaa

SEQ ID NO: 11060 - DNA, 40 bp, Longicatena caecimuris
  source 1..40: mol_type = genomic DNA
agttcattcctgtgtgttgaaaccagccagccttgcaaac

SEQ ID NO: 11061 - protein, 627 aa, Salinispora arenicola
MTSTLPDWLRPPATTPVPQRTIRVAFLGRTSTDEQQDPTLSIPRQLTNSERALLPNMVIVAWFWDVESSRKELSQRGRSTAWQKFNIGVRRDGGLADMLAEATSPDRRFDVVICESIDRIARWTHQGTKIEHDLELAGVPLLAADEPITQSNSRKRAAQILLRRTKQGVAEWYMIEMLEKSWDGFEEHTGQGWNVGKPPYGYLAEKHKHPVPAKRAQGKHKTKLKIDPDRGPVVEQIFAWRIDEKLSYRAIAERLNTDLDRYPPPQPVDPARTVGRWTGSAVREILVNPKYTGHMVWNRRSTKDKLHPGKVNPREQWVVSAQPTHPGIVPIETFLAAQNVGRSRERSRADARQGSPNRHRQTKRVYALRSYVWCAPCQRRMFGRTVTQYTYYSCQPRERAIPEGHPSMISVTEEVLLDFADRSFNTYVLGPDRVQLATHSLDIAAQQAAEEQRRQIAVLRRTLDDIAARRRRLLRVIEENDDPDGSVFAEIAERRAQLDRDREIKTAELAHLEETMPADPGSADILAALPEMEVKLGLLPTDRLRRLLDAFAVQIHHDVRTKQVTFRATVSQHAAPHLARLTRATADGPRPATHRHTSANDAAPAADDDDDGGNDHLQFCDMPRRGH

SEQ ID NO: 11062 - DNA, 50 bp, Salinispora arenicola
  source 1..50: mol_type = genomic DNA
tttgcagttctgtgacatgccccgccgggggcacgtcacagaactgcaaa

SEQ ID NO: 11063 - DNA, 40 bp, Salinispora arenicola
  source 1..40: mol_type = genomic DNA
agcgcaggttcgaatcctgccgggggcacaccacagggcc

SEQ ID NO: 11064 - DNA, 50 bp, Salinispora arenicola
  source 1..50: mol_type = genomic DNA
tttgcagttctgtgacatgccccgcagggggcacgtcacagaactgcaaa

SEQ ID NO: 11065 - DNA, 40 bp, Salinispora arenicola
  source 1..40: mol_type = genomic DNA
gggacagcttggactcctgcagggggcacagcacggggcg

SEQ ID NO: 11066 - protein, 626 aa, Salinispora arenicola
MTSTLPDWLRPPATTPVPQRTIRVAFLGRTSTDEQQDPTLSIPRQLTNSERALLPNMVIVAWFWDVESSRKELSQRGRSTAWQKFNIGVRRDGGLADMLAEATSPDRRFDVVICESIDRIARWTHQGTKIEHDLELAGVPLLAADEPITQSNSRKRAAQILLRRTKQGVAEWYMIEMLEKSWDGFEEHTGQGWNVGKPPYGYLAEKHKHPVPAKRAQGKHKTKLKIDPDRGPVVEQIFAWRIDEKLSYRAIAERLNTDLDRYPPPQPVDPARTVGRWTGSAVREILVNPKYTGHMVWNRRSTKDKLHPGKVNPREQWVVSAQPTHPGIVPIETFLAAQNVGRSRERSRADARQGSPNRHRQTKRVYALRSYVWCAPCQRRMFGRTVTQYTYYSCQPRERAIPEGHPSMISVTEEVLLDFADRSFNTYVLGPDRVQLATHSLDIAAQQAAEEQRRQIAVLRRTLDDIAARRRRLLRVIEENDDPDGSVFAEIAERRAQLDRDREIKTAELAHLEETMPADPGSADILAALPEMEVKLGLLPTDRLRRLLDAFAVQIHHDVRTKQVTFRATVSQHAAPHLARLTRATADGPRPATHRHTSANDAAPAADDDDGGNDHLQFCDMPRRGH

SEQ ID NO: 11067 - DNA, 50 bp, Salinispora arenicola; identical to SEQ ID NO: 11062
  source 1..50: mol_type = genomic DNA

SEQ ID NO: 11068 - DNA, 40 bp, Salinispora arenicola; identical to SEQ ID NO: 11063
  source 1..40: mol_type = genomic DNA

SEQ ID NO: 11069 - DNA, 50 bp, Salinispora arenicola; identical to SEQ ID NO: 11064
  source 1..50: mol_type = genomic DNA

SEQ ID NO: 11070 - DNA, 40 bp, Salinispora arenicola; identical to SEQ ID NO: 11065
  source 1..40: mol_type = genomic DNA

SEQ ID NO: 11071 - protein, 586 aa, Ruminococcus bicirculans
MTGFTFQSLTPQDSLSNELRSVIRDNVLQFYAKGLSTEAEEEGLTALYERLSQEDKLDGESNSIANQKKILERYCKDHGITAYRHYDEDDGYSGTNFNRPGFQRMLADIKAGRIKRVIVKDMSRFGRDYLQVGMYTDVVFPEFGVHFIAVNDGVDSTRGESEFTAIRNVFNEMYARDTSKKIRATWQSKGKSGEHLTTIPPYGYMKSPEDKKKWIVDEEAAAVVQKIFSLCASGKGPTQIAKWLKQQQILNPTAYCHAKGLPTSNKPTADPYKWTNETVSRILERVDYLGHTVNFKTTKQSYKSKKKIWNDPENWVIFENTQPPIIEESVFLIVQNIRKARRRPTKMGEMGMFSGLLYCAECGGKMYQCRATNFAENQKYFICSTYRKGKDLCTTHSIKNVVLHEIVLRNLREAISYVSEHEAEFIQDAAESDMRDRDAEFVRKRETLAKADTRIAELDRIISRLYEDNVIGKLSDERFIKMSHDYELEQSNLKSMAEVLRKDLKQQEQQKTNVKAFIAAVKKYTDLQELDAAVLRAFIDRIEVSHVDKKSRTREITIVYNFIGAFDFTRAIENARNTSKKEQRTA

SEQ ID NO: 11072 - DNA, 50 bp, Ruminococcus bicirculans
  source 1..50: mol_type = genomic DNA
atgttttcctaagtcaccgccgcattaagagcgttgacataggaaaacaa

SEQ ID NO: 11073 - DNA, 40 bp, Ruminococcus bicirculans
  source 1..40: mol_type = genomic DNA
taaaacaaagccttccccttttgggagggtttttgttttc

SEQ ID NO: 11074 - DNA, 50 bp, Ruminococcus bicirculans
  source 1..50: mol_type = genomic DNA
atgttttcctaagtcaccgccgcaggaagagcgttgacataggaaaacaa

SEQ ID NO: 11075 - DNA, 40 bp, Ruminococcus bicirculans
  source 1..40: mol_type = genomic DNA
tgagacaagcccatgcactggtggtagtgtttttgttttc

SEQ ID NO: 11076 - protein, 480 aa, Parageobacillus thermoglucosidasius
MRTAIYIRVSTEDQAREGYSIQMQKDKLQAYCISQGWDIEDFYIDDGYSAKDLNRPEMKRMIANIEQGMIDCVLVYRLDRLTRSVLDLHNLLKLFEKHNCKFKSATEVYDTTTAMGRMFITVVAALAQWERENTAERVKANMYQMVKEGKYPGGKVNFGYKLKNGKIQPNEEEAAIVNTIFDLYLEGNGDNRTAMLLNSMGYRTRSGKLWNGKMVRDILINPIYVGRFFYMDEYHEGIVPAIVDIEKFETAQKMREGRRGKHPKQVSSDYIFSGVLRCARCGRVMPGKLSNGRFKNGVYAQRTYTCRGTFTKLCDMPMVNEKAVEESFLQYVNDLYNEIAATKIASSYTSEEKEIMEQIKTIKKQLEDIKKRRKKWQFAFANEAITLEELKELTENDRELEKELEQKLHDLESELDADKKTPEEIAALLQQFIKNWHHLTDKERKNLVSILVKEIHIDAEQKRPNRYRKRKVYVNKIEFM

SEQ ID NO: 11077 - DNA, 50 bp, Parageobacillus thermoglucosidasius
  source 1..50: mol_type = genomic DNA
acatgccgttttaataccttcggataggcgaatgtaataatagggcaagc

SEQ ID NO: 11078 - DNA, 40 bp, Parageobacillus thermoglucosidasius
  source 1..40: mol_type = genomic DNA
tacatcggcaacgactggatatccaaaaggggttgtatat

SEQ ID NO: 11079 - DNA, 50 bp, Parageobacillus thermoglucosidasius
  source 1..50: mol_type = genomic DNA
acatgccgttttaataccttcggattggcgaatgtaataatagggcaagc

SEQ ID NO: 11080 - DNA, 40 bp, Parageobacillus thermoglucosidasius
  source 1..40: mol_type = genomic DNA
tacatctgcaaagactgtatttccaaataaggttatatcc

SEQ ID NO: 11081 - protein, 508 aa, Pseudomonas kurunegalensis
MGQLARFLRHVRDETIPKGSVLIVESLDRLSRAEVWDALPRFLDILNQGIDIYTSSDDTLYTAKFDAQQLILSIFNMSRAHNESSLKADRVGKVWRRKQDDAREFGKALGAACPYWIRYVNGAYELIPERVEVVKDIFRLAENGYGHRVIAKKLNEAGIPVFGSNRRNSTGLWGGSSCAKILSNRALIGEYQPTGLEDDGSGVKRTKRGEPVINFFPAVLSEDEFYSAQAARDSRRVSKSSKQSADFNVWQGIAKCVKCGGPMHLVNKGAPPKGGKYLRCYVSSKGACPSKLIRFDICQIVFKEVLAKINSISLVKNTQSDLNRELNTINSKIGEIQNRQKELKDQVLSVGGRIPSMLVSTMAVLEDKLAEYRVLQNKLHLDIGEQRITSKDDFFARLDLVSYEGRSRANALVKRLHIVVEMERREDDTVFRIRDAGGFLFSIIYDNDNHISYWGNSKDAHALITAHGDEVAFLKSLPELAVGENDLFELAREVAGLEGLYKDILSKK

SEQ ID NO: 11082 - DNA, 50 bp, Pseudomonas kurunegalensis
  source 1..50: mol_type = genomic DNA
aggggtgtattcgtttacaacattaacaggttgtagtacgctacaccccc

SEQ ID NO: 11083 - DNA, 40 bp, Pseudomonas kurunegalensis
  source 1..40: mol_type = genomic DNA
gcctggggggcctgtgaacaacaggttatgggccccggcc

SEQ ID NO: 11084 - DNA, 50 bp, Pseudomonas kurunegalensis
  source 1..50: mol_type = genomic DNA
aggggtgtattcgtttacaacattcccaggttgtagtacgctacaccccc

SEQ ID NO: 11085 - DNA, 40 bp, Pseudomonas kurunegalensis
  source 1..40: mol_type = genomic DNA
gcctggagggcctgttaaaccaagttcctgggcccccacc

SEQ ID NO: 11086 - protein, 512 aa, Clostridium algidicarnis
MKKVAIYCRVSSDDQKERDTIDNQVEMLSAYTEIKEHLDVYSNYLDNGISGTIPFNERPGGKELINDAKKGLFDTVLVYKIDRFGRDTLSGLNAVEMLRKYGIEIISVTEPFDLNTPAGRFQFITYLNMAELERNNILDRMYIGATRAAKKGKWMGGIVPYGYIKNNDGYLEINEEEAKTIKKIFDLYTIDKMSGLSIAAYLNSSGILSSCGKGKGKRTKGITGKWRSSSIQRILSSTTYKGIHEYGKNGTRRRDTITRTVPAIITQKQWDEVQLQKEKNSLDCMKNRRNREFLLRKLIKCKYCGRTFYGITYPTRNDVYVCAGKRTEMINTKCINVNVNADMIEDHIWSGCVDILKNYNIHIEELRRIENNKENDSENDIVKLNKLLLDKNLEKTNILTLFRKGIISEKDVTDQINDIKKEETKINKLLSMLNNKIDSKKRESELVESMNSKIEYYKTKLEELTEKEKRKIIELLVKGVTVGYTIAGGKKVVNIEVTYNLVKLETHMDMDL

SEQ ID NO: 11087 - DNA, 50 bp, Clostridium algidicarnis
  source 1..50: mol_type = genomic DNA
agtcaaacttgaaacccacatggacacggatttaggtactaagtttgaca

SEQ ID NO: 11088 - DNA, 40 bp, Clostridium algidicarnis
  source 1..40: mol_type = genomic DNA
aagataaaatccacagggacatggatttaaacttcctata

SEQ ID NO: 11089 - DNA, 50 bp, Clostridium algidicarnis
  source 1..50: mol_type = genomic DNA
agtcaaacttgaaacccacatggaaacggatttaggtactaagtttgaca

SEQ ID NO: 11090 - DNA, 40 bp, Clostridium algidicarnis
  source 1..40: mol_type = genomic DNA
aagataaaatacaaagtaaaaaggatatattcttccaata

SEQ ID NO: 11091 - protein, 541 aa, Pannonibacter phragmitetus
MNMQSPHVALRAALYLRVSTARQAEHDVSIPDQKRQGEAYCQERGYQLAETFIEPGASATNDKRPEFQRMIEAATAKPAPFDVVVVHSFSRFFRDEFEMEFYYRKLAKNGVKLVSITQELGDDPIHDMMRRIMSLFDEYQSKENAKHVLRALKENARQGFWNGSLPPIGYRVIDAEQRGAKMKKKLEIDPLHADTVRLIFRLALEGDGTSGPMGVKNIVSHLNRNRMFTRSGGRWGIGQLHRILTRRTYIGEHRFNRRSKKGEVKPEEEVVTVAVPPLIDLEIFEAVQRRLQVNNPKVTPPRVVSGPNLLTGICHCGNCGGAMTLRTGKNGRYRYYACSIRARQGDTGCKGRAIPMDKLDRMVVSHIEERLLDPERIEDVLASLLDRRQESVERRGQHIAELNHRAAEADMRLKRLYDAIEAGSLDPAESALGERIAGLTALRDQARADAARIEAMLKSSAHQGLTGAAVRELATEARTRLRLEKGGYRREHVRAFAQRVEVADDAIYIKGSKSTLLRTLVAAKGGKSAGIGVPGFIPKWR

SEQ ID NO: 11092 - DNA, 50 bp, Pannonibacter phragmitetus
  source 1..50: mol_type = genomic DNA
cggcgttcccggttttataccgaagtggcgggccgaagccgaagaaacgg

SEQ ID NO: 11093 - DNA, 40 bp, Pannonibacter phragmitetus
  source 1..40: mol_type = genomic DNA
gagggtaatcgggaggggggtggcggagaggatgggattc

SEQ ID NO: 11094 - DNA, 50 bp, Pannonibacter phragmitetus
  source 1..50: mol_type = genomic DNA
cggcgttcccggttttataccgaaagggcgggccgaagccgaagaaacgg

SEQ ID NO: 11095 - DNA, 40 bp, Pannonibacter phragmitetus
  source 1..40: mol_type = genomic DNA
gaggggaatggggagggggaggggaggggggatgggaggg

SEQ ID NO: 11096 - protein, 538 aa, Clostridium botulinum
MKVAAIYTRKSKYTGKGESIDNQVKICKEHLSKNNISNFIIYEDEGFSGKNTERPKFQTMLKDAKDKKFDILICYRLDRVSRNIADFSYLIQKLEKYDISFISVSEQFDTSTPMGRAMMYIASVFAQLERETIAERIKDNMVELAKSGRWLGGRTPTGFKSTPITTYDNELNERKMFMLSPINEELKLVKLLFKLYLEKKSLSQVVKYLLSHNIKTKMDNNWSKTNVLSILTNPVYVKTTDEVFDYLNSKNIHPLGTPDGVHGMLSYNKRKGKSGPSRDLNEHIYSVAKHEGIIESHDWLKVQNILEKNTSKAPRLGKTHTALLTGIMRCGVCGSHMKIAYGSINKKTGKRHYYYVCSLKRDSGCTRCNNKNIRGDIIENILIEKLKEMTLDEGVFINELKRHQEELYGKNSTLSKIDELKKQIAIKDTSIENLLKSISLTQDKNISQILVNKLEEISKEKLTLENTLNQYENRDKKNVSDNKNFDTIIYSLRNFKSLIDISNIYEKRLLISTIVDKIYWYGDKEIMDVRFWGAETIQ

SEQ ID NO: 11097 - DNA, 50 bp, Clostridium botulinum
  source 1..50: mol_type = genomic DNA
tatcgcactttagtgttgagagtatctgctctctaaaccaaagtgcaata

SEQ ID NO: 11098 - DNA, 40 bp, Clostridium botulinum
  source 1..40: mol_type = genomic DNA
catctctcttaagtaaacatctgctctccatacaaacatt

SEQ ID NO: 11099 - DNA, 50 bp, Clostridium botulinum; identical to SEQ ID NO: 11097
  source 1..50: mol_type = genomic DNA

SEQ ID NO: 11100 - DNA, 40 bp, Clostridium botulinum
  source 1..40: mol_type = genomic DNA
catctccctcctgtatgcatctgctctccatagcaacaat

SEQ ID NO: 11101 - protein, 558 aa, Enterococcus faecium; identical to SEQ ID NO: 3086

SEQ ID NO: 11102 - DNA, 50 bp, Enterococcus faecium; identical to SEQ ID NO: 3087
  source 1..50: mol_type = genomic DNA

SEQ ID NO: 11103 - DNA, 40 bp, Enterococcus faecium
  source 1..40: mol_type = genomic DNA
agcatagtctggaacaagcaaagcagatccaagctaatca

SEQ ID NO: 11104 - DNA, 50 bp, Enterococcus faecium
  source 1..50: mol_type = genomic DNA
aggtatcgttatcttacctcaacaacagctgacgttagataacgatactt

SEQ ID NO: 11105 - DNA, 40 bp, Enterococcus faecium
  source 1..40: mol_type = genomic DNA
agcatagttgggaataaggacaacagatccctgataagca

SEQ ID NO: 11106 - protein, 420 aa, Rhodococcus rhodochrous
  REGION 372..405: note = misc_feature - Xaa can be any naturally occurring amino acid
MVATPAGIYVRISQDRDHEGAGVQRQEEDCRALAERLGWDVVDVYADNDLSAYTGKLRPEYQRLLADIEKGRIRGLLAWHPDRLHRRPIELEQFIDLVEQTGLQVHTFTAGDYNLSTPTGQAVARTIGAWARHESQHKGQRIAAARKQSALAGRPNGGVRRFGFENDGVTLRLREAAEVAKAADAIIAGVSLRSIVRDLNTRGVPTASGRGKWTSQTLRGILTNPRTAGLSTHHGEIVGKAVWPPMVPEDRWRAVCAILNNPARKTTNGGTIKWLGSGIYVCGVCGSRELRVSAKSDGRRTYRCRNRESEMTTGHVTREAQTLDAYVEQLAVARLSRPDFLEMLSKSVRQLRRGGCDRRGVRRVVAGRGTGXXXXXXXXXXXXXXXXXXXXXXXXXXXXXXXXXXYDRMRTLNPEEALTN

SEQ ID NO: 11107 - DNA, 50 bp, Rhodococcus rhodochrous
  source 1..50: mol_type = genomic DNA
cggtgtctttgcttcgcggcggggaataccaccacttagcaaaggcacca

SEQ ID NO: 11108 - DNA, 40 bp, Rhodococcus rhodochrous
  source 1..40: mol_type = genomic DNA
cggcggcacgggtgcggggaagacgacgatgctagcggcg

SEQ ID NO: 11109 - DNA, 50 bp, Rhodococcus rhodochrous
  source 1..50: mol_type = genomic DNA
cggtgtctttgcttcgcggcggggagtaccaccacttagcaaaggcacca

SEQ ID NO: 11110 - DNA, 40 bp, Rhodococcus rhodochrous
  source 1..40: mol_type = genomic DNA
cggcgccagcggcgcggggaggtcggcggtgccggcggcg

SEQ ID NO: 11111 - protein, 618 aa, Clostridium paraputrificum
MAGIKEEKKIYLVGIYCRLSKDDGTDNESASIATQKSILTDYVKKQGWHIAKTYVDDGYSGTNFQRPSFQNMIKDIESGLINCVITKDLSRLGRNYLDCGLYLEVFFPEHNVRYIAVNDGVDTLNKSAMDITPFRNILNEMYAADISVKIKSAYRARFQQGKFMGTTAPYGYIKDPADHNHLLIDDKVAHVVKEIFDLALKGNGVAKICRHLNKQHILRPAAYAAERGETGFERHFEGNEDKRYIWSGNSVRSILRSPIYAGNLVGYKRIAANMKSKKRPSKLPEEWEVIPNTHEGIVTQEEFDIVQQLITSRRLPQNKGGFVNIFAGVIKCVDCGCALRAMNVHRRKRPEIIDCVQYSCNNYARNGRSECSAHNIEARDLFNAVLADINCFADMAVNDEKAVRAIEKRLTETDQSRAKALEKERKKLNKRLAELDRLFSSLYEDKVMERITERNFEMMSGKYQKEQLEIEARLKEVTETLNESYEKSRGIRDFLALIRNYQGLKELDATVINALIDKILVSEREKMADGTVKQEIKIYYKFIGFVDELHIIPTKRWAAMPAKNCTVCGVEYVPGSGASRYCPACAKKIRREKSNESKRRSREQKRIACMNCPQKMTD

SEQ ID NO: 11112 - DNA, 50 bp, Clostridium paraputrificum
  source 1..50: mol_type = genomic DNA
actgtccgcaaaaaatgaccgactgatgtaggacggattttgcggacatt

SEQ ID NO: 11113 - DNA, 40 bp, Clostridium paraputrificum
  source 1..40: mol_type = genomic DNA
taaaataggtggtagcacagaagttggaggaggcaaggga

SEQ ID NO: 11114 - DNA, 50 bp, Clostridium paraputrificum
  source 1..50: mol_type = genomic DNA
actgtccgcaaaaaatgaccgactagtgtaggacggattttgcggacatt

SEQ ID NO: 11115 - DNA, 40 bp, Clostridium paraputrificum
  source 1..40: mol_type = genomic DNA
taaaatgtgttgaagcaaaagaatgggaagagccaaggga

SEQ ID NO: 11116 - protein, 450 aa, Butyrivibrio hungatei
MQVAAYIRVSTDKQADKGYSLPEQEERIRAYCKSKGWELSKIYSDAGFTGSNMDRPALQELMREISAYDIVLVNKLDRLSRSQKDTLHLIQDIFAPAGASFVSMQESFDTTTPIGIAMVGILSAFAQLERSQIKERMKMGKEGRKKKGLWHGGVNIPTGYDYKDGILLPNDEAEQVRIIYEMFLEGISIRDITRYLQSHFTTRYTSWNYVGTVRRILSNPVYIGMVGDYKGQHEPLIDLETFDRVQVLLDERKQGGKVSTGKHLMTGFIYCGYCGSRVRSCCSVTKAKRYGYYRCGRADTGQLSKLDHKCELKPKNENEIDEIIKNEILKVKFEDVEISDSAATVLPDNSEEIKKIDQQINRLIDLYAICGDNVEELAKKLKDLKAKKTALEKISAKPKRATKKHIMESLRIAQDTFDSGSIEDKRMIIDSLISRVDLYNDTVKITWKFS

SEQ ID NO: 11117 - DNA, 50 bp, Butyrivibrio hungatei
  source 1..50: mol_type = genomic DNA
tttatagactgtttagccttgattttatccatgggtaaacagtctataaa

SEQ ID NO: 11118 - DNA, 40 bp, Butyrivibrio hungatei
  source 1..40: mol_type = genomic DNA
cttatcctttgctttgatcttgtccatggcatcaacaaac

SEQ ID NO: 11119 - DNA, 50 bp, Butyrivibrio hungatei; identical to SEQ ID NO: 11117
  source 1..50: mol_type = genomic DNA

SEQ ID NO: 11120 - DNA, 40 bp, Butyrivibrio hungatei
  source 1..40: mol_type = genomic DNA
cttctccttttgtttaatcttttccatggcaactacaact

SEQ ID NO: 11121 - protein, 423 aa, Flavonifractor plautii
MNEFYAKDCSKKGRSVVRLKAETGARVSSRPRYGYMKDPADPKRHMVPDPENAPVVRYIFDLCVSGKGPAQIAKQLKKDKIPTPGYSYYQKHGVELTGVDITQPYNWSTNTVAGILEDETYLGHTINLKSTTLSFKNKKRIERPESEQLRFENTHEALVTQQTWEIVQDIRKHKRRPAKMEEQNIFSGLVYCLDCGGTMVLHRAHTMDAVKNNFMCSTYKKKGKDVCSGHYIREQELSAILLDDIRRVTHFARQNELRFAEHIRKKQGKEAQQEITVLQKKIDTMQKRQAELTKLFKRLYEDSVLGRIPDEQYRILSQEYTAEQKEIQEQLPAMEGRLQELKDSSSNIARFIENAKRYSEIPELTAEILRIFIKRVEVSERAEKYSRTAPQEVRIYYRDIGLVDELPKSMADSVSEEIPNEVA

SEQ ID NO: 11122 - DNA, 50 bp, Flavonifractor plautii
  source 1..50: mol_type = genomic DNA
aattgtccctatggaacggttccccagtgctccatctcatagggaaacga

SEQ ID NO: 11123 - DNA, 40 bp, Flavonifractor plautii
  source 1..40: mol_type = genomic DNA
aagaaaaaagccggatggccatgccatccggctttttttg

SEQ ID NO: 11124 - DNA, 50 bp, Flavonifractor plautii
  source 1..50: mol_type = genomic DNA
aattgtccctatggaacggttcccttgtgctccatctcatagggaaacga

SEQ ID NO: 11125 - DNA, 40 bp, Flavonifractor plautii
  source 1..40: mol_type = genomic DNA
caggtaaaatcctcatggctttgccatttgggtttttttg

SEQ ID NO: 11126 - protein, 457 aa, Mycobacterium intracellulare
MKAAVYLRQSVDKLGDELAISRQRKDCLTLCEKRGWTPVEYVDNDTSASSRKPRPAYQQMLADIESGAIGAVVVWHLDRLHRKPAELEHFVDLADRHHLALATVTGDVDLSTAQGRLHARIMGAVARNEVEQKSARQTAAMRQLAESGKPNKTARPFGYTKDRQQLVEAEAAAVRDGYAMLLSGGSLYSIAQTWNAAGLRSTYGRTWTGRTVRQALLNARYAGLRSYKDEVLEGVKAAWPAIVSEDIWRSAVAILTDPNRPGGARPRRHLLTGLALCGKCGGVLSSGVKRRTDGGVYTCKHCFGVSRAAELIDPLAVDLALGFLASPDAADLLIDRKRGDLNDLRQQERALLQQLDQLAVDYDEGNLTGRQVKIATERKQQRLDAVRAEMRDANKARVFDGLIGAQNVREVWDGLSLERQRAVLATLFVVTIKPIGSGRYRFDPDNHVAIRWLTGED

SEQ ID NO: 11127 - DNA, 50 bp, Mycobacterium intracellulare
  source 1..50: mol_type = genomic DNA
aacggtcctaacccgatgtgacggctccgcaatatccgtctagaatggtt

SEQ ID NO: 11128 - DNA, 40 bp, Mycobacterium intracellulare
  source 1..40: mol_type = genomic DNA
gactgtgtggccccgacggctctcccccgtcaggaccaca

SEQ ID NO: 11129 - DNA, 50 bp, Mycobacterium intracellulare
  source 1..50: mol_type = genomic DNA
aacggtcctaacccgatgtgacggggccgcaatatccgtctagaatggtt

SEQ ID NO: 11130 - DNA, 40 bp, Mycobacterium intracellulare
  source 1..40: mol_type = genomic DNA
gattgtgtggccccgctggggctgccctggctgtatcaca

SEQ ID NO: 11131 - protein, 549 aa, Erysipelotrichaceae bacterium I46
MKKKECYIYTRVSTSMQVDGYSLDAQKDKLRKYADFQDMVIVGEYSDEGKSGKSVEGRPEFLQMLRDIEEGKDHVSFVLVFKLSRFGRNAADVLTSLQKMQDFGVNLICVEDGIDSSKDSGKLMISVLSAVAEIERENILVQTMEGRRQKAREGKWNGGFAPYGYKLVDGELEIAEDEAEIIRLIFDKYINTTMGVNGIAAWLNQQGYQKKKRQNNTLNAFAASFIKGVLDNPVYCGKLAYGRRKNEKIPGKRNAYHIVKQDSYMLYDGIHEAIVSEEIWNTAHDRRLRTGVKREKTYSLEHEHLLSGILCCPICGAGMYGNVNRKKKKDGSRYKDYFYYTCKHRRSVDGHVCTYKKQWGEDKVNAAVAEVIKKLVQNPKFEAAIRQKINTRIDTGELEQEIENLRKQLRQVLGAKNKLAQQMDSLDVTDRYYDRKYQDMQDRLDHFYDQIDEIEDSIAQVEVRIQNIRQQKLGSDNVYQYLLYFDKLYDKFTDAEKKEFLSSFVERVDIYEDELPDGRFLRHIRFKFPVFYNGQEIDEMSWDKESTVE

SEQ ID NO: 11132 - DNA, 50 bp, Erysipelotrichaceae bacterium I46
  source 1..50: mol_type = genomic DNA
agttgggacaaagaaagtacagtcgagacggttgttcttttgtcccaaca

SEQ ID NO: 11133 - DNA, 40 bp, Erysipelotrichaceae bacterium I46
  source 1..40: mol_type = genomic DNA
tcctcatactccacacgttgagagtgttgtcttgatgtca

SEQ ID NO: 11134 - DNA, 50 bp, Erysipelotrichaceae bacterium I46
  source 1..50: mol_type = genomic DNA
agttgggacaaagaaagtacagtcttgacggttgttcttttgtcccaaca

SEQ ID NO: 11135 - DNA, 40 bp, Erysipelotrichaceae bacterium I46
  source 1..40: mol_type = genomic DNA
tgctcaaaatccaaaacttttgagtgctgacttgatatca

SEQ ID NO: 11136 - protein, 558 aa, Clostridium innocuum
MREVEILKKKQLKCYLYTRVSTSMQVDGYSLDAQRDKLRKYAAYEDMIVAGEYSDEGFSGKNIQGRQEFQRMLNDIQDGKDDVSYVLVFKLSRFGRNAADVLNSLQLMQDFGVNLICVEDGIDSSKDAGKLMISVLSAVAEIERENIRTQTMAGREQKAREGKWNGGFAPYGYKLENGNLVIAEDEVEVIRVIYDRYIHTNEGVAGVAKYLNRNGYTKKLRQNNTIPGFSRDFVKNVLYNPVYMGKIAYGRRRTEKKQGTRNEMHVVEQSEFPVYEGQHEAIISEEDWYLAQEKRKINSFKREKVNNPDHAHILSGILKCPCCGKSMYGNIAKAHSKDKKTRYYYYCKNTVTPTGHECSFRLNIEQTEINKFVAKVISAMVNNPRFVEAIQAKIGTAVDTEDMERQIAVLQGRLKQAFGTKSRLERQMDTLDINDAHYDRKILDLQRRYDEQYDTIEEIEVQIGELQSQIRSIQQEKISGDNIYRLLLAFDEVYHSATEAEQKEFMKAFIERIEMFPEKRKDGSWIKKIVFNFPVPVDGEEVKELPLETETTVESVVL

SEQ ID NO: 11137 - DNA, 50 bp, Clostridium innocuum
  source 1..50: mol_type = genomic DNA
cccttggaaactgaaacaactgtcgagacggttgtcttgctttccaaggg

SEQ ID NO: 11138 - DNA, 40 bp, Clostridium innocuum; identical to SEQ ID NO: 11133
  source 1..40: mol_type = genomic DNA

SEQ ID NO: 11139 - DNA, 50 bp, Clostridium innocuum
  source 1..50: mol_type = genomic DNA
cccttggaaactgaaacaactgtcttgacggttgtcttgctttccaaggg

SEQ ID NO: 11140 - DNA, 40 bp, Clostridium innocuum; identical to SEQ ID NO: 11135
  source 1..40: mol_type = genomic DNA

SEQ ID NO: 11141 - protein, 526 aa, Mesorhizobium amorphae
MKRAAIYARYSTDHQTDRSIEDQIALCTDFAKKQGLTVVSVFHDRARSGASILGRDGMLSAMDAGRDGGYDVLVVEALDRISRDQEDLAGIYKRLTHVGIEIRAVHDGRADIVQIGIRGLVGALYLQDLAHKVRRGMAGVVREGRNAGGRAYGYSTVPGKPGELVIKPDEAAIVVRIFEAFTAGNNPRDIAGHLNAENVPPPRGRYWQASTIYGNPKRAYGILQNAIYDGRIVWNRVHMVKDPDTGKRISRTNPKSEWQEVEAPHLRIVPAELFAAVNGRQRREHVAPHRKNGRILSGLLRCGACGSGMSIKDKMGKITRIMCTRAKEAKSCENIRPYALDDIEATVLSGLRSRLKDPKLLDHYVACYNDEHRSLYAGQGAEREKARQRLAAAEREHDRVLNGYIKGIISEQEAEQRLPLLKAEKADLERALSATPEPPKVVTLKPALVSRYIRELEELERVLAAGDELSEHGRNTVRNLVSTVTVHPAASGEKPTIQIDSYLSNMVDEALSQRFAVRGGRMVAGE

SEQ ID NO: 11142 - DNA, 50 bp, Mesorhizobium amorphae
  source 1..50: mol_type = genomic DNA
tcgggggggaagaatggtagcgggagagcgtttcgtacaatcccccccgg

SEQ ID NO: 11143 - DNA, 40 bp, Mesorhizobium amorphae
  source 1..40: mol_type = genomic DNA
aggggaaggtggtagcgggagagggacttgaacccccgac

SEQ ID NO: 11144 - DNA, 50 bp, Mesorhizobium amorphae
  source 1..50: mol_type = genomic DNA
tcgggggggaagaatggtagcgggcgagcgtttcgtacaatcccccccgg

SEQ ID NO: 11145 - DNA, 40 bp, Mesorhizobium amorphae
  source 1..40: mol_type = genomic DNA
aggggaattttgtagggggcgagggagatgcaccccaggc

SEQ ID NO: 11146 - protein, 563 aa, Maribellus sediminis
MRAIGYMRVSTTNQDLKRQVEKYKEFCTTKGYTALHPIEDFGKTGANFERAGFQQLMQLTTNDADLVVISELSRLSRKEEILDTLNSVQSIISKGLKLLFLDNPEKIYEGTLELTEVLLLSVAAYGAAQERLTTKRRNTEGKSVLFDNVPNAIVDGKIPYGFKKIPNNNGKHPKYLLAFDENEARVVRAMFNLVVKGSSVAEVARRLYDTDRRNRNGEIFTKQALSKLFSNPIYKGDRTRKGKTMQIEPLVKPEIWENAQLKIKENYQYGSTGTTMFNPLRGIIRCRCGRAMMVKNKGGGLLVYRCSDVQPFYMKNKCKYGDSIRFDLTNEVMFSLLQSIDFVEMSGNTQEKIEAYEKQITQIENQIIGDNDKKSSVKIEITSLEERYLNARTQSLADRVQEEIIKKEDEISSIDRAILKKTRTISQIRNQIRSLKEVAKTEDFTNLDINERAKLFRKYIKKIHYLPVTTMQGFYNVEFQFGVTEKIAIKKTTKSPVFVKVPPAFEITSENKLQVTSYDPALAKATFDFGAMTNQEITIQQFFNSYAEEFLDVDLSYRECNKP

SEQ ID NO: 11147 - DNA, 50 bp, Maribellus sediminis
  source 1..50: mol_type = genomic DNA
tggggttattttgacaatttatattcaaatattttgtcaatacagcccct

SEQ ID NO: 11148 - DNA, 40 bp, Maribellus sediminis
  source 1..40: mol_type = genomic DNA
cggaacctggaaaaaatattcgaaaagggcaattccccaa

SEQ ID NO: 11149 - DNA, 50 bp, Maribellus sediminis
  source 1..50: mol_type = genomic DNA
tggggttattttgacaatttatatttaaatattttgtcaatacagcccct

SEQ ID NO: 11150 - DNA, 40 bp, Maribellus sediminis
  source 1..40: mol_type = genomic DNA
agcaacatggaaaacacatttgaagatggaaattccccca

SEQ ID NO: 11151 - protein, 486 aa, Rhodococcus hoagii
MKTPHSAAIYARISSDQTGEGLGVARQLEDCRKLAADRGWIVGDEYIDNDVSAFKSRRRPEYERMLADLDAGDRDAVIVYNADRLTRRPIELEEFVTLCLRAGVQQVATVTADIEIGNDDGLFMARVLAAVAAKESARKSERIKRKAQQLAEQGMPHGGSNRPFGFEDDRITVRESEAAIIRQLAVRFLAGESLRSLCSWLDAEGVRTVRGGGWRTTSLKQMLISARIAGLRAHNGDIVAEAVWESIITPEQRMQILGKLASRQQSGRRTPRRYMLSGKLKCGNCGNTLFSSPRGDRRRYVCLSGPDHGGCGRLTVVAPPVEEWISAAVLHRLDTPEMGDLLAGGRSADERHGALLAEVDADKALMEELARMWSNREISAAEWKAAREPIEARIRSTNRQLEQLHGSHMLDGLVGAGAELRGDMGGAESGSSGGDHRGGTGLRDDPSGHSRCAGAGSEPGCPHVATMRPRFRRRRFAAVRRHPRHP

SEQ ID NO: 11152 - DNA, 50 bp, Rhodococcus hoagii
  source 1..50: mol_type = genomic DNA
agggcctattaatgattgacgaggttggtcactagtcgctaatatgccct

SEQ ID NO: 11153 - DNA, 40 bp, Rhodococcus hoagii
  source 1..40: mol_type = genomic DNA
gcggcagagtaggacgaggttgtcgaggtcggtgggtcca

SEQ ID NO: 11154 - DNA, 50 bp, Rhodococcus hoagii
  source 1..50: mol_type = genomic DNA
agggcctattaatgattgacgaggcgggtcactagtcgctaatatgccct

SEQ ID NO: 11155 - DNA, 40 bp, Rhodococcus hoagii
  source 1..40: mol_type = genomic DNA
ggggaagagaaggaagaggcgggcgaggaaggcgagtcca

SEQ ID NO: 11156 - protein, 520 aa, Paenibacillus larvae
MKNKIAIYVRVSTTKESQKDSPDHQKWACIEHCKQIDLDTADLLIYEDRDSGTSIVARPQIQEMISDAQKGLFNTILFSSLSRFSRDALDSISLKRIFVNALGIRVISIEDFYDSQIEDNEMLFGIVSVVNQKLSEQISVASKRGIKQSAAKGNFIGNIAPYGYQKVNIQGRKTLIVDIEKAKVVREIFDLYVNKKMGEKEITKHLNENAIPSAKGGTWGITSVQRILQNEIYTGYNVYGKYEIKKVYTNLKNIGDRKRKLVKKDQELWQKSEKRTHPEIISQELYKKAQEIRQIRGGGKRGGRRKYVNVFAKIIYCKHCGSAMVTASCKKPDKYRYLICSKRRRHGASGCPNDKWIPYYDFRDEVISWVVEKLKKMINSETGSEYSINFVSSINQNIGKEIDKINKLIESNRRLLFELRKSKMLGEIDEKQYGFEKEEYEKEILQLEEKLIKLTENERHDKDFEKIRKEIKQSVDELVTMGNYDDVEKTRIILSRLIQRIVVDSDGQIDVLTPLGVVKD

SEQ ID NO: 11157 - DNA, 50 bp, Paenibacillus larvae
  source 1..50: mol_type = genomic DNA
ttacgtgtttcaaaccatatctccaatgtaacatgttttgaaacacggaa

SEQ ID NO: 11158 - DNA, 40 bp, Paenibacillus larvae
  source 1..40: mol_type = genomic DNA
cgtacgcaatcatatctccaatgtgatgcaaaaattaaat

SEQ ID NO: 11159 - DNA, 50 bp, Paenibacillus larvae
  source 1..50: mol_type = genomic DNA
ttacgtgtttcaaaccatatctcctatgtaacatgttttgaaacacggaa

SEQ ID NO: 11160 - DNA, 40 bp, Paenibacillus larvae
  source 1..40: mol_type = genomic DNA
cacacacacttcactctcctatgtaatgcaaaaattaaat

SEQ ID NO: 11161 - protein, 568 aa, Streptococcus salivarius
MNRTLTISDYRQVDTSKLSDITVVYCRLSQDDGLDGDSNSITNQKKILLEVVKHEKLPNPILFVDDGFSGTNFDRPAISEALRLVENRQVSNFIVKDLSRLGRSYIKVGQLTEITFPSFDVRFIALNDGVDSSKPNETNSIFLPIKSLMDEMYAADTSKKIRAVVQSKARAGERVTVNPPYGYLKDPSNPKNWIIDPVASEVVKRIFQEAKSGKSLSEISKGLENDKIFKPDRHRIEIGLKPISASSNVESLPYFWTQETLSAILGREEYLGHTVNLRTHTKSYKDKRKVDNPKEGWLVFKNTQEAIIDQETFDIVQKMRSHKRSNQRYKNRAGHENLFAGLVFCGTCGRKHYFCPFQSKTGLNHDHYKCSGYRKPIDGCENPHYIQKSALIEIISDKLRQTIQEAHFNQEAFLKKLEQQSQAQFSKDNKRQQLQLQKDEHRSKEIDSIIQKLYEDNLLGKISDERFVKLSQSYEEEQKQLQISISDLTEKLAKQQEDSLNISKFMTRISKYTELPKLTVEIVNELIDKIVIHKPTGTKRNRIIQIDIYYNFIGKLDKEKSEPNDLAR

SEQ ID NO: 11162 - DNA, 50 bp, Streptococcus salivarius
  source 1..50: mol_type = genomic DNA
aaactgctaggtgtcaggtcagccgaagatagcttgacattcagcagtct

SEQ ID NO: 11163 - DNA, 40 bp, Streptococcus salivarius
  source 1..40: mol_type = genomic DNA
ataagaaaaaagctcggaagattccgagctttatttgata

SEQ ID NO: 11164 - DNA, 50 bp, Streptococcus salivarius
  source 1..50: mol_type = genomic DNA
aaactgctaggtgtcaggtcagccagagatagcttgacattcagcagtct

SEQ ID NO: 11165 - DNA, 40 bp, Streptococcus salivarius
  source 1..40: mol_type = genomic DNA
ataggaaaatagattggatagttccatggtttatctgata

SEQ ID NO: 11166 - protein, 565 aa, Streptococcus salivarius
MNRTLTISDYRQVDTSKLSDITVVYCRLSQDDGLDGDSNSITNQKKILLDVVTRENLPNPILFVDDGFSGTNFDRPAISEALRLVENRQVSNFIVKDLSRLGRSYIKVGQLTEITFPSFDVRFIALNDGVDSNKPNETNSIFLPIKSLMDEMYAADTSKKIRAVVQAKAKAGERVTTNPPYGYLKDSNNPKNWIVDPVASEVVKRIFQEAKSGKSLSEIAKGLENDKIFKPDRHRIEIGLKSISSSPNVETLPYFWTRETLSAILGREEYLGHTVNLRTRTKSYKDKRKVDNPKEGWLVFKNTHEAIIDQETFDIVRKMRNHKRSNQRYKNRIGHENLFAGLVFCGTCGRKHYFCPFQSKTGLNHDHYKCSGYRKPIDGCENPHYIQKSALIEIISDKLRQTIQEAHFNQEAFLKKLEQQSQAQFSKDNKRQRQQLQKDEYRSKEIDNIIQKLYEDNLLGKISNERFVKLSQSYEEEQKQLQTSISDLTEKLAKQQEDSLNISKFMARISKYTELPKLTVEIVNELIDKIVIQKPTGTKRNRIIQVDIYYNFIGKLNNEKSEPNN

SEQ ID NO: 11167 - DNA, 50 bp, Streptococcus salivarius
  source 1..50: mol_type = genomic DNA
aaactgctatatgtcaggtcagcttcagacagcctgacactcagcactct

SEQ ID NO: 11168 - DNA, 40 bp, Streptococcus salivarius
  source 1..40: mol_type = genomic DNA
tatcaaataaagctcggaatcttccgagcttttttcttat

SEQ ID NO: 11169 - DNA, 50 bp, Streptococcus salivarius
  source 1..50: mol_type = genomic DNA
aaactgctatatgtcaggtcagctctagacagcctgacactcagcactct

SEQ ID NO: 11170 - DNA, 40 bp, Streptococcus salivarius
  source 1..40: mol_type = genomic DNA
tatcagataaaccatggaactatccaatctattttcctat

SEQ ID NO: 11171 - protein, 557 aa, Eisenbergiella tayi
MMANMTEMLSYHNVLSLDALTALYCRLSVDDANDGDSNSIQNQKEMLERYCKENGFTNYRFYVDDGYSGTTFDRPDFQRMVADVRAGLVKRVIIKDMSRFGRDYLQVGMYTEMIFPEYEVHFVAVNDGVDSQKGENDLTPFRNLFNEWYARDCSKKQRAVKRMKGMSGQRISSNPPYGYIKGEGGQLVPDPEAAWVVKLMFDLAAQGLGPVRIANILTKKKIPTPGTLAFRRTGKKRNYHPEAPYNWSDSTIANILEYKEYLGHTVNFKTYSKSYKFKKRLPTPEDQQMIFENTHPALVEQEVWEQVQRLREGRPRPTKQGEMALFSGLLFCADCGSPLRAHRGQNISKNQECYCCGKYRDRTNSCTMHYIRAVVLENLVLENLKQTVTFALENEQEFVRRLMNRSAKEQQKQIQSMKKELAAKERRIGELDNIIKRLYEDNISGKLSDERFKKLSADYEKEQRDTCSEIADIQKLVNEAESKVIKIDSFLKMARKYTSFEELSRGMLHDLIEKIVIHEGDKSSGHRQQKIDIYYTFIGEVGATQLVAQLELKGKAA

SEQ ID NO: 11172 - DNA, 50 bp, Eisenbergiella tayi; identical to SEQ ID NO: 10147
  source 1..50: mol_type = genomic DNA

SEQ ID NO: 11173 - DNA, 40 bp, Eisenbergiella tayi
  source 1..40: mol_type = genomic DNA
tacgatacccttttctcattttgccggacggcttttttct

SEQ ID NO: 11174 - DNA, 50 bp, Eisenbergiella tayi
  source 1..50: mol_type = genomic DNA
aagtttccttaaccggctcccgcttcagctggtgccgattaaggaaacta

SEQ ID NO: 11175 - DNA, 40 bp, Eisenbergiella tayi
  source 1..40: mol_type = genomic DNA
taagacaccattttatcattctggcaatctgcttttttct

SEQ ID NO: 11176 - protein, 553 aa, Phocea massiliensis
MMKKEKVKVYIYTRVSTAMQIDGYSLDAQKSRMKAYAEFNDYEIVGEYEDAGKSGKSIEGRVEFNRMMEDIKSGKDGVSYVLVFKLSRFGRNAADVLSTLQVMQDFGVNLICVEDGIDSSKDAGKLMISVLSAVAEIERENIRVQTMEGRIQKAREGKWNGGFAPYGYKLEKGQLFINEEEAAAIRVIFDQYVHTDTGANGLAKYLATHGIHKIQRQNGKNPLFDAALIRRILKNPVYCGKIAYGRRRTEKVHGTRNDYRLVEQDDYLLVDGLHEGIVSEELWHEAQVKLLAQAEKYEHVNRGKDTKIHLLSGIVKCPVCGVGMYGNKSIKHKADGSKYKDFYYYGCKHRTMTRGHKCDFKKQIHEELLDSAVAEVIVKLVSNPKFAAMMQEKINMKVDTSAIEQEIAAHEKQLRQSYSVKVRLMDEIDSLDPDDKHYIKRKADLDDRLYKMYDKIEDTENQLVAARAKKMAIEAEKLTGDNIYKVLIYFDKLYSVMDDQEKRQLMESLLSEVQIYEERQPNGQWLKSIKFKLPIIAEDMSLSLDNDAHIETV

SEQ ID NO: 11177 - DNA, 50 bp, Phocea massiliensis
  source 1..50: mol_type = genomic DNA
agtttggacaacgatgcacatatcgagacggtttgcttgttgtccaaact

SEQ ID NO: 11178 - DNA, 40 bp, Phocea massiliensis
  source 1..40: mol_type = genomic DNA
cccccgcacctgccatgtggagacggttgtcttgctttcc

SEQ ID NO: 11179 - DNA, 50 bp, Phocea massiliensis
  source 1..50: mol_type = genomic DNA
agtttggacaacgatgcacatatcaagacggtttgcttgttgtccaaact

SEQ ID NO: 11180 - DNA, 40 bp, Phocea massiliensis
  source 1..40: mol_type = genomic DNA
tccttgctcctgccatgtgaagaaggttgtgtttgcttcc

SEQ ID NO: 11181 - protein, 589 aa, Pseudomonas composti
MKPKAYSYIRFSSPEQSRGDSQRRQREAAAKYAEEHDLDLVQDKDYQFFDAGISAYTGKNVNDEGKLRRFYEYVKSGKIESGSYLLVESLDRLSREDVLIALPRFIDLLNEGINVVTLADNFIYTKGADVPQLIMSIVHMARAHHESKLKGERVSKAWRKKQDYAREHLTPLGSVCPYWLDFKGGEYIVNEDKAEIVRQIFSMTIAGYGQIAIVKHLNKNNVPVFGSIKRNKSGLWGASSIAKILCNRSVLGEYQPMVYEQKRRRENGSVIEGYYPPVITPEIFYTASYVRTQRHVSKDTKQSKDFNVWSKLLVCSKCRSPMHLVNKGQPPKGFKYLRCYTAAKGKCTAKLIRLNVADIAFKEVLVMFNSMSLVQKSEKESRSRIAELKGRIDSLRLRLVQFEEMLMEAPSIALSKAASAKEEELMLCERELQIENAEMETTAIFNKADFFEKLDLKTYEGRSSANLYLRNLDVQVRAGFNGHEYFFVAITDPKKPKANFAIWLGEDLIPKITPLSKEMMVNVINQGDLPNARMVVPMARHLQELIDETEGNGRGEITVALDSIPALEWSPGAEVLKNKLLKSVGLDPD

SEQ ID NO: 11182 - DNA, 50 bp, Pseudomonas composti
  source 1..50: mol_type = genomic DNA
gtgggtgtattcgtttacaacatgagcagcttatgttatattacacccaa

SEQ ID NO: 11183 - DNA, 40 bp, Pseudomonas composti
  source 1..40: mol_type = genomic DNA
gccaggagggccactgagtagcaggttgtgcgagccagct

SEQ ID NO: 11184 - DNA, 50 bp, Pseudomonas composti
  source 1..50: mol_type = genomic DNA
gtgggtgtattcgtttacaacatgcccagcttatgttatattacacccaa

SEQ ID NO: 11185 - DNA, 40 bp, Pseudomonas composti
  source 1..40: mol_type = genomic DNA
gccgagagggccactgagccccagcctcagcgacacagct

SEQ ID NO: 11186 - protein, 553 aa, Kocuria rhizophila
MTPNIASTLAPSEAISPGAVDSPVLLAVSYLRVSTREQAERGGTEEGFSIPAQREANYRKADELSARIVREFVDAGESARSADRDGLQEMLAFIAATRVQFCIVHKLDRLARNRADDVAIHQALLSAGVTLVSATESIDQTPSGMLVHGIMSSIAEFYSRNLATEVTKGLTQKVAQGGTPMRAPIGYLNVRKTDENGREMRTVEVDPDRAPLITWAFEQYATGETSVTGLLRELTARGLLTVPTPKRPSKPLGKNTLYKLLTNPYYAGVIRYKGALHPGAHEPIVEPELFDKVQSLLRARTAKMTRHVQHAHHLKGLLHCGTCGSRMLLDFATNPRGTTYAYFICSGRAAKKTTCTRRAVPVAVAERLVADSYASITISDATYQRLAADVDAAFDKRNAGNDQELAHLTANRARLEAESDKLLAAHFADAIDLDTLKRHQDRIRAGLADVNRRLAEHSEHHTGGRAFLHDSLRLLTDAHRAYEHSGDADRRIANQAFYTRLDITDDEQLRPRLAEPFATIFRDAHAGGDEGKEAKREHTTSFDVACSRKTLLV

SEQ ID NO: 11187 - DNA, 50 bp, Kocuria rhizophila
  source 1..50: mol_type = genomic DNA
cgtgttcccgtaagacacttctggtggaagcaatggggcgttgcaggaac

SEQ ID NO: 11188 - DNA, 40 bp, Kocuria rhizophila
  source 1..40: mol_type = genomic DNA
cgggcggggcgtgcaccggtgggccctgccgggatcgaac

SEQ ID NO: 11189 - DNA, 50 bp, Kocuria rhizophila
  source 1..50: mol_type = genomic DNA
cgtgttcccgtaagacacttctggctgaagcaatggggcgttgcaggaac

SEQ ID NO: 11190 - DNA, 40 bp, Kocuria rhizophila
  source 1..40: mol_type = genomic DNA
agggcggggcgctcccccgctggctctgccgggttggatc

SEQ ID NO: 11191 - protein, 502 aa, Blautia wexlerae
MEFIREDCIYARQSVDRKDSISIESQIDFCKYELKGGSCRVFKDKGYSGKNTDRPEFQKLLGEIRKGKVRRVIVYKLDRISRSILDFATMMELFQEYDVEFVSSTEKFDTSTPMGRAMLNICIVFAQLERETIQKRVTDAYYSRCLKGFHMSGQAPYGYQLEPTVVEGIRTKKMVADPVAADHVRLMFEMYAEPETSFGDITRYFEEHDIKIYGKSMFRTFLSQLLRNPVYAQADLELYEFFKSQGAAIVNDASDFAGTNGCYLYQGRDVKEDKDRCLKDQILVIAPHEALISSDTWLKCRKKLMANTTFQQGRKPKNTWLAGKIKCGHCGYALKATHVPNSTGYFRCTKRTENKGCPGCGKIRKEEFEQFIFSAMQEKFKDFQILHGREEKVNPKLTAYQVELAQVEAEIEKLLDTLTGANATLLAYANKKIEELDTRRQTISKAIAELSVETISPQQIKKLSYYLDNWDSIDFDDKRKAADGLISTIKATSDRVQIEWKI

SEQ ID NO: 11192 - DNA, 50 bp, Blautia wexlerae; identical to SEQ ID NO: 2062
  source 1..50: mol_type = genomic DNA

SEQ ID NO: 11193 - DNA, 40 bp, Blautia wexlerae
  source 1..40: mol_type = genomic DNA
atttttatttcaatatgttttccaagtgcatttgcatatt

SEQ ID NO: 11194 - DNA, 50 bp, Blautia wexlerae
  source 1..50: mol_type = genomic DNA
tttgtaccccttgtacaccgatgtcagcaacggtgtacaaagggaacata

SEQ ID NO: 11195 - DNA, 40 bp, Blautia wexlerae
  source 1..40: mol_type = genomic DNA
gggtatattccaatatgtccatcaagtgcattttcatatg

SEQ ID NO: 11196 - protein, 628 aa, Anaerotruncus colihominis
MRKNEKITALYERLSRDDFGKDDDQQRESNSISNQKAMLEEFAARQGFTNIVHFTDDGISGTCFDRPGFLAMMKEVEAGNVEYLCIKDMSRMGRDYLKVGQIMEILRQRGVRLIAINDGVDSARGDDDFTPFRNIMNEYYARDTSRKIRSTFQSKGKSGKHLTGTVIYGYLWNEARDQWLVDPEAADVVKRIFAMTIEGYGPYQIASKLKEEKVLIPSAYLAQHGEGVNKNKTFKDVYGWGSSTICNLLEKREYLGHTINFKTRKHFKDKKSHYVPEDEWTIFENTHEAIIDQQTFDLVQKIRGNVRRYPDGWGDAAPLTGLLYCADCGGKMYVHRTNNGKRISQYTCSQYSKVPVGKLCTTQHRINEDVVLSLVSEMLKAIAEYAKHDRAEFVRVVQEAQSSQQTTEVRKQRTRLATAKQRVSELEVLLCKIYEDNILGKLSDSRYATLDAQYEKEQSELTAEISVLEKAVKSHEKHEKDADRFIALIDKYENFDKLTIAMLNEFIEKILVHERDRKGSIQTTQEVEIYFNFVGRFVPPAFGEVELTPEELEEIRKREERKDRLHQNYLKRKASGAQKRYEDKIKKRKKAEIEAKKAAIRAEDIAKGVFVSVSSLPQREPMKGVQSA

SEQ ID NO: 11197 - DNA, 50 bp, Anaerotruncus colihominis; identical to SEQ ID NO: 57
  source 1..50: mol_type = genomic DNA

SEQ ID NO: 11198 - DNA, 40 bp, Anaerotruncus colihominis
  source 1..40: mol_type = genomic DNA
caaattcaagctggccgccggcaagaccctgaaatccatc

SEQ ID NO: 11199 - DNA, 50 bp, Anaerotruncus colihominis
  source 1..50: mol_type = genomic DNA
aaaagtccttgacttttcgtctctgctgttgtatgctctaaaagacttct

SEQ ID NO: 11200 - DNA, 40 bp, Anaerotruncus colihominis
  source 1..40: mol_type = genomic DNA
caaattcaagctgtcaaccgcacagaccctgaaagcctgt

SEQ ID NO: 11201 - protein, 612 aa, Enterococcus faecium; identical to SEQ ID NO: 471

SEQ ID NO: 11202 - DNA, 50 bp, Enterococcus faecium; identical to SEQ ID NO: 9697
  source 1..50: mol_type = genomic DNA

SEQ ID NO: 11203 - DNA, 40 bp, Enterococcus faecium
  source 1..40: mol_type = genomic DNA
gaactgttgattttgttaggggaagagcaagcctatgtca

SEQ ID NO: 11204 - DNA, 50 bp, Enterococcus faecium
  source 1..50: mol_type = genomic DNA
agaaagtccttgacaagttgttactggagtaatagaattaaggagaacac

SEQ ID NO: 11205 - DNA, 40 bp, Enterococcus faecium
  source 1..40: mol_type = genomic DNA
gcactattaattttcttcgtggaacagccaggctatgtta

SEQ ID NO: 11206 - protein, 618 aa, Blautia faecis; identical to SEQ ID NO: 11111

SEQ ID NO: 11207 - DNA, 50 bp, Blautia faecis; identical to SEQ ID NO: 11112
  source 1..50: mol_type = genomic DNA

SEQ ID NO: 11208 - DNA, 40 bp, Blautia faecis
  source 1..40: mol_type = genomic DNA
tattggctggaaaccatctgacttggaacagagggaagga

SEQ ID NO: 11209 - DNA, 50 bp, Blautia faecis; identical to SEQ ID NO: 11114
  source 1..50: mol_type = genomic DNA

SEQ ID NO: 11210 - DNA, 40 bp, Blautia faecis
  source 1..40: mol_type = genomic DNA
ttttgtctgaactccatatagtttggaacagagggaaaaa

SEQ ID NO: 11211 - protein, 540 aa, Coprobacillus cateniformis
MKQPYNTTIYNTALYLRLSRDDETYGDSVSIETQRTILQQYAKEQGLHVVGEYVDDGWSGTNFERPDFQRMMDDMEAGKVNCIVTKDLSRFGREHVMMDYYLEFLFPEKRVRYIAVAENEDTEKGLSDFVPFKNLFNEWFAKDTSRKVKTAFKAKFAAGQRISAYAPIGYRKHPEIKNKLVIDEETRWIVEKIFDLAFHGRGAASITKILIAEKVPTPGFINFQRDGTFANIYVGAPEEKSYAWTIAQVKSIMKDETYIGHTVHYRETNISFKNKRRIRKPQSEWVRVENTQEAIISEPVFRQVQEQIASRRRERKNGTTQIFAGLIKCADCGWSLAYGENRQNSKPYGYYHCSKNGQGTRQCSMHYIRYDVLYAYVLSRLQYWSGLIQHNEGQLLKRLLNASGKGQAAAKKKQAAELKQAEKRKAEVDTLFTRMYEDWAAGRITEYNFNMLSGKYQSEQVELDGKIQQLQAVIAAESQNEADAEKWIAVMKECINPTELTAELLNTLIEKIFVHEVVKSEDGSREQEVEIFYRFIGKID

SEQ ID NO: 11212 - DNA, 50 bp, Coprobacillus cateniformis
  source 1..50: mol_type = genomic DNA
caatatctttaactatgtgataccgggctttcacttagataaagatacca

SEQ ID NO: 11213 - DNA, 40 bp, Coprobacillus cateniformis
  source 1..40: mol_type = genomic DNA
agtaagcaaatgggagtctggtgcttctattcctgaatta

SEQ ID NO: 11214 - DNA, 50 bp, Coprobacillus cateniformis
  source 1..50: mol_type = genomic DNA
caatatctttaactatgtgataccacgctttcacttagataaagatacca

SEQ ID NO: 11215 - DNA, 40 bp, Coprobacillus cateniformis
  source 1..40: mol_type = genomic DNA
aattagcaaatgtgactgtactgcctctaatcctgatttc

SEQ ID NO: 11216 - protein, 511 aa, Anaerobutyricum hallii
MNIAAYCRVSTDKADQLNSLEAQKEFFSEYTQRTGDNLVRLYADEGISGTKIKNRKEFLRMMVDAEHGLFDMVVVKDISRFARNTVDLLQNVRKLKALGIETQFLTANMTSMGNSEFVLTIFGALAQEESANTSKRVKFGKKMNAEKGRVPNIVYGYDKTIGDYFNLAINEEEAAVIRQIYRWYIEEGYGAAKIANMLNAKGIRTKRNCQWSQNATCRILTNELYTGKIINGKQEVADFLTGQRTEKDETEWMVTERPELRIIEPEMYEKAQEILESRSKAFKLTKERQSNKYLFSTLIKCKECGWSFRRTVRTYKNTYIRWVCSGHNGRGADSCPNAQTVDEEELIEVLSEYFSELLKAKKNVIRHVTSEFQRVYKAKDENLNYEKELNAQLRKLQKMRQKYMDMYTDDLITREELNEKIGGTKQEIERLENELKMVAYHLTKGEQLETILNRTFKEIEDISDVRQMTNAQLKRIIQKIEVDKDGNVDIYLRIFGDLGLDETVLISDNQT

SEQ ID NO: 11217 - DNA, 50 bp, Anaerobutyricum hallii; identical to SEQ ID NO: 9937
  source 1..50: mol_type = genomic DNA

SEQ ID NO: 11218 - DNA, 40 bp, Anaerobutyricum hallii
  source 1..40: mol_type = genomic DNA
ggttagtaagagcacggtacataaagacgtaacaagcagg

SEQ ID NO: 11219 - DNA, 50 bp, Anaerobutyricum hallii
  source 1..50: mol_type = genomic DNA
ccgttctaattagtgacaaccaaaattatggaagtaacaatatagaacgg

SEQ ID NO: 11220 - DNA, 40 bp, Anaerobutyricum hallii; identical to SEQ ID NO: 1975
  source 1..40: mol_type = genomic DNA

SEQ ID NO: 11221 - protein, 567 aa, Oceanobacillus caeni
MARVKNKRNKQQHKVWNVAVYIRLSRDDGNDESLSVTNQRKIIQEYLENTFEGEYTIVGEYVDDGLSGTTDYERLAFQRMIQEVESGVVNCIVCKTLARAFRNYSDQGYFLERIFPLYGVRFISLGDPAIDTYLQPEIAQGMEVPITGLMNDRYAARTSNDIRRTFDMKRRNGEFIGAFAPYGYKKNPENKNHLIIDEEAAQIVRNIYHWFVYDGMSKSGIVKHLNELGIPTPTKYKHNKGLKHYTPNYAKNDGMWSLGTVFRILQNEVYIGTMIQGKQRVISYKVHDKIAQPEEEWYVVENTHEPIIDQVTFEKAQNLGKRDTRTAPSQKRVYLFSGFLRCADCNMGMTRKSSRRRTKAGVKEYTYYVCSTYAVKNKNKCTRHSIKVEDLAEAVLKTIQTQIALVGNMSEIISEINQQPIVRTHSKQLEQLLKKQKQELEKITCVTDNLYMDWKCGDITRAEYMRMKAKFEQQADEAKQSIHHIEMEIAIAQKGIGVNDPYLKTFLKHRNIETLDRGLLLELIDTIYVHENNEITIQFTFADQHKRMLEFMKENNKQHMATKDQVM

SEQ ID NO: 11222 - DNA, 50 bp, Oceanobacillus caeni
  source 1..50: mol_type = genomic DNA
gtttgtctatatatctatgcaccattaggtacatgtttatatagacaatc

SEQ ID NO: 11223 - DNA, 40 bp, Oceanobacillus caeni
  source 1..40: mol_type = genomic DNA
agttgatttacctgcgccatttggacctattattcctact

SEQ ID NO: 11224 - DNA, 50 bp, Oceanobacillus caeni; identical to SEQ ID NO: 11222
  source 1..50: mol_type = genomic DNA

SEQ ID NO: 11225 - DNA, 40 bp, Oceanobacillus caeni
  source 1..40: mol_type = genomic DNA
agttgatttgcttggaccatttagacttattatttttaat

SEQ ID NO: 11226 - protein, 565 aa, Clostridium tyrobutyricum
MGFITLTNDVTMEQVRKRVAIYCRVSTIEQAEEGYSIDEQQRLLIEWCKKMDYTVYKCYSDRGISGKDIKNRPELKQLLNDAEDKQFDMVISWKINRISRKLADVLKIVDVLEQNNITFKSYSEPFETDTPAGKMQFQMMALIGEFERGTIAQNVKMGMCAKAKSGEWCGGTVLGYDLVAVESLEGAKRRKTKLTINEKEAETVRFIFNEYGNGKGYKAITNQLNKLGHKTKKGNNFSVGSIKDIITNPVYIGKVRYNVRQNWSEKRRRNINANPIITDGVHEAIIDEKLWDKVQAILENKKGKPSRVHDGEFPLTGILRCPKCGAGMVISRTTNKLADGTKKSIAYYACGNWKNKGTAVCTSNSIRVEKANEYVFNKLSELLSNDKMVKTIVSNINKERIRKVNPTKKELTRIDKELEKLDKKKGKLFEAYEDEILTKEEFQARKNELTERVKKLEEEKAPLLVTLSDDIKEELPYEFIKSILENFSKVLTESTSREQQKKLLHMIISEITINELREIDSIKININDNLVNYLSKEEGVSIKGTPSSFILKNVGISTLSLNIAI

SEQ ID NO: 11227 - DNA, 50 bp, Clostridium tyrobutyricum
  source 1..50: mol_type = genomic DNA
aacctcacttgaaagtgatacggagaaccgtatcataagtaaatgaggtt

SEQ ID NO: 11228 - DNA, 40 bp, Clostridium tyrobutyricum
  source 1..40: mol_type = genomic DNA
gtttagaatattgaaaggagaaccttaccataaataacgt

SEQ ID NO: 11229 - DNA, 50 bp, Clostridium tyrobutyricum
  source 1..50: mol_type = genomic DNA
aacctcacttgaaagtgatacggattaccgtatcataagtaaatgaggtt

SEQ ID NO: 11230 - DNA, 40 bp, Clostridium tyrobutyricum
  source 1..40: mol_type = genomic DNA
atttagaataatgaatgaattacatcaccttaaataattt

SEQ ID NO: 11231 - protein, 567 aa, Streptococcus oralis
MNRTLTISDYRQVDTSKLSDITVVYCRLSQDDGLDGDSNSIINQKKILFDVVARENLPNPILFVDDGFSGTNFDRPAISEALRLVENRQVSNFVVKDLSRLGRSYIKVGQLTEITFPSFDVRFIALNDGVDSNKPNETNSIFLPIKSLMDEMYAADTSKKIRAVVQAKAKAGERVTTNPPYGYLKDSNNPKNWIIDPVASEVVKRIFQEAKSGKNLSEISKGLESDKIFKPDRHRIEIGLKSISSSPNVETLPYFWTRETLSAILGREEYLGHTVNLRTRTKSYKDKRKVDNPKEGWLVFKNTHEAIIDQETFDIVQKMRSHKRSNKRYKNRAGHENLFAGLVFCGTCGRKHYFCPQEKNGLNHDHYKCSAYRKPIDGCENPHYIQKSALIEIVSDKLRQTIHECQLDQETFLKKIEQQSQAQFCKDSKRQQLQLQKDEYRSKEIDTIIQKLYEDNLLGKISDERFVKLSQSYEEEQRQLQTSISDLTEKLAKEQEDSLNISKFMTRISKYTELPKLTVEIVNELIDKIVIHKPTGTKRNRIIQIDIYYNFIGKLNNEKSEPNDLAR

SEQ ID NO: 11232 - DNA, 50 bp, Streptococcus oralis
  source 1..50: mol_type = genomic DNA
aaactgctatgtgtcaggtcagctatagactggctgacactcagcactct

SEQ ID NO: 11233 - DNA, 40 bp, Streptococcus oralis
  source 1..40: mol_type = genomic DNA
agaagaataaaagctgggaattcccagcttttttaatctt

SEQ ID NO: 11234 - DNA, 50 bp, Streptococcus oralis
  source 1..50: mol_type = genomic DNA
aaactgctatgtgtcaggtcagctggagactggctgacactcagcactct

SEQ ID NO: 11235 - DNA, 40 bp, Streptococcus oralis
  source 1..40: mol_type = genomic DNA
agaagagtaaaggatgggaggacccagcttttcctttcat

SEQ ID NO: 11236 - protein, 552 aa, Neglectibacter timonensis
MKQLNRQSSTIATDKITALYCRLSRDDELQGDSNSILNQKAILQKFADDNGFGNTSFFVDDGFSGTNFERPDWQRLMALVDEGKVGTVIVKDMSRLGRDYLKVGYYTEVVLPGADVRFIAINNGVDSANQQDSDFTPFLNIINEWYAKDTSKKIRAVFKAKGESGKPLCTNPPYGYLKDPDDKHHWIVDEVAADVVRDIFKMCVAGKGPSQIAKALSQRQIPVPTVHLHRMGINTPAREPEDIYAWQQRTVADILVKMEYLGHTVNFKTQKKSYKSKKKVNNDPSEWVIFENTHEAIIDQETFEIVQNIRNGRRRLTPMGEMPVLSGMLFCADCGAKLYQVRARGWTHEQEHFVCATYRKQKGKCTSHQIHNVQVEQILLTEINRMLAFVRDREGEFVELLTKKNERDLNRQFREYSRELEQATQRITKLDGIIQRLYEDNLDGKISDERFAKMTATYEQEQKDLQARVIVLRETLSKAKAQRLNIDSFLAQVKKYTEVKELDAEIIRALVERIDVFKPEKVPGTRTKKQTILIHWNFIGAVELPQEQKKSA

SEQ ID NO: 11237 - DNA, 50 bp, Neglectibacter timonensis
  source 1..50: mol_type = genomic DNA
taaaatcccttagtgagacccccttttggagcgttcacttagggattatt

SEQ ID NO: 11238 - DNA, 40 bp, Neglectibacter timonensis
  source 1..40: mol_type = genomic DNA
aaaacggagaaactcccgttttatggcgcattttttattt

SEQ ID NO: 11239 - DNA, 50 bp, Neglectibacter timonensis
  source 1..50: mol_type = genomic DNA
taaaatcccttagtgagacccccttatggagcgttcacttagggattatt

SEQ ID NO: 11240 - DNA, 40 bp, Neglectibacter timonensis
  source 1..40: mol_type = genomic DNA
agaaaggagtaactccctttatatgaagattttttttttt

SEQ ID NO: 11241 - protein, 598 aa, Ruminococcus torques
MNGNEKYIAIYSRKSKFTGKGESIGNQIELCKEYIQTHYTEIPQDHILVYEDEGFSGGNLNRPDFKKMMEAARQRKFKAIIVYRLDRISRNISDFSSLIEELSRLDIAFISIREQFDTGTPMGRAMMYIASVFSQLERETIAERIRDNMHELAKTGRWLGGTTPTGYASESVQKVTIDGKAKKACKLKLIPEESEIVRLIYSLYIEHDSLTSVEAELIKRGLKTKNNKLFTRFSIKSILQNPVYMIADVNAYNFFVKENADLNSAKDEFDSVHGMMVYNRTKQEKGKAVTYLPPDEWIVAVGLHQGIVPGKVWISVQESLDRNKSKAYRKPRNNEALLTGLLYCTCGSRMYPKISKRKTADGKPIYTYVCKLKERSKRSMCNSKNANGNTLDLAVIEQIKLLEDDKGFFIDQLEQSRKFYTGNRAAYEDQLASIRHEKEELEKKIEGLVDSLADLGDSTVRNQVARRIEQLNQKCEETDTRIHELEALTSQHTFSDIEFDVMRQLLSVFKTSIDEMTVEQKRAAIRTLVRKVVWDGVNAHIILFGVQDDEIEYPPLSYQANEADSTEDDLEELERFSDVDYEDEIADGSKTHWGEDSK

SEQ ID NO: 11242 - DNA, 50 bp, Ruminococcus torques
  source 1..50: mol_type = genomic DNA
aaactcattggggtgaggatagcaaatgctatcctatcgccaatggggtt

SEQ ID NO: 11243 - DNA, 40 bp, Ruminococcus torques
  source 1..40: mol_type = genomic DNA
tgcttccagatgcatagaaaatgaaattcttatgtatctt

SEQ ID NO: 11244 - DNA, 50 bp, Ruminococcus torques; identical to SEQ ID NO: 11242
  source 1..50: mol_type = genomic DNA

SEQ ID NO: 11245 - DNA, 40 bp, Ruminococcus torques
  source 1..40: mol_type = genomic DNA
tcattccagatgcacagaaaagaaatattttatttatctt

SEQ ID NO: 11246 - protein, 554 aa, Candidatus Thiodiazotropha taylori
MTQRISIYARYSSDLQSDASIEDQIRLCSEKAASEGWEVINCYTDAGISGASLMRSGIQALLAAAMKGEFDILLAEALDRLSRDQEDIAGIYKRMEFAGVKIITLSEGEISSLHIGLKGTMNAMFLKDLADKTRRGLRGKVENGKSGGGLAYGYKVVKQFNASGDAIKGDREIDEAQADIVRRIFHEYAYENTSPKAIAAGLNEDGIACPSGKAWGQSTINGNRRRGTGILNNHLYIGELVWNRQRFIKDPSTGRRVPRLNPENQWIRQSVPELRIISESLWNAAKARQKELDKRSGHLGTRKRPQYLLSGLLVCGACGGGFSKINSERYGCSAARNKGDSVCENRKTIKRSELESTVLNALQSHLMRDDLVQVFCEEYTRHMNSLRAAQNSSLARYKAEATKLARERENIIQAIKDGVPADMIKDELERVTSRQSELTELMKDQSTEPQPFLHPAMAHRYQEEVAALRKALTEQQAGEAREHVRALIEKIVLTPRADRDDLSIDLYGDLAGILKISMRNKPMKFKGNKEKRLEPMTANDNHNFEPSVQLVAGA

SEQ ID NO: 11247 - DNA, 50 bp, Candidatus Thiodiazotropha taylori
  source 1..50: mol_type = genomic DNA
gccgtctgttcaattggtagcgggggctggcttccaacggtatctaccat

SEQ ID NO: 11248 - DNA, 40 bp, Candidatus Thiodiazotropha taylori
  source 1..40: mol_type = genomic DNA
agatttaattggtagcgggggctggatttgaaccaacgac

SEQ ID NO: 11249 - DNA, 50 bp, Candidatus Thiodiazotropha taylori
  source 1..50: mol_type = genomic DNA
gccgtctgttcaattggtagcgggtactggcttccaacggtatctaccat

SEQ ID NO: 11250 - DNA, 40 bp, Candidatus Thiodiazotropha taylori
  source 1..40: mol_type = genomic DNA
agatttatttgatagcccatatagggtttgaacccacgac

SEQ ID NO: 11251 - protein, 577 aa, Ruminococcus lactaris
MISNSAATHAKVAIYIRVSTLHQIDRDSLPMQRQDLIAYAKLILNTDDVTIFEDAGYSGKNTIRPEFQKMMSQLRTGTYTHLLVWKIDRISRNLLDFAEMYQELKNLGVTFVSKNEQFDTSTAMGEAMLKIILVFAELERNMTSERVTATMISRASNGQWNGGRIPYGYDYDPEEQAFSFNSDEYNIAHLIHDKYEELRSLVYLARYLNEHGYRTRAGNDWSPVSLDIILRSVFYCGDYQYNRLKEGDRQRPKDKSEWITVKDHHLAIVSREQKERILALLESNRRLKSFRKSGKSKYTHIFSGLLICGNCGQPMTSSISTVKKTTGRRYSLYFCPTHRKSKLWCTGKSTSDPIVGEFVFNYILNMLNAQKAFSPETSIQELEQQLLSGDTFSPVVAIAPDGLQDLFHTLRTGTVKGEVFGKDVKIKTDSEPPLQLSKLKKEKVRLERAIDRLNKLFLYSEKAMSESEYLTQKIQLSDALEEVEDKLAFLASEDSLQQSITDDEFIAKASNFILSQKLTDRNYVSFQSLSATVSPEVLDSFLSSIIDNIVFKDGAIHSITFRNGLSHTFIYKEKPEV

SEQ ID NO: 11252 - DNA, 50 bp, Ruminococcus lactaris
  source 1..50: mol_type = genomic DNA
tcactctacaaaatcatcattgcatcccccatgtagagggtgtgccttca

SEQ ID NO: 11253 - DNA, 40 bp, Ruminococcus lactaris
  source 1..40: mol_type = genomic DNA
atctttgatgaacatcgcatcaccaaaactgaagaatctg

SEQ ID NO: 11254 - DNA, 50 bp, Ruminococcus lactaris
  source 1..50: mol_type = genomic DNA
tcactctacaaaatcatcattgcagcccccatgtagagggtgtgccttca

SEQ ID NO: 11255 - DNA, 40 bp, Ruminococcus lactaris
  source 1..40: mol_type = genomic DNA
atctctgatgaacatcgaagcaaaaatcctgaacaaaatg

SEQ ID NO: 11256 - protein, 540 aa, Roseburia hominis
MKQPYNTTIYNTALYLRLSRDDELQGESGSIQTQRMMLRQYAAEHGLTVVDEYIDDGWSGTNFERPSFQRMIDDIEDGKINCVVTKDLSRLGRNYILTGQYTEIYFPSKGVRYIAINDNVDTINGESELAPFLNILNEMHARQTSKKVKAAMHTRFANGAHYGAYAPLGYVKDPDKKGHLLIDPETRWIVEKIFDLAVHGRGAASITRILVEEKVPTPGWLNYERYGTFANIYAGAPAEKAYAWTIAQVKSILKEETYIGHSIHNKQSNISFKNKKKVRKPQEEWYRVENTHEAIISEEVFQKVQELIASRRRKRRNGTTQIFAGLIKCADCGWSLAYGENKQNKNPYGYYHCSKNGQGLRQCSMHYIRYDVLYAYVLARLQYWSMLAQKDEDKLLKRLLNASDRERNSAKKKQAAELKKAEKRKAEVDGLFAKMYEDWSAGRITEYNFNMLSEKYQNEQKELETKIRQLHKTMEAAVQTAADAEKWIALMKQYVNPVELTAELLNTLIEKITVHEAVKGEDGSREQEVEIYYRFIGKID

SEQ ID NO: 11257 - DNA, 50 bp, Roseburia hominis; identical to SEQ ID NO: 2472
  source 1..50: mol_type = genomic DNA

SEQ ID NO: 11258 - DNA, 40 bp, Roseburia hominis
  source 1..40: mol_type = genomic DNA
aatttcaaaatgggaacgaggaaatggttttccggaagtt

SEQ ID NO: 11259 - DNA, 50 bp, Roseburia hominis
  source 1..50: mol_type = genomic DNA
caatatctttaattaagggagacgccagtttcccatagttaaagatacca

SEQ ID NO: 11260 - DNA, 40 bp, Roseburia hominis
  source 1..40: mol_type = genomic DNA
actttcaaaatgggagcatcctaatgattttcttgaagtg

SEQ ID NO: 11261 - protein, 560 aa, Roseburia hominis
MARAKNRGYQQSFSPSYTIRRWRLGIYIRLSKEDLKKGKDDSNSVKNQRDLLNDFYRRNIDEFESITEYVDDGHTGTDANREDFQRLLADVMSGKINCVIVKDLSRFARNYSDAGSLIDNLFVQMGVRFISLAENVDSYKNPDSVSNIIVPITNVMNDNYCYQTSKKIRQVFDYKRRNGQYIGAFAPYGYVKHPKDKHRLIVDPDAAENVKLIFTMLIQGSSKRAIALYLNEHGVPSPSAYKVQKGLPVSTRGYDDPMWGVRMIHSILTNPTYTGDLAQGRSRVKSYKVHQIEAVPREEWVEVAGTHEAIIDYETFDKVQALLQRDTRTSPKGREVHLFSGFLKCADCGRAITRCVGKNNNVYYSCSTYKNRSRTACTMHSIKHERLEAAVLFAVQHQVHLAVSYSEIVTQINSAPIKKSQSYRLDDLIAAKERELTKITRYKQSLYQDWKDGEITQQEYRDMKADYERQTSDISAVLTRLNAERAELANGVDNEHPALVAFMKYQNIEALNREILVELVDYIKVYENGNISVKFKFADELRKIAEYIEINTTEDTAVAG

SEQ ID NO: 11262 - DNA, 50 bp, Roseburia hominis; identical to SEQ ID NO: 2692
  source 1..50: mol_type = genomic DNA

SEQ ID NO: 11263 - DNA, 40 bp, Roseburia hominis
  source 1..40: mol_type = genomic DNA
atatataattgacagaaactatgctgttggtataataaat

SEQ ID NO: 11264 - DNA, 50 bp, Roseburia hominis
  source 1..50: mol_type = genomic DNA
tgttttcctaataggcgctaatcaattgattacttcctattaggaacact

SEQ ID NO: 11265 - DNA, 40 bp, Roseburia hominis
  source 1..40: mol_type = genomic DNA
gtaaataattgccaaaaacatccttgttggtagaatatat

SEQ ID NO: 11266 - protein, 558 aa, Clostridioides difficile; identical to SEQ ID NO: 3206

SEQ ID NO: 11267 - DNA, 50 bp, Clostridioides difficile
  source 1..50: mol_type = genomic DNA
aaacatccttaccaaaccctcacattagtaaggctttgataaggatggta

SEQ ID NO: 11268 - DNA, 40 bp, Clostridioides difficile
  source 1..40: mol_type = genomic DNA
aacaagcataacacatttgttctctagcttctatgtcatt

SEQ ID NO: 11269 - DNA, 50 bp, Clostridioides difficile
  source 1..50: mol_type = genomic DNA
aaacatccttaccaaaccctcacaatagtaaggctttgataaggatggta

SEQ ID NO: 11270 - DNA, 40 bp, Clostridioides difficile
  source 1..40: mol_type = genomic DNA
aacaagcataagacctctaatctatagattaaatgtcatc

SEQ ID NO: 11271 - protein, 564 aa, Paeniclostridium sordellii
MPRSRKSQMSRLTNNRTIWKVAVYIRLSREDGNDESLSVINQKKILKEYLEEMFEDEYVLVDFYVDDGLTGTDDERESFQRMIKDVKQGKVNCIICKTLARAFRNYSDQGYFLEEFLPLYRTRFICLGSPKFDTYLNPEAITDGLDVPITGLMNDRYAARASADIRRTFNTKRRNGEFIGAFAPYGYKKSPDNKNKLIIDEEAAQVIRDIFRWRVEEGINKLGIVRRLNELGTLTPTKYKHSKGLMLKNPNLDKQDGMWSMNTICTILKNRMYIGDMVQGRQRVISYKVHKTICTPENEWFIVENTHEAIIDKDTYLKAQELDQRGIRMSPKGRNVYLFSGFLRCADCKRSMTKKTNKNKLNDGTVKEYNYYICSTYALKNKSKCSRHSIKLEILEEAVLKAIQIQIAMVENMSEVISEINKQATIVNQSSRLKKQLNEKQKELEKIICVTDNLYMDWKSEEISRNEYARMKYKFEIKAEEIRRIISNIEAEIQSSSKEFGDNDPYLKTFLKYKNIKELNRGILIELIDAIYIHENNEITIQFKFADQYKRLKEFIKDNHFSKN

SEQ ID NO: 11272 - DNA, 50 bp, Paeniclostridium sordellii
  source 1..50: mol_type = genomic DNA
acttgtctatacgtcaatggttcaaatgaaccgtaaaggtatagataata

SEQ ID NO: 11273 - DNA, 40 bp, Paeniclostridium sordellii
  source 1..40: mol_type = genomic DNA
aacaggatttgtaggacctaatggatcaggaaagaccact

SEQ ID NO: 11274 - DNA, 50 bp, Paeniclostridium sordellii
  source 1..50: mol_type = genomic DNA
acttgtctatacgtcaatggttcaggtgaaccgtaaaggtatagataata

SEQ ID NO: 11275 - DNA, 40 bp, Paeniclostridium sordellii
  source 1..40: mol_type = genomic DNA
tacagcctctttaggtgctggtggatcagtaaaaaccact

SEQ ID NO: 11276 - protein, 543 aa, Clostridium beijerinckii
MKIAIYSRKSVFTGKGESVENQIDLCKDHCEVYFKNEELEYIIYEDEGFSGKNVNRPNFQRLLNDIKSNQISVLICYRLDRISRNVADFSSILELLQKYSVDFISIKERFDTSTPTGRAMIYIASVFAQLERETIAERVKDNMLQLAKLGKWSGGQLPLGYASEKVNYMNEEMKEKSFVKLIPIDEELEIIKFIYNNYLSKGSILNVVKDLNNNGYKSKTGVNFELTGVKRILRSSLYVKSSESTHEYLKSKNFNVYGKANGNGYLTYNKKTDKDNIIVAISGHSGIIPSIDWLRVQKKLDSNAEKSKQISNRSGTGSNNALFSGLLKCGKCGSNMVIKYNSKNKDGKSYIYYVCSNKEKQYLTNRCAAPNLRCDIVDPIIVETIQTYNKNIILKTYNDKLNDLLKNSDKQIVDNLKSQIIEKEKQVINLVNELSKTEMEDVKKIYRSQIAAMTTEVNKLKLILSSSEETHAHLKDSILEIKHLIQSFIDFNKTFNTTDDIDIKRTLLRNIIEKVTCDFTNKIFDVKFFCLDNMQLDSSSESM

SEQ ID NO: 11277 - DNA, 50 bp, Clostridium beijerinckii
  source 1..50: mol_type = genomic DNA
agttagatagttcaagcgaatccatgaacattctaactacatataaaatt

SEQ ID NO: 11278 - DNA, 40 bp, Clostridium beijerinckii
  source 1..40: mol_type = genomic DNA
agatgcaacaggaaatccatggactgcaacttatatacaa

SEQ ID NO: 11279 - DNA, 50 bp, Clostridium beijerinckii
  source 1..50: mol_type = genomic DNA
agttagatagttcaagcgaatccaaaaacattctaactacatataaaatt

SEQ ID NO: 11280 - DNA, 40 bp, Clostridium beijerinckii
  source 1..40: mol_type = genomic DNA
agatgcaacaggaaagtcaaagagaggaattaaaataaaa

SEQ ID NO: 11281 - protein, 502 aa, Mycobacteroides abscessus
MENQPKRALIVTRLSRVTEATTSPERQMEICQVLCDDRGYEVVGHAEDLDVSGSVDPFDRRRRPNIARWLANEAEPFDVIVVYRVDRLTRSLRHLQKLVHWAEDNGKLVVSATEPHFDMTTPFAPVLIALIGTVAEMELEAIRERNSSAARHNIRAGRWRGGQPPWGYVSSNASGEWRLVPCPEQVELINEVAARVLGGEPLQRIAHDLTSRGIPTPKGRTEWNVTPLKRSLTSEAMLGYVISGDKPLRNDDGSPIVRAEPILSREVFDRVKVELESRSRRGQPTKRSSSLLLRVLYCGVCQLPAYQFNGGSHSKSPRYRCSSTGKSTKCENLTVRMDIADEAFTENLLDVFGDSERLERIWDTGSDHSVELADINEILEDLTGLLGTGPYKAGTPQRSALDARIAALATRQTALSAEAVRPSGWAWKPTGEMFAEWWDNQDTERRNVWLRSMNIKVTYNNSSGAVTWGLDWGDLKKFEEQLKFGKSAQRAVRQITEAAPDL

SEQ ID NO: 11282 - DNA, 50 bp, Mycobacteroides abscessus
  source 1..50: mol_type = genomic DNA
tggcttactttctcgacaattgaggtctcggtggtgcacgattgcagcca

SEQ ID NO: 11283 - DNA, 40 bp, Mycobacteroides abscessus
  source 1..40: mol_type = genomic DNA
aggcttgtccacgatgctggtctcggtcgtcaggatcatg

SEQ ID NO: 11284 - DNA, 50 bp, Mycobacteroides abscessus
  source 1..50: mol_type = genomic DNA
tggcttactttctcgacaattgagttctcggtggtgcacgattgcagcca

SEQ ID NO: 11285 - DNA, 40 bp, Mycobacteroides abscessus
  source 1..40: mol_type = genomic DNA
agggttgtccctgatggtgttcactgacctcaggataatg

SEQ ID NO: 11286 - protein, 501 aa, Mycobacteroides abscessus
MEGATKRALIVTRLSRVTEATTSPERQMEICQGLCDDRGYEVVGYAEDLDVSGSVDPFDRKRRPNIARWLANEAEPFDVIVVYRVDRLTRSLRHLQKLVHWAEDNGKLVVSATEPHFDMTTPFAPVLIALIGTVAEMELEAIRERNSSAARHNIRAGRWRGGQPPWGYVSSNASGEWRLVPCPEQVELINEVVARVLSGEPLQRIAHDLTSRSIPTPKGRTEWNVTPLKRSLTSEAMLGYVISGDKPLRNDDGSPIVRAEPILSREVFDRVKVELESRSRRGEPTKRSSSLLLRVLYCGVCQRPAYQFNGGSHSKSPRYRCSSTGKSTKCENLTVRMDLADQAFTENLLDVFGDSERLERIWDTGSDHSAELADINEILKDLTGLLGTGPYKAGTPQRSALDSRIAALASRQAELSTEAVRPSGWVWRTTGEMFADWWDNQDTESRNVWLRSMNIKVTYNNSSGAVTWGLDWGDLKKFEEQLKFGKSAQQAVRQVTEAPDL

SEQ ID NO: 11287 - DNA, 50 bp, Mycobacteroides abscessus
  source 1..50: mol_type = genomic DNA
tggcttactttctcgacaattgaggtctcggtggtgcaggattacagcca

SEQ ID NO: 11288 - DNA, 40 bp, Mycobacteroides abscessus; identical to SEQ ID NO: 11283
  source 1..40: mol_type = genomic DNA

SEQ ID NO: 11289 - DNA, 50 bp, Mycobacteroides abscessus
  source 1..50: mol_type = genomic DNA
tggcttactttctcgacaattgagttctcggtggtgcaggattacagcca

SEQ ID NO: 11290 - DNA, 40 bp, Mycobacteroides abscessus; identical to SEQ ID NO: 11285
  source 1..40: mol_type = genomic DNA

SEQ ID NO: 11291 - protein, 498 aa, Mycobacteroides abscessus
MEGETKRALIVTRLSRVTEATTSPERQMEICQGLCDDRGYEVVGHAEDLDVSGSVDPFDRKRRPNIARWLANEAEPFDVIVVYRVDRLTRSLRHLQKLVHWAEDNGKLVVSATEPHFDMTTPFAPVLIALIGTVAEMELEAIRERNSSAARHNIRAGRWRGGQPPWGYVSSNASGEWRLVPCPEQVELINEVVARVLSGEPLQRIAHDLTSRSIPTPKGRTEWNVTPLKRSLTSEAMLGYVISGDKPLRNDDGSPIVRAEPILSREVFDRVKVELESRSRRGEPTKRSSSLLLRVLYCGVCQRPAYQFNGGSHSKSPRYRCSSTGKSTKCENLTVRMDLADQAFTENLLDLFGDSERLERIWDTGSDHSAELADINEILEDLTGLLGTGPYKAGTPQRSALDSRIAALASRQAELSTEAVRPSGWVWRTTGEMFADWWDNQDTESRNVWLRSMNIKVTYNNSSGAVTWGLDWGDLKKFEEQLKFGKSAQRAVLQITEA

SEQ ID NO: 11292 - DNA, 50 bp, Mycobacteroides abscessus; identical to SEQ ID NO: 11287
  source 1..50: mol_type = genomic DNA

SEQ ID NO: 11293 - DNA, 40 bp, Mycobacteroides abscessus; identical to SEQ ID NO: 11283
  source 1..40: mol_type = genomic DNA

SEQ ID NO: 11294 - DNA, 50 bp, Mycobacteroides abscessus; identical to SEQ ID NO: 11289
  source 1..50: mol_type = genomic DNA

SEQ ID NO: 11295 - DNA, 40 bp, Mycobacteroides abscessus; identical to SEQ ID NO: 11285
  source 1..40: mol_type = genomic DNA

SEQ ID NO: 11296 - protein, 498 aa, Mycobacteroides abscessus
MEGETKRALIVTRLSRVTEATTSPERQMEICQGLCDDRGYEVVGHAEDLDVSGSVDPFDRKRRPNIARWLANEAEPFDVIVVYRVDRLTRSLRHLQKLVHWAEDNDKLVVSATEPHFDMTTPFAPVLIALIGTVAQMELEAIRERNSSAARHNIRAGRWRGGQPPWGYVSSNASGEWRLVPCPEQVELINEVAARVLGGEPLQRIAHDLTSRGIPTPKGRTEWNVTPLKRSLTSEAMLGYVMSGDKPLRNDDGSPIIRAEPILSREVFDRVKVELESRSRRGEPTKRSSSLLLRVLYCGVCQLPAYQFNGGSHSKSPRYRCSSTGKSTKCENLTVRMDLADQAFTENLLDLFGDSERLERIWDTGSDHSAELADINEILEDLTGLLGTGPYKAGTPQRSALDSRIAALASRQAELSTEAVRPSGWVWRTTGEMFADWWDNQDTESRNVWLRSMNIKVTYNNSSGAVTWGLDWGDLKKFEEQLKFGKSAQRAVLQITEA

SEQ ID NO: 11297 - DNA, 50 bp, Mycobacteroides abscessus
  source 1..50: mol_type = genomic DNA
tggcttactttctcgacaattgaggtctccgtggtgcaggattgcagcca

SEQ ID NO: 11298 - DNA, 40 bp, Mycobacteroides abscessus; identical to SEQ ID NO: 11283
  source 1..40: mol_type = genomic DNA

SEQ ID NO: 11299 - DNA, 50 bp, Mycobacteroides abscessus
  source 1..50: mol_type = genomic DNA
tggcttactttctcgacaattgagttctccgtggtgcaggattgcagcca

SEQ ID NO: 11300 - DNA, 40 bp, Mycobacteroides abscessus; identical to SEQ ID NO: 11285
  source 1..40: mol_type = genomic DNA

SEQ ID NO: 11301 - protein, 502 aa, Mycobacteroides abscessus
MEGETKRALIVTRLSRVTEATTSPERQMEICQGLCDDRGYEVVGHAEDLDVSGSVDPFDRKRRPNIARWLANEAEPFDVIVVYRVDRLTRSLRHLQKLVHWAEDNDKLVVSATEPHFDMTTPFAPVLIALIGTVAQMELEAIRERNSSAARHNIRAGRWRGGQPPWGYVSSNASGEWRLVPCPEQVELINEVAARVLGGEPLQRIAHDLTSRGIPTPKGRTEWNVTPLKRSLTSEAMLGYVMSGDKPLRNDDGSPIVRAEPILSREVFDRVKVELESRSRRGEPTKRSSSLLLRVLYCGVCQLPAYQFNGGSHSKSPRYRCSSTGKSTKCENLTVRMDLADQAFTENLLDMFGDSERLERIWDTGSDHSAELADINEVLEDLTGLLGTGPYKAGTPQRSALDARIAALATRQTALSAEAVRPSGWAWKPTGEMFAEWWGNQDTESRNVWLRSMNIKVTYNNSSGPVTWGLDWGDLKKFEEQLKFGKSAQQAVRQVTEASPDL

SEQ ID NO: 11302 - DNA, 50 bp, Mycobacteroides abscessus; identical to SEQ ID NO: 11297
  source 1..50: mol_type = genomic DNA

SEQ ID NO: 11303 - DNA, 40 bp, Mycobacteroides abscessus; identical to SEQ ID NO: 11283
  source 1..40: mol_type = genomic DNA

SEQ ID NO: 11304 - DNA, 50 bp, Mycobacteroides abscessus; identical to SEQ ID NO: 11299
  source 1..50: mol_type = genomic DNA

SEQ ID NO: 11305 - DNA, 40 bp, Mycobacteroides abscessus; identical to SEQ ID NO: 11285
  source 1..40: mol_type = genomic DNA

SEQ ID NO: 11306 - protein, 498 aa, Mycobacteroides abscessus
MEGETKRALIVTRLSRVTEATTSPERQMEICQGLCDDRGYEVVGHAEDLDVSGSVDPFDRKRRPNIARWLANEAEPFDVIVVYRVDRLTRSLRHLQKLVHWAEDNGKLVVSATEPHFDMTTPFAPVLIALIGTVAEMELEAIRERNSSAARHNIRAGRWRGGQPPWGYISSNASGEWRLVPCPEQVELINEVVARVLSGEPLQRIAHDLTSRSIPTPKGRTEWNVTPLKRSLTSEAMLGYVISGDKPLRNDDGSPIVRAEPILSREVFDRVKVELESRSRRGEPTKRSSSLLLRVLYCGVCLRPAYQFNGGSHSKSPRYRCSSTGKSTKCENLTVRMDLADQAFTENLLDLFGDSERLERIWDTGSDHSAELADINEILEDLTGLLGTGPYKAGTPQRSALDSRIAALASRQAELSTEAVRPSGWVWRTTGEMFADWWDNQDTERRNVWLRSMNIKVTYNNSSGAVTWGLDWGDLKKFEEQLKFGKSAQRAVLQITEA

SEQ ID NO: 11307 - DNA, 50 bp, Mycobacteroides abscessus; identical to SEQ ID NO: 11287
  source 1..50: mol_type = genomic DNA

SEQ ID NO: 11308 - DNA, 40 bp, Mycobacteroides abscessus; identical to SEQ ID NO: 11283
  source 1..40: mol_type = genomic DNA

SEQ ID NO: 11309 - DNA, 50 bp, Mycobacteroides abscessus; identical to SEQ ID NO: 11289
  source 1..50: mol_type = genomic DNA

SEQ ID NO: 11310 - DNA, 40 bp, Mycobacteroides abscessus; identical to SEQ ID NO: 11285
  source 1..40: mol_type = genomic DNA

SEQ ID NO: 11311 - protein, 537 aa, Roseburia hominis
MLTVFLFLSNRKGGSMIAIYTRQSIEKKDSLSIDAQVKACADYCKAQGWEYEIYTQDHGFSGKSLDRPGFQAMMSAVRSGQVNKIVCYKLDRISRSVSDFAQLLQELEQYKCDFISVTENFDTSSPIGRAMVYICMVFAQMERENIQERVKSNYYYRSGLGFWGGGPAPYGYQLKRQQIAGKVHTVLEPDPNEAPWVKKMYEWYLEPGGSAMKILRLLTENQVPTKRGYKWTSRVLMDVLSKPLYTQNSMDVYNYLTQSGAVISNPPEDFDGTLSVDLYGKKDSSQSKHKRCRKGSDMYCNISLHEAIIDSDTWLQVQYKILARPKIGGRTGTSKNSWFTGLMICGVCGRHVSFTHSARTAGYYICSSRKNCGWNSCSSKPASKKKFDPIIVKFIRDHYDSPKTKAAIQQAKLAAKTPQVSIERNNLQMELATINNQIDNLLTSLASGNAVMSKYINDKITELDAKRTPLQAKLLQLDATSSVNDELKRLERIEWAMEQLPLVYTEDTFDLSVQVSQALVNNIVFNSDGEVTISFAI

SEQ ID NO: 11312 - DNA, 50 bp, Roseburia hominis
  source 1..50: mol_type = genomic DNA
gcacttctttactgttcaagtgatgatacacttgtgtcgtaaagaagtct

SEQ ID NO: 11313 - DNA, 40 bp, Roseburia hominis
  source 1..40: mol_type = genomic DNA
tagtattcagtgggatattgacagcttagattggaaaaac

SEQ ID NO: 11314 - DNA, 50 bp, Roseburia hominis
  source 1..50: mol_type = genomic DNA
gcacttctttactgttcaagtgattatacacttgtgtcgtaaagaagtct

SEQ ID NO: 11315 - DNA, 40 bp, Roseburia hominis
  source 1..40: mol_type = genomic DNA
cagtgttcagggggatatttatagcatatattaaaaaaag

SEQ ID NO: 11316 - protein, 558 aa, Clostridium innocuum
MLQTDKITALYCRLSQEDMQAGESESIQNQKLILQKYADEHHFFNTRFFVDDGFSGVSFEREGLQAMLHEVEAGNVATVITKDLSRLGRNYLKTGELIEIVFPEYEVRYIAINDGVDTAREDNEFTPLRNWFNEFYARDTSKKIRAVKQAKAQKGERVNGEVPYGYIADPNDRNHLLPDPETAHIVKQIFAMYVRGDRICEIQNWLREHEVLTVSELRYRRSGSCRHPRPHPTCIYNWPDKTLYDILGRKEYLGHTITGKSYKVSYKSKKTKKNPEEKQYFFPNTHEPLIDEETFDLAQKRIATKHRPTKVDEIDIFSGLLFCGDCGYKMYLQQGAGTLERKHAYTCGKYRNRIRTGELCTTHYIRKSVLKELVLADLQRVLSYVKEHEQEFIETANECSAKAVQKTLTQQRKELDKAQSRISELNILFRKLYEDNALGKLSDEQFAFLTSGYDEEKKTLTRRIAELSQEIDNATERSADVKRFVALVRRYTAITELTYENVHEFIDRILIHELDKETNTRKIEIFYSFVGRVDTGDKPTESISYFRQIGADVKSYAI

SEQ ID NO: 11317 - DNA, 50 bp, Clostridium innocuum; identical to SEQ ID NO: 77
  source 1..50: mol_type = genomic DNA

SEQ ID NO: 11318 - DNA, 40 bp, Clostridium innocuum
  source 1..40: mol_type = genomic DNA
tggaaacaatggatgaattaaagaagcgcctgaattcctc

SEQ ID NO: 11319 - DNA, 50 bp, Clostridium innocuum
  source 1..50: mol_type = genomic DNA
aggttacgttatcttacctcaacaatagctgacgttagataacgatactt

SEQ ID NO: 11320 - DNA, 40 bp, Clostridium innocuum
  source 1..40: mol_type = genomic DNA
ttgaaactatagatgtattatataagagcctgaaatgcac

SEQ ID NO: 11321 - protein, 537 aa, Streptococcus dysgalactiae; identical to SEQ ID NO: 641

SEQ ID NO: 11322 - DNA, 50 bp, Streptococcus dysgalactiae; identical to SEQ ID NO: 402
  source 1..50: mol_type = genomic DNA

SEQ ID NO: 11323 - DNA, 40 bp, Streptococcus dysgalactiae
  source 1..40: mol_type = genomic DNA
catatcaaaatgggaaaatggagatacaacaccagatttg

SEQ ID NO: 11324 - DNA, 50 bp, Streptococcus dysgalactiae; identical to SEQ ID NO: 3539
  source 1..50: mol_type = genomic DNA

SEQ ID NO: 11325 - DNA, 40 bp, Streptococcus dysgalactiae
  source 1..40: mol_type = genomic DNA
catctcaaaaaagaaaaattaaaataaaagaccagagttc

SEQ ID NO: 11326 - protein, 558 aa, Mediterraneibacter faecis; identical to SEQ ID NO: 3206

SEQ ID NO: 11327 - DNA, 50 bp, Mediterraneibacter faecis; identical to SEQ ID NO: 3207
  source 1..50: mol_type = genomic DNA

SEQ ID NO: 11328 - DNA, 40 bp, Mediterraneibacter faecis
  source 1..40: mol_type = genomic DNA
taagctgtaaagcctttgtttacaagggttttacagcttt

SEQ ID NO: 11329 - DNA, 50 bp, Mediterraneibacter faecis; identical to SEQ ID NO: 3207
  source 1..50: mol_type = genomic DNA

SEQ ID NO: 11330 - DNA, 40 bp, Mediterraneibacter faecis
  source 1..40: mol_type = genomic DNA
tgacttttaaaacctttttttacaaaggttttaaaccttt

SEQ ID NO: 11331 - protein, 540 aa, Clostridium cadaveris
MKQPYNTTIYNTALYLRLSRDDESYGDSVSIETQRTILQQYAKEHGLHVVGEYVDDGWSGTNFERPNFQRMMDDVDAGKVNCIVTKDLSRFGREHVMMDYYLEFLFPEKRVRYIAIAENEDTEKGLSDFVPFKNLFNEWFAKDTSRKVKAAFKAKFATGQRIGAYAPIGYRKHPEIKNKLIIDEETRWIVEKIFDLAVHGRGAASITRILIEEKVPTPGYINFRRDKTFANIYANAPEEKSYAWTIAQVKSILKDETYIGHTVHYRETNISFKNKRRIRKPQSDWVRVENTQEPIISEQVFNQVQEQIASRRRKCKDGTTQIFSGLVKCADCGWSLSYGENRQNSKPYGHYHCSKYGQGTRQCSMHYIRYDVLYAYVLSRLQYWSGLVQNGEGELMKRLLNASDKEQAAARKRQAAELKRTEKRKAEVDKLFSRMYEDWVAGRITEYNFNMLSGKYQTEQAQLDEKIGQLQAAIAAESQTVADAESWIALMKQYVNPTELTAELLNTLIEKILVHEAVKGEDGSREQEVEIFYRFIGKID

SEQ ID NO: 11332 - DNA, 50 bp, Clostridium cadaveris
  source 1..50: mol_type = genomic DNA
caatatctttaactatgtgataccggggtatcgcttagataaagatacca

SEQ ID NO: 11333 - DNA, 40 bp, Clostridium cadaveris
  source 1..40: mol_type = genomic DNA
agtaagcaaatgggaaacaggaaactctactccagatatt

SEQ ID NO: 11334 - DNA, 50 bp, Clostridium cadaveris
  source 1..50: mol_type = genomic DNA
caatatctttaactatgtgataccttggtatcgcttagataaagatacca

SEQ ID NO: 11335 - DNA, 40 bp, Clostridium cadaveris
  source 1..40: mol_type = genomic DNA
aggaaaaaaatggaaataattaaaaaatactccagatatt

SEQ ID NO: 11336 - protein, 520 aa, Clostridioides difficile
MMYNIARYDALYGRQSVDKKDSISVESQLDFCKYETHGQPYQTYTDKGFSGKNTNRPDFERMMRDIRAGRIKRVIVYKLDRISRSILDFANMMEVFQEYDVEFVSSTEKFDTSTPIGRAMLNICIVFAQLERETIQKRVTDAYYSRNKKGFFMGGRVPYGFKLEPIVIDGIRTSFYLPIEEEMQQIELIYQLYAEGVKENGEPYSVSDIRNYLLEHDIPQLRGGYWTVSSISSILANPSYAIADLSLYEFFHSQGANITNPVELWEGGNGCYLYQGTVSKDKSRNSFKDKEVVLAPHVGRVSSYIWIKCRLRCMNSRQMATTNKGKSSWLVGKVKCGNCGKGLQISPSRVSKKTGKSIRYMNCSYKYITKGLGCSGTGSRIYADELENYVLKQIKGKLAEFEGLNEQNATQTNPKLNENKIRLAQIDKEIDDLVEKVSGANSVLMRYINEKVEQLDAERRALSEENLSMTVNQSSDTLNMIFNHVSTWEETSFEDKQKVLDAFVKVIKIANGNIEMTWNI

SEQ ID NO: 11337 - DNA, 50 bp, Clostridioides difficile
  source 1..50: mol_type = genomic DNA
tgatttaaaagtgtttggtttactaaagcgatatgaacactttaaaatca

SEQ ID NO: 11338 - DNA, 40 bp, Clostridioides difficile
  source 1..40: mol_type = genomic DNA
aatagttggaaattacgttaagtataaaaatataaaactt

SEQ ID NO: 11339 - DNA, 50 bp, Clostridioides difficile
  source 1..50: mol_type = genomic DNA
tgatttaaaagtgtttggtttacttgagcgatatgaacactttaaaatca

SEQ ID NO: 11340 - DNA, 40 bp, Clostridioides difficile
  source 1..40: mol_type = genomic DNA
taaagttttatattatgtttggtattaaaaaataaaattt

SEQ ID NO: 11341 - protein, 503 aa, Sphingomonas koreensis
MTRKTNQQAVIYCRVSTKKQAREGNGLGSQETRCREYAKHRSHQVVGVFTDDVSGKLAQRPGFDAMLAFIRKKGMVVIIDDISRIAREVRAHFDLKEDIFRAGGTLESPSIEFGSDSDSVLIEHLLASVAQHQRQKNGEQARNRMRARMLGGYWVFMAPLGYRYEKSPAGGSILVRDEPVASIIQEGLEGYASGRFNSKAEVKRFFESHAGFPVTRHGHLTNEQASRIMTHPIYAGYVESKAWDVSLRPGQHEATISLATFHQVQERIAGKPLAPTRSDIHVDFPLRGFVACGDCDHPMTANWTKGRNGRYPYYVCRHRGCDRFGKSVKRDLVESAFEAMLTKLTPRPELLSLFSKIFRKRWNEAEAKAHEGRAAIKREMATIEKKIGQILDKIVQSESRSVIARFESEVDKLEMEKLVLDEKAALCGTVARDYDATFRTAFDFIANPCNLWTNGTFDDKRIVLNLTLGSHLKYDWNEGVRTAEFSLPFMVLGRLGNRETVMA

SEQ ID NO: 11342 - DNA, 50 bp, Sphingomonas koreensis
  source 1..50: mol_type = genomic DNA
tcgggaaccgagaaacagtaatggcggacctgatgggatcaggttcgaac

SEQ ID NO: 11343 - DNA, 40 bp, Sphingomonas koreensis
  source 1..40: mol_type = genomic DNA
acggatggcaaggaagtggcggagagggtgggattcgaac

SEQ ID NO: 11344 - DNA, 50 bp, Sphingomonas koreensis
  source 1..50: mol_type = genomic DNA
tcgggaaccgagaaacagtaatggaagacctgatgggatcaggttcgaac

SEQ ID NO: 11345 - DNA, 40 bp, Sphingomonas koreensis
  source 1..40: mol_type = genomic DNA
acaaatggcagcagagtggaagagaaggtgggatttaaac

SEQ ID NO: 11346 - protein, 589 aa, Bacteroides ovatus
MCSDFIIFAPTNQRRSIMRKRIVGYARVSTEKQDLERQKILIREYCSNNNYDLVKIISEKVSGAKKDRESINELLAVTKDTADMVVVSELSRISREKECLTVLNTINDILENGLDVLFLDDTSKVYSAYTELNVIDIITLTVKAHSAAEERDKITARMRTGKITKLNINPYMYTGSLVPYGFKVIDNPDYKGQKCNIPARKLMVIDESKTKDVQFIYQLVLNGTTLRDAAEEVNKLGLRTQLNKPFCETSISKMIKNPIYNGRRRFKGLNLPLMDKIISDNDWNRAQICVSQNQLFKGKTTKNFNPLKGLVFCPCGYALMLHKMIRKDGSGYFVMTCCKKNDKEYRKKCRNSGIVSHVLLPTVWKCVKDTLLLSEYTTKTTSEVHRINGIIEGLEDRISGLIDEIDSHKKEMARLSKAITLVTVKGLITQYENEYVTEEAKVTEIEAKINNIRDEISNYKANITKINSITYNSQLTNLTDQEKASVYQKVLSKVVYYSIDYFRGFIVISYKNGLENIIAINKTTTGYISPLPSSFSFNAETRKIRVTIGKKQTSIKEFSLSDIENIEYSFKELEANFNPQQWDIQSQIL

SEQ ID NO: 11347 - DNA, 50 bp, Bacteroides ovatus
  source 1..50: mol_type = genomic DNA
tcaagcacatctgataacattgctgacgcaaagtttccaaatgtgctctg

SEQ ID NO: 11348 - DNA, 40 bp, Bacteroides ovatus
  source 1..40: mol_type = genomic DNA
tcaccaccacgcactggcagatgcagaggcttgcgcacaa

SEQ ID NO: 11349 - DNA, 50 bp, Bacteroides ovatus; identical to SEQ ID NO: 11347
  source 1..50: mol_type = genomic DNA

SEQ ID NO: 11350 - DNA, 40 bp, Bacteroides ovatus
  source 1..40: mol_type = genomic DNA
ttgccaccacgcaccggcagattcagaggcctacacccag

SEQ ID NO: 11351 - protein, 548 aa, Mycolicibacterium austroafricanum; identical to SEQ ID NO: 441

SEQ ID NO: 11352 - DNA, 50 bp, Mycolicibacterium austroafricanum; identical to SEQ ID NO: 442
  source 1..50: mol_type = genomic DNA

SEQ ID NO: 11353 - DNA, 40 bp, Mycolicibacterium austroafricanum
  source 1..40: mol_type = genomic DNA
agctgtgaattgtgtccgaggggggacttgaacccccacg

SEQ ID NO: 11354 - DNA, 50 bp, Mycolicibacterium austroafricanum
  source 1..50: mol_type = genomic DNA
agtcgtgtcgccggatgtgtccgagaggggacttgtccgtctacgacacg

SEQ ID NO: 11355 - DNA, 40 bp, Mycolicibacterium austroafricanum
  source 1..40: mol_type = genomic DNA
agctgtgtattgtgacctagagaggccttgaacatgcatg

SEQ ID NO: 11356 - protein, 575 aa, Ruminococcus torques
MTATQKHDIIPICTTVLSADQPPKEDIMLDQQKITILYCRLSNEDAQEGESNSIANQREYLTRYARDHGYTNLKILVDDGYTGTNFNRPGVQEGFELVKQGLVGCWLVKDLSRFGRDYLTVGQYTDIIFPSYDVRFIAINDGVDSNRGDSEGFAAIRNLFNEWYPRDTSKKVRVSLRQRGTSGKHMGKPPYGYRCDPEDKDHWILDEEAAPVVKLIFDLCIDGKGPEQIARILEEKQIMTAKALYAKRKKKPMPERPYHWGNQSIAGILERQEYTGCTCNFKTYSKSYKLKKRIPNEPENMFYLPDTQEAIVSQAQFDRVQELRKNKRRPAKAERQGLFSGLLFCADCGGKLHFATSKSFEGKQDHYVCNNYKSNRGTCTAHYIREDVLREIVLERIRAVNEYIRSDVDGFQEEWLQCRRTDQERSIRDDKKKLEQAKKRLADLDVIIARLYEDYVLGNLNQGRYRKMSADYEAEQERLKLEIEVIEEWVEQREEMNDGLDAFIALTQKYVDVEELTQTIVNEYIKKIIVYAPDKSSGKRKQKVKIFFNFVDDVDIPVISEPIITQTTYEHRKTA

SEQ ID NO: 11357 - DNA, 50 bp, Ruminococcus torques; identical to SEQ ID NO: 277
  source 1..50: mol_type = genomic DNA

SEQ ID NO: 11358 - DNA, 40 bp, Ruminococcus torques
  source 1..40: mol_type = genomic DNA
ggaaacaacgctgtaagcctttgttttcaagggtttacag

SEQ ID NO: 11359 - DNA, 50 bp, Ruminococcus torques; identical to SEQ ID NO: 3729
  source 1..50: mol_type = genomic DNA

SEQ ID NO: 11360 - DNA, 40 bp, Ruminococcus torques
  source 1..40: mol_type = genomic DNA
agagacagcgctttagaccagtgtttccaagagttgacag

SEQ ID NO: 11361 - protein, 599 aa, Klebsiella michiganensis
MKKKLYSYIRWSSAQQTAGTSLERQTAAAREYAKAHDLEFVEILDAGISAFRGKNATDGALAEFIAAVENGAIPSDSWLYVENLDRLSRATVRNALKLLLHITDLGVTVVTGMDGKIYSAETMDKDFTDLMISLLLFSRANEESKTKSDRVKEASMKALARVQAGLPATIKGGGADPFWIQRGGRETSPTQHPTHWLAIKKIVELSLQGIGCNRIRQVLNADPTLYPPPRQKDTPQRRALIDAGLAPIGWNIHRIEDARRQPSLYGLKTIRLSGHTYNLEGYYPAVCSEEEFHLIQNISASNRIKSGDIRNTITLLSGLNLCKCGSCGGWVTTFRKNGKLTYRCDAGHRKIHHCPTTWSLNALIIESATVRALIAGVAHNIIEDSQDLESVAGEIDNRRAEVLEIDRKRERLAIRIAEEDDDLLMQQLRQYNARKRDLLTEIGALTQREALRSEGQNVAERLAEAQRLLTADMVNDIFTSDRLAVRELIRKSMRQVTIWKRQDKSLKVECEFISGWRYTFEGVMNGGQKSFIEYRTSPNGINMMEIYDKLNAITAKAFKHVLGVDDNVMLPTLSHIQVYHDMAVRLGHSPLTGSQFFWR

SEQ ID NO: 11362 - DNA, 50 bp, Klebsiella michiganensis
  source 1..50: mol_type = genomic DNA
ttaggttcctatttcttttacagtcaagtgtagttaatataggtgcacct

SEQ ID NO: 11363 - DNA, 40 bp, Klebsiella michiganensis
  source 1..40: mol_type = genomic DNA
ttcccgcccctgctccagccaggtgtaccaggtgacgccg

SEQ ID NO: 11364 - DNA, 50 bp, Klebsiella michiganensis
  source 1..50: mol_type = genomic DNA
ttaggttcctatttcttttacagtgcagtgtagttaatataggtgcacct

SEQ ID NO: 11365 - DNA, 40 bp, Klebsiella michiganensis; identical to SEQ ID NO: 2020
  source 1..40: mol_type = genomic DNA

SEQ ID NO: 11366 - protein, 599 aa, Klebsiella oxytoca
MKKKLYSYIRWSSAQQTAGTSLERQTAAARDYAKAHDLEFVEILDAGVSAFRGKNATDGALAEFIAAVENGAIPSDSWLYVENLDRLSRATVRNALKLLLHITDLGVTVVTGMDGKIYSAETMDKDFTDLMISLLLFSRANEESKTKSDRVKEASMKALARVQAGLPATIKGGGADPFWIQRGGRETSPTQHPAHWLAIKKIVELSLQGIGCNRIRQVLNADPTLYPPPRQKDTPQRRALIDAGLAPIGWNIHRIEDARRQPSLYGLKTIRLSGHTYNLEGYYPAVCSEEEFHLIQNISASNRIKSGDIRNTITLLSGLNLCKCGSCGGWVTTFRKNGKLTYRCDAGHRKIHHCPTTWSLNALIIESATVRALIAGVAHNIIEDSQDLESVAGEIDNRRAEVLEIDRKRERLAIRIAEEDDDLLMQQLRQYNARKRDLLTEIGALTQREALRSEGQNVAERLAEAQRLLTADMVNDIFTSDRLAVRELIRKSMRQVTIWKRQDKSLKVECEFISGWRYTFEGVMNGGQKSFIEYRTSPNGINMVEIYDKLNAITAKAFKHVLGVDDNVMLPTLSHIQVYHDMAVRLGHSPLTGSQFFWR

SEQ ID NO: 11367 - DNA, 50 bp, Klebsiella oxytoca; identical to SEQ ID NO: 10952
  source 1..50: mol_type = genomic DNA

SEQ ID NO: 11368 - DNA, 40 bp, Klebsiella oxytoca; identical to SEQ ID NO: 11363
  source 1..40: mol_type = genomic DNA

SEQ ID NO: 11369 - DNA, 50 bp, Klebsiella oxytoca
  source 1..50: mol_type = genomic DNA
ttgggttcctatttcctttacagcgcggtgtagttaatataggtgcactt

SEQ ID NO: 11370 - DNA, 40 bp, Klebsiella oxytoca; identical to SEQ ID NO: 2020
  source 1..40: mol_type = genomic DNA

SEQ ID NO: 11371 - protein, 599 aa, Raoultella terrigena
MKKKLYSYIRWSSAQQTAGTSLERQTAAAREYAKAHDLEFVEILDAGVSAFRGKNATDGALAEFIAAVENGAIPSDSWLYVENLDRLSRATVRNALKLLLHITDLGVTVVTGMDGKIYSAETMDKDFTDLMISLLLFSRANEESKTKSDRVKEASMKALARVQAGLPATIKGGGADPFWIQRGDRETSPTQHPTHWLAIKKIVELSLQGVGCNRIRQVLNDDPTLYPPPRQKDTPRRRALLDAGLAPTGWNIHRIEDARRQPSLYGLKTITLSGHTYSLEGYYPAVCSEEEFHLIQNISASNRIKSGDIRNTITLLSGLNLCKCGSCGGWVTTFRKNGKLTYRCDAGHRKIHHCPTTWSLNARIIESATVRALIAGVAHNIIEDSQDLESVAGEIDNRRAEVADIDRKRERLAARIAEEDDDLLMQQLRQYNARKRDLLTEIGALTQREALRSEGQNVAERLAEAQRLLTADMVNDIFTSDRLGVRELIRKSMRQVTIWKRQDKSLKVECEFISGWRYTFEGVMKEGKKSFIEYRTSPDGINMMEIYDKLNAITAKAFKHVLDVDDNVMPRTLSHVQAYHDMAVRLGHSPLTGSQFFWR

SEQ ID NO: 11372 - DNA, 50 bp, Raoultella terrigena
  source 1..50: mol_type = genomic DNA
ttgggttcctatttattttacagccaggtgtagttaatataggtgcacct

SEQ ID NO: 11373 - DNA, 40 bp, Raoultella terrigena
  source 1..40: mol_type = genomic DNA
gtcccgcccctgctccagccaggtgtaccaggtgacgccg

SEQ ID NO: 11374 - DNA, 50 bp, Raoultella terrigena
  source 1..50: mol_type = genomic DNA
ttgggttcctatttattttacagcgcggtgtagttaatataggtgcacct

SEQ ID NO: 11375 - DNA, 40 bp, Raoultella terrigena; identical to SEQ ID NO: 2020
  source 1..40: mol_type = genomic DNA

SEQ ID NO: 11376 - protein, 579 aa, Corynebacterium flavescens
MTDLNPMAAFAESMTPKRAVTYLRVSTSEQASKGGQSEGFSIPAQRDANRKKAQSLGAVVAKEFVERGVSGTSTNRPALKALLRYLEEEQGNVDYIIVHKIDRLARNRADDVAINAKFDEFGVRLVSTSENIDQTPGGLLMHGIMSSIAEFYSKNLANEVTKGMNQKVRSGGTAGKAPLGYLNTRIYETGVETRTVEVDPERAPLVQWAFERYAEGNISVADLTDELAARGLTTVPTRVYPSKAVSKRYIHAMLSNKYYLGITTYCGVEYPGNHEPLITQGLFDRVQQTLNSRRQGERRRKHDHFLKSTVWCGDCGSRMILQKPTNHQGLQYEYFVCNGRLSKRTNCQMSAVPVSWLEGQMEELYRRIQVPREILDLMRPRLKEQLQLHNASRHEERDQLKAQEQAIRRKQEKLLEAFYGQALPMELMAREQKQLEQSLSQVERRLKSFEGDDVEQDALLDTALRLASNCYSAYNKASPTQKRLLNQVFFEKVLVCSLEDKDHHVHAHLAPWTLVFRTTNVAENQAIGLEHQPEPVPEQEPDENLALGLDLTQETEKARSEDLVFSNNFRTRMCKHTMV

SEQ ID NO: 11377 - DNA, 50 bp, Corynebacterium flavescens
  source 1..50: mol_type = genomic DNA
actcgtatgtgtaagcacacgatggtacgccaatcatcacgtaacatata

SEQ ID NO: 11378 - DNA, 40 bp, Corynebacterium flavescens
  source 1..40: mol_type = genomic DNA
gacccggaattgtgcttttgtaccccgtacgggatttgaa

SEQ ID NO: 11379 - DNA, 50 bp, Corynebacterium flavescens
  source 1..50: mol_type = genomic DNA
actcgtatgtgtaagcacacgatgtaacgccaatcatcacgtaacatata

SEQ ID NO: 11380 - DNA, 40 bp, Corynebacterium flavescens
  source 1..40: mol_type = genomic DNA
ggccccaaattctgccttttaaccccttaagtgatttgga

SEQ ID NO: 11381 - protein, 556 aa, Streptococcus anginosus
MSNTKRTGQTALYERLSRDDEMQGESNSITNQKQLLESYAKRNGFTNIYHYTDDGVSGTTFDREGFQKMIKAVEENKVSTVMVKDMSRFGRDYLKVGFYTEILFKEKGVRFIAINNGIDSEKQSESDFTPFLNIMNEWYARDTSRKIQSIFRARMEEGKRVSPSVPYGYYRNPKNKQELLVDKESSKVVKRIYHLVIEGYGVTQIADILTKDKVLIPSAYAEIHYPENNHSSKKRGIEDPYFWTPTTVGYILEKREYMGHTVLGKTICLDYKTKKRRKAKEDELIIFQNTHEAIIDEETWNNAQRLRKTVRRSPKYGTTSHPFTGLLICSDCGGKLSYREPAEHKEKKYDCDYCFVCQHYRHRKGTCSMHYIKVKTVNEILLKSIKEITDFAKEEKQEFLKVMNKLSDEKREEKYQENKEKLEKLSSRNEELTTLITKLYEDHALGKIPVKHFDRLFNIYDTEQQDLEKQIQYFEQEIESYHQRKVDTDKFLKMIEKYTDIEELTVPMINEYIEKVVVHESTGGRKGKDKKQQVDVYFNFIGNCQVPQKADIEKMA

SEQ ID NO: 11382 - DNA, 50 bp, Streptococcus anginosus
  source 1..50: mol_type = genomic DNA
tgtccttgacaaatcttcccaaagggattaaccttttagggacagagaaa

SEQ ID NO: 11383 - DNA, 40 bp, Streptococcus anginosus
  source 1..40: mol_type = genomic DNA
ttgtgtaacagatcctaaaggaacgatagtcattgaatgt

SEQ ID NO: 11384 - DNA, 50 bp, Streptococcus anginosus
  source 1..50: mol_type = genomic DNA
tgtccttgacaaatcttcccaaagtgattaaccttttagggacagagaaa

SEQ ID NO: 11385 - DNA, 40 bp, Streptococcus anginosus
  source 1..40: mol_type = genomic DNA
ttgtataaaacattctaaatgaaagagagtcaaagaaagt

SEQ ID NO: 11386 - protein, 512 aa, Brevibacterium epidermidis
MAELVWGGYARISEDPRDERSGVRRQREDIDAEIVRRGGESLDEARFYLENDTSAYKRKRVTITDEYGEQRQAYRVIRPVWAQALRDLRAGVITALAVYDLDRLARDPRDLEDAIEVVQHHGSLIISATSAGTDLMSDSGRAMARVMVTMAQKSSADTARRVARAHLESAHEGRPVGGSRPFGFLADKVTHCPVEAPLVRKAAQDIIDGASIRGIAEEWAAAGIKTVRGGAWNRSVIRHMLSNPRLAGWRVHQGKIATDRDGKPVRLVQPQTLAVVGEDGKPARAKNPRAGEPVEPLLDQDTFDRLQEALVRPDNRKVKPRRGARRYLLSGLVRCAVCHRQMYGNRWGETGGEMRFYYVCQGGADDKHAVSVSGHGTDAFLERVVLDRLAVEDMERPAPEFSGDGRLAQVKEAITELMSVHRTGLLSGSVVFPQVQQLQEEQERLEAERGEFIRATAGPTTVRVTPEVWAGMSTDKRRAIVETLIEAVLIHPGRQRQNKLDYDRIEVVWRQD

SEQ ID NO: 11387 - DNA, 50 bp, Brevibacterium epidermidis
  source 1..50: mol_type = genomic DNA
tggaatcagctccccatggtcagcgcacctgctggtcgcaccacatattt

SEQ ID NO: 11388 - DNA, 40 bp, Brevibacterium epidermidis
  source 1..40: mol_type = genomic DNA
gcgaaggcgctctccatggtcacctgctggtcgaggagca

SEQ ID NO: 11389 - DNA, 50 bp, Brevibacterium epidermidis
  source 1..50: mol_type = genomic DNA
tggaatcagctccccatggtcagcacacctgctggtcgcaccacatattt

SEQ ID NO: 11390 - DNA, 40 bp, Brevibacterium epidermidis
  source 1..40: mol_type = genomic DNA
tggaagacgcactccatggacacctgcaggctgaggagac

SEQ ID NO: 11391 - protein, 550 aa, Clostridium botulinum
MNNKVAIYVRVSTHHQIDKDSLPLQRQDLINYTKYVLNINEYELFEDAGYSAKNTDRPNFQNMMTKIRNNEFSHLLVWKIDRISRNLLDFCDMYEELKKYNCTFVSKNEQFDTSSAMGEAMLKIILVFAELERKLTGERVTAVMLDRASKGLWNGAPIPLGYVWDKVKKFPIIDRTEKSTIELIYNTYLKAKSTTEVRGLLNANGIKTKRGGSWTTKTVSDIIRNPFYKGTYRYNYKEPGRGKIKNKNEWIVIEDNHPGIIEKELWKKCNEIMDVNAQRNNASGFRANGKVHVFAGILECGECYKNLYAKQDKPNIEGFRPSIYVCSGRYNHLGCSQKTISDNYVGTFIFNFISNILTVQRKIKKLDLEVLEKTLIKGKAFTNVVGIENIEVLQQLSYSESTFKSKNIEDKENSFELEVIKKEKSKYERALERLEDLYLFDDESMSEKDYVLKKNKINEKLNDANEKLRKIDNYNDISELNLEKEASDFMLSKQLLNTECINYKNLVLNVGRDILKEFVNTIIDKIIVKDKKISSVKFKSGLVIKFVYKC

SEQ ID NO: 11392 - DNA, 50 bp, Clostridium botulinum
  source 1..50: mol_type = genomic DNA
atcttctttatttctacatacggtcaaccgtatgtagaaataaagaagta

SEQ ID NO: 11393 - DNA, 40 bp, Clostridium botulinum
  source 1..40: mol_type = genomic DNA
atcctcttcattcatttggcaaccccaggtttctatgaaa

SEQ ID NO: 11394 - DNA, 50 bp, Clostridium botulinum
  source 1..50: mol_type = genomic DNA
atcttctttatttctacatacggtataccgtatgtagaaataaagaagta

SEQ ID NO: 11395 - DNA, 40 bp, Clostridium botulinum
  source 1..40: mol_type = genomic DNA
atctttttcattccattggatattcctagtttctctgaaa

SEQ ID NO: 11396 - protein, 471 aa, Listeria welshimeri
MTVGIYIRVSTEEQVKEGFSISAQKEKLKAYCTAQGWKDFKFYVDEGKSAKDMNRPLLQEMITHIKKGLIDTVLVYKLDRLTRSVVDLHNLLSVFDEHNCAFKSATEVYDTSSAMGRFFITIISSVAQFERENTSERVSFGMAEKVRQGEYIPLAPFGYVKGADGKLIVNKIEKEIFLQVVEMVSTGYSLRQTCEYLTNIGLKTRRSNDVWKVSTLIWILKNPAVYGAIKWNNEIYENTHEPLIDKATFNKVAKILSIRSKSTTSRRGHVHHIFKNRLICPACGKRLSGLRTKYVNKDKETFYNNNYRCATCKEHRRPSINISEQKIEKAFIDYISNYTLHKASISSKKLDNNWRKQEIIQKEIISLQRKREKYQKAWAADLIKDDEFSKLMIDTKMEIDAAEDRQKEFDVSLFLSPEDIAKRNNILRELKINWTSLSPAEKIDFISMFIEGIEYVKDDANKAVITKIRFL

SEQ ID NO: 11397 - DNA, 50 bp, Listeria welshimeri
  source 1..50: mol_type = genomic DNA
tataggctttttgtcaaatatagtgatatctactttacaaaaacactata

SEQ ID NO: 11398 - DNA, 40 bp, Listeria welshimeri; identical to SEQ ID NO: 8313
  source 1..40: mol_type = genomic DNA

SEQ ID NO: 11399 - DNA, 50 bp, Listeria welshimeri
  source 1..50: mol_type = genomic DNA
tataggctttttgtcaaatatagttctatctactttacaaaaacactata

SEQ ID NO: 11400 - DNA, 40 bp, Listeria welshimeri
  source 1..40: mol_type = genomic DNA
tcctaaaatactataaatttctgtctatgtatatctcatt

SEQ ID NO: 11401 - protein, 481 aa, Streptococcus equi; identical to SEQ ID NO: 5156

SEQ ID NO: 11402 - DNA, 50 bp, Streptococcus equi
  source 1..50: mol_type = genomic DNA
taaagaattttactatcctgtatttcaatcaagggtactaaaattattga

SEQ ID NO: 11403 - DNA, 40 bp, Streptococcus equi
  source 1..40: mol_type = genomic DNA
taacaaaaccagaagcatttccagcaaagtgaaggcctga

SEQ ID NO: 11404 - DNA, 50 bp, Streptococcus equi
  source 1..50: mol_type = genomic DNA
taaagaattttactatcctgtattcaaatcaagggtactaaaattattga

SEQ ID NO: 11405 - DNA, 40 bp, Streptococcus equi
  source 1..40: mol_type = genomic DNA
aaacaaaataagcagcattcaaacctaaatgaagggctga

SEQ ID NO: 11406 - protein, 500 aa, Pectobacterium atrosepticum
MPQDNNGIAYSYVRFSSKKQASGDSLRRQTEMAEEYASRHMLRLSSKNFQDLGISAFREGKRPSLADMLTAIDEGQITAGSTIIIEALDRLSRRGIDATQETVKEILRKDVQIVSLSDGLVLTKNSLNDLQSVIRIAVAADIAHSESERKALRLRQTKGQQRQNALKGIPINKILPFWLKRTETGYAFSDKMETARQIVTLKQEGKGSNMIAKFLNKQCIAGIRTAQWNHASITKMLKNPALYGAYQTGETNKEREMIQLEIVEGYYPALISKDEWLLLQSDQSKSTRGRRSTDNPYSGLLRCGCGGALIKRKSTVRGKLYVYHGCLNAKDGRCSQNLSIKGLDNALATMLGRLEFKKAVTSDKSAYLEKKQLEKRIANLNITLQEVDEVPSSVIKTISTMEARVKEITEQQAKVEREQRGIDAVNNAKLSSITDSLELNLMLKRVLKSITVTRSGSSWAVRIFHLSGHTQSFMLDNGKLKFVSDSIALKNLLNEYLKDD

SEQ ID NO: 11407 - DNA, 50 bp, Pectobacterium atrosepticum
  source 1..50: mol_type = genomic DNA
aattattatatatgaaactgcatggtgatattgttacttaatagcaaagg

SEQ ID NO: 11408 - DNA, 40 bp, Pectobacterium atrosepticum
  source 1..40: mol_type = genomic DNA
attatttccgtaaatcaccgtggtgatttttctacacaca

SEQ ID NO: 11409 - DNA, 50 bp, Pectobacterium atrosepticum
  source 1..50: mol_type = genomic DNA
aattattatatatgaaactgcatgaggatattgttacttaatagcaaagg

SEQ ID NO: 11410 - DNA, 40 bp, Pectobacterium atrosepticum
  source 1..40: mol_type = genomic DNA
atcatttgcatagatcaccagtgttatttttgaacagaca

SEQ ID NO: 11411 - protein, 512 aa, Micrococcus luteus
MTTQRAGIYARISRDDQGERLGVQRQLDACRDLAARMGYQVVDEYVDNDLSAMKARRRPEYERLTADIEAGHLDVVVVWDHDRLLRQTRELERFIDLCDPRGVPTLTVTSGHLDLSTPTGRAIAKTRGAWAQHESEHKAERIRAQKAQAARAGKHIGGPAPWGWRRVEHKVLSNGRHEGGRFEVDPFAGRMIQAGTAMILKGHTLGEVARMWAAEGVRSRTGRTLTTSQVKERLIRPRNAGLLTFHGETVSDQWHPIVPLEDFRAVEQMLTAPERRRTSTVKHRYLLSGVLYCHCGRVMHGLRHSTRGTRYRCSVQFEHGTDRTGHTTRRMEPMDEYVRAAVAAFLFDPVNLKALADAYVPRPDPASSGEAAELVALTDRKNALTRLFAQGALSEAQLIEGTAELNAQVDRLRAAVRRRTRSAAVGDIVAGGDPAGAFLAAPLPVQREVLRALLWVEVFPASKAVAGRFESETVRLHWRHAPDFREPVRRPPQKMGPVTGIGEGMDASDAAP

SEQ ID NO: 11412 - DNA, 50 bp, Micrococcus luteus
  source 1..50: mol_type = genomic DNA
gggtgctttgactgatgttccccgtatggggctcgtgtgtcaagtgaccc

SEQ ID NO: 11413 - DNA, 40 bp, Micrococcus luteus
  source 1..40: mol_type = genomic DNA
cggcgcgatcacggccgagtacggcatcctcacgctcgcc

SEQ ID NO: 11414 - DNA, 50 bp, Micrococcus luteus
  source 1..50: mol_type = genomic DNA
gggtgctttgactgatgttccccgcgtggggctcgtgtgtcaagtgaccc

SEQ ID NO: 11415 - DNA, 40 bp, Micrococcus luteus
  source 1..40: mol_type = genomic DNA
gggcgggtacacgtcggagcgcggcggccacacgctcgcc

SEQ ID NO: 11416 - protein, 512 aa, Micrococcus luteus
MTTQRAGIYARISRDDQGERLGVQRQLDACRDLAARMGYQVVDEYVDNDLSAMKARRRPEYERLTADIEAGHLDVVVVWDHDRLLRQTRELERFIDLCDPRGVPTLTVTSGHLDLSTPTGRAVAKTRGAWAQHESEHKAERIRAQKAQAARAGKHIGGPAPWGWRRVEHTVLSNGRHEGGRFEVDPFAGRMIQAGTAMILKGHTLGEVARMWAAEGVRGRTGRTLTTSQVKERLIRPRNAGLLTFHGETVSDQWPPIVPLEDFRAVEQMLTAPERRRTSTVKHRYLLSGVLYCHCGRVMHGLRHSTRGTRYRCSVQFEHGTDRTGHTTRRMEPMDEYVREAVAAFLADPVNLKALGDAYVPRPDPSSSGEAAQLVALTDRKNALTRLFAQGALSEAQLIEGTAELNAQVDRLRAAVRRRTRSAAVGDMVAGGDPAGAFLAAPLPVQREVLRALLWVEVFPASKAVAGRFESETVRLHWRHAPDFQEPVRRPPQKMGPVMGIGEGVDASDAAP

SEQ ID NO: 11417 - DNA, 50 bp, Micrococcus luteus
  source 1..50: mol_type = genomic DNA
gggtgctctgactgatgttccccgtatggggctcgtgtgtcaagtgaccc

SEQ ID NO: 11418 - DNA, 40 bp, Micrococcus luteus; identical to SEQ ID NO: 11413
  source 1..40: mol_type = genomic DNA

SEQ ID NO: 11419 - DNA, 50 bp, Micrococcus luteus
  source 1..50: mol_type = genomic DNA
gggtgctctgactgatgttccccgcgtggggctcgtgtgtcaagtgaccc

SEQ ID NO: 11420 - DNA, 40 bp, Micrococcus luteus; identical to SEQ ID NO: 11415
  source 1..40: mol_type = genomic DNA

SEQ ID NO: 11421 - protein, 512 aa, Micrococcus luteus
MTTQRAGIYARISRDDQGERLGVQRQLDACRDLAARMGYQVVDEYVDNDLSAMKARRRPEYERLTADIEAGHLDVVVVWDHDRLLRQTRELERFIDLCDPRGVPTLTVTSGHLDLSTPTGRAVAKTRGAWAQHESEHKAERIRAQKAQAARAGKHIGGPAPWGWRRVEHKVLSNGRHEGGRFEVDPFAGRMIQAGTDMILKGHTLGEVARMWAAEGVRGRTGRTLTTSQVKERLIRPRNAGLLTFHGETVSDQWPPIVPLEDFRAVEQMLTAPERRRTSTVKHRYLLSGVLYCHCGRVMHGLRHSTRGTRYRCSVQFEHGTDRTGHTTRRMEPMDEYVREAVAAFLSDPVNLKALTDAYVPRPDPSSSGEAAELVALTDRKNALTRLFAQGALSEAQLIEGTAELNAQADRLRAAVRRRTRSAAVGDIVAGGDPASAFLAAPLPVQREVLRALLWVEVFPASKAVAGRFESETVRLHWRHAPDFQEPVRRPPQKMGPVMEIGEGVDASDAAP

SEQ ID NO: 11422 - DNA, 50 bp, Micrococcus luteus
  source 1..50: mol_type = genomic DNA
gggtgctctgactgatgatccccgtatggggctcgtgtgtcaagtgaccc

SEQ ID NO: 11423 - DNA, 40 bp, Micrococcus luteus
  source 1..40: mol_type = genomic DNA
ggcgagcgtgaggatgccgtactcggccgtgatcgcgccg

SEQ ID NO: 11424 - DNA, 50 bp, Micrococcus luteus
  source 1..50: mol_type = genomic DNA
gggtgctctgactgatgatccccgcgtggggctcgtgtgtcaagtgaccc

SEQ ID NO: 11425 - DNA, 40 bp, Micrococcus luteus
  source 1..40: mol_type = genomic DNA
ggcgagcgtgtggccgccgcgctccgacgtgtacccgccc

SEQ ID NO: 11426 - protein, 522 aa, Micrococcus luteus
MTTQRAGIYARISRDDQGERLGVQRQLDACRDLAARMGYQVVDEYVDNDLSAMKARRRPEYERLTADIEAGHLDVVVVWDHDRLLRQTRELERFIDLCDPRGVPTLTVTSGHLDLSTPTGRAIAKTRGAWAQHESEHKAERIRAQKAQAARAGKHIGGPAPWGWRRVEHKVLSNGRHEGGRFEVDPFAGRMIQAGTDMILKGHTLGEVARMWAAEGVRGRTGRTLTTSQVKERLIRPRNAGLLTFHGETVSDQWPPIVPLEDFRAVEQMLTAPERRRTSTVKHRYLLSGVLYCHCGRVMHGLRHSTRGTRYRCSVQFEHGTDRTGHTTRRMEPMDEYVRAAVAAFLSDPVNLKALADAYVPRPDPASSGEAAELVALTDRKNALTRLFAQGALSEAQLIEGTAELNAQVDRLRAAVRRRTRSAAVGDIVAGGDPAGAFLAAPLPVQREVLRALLWVEVFPASKAVAGRFESETVRLHWRHAPDFQEPVRRPPQKMGPVMGIGEGVDGACQLVCVSGVVTGRG

SEQ ID NO: 11427 - DNA, 50 bp, Micrococcus luteus; identical to SEQ ID NO: 11422
  source 1..50: mol_type = genomic DNA

SEQ ID NO: 11428 - DNA, 40 bp, Micrococcus luteus; identical to SEQ ID NO: 11423
  source 1..40: mol_type = genomic DNA

SEQ ID NO: 11429 - DNA, 50 bp, Micrococcus luteus; identical to SEQ ID NO: 11424
  source 1..50: mol_type = genomic DNA

SEQ ID NO: 11430 - DNA, 40 bp, Micrococcus luteus; identical to SEQ ID NO: 11425
  source 1..40: mol_type = genomic DNA

SEQ ID NO: 11431 - protein, 581 aa, Anaerobutyricum hallii
MARKRTNLIGNTPSVRETKVAIYIRVSTIHQVDKDSIPMQKKDLIAYCQLILGTDNYEIFEDAGYSGKNTDRPAFQNMMGRIRKGEFTHVLVWKIDRVSRNLLDFAEMYEELRSLRVTFVSKNEQFDTSTAIGEAMLKIILVFAELERNMTSERVTATMISRANSGQWNGGRIPFGYSYDPKEKVFSIREDEASICRELKDLYLLNRSLAYVSRALNEKGYKTRAGVSWSPHSVWIIASSPFYAGIYRYNRYKGVESRTINPEEEWVMIQNHHPAIFTLEEHQTMRSIMKSNKRNMDNLPGRVHLSTKTHIFQGIMYCDKCGSKMVSTPGRLHVDGYRTSNYGCPLRRNTKKCNNPTVNDIVIGEFVINYILNMLNAKKTFSTINTPDELNAALLSGSVFSEVSSVEENGLNSFFNLLSRYGSDRSYIFSVKSPRKKKAAVDPELSKLRKEKGKQERALQRLQDLYLYSETSMSEKDFIIRKSEISSHLDNINRQLGLMTQDQASFLSDEEFIKQASHLLIQKELKNKKYIYFKKLVSTVDPDILKAYMETILDSIYTADGKITAITFKNGLTHRFIYKDK

SEQ ID NO: 11432 - DNA, 50 bp, Anaerobutyricum hallii
  source 1..50: mol_type = genomic DNA
cggtgtcatatcagaatcatggcatcccgcatgttaatggcaggtaacca

SEQ ID NO: 11433 - DNA, 40 bp, Anaerobutyricum hallii
  source 1..40: mol_type = genomic DNA
ttatatgataatcatagcatctccaaaagagaaaaatctg

SEQ ID NO: 11434 - DNA, 50 bp, Anaerobutyricum hallii
  source 1..50: mol_type = genomic DNA
cggtgtcatatcagaatcatggcataccgcatgttaatggcaggtaacca

SEQ ID NO: 11435 - DNA, 40 bp, Anaerobutyricum hallii
  source 1..40: mol_type = genomic DNA
ttatgtcagaaccacaagatatcaaaaagagaaaaatctt

SEQ ID NO: 11436 - protein, 581 aa, Blautia wexlerae
MARKRTNLIGNTPSVRETKVAIYIRVSTIHQVDKDSIPMQKKDLIAYCQLILGTDNYEIFEDAGYSGKNTDRPAFQNMMGRIRKGEFTHVLVWKIDRVSRNLLDFAEMYEELRSLRVTFVSKNEQFDTSTAIGEAMLKIILVFAELERNMTSERVTATMISRANSGQWNGGRIPFGYSYDPKEKVFFIREDEASICRELKDLYLLNRSLAYVSRALNEKGYKTRAGVSWSPHSVWIIASSPFYAGIYRYNRYKGVESRTINPEEEWVMIQNHHPAIFTLEEHQAMRSIMKSNKRNMDNLPGRVHLSTKTHIFQGIMYCDKCGSKMVSTPGRLHVDGYRTSNYGCPLRRNTKKCNNPTVNDIVIGEFVINYILNMLNAKKTFSTINTPDELNAALLSGSVFSEVSSVEENGLNSFFNLLSRYGSDRSYIFSVKSPRKKKAAVDPELSKLRKEKEKQERALQRLQDLYLYSETSMSEKDFIIRKSEISSHLDNINRQLGLMTQDQASFLSDEEFIKQASHLLIQKELKNKKYIYFKKLVSTVDPDILKAYMETILDSIYTADGKITAITFKNGLTHRFIYKDK

SEQ ID NO: 11437 - DNA, 50 bp, Blautia wexlerae; identical to SEQ ID NO: 11432
  source 1..50: mol_type = genomic DNA

SEQ ID NO: 11438 - DNA, 40 bp, Blautia wexlerae; identical to SEQ ID NO: 11433
  source 1..40: mol_type = genomic DNA

SEQ ID NO: 11439 - DNA, 50 bp, Blautia wexlerae; identical to SEQ ID NO: 11434
  source 1..50: mol_type = genomic DNA

SEQ ID NO: 11440 - DNA, 40 bp, Blautia wexlerae; identical to SEQ ID NO: 11435
  source 1..40: mol_type = genomic DNA

SEQ ID NO: 11441 - protein, 557 aa, Faecalitalea cylindroides
MLQSNKITALYCRLSQEDMQAGESGSIQHQKMILQRYADEHHFLNTKFFVDDGFSGVSFEREGLQAMLQEVEAGRVATVITKDLSRLGRNYLKTGELIEIVFPENGVRYIAINDGVDTAREDNEFTPLRNWFNEFYARDTSKKIRAVKQAQAQKGERVNGEYPYGYIPDPNNRHHLIPDPETAPIVKQVFAMFVSGVRMCEIQKWLAENKVLTIGALRYQRTGQARYQRAMIAPYTWPDKTLYDILARQEYLGHTITAKTHKVSYKSKKTRKNEEEQRYFFPNTHEPLVDEETFELAQKRIATRHRPTKAAEIDIFSGLLFCAGCRHKMYYQQGVNIEPRKFSYSCGAWRNRARTGSECTSHYIRKNVLLDLVLEDMRRVLRYVKEHEQDFICKATEYGDMEARKALAQQQKELFKAQARMTELDTLFRKLYEDNALGRLTDERFVFLTSGYEDEKKSLAARIDELQQQIATVTERKRDISRFIQIVGKYSDIQELTYENVHEFIDRILIHELDRETNTRKIEIHYSFVGQVDTEQEPTQVVNHDRRNMVDVKSIAI

SEQ ID NO: 11442 - DNA, 50 bp, Faecalitalea cylindroides
  source 1..50: mol_type = genomic DNA
aagtatcgctatctaaccccagcaaataatgaggtgtgatagcgatagcg

SEQ ID NO: 11443 - DNA, 40 bp, Faecalitalea cylindroides
  source 1..40: mol_type = genomic DNA
taaatattcaggaggtaataactacgatcctattttaaat

SEQ ID NO: 11444 - DNA, 50 bp, Faecalitalea cylindroides
  source 1..50: mol_type = genomic DNA
aagtatcgctatctaaccccagcatgtaatgaggtgtgatagcgatagcg

SEQ ID NO: 11445 - DNA, 40 bp, Faecalitalea cylindroides
  source 1..40: mol_type = genomic DNA
tcaaacttcagaagctaattgctcctagactattttaaat

SEQ ID NO: 11446 - protein, 523 aa, Clostridium novyi
MIAVYCRVSTEDQQERKTIENQISFAEKYCDLHELKLFKIYKEDGVSGTIPLEDRPQGKQLIKDAKNNKFDTLLLYKLDRLGRSARITLNSIHLLEELNVQIKSMTEPFDTSSPSGRFMITMLAGVADLERSTILERMWLGANRAAKEGKWLGGIVPYGYFVNEDKYLEVNNNIISEINLSEADVVKLIFSLATENNMSCIKIADYLNSLNIPPSYKKDNRKILKGKRKVSVSGIWSPSSILRMLHNTTYKGVHEYGKRSQKKREIITREVPAIITEDIWNKAQGVIKDNIIEATRNRKRNYLLKGLIKCGKCGCNYVGAKYKHSNYYYVCGGKIKYNGPFGKCTSKNLNGEYIENMIWNDITEFINNPGETINILKENLKTKDSNKQDLINQKELLETNLRAKETEKQSILDLFRKGIITANDVEIQLSKIQKEFNAIQDNLNAINHKLNEMYDIPDYTKVDEMLKSMKLIINQDNISFEDKRQIVKTLLDKITVNTIEENNTKSASLDIKYSFIKVENHTF

SEQ ID NO: 11447 - DNA, 50 bp, Clostridium novyi
  source 1..50: mol_type = genomic DNA
tatcaaagtagaaaaccacacgttcaaccatgaacataataactttgaga

SEQ ID NO: 11448 - DNA, 40 bp, Clostridium novyi
  source 1..40: mol_type = genomic DNA
tccatgaaaaccacaaggacaaggattcatactggaaaca

SEQ ID NO: 11449 - DNA, 50 bp, Clostridium novyi
  source 1..50: mol_type = genomic DNA
tatcaaagtagaaaaccacacgttgcaccatgaacataataactttgaga

SEQ ID NO: 11450 - DNA, 40 bp, Clostridium novyi
  source 1..40: mol_type = genomic DNA
ttcattagaactacaagcagcaggatacctactggaacaa

SEQ ID NO: 11451 - protein, 533 aa, Vibrio crassostreae
MTTIRPLVSLRSPTAYSYVRFSSAIQAKGDSLRRQTQLAQEYCTRHSLTLSEQSFTDLGVSAFNSANTNEDNGLGQFLKALEQRAIPRDSFLLVESLDRLSRAKVQTALRQLLNIIEYGITVVTLIDNRTYNSDSDTTDLIISLTVMERAHNESKTKSERLKAAWANKRANPTTTNRTSLAPFWLKLNEDKRTYTVIEKSAETVRRIFQMSINGHGIIGIVRKLNEEQIPSPKGGSWSNTSICRILNSKAAIGEFTPNIGRASTNAPISDYYPSIIDEDTFYLSQSRKAERSKPESAGRKTTFPNVFNQVAKCGVCGATMYYDNKSPTLKYLTCREFKKKNCTNRPIRIEFMHKFIVEQYLLPKHFQHHISMTTTSSKEDPISSLEAKIKEEEQALCQLMEITENFTSHIAVQQMENRDRKIAQLKKELEETKVQQAKVALTPRIGFRQAQQLVANALQAEVHSKKPINTEPQELRKYRVSLNRSLKDVFDSLLIHNEKAEPQIIVKCNQFTYVIEKSCLKSIHKDLYWAVKV

SEQ ID NO: 11452 - DNA, 50 bp, Vibrio crassostreae
  source 1..50: mol_type = genomic DNA
tgtaggtaaatcttgccaaccagcgtaattgtcggttacatttaccttta

SEQ ID NO: 11453 - DNA, 40 bp, Vibrio crassostreae
  source 1..40: mol_type = genomic DNA
ttcaggtagccccaccagcgtaaagccaggcattccgttg

SEQ ID NO: 11454 - DNA, 50 bp, Vibrio crassostreae
  source 1..50: mol_type = genomic DNA
tgtaggtaaatcttgccaaccagcccaattgtcggttacatttaccttta

SEQ ID NO: 11455 - DNA, 40 bp, Vibrio crassostreae
  source 1..40: mol_type = genomic DNA
tggattttgcaccaccagcccaaagccatgcatacctttg

SEQ ID NO: 11456 - protein, 559 aa, Enterococcus faecium
MNTKQSDKRITALYARLSRDDEKDGISGSIQNQKVILEKYAKDNHLPNPRFFYDDGFSGVTFTRPAFMEIMELAEQGMVGTIVVKDHSRLGRNRLVVGQLLEEDFVRLDIRYIAIMDNIDTEKGISDIVPMQDLFNEWHAKNTSDKVRRVMQSKGMSGKPLTTNPPFGYMKNPENKDEWIVDEPAAKVVKQIFEMCVSGLGPTQIAKQLHSEKVLTPTEYWNSIGRKCSKPPAVPYNWCAATVADILDKQEYCGDTVNFRTTSKSFKLKKRLERPQEDWQIFENTHPAIIDRETFELVQELRKHRRRPNRTGEISMFSGLLYCADCGEKLYYSVTNNYKREQAYFFCSAYRKNSNVCSAHYIREKIVEQLVLESMQRVLWYVQSYEKLFAQRQLAEFGEKQKKELTEKRRELDKAKLRVREIDGIIQKLYEDNAAGKISDGRFATMSMSLENEQSELKDRIPSLEDELENAKIKTEGLQQFIDKAKQVTRLEALTPELVHEFIEKIVVSAPKYKDGKRYQSVEIYYNGVGIIREPTSEEMEEYFEEHIKNKPSLKAKTA

SEQ ID NO: 11457 - DNA, 50 bp, Enterococcus faecium
  source 1..50: mol_type = genomic DNA
caccttccttacggagggtgccccaagggagacacttcgtaaggaagttg

SEQ ID NO: 11458 - DNA, 40 bp, Enterococcus faecium
  source 1..40: mol_type = genomic DNA
agaaaaaaataactggaacaagagctatttgtttttacag

SEQ ID NO: 11459 - DNA, 50 bp, Enterococcus faecium
  source 1..50: mol_type = genomic DNA
caccttccttacggagggtgccccaggggagacacttcgtaaggaagttg

SEQ ID NO: 11460 - DNA, 40 bp, Enterococcus faecium
  source 1..40: mol_type = genomic DNA
agaaaagaggaactgaaacaggaactaatagatttaacag

SEQ ID NO: 11461 - protein, 570 aa, Paenibacillus faecis
MALEVEVIKASRKISDRNAGKLSDVLRVAPYARVSTDTEEQLSSYKSQVAYYTDLVSKRSDWVLVDIYADEAITGTQVTKREDFQRMINDCMDGKIDMIITKSISRFARNTLDTLKYVRMLKEKNIAVLFEDENINTLTMDGELLLVILSSVAQQEVENISANVKKGLKMKMKRGELVGFQSCLGYDYDVNTKQITVNQEEAEIVRYIFERYTSGIGAYVIAKELTEAGHKTKYGRVEWQDTTVLGIIKNEKYKGDLLQGKTFTVDPISKRRLDNYGEEDQFYVKNHHEPIVSEEVFEKAQDILHRRGENRRRGAKGKRDKYSRKFAFSSKLECAFCRSNLSRRNWHSGTPHEKVIWQCVTATKKGKKYCSHSKALEEKLIEGAFVESYKLVCRNNSDVLDELMKRMESVFSDQNHQKRLNKIISDIQAMEQKRCRLIDLCLDEKIDRATYEQKYAELDTSLTKLLEEKEQLEQSAQDEIDLGKRLEHFRKVLQTNEVLTAFDRNVFESIVDKVIIGENSNQESPEPYKLTFVYKTGFHNSIQSKMHKQKKSLRSERGRVPSYSENNTCG

SEQ ID NO: 11462 - DNA, 50 bp, Paenibacillus faecis
  source 1..50: mol_type = genomic DNA
tgccttcctattccgagaacaacacatgtggagtgcgtaataggaatgca

SEQ ID NO: 11463 - DNA, 40 bp, Paenibacillus faecis
  source 1..40: mol_type = genomic DNA
tatgtttccgcatacggtgcatgtggaagctgtttgttcc

SEQ ID NO: 11464 - DNA, 50 bp, Paenibacillus faecis
  source 1..50: mol_type = genomic DNA
tgccttcctattccgagaacaacatttgtggagtgcgtaataggaatgca

SEQ ID NO: 11465 - DNA, 40 bp, Paenibacillus faecis
  source 1..40: mol_type = genomic DNA
tacttttcagtataatgtgtttgtggaatctgtttattac

SEQ ID NO: 11466 - protein, 547 aa, Roseburia inulinivorans
MIKDIESGLINCVITKDLSRLGRNYLDCGLYLEVFFPEHNVRYIAVNDGVDTLNKSAMDITPFRNILNEMYAADISVKIKSAYRARFQQGKFMGTTAPYGYIKDPADHNHLLIDDKVAHVVKEIFDLALKGNGVAKICRHLNKQHILRPAAYAAERGETGFERHFEGNEDKRYIWSGNSVRSILRSPIYAGNLVGYKRIAANMKSKKRPSKLPEEWEVIPNTHEGIVTQEEFDIVQQLITSRRLPQNKGGFVNIFAGVIKCVDCGCALRAMNVHRRKRPEIIDCVQYSCNNYARNGRSECSAHNIEARDLFNAVLADINCFADMAVNDEKAVRAIEKRLTETDQSRAKALEKERKKLNKRLAELDRLFSSLYEDKVMERITERNFEMMSGKYQKEQLEIEARLKEVTETLNESYEKSRGIRDFLALIRNYQGLKELDATVINALIDKILVSEREKMADGTVKQEIKIYYKFIGFVDELHIIPTKRWAAMPAKNCTVCGVEYVPGSGASRYCPACAKKIRREKSNESKRRSREQKRIACMNCPQKMTD

SEQ ID NO: 11467 - DNA, 50 bp, Roseburia inulinivorans; identical to SEQ ID NO: 11112
  source 1..50: mol_type = genomic DNA

SEQ ID NO: 11468 - DNA, 40 bp, Roseburia inulinivorans
  source 1..40: mol_type = genomic DNA
ccttctatgctgctcagcagagctgggacatagaggaaga

SEQ ID NO: 11469 - DNA, 50 bp, Roseburia inulinivorans
  source 1..50: mol_type = genomic DNA
actgtccgcaaaaaatgaccgactattgtaggacggattttgcggacatt

SEQ ID NO: 11470 - DNA, 40 bp, Roseburia inulinivorans
  source 1..40: mol_type = genomic DNA
ccttccatgcagaaaagcaatgctgagagatggagaaaga

SEQ ID NO: 11471 - protein, 593 aa, Ruminococcus bicirculans
MSTSNTDCDNRKYAIYARKSKFTAKGESINQQIDRCKLHLSSMNVAEEDIIIFEDEGYSGGNTDRPQFKEMMDMCEDNKIQCVICYKLDRISRSVSDFTNTFNNLEKHNIRFISVSDGLNGTNSPMDKAMIQLVAVFAELERNIIAERIIDNMTELAQKGRWLGGTTPTGYKSVETFGSTNKEGKVHYARKLEIVPEEMELVKRIYKLYLKTESLTAVQAILLNDNIKTKMGNEYTRFAIKVILSNPVYAKADNAVLKFFENKGSTIYAEGTEFDGTKGMMVYNKTKQEKNTSHKVKPYNEWIVAIGEHEGVIDGADWVSVQNILDKNKDKNYNRPRSHCALLSGLLRCKCGSIMYPRVAKTYNERGERNFAYACKMMLNSNRQRCNVKRINGNFLDDLVWEQIKVLTSDKSELAKQLKEVQGNFESDEQPVLKELEQMKKRLSDNKQKQKNLINFIANNGSKMSPEMSDDANEQYRKLENSNKEISSKIIKLEEVVAQSEQAFANFKDLATRLAEFSAALDTQSTFEDKRYAVRQVIEHAEWDGENVKLFFVGNKTVELQDIKDELADYKKAHRKRAKTSSDENTTLGEDSE

SEQ ID NO: 11472 - DNA, 50 bp, Ruminococcus bicirculans
  source 1..50: mol_type = genomic DNA
atacgacattaggtgaggatagcgaacgcaacactaacataaagtcgtat

SEQ ID NO: 11473 - DNA, 40 bp, Ruminococcus bicirculans
  source 1..40: mol_type = genomic DNA
tgggagcaggtgcgtggagaacgagatactaatgcacttt

SEQ ID NO: 11474 - DNA, 50 bp, Ruminococcus bicirculans
  source 1..50: mol_type = genomic DNA
atacgacattaggtgaggatagcgaccgcaacactaacataaagtcgtat

SEQ ID NO: 11475 - DNA, 40 bp, Ruminococcus bicirculans
  source 1..40: mol_type = genomic DNA
tgggagcagctgagtggagacagagaaattaatgtaatga

SEQ ID NO: 11476 - protein, 520 aa, Microthrixaceae bacterium
MTAIPADDVESVVAAFATADPRVTEDNSFARLLKKASSKGDGRLCAYVRISQFRGLDESAGDIGIVRQARDICQLAVDDGVRIGTWHIDNDVSAASGRPRPGYESAFAMLASGRSTGLFAWDLVRLYRRGSELERLVELVESAPEELVVRTVKTGSNGIDLADPLGRMMARMMVWAAEMETFQQSSRQQASQRHRAQKGLWHGGTLPFGYRRRPGAPGYLDVVEEEAELVRWGAAAIVEGTPLSRVVAHFEASGVRPHRAEGWTRQVVRGLYMNDAVAGLRTHTPRRIRSRQPARGASTEVVEAVWDAIIPIEELERVRAVLHDPARGGGKGSRPPAKWWLGRALKCSVCGSKMKGKKRQHRSGKEMPPCYLCEKKGCVTTPVDLTEAWAREVALEAYRGTTALSALSKSDVEELSLIDSQRNEALDLLDKGSSVASVAEVLERLSARETAIRSRARALPGPSVGQDVEDWWDSLTVPEKAARFYDLGLDIVVSPVLVRGTRRADQDDPGFRLRARDTGE

SEQ ID NO: 11477 - DNA, 50 bp, Microthrixaceae bacterium
  source 1..50: mol_type = genomic DNA
taccctttgacagtgacggggtcccgaccctccgtgtgggacacgggctt

SEQ ID NO: 11478 - DNA, 40 bp, Microthrixaceae bacterium
  source 1..40: mol_type = genomic DNA
cccgtcggcgacggggtccccacgctgcgggcgcacgggc

SEQ ID NO: 11479 - DNA, 50 bp, Microthrixaceae bacterium
  source 1..50: mol_type = genomic DNA
taccctttgacagtgacggggtccgcaccctccgtgtgggacacgggctt

SEQ ID NO: 11480 - DNA, 40 bp, Microthrixaceae bacterium
  source 1..40: mol_type = genomic DNA
cccgtcgggggcggggtccgcagtccggggaccaacgggc

SEQ ID NO: 11481 - protein, 501 aa, Faecalibacterium prausnitzii
MIIREDAIYGRQSVDRKDSISIESQIEFCKYELRGGNFRKYTDKGYSGKNTDRPKFQEMMADIRRGLIKRVVVYKLDRISRSILDFATMMETFQEYNVEFVSSTEKFDTSTPMGRAMLNICIVFAQLERETIQKRVTDAYYSRCQHGFHMSGAAPYGFQLEPTTIEGIRTKMMKPDPETADIAKLMFEMYSQPGISFGDIARYFADEGILIYGKEMKRGFISQLLRNPIYAQADLDMYEFFKSQGTVVVNEATDFAGTNGCYLYQGRDVQERKNKHLKDQILVLAPSEGLVSSDTWLRCRKKLMANKTFQGGRKAKNTWLAGKVKCGRCGYALMSVGNPTGVQYLRCSKRADSKSCDGCGTLRTREFERFLYGEMVKKLSEFQTLTAKRETVNPKLTALNMELARVEDEIEKLLNTLTGANAVLLSYANSKIEELDTRRQALTKEIAALSAETMSPEQIERLSVYLNQWEEIDFEDRRQVADGLISQIRATDEHVSIEWKI

SEQ ID NO: 11482 - DNA, 50 bp, Faecalibacterium prausnitzii; identical to SEQ ID NO: 10927
  source 1..50: mol_type = genomic DNA

SEQ ID NO: 11483 - DNA, 40 bp, Faecalibacterium prausnitzii
  source 1..40: mol_type = genomic DNA
atcttttattcggaaatgaaagcaaaaccattttactgat

SEQ ID NO: 11484 - DNA, 50 bp, Faecalibacterium prausnitzii
  source 1..50: mol_type = genomic DNA
ctgtgtgcccttgtcaagcgatgtccacatcgcttgacaagggcacacag

SEQ ID NO: 11485 - DNA, 40 bp, Faecalibacterium prausnitzii
  source 1..40: mol_type = genomic DNA
ctgttttatttgaaaatgacctcaaaatctttttattgaa

SEQ ID NO: 11486 - protein, 585 aa, Blautia sp YL58
MPRIRKSQESGITTNRIIWRIAVYIRLSRDDGNDESLSVTNQRKIILEYLENIFEEEHVIVDIYIDDGKTGTDYERPEFQRMINDVENGKVNCIICKTLARAFRNYSDQGYFLEKVFPIYSTRFISIGSPALDTYLNPDAITDGMEVPITGLMNDRYAARTSKDIRRTFNMKRRNGEFIGAFAPYGYLKDPENKNALIIDEEAAQVVRDIFHWYVEDGMSKIGIVRHLNELGVLTPTAYKHSKGLNLKTPQCAKNDGMWGITTICTILSNQMYIGNMIQGKQRIISYKVHKAVLMPEDEWFVVENTHEAIIDKETFEKAQSLGRRDTRTAPKEKKVYLFAGFLRCADCNKSMTKKTTRKKDAQGKNVEYAYYVCSTYALKDKSKCTRHPIKLETLTEAVLKAIQVQISLVGNMADIIAEINKQPSICNQSLRLEKQLSDKKKELEKIICVTDSLYMDWKCGDITRAEYMRMKAKFEAQAEDLKQVIAAIETEIQISSKGIGNDDPYLKIFLKHKNIKELNRGILVELIDTIYIHENNEITIKFTFADQHKRMLEFIENNRLTSTNEEKQERIYTFPSQTESTVAV

SEQ ID NO: 11487 - DNA, 50 bp, Blautia sp YL58
  source 1..50: mol_type = genomic DNA
ttttgtctatatatacatgctccattagaaccatgtttatatagacaact

SEQ ID NO: 11488 - DNA, 40 bp, Blautia sp YL58
  source 1..40: mol_type = genomic DNA
tgtggattttcccgcgccattggctccaagcaggccaaaa

SEQ ID NO: 11489 - DNA, 50 bp, Blautia sp YL58; identical to SEQ ID NO: 11487
  source 1..50: mol_type = genomic DNA

SEQ ID NO: 11490 - DNA, 40 bp, Blautia sp YL58
  source 1..40: mol_type = genomic DNA
agtggtctttcctgctccattcactccaagaagcccaaaa

SEQ ID NO: 11491 - protein, 480 aa, Brevibacillus laterosporus
MRVGTYRRVSTEMQREDGVSLQTQDERLNAFIQSQGWALVEDYADEGYSAKNMDRPSLKRLIEDIKRQKIDVVLVYRLDRFVRSVSDLHHLLQVMDKHDVKFKSCTEVFDTTSATGRMFITIIATLAQWERETIAERVFDNMLHRSEQGKRNGAPAPYGYNLEDGILTPDENEATWVRYIFQKYKTNGSQNIAKYLNVRGIRTKKGEVWSDYSVRYILKNPIYAGYVRWNLRSAAKGKNTETVIAKYEQKNFEPLISKSDWDDIQELMKERSFMAFRSDNHYPFSSIAKCEECGHSFTGAFKKRKSGGVHRFYKCAGRFRTGTCKVTVIAEEAIEKAFLETMYFSMYDEKEYLAEKEPEIDAQQIQKELVHIEGKKARIKELYVDGDIAKEDYKKKIAELQERENDLLLQLETEDVRASEEEVRMWISSVKANWNTLSYESKKAAVHAIFRSMTIRVIEPPKVGKVAAPPVVEIVNFELR

SEQ ID NO: 11492 - DNA, 50 bp, Brevibacillus laterosporus
  source 1..50: mol_type = genomic DNA
tgggttacttgtcagtggcgtggttccccatacataccgtaagtaatcca

SEQ ID NO: 11493 - DNA, 40 bp, Brevibacillus laterosporus
  source 1..40: mol_type = genomic DNA
aggaatcaaatggagaggttcttcttgcatagggcagccg

SEQ ID NO: 11494 - DNA, 50 bp, Brevibacillus laterosporus
  source 1..50: mol_type = genomic DNA
tgggttacttgtcagtggcgtggttgcccatacataccgtaagtaatcca

SEQ ID NO: 11495 - DNA, 40 bp, Brevibacillus laterosporus
  source 1..40: mol_type = genomic DNA
aggaatgaaatggacttgctgttcttgcctagggaagagg

SEQ ID NO: 11496 - protein, 467 aa, Streptomyces coelicoflavus
MPTDPADPQLACIYCRMSEDREGGGLGIDRQREDCEKLATELGLTVVHTYTDNDLSAYSGKPRPGYQQMLDGLRNGLYGTVIAWHTDRLHRRPTELEEYIDVCEPRRVQTRTVKAGTLDLATATGRMIARQLGVQARYEVERMVERQRRAREQKVGRGEWSGGPRPYGWEEDGVTPIPEEIAVIRESAEAILAGASARSVAADLNLRKLPTSTGARWEGGSVVRMLKRPRNAGILQHRGEEAGRSKWDAALDEATWRSLCDIFADPSRVSTAHNVRKYLGSGIYQCGVCGEALTSFFKRKGEPKKYKCRKNSCVVRDLVLLDKWVQTHLLKRLQRADAADLFAGREQDPVDVRGAQEDLRAARKDLDDLAAEFGAGEIDMQEWRVARASARARKEKAEAILATAVQVNPVVGLLGVEDVEAAWKGLDLSRQRAVIDWAMTVRVLPAKTGRRPGGTYWDRDAVEIAWK

SEQ ID NO: 11497 - DNA, 50 bp, Streptomyces coelicoflavus
  source 1..50: mol_type = genomic DNA
gggaggctttcatcagcgttcggcctgccgaacgcctgcgaaagcctccc

SEQ ID NO: 11498 - DNA, 40 bp, Streptomyces coelicoflavus
  source 1..40: mol_type = genomic DNA
ccgcggccaggccctgggcctgccgacgacgatgacgctc

SEQ ID NO: 11499 - DNA, 50 bp, Streptomyces coelicoflavus
  source 1..50: mol_type = genomic DNA
gggaggctttcatcagcgttcggccggccgaacgcctgcgaaagcctccc

SEQ ID NO: 11500 - DNA, 40 bp, Streptomyces coelicoflavus
  source 1..40: mol_type = genomic DNA
ccgtggccaggcccctggccgtgagaggacattgacgctc

SEQ ID NO: 11501 - protein, 542 aa, Vibrio cyclitrophicus
MKTAYSYIRFSSSRQADGDSIRRQTELARSYANEHGLDLQDVSISDFGVSAFRGSNAIEGALGAFLKLVDEQKIDSDCYLLVESFDRLSRQAVEDALGLLMQVVNRGITLVTLSDNHEYKRGELDMTKLILSIVTMSRANEESEMKSRRTSAAWEKARIDALKGIKAKNSRLPDWLSWNDDKTDFTVSQSAKEIIQRVFELSAGGSGIEIIARTLNEEGCRTFKKSKEWRSSGVSKLLRNRAVIGEFQFYQKDVHGKRSPIGEPIVDYYPQVITKPLFLAVQQGMDLRNKRGSGNRSGQFTNIFTGLIRCGECGSSVVTSSQTTKTPQGYLKCTLRCESQARMNYKYTEPQVLSALSSLQSVIEKYRSPISDETASLKLDIRALSDKVSSLESLLDNAFTPRIAERLQEAELQLAEANAMLETELQRISTQQSRERIVLGLEPLESIDDRRAFNSKLRTVIDRIELIEHPHKKGSALVYFISDRPVMEQHFTKLKGAHGTGSEVYELHIDDVPTYLGRTTSKKPLEFIIDVTEDRLSFMPDR

SEQ ID NO: 11502 - DNA, 50 bp, Vibrio cyclitrophicus
  source 1..50: mol_type = genomic DNA
gtgtacggaagggtctaaaaggtctcgcaatttgcgggggttccgtacat

SEQ ID NO: 11503 - DNA, 40 bp, Vibrio cyclitrophicus
  source 1..40: mol_type = genomic DNA
ctttgcttttttaatggtgtcgcaatttgggataccaaac

SEQ ID NO: 11504 - DNA, 50 bp, Vibrio cyclitrophicus
  source 1..50: mol_type = genomic DNA
gtgtacggaagggtctaaaaggtcgagcaatttgcgggggttccgtacat

SEQ ID NO: 11505 - DNA, 40 bp, Vibrio cyclitrophicus
  source 1..40: mol_type = genomic DNA
ctgtgcatttttactgatggagcactttgcaaaagcaaac

SEQ ID NO: 11506 - protein, 501 aa, Corynebacterium provencense
MNDTNPLAALAEGMTPKRAVIYLRVSTSEQATKGGQSEGFSIPAQREANKKKAQGLGAIVVKEFVERGVSGTSTNRPALKTMLRYLEEEDGAVDYVIVHKIDRLARNRADDVAINAKFDEYGVRLVSTSENIDQTPGGLLTHGIMSSIAEFYSKNLANEVVKGMSQKVRSGGTIGKAPIGYLNVREVVNGAESRTVAIDPERAPLVKWAFEEYAKGDISLGRLADELNARGLTTVPTRKYPAKPVTKRYVSQMLPRRYYLGFVQYRGVEFQGTHEPLITPELFAKVQQVLKARRQGELLRKHPHFLKSTIWCGDCGGRLIVQRPTNHQGRQYKYFICNGRASRRTNCTMPAIPEQWLLDQIEDLYRTIQVPEAIFPGLRQRLAQEIELSHAAVREERARLEKMRRDVQSKQAKLMEAFYNEALPVDMLAKERTGTRRRTRQRRASAEVLRRPGGRRAGAPGARPEPGEGLPPPLLHQRRPGEADAQPAVLRQDLRLYELPW

SEQ ID NO: 11507 - DNA, 50 bp, Corynebacterium provencense
  source 1..50: mol_type = genomic DNA
cgtataagtcggagcactatggtgcgccctaacgtacgcgacgtatacga

SEQ ID NO: 11508 - DNA, 40 bp, Corynebacterium provencense
  source 1..40: mol_type = genomic DNA
aggctctgacctgcatgtgcgcccggggggacttgaaccc

SEQ ID NO: 11509 - DNA, 50 bp, Corynebacterium provencense
  source 1..50: mol_type = genomic DNA
cgtataagtcggagcactatggtgatccctaacgtacgcgacgtatacga

SEQ ID NO: 11510 - DNA, 40 bp, Corynebacterium provencense
  source 1..40: mol_type = genomic DNA
agactctgagtttcagcagatcctggggggacttgaacca

SEQ ID NO: 11511 - protein, 475 aa, Bacillus thuringiensis
MYVRVSTDKDEQVSSVENQVDICRYWIEKNGYEWDQSAVYFDDGISGTAWLERHAMQLILQKVRKNELDTVVFKSIHRLARDLKDALEIKEILLGHGVRLVTIEEGYDSYYEGNNDMKFEIYAMFAAQLPKTLSTSISAALSAKVRRGEHIGTIPFGYDRIDKKLIINDEEALLVKEMFDWYEDGRGYRMIANNLNEKGCRTRFGNLWSEASVKTIVTNSLYTGEHVMHKYKTVKVDGKKKTVKNPKEKWLVFKNHHDAIISKEQWERINLVSDVKDKKTKSDYRNEFRGIVWCAHCGKRVRAIYAGVRSKYERVYMKCSTYKAYGTCVNHIPIRYEDFRNLILERLKQKQEYIETRLVAQIKDKLQGKIAKSKKTIKQLESKKEKLLELYMDSFIDKETFVNRNRKLEDEMTAQELQLLKLKDKDIQNRETKDIQDAFMLLQEEQDLHKAFQKLIKKIVFYQDGKLDIEYTFDI

SEQ ID NO: 11512 - DNA, 50 bp, Bacillus thuringiensis; identical to SEQ ID NO: 2072
  source 1..50: mol_type = genomic DNA

SEQ ID NO: 11513 - DNA, 40 bp, Bacillus thuringiensis
  source 1..40: mol_type = genomic DNA
aggtggtcatggtgggacatcaagtaataactggcagcaa

SEQ ID NO: 11514 - DNA, 50 bp, Bacillus thuringiensis; identical to SEQ ID NO: 2074
  source 1..50: mol_type = genomic DNA

SEQ ID NO: 11515 - DNA, 40 bp, Bacillus thuringiensis; identical to SEQ ID NO: 2075
  source 1..40: mol_type = genomic DNA

SEQ ID NO: 11516 - protein, 475 aa, Bacillus thuringiensis
MYVRVSTDKDEQVSSVENQVDICRYWIEKNGYEWDQNAVYFDDGISGTAWLERHAMQLILQKARKNELDTVVFKSIHRLARDLKDALEIKEILLGHGVRLVTIEEGYDSYYEGNNDMKFEIYAMFAAQLPKTLSTSISAALSAKVRRGEHTGTIPFGYDRIDKKLIINDEEALLVKKMFDWYEDGRGYRMIANNLNKKGCRTRFGNLWSEASVKTIVTNSLYTGEHVMHKYKTVKVDGKKKTVKNPKEKWLVFENHHDAIISKEQWERINLVSEVKDKKTKSDYRNEFRGIVWCAHCGKRVRAIYAGVRSKYERVYMKCSTYKAYGTCVNHIPVRYEDFRNLILERLKQKQEYIETRLVAQIKDKLQGKIAKSKKTIKQLESKKEKLLELYMDSFIDKETFVNRNRKLEDEMTAQELQLLKLKDKDIQNRETKDIKDAFMLLQEEQDLHKAFQKLIKRIVFYQDGKLDIEYTFDI

SEQ ID NO: 11517 - DNA, 50 bp, Bacillus thuringiensis; identical to SEQ ID NO: 2072
  source 1..50: mol_type = genomic DNA

SEQ ID NO: 11518 - DNA, 40 bp, Bacillus thuringiensis; identical to SEQ ID NO: 11513
  source 1..40: mol_type = genomic DNA

SEQ ID NO: 11519 - DNA, 50 bp, Bacillus thuringiensis; identical to SEQ ID NO: 2074
  source 1..50: mol_type = genomic DNA

SEQ ID NO: 11520 - DNA, 40 bp, Bacillus thuringiensis; identical to SEQ ID NO: 2075
  source 1..40: mol_type = genomic DNA

SEQ ID NO: 11521 - protein, 475 aa, Bacillus thuringiensis
MYVRVSTDKDEQVSSVENQVDICRYWIEKNGYEWDQNAVYFDDGISGTAWLERHAMQLILQKVRKNELDTVVFKSIHRLARDLKDALEIKEILLGHGVRLVTIEEGYDSYYEGNNDMKFEIYAMFAAQLPKTLSTSISAALSAKVRRGEHTGTIPFGYDRIDKKLIINDEEALLVKEMFDWYEDGRGYRMIANNLNKKGCRTRFGNLWSEASVKTIVTNSLYTGEHVMHKYKTVKVDGKKKTVKNPKEKWLVFENHHDAIISKEQWERINPVSDVKGKKTKSDYRNEFRGIVWCAHCGKRVRAIYAGVRSKYERVYMKCSTYKAYGTCVNHIPVRYEDFRNLILERLKQKQEYIETRLVAQIKDKLQEKIAKSKKTIKQLGSKKEKLLELYMDSFIDKETFVNRNRKLEDEMTAQELQLLKLKDKDIQNRETKDIQDAFMLLQEEQDLHKAFQKLIKKIVFNQDGKLDIEYTFDF

SEQ ID NO: 11522 - DNA, 50 bp, Bacillus thuringiensis; identical to SEQ ID NO: 2072
  source 1..50: mol_type = genomic DNA

SEQ ID NO: 11523 - DNA, 40 bp, Bacillus thuringiensis; identical to SEQ ID NO: 11513
  source 1..40: mol_type = genomic DNA

SEQ ID NO: 11524 - DNA, 50 bp, Bacillus thuringiensis; identical to SEQ ID NO: 2074
  source 1..50: mol_type = genomic DNA

SEQ ID NO: 11525 - DNA, 40 bp, Bacillus thuringiensis; identical to SEQ ID NO: 2075
  source 1..40: mol_type = genomic DNA

SEQ ID NO: 11526 - protein, 475 aa, Bacillus cereus
MYVRVSTDKDEQVSSVENQVDICRYWIEKNGYEWDQNAVYFDDGISGTAWLERHAMQLILQKVRKNELDTVVFKSIHRLARDLKDALEIKEILLGHGVRLVTIEEGYDSYYEGNNDMKFEIYAMFAAQLPKTLSTSISAALSAKVRRGEHTGTIPFGYDRIDKKLIINDEEALLVKEMFDWYEDGRGYRMIANNLNKKGCRTRFGNLWSEASVKTIVTNSLYTGEHVMHKYKTVKVDGKKKTVKNPKEKWLVFENHHDAIISKEQWERINLVSGVKDKKTKSDYRNEFRGIVWCAHCGKRVRAIYAGVRSKYERVYMKCSTYKAYGTCVNHIPVRYEDFRNLILERLKQKQEYIETRLVAQIKDKLQGKIAKLKKTIKQLESKKEKLLELYMDSFIDKETFVNRNRKLEDEMTAQELQLLKLKDKDIQNRETKDIQDAFMLLQEEQDLHKAFQKLIKKIVFYQDGKLDIEYTFDI

SEQ ID NO: 11527 - DNA, 50 bp, Bacillus cereus
  source 1..50: mol_type = genomic DNA
ttgtagctattgatatgatgaacatctgtctggtatactaatagcgacaa

SEQ ID NO: 11528 - DNA, 40 bp, Bacillus cereus; identical to SEQ ID NO: 11513
  source 1..40: mol_type = genomic DNA

SEQ ID NO: 11529 - DNA, 50 bp, Bacillus cereus
  source 1..50: mol_type = genomic DNA
ttgtagctattgatatgatgaacagatgtctggtatactaatagcgacaa

SEQ ID NO: 11530 - DNA, 40 bp, Bacillus cereus; identical to SEQ ID NO: 2075
  source 1..40: mol_type = genomic DNA

SEQ ID NO: 11531 - protein, 519 aa, Hafnia alvei
MKKNVYCYARVSSRGQAKDGYGMSRQQSMLKDYVVTYDDSLHDRGYDLGAINWLFAEGISAYSGKNIEDGSVLKTFIDDVLKKKIINAVLVIENLDRFSRAEPVKAANLFLNLITAGCDIHEVETEIIHHSSSDLSIITGGLQRAHNESKRKARLSIKNWDKRIKNTINGDAVLTHRVPSWLDVKDNTYIIKKGEKEKYNLIFKMYADGFGPAAIRDELKNKNMLINDREPTIHHLNKILRDQRLIGKFNSTGRKVLEGVVIYPVVVEPTLFNAAMQLRRKGRPVGKINLKANNLFAGLCICMECGRYIQVNGVDRRGDTYFRCGGSLVKIDKCQERGFKYKIVEDALLQHIRNFDFSNLTTDESDIQIRINHLTIELLSNINYRDEILLDLEKEEIPDPHDRRIFKNLQKKIIDIESEILALKQSNVNLRAFDELKKDYSEELRDPTNVDIRLSFNIKIKRVIKSVIIKRYSDVIFLVVNYIAINEKQAIVINSKDGEVLYMGVQNDDLKTVEHLIVK

SEQ ID NO: 11532 - DNA, 50 bp, Hafnia alvei
  source 1..50: mol_type = genomic DNA
aacagtaattcattgttaatgatgaccatgatatgctgtgtgttactgta

SEQ ID NO: 11533 - DNA, 40 bp, Hafnia alvei
  source 1..40: mol_type = genomic DNA
ggcgatgatggcgatcacgaccattagctcaatgagggta

SEQ ID NO: 11534 - DNA, 50 bp, Hafnia alvei
  source 1..50: mol_type = genomic DNA
aacagtaattcattgttaatgatgggcatgatatgctgtgtgttactgta

SEQ ID NO: 11535 - DNA, 40 bp, Hafnia alvei
  source 1..40: mol_type = genomic DNA
ggcagtgatggtgaccacaggcattatccaaataagggta

SEQ ID NO: 11536 - protein, 516 aa, Eubacteriaceae bacterium
MANSVFKQNNNNYAIAYYRFSSHSQNEASIDQQREQAQLYAETHDLNIIKEYTDRAISGTTDERPGFQQMLAEVSKLKPAVLILWKTDRLGRDRYTLALAKKTIRDAGCSISYIAEAIPDDSPESVLMEGMLESMAEFYSKQLRQNVVRGMRYNAENALYNGHKTLGYRVDDTKHYVKDENTAPFVQYIFKQYADGKPLTEIADELNAQGVRTVHGREFKVNSLRHILKNKAYTGVYEYSDIMIEDGMPRLVSDELFEEVQKRFERNKHKAKTPSIEEDAPRYWLTGKLYCGECGATMHGMSGTSKTGKIHYYYSCKNHRKHKCSLRNIPQLQLEAHVMWVLSSLLENSENLASLAVDVAAYYKELNADNGYIGGLEAELKETEKGINNLIKAIEKGVLSETVTNRLAELENRKTAITEAIETERLKQAIVDDGHSIQQYFDKYANADFDDTETRNAILEYFVDKIYVYDDRLVITWYYMNDESTIDLDTLTEITDTKNTSNDKDVRSSTLKQSAP

SEQ ID NO: 11537 - DNA, 50 bp, Eubacteriaceae bacterium
  source 1..50: mol_type = genomic DNA
agttcgactttgaaacagtcagctccacttaaacgcattaagtcgaactc

SEQ ID NO: 11538 - DNA, 40 bp, Eubacteriaceae bacterium
  source 1..40: mol_type = genomic DNA
ggttcgactcccgccaggtccatgataaaggataaaattg

SEQ ID NO: 11539 - DNA, 50 bp, Eubacteriaceae bacterium
  source 1..50: mol_type = genomic DNA
agttcgactttgaaacagtcagcttgacttaaacgcattaagtcgaactc

SEQ ID NO: 11540 - DNA, 40 bp, Eubacteriaceae bacterium
  source 1..40: mol_type = genomic DNA
gtttagtcaccccacaggttgatgattaagaagaaaattg

SEQ ID NO: 11541 - protein, 537 aa, Enterococcus gilvus
MKQQIYNTALYLRLSRDDELQGESSSITTQRSMLRLYAKEHHLNVIDEYIDDGWSGTNFDRPSFQRMIEDIEAGKINCVVTKDLSRLGRNYIMTGQYTELYFPSHNVRYIAIDDGVDSEKGESEIAPFKNIINEWVARDTSRKVKSAFKTKFAEGAHYGAYAPLGYKKHPDIKGKLLVDDETKWIIEKIFSLAYQGYGSAKITKQLRAEKVPTASWLNFTRYGTFAHIFEGKPESKRYEWTIAHVKAILKSEVYIGNSVHNMQSTVSFKSKKKVRKPESEWFRVENTHEPIIDKEVFYRVQEQIKSRRRQTKEKATPIFAGLVRCADCGWSMRFGTNKTNKTPYSYYACSYYGQFGKGNCSMHYIRYDVLYQAVLERLQYWAKAVQQDEEKVLNKIQKAGNAERIREKKKKASTLKKAENRQNEIDRLFAKMYEDRACEKITERNFVMLSSKYQKEQIELEQQITSLREELSKMEQDMIGAEKWIELIKEYSVPKELTAPLLNAMIEKILIHEATTNEDNERIQEIEIYYRFIGKVE

SEQ ID NO: 11542 - DNA, 50 bp, Enterococcus gilvus; identical to SEQ ID NO: 402
  source 1..50: mol_type = genomic DNA

SEQ ID NO: 11543 - DNA, 40 bp, Enterococcus gilvus
  source 1..40: mol_type = genomic DNA
agtgtcaaaatgggaaacaggtcaaacctatcctgatatt

SEQ ID NO: 11544 - DNA, 50 bp, Enterococcus gilvus
  source 1..50: mol_type = genomic DNA
taatatttttaactaagggaaacccttgtttcccaaacaaaaagatatta

SEQ ID NO: 11545 - DNA, 40 bp, Enterococcus gilvus
  source 1..40: mol_type = genomic DNA
agtgccaaaatgggagagacttgaaacctaaacctaaatt

SEQ ID NO: 11546 - protein, 537 aa, Enterococcus gilvus; identical to SEQ ID NO: 641

SEQ ID NO: 11547 - DNA, 50 bp, Enterococcus gilvus; identical to SEQ ID NO: 402
  source 1..50: mol_type = genomic DNA

SEQ ID NO: 11548 - DNA, 40 bp, Enterococcus gilvus; identical to SEQ ID NO: 11543
  source 1..40: mol_type = genomic DNA

SEQ ID NO: 11549 - DNA, 50 bp, Enterococcus gilvus; identical to SEQ ID NO: 11544
  source 1..50: mol_type = genomic DNA

SEQ ID NO: 11550 - DNA, 40 bp, Enterococcus gilvus; identical to SEQ ID NO: 11545
  source 1..40: mol_type = genomic DNA

SEQ ID NO: 11551 - protein, 500 aa, Flavonifractor plautii
MNIVIYARYSSHSQTEQSIEEQLQTCHEFAKHNGHIVIGEYIDRAQSGTTDSRAEFQRMIADSDKHAFEGVLVYQFDRFARNRYDSAINKAKLKKNGVRVISARENISDDASGILVEGVLESMAEYYSAELSQKIRRGMNINAEKCLSNGSNPGLGYYVDEKRRFHVDPERAAIVREIFEMYASGKTVAEITKYLNSKRVKTSLGKDFNKNSLHRLLRNKRYIGYYIYKDTETPGGMPRIIEDELFERVQHILERNKKAPARSRGREEYLLTTKLFCGYCREMMTGYGGTGKSGKAYHYYACNNFKRRKCKKKVVHKEKIENRVVLECCKLLTDSNIERIASAVADVCKTDQDTSAIKRIKAAIQETDTAIENLWKALERGQAVDMITERIEKRKQEKAELQGRLAVEMGKQVTLTAPQVRSFLYALKCGDIDDENTRRGIINIFLRAVYLYDDRVTLIFNGGKRPIILDDVLLDEIEEHFESAVSYHKKCSPLVASAPP

SEQ ID NO: 11552 - DNA, 50 bp, Flavonifractor plautii
  source 1..50: mol_type = genomic DNA
tcgccgttggttgcgtccgctccaccaagcggacattacacgaacaccta

SEQ ID NO: 11553 - DNA, 40 bp, Flavonifractor plautii
  source 1..40: mol_type = genomic DNA
tcgactccccccgcctccaccaaaaagaaagacacgacga

SEQ ID NO: 11554 - DNA, 50 bp, Flavonifractor plautii
  source 1..50: mol_type = genomic DNA
tcgccgttggttgcgtccgctccaaaaagcggacattacacgaacaccta

SEQ ID NO: 11555 - DNA, 40 bp, Flavonifractor plautii
  source 1..40: mol_type = genomic DNA
tagaattcccccacctcccaaaaaaagaaagaaaagtcaa

SEQ ID NO: 11556 - protein, 497 aa, Streptococcus urinalis
MSKIALYIRLSVEDMIKTDESESIINQRAYLNDYLDKNEEFKNFTREEYVDDGYSGTNENRPAFQRMLEDVKKNNIQTIIVKDLSRFMRDYITLGDYLENIFPFLGVRFIAINDGYDSNKEKGNGTDLDIQFKGLLYDFYTKDISEKVKSSMTTLKKQGKFLAWSPPLGYMKDPNDRHKIIVDEETAWIVKKIFKLALDGISSRNIAKILNDEKIPTPSKRKSELTNLDFEYSIIRTAKKPRPTWTNGNVIDVLANENYTGTYTFNMQDKSVLNPTSFKFKPKEEWGRVENNHEAIISKEDFEKVQKIKEKNLFMKGKNTDYEWRKKSPLQGFAKCPTCNHILGCTQSKRKRQDGTMRVHTYFTCRICKCNNVKHKNSRAGSLEEQVFEAIKEKYGLEDPIKDEKVKVKPMEKSIEDLEAKKMQSFEKYKLGKMNRQKFIDLKNSIDEELQAIKEKIQKAKEEKEVIDNTKLTRELMEKYIDSVFCEGNEVLNIIWK

SEQ ID NO: 11557 - DNA, 50 bp, Streptococcus urinalis; identical to SEQ ID NO: 2317
  source 1..50: mol_type = genomic DNA

SEQ ID NO: 11558 - DNA, 40 bp, Streptococcus urinalis
  source 1..40: mol_type = genomic DNA
tatcctagaccccttcacagggacaggtacttttatcaca

SEQ ID NO: 11559 - DNA, 50 bp, Streptococcus urinalis
  source 1..50: mol_type = genomic DNA
tttgtcataagcttgacatgagaggtgtttcgtgtcataatagtgataga

SEQ ID NO: 11560 - DNA, 40 bp, Streptococcus urinalis
  source 1..40: mol_type = genomic DNA
taccctttacccattcccagtaactggtacctgtatcaca

SEQ ID NO: 11561 - protein, 648 aa, Elizabethkingia meningoseptica
MLGIYARISREKEEGKDRSINDQVLSGKELAAKLGLKYEVYIDEGLSGTLDIEERPGLMQLIEDILSKKITHTFAYDQSRLERNKDVWSKLYTIFQDKKVKLSFKDVLEFDFESDENYLFSHITSLMNNFYTKVASRKIKSVLSRNIQEGKAHAIPPYGYKKNNEGYLIIDEIEKDVVKEIYESSLKGNGVDSIAYALNDKSVPTRYNKINTGTYTVRNKYTGEEKKLEKSKTKWRGGTIRNIIINPIYKGSRIWKGQSYNVPAIITPEYWDKVNSNLSENANNTGKKVLHRYLLKGVLSCGKCGRNMVGRSRTNKKDHYYQCSSKRYKGESCGNRSINIDKIEGIIWSRFFKGNDLLNLLQNDLIKDDNKIEVLNKDLQALQKKIEQQKKEKANLINAVAKGLFSDEEITTSKKQIDNKIKETEILINDIESQIDNTKNSDKLINNYITEFEHYTDNMSFLQKKEIINKYIKSISVLSHSNNTNIYTLIIRFKINLKDEHYMYGKSDNFLLSLTSMEVINSKFFSPNTSDVISATDVNVLKRVYIHPDTYEIKTPPYKYVDGNILFSLNSVVPYYTFPSNNAHWTKESICDFYEKHPDYLCKESGVSIISKDESQKYYEDMKYDYQKFKDKPLIEWLEFIENRSKSS

SEQ ID NO: 11562 - DNA, 50 bp, Elizabethkingia meningoseptica
  source 1..50: mol_type = genomic DNA
acccccacattcaaaataattactgatattattgtttagaatgtaaccat

SEQ ID NO: 11563 - DNA, 40 bp, Elizabethkingia meningoseptica
  source 1..40: mol_type = genomic DNA
cccacaccacaccatatccgatgttgcccttgttggcgga

SEQ ID NO: 11564 - DNA, 50 bp, Elizabethkingia meningoseptica
  source 1..50: mol_type = genomic DNA
acccccacattcaaaataattacttgtattattgtttagaatgtaaccat

SEQ ID NO: 11565 - DNA, 40 bp, Elizabethkingia meningoseptica
  source 1..40: mol_type = genomic DNA
cccaccccaccccttatcctgtgcttgcctttttggccca

SEQ ID NO: 11566 - protein, 649 aa, Elizabethkingia meningoseptica
MLGIYARISREKDDGKDRSINDQILSGKELAAELGLKYDTYIDEGLSGMLDIEERPGLMQLIEDILNKKITHVFAYDQSRLERNKDVWSKLYSIFQDKRIKLSFKGVLEFDFESDENYLFSHITSLMNNFYTKVASRKIKSVLSRNIQAGKAHAIPPYGYGKDNNGYLIVDENEKNIVKQIYDSSLKGIGLDSIAYTLNEANVPTRYNKINTGTYTVRNKHTGEERKLEKSKTKWRGGTIRNIITNPIYKGTRIWKGQSYSAPSIISAEHWDEVNSNLSKNANNTGKKVLHRYLLKGVLRCGKCGRNMVGRSRVNKKDHYYQCSSKRYKGESCGNKSINIDKIEGIIWSRFFKGNDLLSLLQNELIKDDNKVELLNKELKKLHKKIENEKKEKANLINAVAKGLLKDEEIITNKRQIDRKVKETETLIKDIEKQIYNAKNSDKLVTNYITEFERYTDNLSFLEKKEIINKYIKSISVLSPYTNANTYTLLIKFKINLKDEIYIYEKSRNFLMSYSDWTVVDSKFFNSESSKAISIVDISIIKRIRFNPETNTWYTPPYHITDDGMINFHPNSIIPYHNFPKNTIVWTKESICDFYKQYPDLLCKESGVSTISKDETQEYYNQMKNDYQQFKNKPLIEWLDFIEDRSKSS

SEQ ID NO: 11567 - DNA, 50 bp, Elizabethkingia meningoseptica
  source 1..50: mol_type = genomic DNA
accccctcattcaaaataactactgatgttattgtttagaatgtaacctt

SEQ ID NO: 11568 - DNA, 40 bp, Elizabethkingia meningoseptica; identical to SEQ ID NO: 11563
  source 1..40: mol_type = genomic DNA

SEQ ID NO: 11569 - DNA, 50 bp, Elizabethkingia meningoseptica
  source 1..50: mol_type = genomic DNA
accccctcattcaaaataactacttgtgttattgtttagaatgtaacctt

SEQ ID NO: 11570 - DNA, 40 bp, Elizabethkingia meningoseptica; identical to SEQ ID NO: 11565
  source 1..40: mol_type = genomic DNA

SEQ ID NO: 11571 - protein, 516 aa, Vannielia litorea
MGYVQKIEGDAPAALIYCRVSSTKQKVDGSGLESQEQRCRSYADMHGYAVEAVFPDDVSGGGDFMKRPGMVALLSFLDAQPGKPYVIIFDDLKRFARDRDFHWKLRKALSARGAVPKCLNFNFEDTPEGEFIETIMAAQGHLEREQNRRQVIQKMKARVEAGYWVFRAPVGYKHVSAKGGGGKVLVPDEPLASVVREALDGYASGRFVSQAEVQRFLERDPHFPKDRKDGSLRPMTVTRLLKKVVYAGYVEAPKWGVSVREGQHDGLISFETYQRIQDNLEGKKRAPAARKDYHVDFPLRGFVACNCCGNAMTAAWSTGCRKRYAYYRCETRGCEEKSKGIPRAKMEEAFEGILQSLTPSRKLFGLVKAMFADAWEMRSAQAHAARDEWKRQLKDAEKQVEGLIDRLVDTENRTVAKKLEERIDALERQKLVLAEKATKELPTKARLEDCMELTLRFLSSPWNIYKNGTHAVQQTVLRLAFAEPLRYCRNNGYGTIKTAFPFKVLGDLTGLNGEMV

SEQ ID NO: 11572 - DNA, 50 bp, Vannielia litorea
  source 1..50: mol_type = genomic DNA
ttgacaggtctaaatggagaaatggtgcagctagagagagaaacttggaa

SEQ ID NO: 11573 - DNA, 40 bp, Vannielia litorea
  source 1..40: mol_type = genomic DNA
gcgtgtcttgggggagatggtgctgtgagagaggattgaa

SEQ ID NO: 11574 - DNA, 50 bp, Vannielia litorea
  source 1..50: mol_type = genomic DNA
ttgacaggtctaaatggagaaatggggcagctagagagagaaacttggaa

SEQ ID NO: 11575 - DNA, 40 bp, Vannielia litorea
  source 1..40: mol_type = genomic DNA
gctagccttgggggagatgggactgagagataggagggca

SEQ ID NO: 11576 - protein, 554 aa, Streptococcus salivarius; identical to SEQ ID NO: 9391

SEQ ID NO: 11577 - DNA, 50 bp, Streptococcus salivarius; identical to SEQ ID NO: 9392
  source 1..50: mol_type = genomic DNA

SEQ ID NO: 11578 - DNA, 40 bp, Streptococcus salivarius
  source 1..40: mol_type = genomic DNA
agttgttttcataagctaattctatcataaaaaaagccct

SEQ ID NO: 11579 - DNA, 50 bp, Streptococcus salivarius
  source 1..50: mol_type = genomic DNA
ggactgctggggaaggtgtggataacataccatactccagccagcagtcc

SEQ ID NO: 11580 - DNA, 40 bp, Streptococcus salivarius
  source 1..40: mol_type = genomic DNA
aattgttttctaaagcaaaacctatcataaaaaaaagaaa

SEQ ID NO: 11581 - protein, 550 aa, Gardnerella vaginalis; identical to SEQ ID NO: 1606

SEQ ID NO: 11582 - DNA, 50 bp, Gardnerella vaginalis; identical to SEQ ID NO: 1607
  source 1..50: mol_type = genomic DNA

SEQ ID NO: 11583 - DNA, 40 bp, Gardnerella vaginalis
  source 1..40: mol_type = genomic DNA
ccccaaaaagcatgcttgaaaagcactggccttacattcg

SEQ ID NO: 11584 - DNA, 50 bp, Gardnerella vaginalis; identical to SEQ ID NO: 2059
  source 1..50: mol_type = genomic DNA

SEQ ID NO: 11585 - DNA, 40 bp, Gardnerella vaginalis
  source 1..40: mol_type = genomic DNA
tcccaaaaatcatgcttgattcaccctgcccttcctttcc

SEQ ID NO: 11586 - protein, 503 aa, Faecalibacterium prausnitzii; identical to SEQ ID NO: 9381

SEQ ID NO: 11587 - DNA, 50 bp, Faecalibacterium prausnitzii; identical to SEQ ID NO: 12
  source 1..50: mol_type = genomic DNA

SEQ ID NO: 11588 - DNA, 40 bp, Faecalibacterium prausnitzii
  source 1..40: mol_type = genomic DNA
gtatgatttatactactgattggagaaatttataatatga

SEQ ID NO: 11589 - DNA, 50 bp, Faecalibacterium prausnitzii
  source 1..50: mol_type = genomic DNA
gtgtagtcccttgtaaactgtactgaaggtcagtttacaaggaactacac

SEQ ID NO: 11590 - DNA, 40 bp, Faecalibacterium prausnitzii
  source 1..40: mol_type = genomic DNA
gtatgatttaaaaaactgagatttcaactttaaaatatga

SEQ ID NO: 11591 - protein, 580 aa, Kosakonia radicincitans
MKKCYLYVRVSSDQQIQGDGLDRQESMLINYFEDNAAAQDFDPQYEVIRDEGRSAFKAEHLQENAGLGKFFKQVKEGLIQPGSVLIVESLDRFSRENPFRCVEYISHLDKKQIELHDVDKRLIISRRHSNSLTFATMIAERAYEESRLKSYRIRKGWDKRRRMAKEEGQYMIKNCPPWISIVNKKYELNDNSKIIRDIFELYLSGIRSFNISKMMNDSGRLINGKLWTGTKICRVLRNVRCKGDYITNITDRNFDDDTIKVTSDILKIYPAVVSDDEFREVQRRLEGHNYSGRIRNDLKKTLFSYVVKCSYCGSALSMSTTGKYTYLKCSNSRENNGCFASMLPYMPFEKAMLKHIKDIDIAAVLNNTERTFNEIDKIKSEIVELEKNIDEYVQGIAKRKKQGQLIPFAMLDEQSQAEDKLKALKESLSTKLESASITHVEFSDDVHDVKNIEERARLEVELKKVIKRIDILSESKKKFIIADVQYYNDDHIKHVLLLNKKNGTINAVGEISQKNGWRIYSFSENNRLIFRVESNGDIWTVQARNDQSIEDIRTYMTMMVGREPDGFDYHLNENFIEWIE

SEQ ID NO: 11592 - DNA, 50 bp, Kosakonia radicincitans
  source 1..50: mol_type = genomic DNA
attttgtctaatgttcaatgtattttgataccatagagcttatacaaact

SEQ ID NO: 11593 - DNA, 40 bp, Kosakonia radicincitans
  source 1..40: mol_type = genomic DNA
tttgatggtgtcgcaatttttaatgccgtacattgtgatc

SEQ ID NO: 11594 - DNA, 50 bp, Kosakonia radicincitans; identical to SEQ ID NO: 11592
  source 1..50: mol_type = genomic DNA

SEQ ID NO: 11595 - DNA, 40 bp, Kosakonia radicincitans
  source 1..40: mol_type = genomic DNA
tttgatgttgtcgcaattttttattttagccattctgatc

SEQ ID NO: 11596 - protein, 551 aa, Streptomyces lydicus
MSDDDLVSRAQWGNLEGQHWAVLVRLSTDENDDEPVTEPVEGGRRRGPMTGRDIKSTKEQERDGRDFISRHGGTCVHVYYEPDTSAWRKKRVRLPDGRVAYRVVRPVFEGALEDLKFGRAPDGRRLDGLIVYDIDRLTRDNRHLEDAIDVVERHRRPIIDINGSLDLLTENGRATARVVVAMSNKQSADTSRRVRRKHRALEREGIPTGGARPFGWNDDKRTLHPIEAKLLREAALGILGGAPVRASCVRWNEQGVTTPRGSTWSTTKLKLVLRNPRICGIRSRKARVLNPETGSENERWEVVYGDDGEPVQGQWERIITEEQWKALMEVIGDNMAPGSGHNSRKYLLTGTLRCDKDDCGTAHRATKAPKSANKPPGFFYYSCPDKGQGGCGGGTKIPGPDADKAVTELVIAKYEEEAAARQAVAAPKDWEGEEELTRVREDIEDAKEARRQRILSKERYFAMLQEFTAEERRLLRDRNRWIKHRHASLGKPVDLQAEWDDLTLPEQRAYVEQTLTAVLVAPAVGRRKPVHTRLTPLFRTEEEAQDPDDDG

SEQ ID NO: 11597 - DNA, 50 bp, Streptomyces lydicus
  source 1..50: mol_type = genomic DNA
gtggtacatcagagcacccgttgcggccgcaggattgttggatgtacctt

SEQ ID NO: 11598 - DNA, 40 bp, Streptomyces lydicus
  source 1..40: mol_type = genomic DNA
ctggtcggtgccctcgacgggccgcagcagctcgaaccac

SEQ ID NO: 11599 - DNA, 50 bp, Streptomyces lydicus
  source 1..50: mol_type = genomic DNA
gtggtacatcagagcacccgttgcgcccgcaggattgttggatgtacctt

SEQ ID NO: 11600 - DNA, 40 bp, Streptomyces lydicus
  source 1..40: mol_type = genomic DNA
ccgctcagtgcccacgacggccagcagcaactccagtcac

SEQ ID NO: 11601 - protein, 575 aa, Pseudomonas aeruginosa
MSSNKPKAYSYIRFSTPEQARGDSYRRQREAAEKFCLENDLEFVSSKEYLFFDKGKSAFHGRNVDDAGELARFLGYVNDGHILPGSYLIVESLDRLSRERVREALPRFLELINRGIRIYTSADRMLYTEKSDERDILISVMVMSRAHGESSLKGQRVSAAWKAKQKRARERGLPLGRACPYWLSLENGKYTFIESRVDVVRKVFNLSISGHGQRAIAKILNQDGVPVFGSAARNKSGFWGASSVSKLLSNRALLGEYQPTNLIDGVRTKAGEPISDFFPRVLSEETFYQAQNTRVVRKAYGSTKNSKEFNIWQGIAKCGLCGGAMHLVNKGGNLKYLRCYNSAKGVCQARSLRLDITEVAYREVLAKVDSLSLVQDAHAKIKKDLDVADAKYVQLIERQGKLMSQAANVDIDLPDLFVQMLSELQQEVDICSKLREKLRSDLQKDRIINKSEFFSRLDLVSQEGRAKSNYLLKSLDILVSLRAFESAHIFCVYVEGYRSFSIVLNDGDALFYPYTRGALDSIRTQGDESEVSLLGEKEIKESELRLVKSAADRIKDLMVSETSSNGLTRLRKRPL

SEQ ID NO: 11602 - DNA, 50 bp, Pseudomonas aeruginosa
  source 1..50: mol_type = genomic DNA
gcgggtgtattgttttacaacatcaagatgttgtgagacaatacacctgc

SEQ ID NO: 11603 - DNA, 40 bp, Pseudomonas aeruginosa
  source 1..40: mol_type = genomic DNA
gcccggcgggccgctgagcaacaggttgtgcgcgccggcg

SEQ ID NO: 11604 - DNA, 50 bp, Pseudomonas aeruginosa
  source 1..50: mol_type = genomic DNA
gcgggtgtattgttttacaacatcccgatgttgtgagacaatacacctgc

SEQ ID NO: 11605 - DNA, 40 bp, Pseudomonas aeruginosa
  source 1..40: mol_type = genomic DNA
gcgcgccggggcgctgatccccaggcgctgcgccccggcc

SEQ ID NO: 11606 - protein, 592 aa, Pseudomonas aeruginosa
MPKIWPYIRFSSEEQKKGDSLRRQQDLIDKFAARPEIVAEGATIDTSLDLNDLGVSGYTGKNLLQGRFKTFLDAVDSGIVKPGDYLAVEALNRVTRLNPRASLPILLGLLEKGVKIAITDSSLIYTNTGDITQLYIAIGELQRGYSESQEKGRRVREAWDDKKKRAFATGEIATSRLPLWLRAVKTTVKGMVIRTVEEIPERVAVVKEIYRLSDTNVGAIATARILTERGTPTFTRENGRKNPNYGDFWQPSYVKKILDNRAVMGHYQPMTWEKLPDNRRRRINHGPEIENYFPEVIAPELFRRVQEKRKGRAIQGQGNKGKKFSNLFTKIAHCSKCGATASHVNKGPNPRKGGRYLVCYRARHGECSYNAWRYDEVETAILKFLAEADIKSIIQDESRADDLINKKYEIDAQISDIQEMLDAFKADFKRLKGRVTDVERELAIENEQLIEVLNSQAQKLEQEIFNAFEQQKADIEKDIQVLRNLSHTEDENTVFEIRSKINERLKLIVKDIVIDFQEKIVEIHFRNGNVRYLSEKSSITYSEPTQSDLEDRQMIDEVWASMSETERQQITDNSIPLEIADNPHLLVKYFES

SEQ ID NO: 11607 - DNA, 50 bp, Pseudomonas aeruginosa
  source 1..50: mol_type = genomic DNA
atgggtccaatggttgcgtaaaagaaggaattgagacaccattagacccc

SEQ ID NO: 11608 - DNA, 40 bp, Pseudomonas aeruginosa; identical to SEQ ID NO: 11603
  source 1..40: mol_type = genomic DNA

SEQ ID NO: 11609 - DNA, 50 bp, Pseudomonas aeruginosa
  source 1..50: mol_type = genomic DNA
atgggtccaatggttgcgtaaaagccggaattgagacaccattagacccc

SEQ ID NO: 11610 - DNA, 40 bp, Pseudomonas aeruginosa; identical to SEQ ID NO: 11605
  source 1..40: mol_type = genomic DNA

SEQ ID NO: 11611 - protein, 590 aa, Pseudomonas aeruginosa
MKPKAYSYIRFSSPEQSRGDSQRRQREAAAKYAEEHNLELVLDKDYQFFDAGISAYKGRNSTHEGKLRRFYDYVKDGRIKNGSYLLVESLDRLSREDVLIALPRFIDLLNEGVNVVTLADGIVYSKGADVPQLIMSIVHMSRAHHESKLKGERVSKAWRNKQKVARQDHIPLGRVCPYWIDLVDGQYILNDAKAAVVKKIFEMTIGGHGQVSVAKYLNSSKIPVFGSGNRNKSGLWGTSTIAKILSNRSVLGEYQPMILENGKRIKNGMPIEGYYPPVVSESDFYSAAYMRSVRRTSNDTRQSIDFNVWSKIIFCSKCGSPMHLINKGRPPKGYRYLRCFSAAKGMCAAKSIRLEAANIAFKEILAMFNSLPLVKVSEKDSRRRITELKGKVEEIHKLLGQYQCLMESAPSITLSKAAAAKEVELIACENELAQVSEELAASVIFDKDKFFASLDLESYEGRSSANLYLRNLNVQIRAGYNGFESFFVAMTRGEGLKAHFAIWVGDDFSPKFTPLSVEMTETIINQGEVGRARMVAPLKRYLPDLIDRTEGNGRLPLVVPLNEVPEFEWHQNPEHHKNRLLRALGLLPEE

SEQ ID NO: 11612 - DNA, 50 bp, Pseudomonas aeruginosa
  source 1..50: mol_type = genomic DNA
catggtgtattcatgcataacataaacaaaatgtggcaaaatacaccact

SEQ ID NO: 11613 - DNA, 40 bp, Pseudomonas aeruginosa; identical to SEQ ID NO: 11603
  source 1..40: mol_type = genomic DNA

SEQ ID NO: 11614 - DNA, 50 bp, Pseudomonas aeruginosa
  source 1..50: mol_type = genomic DNA
catggtgtattcatgcataacatacccaaaatgtggcaaaatacaccact

SEQ ID NO: 11615 - DNA, 40 bp, Pseudomonas aeruginosa; identical to SEQ ID NO: 11605
  source 1..40: mol_type = genomic DNA

SEQ ID NO: 11616 - protein, 590 aa, Pseudomonas aeruginosa
MKPKAYSYIRFSSPEQSRGDSQRRQREAAAKYAEEHNLELVLDKDYQFFDAGISAYKGRNSTHEGKLRRFYDYVKDGRIKNGSYLLVESLDRLSREDVLIALPRFIDLLNEGVNVVTLADGIVYSKGADVPQLIMSIVHMSRAHHESKLKGERVSKAWRNKQKVARQDHIPLGRVCPYWIDLVDGQYILNDAKAAVVKKIFEMTIGGHGQVSVAKYLNSSKIPVFGSGNRNKSGLWGTSTIAKILSNRSVLGEYQPMILENGKRIKNGMPIEGYYPPVVSESDFYSAAYMRSVRRTSNDTRQSIDFNVWSKIIFCSKCGSPMHLINKGRPPKGYRYLRCFSAAKGMCAAKSIRLEAANIAFKEILAMFNSLPLVKVSEKDSRRRITELKGKVEEIHKLLGQYQCLMESAPSITLSKAAAAKEVELIACENELAQVSEELAASVIFDKDKFFASLDLESYEGRSSANLYLRNLNVQIRAGYNGFESFFVAMTRDEGLKAHFAIWVGDDFSPKFTPLSVEMTETIINQGEVGRARMVAPLKRYLPDLIDRTEGNGRLPSVVPLNEVPEFEWHQNPEHHKNRLLRALGLLPEE

SEQ ID NO: 11617 - DNA, 50 bp, Pseudomonas aeruginosa; identical to SEQ ID NO: 11612
  source 1..50: mol_type = genomic DNA

SEQ ID NO: 11618 - DNA, 40 bp, Pseudomonas aeruginosa; identical to SEQ ID NO: 11603
  source 1..40: mol_type = genomic DNA

SEQ ID NO: 11619 - DNA, 50 bp, Pseudomonas aeruginosa; identical to SEQ ID NO: 11614
  source 1..50: mol_type = genomic DNA

SEQ ID NO: 11620 - DNA, 40 bp, Pseudomonas aeruginosa; identical to SEQ ID NO: 11605
  source 1..40: mol_type = genomic DNA

SEQ ID NO: 11621 - protein, 590 aa, Pseudomonas aeruginosa
MKPKAYSYIRFSSPEQSRGDSQRRQREAAAKYAEEHNLELVLDKDYQFFDAGISAYKGRNSTHEGKLRRFYDYVKDGRIKNGSYLLVESLDRLSREDVLIALTRFIDLLNEGVNVVTLADGIVYSKGADVPQLIMSIVHMSRAHHESKLKGERVSKAWRNKQKVARQDHIPLGRVCPYWIDLVDGQYILNDAKAAVVKKIFEMTIGGHGQVSVAKYLNSSKIPVFGSGNRNKSGLWGTSTIAKILSNRSVLGEYQPMILENGKRIKNGMPIEGYYPPVVSESDFYSAAYMRSVRRTSNDTRQSIDFNVWSKIIFCSKCGSPMHLINKGRPPKGYRYLRCFSAAKGMCAAKSIRLEAANIAFKEILAMFNSLPLVKVSEKDSRRRITELKGKVEEIHKLLGQYQCLMESAPSITLSKAAAAKEVELIACENELAQVSEELAASVIFDKDKFFASLDLESYEGRSSANLYLRNLNVQIRAGYNGFESFFVAMTRDEGLKAHFAIWVGDDFSPKFTPLSVEMTETIINQGEVGRARMVAPLKRYLPDLIDRTEGNGRLPLVVPLNEVPEFEWHQNPEHHKNRLLRALGLLPEE

SEQ ID NO: 11622 - DNA, 50 bp, Pseudomonas aeruginosa; identical to SEQ ID NO: 11612
  source 1..50: mol_type = genomic DNA

SEQ ID NO: 11623 - DNA, 40 bp, Pseudomonas aeruginosa; identical to SEQ ID NO: 11603
  source 1..40: mol_type = genomic DNA

SEQ ID NO: 11624 - DNA, 50 bp, Pseudomonas aeruginosa; identical to SEQ ID NO: 11614
  source 1..50: mol_type = genomic DNA

SEQ ID NO: 11625 - DNA, 40 bp, Pseudomonas aeruginosa; identical to SEQ ID NO: 11605
  source 1..40: mol_type = genomic DNA

SEQ ID NO: 11626 - protein, 587 aa, Pseudomonas aeruginosa
MPKIWPYIRFSSEEQRKGDSLRRQQSLIDSFAARPEIVAEGAVLDSSLDLNDLGVSGYTGKNILKGRFKTFLDAVDSGVVKRGDYLAVEAINRITRLDPMESLPIILDLLRKGIKIAITSSSQVYKYGDDITQIYVALGELQRAFTESNEKGRRVRDAWNAKKLRAFQTGEVATSRLPLWLKAVKVVVNGLTVREIEEIPERVEVVREIYRLSDNNVGAIATARILTERGVPTFARENARKNPNYGDFWQPSYIKKILENRAVMGYYQPMTWEKLEDHRRRRIKQGQEVANYFPQIISPELFRRVQEKRKERGLAGQGNKGKKFSNLFTKLAHCSKCGATANHINKGADKRKGGKYLVCYRAKHGSCNYRAWPYEQIEKMLLKFLAEADIKSILAENNKVDDLINLKYEIDSEVGEIQEMLENFKSDFKRLRGKVSDLERLMAIENEQRLEELSERKKAVESEIYQVLEQQKADVDKDIQSLQNLSNTEDDQTVFEIRSKINERLRLIIENIKIDFQDRAVEILFKSGVQRFLHEGGMYGNIPPKAEGLQRENDLAEIYGWQNLTDKEKAKKYQDAGFNIVPLPLGI

SEQ ID NO: 11627 - DNA, 50 bp, Pseudomonas aeruginosa
  source 1..50: mol_type = genomic DNA
tggggtctaatggttgcctaaaagaagtatttcatagatcattagacccc

SEQ ID NO: 11628 - DNA, 40 bp, Pseudomonas aeruginosa; identical to SEQ ID NO: 11603
  source 1..40: mol_type = genomic DNA

SEQ ID NO: 11629 - DNA, 50 bp, Pseudomonas aeruginosa
  source 1..50: mol_type = genomic DNA
tggggtctaatggttgcctaaaagccgtatttcatagatcattagacccc

SEQ ID NO: 11630 - DNA, 40 bp, Pseudomonas aeruginosa; identical to SEQ ID NO: 11605
  source 1..40: mol_type = genomic DNA

SEQ ID NO: 11631 - protein, 575 aa, Pseudomonas aeruginosa
MSKPKAYSYIRFSTPEQARGDSYRRQREAAEKFCFENDLEFVSSKEYLFFDKGKSAFHGRNVDDAGELARFLGYVNDGHILPGSYLIVESLDRLSRERVREALPRFLELINRGIRIYTSADRMLYTEKSDERDILISVMVMSRAHGESSLKGQRVSAAWKAKQKRARESGEPLGKACPYWLSLEDGKYTPVEGRVDVVKKVFDLSISGHGQRAIAKILNQDGVPAFGSNVRNKSGFWGASSVSKLLSNRALLGEYQPTNIIDGVRTKTGEPVSDFFPRVLSEETFYQAQNTRAVRKAHGSTKNSKEFNVWQGIAKCGLCGGAMHLVNKGSNLKYLRCYNSAKGVCQARSLRLDLTEIAYREVLAKVDSLSLVQDAHAKIKKDLDVADAKYVQLIERQNKLMSQAANVDIDLPELFLQVLSELQQEIDMCSKLREKLRSDLQKDRIINKSEFFSRLDLVSQEGRAKSNYLLKSLDILVSLMAFESAHIFCVYVEGYRSFSIVLNNGVALFYPYTRGALDSIRTQGDESDVSVVGEREIRESELRLVKAAADKIKDLMVSESSSNGLTRLKKRPLQG

SEQ ID NO: 11632 - DNA, 50 bp, Pseudomonas aeruginosa; identical to SEQ ID NO: 11602
  source 1..50: mol_type = genomic DNA

SEQ ID NO: 11633 - DNA, 40 bp, Pseudomonas aeruginosa; identical to SEQ ID NO: 11603
  source 1..40: mol_type = genomic DNA

SEQ ID NO: 11634 - DNA, 50 bp, Pseudomonas aeruginosa; identical to SEQ ID NO: 11604
  source 1..50: mol_type = genomic DNA

SEQ ID NO: 11635 - DNA, 40 bp, Pseudomonas aeruginosa; identical to SEQ ID NO: 11605
  source 1..40: mol_type = genomic DNA

SEQ ID NO: 11636 - protein, 597 aa, Pseudomonas aeruginosa
MPKIWPYIRFSSEEQKKGDSLRRQQELIERFAARPEIVAEGAEIDTSLNLNDLGVSGFTGKNVLQGRFKTFLDAVDSGVVKPGDYLAVEALNRVTRLDPMESLPILMGLMSKGIKIAITADSQIYKQGGDITQLYIALGELQRGYAESEEKGRRVRQAWDKKKERAFQTGEIATSRLPLWLRAVKTNEKGLIVRTVEEIPERVAIVKEIYRLSDSNIGAIATARLLTERGVPTFMRENPRKNPNYGDFWQPSYIKKILDSRAVLGHYQPMTWEKLPDNRRRRINHGPEIENYFPQIITPELFRRVQEKRRGRGKDGQGNKGKKFTNLFTKIAHCSKCGATASHVNKGSDPKKGGRYLVCYRARHGDCSYKAWRYDDLETTILKFLAEADIKSIISEKNKADELINKKYEIDAEINDIQEMLDAYKADFKRLKGRVSDLDREMAIENEQALKELKEKSKDIDQEIFKALEQKKADIEKDIIDLRGLSNTEDANTVFEVRSKINERLKIIIEDIKIDFQDRHIEIIFKNGTRRHLKNHLAVELRESTEADQKRQDDYDDFYDSLTDEQKAELNQYSIPAEIANDPKRLIEYLAQFNVAE

SEQ ID NO: 11637 - DNA, 50 bp, Pseudomonas aeruginosa
  source 1..50: mol_type = genomic DNA
tggggtccaatgatggacaaaaagaagcaattagtcaagcattagacccc

SEQ ID NO: 11638 - DNA, 40 bp, Pseudomonas aeruginosa; identical to SEQ ID NO: 11603
  source 1..40: mol_type = genomic DNA

SEQ ID NO: 11639 - DNA, 50 bp, Pseudomonas aeruginosa
  source 1..50: mol_type = genomic DNA
tggggtccaatgatggacaaaaagccgcaattagtcaagcattagacccc

SEQ ID NO: 11640 - DNA, 40 bp, Pseudomonas aeruginosa; identical to SEQ ID NO: 11605
  source 1..40: mol_type = genomic DNA

SEQ ID NO: 11641 - protein, 569 aa, Pseudomonas alkylphenolica
MKPKAYSYIRFSSPEQAKGDSHRRQREAADDYCNEHGLELAKAREYLFFDPGRSAYTQEHVGDKGQLKRFIDLVDSGDIKPGSYLLVESLDRLSRDKVMAALSQFTDLLRKGIKIVTLSDKRVYSEDSPSIAMELIVSITVMMRAHEESAIKGKRVAAAWKNKRTLARSNGIPLGAACPYWLKLVDGAHAEVKDRADVIRRIFDMTIQGYGQAAISRRLNEDGVPVFGSTRATQEKPRNKSGLWGTSSVQKILHNRALLGEYQPTHLVGRVRQNDGDPIQGYYPEIITLDVFLQAKAARAQRQTSGSTKQSKNFNIWQGIAKCRLCGDAMHLINKGRPPKGYTYLQCYSAKKGKCRNGSIRIEPTEDVFKEILTNVDSMSLIHGRSAEVRKNLEAEEGKLALITSKLEQATKAQTAFPSLAGAKLLHDLEQEHTQTLSARDELRGRLASHRVINKEDYFKQLDLVTYEGRAAANSLLKRLGIQVQFKRDNPSRFQCWVLDKSDEAVTEEIQQILLGVLYEDGQVTTQAQDLDLYDRHIEQGVITKAIATREQEEDGIGWQWFGGKLKRS

SEQ ID NO: 11642 - DNA, 50 bp, Pseudomonas alkylphenolica
  source 1..50: mol_type = genomic DNA
gttggtgtattagattacaacctgcttatgttgtgtgataatgcacctac

SEQ ID NO: 11643 - DNA, 40 bp, Pseudomonas alkylphenolica
  source 1..40: mol_type = genomic DNA
cgccggggcgcacaatctgctgttcagcggcccgccgggc

SEQ ID NO: 11644 - DNA, 50 bp, Pseudomonas alkylphenolica
  source 1..50: mol_type = genomic DNA
gttggtgtattagattacaacctgggtatgttgtgtgataatgcacctac

SEQ ID NO: 11645 - DNA, 40 bp, Pseudomonas alkylphenolica
  source 1..40: mol_type = genomic DNA
ggccggggcgcagcgcctggggatcagcgccccggcgcgc

SEQ ID NO: 11646 - protein, 516 aa, Brevibacillus borstelensis
MMKVVIYARVSTKRDAQKNSLENQVSYAMNLAAQNGWTVVGQYIDDGISGATRNKRDGIMRLLNDAKKKKFDAVIAKSVSRLGRNSVENMLTAYEIESAGVRLILPEDNYDTETSTSKLMFNLKAVLAEEESAKLSERIKIGLRASARQGVYKASLPAFGYKRDPFNKRLELDEDYAPIVREIFDLYLYQDWGMYKISNHLIERGIPTPRTVSGGSNAGELWHQSTVKLILSNIVYTGTLIHHREETKDFISKKRKKVDPNQQIVFENAHPAIISMDEYNAVQEKMKQKGKNKSNGRESLFAHIAVCADCGKGMVYRNDRRKSGAYVCGGYVKHSRSFCSSHIVESDTLLQAVKDDLKELIADNVKLEKLYGAVNGKASEQQAKYAKELTNVSKRLKQLNKEFQSLLQLYSEKVIDIVQFRAQNEHIQEEQTRLTQKKAEIESLLETQKDTDYQIHAFKKQIARFAKLDIDDEQVLKQVLQRLIQRIEVNEDGTIKAIHYNITRPHSVRALEKRGA

SEQ ID NO: 11647 - DNA, 50 bp, Brevibacillus borstelensis
  source 1..50: mol_type = genomic DNA
ttaagtaacactgagcactccacatgtgttgaatagacagtgagaacaaa

SEQ ID NO: 11648 - DNA, 40 bp, Brevibacillus borstelensis
  source 1..40: mol_type = genomic DNA
cagcgagcaacactccacatgccccgtatgcgggaacata

SEQ ID NO: 11649 - DNA, 50 bp, Brevibacillus borstelensis
  source 1..50: mol_type = genomic DNA
ttaagtaacactgagcactccacacctgttgaatagacagtgagaacaaa

SEQ ID NO: 11650 - DNA, 40 bp, Brevibacillus borstelensis
  source 1..40: mol_type = genomic DNA
gcgccaggaacaatccattccccccgtttgcaggaacata

SEQ ID NO: 11651 - protein, 516 aa, Lachnospira pectinoschiza
MSKITAMYIRLSMEDEDVSLNRKEESNSISSQRELLKAYIENHSELKDTKVQEYCDDGFTGTKFERPGYMKLMEDIRAEKISCIVVKDLSRLGRDYIEVGSLLEQILPLYQVRVIAVNDNYDSNNYDGSTGGMNVAFKNLIYMLYSRDLSNKICSAKHTRILNGENISGQLRYGYVKDPSDKHKIIVDPEAAEVVKLIFELTAQGKRKTEVANYLNAQGIDTPSAYKKRKGSRNVFHAVEVKSLWSTSSIRDILNDEVYLGKLIWNKTKKRIGSNNTSSYVPKDEWMVIENCHEPIITQELFDMAHANSKKCVRLKRGKRNYNPFYYCGVCGRALVPSKRVKGDILLCYSSRIEENSPCKNNRVEVAKVEDAIMKIVNMYATAYLDEKGIKKAGKSKEVSPEEKIATLEKKVKSLSSKKMMLYSDYKDDKLTREEYVKRSKAMVEQIDELHQEIEQLKTEIPPEDNSSSKFETQLESIINMESFDREKIQKVIKKVIINGEDNIEIVWNTDDPFFK

SEQ ID NO: 11652 - DNA, 50 bp, Lachnospira pectinoschiza
  source 1..50: mol_type = genomic DNA
tttggtctagggttgacacgagcaggtgtttgagttataataggaccaag

SEQ ID NO: 11653 - DNA, 40 bp, Lachnospira pectinoschiza
  source 1..40: mol_type = genomic DNA
cattacaaagtgggaaaatggaaccggaacaccggatatt

SEQ ID NO: 11654 - DNA, 50 bp, Lachnospira pectinoschiza
  source 1..50: mol_type = genomic DNA
tttggtctagggttgacacgagcagttgtttgagttataataggaccaag

SEQ ID NO: 11655 - DNA, 40 bp, Lachnospira pectinoschiza
  source 1..40: mol_type = genomic DNA
aattaaaaagtggagaaacgtaaccggaaatccagacatt

SEQ ID NO: 11656 - protein, 618 aa, Blautia producta; identical to SEQ ID NO: 11111

SEQ ID NO: 11657 - DNA, 50 bp, Blautia producta; identical to SEQ ID NO: 11112
  source 1..50: mol_type = genomic DNA

SEQ ID NO: 11658 - DNA, 40 bp, Blautia producta
  source 1..40: mol_type = genomic DNA
cgcgtgtcactgtgcggcggatatggagcctgcaccgggt

SEQ ID NO: 11659 - DNA, 50 bp, Blautia producta
  source 1..50: mol_type = genomic DNA
actgtccgcaaaaaatgaccgactgttgtaggacggattttgcggacatt

SEQ ID NO: 11660 - DNA, 40 bp, Blautia producta
  source 1..40: mol_type = genomic DNA
accgtggcaccttgcagaggttttggagcctgcacggggt

SEQ ID NO: 11661 - protein, 414 aa, Bacillus licheniformis
MHEIKRVAIYCRVSTEEQATEGYSISAQLQTLRQYTQLYGWEIAEEYVDEGISGKNISGRPAMQKLISDVEKDKFQAVLVWKISRLSRNMLDTLTLLDKFEDYGVKFISYSENFDTGSPIGRLVVQLMASIAEMERNTLSENVKLGMKQRALEGSWNGGVVFGYDTIEKELVINKKEAEIVQQIYQLYANGKGLKSIANYLNKAGYRTKRNCYFSINGVAQILDNVIYNGKISWLKVENWDTKRRRGKNPNPILVEGQHEAIISDELWSMVQARRKSKSFKQRQSNEPFLLSSLLRCPDCGQGMVPAITTNKRKDGTKKKYRYYVCSNFHNKGSSACRANSIKAYDAEYEVINKIEKILSNQNQLFSKLQSINTTSIESLNQLNSELKQLENRLSEIQEYRIVTWKHLSKRPYQ

SEQ ID NO: 11662 - DNA, 50 bp, Bacillus licheniformis
  source 1..50: mol_type = genomic DNA
ttttgcctctatttatggtacggttcaccgtagttatttaagaggcaaaa

SEQ ID NO: 11663 - DNA, 40 bp, Bacillus licheniformis
  source 1..40: mol_type = genomic DNA
ccatcatttatggtaaggctcccctcgattaatcctaaaa

SEQ ID NO: 11664 - DNA, 50 bp, Bacillus licheniformis
  source 1..50: mol_type = genomic DNA
ttttgcctctatttatggtacggtttaccgtagttatttaagaggcaaaa

SEQ ID NO: 11665 - DNA, 40 bp, Bacillus licheniformis
  source 1..40: mol_type = genomic DNA
ccatcatttattgataatcttctctggattaatcataaga

SEQ ID NO: 11666 - protein, 523 aa, Enterococcus faecium
MAKVTTIPATISRFTATPINEKKKRRTAAYARVSTDSEEQLTSYSAQVDYYTNYIKSRDDWEFVSVYTDEGITGTNTKHREGFKRMVADALAGKIDLIVTKSVSRFARNTVDSLTTVRQLKEKGVEIYFEKENIWTLDSKGELLITIMSSLAQEESRSISENCTWGQRKRFADGKVTVPFKRFLGYDRGPDGNLVLNKDEAVIIRRIYSMFLQGMTPHGIAARLTADGIKSPGGKDKWNAGAVRSILTNEKYKGDALLQKSYTVDFLTKKKKVNEGEIPQYYVEGNHEAIIQPEVFELVQQELERRKSSRGRHSGVHLFSGKIRCGQCGEWYGSKVWHSNSKYRRVIWQCNHKYDGEEKCSTPHLTEDEIKAMFVSAANKLIGKKASIISPLRASLDVAFDISALEAETAELQDEIMVVSDLIEKCIYENAHVALDQTEYQKRYDSLTARFDTAKTRLEEIEAAIADKKSRRAAIEAFLDTLTKADLMEKFDPALWCGLVDFVTVYAKDDVRFTFKDGQEIKA

SEQ ID NO: 11667 - DNA, 50 bp, Enterococcus faecium
  source 1..50: mol_type = genomic DNA
tgtatcaaactcggtaagattatttctatgttcctgctgattttgataca

SEQ ID NO: 11668 - DNA, 40 bp, Enterococcus faecium
  source 1..40: mol_type = genomic DNA
agcactggaaatgtttatttcgctaaaacttatgaagaac

SEQ ID NO: 11669 - DNA, 50 bp, Enterococcus faecium
  source 1..50: mol_type = genomic DNA
tgtatcaaactcggtaagattattaatatgttcctgctgattttgataca

SEQ ID NO: 11670 - DNA, 40 bp, Enterococcus faecium
  source 1..40: mol_type = genomic DNA
agggttcaaaatgttcattaagatgaatcttatgaagaac

SEQ ID NO: 11671 - protein, 623 aa, Bacteroides vulgatus
MKAAFLIRCSTKNQDLDRQTRDLTRLAKSLGYEYDIENLVFGEKITGKDDVTIKNRESIDKLLRAAKEQKFDVVLVAEVSRMSRDPASGRVYVRQLINMSIPVYFRDIDTWTINPDNGKRVRDAEQVIGAAFDAAWKYLRSLKTQVASGRRNELDNNQISVGQPFFGYTRYGGKDKSKKNCWIVDEVAAEVVVFVFNEYIKDGSTLKSTALATTAKYGELLGRKFSVGSIEHILTYESYHTGIKKISLTDPDTEEIEVFDVKVPILVDTELFEKATAKRKNNRVKSEPYPKQTTYILSKLLKCPYCGYTMTPRAKGNDSRGKTTNERYRIINGKKALSWLCMSGINNATSCNNRISVANEKAEPIIWELIKKELIVFANLNNEERELKVEELTEKITHLASNIDNYNAHKSSLQKQLSKAYTVATMADESVLAMAMTEFNKTARNIRKEMSDCDSAIEQIKGEIDNLVNLKIFYSQPNLPSDIIEKAETDEAEKRKLVKELINKIVPYKITTFKKQHRDRGLVTLNFGVVLLEVYTVNGIYYVFYNANDRGDIRQAYYISGVFAKFQNSINKFDAYKEGEYFVISNADMVMETEEIDELITVNQMVEIAINNGWVLSYCYKQK

SEQ ID NO: 11672 - DNA, 50 bp, Bacteroides vulgatus
  source 1..50: mol_type = genomic DNA
caatgaaagtgtttttggaattgctcgctatttgaaaaatacttgcatag

SEQ ID NO: 11673 - DNA, 40 bp, Bacteroides vulgatus; identical to SEQ ID NO: 6153
  source 1..40: mol_type = genomic DNA

SEQ ID NO: 11674 - DNA, 50 bp, Bacteroides vulgatus
  source 1..50: mol_type = genomic DNA
caatgaaagtgtttttggaattgcaggctatttgaaaaatacttgcatag

SEQ ID NO: 11675 - DNA, 40 bp, Bacteroides vulgatus
  source 1..40: mol_type = genomic DNA
tcagtaaaataccaacaacaggtttagaaaatgcaaacca

SEQ ID NO: 11676 - protein, 623 aa, Phocaeicola vulgatus; identical to SEQ ID NO: 3741

SEQ ID NO: 11677 - DNA, 50 bp, Phocaeicola vulgatus
  source 1..50: mol_type = genomic DNA
tagtgaaagtgtttttggaattgttcgctatttgaaaaatacttgtatag

SEQ ID NO: 11678 - DNA, 40 bp, Phocaeicola vulgatus; identical to SEQ ID NO: 6153
  source 1..40: mol_type = genomic DNA

SEQ ID NO: 11679 - DNA, 50 bp, Phocaeicola vulgatus
  source 1..50: mol_type = genomic DNA
tagtgaaagtgtttttggaattgtaggctatttgaaaaatacttgtatag

SEQ ID NO: 11680 - DNA, 40 bp, Phocaeicola vulgatus; identical to SEQ ID NO: 11675
  source 1..40: mol_type = genomic DNA

SEQ ID NO: 11681 - protein, 623 aa, Phocaeicola vulgatus
MKAAFLIRCSTKNQDLDRQTRDLTRLAKSLGYEYDIENLVFGEKITGKDDVTIKNRESIDKLLRAAKEQKFDVVLVAEVSRMSRDPASGRVYVRQLINMSIPVYFRDIDTWTINPDNGKRVRDAEQVIGAAFDAAWKYLRSLKTQVASGRRNELDNNQISVGQPFFGYTRYGGKDKSKKNCWIVDEVAAEVVVFVFNEYIKDGSTLKSTALATTAKYGELLGKKFSVGSIEHILTYESYHTGIKKISLTDPDTEEIEVFDVKVPILVDTELFEKATAKRKNNRVKSEPYPKQTTYILSKLLKCPYCGYTMTPRTKGNDSKGKTTNERYRIINGRKALSWLCMSGINNATSCSNRISVANEKAEPIIWELVKKELIVFANLNNEERELKVEELTEKISHLASNIDNYNTHKSSLQKQLSKAYTVATMADESVLEMAMTEFNKTARTIRKEMSDCDSAIEQIKGEIENLANLKIFYSQPNLPSDIIEKAETDEAEKRKLVKELINKIVPYKITTFKKRHRDKGLVTLNFGVVLLEVYTVNGIYYVFYNANDRGDIRQACYISGVFAKFQNSINKFDAYKEGEYFVISNADMVMETKEIDELITVNQMVEIAINNGWVLSYSYKQK

SEQ ID NO: 11682 - DNA, 50 bp, Phocaeicola vulgatus; identical to SEQ ID NO: 3742
  source 1..50: mol_type = genomic DNA

SEQ ID NO: 11683 - DNA, 40 bp, Phocaeicola vulgatus; identical to SEQ ID NO: 6153
  source 1..40: mol_type = genomic DNA

SEQ ID NO: 11684 - DNA, 50 bp, Phocaeicola vulgatus
  source 1..50: mol_type = genomic DNA
tagtgaaagtgtttttggaattgcaggctatttgaaaaatacttgtatag

SEQ ID NO: 11685 - DNA, 40 bp, Phocaeicola vulgatus; identical to SEQ ID NO: 11675
  source 1..40: mol_type = genomic DNA

SEQ ID NO: 11686 - protein, 623 aa, Phocaeicola vulgatus; identical to SEQ ID NO: 3741

SEQ ID NO: 11687 - DNA, 50 bp, Phocaeicola vulgatus; identical to SEQ ID NO: 3742
  source 1..50: mol_type = genomic DNA

SEQ ID NO: 11688 - DNA, 40 bp, Phocaeicola vulgatus; identical to SEQ ID NO: 6153
  source 1..40: mol_type = genomic DNA

SEQ ID NO: 11689 - DNA, 50 bp, Phocaeicola vulgatus; identical to SEQ ID NO: 11684
  source 1..50: mol_type = genomic DNA

SEQ ID NO: 11690 - DNA, 40 bp, Phocaeicola vulgatus; identical to SEQ ID NO: 11675
  source 1..40: mol_type = genomic DNA

SEQ ID NO: 11691 - protein, 623 aa, Phocaeicola vulgatus; identical to SEQ ID NO: 11671

SEQ ID NO: 11692 - DNA, 50 bp, Phocaeicola vulgatus
  source 1..50: mol_type = genomic DNA
caatgaaagtgtttttgggattgctcgctatttgaaaaatacttgcatag

SEQ ID NO: 11693 - DNA, 40 bp, Phocaeicola vulgatus; identical to SEQ ID NO: 6153
  source 1..40: mol_type = genomic DNA

SEQ ID NO: 11694 - DNA, 50 bp, Phocaeicola vulgatus
  source 1..50: mol_type = genomic DNA
caatgaaagtgtttttgggattgcaggctatttgaaaaatacttgcatag

SEQ ID NO: 11695 - DNA, 40 bp, Phocaeicola vulgatus; identical to SEQ ID NO: 11675
  source 1..40: mol_type = genomic DNA

SEQ ID NO: 11696 - protein, 623 aa, Phocaeicola vulgatus; identical to SEQ ID NO: 11671

SEQ ID NO: 11697 - DNA, 50 bp, Phocaeicola vulgatus
  source 1..50: mol_type = genomic DNA
taatgaaagtatttttggaattgctcgctatttgaaaaatacttgcatag

SEQ ID NO: 11698 - DNA, 40 bp, Phocaeicola vulgatus; identical to SEQ ID NO: 6153
  source 1..40: mol_type = genomic DNA

SEQ ID NO: 11699 - DNA, 50 bp, Phocaeicola vulgatus
  source 1..50: mol_type = genomic DNA
taatgaaagtatttttggaattgcaggctatttgaaaaatacttgcatag

SEQ ID NO: 11700 - DNA, 40 bp, Phocaeicola vulgatus; identical to SEQ ID NO: 11675
  source 1..40: mol_type = genomic DNA

SEQ ID NO: 11701 - protein, 623 aa, Phocaeicola vulgatus; identical to SEQ ID NO: 3741

SEQ ID NO: 11702 - DNA, 50 bp, Phocaeicola vulgatus
  source 1..50: mol_type = genomic DNA
tagtgaaagtatttttggaattgctcgctatttgaaaaatacttgtatag

SEQ ID NO: 11703 - DNA, 40 bp, Phocaeicola vulgatus; identical to SEQ ID NO: 6153
  source 1..40: mol_type = genomic DNA

SEQ ID NO: 11704 - DNA, 50 bp, Phocaeicola vulgatus
  source 1..50: mol_type = genomic DNA
tagtgaaagtatttttggaattgcaggctatttgaaaaatacttgtatag

SEQ ID NO: 11705 - DNA, 40 bp, Phocaeicola vulgatus; identical to SEQ ID NO: 11675
  source 1..40: mol_type = genomic DNA

SEQ ID NO: 11706 - protein, 623 aa, Phocaeicola vulgatus; identical to SEQ ID NO: 3741

SEQ ID NO: 11707 - DNA, 50 bp, Phocaeicola vulgatus
  source 1..50: mol_type = genomic DNA
tagtgaaagtatttttggaattgctcgctatttggaaaatacttgtatag

SEQ ID NO: 11708 - DNA, 40 bp, Phocaeicola vulgatus; identical to SEQ ID NO: 6153
  source 1..40: mol_type = genomic DNA

SEQ ID NO: 11709 - DNA, 50 bp, Phocaeicola vulgatus
  source 1..50: mol_type = genomic DNA
tagtgaaagtatttttggaattgcaggctatttggaaaatacttgtatag

SEQ ID NO: 11710 - DNA, 40 bp, Phocaeicola vulgatus; identical to SEQ ID NO: 11675
  source 1..40: mol_type = genomic DNA

SEQ ID NO: 11711 - protein, 544 aa, Micrococcus luteus
MSTATLDTTTSERAAETPVMLAVSYLRVSTREQAERGCTEEGFSIPAQREANARKADELGARIVREFIDAGESARSADRDGLQDMLAFIAASRVQFCIVHKLDRLARNRADDVKIHEALISAGVTLVSATESIDQTPSGMLVHGIMSSIAEFYSRNLATEVTKGLSQKAAQGGTPMRAPVGYLNVRRTDEQGREVRTVKVDPERAPLIAWAFEQYAKGEGSVTALLRDLTARGLVSVPSPQRPSKPLGKNALYRVLTNPYYAGVIRYKGALHPGAHEPIVEPVLFDQVQSLLKARNAHATRHVQHAHHLKGLLHCGTCGSRMLLDFATNPRGTTYAYFVCSGRAAKKTDCTRRAVPVQVAERLVADSYANITISEGDYRHLAAEVDAAFDKRNAGKDQEFADLTANRARLEAESDKLLAAHFADAIDLPTLKRHQDRIRAGLANIEQRLREHDEQHVGGRAFLHDSLRLLTDAHRAYAHSDDGSRRLANQVFYTRLEITEDEQLRPLLAEPFATIVHEAAEGKEAKQEHSTSSDVACSRKTHWV

SEQ ID NO: 11712 - DNA, 50 bp, Micrococcus luteus
  source 1..50: mol_type = genomic DNA
gtgttcccgtaagacacattgggtggaagcaatggagcgttgcgggaaca

SEQ ID NO: 11713 - DNA, 40 bp, Micrococcus luteus
  source 1..40: mol_type = genomic DNA
accgggccttctgactggtggaggtaaggggattcgaacc

SEQ ID NO: 11714 - DNA, 50 bp, Micrococcus luteus
  source 1..50: mol_type = genomic DNA
gtgttcccgtaagacacattgggtcaaagcaatggagcgttgcgggaaca

SEQ ID NO: 11715 - DNA, 40 bp, Micrococcus luteus
  source 1..40: mol_type = genomic DNA
agagggccttctgactgctcaatttgacggcattcgaact

SEQ ID NO: 11716 - protein, 536 aa, Ruminococcus gnavus; identical to SEQ ID NO: 2966

SEQ ID NO: 11717 - DNA, 50 bp, Ruminococcus gnavus
  source 1..50: mol_type = genomic DNA
ttacttctttatcgcacatcagtaaatgctcatgtgccataaagtaacac

SEQ ID NO: 11718 - DNA, 40 bp, Ruminococcus gnavus
  source 1..40: mol_type = genomic DNA
tgtgttgaatccttaaaataacagtcaacgcatatagcta

SEQ ID NO: 11719 - DNA, 50 bp, Ruminococcus gnavus
  source 1..50: mol_type = genomic DNA
ttacttctttatcgcacatcagtacatgctcatgtgccataaagtaacac

SEQ ID NO: 11720 - DNA, 40 bp, Ruminococcus gnavus
  source 1..40: mol_type = genomic DNA
agtgtaaaatcctgaaaatcacagtcgtaggatatagctg

SEQ ID NO: 11721 - protein, 499 aa, Clostridium botulinum
MNIAIYTRKSVYIENSESIETQINLCKSYFNNIECNFEVFEDEGFSGKNTNRPAFTRMMKLCKLGKFDIVAVYKIDRIARNIIDFVNIYDSLEKDNIKLVSITEGFDPSTPGGKIQMILLASLADMERMNIAQRVKDNMLSLAKKGCWTGGPAPKGYEIIKDYENGKSYLQLEDKNLILNLFNWYLENQSLYKVMQLMKENYPPNKAYSIRENIRAFLRNPLYVQSDPSVSEYLKLKGFVIVGTENKKGYLTYGKTKGQSMAIVSKHKAVITPTLFLQVNRLLDEKRESYFKKDSKTYWLSATMKCPFCKADYILCNSGRKSYYVCSNRLKRTSLGLDTKSEKCKNNKYVNAEVIEAKVEKFIDTLKDVDKDEFKKMYEKDTASFDVSLDLERKIKENEKLIDNLIEKLMLLSNEAAKPITNKIEELTKFNSQLKIKLENEKLKTLELEANKYTSENIFDNICSFSSIKDNNQKRIALRNIFKFIIYNPFNDSLEVEFL

SEQ ID NO: 11722 - DNA, 50 bp, Clostridium botulinum
  source 1..50: mol_type = genomic DNA
atcggttttgtcgctagaggacatcctcttgatacaaaaataatatagat

SEQ ID NO: 11723 - DNA, 40 bp, Clostridium botulinum
  source 1..40: mol_type = genomic DNA
tttacagttgaatgggcatcctcttgaagcttcataataa

SEQ ID NO: 11724 - DNA, 50 bp, Clostridium botulinum
  source 1..50: mol_type = genomic DNA
atcggttttgtcgctagaggacatcatcttgatacaaaaataatatagat

SEQ ID NO: 11725 - DNA, 40 bp, Clostridium botulinum
  source 1..40: mol_type = genomic DNA
agtacagcagaaccagcatcatcttgaagcttcttaaaaa

SEQ ID NO: 11726 - protein, 537 aa, Streptococcus pasteurianus; identical to SEQ ID NO: 641

SEQ ID NO: 11727 - DNA, 50 bp, Streptococcus pasteurianus; identical to SEQ ID NO: 402
  source 1..50: mol_type = genomic DNA

SEQ ID NO: 11728 - DNA, 40 bp, Streptococcus pasteurianus
  source 1..40: mol_type = genomic DNA
aatttctaattgggaacgaggtaaaacttacccagatatt

SEQ ID NO: 11729 - DNA, 50 bp, Streptococcus pasteurianus
  source 1..50: mol_type = genomic DNA
taatatttttaactaagggaaacctttgtttcccaaacaaaaagatatta

SEQ ID NO: 11730 - DNA, 40 bp, Streptococcus pasteurianus
  source 1..40: mol_type = genomic DNA
actttttaattggaaataattttaaacttacagagaaatt

SEQ ID NO: 11731 - protein, 550 aa, Pseudomonas aeruginosa
MEKDSALLRIALYARYSSENQRDASIEDQLRQCRERAAREGWTVVETYSDRAISGSSMFRAGIRSLLADAQAGRFDMVLSEALDRISRDQEDVAAVFKRLRFAGVSIVTLSEGEINELHVGLKGTMNALFIKDLAIKTHRGQRGRVEAGKAGSGKAAYGYRVVHQLDANGEPIRGERAIVEEEAEIVRRIFREYASGRSPKEIAFQLNREGVPGPKKRPWIDAMIRGNPVAATGILNNELYAGVLAWNRQRFIKNPETGTRISRVNPESEWIRTEVPHLRIVDDALWQAVRERQRGISAMFGPNLGTTREARAKRLHLTNRPVTLLSGLLTCGCCGGRISMVMTDRYACRNHLRKGICDNARTIRRDEIEARVLAGLKEKLVSSEAVAEAVRAYAKETNRLNRDRRAQAEADQKALQKIDKAVAGIMAAIEDGLYQPSMKARMAELERDKAEIIARMALAPADVPDVHPNIASVYRRNVERFTEALNDPDGGRQAAEALRSLIGEIVLTPGPKRGEVHAELRGELMGILAFATDQKPKQNIRFMPPVASC

SEQ ID NO: 11732 - DNA, 50 bp, Pseudomonas aeruginosa
  source 1..50: mol_type = genomic DNA
ttttatgccgccagtagcatcttgtgccagatcacacttccagcataaat

SEQ ID NO: 11733 - DNA, 40 bp, Pseudomonas aeruginosa
  source 1..40: mol_type = genomic DNA
gcgattggtctgctgcaggtgggtgatgagaatggtcttg

SEQ ID NO: 11734 - DNA, 50 bp, Pseudomonas aeruginosa
  source 1..50: mol_type = genomic DNA
ttttatgccgccagtagcatcttgagccagatcacacttccagcataaat

SEQ ID NO: 11735 - DNA, 40 bp, Pseudomonas aeruginosa
  source 1..40: mol_type = genomic DNA
tcaattggtctgctgatggaggggaaggagaggggtcttg

SEQ ID NO: 11736 - protein, 546 aa, Agrobacterium deltaense
MTKAYSYIRISSKKQERGEGIRRQLERADAYAKKHGLEIDTQLQDIASGYHAKHVTHGALGAFLDLVKEGRIEAGSVLIVESLDRLSRADVISAQAQLLTLLSAGIDVVTLTDEARYSRDRDFTQLIISLTIMSRANEESSRKADFSLKYHSQRLNDIAAGHKRHIVKLPRWLDQTRIDGSKEYDYSLNRHAETAKEIFRLYNKGLGASVIAQRFNQQSIPVYETKTKWHVNGILRVIRSIVAKGDYQVDDVVLPDFFPAVVSRKEWQIANDRLSKQDRTGRRGKTVTNLFSGLTKCFVCGGNARVVGGGSAYKYLTCETAHKTGIHCDGEVKWGKRALPYDPIEKAILDNVGLFVEVEESPKDASDLAKEVAAHLLELDGINKKINNLLDLAEDIDNVEDRANFRKRLAERRSEKATIEQMLSEKQTLINEVATAKDRKVDLKSYVDDERTKWPDMTVDDLYESRSNVALRIKSIVSAVRIDAGSNEVHVAVGGVTKGWTFSGKGDVVSSFDFSHLPIETIQKMTKGVGLSVSEKDIEKVRGSGA

SEQ ID NO: 11737 - DNA, 50 bp, Agrobacterium deltaense
  source 1..50: mol_type = genomic DNA
aaattgacttctgtgacagtgttcttcgtctatgtaacacttgtcaatga

SEQ ID NO: 11738 - DNA, 40 bp, Agrobacterium deltaense
  source 1..40: mol_type = genomic DNA
cttcttcgttcccgtcttcttcgtcttcgtcatgaagatt

SEQ ID NO: 11739 - DNA, 50 bp, Agrobacterium deltaense; identical to SEQ ID NO: 11737
  source 1..50: mol_type = genomic DNA

SEQ ID NO: 11740 - DNA, 40 bp, Agrobacterium deltaense
  source 1..40: mol_type = genomic DNA
cttcttcttctccttcatcttcttcttcttcatggagttt

SEQ ID NO: 11741 - protein, 545 aa, Faecalicatena orotica
MIIYIYSRKSKWTGRGESVENQIAMCREYMLYNIEGADKAEIVEYEDEGYSGKNTNRPQFQKMMSDIKKGQCDYLVCYKLDRLGRNIADLANLIETLNKLNVSFISIKERFDTSTPIGKAMIYFAGVLAQMEREQIAERVRDNMIMLARKGRWLGGNTPLGFRAEAEEKININGKNKKCFRLKEDAEDMKITKFIFQEFLEKQSLVGIVKYFLSHGMLTKRGKEYTTTTIKDILTNPVYCTADQDAYKYFWDLGCQVCMDEEEADGRYGLISYAKTSSSQYKNQDNPPEKWIIALGRHKGIISGKDFVKIQKILKQNSSKGDSWHKPQNPVALLSGLLYCSCGHAMRPKNYSTAQVTENGDRKFSYLCPYKDLTHGEKCSVPNVQGNTLDRLVCEEVLSYTDKNSNIGIMLERAKKRIMESKTDKVTEGEVLEQEIIKRKKEVKNLITAIAKSGNEEFIKQIEEEITRLNEECAAFEKERGNLGEEKCGMQGDQQQIEFVMEQLSSFKALFPALSVVEKREYLHMILERVVWDGEEAHIFIYGSH

SEQ ID NO: 11742 - DNA, 50 bp, Faecalicatena orotica
  source 1..50: mol_type = genomic DNA
tgtttccgctgctcacccatcgcattcccgatggtatagtagtggaaaca

SEQ ID NO: 11743 - DNA, 40 bp, Faecalicatena orotica
  source 1..40: mol_type = genomic DNA
aatggacaggagggtggacttcccacacccggatgggccg

SEQ ID NO: 11744 - DNA, 50 bp, Faecalicatena orotica
  source 1..50: mol_type = genomic DNA
tgtttccgctgctcacccatcgcaagcccgatggtatagtagtggaaaca

SEQ ID NO: 11745 - DNA, 40 bp, Faecalicatena orotica
  source 1..40: mol_type = genomic DNA
aatgggcagtgaggtggacagcccagaccctgaaaggacg

SEQ ID NO: 11746 - protein, 515 aa, Bacillus wiedmannii
MKTAIYLRKSRADLEAEARGEGETLAKHRSTLLKIAKEMNLNVLAVREEIVSGESLVKRPEMLALLEEIEDNKYDVVLCMDMDRLGRGGMKEQGIILETFKRSNTKIMTPRKTYDLNDEWDEEYSEFEAFMARKELKIITRRMQRGRIASVEAGNYLGTHAPFGYDIHRLNKRERTLTINSEEASVVRMIFDWYANEDMGASAIRSKLNDLGYKSKLGNEWNPYSILDILKNNVYIGKVTWQKRKEVKRPDAVKRSCARQDKSDWIIADGKHEPIIPESLFEQVQEKLNSRYHIPYNTNGIKNPLAGIIKCSKCGYSMVQRYPKNRKETMDCKHRGCENKSSYTELIEKRLLEALKEWYINYKADFEKHKQDDKLKETQVIQMNEAALRKLEKELVDVQKQKNNLHDLLERGVYTVDMFLERSNVVSDRITEITSTMENLKKEIKTEIKKEKVKKDTIPQVEHVLDLYFKTDDPKKKNNLLKSVLEKAVYKKEKWQRLDDFELVLYPKLPQDGDI

SEQ ID NO: 11747 - DNA, 50 bp, Bacillus wiedmannii
  source 1..50: mol_type = genomic DNA
tgttgtcaccttgttggtgtaattaggttgttaccaacagggtgataaca

SEQ ID NO: 11748 - DNA, 40 bp, Bacillus wiedmannii
  source 1..40: mol_type = genomic DNA
tgttgccattaggcgcatgagatttactccattaagccct

SEQ ID NO: 11749 - DNA, 50 bp, Bacillus wiedmannii
  source 1..50: mol_type = genomic DNA
tgttgtcaccttgttggtgtaattatgttgttaccaacagggtgataaca

SEQ ID NO: 11750 - DNA, 40 bp, Bacillus wiedmannii
  source 1..40: mol_type = genomic DNA
agttgctatctggccctttatatgtactcaattaagccct

SEQ ID NO: 11751 - protein, 515 aa, Bacillus wiedmannii
MKTAIYLRKSRADLEAEARGEGETLAKHRSTLLKIAKEMNLNVLAVREEIVSGESLVKRPEMLALLEEIEDNKYDVVLCMDMDRLGRGGMKEQGIILETFKRSNTKIMTPRKTYDLNDEWDEEYSEFEAFMARKELKIITRRMQRGRVASVEAGNYLGTHAPFGYDIHRLNKRERTLTINPEEASVVRMIFDWYANEDMGANAIRSKLNDLGYKSKLGNEWNPYSILDILKNNVYIGKVTWQKRKEVKRPDAVKRSCARQDKSDWIIADGKHEPIIPESLFEQVQEKLNSRYHIPYNTNGIKNPLAGIIKCSKCGYSMVQRYPKNRKETMDCKHRGCENKSSYTELIEKRLLEALKEWYINYKADFEKHKQDDKLKETQVIQMNEAALRKLEKELVDVQKQKNNLHDLLERGVYTVDMFLERSNVVSDRITEITSTMENLKKEIKTEIRKEKVKKDTIPQVEHVLDLYFKTDDPKKKNSLLKSVLEKAVYKKEKWQRLDDFELVLYPKLPQDGDI

SEQ ID NO: 11752 - DNA, 50 bp, Bacillus wiedmannii; identical to SEQ ID NO: 1612
  source 1..50: mol_type = genomic DNA

SEQ ID NO: 11753 - DNA, 40 bp, Bacillus wiedmannii; identical to SEQ ID NO: 11748
  source 1..40: mol_type = genomic DNA

SEQ ID NO: 11754 - DNA, 50 bp, Bacillus wiedmannii; identical to SEQ ID NO: 1614
  source 1..50: mol_type = genomic DNA

SEQ ID NO: 11755 - DNA, 40 bp, Bacillus wiedmannii; identical to SEQ ID NO: 11750
  source 1..40: mol_type = genomic DNA

SEQ ID NO: 11756 - protein, 515 aa, Bacillus wiedmannii
MKTAIYLRKSRADLEAEARGEGETLAKHRTTLLKIAKEMNLNVLTVREEIVSGESLVKRPEMLALLEEIEDNKYDVVLCMDMDRLGRGGMKEQGIILETFKRSNTKIMTPRKTYDLNDEWDEEYSEFEAFMARKELKIITRRMQRGRIASVEAGNYLGTHAPYGYDIQRLNKRERTLTINSEEASVVRMIFDWYANEDMGANAIRSKLNDLGYKSKLGNEWNPYSILDILKNNVYIGKVTWQKRKEVKQPDAVKRSCARQDKSDWIIADGKHEPIIPESLFEQVQEKLNSRYHIPYNTNGIKNPLAGIIKCSKCGYSMVQRYPKNRKETMDCKHRGCENKSSYTELIEKRLLQALKEWYINYKADFEKHKQDDKLKETQVIQMNEAALRKLEKELVDVQKQKSNLHDLLERGVYTVDMFLERSNVVSDRITEITSTMENLKKEIKTEIKKEKVKKDTIPQVEHVLDLYFKTDDPKKKNSLLKSVLEKAVYTKEKWQRLDDFELVLYPKLPQDGDI

SEQ ID NO: 11757 - DNA, 50 bp, Bacillus wiedmannii; identical to SEQ ID NO: 1612
  source 1..50: mol_type = genomic DNA

SEQ ID NO: 11758 - DNA, 40 bp, Bacillus wiedmannii; identical to SEQ ID NO: 11748
  source 1..40: mol_type = genomic DNA

SEQ ID NO: 11759 - DNA, 50 bp, Bacillus wiedmannii; identical to SEQ ID NO: 1614
  source 1..50: mol_type = genomic DNA

SEQ ID NO: 11760 - DNA, 40 bp, Bacillus wiedmannii; identical to SEQ ID NO: 11750
  source 1..40: mol_type = genomic DNA

SEQ ID NO: 11761 - protein, 515 aa, Bacillus wiedmannii
MKTAIYLRKSRADLEAEARGEGETLAKHRSTLLKIAKEMNLNVLSVREEIVSGESLVKRPEMLALLEEIEDNKYDVVLCMDMDRLGRGGMKEQGIILETFKRSNTKIMTPRKTYDLNDEWDEEYSEFEAFMARKELKIITRRMQRGRVASVEAGNYLGTHAPFGYDIHRLNKRERTLTINPEEASVVRMIFDWYANEDMGANAIRSKLNDLGYKSKLGNEWNPYSILDILKNNVYIGKVTWQKRKEVKRPDAVKRSCARQDKSDWIIADGKHEPIIPESLFEQVQEKLNSRYHIPYNTNGIKNPLAGIIKCAKCGYSMVQRYPKNRKETMDCKHRGCENKSSYTELIEKRLLEALKEWYINYKTDFEKHKQDDKLKETQVIQMNEAALRKLEKELVDVQKQKNNLHDLLERGVYTVDMFLERSNVVSDRITEITSTMENLKKEIKTEIKKEKVKQDTIPQVENVLDLYFKTDDPKKKNSLLKSVLEKAVYKKEKWQRLDDFELVLYPKLPQDGDI

SEQ ID NO: 11762 - DNA, 50 bp, Bacillus wiedmannii
  source 1..50: mol_type = genomic DNA
tgtcgtcaccttgttggtgtcattaggttgacgccaacatggtgacgaca

SEQ ID NO: 11763 - DNA, 40 bp, Bacillus wiedmannii; identical to SEQ ID NO: 11748
  source 1..40: mol_type = genomic DNA

SEQ ID NO: 11764 - DNA, 50 bp, Bacillus wiedmannii
  source 1..50: mol_type = genomic DNA
tgtcgtcaccttgttggtgtcattatgttgacgccaacatggtgacgaca

SEQ ID NO: 11765 - DNA, 40 bp, Bacillus wiedmannii; identical to SEQ ID NO: 11750
  source 1..40: mol_type = genomic DNA

SEQ ID NO: 11766 - protein, 515 aa, Bacillus wiedmannii
MKTAIYLRKSRADLEAEARGEGETLAKHRSTLLKIAKEMNLNVLAVREEIVSGESLVKRPEMLALLEEIEDNKYDVVLCMDMDRLGRGGMKEQGIILETFKRSNTKIMTPRKTYDLNDEWDEEYSEFEAFMARKELKIITRRMQRGRVASVEAGNYLGTHAPFGYNIHRLNKRERTLIINSEEASVVRMIFDWYANEDMGANAIRSKLNDLGYKSKLGNEWNPYSILDILKNNVYIGKVTWQKRKEVKRPDAVKRSCARQDKSDWIIADGKHEPIIPESLFEQVQEKLNSRYHVPYNTNGIKNPLAGIIKCSKCGYSMVQRYPKNRKETMDCKHRGCESKSSYTELIEKRLLEALKEWYINYKADFEKHKQDDKLKETQVIQMNETALRKLEKELVDVQKQKSNLHDLLERGVYTVDMFLERSNVVSDRITEITSTMENLKKEIKTEIKKEKVKKDTIPQVEHVLDLYFKTDDPKKKNSLLKSVLEKAVYKKEKWQRLDDFELVLYPKLPQDGDI

SEQ ID NO: 11767 - DNA, 50 bp, Bacillus wiedmannii; identical to SEQ ID NO: 9727
  source 1..50: mol_type = genomic DNA

SEQ ID NO: 11768 - DNA, 40 bp, Bacillus wiedmannii; identical to SEQ ID NO: 11748
  source 1..40: mol_type = genomic DNA

SEQ ID NO: 11769 - DNA, 50 bp, Bacillus wiedmannii; identical to SEQ ID NO: 9729
  source 1..50: mol_type = genomic DNA

SEQ ID NO: 11770 - DNA, 40 bp, Bacillus wiedmannii; identical to SEQ ID NO: 11750
  source 1..40: mol_type = genomic DNA

SEQ ID NO: 11771 - protein, 515 aa, Bacillus wiedmannii
MKTAIYLRKSRADLEAEARGEGETLAKHRTTLLKIAKEMNLNVLSVREEIVSGESLVKRPEMLALLEEIEDNKYDVVLCMDMDRLGRGGMKEQGIILETFKRSNTKIMTPRKTYDLNDEWDEEYSEFEAFMARKELKIITRRMQRGRVASVEAGNYLGTHAPFGYDIHRLNKRERTLTINPEEASVVRMIFDWYANEDMGANAIRSKLNDLGYKSKLGNEWNPYSILDILKNNVYIGKVTWQKRKEVKRPDAVKRSCARQDKSDWIIADGKHEPIIPESLFEQVQEKLNSRYHIPYNTNGIKNPLAGIIKCSKCGYSMVQRYPKNRKETMDCKHRGCENKSSYTELIEKRLLEALKEWYINYKADFEKHKQDDKLKETQVIQMNEAALRKLEKELVDVQKQKNNLHDLLERGVYTVDMFLERSNVISNRITEITSTMENLKKEIKTEIKKEKVKKDTIPQVEHVLDLYFKTDDPKKKNSLLKSVLEKAVYKKEKWQRLDDFELVLYPKLPQDGDI

SEQ ID NO: 11772 - DNA, 50 bp, Bacillus wiedmannii
  source 1..50: mol_type = genomic DNA
tgttgtcaccttgttggtgtaattaggttgacgccaacatggtgacgaca

SEQ ID NO: 11773 - DNA, 40 bp, Bacillus wiedmannii; identical to SEQ ID NO: 11748
  source 1..40: mol_type = genomic DNA

SEQ ID NO: 11774 - DNA, 50 bp, Bacillus wiedmannii
  source 1..50: mol_type = genomic DNA
tgttgtcaccttgttggtgtaattatgttgacgccaacatggtgacgaca

SEQ ID NO: 11775 - DNA, 40 bp, Bacillus wiedmannii; identical to SEQ ID NO: 11750
  source 1..40: mol_type = genomic DNA

SEQ ID NO: 11776 - protein, 673 aa, Vibrio harveyi
MIGEETLREEIFQYDKAKFKGICVPYARFSTKGQSKVGKKSLERQLSKAREYAKRNNLFINEDLIFTDKGVSGYSNQGELSKAFKKGQMATMLLLLEEVPPEERDNIYITFHNFDRFSRMSPDAAQAHFNKILNRGFKIVTTIDNQLYDRRDKGMSNMLISIIKMTTAWQESLNKSIYITDALSRKKKVIEYLYNHPSQKGKHKHIGVVQPSIPRWIDQENITYEYIDADGSKRTDTFKKFSLNQYKAEVVRKIFELKIAGLGYTRICQKLNNDGVEVFEQGRFKKAKKWHPYAVQNIITSDKVLGHITLKEMVTEEYHCKETDEIKTKKVKKEVTSKLENYYPAVVDEEVFRLANVLKFQEKKGKPLGRIGERTNIFATFMSCYCGATLQYSRSQINKRSNKAPVYREQLRCNNALVKNGCFDDYINYVELEQAFFKYVHHIDFREVCLVGDKSLETEIKNLQAEITYLNGQKKELKLKNSGLEKTFESAISQGLNADYVLVALNEAKKSADLIETKINDLKVRITKLQLSLDSKESDFLDIVEYSKRIKNSSTETKIMMRKKLNDFLHSKIKWMEVCSSKHSKFVILCFHDDVIRTFAYSENYANDLMFNTIKISYEVEDSQLNYELFLIYIHQIKRSLRGETEVVSNGDLIEALQRLKRKFYAGKGIDYV

SEQ ID NO: 11777 - DNA, 50 bp, Vibrio harveyi
  source 1..50: mol_type = genomic DNA
gtgttggtaataacttatacatctttagataaaatcttcattaccaacac

SEQ ID NO: 11778 - DNA, 40 bp, Vibrio harveyi
  source 1..40: mol_type = genomic DNA
gtgaccaattttaatgtctttcattgtgaacatgcctagt

SEQ ID NO: 11779 - DNA, 50 bp, Vibrio harveyi
  source 1..50: mol_type = genomic DNA
gtgttggtaataacttatacatctagagataaaatcttcattaccaacac

SEQ ID NO: 11780 - DNA, 40 bp, Vibrio harveyi
  source 1..40: mol_type = genomic DNA
gtgacccattttaataactagtaatatgaacatgctttct

SEQ ID NO: 11781 - protein, 547 aa, Shigella dysenteriae
MKLLVPYIRWSTKEQDSGDSLRRQTNLIDAFYSKHKEEYYLLPAHRYVDKGKSGFHQQHKAQGSDFRRMFENVMSGAIPEGSLIVVENFDRFSRADIDTAIDDVRQILRKGVSILTLGDGELYDKSALTDPVKLIKHIIIAERAHQESLVKQKRIAQVWNHKTQLARELKKPMGKQAPGWLELSEDGSHYIVDEDKASLVNIIYDKRLSGMSMFAICKWLNEQGYPTINQRKVRISKTKKPDGNWSALSVKHILTSRSVLGYLPAKISSEDRKTVLREEIEGFYPQIVTDSKFYAVQQLLEETGKGKTSSGDHWLYVNILKGLIRCKCGLVMTPTGIRKPVYQGTYRCNGNKESRCSYGTVSRKLLDTQLCSRLFSKLSQLHDEATDTAKLDELQRRLNTVDGELEKLTETLIQLPNITQIQEALRVKQEEKDELIVQLSREKARVKSVSSLDLSGLDMESVEGRTEAQIIIKRLVKEIVVSGNEKLVDIYLHNGNMIRGFPLDGKDDHTLTLEEATDEMQSLDDMLIFGEPVTRIYPAGDMEEVDA

SEQ ID NO: 11782 - DNA, 50 bp, Shigella dysenteriae; identical to SEQ ID NO: 3242
  source 1..50: mol_type = genomic DNA

SEQ ID NO: 11783 - DNA, 40 bp, Shigella dysenteriae
  source 1..40: mol_type = genomic DNA
gtacatggaataataaagtaccagaactttagtcatttct

SEQ ID NO: 11784 - DNA, 50 bp, Shigella dysenteriae
  source 1..50: mol_type = genomic DNA
gtacgtgtttagctatgtaaaagccatagtattcttgccttaacactcat

SEQ ID NO: 11785 - DNA, 40 bp, Shigella dysenteriae
  source 1..40: mol_type = genomic DNA
ttacattggtgaataaagtcagagtactttagtcattttg

SEQ ID NO: 11786 - protein, 564 aa, Streptococcus suis
MNRTLTIPYYNQVDTSRLSNITVVYCRLSQDDGLNGDSNSIINQKKILSEAVQRERLENPILFVDDGYSGTNFDRPAISEALRLVENRQVSNFIVKDLSRLGRSYIKVGQLTEITFPSFDVRFIALNDGVDSNKPNETNSIFLPIKSLMDEMYAADTSKKIRAVIQAKAKAGERVTVNPPYGYLKDPKNPKNWIVDPVASGVVKRIFQEAKNGKSLTEIAKLLENEKIFKPDRYRLEIGLKPISSSSNVETLPYYWTRETLSAILSREEYLGHTVNLRTQTKSYKDKRSIDKPKEDWLIFKDTHEAIIDQETFDVVQKMRSHKRSNQRYKNRVGHENLFAGLVFCGTCGRKHYFCPQEKNGLNHDHYKCSGYRKPIDGCENPHYIQKSALIEIVGAKLRQTIQEIQLDKDKFLEKLEWQSQVKFSKDNQRQRQQLQKDELRSKEIDTIIQKLYEDNLFGKISDDRFVKLSQSYEDEQKQLQASILDLTEKLAKQQEETQNISKFMARISKYTELPELTVEIVNELIDKIVVHKPTGTKRNRIIQIDIHYNFIGKLNNEKASQAD

SEQ ID NO: 11787 - DNA, 50 bp, Streptococcus suis
  source 1..50: mol_type = genomic DNA
aaactgctatttgtcagctcagctaaagacggcatgacactcagcagtct

SEQ ID NO: 11788 - DNA, 40 bp, Streptococcus suis
  source 1..40: mol_type = genomic DNA
gcacattaaaaagctggcaaatgtccagctttttttgttt

SEQ ID NO: 11789 - DNA, 50 bp, Streptococcus suis
  source 1..50: mol_type = genomic DNA
aaactgctatttgtcagctcagctttagacggcatgacactcagcagtct

SEQ ID NO: 11790 - DNA, 40 bp, Streptococcus suis
  source 1..40: mol_type = genomic DNA
tcagagtaaaaagctgggatttttccattttttttccttt

SEQ ID NO: 11791 - protein, 507 aa, Streptomyces lunaelactis
METMQPTITEYDGCGKCLVGVRRLSRKTESSNSPGKQLGQVLKATEDVGAHIIGWADDWEVSGATDPLTRPQLGPWLRGEMGPYDGIAGAAVDRIGRNVKDVLNTAYTIHETGQILVTADHPGVWDLNDPAQETDLLVKALGAQLEHRAIKRRVQEETERARRSGQPKNKPSYGYTFVRLTPKGKVDHVALHPVASKEIRKVARRILADQTGEITVSRECARLTREGVLTPHDLLAVSYGREPKGKPWTYQTLFQILTSEAALGYLMHGKKPVVGEDGRRMKIAPELWSAATRRALIEKTKPTQNHGDESGRTSHGLTLLAGISFCGTCGERLIVNGLKGYGCTARVRGIPSSAGCKPAPTMKISKLDAEVESWFLSEYGSGQVMRKEYDPGTGYAAQIAELEADRKRLRGDRAAGLYDAEDDAEWYRAEYAKLGQRISELRELPERPAGMRLLPTGKTVADRWDEAPDAPSRREILNEYDVRVTLFPLRAERRILITGTNVYAQDT

SEQ ID NO: 11792 - DNA, 50 bp, Streptomyces lunaelactis
  source 1..50: mol_type = genomic DNA
gagtatgttctaggtgggttcccggtcaggaacccacccagaacatacat

SEQ ID NO: 11793 - DNA, 40 bp, Streptomyces lunaelactis
  source 1..40: mol_type = genomic DNA
gaagtactcgtggttgccggtgacgaagaaggacccgtgc

SEQ ID NO: 11794 - DNA, 50 bp, Streptomyces lunaelactis; identical to SEQ ID NO: 11792
  source 1..50: mol_type = genomic DNA

SEQ ID NO: 11795 - DNA, 40 bp, Streptomyces lunaelactis
  source 1..40: mol_type = genomic DNA
gtagtactcatgattgcctgtgacgaagtaggcaccgaga

SEQ ID NO: 11796 - protein, 507 aa, Streptomyces lunaelactis
METMQPTITEYDGCGKCLVGVRRLSRKTESSNSPGKQLGQVLKATEDVGAHIIGWADDWEVSGATDPLTRPQLGPWLRGEMGPYDGIAGAAVDRIGRNVKDVLNTAYTIHETGQILVTADHPGVWDLNDPAQETDLLVKALGAQLEHRAIKRRVQEETERARRAGQPKNKPSYGYTFVRLTPKGKVDHVALHPVASKEIRKVARRILADQTGEITVSRECARLTREGVLTPHDLLAVSYGREPKGKPWTYQTLFQILTSEAALGYLMHGKKPVVGEDGRRMKIAPELWSAATRRALIEKTKPTQNHGDESGRTSHGLTLLAGISFCGTCGERLIVNGLKGYGCTARVRGIPSSAGCKPAPTMKISKLDAEVESWFLSEYGSGQVMRKEYDPGTGYAAQIAELEADRKRLRGDRAAGLYDAEDDAEWYRAEYAKLGQRISELRELPERPAGMRLLPTGKTVADRWDEAPDAPSRREILNEYDVRVTLFPLRAERRILITGTNVYAQDT

SEQ ID NO: 11797 - DNA, 50 bp, Streptomyces lunaelactis; identical to SEQ ID NO: 11792
  source 1..50: mol_type = genomic DNA

SEQ ID NO: 11798 - DNA, 40 bp, Streptomyces lunaelactis; identical to SEQ ID NO: 11793
  source 1..40: mol_type = genomic DNA

SEQ ID NO: 11799 - DNA, 50 bp, Streptomyces lunaelactis; identical to SEQ ID NO: 11792
  source 1..50: mol_type = genomic DNA

SEQ ID NO: 11800 - DNA, 40 bp, Streptomyces lunaelactis; identical to SEQ ID NO: 11795
  source 1..40: mol_type = genomic DNA

SEQ ID NO: 11801 - protein, 664 aa, Vibrio parahaemolyticus
MFSFDKSKFKGICVPYARFSTKGQSKIGKKSLERQIEEARRYAKSNNLYINEDLIFADKGISGFAQQGNIAKAFKKGQMQVMLALLEEVPYQEREFIYVTFHNFDRFSRMSPKQARTYFDLILQKGFNVVTTIDNQLYTRHDKDLGKMLISTIKMTTAWEESQVKSIYIKDALARKKKVVEYLYTHPSQKGKYKHIGVVQPNMPRWIDHEKIELTYTDESGSKRTDSFKKFTLNKEKTKIVNYIFDLKIQGLGYARICRRLNEEGIPTFDQGKHRIAKKWHVFAVQNLICNEMVLGHITLHTHNEEEYMCEIDKVFKKRKIKQTATEKLYNYYPAAVSEAKYLEAHKNTIQQDKPKKLGRIGERTNIFAQILLCECGGTLQYRRTKKNKKKSESVSVNEYLQCNNAFVNHKCNSQTINYTMLETAFFRYVNNIDFKKICSTTNSKHALKIIDIDADIKELTDEIESLKLREAGLAKTYMSLASAGLDGSTALIDREKTKKEIAEKVLELENLELKKKGLEIEADKDNREFVDINDYMLNKDNYSSDEKIIIRKKINDFLHSKIEWMEVVSTERQKFVIIAFHDTVIRTFAFDDRCANDLMFNEIDVDLSGLNRVQASNLMFTLIKAIRNSLKGVEAVITKADLIRYLQHIKQDYLNNIGEQASV

SEQ ID NO: 11802 - DNA, 50 bp, Vibrio parahaemolyticus
  source 1..50: mol_type = genomic DNA
ggttgtgtaatactatgtaaatcattagataaacgctttaatacacaacc

SEQ ID NO: 11803 - DNA, 40 bp, Vibrio parahaemolyticus; identical to SEQ ID NO: 8393
  source 1..40: mol_type = genomic DNA

SEQ ID NO: 11804 - DNA, 50 bp, Vibrio parahaemolyticus
  source 1..50: mol_type = genomic DNA
ggttgtgtaatactatgtaaatcaccagataaacgctttaatacacaacc

SEQ ID NO: 11805 - DNA, 40 bp, Vibrio parahaemolyticus
  source 1..40: mol_type = genomic DNA
catattaggttttatttttcccatattaaacatactgata

SEQ ID NO: 11806 - protein, 673 aa, Vibrio parahaemolyticus
MIGAEALREEIFQYDKTKFKGICVPYARFSTKGQSKVGKKSLERQLSKAREYAKRNNLFINEDLIFTDKGVSGYSNQGELSKAFKKGQMATMLLLLEEVPPEERDNVYITFHNFDRFSRMSPDAAQAHFNKILNRGFKIVTTIDNQLYDRRDKGMSNMLISIIKMTTAWQESLNKSIYITDALSRKKKVIEYLYNHASQKGKHKHIGVVQPSIPRWIDQESITYDYTDVNGSKRTDTFKKFSLNSHKAEIVRKIFDLKIAGLGYTRICQKLNNDGVEVFEQGRFKKAKKWHPYAVQNIITSDKVLGHITLKEMVTEEYHCKETDEIKTKKVKKEVTSKLENYYPAVVDEEVFRLANVLKFQEKKGKPLGRIGERTNIFATFMSCYCGATLQYSRSQINKRSNKAPVYREQLRCNNALVKNGCFDDYINYVELEQAFFKYVHHIDFREVCLVGDKSLETEIKNLQAEITYLNGQKKELKLKNSGLEKTFESAISQGLNADYVLVALNEAKKSADLIETKINDLKVRITKLQLSLDSKESDFLDIVEYSMRIKNSSTETKIMMRKKLNDFLHSKIKWMEVCSSKHSKFVILCFHDDVIRTFAYSENYANDLMFNTIKINYEVEDSQLNYELFLIYIHQIKRSLRGETEVVSNGDLIEALQRLKRKFYSGKGIDYV

SEQ ID NO: 11807 - DNA, 50 bp, Vibrio parahaemolyticus; identical to SEQ ID NO: 1977
  source 1..50: mol_type = genomic DNA

SEQ ID NO: 11808 - DNA, 40 bp, Vibrio parahaemolyticus; identical to SEQ ID NO: 8393
  source 1..40: mol_type = genomic DNA

SEQ ID NO: 11809 - DNA, 50 bp, Vibrio parahaemolyticus
  source 1..50: mol_type = genomic DNA
gtgttggtaaacataggtttatctccagataaagacattattaccaacac

SEQ ID NO: 11810 - DNA, 40 bp, Vibrio parahaemolyticus; identical to SEQ ID NO: 11805
  source 1..40: mol_type = genomic DNA

SEQ ID NO: 11811 - protein, 674 aa, Vibrio parahaemolyticus
MIGAEKLKTELFEYDKTKFNGICVPYARFSTKGQSKVGKKSLERQLSKAREYAKRNNLYINEDLIFTDKGVSGYSNQGDLSKAFKKGQMATMLLLLEDVPPLERENVYITFHNFDRFSRMSPDAAQAHFNKILNRGFKIVTTIDNQLYDRRDKGMSNMLISIIKMTTAWQESLNKSIYIKDALSRKKKVIEYLYTHPTQKGKHKHIGIVQPSIPRWIDQENVTYEYVAADGSKRVDTFKKFSLNKRKAAVVRQIFDLKIAGLGYTRICQKLNNDGVEVFDQGKFKKAKKWHSYAVQNIITSDKVLGNIVLMEMVAEEYHCKETDEIKTKKVKQEVTSRLENYYPAVVDEETFRLANVLKFQEKKGKPLGRIGERTNIFSTFMSCYCGASLQYSRSQINKKSKNTPPIYREQLRCTNALVKNGCFDDYINYVELEQAFFKYVNHIDFREICVVGDKSLEAEISNLQSEIKALNDEKKALSKKNSGLEKTFESAISQGLNADYVLVALNDVKKSSELIETKINDLKLKISKLKVSIDSKETEYLDIVEYSKQIKNSSTETKIMMRKKLNEFLHSKIKWMEICSSKNSKFVILCFHDEVIRTFAYTDNYANDLMFNTIKLTYEVDDSHLNYELFLIYIDQIKRSLRGETEVVTNADLINALQRLKRQFYESKGVVNV

SEQ ID NO: 11812 - DNA, 50 bp, Vibrio parahaemolyticus
  source 1..50: mol_type = genomic DNA
ctgttggtaatggtttatacatctttagatgaaacctcctttaccaacac

SEQ ID NO: 11813 - DNA, 40 bp, Vibrio parahaemolyticus; identical to SEQ ID NO: 8393
  source 1..40: mol_type = genomic DNA

SEQ ID NO: 11814 - DNA, 50 bp, Vibrio parahaemolyticus
  source 1..50: mol_type = genomic DNA
ctgttggtaatggtttatacatctccagatgaaacctcctttaccaacac

SEQ ID NO: 11815 - DNA, 40 bp, Vibrio parahaemolyticus; identical to SEQ ID NO: 11805
  source 1..40: mol_type = genomic DNA

SEQ ID NO: 11816 - protein, 673 aa, Vibrio parahaemolyticus
MIGEETLREEIFQYDKAKFKGICVPYARFSTKGQSKVGKKSLERQLSKAREYAKRNNLFINEDLIFTDKGVSGYSNQGELSKAFKKGQMATMLLLLEEVPPEERDNVYITFHNFDRFSRMSPDAAQAHFNKILNRGFKIVTTIDNQLYDRRDKGMSNMLISIIKMTTAWQESLNKSIYITDALSRKKKVIEYLYNHPSQKGKHKHIGVVQPSIPRWIDQENITYEYIDADGSKRTDTFKKFSLNQYKAEVVRKVFELKIAGLGYTRICQKLNNDGVEVFEQGRFKKAKKWHPYAVQNIITSDKVLGHITLKEMVTEEYHCKETDEIKTKKVKKEVTSKLENYYPSVVDEEVFRLANVLKFQEKKGKPLGRIGERTNIFATFMSCYCGATLQYSRSQINKRSNKAPVYREQLRCNNALVKNGCFDDYINYVELEQAFFKYVHHIDFREVCLVGDKSLETEIKNLQAEITYLNGQKKELKLKNSGLEKTFESAISQGLNADYVLVALNEAKKSADLIETKINDLKVRITKLQLSLDSKESDFLDIVEYSKRIKNSSTETKIMMRKKLNDFLHSKIKWMEVCSSKHSKFVILCFHDDVIRTFAYSENYANDLMFNTIKISYEVEDSQLNYELFLIYIHQIKRSLRGETEVVSNGDLIEALQRLKRKFYAGKGIDYV

SEQ ID NO: 11817 - DNA, 50 bp, Vibrio parahaemolyticus
  source 1..50: mol_type = genomic DNA
gtattggtaataacttatacatctttagataaaatctttattaccaacag

SEQ ID NO: 11818 - DNA, 40 bp, Vibrio parahaemolyticus; identical to SEQ ID NO: 8393
  source 1..40: mol_type = genomic DNA

SEQ ID NO: 11819 - DNA, 50 bp, Vibrio parahaemolyticus
  source 1..50: mol_type = genomic DNA
gtattggtaataacttatacatctccagataaaatctttattaccaacag

SEQ ID NO: 11820 - DNA, 40 bp, Vibrio parahaemolyticus; identical to SEQ ID NO: 11805
  source 1..40: mol_type = genomic DNA

SEQ ID NO: 11821 - protein, 673 aa, Vibrio parahaemolyticus
MIGEETLREEIFQYDKAKFKGICVPYARFSTKGQSKVGKKSLERQLSKAREYAKRNNLFINEDLIFTDKGVSGYSNQGELSKAFKKGQMATMLLLLEEVPPEERDNVYITFHNFDRFSRMSPDAAQAHFNKILNRGFKIVTTIDNQLYDRRDKGMSNMLISIIKMTTAWQESLNKSIYITDALSRKKKVIEYLYNHPSQKGKHKHIGVVQPSIPRWIDQENITYEYIDADGSKRTDTFKKFSLNQYKAEVVRKIFELKIAGLGYTRICQKLNNDGVEVFEQGRFKKAKKWHPYAVQNIITSDKVLGHITLKEMVTEEYHCKETDEIKTKKVKKEVTSKLENYYPSVVDEEVFRLANVLKFQEKKGKPLGRIGERTNIFATFMSCYCGATLQYSRSQINKRSNKAPVYREQLRCNNALVKNGCFDDYINYVELEQAFFKYVHHIDFREVCLVGDKSLETEIKNLQAEITYLNGQKKELKLKNSGLEKTFESAISQGLNADYVLVALNEAKKSADLIETKINDLKVRITKLQLSLDSKESDFLDIVEYSKRIKNSSTETKIMMRKKLNDFLHSKIKWMEVCSSKHSKFVILCFHDDVIRTFAYSENYANDLMFNTIKISYEVEDSQLNYELFLIYIHQIKRSLRGETEVVSNGDLIEALQRLKRKFYAGKGIDYV

SEQ ID NO: 11822 - DNA, 50 bp, Vibrio parahaemolyticus
  source 1..50: mol_type = genomic DNA
gtgttggtaataacttatacatctttagataaaatctttattaccaacag

SEQ ID NO: 11823 - DNA, 40 bp, Vibrio parahaemolyticus; identical to SEQ ID NO: 8393
  source 1..40: mol_type = genomic DNA

SEQ ID NO: 11824 - DNA, 50 bp, Vibrio parahaemolyticus
  source 1..50: mol_type = genomic DNA
gtgttggtaataacttatacatctccagataaaatctttattaccaacag

SEQ ID NO: 11825 - DNA, 40 bp, Vibrio parahaemolyticus; identical to SEQ ID NO: 11805
  source 1..40: mol_type = genomic DNA

SEQ ID NO: 11826 - protein, 458 aa, Staphylococcus aureus
MKVAIYTRVSTLEQKEKGHSIEEQERKLRAYSDINDWTIQGVYVDAGYSGAKTDRPELNRLKENLSKIDLVLVYKLDRLTRNVKDLLDLLEIFERENVSFRSATEVYDTSTAMGRLFVTLVGAMAEWERETIRERAMMGKQAAIRKGMILTPPPFYYDRVDNKYIPNKYKDVVVWAYEEVKKGNSAKGIARKLNASDIPPPNGIQWEDRTITRALRSPLSKGHYFWGDIFIENSHEPIITDEMYNEIKERLNERVNAKTITHTSVFRGKLICPNCNGRLCLNTSYRKLKRGDVIHKNYYCNNCKVNKNGAFSFTEKEALKVFYDYLSKLDLSKYKTKEKEDKKIVTIDINKVMEQRKRYHKLYANGMMQEEELFELIKETDEKISEYEKQKERVPKKRLDVSKIKNFKNILLDSWNAFTLEDKADFIKMAIKSIEIEYIHVKRGKTKHSIKIKNIDFY

SEQ ID NO: 11827 - DNA, 50 bp, Staphylococcus aureus
  source 1..50: mol_type = genomic DNA
gtgcggaactacgaacagtttatcaatacgaagtgtacaaacttccatac

SEQ ID NO: 11828 - DNA, 40 bp, Staphylococcus aureus
  source 1..40: mol_type = genomic DNA
gtatggaggcacttgtataaacataggatgtattgcttca

SEQ ID NO: 11829 - DNA, 50 bp, Staphylococcus aureus
  source 1..50: mol_type = genomic DNA
gtgcggaactacgaacagtttatctttacgaagtgtacaaacttccatac

SEQ ID NO: 11830 - DNA, 40 bp, Staphylococcus aureus
  source 1..40: mol_type = genomic DNA
gtatacaggcacttcaatattcatatattttattccttca

SEQ ID NO: 11831 - protein, 513 aa, Clostridioides difficile
MRNYVIALYIRLSVEDFKTESLSIPNQKLILREKAMSLPEWDNSEILEFIDNGHTGTNFERPAVQELLTMVQAGKINCIIVKDLSRFGRNSIETGYFIERVFPLYHTRFISVSDDFDTANFKGDTGGIDIAFKYLISECYSRDMSMKTKSAKYAKMRRGEYQSVICPYGYRKSADGRMEPDEDVAPNVQMIFQWASEGNTAAEITRRLYAMNIPTPGEYRKLKGKDYYNVSRTNGVWSTSTVLRILEDQRYIGTYVIGKRKVKEIGSRHTQLKDESEWFKIPNHHPAIVSVDLFEKANASIKRFSLLNKKPRDYLLRGKVFCGCCDHAMSLRNGAWFYCRHSEVAETLPCHGVRIKMADLEQVVFETIRAQMCPALGIDSNKDKLDLQTVQQAEHEEKLRSIQDSKRHLYEQYALGEIDLETYRTRKAVYDTELVQAKNVHAVITAQTKQIKSDYEIKLKQQEIVQEVGNANILTKALIDRLINKVYVFPGDRIEIEYATQDFLETKESEKEV

SEQ ID NO: 11832 - DNA, 50 bp, Clostridioides difficile
  source 1..50: mol_type = genomic DNA
tttgtcttgggcttgacatacgggtgccgttacggtataataacgacaaa

SEQ ID NO: 11833 - DNA, 40 bp, Clostridioides difficile
  source 1..40: mol_type = genomic DNA
aagtaaagtaacatgtgagtgtcttaaatcatggaatcta

SEQ ID NO: 11834 - DNA, 50 bp, Clostridioides difficile
  source 1..50: mol_type = genomic DNA
tttgtcttgggcttgacatacgggacccgttacggtataataacgacaaa

SEQ ID NO: 11835 - DNA, 40 bp, Clostridioides difficile
  source 1..40: mol_type = genomic DNA
aatcaatgtaatatgaaggactcagaaatcatggaatcta

SEQ ID NO: 11836 - protein, 554 aa, Pseudomonas atacamensis
MSKVFSYIRFSSAKQSAGDSEARQMRAAKEFAVERGLQLADPTEYLFFDRGRSAYTGKHLDDTGELARFLAFVDDGTIPPGSFLVVESLDRLSREKVRDALPRFLDLLAKGINVYTSTDKRLYTRDYNEIDLIISIISMSRAHEESATKGSRVSSAWRKKQADARASGKPLGKLRPLWLDVTPEGYTLNTERAQVVRRIFDLSTQGHGSRNIAATLNQEGVPAFSAGRKNLSGLWGFSTVRHVLGSRATLGEYLPHVFVNGVRTPDGEPIKDFFPAVVSEETFYRAQAARGSRRLHKITRQTKDFNVMAGIFFCFDCGAAMHLQTQRGRRYFKCSHSTRGMCNAGVITATRTETVFREILAKLDSLSLVQDSAGSIRKKLDVVEGRTVELRSKLAAAEDAHNEYPSRTTAKLLHELEGELSSLDAEKDTLRQQTAVDRVMSKEHFFEKLDLVSFGGRAAANNLTKRLGTKIFVRKNGRCDETYLIGVTAADGAEPSVIGAITHTNKKIRIDSASDAFTELQALHGDLPKWQRDAKSWRKEIKVPVLPELKSQRR

SEQ ID NO: 11837 - DNA, 50 bp, Pseudomonas atacamensis
  source 1..50: mol_type = genomic DNA
ggtagtgaattgttgcaacacatcaagaaatgctgctacaactacctaca

SEQ ID NO: 11838 - DNA, 40 bp, Pseudomonas atacamensis
  source 1..40: mol_type = genomic DNA
tggcagcgggcagaagttcaagaagtgttgttcgggttat

SEQ ID NO: 11839 - DNA, 50 bp, Pseudomonas atacamensis
  source 1..50: mol_type = genomic DNA
ggtagtgaattgttgcaacacatcatgaaatgctgctacaactacctaca

SEQ ID NO: 11840 - DNA, 40 bp, Pseudomonas atacamensis
  source 1..40: mol_type = genomic DNA
tggcagctggcagaagtacatccagtcttgtgcaggctag

SEQ ID NO: 11841 - protein, 567 aa, Pseudomonas savastanoi
MTVQIYSYKRISSRTQKEGTGIDRQEALIQEYLANHRRELAREFIDLGISGFRGKNARTGALREFLDLIASGIIKANDVLLVENFDRLTRMNGIDATKLVVDILSAKIIIVTLADNQIYDYRQEDHSSILFKINFVLSRANEESRIKKNRSLGAWARKHSEAKSSNKVMTKRLPYWINYNDETETLNLNSHRADEVRKIFDLLEIYGCARTANEINKTPTDKKWTLIAIRHLSRAKSVYGCLEIYKTKSQSGESVDYEELENYYPAVISKERFFNLQTKLNIRTETHDKIGRESKGFRNIFKGVIFCEHCNTALHQNFTKRKGKEYMYLICAKSLVGACPAGRKIFIPYGYIVEPFLLYYKNYELEKIIRKSGDVQSLVESRNAYNAEIEDKQSTVEKIAQSIELNGGDIPKILLSRIRKIETEISELTKKRDLADIEIAKMNIYVEAEQAISRTDIDELLEKEEGRIRFNMLLKESQVQIRVLKRFEDSEPFLGQDFQDEHKMSVVVINNKAKGFGLSYYFDRKHARLAGGTYYFYTKKFVGGWNTDFTLPLGSRAEFSVYDDKPQ

SEQ ID NO: 11842 - DNA, 50 bp, Pseudomonas savastanoi
  source 1..50: mol_type = genomic DNA
tgtctgttaaatcgatagtaaatcgcagtctatgagcgctataatggata

SEQ ID NO: 11843 - DNA, 40 bp, Pseudomonas savastanoi
  source 1..40: mol_type = genomic DNA
ggtggggctgccggaaggggcggtcaaggagagcaaggac

SEQ ID NO: 11844 - DNA, 50 bp, Pseudomonas savastanoi
  source 1..50: mol_type = genomic DNA
tgtctgttaaatcgatagtaaatcatagtctatgagcgctataatggata

SEQ ID NO: 11845 - DNA, 40 bp, Pseudomonas savastanoi
  source 1..40: mol_type = genomic DNA
ggtgatgctgcccgaggggatgagcaaggagagcagagaa

SEQ ID NO: 11846 - protein, 493 aa, Terrisporobacter glycolicus
MKTCIYLRKSRADIEAEKEGEYETLHRHKTTLLKVAKERKLNIVDIKEELVSGEYVEHRPRMMELLEEVKNKKYDAVLVMDLDRLGRGNMQDQGLILDTFKTSKTKIITPRKIYNLDDEFDEEYSEFEAFMARKELKLINRRLQRGRAKSIEEGKYISPDAPYGYEFKYDDRGKKYLAINEEQAAAVKLVFSMYLENKGATKIANKLNALGYETNNHIEFKAKAVRDILSNITYCGYVKWKTIDRKNHSRLRPDGEQIIAKGHHEPIIDEFTFNKVQEIRKGKYISPSKNKVSNPLAGIVICKKCGHNIIQKISRGKTYLWCRHCDNKSSSLDYVEDAIIDSLQGWLENYKIKIDLKDDTEEIDQIKFELKKLQRELKEAEKQKGKLYDFLERGIYDDKTFLERSNVLGSRIDDLKNQISECNLSIISYKDNLQAKKQIIPSLEKVLYNYSRSNDAKEQNLLLKSVLDKVLYEKAKDASKDDFILEVHPKLPK

SEQ ID NO: 11847 - DNA, 50 bp, Terrisporobacter glycolicus
  source 1..50: mol_type = genomic DNA
ttcagctacagtagtacacctaactgattaccagttctagtgtagctgta

SEQ ID NO: 11848 - DNA, 40 bp, Terrisporobacter glycolicus
  source 1..40: mol_type = genomic DNA
agtaaatactcctgctaactggctaccaggaactccagtt

SEQ ID NO: 11849 - DNA, 50 bp, Terrisporobacter glycolicus
  source 1..50: mol_type = genomic DNA
ttcagctacagtagtacacctaacaaattaccagttctagtgtagctgta

SEQ ID NO: 11850 - DNA, 40 bp, Terrisporobacter glycolicus
  source 1..40: mol_type = genomic DNA
agtaagtggatgtgttaacaagctacaaggaactgcagtt

SEQ ID NO: 11851 - protein, 546 aa, Pseudomonas putida
MPAAIPYIRFSSDKQKQGSSEARQHQMVMNWLSQNADYTLSDLKYSDLGKSGYKGDHIKDGGGFAMLLEAVEAGAIKPGDVVLVEAIDRTGRLSPLKMLNTIISPIIEAGVSIVTLDDNITYDSGSIAGGHLFLLVAKIQAAHGYSKQLSERVTASYGIRRQQAIEGKTIKRWTPIWLTVDGVLKETIAPYIKQAFEWYVSGIGKTTIANRLRGSGVPELATCSGPTVEAWLRNKAAIGHWEYHKGKEDAEVIPNVYEPVVTPELFMLAQQRKKAVATKPRERTSKHFLVGLVKCGTCGSNYIIHHKDGKPNNLRCGTYHRLKRAGCTNDETIPYQVAVYIYSLTATHWVDKAMQQIQLTVNDKRKLLLTTERDALTTSITNLTEKAVALNIPELWNKLEEESNRRKVVEDELAVLERTPDAGGGGFDAVLSQDQMMIHDPIQLSSLLKQVEYSIVVYPNKLFTVSGEVYPWLYLGPKRKPKSNVTLGYRMLYLGDETIISPDVPVTLDWGKPTDNPIEQMRYMLRRSYKMVSAPLPYEYNDALTE

SEQ ID NO: 11852 - DNA, 50 bp, Pseudomonas putida
  source 1..50: mol_type = genomic DNA
tggtgtaacaaaagaaaatgttgggaccagcttctttgaatgttacactg

SEQ ID NO: 11853 - DNA, 40 bp, Pseudomonas putida
  source 1..40: mol_type = genomic DNA
cagggtaatcaaaggctgggaccagggcctgatgggcatg

SEQ ID NO: 11854 - DNA, 50 bp, Pseudomonas putida
  source 1..50: mol_type = genomic DNA
tggtgtaacaaaagaaaatgttgggtccagcttctttgaatgttacactg

SEQ ID NO: 11855 - DNA, 40 bp, Pseudomonas putida
  source 1..40: mol_type = genomic DNA
cagggaaatcaaaggcggggtacagggccagagggaggag

SEQ ID NO: 11856 - protein, 531 aa, Enemella evansiae
MVLVQTMEGTVVRAALYVRKSTEPGETNRSLDLQVETCTTLCDQHGYSVTATLKEIVSAYDPRARRAKFAELARLVESEAVDVIVSVALDRLGRRVSETAKLLESCRDHGVLIHTSRDGVLDPNDPTRGFIFNVYAAIAEQEAATTSARIRADKISRAREGGWVGGTPPYGYTTAREGRLARLVPREGEIEILRTAIAEVMQGAKSTGEVARLLNEAGKVTRTGKPWTTNSVQRMLAQPALAGWQAYKPQADRHRSHWDREPFRDELGKPIAVGEAILSPDEYDRLQRLIARKTRYSRAEASLWTPLLRGLIACSCGRPMYPTAQRQTRSTTGEEVRYTRYICRGAAEKVCTNSISGVVDHVALRYVSVILKDGSVERAWKRAESRRRAQLEATGGPLASALLEAQDRAKAFERALGEANSRDVPTIAQHLGRARDEAEALQRELAEALEEVQAPSPAEVMEGIYSGTPEHQRSAIQAVLERVVIHPGGKLSLAGKTRTTSTVDIGRVQFNRRGAQMPFRMPAGSGVEALG

SEQ ID NO: 11857 - DNA, 50 bp, Enemella evansiae
  source 1..50: mol_type = genomic DNA
atcgtttgaaacgcatgcgcgacttgtgttatggtgctagttcaaacgat

SEQ ID NO: 11858 - DNA, 40 bp, Enemella evansiae
  source 1..40: mol_type = genomic DNA
ggtggtcttgcccgcgccctggtcaccggagatgacgatc

SEQ ID NO: 11859 - DNA, 50 bp, Enemella evansiae
  source 1..50: mol_type = genomic DNA
atcgtttgaaacgcatgcgcgactgttgttatggtgctagttcaaacgat

SEQ ID NO: 11860 - DNA, 40 bp, Enemella evansiae
  source 1..40: mol_type = genomic DNA
cgtggtcttcccacagcccgtgtccccagagatgaccacc

SEQ ID NO: 11861 - protein, 545 aa, Clostridiaceae bacterium
MDTLLAGSFRAAIYCRLSKDDDLDGTSASIENQRDMLEKFCQKQGWEVTAVYQDDGFTGLNMERPDLKRMLKAIERKQINLVITKDLSRLGRNYLQTGQLIEDFFPRNGVRYIAMNDGIDTMRDNNDIAPFKNILNEMYSKDISKKVHSSYVLKAQKGQFTGCIAPFGYKKDPEDKNHLLIDGETAPVVRLIFGYALDGHGPNYIRRRLEEEKHPCPTWWNRKRGHRNIRTKWEKKDPENGRYVWDFSVIKEILMNPVYTGAIASQKTEYRFKIGTIRDKKPEDWIVVEGTHEPLVDKKDFAIVQEKLKSRQRPGKSGEINLFAGLIKCGECGKALTIRTTHEKFPKRIFSCKTYNAYGKQHCTQHRVEFDTLYSLVLNKIRECATAALTDSEAVAGRLTDTCQAEQKDQREAMERTLAKDEERIEVLEKMVLRLYEDMVAGRITEENFNLLLEKTQKEQAELKAKVEKGRKHLANEIRLAVDARQWVESIQEYRDITELDASILNRLIKEIVVHETIDSDKTRHISIEIHFNLKPIPEVEQVTG

SEQ ID NO: 11862 - DNA, 50 bp, Clostridiaceae bacterium
  source 1..50: mol_type = genomic DNA
tgttcctactaattggggataacacaggtcatggctaattagaggtaatc

SEQ ID NO: 11863 - DNA, 40 bp, Clostridiaceae bacterium
  source 1..40: mol_type = genomic DNA
aaaaagccagggtatgaaacagctcatggccgggggcggc

SEQ ID NO: 11864 - DNA, 50 bp, Clostridiaceae bacterium
  source 1..50: mol_type = genomic DNA
tgttcctactaattggggataacaaaggtcatggctaattagaggtaatc

SEQ ID NO: 11865 - DNA, 40 bp, Clostridiaceae bacterium
  source 1..40: mol_type = genomic DNA
aaaaacaaagtgtattaaaaatttcatggccgggtgcggt

SEQ ID NO: 11866 - protein, 537 aa, Enterocloster bolteae; identical to SEQ ID NO: 10201

SEQ ID NO: 11867 - DNA, 50 bp, Enterocloster bolteae; identical to SEQ ID NO: 402
  source 1..50: mol_type = genomic DNA

SEQ ID NO: 11868 - DNA, 40 bp, Enterocloster bolteae
  source 1..40: mol_type = genomic DNA
cagctcccactgggagacggggactgcctggcctgtggtg

SEQ ID NO: 11869 - DNA, 50 bp, Enterocloster bolteae
  source 1..50: mol_type = genomic DNA
taatatttttaactaagggaaacccgtgtttcccaaacaaaaagatatta

SEQ ID NO: 11870 - DNA, 40 bp, Enterocloster bolteae
  source 1..40: mol_type = genomic DNA
caggtcccccgcggagacgcggaaggcctggcctctgctc

SEQ ID NO: 11871 - protein, 537 aa, Streptococcus sp group B; identical to SEQ ID NO: 641

SEQ ID NO: 11872 - DNA, 50 bp, Streptococcus sp group B; identical to SEQ ID NO: 402
  source 1..50: mol_type = genomic DNA

SEQ ID NO: 11873 - DNA, 40 bp, Streptococcus sp group B
  source 1..40: mol_type = genomic DNA
catatcaaaatgggaaaatggggataccacaccagatttg

SEQ ID NO: 11874 - DNA, 50 bp, Streptococcus sp group B
  source 1..50: mol_type = genomic DNA
taatatttttaactaagggaaacccatgtttcccaaacaaaaagatatta

SEQ ID NO: 11875 - DNA, 40 bp, Streptococcus sp group B
  source 1..40: mol_type = genomic DNA
catatcaacatggtaaaatcaggataaagggcaagctttg

SEQ ID NO: 11876 - protein, 438 aa, Streptococcus agalactiae
MYFPSHNVRYIAIDDGVDSEKGESEIAPFKNIINEWVARDTSRKVKSAFKTKFAEGAHYGAYAPLGYKKHPDIKGKLLVDDETKWIIEKIFSLAYQGYGSAKITKQLRAEKVPTASWLNFTRYGTFAHIFEGKPESKRYEWTIAHVKAILKSEVYIGNSVHNMQSTVSFKSKKKVRKPESEWFRVENTHEPIIDKEVFYRVQEQIKSRRRQTKEKATPIFAGLVKCADCGWSMRFGTNKTNKTPYSYYACSYYGQFGKGNCSMHYIRYDVLYQAVLERLQYWAKAVQQDEEKVLNKIQKAGNAERIREKKKKASTLKKAENRQNEIDRLFAKMYEDRACEKITERNFVMLSSKYQKEQIELEQQITSLREELSKMEQDMIGAEKWIELIKEYSVPKELTAPLLNAMIEKILIHEATTNEDNERIQEIEIYYRFIGKVE

SEQ ID NO: 11877 - DNA, 50 bp, Streptococcus agalactiae; identical to SEQ ID NO: 402
  source 1..50: mol_type = genomic DNA

SEQ ID NO: 11878 - DNA, 40 bp, Streptococcus agalactiae; identical to SEQ ID NO: 11873
  source 1..40: mol_type = genomic DNA

SEQ ID NO: 11879 - DNA, 50 bp, Streptococcus agalactiae; identical to SEQ ID NO: 11874
  source 1..50: mol_type = genomic DNA

SEQ ID NO: 11880 - DNA, 40 bp, Streptococcus agalactiae; identical to SEQ ID NO: 11875
  source 1..40: mol_type = genomic DNA

SEQ ID NO: 11881 - protein, 537 aa, Streptococcus agalactiae
MKQQIYNTALYLRLSRDDELQGESSSITTQRSMLRLYAKEHHLNVIDEYIDDGWSGTNFERPSFQRMIEDIEAGKINCVVTKDLSRLGRNYIMTGQYTELYFPSHNVRYIAIDDGVDSEKGESEIAPFKNIINEWVARDTSRKVKSAFKTKFAEGAYYGAYAPLGYKKHPDIKGKLLIDDETKWIIEKIFSLAYQGYGSAKITKILREEKVPTASWLNFTRYGTFAHIFEGKPESKRYEWTIAHVKAILKSEVYIGNSVHNRQSTISFKSKKKVRKPESEWFRVENTHEPIIDKEVFYRVQEQIKSRRRQTKEKATPIFAGLVKCADCGWSMRFATNKANKTPYSYYACSYYGQFGKGNCSMHYIRYDVLYQAVLERLQYWAKAVQQDEEKVLHKIQKVGNAERIREKKKKASALRKAENRQNEIDRLFAKMYEDRACEKITERNFIMLSGKYQKEQIELEQQITNLREELSKMEQDMIGAEKWIELIKEYSVPKELTAPLLNAMIEKILIHEATTNEENERIQEIEIYYRFIGKVD

SEQ ID NO: 11882 - DNA, 50 bp, Streptococcus agalactiae
  source 1..50: mol_type = genomic DNA
tcatatctttaactaagggaaagcggtgtttcccaaacaaaaagatatta

SEQ ID NO: 11883 - DNA, 40 bp, Streptococcus agalactiae; identical to SEQ ID NO: 11873
  source 1..40: mol_type = genomic DNA

SEQ ID NO: 11884 - DNA, 50 bp, Streptococcus agalactiae
  source 1..50: mol_type = genomic DNA
tcatatctttaactaagggaaagccatgtttcccaaacaaaaagatatta

SEQ ID NO: 11885 - DNA, 40 bp, Streptococcus agalactiae; identical to SEQ ID NO: 11875
  source 1..40: mol_type = genomic DNA

SEQ ID NO: 11886 - protein, 537 aa, Streptococcus agalactiae; identical to SEQ ID NO: 10201

SEQ ID NO: 11887 - DNA, 50 bp, Streptococcus agalactiae; identical to SEQ ID NO: 402
  source 1..50: mol_type = genomic DNA

SEQ ID NO: 11888 - DNA, 40 bp, Streptococcus agalactiae; identical to SEQ ID NO: 11873
  source 1..40: mol_type = genomic DNA

SEQ ID NO: 11889 - DNA, 50 bp, Streptococcus agalactiae; identical to SEQ ID NO: 11874
  source 1..50: mol_type = genomic DNA

SEQ ID NO: 11890 - DNA, 40 bp, Streptococcus agalactiae; identical to SEQ ID NO: 11875
  source 1..40: mol_type = genomic DNA

SEQ ID NO: 11891 - protein, 537 aa, Streptococcus agalactiae
MKQQIYNTALYLRLSRDDELQGESSSITTQRSMLRLYAKEHHLNVIDEYIDDGWSGTNFDRPSFQRMIEDIEAGKINCVVTKDLSRLGRNYIMTGQYTELYFPSHNVRYIAIDDGVDSEKGESEIAPFKNIINEWVARDTSRKVKSAFKTKFAEGAHYGAYAPLGYKKHPDIKGKLLVDDETKWIIEKIFSLAYQGYGSAKITKQLRAEKVPTASWLNFTRYGTFAHIFEGKPESKRYEWTIAHVKAILKSEVYIGNSVHNMQSTVSFKSKKKVRKPESEWFRVENTHELIIDKEVFYRVQEQIKSRRRQTKEKATPIFAGLVKCADCGWSMRFGTNKTNKTPYSYYACSYYGQFGKGNCSMHYIRYDVLYQAVLERLQYWAKAVQQDEEKVLNKIQKAGNAERIREKKKKASTLKKAENRQNEIDRLFAKMYEDRACEKITERNFVMLSSKYQKEQIELEQQITSLREELSKMEQDMIGAEKWIELIKEYSVPKELTAPLLNAMIEKILIHEATTNEDNERIQEIEIYYRFIGKVE

SEQ ID NO: 11892 - DNA, 50 bp, Streptococcus agalactiae; identical to SEQ ID NO: 402
  source 1..50: mol_type = genomic DNA

SEQ ID NO: 11893 - DNA, 40 bp, Streptococcus agalactiae; identical to SEQ ID NO: 11873
  source 1..40: mol_type = genomic DNA

SEQ ID NO: 11894 - DNA, 50 bp, Streptococcus agalactiae; identical to SEQ ID NO: 11874
  source 1..50: mol_type = genomic DNA

SEQ ID NO: 11895 - DNA, 40 bp, Streptococcus agalactiae; identical to SEQ ID NO: 11875
  source 1..40: mol_type = genomic DNA

(The sequence listing continues in the following parts.)

1. A method for integrating an exogenous nucleic acid (e.g., exogenous DNA) into a human genome, the method comprising:
contacting a human cell with:
an exogenous nucleic acid (e.g., exogenous DNA) comprising a nucleic acid sequence of interest and a first attachment site and
a serine recombinase or a polynucleotide encoding the serine recombinase,
wherein the human genome comprises a second attachment site and recombination between the first and second attachment sites results in integration of the exogenous nucleic acid (e.g., exogenous DNA) into the human genome.

2. The method of claim 1, wherein the exogenous nucleic acid (e.g., exogenous DNA) is up to 5 kb, up to 25 kb, up to 50 kb, up to 75 kb, up to 100 kb, up to 150 kb, up to 200 kb, up to 250 kb, or up to 300 kb in size.

3. The method of claim 1, wherein the first attachment site is or comprises a donor attachment (attD) site, and wherein the attD site comprises an attB sequence or an attP sequence.

4. (canceled)

5. The method of claim 3, wherein the first attachment site comprises a nucleic acid sequence at least 50% identical to an attB or attP sequence selected from Table 1.

6. The method of claim 1, wherein the second attachment site is or comprises an acceptor attachment (attA) site, and wherein the attA site comprises an attB sequence, an attP sequence, or an attH sequence.

7. (canceled)

8. The method of claim 7, wherein the second attachment site comprises a nucleic acid sequence at least 50% identical to: an attB sequence selected from Table 1, an attP sequence selected from Table 1, or an attH sequence selected from Table 1.

9. The method of claim 1, wherein the serine recombinase comprises an amino acid sequence at least 80% identical to a sequence selected from Table 1.

10. The method of claim 1, wherein the serine recombinase comprises:
an amino-terminal catalytic domain,
a recombinase domain, and
a DNA-binding zinc ribbon domain,
wherein, according to UCLUST algorithm analysis, the amino-terminal catalytic domain, the recombinase domain, and the DNA-binding zinc ribbon domain comprise amino acid sequences at least 90% identical to a sequence selected from Table 1, wherein the sequence selected from Table 1 comprises an amino-terminal catalytic domain, a recombinase domain, and a DNA-binding zinc ribbon domain.

11. The method of claim 1, wherein the serine recombinase comprises:
an amino-terminal catalytic domain,
a recombinase domain, and
a DNA-binding zinc ribbon domain,
wherein, according to UCLUST algorithm analysis, the amino-terminal catalytic domain, the recombinase domain, and the DNA-binding zinc ribbon domain comprise amino acid sequences at least 90% identical to a sequence selected from Table 2, wherein the sequence selected from Table 2 comprises an amino-terminal catalytic domain, a recombinase domain, and a DNA-binding zinc ribbon domain.

12. The method of claim 1, wherein the serine recombinase is a recombinase selected from cluster 2, 3, 6, 7, 11, 12, 14, 16, 75, 76, 82, 85, 93, 103, 104, 111, 112, 136, 140, 144, 148, or 152 as identified in Table 1.

13. The method of claim 1, wherein the serine recombinase comprises an amino acid sequence at least 80% identical to a sequence selected from SEQ ID NO: 58926, SEQ ID NO: 10611, SEQ ID NO: 33021, SEQ ID NO: 40191, SEQ ID NO: 5681, SEQ ID NO: 36231, SEQ ID NO: 34841, SEQ ID NO: 9906, SEQ ID NO: 21701, SEQ ID NO: 7466, SEQ ID NO: 57456, SEQ ID NO: 41066, SEQ ID NO: 41186, SEQ ID NO: 21126, SEQ ID NO: 1191, SEQ ID NO: 35081, SEQ ID NO: 18926, SEQ ID NO: 51806, SEQ ID NO: 58376, SEQ ID NO: 29771, SEQ ID NO: 21276, or SEQ ID NO: 36986.

14. The method of claim 1, wherein the serine recombinase, the first attachment site, and the second attachment site comprise sequences at least 80% identical to sequences that have the same system ID in Table 1.

15. The method of claim 1, wherein the polynucleotide encoding the serine recombinase is or comprises mRNA.

16. The method of claim 1, wherein the polynucleotide encoding the serine recombinase is or comprises DNA.

17. The method of claim 1, wherein the polynucleotide encoding the serine recombinase is operably linked to a promoter that is active in the human cell.

18. The method of claim 1, wherein the exogenous nucleic acid (e.g., exogenous DNA) is or comprises a plasmid, a nanoplasmid, a mini-circle, or doggybone DNA (dbDNA).

19. The method of claim 18, wherein the exogenous nucleic acid (e.g., exogenous DNA) is delivered to the human cell in a lipid nanoparticle (LNP), an adeno-associated virus (AAV), a lentivirus, a virus-like particle (VLP), an exosome, a cationic nanoparticle, or a dendrimer.

20. The method of claim 1, wherein the exogenous nucleic acid (e.g., exogenous DNA) and the polynucleotide encoding the serine recombinase are delivered to the human cell in an LNP, and wherein the polynucleotide encoding the serine recombinase is or comprises mRNA.

21. The method of claim 1, wherein the human cell is or comprises: an osteoblast, a chondrocyte, an adipocyte, a skeletal muscle cell, a cardiac muscle cell, a neuron, an astrocyte, an oligodendrocyte, a Schwann cell, a retinal cell, a corneal cell, a skin cell, a monocyte, a macrophage, a neutrophil, a basophil, an eosinophil, an erythrocyte, a megakaryocyte, a dendritic cell, a T-lymphocyte, a B-lymphocyte, an NK-cell, a gastric cell, an intestinal cell, a smooth muscle cell, a vascular cell, a bladder cell, a pancreatic alpha cell, a pancreatic beta cell, a pancreatic delta cell, a liver cell (e.g., a hepatocyte, a hepatic stellate cell, a Kupffer cell, or a liver sinusoidal endothelial cell), a renal cell, an adrenal cell, a lung cell, a mesenchymal stem cell, a hematopoietic stem cell, a hematopoietic progenitor cell, a neuronal stem cell, a retinal stem cell, a cardiac muscle stem cell, a skeletal muscle stem cell, an adipose tissue derived stem cell, a chondrogenic stem cell, a liver stem cell, a kidney stem cell, a pancreatic stem cell, an embryonic stem cell, an induced pluripotent stem cell, or a fate-converted stem or progenitor cell.

22. A transgenic human cell obtained by the method of claim 1.

23. A transgenic human cell obtained by culturing the transgenic human cell of claim 22.

24. A method for obtaining integration of an exogenous nucleic acid (e.g., exogenous DNA) comprising a nucleic acid sequence of interest and a first attachment site into a human genome comprising a second attachment site, the method comprising:
contacting the first attachment site with the second attachment site in the presence of a serine recombinase,
wherein the contacting step results in recombination between the first and second attachment sites, and
wherein recombination between the first and second attachment sites results in integration of the exogenous nucleic acid (e.g., exogenous DNA) into the human genome.

25-36. (canceled)

37. A system for integrating an exogenous nucleic acid (e.g., exogenous DNA) comprising a nucleic acid sequence of interest into a human genome, the system comprising:
an exogenous nucleic acid (e.g., exogenous DNA) comprising a nucleic acid sequence of interest and a first attachment site, and
a serine recombinase or a polynucleotide encoding the serine recombinase.

38-55. (canceled)
